United States Patent Application Publication US 2026/0103690 A1 - sequence listing, part 41

SEQ ID NO: 193340 - protein, 372 aa, unidentified
MFTKIAFICVSCMKTVQKSNLFFGVLTPELDKLRDLLVSHHVCEVALESTSIYWIPIWNILSVDFSLKLVNPYFIKQLPGRKSDVKDAEWIATVLQKGLIRGSYVPDRMIQCLRQYERRNHELSKNIVHAEQRMDMILQRCNIRISNYVSCISCKGYQKVVNAIISGESNPKVLVTLIHKRTLNKHGRQVVEDSLNGFVSDTDRDILRQYRDERMQMEQHKSENKAKMQAICEAHYCEELELLQTLPGIKEESAANIIAEIGVDMKMFLTASAIVGWAGLKPRNDQSAGKIKSRKITHGNKYLRKILVEAAWSAARTKDSRFMKMYQRLLARGKSKQKALIAVARKLLVLIWNMLSKKEAFNPEYKRRIQAA

SEQ ID NO: 193341 - protein, 429 aa, unidentified
MNSTQNKKIEQVKETTMIVGIDVGNEKHYFRVFNLRGIKLTRKPVAFSNSMEGFSSFYNTIVELMQKSELEEALVGIEPTGHYWFDFGQFMGEKNIKFVMVNPHHVHKTKDLDDNSPSKNDRKDPRVIAGLVRDGRYFYSYMPTGVYAELRNASNRRFVLVEEQTRAKNRLQKWIAVYFPEYKGIYTHIDAKGGLLVLKQAPTPEEIVKLGEEGIIKIWKDAKLRRNGNKKALKILNAAMRSIGLRTGLTEARMEIQDLIEDYELQTKRLERVNDLIKELCQQIRYADKLLEIKGIGITTVAGFIAEVGDITRFDSTKELQKLAGLELVADSSGKHNGKTKISKRGRKRLRYLLFEAAISVVGKNEEFKEIHRYYTTREKNPLKKMQSLIAVACKLIRVFHVILTKGISYDASKMLKDIRHQGEQLKAA

SEQ ID NO: 193342 - protein, 486 aa, unidentified
MAKRKESTFERLQRGPPLNRRERREVANGLNSPDPGWEIVHPHAAGIDIGNESHYVAVALGEDEHPTREFGSWTADLERMADWLQACGIQSVVMQSTGVYWMAVYDVLQRRGFDVHLVDARGTRNLPGRKSDVQECQWLLKLHTYGLLRRCFLPGEEIRRVRTVWRLRDQHVKEAGRAVQHMQKALTEMNVQVHNTISDLSGVTGQAIVRAILEGERDAARLAALRDSRIQASEPELVQSLRGNWQEDALFELRQAVEAYDFYRQQMKQCDAQLEQYLAALPSREPVAAPPTAETPEASRKRPVRRGFRKPRKAPGNQPALDLRTELQRILGVDATSIDGIEVMTVQTVVAEVGADLSAWKTERHWASWLNLAPKREVSGGRVIRHTREHRTNRVGNAFRMAAQSLIRSESYLGARFRYLRAKLGGIKAVKAMARTLACLYYRLVTRGQAWVDRGAAEFERRRQEREFAMLQRKAGDFAMKLVPAV

SEQ ID NO: 193343 - protein, 343 aa, unidentified
MQAITTIGLDIAKSVFQVHGIDAEGNVIVRRQLKRRSVTAFFHKLPPCLVGIEACASSHYWSRELRALGHTVRLMPPAYVKPYVKRQKNDATDAEAICEAVRRPTMRFVETKTPEQQSCLMLHRTRHLFIRQQTAVINAIRAHFAEFGIVAPVGRQGVENLLDIIADARDARLPEVARACLAALGNQLRMLKTQILSFDRMITAWHRSNETSKRLDALPGVGPTLATALVASVADPKAFRSGRDFSAWIGLVPKQNSSGGKQKLGSISKQGDRYLRSLFTAGALAVIRYAKIHGTGHRPWLTALLARRPTKVAAIALANKIARMAWAMMARGENYREPVALAA

SEQ ID NO: 193344 - protein, 382 aa, unidentified
MRLFVAIDVSSEKLDVCFLDSHDTVLKEICLSNDVNGANAIKEDVLHFHQLYNYEKIVIGMESTSVYSFHPSMFLTEDKDLRALDVEVVVQNPKAIHRYKKLFEEDKTDKIDAFRIADFLRIGRYNKFLIKEEKYVALQRLTRSRYQLVHQQTECKQHFLENLYYKCNTLSKELNTSVFGATMMEILSDSLSLDEIAEMDLEALATLLQKKGKGRFSDPEDLAKTIKKAIRDSYRLGKVVQDSMDVVLATYARLIQTLKKQIKEIEKSITALFKAIPEARYLTSVPGIGVVYAAGIIAEVGQIERFENEAQLAKYTGLYWKKSQSGNFESERTPMTRTGNQYLRYYMVEAANSVQLREATYRAYYLKKYDEVPKYKHKRALV

SEQ ID NO: 193345 - protein, 333 aa, unidentified
MNDVKILAVDLAKHVFQLHGVNARGEVVLQRRLSRVHLPAFLAQLPPCEVAMEACATAHHWARRACSYGHAPRLIAPQYVKAFNRGQKNDRNDAQAIACAAMQPDMPQVPIKNEEQQVVMALHRIRSRVMKERVGVVNQLHGLVAEFGIVLPLGTRPLRRELTRVLDEGALPPLLQQVLTDQLDQLKQIEERLQILTERIQRLAEGSIPCRQLMRHRGVGPLTATAFVAEVANPRVFKNGRHVAAWLGLVPRQHSSGEHTRLLGITKRGNPYLRTLLIHGARAALRQAHRHTDPLSRWSLEVKQRRGPHRAAVALANKTSRRLWATLRYAEAA

SEQ ID NO: 193346 - protein, 369 aa, unidentified
MTKIIRIGVDTSKHVFQLHGVDAVEEPALRKKLRRRDVVRFFAKLEPSKVGLEACGAAHYWARELRRLGHEPFLLPPQYVKPYVKRGKNDQADAEAICEAMSRPTMRFVPMKSAEEQAALMLAGTRDGLVRRRTQLANTIRGYAAEFGLTAAKGVAHIEPLLVRIAGDTSFPELAKELFAIYGQEYAQLNRQLKHIQARLMAWHRGNELSLRLAEIPTVGPMGASLTVMKVSDPRHFRSGRDFSAWLGLTPKDHSTAGKARMGVITRAGDEALRSILVVGATAAIRQARLGRGNPSPWLLDLVRRKPPKLAAVALANKTARIMWKLMISGQRFNPLHEAATRKGRSAPLHGGYAARPLLTPCSQREIQS

SEQ ID NO: 193347 - protein, 360 aa, unidentified
MRTEVTKDSFNGQSFYVGIDYHKKSWQVTILGEQYEHKTMSQNPDPDLLAAYLNRNFPGGNYQAVYEAGFSGFESCRRLNQLGVNCLVIHPADVPTSQKEKLQKTDKADSRKLARSLRSNEFEAIHVPDPELEADRALVRQRFRMVKDVSRTKNRVKSLLFQFGIAIPDRFTASQTRHWSKVYINWLKELAIDKPSLRQVLDNYLNIGESQRKNLLLLNKQVRNLSLAEAYKNNYHLLLSVPGIGLMTAMTFLVQIGDVGRFERLDDLCNYIGLVPKMYGSGEKMQTGKMIKRGRKDLKIMLVEASWEAIRKDPALMLKFNELSKRMHKNKAIIRIARKILSRIRFVLQNQQPYKLSVVQ

SEQ ID NO: 193348 - protein, 356 aa, unidentified
MTIVAHAHSFVIGVDTHARNHVLAVVASDGRLIDTASFPTSQAGLGRAIAWAARRTGGDLGALWVIEGAANYGAQLAHSVTRAGYQVVEAPRMGARGPQGKTDAVDARRIAEAVLPLDLTELRHPRRDNGERAALQILITARDQMSTERTATINALTALTRTIDLGIDARRALTRTQIRQIATWQPLGNHPIATATARTEAIRLAHRITALDTQLATNLTTITTLLKATPAAGLLTKTGIGPITAAIALTAWSHPGRLRSEAAFAALAGVNPIPASSGNTQRHRLNRGGDRRLNRALHMATITRMTHDPDTRTYTQRRTEQGRTTKEIRRCLKRYLARHIHRYLTNAYTPTTLDKT

SEQ ID NO: 193349 - protein, 373 aa, unidentified
MEHNITIVGLDAHKNSIEIVTAETAGNQEVRHYGKIGGDMASLDKAIRKLRSVRSKGAELRFVYEAGPCGYEIYRHLTKQGFQCVVVAPSLIPKKSGARIKNDRRDAENLARLERAGELTKVYVPREEDEAMRDLTRAREDAVKAQRTARQLLGAFLLRHGHRYSGRQSWTPVHMRWLSDITMPHPAQQITLQEYIHAITESTGRVTRLTEQIQKLLPEWHMQPIAKALQALRGVAPIVATTTVAEIGDMNRFERPKQFMTYLGLIPSEHSSGESIKRGGITKTGNNHVRRALIEAAQAYSFPARVSRHLLKRQEDLPQSVREIAWKAQVRLCGRFRRMMARGKQRNKVVTAIARELAGFMWAIAREVQVQGA

SEQ ID NO: 193350 - protein, 331 aa, unidentified
MKFKDFVGIDVSKHTLDVFILNVKVHKQFKNERLGFQQLEQWVQRQTCLALSDLLLCFEHTGLYSLSLAQFLEEKRVLYAMVPALEIKRSMGITRGKNDRIDSRRIAEFAFRFLDKIRLTTLPAKEILNIQHMLNLRERMARNLAGYIVSKHEIRSAFHAEELPHMFSCYDTMICTLKHEIKLLEKSIREILHGNKELWTTFELITTIKGIGLIVASHLIVYTCNFTRFDNWRKFACYSGTAPFEYQSGTSVRGRTQVSQIANQQMKKLLHLAAICAIHTDTEIRAYYQRRLDEGKSRMTVINIVRNKLLARVFAVAKRGTPFVDIKKYVA

SEQ ID NO: 193351 - protein, 396 aa, unidentified
MRIYGIDIASEVHVVAGVDAEGELTLKPAKVEETGTGHEKLLGLLGEAAGALVVMEATGHYWKNVFARLSAAGFSVAVVNPLAIRRFAESHLKRAKTDATDALLIARFGHAMKPRPAPMLDEQLEELREAVRLRDRWVQDIGDRVRQLHRLVDLGFPEFTRHVRDLGSGLAATLLTRCPTAAAFRKVKPSTLAKLKYDGRHHVPEDLAAELIAAAKHSAGMHHGDVYQVGVRATCEDILVLRSRIREADRNIATLVNASELGGLLQTIDGIGPTTAARILAEFGDPSTYASADAFAAHFGVVPATNHSGKSTPMRSPTTNLGDAKLRSKLWMPTLTAVARNPWLKAFYERLIARGKPAKVALTAAMRKLTTAIYSVAKNRKPFVPRLQAPPTETPC

SEQ ID NO: 193352 - protein, 487 aa, unidentified
MAKRKKSTFERLSTGKMNRAQRRELGRRVAASDPGLTIVHPNAGGIDVGNESHFVAVPPDRDENPVREFGCWTAALNEMAEWLKSCRIDTVAMQATGVYWIALYDILEQHDIRVVLVNAQHTKNVPGRKTDVQECQWLMKLHTYGLMRDSFRLQQDMEYLRTIWRVRDRHVKEAGRAVQHMQKALTKMNVQLANVISDVSGVSGQAIVTAILQGERDPYKLADLADYRVKASREEVARSLEGNWRADVLFELQQAVDSYHFAHRQMQECDKKLQLYLASLPARLLDIPVRSTGAPETPETTAKKRKKTKKPRGNEPQLDLQAELERVCGVDLTSIDGINVMTAFTVISEVGTDMNRFQDENHFTSWMGLAPSKDISSGKIVGSGKKKVKNRVAVALRTAATTLLESNTHLGARYRHLRRQLPTYKAAVKAMARYLAVLIYRLLTKGEAWVDRGAKQFEQRRIERELASLQSKAKAKGFTLVPLAEAC

SEQ ID NO: 193353 - protein, 347 aa, unidentified
MHSVGIDLHRKRSHVAILDDQGRELRSRRVINDGPTILALLAEIDGECRVALEATYGWEWLADVLQDAGYELHLAHPLRTKAIASARVKTDAVDARTLAHLLRTDLLPEAYIAPRELRELRELLRHRVALTRMRSALKNRVGAILAKHGVQRPFTDMFGPSGRRFLHELALPDAARRRLSSLLALIDDFTREIELTTEEIEQRAGEDPYVDVLCQIRGVGRYIAMLVIAEVGDVTRFDSARRLCAWAGMTPTVRSSDLRTRLGHISHQGSPALRWALVEAAQHAARGRGPLRDSYERIAKRRGNQVAKVAVARKILTLCFYGLRDGEIRCLAPRATARTIRPTAVSA

SEQ ID NO: 193354 - protein, 359 aa, unidentified
MNQNSMYFIGLDLGDKLSYLTILDQEGELIEETRLSTTKASFHRKFSTIQSCRVAMEVGAHSRWASHLLEELGHEVLVANARKLRAIYHNPRKGDRADAEILARLARLDPKLLSPIHHRSPQAQADLAVLRSRDAIVRSRTLLINHARSIVKSTGERLPSCSADSFAHKVASDIPEPLLPALAPILDTIASLTQQIKSYDRKADELCSQPYPETKLLRRISGVGPLTSLAFILTLENPDRFRRSREVGPVLGLVPRRDQSGDQDPQLRITKTGDAHLRRLLVSSAQYILGPFGPDCDLRRWGLMLAERGGKNAKKRAVVGVARKLAVLLHHLWKTGEVYDPLYLAKQHDQASEAIPAAA

SEQ ID NO: 193355 - protein, 370 aa, unidentified
MNDLIRIGIDTSKSVFVLHGVDAAEQPVLRRKLRRRQMLEFFAKLAPVQIGIEACGAAHYWARELIALGHEVRLLPPQYVKPYVQRGKNDAADASAICEAMSRPRMRFVPVKTAEQQAALMLVGVRDQLVARRTQLSNMIRGYAAEFGVVAAKGLDKIEPLLARLAREPAVPAQAKALFAVLGEEVVALKPKLRKLEAELLAWHRHNELSRRLAEIPAIGPIGSALLAMKVTNPQAFRCGRDFAAWLGLTPKDHSTAGKQRLGVITRAGDETLRRVLVVGATAVIQQAKHGRGNPSPWLTGLMRRKAPKLVAVALANKTARIAWRLMVSGERYDRQHARGGFVPPAGSLAPGARRQGRGAPPAAVACGQP

SEQ ID NO: 193356 - protein, 412 aa, unidentified
MTNPYNLFVGIDLGSQSHHVSVVDRDGTLLGERKFEHDGQGIQQLLTWLAELAGGASPETVAVALEAPRGAIVDALLERGYCLFSINPKQLDRFRDRYSVAGAKDDSRDAYVLGNSLRTDLSHFRRLRPDHVQIVRLRELSRASDALQEDWRRNANQLWSYLQRYFPAILKFSSAADDVWVFDLLEQTQAQSKLAAALPIEELAKLLRRRRIRRFSAEKLYRALQDRLPLAAGVEEALAEQVLLLLPRLRLLHQQRSEVDHRTDRLLVEMAQENFPEHRSVEILRSIPGLGRVFIATVFSEAGRPLLDRDYHDLRILAGAAPVTWRSGKTEIVSMRRACNERLRDAVQNSANTHMQKDPRAKQIYARLRRKGNTHARGLRGVGDRLLELICVLLRSDQLYQLDRRQPKQDAA

SEQ ID NO: 193357 - protein, 355 aa, unidentified
MTSSKYIGMDVHKESISIAVRNAAGKVVMESVIEAKTNMILEFIDGLRGDVHVTFEEGTWSAWLYDLLKPHVSQLVVCDPRRNALLKEGNQNDRVDARKLAELLQNNQLRPVYHGDHGLRAQKELVRSYLTISKDLIRVMTRVKAIYRSWGIATSGTQVYVPRHRAEWLEKIREAGVRRRAEHYYQQMDALRTLRLEVRKDLLAESKKHKEWKLLCGIPSIGAIRAAVLLGIVQTAHRFRTNRQLWTYSGLGIEVHSSADHQVVKGQLQRKKKPIEIRGLNRNCNHHLKNVFKGAAATALTKPGPLRELYTALVAKGMRPEMARLTLARKIATIVLIVWKRGVCFDASHLKPQTA

SEQ ID NO: 193358 - protein, 387 aa, unidentified
MIYVGIDIAKQKHFAAAMTADGEVLISPFGFTNDAEGFKLFLSKIKSFKKESTLIGLESTSHYAENLICHLFDLGYHISVINPIQTSTLCKTNIRKTKTDKVDCLLIIKSMIVNKPRLYSKTDIDSLRLKSLCRFREKIKKAKAKLKIQLVTFVDIIFPELQYFFKSGIHTNTCYQLLKKHSSPDDIAALHLTYLANLLQKASHGRFGKKEAIALKGLAKSSVGTGNTDVSIQITQSIAQIELLEQQLADIDRIIESIMLEMDSVILTIPGIGFLNGAMILGEIGNISRFSNPSKLLAYAGLDPTVNQSGKFNAKSTKMSKRGSKLLRYALINAAWNVSLNNKTFNDYFNLKRSQGNNHYAALGHVAHKLVRIIFKMLKDNVAFNLD

SEQ ID NO: 193359 - protein, 428 aa, unidentified
MEKLNEHAAGIDLGSRKIYIGLEGKDVVSFETFTSDFMKASDYLKQNNITTVAMEATGVYWIILYDILVNAGFDVWLVHGRQTKQVPGRKTDVKDCQWIQQLHSYGLLNRCFVAEGILKTLRSYQRLREDHVRSSTMHIHHMQKALIEMNIRLPEVLDQIHGKSGMAMIMAILEGERDAKKLLSLCDTRLKKNKSEQILKALEGFYTPQGLFALKQAHNAYLFYQQQIAECDNEIAKILFQLNPVDASGKPLKRKPIRHHSPNINNFGNHMLHLFDGKDATILSGITDYSWFQLYTEVGADLTKWPTEKHFTSWLALSPGQNNSGKKKKNVRKGHPKAGQIFRQIAQSLLTSKNIALGAFGRRIRARKGPGVAIKAVARKLAIQYWRLMVKGSDYVEKGVEHYEKILLMQRQKAFKRLAEELHVEITT

SEQ ID NO: 193360 - protein, 348 aa, unidentified
MIMIGCDYHPSWQQICWLDTATGETEERKLEHASGEAEKFYRGLSGPARIGMESTGNCQWFVELLLSLGHEVWIGDAAKIRASEVRQQKNDRRDAALILKLLVEGRFPRIWTPSSQERDLRQLMIHRYKLVQMRVQVKNELQHLAMNQGITRRRKLWSAAGEKVLCELPLRPWASRRREDLLKLRGILNEQIGLLDEAVRKAAEENERARLLMTQPGVGPITSMAFVLTMGDVNRFPRGKQVASYLGLIPREYSSGGHKRYGPISKQGNRFLRMLLVEAAQCVVRYDPGFRKEYLHRCHSRPKGVAKVAAARKLAVRLYWMLKTSTAYPEIVRVESSSRVPLTVRPGG

SEQ ID NO: 193361 - protein, 409 aa, unidentified
MELTPIYKRVIGLDVHQAQISACAIIEQPDGSAVLERREFGGFKRDRKALAEWARSIAPDVVVMESTGIYWKSPFAALESAGIVAWVVNARHVKAVPGRKTDVADAQWLATLARSGLLRASFIAKADLRSLRHIARQRQKLGGMLASEKNRLHKLLTDAGIRLGVVVSDLHGQSARAMVKAIIAGKSAPEVLSLASKRLRASREDLFEALQAEELSQAHRFVLTEIMAHIEEIEARMTRFDQELLRCLVDAGYGPALQLLQTLPGIDLMGAAMLLVEIGADMSVFGSAQRLASWVGICPGNNESAGKRKSGRIRKGNAWVRRLLCEFAHAAGRSRCALKAKFQALSVRKGHKRSIVALGHKMLRTIYAMLSKKTHYVDKTVDYEALMVARNAPRWLQMLVKHGFVPAPA

SEQ ID NO: 193362 - protein, 312 aa, unidentified
MTEIIIGADISKDHIDLYRLSDGDRLRVSNDGKGFAAILGWIGNTPVARVVYEPTGAYHRAFERFMLTRSLPVSKVNPRQARRFAEAIGKLAKTDRADAEMLAQFGMLLNPRLLSPDAASFSELKELHAARLALVKDRTAAKNRGKNITQPLLKRQNTARLKQIEAQLAQVEQAITDHIAIDESLKARFDILVSIPGLSKITAFTLLIEMPELGKLDEKAAGKLAGLAPSDRQSGVWTGRAFIVGGRAIVRQALYMPALVATRFNPDLKAKYDTLRKAGKPPKVAITAIMRKLVVLANALLRKQQKWTPKPA

SEQ ID NO: 193363 - protein, 371 aa, unidentified
MADYREAFVGIDVAKLKNAIAVAESGREGEVRYFGEVDASYASMRRIIQRIAAKFDRVHFCYEAGPTGYGLHRLIQSLGHECMVVAPSLNPRKPGDRVKTNRRDALALARLLRAGELTAVWVPDEGHEAMRDLVRARAAAVETLRVHRQQISAFMLKHGRIYPRMKGWTMRYLCWLQEQQFDHPAHQIALQEMVEAVRVSKERVERLEKVIEEFVPNWSLAPVVRALKTLRGVDLIVAVTFATEVGDVSRFESPRQLMGYLGLVPGERSTGETVRRGATTKAGNGRVRHMLVKCAWTYRHPPKVGARKLYRLEQAPPKVREIAWKAQSRLTALYRMLTGRGKRTTVVCTAIARELTGFMWAVAREAQAIRL

SEQ ID NO: 193364 - protein, 332 aa, unidentified
MQTLAIDLGKQSFHLYGITDDGEVISRKVSRAKLLDVVIKLHPASVAMEACASSHHWGRTFEASGYTVRLIHPRFVKPFVKGSKNDAVDAEAIFDADSRPNMRFVPLKSAEQQDLQSLHRMRDRLIVQRTALINHTRGLLAEYGLIIPAGAARFRLQVEELVNTAELSDLAKSLFEKLIEEYRDLDTRVSEVDDTLVQICRTNERCKRLTSLPGVGPVVATALVAAIDDGRHFASGRALAAWIGLVPRQYTTGGKPRLGGIGKRANHYLRRQLVHGARSALLRIARYDDQRSKWVQALLARVGHNKTLVAMANKTARIAWAMLRNEESYKMA

SEQ ID NO: 193365 - protein, 328 aa, unidentified
MKKLFIGIDISKDVFDYCFLNSENEIIEKGQMPNSRKEILKFCKKVKSFKAYEPLICMEHTGHYGYLLSCVFTDQNLCYSLLDPLNLKRSFGVVRGKTDAIDAYRIASYALSNKHKITPFELPSYELRKLKILMKSRSRYSKISVQLKNGIQANKVANKSMDIGDEIIEDQETLVIFKAKLKRIEKKMLDLIKATKELKITYDKITKVIGVGPIISINCIIETRNFTRFYNPRKFGCHCGLAPFPHSSGSSVRGKTKTSNLCNKALKGIIFKGAWTAIQHDPQLKKYYNRKIKEGKNKFSVANAVAFKIVLRIFAVVKRDEPFVKHAV

SEQ ID NO: 193366 - protein, 453 aa, unidentified
MPRKRLNKNKKVALPVLNPDAAGIDIGATEIYVAVPADRDPEPVRMFATFTQDLNQLADWLQQCRVRTVAMESTGVYWIPLMQILEIRGLEVYLVNAKHVKNVPGRRTDVSDCQWLQYLHSVGLLRASFRPAQDICAVRSLLRHRASLVDMATCHVQHMQKALDQMNLQLHHVISDITGTTGLAIIDAILEGNRDVHALAALRDPRIQASHETIAKSLVGDYRQEHLFTLRQSVGLYREYQRRIAACEEEMQRLMKALETRANPADTLPTAKDSVKKCKVMPPARAMALREEAYRILGVDLTTIPGISVLHVQCILAELGGDVSKFRSAGAFSSWMGLCPDNDISGGKVLWSGTRKVRNRIAVTLRMAAQSLQHSESALGEFYRRMRTKLGGPKAITAAAHKLARIVFHLLNTKQPYDDTVFAKAEQKYRLRTENRLKAQAQAFGYKLVPAQH

SEQ ID NO: 193367 - protein, 343 aa, unidentified
MQTVTTIGLDIAKSVFQVHAVDAAGKVILRRQLKRRHVLAFFEKLPPCLIGIEACASSHHWSRELQALGHSVRLMPPAYVKPYVKRQKNDATDAEAICEAVTRANMRFVETKTADQQSGLVLHRTRHLCMRQQTSVINAIRAHLAEFGVVAPVGRNGVEELLRVVADPDDKRVPEVARVCLVALGAQLRRLKDQVLEFDRMITAWHRSNKMSIRLDECPGVGPVLATALVATVADPKSFRSGRNFSAWIGLVPKQHSSGGKDRLGSISKQGDRYLRSLFVIGALAVIRYAKVHGTRHRPWLTALLARRPAKVAAIALANKIARMVWAMMAKCERYKEPVALAA

SEQ ID NO: 193368 - protein, 394 aa, unidentified
MVQSGRVVIGMDPHKRSVTIEVMAGDETILGGGRFATDPDGFTALREYVRAWPDRVWAIEGCNGIGHHVALRLLAEAQEVVDVPPKMSARARVFATGQGRKTDATDAHSIALVGTRMAGLRPVIDDEQLAVLRTLADRRRALGQEHTRMVAQLHHLLLELVPGGAKKFLSAAQAKEILSKVRPRDAAGKVRRRVAAELVGDLERTYKRKKAADKELTELVRATGTSLLDLTGIGPSGAARLLVEVGDITRFPDRAHFASWTGTAPIDASSGDHVRHRLSRGGNRQINRVLHIMATVQLRSPGIGRDYYDRKKADGKTSMEAMRALKRRLSDVAYRAMLDDAVAHTTGARTGPGGHRGTSLTSSAAGSHPHTGTSDQSLPGPVTHDPRTALPAAS

SEQ ID NO: 193369 - protein, 341 aa, unidentified
MSEQYAGRQIVGMDLHRRRSVLVRMTETGERLETVRILNDPERLAAVMARAGEAPEVVLEATYGWYWAADALAELGAQVHLAHPLGVKAFSYRRVKNDERDAADLADLLRMGRLPEAWIAPPATRELRQLVRHRAKLVGLRSNLKCQVHAVLAGAGAPVVMSDLFGVEGQRLLTRVELPTGARARVSSQLRLIEGLDFEVELFAKLVAGRLREHPGYRAIQVIPGVGPVLAAVFVAEIGDVARFPAAAQVASWAGLTPKHRESDTTVHRGRITKQGSRLVRWAAVEAVQRVPGHTRLGQIRDRIGERRGRNIGVVAAARELIGLVYYGLRDHHIRCLTRAA

SEQ ID NO: 193370 - protein, 422 aa, unidentified
MSYCPVAGIDVSKQFSDMCILSPDNKIFAQEKIYHDETSINRANALLQKAERLFFSKPVIVMESTSHYHLILFQFFSEHGYDVIVVNPLQSNSMKDFSIRKRKTDRVDAFKLAMMYRTKTLRPSQIPQTATRALRQLCRHRAELLNDVSSYKNRLTALLDQTFPGYDKVFSDVGGVTSCAVLVRFPTPTILLVEEESELVDVIAAASKAGYNFAKKKAGLLISAAQKAQTLGIHSCADETLIVCTIQMLRTLSESVLQIETAIDNLLAQIKEMRNNVSLLQSIPGVGSHSAALLLGEIGDILLFKKPKQLAAYFGLDPTERQSGSFRGTKNKLSKRGSPYARAALHMGVVNSICKRGKDSAANPVLLSYYEKKCKNKPAKVAQAASMHKLVFIVFAVLRDQKPFELKTPEQHAVEQGFVKAA

SEQ ID NO: 193371 - protein, 370 aa, unidentified
MQFVGIDLHTNKFTCCYRDEKHPVEGKEEKRIETYSLTALGLADFFKTLNLETYVLVEATITTFSFVRLLEPLVKEVIVANTYELKQISLGRKKTDKVDADKLCRILKMQVLSGEKTISPVVVPPEEIQELRGLFSTYRLLKKQTTQIKNRIHSVLKEKLYGFTREKIFTGKGRECIRGLEEGTVLSFQINLLFCELEQLEGLIESLQDKIKEQAEPYMREIKILTSMKGVSVFMAIAIIADIIKVDRFKDSKSFTSYLRSAPKVESSNTTVNIRGTNKQGRKLSATLLSQSMNHILDASPKLNKWYVRLSRYKKAGLVRTGLRRRVFAEIYQMLKKGEYHYGREADKHEAKLLQYKKLLEKTKNSVKTA

SEQ ID NO: 193372 - protein, 337 aa, unidentified
MKLYCGIDLHSNNHYLTLIDENDRRILEKRLPNDLAATLKTLKPYRGKITAIAVESTFNWYWLVDGLMEAGYCLKLVNTAKTRQYEGLKHTDDRYDAFWLAQQMRLGILPTGYIYPKAERSVRDLLRVRRRLVRHRTTHILSTQCTLWRHTGIKPSAKMIVGEKKTPWPRLANASDELGLEAHRAAIDVLSMQIERIERTVLKALKPRADYKALLTVNGIGEVIAWTILLESGDLTRFKDVGHFASYARCVDSKRISNEKKKGEGNAKNGNPYLAWAFFEAAHFAIQFLPAARRFYEKKAAQRNPILAMKALSHKLARACYYVMRDRISFDPARLFG

SEQ ID NO: 193373 - protein, 337 aa, unidentified
MEHFGGLDVSMAETHVCVMNRDGAVVHEVKVPSMSVDIAAALAQAPTCERIVFETGRMAPMLYHGLSQLGLPIVCIESRQAYQALKSLATHKTDRNDARGLAHLSRTGFFKAVHVKSLPAHALRSLIIARKKLVGQRVTLENQIRGLAVVFGVRLPRALTAAFIRQALGASEGITGLSAAMRGLVAARTAVLAAVVAIDADIRQLVRASAACRRLMTIPGVGQLTALAFTAAIDDPSRFRRSRDIGPYLGLVPRRYQSGEVDYTGSISKCGDRRVRTLLYEAANVMLTRYKPALKLKDWAFAIAKRSTMRKARIALARRLAIIMHAMLRDGTEFKPA

SEQ ID NO: 193374 - protein, 343 aa, unidentified
MDYYAGIDVSLELSSVCILDASGQIVREAEVASEPEALATFLASLNLPLTRVGLEAGPLSQWLYAGLVQVGFEVVLLETRHVKAALSAMIVKTDRRDARGIAQLLRMGWFRPVHCKSPPAQEVRALLMARKQLQAKMRDVELSLRGLLRGFGLKVGEISKGQFAARVRMLTAGHAMLEKIAEAMLRAREALQTEFARLHRAMLSIARENEVCRRLMSVPGVGALIAVTFTSAVDDPERFARSRAVGAHFGLTPKKYQSGETDITGAVSRVGDPMVRTALYEGAHILLTRAVRFSALKRWALEVARRRGMRRAKVALARKLAVILHRMWMDGTTFRWGQEGAAA

SEQ ID NO: 193375 - protein, 343 aa, unidentified
MKILKQSVGIDVSKSDYKVCLGKLDEQLSVAFSFQKAYDNNLKGVTLFLKEVSRLFTADVPVQFILEASGVYHELLAHKIYQHGYEVSIILPSKSKAFFRSITQKVKTDKVDARLLSQLALERQLDNWVPADPIYAQMRSLTRERESNMKEKTMIINKIHAQQSAYQIAKSTLRRSKQRLKLLQKQIISIDSELKTLVESSEMLCSKVNRITKVKGLSLLTVATVIAETNGFGIIRNRRQLVGYVGLDVLINQSGQKSSKGRLSKKGNPHIRKALYMPALSSSRSNELIKIIYQQLNQRQAAKKQGIMVVAKKLLILIYALWKNSTEYDPQKNIQSRLVLATV

SEQ ID NO: 193376 - protein, 413 aa, unidentified
MLSNLNWSELLAVSCSALLDAMWATAVILQVPTEKEDTMSTAATRMDENTRKLYVAFELGEKEWRLAMSPSLAVRPTLRALRSRATARVLEVLESECQRVGAVQVVSCYEAGRDGFWLDRFLHAHGIDNRIVDSASIEVRRRARRVKTDRLDAQKLLTMLHREALGEKDLWSVVHVPAVADEDARSLQREYRTLVKERSRSSNRIKGLLASQGVVAPRIDAQFLPWLAAARLWDGSAIPSGMRARVEREFARWRFTRDQVLALEKERRDRTKDETDRSLEKVRALFALKGIGLGAAWTWGLEFFTWRDFRNGKEVGALSGLAPTPYQSGDSSHELGISRAGNRWVRGLAIEIAWGWLRHQPDSALTHWYNERFARGGPRARKVGIVALARKLLVALWRYVETGVLPEGAVLKA

SEQ ID NO: 193377 - protein, 414 aa, unidentified
MTKFSVYIGIDWANDKHDVCVQVANSSVRKFEVIKHSPRSINEWITSLHKQYKGQIAVAIELSKGPIVYALQKFDFVTIHPVNTSMLAQYRKAFSPSGAKDDPTDAEIALDLMLRYPNKIKALKMESESVRKLTYLVEQRRKLVEDKRRFSNRLIVTLKEYYPHLLDWFSHRGSGIFCDFITRWPNLQKLKRARPDTLKKFFGSYPGRTASYSVKRIQSISEAEPLTLDNAVIESHQLLAVALANQLLVAVKVIKVFDKEISELFNALPDAELYKSLPGTGPCLAPRLLVAIGENRSRFNSASEIQMYAGIAPVTVRSGQKSWIHWRYQCSKFTRQSFIEWAAKSVHQSYWAGIYYQQQRSKGNTHQASVRSLAFKWIRIVFRCWKTKEPYNEAKYLKALSDRNSPLLFKEKAC

SEQ ID NO: 193378 - protein, 419 aa, unidentified
MHTEERQWFAGIDWATETHHVFVSDDRGQKLGEKVFPHSGEGLAAMQDYILSLTGSTPDKVFVAIEVPNGPVVESLMERGFRLHSINPKQLDRFRDRFSPAGAKDDSRDAEVLGSGLRTDPHCFRPLAPLDPVVIELREWSRIGEDLTAERNRLCNRLREQLWRYYPQMLELTDDIAAGWLLELWALVPTPDKAKRVREDTVSRLLKRRRIRRLDAGQVLTTLRQSAMIVAAGTVEAATGHIKVLAKQLELVNRQIAEAEQQLDRLTERLAGAEAGEPGQKIEQRDVTILRSLPGVGRIVLATLLAEAWDLLQRRDYHGLRCLCGVAPVTKRSGKSKLVHRRLAIHRRLANAVHHWSRVAMQYDPRSRAKYAALRQRGHGHARALRSVGDRLLAVACAMLESQTIFDPNLAQQRALNVA

SEQ ID NO: 193379 - protein, 379 aa, unidentified
MKKNSKQTASIETVKKNSKETAKVETVPANRWGEKPKVTVGLDLGDRYSYYCMINADGEVFEEGRIQTNEEGLHRHFHGQGRWRIALEAGAHSPWVSRKLRAWGHQAIVANPRQIPALTETDSRNDRNDAENLARFAYCDPCLLKPIEHRSVERQRDLNLLKVRDTLVRARTMMINSLRGLVKSEGQRLPKCDADNFVSRTELFIPAGLRPASQPVLEQIQQLTQHIQDLEKQIKKLAEHYPEMELLQTAQGVGPIIAAAYVLTLDRPEAFPSSRQAGAFLGLRPRQKQSGNSDVQCRISKRGNQYLRRLLVQGAQRILGPKGEDSALRRWGLKLASTGGKRGKKRAVVAVARKLAVILHSMWKNNEPFRPFPETAAAA

SEQ ID NO: 193380 - protein, 315 aa, unidentified
MTITSQIYVGIDVSKESLEVAKLGKKPTERFSNKKPGIAKLVRHLKPWKPKLIVVEATGGYEEALVLALFEAGLPVALVSPQRVRQYAKAKGLLAKTDPIDAQLLAEFGKHLQPRLFVGKSEERRRLSALVGRRKQLNDMLQAEKNRLRTSSVEVKHSLKRVLDYLQTEMKQLEEEIHKFMQVHEDFGDQEKLLCTAKSVGPVTAATLLADLPELGTLDRKQIAALVGVAPMNKDSGKKRGYRKTKGGRPAVRNVLYMSALSGIRYNPILKPQYEQLRKRGKEKKVAITACMRKMLTILNAMVRDQQPFRYPTMA

SEQ ID NO: 193381 - protein, 415 aa, unidentified
MAQSRPLFLGMDVHKESIAVASVAHAHGADVTFLGTIGTRQCASASLLRKMPSKATHLIFVSAAGPCGSWLSRYRTKQDDACGVVAPALLPKKPGDRGKTDRTDAMQWARLARSGDLPVVDVPQVDEEALRALARARADTLRALQAATFRLKAFLLRHALRYPGRAPWGPAPLRGLSEVVCPPPAQHIVFPEDVRAVTAHPERRQRLDHARHAQGTSWRLPPVVEALQALRGVQCTAAVTMVAEMGALPRFESPRALRQCLGLLPAEYTSAERRRQGAIPQAGTTQARSALVAGAGASRSPAQGSRPIHLRREKHPKILQDISWKAQGRRCQRSRQLSARGQHATGVTVAIARELGGFRWALAQQVPGTPEGQRSQRSCTPHAAGCRRAAAKTPPRCGVILGGVQRLVEGYACRE

SEQ ID NO: 193382 - protein, 337 aa, unidentified
MTYYIGLDVSVESTAICVIDDKGHVAKELSVPSRPDDLAAALNPFSEAIGSIGLEAGPMSSFLAAGLKRHGLVPVLMETRRVHAALSAIPVKTDRRDARGIAELLRMGWFQPVHLKTPAARDLRLILSARDTLGRRIRELDNSVRGLLRGFGLKVPKGARGRLCDLVRDLIDGNPALKAAITPLLAAREAMADEFARLDKLVRDQSRKDPVCRLLMTVPGVGAVIAMTFRAAIDDPKRFRSSKSVGACFGLTPRRYQSGETDRVSSITKAGDASVRTALYEAAHVMLVRSSRWTPLKAWAMRVAARRGAKRAKIALARKLAVILHRMWMDGTEFKAA

SEQ ID NO: 193383 - protein, 360 aa, unidentified
MNSALTYLGLDIAKLTLELSPLQGTKTHPFPNDSKGHQRLVAHLKALPGDLHIVCEATGGYEHDLLKVLFENKVAVSLVNPRKIRDFARAKGILAKTDCIDALVLASYGRLLTPPRTLPKPAEEQRLTQLVTRRQELMGLIGQEQNRQEHHHDPFVVKQAKSLIKSLKRHVQLIEAQLATLQESSITIASRVERLSSIQGIAQRTSWILLAALPELGTLDRGQAAALAGLAPYNHDSGPLRGKRHIAHGRPLARSALYMAALAASRHNPVLSPIYKHLRAAGKPAKVALTALMRRLAELANLILKNPKLKLLSSVGQPQKGKASGITGSKAALESISKAGSGPAVQSEDRALQGCNPSAG

SEQ ID NO: 193384 - protein, 331 aa, unidentified
MQSKEFFIGIDVSKLTLDVSVHGTKNHIRIVNSSEGFKQLQSWLKSLTISVSDCWFVFEYTGGYEYRLVQFLQSKGILFTRVPGLEIKKSMGMQRGKNDKIDSKRIAEYGYEKRDKLKEHKACSTAITRLKLLLTQRSGFVDDKKAHEHRMKELEAMMDLKAGDPILKHYKQAVDFAVRMIAKTENEIMKIFSKNEAMNKNFNLITSIPGIGKVNGWMTIAYTENFERFPNGRAYGAYIGVVPYEHSSGTSIKGKSRVSHMANKTLKADLSMAAKASVQHDPEMKTYYERRTVLGKRHMGIMNEVKFKLVLRMFAVVNKGEVYVKNLKSAA

SEQ ID NO: 193385 - protein, 330 aa, unidentified
MQFIGCDVSKTTLDLAWYNVQRGCWGTALKVHNNRAGWQDLMKWAKHHCQVDQSEICVVMEATGVYHLPTADHLSRVGFKVVACNPGRSADYARSQNQLNKNDSLDARSLQRYGSRLEKIHWFQPYTPEISQLKSLLSLLDQLDKDVLRWQNRLEKITFQYPGWSASGGVKRQLRNLCREQDRTQQAIDELIQGHEELWRNQQLMCTIKGVGSKTSQYLLPLLHGGRFVSARQLAAFLGLTPCHKSSGTSLRSPGQLSGRGDANLRAKLYMPALSAAHKNPELKVFYETLLARGKTPKQAITAVMRKLVHLCYGVVKNQTPYIENYASLS

SEQ ID NO: 193386 - protein, 366 aa, unidentified
MKKTSTVRVKGNMIFKGHQLTTGLDLGDRWSCYCVLDEAGEVLLEQKVATTPEAMKQTFEKIPRSLMALETGTHSPWVSRLLRELGHQVLVAHAQKVQLITKSTRKDDRHDARTLARLARIDPELLGPVRHRSAKAQIHLTVIRARAELVRARTALVNAARGLVKSYGQRLPKCGTRQVSRELAAGLHAELREVLEPLLKEVESLNERIQEYDERMEKIAKESYPHVELLKQVKGVGTQIALTYVLTLEDPHRFPKSREVGCFLGLKPGRRDSGESQPQLHISKEGDRYLRTMLVQGAHYILGPFGEDSDLRRWGLRLAERGGKNGKKRAVVAVARKLAVLLHRLWVSGEVYEPLRNSQKVIRAAA

SEQ ID NO: 193387 - protein, 352 aa, unidentified
MAKNKIDELMSVGIDIGKDTFHLVGFDNEGQLVLRKKIPRLALVATFEKLPPCIVGMEACLSAHFVSRTLRKLGFETRIIPAIYVRPFIKGQKNDYNDAEAIAEAALRPNLPTVSEKSQDQLDLQALHRVRSRLVSRRTATINQIRAFLIEQGITVRRGLRALKNSFETILEERKDEISPRMRTILIGLYGDWLWLDDRIETVSKEIEQISRTEENCVNVMTIPGIGPMISTAMVAAVGEGEAFGRGRDFAAWVGLVPRQYSTGGRTVLGRITKRGSRYLRMLFVQAAKVIMMRSNRWPDFSFGDWLTRASERMHRNKLAVALANKLARMAWSILRHKTAFDAPRDEVSIGV

SEQ ID NO: 193388 - protein, 345 aa, unidentified
MQSMYYIGLDVHKKSISYCVKDASGQIHAEGAIPATRFDLDRWMKTLPQPWTAAMEATLFTGWIYDHLLPHAAALKVAHPLMLRAIAAAKKKNDQIDANKIADGLRCNFLPECYMASTEIRERRRTLRYRNLLVRQAVQLKNKISGLLMEAGVSYNKQKLHKVGYFRELLATNQEIGEGLRPLLRICRETLVRLQKTESALVRSLEHDPLLAERVERLMTIPAVGPITALTWVLEIGDVKRFSSIKKAISYCGLCGAENSSANMIKRTPLSKQRNKHLQSVLIEAAKLAPRRSSGLALVYDRERQKGNANRATLAVARKLVAYLVAVDRSQRDFQVLETNNCIAA

SEQ ID NO: 193389 - protein, 366 aa, unidentified
MGWMAPLRHLSAKLLSDRISSEWEPSMGEVTTIGLDLAKHVFQVHGVDAEGATVLRKQLRRAQVLAFFSRLPPCLVGLEACATAHYWGRELRALGHEVRLMPAQYVKAYVKRNKHDAADAEAICEAVGRPTMRFVPVKTADQQAAVLLHRGRERLVRQRTGLVNALRGHLAEFGVIAPQGLRNVGKLIAIVRDERDARLPDLARQVLQVLAAQIEQLEAAVAAIEKQLMAWHKSNPVSQRLASVPGIGPIIATAIAATVVEPSGFRSGREFAAWLGLVPRQNSTGGKHRLGGISKRGNQYLRRLLINGASANLLRSKATNADPWVIGLRRRRPPLVVAVALANKTARIAWAVMHRHENYQRVAAAA

SEQ ID NO: 193390 - protein, 352 aa, unidentified
MATYTRTIENGKIFVGIDIHKRTWYVTIITGDGEELFSRGIPANWDNLKKLLNRYKRDTVRVVYEAGYFGYWLHDLLIEHGCHCIVTPPSLIPQEYGNRVKTDRRDSRKLALLLAKSMLKRVYVPTKKERYHRQVLRRRRQLIGDRIRTQNRIKSELMFYGIPLPQIRGNWSKTFMRYIWGIHFKDPWMQESYHQLLELYGYLSNQIDKQTALLKELSQTDRYRDRVQILTSIPGIGLIGAMELLLELQDVARFKRADQLAAYVGLTPSQYSSADKIRMGHITRIGKNQLRALLIESSWHLIRKDENIRIKYEQILLRSGSKRAIVAIARRLLLCSRRMLLDGKPYSTSSAA

SEQ ID NO: 193391 - protein, 375 aa, unidentified
MKKTSSGCKSPKASRKATKATKVTVGMDLGDKTSRYCMLDENGEVLREASVATTKKAMTQVFATMKPCRVAIEVGTHSPWVSRLLKSCGHEVIVANARQVQLISKSSRKNDRMDAQTLARLARVDPRLLRPIQHRSEQAQGHLRVIRVRAALVEARTMLVNAARGLTKATGERLPSCDADQIGVELMESLPAGLQNSLRPLLEEVESLTEKIQALDQQVEQIARTDYPETDLLQQVSGVGPLIALTFVLTVEDRERFQKSRDVGCYLGLRPRQSDSGESEPQLRITKEGDPYLRKLLVQGAHCIIRRRGPDTDLKRWGLKLSARGGKNAKKRAVVAVARKLAILLHRLWVTGEVYEPLRNSQSGPPVNKSRKAAA

SEQ ID NO: 193392 - protein, 354 aa, unidentified
MIVIGADTHKSTHALAAVDAATGQLLTEKEIPAKENGHIDALRWAHELGPEIVWAIEDCRHVSQHLEHALIAAGERVVRVAPKLMGASRRGEREPGKSDQIDARAIARAVLREGLERFPTAYLDESAMEIRLLCDHHDALVNERIRLTNRLRWNLVILDPELEATVPTRKLDYPGQLERITRRLRALPQTARVRIAKEQAKRIRLLAREAEALKRELRDLVKTHNPRLLAETGCGPLTAAILIGQTAGAQRFATDAQFARMAGVAPIPVSSGRKDRYRLDRGGNRQLNRALHIIAITRGRRDPQSRAYLERKEAEGKSRMEALRCLKRLLARHFHQLLTTPSRLPADETAVQIS

SEQ ID NO: 193393 - protein, 396 aa, unidentified
MLYLAIDQHRKQLTVNLRNEAGDVILKRQVSTQWARVREFMEEVRNRSVPEGGFVAIVEVCGFNDWFLKLLAEYGCKEIVLIQPEKRTKNKTDRRDANALGELLWTNRQRLLAGKKVQNVRQIVPPSQRDAEDRQLTAVRQRMGQLRTRAINRVQHLLLKHNLQQECPTKGLQTQAAKKWLAKLPLGTIDRLELDQLLAQWELLDRQLKVLEAKIVERQAESQTAAIIATVPGAAAYGSLGLASRIGSIERFPHARSLAHYFGLTPGCRNSGDATRRLGSITKQGSALARFILAQMVLHVLRRDARMKEWFGRIKRRRGAKIARVAAMRRLATILWHMLKHQQPYRLGGKPGEGSGPDMGCLPPERDAFLQALQGRSRGGKEKGCPGLATEAAARA

SEQ ID NO: 193394 - protein, 338 aa, unidentified
MKKFIGIDLHSNNSVVVVSDEEDRMIFQKRMPNDLKLIEAALAPHRDETVGVVVESTYNWYWLVDGLMDAGYRVHLANASAIKKYEGLKYSGDVADAAYLAHLLRLGLLAEGYIYPREERGARDLARKRLQLVRYRTAQILSIEGILMRQTGARIKSESVKGLTPEQVEEFGFAPDVALAVEANRAVSQTLGQQIEALEKRLRERVSLRGEFKLLKTAPGIGETLATTIMLETGTIARFAQVGNFSSYCRCVDSLRESNGKKKGEGNAKNGNKYLAWAFVEAANFAVRYCPQAKSFYERKKRKTNRIVATKALAHKLARACYHMLREHKPFDVNRCFA

SEQ ID NO: 193395 - protein, 345 aa, unidentified
MPIVGGLDIHRKQLTFDYLDTVTGEVKRGQVVPADRAHLRAWLARFAGRDDVVFALEGCTGWRYVAEELAGAGVAAHVAEPADTAFARGRKRHAKTDKTDSRHLRELLAQGRLPECWIPPAHILECRALLELYHDLRAEHTAWVQRIHAVFFHQGAPALGDGTLRTGQGVAAVRAAAAAHLSPAGQLQVATALEVIEALEARMHAVRHQLLTAARHLAGAKVLAERLYGVGPMTALAMTCWLGGAGRFSSSRKAVRFAGLDITVYSSDGKRSPGRLSRQGPPVLRWAVYEAGKTHARAPAPDHRYYAQVKDRQDGKRAALSEARKLLRQACHILAELGDDALSAA

SEQ ID NO: 193396 - protein, 364 aa, unidentified
MDNLQHVGLDVHKKTIEAAVFRGWNTDPELEKMLPNERAKIRTFFDRLKMRGPVVACYEAGCMGFELQRMLANMNVPCMVVAPGLLPRKPGERIRTDRRDARMLARNLRNGEVTAIHIPTQEDESVRDYLRMLDDFKGELKKTRQRLLHFLLRHNVVYSEGSHWTGRHERWLRTLNLEDPLLQETFDEYYLHLNELQEKIKRIKEKMEEIALRESYRDKISMLKCFKGIETLTALSLVVEIGDFRRFMKAEEFMAFLGLVPSEDSSGDIRRKGGITKAGNSHLRRLLVEASWHYRFYRGASSRLIARRKGQKAEIVSYANKAGRRLAKKFSRLAFRRKRSQVAVTAVAREFAGFVWGMMVGQLS

SEQ ID NO: 193397 - protein, 387 aa, unidentified
MQKPHDNSKASPAAFVQDNTLIAVIELSLSNWLVAGLIPGVSREPLKKLEPNPEDLLKLLHGWRDEAIKAGRPITRIAVAYETGRDSFWLARWLRERGIDAHVIHATSVTVSREHRRAKTDRLDTAMLKRGFLGWLRGERGHCTVAIVPTMEEEDAKRPHREREGLVHEQTRAVNRMKSALIQYGVRNFNPKLRKASVKLETVRTPEGKSLPPNTIAALRRDMERLKIIKEQIKAIEQARLQQFEQKPEALVNRMVYLLVRIYGLGLETADLLAHELLSRKLRDRKAVARYAGLTGSPDESGSKRREKGLSRSGNARVRKIMIQLAWRMVKFQPDSALVQWFKQRTESAKGSRKPMIVALARKLIIALWRYANDGVIPEGFKLHSAA

SEQ ID NO: 193398 - protein, 414 aa, unidentified
MAKNDRIVVGGVDTHKDVHVAAVVDEIGRILGTSAFPTTARGLAELHAWMRSFGDVARVGVEGTGAYGAGLARHLGGEGVEVVEVNRPNRQMRRRRGKSDTVDAEAAARAALNGEATVAPKAQVGVVESIRVHRVAFVSARSHRTQVALQIRDLIVTAPPELRAVLGPLATEERVARCARFRLMGDPADPSVGVKSALRSLARRHEALTIEMAELEATLDRLTAVANPALRGAKGVGTDVAAILLTAAGDNPGRLRHEAAFAAMCGVSPIQASSGKTQRHRLNRSGNRQANHALWRIVNVRLTCDPASKAYLERRTAEGKSRREIVRCLKRYVAREIFRLLVVPEAVPDGADLRTARIARGLSQTPVATALNTSVNAISRLERSRIFDTELARRYESFLASISENEPHAVPAAA

SEQ ID NO: 193399 - protein, 408 aa, unidentified
MNSVGIDVSKGKSMVAALRPFGEVAISPREVPHTLSKLESLGYDIISLGEDTKVIMEATGRYHEPVAAALHELGICVCVLNPIVIKQSGAGSVRKVKNDRKDAMKIAKYGLDNWMSLRQYTPSDAVRQMLKLFSRQYNLYMKTSVSLQNNLISLLDKTFPGANKLFDSPTRADGHQKWVDFAADFWHCDCLTRISVKAFNERYQKWCARKGYNFSASKAEDVYISSAGHFPTLPKNDGSKLLITSAAAELTAARQVLMMVKSEVIRLAQMLPEYVIVQSMYGVGEITGAQLMAELGDVRRFDNRRAIIAFAGIDPEVNQSGSYQRESNPASKRGSPHLRKTLFQVVETHLKCSPSEEPVYQFLAKKRSEGKPYYVYMTAAANKFLRIYYARVKEYLNEHCPEQDPPKL

SEQ ID NO: 193400 - protein, 339 aa, unidentified
MEGKNSSVWAGFDVGKASFSAALDTTSEGSRAKLSTLPCRDFKRTPEGVEQFFRWVQNTVPDYDVHIVMETTGCYSQHLTDWINQLRPNVGVTIENARNIHAFIQSLNLPHKTDKLDAQAIARFGTERQPKPTNRPSQTVLTLRELSRERTALIKARVDLQNRRDTLTSTIARKINGQTLATLTIQIEKIDKEIKACVVQDEELLAEVHIMTTMPGVNFISAYSILAEIGSLKQYSAKELSALSGLAPRIIESGSSVHSSYLSRRSSGRLRQILYLDSVSGVPKIPALQDFHQRLIARGKKKMTARCACMRKMLLMLRSMVVHKTPFDENFLKNSSKGA

SEQ ID NO: 193401 - protein, 370 aa, unidentified
MHKPTTVFVGLDVHKDSISVAHALEDRDSEVTFVGPIGTRQCDIDKLVRRLQSKAPHLVFAYEAGPCGYVLHRYLTGKGLECLVVAPSLIPKKPGDRIKTDRRDAIELARLLRSGDLTAVYVPSIEDEAIRDLSRAREDSVKDLKASKLRLKSFLLRLGITYVGRADWNAAHLRYLARVVCPTPVQQIVFQEYLHAVTEISDRLKRLEAELRGHVSSWRLSPLVESYQALRGVQDTVAITTAAELGDITRFDSPRQLAAFVGLIPSVHASGNSRRLGSITKAGNSHARRVLVEGAWAYRHPAKVSEAIRKRVERLPKKIQDIAWKAQVRLCKRFRQLSARGKHPNVIVTAIARELLAFMWAIAREVKSSA

SEQ ID NO: 193402 - protein, 884 aa, unidentified
MANRKRTTFERINLERMNRRQRRELGQRLEKSDPGLEIVHPHAAGIDVGNQSHFVAVPGDRDAQPVREFGCWTGDLVKLSQWLKAGGIQTVLVQATGVYWIALKDIVEQHGIEVVVANAQHTKNLPGRKSDVQECQWLMKLHTYGLVRGSFQLAKDMQGVRAVWRLRGRHVEEAARAVQHMQKALTQMNVQLANVLSDISGKSGQAIIGAILMGERDPDKLAELCDRRVLASPAEVAESLRGNWRDEMLFELGQAKESYQFALQQIQSCDRKLESYLNVLPARQVEITLPSPATAVRARKAPRQRGHTPDIPGLRDQLVRICGVDLTTIDGISVITAQTILAEIGTDMSRFPSEQDFVSWLGLTPSRDLSGGKVVRVVRRKVPSRAALALRMVATALRCSNSYLGRPLPAPAEAATQQSFRCQSHGSLPGRTRVSLADERTGVGGSGSGEVRAKTQSAEPGLTAGPGSRQRIPAGPCNRRVNRHHPLFFSAGLHAGRSMAKLCPQHAMLHAANPESLLYIETFVQPSLRRRAIAEEVSGETMYYIGLDVHKRTISYCVKDAAGHVDSEGKIGSMRRELDAWIRTVPQPRMIAREATIFTGWIYDHLLPYAEKVKVAHPLMLRAIAAAKKKNDKIDAGKIADCLRCDFLPECHMVSTEIRDRRRTLRYRHLLVRQMVQMKNRVSGLLMETGVEHNKQRLHKVGYFHELLATNPEVHPCIRPLLKISRETIERCQKTDYALVSSLQRDPLLAERIKRLRKIPGVGPITALTWALEIGDVSRFRTIKQAISYCGLCGEEKRSADKVMRTPLSKQRNKHIQHVLVEAVKLAPRQCHELAVVHEREMQKGNRNRATLAVARKMVAYLLAVDRQQRDFVSAEDRRRTAAA

SEQ ID NO: 193403 - protein, 413 aa, unidentified
MSIDPNTAAARVTAGVDWAKDDHVVCVTGCEGEVLDRFTVGHNAAGLKRMAARLLRAGAGQVGIERGDGPVVDTLLQAGLTVFVIPPAQIKHLRSRYGSAGNKDDRFDAYVLADVVRTDIRRLRSMVSDSEQATALRSSVRTRRDLVGHRVAAANQLRAHLQNVFPGAAALFADIDSPITLTFLSRFTSQEQADWLSPRRMTAWLASVAYSGGTDPAVLHARLLAAPRGVTGQHAGVHAATTLAWVAVLRTLNAQIQALAASIGTQLASHPDAAIFTSLPRSGTVRAARLLAEIGDARGRFPTRDSLTCLAGVAPSTRQSGKVKSVTYRWAADKQLRDALCDFAGDSRRASPWAADLYNKAIARGCDHPHAVRILARAWAHIIWRCWQDKLPYDPAAHNSLQALLSQHPPLAA

SEQ ID NO: 193404 - protein, 282 aa, unidentified
MGVDIGKRNCVVCIMDSDGSIIEETKYNNTFDEAKSFASDIKKKHGGSGKSTITAVCESTGNLWLKTYHAFEKYNIDVKLANPLKTKAIAEARIKTDKLDARTLAHLLRSDLVAECYIANKKTREERSLLRLRTNLVQDRTRVINRTHSLLDKYDMDFGYSKIFGIKGLQWLRDLRVIGNDQILLQEYISQINFLTTEIKNIESKIRIEASKNESVKILMSMTGIDYFSAMMISSEIGDINRFGSPQKLVSWAGLCPSVHQSGNSLYMGRMKGGNKKVSDPV

SEQ ID NO: 193405 - protein, 343 aa, unidentified
MRHYAGLDVSVKETSVCIVDESGKVCRETKVPSHPEDLARALHDRAWCLERVGLEAGPLSQWLFSGLAATGLPVVCIETRHTKAFLQAQVNKSDRNDARGIAQMMRVNLFRPVHVKTLTSQKRRALLTARKLLQEKALAVDNDIRGLLRNFGLKVGPIGASRFETRTRELVDGMAELAEIIDPLLEARRKLRELFAVLHRKLLVIVRDDTVCRRLMTVPGVGPVVSMAFTATIDVPARFKSSKAVGAALGLTPILNQSGESKRLGRVSLCGDGMTRTLLYEAAQVMLTRTTKWSWLKAWAMKVAARRGIQKAIVALARRLAVILHRIWVSGTDFRWTREVQST

SEQ ID NO: 193406 - protein, 343 aa, unidentified
MKLRVLGIDLGKTVFHLVGLDSTGRVVIRKKCSPTQLLAFTANLQVQLIGMESRSGSHFLGRALREQGHEVRLMPAQYVKPYVQTNKSDFLDAEAIAEAVQRPRMRFVPIKTEEQLDLQALHRVRERWVMRRTAVVNPIRSLLLERGLTLPKGRGYVDRQLPRILEDGELRLSGSFRVLLAQLKIELEQLTARIEEMDRVIQKTAKENEACQRLTEIPGVGPVTATALIAAVGNGSTFQKGRNLAAWMGIVPGEYSTGGKQKLLGISKRGNKYLRTLFIQGARSVLQQRDKQVPGLSSWLTQLLARAHQNVVIVALANKMVRMAWAVLCKNERYRAPVLAMSA

SEQ ID NO: 193407 - protein, 348 aa, unidentified
MIMGVDYHPSFRQIAFVDQETGDYGERRLNHGDGEAERFYRNLKQRGIPVRVGMEATGYSRWFERLLAELGFEIWIGDPAEIRTKRVKKQKTDRRDAELLLKLMLEDRFPRIWTPSPENRDLRQLLWHRHRLVQMRTRIMNQLQALAMNENQCWKKKLWSKRGRAELEKLRLAPWGSRRRQELLQLLDRLDPTIEELTAAAEQEAGKRPEVLLLMTHPGVGFLTALAYVLIIGTPTRFACGKQIGSYLGMIPSEDSSGGKQRLGHLSKQGNSLITLFAGGGSTGGCALQSGLAASLSTAGHEATKEHCQGSYGAKTGNLSVLDVAKRVGVSAVGQVRFARGTARYRKW

SEQ ID NO: 193408 - protein, 351 aa, unidentified
MLAGVDADTGQVFGARQIAADNSGHLQAVRWARGLDPERVWAIEDCRHVSRRLEEALLAAGERVVRVPPKMMGASRRGEREAGKSDEIDALAVARAVVKDGVERFPAAYLDERAMEIRLLSDHRDDLVRERTRIQNRLRWHLLELCPELEAQLPKGGLDRHVVLERIARRLRAFGGDQRARVAREQLSRVRTLTRQSNELERELRRLVEAHRPALLAEQGCGTLTAATLIGRTAGAERFPTDAHFARQAGVAPIPASSGRVVRHRLHRGGDRQLNRALYMIAITKARIDPQTKAYLERRRAEGKTKREALRCLKRHLAGHIHRRLLSMPPFDLDQEPPIEINAAISGGCLT

SEQ ID NO: 193409 - protein, 410 aa, unidentified
MRVIGLDVHRSFAEVAILENGTIQHAGRFKLEHWRVIAFGKTLKRNDEVVLEATGNTSVIVRLLTPFVRRVVVANPLQVRSIAWAKVKTDKIDAGVLAKLHASGFLPEVWIPNEETEALRRRIAERNQLVSQMTRLKNRVHSVLHANLIPRYAGKLFSERGRTWLDTQPLPEDQRRQIGRHIDEHDRIAIELVALEKNLAENALRDDRVKRLMTIGGVNAIVALGVLAAIGDVARFSSPQKLVSYFGLNPKVRQSGDRPAYHGRISRQGRAHARAMLVEAAWSIATQPGPLRAFFNRVKQRRGQQIAAVATARKLAVLIWHLLTNEEDYAWTRPALMQWKIRELELRAGRASRRGGNKPGPARDYSLKTVRDKEREWLGLAEAGYRRFVSAWKEKPPTRRPGAAKEVRRS

SEQ ID NO: 193410 - protein, 425 aa, unidentified
MSACLSSTVRFTVAIDLAKQHHVATIFDAKLLKPCEVVRISVTALGFEHFKARLDHYSGNVTDFIIGCEATGHYGETLLKWLQHRGYSIIRLNPAQVVQFRRGLGVRAKTDELDADAMARQLAVIHAKPDLQVGEHAERLRRLSRLRLDFVEEQSRWINRVRALINQMCPESEVLFKDFTAPGTLAVLQAFPSRIALAQVPVTELSEVARKSSHGIRSLDFARQLQTVAQQSIGLDDPWLTDELLIIVKQLMHLVTVIEQLDVQIDIHTKAYLVEHSLAHGFQVPLTPSAFPIRGTLALGTILGEIGSIERFESLNHLLSYFGWCPQTAESGTLANPHPALSPKGNRFARRILFLQAVCAIRCLPEYQAYFAERTRSGKTKMKTLIAVGRKLLSVIVAVLRSGQPYIPDRYLERMQKVRQASSSA

SEQ ID NO: 193411 - protein, 345 aa, unidentified
MMVVLGTDAHKRSHTVVACNEVGAEIGTVTVPATPPGHLRLVKWAAQFTVRRWAIEDCRALSRRLEADLLRVGEHVVRVPPKLMAGVRRSARTRGKSDPIDALAVARAALREPDLPTARLDGPSREVRLLVDYRESLVKDRTAAQNRLRWRLHELEPGYDPPAGSLNRYKTLAAIDQLLDNHTGVVADVARREVTRIRELTTEANQLEADITVRVTGLVPSLLAIPGCGALSAAKLVGEAADISRFKSRDAYAMWAGTAPIPVWSANNTRFRLNRGGNRQTNAALHRIAITQIRIHPDAKAFITRRLQAGSTKREALRLLKRKLANVVYRTLLADTQQPALEKAA

SEQ ID NO: 193412 - protein, 349 aa, unidentified
MRFYTQQHRFYCGVDLHARTMYLCILDSNGQVVFDKNLAAEPDAFLKAIAPFRDGLVVAVECLFCWYWLADLCAKEQLPFVLGHALYMKAIHGGKSKNDQIDAAKIARLLRGGTLPQGYVYPAGMRATRDLLRRRMYLVHKRAETIAHVQNTNSQYNYAPFGKKLSYAANREELQVAERFTDPSVRRMIDIDLALIDQYDALLGDVELYLTRTAKVDDVNTFHRLRSVPGIGKILALVLLYEIHDVRRFPEVGNFLSYARLVRCAHESGGKKLGSGGKKIGNPHLRWAFAEAACLFLRQSETAKKWLQRQEKKRGKGKALGILAAKLGRAVYHVLHKKVAFDEARFWAS

SEQ ID NO: 193413 - protein, 310 aa, unidentified
MANQYVGIDVAKATLDVAIGSDGELVQVENNEAGIARLLERLGEVEPTLVVLEATGGYETVVAGAIVGRGIAVAVVNPRQVRDFAKATGVLAKTDRIDARVLARFAEAVRPEPRPLPTAEAKELEEYLSRRRQLVDMLTMEKNRQSIATTERMKKSLKKHIDWLEEALRRANDDIDKAIRNSPAWREQEDLLRSVPGIGPVSARTMLAELPELGRLNRKKIAALVGVAPLNRDSGTLQGSRTCWGGRASVRQVLYMAAVTAVRCNPVIRRTYAALRTRGKKHKVALVACMRKLLTILTAMVRDQRRWSPS

SEQ ID NO: 193414 - protein, 415 aa, unidentified
MALKIVYKICCGIDVHKTFVVACIASTNDKGVTSYESHRFSTYTSGLKTLLQWLLDRNCKDVCMESTGKYWIPVYNILEKDCKIVLAHPKYVKAIRGKKTDKKDAKWIADRFKHDLVAGSFMPPADIRQLRDLMRYRFKLTCFKSSEKNRLQNCLTVSNIQLGNVVSDTFGKSAQAILDKILENPADTSFDLEPLVFKSLKKKLSELRDAIDGYITPEQAGKLKVIKAHYENLESRKAELEELILALAAPYQQELAILQTAPGISSDFTAIGIISEIGTNMEAFPSAKHLCSWAGLTPTNNESAGKKKSVRVSKAGCYIKPLLVQCANAVVTSKKHPEIRNRYLRIKKRRGHKKAIIAIARMLLTALYHMLKNGENYNAELYRKSDLPPVDREITVEQTLMIARNQGYKIKSATA

SEQ ID NO: 193415 - protein, 349 aa, unidentified
MYYVGADLHKEQTWFYIMDQNGTKIDSKSISNSPDSLKSYFATMPTPFTLAVEATYNWYFFIDMAEQFAQTAYLANSYELKAFAKRHKKTDKIDARLIADILRKGFLPTVFIPDQSIRSLKELLHYRINLVRDRCRNIFRLKNTLDKLGADSSGDFTTKKRLWEIPVDSFAERCHYIISGYIGRIVALNQHIHNMKTYLKNELLEDKEIQNLITIDGLDYFSAALIKSEIADINRFASFNRLCAYAGLAPRVSQSGDKEAHHGALMVNRRKNLQWILLETVFHFIKATPERQARYEELKGRKGANTAKVIMARQYLKIIYHVLKEQRPYYREEVKRPKVFCQIQSVATA

SEQ ID NO: 193416 - protein, 341 aa, unidentified
MTEVSTIGLDLAKNVFQAHGASVSGAILFRKKLRRDQVLAFFAAQPRCLVAMEACASAHYWAREIAKLGHEVRLIAPTYVKPFVKRQKNNAADAEAICEAAQRPTMRFVAVKSEAKQASAVVFRTRDLLVGQRTQIINAIRGHLAEYGLIAPQGPSHVDQLIAQIEDPSSGIPDPARSCLAVLVETLRALQGKIVALDAEIATRAKRDDGARRLMSIPGIGPLIATAIEALAPPVETFRSGRDFAAWVGLTPLQRSTGAQERLGKISRMGERTLRRLLIIGASGVVRWARRKGAPAGSWLARMLARKPPMLVMVALANKMARIAWALIAKGGSYRAPAVAA

SEQ ID NO: 193417 - protein, 354 aa, unidentified
MSTMADLPRSITGGVDTHADVHVAAVVDDLGRSLATGSFPTTTAGYRALLDWMHQHGEVQQIGIEGTGSYGAGLARFLTGTGVAVVEVNRPDRATRRRSGKSDPVDAQAAARTALAGEQSASPKSHNGPVEAIRQLRICRRSAIKARTQAANQIHAVVLTAPDELRARFRDRPIAKIVPDATRLRPGPDLTDPVAAAKHALATLARRWNHLNDEINALDRDLHTLVHATAPGLCALLGVGTDTAGALLIAAGDNPDRLHSEASFAALCGVSPIEASSGKITRHRLNRGGNRDANNALWRIALVRMSCDPTTRAYVERRTTQGRSKREIIRCLKRYIAREVYPHLTPSAHPPTTP

SEQ ID NO: 193418 - protein, 381 aa, unidentified
MAKQKKSTFERLRSGTMNRQQRRDLGRRLAGNDPGLTIVHPNAGGIDVGNESHFVAVPPDRDPHPVQEFGCWTADRKRMAAWLSACRIDTVAMPATGFYSVPLYDILTGHGIPVVLVNAQHTKNVPGRKSDVQECQWLMKLHTYGLLRDSFRLEEKMEGVRTIWRLRDRHVKDASRAVQHMQKALTKMNIQLANVISDITGVSGQAIITEILKGERDPWKLADLKHELVRASREEVARSLEGNWRADLLFELRQAVDSYRFAHQQMRECDRKLKSFLASLPTRSLERPNRSGEASATAPQEKKTLKKPKPKRNEPTIDLKAELKRICGVDLTSIDGINVITAQTILSEVGTDMSGFPTENHFTSWLGLTPSKDISGGKSSD

SEQ ID NO: 193419 - protein, 355 aa, unidentified
MNQEKYIGMDVHQATISVAVMDGSGKLIMECILETKAATILEFIAGLRGTLSVTFEEGTPAAWLHDLLKPHVSHLVVCDPRRNALLKDGSKSDRIDARKLAELLHANKLHAVYHGEHGVRTLKELGRSYLTITKDLARVMSRIKALYRGWAIPCSGATVYAPRHRDEWLAKIPHPGVRLRAERLYQQLDLLQPVRQEARRDLLVESHKHHAVELLRQIPAIGPIRAALLVALLQTPHRFRTKRQLWAYSGFAVEIHDSGEYRFARGKLVRNRERITVRGLNHNHNHDLKNLFKGAAISASTRPGPLCDFYVALVEKGMRPTMARLTLARKMAAITLTIWKKGVEFDAKQLNRQAA

SEQ ID NO: 193420 - protein, 364 aa, unidentified
MCQIELVERLKRGRPSVEQITRIGVDTSKNVFQLHGVNAEEKPVIRKKLTRTQMLSFFKGLPPTVIAIEACGSAHHWARNLGSLGHEVKLIAPQLAKPYVKRGKNDAADAEALCEAMSRPTMRFVPIKTANQQAALMLIGMRDRLVRNRTQLANAIRGYAAEFGLTAAKGISRIELLLGDIASDDSLPELARDLFAIHRREYELLQAEIEKVEARLMEWHRNDECSQRLARIPGVGPIGASLLTMKTPDPGLFKSGRDFAAWIGLTPRDHSTAGRARPGGITRAGDEHLRSVLVVGATSVLKTIRAGRGKNPSPWLLKLLELNKKPKLVAVALANRIARIAWKLMVSGESYRATGTPPVLANAA

SEQ ID NO: 193421 - protein, 411 aa, unidentified
MSQMLIGIDVSLRSHHVQFMAGDGQKLASFSVTNDRGGADTLIRRMLDTAAEAKCQTLRIGMEATSNLGWHLAHYLKDQLAPYEPKIQAQIYVLNARKVARFKKGYDTLPKTDRIDAWVIADHLRFGRLPHDMAEMIQYQALQRLTRTRFHLVQSIKREKAYFLNQVFLKFSGMRIDNPFSDTFGTTSLAVIQELDPESVAEMPMEELIEFLQDKGKNRFANPQEIAELLKKLARSSYRLDKSMSDPVNISLAVTLSVIKHMEAEVKKLDKEIEKIMKGLQQTLTSVKGIGLVYAAGILAEIGDIGRFNDHNALAKFAGLVWSKYQSGEFEAEDTDRVMTGNKYLRYYLVEAADKIRKYDSEYGAFYQKKFNEVSKHQHKRALVLTARKLVRLVFMLLKTNKLYTPPERRN

SEQ ID NO: 193422 - protein, 483 aa, unidentified
MKSKPEEQNKRATNHPTQHHWHEMNRKQRREMMRKMQNEDLSLEVIHPDAGGIDIGNESHYVAVPPSRDSQSVREFGCTTAELKAMAVWLKQCRIRTVAMQSTGVYWVAVYDILEQAGLEVYLVNARDTKNLPGRKSDVQESQWLMKLHTYGLLRNSFRPSPEIRVMRTHWRQRNDLVQSAGRHIQRMQKALTQMNLQLANVLTDISGATGQAIIKAILAGERDSHKLAQFRDPRVKASEEQIAQSLEGNWQEDLLFVLKQEHEGYEFCHQQMAECDRQLKQYLQQGEDRSQGAPLPEEKRKGRLKKKRANKPQFDLREGLFRMTGTDLTRIDGIDVMTAMTIISEAGWDMSKWPDEDHFVSWLRLCPDNRISGNKVIGKGRLPTNNPISIALRMAASTLRQSKTYLGAQFRRFRTRLGAPIAIKAMAAKLARLVYRMLRYGMKYVDQGAAFYELRHRELQIKRLKAKAEKLGYRVTPIPAAA

SEQ ID NO: 193423 - protein, 376 aa, unidentified
MSNVRFIGLDVHTETIAVAVAEPGGEVRSLGVIPNRSEAIRKLVKKLGPAEELRVCYEAGPTGYVVYWELTGLGVKCEVVAPTLVPVKAGDRVKTDRRDALKLARSYRAGDLTAVWVPDAAHEALRDLVRAREAAKKDQLRARHRLGKFLLRHGRRPATTMKAWTQKHLTWVKTVHFEHAAQDVTLLDYLNEVEHVADRLERLEGAIDDAVNAAPESMRAVIEALQALRGIAQVSAVTIVAEVGTLSRFAKPRQLMGYSGTVASEDTSGERTRRGGITKTGNAHLRRIVIEAAWAYQHRPSIGRALRKRQTTVSPMVKELAWKAQHRLNARYRHLTAKGKCRQEVVTAVSRELLGFIWAIGVKVEAQGTRQPSAAA

SEQ ID NO: 193424 - protein, 347 aa, unidentified
MRFDNTQHPFYCGIDLHARAMYVCILNPAGETLLHRNMKTTPDAFLKVIAPYRPDIVVAVECLFTWYGLADLCADEDIPFVLGHALYMKAIHGGKAKHDQIDSQKIAVLLRGGMLPQAYVYPAERRATRDLLRRRMHLAHKRGELLAHVQHTNSQYNLPAIGQNLADKANRDGVAERFADPAVQKSREVDLALVSHDDTLLRDVELTILKTAKQHDPNTLYLLQTVPGIGNILSLVLLYEIHPIDRFPRLQEFASYCRLIKCAKESNGKRSGTSGSKMGKAHLKWAFSEAAVLFLRDNPEGQKFLAKLEKKHGKGKALSILAHKLARAVYYMLKRKVAFEMKRFLHP

SEQ ID NO: 193425 - protein, 435 aa, unidentified
MIVAQKTIQPVLQRYARRCRMLQLGFVGLCVTPAFLLRRETLFMSSCVYTFLYAAEYMKARLRAEQCPPRAYNRTGWTTRTEARMREYISFDSHKYYTLMEREDIQTQVARQRRIEHAPDAIRAALRGCEADTPVAVEATGNWYWIVSEIEQAGLRPLLVHPRKAKLMMGMINKTDKLDVHGLNRLQRNGTLPTVWIPSADLRDLRELTRTRLMLSAQRTRLKNRLTATLAKYGRQHSEFTDAYGPRACTELRQRLEALPTQTRFVSELLLQQLDFVQQQIQTIEQRLQQLVQITPEMQLLQTLPGIGVILAATIALELGQIERFASAARLASYAGTTPRVHASGDKTRFGALRTDINQYLKWAFAEAGNSVALYHQRRPQRHVSQLYRRVRLRLRKGHGKAIGAVARHLAEATFYVWSRREAYREPTGGRSKAV

SEQ ID NO: 193426 - protein, 262 aa, unidentified
MKSEKYMGLDVHQATISVAVMDSTGKVIMESILETKASTILEFFAGLRGTLSVTLEEGTWAAWLYDLLKPHVANVVVCNPRKNALLKHGNKSDRIDARKLADLLRLNDLEPVYHGETGVRMLRELARSYLTIVKDLSRVMNRLKALYRSWAIPCAGRDVYYGRHRAEWLAKIREAGVRRRAEQLYQQLDMLQHLRQQARRELLAESRKHPITAKLRQIPFLGRVRSAMAVALIQTPHRFRSKRQLWAYSGLALETRISGEYR

SEQ ID NO: 193427 - protein, 345 aa, unidentified
MPIVGGLDIHRKQITFDYPGTVTGEVRRGQVSPADRAHLRAWLARFAGRDDVAFAMEGCTGWRYVAEELAAAGIAAHVGEPADTAFARGRKRHAKTDKTDSRHLRQLLAEGRLPECWIPPAQVLECRALLETYHDLRREHTAWIQRIHAVFFHQGAPALGEGALRTERSLAALREAAAVHLSPAGQLQIATDLDMLAAVEARMDTLRRQLREAARRLAGAKALADRLYGVGPVAGLALTCWLGGAGRFSSSRKAVRFAGLDVTVYSSDGKRSPGHLSRQGPEILRWVVYEAGKTHARAAAPGHDYYAAVKDRTDGKIAALSQARKIVRQACHILAELGDDALTVT

SEQ ID NO: 193428 - protein, 355 aa, unidentified
MRFYSGHHQFYCGIDLHARQMYVCVLDESGQIVLHRNMAARPAELSRTIAPYEEHDLVIAVECVFTWYWIADFCAQRNIPFVLGHALYMKAIHGAKTKNDKIDSRKIAMLLRSGMLPQAYVYPALMRSTRDLLRRREYFMHQQSELLAHIENTNTQYNLLPFAKRISHRSNRSGITERFADPLVAKSIEADMRLLDVYHQILLELEAQILKEAREHDPVGLQLLRSIPGVGKVLALVLLYEIHDINRFPSVGQFISYARLVKCPHESGGKRFGGKGNKIGNVHLKWAFGEAAVLFLRRNEPAQRYHEKLVSRYGKAKAMSIIAKKLGRVVYTVLKKRRPFDPAKFFSDAAHESVA

SEQ ID NO: 193429 - protein, 343 aa, unidentified
MKISRVGVDLAKNVFQIHGTDAHGNAIWKRKLSRERWIEAICTKLPEGCEIGMEACAGSHHWARRLSEYGFNVKLIPPQFVTPYVKSNKNDANDAEAICEAMSRPSMRFVKMKTVEQQDIQAIHRIRSELMSHRIAKMNQIRGLVAEYGLVAPKQVSALRKAIPLWLEDAENGLTDRFRHLVSDLWRDLNYLEERISGLNAEIREVANTDPMAIRLQQLRGVGPLVATALIATVGNGDQFTKGKQMAASIGLTPRQYSSGGKDRLLGISKRGDAYLRTILIHGARSTIAHAKHREDRLSVWVMALAKRSHTNVAAVALANKTARMAWAMMRYNTDYDPERAVA

SEQ ID NO: 193430 - protein, 373 aa, unidentified
MPKYSTAFGMDVHLRSTTVCALDADTGEAVTRRFPGNPWGEIAGWMDGFPGPSLAAYESGYLGFAPQRELAGLGVECAVAAVSKIPRSAADSASKNDRNDAARMAKAILAHDISPVWVPSPEVEGIRDLAGAYDGATARLATAKQRLLAFLAKRGFVYGGTTPAGNPRKYWTYDFLRWLDKVRPEDDGGVRTLAALRNEVEAAAEARADLLSEYRAAVDASPIAAEVASLQSIKGCAFALAAAFSAEVGDFTRFRSGRQVTAYFGLAPSQRSSGDSVRLGGISGAGNALVRKLAVEGSWCYAAARHQPKLMPRDTGVPLEIRMHGRKGSERLLRRRKEMLARGVPAAKANAATAAELVRWLWALGMMCREGAE

SEQ ID NO: 193431 - protein, 314 aa, unidentified
MNTTNEINVGIDTSKATLDIYIRPLDKFFSVDNSAQGVREAIKCLKAVHPTRIVIEATGRLELPFVVAAQKSGLPVTIANPMHVRRFAGAAGQLAKSDKLDAQTIARFGEALKPEPTKLKPENVRLISDLLARRSQLLDMSTMEKNRLSILPKPLHTSLKRHIKQLQTEVKRIELKLDKLIDQTPLWQEQRDLLMSVNGVGKILAYTLLSDLPELGQLNRREIAALVGVAPMNRESGNYKGKRRIRGGRARIRTVLFMAIMSAVQSNPKLKRKYQQLKADGKPPKVAIVACMRKLLTILNVMVKTGQHWDAELA

SEQ ID NO: 193432 - protein, 400 aa, unidentified
MNIIGIDVSQGESHATLITKEAEEIAFKFKHNKSGFQILNSYIKPGTIIIFETTGVYSAQLTTYLKNKKVKFYELNPLEAKLRMASLRRNKTDKNDSFKLALLGKTQLAEIKDHCNKQSNSLYESLRILSLRYKQLIKCRTRILNFLRSSLELTFPELNQIFKNAYAVLALQVFRMYCHPDFLVGLTLKEMTTRVYQSVSRRIHKDVIQSYCAQVWLAAKDSYPAVPANSLEIEIISEYCDEIESYNKEITYIQNKLIKTAVGLDDFKVISSIPGAGQLNSALLLGFTGDIARFDNYKQLNAFLGLDLNRYQSGKYIKGDTINRRGSNQGRAVETDMIRSMLRNQGKIQNHLIDYYYKLKKPPFNKHDKVALIACANHLNRTIINLVHTHQLYNYSKAIN

SEQ ID NO: 193433 - protein, 408 aa, unidentified
MRIIGLDIHRVFAEAVAWEDGKLRRMGRVDIRRDLLEKFACSLSPEDIVVVEATGNASAVSAVIAPHVKRVAIANPKQVKIIAHAKIKTDTIDAGVLAQLYACGFLPEVWVPDEATQALRRQVSRRQQIVKQRSRLKNIIQSILHAHLIPPCPAADLCGTKGRAWLSGQRLPEDERLAINRHVREFDRLGDDLKVIERDLAQSALEDGRAKRIMTIPGIDMIVALAIVAAIGDAGRFETAEKLVSYLGLNPSVRQSGSGPAHHGRITKQGRGHARGMLVEAAWAAARAPGPLRAFFLRVRSRRGQHVAAVATARKMAVLIWHLLRKGESYAWARPALYAKKLRDLELRAGCKPNRGQKGAASAYNIKSHRDEERRWAEQAETAYARFVAGWNARGPKARTAAAKEERR

SEQ ID NO: 193434 - protein, 428 aa, unidentified
MRNNKAENRRHVNTSEATIGIDIGKYKHVAVPQNWDGRRLKPLILENNLKGATSLIGLREKAQESFGVSHVRFALEPTGQYWLAVAEWLDRRKEEVRLVQPAHTHKAKELEDNSPGKHDIKDCGLVADLDIQGKSMRWIRPQGVFAELRYLTACRHGLVQDINRQINRLHGVLDLLFPELIGLFKNYIGKGLLGLLKEAACPDKISQLGEQVIGELLRGSTKGKLGITRASLIVQTARVSIGIKEGRQVLELELRQLLDRLEFTRRQLKEVERSMKVALKEVPDVEILLSIPAIGEISLGAILGEIGDIRHYHSAQEIIKLAGLNLYELSSGQHHGPKRISKRGRPLLRQMLYMASLRLIRAEGGFYDFYQRLTGKGKHKIPAIVAVMCKLVRVLFAMARDKQNYNDNKVGQECPVNCEKNRVKLVLN

SEQ ID NO: 193435 - protein, 380 aa, unidentified
MAHNQMIQTEVKDSTRKQVLYISLELSNKKWKLTFGDGQRKRERTITAADRKAFQEELIKTRKHFRQEEGCKIYSCYEAGRDGFWIHRYLESIGIQNIVVDPASIEVNRRCRRAKTDRLDGLKLLTMLMRHWGGERKVWSVVKVPTLAQEDERRPNRERNRLIKERGAHAARLKSLLVLYGIHAEVGSKFLQLLEDVRAWDGSKLPEHIVQEMKREYERIGVLDHQLKQIKEEKKRQLGAHPEQLQKVQKLARLRAVGPISSWDLVFEFFGWREFKNVKQVGGAAGLAPMPYSSGEMQIEQGVSKAGNRRIRALLIELAWGWLRLQPESKLSRWFQERFGGGGKRMRRIGIVAVARKLLIALWQYLEKDIVPEGALLKKA

SEQ ID NO: 193436 - protein, 349 aa, unidentified
MTLTIVDEARAVTGGVDTHADTHMAAALDAVGGLLGVQEFPATLAGYARLLAWLRGFGVVHLAGIEGTGSYGAGLARHVAAAGIRVVEVDRSDRQDRRRKGKSDPLDAISAARAAQSGRASGAPRGRDGAVEAIRALMVAKRTARAQRTQTINQARALILTGPDDVRARFAHQTPAGLVAGLAALRPRPGSMVRYHTLLSLRELGRRAQFLDAQLARLDELIVPLVTARAPRLLQLYGVGSDTAATLLIAAGDHPRRLRSEAAWAHLCASAPIPASSGKVTRHRLNRGGDRQANHALWRIVITRMGSHPPTRAYVARRSKEGLSKPEIIRCLKRYAAREVYPHLRPGPG

SEQ ID NO: 193437 - protein, 417 aa, unidentified
MKLLFIGDDWAEGHHDVAAQDDAGKTLARRRLPEGADGIARFHEMVGSCLGEDAEPDPARVIVVIETDRGPWVKALAAAGYRVYPANPGQAARHKETVANPGKKDDFFDAGCLADMGRTRRHQMRELAAGSDVAEAVKIAARAHQKLVWERTRHLLRMRPALREYFPAALEAYADLTLAGKDALELLAKAPNPESAARLTVTQVTAALKRAGRRGDLAQRARDIQAALRAPHLAQPDVIAEAHAASVQAAAAVITALNEQVKIMEAKVSGLFRRHPDAGLYLSQPGIGDITGARIPGEFGDAPGRYATAKARKNYAGTSPLTIQSGKKKTVHARYIRNRHLIDALPAQALTALSVSPGARGSYDDLRARETGHDDAMRRVASRLAGILHGCLKTGREYDEATAWSHRAGNPEATKAA

SEQ ID NO: 193438 - protein, 351 aa, unidentified
MTCKKDVAVVRTIGIDTGKNTLHMIGLNEKGAIVLREKVSRDRIAARLVNIPPCLIGIEAGMATHYMSRDLLALGHEVKQVPPAYAKPFRQGHKNDFRDAHAVAEAVQRPSTRCVPIKTDDQLDLQALHRVRSRLIGDRTAVINQVRGFLLEHGIAVRQGPRSLRQQLPQILATRTDVLSPRMLKIIEDIVDDWRYLDDRIERVTDEIEGLARTDVNCGQLISVPGIGPIIASATVAAVGNGTAFAKGRDFAAWLGLVPKQMSTGDRTILGRITKRGNRYLRMLFVQGARAILLRPKSWAKYSFGPWLMAAARRLHRNILTIALANKLARVALTVLVQGRSYETRIEAAAA

SEQ ID NO: 193439 - protein, 375 aa, unidentified
MKEKLRFLGLDVHAETIAVAVAEPEGEVRSLGTIPNRAESIRKLIKKLGPAAELRACYEAGPTGYVVYWQLAELGVECEVVAPTLVPVKAGDRVKTDRRDAEKLARCYRSGDLTAVWVPDEGSEALRDLVRAREAAKQDQTRARHRLSKFLLRSGQRPPSGVRSWTRPYLIWVAQLRFTQIAQESTRQDYLHEVEHMRERVARLEQAITEAVKLASPALQQVINDLQALRGIADISAVTIAAELGQVSRFDSARQLMGYCGAVSSEDSSGKRTRRGGITKTGNAHLRRIVVEAAWSYRRPPCIWYGLRRRQESISEAAKEIAWKAQHRLHKRYMRLGAAGKDQRKIVTAVARELLGFIWAIGTRAETISSQQVAA

SEQ ID NO: 193440 - protein, 425 aa, unidentified
MNYKQNEKINQVKESTLVVGIDIGSTTQYARAFDWRGIELGKVFPFSNSREGFESFKAWMQRLQDKYKKSDVIVGIEPTGHYWFDLGAYLEDEGILLVMVNPYAVKQTKELDDNSQSKNDRKDPKVIAKLVTEGRYSAPYTPDGVYADLRIMVANRKRLIREITQIKNRFARWFAIYFPEYADVFGDYEAQSSMLLLKKACTPEAIVELGAEKINQIWRDAKLRAVGMKRATTLCETAKRSIGLRKGSSAAKYEMKLLLEDYEYKKAQLDSVMEEIESLCKKIPESEQMLAIKGIGVITVAGFLAEVGDVRRFESPRQIQKLAGLSLRENSSEKHKGQTTISKRGRSKLRAVLFNAAIPLIAKNPEFKSLHEYYTTRANNPLKKKQSMIAISCKLIRVFYAILANGVTYDPQKMLSDIHRKPQAA

SEQ ID NO: 193441 - protein, 408 aa, unidentified
MLLAGDDWAEDHHDVEVQDQAGRRLGRARLPEGIAGVARLHELIGEHLAGEADRGQVAIGIETERGPWVAALIAAGYTVYAVSPRQVARYRERHGTSGARSDAGDAHALADMVRTDRHQLRTVAGDSEQAQAVKVVARAHQTLIWERHRHMLRLRTALREFFPAALEAYDDLTAPDVLELLSRAPDPVTAARLSRSQITAALKRAQRRRAEERAAAIQAALRTVHLAQPPAVAAAYAATVRSLTSMITAFNAEIAVMEEQVKECFGQARDAEIYLSQPGLGPVLAARVPGEFGDDEHRYATAKNRKNYAGTSPITRAPGKKKTVLARYIRNDRLADALHQQAFCALTASPGARAYYDELRRRGQGHHAALRQLSNRLVGILHGCLKTRAAYQENTAWEPYNQDQQPAA

SEQ ID NO: 193442 - protein, 499 aa, unidentified
MPSRRKGKNTMTTAGKQPSKKEGFDPQRSALKRKARGRCCFEGKGKRRKSKLSVINPDAAGVDVGAQAHYVAVPEDRAAVSVRSFGTCTAQLDEIVQWLKDCGIKTVAMESTGVYWIPLFQKLEEAGFEVLLVDARQAKHVPGRKSDVQDCRWLQQLHSYGLLRAAFRPEDGICRLRTFQRHRKNLVECAGMWIQRMEKALNEMNLQLHHVLSDITGQSGLAILDAIVAGERDPSKLASLAHYRVKKSQAQIEAALRGDYRPELLFVLRQSLENYRQMQQQILQCDLSVEKQLAAMSHQSKPSEHLESKGQAEASAHCRPGKEKPKNGLESTLAAHLKRILGVDLTTLPGLNVLASLTLLSEIGTNMTKWRNHKAFVSWLGLSPNNKISGQRVLSSRTRKVVNRAATTLRLAAMLVGKTDTALGSFYRRKRAQLGAPKAITATARKLACLIYHLIKNGQAYKEPDLRTYELKYQEQILQSLRKRAKSMGFDLVELPKAA

SEQ ID NO: 193443 - protein, 317 aa, unidentified
MTQKQVIVGIDIAKEKIDAAIRFGAQTSFANSAEGRHELLAWLKEHGVRKAAMEASGGYERSWARLLREAGVEVAIVDPKRVRHFAKSAGQLAKNDPIDARMIAWFGEVFGHASGQPHDGERQELDQMVTARMAMARLKEQIEGWGEHEQPKAVQKAHQALLKAVVTQLDKLEDVIAAKIDKTEHFAQRAEIIQSVPGLAGTAAAGIIAFLPELGLVDRQAASALLGVAPFNDDSGKRHGERHIQGGRRKLRKLLFMPIVGAATQHNPVLKACYQRLIAKGKKAKVAFIACMRKLIGILNTMLARGEKWDPAKHAIA

SEQ ID NO: 193444 - protein, 372 aa, unidentified
MKKIRFLGLDVHAETIAIAVAEPDGEVRSLGIIPNREESVRKLVKKLGPAEQLQACYEAGPTGYVLYWQLTALGVKCEVVAPSLVPVKAGDRVKTDRRDATKLARSYRAGDLTAVWVPNEEHEALRDLVRAREAAKQDQLRARHRLSKFLLRHGRRAPAGIKVWTQKHQHWIKEQVHFEQPAQEYTLLDYLHEVEHTADRIRRLEQAIEEAVKLAPPRMQEVIQALQALRGVAQISAVTIVAELGEISRFDGARQLMGYSGAVPSEHSSGKRIQRGPITKTGNTHLRRIAIEAAWAYRHRPTVGPALRKRQEGLSEEVKGIAWKAQHRLHKLYRNLVAAGKEKQKVITAVGRELLGFIWAIGVQVERNSRVA

SEQ ID NO: 193445 - protein, 402 aa, unidentified
MNAVGIDVSKGKSMVAIMRPFGEIVSAPFEIKHTASDIHSLVELINSVEGESRIVMEHTGRYYEVLAHQLSKANLFVSAINPKLIKDFDNDSLRKVKSDKADAVKIARYALDKWQNLKQYNVMDELRNQLKTMNRQFGFYMKHKTAMKNNLIGILDQTYPGVNTYFDSPARSDGSQKWVDFASTYWHVDCVRKMSINAFIDHYENWCKRKKYNFSKSKAEEIYGKAKELVPVLPKDAITKLIIKQAVDQLNSASTTVESLRTLMNETASKLPEYPVVMAMKGVGTSLGSQLMAEIGDVSRFTHKSAITAFAGVDPGVNESGSYEQKSVPTSKRGSSDLRKTLFQVMDVLIKTHPQDDPVYQFLDKKRAQGKPYYVYMTAGANKFLRIYYGRVKEYLSSLPES

SEQ ID NO: 193446 - protein, 407 aa, unidentified
MVNVGIDLHKTQFTVCVRGRKGDRFAQYPTTEKGYQAFFREAAVWQRKGEEVRVGVESTGNTRYFKSQMEGAGIGVTVINTMKLKVVTESVKKTDKHDASTIAEFLEKDILPKSRLCSRESEQLRRLLKVRTTLVRAEVVIKNQIHALLSAEGMEDIKSAELQSKRGRKRVLDALKEWEHGLVAQPLLETIERLEENVKEIEGELRTLTDGDRMVKLLMSIPGCGEIGAWTIRAYTDDIKRFSSAKKYCAYAGLVPWVQNSNETVHHGKITKRGPRELRTALVQVVMGLRRMKAKTFVWRFMQRYEAMKKGKGSGKAIIATARKMATVIWHMLTEEVEFDIVKMVDRKLAKKAEAMRKSDGLAQDALVEEQGRPASKLKEEKGSKKLALPVKQIKERKKLANGSFDG

SEQ ID NO: 193447 - protein, 329 aa, unidentified
MQIYGIDLASEKFDVSFIDSGSRARHVVVRNTKSQIDKFLSKLPEDCRLVAEHTGVYGDLLLKLADMRNIPVSYVSGYEIRHSMGLSRGKSDPLDAARIREYGERYTDRLEDTHFPSETIYELRELYATRRLLVHQRKQLQAMLKGDDRRPSRSNTAREIKQQMMEQLDSRITSLEKKMTELIDNDENLAKNSAIVQSIPGIGPVTATELIIKTDNFKRVSTAKKCATLAGISPFPNSTGKSDKGNHVSHMGDKELKSLLFMCALSSVVHFEKMRVYKIKKHEIEHKHIFVVLNNVANRLLKILYALVKKGEYYNPMYMPTDPRLKLSN

SEQ ID NO: 193448 - protein, 413 aa, unidentified
MSEMVMMLSAVWFVGIDWASEEHAVHVMDAHGRKVKAFMIKHSRDGFEQLVTGLAKLGEAASMPVAIERPDGRLVDVLLEAGHPVVPVSPNAIKAWRDGEVVSGAKSDAGDAEVIAEYLRMRQHKLRVLAPFSDATRGLRAAVRARDALVDQRVAANNQLEACLEAFWPGANAIFADICSDIALAFLERYPTPASALRLTEKQLATFLTRHGYSGRRSASELLERLRSVPDGISPGLENRARQATVIGYIGVIRALNDAIKQLAREIAAQLGEHPDHTIFTSLPRSGSINAAQMLAEWGDCREAYDSPEAVCALAGLTPVTKHSGKHHAVHFRWACNTRFRDAMTTFADNSRHASPWAANIYQGAKDRGCDHPHAIRILARAWVRVIWRCWTNGTAYDPNLHNGAQQLTTNAA

SEQ ID NO: 193449 - protein, 467 aa, unidentified
MTPHKDYCLAPPPPVPTPMLPESSVLSDTLQVCHPHAAGIDIGEAEPWVAVPPGCDPQPVRRFGTFTVDLDAVADWLIDCGVTTVAMESTGVYWIPLFELLEARGVQGLLIDPRQAKRVPGRPKTDRLDCKWLQRLHTYGLLAGAFRPEAHVCVLRSYLRHRQMLLTYAAHHIQHRHKALEQMHRKLTQVVSAITGVTGMAILKAILAGERDPQHLAKLRNPHCHHDEDDIAKALQGTWRAEHLFALRQAIELYDFSHQQMTQCDQQIKAHLAPFDDKSAGRPLPPKARRHKKTNEPRFDARTPLYHLAGGDLTTIEGIAEGTALGILSAIGTDMHRWPSVKHFWSWLGVCPQHKISGGKVLSRRVRPGAHRVTVALRLAARTLHHSQSALGAFCRRMKARLGAPQAITATAHKLARLVYSLLQHGSAYVQQGLDAYEAQSRERKVTTMAKQAKALGDTLVPLAAQG

SEQ ID NO: 193450 - protein, 352 aa, unidentified
MKPKTKTTASLAVVGVDIGKEVFHLVGLGTDGTIAFRRKIRRSSLRDVFEQLPPCVVGMEACLSAHFVSRTLRALGHEPRIIPAIYTKPFVKGQKNDYNDAEAVAEAALRPNLRVVQEKSQTQLDLQACHRVRSRLVSRRTATINQIRAFLIEQGITVRAGARALRNSLFTILENRKDEISPRMAKLIHGLYEDWCCLDQRIETVTGEIEELSRIEPKCQRLMSVPGIGPLISTALVAAIGTGEAFERGRDLGAWLGLVPRQYSTGGRSILGRISKRGSRYLRMLLVQAARVLLMRPHTWSRFSFGAWLKAASERLHRHKLAVALANKLARIAWSVLRHDKAFDTHLEIAAI

SEQ ID NO: 193451 - protein, 343 aa, unidentified
MYYIGLDIHKRTISYCVKDAAGHVHQQGKIGTTRCELDAWIKTLPQPRMMAMEATIFTGWIYDYLLPHAEQVKVAHPLMLRAIAAAKRKNDKIDAAKIADCLRCDFLPECHMASTEIRDRRRMLRYRNLVLRQMVQMKNRVSGLLMETGVTYNKQRLHKLGYFTELLSSDDEVIDSIRPLLKLSRETINRSQKLDRALTSSLERDPLLSERLRRLRTIPGVGPITALTWALEIGDYTRFQSVKEVISYCGLCSAEKSSADKVIRMPISKQRNKHIQHVLVEAAKLAPRYSHELALVREKEMQKGNTNQATLAVARKLVAYMLAVDRRKQDFLPAEELGGKAVA

SEQ ID NO: 193452 - protein, 355 aa, unidentified
MNTLTQSHPTEICQAIKLGIDAHARFYYVARQVDGATPQPVQKMTFEGLLHFVAKQQRLAREVFTCYEAGAFGYHLHRRLTKMGVTNYVVQPQDWDEQGKGVKNDRLDALALCQRLDRFTRGNRKAFSTPDEERERALSRQRQQIVRERQRLQAMGRSLLASHGIHVTGKWWKGRTWSLIRSEAPGWVVERLEVFIRLIEPIDAEEAKLTAVVEQVGGEVKIPRGVGALTFEVLRREVGDWGRFTNRRQVSSYTGLCPREHSSGGKRRGGSINKSGNPRVRAMLVEMVWRMTRWQPTYHALKKWLSVLGDPSRSAAARKKAIVAIARQLAVDLWRLFTGQTTADKLGLIYLPDAA

SEQ ID NO: 193453 - protein, 431 aa, unidentified
MALARWVGRAIGLDVHRDFCVVAVCEDGRVRSGARVPSTPEGVRTLAESLVRSDRVALEVTGSCWEIARILEPHVDRVVVVSPDDTGIVQARAESDRLDARALARLLWSGELESVWMPDERCRVLRRRLARREQLVRSRTRAKNEIHAVLQRRLQGKPPCADLFGVKGRRWLVSLELPLEERESVDAGIRHVEFLDAEIAAVERLIARQALAWPEIRRLMTVPGVNLICAATFIAAVGDAGRFLTSRKLVAYLGLDPKVRQSGEAPARSGRISKRGSAAARWALVEAAWSTVLQPGPLHAFYDRTRARRGHGKAIVATARKLAILFWCMLTRGEDYAHQQPSLTKKKLRRLELTAGAPKYATSARGIWSTNDAIRKAERRLAEQAEISYKRLVIDQRAGAPARKTGRERDTGARINLDPQRAKAARQTQSS

SEQ ID NO: 193454 - protein, 390 aa, unidentified
MQKLNDLSRSLTPLDPDGTLIAVIEMSQSSWLVAGIVPGVERQPLKKLAVDESALLNLLNRWRVEAEKAGRKIERIAVAFEAGRDGFWLARWLRARSIEAYVIHASSVAVSREHRRAKTDRLDTELLKRAFIGWLRGERDHCKMVAIPTTKDEDAKRPNRERESLIGDQTRIINRMKAALIRLGIRGFNPKLKKAAGRLEDLRTPEGEPIPPNTLAELRRDMERRRLISDQIRQIEDARQERIKQAPGDGPHAMVRLLTRVIGVGIETADMLVQEVLARNMRDRRAVARYAGLTGSPDESGTKRREKGLARSGNARVRRGMIQLAWRFLMFQKESALAQWFRARTETARGTRKIDRGRGAQASDRPLAAGAGGRGAGRRRSAPGAMNGGR

SEQ ID NO: 193455 - protein, 347 aa, unidentified
MRFYTQQHKHYCGIDLHARAMYVCILDQAGTILVHKNLPTTPEAFLRVIAPYRDDLVVGVECIFTWYWLADLCAKEGIAFVLGHALYMKAIHGGKAKNDKIDAHKIAVLLRGGMLPQAYVYPAEMRATRDLLRRRCHLVRKRAELLAHIHNTNSQYNLPEIGKKLAYKANREGVEEHFPDPSVRKTIEVDVSLIDHYDKLLGEVELYITRSAKAHDVQTFSRLQSVPGIGQILALVILYEIQDIARFPRVQDFVSYCRLVKCAKESGGKRLGTSGKKIGNVHLRWAFAEAAVLFLRHNQPGKEYFTKLEHKHGKAKALTVLAHKLGRAVYYMLTRGQAFDLRRFVTA

SEQ ID NO: 193456 - protein, 329 aa, unidentified
MQNFIFIGTDVSKLTLDHGVHTSMVHQKLPNNSEGFKSWLKWALQFGSKEQLWVVMEHTGYYSYQFEVFLQGHQIRYTKVAAIEIKRSVGLVRGKSDKIDALLISRYGWMNQDRLKPQQLSAAVITELKDLVSLRDKLVRDRSGYKARMKEQAATRKYAKSHIQTKIQAQMIKELTANIKEVEAAIKKLIKEDEALLNNCNLLVSIKAVGFVTAIYMLAYTENFRKFLNSRKFSCYAGLAPFEHTSGTSLRGKKRVSHYANKKAKCLLNLAASVAIQHNPEMKAYYIKRVNEGKSKMGTLNIIRHKLIDRMFAVVKRGTPYTEIISIAA

SEQ ID NO: 193457 - protein, 375 aa, unidentified
MKEKVRFLGLDVHAETIAVAVAEADGEVRSLGTIANRIESVRKLMKKLGPVEHLRACYEAGPTGYVLYWQLAELGVKCEVIAPTLVPVMAGNRVKTDRRDAEKLARSYRSGDLTAVWVPDEGSEALRDLVRARESAKQDQLRARHRLGKFLLRTGRRAEHGVKAWTQEYMKWVRQLRFEPMAQEATRLDYVHEVEHMGERVARLEQAIAEAVKVASPALQEVVRDLQALRGIAQISAVTIAAELGNLTRFAGARQLMGYSGAVPSEDSSGERTRRGRITKTGNAHLRRIAVEAAWSYKFRPAVGPALRKRQEGLPEEIKEIAWKAQHRLHKRFSRLAAAGKDRRKIVTAVGRELLGFIWAIGIRAEAAASRPMAA

SEQ ID NO: 193458 - protein, 308 aa, unidentified
MICGVDVAAQTLQARIGAQGAQQSFANHAEGIAELAAFCRQHQVELVVMEATGGYEQMAYALLWEQGLEVAIVNPLAVRRFAQSMGHLEKTDALDAGVIAHYAATKNVQPQPPASATQQKLRALVTHLRQLTVTRVQLRQQQRLVGEPMVLASFQRMLDCLEQEEERLEEAIAELISADPLWQKLNESFRQIKGVASRTVARLMAEMPEMGTVSNKAIAKLAGLAPLANDSGRMQGRRAVRGGRRHVREVLYVVAGIVCRFDAHFQAFAQRLLEAGKPKKVVRIAVARKLLVRLNARAREVRAAFACA

SEQ ID NO: 193459 - protein, 412 aa, unidentified
MLKIVYRICCGMDVHKSFVVACIATTNDHGVTNYKSKRFSTFTGDLRRCADWLSENNCKDVCMESTGKYWIPIYNILEHTCNIVLAHPKYVKAIRGKKTDKRDAKWIADIFKHDLVSGSFIPPADIRQLRDLVRYHWKLTNFNVGEKNRAQNCLTVSNIKLDDVFSDVFGKAASAITTRLLESNEPFDVKPYLTKNIKKPIEQIQAAVDGEMCAEQAEKLRIIRSHMDSLELCKLNLESLILSTAEKYIPQLNLVMTVPGIQSFAAIGIISEIGVDMSVFPTSKHLCSWAGLTPQNNESAGKKKTTRISRAGAYIKPLLVQCALCAIRAKRFPEVRNRYLALKKRRGHKKAIIAIARMLLTAIYNMLKKNEPYNPELYRSADRPPAHREVSVEEAVFILQRQGYLVTAPPTA

SEQ ID NO: 193460 - protein, 351 aa, unidentified
MMIIGCDYHPSDQQIAFVDQETGECSERRLNHSEGEAEKFYRDLQQRGVSVRVGMEATGHARWFERLMAEPGFELWIGDPAEIKTRRVRKQKTDRQDAQLLLKLLLEDRFPRVWVPSPENRDLRQLLWHRHRLVQMRTRIMNQLQAVAMNEGIRRKKALWSKSGRVQLESFSLAPWSSRRRQDLLELLDRLNPTIDQLSAAIAQEAEKRPEVRRLMTHPGVGPLTALAFVLIIGSPERFRCGKQIGSYVGLIPCEDSSAGHQRLGHISKQGNSSLRFLLVEAAQIAVRHDPDWRRRFLHLAVRRERRIAKVAMARKLAVRLYWMWRKGWDYQQVLQFGSHAGQPVYGHGVK

SEQ ID NO: 193461 - protein, 355 aa, unidentified
MDNLRYIGLDVHRDTISAAVLNREGQLMMQSVVPTHAPAILDFLNGMRGTLHVTFEEGIHSAWLYDPLQPRVARVLVCDPRKNRLLKLGNKGDLIDARKPAELLRNDALSPVYHGELSSLEVQRRTRSYTMLTEDTTRIMSRVKAVFRGQAVHYHGRSIYRPDHRESYLAQLPTEGLRRRAEILYQELDAVHRLRLRAKREMLAECRKHPAMKWLQSVPFLGKVRTAVLIGRVQTPHRFRTKRQFWSYCGLALETHDSAQYHVLHGQVERKPRFVQVRGLNWNHNHDLKDVFKSAATMAAAREGVFRDYYCGLLAKGTRPEMARLTLARKIAAITLKIWKEGGMFNAEQVKPQAA

SEQ ID NO: 193462 - protein, 363 aa, unidentified
MLQHTSATHVGLDVSKASISVALLRPDGRLDEERIPNTPEDVRRLVHRWPEPAQVRACYEAGPTGYDLYRRLTGLGIHTTVIAPALTPRRPGDRIKTDRRDARKLAGLFRAGELTAIRVPTPEEEAVRDLLRARQDEREDILRARHRLSKFLLRHGRVYPEGKAWSQRHFAWLARQRFDEPAARRTLAHYRAELDMRLASLKLLDDELGAIARHASFAPTVARLSALRGIAELSALTIAVEVGDFRRFESASAFMAFTGLVPSERSSGERRAQGSITKAGNAHLRRVLVEAAWHARRRPNVGPALAKRLEGQPPEVLAIATKAQRRLHDRYWRLVGRRKPTTVTAVAVARELSGFCWALGRMG

SEQ ID NO: 193463 - protein, 320 aa, unidentified
MDKEQTYVGVDVSKGNLDVAVFASEARWSFPNTPVGIKKAIAVLTEMAPVLVVFEATGGLELMFWAALTEAGIKATPINPRQMRDFAKAKGHLAKTDTIDAKVIAHYAQAMQPRPRTFPDTQDLKELMARRSQLVEMISAEKNRLGAARKVGIKADIKAHIAWLTSRLDDVDLEVRQAIKANPAWREKDALLQSTPGVGPTLAATLLTQLPELGTLNRHQVAALAGVAPLNRDSGAMRGKRAVWGGRARVRGVLYMATLVATRYNPVIRAFYKRLCSAGKAKKLALTACMRKLLTILNSMLKRHTTWIHHPIPALVGPCH

SEQ ID NO: 193464 - protein, 319 aa, unidentified
MVLNSNRCLSTTTINDRSSYPVRMSPKNHPILYAGLDVAKRSLPLHLAGRFYHLSNHAKGHAQLLKRVRSLSEVHVVCEATGGYEQPVVRALQAANIPVSIVEAGRVRYFARAQGRRAKTDPMDAAVLTPYGGTFHPRVTPPTSPQPQRLADWSQRRRQRIHTLTVETNRAEHHADAFCQRQARPLRRLLAKPIEPCNQAITQLIAADVVLAHKARRLDAIPGVGPVVAATVLAEMPERGSLNRQTAAALAGVAPYHRDSGAQNGIRRISGGRRPVRCALYMATWSAIRHDRILISACGPPERDRSSPSPPVCANSSSS

SEQ ID NO: 193465 - protein, 369 aa, unidentified
MKIYTLKAAPAASANQLTNNNKSAKAKRILVGCDVHLRGYQAARKIDEGAIGVVDNFRSEEALLLSIEKQRQQAEQVVVVYEAGPLGYTLYRKLRATGVLCYVCAPDSSQQRKKRRKNNQIDARSLTSKLFNYLNGDQHALQLARVPSEAQEQLRMASRQHDQLVEERKRLGAKGNAMLLSQGIGSWSNWWRPKAWSQLSRVAPQWLLERLQIWVDVLKILDEKISGAKAALARACSGPRPKGVGALSQMQLQSEVLDWSLYGNRRKIACLVGMVPSEWSTGDKESRGSITKVGVPALRRIIVEMVWRMVLFQPQYKPVQKWQEVLKGPNPALKKKAVVAIGRQLMVDLWRLQTGRVTAQDLNLIMVEN

SEQ ID NO: 193466 - protein, 423 aa, unidentified
MSYRIAGIDVHKKMLAVVVADVEVQGEYQFERIRYGSNPEQLRLLAAWLIEHEVEEVVMESTAQYWKPVWGALEQYWKPSGQKRETTGPMSGTLHLAQAQSNRGPRGRKKDFPDAERLVKRLVANELSLSFVPDAEQRLWRTVMRRKYQLTRNRVQLQNRLEALLEEAHIKLSSLVSDLLGASARRMLKALADGETDPAALASLADKNLRATPAQLCDALGACIELNPVYRRLLKMFLEELQLIDQQIGQLDKEMATLLGQHQTAVERLAEVPGLGVDSAQQIIAEVGATAATFPSAKQLSSWVGACPGDEESAGVSTSHRSPKGNRHMRRILNQCANAAAKSKGTIFEIVYRRLVSRLGHNQTIGAIAHRLCRLIWIILHQNVRYEERGPSVSAKSRQRRTHKMIRELRNLGYRVEPVVTTL

SEQ ID NO: 193467 - protein, 412 aa, unidentified
MDVIVDRCAGLDVHKKTVVACVRSPGAGRSKRAVEVRTFETFTDDLVKLREWLMESGVTEVAMEATGVYWKPVWDALEGHGLEVLLVNPAHIKNVPGRKTDVNDATWIATLLECGLLRGSFVPPMEIRELREITRYRRQLTEERSRETLRLQKLLEDAGVKLSSVASDTLGVTGRAMLEALIDGERDPAVLAALAKGRLKVKSELLARSVPGRFNDFHAVMARELLDHIDYLDLAICRLDGQVDVLMVPFVDARDRLDTVPGIAKRCAEIVIAEIGVDMGRFPTPGHLASWAGLCPGNNESAGKHKSTKTRSGNPWLTSALVEAAWAGIRTKDCYLAVRFQRIRKRRGEQRALIAVAHTLLIICWHILAEDTIYQELGPDYLAGKDQPDRRRKHLVAQLEKLGYSVELAPVA

SEQ ID NO: 193468 - protein, 324 aa, unidentified
MNGDYDGRQYVGIDLHRRRSVIVRMTEQGEQLGWVRIDNDPVALGLELAKAGPDPEVVLEATYGWYWAVDALQTAGAHVHLAHPLGVKGFAYRRVKNDVRDAADLADLLRMHRLPEAYIATPHERELRELVRHRAKLVALRSGLKAQVHATLAKQGQLPAASDVFGRAGTAWLRSAPLELVYRQRIDSLLELIDAYDGEIETFRTMIANRFTGHRGYRAIQQISGIGPTFAAVFVAEIGDINRFSRPEKLCCWAGLTPRHRESDTTVHRGPITKQGSKLVRWAAIEACQHTRAGTKLSADRSRIIAARGRNVGIVWGSRTLPWC

SEQ ID NO: 193469 - protein, 408 aa, unidentified
MEILYPRCAGLDVHKDSVVARVRCVSAPAIDDTQSFATTTAALIELQEWLSSCGVTRVAMEATGVYWKPVWHLLEEHFTLVLANAQHIKNVPGRKTDVNDAAWIADLLAHGLIRSSFVPPAPIQELRDLTRTRKQLVREISQHTLRIQKTLEDANLKLSSVLSSILGASGRAILEALVRGESDPERLADLAQGHARKKRAALVEALHGRITPHHRQLIKLHLDLIAALECALLEVDAAVGKRLAPIQHSARRLATVPGISEITAHVVVAEIGVDMARFPTPGHLLSWATMCPRNDESAGKRRSTRTRKGSPWLKTALVTAAWAAVRVKGSYLQAQFLRLRARRGAKKAILAVAASMLTAIWHMLKDDVDYHDLGADHFSRRDRSKAILRLVRRLNDLGCDVTVTPQAA

SEQ ID NO: 193470 - protein, 481 aa, unidentified
MAKRKASTFERLRQGVMSRKELQRRLYSADPGLSVVHPNAAGIDIGNESHYVAVPADRDANPVREFGAWTAALEEMAQWLKACRIDTVVMQSTGVYWMAAYDILRRHGLDVQLVDARGTKNLPGRKSDVQECQWLMKLHTYGLLRSCFLPPEQIRQVRTIWRLRQQYVGQAGSSVQHMQRALIQMNIQLSNTISDLSGVTGQAIVRAILDGERDAERLADLRDRRVKASLPEIVNSLQGDWKDDIVFELRQAVACYDFFQQQIATCDRQLQQYLATLPAREVAGVSPLAEPCAPKKADKTRATSRARKPKGNQPAFDLEAELQRILGVNAKTIHGLDVMTIQTVLAEVGPDLSAWKTEAHWASWLNLAPKRDVSGGKVIRHTREHRTNRVGNAFRLAAQALFRSDTYLGAKFRHLRAKLGAGKAVKAMARTLACLYYRLVTKGQTWVDRGTDEFERKRQERELTSLQRKARSLGMQLVPVP

SEQ ID NO: 193471 - protein, 342 aa, unidentified
MTVMIGIDPHKASHTAVVIDNTECVLDELRVRACSKQTDQLRAWAAPFPDRVWAIESARGLGYLLAQQLVAAGETVVDVPPVMSTRTRLLGSGKAQKNDPNDARSVAIAALRHDALGRVVLDDHARVLKLLVKRHRDLGRLKNKSACRLHALLMELEPGGMAKEMSVTRANEILDRIEPATQMTEHRLAVARETLADIAHYETQMKASMKRLRTAVAASGTSLVEIRGVGVVVAAMIIGHTGDVSRFASAGHFASYNATAPIEASSGENKRHRLNQRGNRQLNWAIHVVAVTQLRQPCSGREYYDRKRAEGKNSKEAIRALKRQLSNVIYRSLVADARRLEQ

SEQ ID NO: 193472 - protein, 384 aa, unidentified
MEPMYYIGLDVHKRKISYCVKDSGGKVYSEGSLTATRLDLDVWMKSLPQPRSAAMEATMFTGWIYDYLKPHAAALKVAHPLMLRAIAAAKKKNDRIDASKICDCLRCDFLPECYMASTVIRERRRTLRYRNLLVRQMVQMKNKISGLLMEAGVSYNKQRLHRAGYFRELLATNSDIDEGLCSLLRLCRETVVRLQKTESAMVLSLERDSLLMDRVERLMTIPAVGPITALTWALEVGDAQRFSSIKKAISYCGLCGAEKSSANTVQRTPLSKQRNKHLQTTLIEAAKMAPRYSPNLAMLYDKEKQKGNANRATLAVARKLVAYLMALHRCVKRGGEQGGFLRRVACQVLPSSRLGEGAQALDAPVDKFRDWQETQTQSSVQLKG

SEQ ID NO: 193473 - protein, 414 aa, unidentified
MFAVGVDVSNGKSTVAVLQSKSTVTLKPFEVSHTPEALGRLVDKLNGLNGETKVIMEHTGRYYESIAMFLDSAGIFVSAVNPILLNGYQDGMSVHKVKTDKADAIKIAKFGLDNWDQLRQYEPMDTIRYQLKTMHRQFQLASKSETAFTNNLIALLEQTYPGIRKLLSSPARPDGSQKWVNYVGTFWHVDCVRKLSLNAFKERYLKFCERHKYYYSDEKAAELYRHAQNAVALVPKSDVSKMMVKEAVAQLNAISRTVETYRAEMNRLASQLPEYETVMGMYGAGPSTGPQLMAEIGDIRRFPKKNSIIAYAGIDPGKDDSGDVVKKSNKSSKRGSPYLRKTLFVIMDVLIRNKPADDPVYQFLDKKRSEGKPYYVYMTAGGNKFLRHYYGKVRDCLKEKGLWDQPLNDNKLSE

SEQ ID NO: 193474 - protein, 350 aa, unidentified
MLIIGCDYHPSFQQIAFVDTETGEFQEQRLSHREEAERFYRDLAAQGMKGRVGMEASGHARWFERLLAELKVELWRGDAAKIQAKRVRKKKTDREDARHILQLMLKDDFPQIWVPSWDNRDLRQLLWHRHRMVQMRTRIMNQLQAVALNEGLRCKKRLWGERGRQQLESIGLAPWASRRRRDLLELLDRLTPTIAELTKQIEQEVEKYPAAQRLMTHPGVGALTALAYVLIIGEPERFECSKQIAAYLGLVPEEDSSGERRRLGHISKQGSGLMRFLLVEAAQVTVRSDPEWRSKFFHLALRRGRKIAKVAMARRLAVRMYWMWRQQWDYEQLKKFGPHAGQPGTAHGVK

SEQ ID NO: 193475 - protein, 426 aa, unidentified
MPQLWAGIDAGKTEHHCIVLNADGTKLLSRRFANREGEILTLMGDVASLPGGTDVAWATDLNHGGTGLLQSLLGSHKQPLHYIPGRAIHHASLTYAGEAKTDARDAVVIADQARIRHDVNLMRQPDEVTVELRLLSARREDLVHDRTRAVNRLRALMAHYFPSLEAAFNYATTRGPLVLLTKYQTPAAIRRIGERRLATWLKGQECRKSAVIAAAAVQAAHEQTAVVVGEAAAARLVSRFARDLLRIRDELSELEAEIETALKGNVLAVPLMTVPGFGMRLTADFLAATGTDLMAFETPDRLASFAGLAPVPRDSGKISGNRHRPRRYDRRLLNACFQAAFIAARTCPVSRAFYERKRREGKSHKQALIALARRRINVIWAILRDGTSYRPITSGDVILKMTTLAVPVVEQTTSYADALPAAGYRS

SEQ ID NO: 193476 - protein, 389 aa, unidentified
MLHDHPSVGPTAILTQFGAIFVSLELSRSNWVLTSLSPGNGEKMSQYSLAAGDIGGLLARFAELKRKAKERTGSDYPTITIHEAGLDGFWVHRVLQNEGIDSYVVDAASIATSRRRRRAKTDKIDGEALLRALLAFKRGEPRVCAMVVAPSPEEEDRRRLCRERQTLIAERIIHVNRIKGLLFAQGISDYVPLRRDRRKRLEGLRTGDRRPLPVHLKTQISRELDRLELLLDQIRKVEVEQEALLAAESKAAPEGEPHNAVAMLLAVKGIGEHSAAILWSEGLCRQFSNRRQVAAYAGLAATPWRSGAVIHEQGLSKAGNPQLRTTMVQLAWLWLRHQPQSALACWFRARGERGRKGSIVALARKLLVALWKYVTHGVIIEGAVMKPAA

SEQ ID NO: 193477 - protein, 355 aa, unidentified
MSQEKYIGMDVHQATVSAAVRDRNGNLLMECVLETKADTLLEFVQGLHGTLSLAFEEGTLAAWLHDLLKPHVNQVVVCDPRKAALLRNGNKNDRIDARNLSELLRTNQLKPVYHGEHGLRTLKELGRSYLTVSKEMTRTMNRIKSLYRSWAIPCAGTTVYAPRHRREWLAKIAEPGARVRAEHLYEQLDHLQPIRVRARRELLQESHKHDVVKRLRQIPSIGQIRAALLVALLQTPHRFRSKRQIWAYSGFAIETHDSGEYRYVRGKIQRNRERITVRGLNRNHNPDLKNIFKGAAISASRRPGPLQDFYETRVAMGMRPTMARLTLARKIAAITLTLWKKGANFDPQQLRRQAA

SEQ ID NO: 193478 - protein, 354 aa, unidentified
MKKVIKQVVGIDVAQKELVVTIGKLYDDLSTDLIAYKVFKNTTKGFEALVSWVKKLTQDDVEARYVMEATGVYHEKLAYFLLDFKKAISIILPNKISNYIRTLEVKTITDKSCSQAIAQFGLERKLDNWNRPNPVLKSLKQLTRERDQIVDERSAIKNQIHAENTESEPNQSSIKRMNQRIKLLSKQEQEIKVEINQLIASDKELNRHVKQATTIPGIGLLTASIIYAETNGFELIRNKKQLTSFAGLDVIEKQSGTSIKGKTHISKKGNRHLRKAMHLPALSAIKHDMRYKDLFVRLVGKHGVKMKAVTAVQRKLLELTYILHKNNSTYNKLTREQCESVENEREQLLVIAPF

SEQ ID NO: 193479 - protein, 364 aa, unidentified
MKRKVYVGMDVHKETIQIAILPSNTKALVKEQQIKHEEGQIKKFIQKLKSEGTEIHCCYEAGVTGYPLYRYLKTLGVNCIIAAPGKIPRQSSDKIKTDKRDAIKLARLLRSGELESIHVPSEEDEAVRDYLRSRDSLRLDLGRNRQRLMKFLLRKGITYSTTKYWTASHYKWLNNLHFENEILQATFNDYYSRVRVQEENLKAMDQKIQEIAKSEPYREKVGILRCFRGVDYLTAMFLLSEVNDFKRFKTAGSFMSFLGLVPGEYSSGSKRKQTGITKTGSPRLRRILVEAAWQHRFPGTGSKVVVARRVGQSALVVSLAEKASLRLHKKFKSMQLRGKTPQVMITAVSRELSGFLWAAMNLVA

SEQ ID NO: 193480 - protein, 354 aa, unidentified
MKQQAIQYLAFDVHQATTVASLRDASGSVVMRASVATEATAIVRVVRSAGPRVHVAFEEGTQAQWLHDLLVPHAEKIVVCNTRGKSESGNKSDRLDADGLSEQLRAGTLRAVFHGTSNVLTLKELVRSYNNLIEDATRVMQGLKALFRARAIQTRGTGVYRPSERNEWLAKLEGGARVRAASLFKQLDVLLELRPAAKAAMIAEARRQPGWKVLRSIPYLGPIRVAEILAIVRTPFRFRTKRNLWPYVGLAVVTRSSADEEFVDGRLRKRKRAPLTRGLNRNHNPILKSVFKGAANAATARPGPLRDFYEASLARGVRDELAKLTLARKIVAIALRLWKRGELWDPNKLTIQAT

SEQ ID NO: 193481 - protein, 323 aa, unidentified
MTKDRNYFGIDISKDIIDVCDDNGNHYRFKNSLSGFKKLHKLIDVTTVCVMESTGYYHVKLAYYLLEQNHKVSIVNPLKIKRYIQMQLSKIKTDKSDSKMIQAYGVACNPSLWLGQSKTQQNSLQLSRLLSMYVKQTTQLKNKIHGEEVLGFPSKDVVRSLNRQLKNLKKEIEVLEEKLLKNVKSEYQESLTLLKTIPSIGDKTALMLLVFTDGFQRFTSSRELCSYAGITPIIRQSGTSINGRPRMSKMGNPKLRNLLFMCSFNACKYNQGCKALYDRIVAKGKSKKLALIAVCNKLLKQAFSIVKNRIPYDENYKSVLVNN

SEQ ID NO: 193482 - protein, 362 aa, unidentified
MSRDIKYIGMDVHQEAIVIAVLNGSGKLVMETILETKASSILQFIHGLRGELHVTWEEGTWAAWLYDLLQPQVQEVLVCNPRRNALLKEGSKSDKVDARKLAELLRTGMLRPVYHGENGLRTLRELARSYQTIGKDLTRVMNRLKALYRGWGIPCAGTQVYAPRYREEWLSKITQAGVRRCAELLYQQLDGLQALRRNLRPEFLAESRKHKAAKLLRQIPCIGPIRAARLIALMQTPHRFRSKRQLWTYSGLGIETRDSAQYRYVAGQLQRSKKPQQLRGLNQNHNHEMKEIFKSTATRASCGTGPFHDFYAVLLAKGMKPEMARLTLARKIAAITLTLWKRGERFDAEPSAITQNRPMSIT

SEQ ID NO: 193483 - protein, 307 aa, unidentified
MFIGIDVAKDRLDVHVRPTGESFTVGRDDQGIEELAKRLNAVAPTVVVLEATGGFETVVAAGLAAAGLPVAVVNPRQIRDFARATARLAKTDSLDAAVIAHFAEAVNPPVRPLADPQQRLLGELMARRRQLIDMMVAEANRRRLLTARRTLKSVDRVLATLKAQLKEIDHDIDIAVRGTPAWREAEDLLISVPGIGPKIARTLLAEMPELGRLDRRQIAALTGVAPFNRDSGTLRGRRTIAGGRTVVRSALYMSVLVSIRRNLPLAHTYHRLRASGKPAKVAIVACMRKLVTILNAILRDKKPWATA

SEQ ID NO: 193484 - protein, 397 aa, unidentified
MIAVGIDVSKSKSTVAILNGDGSIRAKPFDVHHVADELQALVDYIKRTSEPPTILMEPTSHYHYPLLKAFTEAELPVCLINPYQMKKYGDTELRKAKTDKRDSLRIAQYALEKSYSLIPYTPQDQKYEDLRFLSRQYSQRISTLTVAKVQLLSLLDETMPGITTILPLKSRDPDNCVLLRFIKRFKSFDVIRKMGKTRFLDSYQVLFKKTKDRFAGSKGLAIYELVLNSVTTRGENPLSAMTQDQCVDLVSTSQKAADEINLQMRIIAETMPEYKVLRSMAGVGDRLGPIILGEIGDIRRFHSGKALNAYADNDAPPYQSGQFESRNRHISKRGNPALRKACFEVMQALKLTKPQDDPVYLFLLKKEQEGKPYNVAKMAAVNKFLRIYYARAMELYK

SEQ ID NO: 193485 - protein, 462 aa, unidentified
MAARKQKRMSARTVEDEDCQLRYERVAGIDVAKGPAMVCLRLPPGPGKTRRTSRTWEVTARVPDIGALAAGLDASRVERVPVESASGCWRTWFVVLEAAGLEVQLVNSSQARNLPGRPKTGKAAAAWIARLTEMGLLRGSFVPPPQIRALRQYTRQLAHLTGDRTRYWQRLEKLPESALRKLTSVVSGLAGSKPCPAMLEAVIAGQRDPQVLAGYAPGPVKNKHAALVKAFTGMQFGPEHAFSASSDLRMIKMPDAGIAGLEQQVRDHLAAIPAAWGVDADGTAGPGAGTGPDAAVLPAVSRLAEIPGVSPGIAAGLTAGIGLDMSRFPTPDALVSRAGLAPVPDQSGSRKGRGKRHGLQLRPPLRRPGRPPRRPHGHVPRRTAPPRPQPPRQRRMEESLHRSRPFRPRHRLAPARRPRRPLSRPRTGPLRQAHRHQPQGPRPQAAARGPRLRRRPHPREAA

SEQ ID NO: 193486 - protein, 348 aa, unidentified
MNYIGLDLHQQFSQMAVVTKQGKIVKQLRVLNSPDMFERATLKELFSQPTKVALEACNGWYWMVDALEETGNAEVHLAHPLKTKLIAEAKVKTDKIDAKVLANLLRSDFLPESYLASCEIREAREVHRHRAALVKVKTSIKNRVHSILAKHGIFFLHITDIFGIEGRQQLEKAANNLKPVYKEELRRYLALIDWLDTEIEKIERQIKSLVKKDELTELLMTIPGIGEYSAYLILSEIGDINRFSKPKKLISYAGLNPGADISGKHFYHKHITKQGNVWLRWILIQDAPHAARSDERLKKIYQRISQRKGKNTAKIAIARELLFAIYWVLKKRAPYCPKSVTPVLDIVS

SEQ ID NO: 193487 - protein, 288 aa, unidentified
MISESDANMSRQRKRLSRHDLIPFLAKLPPVLIGMEACGGAHDWARRFRAHGHEVKLMAPQFVKPYVKSNKNDSRDAEAIAEAMTRPTMRFVPTKEVDQQDLQALHRVRERLIGARTALVNEVHGLLHEYGIVIPKGVAKFRQAVVGKLESEQDKLTPLSQEMFWKLIDEFAALEKQLAYYQEKLEALATTHPACQRLMTIPGIGPLTATALVAAVSDASAFKNGRQCAAWLGLVPRQHSTGGKERLLGISKRGDSSLRKLLVHGAQQFPLCPQDPMRRMSEAPLGAM

SEQ ID NO: 193488 - protein, 356 aa, unidentified
MQTQVTKKIDFKGKEFFIGLDVHKKSWSVTIVVDGIEHRTFTQPPDPLVLNNYLQRMFPGGDYNSAYEAGFCGYGIHRELNSLGIKNIVINAADIPTSQKDKLQKRDPIDSRKIARALEKGSLQGIHIFDRELEELRSLNRTRFYLMRDLRRSKNRIKSFLQYYGVAIPAEYDNNQWTLKYVAWLKQIKMQTMSGQDAFTNLIRSYEYHREQLLILSRQIRKRISEYDNELYSLLKSISGIGPLTSSALITELGDINRFPHIDHLSSFVGLIPRVKESGETIRTGGITFRCNSFLRTLLIEASWQAIRMDPAMMQYYQKHIINNKGHKVIIKVARKLLNRIRYVMKNRQPYVTGVA

SEQ ID NO: 193489 - protein, 348 aa, unidentified
MTISMIGLDTAKHVFQVHGVDAAGKAALKRKLRREEVIPFFEQQERCTVVLEACGGGHHWARMLAQLGHEAKLLAPEAARPFVKQGKKNDATDAAALCAAASRPEVTFVPVKSPEQQGVLALHSVRTLLVKQQTMLANAMRGLAAEFGLVVAKGVHRLDELEAQVLAEASMPATAKQAFAELHGHSQAAATRIAGLEAQIVAHARQDATARRLATIPGIGPITASLIAATVGDTIGSFKSARHFAAWLGLVPRQHSTGGKTRLGRITKAGNGEIRRLLVLGATSMVFRAGQWNSAAGAWLRGVLERRPVRLATVALANKMARIAWAVMTRGEVYQAKGRAPAAAAAVA

SEQ ID NO: 193490 - protein, 358 aa, unidentified
MRATILRLMNPTPLTLTIGLDLGDRAHHVCILDSAGAVLAEEALPNTRECLAQLSARWPAATIIMETGTHSPWVSRLFEQHGHRVLVANARKLRAISASHTKTDAEDARMLARLGRADPALLSPIQHRSEAAQRALVRLKVRESLVRARVNQMNSVRFLLKSLGLVTPRQVKATAFTRKLRPLLDAATCALVEPLLTLIDTLNAQLAALDAELETLARDHYPVTERLRQISGVGALTALCFVLTIEDPARFPHTRAVGAYLGLVPRRDQSGQTDKQLPITKAGHVQLRCLLVNCAHYILGRYGPPSHLRTAGERLCARGGKSAKKRAVIATARKLAVTLLALWKSGADYQPLPLPQAA

SEQ ID NO: 193491 - protein, 299 aa, unidentified
MGEVITIGLDIAKSVFQIHGVDEVGAVVIRKRVSRAKMLEFFAELPRCLIGIEACPAAHHWARELQAVGHTVKLMPPSYVKAYLKRSKNDANDAAAICEAVTRPSMRFVAIKTKEQQAALILHRARQLLVRQRTMLSNAIRGHLAELGIVSAKGRNGTGELLEIITNDADSRIPLAARSILKVLAAQYNAIGTEIASIGKSILAWHRSCEPSRRLEEIPGIGPIVATALVAEIGDWKAFRSGRGLAAWIGLVPKQHTTGGKDKLGSITKQGNRYLRWLLVSGAMDVNLDKFIRQPSYSL

SEQ ID NO: 193492 - protein, 351 aa, unidentified
MSHKTAATVAHTIGIDTGKNTLHLIGLDDQGAIVLREKIARGRIAARLANVPRCLIGIEAGMATHYVARELGALGHDVKQVPPAYSKPFRQGHKNDFRDAHAIAEAVQRPSTRCVPVKTDDQLDLQALHRVRSRLVGQRTAVINQIRGFLLEHGIAVRQGLRFLRQQLPDILAKRSDVLSPRMIRIMEDLSGDWRRLDERIEHITKEIEVLAGTDVNCGQLMTVPGIGPIIASATVAAIGNGAAFARGRDFAAWLGLVPKQMSTGDRTILGRITKRGNRYLRMLFVQGARAILLRPKSWVKHSFGPWLTTAVRRLHRNILTIALANKLARIALSVLIQGRSYETRIVPAAA

SEQ ID NO: 193493 - protein, 341 aa, unidentified
MNVKTIGIDLAKNVFQIHGVDEHGKRLFNKQLRRAQMASFFANIPPCLIGMEACASAHFWANKLISMGHNVKLMAPQFVKPYVKTNKHDAADAEAICEAVTRPNMRFVPVKTAEQQAVLALHRSRQSFIKQRTAQANQIRGLLAEFGIVVPRGIQQLQRRLPELVEDAHNPLPVLFRTQLSLLQHHMAYLFDVIATLDKQIEQCYRQNALCQRIGKIPGIGPVTASALIATIGKANNFEKGRQLAAWLGLVPRQHSSGGKQVLLGISKRGDTYLRTLLIHGARAVLQSAKHKQDAVSSWANQLMARRNNNIASVALANKNARTVWALLAKEREYCAPIISA

SEQ ID NO: 193494 - protein, 428 aa, unidentified
MSEKDCTRLKEFRQLQKEIRGSKEHLIVGIDVAKERHNAFFGTATGKTLFRRLVFQNDREGFERLLLQAEAMRIQHGLKRVVFGLEPTATYHKPLGEYLVTGGHRVVLVSAKSVKRNRELLDGRWDKHDTKDSANVADLISQGKCLYYDYPELRLRELRSLLSLRRRLKRQEHGLRVRIRNNLLAQYFPEFDRYFGRSESESLAIVRWCLAPSVIAGLAYDEFVRLVAPGNRAIRQQERLREIWDKAAASIGCEVGEAVRFEAKLMVEGLRQIRQALGETDEKITDLCVQFPEYEYLLSIPGYGPDVSSKVLGALGNPFRFTRGTQLLKMAGLDLVADRSGKRSDGVVPVISKNGKADLRYALYQAAVVASSRNREFIMWFTNRLRGRQREKGIKTRMRVKLSAKLLIIAWTLMKKKEPFNPDYLRIE

SEQ ID NO: 193495 - protein, 355 aa, unidentified
MKYYTSTTQFNCGIDLHAHQMYVCVMDRDGQKLVHTNIRNNDFAYFLKLVEPYRHDLTVCAECMFGWYWLADACQAAGLKFVLAHALYLKAIHGGKNKNDRIDSEKIAHLLRTNLIPPAYVYPAEKRPLRALLRQRILYVWRRSELLARIQSHQLAYNRPLIRQTRPNRDPWEEKLLAQEDNPIRQLALQNDLALIRHYDTQITALEEQLQKLTKAAAWRDYTLLQTVPGIGEHLGLTLLYEIGDIARFPTVKDFVSYCRLVKGTVASAGKIKGLRGAKLGNPYLRWAFGEAAVIAKRDHAVIGPLAQRLEARLGGNKFKANTVLAIKLARAVYFMLRSGTVFDPERLVAALTHK

SEQ ID NO: 193496 - protein, 326 aa, unidentified
MEHELHYIGIDTAKEKLDVDVLRPDGRHRTKKFANTTKGHDELVSWLKGHKIDHAHICIEATGTYMEPVAECLYDAGYIVSVINPALGKAFAQSEGLRNKTDTVDARMLAEFCRQKRPAAWEAPHPLERALRALVVRHQALTDMHTQELNRTETAREVQRPSIDAHLLWLEAELKRLEKQIKDLTDDDPDMKHRRKLLESILGIGEKTSAVLLAYIGLKDRFAHARQFAAFAGLTPRRYESGSSVRGTSRLSKAGHVSLRRALYMPAMVATSKTEWGRVFRDRLAANGKKGKVILGAMMRKLAQVAYGVLKSGVPFDAARHNPVAA

SEQ ID NO: 193497 - protein, 388 aa, unidentified
MIYVGIDIAKLNHFAAAISSDGEILIEPFKFSNDYDGFYLLLSHLAPLDQNSIIIGLESTAHYGDNLVRFLISKGFKVCVLNPIQTSFMRKNNVRKTKTDKVDTFVIAKTLMMQDSLRFMALEDLDYIELKELGRFRQKLVKQRTRLKIQLTSYVDQAFPELQYFFKSGLHQNSVYAVLKEAPTPNAIASMHLTHLAHTLEVASHGHFGKDKARELRILAQKSVGVNDSSLSIQITHTIEQIELLDSQLFSTELEMANLVTCLHSVIMTIPGIGVVNGGMILGEIGDIHRFSNPKKLLAFAGLDPTVYQSGNFQAHRTRMSKRGSKVLRYALMNAAHNVVKNNATFKAYYDAKRAEGRTHYNALGHCAGKLVRVIWKMLTDEVAFNLE

SEQ ID NO: 193498 - protein, 363 aa, unidentified
MHSINNTELSSLEGTRGQFNGSKADIKLGIDVHQDFYVMVEQEGGANPKPPQRFRKEAFLYWAAKLARSGAQVHAVYEACGFGFGLQRNLTALSIHCYVVCPQKLDEQNRRVKTDGLDAKALVLKLDRFVQGNRCALALVRVPTEQEEQLRAIHRQREQLVKARKQLEAQGRSLMVNHGVEPVQQWWKRRAFSQLQVPEWMRAMLSNSQPILLALEEKIRALTVQLQSAASPDQPRGLGKMTSVIIDREIGDWHRFNNRRQIASYTGLCPGEYSSGNTRLQSCVTKHGNPRLRAALVELAWRLVRFQPHYKPVVKWRQILAKGALATGAARKKAIVAVARQLAVDLWRVRTGRCKPEVFGLEI

SEQ ID NO: 193499 - protein, 337 aa, unidentified
MTIAFMGVDLAKNVFQLHGENADGVIVYRKRLGRTRLLEEIARIPACIIGIEACTGAFYWQREFEALGHTVKIIAPQYVKPFAQHQKNDRNDAEAICTAMKQPNMRFVPTKSIQQQDIQALHRGRQRLVNHRTALVSQMRGLLLDRGIAFGLSITRARREIPRLLNEEREELGTLFADLLEQLFEMLLELDRRVKWFDREIEKIFRHDEACQRISRIRGVGPKTATAMIAAIGDASEFKNGRHLAAWLGLVPRQHSSGNRQRLFGISKRGDRHLRTLLVHGARAVLRTAPKKNDPLSKWAIDVQDRRGAGKAIVAVANKNARIIFALLRNETEFRAG

SEQ ID NO: 193500 - protein, 391 aa, unidentified
MTSSHRIDTLAAGDKDGTLYVAFELSKSKWLIGLVVSGESKLSRHQVSGGDTAAVWQLISKKRAYAEKKLGRAVRVVSCYEAGYDGFWLARRLGEQGIDNRVLDPSSIEMPRRARQAKTDRLDLERLMRVLIRHDGGEPRVCSVVHPPSPEQEDARRLSRERDRLIGERTGHGNRIKGLLHGQGVREVEPRRKDFLERLAQARTGDGRVLPARLVAEIKREHARLVLLGEQLAEVEGQMRAEREAAAPDSRARQVNQLLGLKGIGAVGGETLVNEVFWRDFQNRRQVGAYFGLVGTPFDSGQSSREQGISKSGNGRARTLAIELSWLWLRHQPDSALSLWFKQRVGDQKGRVKRVAIVAMARKLMVALWRFLTLGVVPDNAIVRAAAPAGR

SEQ ID NO: 193501 - protein, 344 aa, unidentified
MKVTTLGIDLAKNVFQVHGIDQHGKVMLKKQLKRAQMAPFFINLPPCLVGIEACGSAHHWARKLQTMGHTVRLMAPQFVKPYVKTNKNDAADAEAICEAVGRPNMRFVPIKNVEQQAVLALHRVRQGFVKARTAQGNQIRGLLAEFGIIIPQGINNIGSRVPELIEDAGNELPGAFRVLVQRLLDHLKELDRQVDELEAQIQAWHRNSDLSTKIAQVPGIGPISASALVASIGDAKNFDNGRQLAAWLGLVPKQHSTGGKSNLLSISKRGDTYLRTLLIHGARSVIYHAAKRPESCSWVSAVVNRRNKNVAAVALANKNARIVWALWAHDRCYETGYTRVVEAT

SEQ ID NO: 193502 - protein, 340 aa, unidentified
MNAATHVISVYVGIDVSKRKLDCAILLNGKIKSKVVSNDRPGFALLNAWLQERSAATDSTHLCMEATGPYSEQAALALVDSGWMVSVVNPARIKGFAQSELARNKTDRADAALLARFCSAMRPSVWTPPSPAYRQLRAMVERLQALKDMHQQEANRLEAHHASGETTVLSNVKSHIAWLDKQIAKLQREINDHIDGHPELKQDAELIASIPGIGEVTVAKVLAYAGDVRRFANAKALAAFIGICPRQRQSGSSVKGRTMISRTGHAALRKALYMPGLVALRHNSILQVFGARMKANGLAPKAVVGAAMRKLAHLIYGVVKSGKPFDANFAMNGLAIQDGI

SEQ ID NO: 193503 - protein, 304 aa, unidentified
MFGIGIDVSKAMLDVAVHEEQFRQFSNDKRGFASLIRWLKKWPIKQVVLEASGGYERAALDALHSAGLPVVRINPARARRFAQGIGRAAKTDRIDATVLAQMAHLLSLTRYVPPAPWQQRLAEFSQCRRHLVQMRVSEMQRLRRLVDPDLIAMKKRHIAQLSDELKQLDKAIGEQLEGQPGWQNIGSVKGVGPILVSTLACELPELGSLGSKAIASLVGLAPMNRESGTWHGQRRISGGRAVVREALYMAALTAIRYEPKLRDFYAGLKAKGKASKVALVAVMRKMLVILNARKRDAEVALGSP

SEQ ID NO: 193504 - protein, 432 aa, unidentified
MAVRKNRAVHNEMEGIRMEVLYGICGGVDVHKKLVVVCLRSGRKSEVRSFGTTTQELFEVANWLKSGNCEMVAMESTGSYWKPLYNVLEVMGLPAMVVNAQHMKAVPGRKTDVKDAEWIADLCQHGLLKASYIPDKDQRELRELVRYRKSLIEDRGRELNRLQKMLEGANIKISGTIRDISGMTGRNLMNKLIKGVKIDAAVYDEMYAKGEIAHNLKESKEQLIADLNGVLSALQRKMLKELMDHLDELDAHIKHLDDEIDNFMTPDETTAAKVIQDIPGIGNASAQVVISVIGTDMTRFPSDRHISKWSGLCPGNNESAGKRKSGRTTKGNGLLRTTLVNCAHAAVRVKDSFFSAQFSRICARCGAKRAYVAVAHSMLIAIYHILSDGVVYKDLGSNYYNQFNKERKAESMVKKLKALGYEVSIAAATATA

SEQ ID NO: 193505 - protein, 371 aa, unidentified
MTIVAHTHPFVIGVDTHARNHALSILAMPHGEVVDDAEFPTTSAGMARALEWAGRRTGGDLEALWVIECSASYGAQLARAVTTAGYQVVEAARMSARANRGIGKSDSLDARRIAASVLSLRADQQRYLRKDNGVRAALRVLLAARDHMTSERTGTINALIALLRVLDLGIDARRPLTGRQVIEVAKWRSRTEAIEMVIARAEAVRLAKRVLDLDQELAENVKTTTSLLKQSAARVLLDKPGIGPVTAAVAMAMAMAAWSHDGRMHSEAAFASLAGVSPIPASSGNKVRHRLNRGGDRRLNKALYMAVIVRMTHDAETKAYVDRRVAEGLTRREIRRVLKRYLARQIHRALTAASRADEAAVNTIPAAPVTA

SEQ ID NO: 193506 - protein, 350 aa, unidentified
MRIIGCDYHPRYQQIAMLDPATGELVERRLEHENGEARAFYASLPKPARVGMEATGYGQWFERMLAEFGHELWIGHASEIRAGVVRKQKTDARDAAHLLRLLVENRFPRIWIPSPSERDTRQLLRHRHKLVCFRVSVKNQLHGLAMSQGVCRKKKLFTAKGREELEKLSLGPWASRRRQELLAMLDQLNPLIEELDRAVQQEANRHADAVRLMTHPGVGPVTALAFVLTLGPMARFQRSKQVVSYLGLNPMERSSGDKQHTYSISKQGNTMMRWLLVEAAQTAVRLDPELQRVYRRLKFNKGAGVAKVAIARKLAVKLYWLLRATASCAQMAPMQGSSGGTLVPQVGSIF

SEQ ID NO: 193507 - protein, 327 aa, unidentified
MEKSYKIAGIDVHKSMLAVVVADAALEGEFRFERRKFGTMASELKALAEWLAAQQVREAVMESTAQYWKPVWRELEGQCRLQLAQAHSNRAPRGRKSDFKDAERLLRRLVAGELILSFVPNPEQRLWRTLTRTKHQLTRDRVRLHSQLESLLEDARIKLATCVSDLLGLSSRRMLQGLADGQTDAAALAGLAEPELRATPEQLADALSAAATLSPLHRQILRLFLERLELIERQIATLHQTIASALQQHQQAVLRLAAVPGFGPDSAQQVIAEVGPEAATFASAGEMASWVGVCPGREESAEESKSNRTPKGNRAMRRAEPSRQCRA

SEQ ID NO: 193508 - protein, 377 aa, unidentified
MEYCTTIGADVSDRTTKICVMTKAEGGERRIVVETTCATTKAGFEEAFAKFDRSWPVAFETGTHCRWMDRLFRKMGFKTIVGNPGKIPSITKSNTKNDRNDARELALADPAMLHPVFLRDEVYQQMLRFHHARNMLISQRTQTINQIRGFAKSMGHRIECSSTEKFHEQGKADWPREIEECAWPLMGSPKTINLKIKAYDRLIARLAERPEFKPMVERVRVVYGVGIVGSTVFVAAIGGRPDRFDHTRDIGAYIGMIPKQDQSGDDDKQLHITRAGADIVRTALVGCAGVAMMSNAKDTDLKLKGLRIAMRGGRIARKKAKVAVARGLAVTMLALLQHPEREYVPLSEEGKKEFERYRAELECLTMQKASRKEKKVA

SEQ ID NO: 193509 - protein, 300 aa, unidentified
MYRGLLPCGNRAAYNRKEPIVENSITYVAMDTHKKQHRVALVYPNDERIIEFSVKNTPAEIRKMVRKVKRNAPGKVKFCYEAGVCGFTLQRRIESLECKCSVIAPSLTPRKPGERKKTDRRDAKKLLGLFMSDMLTEVYPPDEQQEAARELTRCREAAQENLKRIRHQLQKLLVRHGYVFIDGQHWTQKHLRWLGTVEFEQPLLQEVFDCYFTEMRHCLQRVKTLDKELEKLAQSEAYREVAGALRCFYGINTLTAMTIITEIFDFGRFASARDFMSYLGLTPSESSSGEKQQKGSIVGY

SEQ ID NO: 193510 - protein, 333 aa, unidentified
MSRFWVGIDVAKRKLDVALLDEAGKVKSKVLANDPAGFAALMTWLKERGADAASSHLCLESTGVYSEGCATFFADAGWKVSVVNPSLPKDFGKSELKRNKTDAIDAGLLARYCSKMAPSAWQPPPLEYRKLRSLVERRQALQDMHQQEANRLESTLEAAARASIGEHLAWLEARIAELEKDIDDHIDGNKETLGKDAQLLTSIPGLGRTTAAKVLGLLGDLRRFDSGKALAAFIGVTPQRHESGDSVRGRSSISKAGHASVRHALFMPTLVATRHNPKIKAFRDRLVAAGKPKKSAILASMHKLVHLMYAVVRKGVEFNPRFGLLALDGQDGI

SEQ ID NO: 193511 - protein, 360 aa, unidentified
MFCERTSVGLDVHARSVVAAAIDGQTGEVFKARLTPSDAEVLGWIGTLPGPCAVVYESGPTGFGLARALMAAGWRCEVAASSKLRRPAGDRVKTDSRDALQLARLLRLDEVVPVRIPTRAEEAARDLVRAREAARADLMRSRHRVSKLLLRHGIVYSGGKAWTALHDRWLRRQRFDSAATQAAFDDAYETVVLGTARRARLDEKITALAEDSEFTALVRRLACLRGIATLTGFALAVEIGDWDRFTGAGIGAYLGLVPSEHSSGQSRSQGGITKTGNAHVRRLLVEAAWQHRTTYHPGVVLQRRWDQAPAAARARGHAGNQRLHARWVNLNLRKKRPVIANVAVARELAGWCWSLAVLPD

SEQ ID NO: 193512 - protein, 329 aa, unidentified
MNVHQQGRETTAASRINAGIDVCKQWLDACWGDRSQRFNHDAEGIRQLAAALLEAHTDLVVMEATGGYEVAAAAALQAEGLAVAVLNPRQTRDFAKSLGVLAKTDRVDARVLRDFAQVIAAHPRRERYLRPAPDEQRVQLAALVMRRRQLVDMRVAEANRLTLAHKAARKSVEAILAALDEQLAHVDSDIDQHMREHYKETMAFLRTLKGVGRVTLTTLLAMLPELGHLRGRSIAALVGVAPLARDSGQRHGRRQTWGGRHEVRAALYMAALSAVRHNPILRQFHQRLIAAGKPPKVALVACMRKMVVILNAMARDHASWDPARTTPHA

SEQ ID NO: 193513 - protein, 346 aa, unidentified
MMIIGCDFHPSWQQISWLDTESGDCGERKLVHASGDAKKFYQQLALPVLIGMEATGNSQWFVELIEDLGHEIWIGDAAQIRASYVRKQKTDKRDAAHILKLVVQGRFPRLWTPDREQRDLRQLVLHRHKLVEIRSRVKNELQHLSLNKGMQRKGKLWSQAGQKLLRELPLKPWAACRREDLLGLLAMLNQQVGQLDIAVQHAAEENPQARLLMTQPGVGPNTALAYVLTLGDVSRFPRGKQVASYLGLIPREHSSGGRQKLGVITKQGNRMLRSLLVEAAQIAVRFDPGMKKQYLHRCHQKPKGVAKVATARKLAVRLYWMLRTNVAYPEIVRIESSPRVPLVGAS

SEQ ID NO: 193514 - protein, 430 aa, unidentified
MNYNTQNKKIEAITEKTLVIGIDVGSETHYARAFDHRGIEYSKKPFKFSNDEAGFASFKAWILEHKETHEKDKVVPGMEPTGHYWFNLGKFLQDNDMKPVLVNPHHVKKSKEFDDNSQTKNDRKDPKVIAGLVREGRYMIPYLPDGVYADLRTASNMRFQIQSELTRILNRISRWFNIYFPEYRTVYGKLDAVSGMLILKTAPLPEDILTLGVDGIDKIWRNAKLRAVGKKRAQTLVNAAEHSVGNKEGATSARIEIRMLMEDYESRNARLQEIMALIEELVKKIPMTEKLLAIKGVGIRTVSGFLAEVGDISRFKSPKELQKLAGLALVENSSGKHKGETTISRRGRKKLRYLLFEVAMSLVAKNREFAELHNYYTTRKMNPLKKMQSLMVVAAKLIRVFYVILTKGVDYDPGKMSEDIIRPMADLKTA

SEQ ID NO: 193515 - protein, 361 aa, unidentified
MSTLKVNVGIDAAKDNCDCNLSKLTAELDVKVIAAKRFLNTEHGMEELVKWLIKNCPADCIKVHAVIEASGVYHERFALGLQQAGYIVSVVLPNKAKKYMESLGLKSKNDSIDAKGLAQMGCEQKLEEWTALSPFYHKLRTYTRLHEDIQETKTQSTNQLHALNHSAVQMKDATKVLERLVKVFDAELFKIKKLIDDHIASNAEVKERMDKICDIKGVGTLSAATVIAECNGFGIIKNIPQLISFAGYDVVEDQSGKRKGRTKISKKGNAHIRRILHMPALNMNTYEVGAMPALFERTFDKHGIKMKSYVALQRKVLILIYTLYKKNEAFDKNYHTKDKSARVEKVEAFSRLSLKEAGKAA

SEQ ID NO: 193516 - protein, 474 aa, unidentified
MARTRSRPASPPVPGDAGAEVTDEPVQVISRAAAIDVAKGSGMVCLRLPHESRAGRRTQKVWEVTATFASVVALMDHLVCQGVERLVLESTSDYWRIWYYLAEAAGLEVWLVNARDVKHLPGRSKTDRLDCVWLCKLSEWGMLRRSFVPPEPVRDLRALTRLRANLTHDRVRHQNRIEKILEDALLKVSSVISDLMGGSGRRFLQALADAERSPAALAALGDYRLHASKAELREALTGRFRDIHGFEIGMLLELIDDLPAKITELDERIEAQLENVPGLGGVCTSCGQPGPDGPCTGCGEPVLGVIARLDEITGIGRGAAQVIVAELGTDMTQFPTPGHAASWAKLTPRAIQSGATSKAGRTGKGDPYLRGATGVAVMTAARTGTFLGARYRRHARRRGKQKAIVAGSRTIIEIAWRVIADPGFRYIELGPDYHDQLDPGRKTRDKIRQLEKLNPGMTVTLTPRPERGGQSPAA

SEQ ID NO: 193517 - protein, 463 aa, unidentified
MAKTRKYLAPRRRLTTVSPLTPRADLTVKNPRAAGIDIHDGVHWVAVPSECDPQPIRAFATFTADLEALADWLTACGIDTVAMESTGVYWIPLYELLERRSFRVFLVDARTIAKVPGRPKTDIHDCQWIQRLHSYGLLGKAFRPKDDIVVLRGFVRQRQTLISYASQHIQHMQKALVEMNIKLTLVVSDIVGKTGMAIIKAILAGDRDPVKLAELRDGRCKHTEEEIAKALVGNWREEHLLALKQAVELYEFYHCKITECDQAIDKYLSRLPNRTGEKPLDPGPRKQKNKDNEPMFDARKRLYEMMGVDLTAIDGISVSVALTIASEIGHDVSAFRNEKAFANWLGLAPNHRITGGKIKSNKTRPGANRIATGLRMAAASLLRTPTAMGAFGRRIRSRLGSPKAITAIAHKLAKVVYRMLKNGEAYVKRGAEEYEAQFQERRMAALKRTAASMGFRLEPVLAQ

SEQ ID NO: 193518 - protein, 422 aa, unidentified
MESTRARKLKQVPVGYLIAGVDPHKKKHAVVVIGQDLVVHSKFKVLNSRQGYEELLERARWQMMATGSRGIIFAIEAGGHLWRNLAYFLEERGIPFRLINPFTLKRWREGRDLNRLKNDYRDAEVAAELLRTGEFTETRLVQGTYAELRAAYNAYRRLVKDRARSLNLLKGLLDGLFPEFCQVFNDPAGKTALAMLSLCPVPRAIAGMTADEFVDTIRGGYPKPRLKLRKLRALHNAAQTSIGIQSGTKSLSIELSLLAQRLRLGGQQIEEVEERLVGLVDSMKDGEYLLSVRGLSYVTVAGLLAELGPLRSYQNAKQLIKMAGSNPIESESAGKRRSRTPMSKKGRPGLRWCIWTAAISLLRHNSDFRSWARMRRERPAYDHPLKAREVVGAAGNRLLRLAYALIKKQTSYRMPQMAEVAS

SEQ ID NO: 193519 - protein, 403 aa, unidentified
MIFIGDDWAEEHHDVYLMDEAGKRLASRRLPEGLAGVRQLHELISTHAEEPDQVVVGVETDRGLWVGALAAAGYQVFAINPLAVARYRDRHHVSGAKSDASDAKLLADLVRTDRHNHRLIAGDSTDAEAIKVLARAHQNLIWSRTRHTNALRNELREYYPAALVAFDDLAHGDALGVLGRAPTPEQGARLDRPAIQSALKRGGRRRNIAERARQVQAALRSEQLAAPAAVSAAFGATTRAAVGIIAELNRQIADLETSLAAHFEQHPDADIYRSLPGLGVVLGARVLGEFGDDPNRYTDAKSRKNYAGTSPLTIASGKKRAVLARHVRNRRLYDAIDQWAFSALSTSPGARALYDQHRVAGDLHHQALRALGNRLVGILHGCLRHKQPYSEHTAWAHRTPVAA

SEQ ID NO: 193520 - protein, 347 aa, unidentified
MKITRIGLDLAKNVFQVFGVDAHDKRVLSRQLKRKEMQAFFQALPACLIGMEACASAHYWAWVLTEMGHTVKLIAPQFVKPYVKGNKNDANDAEAICEAVSRPGMRFVPVKTIEQLHIQARHRVRSELIKQRTAKANQIRGLLAEYGIVIGLGVRCLRHRLPEILEDAETRLQADFRILLMGLRDDLVYLDERIKTEDKAIEALARTHPSARRLQQLRGVGPLVATALIAALGDGRQFTHGRQASAWAGLVPGQHSSGGKQTLLGISKRGDTYLRTLLIHGARAALRAARDKTDPLSLWLQGLCARRNKNVAAVALANKTMRLAWVLLRREEDYDPLHGHATPPEPA

SEQ ID NO: 193521 - protein, 323 aa, unidentified
MERIYIGVDFHARQQTICYLKIETGELVFCELGHENKEQVRAFYAAFSSQVIVGLEASGYSPWFERMLEELGCEVWLGHATEIRRRARWRQKNDRRDAELILDLMLHEEFPRLHRPAVQSREVMRMLRYRQKLIKMRTMSKNSLQALALQSGLARRSRLFTREGKHELSIALMSPAMQWQRDHWWQLLQSLNEQLQETMGWLKTHAQGDVKVARLRTHPGIGLLTALCLLHTLQPVDRFRNTRKVAAYGGFDPLERSSAERKCFLGISKAGSRILRHLVVEAANVAVRSDEDLKRFYKRLAEHFVLHCCFPEMNTYETRRGEF

SEQ ID NO: 193522 - protein, 467 aa, unidentified
MAARKQKQGRMSAQVVEDEDYQLRYEVVAGIDVAKESAVVCVRMPPARGRKHRTSQLQAVPATVPAIGELAAELTAAGVQMVSMEATSDYWRIWFAVLEEAGLAVQLVNSSQARNLPGRPKTDKEDARWIARLTEMGLLRPSFVPPPEIRALRVYTRHIWDLTADRTRYWQRLEKLLEDALCKLSSVVSRLAGHQTARAVIEAMIEGERDPRVLAALGRGRMRNDRLPALAEALSGMRFGPQHAHAAASLLRAIDLLEAELRDLQERVTAHLAAIPASWGVDADGVTGPEAGQAGEAAVLPAAGRLDEIPGLGREAAAALIAEIGLDMTRFPTPEALVSWAGLTPTARQSGPRKGRGKKGHGNTYAKRIAVLAAYAAANTDTFLGERFRRLAFRPGGGGRKKAGCAVGRSILVIVWHLLNDPAARYRDLGPDWHARHTDRSRKARNARRQLEALGYDVIITLREDAA

SEQ ID NO: 193523 - protein, 368 aa, unidentified
MSLQEKSLFVAMELSNKKWKLAMGDGSQERYRTIDARDTAGLVREVGRAKEKLGLPAEAPVMFCYEAGRDGFWIDRMLKQQGYKNYVMDPASIEVPRRARTRKTDRLDAEKLLQLLLRYELWGQRKAFSAVRVPTEAQEAERRVHRERERLVKERVGHCARLKSLYALHGITVSHPLTVPADQICDWEGKPLAGALVDEVKREQERLRLVDEQLKRLEKQQTAALAQASTPAMQKAHKLCRLKAVGPQSSWILSQECFAWRTFANRKHLGSFVGLTGTPYDSGDTLREQGISKAGNRRVRTTMIELAWSWVRWQPDSALTHWFIDRYVRSGTKRSKRKGIVALARKLLIALWKFIEQDIVPEGAIVRA

SEQ ID NO: 193524 - protein, 326 aa, unidentified
MQVKSVSKQGTGVQSTAGIDVSQECLDAHVHPQGISLQVPNTPAGIGKLKRFLQKHGVGLIVLEPTGRWHRTVHRNLHDSGMCVALANPYQVRSFARACLQFAKNDKLDAKILAKFAAAMEPAVRPPAPKVMEILGELTRARASALAERTALQNQIHAASYKLIQQNLERLIRHVDDYVEALEQEIEGIIADNPALARHFAILTSIPGVGKATAMTFIANLAELGSISHKAVAKLVGLAPLDWESGKQQGRRAIFGGRADVRHMAYMSALSAAQHNPSLKAFYQRLRDAGKAYKQAAVAVARKLVILANTLIAEDRLWQPQAPKTA

SEQ ID NO: 193525 - protein, 345 aa, unidentified
MGQITRVGVDIAKSVFHVHAVDRFGERQWKGKYCRTKWLDAIENKVPKGTEIAMEACGSSHYWGRELQKRGFKVKIIHAQFVKPYVKSNKNDAIDAEAICEAMSRPNMRFVSVKSSKQQDIQSIHRIRDKLMVQKASKANQIRGLVSEYGLVAPVGINKLREAIPLWLEDAENGLSALFRLLLRDLFDDLRQLQERVDTLDTLIEKEVKNDPVARSLLQLRGIGILCASALSCAIGDAKGYRKGRDFAASIGLTPRQHSTGGKPRLLGISKRGDGYLRKLLVHGARSVIRHAHRHDDNLSKWIEKLCAYKHVNTVTVALANKTARAAWAMVNTNESYDPGLIASA

SEQ ID NO: 193526 - protein, 394 aa, unidentified
MILVGIDIGKNKHTFSIIDKVTGEILLNPSVFDNNQTGFLYLIKKLSSYAKSELLIGMEDTGHYHFALLKHLLDNRYTVALINPTTTDLTRKIQGGITKNDTLDSITICDVISSNQRKKPYRITKLNRFDLYEQKQLTRHHHNLKEELNIYKNRLQKCIDIVFPEFNSLFNSKYGIVYMSILKTFSSANAIANADIRSIRKCFEFKGRGGRISLSAEQLKTVAKVSVGIPSAAEEIQIRHLVCQIELLEEQLSEIDKRITEFSVKNNSAILSIPGISHFSGTSILAELGDICNYQKSSQIIKFAGVAPYHYESSQFTAQHTAITKKGSRYLRKTLYQIILPVINNNEVFRTYYNKKLAEGKGHRCAQGHCIRKLLRVIYRLLTTGQQFCPELLV

SEQ ID NO: 193527 - protein, 391 aa, unidentified
MIYIGIDAAKDKHDCHFVNSDGEVLLDNLRILNNLDGFNTLKQAIEQFSTGDNSQIKVGLESTGSYSANIISFLKQLNLSVTVLNPYNVANLRPATTLRKTKTDKSDARLIATATALCSPNQAYLDISYHIQTQKSLCRTRYRLIKTIQPIKNRFRRILHVMFPEFETLFNVSINSSYELLKKYPGPKAILHTRKSSLEKFLKGISMGRLTKKVDALIEIAKNSIGSYNEGDAFELQDTCDNILFLENKLANLESKIKDIMQIINSPITSIPGIGDIMGATILAEIGDIQRFDSPEKLQAFAGLAPMLYESGKYIARDTPMDKKGSVYLRNALYQVTKAAYVHCPFLRSYMDKKRSQGKHFYTAMSHGMKKMVRVIFAVLKKNSNFVEPII

SEQ ID NO: 193528 - protein, 360 aa, unidentified
MLHIGIDVHQKSSVFNVFNPAEGDGGTHRSQRVETTAQGFRKVLEPLAGRCEVVYEVGPMAQWVAALVRPYAVKLTVANPSQIPWLFRAGRKNDRIDAKKLSILSYLGQVPKVHLPPPEVSEWRGLINERRQLVTKRTRAKIQIRALLRTQALRCPQKSVWTRCGMIWLKALKLKQILKGRITRLIDEMDFLIGQIAALEKQLNELAEKQPAVALLRTIPGIGPRSAEALVAYTDDVKRFSNRKQFGSYFGLTPTEDSSGERVRRGRISKRGPSVVRWVLVEAARCAIRCCPAFRDFAERVARGRKDRRKKAVVATARKLTAIAFGMLRTGEVFDIARLAPPQTTPQKKAEASLEPKPAA

SEQ ID NO: 193529 - protein, 485 aa, unidentified
MTKRRMSTFERLESGRLNRKQRRVLERQVAAADPGLTIVHTNAGGIDVGNESHYVAVPSDRDPNPVREFGCWTAALNEMAEWLKSCRIDTVAMQATGVYWIALYDVLEQHGIRVVLANGRHTKNVPGRKTDVQECQWLMKLHTYGLLRDSFRLAQEMESVRTIWRLRDRHVKEAGRAVQHMQKALTKMNIQLANVLSDLNGVSGQEIIAAILQGERDPWKLADLKDYRVRASREEVARSLEGNWREDVLFELEQAVDSYHFSHRQMQECDQKLEGYLASLPARMLDIPAQPEGSLAATAKKKTKKAKKPSGNQPHLDLKTELKRICGVDLTSIDGIDVMTALTIVSEIGTDVSRFQDETHFASWLGLTPAKDISGGKTIGRGKRKVKNRVALALRTAATTLLKSDSYLGARYRSLRRKLPSFAAAVKAMGRYLAVLIHRLLTKGEAWVDRGATQFERRHTEQELASLNFKARAKGFKLIPITEAS

SEQ ID NO: 193530 - protein, 430 aa, unidentified
MPYRIAGIDVHKKMLAVVASDVEIENEYQFERRMFGGNPEQLRSLAAWLLEQEVEEVVMESTAQYWKPVWEALERYWKPIREKREGARPRSGTLHLAQAQSNRGRRGRKRDFPDAERLVKRLVARELVLSFVPDSQQRLWRTVSRRKYQLTRDRVRLQNQVESLLEEAHIKLSSLVSDLLGVSARRMLKALAEGETDPTALAGLADQHLRATPEQLCDALGACTDLQPVYRRLLKMALEQLQFLEQQIGQLDQEMANLLSQHQNAVERLAEVPGLGVDSAQQIIAEVGPTAATFPSEKCLASWVGACPGDDESAGVNYNHRSPKGNRHMRRVLNQAANGAVKVKGSIFEIAYRRCVPRLGHNQAIGTIAHRQCRLIWLILHHGVRYEERGPAVSRRSKQARTAKMIRQLRRLGYRIESSTAQEDSAARVW

SEQ ID NO: 193531 - protein, 338 aa, unidentified
MNVKVIGLDTAKHVFQVHGADKTGRAVLKKRLRRSQVSDFFGSIPQCIVGLEATRGAHYWARVISAFGHQVRLIAPQFVKPFLRSQKNDPGDAAAICEAVSRPEMRFVSQKSIEQQDLQALHRIRSRLISCRTQLGNQIRGLLAEYGIILPLHLSQVRRNLPALFSEEHPLLTGFTRELLADLYQELCALDQRVQALEGKMQASFESQMLCQKIAKVEGVGPVIATAVVAAIADGRAFRNGRQFAAWLGLVPRQYSSGDKQRLLGITKRGDPYLRMLLIHGARSVVYRAAGKGDARNRWIAEKQKKLGTTKTCVAVANKNARIIWALLAKDEPYRIAA

SEQ ID NO: 193532 - protein, 326 aa, unidentified
MTLLHLSDNNFIGIDVGATDLDVAWHRGDSAQYANRPDAIAALVKRLRAQAAVTRIVIEPTGGYEKALVKALRQAGLPVEIIHTTRFKAYRSLVGAKAKSDSSDARLLAAYAAAPDEVRGRKAGYVELPEDAIREQLGELASRRDQLKHMIHAETCRLGTVRLAELREAITAHIEILRAEDKRVHRTMLDLVRRRVDLQRDRRLLETIKGIGMKSAIAFLACVPELGRVENKAAAALVGVAPFVHQSGSMIAPARIHGGRAAVRSILYMAAVAASKHNPVLRPFYERLLAKGKPAKVALIAVLRRLVVFANAVLKSGQSWRGAAIA

SEQ ID NO: 193533 - protein, 353 aa, unidentified
MKRIVKQAVGIDVAQDELVVCMGRMHEDLTLELYSHKTFSNTAKGFELLTTWVSKLSNADVELNYVMEATGVYHESLAYYLSDRGDHLSIVLPNKISNYSRTLDVKTVTDKTASEAITRFGLERKLDNWEPPKGVYRSLRQLTRERDQIVATRTIAKNQLHAEEAEAYPNKRSIARTKKHIAFLDKQEQEIKEELAQMIKEDEEVKRIVVLLCSLPGIGLLTAATILGETNGFDLIRNKRQLASYAGLDVKEKQSGTSVKGKPRISKKGNRYLRKAMHLPALTAIRHDERFKAIFARIVSKHGIKMKAAVVIQRKLLEMAYTLYKKQEKYNHEYLTKSEGKIAIEMQDLSIKN

SEQ ID NO: 193534 - protein, 340 aa, unidentified
MSKVTTIGLDLAKHVFHVVCCDARGKMVRKKVLRRGQVWAFFVHLEPALIGLEACASAHYWARELGELGHTVKLIPPQHVKPYVRGNKNDYNDALAIAEAVMRPQMRFVEIKTEAQQDIQALHRLRERRVQERTALCNQLRGLLAEYGLILPKGISAMRRRIPALLEDAENGLSDLFRRLLAQGYHQLLELDAHIDGYGEELKRYSAQSEACQRLQTIPGFGPVVASAFAGHVASGESYRRGRDVSASLGLVPRQHSSGGKQVLLGISKRGDRYLRCLLIQGARAVVYRTAGKDDPLSRWIDQIKDRRGINRAIVALANKMARMGWAILRNKTVYQAAQV

SEQ ID NO: 193535 - protein, 338 aa, unidentified
METYAGIDLHSSNNYIGIMDQDHKRLFGRRLSNSLDEILMVLEPFKSDLQGVVVESTYNWYWLVDGLQEHGYKAHLANPSAIKQYEGIKHTDDKWDSFWLAHMKHLNILPEGYIYPKEQRPVRDLLRRRLFFVRHRTANILSLQSTISRNLGIKMSSNGIKKLDMDEACDLFDSSNLVFMAQNNISTIKHLGKIIKGIENEVKSQVKLRKEFVMLTTIPGIGLILGLTIMLEVGDIGRFFKVGNYSSYCRCVGSKRLSNGKKKGENNKKNGNKYLAWAYVEAAHFAKRHIPKAQRFYQQKMAKANGAVATKALANKLARASYFIMRDQVPFDENMLFR

SEQ ID NO: 193536 - protein, 317 aa, unidentified
MVYLGIDVGKADFHCALLSDGRSKPNSFPNSQKGFERLRSWLHNRGVDRVHACLEATGGWSEELALFLQEQGHAVSLVNPMAIKSFGQSELSRTKTDKADAALIARYCSAMQPRLWEPPSPSQRRLQRLGRRRTALVEMRTQEHNRLEGPGIAEVRDSLEKSIAFLERQIADIDREIASVINDDPDLRNKRDLLESIPGIGERVASTLLGELPQITEFRNGKALAAFVGLCPREFRSGSSVSTSWLSKMGNPHVRRVLYMPAITAMRCNPILVDFSARLRARGKRTKQIIAAVMRRMLVLAYGVLKSGRPFNAVPAP

SEQ ID NO: 193537 - protein, 350 aa, unidentified
MNTTAREASVSEVITVGLDLAKSVFQAHGADASGEVVFRKKLRRDQVLPFFARQPRCVVAMEACASAHHWAREIGAQGHQTRLIAPAYVKPFVKRQKNDMADAEAICEAAQRPTMRFVAPKSAEAQAAGVVFRTRDLLVRQRTQLINALRGHLAEFGHVTAKGPGHARKLAELVRDPASDLPDAARSVLIVAVESLEVLQAQIAVLDRQIEARAKTSPLARRLMTVPGVGPVLATAMVALAPAACTFGRGRDFAAWVGLTPRQHSSGGKERLGRTTKMGERSLRRLLILGASSVVKVAARAGARDPWLARMLLRKPRMLVTVALANKMARIVWALMAHGGSYRAPAAAAA

SEQ ID NO: 193538 - protein, 312 aa, unidentified
MYYIGIDVSKKDLSVFDGKKDLKFINQEALKSFKKYLKKKVNFSDLVIIFEPTGVYSLYLKEFCAKNSIKAYILNPKQSHNFARALGIRPKTDKIDARNLYQFHKLINLKDIQVPKIDQQAKTLASYLVSYEFALRQRISLSHHLESLREKQLIVLIKKEQKRAKKLEDKIFHDILEYLSKNQNLKEDYQRLSTIPGIGEKAAIALLTLFKTYPGTNRAQITALAGLDPVKRESGTSVKYKVKISKNGKGIYRKILYLPTLCATIHNQKIKIFYQRLLAHHKAKKLAVIASMRKILLIAHAMYQNKTEYITA

SEQ ID NO: 193539 - protein, 372 aa, unidentified
MEHHSEAFVALDTAKLRNAVAIADAGRSGEIRYLGEFDNTEVATRKLVAQLASKHTRLTFCYEAGPTGYGLYRLIKSLGHDCIVVAPSLIPSKPGDRVKTNRRDAVNLAKLLRAGELTAVWVPDERHEAMRDLVRARDAAAKDYRIKRQNVSSLLLRLGRHYPGKKTWGRAHINWLTSLKLDHREQRIAFEEMLLAVRQVRERIERLEQAMREAVADWALAPVIEAVQALRGIDMVGAVAFLAELGDLSRFENPRQLMAYLGLTPSERSTGESVKRSGITKAGNTRARRLLIEAAWSYRFPPRVSKEMQTRIGAAPRTAREIAWKAQMRLCGRFRTLTRKGKRSTIVVTAIARELSAFIWAINREVVATENQ

SEQ ID NO: 193540 - protein, 422 aa, unidentified
MQVLYERCAAVDVGKDVIAVAVRLPGDGPDGRQMIKRTFKTYYGVLREAARWLTSLGVTHVAMEATGIYSMPVYHALVEHGEFTQVLVCNAGHVKNVPGRKTDLADAEWLVHLLECGLLRGSFIPPADIKAARDVIRYRAKVVQSRTSEVQRLGNVLQDAGIKIDSVASSITTKSGLAMIEALIDGERRGRVLADLARGTMRSKIPDLSMALEGRFGDHHALMCRLHLDHIGHLEEMIAALDAQIEAMMAPFRAQRDLLTTIPGIGPLAAAAVISEIGADVREYFPDAAHLASWAGVCPGNHESAGKRRSGQRRHGNQHLQPVLVESSWAAVRHQGYLKALYHRHVMKWGGYRSPAAKKKAIIVVAHALLVIIWHVLATGTPYGELGENYFTTRMDPERETRRLVAKLEALGHAVTLGSAAA

SEQ ID NO: 193541 - protein, 356 aa, unidentified
MENLIRVEVQAVVGVDLGDRSSQICCLSRETGAILEEKRLSTTTASFQRYFEGRVSCLVIVETGTHTPWVRRLLASMGHQVIVANASKVRAISASVRKTDERDARYLAQLGRVDPELLSPVHTRSEEAQQALAVVRSREGLVKARTMLINQVRGMVKSFGARLPSCSAKSFARGASKALPQGLKAALEPLLEVIADLSERIRGFDRDVEAWAQRFPVTERLRQIKGVGALTALVFVLTLDDPHRFARSRSVGAYLGLVPASRSSGSSTPQLPITKHGDCLLRRLLVQAAHYILGPFGQDSDLRSFGLELARRGGKNGKKRAVVAVARKLAVLLHRLWISGEDYEPHRQPVSSSAAA

SEQ ID NO: 193542 - protein, 325 aa, unidentified
MSKQNDLSRCLVALEQDATLIAVIEMGQASWLVAGIVPGLDRYPLKKLGPDRDALLQLLHRWRNEAAKAGHAIDRIAVAYEAGRDGFWLARWLRSQLIEAYVIHPSSVPVSREHRRAKTDRLDTELLKRAFLGWLRGEPKHCSIAAIPTLEDEDARRPGRERQILVEERTRILNRLKANLARLGIRGFRPNLARAPSQLEALRTPEGVAIPTNTLAEMRRDLDRLQFVKQQIKQIEMTRAERLANAPDERRHAAARLLTRVVGVGVETADMLVQEVFWREIRDRRALARYAGLTGAPDESGQRRRERGLAKAGNARVRRGMIELA

SEQ ID NO: 193543 - protein, 314 aa, unidentified
MAETAGIFVGIDISKAWLDIAVHESETVWRAGNDNPGIAGLVKCLQQMKPTLVVLEATGGYEMQLVAELAHAKLPVVVTNPRKVRAFARSTGKLAKTDKLDAKLLAHFAAAIRPAVRVLPSEEEEQLTGLLVRRRQLVDMLTVEKNRLHTVRPAFRDDIKEHIAWLQAKLSKIDEEIDQFVRKTSLWKEKDAILRSTPGVGRVTSCTLLAMLPELGTLNRQEIAALVGVAPVNKDSGRKQGKRRVYGGRATVRSVLYMAALAAKRYNPRIKAFYEDLLRRGKEKKVALTACMRKLIVILNAMMKTNQPWRTEAT

SEQ ID NO: 193544 - protein, 345 aa, unidentified
MEMKQIGSIEYFIGIDVSKLTFNYCLRYGGGKVINGKASNNIESIKEFVFSLKDIPGFKLAQAVFGMEVTGVYGLTLMNTLTKMKGKVVVEAATKIKNSLGIVRGKNDKLDAARIARYLIKNLQELKLWTPRRLIIDELDSLSTLRDRIVRVNSILNVPLDEDDGFINHEISDSNRKLCAPTISGCQQLILDIETRIKTKWKNDERCNRLMEIMLSVKGIGNVTALEMLIRTNEFKSITTSRAFASYCGVAPFECTSGTSGKKISRVSPLANKHIKSLLHNCARTCIGYDQEIKAYYRRRVEVDKKNKMSVINAIKFKIICRVFACVRGERMFQQGYVSKAPAVE

SEQ ID NO: 193545 - protein, 427 aa, unidentified
MSEERSVELRVSVDVGYRRHSVAMGLSSGEVLEEFEIDHRPEGFQEFFSRIEKHQKAKSCTVAVAMEGYNGHARPLDSLVRQRGYRLYNLNNLKFARFKEIFPGAAKSDRIDARRGLELFQLSDHLPLAKEVLQEVRGTPKENEVLKRLTRRRRRLVNERVRVVNNLQADLQAVCPGLLEITSEASNQWFLNFLVSADSLSQLARLRKSSLLKIPAVGRKYAGLIQDWQKRAHFSEEAGWVSEMIQEDAKRCLELEEKIKTLETKIEQVAKDSKIAKILLSIPGFGPVCTSELAGEIGTVERFNKEGSLALYLGMSTLDNSSGNYQGTKAPKHVNTRAKAAMMIALDRHRKYVPESQRYYEKKRTQGKGHNQAIRALGRHLCRIIYKMLKEQREYQLRSKEGDTQARVRSRSCVKTKIRRSKISRRG

SEQ ID NO: 193546 - protein, 355 aa, unidentified
MKNFFIGIDVSKKTFDVVAIKAEGLQELMERRHEKFQNNAEGFKALMAWLTPLSEGLEPERWIFCAESTGDYSQRLADFVYSQGMDIWMENPYTIKHSFGLQRGKSDKADANGIAEYAMRHCDKMKAYEPLSDSVRRLREVFLYRHKLVQHKQVLDIRDGGKEELESSDKTYKFMKKETDRIIKEFDKAIDKCDKKMKEIIESDPEMLQTFEIVTSMKGVAMQNAASLIVYTNNFRRFDFNARKIACYYGVAPFGKSSGTSINTKPKVSGFANKTIKAMLTQAAICAIRFCPEIRTYAQRLKSRGKHSSIVVNNVCNKMLAMLTAMVRDNQKYNPNKQQKSREMFQKHVDMLNAS

SEQ ID NO: 193547 - protein, 401 aa, unidentified
MTAQREKAWVGIDVGKTHHWACVVDADGRKLLSIKVGNDEADVVALIANASSQAKQLDWAVDIIGAPSALLLALLDRASQPVRYASGRVVAAMSAAYAGEGKTDAKDAYVIAETARLRGDLSVIDTGTDLIRNLAVLTGHRADLIADRVRMLNRLRDLMTSVFPSLERAFDYSSHKGALTLLTGYPTPDRIRRIGQTRLTSWLRNRHVRGSAEVAARAAAAAKAQTIMLPGQELTAKILTELATAILALDDRLKALDAQIQTAFAEHPHAAIIQSMPGFGPFLGASLLVGSNDLRAFPSAGHLAAAAGLVPVPNDSGRRTGNLHRPMRYSRSLRHVFYLSAQTSMMRAGPNRDYYLKKRAHGATHTQAVIALARRRIDVLWALIRENRTWTAAPPSPTQAA

SEQ ID NO: 193548 - protein, 416 aa, unidentified
MLILSKGVSVMNAVGIDVSKGKSTVTIRRPGDIVIMTPRDIPHTQSAINSLIEQIRALDGETKVCMEHTGRYYEPVATWLSDAGIFVSAVNPILIKGFGDDSLRTPKTGKADSKRIARYTLDRRAKLKQYGSMDKTRNQLKTMNRQFGFFLAQKTAMKNNLIALLDQTYPGANNFFDSPARNDGSQKWVDFVHTYWHVDCVRSKALNTFTEYYRNWCKRKGYNFSAAKAEKTYQSSSDLIAVFPKDDSTKLLIRQAAAMLNTASETVESLRLKMDETASSLPEYTVVMAMNGVSPTLGPQLMAEIGDVTRFTHRGALTAFAGVDPGKNDSGQHIQKSVHTTKKGSPSLRRTLFQIMDGLIKRPPIDDPVYAFMDKKRARGKPYYVYMTAGANKFLRIYYGRVKEYLSTLTENEKLK

SEQ ID NO: 193549 - protein, 411 aa, unidentified
MEAAVITAVGIDVSKSKSTVAVRRPGGEIALRPFEVHHTNSDLKKLASTLKKLGGDIRIVMEHTSTYWRPIALTLKEAGFFVSVVNAMLIHDFSDNTIRKLKTDRADALKIANYALTFWDTLPPFNNEEETRLLLKMQSRANERITATATALRNGLIALADQTFPGVNIAFDPNTKNANGHEKWVDFFLRYWHKDCVCQYSMEAFTESYRGWCKRKNYKFRTDTAHKIYLLAQEGVATLPKCESTKMLITQACKSLNAVCEAKQSTQLEIQRLATMLPEYEVVMQMEGAGPITGPALMAEIGDVRRFKNKKALVAFAGIDAPPFQSGAFESKSRHVSKRGSPHLRRTIFIVSNIILTRSNPENAVYCFMDKKRSEGKHYYVYTVAGSAKFLRVYYARVTEFLRSQPSPDAC

SEQ ID NO: 193550 - protein, 345 aa, unidentified
MLHVGMDLSRHRLDVRVLEDGGATVAELVVAPTEPELRQLAARFKPGGPVRGVIESMNGARFVHDTLELAGWEVEIADAQKVKGLAPLACKTDRIDAWVLAELSRRDLVPAIWLPDPAVRAHRERARFRLHLVHHRVELKNRIHASLITFGHACPTSDLFGRVGRQRLTELEFPEPWASDIAAAVELIDHLNAQIATIDTDLRREGADHPYVPLLMTVPGIGWILAYTIAAELGDIARFPTPKKLCGYTGLCPRVYQSGSVDRRGRLAHNGPKYLRWALIEAAVHACRHEHYRDHHQATKVRLGPQRGAKVARVETARKLTEAIWHMLTKGEPFAPQVPRQSLAA

SEQ ID NO: 193551 - protein, 405 aa, unidentified
MEIMYPRCCGLDIHKKTVVACVITPEEKEIRTFSTMTEDILAMVDWIKSKGCTHVAMESTGSYWKPIYNILEIEELNPMVVNANHIKNVPGRKTDVKDAEWIAGLLQHGLLQGSYIPSREQRELRELIRYRRSLIEERAREINRIQKVLEGANIKLSSVVTDIMGKSSRAIIEAIINGEEDTVVLSELAQKRLKNKKEELKKALKGLIGPHQRLMLKTQLAHIDFLDEQIGLLDEEIKRRMLPFEEDLERLDTIPGVGRRTAEHIIAEIGTNMDQFPSAAHLCSWAGVAPGNNESAGKRKSGRTRKGNEKLRSVLVEAARAAAHTKDTYLSAQYHRIAARRGANRAAVAVAHSILTIVYYLLKRKERYNELGVNYYEERKKEAIVKQSIKKLESLGLKVIVENAV

SEQ ID NO: 193552 - protein, 403 aa, unidentified
MNSVGIDISKGRSTVAVMRPFGEVVISPFEVRHTDSELSELARQLKSLNGETRVVMEATGNYHAPVAKLLHDAGLYVSVINAKLVHGYGNNDLRRIKTDRKDAVKLANYGLDRWLTLPRYVPEEDTRLLLKNCYRQYRQYSKVQTVLKNNLISLLDTVFPNVNRLFSSPARADGSEKWVDFVAEFWHCGCICERSKKAFVSKYQKWCKKHGYNFGEEKACAIYAEASGYIGVMPKSETTKLLVEQAVAQLRATSTALAALKQEMQTLASMLPEYPVVMDLFGVGPTLGPQLIAEIGDVRRFYSKKALVAYAGLDAPPNDSGDVTGRHKSMSKIGASSLRRTLFLVMSVYLQNAPLDEPVYQFMDRKRAEGKPYRVYMMASANKFLRIYYATVKAYLKSLEHTA

SEQ ID NO: 193553 - protein, 316 aa, unidentified
MTETIITTAGIDTSKLKLDIAIHQRPERWQVRNTLPGWRELVTHLAKAGVTRVGIEATGGYERGVVDHLRAAGFAVLVMQPIQVKAFGRVHLRRAKNDALDAALVAACAATLDPPKIAPDPRLTELAHELTFLEQIEEDIARLKTRLEHIDEPRLRRMVDGDIARLKLRRLAQIRMLAKRLCDHDDLARRFDLVLSVPGIGERTALALIIRMPELGKISREEAAALAGLAPFDNDSGQYRGQRRIAGGRGRLRKSLFAAALPAAFQWNKALIELYARLRAKGKAHNLALIACARKLLVYANTVVQRGTPWVDSTAS

SEQ ID NO: 193554 - protein, 414 aa, unidentified
MSLPAAQFFVGLDWAADSHAVCVIDTEGRPLARFSVEHSADGIALLIRRLAKFGDPLDLPVGIERPDGRLVDLLLEAGHPVVPVSPNAIKTWREGEVLSGAKSDAADAAVIAEYLRLRQHRLTAATPYSGETKAVRTVVRTRDDLVAMRVAAVNQLAGLLDAHWPGAKAIFADLESPIALAFLTRYPTPTSAMHLGEKRIAGFCKAHGYSGRRSGPELLTRLRSAPSGTTDPHLTTAVKDAVLAMVGVIGAVNAAIKTLDASVAARLGEHPDGEIFTSLPRSGQINAAQMLAEWGDCRQAYERPDSVAALAGCTPVTQASGRHKSVHFRWACNKRFRRAMTTFADNSRHTSPWAAAIYNHARKTGKDHPHAVRILARAWIRVIWRCWHNNTPYDPARHGAARALSQATSPNLAA

SEQ ID NO: 193555 - protein, 411 aa, unidentified
MEVIYKRCCGLDVHKKMVVACLLVREGGKVLKEIRTFLTMTVDLVVLHDWLKAQQVTHVAMESTGIYWRPVFNLLEEDFTILLVNAAHIKTVPGRKTDVKDCEWIADLLSHGLLRGSFIPPEPIRGLRDLTRYRKSLTDERVRQVQRLQKFLEGANIKLASVASNGMGVSGRAMLEALIAGSTDPQVLSELAKGRLRKKLPELKKALEGRFRPHHGFMVAEILTHLDFLDEAIERVSQEVSKRIVPFSRKVELMDLVPGINQRVAEGVLSEMGVDMSCFPSHRHAASWTGLCPGNNESAGKRKSGRVRKGNQWLRRYLIEASWAAVQKRGTYLSALYYRLVPRRGKKKAIVAVAHALLVMIYHILKSEVPYHELGSDYFNKLNAAYVQRHHVKRLESLGFKVILEPLSEAA

SEQ ID NO: 193556 - protein, 348 aa, unidentified
MNQFIGLDGHKNSCTFVVINEKGKVKRKAVLATDQKQLLQFIKSIPGRRHLCIEEGTQSQWFYEIFSDHVHDLAIVQGRKSPGNKDDERDARSLAERFRTRDLGNRIYKVPESLATLKELVRGYEMLNRDLTRVKNRIKHLYSSRGIAYSKDGCPFCEGRGSCQKPGFHQTLQLLRTQQECLEPLKAAAQKAMITEAKRHPIARIIQTAPGFGEVRTAELLSIVIDPCRFRTSRQFWCYCGLAIVQRSSANWVQKPNGQLDRVKLNQTRGLNRNFNRMAKAIFKGAAVTVLTSMPTEPLRKDYDRLVTNGTAPNLARLTLARKIAATVLAMWKNEEAYDPGKYRLNSI

SEQ ID NO: 193557 - protein, 408 aa, unidentified
MQRRENLLYVGIDLHKETHTAVMVNCWNEKLEVVAIENKPSEFKKLAEKVNRKSRNLGLNPIYGLENAYGYGRSLAVWLIENGYAVKDINPALAYDQRKSAPMFRKNDEWDAYCVATVLINQLHTLPDAKPKDNEWTLSQLVNQREMLVKDGIRFKNGLHEQISMAYPSYHKFFSEIDGKCAMYFWRTYPSPVHLEGKTAEELTAEFKEIARITKRDKAELILDCVRNDGNTIREYQESRDFITRSLVRNLEHQKEELAGVDEEIEKILLTFDYKLTSMPGIGITVASKLIAEIGDIRRFSNADKLARFAGVAPVKFSSAGKGKEQSSRQGNRQLHGLFYFLAVTMVSVPKNGMPNHPVFHSYYMRKISEGKTKSQALVCIMRQLVNIVYGMMKNKTEYREPLPEEEQ

SEQ ID NO: 193558 - protein, 345 aa, unidentified
MNITTVGIDLAKNVFQVHGVDARGKVVLRRQLRREQVARFFVKLPPCLIGMEACASSHHWGRTLERFGHAVRLMAPQFVKPYVKTNKNDAADAEAICEAVSRQNMRFVPIKSIEQQAILSVHRVRQGFVKARTAQANQIRGLLGEFGLVIPKGICHVAERVPGLLEDASNELPLALRQLIDRLTSHLKDLDQQVRELERQIIAWHRGSELSRKLEKIPGIGPLAATALVASIADPRSFKNGRQVSAWLGLVPRQNSSGGKSTLLGISKRGDVYLRTLLIHGARSVILMAKRQTENKIRPQHQLLNRRHPNIAAVALANKNVRTVWALLAHGRDFKPDYVPVRATA

SEQ ID NO: 193559 - protein, 419 aa, unidentified
MNKLYVGMDISQKDVKVQILDQDGNEATKRFAVDNNPLGAETIASRILECCRKLDIRKVFAGLESTSVYGWHLQYYLADHLKLKAYDPMIICFNAKLVEAFKESLGNLPKNDWVDAFTIAERLRFGRLPKSCPVDFRYLALQRLTRHRFHIVDNIVREKNYFLSNLFLKFSGLCQNQVFATNFGAVATELFNEFLTLDDIAARPLDELVDFMVEHGKDHFTNPQSTAIALKDAVRKSYRINPSVDNSLSFVIKSCLDNIQALEKQKKAVEKAITHEIAGFNNQYLCLTSVKGIGPTIAAGLISEIGGISRFDNDNALAKFSGLYWSEYQSANFVAEDTYLKRTGNEYLRYYFIQAADQLRKYLPEYSEYYTRKFKEAKTHKHKRALVLTARKAVRLVFALLREEKLYKPSAMKGGDSLV

SEQ ID NO: 193560 - protein, 330 aa, unidentified
MKIQNAYPNGLPLCFGVDVAKAKLDCALLRADGKYRNKTFANTPKGFADLSDWLTKQQVTEPLHVCMEATSVYWEDIAQYLAEAGHTVAVVNPALVKAYGQSLSIRNKTDAADARLLASFCQERRPEAWQPYTASEKTLRALALRRQSLVDMQTQEKNRLGVAREDVTDSLNEHLAWLDGEIKRIEKLINKHIDSDPELREKSRLLRSIPGVAEHTSAALLAYLGRMRQCEKASAFAAFAGLTPRRHESGTLKGKSTLSKKGHAFLRHALYMPAMNATSKTAWGMAFRARLKANGKPGKVIIAAMMRKIAQVAFAIIKSGKPFNPHLHPA

SEQ ID NO: 193561 - protein, 441 aa, unidentified
MAMRKRDEEVVFPNAAGIDVGASSHWVAVPRHSASEPVREFGAMTDDLNALADWLLACGVDTVALESTGVYWIPVYEVLESSGLKVWLVDARQMKYVPGRKSDVQDCQWLQKLMSLGLLRAAFRPGNEVCVVRAVVRQREVLLAEQASWVLRMQKALVQMNIQLGEVLTDVMGMTGQAIIRDIVAGQRNPAVLARHRHGRVKASEHDIVRALTGNWRDEHVFVLTQALAMYDSLAQRIVECDARIEALLAPLGCHEVTLAGPAKRAGKNTPGFDLRTALARWAGVDLTRINGIAVTSVLTVLSEIGPDLGRFASVKHFCSWLGLCPGTKVSGGKILSARTRRSTNRVRQTLKLAAMSLSRNGSALGAFYRRMCARMDKPRANTAVAHKLARMIYFMLTRGEAYVDQGQQNYEEQQRQRSIAALRRRAAELGFAVTPTAATA

SEQ ID NO: 193562 - protein, 435 aa, unidentified
MQAVYARCAGLDVHKNTVVACRIWQEANGDKHQETKSFGTTTSELLELSDWLSEWECTHAAMESTGVYWKPIYNILESSFQVLLVNAQHIKHVPGRKTDVKDAEWIAELLQYGLLKASFIPPAPQRDLRDLTRYRTKLVQERAREVNRVQKVLEDANIKLSSVVTDTLGVSGRAMLDALIDGCADPKAMAQLAKKRMRSKIPQLEKALAGIVRDHHRFLLASHLEHIDSLDMHIASISMEIDHRISGAGQTQDDNPKEPSIGDMSIPLSFDQAVNLLDTIPGVNRNISETIVSELGTDMSRFPTAAHAASWAGLAPGNNQSGGKQRSGRTRKGNQALRNALVEAALAASHTKGTYLSSQYHRLAGLKGRKRANVAVAHSILVIAYHMLKYHQPYQDLGANYFDEHKKEALIHRLTKRISKLGYNVTLEPIAARTS

SEQ ID NO: 193563 - protein, 342 aa, unidentified
MPQTLGGVTVGVDTHGKIHVGAVADPLGRILGTIEVTTDERGFRQLENYAKGFGTIERFGVEGTGAYGATLCRWLTSRGHEVLEVDRPDRKMRRLRGKSDPIDACAAAQAVLSGRASGVPKARDGAVEAIRVLRMARGSAVRGRTQTMNQMHALVTSAVDPLRMQLRSCSPAKLVDRCVGMRPGKLDSPAAATKFALRELARRHRALDEEVERFDEELSRLVAKRAPRLVALVGVGTDVAGALLVTAGDNPDRLRSEASFAHLCGVSPIPASSGRIHRHRLNRGGDRSANQALWRIVMVRMSWDERTRAYAARRTSEGLSKREIIRCLKRYVAREVYEVLVA

SEQ ID NO: 193564 - protein, 460 aa, unidentified
MSGGNGNGAPTRRSVQRLAVIQPDVAGIDLAAEEHWVCGPAREDGKPNVQRFGTRTHELESLADWLIAQGVKSAAMESTGVYWIPLYELLESRGIEVLLVNARQLSHVPGRKTDMQDCQWLQLLHSCGLLRGSFRPKESICKLRALHRQYANLVAERSRAIQWMQKALDQMNVQVHRAVSDLSGKTGLAIVRAIVGGERDPLRLAQNRDFHCRKSVEQIATYLRGNWRDEHLFNLKMALALYDQIAQMLGEYEAELARQMQAVQPPDRQDAPVPPHPNRTKEGVIRSRGEQGQRTDLWRFAGVDLTRIDGLRPDACRMILTEIGPDLSAFPSEKHFVSWLRLSPRTAISGGKVLPRRRNATGATRIAGVLRMAALAVGKSKTALGSAYRRLARRKGADVAVFAIARKLAMLIYRMLRFGQDYIDEGMQAYEARFQAQRLHNLHSVAKQLGYQLVPLETAA

SEQ ID NO: 193565 - protein, 404 aa, unidentified
MNAVGIDVSKGKSTIAILRPFGEVVAAPFEVTHTDDELRKLTARLRDLSGETRVIMECTGTYYQPIAYGLHDEGFFVSAVHAQLIHDFGNNTIRKVKTDKADAIKIANYGLTHWLELPRYYPEEDVRRQLKAYSRQYNKYCKLKTMLKNNFITLTDQTFPGVNGLFTSPPRPSDGHQKWIDFTAKFWHCECVCGLSMKAFTQRYQKWCKRYGYHFSSAKTENIYILSCGHIGILPKNESTKLLITLAVAQLNAVLESLASIAAEMKRLAALLPEYPVVSDFYGVGDILGPQLMAEIGDIYRFHHKGSLVRFAGLEPPEHQSGKFVAESRSISKQGSPHLRKTLFQIMDCLLKTSPSNDPVYQFLDRKRAEGKHYYNYMTAGCAKFLRIYYARVKEYLDSLVSGA

SEQ ID NO: 193566 - protein, 332 aa, unidentified
MMNPQGIIIDEFTFTNNYNGITSLASRLTMDDRVVMESTGSVWTNLHNHLDDAHIPVVLANPLKTKAIASARIKSDEIDARILAHLLRTNLIPESYVPPKEIREVRALIRHRTSIVKIRTMVKNKVHAIVDRNGLEHDELFSDLFGKAGMQWLRTIQLPSLDRLMLDNHLEHLESLKKQIHAVDQEILAKASRDEDVRLLLSMTGVDIFTALLIRSEIGNISRFPEYKKLISWAGLAPSLHQSGSIEYHGSITKQGSKMLRWVMVEAARVAVNHDEKMRAFYARVKYRRGDQKAIVATASKMLKIIWFMLARREPYLSRNQRRYEEKLNTIE

SEQ ID NO: 193567 - protein, 384 aa, unidentified
MAVDDLRDRCREISVGIDAVELDGVDGPRFRLHSAERSGDRSEEKPFMNEVKAVGLDLAKRVFQVHGADAKGHPVLQKKLRREDVLTFFAKLPPCLVGMEACASSHYWAREIRNLGHDVKMIPATYVKPYVARQKNDAADAAAICEAATRPAVRSAPIKSLAQQAARVVHRTHELLSRQRVSLINAIRSHMAEFGIIAASGPQHVSPLIERISDPATPLPDMVRTALNILADELVAMTKQINALEAQMQKHCRKEPEAARLLTIPGVGPITVSAILAGVPDINGFRSGRDFAAWLGLVPRQNSSGGKERLGHITKMGDRTIRRLLVVGAMSTIRWSRGRENFADSWLGRMIARKPAKLAAVALANKMARIIWAVMTREEAYRAA

SEQ ID NO: 193568 - protein, 369 aa, unidentified
MEEGITYVGLDVHQASTVVAVILPTGEVLEDRFATSAEGVRRWVRRLKRRSTGRIVSCYEAGPTGYTLQRMLEGHGVACRVIAPSLIPHKPGDRIKTDRRDARKLVELLAADLLTEVHAPTPEQEAIRDLCRARTSVKGDQKRIQHRLSKFLLRRGIRWTTGRKMWTRAHREWLRGQRLDHAADQITLEDHLLALEQIEGRLAHLDEQLDHWALQAPYAEAVGWLRCFRGIDTLTALSVVAEIHDWRRFPSPRALMAYLGMVPSESSSGGRFQRGGLTKAGNSRVRRLLIEAAWHYRHRPSVGYRLAKRREGQPATLIALADRAQQRLHSRYTRLSARGKAHNQVVAAVGRELVGFLWAAMQGTAESTS

SEQ ID NO: 193569 - protein, 342 aa, unidentified
MERVVTIGFDIAKSVFQVHGIDATGAVVVRRKLARGRVLTFFEALPRCQIGMEACNTSHYWARELIALGHDVRLMPAQYVKPYVKRGKNDAADAEAICEAVTRPTMRFVPVKTPDQQSVMMLHRVRLMLNRQRTQLSNAMRAHMAEFGVVAPVGRMGLERLLAIVDDHEDRRIPVDARVCLAMLAAQLAVVKKQVLENDRRIRESARETEVGRRLMAIPGVGPLLASAFVASVADPAVFRTGRDLAAWIGLVPKQNSSGGKERLGGISRAGNRYLRQMLVVGAMAVIRHAQRHGTKRAWLLQLLARRATKVAAVALANKTARMVWALMTSGERYREPVVTLA

SEQ ID NO: 193570 - protein, 349 aa, unidentified
MQHYAGIDVSLELLSVCIVDTKGKIVKEAKVGSDPDTLVAFLRGLDLAIERIGLEAGPLSQWLHAGLTSAGFEAVLLETRHVKAALSAMTVKTDRKDARGIVQLIRMGWFRAVHCKSAGSQEVRALLVARKLLLSKLLDVEFSIRGILRGFGLKMGMVTRKRFEARVRELYAGHAMLEQICSAMLTARSALQTEYAKLHKALLVIVREDEVCRRLMTTPGVGPLVAITFKTGVDDPSRIHKSKAVGALFGLTPKKYQSGETDVTGGITRAGDEMVRTALYEAASVLLSRVTRFSALKRWGMDIAKRRGTKRAKVALARKIGVILHRMWVDMTSFRWTKGAPTTMRLARV

SEQ ID NO: 193571 - protein, 314 aa, unidentified
MAMHATRPVIGIDTAKEELVIQHDDEKRHLAVDNTPAAIRQWLAGLPKGCDIAIEATSTYHMEITERAHAKGHHVYVVDGYRLKNYREGVGGRAKTDLTDAQLLARYLRKEKDELRRWMPPPKAYRTLQSLLRRRAALVKARTALRQSLSAEPLLKTALATLLKQIDRIDQLIQKRLREAVHAAGLRDQVQRCQAIDGIGELTATALVMAFLRGDFRNSDAFVAFLGLDVRVRDSGKLKGKRRLTKQGDTEVRRLLHCSAMSGARHPTWKAFYQRYRDRGLKTTQALVILARKLARVAFALMKHQENYCAPRLS

SEQ ID NO: 193572 - protein, 349 aa, unidentified
MLADQVDYVVGVDTHRDEHVLAVVVAPTGAIVVQRSVRASARGYAQALRFAEEHADGTRVWAVEGAGHYGVGLARYLSGHGETVCEIGRGPRDERRLRGKDDSLDATRAARTALASETLSLPRAGQRREALRLLLLARRSAVDVRREALAQLRSVIVTAPDGLREQLRGLPAGRLIQRCSRLRRSSSRTPDELATILVLRSLARRIEAATAEAAELEAEMLAHVRALAPQLLDEAGVGPIVAAQLIVAWSHQGRVRSEAAFARLAGVAPIPASSGQTNRHRLSRGGDRQLNRALHTVILHRRQHDPATKAYIARRVSEGKSGREAVRLLKRYLARHLYRLLQNQEPLMT

SEQ ID NO: 193573 - protein, 367 aa, unidentified
MKKVSTATRCEFGKFAGQRLTIGLDLGDRSSWYCILDEQGELLLEQKVATTPKAMKEVFGAMPRSRIALETGMHSPWVSRLLSELGQEVIVAHARNVRLIGESRRKDDRFDARTLARLVRIDPQLLSPVQHRSRKAQADLTVIRARAGLVRARTALINTARGLTKSYGERLRGCSPRKMNGELAQGLSPELQSALQPLLEEIGSLSERIREYNEGVKQIAQESYPEVARLEQVKGVGTLIALTYVLTLEDAHRFGKSRDVGCYLGLQPGRRNSGQSEPQLHISKQGDPYLRTLLVQGAHHILGPFGADSDLRRWGLKLAERGGRNGKKRAIIAVARKLAVLLHRLWVSGEVYEPLHNSKQSAMPAAA

SEQ ID NO: 193574 - protein, 356 aa, unidentified
MTIVAHAHPFVVGVDTHARNHALTVLAAATGEVVAAEQFPATSAGMARAVAWAARRTGADLATLWVIEGVATYGARLARTATGAGYQVVEAARMNARARHAVGKSDPLDAHRIAAAVLPLDVDELRRPRRDEGVRAALRVLVAARDHMTAERTATVNALIALVRVVDLGIDARRPLTGKQIAEVSRWRTRDEEIGLTTARAEAVRLAKRVADLDEDIAANTTTMAELVRQSPAAVLLEKTGIGPVTAAIALTAWSHPGRVRSEAAFACLAGVNPIPASSGNTVRHRLNRGGDRRLNRALHIATITRMTHDPDTRAYVERRRAEGRTTKEIRRCLKRYLARQIYRTLNAADTGPSPA

SEQ ID NO: 193575 - protein, 362 aa, unidentified
MVYVGLDVSSKSFVVHVIDEKKQVVKRGEIAATRAALRGLCAELGRGRKLVVFEAGNQMKWIADTLKQQPGVTLHVVHPNEVKWIVESGGKKTDKVDAKKLAELARGDLLPRKVHVVEGATRAMRELVSARTRLMQRRVSLINTLRGYLKQEGVRLSERFFAQDDWRTQLAQRKVSAPLRAIVEAFRPGIDALQDGEAALVAELRTLRDDRTQLVESIPSIGVLTARTVVSALDDAARFDNRKCVAKYGALTPTIYQSGDVVQYGRINRDGRQEIRRVLLQCAHGVVRMKSPAAAPLRQFYWRLEQTRGKKKALVALARKLLVICYGVLKSGQPYDPTKLTGRPTPSAPPRTPRSYRLNRAA

SEQ ID NO: 193576 - protein, 401 aa, unidentified
MKYGVGIDVSKGKSTISMLSIAGEVIEEPFEINHDLNGLSILKGKLEKFSKDDIKIVLEQTGTYHLIILTFLLDEGYCVIAENSLKIKKYLDRSLRKAKNDRKDSLKLAEYACDNWYKLKLNTIEEEKYKELRFLSRQYFTFNDIKVKQKNDFSNLCDLLFPGYYQLLNENNFVLGLKIFQKYNNPKIIKNLKEEKFYKDIEKIAEKRGQLQAGITLAIKIYQLAKETYSLCPSSNITQPIIDRSVATLILSIETTKEIITNMNELAKSMNEYNTVRDMSGVGDRLAPLLIAEIGDIRRFKNAGSLIAYTGIDAPPYQSGKFEAVNRHISKRGNKYLRRIGYTTMKAIKTFCKSGDELYDYMIQKENEGKSKKSAKIATLNKFLRQYYGTIRKKYIDIGIW

SEQ ID NO: 193577 - protein, 407 aa, unidentified
MICVGIDVSKRKSTVCFMAPGDKIIRRPFDVKHTKEELQPLVDEIRVQAKYDEIKVVMESTGVYHLSIAYFLQQNGIFVSVVNALKVANFNKAENFRHTKTDSIDSTNIARYGIAYWAKLPQFDLNGDKYFLLKRLCDAYLNFSEERSRILLQLQSQLEQTMPGIFDLFGGFDINSGKDKLLDFLERYCHIKDIIAKSEAEFVASYREWAEEKGYRSNESKAATIYAQAKNGIPSIPNNPIVRETIMWYVGLLRRADEALMASLTRMEDIAKDLPEYELVGEMGGVGRVTRVALIAQIGDVRRFKNKHSLICFAGLTPSIHESGKFRASQNHIVKKGPARLRKVLYQVMMSLVMHKIPKDDAVYRFIKKKEAEGKYKKVAKVAGMAKFLRIYYGRVMHLYRDLGLAA

SEQ ID NO: 193578 - protein, 347 aa, unidentified
MRFYNQQHKFYCGIDLHARKMYVCIIDQRGKTRVHQNINTDPELFFDIIFPFLEDLVVCVECMFSWYWIADFCSEHKIPFVLGHALYMKAIHGGKTKNDKTDSYKIAKLLKGGNLPMAYPYPAKMRATRDLLRRRTYMVRQSSLLVGHILNTNTQYNLPPFNKTLTRKFNHEGVAERFDDPSVRATVEADLAMIEAYDRLIRPLEWQIEKTACEHDHNSLYLLKTIPGVGPILAMVILYEVHDIRRFASVQRFCSYARLIRPEKESDGKWAGKSNKKIGNAHLKWAIRTAAMISLRESDQAKKFVERLSKKHNKGKALGIYTHKLGRAVYYMLKNKRAFDMKQFFSH

SEQ ID NO: 193579 - protein, 401 aa, unidentified
MEGPIVSIDVSNGNSHYMCFIKNNKRFGKVKKIDHDIEGFKRLLEDIQKLEAETNEKVCAVFEATGVYTKPLERFLSKNSIKTYMINPLESARKRKEEIHNKKTDKLDPISISKVYYDKEEMMELKKKDETYNWLRKKNRLYEDQLNHLRKYKVTFQNQLSICFPGYLDLFKDGYSDIPMTILKKYPHPDLLKNKKAETVARYLEKNTCHNHKVSLEFALKIIEFAKKTYPGCEKDDVEVEIFKILLDKVIETQRECEKTLNEMITVASTLEEYRYILSIDGIGTNLAARIIAEIGDIEEFKSREALVAYAGLDPHIYQSGDQDGKHLKISKKGNKYLRCLLFLAVGCSIRGAKDNPVNRFYQKKKQQSNPLNSKAAKTACTAKLLKIIYGICKNKTTYEG

SEQ ID NO: 193580 - protein, 339 aa, unidentified
MNVVIGVDPHKASHTAVAIDDAEDEISSVKVCATRRQVEQLVQWAEPFEKRRWAIESAGGTGYLLAQQLVARGEEVLDVPATLASRIRVLGTGRSNKNDPNDAHSIAVAAFRSPSLRSVEPADHSQVLRLLAKRNVDLGSHRTRVVCRLHALLAELAPGGIAKELYVSDAERFLTKITPGTPAEQVRYDMALELLDDVRRVDHQTKESHRRIRLAIKASGTSLTEIYGVGPIIAAQLIGYAGDVRRFANRDAFASYNGTAPVEFASGGRVVHRVSQRGNRRLNHAVHMTAVSQIRQSSSEGRAYFERKVAEGKTKKEALRSLKRQISNAIYRQLVLDAR

SEQ ID NO: 193581 - protein, 454 aa, unidentified
MASTGRRRAALVVEDEAHERRYERACGIDVGKASGVVCTRLPPAREGGRRASRVEEVEATVPAVTELAGRLLAAGVEMVTLESTSDYWRIWFYLLEDAGVPVQLVNSAQARRVTGRPKTDALDAQWLARLTEMGLLRPSFVPPAEIRALRDYTRARLHAVQDRTREYQRLEKLLEGALIKLSSVASRLTTLSALDMIAALAAGERDPRKLAGLARGKMKAKTQELERALTGMFGDHHGELARYHLDHITFLDRKIAQLDDSIEACLDAIPASWGTDADGATGPGAGTGDDAAVQDAASRLAEIPGMSKELARNIIAEIGLDMTRFPTPGHLVSWAGLAPETAQSGTRARTRKGHGDGYARNAATQAASGAAKTKTFLGERYHRISRRRGKARALVAVARSILTIIWHLLADPTARFTDLGWDHHARKTDKDKKLRSHIAQIQALGYQVTITLAD

SEQ ID NO: 193582 - protein, 380 aa, unidentified
MASMHDSVGFKTTVYAAIELSKKSWVVAIARPDRDRPSIHRIAGGNLADLIGRLRQAAGEKQRIVVCYEAGYDGFWLARSLAKIGIDCRVLDPASIQVNRRARRVKTDRIDSLALLRALIAIDRGERHVCAVVRVPTVEEEDARRSHRERQRLVRERTGHINRIKGLLFAQGIRGIEPKRRRTRIDFGKLTTAEGRPLAERLRRELEREYQRLELVQSQLRIVEKERDTADAQDPAIERKRELLCALQGVGGASAAILAREVFARPFASRRQLGSYLGLTPSAYDSGSTTRCQGISKAGNSWARRVLIEVAWLWRKYQPGSPLSHWYARKTADQSPRIRRIMLIALARKLAISLWRYVETGLVPDGAVMAKTTPHTAAAT

SEQ ID NO: 193583 - protein, 357 aa, unidentified
MSPAPRVAVSPVPPQDMQPRWSQGSSPLSRTTEQSLDFSIVRTRQVTVMQIICGVDVSKNWLDAFVAMLHRRFANNEQGCRALAEFCREHAVELVVMEASGGLEQPAFLMLWKLGQPSALANARSVRRFAEAMGTLEKTDRIDAEMIARFAEAKRMAPTPPPSADQQRLSALATRLRQVTQDLGNQKRRLYSTREETARQSLIAAIAFFTAQARDLADEIATMIKADPLWSALESTIRSVKGAAGRTVAYLLADLPEIGTRPNRAITKLVGLAPLPDDSGERHGKRSIRGGRANIRSLLVLIADIVRKFDPSLADFRQRLLAKGMSKMQVRVALARKLLVRLNAKARETRAAFAAAA

SEQ ID NO: 193584 - protein, 400 aa, unidentified
MPLAVGIDVAKETHWVVVKVAETGQVLASHAVDNTPQAIADLIAEIRAAEAGHGPATVGIDILGGIAALAGAMLLADGLRVVHLPGLAVSRARRATTGGEHKSDPKDAAVIADQVRVRDDLRAVEPAREIDVELRLLAGRRSEIVADQTRRAQRIRDLLVSVFPGLEHVVDVTSKAGLHLLTRYVTPAEIRRAGKARLTAHLNRAGRVRDTTISNLADAATAAAQAQRITVPGEAVAASLIRSLAAEALAGRNQLTALDKQIADVLACHPDAALIRSMPGMGATLTAEFLAITGGIGRFPDGNRLAAAAGLAPVLKQSGKVRYLQRATAGDKALKRVFYQSAFVAISCDPASKTYYRRKRAEGKTHHQAVLALARRRVNVLHAMLRSQTPYQAGHVSAAA

SEQ ID NO: 193585 - protein, 371 aa, unidentified
MPRPAIKRRLRKHTQEEPMNVTHYIGFDVHKKHVNFCAKTANGEIIEEGKLPAQRAVLRQWATTQQPPWRGAMEATLFSAWIYDTLKPYGQPLEMAHPARLKAITSAKKKNDRIDARTIADLMRCNLLPSCYVATPETRELRRLLRYRNLVVRESVRMQNKIAGLLMETGSPFEKGKLHGKKYFTNLLKNLEEVPESVKDLLCLSRGAMEMFQATQKRLIQRLLANPKLGQRVERLASIPGVGEITALTWALEIGDPRRFSSSARVMSYCGLTAALRSSADKQQRGPISKQRNQWLQTALIEAAKLAPRWNPQLAALHTRELERGHRNRATLAVARKLAAYLLAVDKSGQPFQLRALPTADLTSPALDKAG

SEQ ID NO: 193586 - protein, 344 aa, unidentified
MKHCKRLSIDLAKSVFQVCGLNSYNQEIFNHKVTRAKLLKEVLNRNPEIIIMESCYSANYWGRLFESQGFKVNLIPAQHVKPFVKGNKNDKNDALAIAEASMRPKIHFVPIKTIEQQDVQCLHRVRQRLVASRTALTNQTRGLLTDYGITFSKGHHKILQALPFLIEDMENNLSFTMRELLNDLLEELRNINQNIVRIENAIKAVSSKQTGFANLMEMPGIGLINASALISAIGDGKQFSSARGFAAFLGLIPKHAQSGTKLVSKGISKNGDCYLRTLLIHGARTIVSRYKNNDDPLKQFANKIKEKRGKRKAYVAVAHKMARIIWAMLTTNSAYNPDFILTKK

SEQ ID NO: 193587 - protein, 290 aa, unidentified
MPETEVDRFAGIDVSARELSVALRRGKAEDKPAIAKFSNHHAGHKALIAHLFRGGRRVRVCLEASGNYSLDLALTLQAHRQVEISVINPRRARRFAESLGQRSKTDPVDARVLCEYAARMPWVAWQPPSSVALHLRAVARAIADLAGRFRLMLTTTGIAETSALQILGELAVLPDILDARQWVAFSGLDPRLFKSGKSVEKRPRISRGGSRHLRRALYMPALVALRRDPYLRCFYQNLLARGKARLQAVVAVMRKLLHALFAMFRTNQPYDGSKLCCAVEMAGHAIAACA

SEQ ID NO: 193588 - protein, 375 aa, unidentified
MSKHSEAFVAFDSSKLRNAVAIADGGREGEVRFLGEIDSNMAAITQLVHKLEANYERITFCYEAGPTGYELQRHIKALGHECLVVAPSLIPKKPGDRVKTNRRDAVSLVKLLRAGELTAVWVPDRRHEAMRDLTRARETAVIDLRAKRQQVSAFLLRQGRWYPAGKKTWTKVHMEWLAQQKFEQPERRMVFEEMIFAIRQAQERVARLEQAIRAAVPDWSLAKMVTAFMALRGIDLVSAADLLAELGDLSRFPTAPEVMGYVGMGCSESSTGDTIKRGPITKSGNRRARRTLVECAWSYQHPPRIGVAKQQKVAAAPPKVREIAWKAQSRLNRRYRALIKRGKRKNVAITAVARELAGFVWAVAREVASAERAAK

SEQ ID NO: 193589 - protein, 414 aa, unidentified
MFNPLLVGVDVHRKTNTVCLMDSQGQEAGPRFTVDNNSPGTEALIQRVAQQVVAGNFDAVKIAAEATGWYWFHFLQTLDRDPLLSQWPLELYPFNPRLTANFKKTYVDLDHTDPIDAFVAADRLRLGRDLPAPFHYEERYFPLRLLTRYRYHLIHNLAREKAYCLAYLYLKASEYTRKDKKPFSNVFGAASQAVLREFASMEEIAALPFDELVEFIDAKGKRRFPDPSENARRLHLVARDSYHLPEALQQPINVILGLTLRHITFLERQEKRLNTAIAQHMETIPHTLDTIPGFGPVFSGGIISEIGDIERFDYNQAKVAKFAGFKWRKRQSADFEADETRLTRSGNRYLRYYFCEAANAVRRSDREYAIYYQRKYDEIRKHQHKRAMLLTARKLVRLVVRLLTTNQPYQPRRC

SEQ ID NO: 193590 - protein, 356 aa, unidentified
MVKRNKLEFTGQWIYAGLDVHKKSWKVSIYTPYGEYKSFSQPPQVETLVHYFRHHFPGAVYYTVYEAGYCGFWIHDQLVKQGVHCLVVNPADVPTKNKERRRKGDRVDCRKLSRGLRQGDLEGIYVPARGKLEDRSLIRTRLSMGRKQTRCKNQIKSMLLFYGIEIPEEREMGHWSRRFIQWIEGIRLEQASGNMAFQIHLEELSHLRQILAKLNRAILTLSRTEEYRSWVGLLRIIPGISTLTAMILLTELGEIMRFRSVDQMCSYVGLIPDTRSSGEKEHVGGVTQRRHSHLRWLLIEASWIAVRKDPALMMAFNEYCKRMRKSKAIIKIARKLLNRVRYVLKNQAEYVPCVIE

SEQ ID NO: 193591 - protein, 347 aa, unidentified
MRKIAYLAMDVHARNCVLGEMDGNGEFHGNRSFKTCEINIIKALKTIKAKRKYLVIEAGPLSNWVAQVANDHVTRVIICDPRENALIYKSSQKRDKVDTKKLCRLLRLNEFKEVYRPENDQRAIFKAAVQHYLDLRDQLKALKQKIKAMYRQWGVIDVFTESVYSVSGRDKFLNQLNHRPIYLQLKRLYTLLDTTADMKQDAQKSMTSLGRKYPEIKEFKKMPGMGIVGPHTFDAYIQTPHRFAKSSRLWKYCRLGITDHTSDGKPLGYRRLDKSGISELKAVSYRAFLSAIKGDNEIRRFYLSSLKRTHDKKHARLNTQRKILSVMLSIWKKGSAYRAELFLDPST

SEQ ID NO: 193592 - protein, 435 aa, unidentified
MRYIGLDVGRDFAHAAVVEGKGTARRLGRFRMGEELRAFAATLGADDVVALEASTNTWALAELLGRHAGKVVVSNPLRTRAIADALRKTDDIDAASLAELLAADYLPEVWQPDEATRRLRRLVAHRAGLVRQRTVTRNRVAAVLARRLVRSPMTDPFGAGGRSWLASLELPPEERLALDAALRIEAAIGAEVAAADRVIAETVVDDIRMRHLLTIPGIGLVTAAGIIAVVGDIRRFSRPAKLVSCLGLDPRVRQSGDRPAYGGHIRRQGQAHARGLLAEAAHAAVRAPGPLAVTFARLQRRRGTGVAIIAVARKLAVLVWHLLTRDEDYRDARADLVRTKQRALDRLAGRTPSGTRSSHRGATDSSHDRGRARLRGGDDPHHPTLHHAIGRVRLHDTPVPGAVAGQRLCHSGGQRLRHSGSRRRCHRDLGRRRQG

SEQ ID NO: 193593 - protein, 359 aa, unidentified
MAKARTLVGMDVHAASVVAAILDAETGELRFQRLGGGSDPVLRLVSSLEGPVRASYEAGPTGYGLARALEQSGIECVVAAPGKIPRGATERIKTDRRDAEHLVRLLLAGKLHPVRVPGPAEEALRDLVRAREDIRSDLMRARHRLSKLLLRHEARFSGRAWSERHRAWLSKLELGPDAAQATLVDYLGAVEALLHRKRELERQIAAAVPGSPWAREVGRLRCLRGIDTLTAVGLCAEIADFARFARAGQLMSYLGLVPAEHSSGEQRRLGSITRSGSRHARRLLVEAAWHYRNQPRVGVELERRQQGQPQAAVAIAWSAQRRLHRVWWRVQRRGKRSTLITVAVARELAGFCWSIARVE

SEQ ID NO: 193594 - protein, 320 aa, unidentified
MKDIAQAVILGIDVSRDHLDGYFLPDGKRFRLANTEEGHGQLIGLLASRPDVMVCFEATGGQEWRLWAALDTVGVATRQLPPAQIKAFAASRGTRAKTDRIDAELIARFLALRPDAGRQLPHEKLRLLRALCAKRGQLVEMRKRLLAQTKARLKNGSGDPFEGMDGELKALLGIQIVGLETQIEAAIAADPDMADTARILRSITGVGPVTSWMLIAEMPELGQISGEQAAALTGLAPIAHDSGAMRGKRAIAGGRRALRHVLFQAALVASHHNTRLTAFADRLRKRGKPHKVIIIAVARKLVTIANALCKSRQMWDDQTA

SEQ ID NO: 193595 - protein, 350 aa, unidentified
MTSMTSTRRVVTVGVDTHSDTHHAAVIDDVGRPLADAGFPTTPAGYRQLLAWAGEHGDVAAFGVEGTGAYGAALARHLRAAGQTVIEVDRPDRRTRRQRGKSDPIDAYAAAAAVLSGAAAGTPKTRDGRVEAIRTLRVARRSAIKGRTQAINQLKAVVLTGPTELRQTLGGQSTRQLLATCRRLRVTECLVEAADPVTAATKLTLRRLARRIAALTEEIDELDADLQPLVTATAPALMAVYGVGTEVAAQLLVTAGDNPDRLRSEAAFAQLCGTAPLPASSGRTTRHRLNRGGDRHANYALHIIALVRLSSHQPTQAYAARRRAEGLSNLEIIRCLKRYIAREIHHVMTA

SEQ ID NO: 193596 - protein, 392 aa, unidentified
MVVSVGIDVSKDKHDCFIVSSEGEVLADAFTIPNTIDGFHCLLQRIQDCTHAQDKIKVGLEATGHYSYNLLGFLLDNGLATYVLNPLRTNLYRKSLSLRKTKTDRVDARTIASMLLSDAGLKPYTNTAYHNEELKSLTRYRFDKVKERAKLKSSIARLVCILFPELEKFVPSLHIASVYALLEEFPGAKQIAAAHLTRLKTLLETTSKGHYKRDMALEIRDASRNSIGSWMPAKSLELQHTIRLIRELDHEIAEIEEQIQSIMDELHSPITTIPGLGFRMAAMILAEVGDFTRFDSPDKLLAYAGMSPSTYQSGQLKNCYPHMEKRGSRYLRYALYNATKYVCHWDPAFAAYLAKKRAEGKHYNIAISHAAKKLVRLIFAMEKSRQPYCSAA

SEQ ID NO: 193597 - protein, 457 aa, unidentified
MSQTKRSRKSRGLFPVHPAAAAIDVGAALHVAAVGPDRDKEPVRTFRTFTDDLHRLADWFAQCGIRTIVMESTGVYWIPVFEILEQRGFEVMVVNARDAKHVPGRKTDVSDAQWLQRLHEYGLLRASFRPEAEIAGLRTYLRQRERLLDYAAAHIQHMQKALMQMNLQLHHVVSDITGVTGMTIIRAIVAGERDPNVLASHRDRRCHASVEMVCQALVGNYREEHVFALTQALELYEVYQTKVTACDEQIEAILKRLKKNAPPPASKLLPVRQRTHQPNAPAFDARGALHAILGVDLTQINGLGPYLALKLVGECGTNLAAWPTAKHFTSWLGLAPHNKISGGKVLSSKTRRTSNRAASLLRLAAGTVGRTDTALGAFYRRLSARVGKAKAITATARKIAVLFYNTLRHGMAYADPGATYYEDRHRQRVLNNLQRRAKSLGFVLREAGLDTARADVS

SEQ ID NO: 193598 - protein, 363 aa, unidentified
MLTIADAGRLVTGGVDTHAEVHVAGVADQAGRVLGTREFPATAEGYAAALAWMRGHGDLVKVGVEGTGSYGAGLARYLAGQGVEVAEVMRPNRQARRRRGKSDTADAVAAALAALNGEASGTPKSGDGAVESIRALQVARRGAVKARTQAGNQLRDLIITAPQPLRDKLAALPAAQRVKLAARFRPGDLTSPAEAAKAAMAAVARRHQALTAEIAQLDTALQALVEHAAPAGFLARTGVGTRVAATLLVTAGDNPARLRTEASFAALCGASPVDASSGKQRRHRLNRGGDRQANSALWRIVFTRMATDPRTQAYVARRTTEGKTTREIIRCLKRYVAREIYKTLTADTRKQHQATQITHDHLT

SEQ ID NO: 193599 - protein, 338 aa, unidentified
MTFYAGLDVSDKSTHICLVDEAGAIAWRGTCATDPQVLSETLGKRCPDVARVVLETGALSAFLYHGLIERGVPAVCICARHAKGVLSTRVNKSDPHDAEGLAQLSRTGWFKAVHIKDGATHLDRTHLKVREQLVKGHGAMKNQLRGLLKLFGLRLGSATTPSKRAERLQALLTDKPELRAALAPLVTALAALEEQIAVSTRALKQRVAADPICARLMSVPGVGPVNALTFKTSVEDPGRFARGADVGAFAGLVPRRHQSGERDTKGRISKAGDAMLRRALYEAANSLLGRVKRDCALRRWGLALAATKGAKRARVAVARKLAALLHTLWRSDTSFRWA

SEQ ID NO: 193600 - protein, 446 aa, unidentified
MEPHLCVGIDVGCKAHRVGIARPDGSILEEFDISHNDVGFQEFFRRVEAHRQRMDLPVAVAMEGFNGYARPLDRLVLDNQYRLYNVNNMKLAQFKKIFPGPAKTDAIDARKILELFILKEHLPMAKDALQEVTVAPAVNDKLKRLSRRRRHLVNERVRVINCMQADLQAVCPELLAITHSVSNVWFLRLLTFRNDLRQLARLRHSTIHQIPGVGEKYVGIIREWQGKARFSGEVEYVGPMIIADARRILELRAQIHALDEAMAKLAVDSEIARRLSTIDGFGKTSTAELAGEIGTQRRFAAEASLALYLGMSPLTHQSGQMSTTRSPRQVNRRAKAAMMTAVAHHIRCVPQSKVYYDRKRAEGKTHNQAVRALGRHLVRVIWPACANGRQGDAPRRSRLRNPGGHPPRALKIQEGCSDLVFFDSPRARVNPWHDHCELSLRELCTS

SEQ ID NO: 193601 - protein, 385 aa, unidentified
MAKQIFKYSVGCDISKDTFNVCILEVDQEMESKVKASHKFNNETKGFKEFESWVKKHKRHDVQTGFYMEATGVYYENLAWYLFEQEYNVYVLLPYKTKHYLKSIGIKSKNDKIDAQGLAHMGAQQKHNPWRPHSKSIYTLRSLTRQHENVTKLKTSLENQLHANEHSAVRNVTVKKQLNATIRLLKKQLGELADEISNLIDADEKLNKKYCHIESIRGISKLSWATIIAETSGFETFENQRQLVSYAGYDVVENQSGKHVGKTKISKKGNSRIRRILYMPSLVSVRLKEPALFNLYQRVHERTGIKMKGYVAVQKKLLVLIYHIWKNNQAFQSDHSKTFGEEKSKLLFPFGFGETIKESSPDKRATQDEHSYELSSKVLFPLAQI

SEQ ID NO: 193602 - protein, 401 aa, unidentified
MQDTQQRDAVDVFIGVDVGKGHHHAVALDRSGKRLYNKALPNDEAKLRALITELKTHGRLLFVVDQPSTIGALPVAVARAEGVLVAYLPGLAMRRIADLHAGEAKTDARDAAIIAEAARSMPHTLRSLRLADEQLAELTMLCGFDDDLAAQVTQTSNRIRGLLTQIHPALERVLGPRLDHPAVLDLLERYPSPAALAGTSEKTLANRLTKLAPRMGKGLAAEIVQALSEQAVTVPGTQAATIVMPRLAQQLAALRQQRDEVAAEVERLVLAHPLWPVLTSMPGVGVRTAARLLTEVAHKAFASAAHLAAYAGLAPVTRRSGSSIRGEHPSRRGNKVLKRALFLSAFAALRDPISRAYYSRKIQQGKRHNQALIALARRRCDVLFAMLRDGTIYQPKSVPNA

SEQ ID NO: 193603 - protein, 398 aa, unidentified
MYLSEEVTIMYENVKKVIYVGIDVHDETFTCCFYDPDDKQAKKGLRTVKIFSSAAQVRCCLADFCKDNPFNMSGFTFRCAYEACGYGYELARSLHSSGIDCVLLAPSTINEYHNNQRIKTDKRDAFTIAKSYANGEASPVHIPDKHDEEVDNLIRVRDMYKDTAKRYKQQIIAFVKRLGYKYEKHGHYWTQRYMKWLADLPLSTVNRYVLDNLLNSLAQTMDSLADFDGQIAFIATNDNRYKEKVQRLRGLFGIDTYTAMAIVVKSGDFKRFAKAKSYMAYLGLIPGEASSGGTVHKKSLTKTGNPRLRQLLTESAQCYLRKPNLLKSKAFKKRQEGLPEEFITYADRGLMYIVRKGKKMLYNKKNWNVIVSALARTLAGFIWGAMTTHLDRNPKAAA

SEQ ID NO: 193604 - protein, 416 aa, unidentified
MEVIVSRCAGLDVHKNTVMACVRVPGPNGGRTSTVRQFRTFTAGLRQLRDWLVAEQVSQVVMEATGVYWKPVWHVLDPTAGLELMLVNAYAVKNMPGRKTDVADAVWLAELGECGLLRPSFVPPPVIAQLRDLTRYRKKLIEERARETQRIQKLLEDAGIKLDSVVSDILGVSARQMLEALIAGVRDVAALAELARTRMRPKIPQLRQALEGRFGAHHALMLRMHLEHVDQLSVSIDRLDSEVDRVIRPFSNALQRLITIPGVGRRTAEVIIAETGADMRRFRTAGHLASWAGMCPGNHESGGKRRSGRARKGNAALRAALCEAAWAASHARSGYLPAQYRHLLRTFGKKGQTRAVFAVGHSILVIAWHLMAHDRDYADLGGDHFTRATDAEARERYLVRQLEALGHKVTLEPAAA

SEQ ID NO: 193605 - protein, 467 aa, unidentified
MTPRAGKEFRRSAQAEDLAITHRHAAGIDVHSREHFVAVAAEDVPAGFVNVDDKLPAGVRKFGTNTGDLEALAAWLKDCGVTTVAMESTGVYWIPLYDLLASQGFEVLLVDPRQTKHAPGRPKSDVVDCQWIRRLHSYGLLTGSFRPGDEIIRWRGLQRQREMLIRYGAMHIQHMQKVLEEMNVKLTEVVSDIVGQTGMKIIKDIVRGERDPLKLAKHRHASCKRTEGEIASALYGNWRSELLFALKQALKLYEFYQKQLRECEGQIEAWLLALKDKSDGRPLPPSLRKRKPEKNEVRFGARALLFRMSGVDLTQIEGISETTALVVLSELGTDLSAFAHEKNFVSWLGLCPQHRGSGGKIFKRRIRRGANRVARALRMAAQGCHHAKNALGAFYRRVQSRAGGPKAIVATARKIAERVYRMLKYGQEYVRQSQDLYEQAYQQRLHKSLAKKAASLGYKLVPETMTP

SEQ ID NO: 193606 - protein, 497 aa, unidentified
MARGESTTTKKAKQRKAYRRRKARGQARAARAQQVEAARVAGLPVTQPHAAGIDIGSRSHWVCVGCCGNDRGDLLQEFPAHTEGLHQILAYLRQHGVTTVAMESSGVYWIPLYELLEGHGFEVLLVDPRYTKQVKGRPKTDRLDCQWIYRLHSVGLLAAAFRPDEKTCQLRSYLRQRANLIRYAGQHIQHMEKALEQMNLKLTEIVSDITGVTGGAIVQAILRGTRDPHKLAKLRHRRCKASEAEIAQALNGSYRAEHLFALRQAYEAWQFYQKQVGAVEEQIEQQRGRMKQDRALPPLKPRPRNGGRKPNQPRFDVRSALYYVVGIDLTEIEGIGEQSALTIISEIGPEVSRFATVKHFCSWLGLCPQLQKTGGRVRSSRTRPGVNRAAVAFRLAANSLYASKGALGNFLRRQKARLGAPQAVTATAHKLARIVYFALKHGLAYVRQSQEAYEVRLREQQVKAVKRKARQLGLEVIDKPAPAAAAETAATPAAGRR

SEQ ID NO: 193607 - protein, 326 aa, unidentified
MNKFTQYYGIDISKDVFDVMDQTGTHRQFENAPAGFLKFKKHLKSNCCCVMEATGVYQVQLADFLYANNTFVAVINPLVIKRFIQMNLRRLKTDKADAEMICLYAQMNPLMGYKPAPVYVTESRILVENMDLLIKSRTMLKNRLHAIKYKSRKQRAILINPIKKSIKELTTQIDRLETELKRLIQANEPDLFTRLQSIPGIGKSTAMFMIIISEGFKKFETAKQFTCYIGLTPVQKQSGSSVRGRSRISKQGNGKLRNLLFLCSFNACKYNKACRELYERIIHKGKSKKLALIAVANKLLKQSFAIAKSGLIYHEDYRSVLNVSRN

SEQ ID NO: 193608 - protein, 345 aa, unidentified
MNHVAIDLGSKESQVCVRLPNGDIELEKKHPTSRLPELLRNLTHSRVILETSSEAFRIADAAIAAGHEVRVVPSTLSKQLGVGERGVKTDLRDARALSEVSRRIDLPSVHIPSEAARFARSVLCSRQIMVESRTKLINHVRGWMRTQIWKLRGRGTATLPKRLRDQATEDSTRALPEHIEAVLTTIETLTAQMRRSDQQIKQLARSNTVCVRLMTMPGIGPVTSLAYFAALDDHKRFAHAYRVASYLGITPGEDSSSDRQRRTGITKAGPSWVRRTLVQAAWTALRTRPNDPMVRWALKIAERRPLPVAVVALARKMSGIMFALWRDGSTYTPEKGAQMMEQPTS

SEQ ID NO: 193609 - protein, 388 aa, unidentified
MIQVDDLSRSLIAFEQISTLVIVVELSQSSWLAAGVVPGIERRPLKKLDPDPTALLHLVEGWRDRATKAGRAITRTVLAFESGRDGFWLARWLRVHGVETFVMHSTSVAVSREPRRAKTDRLDTEMLIRVFLGWLRGEPRHCKMVAIPTLEEEDARRPSRERESLVGERTRIINRMKAALVRLGIRGFKPGLLTAPQKLDALRTPEETPIPPNMLDEMRRDMARLAWVREQINAIEQARLERLERAPATGRHAMVRMLARVIGVGVETADMLVQEVLSRNLRDRRAVARYAGLTGSPDESGSKRREQGLSKAGNARVRRGLIQLAWRFLRFQKDSALAQWYRGRTEDAAGKRKRTMIVALARKLLIALWRLATIGEIPVGVALRPAVA

SEQ ID NO: 193610 - protein, 392 aa, unidentified
MSQKVEQVIIGVDPHKLSVTIEVVGQREQMLGSGRFTTDRAGYAAMRSYARKWPDRVWAVEGSNGAGRPLAQRLLEDGEYVVDVPAKLAARVRLFDTGHNRKTDAHDAHAVAAVAVRTTTLRVLQHDGELEALRMLTDRREALTRRRVQTVDRLQALLAELLPGQAKRDLTTGQAKTMLASVRPRDIAGKTRRRIASEELAELVSVEAKIKKATAELKSIVLARGSRLMDLHGVGPVVAARVLADVGDVTRFADRNRFASWTGTAPLDASSGEQNRHRLSRAGNRRMNHMIHIAAISQIRLDTDGRAYYRRKRAEGKKPLEAIRCLKRRISDAIYRQLLEDAQRAAVEDVGTGPGGHCRASQKSSAVDLPLLIDTSDQPLPGPADKTLRRTG

SEQ ID NO: 193611 - protein, 374 aa, unidentified
MTTASASVTVIGGVDTHKHTHYAAAVDDQGRLLGHREFPANDGGYQRLLGWMRSHGQIAAIGVESTGSFGATLTRALSKAGERIVEVNRPNRVARHMDGKSDRLDAEQIARAVLGQTSTATPKTKSGMVEVIRTLRVTRGSAVKARTQAFNTLWGVMIGAPSPLRDELVMLTKRTLVNRCLRLRPDTEDFLVLAGDPDRLLLAGVKTALRNLARRWKALDAEIKALNHQIEGLVRVTAPALVELHGVGVEIAGQFLATAGDNTDRIRNEAAFAKLCGVAPQPASSGRSSGRHRLSRGGDRAANSALYIITIVRMRHHQPTRNYVQRRTIEGLSKREIIRCLKRYIAREIYAALPRPSSPSPPVLAIPEPTTPSV

SEQ ID NO: 193612 - protein, 350 aa, unidentified
MIIIGCDYHPGFQQIAFVDTDTGELNERRLGHREEAEQFYRQLKVSGKQVRIGMEASGHARWFERLLSELQFELWIGDAAAIRAKRVRKQKTDRQDAQLLLTLLLEDRFPRIWIPNPENRNLRQLLWHRHRLVQMRTRVMNQLHVIALNEGVRLKKALWRPAGRAQLESLELACWSSRRRQDLLDLLDQLTAKIQELTRALEAEVEKRPVARRLMTHPGVGPLTALAFELVIGTPERFGCGKQIASYVGLVPSEESSGDRRRLGHISKQGNSLLRFLLVEAAQVTVRTNPDWRRHFLHLAMRRERRIAKVAMARKLAVRLYWMWRKQWDYEQMRKFGSHVGEPGNRQGVS

SEQ ID NO: 193613 - protein, 391 aa, unidentified
MDRQRTVAGLDVHKDSIYLCVMGHDEAIIFQKTYGTLTPGLRQMCADMVAHGVTEAAMESTATYWVPVWNALCDSMSLKLVNPYFIKQLPGRKSDVKDAQWIAECLLKNLIKGSFVPDGVVQDMRKYNRRIFDLNDDMVYNTNKLDAALQRCGFRLSNYVTKVKGKSYRSCIAAIINGTTDQAELVKLVHGKTVNKHGRDVIMAAVTADFHQADIDLIRQYKEMIDIIERQIKDCQSALTALCRKHFPTQYERLQTIPGVKERAATAIIAETGADMSHFQKSTNLVGWCGLRPRNDESNRKIKSNKITHGNKFLRNILIEIAWTASRTRNCFFSNFSYVQCTVRRKTKMKVQVAPQPKAERRCKTLNISDIRCFLHLRGKAKRSIHTNPAG

SEQ ID NO: 193614 - protein, 289 aa, unidentified
MAIAIGIDVHKKTSTFFAYGEDGEPLEEFNKRFKRVASNRDGYTEVLVWLGNTDCDFLMENSTKTHDVYWILQGLGYKNLYVAHSVDLKRITKSSKKTDQFDAEKLATYMRVKQQNIDQFRTCYICTPEDMRIRRLCRIAKQELFDMGRIRRRIRSHLLLTGREWMGGLNTKWECEALMNEDDPGLRHLGRQLNECRLRRDAAEEAVVEAIKGNEKMFPIYEKLKEIPNFGDITAAYLAAVIVDIDRFENPKKLAAYLGIVPRMRDSGETENHCGLTRSGDPAARWLLI

SEQ ID NO: 193615 - protein, 356 aa, unidentified
MRREYQKGKVLARGKDVYIGIDVHKEKWHVTARIEGEEIFHGSMLSEYQCLSKFLERFKGSKIKIAYEAGPCGFGLYDKLTNDGIETIVVPPSLIPVESGNKVKTDKRDSRKLAKLLESNMLKKVYVLTEEDRANRELVRTRRQLMEHRSDVMRQIKSKLLFHDIKSPFPAKRGWTKQYVKWLRELHFEHEVVKVSFDTLIDLYEYLGSQLTRISKEIIALSQSDKYSHKVKLLRSVPGIGILIAMELLVELPDIERFKTADEIASYMGLTPSEYSTGQYVRQGRITRCGNTRARTCLVESSWHLIVKDLFWRGKYMKLKYRRGAKRAIIAIARNLIIRIRRILLNNEPYMVAKAA

SEQ ID NO: 193616 - protein, 361 aa, unidentified
MPKYSTAFGMDVHLRSTTVCALDADTGEAVTRRFPGNPWGEIAGWMGGFPGPSLAAYESGYPGFAPQRELAGLGVECVVAAVSKIPRSAADSASKNDRNDAARMAKAILAHDISPVWVPSPEVEGIRDLAGAYDGATARLATAKQRLLAFLAKRGFAYGGTTPAGNPRKYWTYDFLRWLDKVRPEDDGGVRTLAALRSEVEAAAEARADLLSEYRAAVDASPIAAEVAALQSIKGCAFALAAAFSAEVGDFTRFRSGRQVTAYFGLAPSQRSSGDSVRLGGISGAGNALVRKLAVEGSWCYAAARHQPKLMPRDTGVPLEIRMHGRKGSERLLRRREEMLARGMPQAKANAATAAELVRWL

SEQ ID NO: 193617 - protein, 477 aa, unidentified
MKSTAKKLSDLQAIPLLKQESLYIGIDIGKVRHVAGFVSLTLLERHQRFEACPALAFENSRDGFHALAERIRTLAPFEHCFALLEKTGHYHKALVQYLQELDIPVYVMHVQERPKAMMKTDKRDALGLANTLYNQLALGIQVSDKTQLVRRDVPPTPAAAQLKGFIRHRYELVHEATQRKNKLIAICDEVFPEFTRILHDPNGPTALALRERFPTPAAFATASLSALQEVRGKARCISDARLLELQRLATESIGTKDIVRQRGLVLEQTQLTRELRLLQEHIAQLESEITTIVAQARAGRILQSLGIGPIQTATVIAAIGSIENFPNAGCLKSYFGWSPTVIQSGSSIDYSGQTHGGTRTMKQMMFLIVSNLINRDTEWAKLYDRLVKTKCPYDERTGQRKGKLRIIGRVAGQLIETMYALLKTDAEVLSKVLPQTTPPEPTLYDPEKHRQHREGHYQPLKVAARRPVLTLLPYASE

SEQ ID NO: 193618 - protein, 402 aa, unidentified
MNSVGIDISKGRSTIAVMRPFGEVAISPFEVRHTDSELSELARRLKSLNGETRVVMEATGNYHAPVAKQLHDAGLYVSVVNAKLVHGYGNNDLRRVKTDRKDAIKLANYGLDRWLTLPRYIPEENTRLLLKNCYRQYRQYSKVQTVLKNNLISLLDMTFPNANRLFNSPARADGSEKWVDFVAEFWHCECVSERPLKSFVNKYWRWCRKHGYNFSEEKAHAIYDEASGHIGVMPKSETTKLLVEQAVSQLSATSAALAVLKQEMQSLSSQLPEYPVVMEMFGIGPTLGPQLMAEIGDVRRFYSKKALVAYAGIDAPPNDSGDVIGRHKSMSKVGASSLRRTLFLVMSVYLQNSPPNEPIYQFMNRKRAEGKPYRVYMMASANKFLRIYYATVKAYLEILEQI

SEQ ID NO: 193619 - protein, 335 aa, unidentified
MHYLYYVGLDVSKKTFDASLVAFEDANEMAHRKFANSRKGICSCLHWVEKRHGIRLDDVIFCAEDMGSYISEMAVCASDRTLNFNFSLISPLVIKYSMGIARGKTDRVDARRIAEYAITHYRKIALYLPAEKELCQLRTWLILRAHLAKQRVAKLVLLEKLDYKEKFADVSIQRSMLQEEIAYAETHMKTIEREMKELIAADSNICRNYKLLTSIKGVGPITAIVMLCSTLNFTKITDHRKFACYCGLAPFEHSSGTSVRGGCHTSSMANRDIKVQLNRSALIAIRCDPQLKAYYERKVAEGKHKFSVLNAVRAKIAARCFAVVRRGTPYVALQI

SEQ ID NO: 193620 - protein, 341 aa, unidentified
MQTFIRIGVDLAKNFFQVHAIEREGGSPLTRKLTRRKFREFFSKLAPCRVGMEACGSSHYWGRELRAMGHEVVLMAPAYTKPYVKRGKNDAADAAAICEAMSRPDMRFVAIKSADQQAVLMLHKTRDLLVKQRTMGVNALRGHLQEFGLIAAKGIHRVEDLIALARTDAGLPQEAKQAVEILAWHGEQLDAKIDALEKTIAQASAKNPTSRLLNEVPAIGPLIASAMTASVPDPSVFKSGSDFSASLGLTPSQHSSGGKEKLGAITKKGNRYLRKTLVVGCASVLRVAHKYKGALAEWIAAMKARKPERVVAVALANKLARICWAIMATGESFRQDMYTRA

SEQ ID NO: 193621 - protein, 341 aa, unidentified
MKQSMTIGIDLAKSIFFVVALSPSGKQLQRKKLRRSQVMPYLANQPQCTVALEACSGAHYWAREIQALGHEVKLLPPQHIKAYLRRQKNDYNDAEAIAEAAQHGRIRPVAPKTVDQQLDQNLHRLRRALVADQTRLINRTRALLAEHGVVIPEGKARFGSTVAALLEGDENSLPWRLRQLLGRQYQQYRLWEEELAWYTQEIERHAEQDEVCQNLISVPGFGPISSSAFRSWMGNGQQFKCGRDAAAALGLVPRQHSTGGKSILGGITKAGDRYLRALLIHGARAVIRYASKHNDRLRQWVLSLVERRGYNKATVALANKMARIGWAVIARSRRYQPVPCM

SEQ ID NO: 193622 - protein, 341 aa, unidentified
MEEVSTIGLDLAKHVFQAHGASASGAVVFRKKLRRDQVLPFFASQPRCRVAMEACASAHHWARAIGDLGHEVRLIPPAYVKPFVKRQKNDMADAEAICEAAQRPTMRFVAVKSEAKQASTVIFRTRDLLVRQRTQIINALRGHMAEFGFIAPQGASHMAQLMAQVEDPSFTLPEGARSCLMRLVTMLRDLQEEVEALDREIAARAKSDDVARRLMTVPGIGPLIATAIEALAPPPEAFRSGRDFAAWVGLTPVQKSTGGKQRLGRTSRMGERTLRRLLIIAASAVVRWAKRKGVPAGSWLARMLARKPPMLVIVALANKNARVAWALVAKGGIYRAPAVAA

SEQ ID NO: 193623 - protein, 382 aa, unidentified
MTEVQMVPTNDTIRNDRLYIALELSNTKWKIAFGNGFKIRLKSIEARDIEQFELEVQRTRKHFGMAENIPVFCCYEAGRDGFWIHRYLCTLGIHNLVVDSSSIEVNRRSRRAKTDRLDAGKLLTMLIRYINGETKLWSVLRVPQKDHEDARRLHREIERLKKERTAHTNRIKSLLALHGVVMEMGIGKTFPEYIEKVVLWNGEHLPSRVKEEMIREYRRYDLIQQQLQASEQEKKEALKRESESSKKVLTLQNLKGIGPVSSWVLVYEFFGWRLFKNVKEVGAAAGLAPTPYDSGGSQSEQGISKSGNRRVRALMIEVGWYWLMHQPKSKLSQWFMERYGQGGKRMRRIGIVALARKLLIALWKYLEQGIMPEGATVKAYFD

SEQ ID NO: 193624 - protein, 406 aa, unidentified
MVDITVSDFMKGRYNLMIYVGIDIAKLNHFASAISSDGTELMKPFKFTNDGDGFQMLDSRLSALSYEDDSIIIGLESTAHYGDNLVRYLVACNYNVCVLNPIKTSVMRKDNIRKTKTDKVDTFIIAKTLMMQDSYRFVSFYDLDLMDLKQLGRFRQKTIKQRTRLKIQLTSYVDQAFPELQYFFKSGLHQKAVYALLKEAPSPQGIASMHMTHLSHLLVTASHGHFKKEQAKELRVLAQKSVGASDSSLSIQITHTIAQIELLDSQLNSVEAEMTEIMKFNDPVIMTIPGIGYINGGMILGEIGDIHRFPSPSKLLAFAGLDPSVYQSGNYSARRTRMSKRGSRVLRYALINAAHNVVKNNATFKAYYDKKMAEGRSHYNALGHCAGKLVRIIWKMLTDGVEFNLD

SEQ ID NO: 193625 - protein, 367 aa, unidentified
MTLSVRPIGWADQRGTNVAPPGTRVFMAIDVSRTKLVYCVRWEGGERRLSTPMDLGCVQAEVQRYRECRLRVAYEACGFGYEIAWWLREQGIDVTLIAPSSVERAPGRQVKTDRIDAGKLAQKLERGELKGIYVPTRVQHQQRQVLRSYRQCTKERRRAQIQIRALMQEHGRLGPDRKQGWGRYQRWLPTQELSAPLQACVKALQEMRTVADEQAKALRAEATRLTRLPEYRGLIKALSDEAGIGPLSALQCVLELGTIQRFRTTDSLPNYLGLTPAQYSSGELDRRGHILKCGPVMLRTLFVQCAKAALRSRKGAELSAMYNRLAPRIGWKKARVAVARKLATRFRQRWIEFERAATPPTTPQAAA

SEQ ID NO: 193626 - protein, 388 aa, unidentified
MQAANHQLEDRTAIRTDLGAIFVSLELNRSTWLITSLSPGSGEKMSKHSVPGGDIAGLLLRFSQLKAKVRGRTGKDFSVIVIQEAGLDGFWIHRVLEREGIESHVVDAASITTSRRCRRAKTDRIDGEALVRALLAYKRGEPRVCAMVQVPTPEDEDRRRIFRERKALTAERVAHVNRIKGLLFSQGVEYEPLHRNRRARLEELRTGDGRSLPDHLKRQISRELDRLELVLEQIKAVEAERDAMLATAKEQEVPTPAKMLMDLNGIGAEFAMGLWSEGLFRHFDNRRQVAAYAGLAPTPWQSGTVDREQGVGKSGNPRLRTTMIQLAWLWLRHQPDSALSRWFHERVERNGGRFRKTMITALARKLLVALWKYVTAGVVIEGARVRTA

SEQ ID NO: 193627 - protein, 375 aa, unidentified
MGHHTEAFIGIDTAKLRNAVAVAEAGRNGEVRYLGEVDTSAAATRKLVARLATKYAKLTFCYEAGPTGYGLHRQIESLGHTCLVVAPSLVPKKAGDRVKTNRRDAEGLAKLLRAGELTSVWVPDERHEAMRELARARDATRQDLTRKRQQVSSMLLRLGRHYPGIKTWGARHRSWLASQKFVHTEQRLAIEELLLAERQAAERIARLEQAIRAAVADWSLAAMVPALMAMRGIDLISAVMILAEIGDLSRFENPRQLMAYLGLVPSERSTGDSVRRGPITKAGNGRARRVLVEAAWAYRHPPRVGYEKQAQVAAAPVPAREIAWKAQVRLCARFRLLSRKGKKSTVIATAIARELAAFIWAIHCEVIGSRPVRSP

SEQ ID NO: 193628 - protein, 370 aa, unidentified
MLDTTTFVGLDVHARSIKAVSLDVMTGEVRCATFGYDAGAVAAWVRSVDPKARCVYESGVTGFDLQKRLSGLGVDCVVGAVSKMIKPSADRRRKNDRNDAEFLARMLSVGNVVEVWVPDDECEAARDLTRALEDARDDLSRSKQRLSKFLLRHGLVFDERTPTGRRKGNWTRAHWSWIESIRFAEGADNEVLAYYVDAVRRAAEEKARLEGLVGAEARKPRWRRRVDSLRCLKGVDPAPAADLVFEAGEFSRFRNARSFAAWVGLTPSEHSSGESDRRGAITKAGNRHLRKTLVEAAWHYLTCSGRPKDLARGQAPDPAARRHAAKGVRRLVDRREALLARGVHSNKANVATARELACWVWAVGLMAEEA

SEQ ID NO: 193629 - protein, 369 aa, unidentified
MNDITYVGLDVHKATVCVAIAESGRGGEVREVGIFENRPDVLRKMVARLGKHRRRLNFCYEAGPCGYGLHRLLTGLGHDCVVVAPSLIPMKAGDRVKTDRRDALMLARLHRAGELTPIWIPDAAHEAMRDLVRARATAVRALSKARQHLQGFLLRHDRICHGARAWTLAYRRWLTTVRFDHPAQQIVLQDYIHTVEDAECRRDQLTRQIEELMPTWSMAPVAAALQAMRGVALVVAVTVVAEVGDFRRFTNARQLMAYLGLVPSEHSSGSTVRRAGITKAGNALARRVLIEGAWTYRMSARVSRKLHDRLEPLSAAIRDIAWKAQVRLCARYRRLAATGKPKVVVTTAIAREMVGFIWAIACVAQPELT

SEQ ID NO: 193630 - protein, 472 aa, unidentified
MKLLYRRCAGIDVHKKSISVCVRLRVRGNREAETEEAVFGTFTQDLERLGQWLRERKVRHVAMESTGVYWIPVWNILEKKKWKLELTLVNPATVRALRGQKTDRIDARRIAEYLQYGLLRGSFIPAKPVRHLRELTRMRVHIQNDRNRVINRIGRLLETVNIKLGSVASNIVGKSGRAILDRLSRGEGRAEELAELALGSLKKKIPDLVLALDGCTDEHFRWMLKSLLKKLVSQDMELSEIDARLCQKYARHEEVLRRLCTIPGVEMTTARILLAELGTDMNQFPTAAHAASWAGLCPGNAESGGKRFSGKTRKGDRYLRRILVQSAWAAARTNDCALAESFRRTAHRRGLKKAALATAHRILRIAYAIIRNGTEYVEHGGNRLDQLHPERTARKLLQRLERIGFEIEIKSGRGRPLGSKNRPKPAVVILDRVPESECVRCFAAGVRGACVHLIRRRKKTISANFNPSTPTT

SEQ ID NO: 193631 - protein, 418 aa, unidentified
MKKHNNSGKKSEPTSKRAKPRGPIRRDTKDVLAELVGKLKEKLDPKKLAATTAGEKHKRGELRPNLDRLTVGVDLGDQWSNYCILGLEGETLAEGQLRTTQEDLAEFFQALNAARVVFEVGTHSPWVQEVIGGCGHEVLVANPRMMDGSKRRKRKNDRIDANKLARLGRVDPQSLHPIQHRSREVRQDLAVLRARDAVVAARTELINATRGLVKSMGTRLPNCSSPSFAEKVEGTVPAELREALLPLVRMAAALSDCIQEYDEKIEKLGHEKYGHTALLRQVKGVGPITSLAYVLTLENPDRFAKSRDVGPYLGLVPKQEDSGEIQPQLGISKTGDTMVRKLLVGSAQYILGPFGPDTDLRRYGLRLCERGGKNAKKRAAVAVARKLAVLLHCLWVSGEVYEPLRQGTSATIAPAVAA

SEQ ID NO: 193632 - protein, 355 aa, unidentified
MNQEKYIGMDVHQATISVAVMDSSGKLIMECILETKAATILEIIAGLRGTLSVTFEEGTSAAWLHDLLKPHVSHLVVCDPRRNALLKDGSKSDGIDARKLAELLPGNKLHAVYHGEHGVRTLKELGRSYLTITKDLTRVMSRIKALYRSWAIPCSGTTVYAPRHRAEWLAKIVEPGVRQRAERLYQQLDLLQPVRQEARRDLMVESHKHHAVKLLRQIPSIGPIRAALLVALLQTPHRFRTKRQLWAYSGFAVEIHDSGEYRFVRGKLVRNRERITVRGLHHHHNHDLKNLFKGAALSASTRPGPLCDFYVALVEKGMRPTMARLTLARKMAAITLTIWKKGVDFDAKQLNRQAA

SEQ ID NO: 193633 - protein, 390 aa, unidentified
MDRRKKRRAPGWVGIDVSKDVFDVAIWGDQAFSAMTLAQFKRTKKGTEAFVRWLASQPRKPAGIVMEWTGGYSRELAEWLHRLVEGVPVALMNPCLVKAFGKSLNLRNKTDAVDARLLAAFGQERRPSGWVPPTPEMDQLQSVFRTRAKLVEMLSALKTRDESCLNLAPQAEKAQTEVIELLTAKVKALAAAGEALATRHSCLAGDFSLLRSIKGVGPITVMAVLAEAGDLRRFRRGRQLTAFLGVSPKRYESGSSVRGKTRMCRIGGTHVRPVLYMAAVSVATRKGPLGDFYRRLVAAGKPEMVAIGAVMRKMVLIMRAVLIRNKPYEVMDQDHQQGMERPARPEGKRKSPGGGHDPVRDRGRLQGGQASARQEDGPSKKTRRVPLDNP

SEQ ID NO: 193634 - protein, 387 aa, unidentified
MIYVGIDIAKETHVAAAVDSDGVIIIEPFSFTNNHEGFKLLRSKLDTLDRDNLLIGLESTAHYAENVIFFLHGCGFELAVINPVQTAAMRKTGIRKIKTDKVDSLLICKTLMVNSFRHYTENDIKTLKLKSLCRFRQNLKKSKARLKIQLTSYVDIIFPELQSFFKSGLHIRTCYELLKAYSSPDDIAALHLTKLSNILSKASRGRFGKQDAQSLKSLAMSSVGVKSTYISIQITQTIAQIELIESQLAELETVIEAAVDELDSVIMTVPGIGKLNGAMILGEIGDIKRFSDSSKLLAYAGLDPVINQSGKFNAKRTRMSKRGSKLLRYALINAAWNVSLNNDTFKRYYDSKIAQGNSHYSALGHTAHKLVRVLFKLLNDNIPFALA

SEQ ID NO: 193635 - protein, 411 aa, unidentified
MDVVHERCCGLDIHKKLIVACTIVPGRGRQLQRQLRTFGTMTDDLQHLSDWLSEQGVTHVAMESTGSYWKPIFNMLEDRFELVLVNARHLQAVPGRKTDVKDAEWIADLLRHGLLKASFVPDRQQRELREVVRYRTSLVQERTAAANRLQKVLEGANIKLAAVATDILGRSGREMLEALVAGQTDAAALADLARGRLRDKQPALERALAGRFGPHQRFLVAQILAHIDFLDERLQQLDTEIGERERPFEEVLDRLDTIPGVARRVAEIIVAEIGPDVHRFPSPGHLASWAGLCPGQDESAGKRRSGKTRKGNRSLRTALVQAALAARRTKTYLAAQFRRLASRRGAKKAAVAVAHSILRIVYHLLIDQHPYEDLGELYFDNRQKDLVSQRLVRRLQRLGYAVHLELTGSAA

SEQ ID NO: 193636 - protein, 353 aa, unidentified
MTDTPSIAWLGLDAHSRNCVLAQLDDQGHEIHHWRFPTDPRQLLRHIQAIPATVKRLMLEESNLARWISQLLKPHVQQLVVCDARRNRLISHDANKHDRRDAFALARLLRLNEYRPVWQPTDDQRVLFKRAAQAYENSVLRQTRLKLQLKSLFQHWGLFPTGATVFSQAGRSAWLQQLPYEALRAQARLLYELLDQALAGQARARRLLCQAGRPFPEVQHLRTAPGIGLVGAHLFVAYVQDPHRFAKFSRLSKYCRLSIRDRTSDNKPLGFKQLDRQGNGVLKAISYRAFLQAAKRRSGPLWDFYQASLRHTGSTTHARLNTQRKILLVLWTLWLKDKDFDPNQFSRSQPIDV

SEQ ID NO: 193637 - protein, 422 aa, unidentified
MSYCPVAGIDVSKRFSDMCILSPDNKIFAQEKIYHDETSINRANALLQKAERLFFSKPVIVMESTSHYHLILFQFFSEHGYDVIVVNPLQSNSMKDFSIRKRKTDRVDAFKLAMMYRTKTLRPSQIPQTATRALRQLCRHRAELLNDVSSYKNRLTALLDQTFSGYDKVFSDVGGVTSCAVLVRFPTPTILLVEEESELVEVIAAASKSGYSFAKKKAGLLISAAQKAQTLGIHSCADETLIVCTIQMLRTLSESVLQIETAIDNLLAQIKEMRNNVSLLQSIPGIGSHSAALLLGEIGDISLFKKPKQLAAYFGLDPTERQSGSFRGTKNKLSKRGSSYARAALHMGIVNSICKRGKDSAANPVLLSYYEKKCKNKPAKVAQAASMHKLVFIIFAVLRDQKPFELKTPEQHAVEQGFVKAA

SEQ ID NO: 193638 - protein, 370 aa, unidentified
MLDTTTFVGLDVHARSIKAVSLDVMTGEVRCATFGYDAGAVAEWVRSVDPRARCVYESGVTGFDLQKRLSGLGVDCVVGAVSKMIKPSADRRRKNDRNDAEFLARMLSVGNVVEVWVPDDECEAARDLTRALEDARDDLSRSKQRLSKFLLRHGLVFDERTPTGRRKGNWTRAHWSWIESIRFAEGADNDVLAYYVDAVRRAAEDKARLEGLVEAEARKPRWRKRVDSLRCLKGVDTASAADLVFEAGEFSRFRNARSFAAWVGLTPSEHSSGESDRRGAITKAGNKHLRKTLVEAAWHYLTCSGRPKGLAKGQAPDRGARRHAAKGVRRLVERREALLARGVHGNKANVATARELACWVWAVGLMAEEA

SEQ ID NO: 193639 - protein, 367 aa, unidentified
MKKGSTVAAKQGRNFTQQKLTIGLDLGDRASWYCVLEQTGAVLWEQRVSTAPKAMREAFGTVARSRIALETGTHSPWVSRLLAEFGHEVIVAHARNVRLIGESRKKDDRLDAQTLARLARIDPQLLCPVKHRSAKAQADLTVIRARAGLVRARTALVNTARGLAKSYGERLRSCNVRNMNPEKAEGLSPELQTALEPLLLAMESLSEQIREYNERIENMAQQSYPQVALLKQVKGVGTLIALTFLLTLEDPLRFRKSRDVGCYLGLQPGRRNSGQSEPQMHISKEGDPYLRTLLVQGAQHILGPFGVDCDLRRWGLKLAERGGKRGKKRAIIATARKLAVLLHHLWASGEVYEPLHNSKQNAMATAA

SEQ ID NO: 193640 - protein, 411 aa, unidentified
MEILHERVAGLDVHKDTVVACVRVQDGREVHEELSEWGTTTNDLLGLRDWLEAHRVQVIGMESTGVYWKPVFYALEDLAECWLLNARHLRNVPGRKTDMADAAWIAKLVQHGLVKPSFVPPKPIRELRNLTRYRKAQIQERTREAQRLDKVLQDAGIKLSSVASDTLGVSGRAMLAALVGGTRDPEALAELARGALRKKLPMLREALFGRFNANHALLVGEIMAKLDYLDEAIGRLGEAIDELCRPFEAELELLDTIPGVDRRCAQAMIAEFGVDMTRFGDSARLASWAGLCPGQHQSAGRNKTGKTRKGSKWLQMHLNEAAKSIVRSKGTYLSAQYARIKGRRGHAKATVAVEHSIVVAAYHILDRKQPYHDLGADYFLRRTDPEHHARRLARQIEALGFQVTVHPPEAA

SEQ ID NO: 193641 - protein, 480 aa, unidentified
MAEKTTARTGQRERLTRKQRRELGRRIWSAHPGLEVVHRDAAGIDIGSEEHYVAVGPDRDAEPVRTFDCFTEDLQRLAQWLKECGIGTVVMQSTGVYWIPVYDVLEQHGFDVWLVNAQDTRNLPGRKSDVQESQWLLKLHTYGLLRKSFRPEADIRALRTCWRERAEYVQQAGACIQRIQKALTEMNVQLSKVLSDLSGVTGMCILRAIVAGERDGRRLAKFRDARVKASQETIAKSLEGTWRPEQLAILQRQLADWDHVQQQIAACDADLETMMKQLPDAEIHPQPPAATPPGKSKRRQKNGRSSKNQPSFDLSRELKRVTGVDLTRIDGVKEMTIQTILTEAGLDMSKWPTENHFVSWIGLAPRNEVSGGKVLKRKTRKVVSRLATGFRLAATTLRASDSYLGEQFRRLRTRLGAPKAITAMGAKLARLVYRMLRYGQEYVDKGSAQYQAKYHEQQIRQLKKKAAQHGFTLVSTPDPA

SEQ ID NO: 193642 - protein, 346 aa, unidentified
MKHSVGLDVSVKETAICIVDEAGKVVREGKVATEPQAIIAFLSSAGVEYARIGLEAGPLSQWLVNGLSEAGLPVICVETRHMKAVLKAQQVNKSDRNDARGIAQMMRVGLYKPVHVKTLASQQARMLLTSRKLLRDKLQDMENELRGTLRNFGLKVGVVSAGHFEARIKELVAGQPPLEMIVVPLLTVRRVVREQLAKLDKMVLDQVRDDKLCRRLMTVPGVGPIVALTFRATVDQAQRFARSKTVGAHFGLAPRRFQSGERDYDGRVSKCGDAMMRTALYEAAQVLLTRTRTWSWLKAWGMQVARRRGAKKAIVALARRLAIVMHRMWVDGTEFLWRKEADTAAT

SEQ ID NO: 193643 - protein, 421 aa, unidentified
MKSTVARKLRQVPQGYLVMGVDPHKKKHAAVAITQDFTTLVKFKFDNSRGGFEMMLQRSRVEMAKTGCRGVIFAIETGGHYWRNLAYFLDERGIPFRFINQFTLKRRREGKDLNRRKNDYRDSEVAAQLLCTGKFTDSKLPQGVYAELRAAHNAYRRLVKERTRIINLIKGLLDSLFPEFTEVFKDPCALTAMSVLSTCPIPGVISGMTEEEFVAAIRAGHQGRLMRRKLRALHHIARTSIGIEASAWSVSMEISFLVEKFSLIKQHIRIIERTMVRLVDETEEGKYLLSIRGLNYIAVAGLLAELGSFKQYRSAKQLIKMAGSNPTESESAGKRGGHTPMSKQGRPVLRYCAWTSVIPMLRFNSDFRAWAKRRRERPVHANPLNGREVVGAALNRLLRLSFALVKKQTFYRVPEPARIAR

SEQ ID NO: 193644 - protein, 445 aa, unidentified
MRRPSEQSVESVSIMPNAAEIEFDWYVGIDGGGATHQVCVLDAAGRRAGERAVAHAGADLATLAAWLHQLAGPSLTRVAVGLESRHAGPVALCLEHGAAVFAINPKQLERFRERASAAGAKDDRRDAYVAASALRTDRGAFHRVVPDDARVVALRELSRTADELREDTRRLSNRLRAQLERYFPQMLTLAPAADEPWLWTLLERVPTPAAAARVREAAVARVLKAHRIRRVAAPEVLAALRAPALVVAAGTVEAVSAHVGLLVPQLQLVSEHHRRCLAQLEAAVTALAGPGTDPPSPPAPNAASPSPDALGTVVRLVRSLPGVGGVIAGALVAEAAGALLAGDYHALRTQGGTAPVTKQSGKQRLVAMRYACNQRLRTALYHWARISTQHDAAARQYYATLRGRGHSHPRALRSVADRWLRILTAMLATGTPYDGMRFASGVAAP

SEQ ID NO: 193645 - protein, 348 aa, unidentified
MHFYKGAHTFYCGVDLHARTMFTHVLDHAGVTVFARDLPARPDAFLHAIGPYRPGLVVGCECMFAWYWLADLCEDESIPFTLGHALYMKAIHGGKAKNDRIDAAKIAGLLKGGMFPMAYVYPRQKRATRDLLRRRCCFVKERSQLIAHIVNTNSQYNHPPLTAKLCYARNRTEGIAERFTDAATRVSIHADLKLIDHFDEQIDEIEQVVLKTAKIDDPVTLGFLRTVPGIGKILSLVMLYEIDQVKRFPEVGNFLSYSRLVRPEHESAGKKKGSGNKKIGNAHLKWAFSEAACLMLRAWPDAKKWLARQERKRGKRKALSVLEARIGRTVYHLCRKQRPFDPKRFFSS

SEQ ID NO: 193646 - protein, 339 aa, unidentified
MTEIKRIAIDTSKSVFTLHGVDLQDRPVLRRDLRRAAMIGFFTKLPPTEVVLEACGGSHHWARALTALGHRVKLIPPQYVKPFVKRGKNDRNDAEAICEAAGRPNMSFVPVKSAARQAELMVLRTRELLVGQRTQLINALRGHATEFGVIAAKGTGNVAALLEKIAADEDIPPVARQTLAMLGDQVARVETQLAQIDASLLKAHKANPVSLALAKIPGVGPITALTLATEIDPNHFKSGRHLAAWIGLTPKERSTAGKQRMGGISRAGHERLRSLLVLGATTVIQHAKPGSQSASAWLLQLLERRPRKLAAVALANKIARIAWAMMSTGEAYRGTPREA

SEQ ID NO: 193647 - protein, 376 aa, unidentified
MGTPSAQTLDDVGVREIFQELEEVPLMTMVGGLDVHRAQVTFDYVDDDGLVHWGQIRAATRKTLRGWLAEHCPDGDAEFALEGCTGWRYVSEELAGAGVGVHLGDPAEIAVLRGPKKRAKTDRADARLLRTLLLQGRFPESWIAPAHVLEIRTLGRLYCTLMDERRAWQQRIHAQLFHQGCPPVRALLSVTGRAALAGAELSAVGGQYVDTALGRIDELSTEIEPLRAQLVNFARHQTGCQALQRHYGIGWLCAAIIWAEIGDARRFSSSDQLVRFAGLDVTVYSSDGKRSPGHLSRQGSPELRWAAFEAAKCAARRGSPDYGYYRKLAAKRDGHNGKNPTLAVERKIVRRCHHTLRELGDAAVALPVAEPQEVAA

SEQ ID NO: 193648 - protein, 419 aa, unidentified
MSFKILKNNCCGLDVHKTWIFACIGITDSRSRTEYKQARFSSFSKGLQELCDWLAKYNCTDVCMESTGKYWIPVFNILEKNNVWVTLSHPKYTKPQKGNKTDRKDARWICDLYMCGMVKPSFIPPADIRELRDLVRYRYKLTCMITGEKNRAQNCLTVSNLKLDEVFSDVFGKSSRSITEQILQHSGEIFDVTPFVDGRCKTPIEEIQAAVDGAVSTEQAVKLKQCLNHIDELEMHKAEIDREIFRLSDKYEEALILIRTVPGFDKNPMTAIQVLSEIGGDMSVFPTAKNLVSWAGCCPRNDQSNQKIKSTRISRAGSYFKPVLVQVANALIKSKKNPEFTTRYRRIKARRGHKKAIIAICRMLLTAIWHILTDLKPYTPEGFLESRPVNESKVLTTSQALNLLKQRGYIIKDDVVPVS

SEQ ID NO: 193649 - protein, 400 aa, unidentified
MLSIGIDVSKGKSTVCGMKPGGEIVYTPFEVQHTREGMSELVSLLHNSGEEVRAVLESTGSYHCPVVAALLENGIFVSVVNSLRMKRFCSQSIRKVKTDRIDAMQIALYGLAYWQELQPTRLPEDTYRELQLLARQYYQMTSLLIKAKVDFNAICDQVLPGMQELMNDHAGRHKLSDFVLRYRHTTHILEMGETRFRKDYCKWAEKKGYRNCERMAALIFATAQNGIPVLPNAPSTQIVITEAIRVLHTVEASRDAILTQMQALAKTLPEYSLVREMPCIGDTLAPRLIAEIGDVRRFHSKRALIAYAGIDAPPYQSGKFCANNRHISKRGNRYLRKTGYEVMQSYVMHKPANDPIFTFIEKKRGEGKSGKLAMVAGLNKFLRVYYGKVTELYRSLPAIE

SEQ ID NO: 193650 - protein, 338 aa, unidentified
MEHQQQYVGIDLHRRRSVIVRMTGEGEVLEVVRIVNDPVALSLELAKAGPDPEVALEATYGWYWAADLLEADGAQVHLVHPLGLHWDARRVKNDERDATELAHRLRRGDLPESWIAPAEVRELRELIRYRAKLAALRTSAKAQIHAVMAKLGILPSMSDMFGPTGQALLDGMPFEGAYAIRVASLRGLLERYEDELVLVEHQLHGRLADHKGYNAIQALNGVGRITAAIMIAEIGDVGRFPDARHLCSWAGLTPTHRESDTKVHRGHITKQGSTLVRWAAIEAVARYHGGAPIAPAFTRIAKRRGVMIARVAAARKLLSLIFYGLRDGEIRCLAREAS

SEQ ID NO: 193651 - protein, 342 aa, unidentified
MSFYCGIDLGARESQICVIDKRVKKVLELKTANKLERIKQLLEPYKAELEIVVESTFNWYWLVDGLQAAGFKVVLAHTLGLHMITAAKVKTDRRDAFALAKLLLAGMIPTAYIYPAETRPVRDLLRRRARLVQVRAGEYGSLRRLLLRHGFLSQKQQEIKAADEADLEKWFSHPLVRLHASQELERIRLYSEQLAELEKTILAQAKKEWAFAQLQKLPGIGPIIALTIFYETGDLGRFASEKDFSSYCRVVPGVAQSGTVTRRGRGSKQGNHYLKWALSQAAVHAVRCYPRVRRYYQRQLRRHRGRARQMVAYNIVAHKLAQGVYHVLKERTEYREELLFGR

SEQ ID NO: 193652 - protein, 319 aa, unidentified
MDGSFSTFVGIDVAKHSLDACLLPEGRICSLAYDQSGLEKLRSELPAPGSCLIVVEATGGYERRLVADLLDAGHKVAVVNPRQVRDFARGVGILAKTDRIDASVIAHFGRSVQPRTVAKTPEKQAELEQLVLRRRQLVELRTGETNRLETVTSRPVRKNIQQLIDRLNKDLRKIEKEILAFLDSDDDWRGKAQILGSTPGIGTTTAATLLAELPELGQLNRQKISSLVGLAPFNHDSGRFQGKRRIWGGRASVRSVLYMAALTAKRCNPIIRDFAQRLEAQGKPFKVVMTACMRKLLVILNAMLKTNSHWNPTFSLVAS

SEQ ID NO: 193653 - protein, 458 aa, unidentified
MGKRNRKEREQKFRVVHRFAAGIDIGATFHVVAVSAEHDPEPVRKFNSFTTDLHRIADWLESIGITTIAMESTGVYWIPAFEILESRRFEVILVNARQVKRVPGRKTDMNDAQWLQQLHQYGLLAASFRPREQIASLRAYLRHRERLIEYAAGHIQHMQKALMQMNLQLQHVLSDITGATGMKIIRSIIAGERSAKKLASYRDIRCKKPEEMIAAALTGNYRPEHVFALKQSVSLYDFYQQQIRECDKEIELILTKLPGDKCPPAQPLSKARHRTKQKNEPDFAIRQALYTLLGVDLTQINGIGPYTALRLIAECGDDMGKWPTARHFASWLCLSPGNKISGGKILASSTRKTKNRASTLLRIAAVNIGKTQTALGAFYRRLSARIGKAKAVTATARKLAVLFYTLLRYGESYVEPGADYYEQQYKQRVLRNLTRRAKGLGFDLVQITENPAESMNVS

SEQ ID NO: 193654 - protein, 346 aa, unidentified
MSRVSFEQVILRGCGLDVHKDVVVATISGEGLSTETRSYKTFSSSLTELKEWLLSNGITHAAMESTGVYWKPVYKVLECPRMKVWVVNARHIKYVPGHKTDKKDSAWICKLLLAGLLKPSYIPEREQRELRDLTRYRNKLIQHVSSDKNRIVRILEDCNIKLSSVMSHLDGVVATKLIDILIDKGHVTMDDIACVYHKRLEASPELLYQACEGFIEPHHTYMLQTIRQDIEQTESIISNLTSRIKEVLSPYENVIDLLRKIPGLDRKTVEDLIAEIGVDMEVFPTEKHLASWAGICPGNNESAGKKKWKNHSWQQTVESRYYGGSLGSHPYQEHILQRTLPPFSRP

SEQ ID NO: 193655 - protein, 347 aa, unidentified
MLHAGLDLSRKKLDVCVLSDQGEHLDQLAVPPDVDSLRRLARRVVEVHRQPVCAVIESMTGARIVHDTLEQQGWSVEIADAQKVKGLAPLACKTDKIDSMVLAVLSHRDLVPAIWLPDPRVREERELARFRLHLVKHKSALKCRIHSTLINFGRACPVTDLFGVEGRRLLERLEVPEPWCSNVTASVELIDDLEEQIAGINRRLKDGHADHRYIPLLMSVPGIRWVLAFTIAGEIGEIERFSSPERLAGYTGLCPRVNQSGEKDRRGPLTKHGPTYLRWALLEATMHALRHPAYAERYQRNKRRLGKQRGAKVAQIDIARRLAHAIWHMLTRNQPFAPRGAAFRLAA

SEQ ID NO: 193656 - protein, 459 aa, unidentified
MKIRIGVDIACRSPHHAACADETGAILWSRHRFRTDVAELEALWARLPVDVDEVMVVMEPTRNAWVPLAAWFRRQGAVVVLVPSEQSADLRDYFSKHIKTDRLDAELLARLPVLHPDGLHLAETIGPGDPLKRAVKIREGLVHRRSTAMARLDSLLEILGPGWIDALGTRMTQTTFKFLASYANPHQVKRLGAARLARWFQHHSRKAWGPERAAAIIAAAEATLAIWGNEGLDFEALAADIAAEALIALEVSEQIALLDRRIHDLYLEADPAGIVRSAPGVGDILAGQILGRLGDPNRFASLAAARSFSGLIPKRNASGLSDHAGGPTKRGDACLRAAMFQAADRARKVDPTLAARYQRLMCDSRRHHNSATCTIAAALLTRIVACLRNGTLYELRDVDGRPITDAEGRAIAAERYPIPTEIRQARRSISKARSATRRDERVKKGVAKRSETPLVPPAA

SEQ ID NO: 193657 - protein, 343 aa, unidentified
MSIVGGLDIHRKQITFDYVDTETGEVRRGQICPADREHLAKWLARFAGQDAHFALEGCTGWRYVAEEIIAAGLTPHLADPAEAAHLRGPKRRAKTDRADARHQRVLLEQGRLPGCWVPPSHVLECRALLETYLDLREQRTGWVQRIHAVLFHHGAPHIAGQQLGTAEGAAALRAAAAHCSPAGQLQLAIAAQMLLVYDERLHQVRRQLLDRARHTRGAAELTARLYGVGPVTGLALTCWLGGAGRFSSSRKAVRFAGLDITVYSSDGKRSPGHLSRQGPEVLRWCLYEAGKAHARASAPDHAYYAQVKERIDGKRAALSEARKIIRQAVHILAGLGDDALTAC

SEQ ID NO: 193658 - protein, 428 aa, unidentified
MNFNTQNAKIASITEKTLIVGIDVGSETHYARAFDWRNYEYSKKPLEFSNTEAGFMTFKTWVEDIAEKHGKTAVIPGMEPTGHYWFALGKFLQDNEMKPVHVNPHHVKKSKELDDNNPNKNDRKDPKTIAALVNEGRFSYPYIPTGIYAEIRSLSNLRFQTQEELTRIKNRIARWFAIYFPEYKDVYGDLKAVSGRMGLKIAPLPEDIQKLGVDGVNKIWRDAKLRGAGMKRAKTLVSAAEHNVGSKEAPETARFELKNLLDDMDVYTLRLEELLRKLEEKLKEIPYIDKLMKIKGIGMITVSGFIAEVGDIGRFDKPKQLQKLAGYAIVANDSGKHNGESRISYRGRKRLRYVLYEAAISLVGRNAEFKAIHEYYRTRKENPLKKMQSVVAVACKILRVFYTILTKGVDYDPVKLMGDIKRPQLQAA

SEQ ID NO: 193659 - protein, 343 aa, unidentified
MQSISTIGLDIAKSVFQVHGVDAVGQVVLRRQLKRRYVLAFFQRLPPCLVGIEACASSHHWSRELQELGHTVQLMPPAYVKPYVKRQKNDTTDAEAICEAVTRPNMRFVPTKTVEQQSCLMLHRARHLFIRQQTAVINSIRAYLAEFGIVAPVGRRGVEQLLEVVADTADRRLPEVARACLAALGGQLRALKAQILEFDRRIMAWHRSNATSKRLDTIPGVGPALATALVASIAEPRAFRSGRDFSAWVGLVPKQNSSGGKDKLGSISKQGDRYLRSLFTAGALAVIRYAKIHGTGHRPWLTGLLARRPTKVVAIALANKLARMAWAMMARNERYKEPAALAA

SEQ ID NO: 193660 - protein, 334 aa, unidentified
MDREYIGVDLHKAFFQACAVNATGHRLWEGRFARTADGLARFVARGVGAAQAIAVEATGPTWAFVDAVTPTGAHVCVVDPRKTRLKAGYAAKTDRLDARRLADALRRESVVSIYVPPPAIRELREVCRGRHQVVRLRTRLAQMIRALLLRGDAGEPPGTRLYSPRALAWLAAVQLPPDALGTLRRLDRLYRDVHREAQAADAEVRRRAATDPIAQALAGMVGIGPVMALTIRAEIGDIARFAGGPALACYAGLVPRVDRSADHAYHGRITRDGSPWLRWALVQATRHAIRQPDARARWARRLAIRKGLNKARVALARVLCDQVVTTWPTTNLSA

SEQ ID NO: 193661 - protein, 431 aa, unidentified
MAQAKPQVIDDEEHERVYERVAAVDVAKDSGMVCTRTPHRSRPGARQSTVWTVKARMTAIRALGRQLTKDGIEMVTLESTSDYWRIWLYVLEACGLAVQLVNAAQARNLPGRPKTDKLDAMWLARLTEMGLLRPSFVPPAAIRALRDYTRARTRLVQERTRCFQRLEKLLEGALVKLSSVASKLTTESAKDMIKAMIAGERDPHTLAALARTRMKAKHDELVEALAGMFDDHHGELAQILLDQAAFCDARIAQLTARITAAVAAMPAAWGVDADGTTGPDAGTGPDAAALPAVQRLAEIPGVSPDLARSIIAEVGLDMSRFPTAAHLVSWAGLCPRARQSGPRTRAGKKNQGDSWLRNSLGQAAIGAARTTTTFLGERYGRIARRRGKAKAQVAVARSDRKLPPTWRQQPVILGSVTARVCGDLGGLRRVV

SEQ ID NO: 193662 - protein, 408 aa, unidentified
MRTIGLDVGRQFAEVAIREEGRTRSAGRIPVTPDGLRAFAASLRADDEVVLEATTNTWAIAGLLAERAGRVVVSNPLRTRAIADARHKTDRIDAAVLAELGAARYIPEVWQPDTATRELRSLVAHRAALVGVRTAQRNRVHAVLARALVSPPMTELFGAGGRAWLRTVDLADIARLELEAALRLHDAAEAEIAAADRRVAERVVDDPRVRHLLTIPGVGVGVAAGLVALIGDVTRFPRPGQLASYLGLDPKVRQTGGKPAFTGHISRAGQAHARGLLIEAAHAAVRVPGPLRAFHARLLRRRHSSGVAVVATARKLAVLIWHLLTRDEDYRFSPPLRTAEKVRHLELAAGWPRRSPGGSGPGRSVDARRVQRANERAVLEVAEAAYVELVRARAGRGALDAAAAPGSD

SEQ ID NO: 193663 - protein, 341 aa, unidentified
MGEITTIGLDLAKSVFQAHGADASGAVVFRKKLRRDQVLAFFASQPRCLVAMEACAGGHYWARELAALGHETRLIAPSYVKPYVKRQKNDMADAEAICEAAQRPTMRFVRPKTAEAQASATVFRTRDLLVRQRTQMINALRGHLAEFGMVVRKGAGHAPELVSLVRDPTFELPDEARAVLEVLAQMLQQAEEKIAVLDAEIARRARANPMIKRLMTIPGVGPIAATALAALAPAPETFRRGRDFAAWIGLTPLQKSSGGKERLGKVSKMGERTLRRLLIIGASSAAKAAARNGVGPEAWLGRMLMRKPRLVVAVALANKIARVAWALMAHGGVYRAPAMAA

SEQ ID NO: 193664 - protein, 346 aa, unidentified
MKKIFIGIDFSKEKFDASLIYAEGLKECAASVHEVFDNRPSGFRRLVRWVKNHSDDLPVDYWLFCGENTGGYSIGLSNYLYASGYDMWLECAYKIKHSAGIRRMKNDKADSRAIAEYAMRNYDKMRPYKPQSASLTCLREIFLYRHSLVRQKVALSVRRNEKRLTQEKSEARAFMSFTSKHLITEMNKAIAKCDRKIKEIIAADEELRQIFDIVTSMPGIGVQNAVCLIVYTDNFQRFDMNSRKIACYYGIAPFGRQSGTSVNSKPQVSPFANRMIKSLLSQAALAAIKSDINVHNYYQRLIQRGKHPLLVHNNIKNKMLHAIVAMIRDKVKYNPEYVYSNNKNVA

SEQ ID NO: 193665 - protein, 340 aa, unidentified
MQVTTIGVDLAKNVFQVHGITASEEVVFNKPLRRAQFLPFFAKLDPCLIGMESCSSAHHWARELTALGHEVRLIPPMYVKPYVKRGKSDAIDAEAICEAVTRPTMRFVAIKTVEQQSLLSLHRARDLLVRQRTQLINNLRGLVAEFGIFIPRGLARVIGFAEDITLGEVLDLPDIANEVIRNLSEQLMALHHRVRWYEERLKQVAKEDARVRLLRTIPGVGAVTASAIIASIGDGHQFKNGREFAAWLGLTPANKSSGGKEKLGRITKMGDQYLRSLLVVGMTSLVRQTRSHPERASKWLTALLERKAARVATVAMANKTARIVWAVLTRNEPYSPRAVA

SEQ ID NO: 193666 - protein, 345 aa, unidentified
MKITTIGIDLAKMIFQAHGVDEHGKVRLRKPLKRKDVVSFFANLEPCLIGMEACGSAHYWARKLSELGHTVRLMAPQFVKPYVKTNKSDRNDAEAICEAVGRPNMRFVAVKTAPMQAVLALHRARQGFVKARTAQGNQIRGLLAEFGIVIAKSIGHISVRLPEILEDGENGLPGMMRELLERLGENLKDMDRQVGELERQIKLWHRENEASRKLEAIAGIGPITASALVATLGDAKSFKNARQVPAWLGMVPRHEGTGGNVKLGGISKRGDVYLRTMLIHGARAVIAHIERKPDHADEWLKKLIARRNKNIAAVALAAKNARIAWALLAHERSYQHDYVATRKAA

SEQ ID NO: 193667 - protein, 417 aa, unidentified
MKKHSNSAKKCEPSIKCAQSRVSVRQDSREVITELVAQLTKQLDRGRLPAVESEDEGRSAACPNLNGLTVGVDLGDQWSNYCILGLSGETLAEGQFPTRRQEVAEFFQGLAISRVIVEVGTHSAWVQEVIAGLGHEVLVANPRMMEGAKHRRRKNDRIDAHKLARLGRVDPKSLYPIRHRSSQVREDLLVLRARDALVASRTELINTVRALVKTMGARLSSCSSDAFWKKAEMEIPNELRETLQPLLRLIATLNDEIKSYDQKIEQLASQKYRHTQLLRQVTGVGPITALAYVLTLETPLRFARSRDVGPYLGLVPKQEDSGDSQPQLGINKAGDQMLRKLLVGSAHYILGPFGPDTDLRRFGMKLCERGGKNAKKRAVVAVARKLAVLLHRLWASGEVYEPLGHASPTRTAQAAAA

SEQ ID NO: 193668 - protein, 338 aa, unidentified
MTVYAGIDLHSNNSYLGILDHGNQRLFGKRLPNKLELIERALRPFKSELAGTVVESTFNWYWLVDGLQDAGYKVHLANPSATKQYEGLKYSDDKSDAFWLAQMLRLEILPEGYIYPKEHRYTRDLLRRRLLYVRQRTEHILSFKSMLSRSIGQSLSANAVKKLLPHDAGHLFDSPHLVMAGRCAIEAIQFLTTHISAIEKEVLGHARLKPAFAWLLTAPGIGQILAMTIMFEVGDIRRFKKAGNYGSYCRCVKSEKISNKKKKGRGNRKNGNAYLSWAYVEAAHGALRHYPKARRFYDRKASLTNTTVARKALANKLARATFYMMRDQVPYDEAKMFG

SEQ ID NO: 193669 - protein, 375 aa, unidentified
MKIVGCDFHPSWQQVAVFAPETGEVAELKLLNGDGEAERFYRELEAPALIGIEACGNSQWFIELAERLGHVVWVGDAAQIRASYVRKQKTDRRDAGHILKLLMESRFPRLWTPTAAQRDLRQLLIHRHKLVEIRTRVKNGLQHLALNRGFPKQSSRLCGVRGRAYMEKLPLAGWTARRREDLLKLLAELDKHLGELDDAVQRAADEHPQARLLMTQPGVGPITSLAFVLTIGDVSRFKHSNQVASYLGLIPREHSSGGKQRLGSISKQGNRFMRQLLVESVQTVNRLDEEFRKQYAARCHHKAKGVAKVAAARKLAVRLYWMLRQNVGYPEIAHIESSPRVALRGEVGVPGKRTLLAGVNESHLATVNGRSRIQQ

SEQ ID NO: 193670 - protein, 408 aa, unidentified
MRIIGFDIHRAFAEAVAWEDGKLRRLGRVDMRRNLLTAFAATLSREDIVVVEATGNAAAVASVIGPHVKRVVIANPIQVRMIAHAKIKTDTIDAGVLAQLYASGFLPEVWIPDEATQALRRQVTRRNQIVRQRTRLKNIIQSILHAHLIPSCPAADLCGSKGRAWLSEQVLPGDERLAVERHIREFDRLGEDLTVIERDLARSALADENVTRLMAIPGVDMIVALAIIAAIGDINRFGEPQKLVSYLGLNPSVRQSGPGPAHHGRITKQGRGHARGMLVEAAWAAARAPGPLRAFFLRIRAKRGQHVAAVATARKLAILIWHLLSKKENYAWARPALQARKTRKLELKAGHAAKRGQKGSAHAYNVKGHREEERRFVEQAETAYARFVAGWSQRGPKARTGAAKEERR

SEQ ID NO: 193671 - protein, 373 aa, unidentified
MNSTTFVGLDVHKDSIAVAVARPGRQEPEQLGVIPNTPEAVARMMRKLGRPEKLSVCYEAGPCGYEIYRQLTQMGISCVVAAPSLIPKRAGERVKTDRRDAQKLARLLRSGDLTPVRVPGEEQEAMRDLVRARESAKEDVLRKQNELSKFLLRLGLHPAKGVNPWTQKHRQWLESLRLEQAPQQVVLRDHLHALDEALARLERLEKEIEELAPQYCDPEMLQALQALRGVKLITSATILTELWNMEYFRSPAQLMSFVGLVPSEHSSGGKERRGSITKAGNAHVRRILVEAAWHYRHIPRVGVALKKRQEGVPEEVKAIAWKAQNRLNKKYRRMVGRGKLKTVTVVAMARELMGFIWAIAQEVARRRQEKQAA

SEQ ID NO: 193672 - protein, 354 aa, unidentified
MVIVGTDVHKRTHTFVAVDEVGRKLGEKVVPATTAGHQKALGWAREQFGGDLLWGIEDCRNLSARLERDLLTAGQKGVRVAPKLMFQTRASARTRGKSDPIDALAVAQAVLRYPDLPVASHDEVSRELKLLTDRREDLVAQRTSTINRLRQRVHELDPAAEPKPASLHRAKPCAVLADWLDTQSGILAELARDELADIIHLTEAIDELAARIGERVREVAAALLALPGCGELTAAKIIGETATISRFRSEAAFARHSGTAPIPVWSGNTAGRVRLNRSGNRQLNTALHRIAITQIRLTDSAGQRYYRKRLADGKATKEALRCLKRHLARSVYRRLHTDDHTRRAHQNSDMRTAA

SEQ ID NO: 193673 - protein, 418 aa, unidentified
MEDWSGDIPCLIFNHIMEVLRMYRYFVGIDVSKDSFSVSGLNSEGSVVFSLGAPMDRHGFSELSTLISSCADDPSAVIVGMESTGSYHVNLVSFLKVKGFPVIVVNPLLISNFTKLSLRKTKTDKKDAHTIARFILAHRDSLSRFAGSQGNTHLKDIARERESLLKFISAVKNDIRRMLQSTFPELEKMCDVFSDVMLLFLKEFPSAQILSAADPSVIIRAFSHADGRMRIRLSIEDLVEAAHHSIASPHPGLEAILPGKIATLVHLNARLDEITKLLVRVCESVMKEDLDIIISIEGVNTKTATPFLAEMGDYRNYKSYKNFIAYTGLDPSIYQSGTLEGISKLSKRGNRHLRRVIYLMTFCAIRVHGPFKEYFQRRKKEGLPFKKALFATAHKLIRTIFAMLTKRTYYRCEEMIIS

SEQ ID NO: 193674 - protein, 341 aa, unidentified
MWIIGCDFHPRFQQIAFVNTEGGEWGQRRLEHRREAEQFYRSLAGQAVRVGMETGGSSRWFERLLAELGQELWIGDAAKIRAAETRKQKTDARDAEHLRELLCNGMFEKMRIWIPPADNRDLRQLLWHRHRLVQMRTRVKNQLRSLAMSEGMERKPGLWSRAGQQQFQALELAPWAQRRRQDNLELLAQLLQRTTPLDEAVAQQAAQQPEVVRLMTHPGVGPITALAFVLVIGDPARFPNSKKLTSYLGMIPSEDSSGGKQRLGHISKQGNAMLRGLLLEAAHVAVRRDPEWKRYYRRLAMKKHRSIAAVAVARKLAVRLWWMWRHGVDYAELSASGSHAG

SEQ ID NO: 193675 - protein, 343 aa, unidentified
MDHFAGLDVSVKETSVCIVDDAGKIVREVKVASEPEALLEVLRNPAWHFKRIGLEAGPLSQWLYSALAEAGLPVICVETRHMRAVLKAQINKTDRNDARGIAQMMRVGLYRPVHVKTLRSQKLRMLLTHRKLLQSKAIALENDLRSTLRNFGLKVGMVGTVKFDARIKELVENLPDLATLVEPLLIVRRVLHEQLGILHRRLLDIVRNDDVCRRLMTVPGVGPVVALTYRATVDVPARFKNSKAVGASFGLTPSRHQSGESDRPGSISKCGDEMMRVMLYEAAQVMLTRTNKWSWLKAWAMKIARHRGMKKAIVALARRLAVIMHRIWVDRTEFRWTQDVATA

SEQ ID NO: 193676 - protein, 447 aa, unidentified
MSREPAALDGMQCLNPNAAGLDIGSAEIWVAVPPDRHPTPVRMFGTCTPDLQALADWLAACAVTTVAMESTGVYWIPIYEILEGRGFQVRVVNARHLKNVPGRKSDVQDCQWIQRLHSFGLLTGSFRPEGEMCALRAYLRHRASLIQHRAAHIQHMQKALQQMNLQLTLVLSDITGTSGQAILRAIIAGERDPRTLAALRDGRCAHSEAEIAKALTGHYRPEHVFALKQALALYDAYTDQLLECDAQIEGHFATLRPATEEELPPLPRHDKCDSHSKNKPAYDARTLLYRLTGVDLVAISGLNESTVQTIISEIGTDMSRWPSEKHFCAWLGLTPRHDISGGKVLRRRTAKTRNRAGQAFRMAAQSVSRSPYTAFGAFFRRLRARHGPEKAIVATAHKIARSFFHMLRYRTPFRDLGAEEYEQRAREREIAHLRKKATKLGLTLVSS

SEQ ID NO: 193677 - protein, 371 aa, unidentified
MHDTIFVGMDVHKATISVAVAEGARGGEVRHLGNFLNRADHVGKLVERLRKADGQRLRFCYEAGPCGYGLHRQITDLGHDCVVVAPSLIPMKAGDRIKTDRRDAVMLAKLHRAGELTAVWVPNAAHEAMRDLIRARATAVRVLGKARQHLQGFLLRHGRVYAGKKGWTLPYRRWLTTLRFDHPAQQIVLQDYIHSVHDAEERIARLMKQIEDLVPTWSMAPVVKAFQAMRGVAFVTAVTVVAEVGDFARFDNPRQVMAYLGLTPSEHSSGTAIRRGGITKAGNALARRVLIEGAWTYRMQARISPKLHDRLEGLPQIVRDTAWKAQVRLCARYRRLAATGKPKVVVTTAIAREMAGFLWAIARQTQIGSAA

SEQ ID NO: 193678 - protein, 423 aa, unidentified
MAYRIAGIDVHKKMLAVVVSDVEVDGEYRFERVRYGSTPEHLRLLAEWLITQQVEEVVMESTAQYWKPVWGALERYWKPICQEREGAGPKSGTLHLAQAQSNRGRRGRKKDFPDAERLVKRLVANELILSFVPDAEQRLWRTVTRRKYQLTRSHIRLQNQLEGLLEECHIKLSSLVSDLLGASARRMLKALAEGETNPAALAAMADRNLRATQAQLCDVLGACTELKPIYRRLLKMFLEELQFIDQQISKLDQELANLLSRHNDAVVHLAEIPGLGVDSAQQIIAEVGAGAATFPSAKQLSSWVGACPGDEESAEVSKSHRSPKGNRHMRRILNQAANAAVKSKGTIFEIIYRRLVSRLGHNQTIGAVAHRLCRLIWIILHSGVRYEERGPSVSAKTRRHRTNRMIRELRILGYRVEPLVTTG

SEQ ID NO: 193679 - protein, 392 aa, unidentified
MIIVGIDVASFKHDYFMIQKETGVTFSKRSVTIPNSEAGYKKLHEDIQSFCGAAGDQDIRIGLESTGIYHTNIITYLVGLGYQVMMINPILTNMARKAEKVHAPKNDNFDSQTICKYMIDNSDDFSPYTLSLYKIQTLKSISRKRFSVAESLRKAKIAVNNLVQIIFPEFKTLFSNIYGDSAIAVLKAYSTPKKLAKAHRSKVAELLHGRCKCTADDLIEAAKHSIGISDDCFSFELKDAIDEMEHIQKRINKFDEEIKKLVDELCPNLLTVPGIGYTTAGLIIGEIGDINRFSSVNKLESFCGLELVIYESGKYKATHLMPSKKGSRYLRYALFQVARVIWRFDPVYKAFYEKKQAEGKHYYVILGHIQKKLCRLIYSLMKSGNSYEVRSE

SEQ ID NO: 193680 - protein, 324 aa, unidentified
MKVQHIIGADLSKTTIDLFLQSRLQIENTKTGFQQMMNWFKQQNINASEVMIVMEHTGLYSYCFENFLHDHHIAFCKVNAYAVKRSMGLVRGKSDSIDARRLANYGSKEKLSIEPQLSKELQRLQMLYSTRERLVRHKAALLNAVSEYRNIGLAASDLIMTTHTTVIKSFEKQIEKLQNQMDDIVKNNPSIKGNQNLLQSIKGVGKVLSIATIIKTRNFTRFQSARKFACFCGTAPFENTSGSSIRGKTKVSQLADKTMKTLLDLSAKSAIQYDKELREYYLRRIKSGKSKMSTINIVRNKILYRMFAVIKRQTPFVENYLQTA

SEQ ID NO: 193681 - protein, 316 aa, unidentified
MKSQIFVGLDVSKQKLDVALRPQNRHFVTPNDDRGIKQLVKRLATLKPQLIVLEASGGYEFLVTAALAEVQLPVALVNPQAVRKFAGAAGKLAKTDKIDAQVLAHFAEAIKPEPRPLPDQEHQVLKAALQRRLQVVKMIGQEENRLEKTYIPAVRRDIQEHLTWLRRRLDELNRDLDGQIRRSPLWQARDRLLQSCIGIGPIVSLAIIAQMPEMGRLPGKQASALAGVAPYNRDSGRLRGKRMIRGGRSYLRRMLYMAAVVAVRWNPVIRAFYQRLLAAGKPKKLALTACMHKLVLILNAMIKNNQPWNQFITQVP

SEQ ID NO: 193682 - protein, 322 aa, unidentified
MEMLSFGGIDVSKDRLDITVLPDEQCSSVSNDAAGWAELIEQLRGSLITAIGVEASGGYERGVVRALLAAGMSVRQINPFKLRQFAKASGILAKNDRLDARMIASFVAIMPTRPAQRQTPMIEQLAAMLTVRRQLSDHKVATENASRLLEDAMLQRLSRRRVARLTADIDLLDQRLVEIVTADPALAHRFRLLTSMPGVGAVLACTLIALLPELGQMSRKQVAALVGLAPYDFDSGKLKGRRCIWGGRARVRHVLYMAALSASNWNPALKAFHDRLEATGKKPKVVIVAVMRKMITTLNAMLRDGAAWVDRYSGRRSASTAR

SEQ ID NO: 193683 - protein, 372 aa, unidentified
MNYNTVYVGMDVHKESFSLCAYTIETEKASHYQRTEADCKNVLKYLEFLRTIYGDDANFICGYEAGCFGYTLYHQLTANNVKCIILAPTTMLEQRSKKRIKTDRRDAEIIAKCLAQHNYSPVHIPTAKDEETKEFLRMRDDHKLALKKVKQQILAFCLRHNYRYDGNSHWTAAHLKWLKALTPEALYKEILDEYLLTYQTLSDKLERLDKRIGELATQDEYKEAVKKLCCFIGVKTHTALSVLVEVGDFKRFASAQHFASYLGLVPGEDSSGDDQNRLGITKAGNRHVRLLLTEASQCYARGQVGFKSKELKASQSGNTPAVIAYADKANERLRRRYYKMVLNKCKKHNVAKTAIARELACFMWGMMTDNIA

SEQ ID NO: 193684 - protein, 407 aa, unidentified
MDVIHERCAGLDVHKDEVVACARVVAGRKVLRTSARFPTTTRGLGTLADWLSTHECEIVALEATGVYWKPVWHILEAQFTLVLANPGHVRAIPGRKSDMNDAAWLADLVAHGLIRGSFVPPAPIQELRDLTRTRKQLGRQIAQHSLRLQKTLEDANLKIASVVSDLLGVSGRAILRGLIEGDTSPERLLARTTGLLRAEPAQLQAALEGHVREHHRCLLRLHLAQIEAIEDGVRTIDARLETLLRPFHAVIARLSTIPGVGALVAQTVIAEIGADVQRFATAGHLRSWVGLCPRLDESAGKRRSTRLRHGAPWLKTVLIQAAWAAVRRRDAYPHAQFQRLKAKRGPKKAIVAVAASLLTAVYFILRDEVPYRDLGAHYFDRHDASRAAARLTKRLEALGFKVALSAA

SEQ ID NO: 193685 - protein, 369 aa, unidentified
MNDITYVGLDVHKATVCVAIAESGRGGEVREVGIFENRPDVLRKMVARLGKQRHRLNFCYEAGPCGYGLHRLLTGLGHDCVVVAPSLIPMKAGDRVKTDRRDALMLARLHRAGELTPIWIPDAAHEAMRDLVRARATAVRALSKARQHLQGFLLRHDRICHGARAWTLAYRRWLTTVRFDHPAQQIVLQDYIHTVEDAECRRDQLTRQIEELMPTWSMAPVAAALQAMRGVALVVAVTVVAEVGDFRRFTNARQLMAYLGLVPSEHSSGSTVRRTGITKAGNELARRVLIEGAWTYRMSARVSRKLHDRLEPLSAAIRDIAWKAQVRLCARYRRLAATGKPKVVVTTAIAREMVGFIWAIACVAQPELT

SEQ ID NO: 193686 - protein, 345 aa, unidentified
MSESYEGKQFVGIDLHRRRSVLVRMTETGETLETVRISNDPEYLRAVMARAGEHPEVVLEATYGWYWAADALAELGAHVHLAHPLGVKMFSYRRVKNDQRDAADLADLLRMGRLPEAWIAPPATRELRGWVRHRAKLVGLRSSLKCQVHAVLAGAGITVPMSDLFGPGGQRLLAACPLPVESRSRVDSLLRLIAALDFEVDTFARLVTNRLREHPGYRAIQTIPGVGPILAAVFVAEIGDITRFGTPEQLASWAGLTPKHHESDTTVHRGRITKQGSRLVRWAAVEAVQRVGAHTALGAFRDQVAARRGRNIGVVAAARELTEMVFYGLRDGQIRRLSTARNPAA

SEQ ID NO: 193687 - protein, 353 aa, unidentified
MMIIGCDFHPSFQQIAYVEQETGEYEERRLSHRGEAEAFYRSLAGKAVRIGVEATGNDRWFHKLMSELGHELLVGDASAIHASAPREQRTDKRDARHILRLLMENRFPAIWQPSVGNQEQRQLLLHRCRLVRMRTRIKNQLDSIAKNEGLTGSRVWRAKRRQQIEALPLTGWYAERRKDLLALLDEMDKLIEPLDEAVRAAAEQNAEAQLLMTHPGVGPVVSLSYVLILGDWRRFPRGKQVGSYLGLIPAEASSGKHQQQMGHITKQGNTLLRWLLVEAATKAQSKDPSWHRQYVRLSMNKHHGVAKVAIAHKLAVRLYWMLRSGQNYRQIVERGSQAGQSDLAGGCGLRPIN

SEQ ID NO: 193688 - protein, 353 aa, unidentified
MEYGAVDLHKKESQIRILTESGEVIDQRIRTTRDRLTALFWGRPHARILIEASTESEWVAQHLETLGHEVIVADPNYGLMYGHRSRRVKTDRRDVAALAEACRHGIYRCAHRRSSRQRLVQWHLNVRRELLDARTRLISVVRAITRSQGYRIAGGATDTFLTRLAALDLPVSVSESLVPVRSVMELLNHELAAADQRFETLVAEDPIVKRLTTCPSVGPITATAFVAALDNVHRFAGRRGAAQMTSYLGLVPREDSSGEQQQRGRVMRSAHPYVRVLLVQAAWRICRSSDARTAALRTWAQAIARRRGKNIAIVALARRLTRILYAMWRDEIDYQPDRIRSDRRDTAAAKPAA

SEQ ID NO: 193689 - protein, 371 aa, unidentified
MKYEIKILKYAVGIDISKADFKACFVSIDNNQHIKIIASRSFSNSNAGFKKLDQWINQKRKDNAIGLVLVLEATGVYYENLAFFLQDKQYALSVVLPNKAKKYLEYLGLKSKTDKIDAQGLAQMAAQQQLRLWQPATKFWYELRALTRHYQNLQEQKTAVGNQLEAATHSANSSNFVLKSLKLQIKRLNLEVKKAAIAIKAQVQKDEKVYAKILGICKLKGLAILSVSTVLAETFGFELFENYKQVISYSGYDVVENQSGKRSGKTKISKKGNSRIRRILYMPAFVAVEHQQTVFCNLYNRIYEKSGIKMKGYVAVQKKLLVTIFAMWKNNTAYDNDYHKINIRRNGSVGVSLSGTSSSEAAIITNEPMIV

SEQ ID NO: 193690 - protein, 366 aa, unidentified
MMIIGCDFHPRFEQISFLLEETGECGRRRLMHPAEAEQFYRSLVGVRVRVGIEATGSYGWFRRLMGELGHELVVGDASRICASNPRRQKTDKRDAEHILRLLVEDRFPAIWQPPAENEQLRQLLLHRSRLVRLRTRVTNQLDGMAKNEGLIVAGGWSRKRRQAVEVLPLSGWYGERRKDLLALLDRVEERIAPLDKAVSRAAASNAEACLLMTHPGVGPVVSLAYVLTIGNWQRFPRGKQIGSYLGLIPSEDSSGDKRRLGHISKQGNTLVRWLLVEAAGTAQRYDASWHRQYVRLSMDKHHGVAKVAIAHKLAVRLYWMLRSGQDYRQMMERGSHPSDEDLSLGVRGSHARQSECPGGRSKRPIE

SEQ ID NO: 193691 - protein, 349 aa, unidentified
MITIGVDFHKRTSSYHVLDENGKRIKKCKLVNDRQTIREFVASIPGPKQLAMEATRSWNLYYDTVCDLVDQFHLGHPKKMKAITESETKNDPHDAELTARLTYADFLPKAHVSSWRTRQLRSLLRFRHFLVNQRRSIRNQVQTLIDRNLWPTERPGSFKNPFCKKGLHWLQTLTLPPRERFILSQCLEAYQELNQKIQDLENFLKTQTCEIDGLAYLSTVPGFRTGRVNAWIVLLEISDIRRFRKPDGLSHYAGLIPREFSSGDKHRTGRLIKDANMHLRTALIESTLAALRQDPGLRAYYKQVKARRGSGAAIIASARKLTRAIYCVLKEQRAYRPEKLTPPAADCHP

SEQ ID NO: 193692 - protein, 317 aa, unidentified
MMSEKLQESFVGIDVSKNTLDILIEPAGESLHIAYDDAGVSEISRRLKRVAPTLIVMEATGGLETRLASELAAQGLPVAVINPRQARDFAKATGQLAKTDKVDAAMLAAFARAIRPAVRPMKDADTRDLDDMVSRRRQLVAMRVQEKLRLETAASKPLQKNLKSHISWLDKQIAKLDSDLTKRLRRSDAWRTKDDLLQGIPGVGAVTSVTMLAKCPELGQLNRREIAKLAGVAPMANDSGKHRGKRFVWGGRADVRTVLYMAALAAKRFNPVIKAFADRLEKAGKPAKVVIVACMRKLLTIMNTMLKNNTSWTLKSA

SEQ ID NO: 193693 - protein, 439 aa, unidentified
MTTPSLPVLDPTAAAIDVGSEQLHVSVAGGPPKVFGTTTGQLHECRDWLKAQGAKTVAMEATGVYWLCPYEVLEQAALEVVVVNGKYVKNLPGRKTDMKDCQWQATLHAHGLLKPGFVPPEHIRRLQDYLRLRTDHITMAGSHEQHMQKALERMNLKIHDVISDLTGTSGLKMIEAILAGERRAGELLALCDPQIQKKKAAALRAALEGTWKREHLFALRQAYQLWQFYQKKIAECDQAIEEVLQEMTGPEDPTQPAPPGNKRGGVNAPQISGLHSMLWRLCGNKDLTTLPGVADYVLLQLLAEVGTDLSKHWQTEKHFTGWLGLAPGSRQSGKRRGSQRRGRNRAGRLFCVIARSVGRSVDKALGGFYRRLKGRRGGLIANMALARKLAELFWRLMVRGVAYVEQGLKKYEMKVAETEQRLLQKLARKYGLVLQPKAA

SEQ ID NO: 193694 - protein, 376 aa, unidentified
MITCFIGIDAHTTNYTLSTAIDAEDKPFNTCKYAPKLTYILKYANALCKKYNLKKEDILLGYEAGCLGFKLQRDLNENGFNCVVMAPSTIPGTAINRRKKTKNDIRDAEAIAKALRNDDYSSVATPDEEDEAIREFIRAREDVRMELKRCKQHIMAFCNRHGQHYEETGWTQKHMKWLNNLAFSQPVLKETLNSLLLEYEYLTEKLEEKDRRIEEFAQMDKYRESVHKLTCFKGIKTLTALAVIVEIGDFARFMKPKNFVAYLGLSVGEQSSGNDHNQTGITKQGNRFIRKLLTEAAQCFSRATSKKSKELKKRQEGNVEEVIAYADKANERLRKRYHHLVIHNMKSPNKAKCAITRELACFIWGMMTDNIHPVLV

SEQ ID NO: 193695 - protein, 321 aa, unidentified
MNRVLVGVDVCRDFLDAHARPSGLPKRFDNTPAGIEQLVAWLRSLAPERIIFESTGPYQKAAVGALLAADLPAVVVNARQVRDFAKGTGQLAKTDAIDASVLAHFGEVVATVVRPLPSQEILEFRELCDRRGQLVRMLDSEKNHRHAAQGASPKVIKNIDKHIAFLQRQIDDLEERMDRIVADSETFKAKDEILQSIVGIGRQVSRVLLVHLPELGKGTRRSIAALVGLAPFADDSGASSRIRHIRGGRAKVRMALYQAAVAAVRYCPTMKSFYASLKARGKATRVALIAVARKLLVLANALLRTGIPYQRPTNSVCLKNA

SEQ ID NO: 193696 - protein, 344 aa, unidentified
MTVDYYVGIDVSLEASSVCVVDGSGKIVREAKVSSEPEALIAWLKALPFAPARIGLEAGPLSQWLYAGLKEAGFAVELLETRHVRDAFKAMPVKTDRNDARGIAQLMRLGWFKPVHCKSAPAQETRAVLTARKLVQGKLYDIEMSLRGILRGFGLKVGRTTKTGFASRIMELTEHHPALKVIAKALLAVHAVLLKELNGFETQVRKLARSDSRVRLLMTAPGVGVIVGLTYVAAIDDPARFSSSKTVGAHFGMTPKKYQSGETDITGRISKTGDKGVRAVLYEAAHIILTMPIKGGALKSWAAKLAKRVGMQKAKVALARKLAVILHRMLANGAGFDAAKAAAA

SEQ ID NO: 193697 - protein, 339 aa, unidentified
MPIVGGLDIHRAQITFDYLDLRTGEETRGTIRPATREEFRRWLGQFGRKQVAFAMEGTTGWRLVVEELEAAGMEAHLAEPSETRARRGPKRRAKTDRADARLLRDLLLNDNLPESWIPPAHLADLRTTVRLRKALVDARSAWNRRIQAQLFHHGLPSAPHLQTFAGREYVSSVELPPAGRQVVEVGLHMLEVFDDEIEVLDHQLEHFARRQTGCQLLQRQWGMGPISSTAILAELGDTRRFSSSRQSVRFSGLDVTVEESDGKRTRGHLSRQGSPVLRWALYEVATHAWRKASPDHEYYLEVKRRLGAKRARLSVARRILRRVHHELANAGDDAFADVA

SEQ ID NO: 193698 - protein, 340 aa, unidentified
MNNTTRIGIDLAKNIFQLCLTDERGRVIKNIKLKRVELLAFIAQQSPCEIILEACATSNYWARQFSEFGHTVKLIHPLYVRPYVKTNKNDATDAEALCEAASRPTMRFVHPKTPMQQDIQLLHRVRSRLVAQRTAVVNQTRGLLAEYGLIMPIGIGQLRKQLPLILEDAENDLSTTARQTFHLLYDELQDLDERVACAKQSIDNISRENEACTRLMTIPGVGPIVATAVYSVMGSAQQFRHGREFAAFLGLVPKQYSTGGKQVLRGISKRGDSHTRMLLIQGAMAALNHMHKKDDRLSRWGCQLKARRGTAITVVTLANKMARICWALSAHQTTYKQAMA

SEQ ID NO: 193699 - protein, 311 aa, unidentified
MNLQELFIGIDVSKDKLDVAVRPSGETKIFSNTHEDLRRLTQYVKSLTPALVVLEATGGLHRTVLSTLATEGLPVVAVNPRQIRNFAKATGTVAKTDRIDAQIIAHFAEALRPQVRPLKDEQAERLQALVTRRRQLIDMLTAEKNRLASAPKWIQKDIRAHIQILERRLKHIDDDLDKLIKQSPLWRHKEEILQSMPGVGPVLVRTLLAELPELGTLNRHQIAALVGVAPFNRDSGCFKGRRTIWGGRAHVRSVLYMNAVVAARFNPVIKTFYQRLRQAGKRFKVAITACMRKILIILNTMIKNDACWNLT

SEQ ID NO: 193700 - protein, 481 aa, unidentified
MKPKPKEKSKQATRPTQSKWHEMNRKQRREMTRKIQSEDLSLEVVHPDAGGIDIGNESHYVAVPPSRDSQPVQRFGCTTAELKAMADWLKQCGVQTVAMQSTGVYWIAVYDILEAAGLEVYLVNARETKNLPGRKSDVQESQWLMKLHTYGLLRNSFRPSQEIRTMRTYWRQRNDLVQSAGRHIQRMQKAMTQMNLQLANVLSDVSGVTGQAIIKAILAGERHPHKLAAFRDCRVKASEEEIARSLEGNWQEDLLFVLQQEQAGYEFCQKQMAECDRQIEQYLQQREDRSRGAILPEEKRKERLKKKKGNAPQFDLREGLFRMSGTDLTRIDGIDVMTAMTILSEAGWDMSKWRTEHHFVSWLRLCPDNKVSGEKIIGKGRLPTNNRVTIALKMAASTLWASNTYLGAQFRRLKTKLGASVATKAMAAKLARLVYRMLRYGMSYVDRGAEFYQAQHRQLQIKYLKWKATSLGFQIIQVPAA

SEQ ID NO: 193701 - protein, 334 aa, unidentified
MGTPVSVGIDVAKATLSVSICDHDGHEQALAIRNTDTDITTKVLPYLRHYSGKVVMESTGHYHWTPALVLREAGIDIRIVNPLLAKQYTSGTIRKVKTDPADARGLARMAAVCDNLPETFTVSRARLIIRKKLATISTMGRHLQALKANLASLREGQVLLDEVDTPVVAELAESIRQLGISLKHLEVECVQLTESDEASLEIMKRLETIPGVSLFCATLATNWFDINTATSAKSFIGYAGLDISSRKSGTWKGHCRLTKRGNPFLRKRLYSAAWGAVMNYPEYRAYYDKLKAGGRGHKEAVVIIARKLVRTMYCLFRDGVSYDSAKVSFPNRII

SEQ ID NO: 193702 - protein, 355 aa, unidentified
MQKYKVSFKGQNIYVGIDVHLKTWHVTTLTESGCKYSFSQHADAKELFDRLNKKFPEAHFKSAYEAGFCGFSAHYALTEQGIENIVVHAADIPTTGKEKALKTDAVDSEKIAWALKRGELTGIYIKDKRYMDDTNLMRLRQRFIMDLSRQKNRTKHLLYTQGVTYPERFRNSRTHWSRNFMKWLREEVELLSEQKMSLILLCEQVENTRKAILKVTREIRRLSTTDRYKENYNLLITVPGLGLITSMSVLTELDNNIMRFPNERSFVAILGLIPTCHDSGDRKVSGEKINRGNKHLGPLIVESCWIAIQRDIELSAYYSKCCQSMKPHKAIIKVARKLACRAYAVLKTKARYALP

SEQ ID NO: 193703 - protein, 312 aa, unidentified
MTQIVLIGLDVAKHVFQLHAVAADGHVVFRRQVRRAQLITLLMSLPHCRVAMEACGTAHYWGRQLQELGHEVLLIPPDYVKPFVKRQKNDAADAEAIAEAAQRPDMRFVHVKSEASQAASIVFRARDLVVRQKTQLLNAIRSHLAEFGYIFPQGAAASAKMQEVIESDDNLPPAAQGILRSLWQHLSSCEAQLTEFDREIQKRARDDLDARRLTSVPGIGPLTAAAIAALAPDPATFRKGRDFAAWVGLTPLERSTGGKQRFGRISKMGERTLRRLLIMGASAVVSWVRRGRSSQALGLPASSTESHRCSRS

SEQ ID NO: 193704 - protein, 485 aa, unidentified
MSALEASSLGRCATSLAIDEHSDEDGKGEAVSLWCGIDWAENHHDVSVVDETGSQRVRVRIEDTATGFARLMRLLAEQNAISEQPITVAIETAKGLLPAALRAAGVPLIAINPLAVSRYRDRHSPSRAKSDAGDAFVLANILRTDPHAHRPLPVDSELAQSIHVLARAHQDAIWDRMQIANKLRSVLREYYPTFLGAFPELASREARAVLHLAPAPAQGQLVRRPSLTAALRRAGRSRGIPAAVDQIHTALRQDQLRQPPRVEAAMTHRATALLHALDTAVANVARLEAVLAEAFEQHPDAEIITSFPGLSTVLGARILAEIGDDRTRFASARGLKAFAGTAPITRASGMKTLVTRRVVRNKRLGQAAYLWALPMIAHSPGAHAHFTDRRDRGDSYSAAARNLTNRALGMLHHCLQTRQHYDENKAFPNRHNQPVTSDKPSAGKAYQEAEAQPTPTARTPTCPRPAVSIAPPASQAHRKIEAHPA

SEQ ID NO: 193705 - protein, 329 aa, unidentified
MQTILHICCGMDVHKDSVVACIIKTREYQPPHNKSEDIEKEIRVFETFPDNLAELRSWLEAEQCMHVAMESTGVYWLPVYEALEDSFGGKMEILVTNPRHMKNVPGKKTDIKDSEWIAKLLRAGLLASSFIPPKDIRELRQLTRYRKNVVQDINTQKNRIEKTLQQAGFKLSTFLSDIFGVSGRNLIRTLIKKGRISPSDVEAQTKRISKDKKAEIKRAINGQLTAHQRKFLQMQVTLLDELLVHLALIEESIQLLSDKFSDSIERLSTIPGIAETSATAIVAEIGTDMSKFKTSEHFCSWAGLAPGDNESAGKKKVQESHLETPTSKE

SEQ ID NO: 193706 - protein, 368 aa, unidentified
MTTVSNRKRDGKRNGKRNSGPWTALAGERVHVGLDVHKKAIHVAVWSVRQEQIVRQWVTPANDARLVEQLEPLRAAIVRIVYEAGPTGYRVARSLAEATLPVEVIAASKTPQVADRLAKSDGLDCRQLAEYSAKGLLHRVAIPTEQQEADRQVTRLRDSWTSKRRRVQQQIKSFLLQHGLGEPDGLANWSAKGLEGLGQIELGPELRFALDLMVEELGQLNGQLLRINQQIRQLSKTDRHGPAVAVLTSHPGVGLTVAMAFRTELHQAGQFTDAAQVGQYVGLAPRVSQSGQTRRDGPISRSGRGPLRALLTQAAWVWIRFDEAAKKVFNRLVSNTGSAQKAIVGMARRLAIRLWRMMVTGEVYRVAA

SEQ ID NO: 193707 - protein, 376 aa, unidentified
MREKLRFLGLDVHAETIAVAVAEPDGEVRSLCTIANREDSIRKLIRKLGPTEQLRACYEAGPTGFVLYWQLTQLGVECAVVAPTLVPKKAGDRVKTDRRDALKLARSHRSNDLTAVWVPDEDSEALRDLVRAREAAKQDQLRARHRLTKFLLRTGQRPPLGLKAWTEKYVEWIQQVHYTHPAREATLLDCLNEVQHMEQRVKRLEQSILEVVTLAPAPVQAVIQGLQALRGVAHISAVTIAAELGNISSRFESARKLMGYSGVFPSEDSSGERIRRGSITKAGNAHLRRIVVESAWSYRHRPSIGARLRKRQEGVPAQITEIAWKAQNRLHKRYMKLMAAGKDQRKVMTAVGRELMGFIWAIGVKAEAACMQQKAA

SEQ ID NO: 193708 - protein, 296 aa, unidentified
MGIKYIGMDVHQATIVIAVLNEAGKCVMETIIETKTITIVDFICGLRGVLYVTLEEGTYAAWLHDVLSPRVEKVVVCDPRKNKLLPSGHKSDKVDARKLAEWLRNGQLSPVYQGRQSLRTLKELARSYRCLVEDSTRVMNRLKALFRGRGIACSGAAVYQARQREQWLQQLTQPGARRRADWLYQQLDQLQPLRKAAHQALLAESRRQAAQRILCQIPGLGPTRAALIQAIVETPHRFRSKRQFWIYVGLAVVTHSSADYRMVEGQVRRSNKLVATRGLNRNHNRVLKEVFKSATT

SEQ ID NO: 193709 - protein, 345 aa, unidentified
MIIGCDFHPSWQQIAWLNTETGETGEQKLVHAAGDAKLFYQQLAAPVLIGMEATGNSQWFLELVQDLGHEIWIGDAAQIRASYVRKQKTDKGDAAHILKLVVESRFPRLWTPDREQRDLRQLVLHRHKLVEIRSRVKNELQHLSLNKGIQRKAKLWSQAGQKLLRELPLKPWAACRREDLLGLLAMLHQQIGKLDQAVQQAADEHPQAQLLMTQPGVGPNTALAFVLTIGDVSRFPRGKQVASYLGLIPREESSGGRQKLGAITKQGNRLVRSLLVEAAQIAVRFDPGMKKQYLHRCHQKPKGVAKVAAARKLAVRLYWMLRTQKPYPEIVRIESSPRVPRVGAS

SEQ ID NO: 193710 - protein, 351 aa, unidentified
MTIIGCDLHTRYQVVAWIDEGTGEIRTRRLEHENGEARVFYASLPRGARVGIEATFPALWFERLLAECGHELWVGDAARIRASDVRQQKTDTRDAEHMLDLLRADRFPRIWVPSQAERDVRQLLVHRMKMVRTRTMVKNQLHYLAMSQGVCRKHKLWTVKGRAELDGLALLPWASRRRKELLVMLDQLDAAIEPLDQAVKQEAQARAEAVRLMTHPGVGPVTALGFVLTLGPVERFANRRKLVSYLGLNPREHSSGGRQRLGAISKQGNSMMRWLLVEAAQTAARYDPELRRAYQRLKFRRVSGVAKVAIARRLAVRLYWMLRTRMDYAQLVRMSGSPSSAVVLQEKGSTV

SEQ ID NO: 193711 - protein, 406 aa, unidentified
MKKNIRTEDKKKRNQNPPEAEPNKALSKRVQNLQSKLKASTSWQAQGAGENEFGFSVGITWETKRVVFCFLNIQGAVISEDFLATTTGEFKAHFSSIPKARIAIEVGTHSPWVCELLESSGHTVYVANPRKMESIHKNRRKNDKVDARTLARLVRADPELLYPIRHRGAEVREDLVVLRARDALVAVRTSLINSMRGLVKSVGERLPVCSSESFHKSAEDSIPERLEPALRPMLEQIQSLTEKIKEYDKLVDTLAAKKYPETGALRQVNGVGALTSLAFVLTLENPDRFQKSRDVGPYLGLVPKQDDSGDSSPQLRITKTGDTMVRRLLVGSGHYVLGPFGKDCDLRRHGLKIAARGGKNAKKRAVVAVARKLGVLLHRLWLTGEVYDPLYNSARTDKPLDATAEA

SEQ ID NO: 193712 - protein, 503 aa, unidentified
MSKRRKLSTFERLNSGKMNRAQRKELARRVCADDPGLEVVHRNVAGIDVGNESHYVAVAPGCDAQPVREFGCWTADLKRMAEWLKSCGVKTAVMQSTGVYWIAVFDVLERAGLNVWLSNARDTKNLPGRKSDVQESQWLMKLHTYGLLRNSFRPPEEIRAVRTVWRLRGRHVQDASREIQPMQKAMTTMNLQLANVISDVSGETGQAIIRAILKGQRNPRELAKLRDYRIKASEEEIACSLEGHWQEEVLFELQQSVDRYDFCQRQIAECDQRLQKCLAALPSRTMAPQRESKTDPAVNCPEGQDATEKSKKKKRSKPRDNEPKFDLESELTRICGVDLTTIDGVKVMTIQTFVAELGTDMSRWPTEDNLVSWLKLSPNRPVTGGRVMRQRPLQTKNRVSTVLRTAATTLADSDSYLGARYRQFRAHLGPGKAAKAMAAHLARLIYQMLTHGQAWVDRGAQEHEKGGRTERRNSCCERPPHLAIAWNRLPSQNGNSGYEQSST

SEQ ID NO: 193713 - protein, 342 aa, unidentified
MEQYVALDVSLKEISVCIVDSNGEVVFEGKTAAEPAILVELIRSKAPQVKRVGLETGATSPWLFHALASAGLPVVCMDARHAHAALSIRPTKSDRSDARDLDDMLRLGWYREVHAKSVTSHERRTILGARHQLVTMRSELDAQIRGILKTFGLILGTGNKDTLIQRAEKLAAGHPVMSGLVAKLAEVRRHVTSQIAAIDRDIRRLVHTEPTLKRLMSVPGVGPITALAFLSAVDDPRRFKHARDVGPYLGLTPTRYQSGETDRQGRISKCGDTFTRTCLYEAAHVLLTRVQRFSPLKAWGMRLAKRIGGRKARIAVARKIAVILHCIWTDGTEFWWTREKAA

SEQ ID NO: 193714 - protein, 339 aa, unidentified
MKYTPVGVDIAKHVIQIHFINEHTGEVVDKQLRRQDFLTFFGNREPCLIGMEACGGSQHWARELTKLGHKVRLLQARFVKAFVMGNKNDVMDARAIWMAVQQPGKEIAVKTEEQQSVLVLHRTRMQQVKFRTAQINALHGTLLEFGETIHKGRAAMEREFPEALERMKERLPPYLIMVLENQYNRLNELDSLIEDIEKQLTSVARQNETCKRLLDIPGVGPLIATAAVATMGEASAFKSGREFAAYVGLVPKQTGSGGKVCLLGISKRGDTYLRTLFIHGARAVALVAKEPGPWITELKKRRPASVAIVAMANKLARTVWAITAHDRKYDRNHVSIRPY

SEQ ID NO: 193715 - protein, 399 aa, unidentified
MFVGWDWGMATHDVTVIDDAGARVERFAVPHTEQGITSALTRLARHGRPVELPVTIETTRGLVIDRLLAAGHQVVPVHPNAFHATRPRWGAARAKNDAGDSFKLADYQRTDAHRLPALAPTMPETLELQALTRQRADHLACRIAASNQLAALLDVHWPGGKAIFAKLHSDIALAFLDRYPSPESAATLTPARIETFCRRHGYSGRRSGTELLARLRAAPTSASRLSQPVIAQLVRAQAALVRSIQTGLDQLDAVIAEAVARHPYAPLLADLPRIGVLNLAQIIGEVGPILQRTGSFDQLAAETGIAPVTRASGKSHTVAFRHATNRYARQALVTWIDNSRRGSTWADQRYTAARDRGQRHPHAIRTLGRTWLRIIWACWRDKTHYNATRHEPIEHAHTA

SEQ ID NO: 193716 - protein, 414 aa, unidentified
MQVLYPCCCGLDVHKKTVVACLLRAGADGQRRREVRTFATMTDDLLALADWLRGAGCTHVAMESTGVYWKPVYNILEGQFEVMVVNAAHIKAVPGRKTDCQDAEWIADLLQHGLVRPSFIPDRPQRELRDLTRTRTALIDERSAAVNRLQKVLEDANIKVAGVATDVMGVSGRAIVEAILRGTTDPATLAELAKGRLRAKRAELERALRGRVGAHHRLLLTTHLAHVDFLDEEVARLSAEIAERLRPVEDEVQRLDTIPGVDRRTAEVLVAELGTDLDRFPSAAHLASWAGMCPGNHESAGKRRGGRTRKGSKWLRRALVEAACGAARTKQPGRAALAGHYRRLVARRGRQKAVVAVGHRLLIIVYHVLRHGQSYQEPTPTDLDQRRRRTRDRAIHQLRQLGYDVAVTPKQAAA

SEQ ID NO: 193717 - protein, 337 aa, unidentified
MELYCGLDLHARNTYIGILDTDFKRVFKKRVSNNLNLILETLEPFRDQFKGIVVESTFNWYWLVDGLMDAGYGCVHLANPSAIKQYEGLKHSDDQHDAFFVAQLLILGILPQGYIYPKQDRPVRDLARKRMFLVKHKTAHILSLQSLIARCCGQRISTNQIRNLKIADLRQLLREEYLFLSAQANLNTIAFLIQQIKALEKAIKKKVKLDKAFEQLMTVPGIGFILAMTIMLEVGDISRFAKVGNFASYCRCVSSQRLSDGKAKGSGNRKNGNRYLSWAFVEAAQLGRRYSQRFGRYYDRKAAQTNTIVATKALSNKLARICYYIMRDQVPFREELF

SEQ ID NO: 193718 - protein, 425 aa, unidentified
MKQEGQQQQEFGAYIGLDWADRTHVISLRGTDSGKVEHYELVHKPEALVEWVSGLQRRFPGQRVAVALEQARGAVVHALMGYDFLVLYPVNPKTLAKYREAFSPSGAKDDPTDADLLLELVTLHRDKLRAWLPDDELTRTITLLVEYRRDLVATQTSLTNRLTSLLKLYYPQALAWAGELTTVQACDFLQRWPTLAKAQQAAPAKLRQFYLAHGCRKAELIEQRLQEIKLAQPLTRDGAVITASMAMVQATTSQLRPVLEAIARMEKQIAELFRQHADHDLFSSFPGAGPVLAPRLLAALGADRGRFAAATEVQQLSGIAPVMERSGKSCWVHRRWACPKFVRQSFHEFAGQSIRWSTWARAFYDQQRQHGNGHHAAVRSLAYRWIRIIYRCWQVRVPYCEETYCRALQRRQSPLARVLSAQTQN

SEQ ID NO: 193719 - protein, 387 aa, unidentified
MTVRTVSNLPAAMHVETARCLFAIELSKQSWVIGFISPLSTKINRRILSGCDWKGLLDLIEEVRARVSRETGRAVDVISCYEAGYDGFWLHRLLEAHGIRNYIIDPASLQVDRRARRVKTDRIDTERLLRSLMAYLRGEPKVWSVVRVPSVAEEDARRLHRERDRLVSERVQHVNRIKGLCALHGIYDYQPLRPQAMARLEQLRTAQGISLPPRLKSEIKRELQRLELVVEMIATLEAERDAIVEDEASTHVNAKKIQNLHQLKAIGPEFAAVLVGEIFHRDFNNRRQLASYVGYAPSPFQSGNVAHDQGISKAGNRKGRTTGIELAWLWLRYQPDSDLSVWFRARVGTTKGRIRRIAIVALARKLLVALWRYLETGLVPRGAVLKG

SEQ ID NO: 193720 - protein, 402 aa, unidentified
MISVGIDVSKEKSTVCILKPYGEVVCKPFELQHSKKSLESLDELLRRLDGEVKIVMEATGIYNLPVLNFLDEKGYFVSVINPCVMKKYARNNNFRNVKTDKMDSITIANYGIEKWFKLKRYEASESTYTELKMLGRRYRHYMEMHIQALQELTHVLDYVMPGIKNLFNSWTESNNRDKLSDFVERFWHYDLITSMSCEEFVKAYNEWAKEKKYHQSESKAIQVYELASNGIPTLSSNLPSTKMLVLEAIKTLRAVDDSLYIILSRMKELAKSLPEYSTVRAMGGVGDVLAPKLIAEIGDVRRLHSAKALIAWAGIDPPPYESGQFVGSNRRISKKGSATLRKTGYEVMRSLKSHQAPKDCTVYNYILKKEAEGKSKKQAKIAGLNKFLRIYYARVMEVYQAA

SEQ ID NO: 193721 - protein, 398 aa, unidentified
MTESSDYESVQVFIGVDVGKDTHHAVAINRSGKRLFDKALPNDENKLRSLISDLKQHGQILLVVDQPATIGALPVAVARSEGVLVGYLPGLAMRRIADLHAGEAKTDARDAAIIAEAARTLPHALRTLKLADEQIAELSMLCGFDDDLAAQTTQASNRIRGLLTQIHPALELVLGPRLELPAVLDLLQRYPSPEKLASLGEKKLAAQLCKLAPRLGKRLAADIAQALAEQTVVVPGTNAAAVVLPRLALQLITLRKQRDEVALEVEQRVLAHPLYPVLTSMPGVGVRTAARLPTEVACRAFASAAHLAAYAGLAPVTRRSGSSIRGEHPSRRGNKALKRALFLSAFAALRDPLSRAYYTRKMSQGKRHNQALIALARRRCDVLFAMMRDGTFYTPQGS

SEQ ID NO: 193722 - protein, 422 aa, unidentified
MLTETQDNEEIIARVAALDIGKAELVCCVRVPDEDRPRRRLQEVETYSTMTRPLLSMADRLRCLGVTRVVMEATSDYWKPVFYLLEAAGFETWLVNARDVKHLPGRPKTDKLDAVWLCKVAERQMIRPSFVPPPVFRRLRDVTRYRADLVAVRTAEKQRAEKLLEDAQIKLSVVASDIFGVSGRQMLAALIAGERDPGVLAQMARAAMRGKITALREAFTGYFTDHHAFLLAKMLARVDAIDADLAALDAKIEEMIAPFTAAAQRLDEIPGINAIAACVILAEIGIDMGRFPTAGHLVSWAKFAPGVKESAGKKKGKNTTGHGNSYLARVLGNAAVSAGRTDTFLGERYRRIARRRGKKKAVVAIGRSILVIIWHLLADPHARYTDLGSSFYDTRINPERRKRNHIRQLEALGYKVTLDPAA

SEQ ID NO: 193723 - protein, 314 aa, unidentified
MAEEKVYVGIDVSKSWLDVAIEPQERLWRMENSRTDIAKLVKQLAELHPTMIVVEATGGYEAKLVEALCAAGLPVARVNPGRVRKFAQGMNWLAKTDKIDARLLARFGEKANPRLTQLPNEQEKRLAALVKRRKQVLDMLVAEQNRLENADPDVLQYILGSQTMLQNQLDELDCAIQTHIDQAPDLKKKQNLLITVPGVGNVTASTLTAQLPELGTCDRKQIAALVGIAPFPHDSGRKRGKRFIKGGRPSIRSVLYMAALTATRFNPVIRAFYKRLILAGKEFKVALVACMRKLLAILNAMIRNQQPWKPCVSS

SEQ ID NO: 193724 - protein, 340 aa, unidentified
MSFYCGIDLGARKSHLCLINENDKRLLNKKMDNDLDEIESKLYPYKLSLKIVAESTFNWEWLVYGLQNRNYNVKLAHTLGLKAISWSKKKTDKWDAFTLARLLRVNMIPQAYIYPYELRPIRDLLRERIRLVTKRATEYGAISRMLLRYNIQGYNRNMVKHFTEKDIHQLYHHPFIRSKVTMELERIDLLTKQIDSIDKKILERAKEDETFYLLKTIPGIGDILAFTILYEVGDISRFTNARAFCSYCRVVPGIHQSSDKTHRSPNSKQGNHYLKWAFSQAAIMAIRYYPKIRRLHDKLSAKRKKAARLVARSIISHKLAQATYHVMRKQCVYRERLLFG

SEQ ID NO: 193725 - protein, 343 aa, unidentified
MQTTTTIGLDIAKSVFQVHGVDAAGEVVIRRQLKRRYLLAFFQKLPPCLIGMEACASSHYWSRELQTLGHIVRLMPPAHVKPYVKRQKNDATDAEAICEAVTRANMRFVPTKTPGQQSGLLLHRARHLFIRQQTSVINAIRAHLAEFGIVAPVGRHGVEELLNVVADSNDKRVPEITRACLSAFGAQLRMIKEQILGFDRLIRVWHRSNELSMRLDEAPGVGPVLATALVAAVADPTSFRSGRNFSAWIGLVPKQHSSGGKNRLGNISKQGDRYLRGLFVAGALAVIRYAKIHGTTHRPWLTALLARRPTKVAAIALANKIARMVWAMMARGERYKEPFALAR

SEQ ID NO: 193726 - protein, 458 aa, unidentified
MSQAKRSRGRQELSPVHPNAAAIDIGATMHVAAVGPDCDEQPVRTFQTFTADLHRLADWFAQCGVKTVVMESTGVYWIPIYEILEQRGFKVMLVNARDAKHVPGRKTDVSDAQWLQRLHEYGLLRPSFQPQAEMAGLRAYLRQRERLLDYAAAHIQHMQKALTQMNLQLHHVVSDITGVTGMRIIRAIVAGERDPAILASYRDARCHASVETVRQALVGNHREEHIFALAQALELYDVYQAKVAACDGQIEAVLERLKQSAVPPTEKLPAARHKTRQPNGPAFEVRGTLHAILGVDLTQIHGLGPYLALKLVGECGTSLSAWPTAKHFTSWLGLAPHNKISGGKVLSSKTRRTSNRAATLLRLAAITVGRTDTALGAFFRRLSGRVGKAKAVTATARKIAVLFYNTLRHGMTYADPGASYYEDRYRQRVLSNLQRRAKSMGFVLQQQAEPAGAQASVS

SEQ ID NO: 193727 - protein, 393 aa, unidentified
MERPMSQPNDLSRSLVALEQDKTLIAVIEMSQSNWLAAAIVPGVERQPLKKVDPDADVLLKLLHRWRGEAVQAGREIKRIAVAYEAGRDGFWLARWLRVHDIEAYVIHPSSVAVSREHRRAKTDRLDTELLMRAFLGWLRGEKRHCSMAAIPTIENEDARRPNRERESLVGERTRLVNRIKATLARFGLRTFKPTLRKAEEKLAGLRTAEQTSLPENTLAELRRSMARLRIVCEHIKQIEHERLRQLEATASVAKGPHAMVRLIARVIGVGIETADMLVNEILSRDLRDYKAVARYAGLTGSPDESGRKRREKGLARAGNARVRRGMIQLAWRFLMFQKDSALAQWYRERTANGRGDTRKTMIVALARKLLVALWRMVTSGEVPEGVLVRQTA

SEQ ID NO: 193728 - protein, 344 aa, unidentified
MSEVIIIGLDIAKHVFHAHGADERGRAIFSKRISRGKLLDFFAAQPSCMVALEACGGAHHWARQLTQLGHEVRLIPPAYVKPFVKRQKNDAIDAEAICEAAQRPSMRFVAVKSEQQQAAGLVFRTRDLLVRQRTQLINAIRGHLTEYGWVAPKGPSHVTMLADLIEEEEMARSLPEAAHAMFRLMLDLFASLNGKIADLDKEIARRAREDELSRRLMTVPGIGPISATAIAALAPPVETFAKGRDFAAWLGLTPLQRSTGGKQKLGATSKMGERTLRRLLIIGSSAVVQQVSKRGAPKGSWLEQMLARKPRMLVTVALANKMARIVWALLVKQENYRAPVAAKA

SEQ ID NO: 193729 - protein, 479 aa, unidentified
MIKSVGIDLAVTGEHKVRCLDERAQPCDGFSFQTTSEGLAKLEERIFGDGSNPVIIFEPTGLAWLIVAIYLKARHPDCRLVRVQGRKVVALRKYLHRSSKSDKIDALTLAKMSFIDSEQLEEVYLPPAKIYAMHRLARQRKRLESEIGARKTRIGSIVDGYFPGIRQAFSDPWSAHARAFLHSRLNPVSVVHASEKTLHAFLTKERRHGKADAAESHMVYLSCKDAATIYERSKPVGTIDDDFFADLQEEVSRELRIMEMTEAESDAIAKRLEQLYLELHPSDNLRTIPGVGEHTAPMFLATVGDPARFRSQSAFANYSGVVPAAKQSSNAEAKGLRMTKAGPATLKWALYQSGQIGRRCDPQLACVYYREMVHHGKNHKQAMGAVMSHMGARVLAVLREDKPYELRDMQGKPITREEARKLILSNFQVPEEIKRERRRRKATSSSTKPRRKNQEMAAARTNEAAVAPQPVVTVAISRT

SEQ ID NO: 193730 - protein, 308 aa, unidentified
MHYLYYVGLDVSKETFDASLVAFEDANEMAHRKFANSRKGICSCLHWVEKRHGIRLVDVIFCAEDMGSYISEMAVCASDRTLNFNFSLISPLVIKYSMGIARGKTDRVDARRIAEYAITHYRKIALYLPAEKELCQLRTWLILRAHLAKQRVAKLVLLEKLDYKEKFADVSIQRSMLQEEIAYAETHMKTIEREMKELITADSNICRNYKLLTSIKGVGPITAIVMLCSTLNFTKITDHRKFACYCGLAPFEHSSGTSVCGGCHTSSMANRDIKVQLNRRALIAIRCDPQLKAFTNAKWLKVNINSAS

SEQ ID NO: 193731 - protein, 343 aa, unidentified
MQIHSVGIDLGKTTFHLVALGAAGKVLVRKKFTRSQILAYTANMPRSLIGLEACAGAHFLGRALRKQGHDVWLIAGQFVKPFVKSNKNDFIDAEAIAEAVARENMRFVPIKTDDQLDLQGIHRVRDRLISRRTAVINQIRAFLLERGMAFAQRPAKLKAVMADVLENAEVDLTPQMRNLIDILWDEWKLVDLQIEKLNLELERISAADAGCTRIRQIPGIGPVVATAIVAAIGNGAAFRKGRDFAAWLGIVPRQHSTGGKAKLLGISKRGNVYLRKVLIHGARAAVLRIKRDRAPIGAWLDALDARAPKNVVVVAMANKLARIAWAVLSSGQDYRPTANAIAV

SEQ ID NO: 193732 - protein, 368 aa, unidentified
MDERITAYVGLDAHAESTAIGVAQADRTAPRFVGTVGAKFGELARALSRLGEPEALQIVYEAGPCGFTLARQLRQAGYHCEVVAPSRIPRRAADRVKTDRRDALLLAGLARAAQLTYVIVPDERDEAMRDLSRARIDAVRARLKARQQLKALLLRHDRRYSGKSSWTAAHERYLSTMSFAHRAQEIAFAEYRRAVGEGQARVDLLTQELAGELEHWRMCPLVRALMTLRGVDSVSAITLVAEIGELKRFAHPRELMGYLGLVPSEHSSGKTRSLGAITKSGNTHARRILIEAAWNYRFPARISAPLQRRQEGQATQIRDIAWRAQVRLSHRYRRLSARGLQYNKICVAIARELAGFIWSIGQHVSISS

SEQ ID NO: 193733 - protein, 318 aa, unidentified
MSEKIAVGIDVAKATLDVAFGVAGSVTTYPNTPAGHEELLTALAECQVDLVVLEATGSYEAAAGCALQSAGYAVAIVNPRQARDFAKAMGNLAKTDRIDARALAQLAQVLAQRSDRDKIVKILPSPLQQELQALVARRRQIVTLLTSERQRLGISHEAVRGSLTAVIEVLQGQLKAVEAALAKHVKAHHTGLVELLSSVRGVGPATVATLIADVPELGKLTRREVSALIGVAPFNRDSGAFRGKRMIFGGRAAVRRMLYMATLAAVRFNPVIGAFYHRLVATGKPNKVVLVACMRKLLTILNAIAKTGKPWDESIHTA

SEQ ID NO: 193734 - protein, 394 aa, unidentified
MKLIGIDIGKNKHFFCVMDQQTGEIISQPVSFSNDTEGFDFLVQKIKSYPKDSILIGMEDTGHYHFALLKYLLDLQYTVALINPKTTDFNRKMQGGITKNDKLDTINICDVLDTPERKKQYRITKVNSFDLYEQKQLTRHHHNLKEEENVYKNRLQKCIDIVFPEFNKLFNSKYGIVYMNILKMFGSAENIANTDIRTIRKCFEIEGRGNRISLTPERLKECARSSIGISSSAEVIQIKHLTAQIELIEEQLTEIDKKIEEFSIQNNSPILSIPGISHFSGTSILAELGDISNYSKPSQIIKFAGVAPLHYESSQFNAQHTAITKKGSKYLRKTLYQIILPVIRHNPVFNKYYQLKISQGKGHRCAQGHCVRKLLRIIYHLLKTNQQFDPQLLR

SEQ ID NO: 193735 - protein, 386 aa, unidentified
MHILAVDVSKDSLSYYSDFASGMIENSPEAISLLYSLAQSSGYEYMLVCKSTGAYSQPLMDFFHSKHVPTYYVPTNVLTLTKKMKFPENDKLDAQIIFKAAEEFSEKLIPFQTFDELISQLRGLTRQRFNLSHSIVSLKLRLLSLVFKYFPDMKFDFKATHSYFLKNYLVEKAVQMDFNNMASLICEISNQKLNVNEFANKLKDASRDNMESSSSSQDPLKLAINLTLDNVNSQVEQLRILDEEIEKFMEKIPQTLTTIPGMDTITAAGIISEISDIRKFASSSKLASYVGIVQFSSKNDSYQSQEKSQESQMAKKGNKYLRYYILSATNAISKIDPTFKNYYQKKYNEVDDNPDSRAVVLTAKKLVGVIYSMMTNGEKYKPQEPR

SEQ ID NO: 193736 - protein, 325 aa, unidentified
MYAALDLHKKYSNAVVMNADGVVLWEERLENDPAAMEDFSNSLLRETNVVIESSSTWYWAYQILAKRHRVVLSNPVKSKAIASAKVKTDRIYTLTLANLLRGRYIAECYVPSQHIMELRGLVRYRANLVRLRSNVKNRIHAYLLMNNTRIEGTPFSKRFLEQVRKIDDRRVQGYLKIIDCLNAEIYEASRVISNEALNNEDAKLLITMPGIGFYSALLIVSVIGDVNQFLASHNLDAYAGLAPSTRSSGGRTYHGRIMKTGSPYLRWVLNQCVRASLRSDPDGRLATFYGRLAKKKGDAKAVVATSAKMLRIIYWMLKEKQPYHG

SEQ ID NO: 193737 - protein, 377 aa, unidentified
MAQFPVSTSSEQSIYAALELSKNSWLLAIQVPGRDNPSLYPIRGGNAEGLLAKLEAARDRVAQATGQTPKVTLCYEAGYDGFWLARFLEQRGIECLVMEPASLQVNRRARRVKTDRIDVENILHTLIAWCRGERHVCSMVVIPSVEEEDLRRTHRERDRLVRERTAHINRIKGLLFGQGIRRINVKSSYKTLTPAELVTGDGRPLPERLGREITREIERLAQVQAQIVEVEHERDKAPTPCVATERKRHQLLCLKGVGPALSSTLTREVYYRQFVNRRQVASYIGIAPSAYDSGDGHRSQGISKAGNRLARVAMIEAAWLWVRHQPDSALTQWFHHRTQGQKGRIRRVMIVALARKLAIAFWRYLETGLIPEGAVVK

SEQ ID NO: 193738 - protein, 380 aa, unidentified
MDERIKFFIGLDAHKDSTSVAACEATRDPARFVGTIGPDVRVLLKLLAKAGDPAQVSVVYEAGPTGYGLYRELCQRGYRCEIVAPSLIPRRAGDRIKNDRRDCARLAELSRAGELKPIWVPDESHEAMRNLWRAREDAVGMRLKSRQQLKAFLLRQARRYPGKTSWTKSHERWIADQRFDHQADRIALAEYQLAVQSAEQRVQRLTIALTEATQGWRFEPVVAALRALRGIDTVSAIGLVSEIGDINRFTSARQLMGYLGLVPSEHSSGNSIHRGSITKTGNAHARRLLTEAAWNYRFPARLSRNLRDRSDSVPEAVRSHAWKAQVRLCGRFARLSSRGVQVNKVCVAVARELAGFVWAIAHQVSPAAPSFIDSTASGPR

SEQ ID NO: 193739 - protein, 344 aa, unidentified
MDNHTQYLGFAGVDLAKKVMQIHFVTEDGEITDKSVKRAEFLDFFRNRGKCLIGMEACGSSQDWARKLEAMGHEVHLMSPKAVKPFVSGQKNDHNDAIGIYKAMFNGVRRVPVKSTEIRDLQTLRRIRSQVTKDKVKEINHVRGLLAEYGIVMGKSLNAFNKDISSALEILTERGDVSPLVAEELRTTVEAIKAKIERQKKLDQEIEQLARGCKNYENFLKTPGVGPFTAAMLCVLLCDPSIFANGRQFAAYIGLAPRSRGSGGKNYVIGIPSKFNCDCESRAVFVECAQAIARCKNKSPWVEGILRRKPKKVALIAIANKLARQVWAMANKGESFKQMAILTA

SEQ ID NO: 193740 - protein, 341 aa, unidentified
MDSIYYIGLDIHKKTIAYCVKRPDGVLLRQGTISAQRQALLEWVSGLPGCWIGAMEATMFTGWVYDFLKPHALELKVAHPEMLKAITAAKKKNDRADAEKITDLLRVNLLPECYMAPTEFRELRRILRYRNMVVRTAVGMKNKISGLLMEVGASYDKKRIHGKRYFDSLLDRVEDVPASVKELLALSRSNLELFTAVQKKLLSTLKDNELIRQRVERLMSIQGVGEVLALTWVLEIGEPGRFSSSRKAISYCGLCSAQHQSAGREQRGPISKKRNKHLQTMLIEAAKLAPRWNPQLAALYARELARGNRNRATLAVARKLVKYILAVDRRESDFETLKQAV

SEQ ID NO: 193741 - protein, 358 aa, unidentified
MPEHRAETFVIGGVDTHKDLHVAAVVDHRDRVLGTESFPTTRHGYRLMLAWMRSFGDLQRVGIECSGSYGAGLLRYMQTAGVEVLEVTAPDKLDRRRRGKNDYFDAESAAHAAFARRYTVTPRSRDGMVESLRVLRGCHKTAIQARRIALQMIQATIVCAPDKIRDPLRSITRMQLIRTLAASRPDLTAYRQVEEAYRISLKSLARRYLELHDEIADLDDMIEAIVKDLAPELLAQTAIGVNSAAQLLLTAGDNFDRLKSEASFAALCGVSPVPASSGKTVRHRLNRGGDRAANSAIHIIAIGRLRLDARTQDYVARRIAAGNSKLEAIRCLKRYIAREVFATIMRRHREINQSQIAA

SEQ ID NO: 193742 - protein, 350 aa, unidentified
MDKELYIGVDVSKQTLDLAYYDGESIDWKKAHIKVSNNNAGFKKIGSWVAKVSKGFDIVLFCMEYTGLYTQNFRLWLEEKHYIYRMVEPRKMHRFEPDLDDGLRSLDRIKTDELDSFRIAIYCEQNHRKILRNPSKLPPPVYFKLKRLLAERKQTVKQSVLYKQQLHDICAHDTDLSVERKNGQLKTLNDALKGIDNEIDMYIKEDADISKNFSLLTSIPGIGRVVALETIVLTENFMAIDNPRKYACYIGVAPFKKESGTSVRKGSSVSKKGFKQAKADLSIACLVCMQHIPNIRDYWERKRKEKCSGIVFNAIKFKMILRMFAVIKRGTPYVETDNYRNGKNKQPGVN

SEQ ID NO: 193743 - protein, 321 aa, unidentified
METVSFEQVVSRGCGLDVHKETVVATIDGEGLERTTREFGTFTRSLTELKDWLVENKITHVAMESTGVYWKPVYNILEPTGITVWIVNARHVKNVPGHKTDKKDSRWICKLLLAGLLKPSFIPPREQRELRDLTRYRKKLIQDMASNKNRIIRILEDCNVKLSSVLSDTSGITATKLINKLCDGKKVTLQDIDEVYHGKIRATKEEIWEACNGNITDHHIYLLGKIRSHNRHIESLIEELNQKIRHMLSPYENVLELLREIPGLSHKTVEDLIAEIGLDMEVFPSEKHLTSWVGVSPGNNESAVKKKVVEPPTGINRPKQR

SEQ ID NO: 193744 - protein, 315 aa, unidentified
MEAMIERCAGLDVHQETVVACVLYGSLDKKPQKAIETFKTTTKGLLSLSDWLATFKVTDVVMESTGVYWKPVWNILEGTFHLILANAKHVKNVPGRKTDVKDAEWLAQLLRCGLIEGNFVPPEDIRDLRDLTRYRSKLIGHRTSERNRIHKILQDANIKLTSVFTDIFGVSGRRILAAIINGEKIEAKDLEKMVDGRSRTSIDDITEAINGRIRRHHRDMLRYHWEHMTYLEKNIDDIEEQIEQLLTPYRKEIELIKTIPGVNKDSSAVFIAEMGVDMSEFKSAKHLASWAGVSPGNYESAGKKKQVKPHTEIKA

SEQ ID NO: 193745 - protein, 351 aa, unidentified
MKYYTSTTEFNCGIDLHAREMYVCVMDRQGNKVVHTNIVGNDFAHFLKKIEPYRHSLTVVCECTFNWYWLADACFEAKLPFVLAHALYLSHIHGGKNKNDRIDSEKLAHLLRSNLIPPSYVYPSERRPIRALLRQRMSYVWQRAALMTHVSMNQTAEGLTPAAKGGHNRDVWVERILAQYDNPLHRMAVTCEMDVIRAYDIQIAKLETEIIRQAKQHEGRDYHLLLTVPGIGRILAMTILFELDAIERFATVKDFLSYARLVKGSVASAGKVKGLTGGKMGNAYLRWAFGEAAVLGKRTYPLLSAYADRLVAKRGKFKGNAILAAKLARAVYFMLQKGTAFDTEKLIATSL

SEQ ID NO: 193746 - protein, 315 aa, unidentified
MSHPATPSRFIGCDVGKTAIVVFDTASGRTYAVANTPEALSGFAASLEATCFVVCEATGGYERDLLAALIAAGVPACRADARKVKAFIRSFGTLGKSDAIDANALARYGLDRYAELPLWSAREPERERLQALVLARRDLVKDRLAYANRRAAPAAEPVHPYLQALVESFDAQINAIEADIKTLCAACEPIAKAVNVLVAIPGVGQKTAAALIALMPELGSLPRRQAAALAGLAPHPNQSGQTDAYRRTRGGRPEVKRVLFMAAISAAKHNPTLSAFYKRLLSAGKKPLVAITAIMRKLVVIANAKLRTANALQVS

SEQ ID NO: 193747 - protein, 374 aa, unidentified
MNFNTFVGLDVHKDSISVAVAFCEGEPQDRGSIPNNPKAIERLTRKLGPGAIFAYEAGPCGYTIYRQLKRLGFPCIVAAPSLIPEKPGERRKKTDRRDAKKLARLLRSGDLTPVWVPDEKEEALRDLTRAREEAVRDCTRKKQQLSKFLLRLGVYPPPGVKPWSRRYFAWLKELQLAQEIHRVLLADHLRALEEAIARRKRLEEAIKEYVEKGLDPESRALLMAWQALQGVGMITALTFLAEMIDPLRFAKPTQLMSYLGAIPGEHSTGTRRRQGSITRTGNAHLRAVAVEAAWHYRHRPQQGWRLKKRQKGLSPEVIAIAQKAQERLHDKFWRLIARKKPPQVAVVAVARELLGFVWAIARQVAKERAALKAA

SEQ ID NO: 193748 - protein, 351 aa, unidentified
MDHYAGIDVSLECSSVCVVDGSGKIIREAKVASEPEALIDWFGSLEVELARIGLEAGPLSQWLYAAMKEAGLAVELLETRHVSDAFKAMPVKSDRNDACNIAQLMRLGWFRPVHCKSMSAQETRAILTARKLIQTKLQDIENSLRGILRGFGLKVGKTTRRGFAARINELVAGHPALEAIAKAMLAAHAVLLHEFKGLEKRVRTMSLLDAKARLLMSTPAVGPIISLTYASAIDDPSRFASSKRAGPLFGLTPKKYQSGETDYTGRISKNGDASVREALYEAAHIILTKPVKGCAQLKSWAMRIARRAGMSKAKVALARKLAVIMLRMLKDNVPFNAAGKAMAAKAITVAA

SEQ ID NO: 193749 - protein, 368 aa, unidentified
MNRKSSKLYVGMDVHKESIDLAVAEESGEVRHHGQIGGDMNALWRAVRKLESSGRELVFVYEAGPCGFGIYRGLTARGHSCWVVAPSNTPRRVRDRIKTDRRDSLKLAGLARAGELTPIYVPDVRDEAMRDLVRTREDAVMMQRQARQRLAALLLRNDVRYAGKTAWTAAHRRWIADLRLPQPAQRLAFEEYVQAVEEASARVQRLSQCIEQELVTWRWRPVVAALQACRGIQLIHGVRIVAELGDLSRFRHPRQLMGYLGLIPGEDSSGEHRHQGAITKAGNSSARRALVEAAWAYQFSATVSALIARRQADVPKAALDIAWKAQLRLCARFRRLAARGVNRNKIVVAIARELAGFVWAIAQQVKPV

SEQ ID NO: 193750 - protein, 333 aa, unidentified
MEYGAIDLHLRHSQIRIVREDGSVVLERRISTTRESLTAMFQARPRMRVIVETGTESEWVAQTVEACGHEVIVVDPNYTLMYGTRQRRVKTDRRDVAALAEANRHGIYRAAHRVSAAQRHQRRVLRVREQLIRVRTQAINLVRAQLRQEGYRLSSGSAGRVVARYRALAITGALAQALAPVIALLEHLAPAIGGANTDATAAAQQDPIVRRLTTAPGVGPIIGLTYRATVDDIARFRAAASASAYFGLVPCEDSSADRQRRGRITKRGPTTARSLLIQAAWGGGGSARGIRCSGGRVGLRSGAGAASRSWRSPVACVGSSMRCGATARRISRR

SEQ ID NO: 193751 - protein, 519 aa, unidentified
MVVVGTDAHKYSHTFVATDEVGRQLGEKTVKATTAGHATAIMWAREQFGLELIWGIEDCRNMSARLERDLLAAGQQVVRVPTKLMAQTRKSARSRGKSDPIDALAVARAVLRETDLPLATHDETSRELKLLTDRRDVLVAQRSLRTCRGGSEATTMVVVGTDAHKYSHTFVATDEVGRQLGEKTVKATTAGHATAIMWAREQFGLELIWGIEDCRNMSARLERDLLAAGQQVVRVPTKLMAQTRKSARSRGKSDPIDALAVARAVLRETDLPLATHDETSRELKLLTDRRDVLVAQRTSAINRLRWLVHELDPERAPAARSLDAAKHQQALRTWLDTQPGLVAELARAELTDIIRLTGEINTLAQRISARVHQVAPALLEIPGCAELTAAKIVGEAAGVTRFKSEAAFACHAAVAPIPVWSGNTAGQMRLSRSGNRQLNAALHRIALTQIRMTDSRGQAYYQRLQDAGKTKRAALRCLKRRLARTVFQALRTVHQPSSEHTQPAAACHRSYCSRSCLSG

SEQ ID NO: 193752 - protein, 356 aa, unidentified
MEKLTTVGIDLAKDVIAVCVLDVHGAAMERRVFRREAFERWAEQLPASNVAMEACGSAHHWGRWFAARGHTARLIAAEFVVAFRKGGKNDTADAEAVAIAARQPTMRFVPIKSVDQQAILAWHSVREGWKEERTALLNRMRGLLAEYGVVIARSADRFLAALPKLSEDSRLPDPVRALLLEAREQFAALHARLARCDAQIAAHARNSAAARRAGELLGVGPITSSALIATVPDARVFKSGRQFGAWLGLAPRQHSSGGKTRLGRISLRGNVYLRTLLIQGARSTLQSAINTEPSRASRLQRWIIELYARKGYYKTLIAIANKHARMLWAMLAKDQRYDAAAWQRHPMHQPPLAGNA

SEQ ID NO: 193753 - protein, 357 aa, unidentified
MPTEAFEGSVCSKIAVGTSSGPEWLNELEVRITREGSTKMAKRTTICAGIDTSKRKLDVAIDGRREQLQIENTPDGHAVLLAWLRQRRVKRVGIEASGGYEQPIVAELRRNRFVVVVFQPAQVRAYAKYRKQRAKNDRIDAVLIAACTAEVEEIHPAPDPRLSSFAEHLTLIDQIGEDASRLKNRIETCRDPRIKKLWKEELVRLERLQRAELKLLVGSIRRHGDLAGRLDLIHSVEGIGLPTAVAILVRMPEIGQITREQAAALAGLAPYDDDSGEHTGPRHIAGGRERLRHALYAATLAACFRWNAQLIVLYERLIAAGKGHKRAMVACARKMLIFANTVVARGTPWQKSASIAA

SEQ ID NO: 193754 - protein, 373 aa, unidentified
MKYTTVYVGMDVHKESFTLACYTNEKEEAEYVQRTEGHYSKVISYLEAMRFHYGDDVTFICGYEAGCLGYTLYHQLTSHHVRCVILAPTSMPTQKGKKKVKTDKRDARKIAKCLAHHDYSPVHVPTAKDEKTKEYIRMRDDHKLALKKVKQQILAFCLRHNLRYPGGNRYWTIAHLKWLRELKLGDVYQEILEEYLLTYTNLVDKLERLDKRIEELAADQEYAENVHKLSCFIGIKTQSALSLITETGDFKRFANAQQYASFLGLVPGEDSSGEDQTRLGITKAGNRHLRTLLVEAAQGYSRGQIGHKSKELKKRQEGNPPEVIAYADKANERLRRRYYRMVLASNKRTNVAKTAVARELACFIWGMMTGNIA

SEQ ID NO: 193755 - protein, 361 aa, unidentified
MRIIGCDLHARQQTLAMLDTTTGEVVTMTLKHEGNNVREFYSKLPRPVRVGIEATGSMQWFVNLLEELGMECQVGHPATIRAAEPRKQKHDRRDADLILKLLVENRFPRIWLPSKELQDLRALLRHRHQWVRIRTRIQNAMQAIALANGLRRGPSLWSQDGQSKIAALPLAPHTAYRRSELQAMYAKFEAEIEKLNQRVEEQACERPGARLLMTHPGVGPITALATDVFLGDAARFADSKALASYVGMIPSEYSSGGRQRLGGVSKQGNPLLRFLWGEAAAHAVRRDPELQRFYRRKLVQKGLGKSRVAVARKLGIRLWIMLRDEIDYNEFCRRGQKQQKSSEACAGMPDTGHGAKQSPAD

SEQ ID NO: 193756 - protein, 346 aa, unidentified
MKHSVGLDVSVKETAICIVDEAGKVVRETKVATEPEAIIAFLNGAGLEYARVGLEAGPLSQWLVNGLAEAALPVICVETRHMKAVLKAQQVNKSDRNDARGIAQMMRVGLYKPVHVKTLVSQQRRMLLTSRKLLRDKLQDMENELRGTLRNFGLKVGVVSSGHFEARIKELVAGQPPLEMIVVPLLAVRRVVREQLAKLDKMVLDQVRGDKLCRRLMTVPGVGPIVALTFRATVDQAQRFARSKTVGAHFGLAPRRFQSGERDYDGRISKCGDAMMRTALYEAAQVLLTRTQTWSWLKAWGMQVARRRGARKAIVALARRLAVVMHRMWINGTEFRWRKEADTATA

SEQ ID NO: 193757 - protein, 332 aa, unidentified
MSVYVGIDVHRKRSQVAVIDQGGEVLANRNVPNGVEPILRVIGGLPSGTPAAFEAAFGWGWLVELLEGYGFEPHLVHPLQCKAIASARLKNDKVDAAILAQLLRADLLPEAWIAPPAVRQLRALLRHRAQLVRLRTLLRNRIHAVLADHGYGRPEGCWSGPGREWLASLKLPAVSREVIEDALALTGALQQPIDRLDWEVHQRARSEPAVKVLTQLPGVGPFTALVLLAEIGDITRFGSARKLASWAGLTPTVRGSDRTVRHGHISKQGSVWVRWVLCEAAQTAKRHPDFAASYQAIAARRGKKIATTAIARKLLTRAYHLLTDASSAGEPQ

SEQ ID NO: 193758 - protein, 359 aa, unidentified
MQTQRKELNFKGQNIYVGMDVHKKSWSITIMSEHLEHKTFSQDPSTDILHRYLVKHFPGATYHSVYESGYCGYWIHRELLSRQINNIVVNAADVPTTGKEKANKTDKRDSRKLARTLSKSELEGIHIPSRKTQEDRTLLRVRYAIRKNLSKEKVRIKSMLNFYGIEHPERFEKNTTHWSKRYLEWLKSIPMEYQTGKASIDLLIKQVEELRKLLLEVNRKIRQLSRDDDYRENFELIDSIPGIGLIIGMTLLVEIEDIQRFNNIDQFASYVGLVPTCHSSAENEQNGKITFRSNGLMREMLVESAWTVAAKDPAMHLAFSELCQRMESNKAIIRIAKKLLNRIYFVLKNKQKYVCCIAE

SEQ ID NO: 193759 - protein, 454 aa, unidentified
MGQAMSKKRGRSKRLSTINSNAAGIDVGSQFHVVAVPTDRDDEPVRTFQSFTGDLHRLADWLVACRIDTVVMESTGVYWIPLYEILAARGLRVLVANARDVKHVPGRKTDVNDAQWLQQLHAYGLLRGSFHPPADIAALRAFLRQRERLLDYAASHIQHMQKALIQMNLQLHHVVSDITGKTGMRIIRAILDGVHDPATLAAHRDVRCKASMDTIAQALEGNYRPEHLFALSQAVALYDTYQEHVADCDERLEALLVQLRAPEPPQAPLPAPRHKTRQPNALSFDVRAALYAMIGVDLTQIHGIGPSLALKLVSECGTNMTKWPTAKHFTSWLCLSPGNKVSGGKVLSSRTRRSKSRTSALLRLAAVNVGKTDSALGAFYRRLAARVGKAKAVTATARKLAILFYNTLRYGVDYSDPGASYYEERHRTRVLHNLERRAKQLGYTLEPAQVAEVS

SEQ ID NO: 193760 - protein, 343 aa, unidentified
MGEVSTIGLDIAKSVFQVHGVDSCGEVVICKRVRRSKLLEFFAALPRCLIGIEACPSAHYWGRELQTLGHKVRLIPPKYVKAYLKRNKNDANDAAAICEAVTRPSMRFVPTKSEQQQCGLMLHRSRQLLVRQRTMLSNAIRGHLAELGVVSAKGRNGMAELLGIIANEGSNCIPAIARLSLEVLARQYAAIAAEIGTIEKHIHAWHRSCEASRRLEEIPGIGPIIATALVAEVGDWKAFSSGRNLAAWIGLVPKQHSTGGKSRLGRISKQGNRYLRWLLVAGAMAVIRYARQHGTKRSWLVRLMERRPPKVAAVALANKIARMAWAVMVRGERFTEAKLLPAT

SEQ ID NO: 193761 - protein, 312 aa, unidentified
MTQNEGFVGLDVGKFEIYVFISKTGSSFAVPNTASGHASLQSQLGKPSGQIIALEPTGGYEWAVWEILDTAGFDVRQVSAAHVRAFARATGSLAKTDPIDARLIAQYMAFRPQSGRRLPVENLRHLNALSTKRRQLVELRKRLKCQIQQHHDPELIVLDTELLELLSRQIKVLEDAVQIQINADPQMQRHAKILRSIPGIGPVLCAVLIGEMPELGAIGDKQIAALAGVAPINNDSGRTEGKRSIRGGRYNVRCLLYQAALVASTHNQHLKAFAKRLKQKGKPHKVILIAVARKLLVIANALVAKNQLWSTN

SEQ ID NO: 193762 - protein, 354 aa, unidentified
MSNPNRWVGVDLHRRRSQIAAVDEHGELTLSRRIVNDRDTFRELLGDPDGTHVALEATYGWEWLAELLQEAGYDVHVAHPLRTRAIAAARVKTDAVDAKTLAHLLRTGLLPEAYIAPPELRDLRELLRHRAVLTRMRTAVKNRVHALLARQGILPEHSDLFGNSGREFLAGLELPDGSRNRLDSLMSLIGDFDREITTTTREIDARAKADDRVDVLCQIRGVGRYTAMLVIAELGELTRFPTARHLCAWAGLAPSVRSSDGKARLGHISRQGSPALRRALTEAAQKIPTGGGPLRATFERIAKRRGRNIAKVAIARQILTLCYYGLRDGEIRCLKGQQPDIDDHDNDNELAEVA

SEQ ID NO: 193763 - protein, 358 aa, unidentified
MAKRTTKSENGKQMVATAKDRVFVGLDVHKKSYHAAVRINGREITTRVLAPTAEAVLVFLEPYRSGRLHVVYEAGPTGFGLVRALREAKVSADVIAPSKTPQTPAKANKTDRLDCRQLTFYDEKAMLKTVAVPTVEEEADRQVIRLRDQVVDARRRIKQQIKSFLLQHGAAQPAGLANWSKESVEMLGQLPLVAPLRFCLDAMVAELKDFDERLGQVNREIERLSQTPRHAEAVMRLRKYSGVGVITAMQYRTEVFRPGRFANERQVAAYLGLAPRVSESGERHRTGPLLKAGHGRLRSLLVEAAWIWIQKDETAKATYKRLLQNTAQPNKAITGMARRLAIQLWRTLVPPEERRGAA

SEQ ID NO: 193764 - protein, 373 aa, unidentified
MNYSTVYVGMDVHKESFSLCCYTNEKEQAEYPQKINAHYSKVINYLEAMRFHYGDDVLFICGYEAGCLGFTLYHELTAHNVKCVILAPTSMPVPGGKKRVKTDKRDAAMIARCLAHHDYSPVHIPTQKDEQVKEFIRMRDDHRLALKKIKQQILSFCLRHGCHYNGTQNHWTQTHLSWLRTLRVEELHQEILEEYLLTYDYLTAKLGRIEQRIEELASEEEYRENVHKLTCFLGIKTQTALSVITETGDFRRFPDACHYAAFLGLTPGEDSSGGDQNRLGITKAGNRHVRMLLVEAAQSFARGKIGYKSSVLAARQEGNSPTVIEYADKANERLRRKYYRMTLKNGKKSNVAKTAVARELACFIWGMMTEHYA

SEQ ID NO: 193765 - protein, 338 aa, unidentified
MTTKISMLAIDLAKGSFQVCAVAADGAVLYNRVMSRTRLAALLAEQPACVVAMEACATSHHWGRMAQSHGHEVRLVPAVYVKPFVKRQKNDRADAEAIAEAALRPTMRFVAVKSADTQGRAVAFRTHQCLVRQRTQLINALRGHLAEFGLVAPKGPASLKVLENALADPASDVPGPVREMGAIYVEQIARLTEVIGRLAEELEAASRTDTQLRRLCTIPRIGPVTAGAVAAFAPDLDTFDSGRNFAAWLGLVPRQRSTGGKTRLGSVSKMGQTDIRRLLIVGAMSVIRWVVRKGGSANRWLAALVMRKPKMVAAVALANKMARMIWALTTKEQDYRMA

SEQ ID NO: 193766 - protein, 369 aa, unidentified
MNMQASNSAILLRYCVGIDVSKDTLQICLSVIDTHGKVTIKGSSKVNNKVTAFESLLTWVEKHCKEQRIPIRYVMESTGVYHEQIAWYLFQKDLSVSVILPNKAKHYLKSLGHKSKNDKIDARGLAQMGAEQSLGLWQPLSKNIYDLRMLTRQHQRLQELKNQSDNQKHALLNSRISDEFIIQQLDKLIKLYDRQIDQIKKEIDKLLDKDPVLKTKIEQLCEIKGLATLSIATLVAETNGFTGFENVRQLISFAGYDVVENQSGQRAGKTKISKKGNSKIRRILFLPAFNAVRFGEPACQALFERVFEKTQIKMKAYVAVQKKLLTLCYAIWKNGVKYDPLYYANNVKELQGKDKKIVPTGGTTQDATV

SEQ ID NO: 193767 - protein, 342 aa, unidentified
MTAIGIDTHKATLAACTVDELGRAIGEATFANDPAGHVAFIAWARSIASEATIGIEGSSSFGAPLAWAVHHAGLSVREVPPHLSRTERQRTRRPGKSDPGDALAIARVTARETNLPPIRLPDRTSELKLLLEAREDLVAETTRVRNRLHAHLLALVPGYGGTVANLVAARHRITVGRLLRGNTAVQAELARALLARLARLERETGALTRRIGALVDGHPLLGLPGAGPITVARLIAEVGDVRRFRTADAFAALAGVAPIPASSGQIQRMRLNRGGNRQLNRALYVIAVSQSRFHPPAKAYVTRRIEVDGKTWREAIRALKRLLVRPVFRLLVQGSIVPAEAA

SEQ ID NO: 193768 - protein, 360 aa, unidentified
MTTYYIGADVHSNSTELAIEKNKKIVQRYNLPTSIAALTGVLDSLKGEKHLAIEEGPMAGWLYRNLSSKVEQLIVCDPRRNKLIDSDGDKDDKIDAAKLACLLRGNYLRPIYHTDDVSRTELKHWVSLYQDRVRDAVRNINKIRARCRMHGVSIPRMVVRNPSARAEWLSKLNNPPLAGQLEMLWIGYDATSRQVRIARRRLSMLGTKHTIIKFWGELPGVGLVRATTLFAFLDTPWRFRKKNKLWKYCGVGLQRTTSGTDKKGRPKPARLQLPWAVNRILKCAALGAAASAINQKKNLFKDYYERMLADGILPSNARHAVARKLLTVMWAMWKTNSRFNEKLCRNPDNEKVTALPRLPL

SEQ ID NO: 193769 - protein, 412 aa, unidentified
MQTLVERGCGLDVHQATVVACLLMVRRDGKVHKQMRTFGTTTRELVGLREWLLSEGCTHVALESTGVYWKPIYAILEGALEIVVANAQHIKKVPGRKTDVKDAEWIADLLCHGLLRSSFVPPKPIRELRDLMRYRRKLVESQAAERNRLLKVLETANIKLANVATDVFGMSGRLMLRALIEGKATPQQMAELAKGLLRKKIPELQLALEGKLEEHHRFLLELQLRRLEAAEKDLAVLEQRIQQKLEPYAAQLALLDEIPGVDWTLGAVIIAELGVDMSVFGSVSQLASWAGVCPGNNESAGKRKSSRIPSGNVYLKSALVEAANAAARAKGTYLRDKFFRLKARRGYKRAVVAIAHKISVAIYHMLSQQVSYNDLGDLYLDKLNKNHLTRNLVHRLERLGYTVTLTFQQKTA

SEQ ID NO: 193770 - protein, 385 aa, unidentified
MTIQIQAPRFIPREYDVFGGLDVDKKSMSVVFTDHAGSQRALRMAHQVTPLVNYVRKHFAGQRVAFAYEAGPTGFGLHDELVRRAYTCVVVAPSKVPRAPGERVKTNRLDSRKLAESLRGGQLHSIHVPSGVYRNLRHLVQMRDTHVRQLTSSKLRIKSLLLYEGIPFPEPSEKWTARAMRELQTLPCSETVRFKLDDLLDTLHFHFQAAARATKQIRQYCLDDPELQQSIDLLLSLPGIGWIVGSHLVARLGNPREIKNGRQIAGFLGIVSSEHSTGDKQNRGEITRSGDSRLRNKLIQSAWTAIKRDPELRAFYRRIYQRHPKKVAARKAIVAVARKLTNRIYVVLKEQRPYVIRPDSSIAPLTVEETVGPRERLDGAQNDQS

SEQ ID NO: 193771 - protein, 436 aa, unidentified
MFVGHRFRTDPDELDTLWARLPKDAERIEVVMEPTRNAWVALAAWFRRHGATVVMVPPEQSADLRDYYNKHTKTDRLDSKVLARLPLLHPEGLHREDSLGPGDELKRAVKIRSGLVHRRTACMARLDALLEILGPAWIAALGSDMTLTALRFLARYANPVQVKRLGKARLAAFFRRSSRQAWADERADAVIEAAATTLRLWGADGGELDFDALGADIAAEARLALTLTDEIDGFDKRIGALYDKADPAGIVRSVPGAGRVCAPQILGRLGDPTRFANLAAVRSFAGLVPAADSSGQADGHRGPTKAGDCCLREALFIAADHARKVDPTLAVRYQRLMLAGKHHDSAVCTLAAVLLTRIAACLRAGTHYLLRDTDGRVITEAQGRAIVAERYTVPSEVRAARRKVTPHRHPRRNERNERAKTGVATRSKASPVPQPA

SEQ ID NO: 193772 - protein, 341 aa, unidentified
MLYVGLDVHSRQSSLCILNSGGGTVNEIHVNGPRAGVVDRLRQLNEPFSVCYEASCGYGQLYEMLRPIAHHVAVAHPGKLRLIYGSKRKNDRVDAQKLAKLLLLDMVPPVHVPTVDVRAWRSLIVFRQRVLQQVVRAKNQIRGVLREHDLSAVKWLWSKKRLAWLESLELHPIAKLRLELAVEEFKSLQAKIKRIERELQRYADRTPAVKLLMTIPGVGIRTAEAFVAWVDDVTRFRNNRQIGSYFGLVPCQDASADKNRLGHITRDGPPVMRKLICEATWTAIKKCPGFRGFFERVMGGKPERRKIAVVATMHRMTRVMGAMLRSGASYQPAPLRKTPDA

SEQ ID NO: 193773 - protein, 345 aa, unidentified
MKYIGIDYHKQYFVATMMNEQGEVIRRDKASTDRSSIRHYFKNADLSGEVKAVMEACYGWEYFYDEASELVDELIMAHPLKTRLIAEARIKTDSIDSATLAHLLRADLIPQAYAPDSETRNKKNLLRYRSSLVAMKVRIKNIIHSVLTRNHIEDQLFTSLSDKFGKRGLSYLRAIRLKGNDTVILNDYLDLLEETGRKIKEAEKRIQGVCHEDKICTLLNSIPGIGPILAVTIRYEIDDIERFMSAGKLCSYAGLVPSTYSSGNRTYQGKITKQGNKWLRWAMIEAAQKAPAKDLWLRSFYQRISKNGKKIARVAVARKLLEIVYRIWKEEKPYYKKGTVALPFV

SEQ ID NO: 193774 - protein, 406 aa, unidentified
MYYVGIDVAKDKHYVCILDEDTQLACKAFWIYSDCVGLNELVKRLYDLSLTCDDFILAVESTGAFSENIYEYLTDLDFKVILLNSYQTAKYRDFSTMKKVKNDSIDAYVIAELIATGKYKESHISSESYHTLKVLNRLKKSLNEKIKTIQREISTVMAIVNPEINNILPNIFTKTAIAIIKEYPTAKDLQETTPKKLCKVFRNIKGNNFNEDKAKALIDISKDSIYLGRARDARSLMITTNINILELIVQEKTLLEHEIKILIDENQDDNFSNGVENLRTIPGVADKTISAILGECGDLTRFDSAKAFIGYLGLYPTQYQSGNSHTIGRLAKRGIPIAKHALYMSAVASVLHNEQLRKIFRDKVSAGKSKKEALIIISKKIATMIYSMFKYNKPYNPNRVLVSYRK

SEQ ID NO: 193775 - protein, 412 aa, unidentified
METIHERVAGLDVHKDTLVACVRVPGGRGRRESHVHEFSTTTPGLMALRDWLVSHQVGLVGMEAIGNCWKPVYYALEDASECWLLNGRHLRNVPGRRTDLADAAWIAQLLEHGLVHPSFVPPPEIRELRDLTRYRKAQIEERGREAQRLDKVLQDAGIKLSSVASHLVGVSAQAMLRAMVAGERDPEILAELAKGKLRRKLPELAEALEGRFRGHHALLVGEILAKLDHLDEAIERLSDEIERVLGPFAPQVELLRTIPGVDRRMAEALIAEIGVDMSRFGSSARLASWAGVCPGQHESAGRQRHGTTRKGSKWLRMHLTQAAKAAARTKGTYLAAQYARLRGRRGGSRATIAVAHSILVAAFHILERGTPYEDLGADWFIRRHSPERHARKLVHQLETLGFDVRLQERAAA

SEQ ID NO: 193776 - protein, 406 aa, unidentified
MRLPGKKPGSRTTDVLEFRTFYGVLQAMARELRGRGVTHVVMEASGVYTEPVYYALAELDFTEVLVVNPAHVKALRGHKTDAKDAVRLLDLYECGAVMRGSYIPSADLKEVRDLVRYRVKTVQARTSEIQRLQKTLESAGIKLDSVVSDITGMSSTAMIDALIDGERRGAVLADLAQGRMRTAGKLADLSMALTGRFTGHHALMCRLHRDRISMFDDAVAGLDATIAPLVARYPDAGALLRTLPGFGEVVTAGWPGAIGPAPHRHFGTAERLASWVTLCPGNYISARKSRSGRTGDGGNYIKPLLVQAAWAAIRVPGRLQARFHRLVRKFGGPKNKGARKRAIIAIAHTLLKIAYAVLKTGKPYQEPGADFYTRRESARARQDYLLQQLQKLNPGCVITITPPEAA

SEQ ID NO: 193777 - protein, 390 aa, unidentified
MKCQTIDQASASATAALDYDSTMIGALELSSKKWVFAVQLPGSRKHTRHTVEPNGPALETLLEKLKANGALSGRPISRVIMTHEAGRDGFWLVRFLQRRGVEVHVMQASSLPVDRRARRAKTDVIDAEMLLRTLLAWLRGEPRVCSMVPIPSEADEEARRAHREREDLLCERRSLLNRIDGILATLGVVGFKGLRRDRRKQLDDLRQPDGAKVPATAHSRIERLVERLELVMAQLATVEAARDAVIEKETPANTSERMIRDLSRVCGIGVESATLLVREAFCRNFANRRALGSYAGLTATPFARGSMAREQGISKDGNRRLRACLVELAWLWLRYQRESGLAQWFCARVNGAKGRVAKIMIVALARKLLIALWRFAKEGVIPEGATMKAA

SEQ ID NO: 193778 - protein, 375 aa, unidentified
MIKHSEVFVAFDTSKLRNAVAIAEAGRAGEVRFLGEIENTAGATTKLVRKLGAKYERITFCYEAGPTGYELQRHIHGLGHECIVAAPSLIPKKPGDRVKTNRRDAVSLVKLLRAGELTAVWVPDPRHEAMRDLTRAREAAVIDLRAKRQRVSALLLRQGRSYPADKKTWTKVHMNWLASQRFEQPERGIVFAEMMFATRQAQERVERLEQAIRTAVPDWSLAEMVTAFMAFRGIDLVSATCLLAELGDLTRFPTAPEVMGYLGLGCSEGSTGDRIKRGGITKSGNRRARRTLVECAWSYQHPPRVGIAKQAKVAAAPAKVREIAWKAQCRLNRRYRVLLRRGKLKTVAITAVARELAGFLWAAARELSSPQRVAK

SEQ ID NO: 193779 - protein, 332 aa, unidentified
MAQFTPCVGIDVSKARLDVAVFPDATSFAVDNTAAGWAELGRRCTELSVVTIGLEASGGFERGVADALQDRGFTVRLLNPFRVRSFAKALGKLAKNDSIDAEVIARFVATVPGRPLPRRSAARQKLSAVLTMRRQLTERLVMVRNQAQGLTDPLLCRLSKRHIAGLLADLRLIDRRLTEIVAGDAELAGRYALLCSMPGVGPVLAFTVLAELPELGTIDRWKIAALVGVVPYDFDSGTMKGKRCIWGGRTAVRNVLYMAALVASRCNPQLKVLRLRLAQAGKPAKVALVAVMRKLLTMLNAMLRDGREWQPASASDNPNLTTPSTSLGSIGA

SEQ ID NO: 193780 - protein, 345 aa, unidentified
MEYGAIDLHMKRSHVRIVSEDGSVIWKGRIDTRRAEFERVFASRSPMRILLESSTESEWVAQTLESMGHVVVVADPNYAAMYGTRNRRIKTDERDVTALGDANRLGVYRAAHRVSAAQRQVRRELRVRSHLVQMRTRTIGLLRALLRQDGLRVPTGSADRILLRLQQVAVPAALEAVIAPLRHLLAELNTQLAEAEVRVDARANGDAVVERLMTAPGVGPIVALAFRAVLDDPARFGGDARRVSAFVGVVPSEDSSAERRQKGHITKMGPTELRALLVQASWVIWRGRSPEGATLRAWAHALADRRGRRIAIIALARRLTRILYAMWRDGTDFGDRPRVRVSVAA

SEQ ID NO: 193781 - protein, 343 aa, unidentified
MSDVALIGIDLGKHSFHLHGQDKAGRMVFRKKLTRSQMLTLLGNFPPCTVVMEACAGAHWVARRVAALGHQAKLISPQFVKPFVQGNKNDFVDAQAICEAASRPSMRFVSPRTETQQTISALHRVREALVRERTVTINQIHGFLLEFGISLPNGPAIVKRLPAVLAEHEAALPPRLMGLLERLRAHFAYLNEQITELERELKQQLAEDDNSSRLLEIPGVGPITASVLATDLGDAKQFANARQFASSVGLVPKQYSTGGKPTLLGISKRGDKNLRRLLVQCAHAVMLRIERRHDALGAWVRTMLTRRHSNVVACALANKLARIAWAIIAKGTRYDSGQAAATA

SEQ ID NO: 193782 - protein, 385 aa, unidentified
MAPPRMPEAVIGLDVGKSSHWACVATRDGEILLSAPVANREGDLDSLFGRFPDALVVVDQSRNIGALALARAKAAGMSAAYLPGLAAHGAARLFAGDAKTDERDAMVIAKTALGIPDTLLPVGDPGPTVAAARALAAQRNFLTCENTRSKNRLRSILLESCPAFEALVDLSDGPQLRLMASLGGAWSVADAGPRRAAALTRGAARGKIEALVRSTASSTRPDAAAIAAEDRAVRLLARRISENSAEIDVITAEISALLEGDDTYRCLLTVPGIGPKTASELAISIDIEDFPSHDRLASYCGLAPRNRQSGTSISSVTASRQGNKRLKNLLIFSCNCLTRTEGRWGDYYARCRERGMPHGKALKALARKRLKVIYAIMRDRVPYAA

SEQ ID NO: 193783 - protein, 455 aa, unidentified
MKVNKVSAFRVKRGLHRVNGAEPQVVGLTPQTTDIRKTDTMKTYILRQPKPVEPQKSSRTPRPKPAPLMVPVGHWERPETAAKGPVLFIGLDVHNDSIAVSLAPSDAMEVRRYGIIGGEHEDVLKLAHKLQAAHPGTLLKFCYEAGPRGFALCRCLRSHGWHCILVCPSKVPRKPGERVKTDRRDADDLARLYRAGELTGIYVPEPEDEAMRDLIRARFQVGRQQHRARQQLKMYLLRHNLRYGGQSSWTPAHLRYLAKIKMPFPVQQVVFQEMLDVISEATARLERYDQEIERAVPGWRWEPAVRALMSLRGMALLHAATLVAELGDFNRFEHPGQLMGYLGLVPSEHTTGKDRQQGGITKMGNAPARRALVEAAWQYRAPARLSPHLKKRQEGLPKAITDIAWEAQRRLHHRYTHLTRVGKKKSQVAVTAVARELSGFVWAIARQVKPKAAVA

SEQ ID NO: 193784 - protein, 312 aa, unidentified
MATSSYIGIDVSKARLDVAELGGRVWQVDNTPDGIARLVQQMAERQPELIVVEATGGYQRSIVDALFHAGISVAMVNPTRVRQFARACGLLAKTDKLDAQVLADFGQRVQPKRYVGKTEAEKQLSALLVRRKQLEEMLKAEQNRLRTISPSLRGSVERIIAILREEKKRLEEQIHEFLKEQKAWQEQAEILGSAPGVGPVTTATLLADLPELGKMDRKKIAALVGVAPMNYDSGKKRGYRKTKGGRTDVRSVLYMSTLVATRYNPIIQAHYQQLLKRGKLKKVALTACMRKFLTILNAMLRDQQPFRGVARN

SEQ ID NO: 193785 - protein, 427 aa, unidentified
MEEVTDEPLYRDRVCGIDIGKAQMAATIRVPSDANPARRAAETRSFGTTKREVLALADWLRCWQVPAVVMEATGDYWKPVFYRLEAEGFECVLADAKQVKHLPGRPKRDPSDSRWLAACFERGAITSCFVATPEFRIIREHTRYRRDLTAERTREKQRAEKLLESAAIKLSSVVTDLHGVTGRDIMDHLIAGERNPKVLAQLARARARRKISELEAALEGAEFFTPQLAALLARMLARIDQLNASIGELTAVVETLLEPYEEQLQQAESMPGWGRRSAQDAVAGTGVDMTRFRTGGHLASWAGRTPLDNQSGSRSGRAKSKKGNRYLAAITGETAVAAGKTQTREGARYRRIARRRGKPKAGVALGNTQLKVYHALLSSPGTRYQDLGVDYYDNRASTRRQVRALHKRASELGYTLVPDLTGCPEIA

SEQ ID NO: 193786 - protein, 344 aa, unidentified
MEHFAGIDVSLKDSSICVIDAAGRIVREAKVASEPEALIAWFGGLGLAVTRIGLEAGPLSQWLHAGLTGAKFETVLLETRHVKAALSAMVVKTDRKDARGIAQLLRMGWFRPVHRKSADAQEVRALLVGRKLLQGKLRDVELSIRGILRGFGLKVGEISKGRFAARIRELVAGHEMLETVTGAMLAAREALLAEFMRLHRRMLVTVRADAVCRRLMTVPGVGALVAVTFKTAVDDPGRFSSSKAVGAHFGLTPKKYQSGETDVTGGVSKVGDAMVRTALYEAANVLLSRTTRFCVLKAWALAVARRRGAKRAKVALARKLGTVLHRMWVDGSTFRWSKEAPAAA

SEQ ID NO: 193787 - protein, 285 aa, unidentified
MERYLGMDVHAASCTLAIISEKGRKLRDFVVETNGQALVEAIRMIPGHKHLVFEEGLQSAWLYEILNPHVDDIVVAGITTSQGQKSDKIDAYGLAEKRRVGNLGKRVFKAPRQFTRLRELSRIHMTLVSDTVRVQSRIKSLYRSRGIWVTGANVYGVRHREQWQSQLPSSHQTRATRLYEHLDFMLDQKKQAEADLLHEAKKHPIFSILKTAPGFGPIRAARMIPIVITPHRFRTRRQFWSYSGLGIVTRSSSDWVQTANGKWIRAQVPQTRGLSRQHNRVLKDI

SEQ ID NO: 193788 - protein, 341 aa, unidentified
MPIVTIGIDLAKNVFAVHGVDENGKVMLIKPRVPRDQLVTLISQLPACLIGMEACSGAHHWARVFQQHGHTVKLMAPNLVAPYRMSGKRGKNDAADATAICEAVTRPSMRFVPLKDEHQQATLCLHRTRQGFVEERTATYNRLRGLLSEFGVVLPQSPEKLRRYITEHLDALPGWAKRSIRDLLEHAGHIEDRLLEYDRAIAEIAREDARSKRLMQLRGIGPTTASALLASIGAGHDFRNGRQVAAWIGLTPGQYSSGGKARPGSITKAGDAYLRGLLVNGARAVIASLGEKQDRFSRWARTLVERRGYWRVAIAIAAKNTRLAWAVLKYGDDFKLEPAAG

SEQ ID NO: 193789 - protein, 438 aa, unidentified
MICAAIERCAGIDVGKTFLAVCVMTGPLGGEARAEKRRFGTTIAELERLRQWLQLEQVTHVVMESTGSYWKPVFNVLETSVKVYLANSQEVKNRKGHKTDDKDGWWLAHLLRHAMIHPSFIPPRPIRELRDLTRRRRRLLEDVTSEKNRVQKILEDANVKLGNVLSDVFGVSGQLMLDALLEGKAGAAEIAQFAKRRAKKKIPAIIQSLEGHRMSDHHRQMVRYSLKHLEFLEEQIGEMDRDIVAKIGAAGLGPSWQLLQTVPGIQERSAAVILAETGGDMKQFPSRGDLSSWAGVCPGNHRTAGKNKSSRTTGGNPWLRGTLTECAWAAAAKKNCFIKEKFWRHVSKSGGKKAPALIAVAHTLLKLIYEVLRTGQPFVDRQAPPLDDGQRQRMIRHHIHRLGKLGISVPQYLVSAPLESQTIRSCYSTGQTRSSPSH

SEQ ID NO: 193790 - protein, 345 aa, unidentified
MEHFAGLDVSVKETAICVVDELGKVCREVKVTSHPEDLLGVLKDSAFRFKRIGLEAGPLSQWLFDGLAKADLPVVCIETRHTKAFLKAQVNKTDKSDARGMAQMMRVNLFRPVHVKTLASQQRRALLTGRKLLQEKAIAIENDIRGLVRNFGLKVGAVGVIKFENRIRELVDGMPDLADITDALLIARRKIREQYAKLHRKLLAIVRYDKVCARLMTIPGVGPVVSLAFSATIDIPARFTNSKAVGPALGLTPILNQSGESSRVGRISRCGDNMMRTLLYEAAQVMLARTTRWSWLKAWAMNVAGRRGLQKAIVALARRLAVIMHRIWSDGTEFRWTREKALATT

SEQ ID NO: 193791 - protein, 363 aa, unidentified
MRFYKNQHQFYIGIDLHARTMYICVINNIGETVFHKNMECSRDNLELVTNTFGKDIVVGVECIFTWYWVADFCAEQGIDFALGHAYYMKSIHGGKTKSDKIDSEKIANMLRGGMFPIAYAYPKAKRAVRDLLRRRLFFVRQRAELSVHLQNTNHQYNINEPLTSSRMRSEVYRNTIPQKFSDPATLKMVNADLAMFQSYHDIITKLEFQIEDSMEVQDPVSYSIINSVPGLGFILSLTILYEIDDIHRFSDVGKFISYCRLVKCSHESAGKKEKGGHNKIGNVHLKWAFSEGAVLFLRNNERGQRWHDKLVQRYGKAKAMSIIAQKLGRTVYYMLRRKEAFNPDKFYGDVKIENKDSDSEHLA

SEQ ID NO: 193792 - protein, 376 aa, unidentified
MLSARPAGATTRPHRFERMAITTMAHPTPPRVTVGVDTHKDTHVAAARDQLGRRLGTTQVPASSAGYAQLLSWAGALGEVAAWGVEGTGSYGAGLARFLAGHGQRVVEVNRPDRQARRRRGKSDAVDADAAARAVQAGEATGVPKAQDGVVEMLRALRAARQTAVKARTQAINALKGLLVTAPAELREQLGGLPTGRLVGAAAELELGTLTTPTAAVRLALRGLGQRYQHLDAEIALLTEQLDALTARHAPKLRDLHGVGPDCAAALLIAAGDNPRRLHSEAAFAALCGTSPVEASSGKTRRHRLNRGGDRQANAALHRVVVVRLRWHQPTRDYATRRTTQGKTSKEILRCLKRYVAREVFAVLRQIDDPGLAAAA

SEQ ID NO: 193793 - protein, 320 aa, unidentified
MMAQNDLVVVGIDVAKDKVDACIRALALRQSCPNTAQGNRKLVAWLRKYRVSKAVMEASGGYEREWRKVLHNAGIEVRIVDPKRVRSFALSAGRLAKNDAIDAEMIAWFAETFSEAPNQTHDAAHEELVALVKARIGLVELRTRLQSQDAHAAPGQVRKAHARVLKSLAAEIEKLEAAIATKVKATADFAERAAIIESVPGFAETTSANLLAGMPELGHVSDKIAAALIGLAPYDDDSGQRRGERHIRGGRRWIRNAIYMPCLGAATQNNPVIKAFYDRLIAKGKPPKVALVACMRKLIIILNTLIARQQKWDPSRYVVG

SEQ ID NO: 193794 - protein, 340 aa, unidentified
MAKNIFFIGLDIAAYDFAASIYQAPEKPIMTKESIKNSPEGFSMLLSWLKEYDIDKTNSLVCMEATGVYSEAVAYYLTSCGFKVSIEPPLKVKRAFDPVGHKTDALDSRQIAEYAYRYNDELKFWQPKEEIIEKIRQLLTAREQFTKQKVALKNAMHAYSRQMVQVALIKEAHQETLTQIKKQIARIDRELSKMMKQDPAISQKMNNLKSIPGCGMLLAANLIAITNNFKQISNYKKLAAFIGIVPYQHQSGTSIVKRPRIRHFGPRYIRKLLRLAAQSIATHDITFRRYYLRKVAEGKAKALVLNNIANKLLKVAYATIRDNTCYIKEYKSIHPMYLKI

SEQ ID NO: 193795 - protein, 342 aa, unidentified
MQVTTIGLDIAKNVFQVHGIDAAEKVVVRKQLRRSQVLAFFKALPPCLIGMEACATAHYWARELTKLGHQVRLMPPKDVKAYVKRNKNDAADAEAICEAVRRPTMRFVQIKSVEQQGRLMLHRVRDLLMRQRTQVINALRAHLAELGIVAAQGREGIKELLKIIAGEEDAGLPVDAHASLVVLAAELQAMQTMIGSIDKRIMAQHRSNEASQRLESIPGIGVTGATAIAATVPDPKVFRSGRDFAAWIGLVPRQASTGGKQKLGPISKRGDRYLRRILVVGACAVLRYARQQPQKYPWLTQLLARKPFKVVAVALANKMARIAWALLAKGGTYRAPVLVAAA

SEQ ID NO: 193796 - protein, 436 aa, unidentified
MRGCRCSMIMGFTKPIEHSNLTRKEGDFMNPLYVGIDVSSKSNVVYFMLPDGSKQSNFSVANSHDGSTQLVKRIHAAIESMSLDTVLIGLESTSVYGDNLVYFLREDESLAPFNRKIHVLNPKQVKKFKDAYNDLPKNDYVDSFVIADCLRFGRINKEVYIGDYRYKALQNLTRARFFTVCNLTKEKQRFINVLFKKYSTITQEKVFSDTFSTTALAVYDEFESAEALAYMDLQELTAFIIKKGKNRFPDPDAVAKAIQKAARSSYRLPKTVNDSVNQVLSISITSIKALEVQIKEFDKAISAQIQLLPNVLISIPGIGPVYSAGIMAEIGDINRFANQAQLAKYAGLAWTQYQSGNFEAENTRLIKSGNRFLKYYLCEAAFSLVRCDKEYKAFYHQKYKEVNRYQHKRALALTARKFVRLVFTLLKDNRLYRSAK

SEQ ID NO: 193797 - protein, 353 aa, unidentified
MKCDKYMGMDVHQAMTVVVVLDADGKVVMETMVPTEAAAIIRLVRSLSGPLRVTFEETTQAAWLYEVIRAYVTEVIVCDPRRNKLLEDGSKADKVDALKLAELLRAGLLRSVYHGHEATRKLKELVRAYETLSIDTLRTMARIKAIYRGRGIRTPGRGVYQPKQREQWLPTLTEPGIRQRAAWLYEQLDQLQPLRRKAKQTMLIESRAHRAVSLLRTIPQLGPIRAAFIVATVDTPHRFRTKRQFWSYVGLAVVTHMSAEYEMKAGRVVRCRKPISTRGLNPNCNRRLKEVFIAAATSASNRKAYGSFLNKRQENGMRPEMARLTLARKIAATALAVWKKGEEFDPKKLNVTT

SEQ ID NO: 193798 - protein, 456 aa, unidentified
MAVRNRNVIPKSGKCRAPALTITHPNAAGIDIGSASHFVAVPPDRDDQPVREFPSFTVDLNALADWLTACKVDTVAMESTGVYWIALFELLESRGFTVLLVNARHVKSVSGRKSDVLDCQWLQQLMTYGLLSGAFRPVEQVCVLRSLYRQRGMLLKSQARDVQHMQKALTQMNVQLTNVISDVVGETGQKILRAIVAGERDGQVLGSMKNSRIRASVDEIARSLQGNWRLEHLFALKQALGAFDFVGTQLAECDREIELQLQGLKAHDGEPAKGKKRGRARNAPKFDLRVQLFKMCGVDLTRIDGIDVTTALAVVSEIGVDMTRFPTIKHFTSWLGLCPGTKITGGKVMSGKTKRCVNRAAQALRLAAAALRSSKSSLGAYFRRLCSRMDKPKAVTAAAHKLARMIYTMLTKGEEYTDQGQDYYEERYRERVLRALSQRAAKLGMKMVAIEQPELT

SEQ ID NO: 193799 - protein, 355 aa, unidentified
MDSTKYIGMDVHKETVSIAVMNSAGKVVTESIIETKAATILQFIQGLRGNLQVTFEEGTWAAWLYDLLKPHVTKIVVCDPRRNALLKEGNKSDKVDARKLVELLRAGLLRAVYHGENGLRTLKELSRSYLTISKDLTRVMNRLKALYRGWGISCEGATVYAPHHRSEWLGKITEAGVRRRAEFFYRQLDALQALRQQVRRDLLAESRKHSERKLLRQIPSIGPIRAALLIALIQTPHRFRTKRQLWAYSGLAIETHDSAQYRYVAGQLQRSKKPQQLRGLNRNHNHDLKAIFKGAATKASSGAGPFHDFYEALLTKGMRPSMARLTLARKIAAITLIVWKKGAHFDAEQLKPQAA

SEQ ID NO: 193800 - protein, 479 aa, unidentified
MTPSKDAFPEPCPPDPTVPEPLVLRPSSSLPLYNPHAAGIDIGEAEHWVAVPPDRSPEPVRRFGTFTADLDVLADWLLDCGVTTVAMESTGVYWIPLFELLEARGLQVFLIDPRQAKRAPGRPKTDRLDCQWLQRLHAYGLLAAAFRPADQVCVLRSYLRHRQMLLTYGAHHIQHMHKALQQMNLKLSQVVSDLTGVTGMAILHAIIAGERDPLTLAKLRNPHCQHSEDEIAKALQGTWRAEHLFALQQAVELYHFYHQQLTVCDQQLQAHLGTFADKSDGQPLPPKPRRHKKANEPRFDARTPLYRLAGVDLTTIEGIEEGTALVILSEIGTDMSRWPSVKHFCSWLGLSPQHKISGGKVLSRHVRPGAHRVAVAMRLAARTVQQARTALGAFYRRMRSRLGAPKAITATAHKLARLVYSLLKHGSAYVKQGLEAYESQYRERTVKAVARQAKALGYTLVELAVPATPGNDAVAPATP

SEQ ID NO: 193801 - protein, 337 aa, unidentified
MKRYLGVDLHRTQFVVCTRWENGEQEIRQWRIGELPKFVEQLSIEDQIAVEAMGTTARFYDAVAGRVARVVVVNPHQFKVISESVKKTDRKDAQALALYLEKDLLPEVRMKPKQNRELMHLAETRDLLVKQRSALKGKINNLLAMQGIELKREALSSKIALERVLALPVSGMVQLELRILVEQIRSLSESIVELDERLEEEGQQLPGYENLTSIKGIGSLSATVLLTVIGKISDFADENKLASYLGLVPKIANSNESERSGRITKQGNKLARTALVQCGLVAKRYSPYLNRFYDRIKQRRGGGKAKIALARKLVKIVYDTLKNQWVFEDFPTFTLAA

SEQ ID NO: 193802 - protein, 412 aa, unidentified
MEVVYSCCCGLDVHKKSITACVLWAEAKGKSRKEKKRFGTFTHDLLQLADWLAERGVTHLAMESTGVYWKPVWNILAEQFEALLVNAQHIKAVPGRKTDQKDSEWIADLLQHGLLRGSFVPPQPIRELRDLTRYRVSLVQEINRIANRIQKVLEDANIKLASVATDALGASGRAILEAMLAGEQDAARLAEMSKGLLRNKIPELKLALEGRMTEHHRFLLRQLFEHLRFTESKRSEIEQEIDKRMRPFEDKVTRLCTIPGVDRVTAWGMLAEMGMNMNQFPSSGHLASWACLCPGSFESAGKRLSGKMRKGNVSLRRCLSQAAWAISMMKNNYLSALYRRLAARRGAKRAIMAVAHALLEIAYHMLKRKEDYRELGADHFDRIDVNRIRRSLVRRLERLGHKVTLEPLAQTA

SEQ ID NO: 193803 - protein, 331 aa, unidentified
MFLGIDVHKRDAQVAVIDDAGELVDEVRVENANLDEVAQQYAGAEAAIEATSNYYHIHDTLSEYLDVTVAHPGKLKLIAQSDKKTDRVDAKELARLLRLNALPESHVPTDEIREARALVRGRQTLVQERTKFVNQIHGLLDDLGVTRSVKPLSVQGREFLEELSVPTPWDGLLESYLDVIDTLSTRMEQLEAVIEEIAGSLKETQLLMTIPGISYYSSLLIYAELGDVDRFDSHKDVVSYVGLNPTIRESGDSRIEGGISKRGSGRVRWILVQAAYNAVNYGDEYLSRFFNRLDGRMNSKQAIVATARKLLVSMYYMLDREEVYDPPGVTS

SEQ ID NO: 193804 - protein, 340 aa, unidentified
MLYVGLDIHLKQISVCALDENGKRVRRERVGDASALVRLLTSLDQPLSICYEASCGYGRWHEILSRVAARVVVAHPGHLRLIFRSKRKHDALDAEKLAKLLVLDAVPSVHVPAAKVRAWRELITFRQKLVHKRTRAKNAVRALLRSLGIVAPRRPGLWTKKGMAWLKSLEIDQPALVIKRDMLVDEIETFNRQIRRVEGELSRFARKSPAVALLRTIPGVGLRTAEAVAAFLDDPQRFTNSKQVGAYFGLVPAQDQSGNKNRLGHITREGSPVVRHYLTEAVWQACRLSPTIGAFRDRVQRDDPQRKKIAVVATAHYLVRVMWSMLRHQRPWQESVVAAV

SEQ ID NO: 193805 - protein, 356 aa, unidentified
MSVKTIGLDLAKDVFQVHGISENGRVIFNKAIKRTKLLSFFEALPPCLVGLEACGSSHHWGRTLRKLGHDVRLMPANYVKPYVKRGKTDAVDAEAICEAVRRPTMRFVEIKTEDQQAVLSIHRTRDLAVRQRTQMANMIRSLLREFGHILPLGVEAVTAFATRHLEGDQPDMPDIANGMLGMQCYQFIGLNERIAGYSKMIEQHALSSSDARRLMRMPGIGPITASAIIATIGDAQQFRTGRDLAAWLGLTPLNKSSGGKERLGKITKKGDRYIRKLLVVGMTSRAVMAKRSPEKVDLWTAKTLPTSRSDWLQRRWPTKQPGSSGRYSQRNRNIGSQRSNRANCQEMQDVEVMMRN

SEQ ID NO: 193806 - protein, 361 aa, unidentified
MKCVQSNKLDFRGQNIYVGIDVHLKSWSVAILSEHSVLKRFSQSPEPEALHNYLVSNYPGANYFSVYEAGFCGFWIHEKLTDLGITNIVVNPADVPTMSKEKLRKTDAVDCNKLARELRSGSLEGIYVPKADVLEMRSLIRMRNLIVKDSTRAKNRIKSLLRFHGVEIPQEFIRCSIGCWSKRFLTWLHSLELSTEYGKKTLELHLEQFVRLRKMLLQETRAIREISRKAPFEKPIRLLTSVPGIGVTTAATLMVELDDIVRFKNADHLASFIGLVPMCHSSGESNGTGDITVRRHFMLRCLLVEAAWIAIRKDPAMTVAYTEYRKRMNPQKSIIKIARRLVNRIYYVLKHEKEYVPCVVK

SEQ ID NO: 193807 - protein, 311 aa, unidentified
MDSEAYVGVDVSKDRLDVNVLPNNDAHQVSNDDAGIIRLIKLLKKVAPKLIVFESTGGLEMPAVSGLIEHQLPVVVINPRQIRDFAKATGRLAKTDAIDADTIARFARDVRPALRPVKDEHTQLLSALNARRRQIVDMLVAEKNRLHTAHKKNKKSIHKHIQWLEKSLANINDDIDKTIRKSPSWRENDKILQSFKGVGPVVSATLLCDLPELGTLDRKKIATLVGVAPLNCDSGRYRGTRRIKGGRANVRRQLYMAAVAAAHHNPTIKDFYNRLIKAGKPPKLALTACMRKILTILNAMMRNQSYWIAPS

SEQ ID NO: 193808 - protein, 406 aa, unidentified
MEAVHKRVAGIDVHRMKHVVTILIEHDGAVSSQTREFGGFKRDMRALVGWLQEHRIQQVVMESTGVYWKSVFSHLEAAGIAALVVNAYHVKNVPGRKTDVSDSEWLAQLARFGLLRGSFIPPKDLRELRIVSRYRRKLSAVAAGEKNRLHKLLDDAGIKLGGVVADIDGVYARKMVEGLIEGRAPEQLSALGRGRLKSGREVLQAAMDGDLSARHRLVLTMVLNHLRYLEQQLDELDRTLVAAMKPYAGAWRLLQTIPGIDQISAAMIIIEISDDLTRFGSASRLASWAALCPGNNESAGKRKTGKVRHGNPIVRYLLCEAANAARKTKTLFRAKYESLVIRRGYKKTIIAIAHKLIRTIYIVLARRKPYRDSTFDYEAASVAKNAPRWIRALKKYGYWPQPASAT

SEQ ID NO: 193809 - protein, 343 aa, unidentified
MSEYDGKQFVGIDLHRRHSVIVRQTGTGERLSAVRIVNDPGSLALQLEEAGEHPDVVLEATYGWYWAVDALQAAGATVHLAHPLGVKGFRYRRVKNDVRDAGDLADLLRMNRLPEAWIAPPPTRELRELVRYRAKLVALRSGLKAQAHAVLAKAGVLIAVSDLFGVEGRQRLARVPLGAAYAQRMSSLLELIDVLDTHERRFAEQIAAKLYDDRGYGAIQQLPGVGPVLGAVFVAEIGDVHRFADPSHLCSWAGLTPQHRESDTVVHRGHITKQGSKLVRWAAVEAIQRQPAGTKISVDRKRIEARRGKNIAKVAAARKLLTLVYYGLRDGHIRALTHQPAAA

SEQ ID NO: 193810 - protein, 361 aa, unidentified
MPTVADVIDDVIGVDTHTDTHTLVCCSPAGAVRGELTVDNSTDGFAEALTWATMLASGPSLIFGIEGTRSYGQALSEFLSRAGLVVVEVERPARRSARTRGGKSDPIDAKAAAHQVLAMDPDALPTPRADGDREALRVLLVTRRALADECKKANARLRALLLTGTDTDRALLRGPKLSKTTLTGLTRRRGSKGEDRATTTRRREITRLANQQLRLLEELRANNRDLATITDEIAPGLTSEHGVGPVSAAQLIVSYSHRGRVRSEAAFAALAGVSPVQASSGRRTRHRLNRGGDRQLNRALHDIARTRMRDCPNTRAYVTRRTSETPNFTTRDARRCLKRYLARHLYRRLETIMTPGPGPTT

SEQ ID NO: 193811 - protein, 338 aa, unidentified
MKTYAGIDLHSSNNYIGVIDAKDKRLYSKRHDNRIEDVLKVLGKFKASLQGVVIESTYNWYWLVDGLMDQGYTVHLANPNAIQTYNGLKHTDDKWDSFWLAHLLRLGILPEGYIYPKHQRPLRDLLRRRLMFVRQRTSQILSLQSMITRNRGLNFSGAQIKRFRDEFIDKLFSDRHLVFTAKRNIATIRFLDQIVSEVEIEVASQIKLKKEFISLLTTPGIGNILGLTIMLEVGNIGRFPKAGNYSSYSRCVESKKTSNGKKKGENNKKNGNRYLAWAYVEAANHAIRCCPKAQKFFQRKMAKNERVLATKALANKLTKATYYIMRDQVAFDEDKLFG

SEQ ID NO: 193812 - protein, 355 aa, unidentified
MNYVGIDLHKKTIVLCVVNKDRQVLDRKKFNCRDTEAISDYFRSLGPFQFVVKATAAYYWLVGLLEPLAERVVLAHPKKLRVIAETTRKTDKLDAQVLAEFLALDMIPEAYRPSPRERAYRRLVRHRQFVQSRITSIKNKIRNVLAGYNADREQLFTRAGLAYLKQVPVGQADRFVLDQLRNDLIHFRGQLTAVDKELEAFRERGPQREQEARMLLGSIPQVGPVTSDAVLSELGDVRRFRNAKQVCAYAGLVPGVRESAGKRKDKGITKEGSRMLRWVLVEAAWRLKNTHAKWGHIYEQLHKRCGKKKAIVAVARKLLCVIYAMLRDGTGYGGDMTLKKIREFQRWARAGTTTQ

SEQ ID NO: 193813 - protein, 339 aa, unidentified
MQVTTVGIDLAKHVFQVHGITKDGQVVFNRAIRRAQLMQFFTNLEPCLIGMEACGSSHYWARELSKLGHDVRLIPANYVKPYVKRGKSDANDAEAICEAVTRPTMRFVAPKSEEQQAVLFLHRARDLIVRQRTQLSNMLRSLLAEFGVIIPQGTGAAVKYAKGVLEGEKPALPEFAIDVLSQLSHQLVAMHLRFRWYEMRMRLHSKLDKRVMLLRTIPGVGPVTASAIVATVGNAKQFKNGRQFAVWLGLTPLNLSSGGKERLGRITKMGDRYIRRLLVTGMTARLRQMKVNPDRVDPWAIGLLERKPARLATVAMANKTARIVWAVLTRNEYYRPHTA

SEQ ID NO: 193814 - protein, 344 aa, unidentified
MDITTIGLDLAKSIFQVHGVDANGRVVIRKSLRRAQMLPFFARLPSCLVGMEACGTSHYWARELIELGHEVRLMPPAYVKPYVKRSKTDAADAEAVCEAVTRPTMRFVPVKSPEQQAALSMHRARDLLVKQRTQLVNMIRGLLAEFGINIPKGLERALLMARRIVDDEAPDVPIEAAKIVGTLSQQALDIHVRLRQIDRDLLVWQRGNDVARRLMTIPGIGPVGATALAASVTDPHQFRSGRQFAAQLGLTPLQKSSGGKERLGRITKMGDKYLRKLLIVGMTSLVRRAKDNPPTIDPRLANLLVRKPVRVATVAMANKTARIIWAIMTRGETYRASHQPALAA

SEQ ID NO: 193815 - protein, 430 aa, unidentified
MDENNRNRLEEFRQLRKQIRQSEEDLIVGIDIAKEQHHAFFGTATGKTLLRRLVFSNDGEGFRRLLDQAEALRVRHGLKKVVYGMEPTGNYHKPLGEYLIHMGRAVVLVSGVMVAKNRESLDGRWDKHDDKDSANVADLISQGKCLYYEYPTAQLRGLRGLLSLKKRLKRQEQGYRVRIRNNLVAQYFPEMDSEYGRSEAQGLAIVRWCFPVSEITRLDVAPFIERVTSRRIGMDKRRRLEAIWEKAGESIGCEGVPGLEHEVRVMVEGLRQIREMIKETEQKIEELCNEFPEYPYMLTIPGFGPDVSAKVLGAVGDPDRFLNGRQVLKLAGYDLSADRSGKNSDRAIPEISKRGKADLRYALYQAAFIASTKNRDFMLYYTSKIQGRHKEKGIHTKMRVKLSAKLLVIAWTLMKKKEPFNPAYLKAEFN

SEQ ID NO: 193816 - protein, 345 aa, unidentified
MSLMFFLGVDVSKKTLSVVLTDHKDKTLWSNKSIPNDEVGFKKLVETVIKNTSKKAGKEEYSIAAGMESTGVYGERLAYYLNGNSHNGRIVTYVLNPAAVRAFGTSVMAPNKNDSADAQLIASYLSMAVTKEQISPWKAPSPEGRALRELSRRREELTELHASECNRLEKLECMQEPPEAIVRNVRELISYLEDSIHNLEKEIEEHIDDDPGMREDIELLRSIPGIGDVTSVTLQGESDGLINFASVKGLVSFVGIAPSEHTSGTSVFKKSKISRRGNSRIRHHLYMATLVAARVNPVIKEFYERLLNRGKCKKLALVACMRKMLHIIWGVMKHRKRFDPCYSLK

SEQ ID NO: 193817 - protein, 415 aa, unidentified
MEITAVGIDVSKSKSTVAIRRPGGVIVARPFDISHSNHDLEKLVSILKTTGGDIRVVMEHTSNYWKPIALTLKEAGFYVSVVNAMLIHDFSDNSIRKLKTDRADSLKIANYALTFWNELPPFNDEDETRLVLREQSRMYERLASTATSLRNGLIALADQTFPSIDQAFGHAIKNADGHEKWVDFFSIYWHRDCVLRLSIEKFTESYRKWCLRRNYKFRTNTAHKLYALAQDAVPTLPKNNGTKALVLQACKSLNAVCEAKQSTQEEMNRLASLLPEYEVVMQMEGTGPITGPALMAEIGDVRRFKNKKALVAFAGIDAPPFQSGNFESKSRHVSKRGSPHLRRAVFLVANIILTLSHKDNSVFCFMDKKRAEGKHYYVYTIAGSAKFLRIYYARVTEYLRVQERPVAASCPNGNS

SEQ ID NO: 193818 - protein, 429 aa, unidentified
MNCTQNKKIEQVKETTMIVGIDVGSEKHYFRAFNWRGIELTRKPVAFSNSMEGFNSFYNTIVELMQKSELEEALVGIEPTGHYWFDLGQFMGEKDIKFVMVNPHHVHKTKELDDNSPSKNDRKDPRVIAGLVRDGRYFYSYMPTGAYAELRNASNRRFVLVEEQTRAKNRLQKWIAVYFPEYKGIYTHIDAKGGMLVLKKAPTPEEIVRLGVEGIIKIWKDAKLRGNGHKKAMLILAAAMRSIGLKAGLTEARMEIQDLIEDYELQTKRLERVNDLIKGLCQQVRYADKLLEIKGIGITTVAGFIAEVGDITRFDSTKELQKLAGLELVADSSGKHNGKTKISKRGRKRLRYLLFEAAISVVGKNEEFKEIHRYYTTREKNPLKKMQSLIVVACKLIRVFHAILTKGIRYDASKMLKDIRHPGEQLKDA

SEQ ID NO: 193819 - protein, 389 aa, unidentified
MIVIGTDTHKHSHALSAVDEGTGRVRGCREIKAEESGHLAAVRWARGLDEERVWAIEDCRQVSRRLEQALLAAGERVIRVPPKRMGASRRGERERGKSDEIDAQAVARAVVKDGVDRFPIAYLDERAMEIRLLSDHREDLVKERTRMINRLRWHLLELCPGLEAKLKRGALSELRALERLDRQLRRLAPNARLRIAREELAHIRALTRDAKAIESQLLELIRGYRPRLLDEQGCGTLTAALLIGRTAGAERFRSDACFGRQSGTAPIPCSSGQRTQHRLDRGGDRQLNRALHTIAITRAQHDPATREYLARKEAEGKTRKGALRCLKRHLARRFWRLLTEPPLKPAQATEPVLTANSAEPEPITIPKRPAPHREVDRTITGPIPMICIT

SEQ ID NO: 193820 - protein, 357 aa, unidentified
MTSDKYVGLDVHQASTSIAVLDCNGKMISNAVVRTTADAIRDFINGLSGTIHVTFEEGTQAAWLYEVIRRLVAELVVCDPRKNKVLAVGNKGDRIDATKLAELLRAGLLKSVFHSNHDTKLLKQLTHNYDSLVSDTTRVMSRIKAVFRGQAIPCSGRDVYYKRNREQWMTRLAEPGLRIRAQFLFDELEPLKALRREAKKVMLKEARRHQAFKILSGVPTLGPIRIAQIIAAVGAPHRFRTRRQFWAYCGFAVVTRSTDDYRFDENGPLRRSRPPATRGLNRNFNRRLKHVFKSAALQGAGHEPFKSYYQARVASGMRPEMARLTLARKIANITLTLWKNGGQFNERKLSAQHDRTT

SEQ ID NO: 193821 - protein, 347 aa, unidentified
MKITRIGLDLAKNVFQVFGVDAQDKRVLSRQLKRKEMQAFFQALPACLIGMEACASAHYWAWVLTEMGHTVKLIAPQFVKPYVKGNKNDANDAEAICEAVSRPGMRFVPVKTIEQLHLQARHRVRSELIKQRTAKANQIRGLLAEYGIVIGLGVRCLRHRLPEILEETENRLQEDFRTLLAGLRDDLVYLDERIKTEDKAIETLANAHPSARRLQQLRGVGPVVATALIAALGDGRQFRNGRQASAWAGLVPGQHSSGGKQTLLGISKRGDTYLRTLLIHGARAALRAARTKTDPLSLWLQGLCARRNPNVAAVALANKTMRLAWVLLRREEDYDPLHGHARPPQPT

SEQ ID NO: 193822 - protein, 370 aa, unidentified
MQQYTEAFVGIDTAKKKHALAIADPGRDGETRYLGEIDSAPAAVQRMIRKLARRYEKLYFCYEAGPTGYGLYRQVRALGHDCIVVAPSLVPKRPGERIKTNRRDAVTLARLLRAGDLTPVWVPDAVHEAVRDLVRARTAASEDLRRKRQQLLSFLLRHGRIYSGRKHWTKMHLHWLAQQKFDHPAQQIVFQDAVDAVEDAATRLRRLDQQVAEIVPSWSMAPVVEAYQAMRGVSFAVAVTFVVEIGDLRRFDNPRQLMAFLGLVPSERSTGERVRRAGLTLAGNKRARRVLIEGAWSYRYPARVSQALQTRLEGLPKTVREIAWKAQTRLCARYRRLTAVGKKRPLVIAAIAREMAAFLWAIAQHVAPAA

SEQ ID NO: 193823 - protein, 341 aa, unidentified
MSDVALIGIDLGKHSFHLHGQDKIGREVFRRKSSRQQMMRFFGNLPACTVVMEACAGSHFIARELMALGHQAKLISPQFVRPFVKSNKNDFVDAEAICEAASRSSMRFVTPRTEAQQTLSVLHRMRESLVRDRTKTANQMHGFLLEFGVSLPKGLAVMRRLPGVLTERPLPVRLSLLLQRLHAHFDYLDKQIRELDKEVAGQLASDDLGSRLLTIPCIGPITASLLAAEIGDGRQYGCSRDFAASVGLVPRQYSTGGKARLLGISKRGDKRLRQLLVQCARVYLQRLEHQRGALADWVRALRSRRHSNVVACALANKLARIAWSIAANHTQFEAGPDASAA

SEQ ID NO: 193824 - protein, 313 aa, unidentified
MSERRVVGIDVSKAELECFFIPDSVGWLEPNSESGIEALVLRLHELKPDLVVLEATGGYETAAAVALILANFAVAVVNPRQVRSFANAMGKLAKTDKIDARVIALFGERMQPEARGVPDEEVRELDALVTRRRQVQAMITAEKNREQVAAPAVRPRILEHLRWLSQELDATEEEIGGKIEKSPAWRTREELLMSVPGVGPTTARALIAELPELGALGPKRIASLVGVAPWPRDSGMFRGQRRIRGGRASVRCSVYMATFVAIRFNPVIRAHYKALTARGKLFKVAMVACMRKLLSILNAMVRDSRPWTMAAAA

SEQ ID NO: 193825 - protein, 336 aa, unidentified
MEHYGAIDVSLEWSSVCVVDAAGQIVREAKVQSEREALVAFFERSGLRFTRIGLEAGPLSQWLHAGLVEAGLPAILIETRHVKAALKAMTVKTDRNDAREMAQLMRMGWLRPVHAKAPVVQEIRALLTARKLLVAKLRDVESSIRGILRGFGLKVGAISKGKFEARIRELVAGQAMLERAAEPLLRARAALRAEYATLHRELLRTVREDEVCGRLMTIPGVGAVVAMTFRSAIDQPRSRAVGAHFGLTPKKYQSGEIDRTGRISKVGDAMVRTALFEAANVMLTRAVRSSVLKAWALRVASRHGMKKAKVALARKLAVVMHRMWVDGTTFHWGRAP

SEQ ID NO: 193826 - protein, 358 aa, unidentified
MQAKDTKISFNGQNVYLGIDTHLKNWKVTVLLENSVFKTFSQDPCAEVLKKFLRKNFPEATYYSAYEASFCGYSIHRELEKEGIKSIVVNPADIPTTDKERKQKEDKRDSRKIAKSLRSGDLQGIYIPTIQTMEFRTMVRLRKTLVKEVNRNKSRVKFFLYFNGVKIPPELENTSKHWSARYTKWLKELSFASKFGNKTLDMLIEITTFYRQKLLEVTRELRSIQEESEYGKKIKLLLSVPGIGIITALTLLSEIEDINRFKNLDALCSYVGLVPSTNSSGEKELIGDITPRANKPLRGVIIESAWVAVRNDPSLALKYNQLCQKMKPSKAIVRIAKKLLNRIRYVLKNEQEYVLSVN

SEQ ID NO: 193827 - protein, 348 aa, unidentified
MDKIIRIGVDTSKSVFVLHGVNAADEPVLRKKLRRRQVVDFFGKLEPTRIGLEACGAAHHWARELTALGHEVVLLPPQYVKPYVQRGKNDAADASAICEAMSRPRMRFVSVKTAEQQAALMLMGVREQLIARRTQLANMIRGYAAEFGVTAAKGLDKIEPLLARIATAPDVPELAKELFATLAEQYGELKPKLHRIEAQLLAWHRQNEVSRRLAQIPAIGPIGAVLLAMKVPDPRAFGTGRDFAAWLGLTPKDHSTAGKQRLGVITRAGDEALRSTLVLGATAVIQQVRKARGKPSPWLIALIKRKPPKLAAVALANKTARIAWKLMVSGERYDRNHAAAAQTARIAA

SEQ ID NO: 193828 - protein, 387 aa, unidentified
MPEDAPRPAQAAIRTDLGAIFVSLELSRRAWLVTSLSPGGGEKMSKHSVQAGDIAGLLRRFAQLKEKARARTGRDFPVITIQEAGLDGFWIHRVLQSEGIESHVVDAASILTSRRRRRAKTDKIDGETLVRTLLAYKRGEPRVCSMVKSPTPEEEDRRRICRERRALVAERVQHTNRIKGLLFAQGAFDYEPLKRNRRAHLEDLKTGDGRPLPVNLKAQISRELDRLEVVLQQLQTVEAERDALLEPASEASPAPAAMLSQLKGIGPEFATILYTEGLFRGFDNRRQVAAYAGLAPTPWQSGSVDHEQGVSKAGNPRLRTTMIQLAWLWLRHQPDSALSRWFQDRVQRNGGRMRKTTIVALARKLLVALWKYATSGVVIEGAVLKAA

SEQ ID NO: 193829 - protein, 432 aa, unidentified
MKNQTNAKIEEITLNTVVVGVDIAKEVHYARFVDYRGMEVGKTVSFRSDRKGFDHIIAQIENICNGKTLKTPFTNVLIGMEPTGHYWKSFANYLMKDGKYKVVCVNPYHTKKAKEFDDNSPTANDKKDAITIARLVKDGRYFEPYLPEEIYAELRVLTNTRHGLLKRNSSSKNNITAILDEYFPEITKAFKQPLKGKASRQVLKMCPFPKLILELGEVGVLSEIKKAVKKSVGLKKVRELMAAAEDSIGVEYGLESARLKLRMWLDELDLVEKQLAEVESAMEKMLDATGYAGQMLGIKGIGVVSAASFLGEVGDPLRFSNARQIANYAGYNLTEDSSGKNKSGTCISKRGRSRLRSVLYKMALVMVATNAEMKQLYTYLKTRANNPLKKKQALVVISKKIITVIYSLLKKKEAYNPELVLGAARKEMMAAA

SEQ ID NO: 193830 - protein, 338 aa, unidentified
MKITTIGLDIAKSVFHAVGVDKAGKLIKKKMLRRKDLLPFLAQIEPCLIVMEACGGANYWAREFELLGHNVKLIAPQFVVPFRQGNKNDYNDALAIAEAAQRPNMRFVKPKGVAQQDVQLLHRMRERLNKQSTALINQVRGMLAEYGIVITKSKSAFKVQFPDILADETNALTTKGRAIFYQLYEEFSDIEKRLKGCDVQVLTETKNNVICQRLETIPGIGPVTATAFYAAVGDGKDFSNGRHFSAWCGLVPKQHSSGGKDNLLGISKRGNAYLRTLFIHGARAVLQHSCHKQDKFSCWAILLAERRGFNRACVAVANKLARMAWVIAAHDEEYRLPV

SEQ ID NO: 193831 - protein, 433 aa, unidentified
MKVLYERVAGIDVHKEMIKVAIRSPGEKPWTRKTEILEFRTFYGVLQAMARELRKRGVTHVVMEASGVYTEPVYYALAEQDFTEVAVINPAHAKALKGHKTDARDCARLAELFECGLLHGSYIPAPELKEVRDLTRYRMKTVQARTSEIQRLGKALESAGIKLGSVASSITGVSATAMIEALIDGERRGGVLADLARGRMREAGKLADLSMALTGRFTEHHALLCRLHQDRIAGFDAAVAGLDERIAGKVTRWQREAGLLTSVPGFGDVVAQAWLGEIGPAPHRHFATHEKLASWVTLCPGNNISARKRKHGRTGDAGTYIKPMLVQAAWNAVRVRGRLQARYNRLVRRFGGEKNPGAKKKAIIAIAHTLLKIAYQVLKSGVPYQELGADFYTRRESPEQKHAWLERQLQKLHPGCTITITVSPPEAALAPGP

SEQ ID NO: 193832 - protein, 430 aa, unidentified
MNSNTQNKKIEAITEKTLVIGIDVGSETHYARAFDHRGIEYSKKPFKFSNDEAGFASFKAWILEIKEAREKDKVVPGMEPTGHYWFNLGKFLQDNDMKPVLVNPHHVKKSKELDDNSQTKNDRKDPKVIAGLVREGRYMIPYLPDGVYADLRTASNMRFQIQSELTRTLNRISRWFNIYFPEYKTVYGNLDAVSGMLVLKTAPLPEDVLALGVDGINKIWRDAKIRAVGKKRAQTLVSAAEHSVGSKEGAISARMEINMLIEDYESRSARLQEVMALIEELVKKIPMAEKLLAIKGVGIKTVSGFLAEVGDVSRFKSPKELQKLAGLALVENSSGKHKGETTISRRGRKRLRYLLFEVAMSLVSKNREFAELHQYYTTRKQNPLKKMQSLMAVAAKLIRVFYAMLTKGVDYDPKKMSDDIRRPMVGSQAA

SEQ ID NO: 193833 - protein, 418 aa, unidentified
MDIKKTQKVTKINHQTLIGAVDIGKNVQYGYFRAPNGNDTVTFKFFNTRKGFTVFWKKLCRFKKQEGLEDVVIGFESTGCYAEPFSNFLRKKPVKLVQVNPVHTKRVKELTGNSPNKTDKKDPRVIADIIGLGHALTMVVPQGPAAELRRLTQARERSIKNRTAANNQLQDLVYIIFPELLNAMKPSTKTGAYLLKNYPCPEDIVSLGQKPLAEIVTKISRGKFTDQKALALFEAAQTSVGIKEGKASIVLEIQYLIDMIAQHNQFIASLEKEMHTYLEQIPYGPNILSIKGIGVVTASGLIGEVGDFKSFNTIPEIMKLAGLDLYEISSGSRRGQRRISKRGRPLMRKLLFFAAINAVKSGGIMHDKYHQMLDRGMNKIKALVAISRKILGLIFAIVRDNTMYRKNYSYDHYCKLAA

SEQ ID NO: 193834 - protein, 340 aa, unidentified
MNATTYGLDIAKRVFQMYWVDASTGEVVNRRFGRDDLISFLAQRPAGRVALEACGSSHWWARKIQSLGHEVVLLHAQFIRPFVQTNKTDAADARAIWTAVQQPGMRTVAAKTEDQQAMLSLHRMRSLLVKFRTMQVNQLRGLLYEFGASFRAGRVAGLAEIRQRMVELGDVLPKIISANLHDQLRRIDGIEADIELLEKRIGAWQKQEAACRAIAEVPGVGRLTATALVATIGDAKTFKSGREFAAFLGLVPRQNGTGGKVRLGSISRRGDPYLRTLLIHGARSVMYHAKLPSAWLKGLRERRPANVAAVALANKMARTAWAILAHDSAYEVGHISVRPA

SEQ ID NO: 193835 - protein, 359 aa, unidentified
MRVQINKLNFEGQNIYVGIDVHLKSWSVAILSEHSVLKKFRQNPDAAALYKFLSVNYPNAHYHSVYEAGFSGFWLHHQLVGLGINNIVVNPADVPTMSKEKLRKTDAVDCSKLARELRSGTLKGIYVPSVEALEIRSLIRLRKSIVKDSTRKKNRIKSLLHFHGIVIPEEFTKRPGGNWSKRFLAWLSSAELSTEYGRKALDIHIEQFVSLRQMLLQKTRLIRDLSRTESFAEPLRLITSVPGIGITTGISLLTEIDDITRFKNAEQLASFVGLIPMCHSSGEKEGVGGITIRRHATLRWHLIEAAWVAIRKDPAMTMAYAEYRKRMNAQKAIVKIARKLVNRIYFVMKRKQEYVPCVV

SEQ ID NO: 193836 - protein, 343 aa, unidentified
MQVNTIGVDLAKNVFQVHGVDNAGKVVISRQLRRKQVIDFFSKIPPCLVGMEACGTAHHWAREVSKLGHTVRLMPPSYVKGYVKRSKNDAADATAICEAVTRPSMRFVPIKSADQQALLMLHRTRDLLIRQRTQLINALRAHLAEFGLVAETGREGLAQLAAIITDESNREALPSAMKQALQAIVDQLAALELQTGALDRAIHAHHRANDMSCRLETVPGIGVIGATAIASTVTDPNGFKSGRDFAAWVGLVPRQHSTGGKERLGGISKQGDRYLRRLLVIGATAVVHHARRHPQKHPWIIRLLARKPAKLVAVAVANKMARIAWAIMAKGGYYRAPELAAAA

SEQ ID NO: 193837 - protein, 382 aa, unidentified
MNKIIRIGIDTSKSVFVLHGVDAAEQPVLRRKLRRSQVLEFFRKLEPTKIGMEACGGAHYWARELQALGHEVVLLPPQYVKPYVKRNKNDAADAEAICEAMSRPTMRFVPVKTTEQQAALMLAGTRDGLIGRRTQLSNTIRGYAAEFGLTTAKGLDKIELLLAGIAASAELPTLTKELFAAYGREYAQLQRQIIKIEARLMAWHKDNELSRRLVEVPSIGPIGATLLVMKVTNPHAFRCGRDFSAWIGLTPKDHSTAGKTRLGVITRAGDEALRSVLVAGATAVIQQAQKGRGYAPPWLVELLKRKPRKLAAVALANKMARVAWKLMVSGERYNPARTAAQSAAREGRGAAPRGGSAPRPSLASRITPLGGGCHDRGVTSSA

SEQ ID NO: 193838 - protein, 354 aa, unidentified
MTTPSIQNDFTPASVGIDIGKDVFHLVGFDLDGNIVLRRKIRRSALVSEFEKLPPCIVGMEACLSAHFVSRTLRKLGFEPRIIPAIYVKPFIKGQKNDYNDAEAIAEAALRPNLKFVQEKTQDQLDLQALHRVRSRLVSRRTATINQIRAFLIEQGITVRTGAHALRNSLFAILENRKDEISPRMNDLIVGLNADWQELDERIGTITGEIEMISKSEENCQRLMSVPGIGPIISTAVVAAIGTGDAFGRGRDFGAWLGLVPRQYSTGGKTVLGRISKRGSKYLRTLFIQAAHVILMRPNNWRKFSFGPWLTEASTRLHRNKLATALANKLARIAWSVLASQKAFNANRKEVTAI

SEQ ID NO: 193839 - protein, 312 aa, unidentified
MSSALYVGIDVAKAHLDLALRPAAAPQRFPHDEAGLSALVQYLHPRQPTLVVLEATGGYEADVAAALAVAGVPVAVVNPRQVRDFARATGRLAKTDALDAVVLAQFAEAVRPPARPLPDAAHQALTALVRRRQQLVEMLTAERNRLPLAPPPIRADVHAHIHFLEQRLKQTDRDLKQVLRASPIWRTADQLLQSVPGIGPATTAMLLAWLPELGQVSHRALAALVGVAPLNLDSGTRSAPRSIWGGRAAVRGALYMATLVATRWNPVIKAFYGRLRDAGKPPKVALVAAMRKLLTILNAIMRSKQPWTVENA

SEQ ID NO: 193840 - protein, 421 aa, unidentified
MDNAAYYVAGIDVHKKMLAVVVANARNRELQFECRRFGTTVSELQKLSTWLQEHAVQEVVMESTAQYWKPVWFALEGHFQLWLAQARSNRGPRGRKTDFRDAKRSVSRLLSDDLILSYVPDAEQRGWRTLTRTKYQLRRDRVRLQSQLESLLEECQIKLSSVVSDLLGASGQRILCAIAAGETDPARLRAWGDKRLHATDEELRDALNGQPQPLHRRLLKLYLERLNLIEEQIAELEGMIAEAMKAHQDAVVRLSELPGLGVDSAQQIIAEIGPRAESFPSAGQLASWVGVCPGLQESAGESSSNRSAKGNRAMRRLLNQLAHAAVRKRDCYLQIVFKRLSARLGYAKAVWAIAHRLCRLIWKVLHEGVHYIERGPAVTALTLKTPKAKARHPTEEARILGSANAHHSSRGEFVALLFSRV

SEQ ID NO: 193841 - protein, 351 aa, unidentified
MSQILNAVIVVMGIDIGKNSFHVVGLDQRGAIVLRQKWSRGQVNARFANMPPCLIGMEACVGAHHLSRELKAFGHDARLMPARYVRPYSKGQKNDFRDAEAIAEAVRRPTMKFVATKTADQLDLQALHRVRERLVSQRTGIINQIRAFLLERGVAVRQGLRFLRAELPRLLATPPDVLSPRMVRVIEDLAGDWRRLDERVESLSSEIETVARQDAGCGRLMSVPGIGPIISSAMVAAIGTGDVFSKGRDFAAWLGLVPKQISTGDRTILGKILKRGNRYLRVLFVQAAWVVLIKPKSWERHGLKHWIEAAKKRMHRNVLAIALANKLARIAWSVLAHGRSFEARPATASAA

SEQ ID NO: 193842 - protein, 365 aa, unidentified
MLSIGIDVSKGKSTVCGMKPGGEIVYTPFEVQHTREGMSELVSLLRGSGEEVRVVLESTGSYHCPVVAALLENGIFVSVVNSLRMKRFCSQSIRRVKTDQIDAMQIALYGLAYWQELQPTRLPENTYRELQLLARQYYQMTSLLIKAKVDFNALCDQVLPGMQELMSDHAGRHKLSDFVLRYHHTAHILKMGETRFRKDYCKWAEKKGYRNHERMAALIFATAQNGIPVLPNAPSTQIVITEAIRVLHTVEASRDAILTQMQALAKTLPEYSLVREMPCIGDTLAPRLIAEIGDVRRFHSKRALIAYAGIDAPPYQSGKFSANNRHISKRGNRYLRKTGYEVMQSYVMHKPANDPIFMFIEKKTR

SEQ ID NO: 193843 - protein, 443 aa, unidentified
MNEHATPHLRGSRGQAFADLVRGIAPEHILCVSLDISKYFHVVMIHNGLGEIVTPTFEIDIYQSGFEQLGQAIARAKTGTQAQVVLVGMEPTSHYFENLARHLLRHAQPVTLINSFAVKQNREQQLMRREKTDQIDVAAIGDLLRRGEGTRYRPATGVYLHLQQLDRVRLGKVKLVNILKNQIIGHLDRIFPGLILLDEAARQRYTPVFNTDFWSCQTLQDLIRLCPNPHDLCALTPPQLVQLFHAHHCRLGPQTAAKLITHARQTLLPDIELVTVRCELLQHDLALLEAVQTHLTQLETRLTALVASTPYQVWTTLKGLSAVQVASLAAAIGDPEYYPAAAPVFRRSGLVSGRNDSGNRQRRGKGSHILKAGDVYLRRALMNATATLILHQPVLARYSKHLQVTKPAGVARVATARKALGILWAVLRDQSSITLILNKEANM

SEQ ID NO: 193844 - protein, 424 aa, unidentified
MSKKKSRVAGLEALYARVCGLDVHKKVIVACVRILDAKDGTVQSTLRQFGAMTADLKELRGWLGEFKVTHVAMESTGIYWQPVFNLLEGHFKTWVVNAQHIKKVPGRKTDVKDAEWIAQLLQCGLLRPSFVPERQQRELRDLTRQQTKLVQQRNAVDNRIQKVLETANIKLGSVASDVMGVSGRKMIEALIGGEKDATVLAELAQRKLRGKIPELQRALEGELTEHHRFLLSRLLGQYDFLEKEITSVSERLGAVAPPSFRAAVEQLDAIAGVGERGGRALLAETGIDMSRFPSHKHLASWAGQCPGNHESAGKRRSGKTPPANRHLDAVLTEMAHAAVRTKNSYFKAQYHHLAGRRGKKRAIGAVKHSLLVTVYFMLRDNKPYTDLGVDYFDKLNPQQRIRYHVRKLQQLGQEVELSPMAVAA

SEQ ID NO: 193845 - protein, 360 aa, unidentified
MNGSKEHPQTTAGLDLGDKYSYLCLIDTESGEVIEEGRLRTSPEAFLRRFASERPMRIAIEAGTHSPWASRVLEELGHEVLVANARKLRLIYANKRKTDEVDAENLARLARLDPKLLYPVAHRGEDSQAHMAIIHSRQALVDCRTRLVNHVRGAVKSFGARLPKCPTRSFHKRAPEHIPEALLPALGPILEQIGSLTERIRDYNRQLETVSKENYAHETDLLRQVEGIGPLTALTFVLTLEDPHRFERSRSVGAYLGLVPARDQSGDRDPQKRISKEGDEMMRKLLVGSAHYILGPFGSDSDLRRHGEKIASRGGKNAKKRAVVAVARKLAVLLHSLWVSAEVYDPLYNTHRRTKQEEAA

SEQ ID NO: 193846 - protein, 340 aa, unidentified
MHISNKNYLGIDVSKPWFDVSLLVVADHVKQPMITERFDNSVEGLKVFKIWFKTHAISLDENTLLVIENTGVYHRLIWSFCSKNNLPLHIGNAAQIKWSLGITRGKSDVIDSKRLCTYCYKQAEELKATPPLNPVFMKLKDLMSSRSRLVTQLHSTKNYIREIKCTGDKELLAVLDKAHKAAIEGIKKSIEQIEILIEKIIREDAAIYTNYQLIKSVPGIGHLTAVYIICCTNNFASKISGKQLASYAGVVPFEHSSGISIKGKNRVHKMANKELKKMLHLCALTAIKYYPEFRQYFDRKKAEGKNGMLVLNAIRNKLVLRVVAVVNNQQPYVDNSQMAA

SEQ ID NO: 193847 - protein, 329 aa, unidentified
MKKMHIIGVDISRNTIDFHCYGHSVTADPVANNLKGFGQFQKWIRQQVSKTKEEVMIVMEHTGIYTYNIERFLHAKGWSYVKGPALDIKRSVGIQRGKSDRTDARMISKYGWMNKESLAPMEPVNDNRVNLQQLMSYREKLVTDRTAHQVRIKELQGQMGNKLCDQIRRSTQRMIKLLTIEIEKMEEAVKACLAKEASLQKNYELLITVSGIGFVTAVSLLITTENFTRFDNHRKFACYCGVAPFTHRSGTSIRGKTRISQLANKPIKSLLTMSALSAVRNDTELKAKYEQKCKEGKAKMSVLNIIRAKLIERVFSVINRQTPYLKAAA

SEQ ID NO: 193848 - protein, 348 aa, unidentified
MQSIASLPIVGMDIAKNVFQLHVVDIETGEIQRHKLKREKVSAFFANHQKSLIAMEACGGAHHWARTLQTLGHDVKLLPAKHVKPFVLRDKTDARDAQAIWVTAQQPHIKHVPVKSEQQQACLALHRLRAQLMKMRIMQTNGLRGLLYEFGIVLPEGHRTLLKRIQGELAKAQEEGALPTALVDSVQDQLRRIDGLQKDIDQLERRLTAMIKENQHMQALQAIPGIGPLTATALVSTATDMNSFTSARQFAAWLGLTPRQTGTGGKTRQLGISKRGDPYVRTMLMHGARAIITRSTQTSWVQRLLQRRPFSVVVAALANKLARTAWAILVKGKAFDQVRWNPVDVAAA

SEQ ID NO: 193849 - protein, 422 aa, unidentified
MENTVAKKVKQVPEGYLVIGIDPHKKRHAAVAITQDFTTQAKFKFDNTREGFEFMLRRAKMEMVNSSCRGVIFAIETGGHYWRNLAYFLNKQDLPYRFINQFTLKRRREGKDLNRRKNDYRDSEVAAQLLCTGEFVESKVPQGVYADLRAAHNAYRRLVKERTRITNLIKGLLDAVFPEFTHVFKDPCALTALSVLSTCAIPRVIGGITEDEFIATVEARHQGRRLMRRKLRALRSIAKTSIGIEAGARSVSMEISFLVEKLGLIRQHIRTVEGTLVTLVDETEEGKYLLSIRGLNYIAVAGLLAELGSFKYYRSAKQMIKMAGSNPTESESGGKRRSRSPMSKQGRPVLRYCAWTSVIPMLRLNSDFRAWAKNMRERPVHANPLNGREIVGAAINRLLRLSFALVKRRTFYQLPQLVEVTC

SEQ ID NO: 193850 - protein, 424 aa, unidentified
MREEGLSMAEEIEWFVGIDWASQSHQVCLVDAHGECLGERAFAHGGPGIEELCDWLIARTGATPEVIGVAIEMTQGPVVEALLERGFCVYGINPKQLDRFRDRFTVAGAKDDRRDAHVLGDSLRTDRHAFRRLSNDEPVIVKLREWSRMADDLQQERARLASRMREQLWRYYPQMLELADDLAADWFLDLWSQAPTPAKAVRLRQTTIERFVKAHRLRRWQAPEVLRILKQKPLSVAPGVVEAASDHIRTLTVRIRLVNQQLKAAHRKLDELCAQLIPSEENEPGQQCEQRDVVILRSMPGLGRIILAVLLAEVWQPLRRRDYHALRSLSGVAPVTRRSGKTSVVVRRYACNKRLANALYHWARVATQHDALSRRRYAALRQRGHSHGRALRTVADRLLSVACTLLEQQTLFDPAYEVREAAGA

SEQ ID NO: 193851 - protein, 419 aa, unidentified
MTGKRSKVCGIDVHKSFVVATTLDSDGTRETRRYTQNLDSLITLRDWVLKSKCESVAFESTADYWRPMYMILEPHITITVANAYHIKHIPGKKTDITDSHWIAELELNGLITPSRIFTKEQYDLRALTRYREMLVAARTTFKNKVHHQLDLCGIRLCNYLKDIFGKTGYPLLKGTINRKSQKEITESLPKKSRKRAEQFFSAIPDDIPEHILIILDSLLTLIDSLTEQIRIIEERIKFVLSQRKREIHILMSIPGIGFIGASTILAEIGNVHDFPNSDKLAKWAGLTPSVYQSANTNYTGAITKQGSKHLRRILIECTHSAVRSSGKLKTAFNRYLPGKGYKKALVAVARKMLRIAWHLLVNDEEFIDEESKSKEVYIPKMPSGMDKIGIEKIIELLSRGAEMIIREDDKEVMRLKLDT

SEQ ID NO: 193852 - protein, 426 aa, unidentified
MDVMYPRVAGLDIHKKLIVACRIIPGAGAQAQREVRSFGATTAAIEDLGDWLAEGDVTHVAMEATSVYWKPIFNLLEDRFALVLANAQHIKGVPGRKTDVKDSEWIADLLRHGLIKGSFVPDRAQRELRELTRYRTSLVRERAAVANRIQKTLEGANIKLGDVATDVLGQSGRAILEDLVAGESDPTILAGHARGQMKSKRSALQEALRGSIGPHQRFLLEQQLGHIDCLEWLIGRVEAEVSARLEADAASVPGVPDGDGAPASGTEAVARLDTIPGVGRRVAEVVVAEIGRDMSRFPSADHLASWAGLTPGHHESAGKRYSGRTRKGSPALRVALVEAARAAARTHTYLAAQFRRLAARRGGKRAAVAVAHSILVIAYHLLRDGGVYEDLGQTYFDQRDKTRVTQRLLQRLRNLGVAVEVQPATT

SEQ ID NO: 193853 - protein, 309 aa, unidentified
MEIIVGIDVSKDRLDVHIAPSAEAFWLGNDHAGVEDLVRRLAALSPTAIGLEATGGFENLAVAALAGAGLAIVVVNPAQVRAYANALGKRAKTDPLDAAVIAAFVAATKPELRPLRDAETRTLADLVARRRQIVQMIVAEENRARTVTAKQAHKSIKRLLAALRRELASLDADMDDHIRKSPVWRVREKLLSSVPGIGPVVARTMIAEMSELGSLDRRQIAALAGLAPWTRQSGKWRGKSFIGGGRSRVRAVLFMAALVAIRHNPVLKAFRDRLVEAGKPKIVAVVATMRKLLTILNAMIRDQKPWQAA

SEQ ID NO: 193854 - protein, 388 aa, unidentified
MIYVGIDIAKLNHFAAAISSDGEILIEPFKFTNDYDGFYLLLSKLAPLDQNSIIIGLESTAHYGDNLVRFLISKDFKVCVLNPIQTSSMRKNNVRKTKTDKVDTFVIAKTLMMQDSLRFLTLDDLDYIELKELGRFRQKLVKQRTRLKIQLTSYVDQVFPELQYFFKSGLHQNSVYALLKEAPTPTAIASVHMTHLAHLLEVASHGHFGKEKARELRVLAQKSVGVNDSSLSIQITHTIEQIELLDSQLFHTELEMANLVTCLHSVIMTIPGIGFINGGMILGEIGDIHRFSEPKKLLAFAGLDPSVHQSGNFQAQRTRMSKRGSRVLRYALINAAHNVVKNNATFKAYYDAKKAEGRTHYNALGHCAGKLVRVIWKMLTDEVEFNLE

SEQ ID NO: 193855 - protein, 344 aa, unidentified
MEYIAFDAHKHYTLASVATPDGQLVREERIEHDRGALRGFLERCERGSPVAVETIGNWYWIVDEIEAAGCLPRLVHARKAKLRTGEINKTDRLDARGLNRLQRNGTLPTVWIPPGELRDQRDLPRTRMVFVRQRTQLKNRIHATLAKYALHDLEVSDLFGVRGRALLRERLELLPPHTAYASQQLLGQVEELGRQVRAFEQRIRATFQPTPAVQRLLTLPGVGLTLAVVIALEVGEVARFASAEKLAAYAGTTPRVHASGGKTPFGPSRPDVNRYLKWAFVEAANAICLHRGRAARKLDDVPFEPWLAKRISLDVVQPVQHDRFRRRGRSVPSSSTRAGSAGAT

SEQ ID NO: 193856 - protein, 402 aa, unidentified
MKKHSTAKQSEHKLTKSVLWVLRERASAERLTIGLDLGDRMNHYCILNEQGEIWIQDQLPATRTGLNHLFEKLPRARVVMEVGTHSPWTSRHLAGLGHEVIVANSRKVSLITESQRKNDRLDAEKLARLGRLDPKLLSPIRHRQEDVQRDLAEIRLREALVHSRTMLVNSARGMVKSFGYRLNSCDCDQVDTELAASLPAELRKLVEPLLATAAYTTLRIKAADQRIHEVAKRYPEIELLTVIYGVGELTALAFVLTIEDAERFGRSREVGPYLGMVPGQAQSGDRDPQQRITKEGDRMVRWLLVQSAHCILKHGAPDSDLRRWGLAKIEQRDREQQPNRRGKNRKSKGKKRVLVAVARKLAVLMHRLWANGEVYDPLYGAQQQAAQEAKQAAKKSAGKAAA

SEQ ID NO: 193857 - protein, 342 aa, unidentified
MQITTIGLDIAKNVFQVHGIDATEKVVVRKQLRRGQMLAFFKALAPCLIGMEACATAHYWARELTKLGHQVRLMPAKDVKAYVKRNKNDAADAEAICEAVRRPTMRFVPVKSAEQQARLMQHRARDLLMRQRTQLINALRAHLAELGIAAAQGREGIKELLAIVAQDGDTRLPVDAHASLIVLAAQLQAVQTMIGSIEKRIVAQHRSSEENKRLQTIPGIGVLGASTIMAVVPDPKVFRSGRDFAAWIGIVPCEDSTGGKQKLGPISKQGDRYLRRILVVGACAVLRRARQQPEKYPWLTQLLARRPFKVVAVALANKMARIAWALLAKGGTYRAPALAAAA

SEQ ID NO: 193858 - protein, 342 aa, unidentified
MYYIGLDVHKKTISYCVKDASGQVHREGTIGATRRELDTWMQTLPRPRMMAMEATIFTGWIYDHLLPHAEQVKVAHPLMLRAIAAAKKKNDRIDAGKIADCLRCDFLPECHMASTEIRDRRRTLRYRHLLVRQMVQMKNRISGLLMETGVSHNKQRLHQVGYFRELLSSNAEVQESIRPLLRVSRETIVRCQKTEYALVSSLERDPLLAERIKRLRTVPGVGPITALTWALEIGDVSRFRSIKQAISYCGLCGEEKSSADKVLRTPLSKQRNKYIQHVLVEAAKLAPRQNKELALIHAKEQQKGNRNRATLAVARKMVAYLLAVDRREREFVPAGGHRTAAA

SEQ ID NO: 193859 - protein, 316 aa, unidentified
MKETPTYAGIDVAKDRLDVMLRPSGEYVEATNDERGIRSVVRRLRKEDVALAVLEATGGLEQPAAAALALAGVPVAIVNPRQVRDFAKATGKLAKTDRIDAAVLAHFAEAVRPEPRPLADEHARELSAVVLRRRQILAMTTAEANRARTAPKAVRKRIEAHLRWLRKELARVDGELERVVKESLVCKERAALLMSVPGVGPTLSATLLAELPELEHLDRRRLAALVGVAPLNRDSGTLRGIRTVWGGRSGVRTTLYMATLCATRHNPAIREFYGRLVASGKPKKVALTACMRKLLTILAAILRNRTPWQPRLLPAS

SEQ ID NO: 193860 - protein, 428 aa, unidentified
MKYNTQNAKIESITEKTLIVGIDVGSETHYARAFDWRNYEYSKKPLEFSNNEAGFVTFKVWMEELAEKYGKDVVLPGMEPTGHYWFNLGAFLQDNGMKPVHVNPHHVKKSKELDDNNPNKNDRKDPKTIAALVNEGRFSYPYIPTGVYAEIRSLSNLRLQAQEEITRIKNRIARWFSIYFPEIKDVYKNPGAVSGLMILKVAPLPKDIVKLGVDGVNQIWRDAKLRAAGLKRAKTLVTAAEHSIGSQEACDSARIELKILLNDYEIYHQREEELMELIEEKLSEVPYIDKLLEIKGIGMKTVSGFVAEVGDIKRFDNPKQLQKLAGYAIVECSSGKHKGESHISYRGRKRLRYVLYEAAISLIARNTEFKEIHRYYQTRGKNSLKKMQSVIAVACKALRIFYAILTKGVTYDGAKMLQDIKRPQLKVA

SEQ ID NO: 193861 - protein, 351 aa, unidentified
MKYIGVDVGKNRCQACIIDEEGEILDEFPFTNTWEGIQALLEKTGDTKSKAVVESTGNLWLRIYEALEGHGVEVKLANPYKTKAIASARIKTDKLSARILAHLLRADLVAECYVAPRDVRQVRALLRQRASLVKMRTMVKNRVHSHLDRYGYTSSWSDIFGLAGLEWLRGLELEPVDRCILDTHLRHLECLNSEIGFLDSRIAGQALESEDALLLMTLTGVDYNSGMLLACEIGDISRFPSPKQLVSWLGLCPSLYQSGNSLVLGRMKKDSNGRARWVLVQAARTASRRDPRMRELYLRVASRKGTGKAAVRVANKMAVIMWYMLTERKPYMQVKEGLYRSKLKNVRRLAS

SEQ ID NO: 193862 - protein, 340 aa, unidentified
MKLYGAIDLHSTNNVTVVIDEQDRVVYQKRLPNDLALVLKELSVYQSGLEGIVVESTYNWYWLVDGLMEHGYKVHLANTAAIQQYEGLKYTDDHSDARWLAHLLRLGVLPEGYIYPRADRPVRDLLRKRSQMVRQRTTNLLSIQNLLTRNTGSSMKANRVKGLDVQQVDELLPNGDLALAVKANLSVMLSADEQIDILERTVTQRVKLRPQFSFLKTAPGIGEILALTIMLATGDIPTFASVGNYASYCRCVGSQKISNGKKKGQGNTKNGNKYLAWAFVEAAHFAIRFNSKIKSFDQRKKAKTKGVVALKAVAHKLCRACYYIMRDRVAFNITKAFGPK

SEQ ID NO: 193863 - protein, 416 aa, unidentified
MEVIVSRCAGLDVHKNTVMACVRVPGPNGGRTSTVRQFRTFTAGLRQLRDWLVAEQVSQVVMEATGVYWKPVWHVLDPTPGLELMLVNAYAVKNMPGRKTDVADAVWLAELGECGLLRPSFVPPPVIAQLRDLTRYRKKLIEERARETQRIQKLLEDAGIKLDSVVSDILGVSARQMLEALIAGVRDVAALAELARTRMRPKIPQLRQALEGRFGAHHALMLRMHLEHVDQLSVSIDRLDSEVDRVIRPFSSALQRLITIPGVGRRTAEVIIAETGADMRRFRTAGHLASWAGMCPGNHESGGKRRSGRARKGNAALRAALCEAAWAASHARSGYLPAQYRHLLRTFGKKGQTRAVFAVGHSILVIAWHLMAHDRDYADLGGDHFTRATDAEARQRYLVRQLEALGHKVTLEPAAA

SEQ ID NO: 193864 - protein, 426 aa, unidentified
MSPPLLPTYERYLAIDLHKHYVVIGGLNARQEMVLAPRRIDLTDWPAWAKTHLRKTDILVVEATTNAWDFYDQVQPLVGRAVVANAGKIAGLVKTKVKTDRVDVLKLAKLLVAAMIPEVWVPPVEVRELRALLAHRRQLIKNRTMLKNRLQSILHRHQLVPPEGELFGAKNREWWKTLKVSPTERLHIQHDLTTLTTLEPQIAEVETELHRLSTTSPWMEPVTFLLQLPGFGLIIAMTILAAVGDIQRFEEAKKLVGYSGLGAGVHISGETHRTGRITKEGRRDIRWALVEAAWIAVDTHPYWKREFERLARRMDKNKAIVAIAHKLLIAVWHVLTERVADKHAEPKMVAFKLMRWSWELTEQQRGGLSSRQFIRLGLMHLKLGEDLTHVVYGNLPRRIASVEELLSVRPELRTLLDNSVLPTTAS

SEQ ID NO: 193865 - protein, 365 aa, unidentified
MKKISRGTGRMEKPEITIGLDLGDRFSHYCMLNEDGDAIESGRIQTTEEALRRHFEGEPAMRFALECGTHSPWISRLLEQLGHQVVVANTRKIRAITASESKNDKNDAEKLARFAFCDPRLLSPIRHRSPERQQDLNLIQARSTLVRARTMIVNALRGLVKSAGGRLPACSPQGFEARVEASIPPPLADAARPLLNQIVALNASIQQMDRAIEQLSNRYPEIPVLRTVPGIGPLIAAAYVLTLDRPDAVQHSRQAGAFLGLRPRQSQSGDSDPQHRISKTGNVYLRSLLVQAAHYVLGRFGPDSDLRRWGLKLAASGGKRGKKRAIVAVARKLAVILHRIWQTGNSWQAFPQSRNNTASKNVCMA

SEQ ID NO: 193866 - protein, 355 aa, unidentified
MNVYTGVHSYYCGIDLHARTMYVCVLDSDGKTVYHKNIPCRPDRFLQAIEPFREDIVVGVECIFCWYWLADLCDEEGIDFVLGHALYMKAIHGVKTKNDRIDSLKIARLIRGGNFPVAYVYPPEMRATRDLMRRRNHFVRKRAELLSHIQNTTMQYNLAPLGTLSRPHHRRDKDIVGHFPDPVVQLIVETDLQLIDHYDPIIKHLDKQILALAKGHDPTSLDLLRSIHGVGDVLSLTMLYEIHDITRFPSRGEFCSYARLVKGQKSSAGKNYGTTGGRIGNAHLRWAFSEAAVLFLRNNTQAERYYNRLINRHGKSKALSIVAKRLGIAVYYMLRRGNPFNINMFLQNHMANEKA

SEQ ID NO: 193867 - protein, 365 aa, unidentified
MKIMHWVGIDDHADKWTIAHYTGNEEKPTREFELVPDSKGYRSLVSFLKGLKSEVRVVYEAGPCGFEQYRRLKAAGVNCQVAAPTLTPRKPGEKVKTNRRDAAKLGRELRSGGLTMITVPEPEQEPPRDLIRARQTIQKDVGRLRKQIIQLLLRYGHRFRDGQSWTKRFWVWLKAIKLTGSYSSFVLADKIVELEHRIEQLARYDEEIERAAQKPEYQTYVAAMRTLRGVETLSAMTILSEMGDLRRFATAPQLMAAVGLVPSEASTGDKTRRYGITKTGNAHMRHIAVQAAWQYQRQATASAKIKARRKDQLPEVVAIAQKCEARLNRRFHRLTSRHKKSTVAVVAVARELIGFIWAIGQIVHP

SEQ ID NO: 193868 - protein, 394 aa, unidentified
MKKNNTVVQSVAKPKKRSSDKSVDESPGKKAAKEAKGAPGPLTIGMDLGDKTSRYCVLNGSGEVSKEGSVPTSKKGMLERFGALARCRIAMEVGTHSPWVSRLLSQLGHEVIVANARQVKLISESSRKDDRLDARLLARLARVDPALLRPVRHRSEQAQLHLLEIRARAALIEVRTSLVNSARGLAKALGERLPKCDADQMGVEQMKSLPAGAQETLRPLLEEVASLTKQIYVYNERIEQIARQDYPETKLLQQVSGVGTLIALTFVLTVEDAGRRFERSRDVGCYVGLRPKRSDSGESQPQLRITKEGDSYLRKMLVQGAHYILGKRAPDTDLKRWGLKLAAHGGKNAKKRAIVAVARKLAVLLHRLWVTGEVYEPLRHSNAALAGEKQVAAA

SEQ ID NO: 193869 - protein, 377 aa, unidentified
MHSENIAAYVGLDVHKETLAVAIAAPERLGEVRYYGTINNEAQAVRRLFQKLQGLYGNILSCYEAGPCGFRLYHQLTAMNIKCQVIAPSRIPKSPTDRIKNDHRDAISLARLLRAGELTPVWIPDLTHEAMRDLIRARAAAKRDSRVARQRILSMLLRTDKHYAGKHWTGKHRTWLANQSFSQPSQQIAFQHYCQSLEQIEDRILQLDQEISRLLPEWSLCNLVCQLQALKGVGQLIAITLVAELGDFSRFSNPKQLMAFLGLVPGEYSSGNSIRPRGITKVGNSELRRLLYEAAWSYRTPAKVGAWLIYYRPDSVTQYSKDIAWKAQQRLCSRYRSLTAKGKKSQVAITAVARELTGFIWDIALAAQSSFSQQKQN

SEQ ID NO: 193870 - protein, 430 aa, unidentified
MRHWGCGQDGSIVSERFELFVGIDWAAESHEVCVLDAERRVIDRKTVEHSGAGVAQLCDLLLKLSNHQPSRVAVAIETPRGAVVETLVERQFAVFAINPKQMDRFRDRHSMAGAKDDRKDAFVLGDSLRTDRHLFHRVQLDEAQVVRIRELSRTEEDIVQEQVRAGNQLRELLRRYYPQMLNLCPGVDEIWFWDLIECAPKPEAVRKLTRSKIERLLKEHRIRRLSAEEVLGALKAPPLQLTPGAVEAASEHVLLQLPRLRLLQQQKNDVAARIQSILDEMSQPGQSGEHRDVAIILSLPGVGRSVAATMLAEASQALARRDCHALRSYSGSAPLTRQSGKKKVVLMRQSCNQRMRNALYHWARVSVQHDDHSREHYAQLRRVGHKHGRALRGVADRLLPVLMAMLKSGTFYDPQRRTNCLTPTIESQTA

SEQ ID NO: 193871 - protein, 442 aa, unidentified
MLGIDLGDQKQALALIDHDMRVLWRRSPRCAVHQLGGPVADAVEAAAAAGMSRVTVACEPTGSRWMQVRRLCGEAGVALVCVQPLVSHIAREQEDYTGHKRDEPDAVLIARLACELHCYIPEELDESWAFLRQLGRRRAQLVTTATASVLRVRDFLPVAWPSAVTAAGDPFKSMTWLAALEVATSRCGADPARLAAAGEEEFLALVRDAAPGWGTPRPDRRIARKVLALADDPDAVAWSRRGLFRRIRDELGDLQRARRQLKEVEADMTALLAELGLARLGDIPGLTLAGAAVILAETGDPRRYETSSSMVKHAGLSPSDNASGASEGASRISRRGRPSLRVAAWRATFAMLNWNPVMKAKYETLVAGAEESARAAAGSSHPGSARAAQAARSARAARAKARVACAASLLRWIYFMTVHDAGWDPVAASGGRFAPQEAQQAA

SEQ ID NO: 193872 - protein, 377 aa, unidentified
MKRILKIGMDVHSTNYTLCAMEPVIGAEDRVFANVQVTPDYKNIILFIENLKQKLGLNDTYDIECGYEAGCLGYSLYNQLTAAGVKCVILAPTTMLTEQGQRIKTDSRDAHLIAQCLSYGGYHPVYIPTEQDDSVKEYLRMRDDHKKALKKIKQQIGMFCMRHGYSYEGTKWTIAHLKWLKKLELAPMYQETLDEYLASYEEQTAKIERFDARIEEIASQAEYAEKVKKLGCFLGIKTHTALSLIAETGDFTRFAKGNVYAAYLGLAPGEHSSAVKVNRLGITKAGNSHLRLLLVESATGICKGAIGHKSKALKQRQQGNSAKVIAYADKANARLRSKYYRLIRHGKKRNVAVAAVARELACFVWGMMTDNIDVTAA

SEQ ID NO: 193873 - protein, 344 aa, unidentified
MVYAGLDVHKRCTQICLEDESGALLERRILTERHRLLEEFGGKPPMRILLESATESEWVAPCLESVGHEVIVGDPNFAPMYAQRSRRIKTDRRDARALMEECKVGAYKPAHRCSDAHKRVRARISARDLLVQTRTKCISLVRALLRHEGIKPERKSSATFARKVREIGVPEALANEIAPVLDLVDALNEKIRRADERVSELAKDETHQRLMTVPGVGPVTAVAFIATLDDPKRVHGPKQVRAYPGLVPREHSSGEKALRGRITKQGSGRMRRLLVQAAWAVLRSRPTPEADILKSWTTNVASRRGRYVAIVALARRLPGILFAVWRDGTSYRVPGPLGGREVTT

SEQ ID NO: 193874 - protein, 402 aa, unidentified
MKFSVGIDWATQAHAVCILDQTGRVQWQGSVPHTADGLAALLARLRRVRRRGPLRVALERPSGLLVDTLVEAGFEVVPIHPNALKASRPRYSAAGGKSDPGDAFILADLLRTDGHRFPALRPPSDDTRALRALVRGRDALVAQRVALANQLRALLERFWPGAAGIFADVDSPIALAFLTRYPTPHAAARLGAKRLAQFLGQHSYCGRRPVGELLARLRSVPVSQVGEADAEASGDVVRALVAVLSPLVTHIQQLSAGIEAALSQHPDGPLLQSLPRSGAVNAAQILAELGDDRARFPTDEQFAAEAGLAPVTHASGQHHAVVFRWACNKRLRRALTTFADNSRHASRWAALVYQRARARGCRHQHAIRILARAWARILWRCWQDRAPYDVSRHRAALALAVA

SEQ ID NO: 193875 - protein, 387 aa, unidentified
MHTVTSTTVVATAARANDNTLFASLELSKSKWVVTINSPGSEKFSKHVIEGGDGAGLLELLARLRAKAEQRCGAGVKVVVIQEAGLDGFWIHRLLLAAGIESHVVDAASIALPRRHRRAKTDTIDGETLLRTVMAWARGERRVCSMVCAPSPEEEDRRRLTRERDTLLKERIRHTNRVKGLLSSQGVRDYHPLRRDRFERLETLRTGDGRELPPLLKVEIRRELERIGLVTTQLAAVERARDALIRADAEGPNTPAALLLKLKGIGPEFASLLWLEALFRSFVNRRQVAAYGGLAPSPWQSGAIERDQGISKSGNRRLRKTMIELAWLWLRHQPDSALSRWFRARVGAAKGRVRRIAIVALARKLLVALWRYVTQGVVPEGAVLKAA

SEQ ID NO: 193876 - protein, 415 aa, unidentified
MDVLHDRCAGLDIGKKDLKACVRTPSPARRNSRRQEIRTFTTTTNALLELRDWLVEQQVTLVVLEATGDYWRGAYYLLEDALNVILVNAAHAKGLPGRKTDVSDSAWLAQLGECGLLKASFVPPEPVRHLRDLTRYRSTLTVERTREAQRLEKELEDAGIKISSVASDILGVSGRAMLAALIAGQDDAQAMAAMARGRLRSKIPALVEALTGNFGEHHSFLCRLHLTRIDELSATIEELSARIETEMRPFAPQIERLVTIPGVKQTTAEVIIAETGGDMTRFRTPANLASWAGVCPGHHESAGIRRSGKRRHGNRWLGGALGTAAMAAGRTRERTYLGARYARLVPRLGKQKTIVALEHSILIAVWHMLTDTVDYQDLGGDYFTKQDPERALRRIIRQANALGLTVRFDPIPDVA

SEQ ID NO: 193877 - protein, 334 aa, unidentified
MKNRYFMGIDVAKATFDFCLLSSSGAALWRGQFSNDACGIERFLAQLPARSWKLCQIHFALEATGVYGKALIAALHQAGLAVSVLNPAQVKYFALSVLRRTKNDTVDAEIIARFCRERKPLATRPLRPIEEQLKVLVHERESRVGEQTRERNRAKKDPFQIELPTLISRQRQQRLKQLAKEMAQLDAAIASLIASDECLKNHSQLLCSIPGIAAVTAAKLLAELAAKEFQSARQLAAYAGLTPAEYRSGCYLYGKTRISKIGNAFLRKALYLPAAVARRWCKRLKPWIAMLESRKLHALAIRGAIMRKLLHIVFGVLKHQKPFNPLLVSSPKTV

SEQ ID NO: 193878 - protein, 460 aa, unidentified
MTLLERLGAGLPTRYYLGVDVGYKEHVAVVVSLKTFVRGDDRWKRARCVHFPSTQAGLHKLQRYLEQFSTDPSQFLGLCEPTGGYYGATVFQSLLSRGYDMNLIENATVSRMRKQLFPGLPKTDEMDGRVMSRIGYLHEAVGEEFTLRPLKLSNPDDTHLLALCRDSWKVSAIITRARNQFTQLMAITFPELKTFFTGSVSSLAPVSLMAAYPTPALLAEAPEDEVREVLWKTGAYHHAKRASELCTLASDSSGLLPDPGRAWRQEWLTHFLLTNFEYQAALDRRIKQLLEQRDDYQLITTVPYSGPNTLGIILAATRDVANYSNYRKYVAYTGYFAGLLKSQSIDRTKMSKRGNRELKRAYFQIAAPLVWFDKGENPYKELYQRKMAEGKEWYKAMPFVCAALARHIYHCLKFNAPYDVEKAFQGTSLQPASEEGWLDLGACLDERFEEMEVHLCQIEG

SEQ ID NO: 193879 - protein, 349 aa, unidentified
MTQQRISYAGERVYVGVDVHKETSTVTCVCHKQIVKTATVPAEPASLAASVLQWFPGAMLASAYEAGFAAFVLHRALTQVGITNIVVNPASMAVAANDKVKTDRRDSKRLAIDLADGRVRGIYVPTEGEELARLLPRTRAQIVDHRATIARQIKAKLHQFGLIAPASRRMISNRYLREIAAWSLPPELRVSLTLLAEQWRFGTRQLIEIRRLLRTQAAAQAELAHVYRSVPGIGAVVARTLATERGDMPRLANERALFSYTGLTPSEDSSGPAVRRGHSSRQGSGRVRHLLIETAWRALPRDKVLQEILDRIAATRGKKRAIVAIARRLTGRMRACFRQGTTYAVGTYA

SEQ ID NO: 193880 - protein, 357 aa, unidentified
MAPQLSNIVVGGVDTHKELHVAAVVDERDRVLDTEFFPTTRHGYKQLVHWLRSFGKIARIGVECTGTYGAGLLRYLHAQDIEVLEVTGPDQDLRRRKGKDDTLDAENAAHAAFARVRAVTPKTRDGLVESLRVLKVSRKTAVAARRVALQMIRMNIVSAPDDLRDQLRHLTRMKLIRMLAAWRPDLTRYRDVTGAYKIALKSLARRYLELTDEITDLDVMIKNIVDHLAPDLITKPAVGYESAAQLLITAGDNPERLTSEAAFAALCGVSPIPASSGKTHRHRLNRGGDRQANSALHIIAIGRLRTDPRTQDYVAKKLSEGHSKMEALRCVKRYLAREMFYVLKARTEVINQTQIAA

SEQ ID NO: 193881 - protein, 416 aa, unidentified
MEMDREVVCGADIHKQFLLATILSNSGQKIQDRFDMNFEGLTSFRKWLLDHGCQKLAVESTANYWQPIYLIVGKDVEFVLANAYQIKHIPGRKTDVLDSEWIAELCLKDLIAPSRIFSEDERDLRAVTRTRENYVKMRSQIKNRIHQELESACIKLSSVLSDIFGKSGIHIIRGILKGLSIEDILDSIPSKKVKARKKEIQDAIRANISPVQVDLIGRLLDSVDFLNREISSIDKQIQALISKRQEDLKIAMSIPGMGITSASTILAEIGNFADFKTGEQLAAYCGLVPSVYQSAGKLITGHITKHGSPHVRRMLIEVAHAISRTKADSRLKRFYFRIKRRHGAKVAIVALARKVICILHHLIVNQEIFEDEIANKSKREKPGRSSSSPVLVIEDAIQILVRAGYLVQKRSEQEGG

SEQ ID NO: 193882 - protein, 364 aa, unidentified
MKKLVLREIGKQAQRPRAPEAGEVVIIGVDLSRSKWVYVCRWGGQEQRRFGSAGELKHLQAVVREYQHRGCEVHVVYEACGFGYQIAWWVEAHNAQVIVVAPSCVEKAPGAQVKTDGLDAGSLALKYERGMLKGIYIPTREHHEYRQLSRTYGQALKDRSRQQVRIRMLLQEHGYTPPPAGSGWGALERWLSAQSWAPPVGICVTELRELRASASRSARRLATEVRAVGRLPPYGELGKALAEQSGVGRFTAIRFMLEVGDIHRFATADSLPNYLGLTPKEYSSGDLVHRGRIRKCGPGSLRAWLVQCAWAAIRAGTDVALVECFRRLEPRVGRKRAIVAVARKLALRLRARWLAFEKEVPQAA

SEQ ID NO: 193883 - protein, 338 aa, unidentified
MELYAGIDLHSNNSVVSVLDEQDRTVFAKRLPNDLASIVDVLKSCAGTLRGVAVESTYNWYWLVDGLQDAGFDVQLVNTAAVKQYDGLKYSGDFSDARHLAHLMHLGILPTGYIYPREDRAVRDLLRKRCQLVRQRSAQILSMGNLIARDLGAHASGNEIKRWHAEEIDAMPLLAEQKLALKANLAVMQCLDVQVTALERAVLAKAKLREDYRALKTVSGIGEVLAMTIALETGDITRFDGPGNFASYARTVDSRRESNGKKKGEGNAKCGNKHLAWAFIEAAHFAVRYDAAIKRWYQKKCAKSLAVVAIKAVAHKLARACYHVMKDGRAFDVSRAFG

SEQ ID NO: 193884 - protein, 343 aa, unidentified
MSEYDGKQFVGIDLHRRHSVIVRQTGTGERLSAVRIVNDPGSLALQLEEAGEHPDVVLEATYGWYWAVDALQAAGATVHLAHPLGVKGFRYRRVKNDVRDAGDLADLLRMNRLPEAWIAPPPTRELRELVRYRAKLVALRSGLKAQAHAVLAKAGVLIAVSDLFGVEGRQRLARVPLGAAYAQRMSSLLELIDVLDTHERRFAEQIAAKLYDDRGYGAIQQLPGVGPVLGAVFVAEIGDVHRFADPSHLCSWAGLTPQHRESDTVVHRGHITKQGSKLVRWAAVEAIQRQPAGTKISVDRKRIEARRGKNIAKIAAARKLLTLVYYGLRDGHIRALTHQPAAA

SEQ ID NO: 193885 - protein, 401 aa, unidentified
MDPHLCVGIDVGCRSHRVGIALPDGSILEEFDISHSDAGFQEFFRRVDEHRNRLSLPVAVAMEGYNGYARPLDRLVQDKGYRLYNVNNLKLARFKEVFPGAAKTDPIDARKILELFRLKDQLPLAKDAIQEVVTAPVVNEKLKRLSRRRRHLVIEKMRVLNRMQADLQAVSPELLAATNDADNLWFLRLLTFRDDLRQLARLRRSTILQIPSVGQKYAGLIQAWQAKAQFSSEVEYVGPMIIQDARRILQLREQIHALDEVMAELADQSEIARRLSTIPGFGKTSIAELAGEIGTMERFASEASLALYLGMCPLTRQSGQMCTARAPRQVNTRCKSAMMTTAVRHIGCVPQSRAYYDRKRAEGKTHNQAIRSLGRHLVRVIWAMLRDGRDYEIHEHQHSTA

SEQ ID NO: 193886 - protein, 387 aa, unidentified
MPQPNDLSRSLVALDQDSTIIAVVEMSQSSWLVGGVLPGIERQPRKKLEPNPERLLALLHRWRDESVRAGRTITRIAVAFEAGRDGFWLARWLEARGVEAHVIHPSSVAVSREHRRAKTDRLDTELLKRGFLGWLRGERGHCSMARVPTIAEEDAKRPNRERECLVKERTRLVNRMKGTLARLGIRHFRPTLRNAAEHLAALSTPEGSPLPPNVAAELERDIARLRLVIGQIKQIEEARRQRLEEQPERGPHAMVRLLARVVGIGIETADMLVNEVLSRPLRDRRAVARYAGLTGAPDESGAKRREQGLAKAGNARVRRGMIQLAWRFLRFQKNSALAQWYQARTADHRGATRKTMIVALARKLLIALWRFVTIGEPLDGVTLRPAS

SEQ ID NO: 193887 - protein, 358 aa, unidentified
MQRNKKTFKGQNIYIGIDVHKKNWQVAVITESGYTERLSTAADAKALFKFLKSHYPDGNYRAVYESGFSGFATHYALSELGVSCVVAHAADIPSSQYELTMKSDRIDAEKLARALRAGLVRGIYVRPKDNLDDRGVLRIRKTIQIQVGGYKTRIKHLLHSNGVELPERFSRSGTHWSRAFIAWLREDVRLLSDTRRSLDLLLLQVETLRANLLEATRRVRALSMTDRYREDCALLMGIPGIGLTVAMTILTEVCDIGRFGNERQFASYLGLVPTSHSSGERVSHGEMTFRGNKHIGPLLVEASWVLIVRDRELGRMYTEYRWRMAGQKAIIKIARKLSNIIFAVLKTRKAYEPYRRDA

SEQ ID NO: 193888 - protein, 373 aa, unidentified
MSEFNKFVGLDVHKSTIAISIASDDGAEVRYFGEIKNTKEALSNFANKISQGSLKLSFCYEAGGCGYEVYRHLRNIGHDCMVVAPSLIPKKAGQRVKTDRRDSLNLARLHRAGELTGVWVPDAMNEALRDLTRAREDMKHLQRQAKQRLLAFLLRHGWTYSGKSNWTKDHFNWLETVKFQHAAQQIVFQEYVDTVKYCGKRVESVTQQIEICSRESAYWPVIESLMALKGIDLISAATIMAEIGDLTRFDSAPKLMSYLGLVPSEHSSGSSVRRGGITKTGNSHVRRVLVEAAWTYRFPARKTAHTQKRAKVTTEAVQEISWNAQKRLCQRYKELNANGKIKVQTCTAVARELAGFVWAIGQTVPLKQSANVQ

SEQ ID NO: 193889 - protein, 488 aa, unidentified
MANRKISTFERLQQGKLNRAQRRELGRRLHSEDPGLQVVHPDAAGIDIGNESHFVAIPPDRDATPIREFGSWTADLQEMANWLIERGITTVALQSTGVYWIAVLEVLEKAGLEVYLVNARGTKNLPGRKTDVQESEWIRKLHAYGLLRNSFRPPEEIRAVRTIWRQRERWVQESGRAVQHMQKALTTMNVQLANTISDISGTTGQAIVRAIVAGKRDPWELAELRDRRIAASKKEIAYSLQGHWREDVIFELRQAVESYDFFQGQMKACDQELIKYMAAIDSREIVPKQDLPENAAPLSCPKPRRRSKTRSKNRPGFDLAAELERTMGVDLTQIDSIDVITAQVIFSEIGPDFSAFRDENHFASWLTLAPKRDISGGKVIRNIPSAGRNRVANALRMAAESLSRSNSYLGARYRRLRARMDGPVAVKAMARYLACLIFRIVTKGQAYVDRGAAHYEAKRQERERMALERRAANLGLTLVPQASIMTAL

SEQ ID NO: 193890 - protein, 346 aa, unidentified
MLHIGLDLSRKRVDVCLISDQGELVDQFPAPADRDGLYGLTRRVAVYDQPARGVVESMNGARFVHDELVKHGWEVLIADAQRVKGLAPLACKTDKIDARVLAELSFRDLVPAIWLPPAGLRRERERSRYRLHLVKHRSTLKHRIHSTLICFGYQRSMSDLFGVAGRRLLKELDIPEPWRGHVDASLELIDDLDRRISEIEDELQRAGADHRYVPLLMTAPGFGWITSFTVACELGDITRFSSPVKLVGYTGLCPRVNQSGDVDLRGPVSKHGPRYLRWGLMEAAIHAATHPLYKERYQRLRRRHGRQRGPKVAQIDLSRQLAKAIWYMLTRNQPFAPAGATFRLAA

SEQ ID NO: 193891 - protein, 331 aa, unidentified
MMPSFTYIHGIDVSKDTLDILTIDSTTLSKDKAQIKNVSICIETWLRLITTDNCLCVVEATGNYSSTLIYLLNQYNIQVAVVSPFKSKSFMEAMGVSNKTDEQAAYCLAMMGLHLELKPYQMPSIDRQKRRQLQTAHNAMLKQRQMLKNQLHALDQLPFVAQQARQAYQQTLQTVDEQIQQLEKQLADLDEDEAYRNTRQLACSVVGIGPATAHAMMLTANCFDFFETADQLSKFFGLTPNSHYSGSSVRKKGRISKMGAPYVRNLLYMCTRSAIRHNLACKELYQRLRAKGKSHKVAAVAVMHKLVKQVFACVKKQVPFDNQYYLKFKVD

SEQ ID NO: 193892 - protein, 334 aa, unidentified
MRIVGLDVSRSVAEIAYLEDGTLHAGGRTGLRRDELERFAGRLRATDHVVLEATGNTAAIVNVLRQHVARVAIANPLQVRLIAEARVKTDRIDAAVLAQLYASGFLPEVWMPDERTLALRRQISRRSQLVRQRTRLKNEIHAVLAAHLIERCPVTDLFGRKGRAWLSVQPLPLDERLGVEQRLRELDRLGEDLREVEQALAQATIDDARLRVMLTITGVNTTVAIGLLSAIGDVGRFPNPEKLVSYFGLNPSVYQSGTTPARHGHITKRGRSYARAMLVEAAWGATQAPGPLRAFFLRVRDRRGQQIAVVATARKLAVIVWYVLTRDECQRAEL

SEQ ID NO: 193893 - protein, 403 aa, unidentified
MRMFVGLDWASAEHAVCVVDERGGVRAQFTAVHSATGLAGLVAQLQRFGEPATLPIALERPTGLLVDTLVDAGCPVYPVHPNVVKASRARYRAAASKSDPHDAYVLADLLRTDGHRLRPLRPQRDATCALRALVRGRDDLVATRLALANQLRALLESFWPGAAAIFADVASPIALAFLARYPTPQSATRLGPKRLAAFLAQYAYCGRRAPAELLARLQQAPAGRAAAAEATAKGEVVRALVAALMPLVAELQRLTAAVEHAVATHPDGPLVMAFPRAGRVNAAQILAELGDDRARFTSDDHLAAEAGVAPVTYRSGKQHGVGFRWACNKRLRQAVVCFADNSRHSSPWAAAVYTRARARGCDHPHAVRILARAWLRVLWRCWRDRVPYDPAKHRAAKQMLDAA

SEQ ID NO: 193894 - protein, 427 aa, unidentified
MEHILQPIGKAEPEFAALVAIDWADQKHYWSLQVVGQEGLQRGTLDHTPEAVEVWMMELHLRFGGRPLAVALEQRRGALAVMLSKYAHVYLYPVHPTTLAKFREAWYPSRCKSDPGDADLLLEILTVHRSRLRRLDPDTVEMRFLQNLVENRRKLVDERTALSNRLTDLLKLYFPQILGWFTDVASAVVGDLLTQWPSLQHLQQVQPAKLEKFLRAHHCAEIPERLFQIRQAIPAAHDRALLDSAWYLVTAWVQQMAVLRESIRQLEKCIVEQAAQQEDGPIFQSLPGAGAALAPRLMVALGTQRDRYSSAGELQSFSGIAPVKEASGNTQWVHFRWACPKFLRQTFHEWAACSIAQCEWARAYYQQQKARGKQHHVAVRALAFKWMRILYRCWKDRQPYREEIYLASLAKRRTALVAALAQSVQMS

SEQ ID NO: 193895 - protein, 346 aa, unidentified
MLYAGLDLSRQRLDVHVLDEAGRTVEVSAVRPDADALRTLANRILCHGQEVSAVIESMTGSRFVHDTLERMGWEVAIADPVKAKGLAPLAAKTDKIDAHGLAELARRDLVPEIWLPTPGVRAERERARFRLHLVRHRSALKCRIHATLMAFGHPVVVTDLFGISGHELIASLALPEPWAATLATSLGLVDELDQRIDECGREIIRLGADHPYIPVLLTVPGVGPLLAYTIASEIGDIARFASPKKLTGYTGLCPLVRQSGNRDVRGPLAKNGPKYLRWALIEAATHAARDARYRDRYERTKHRLGRQRGAKVARVDIARQLAEAIWHVLSKNEPFAPAGPAIKLVA

SEQ ID NO: 193896 - protein, 316 aa, unidentified
MKIYIGIDISKDTFDAATSSQKQSVTFNNNPMGFKKFIKWLNAFDSPHIAMEATGKYYLSLALHLYEQDYPVSVINPFKIKHHAQSKLKRVKTDSEDAKLIADFCEVHPTKPWQPDSPIIAKLQEFSALQALLIQTKTRIKNQMQSSTEIEVLKIQKSQIQQLEKQIEKIQSQMKACVQQDVELTKQLALLTSIKGLGEKTAIELITHIKDIYRFDNAKALACYSGLVPQIQQSGSSLNRSSLSKMGNANLRRCLYMPAVNSIAYNPVLKAFAANLRNRGVAGKKIVVAVMRKLIHLVFAILKSGKPFDPEYKIRA

SEQ ID NO: 193897 - protein, 359 aa, unidentified
MQKQNYELDFSGKDIYAGIDAHLKTWTVSIMVEGIMCKTFSQDSKPLDLKRYLEKKYPNGHYHSAYEAGFCGFGPHRELLKYGIHNIVVNPADIPTTDKEKKQKEDARDSKKIARSLHNNELNAIFVPSIEIESLRELVRHRKTIVKEINRYKYRTKSFLYRNGIKIPNELTVGSKYWSKRYSNWLKSLTFQTEYSKTTIDSIIATVEHLRKELLTVNRQLRKLEKEGAYSETILLLRTVPGIALIMAMTIITELENIQRFNNIDKLCAYVGLVPNTNSSGEKERVGGITKRSNNQLRNMLIESAWIAIRHDPALMMKYGELKQRMDGNKAIVKIAKKLLNRIKHVLVTREPYVQGIVK

SEQ ID NO: 193898 - protein, 449 aa, unidentified
MGESRSFEHEEYTVQEQTPPRMLPLKERKRTEGKGVVSMSVEMMYQRCAGIDVHLRFLVVCLIIVEAGKRRKEIRTFRNETADLLALRAWLLQEGCTHVAMESTGVYWMQVYRRLEGFFELIVANAQHIKSVPGRKTDVQDAEWIASLLQYGLLKASFVPSQQQQDLRDLTRTRISLVRERARLVNRVHKVLEEAGMKLSTVLSDIMGLSGRAILQGICEGESDPERLAKRVHPSVRASREQIVAALTAEVREHHRFLLRELLSLISAQDRSIRHLEEEIERRLQPFEEQIKRCEQITGVSRHVVHVLMAEVGTDLQRFPDAEHLSSWAGVCSGHRESAGKRQSGRCKKGNRYVREALVQAAHGVRRSRTYLGERYRRLKKRRGSKRAALAIGHNILVIYYHMVKTGQDYQEKGEEFFQQRDRGKLERQLVRRLERMGYRVTPSSQPAA

SEQ ID NO: 193899 - protein, 361 aa, unidentified
MTDVSKVLPQMTAGLDLGDKYSYLCLIDTQSGEVMEEGRLRTNPEAFKRRFVSEQPMRIAMEAGTHSPWASRMLEECGHEVLVANARKLRLIYANKRKTDEIDAENLARLARLDPKLLYPLQHRGENAQAHMALIRSRQALVGCRTQLVNHVRGAVKSFGARLPKCPARSFHKRVSEHIPEALLAALEPVLEQIGSLTERIRQYERQLETISKEHYPHETDLLRQVEGVGTLTALSFVLTLEDPHRFEKSRSVGAYLGLVPARDRSGERDPQKRISKEGDEMLRKLLVGSAHYILGPFGKDSDLRRHGQKIASRGGKNAKKRAVVAVARKLSVLLHSLWVSGELYDPLYNAHRRRERGEAA

SEQ ID NO: 193900 - protein, 399 aa, unidentified
MTPDDIDVWVGLDVGKSAHHAHALDHDGNTLYDKPLKQDKKAIRTMLGKLSKHGRVLLVVDQPNTIGSLPLTVARNMGIAVAYLPGTAMRRTAQLLPGDAKTDRRDAHVIAWAALKLPETLRDAGPDDETLAALKLLAGHDEDLAHESTRHVNRLRSLLLQTHPAFERALKGERITRDATLALLERYGGPMGVKRAGIEDVKDWAKSNGLRAGRIIDDMFKAIGEQTVTVPGTLMAETIIPSIAHDIKTIRDRRREVGRQVEKLLEDHPLLTVLTSMPGIGVRTASNILLGIGGDIANFKSSAHLAAYAGISPVTGQSGTSIKGERPSRRGNKRLKNALWQTAFVASTKHPPSVAYYKRKREQGKHHNAAIICLARRRCDVIYSMLKNGTLYQEPALVA

SEQ ID NO: 193901 - protein, 338 aa, unidentified
MTIETLGVDIAKTVFQLHGVNRSGRIVMRRRVMRDQLLAVIAQIDPCTIAIEACTGAFYWQRKFEQLGHQVRIISPQYVKPFVRRQKNDGNDAEAICTAARQPHMRFVPKKSIEQQDIQALHRARQRMVNHRTAVVSQIRGLLLDRGFAFGKSITRARRIIPEILADLENELTDLAREAIGELHDLLQDLDRRIASFDKKIERVFRQSEVCQRIAKVKGVGPKTATAVVAAIGDGTEFKNGRHLAAWLGLVPRQHSSGDKRVLLGISKRGSQHLRTLLVHGGRAFVRTAGNKSDPINQWVNQLRERRGYNRAAVAVANKNARIIWAVLRTGEAYGSAR

SEQ ID NO: 193902 - protein, 405 aa, unidentified
MEILVDRACGIDVHKATVVACIMGTGIKKEIRTYTTMTNDLLRLKAWLRDNRITHVAMESTGVYWKPVFNILEDSFEVILVNARHVKNVPGRKTDVKDAEWLCKLLRSGLVRGSFIPPKEVRELRDLTRYKRKLIQTITSEKQRVEKILEDANIKLSSIASDTFGASGKRIIEELMRGELKPEAMAELSKGRLRNRKAEMKEALVGNMEDHHRFMIQAHLTHIAMMEGLLSTVEQKIQEKIERHFKEEYELLKTIPPVKDSASIVIAEIGVNMDPFPSEMHLSSWSGMSPGNNESAGKKKPGATTHGNKHLKTILTEFGWIASKMKGTYLWSKYHSLVGRRGKKKALVAVGHKILIMCYHILKYKVPYKELGPRYLDERRKDRMAKSYIKRLTSLGYAVTVKEAA

SEQ ID NO: 193903 - protein, 393 aa, unidentified
MRFAGIDIASETHVVAVVDENAEVRLKPLAFAEDATGYAKLLAALGPPAGVLVAMEATGHYWKNLFATLAAHDYAVTLINPLRTRRFAAEDLERTKTDAIDALGIARFAAQKRPAPTRLPDSTTEELRELVRLRDRLTQDFGDRVRQLHRLVDLGFPEFTRYVKSLDSELASAILHDYPTAKAFGGISTKRLARLCYDGRHQVGTELAAALIDAAQRSVGQHHGEPYRIQVRYACEDLDTLRRRLRSLDRDIEGKLAEHEVGTLLTSIDGLGPHTAARLIATLGNPSHFRSAAALASYVGVIPGLRQSGKNRSTRARLAPLGNARLRAKLWMPTLTAVRLNPWLRTYYQGLRARGKLPKVALVACMRKLLLAVYTVAKHRKPFVSHCAQSAQP

SEQ ID NO: 193904 - protein, 341 aa, unidentified
MKQYVGLDVSQKETSICIVDEAGRPLYQGRVKSDPGVLAAVVAKKAPNAERVGLETGAMSSWLWHELKRTGLPVVCIDARHAHAALSVRMNKSDENDARGLAELVRVGWYREVAVKSEESQAARSILVCRSRLVRIRRDLENQMRSMLKECGMLFPRAVGGQFQRRVSDLIADGHALGPILLPLLSVHEQTCGELEKIDRTIRHLAREDETTRRLMTVPGIGVVTALTFRHTIDDPTRFQNATKVGAYLGLTPRRKQSGEMDVTGKVSRWGDRLLRTYLFEAASVLLHRTKRWCALKAWGLRIAKRSGMKKAQVAVARKLAIILHCIWVDGTEFEWGKQPA

SEQ ID NO: 193905 - protein, 394 aa, unidentified
MKLVGIDVGKNNHHFCVMDKETGEFNVTPSSFSNNKEGFDFLINSLKPYSKKSILLGMEDTGHYHVALLKFLLSNGYTVALINPKTTDLTRKMEGGITKNDKLDTITICDVLDTPERKKQYRITKVDRFDLYEQRQLTRHHHNLKEELNIYCNRLQKSIDLVFPEFNTLFGSKYGVVYMNLLKTFGSAEAIASTDIRTIRKCFEIKGRGGRISLTAEKLKECAKNSIGISSEVETIQIKHLVSQIMLIKEQIAEIDKKIEEFSIKNNSPILSIPGISHFSGTSILAELGDIGNYSKPSRIIKFAGVAPYHYESSQYNAQHTAITKKGSKYLRKTLYQVILPVINNNPVFKKYYRLKISQGKGHRCAQGHCIRKLLRVIYHLLETGQSFDPALLR

SEQ ID NO: 193906 - protein, 334 aa, unidentified
MDNSVLYVGIDLHERESQLAIFEKDGALLEERRLATGELASFLSSLPGEKRIAIESVGFVYPIYDKLSSLQDCTVTVANVNRLQLISRSSTKHDSADARILGDLLRTNYLPVAHMKDEETREKLAVVQERVNYGVKRAELRGSVRWLLKRRGIEVEKPFGLEGRARLRELHLQEVDNRIAELDLVESFVERLDAQIVDIASRDHRARLLDTLPGLGPYTALYLACALDDVDRFPDSKHACAYLGLVPWLDESADTRHLGHITKKGDKWLRRNLVECAAVAVRKDARLNEFYTRLRHKRGERRARIAVARKLVSYAYWMIKRNKTYEELSPWTTT

SEQ ID NO: 193907 - protein, 346 aa, unidentified
MEQISRIGMDTSKHLFQLHGVDAAEKPVLRRTLRRRDMITFFERLAPTRVAIEACGASHHWARLLRGFGHEVQLIAPQLVKPYVKRGKNDAADAEALCEAMSRPTMRFVPVKTAEQQAALMLVKLRDRLIRNRTQLVNAIRGYAAEFGIAGAKGIAHVTTLLARLQADVTLPALARELFAMQAGEYAQVQAKIAVVEAKLLAWHRADPCSQRLAGVPGIGPIGATMLTMKTPAPEAFRSGRQFAAWIGLTPKDHSTAGKARPGVITRAGDEGLRSVLVVGATAVIRHAQRSQARVAPWLVKLLKRKPPKLAAVALANKIARIAWKLMVSGEHYAARVGPVGLGAAA

SEQ ID NO: 193908 - protein, 464 aa, unidentified
MMHPRQNQLPPDSPTDPDGFPVLRPNVAGIDLGSTSHWVCAPTLDGSAREVAQFGATTPELQKLVCWLQLRHVVSVAMESTGVYWIPLHELLERLGFEVLLVSTRDLAHVPGRKKTDRIDCKWIQRLHSCGLLRGSFRPAELVCMLRTLVRDKATLAAAQADWIRRIQKSLDQMNVRVHRAVSDIQGATGMAIIRAIVAGQRDPAALANLRDPGCRKSPQEIAEQLTGHWREDHLFSLQQSLKMYDAIGETIAAYDKEILHRLGELQRVELTGKQAPPLRNPNKAKMIRQRGEDPLRQALYRMSGVDLTAIDAIGVGVVQTVLTEYGPDLSRFPTENQFVSHVTLAPKTPFTGGKPIKNKKRRGGASSRVAAALRSAALSLRHSHTALGAYFRHTANRLGADVATFATARKLATLIYRLLRWGTAYVDEGAEAFEKRYQTARVHRLLTNAKDLGFQLIPSPQNP

SEQ ID NO: 193909 - protein, 315 aa, unidentified
MMNEQTYCGIDVAKRHFVIGLSTQKRTKTETNNPKGIAHTIEYLRRFSVDLIVLESTGGLELPLAKALHRTGFRVVIANLRQTNQFAMSQSLAKTDNKDAKMLAFYAQMLAMRDNVAQQLYIPPTPEQEQLEALVSRRNQLVEMRFAEKNRLEQVHSTQVFSVEQHIDYLSLRIDELDREIEQHLKHFDDTIKKFKDIKGLGTQTIAVLMSMLPELGQYTHKQIASLVGVAPHPKESGNTKWKSRCSGGRKAVRNALYMATFVCVRFEPKLKQFYERLRANGKAFKVAINACMRKLLTILNAIVRDDSQWDAHAL

SEQ ID NO: 193910 - protein, 421 aa, unidentified
MRFYTKPHRYYCGIDLHARRMYICVLDAEGQVRVHRNGPATPEHFLTTVAAYREDLVVAVECIFTWYWLADLCAQEGIAFVLGHALYMKAIHGGKAKNDRIDAHKIAVLVRGGMLPMAYVYPREMRATRDLLRRRCHFTRKRAELLTHIQNTASQYLLPTLGKIAYHANRVGVAEQFRDPEVRKSVETNLALVDEYDRLLSELELHLTETAKVHDVNAFYRLRSVPGIGKILALVLLYEIHDIHRFPRVQDFVSYCRLVKCAKQSDGKHYGYSGTKIGNAHLKWAFSEAAVLCLRKNPPAQRYVARLAHKHGKGKALTILAHKLARAVYSMLRRGQAFEATKFFGRTGSGDRAARPEIDRILRDEVHDASRSGPTRHDREGGRYLDPPENKRRGSRPHVHAGGGARPRRAAGAADRVEEAK

SEQ ID NO: 193911 - protein, 340 aa, unidentified
MGEQYVGIDLHRRRSVIVRMTGEGEVLETVRIDNDPVALSLELAKAGPDPEVVLEATYGWYWAADLLQACGANVHLAHPLGVKMFGYQGVKTDARDSTNLAELLRMGRLPEAWLAPPQVRELRELVRYRAKLVALGSGLKAQVHAVLAKEGVRVPMSDLFGVGGTRLLDQLQLGRAYGLRVASLRSLIGAYDQEITTLQREVAAALAGDVGYLAIQAIPGVGPVLAAVFVAEIGNVHRFAGAPQLCSWAGLTPRHRESDTTVRRGPITKQGPRLVRWAAVEATQRLPRTSKQAADFHRIADRRGTGIGRVAAARKLLTLVFYGLRDGQVRCLARSAAEAG

SEQ ID NO: 193912 - protein, 419 aa, unidentified
MKEMSSSETKTDRVAKPRGTGKKRGPVQRDVKEVVAELVLKLSQQLEPQPERAREGEGQRECVPRPNRGRLTVGVDLGDQWSNYCILGLEGETLAEGQLRTTQQDFAEFFQSMAAARVVMEVGTHSAWGRDVVAGCGHEVLVANSRLMEGPKRRKRKNDRIDARKLARVGRVDPQSLFAVQHRSLEVRQDLVVVRARDTVVAVRKDVINSTRGLVKALGARLPKCSSQSFSKKVEGSLPTEVHEVLLPLVRLVETLSNCIKAYDERIEKLAAEKYPHTELLRQVKGVGALTALAYVLTLEDPKRFAKSRDVGSYLGLVPKQEDSGDRQPQLRITKMGDMMLRRLLVGSAHYILGPFGPDTDLRRYGLRLCEPGGKNAKKRAVVAVARKLAVLLHRLWVSKEVYEPLRHAPPPATGQEAA

SEQ ID NO: 193913 - protein, 320 aa, unidentified
MNINTTTKNNIGVDTGKSQLDIYIRPLNIFFTVTNNEKGIKEAVKKIKKHKPERIVIEATGRLEMPFIIACSKAKLPFVIANPMHVRKFAGAIGQRAKNDRLDAELIAHYAEAIKPKLTNLKPDKIRLMSDLVTRRNQLLTLQTMEKNRLQILPKELASTINPILTTIKNQVEKIEVKIEKLIEKCEEYQNKNIILQSMPGVGKIAAASIISNVPELGYITNKQAASLIGVAPITKESGAYKGKRVIQGGRAQVRTVLYMAMMSAIQCNPIFKGHYQHLLEKGKPKKVAIIACIRKMVVILNSMLRDGVIWNENTSKNNY

SEQ ID NO: 193914 - protein, 346 aa, unidentified
MKHIGLDVHKKTTNVCWIDEQTGVVSGQSKVLTEQVVATVGALPGEKWVALETGSQSWFLARQLQSLPDTEVFVVDAFRGHRALEGMKRGRKNDKLDARGLARLSLEGRTPAMAVWLVDQAGHDLRTLTRTYITLVRQSTVLRNRIRSLLAAQGLSCEASDLTAPRAQGQLQQLRAQLPLQVQFCLESLNDALLCISKQVERCRARVEQACEQHAQCQQLQSIGGCGPILSTLVMAELADYQRFTHCGALRCYAGLTASIDDTGERSRYGRLVKGNSYLKYALVMLAQHMASHKDFEGTAMRRRYYRCLFKHDRTVANIDLARQLCDLIYAMLRDGTDYKPKKLEP

SEQ ID NO: 193915 - protein, 355 aa, unidentified
MTNIEGPVTGGVDTHGQTHHAGVIDQVGRQLADSEFPTTPAGYRALLAWLRGQGQLERVGVEGTGAYGAALARYLRGQGVVIVEVDRPDRKTRRVKGKSDPIDAYAAARAALSGTASGSPKTRDGRVEAIRALRLVRRSAVKARTQAVNQLKSLLVTGSADLREQLRPLGPAALVEACARLRPGADLTDPAIAAKTALRRLAARIRALGAEIAEADRELDPLVTAAAPRLVAMMGVGPEVAGQLLVTAGDNPGRLRSEAAFAHLCGVAPIPASSGRIDRHRLNRGGDRAANSALYTIVLCRLRYHPATQAYAARRTEQGLSKPEIIRCLKRYVLREVYRTLLPTAPPAEDLAPAA

SEQ ID NO: 193916 - protein, 433 aa, unidentified
MQDTQDEPLFVQRVAGLDIAKAEAEVTIRVPSDTTTGRRQQETRTFAATRAGLLSLADWLRCWGVTKLGMEATGDYWKPVFFLLESRGFACELYNAAQVKALPGRPKTDRADSIWLAKIVERGMIAASFVPPEPIRALRTHTRYRRHLTQARTAEKQRVEKLLEDGHLKLSSVISDIHGVSGRDMLDAIAAGQRDPKALAQLARGTMRSKIRRLEEALECSFFTDEHAAVLAMMLAVIDHYSAQIEELTATIEALTEPWLHQIAQLDAVDGIGLVCAQDIIAEIGADMRVFPTAAHLVSWARWSPQVKQSAGKRKGSNATGRGNPYLSAALGEAAISAGRTQSFLGARYRRLTRRMPKKKALVATGNSMLVIIHALLADTEARYQDLGADYYEQRMHARRQARNHVKSLERLGYKVTIQAINPDTGELQAATA

SEQ ID NO: 193917 - protein, 393 aa, unidentified
MSLDHHFAEPTAIRTNLGAIFVSLELSRSTWLITSLSPGGGEKMSKHGLSAGNIAALLARLSELKQKAFARTGQSFQVIVIQEAGLDGFWIHRVLQSEGVESHVVDAASIAISRRRRRAKTDRVDGEALVRTLLAYKRGEPRVCAMVRTPTPEEEDRRRLCRERKTLTNERVQHVNRIKGLLFCQGISDYEPLRRNRRQRLDELKTGGGRPLPPHLKAQITRELDRLELLLGQIEAVEIERDALLSAMKPDGMNADAVRSPPAMLINLNGIGPEIAAVLWSEGLYRSFANRKQVAAYAGLAPTPWQSGSVAREQGVSKAGNPRLRTTLLQLAWLWLRHQPQSALARWFHERVRRNGGRLRKSTIVALARKLLVALWKYVTAGVVIDGAVARAA

SEQ ID NO: 193918 - protein, 343 aa, unidentified
MNYYAGIDVSLECSSVAIVDATGKIVREGKVASDPVALIAWFGVFGLNVIRIGLEAGPLSQWLYAAMKEAGLAVELLETRHVRNAFKTMAVKTDRKDARGIAELMRVGWFRPVHCKSMDAQETRAMLTARTLVQSKLHDIEMSLRGILRGFGLKVGKTTSNRLAGRINELVSEHPTLQIIAKALLAAHEVLLREFKGFEKRVRIMAREDAKTRLLMTTSGVGAIVSLTYGSAMDDPGRFKKSKTVGAHYGLAQKKYQSGETDYTGRISKIGDKSVRRALYQAAHIILTKPVKSSTLKTWAMRLAKRIGMKKAKVALARKLAVIMHRMLVDGKPFNPAAAGAAA

SEQ ID NO: 193919 - protein, 365 aa, unidentified
MKKISTAAARRIGKIEGQRLTAGLDLGDRSSWYCVLDAAGEVLLERKLATTPKAMKEVFGGMPRSRIGLETGMHSPWVSRLLSALEHEVIVVHARNVRLIGESRRKEDRFDARTRARRARMDPDLLGPVQPRSRKAQADLTVIRARLVRARTSLIHTARGLTKSYGGRLRGCSPRKGNRELAEGLSLELQSALQPLRNEIESLSERIREYHERVQQIAQESYPEVARREQGKGVGTLIALTDVLTLEDPRRFRKSRDGGCYLGLRPGRRNSGQSEPQLHISKEGDPYRRTLMVQSAHHILGPFGADSDLRRWGLKLAERGGKNGKKRAVVAVARKLAILLHRLWVSGEVYEPLRNRHQVVLPAAA

SEQ ID NO: 193920 - protein, 343 aa, unidentified
MVAYVGLDVSLKQTSICVVNQLGSIVREGVVDSEPEAIAAFVRLNAPGAVRIGLETGPTATWLWTELKQLGLPVICIDARHAKAVLKMQINKSDRNDAAGIARIMQTGWFKEVRVKDLDSHSVRALLASRALLVKIKRDLENQIRGLLKNVGLVIGRAKFNVFAVRAEELIADRPELIAVVGPLLEARKAIEQQVDDLDRKVLKLARYDAQVRRFMTVPGVGPITALCFKATIDDPTRFKRSRSVGAYVGLTTRRHASGEVDWTGRISKCGDAMLRSYLFEAAGVLLTRVPKWSALKAWGIRLAKRSGLRKAKVAVARKLAVILHRMWIDGTEFNWSTKKAAA

SEQ ID NO: 193921 - protein, 341 aa, unidentified
MNVTTVGIDLAKSVFQIHGVNNNGKVVLRKQLKRQQVAEYFANLPPCLIGMEACGSAHHWARKLQAIGHKVRLMAPQFVKPYVKTNKNDAADAEAICEAVSRPNMRFVPIKNIEQQAVLALHRVRQGFVTARTAQANQIRGLLAEYGLVIPQGVSTLVLRVPELLEDATNKLPGSFRLLIQRLLDHMKELNRQVQEVEAQIVAWHRDNDLSRRLAAVPGVGPITASAVVATVGDAKSFTSGRQLAAWLGLVPRQNSSGGKNVLLGISKRGDTYLRTLLIHGGRAVIHAAQRKKAQIDGWLGELLQRRHKNVAAVAMANKNARILWALLAHGREFESDYTAA

SEQ ID NO: 193922 - protein, 321 aa, unidentified
MTYVGIDVSKTTFVVAYSSDKASKTKTFRNTVKGVHEFIQTISSAGHHCVLEATGNYSPLVVYLLSQAGITVSLENPLKIRNFARVMLSVTKTDETDALLIALYGEKMQPAPYRLRSDAILTLKQKRTVIRQLKKQLIATRNLKGSMEALPFFDPKCRKTIEKTIAFLEKQIKGLEEELSSLAQSEYKKQMDLLTSIKGIGITLAAALIMATGGFTYFDNAKQLTRYLGLSPTYQQSGTSVNVKGHINRNGDSSLRSQLYIAAMASLRCNTECKECFTRLRSNGKPGKVAVIAVANKLVRQAFAVVTQERTYVDGFKSAKP

SEQ ID NO: 193923 - protein, 340 aa, unidentified
MTYVGMDVHQKTSTLVMLDPATGVTDKRRIETTRGQLQEALSRWERPWVVAIEATRQTPAATAWLREMGAQIHLAEPQKLDALAKLRIAKTDAKDAQLLLYALTHDLLPECYLAPPQIMELRALSRGRDLLSKINTMLRNMGRTLLSQAGLQCLFTDLRGKGAQAGMPGLLAQLAPNARRMAEAYDTLLGVVQQLLAQVDAQIQREVAADPIARALTALTGVGPVIALALRAEIADIERFAAPKYLYGYAGVVPKVQQSDTFHQTGSVPRRCNKRLRYWAIQAAQCAANSRKDSPAKSSYERVRNRCGPNPAKVAGARVILKEVFGIWRRLQSASPSPGA

SEQ ID NO: 193924 - protein, 306 aa, unidentified
MDLTPMHKRVIALDVHQAKITACAVVEHDEGRVEVTKRDFGAFKRDRRALAQWALEIGPEVVVMESTGVYWKSPFAALEAVGIIAWVVNARHVKAVPGRKTDMADAQWLATLARAGLLRASFIPPLQMRQLRLVARQRQKLVGMCSAEKNRLHKVLVDAGIRINVLVADIHGASARAMVKALIADKPMHEGICPGNNESAGKRKTGRIRKGNAWVRRLLCEFAQAAARTRCALKAKFDALAIRKGRKKSVVALAHKMLRTIYAMLSDGTHYQDKEVDYEALNVQRNAPRWIKMLRKHGFIATPAVA

SEQ ID NO: 193925 - protein, 370 aa, unidentified
MRFYQGQHPFYCGIDLHARTMHVCILDQAGQTVFDKGIPCRPEALLRAIQPYRDHLVIGAECMFAWYWVADLCVEQDIAFVLGHALYRKAIHGGKAKNDRSDAGKIARLLRGGTFPLAYAYPKGMRETRDLMRRRTYLVRKRAELLTHLQILNAQYNLAPFPKKLACAANRTEMNVAERFNDPSVHKSAAINLALIDCLDELIGDLELYLVRTAKVDDVQTFYRLRSIPGVGKVLALILLYETHDIGRFDTAGQFLSYARLVRCAHESGGKKLGTGGKKIGNAHLRWAFAEAACLFLRSSERAKKWKQKQAAQRGEGKALAILAARLGRAVYHMLRKGEAFDEDRFWSGARRTRTGSSSLSRKEARDAGH

SEQ ID NO: 193926 - protein, 438 aa, unidentified
MTGANERSEPDFAAFIGIDWADQRHAWALQTTTQGAMERGDLDHTPEAVDAWATELGRRFGGRPIAIALEQSRGALLFMLTKYAHFVLYPIHPTTLVNYRRGFRPSGAKSDPSDAGLLLDILVRHREKLRRLNPDTAETRTLQFLVEGRRKLVNDKTRYSNRLTAYLKMYFPQVLDWFGEVSSQITGDFLERWPTLQKLQKARPDTLRAFFIQHHSCRSENVQRRLEEIRRAVPATHDMAVIASSVAAVVAVVRLLRELRQAIHSYDEQIETMARQHPDFVIFDSLPGAGAALVPRLIAALGTQRDRYNSASELQCYSGIAPVLASSGKQSWVHWRWACPKFLRQTFHEWAAHSIGSSAWASAYYNQQRAKGKSRNTAVRALAFKWIRILFRCWKDRIPYQEDLYQQALVKRTARANQTVNLQWKTCGGFSKFSGLSS

SEQ ID NO: 193927 - protein, 346 aa, unidentified
MNDITIYGLDLAKHVFQVHWVDVASGEVHRKTLPRAQVSGFFARAPRGVIAMEACGSAHHWGRLLQTLGHEVKLIAAQFVQPFVKTNKTDAADAQAIWEAAQRPEMRFVALKSEEQQAVLSLHRLREQWVKVRTLQANQIRGLLYEFGVVVPMGWRTLLKSVPEHLTATGSPVPTLLQEPLLEQLEALRAATARIVALEKQLASWQRSEPECQRIMAIPGVGPLTASAVVASVTDARQFRSARQFAAYLGLVPRQSGTGGRVKLLGISKRGDTYLRTLFIHGARSVLLSHSRKQGDGPLQTWLNGLLQRRPSNVVVVALANKMARTVWALLAQGRRFDAGWVSKRP

SEQ ID NO: 193928 - protein, 367 aa, unidentified
MQRVRFVGLDVHKESIAIAVADGDGSAPETVATVPNDTSGLVKRLKKLAVGGKVKCCYEAGPTGFGLQRALQAAGVECVVIAPSMVPRTSGDRVKTDRRDAVKLARFLRSGDLTEVYVPDAATEAMRDLERCRDDAKRAERTARHQLSKFLLRHGRIYDGKSAWTGMHLDWVRRQVFEHEAQNRVLVDCVHAVENATARVERLTNDIVDLVESWSLRPLVKALQALRGVQVVSAVILAAELGDFARFASAPALMAYLGLVPSEHSSGETKKRGRITRTGNGHVRRILVESAWSYRHRPAMSWAIRKRNEGVAPGVKAIAWKAQRRLHDRYKKLLGRGKNKQQTVTALARELAGFVWSIARQPQLLES

SEQ ID NO: 193929 - protein, 373 aa, unidentified
MRAGKKRGKVKVGRMNSIVTGIDLGDRESLATVLSPIGDVTDRFTFPMNEEGYAFFASRVPKHARVAFESTIMAYPISRALKTHGYSDITVAHPKTLAWIVKSKKKNDRVDSLKIAKLHMAGMLPESHLLDRNDQIVRDLLVQRVKLGVEIGRLKNSVIGYLKREGVYDSLARTGDNFSARRRHAIRSLQFHDKRDLVLGTMMDRLHFLEKQCTPLEDSVRENAKLSDDVKILMSITGVDYYLASLISSFIGDVERFPSDDHLASFFGIVPTSRDSAEVKRRGRMSKDGSSIARWALSIMVDTVMRHNEPIRQYYTSVKKRTASGKLAHVSTMRKLTRMLYHMLKTKQHWKWENPLLTERKMARLQMDGGEVS

SEQ ID NO: 193930 - protein, 351 aa, unidentified
MKKVAYLAMDVHSGHCVLGHMGFDGTFIGNRRFPTSEQHIIEALKAVKAKEKYLALEESNLAYWAAQVARAYVTEVISSDPKENALIYRSPNKRDKVDTHKLCRLLRLGELKRVYHPENDERAIFKAAVQHYIDLRDQQVVLKNKIKAMYRHWGVIDVAGQAVYGIRTRDDYLKRVKHLHIGNQLHRLYCLMDETESMQKKALKAMKQLGRKYPEIKQFEKIPGIGEILSHTFDAFIQTPHRFADKRKLWRYCRLAITDRSSDGKPLGFKRLDKSGVSELKALSYRAWLCAMGSDNEVSRFYSRSLRRTHSHVHARLNTQRKILAVMYGMWKRGEAYRPQLFLDSPQMSVV

SEQ ID NO: 193931 - protein, 359 aa, unidentified
MQQKISEKDFSGQSIYIGLDVHRKAWKVSVMTETLMYKTFSSPPVAEKLGNYLRNHFPGATYYSAYEAGFSGFWLHRELTKLGVNSMVVNPGDIPTTDKERKQKEDLRDSRKIAQSLRAGQLKGIFIPSEKVQQDRILLRTRETIVKDLKRSKHRIKSLLYFQGIQYPDRFYLNSTHWSKAFIKWLDGLTFVHESGKGGLNAHLEMVRQLRGLLLKVTRQIRELSRGPDYSQAAELLMGIPGIGMLTAMKILTELETIERFENFDSLCSYVGLVPSTNSSGENLVDSGITPRRNSRLRAALVESAWIAVRNDSALLASYQKLCRRMPGNRAIIRIAKKLLNRIVYVLRSKEKYEKSVVK

SEQ ID NO: 193932 - protein, 364 aa, unidentified
MNTISPTPNAKPAGVSAPMAWLGTDVGKDAFEAALYRALPAGQYWKAQDIPVKQFTRTKAGVLKCLAWLKAQEPPAGSVEDAAPETRVVMEATGKYSRELAEWFIKLAPAMSPAIINPRLTKNFTQSLGVFTRTDRADARSLARYGAERRPVAYEPAAREIATLRDMTRYRQTLIEERTAERNRAAEGSVSPEVRKIQKRRLEHIERDIAKIEKAIKAHVDSDTVLAADVARLQTIPGVGPLTAQVVLGEMGDLRRFNRARQATAFVGLIPTCHDSGTSVHKKSHVSKSGSPHVRRILYLSAMAAIRGNNELADVYKRLYEAGKPPLVAIVAVMRKLLVLMRALLVHEQNYQSDYVKNRRTTCG

SEQ ID NO: 193933 - protein, 339 aa, unidentified
MNLYAGLDLHSSNTFIGVLDPQFNRIFKKRVSNDLDLILKSLEMFRDRLKGIVVESTYNWYWLVDGLMDSGYACVHLANPCAIKQYEGLKHSDDQHDAFFLAQLLILGILPQGYIYPKETRPVRDLVRKRLFLVQQKTAHILSLQSLLARCCGQRVSSNQLRKVTGHDLRQWLKEEHLVLSGQANLDNIVFLKQQIGRLEEAIQKQVKLSDAFNCLLTVPGIGKILAMTIMLEVGDIRRFATVGNFASYCRCVSTQRLSDGKSKGSGNRKNGNRYLSWAFTEAAQMARRFNSRFRSYFDRKAAQTNSILATRALSNKLARVCYYIMRDQVEFREESVSH

SEQ ID NO: 193934 - protein, 389 aa, unidentified
MKIYVGIDIAKLNHFAAAISSDGEIIIEPFKFTNDADGFQLLVSKLESFDKNSLIIGLESTAHYGDNLVRYLVTELYQVCVLNPIKTCQMRKNNVRKTKTDKVDTYVIAKTLMMQDNLRFVSFFDLDMMDLKALGRFRQKTIKQRTRLKIQLTTYVDQVFPEIQYFFKSGLHQHAVYALLKEAPSPKEIASMHMTHLANLLKVNSHGHFTKEQAKELRVLAQKSVGANDSAISIQITQTIQQIELLDSQLEKIEAEMTDIMKFNDSVIMTIPGIGYINGGMILGEIGDIHRFSNPNKLLAFAGLDPSVYQSGNFQAKTTRMSKRGSRVLRYALVNAAWNVVRNNATFKAYYDAKRAEGRSHYNALGHCSGKLVRVIWKMLTGEVEFNLE

SEQ ID NO: 193935 - protein, 348 aa, unidentified
MPEIATIGLDIAKNVFQLHGVDRSGKIVLRRALRRSQVPGFFSTLPPCLVGMEACATAHHWARTLMAFGHEVRLIPPAYVKPYLRRQKNDAADAAAICEAVTRPSMRFVPVKSPQQQSTLMLHGARDLLIGQRTALINALRGHFAELGIVVAQGARNTRQLIAFLHEANPDFPAPARTALQSLATMLVEIEAQIAKLDKAILAAHRSDPVSTRLAGIPGIGPIVASCLAASVPDPSLFQGSREFAAYLGLVPRQHSTGGKARLGSISKMGNRHLRKLLVVGAHAALYSMKSGKTRTAMADWARSLLAKKPFKVVAVALANKIARIAWAVMARSTAYEPGTNGVAAPAA

SEQ ID NO: 193936 - protein, 473 aa, unidentified
MARTRKKPAAAPAGESVEVTDAPVQVVDRAAAIDVAKGSGMVCTRLPSDTRAGRRTQRVWAVTSTFAAVVTLMDHLRSQGIQRLVLESTSDYWRIWYYLAEAAGLEVWLVNARDVRHLPGRSKSDREDCAWLCKLNEWGMLRRSFVPPEQIRDLRALTRLRTHLVHDRTRHQNRIEKILEDALLKISSLISDLMGASGRRMLAALVNGERSPRALAALGDHRLKASPAQLEAALTGRFRDIHALETGMLLELIDDLTAKITRLDGQITRLLEQIPGIRGACTSCGLTGGGHAPACASDQARVLSVIERLDEITGVGTTNAQVIVAELGTSMAQFPTPGHAAAWARLTSRTIQSGTTTKNGRTGKGNRYLRGALGAAVMTAANTDTFLGERYRRIARRRGKQKAIVAVARTICEIACLIIGDPGFRYIELGAGYHTRHNPQRQTRTKIRELEKLNPGMTVTLTPRAPATATPAA

SEQ ID NO: 193937 - protein, 350 aa, unidentified
MIIIGVDFHPEFQQIASVDTDTGEFQEKRLTHREEAEKIYRALACAGQKVRVGMEASGHARWFERLLAELQIELWIGDAAEIRTKRVRKQKTDRQDAQLILRLLLEDRFPQIWVPSWENRDLRQLLWHRHRMVQARTRIMNQLQAVALNEGLRCKKKLWRERGREQLESFRLAPWASRRRRDLLELLDRLNPTIAELSQAIQQEVEKCPEARRLMTHPGVGPLTALAFVLIIGEADRFHCGKQVASYLGLVPLEDSSGNRRRLGHITKQGSSMLRFLLVEAAQVTARSLPQWRSKYLHLMMRRGRKTAKVAMARRLAVHLYWMMRQGWDYQQWIKFGSHAGQLGNRHGVQ

SEQ ID NO: 193938 - protein, 391 aa, unidentified
MTSLTQPRPDSHSPDRHSPDRRSPGRHSPEPDLREVIEVVIGVDTHTATHTAAVVCARTGGVLEEITVEATAVGYQQLVEFAEQHPALRAWAIEGTSSHGAGLARLLSATGEVIIELDRPERARRRHGAKSDALDAVRAAREALARPRWGSPRTSHAPGAAAHAAERDALATLLVARRSAVQAAGDARRQLIALIVTAPEHVRARFHVTASCQAPAVAGRLRHRAGEDVATATTITVMRSLARRIEALEIEAAAHQNAMVTIIRGWRPDLLATHGVGPIVAATVLCAWSHPGRVHSDAAFAMLAGIAPIPANSGQQQTRWRLNRSGDRRLNQAVHTIVLCRTRHDPRTRDYIARRTAEGKTPREIRRCLKRYVIRELYRLLEHPEQPATTT

SEQ ID NO: 193939 - protein, 354 aa, unidentified
MVVLGIDAHKRTHTVVAVDQRGRKLGERTVGTTTADHLDLLVWASRFGTERRWAVEDCRHLSRRLERDLLGAGQPVVRVPPKLMANARTAARTYGKSDPIDALAVARAALREPELPTAQLDGPARELRLLVDHRDDLVAERTRVINRLRWHLHELDPAVAPPARSLSRAPATHLAAIEAFLCRFDGDGNQVVVDLAGQLVARVRELNAQIDQLEADLVPRVRRLAPSLLALAGCGVLTAAKLVGETADIRRFRSKDAYARHNGTAPLPVWSGNTQRYRLSRTGNRQLNLALHRIALTQARHHPDARRYLARRRANGDTPTEAIRALKRRLSDVVYRALLADASTAQTNDQAAAA

SEQ ID NO: 193940 - protein, 320 aa, unidentified
MAKPIEPIRIGIDVSKAELVIARSDSKSLEKIANTPRAISRWLKTLPCGTPLAFEATGAYHRTLASLAHQAGFALYLLDGYRLNRYRDGIGNRAKTDPADARLILRYLSKELSELKPWVPPHEAFYRIQSLLRRRASLVHTRVALTQSLGDVPELKNASKRLSNNIKDIERLIERCLKEAMAEVGWRPDAQRCKAIEGIGDLTSVALANTFHRGEFKSSDAFIAYLGMDVRVRDSGKQVGRRKLTKKGDPELRRLLYNAAMSARRTKAWAGQYETYLSQGLKTTQALVKLARKLARIAFALMKNQSTYRPKVPVTCCAVP

SEQ ID NO: 193941 - protein, 347 aa, unidentified
MYQDNVIALDLAKNVIQVCILDKQNEVKTNRELRRQQVLNWLAKQTPSVVAMEACGSAHYWAKQARALGHQPVLISARFVKKFVEGHKTDKNDAVAIGIAVRQPNVKPVAIKNNDQLALQALEKMRKHYQDIAIATSNLIRAIVFEFGLVIPQGEKAFRERIPDILEDAENELPMMLRGPLHQQYQFWISLKQQVREAEKQLRAQLKTHEQCNELQKLDGVGPVNALNLYLALGTRGEAFKNGREAAACIGLTPKQHSSGGKVVMLGISQRIAKKQLRANLIQGALAKIKVVAKRPPKNTREVWMKQLIERRGLRRAAVALANKTVRIAWAMVHYQQPYQAPESVTI

SEQ ID NO: 193942 - protein, 343 aa, unidentified
MKLHVLGIDLGKTVFHLVGLDSTGKVVIRKRCSRRQLLAFTANLQVQLIGMESCSGSHFLGRALRDQGHEVRLMPAQYVKPYVQTNKSDYIDAEAIAEAVQRPRMRFVPIKSEEQLDLQALHRVRERWVMRRTAVVNQIRSLLLERGLTLPKGRRYVEEALPRILEDAELPLSGSFRLLLAQLKLELEQLSARIDQLDVVILQRAKEDDACQRLTTIPGVGPVTATALIAAVGNGSAFQRGGDLAAWIGMVPGEHSSGGKQTLLGISKRGNSYLRRLFVQGARSVLQQRHRQSPGLCSWLKQLLARKHQNVVVVALANKVVRMAWAVLCKGERYRAPVLAVST

SEQ ID NO: 193943 - protein, 389 aa, unidentified
MYFVGIDISKYKHDCFITTETGDVVSNSFTINNNQDGFQQLLTILNSLDNQDEIRIGFESTGHYALNLKLFLEKAHYSFMEFNPVLLAKFNKSQTLRCTKTDAIDCASIARWLMTVEYKPYPIGFYHTYSLKSLTRLRDTLVKQRSFYIVKMTNVLDHTFPEFKPFFKNRFSKTALYLLENYGCAEKISRMNASSYENLRKISRGKFSMQKFLKLKELAANTVGENNEIFSAQLNSLMALYNQSVIEVNALEQQIIWLIENINPHFLTIPGIGALSAAVIYAEYGDISKFNSSSQMLSFAGLEPGYYQSGTSVHGGHMVKRGSSHLRFTLMNLCIPLIQYNMVFAEYYAKKRSEGKSHRVTCSHVIKKLIRIIFTLEKNNIDFDASKLR

SEQ ID NO: 193944 - protein, 355 aa, unidentified
MDSKKYIGMDVHQASISIAVMDATGKVVVESIIETKATTIVEFIRGLKGTLWVAFEEGTSAAWLYDLLKPRVAKVIVCDPRKNALLNAGNKNDRVDARKLSHLLRAGLLTAVYHGENGIRTLRELGRSYLTVNKDLTRVMNRLKALYRSWAIPCAGEKVYSPRQRNAWLEKLSQVGVRRRAEQLYQQLDALVQIRREARRELLTESQRHPATPLLRQIPRLGPIRVALLIALIQTPHRFRTKRQLWAYCGLALQTRASGEYRFSGGELQHCKRLPALRGLNVNHNHDLKNLFKSAATHVSTSTDPLGDFYRSLLAKGMKPTMARLTLARKMAAIVLSIWKKGARFDPAELKRQAA

SEQ ID NO: 193945 - protein, 425 aa, unidentified
MDVLHTHCAGLDVHKQTVVAAVRVPEPKKKRGWRVITQTFGTMTADLLALSDWLLTQGVSHAAMESTGEYWKPVYNILEANFELLLVNPHHIKAVPGRKTDVSDAEWIAELLQYGLLRASFVPPKGQRALRELTRARTTFVRERATLVNRVQKVLESANLKLGDVARDVLGVSGRAMLEAVIDGHARPEQMASLARGRLRNKHAQLVKALEGRVEAHHRFILTELLSQIDTLDETLERFNAQILDACVPFEHAVALWDTIPGVARTAAEIIVSEIGTDMRRFQSAEALSAWAGVAPGNNESAGRPRSGRTRQGNAALKTILVQAAHGASRTKGTYLAAQYHRIAARRGRKRAIMAVAHSILVIGYHLMQRDEPYHELGADYFDRRNPEMTAHRLVRRLEYLGYQVALQSPSCDPTAMMRSALTIR

SEQ ID NO: 193946 - protein, 343 aa, unidentified
MPHYVGLDVSQKTTAICVVDEQGRQLWRGACVTDPAAISALVLRHAGSNAKAGIETGAMTPWLVHGLRSAGLNVECLDARRVKAALQMRLNKTDENDAEGLAQIMRTGWYRPVHVKSLDAHRARALLGARVQLVGMTTRLSNMIRGVLKTFGLLPGAGRGLRFDQSVEALLEGAPEIALIVRPLLATWRQLRQQITVFDKAVRRQVKTGPVCRLLMSVPGIGALSSLMYVSTVEDPDRFSRSRAVGAHLGLTPRRYQSGETDRTGHISRCGDGLARTLMYEAATVILYRVKRSLHLKDWAEAIERRSGAGKARVALARKLSVILHSIWRSGEPFRWASPAITA

SEQ ID NO: 193947 - protein, 370 aa, unidentified
MSQSSTLFIGMDVHKETIAVAYVAQEHGAEVIYLGTIGTRQCDIDHLVRKMQSKAKHLIFVYEAGPCGYWLYRYLTKKGYDCWVVAPSLIPKKSGDRVKTNRRDAVQLARLARSGDLTLVSVPKVEDEAIRDLTRAREDTISDLKDAKFRLKAFLLRQDIRYAGRANWGPAHLRWLSEVVCPTAAQQIVFQEYVRAITEYTERLQRLEQELQAQVQVWRLHPVVEALQALRGVQFTVAVTMVAEIGDLTRFEHPRELMKFLGLTPSEYSTGDHRRQGAITKAGNTHARRALIEGAWAYRYPAKVSRHLQLRLEKQPKVIQDISWKAQVRLCRRYRRLGARGKHANVVTVAIARELAGFMWAIAKQVSVTP

SEQ ID NO: 193948 - protein, 407 aa, unidentified
MWWIGIDWAEDHHDVCIMDDPGRIHREFRFPHTPEGFDQLRAYLENLSERKEDLAVGIERPDGLLVEFLVTQGYPIYPIPPKAVDRGRDRHSQSQAKDDRRDARTIADLIRTDHARFHPLVPDSDAYRELRLLVYDRMALVKLRTQILQQLRAALLDYYPRVLELFEDLLAPVALAFLKTYPTPHDLAQASDPQLKQFLKEHRYPNIHKHKIPKLIQEALAPQLTPNPGVMRAKSAYAQILADQLTFLNRNIATHEGVVASLFCSLPDAQLFQSLPVGGPRMLPALAAVLGGNRERFPEVELLYMHTGVVPITKMSGKSRHVHFRRACDHRARTIMRQWAFTSLKYCEWAKLLYRAKRKEGKKHELALRIVAHRWEKIIYAMWKHNTPYDETTFLASRANHQMRQVA

SEQ ID NO: 193949 - protein, 357 aa, unidentified
MQPETSRKEEMKYVGVDIGKRKCRAAIMSAEGRIVKELDFTNNSDGIASLTLLLTMDDRVVMESTGPYWLDLYNQLDQLHISVVLANPLKTKAIASARIKSDKVDARILAHLLRTDLIPECYVPSKEMREIRSLVRHRLSIVKLRTMVKNKVHALIDRNGLKHEFSDLFGRAGMQWLKSVELSGLDRLMLDNYLMHIESLELQIERVDLEITSRASFDGDVKILLSLKGVNVYGALLIKSEIGSILRFSDYKKLVSWAGLAPSLHQSGDVEFHGSITKQGSTMLRWMMVESARVASVFDSRLKAFYERVARRRGDQKAVVAVANKMLKIIWFMLTRKEPYESVDEGRYAKKLKSLNG

SEQ ID NO: 193950 - protein, 350 aa, unidentified
MPKCNVQRRAAAYGIDIGKNIFHVVGLGSDGVPVQKVRFRRDTLLQFFERAAPAIVGMESCAGSQWLARKIQALGHKVRLIPAQFVKPYVKSNKSDIIDAEAIAEAATRPTMRFAALKSEEQADLQALHRVRDQMIGTRTRLINQMRAFCLEYGIALRQGAGQFKVDLPLVLEDQSNDLSPAMRKLIAELFSDLRQLEKRISDVTREIEAIASREDVARRLMTIPGIGALGATALLAAVGCGRQFQKARDLAAWLGLVPREYSTGGKQRLLGISKRGNRYVRKLLVHGARSCFRHLDRTKDRLGSWLDGLQARMHPNKAVVALAAKIARIVWVVLTKPGALYERRDPAFT

SEQ ID NO: 193951 - protein, 313 aa, unidentified
MAMEVNQFIVGIDVAKAELVVHFQDSGTQMSLTNTKPEIKKWLRQQPANTALCVEATNVYHLDVVEMAYEKGFKVYVVDGFQLSNYRKSIGGRVKTDSSDAALLARYLEREGRELRAWTPPPAVYGKLQSLLRRRAALVTMRTALNQSWSNEKLLKTAFKSFTKQIDRLDLLVQKKLKELLKEAGLLEQVARCQAIEGIGFLTATALVMAFIRGEFKSSDAYIAFIGMDLRISDSGEKTGRRRLTKRGCSEIRRLLHNASMSASRTAAWKETYEHHRNKGKATTEALVILSRKLARIAYALLKSEKAYVSKTA

SEQ ID NO: 193952 - protein, 445 aa, unidentified
MNPVNLSLERQTTRFSVSVQSLPAFSNIFIEEMPMPKIVYPICCGIDVHKSFVVACIAVTDEKLVTTYSKTKRFSTFTNDLRRLADWLNQQNCRDVCMESTGKYWIPVWNVLEPTCNLVLAHPKYTKAIKGKKTDKRDAKWIADCFKHDLINGSFIPPEEIRQLRDLVRYHTKLTSYTTGEKNRAQNCLTVSNIKLDDVFSNVFGKAASAITARLLENNKPFDVTPYLTKNLKASPEEIQAAVDGVMCANQAEKLRIIRSHMDSLALCKANLESEILSVAEKFLPQINLVTTVPGIKTFAAVATIGEIGVDMSVFETSRHLCSWAGLTPQNDQSAGKKKTTRISRAGAYIKPLLVQCALAAIKSNMHPEVRNRYNAIKKRRGHKKAIIAIARMLLTAIYNILKKNEPYNAELYRLSDKPPVQREVSVEQAIFILQRQGYLVTAST

SEQ ID NO: 193953 - protein, 340 aa, unidentified
MRRLYAGSDLHGNNNLIGIVDGEGKRIFKKRLPNEPQLILEVLKAYKEDMVGIVVESTYNWYWLVDALMDEGYKVHLANPSAIEQYSGLKHADDKHDAFWLAEMLRLGILPEGYIYPKEERPVRDLLRKRGHLVRLRTSLMISLQNILSRNLGRNMNVNDVKALKEDRISPLLEQNEDLALAGRVSKEAMDHLTHQISKVEWVVQKKIQLKPGYQYLPSVFGVGKILSLTIMLETGPISRFPTVGDYVSYCRKVPSQWMSNGKWKGSGNRKNGNKYLAWAYSEASEFARRFYPEARAYYQRKMHKTNAPVAHSALAHKLARAAYYVMRDQVPFRPEKLFG

SEQ ID NO: 193954 - protein, 479 aa, unidentified
MHVVYERCAAIDVGKDEIAVAVRMPGDGPEGRVTVKRTFRTFYGVMGEAARWLVSLGVTHVAMEATGVYSMPVYYALVEHGDFAKVLICNAAHVKNVPGRKTDYADAEWLAHLLECGLLAGSFIPPAEIKDARDVVRYRAKVVRQRVSEIARLGNTLQDAGIKIDSVAWSIATKSGRAMIEALIDGERRGPVLAQLAKGTMRAKIADLSMALEGRFGDHHALMCRLHLDHIDHLEAAIARLDARIEQMMEPFQCWRDLLATIPGIGRHAAAAVISEIGVAVKEFFPDDAHLASWTGLCPGNHQSAGKRRSGKPRPGNTHLQTLLVECAWAAVRHDGYLKSLFHRHVMKNGGYRSATAKKKAIVVVAHALVGQVAGARCRAPAPSEPDLPVSRHPAQASHSGHCGLQRRCAPALPGLEGTVAGGVHQGCGGFRVPLAIPPGASRPAGCGLDVLAGGAHPPVLPFLRGAGQVAGVKQMVSA

SEQ ID NO: 193955 - protein, 342 aa, unidentified
MRFYCGIDLHARDCFVCVIDDQDKIHLKSKVPNHLPSILDRLEAFSPRPSVVVESTLNWYWLVDGLQEAGFEVKLAHTLGLYMITGAKVKTDRRDAFTLARLLRLGAIPEAYIYPKDKRPIRDLLRRRNRLVFLRATVYGHLRRTLLQHGLFGYSQGEIKALSETQIVHYFEHPVVQCSGQLQLERISLYSRQIKDLEEMILATVAEEPLFELLQTIPGVGKILALTIYYEVGDIDRFEGPKQFCSYARVVPGIAQSGHIIRRGRGCKQGNGYLKWAFSQAAGLAVRYDSAVRKFRQKHLARRRSKARKLISLSIVAHKLATGAFYVLRDQVPFNEELMFRL

SEQ ID NO: 193956 - protein, 323 aa, unidentified
MNKYKETFGVDISKDVFDVHGSSSGHNQFKNDEKGFKSFLKILPNDSIVVMEATGYYHYRLAQFLYKNNVAVSVVNPLSVKRFIQMKLAKVKTDKSDAKSIYDYALANEVPLYNALTNVQAECLQLFRLMDSYLKKRTATKNKMHGEETLGIPSKFVYRSLKRDKKHLDRELEGIEARLLELVKQEQQQQLTLLQTVPGIGAKTALFLIVITDGFSKFETGAQLCSYVGITPTIRESGSSVRGRSRISKVGNKKLRNLLFLCAFNACKHNKACRELYERIVQKGKSKKLALIAVANKLLKQCFAIAKSGLPYDAEFVSILTVK

SEQ ID NO: 193957 - protein, 390 aa, unidentified
MAQSHMREEPVMKKNTRFVGLDVHADTIAVAVAEPSGEVRSLGTIPNRPESVRRLLKRLEPTKQLRVCYEAGPTGYALYWELTGLGVDCTVVAPTLVPVKAGDRVKTDRRDAEKLARSFRSGDLTAVWVPDQAHEALRDLVRAREAAKKDELRAKHRLSKFLLRHARRAPEGTKAWTTGYWKWLSGVRFEHAAQEATLLDYRTEVEHAASRIERLERAIDAAVEQMPPEHREVIEALQCLRGVAKIVATTIVTEVGNFSRFARPKQLMGYGGVVSSENSSGTRTSRGGITKTGNNHLRRVLLEAAWTYQHRPAISHRLTKQHRDQDEKIKEIAWKAQTRLHSRYWRLLSRGKPAAKAITATARELLGFIWAIAVYVEKKQAEHTQQKKAA

SEQ ID NO: 193958 - protein, 310 aa, unidentified
MEPIFVGIDVAKDRLDVHVQPSGQAFSVSRDDAGLAELVRRLQPLGATLSALEAPGGYEVVVAATLAAAPLPVAVINPRQIRDFARAPGRLAKTDALDAQAIAGFAAAVRPAARPVADADARLLGELVARRRQLVDMLGAEHNRRRLIEPPALKRRLDAHIRWLERALRELEGDLDTTVRASAIWRATEDLLRSVPGIGPITAYTLIADLPELGRLDRRKIAALVGVAPINRDRGTLRGRRMIAGGRASVRHVLYMATLTAIRHNPVIAAFYHRLVSAGRPGKLALTAAMRKLLVILNAILRDQRPWRPA

SEQ ID NO: 193959 - protein, 337 aa, unidentified
MGLYCGIDLHSNNHVLTVIDEADRRVYERRLPNDLAITKAALEPYRAELLAVAVESTFNWYWLVDGLMEAGYAVRLVNTAAVRQYEGLKHTDDEHDAFWLAHLMRLGILPTGYIYPRSERGLRDLARQRMRLVQHRSALITSVQSQVWRSTAVRLRSETIKGRGKQPWPELSDPDLALSVKAGRVAIDTLTVQIERLEKLILKRVDLSPQFRMLKTVTGIGPILAMTIALEVGDIGRFAGVGEFASYCRCVDSQRLSNGKKKGEANRKCGNRYLAWAFMEAAHFAIRILPAAKRFYERKRRQRHALLAVKALAHKLARACFYVLRDQVPFAPERLFV

SEQ ID NO: 193960 - protein, 348 aa, unidentified
MKFYTKQHPFYCGIDLHADAMYVCILDSAGEIVLHKNIPTKPKTFLRLIKPYRDGLVVGCECMFSWYWLADLCAEESIDFVLGHALYMKAIHGGKAKNDKIDSCKIASLLRGGNFPLAYTYPKKMRATRDLLRRRNHLCRKRAELIGHIQNTATQYNLPEPLGCVAKPSVRGELSKKFRDPIVRAMVEVDLSVIEHFDELLGTLERHLEKVAMGHDPISLSLLKSIPGVGRILSLVMLYEIEDISRFPRVQDFVSYCRLVKPEKSSNGKSYGHSGKKIGNAHLRWAFSEAVVLMLKGNPPAKRAKDRLASKYGKGKALAILSHRLGRAVYFMLKNQVPFNQELFLRGA

SEQ ID NO: 193961 - protein, 387 aa, unidentified
MPQQLDDLSRSLTPLEQDSTIVAVIEMSQASWLVAGIVPGIERHPLKKLEPSEVELLRLLMRWRAEATQNGRTITRIAVAFEAGRDGFWLARWLRARGIEAYVIHPASVAVSREHRRAKTDRLDTGLLKRVFLGWLRGEPDHCHMVAIPTLAEEDAKRPNREREGLVRERTRLVNRVKSCLVRFGVRTFKPTLRNAPDRLATLRTPEGVPLPPNTLLELRRDMARLRFVMDQIKEVEEARAQGLNQAPPDKTHVMVRLLARVIGIGLETADMLVQEVLARTWRDRRAVARYAGLTGSPDESGSRRREKGLAKAGNARVRRGMIQLAWRFLLFQKESALAQWYRARTADARGSTRKTLIVALARKLLIALWRMVTTGEVPAGVVLRAA

SEQ ID NO: 193962 - protein, 410 aa, unidentified
MSVTESVDGAKPVTVGVDWASDSHAVCVIDADGEPVQRFTVSHTRAGLRQLVAILGRYQVGGVGIERPDGPVVDALLDAQLPVFVIPPSQLKALRQRYGSAGNKDDQFDAYVLADTVRTDRRRLTALQRDDDVTIALRQLCRARKDLVAHRVAVANQLRAHLAVALPAAVGLFSEIDSPISRAFLTRFRTQDALDWLSPTRLAAWLRSAHYRGHTDPGTLYARIADAPRGALGAHGQALAAITSAHLAALDTLTAQIDLLARQIAAGYKTHPDKPLYAALPRVGTIRAARLLAEIGDARGRFPTATALACLAGVAPSTRRSGTTTVVSFRWAVDKQLRDAVCDFAGDSRHANPWAAQLYANARARGHDHPHAVRILGRAWLDVIWKCWTTNTPYDPRRHGALQQDQPAAT

SEQ ID NO: 193963 - protein, 342 aa, unidentified
MDIVIIGIDLGKNSCSLAGMDASGRVVLRRRMRRNSLERFTKGLGRCIIAMEACCGALGRVFATQGHEVRLMSPEYVRPYVKAQKNDDLDAEAIAEAASRPTMRFVEVKSQVQSDIQALHRARERLVAERTALINHLRALLLERGIVAPQGRRKLEEQLSTFVDEDGIEALSPRIRLLIEDLRAEWRALDERIAAFDGEFVRMARDDEAVRRLTKIPGIGTINATALAAAVGNARAFRRGRDMAAWLGLTPRQMTTGGKPCLLGISKRGNRYLRKNLIHGARAVLPYLVERETPLGRWARGLLARAHKNVAVVALANKLARIAWAILARGCAYDAGYEMVSA

SEQ ID NO: 193964 - protein, 400 aa, unidentified
MSQMWAGVDVGKEHHWVVVVDDTGTVKLSRKLVNDEQPIRALVAEIDAMAERVSWTVDLTTVYASLLLTVLADAGKSVRYLAGRAVWQASGTYRGGEAKTDAKDARVIADQSRMRGTDLPVLHPHDDLITELRMLTAHRADLVADRTRTINRLRQQLVAVCPALERVAKLAQDRGWVVLLSRYQRPKAIRQSGLSRITKTLTEAGVRNASTIAEAAVTAVKTQTVRLPGEEVAAALVAELAQGVISLDDRIKATDADIEGRFRRHRLAEVITSIPGIGFRLGAEFLAAVGDPTLIGSADQLAAWAGLAPVARDSGKRTGRLHTPQRYSRRLRRVMYMSALTAIRCDPHSRTYYQRKRDEGKRPIQATICLARRRTNVLYAPIRDNRTWQPDSPHITKSAA

SEQ ID NO: 193965 - protein, 309 aa, unidentified
MKQSVVYIGIDVAKAHLDVAWAGTFRRLPNERSGHAALVRWIKQSTTPVQLICEASGGYEQALLESLEKSEVKVTLVQAVRVRQYARAAGILAKTDRIDAKVLAAFGSAMQPQPTSPLSAEQKRLRQYEAQRRQLSRILVAEENRLAQLSCTELRTLSRSLISKIKTQIKTLDRGISDLIAQDQTLCVKAQKLTAISGVGVRTAALLLAQMPELGQLNRRQAAALAGLAPFNHDRGSVRGKRAIFGARPALRSGLYMAALSAARFNPILSSFYQRLRTKGKPHKLALTAVMRKLLLALNQTLKPLPCST

SEQ ID NO: 193966 - protein, 356 aa, unidentified
MASTGQPARRGLLKEVATIGLDLAKTSVHFVGLDASGQVLTRRQYSKTKLVQISAKLGPCRIGMEACCGAHHLGRQLLAQGHDVRLMPPKYVQPFVKRDKNDSKDAEACAEACLRPTMRFVAVKSEAQLAMQSLHRHRSRLVGNSTQLVNQARGILLERGIAIPQGKHRFAAQLPEILADPGNGLGERMRELVADMLEEWQQLQGRIHAIDCELVVEAQQSEACTRLREVPGIGAQTATALVAAIGDGRAFENGRDLAAWLGLTPQEHSTGGKQRLGRISKRGNRYVRTLLVHCARSGLERLAKRSDGLGQWLRRMLATKDRCTVIVALAARLARIAWALLTSGQRFGQHQPQPAS

SEQ ID NO: 193967 - protein, 408 aa, unidentified
MRVIGLDVHRSMAVVAVLEKERLTSGGRIDLTRDAVIAFGRKLRPDDEVVIEATVNTAAIVHLLRPFVRRVVIANPLQVRAIAHAKIKTDKIDAAVLAKLHASGFLPEVWMPDETTETLRRLVAQRAQVIQQMTRAKNRIHSILHANLIPLYQGELFSVAGRSWLKTQPLALDETLAIQRHLADLDCRASDLGVLDQALAQRALQDTRVERLMTISGIHVTVALGLLAAIGDISRFASSEKLVSYLGLNPSVRQSGDGPAHHGHISKHGRAHARAMLVEAAWAAARAPGPLRAFFIRIQSRRGKQVAAVATARKITVLAWHLLTKNENYAWARPALLENKLRKVELLAGQPAAKGRRPGRAHAYNDRAVRQRERSWLEQAEGAYTRFVVNWQTKPGQRTGAANRKRPS

SEQ ID NO: 193968 - protein, 425 aa, unidentified
MTYRIAGIDVHKKMLAVVVADVASEGEFQLERLTFSTAPEQLKALAQWCVEHGVQEVVMESTAQYWKPVWEALERYWQPVVQKQADANPMTGSLHLAQAQSNRARGGRKNDFGDAERLVRRYVAQELVLSFVPSAEQRLWRTVTRQKQQRVVARVRLRNQMEAFLEEAHIKLSSLVSDLLGQSGRRMLQALAEGKTDPAEIALLGDQKLHATQAQLCDALSAARELNPVYRRLLKQSLEELRLLDEQIQELDQEIAGLLASHQDAVQRLSEVPGLGPDSAQQIIAELGPTAAVFPSAKDLASWVGVCPGDDISAGEAHSTKSPKGNKNMRRILNQAAHAAVKAKGSIFEVVFQRLRRGLCYKEAIWAVAHRLCRLIWVLLRRRVRYEERGPAVSAASKRMRASRMMRELRRMGYRVDPPPELQLA

SEQ ID NO: 193969 - protein, 348 aa, unidentified
MNTLARSVTGGVDTHLEFHVAAALDERAGLLGIERFDTTTRGYKKLLAWLEAFGPVVLVGVEGTSSYGAGLTRHLHAEGIAVVEVDRPNRQRRRRQGKSDPKDAVSAARAALSGDADGAAKTQDGNVEAIRVLRVAQTSARSARSQALNQMRSLVSTAPEPIRGELRGLSVHRLLARASTYRPGTKRDVISLTKLTLRGLARRAIELEEEIRAYDAILEPLVTETAPELVSALGVGPDSAGALLVAAGDNPERLRSEAAFAHLCGAAPLDASSGKQQRHRFDPGGDPQANSALWHIVITRMVYDPRTTAYIERRMKSDQLTKKEAVRCLKRYVAREVFNLLPMDRLVA

SEQ ID NO: 193970 - protein, 357 aa, unidentified
MPSSDVKYIGLDVHKEAIAIAVLNGAGKLVMESIIETKASTLLDFLHGLHGELHATLEEGTWAAWLYDVLKPHVLEVVVCNPRRNALLKEGSKSDKVDARKLAELLRSGMLRAVYHGENGLRALRELARSYEVVSKDLKRVMNRLKALYRAWGIPCTGTQVYSRRHREQWLKKIREAGVRRRAELFYQQLDGLQVLRRTVRGELLAESRKHQAVKVLRQIPFIGPLRAAQLVALIETPHRCRSKRQLWTYSGLAVETHDSAQYRYMDGQLQRSKKPQQVRGLNQNHNHAMKEIFKSAALSATGRAGAFQDCYAGLLAKGMKPELARITLARKIAAITLTLWKKGECFDAGYVKRQAA

SEQ ID NO: 193971 - protein, 457 aa, unidentified
MKWYLGIDVSKGYADFVLLSDLLEQQEETFQLDDTKAGHEHLKTWLETYFKRYPDLEIDCGLESTGGFENNWHALLIKLSSSLPLRASRLNPSVVKNSSRALLNANKTDAESAREIAGYLKRYADQVNYAIRDNHYASFRSLQNHIELVTKQKTQLINELKQLLYSSFPELQRFCKQGIPSWVLELLMLYPSPQNLARQKANKVARIKGITMDKAQSLIEKAQDTIASRTHLTDGFLISELASEVRQKQEKIKRLKKHLEDNCNGKEKEMLESIKGIGSYSAAAIMIQIEDVHRFASPKHLSSYFGLHPLIKMSGDKRMVSRMSKQGRPAIRSLLYMCANTAVRSDEHMRSIYARHRAKGKNHKQAIGAIMHKMIRVIWGILKHEKPYDSSIDLANQTKNIQDPVQDEQKETENKRRMQNFDNEAPISRVASKKRKVHVTSQAGNAELIRDLVHEPG

SEQ ID NO: 193972 - protein, 394 aa, unidentified
MKLVGIDVGKNSHHFCVMDKENGEFNVTPTSFSNNKEGFNFLINSLKPYSKKSILLGMEDTGHYHVALLKFLLSNGYTVALINPKTTDLTRKMEGGITKNDKLDTITICDVLDTPERKKQYRITKVDRFDLYEQRQLTRHHHNLKEELNVYCNRLQKSIDLVFPEFNTLFSSKYGVVYMNLLKTFGSAEAIASTDIRTIRKCFEIKGKGNRISLTPEKLKECAKNSIGISSEVETIQIKHLVSQIMLIKEQIAEIDKKIEEFSITNNSPILSIPGISHFSGTSILAELGDIGNYSKPSQIIKFAGVAPYHYESSQYNAQHTGITKKGSKYLRKTLYQIILPVINNNPLFKKYYRLKISQGKGHRCAQGHCIRKLLRIIYHLLETGQSFDPALLR

SEQ ID NO: 193973 - protein, 313 aa, unidentified
MSDPTCYVGIDVAKDTLDICINPSGELLSLQYTESKLTDLIKRLKTLDAELIVVEATGGYEMDLVVALAAQAMPVTVVNPRQVRDFAKATGTLAKTDRIDARVLAQFAEAVQPEVRQLKDNQARELDALILRRRQLIDMLVAEKNRLKRSAKSVRKDIQAHISWLNKRLKDTDNHIDRLIKSSPIWRVKDELIQSVPGVGRVLSFTLLARLPELGQLDRRQIAMLVGVAPLNRDSGKYHGRRCVWGGRKDVRNVLHMATLAAIQYNPILTDYYQRLCSAGKPKKVALTATMRKLLVIVNAMVKNRTAWSLANA

SEQ ID NO: 193974 - protein, 338 aa, unidentified
MTILFVGIDLAKSVFALHGVDEQGKAVLVAPKVVRDKLVGVVAALPPCTIGMEACSGAHHWARVFAGLGHTVRLMAPKFVAPYRMSGRRGKNDAADAAAICEAVQRPNMRFVPVKSLEQQGRLTVHRMRQAFIEQRTGMINRIRGLLSEFGIVLPLKAATVRRQAGACLEDLPGWANLAIGDALSELHRLDERIEQYDRHIAQMAREDARAQQLMKLCGVGETTATAMVAMIGNGHEFDCGRQFAAWLGLTPGQYSSGGKSRLGRITKAGDSYLRSLLVLGARAVLAAAGSKSDPISKWAKSVAERRGYWRAVIAIAAKNARMAWAVLKRGEAFELPT

SEQ ID NO: 193975 - protein, 418 aa, unidentified
MIDQDQAPATPATTPAATPAPTAGIDWASSDHAVAIVDPHGVQQDRFTIPHTAPGLRQLVARLHRAGVDEVAIERPDGPVVDALLEADLGVVMIAPNQVKNLRSRYGSAGNKDDGFDAYVLADTLRTDRTRLRPLTRDSDATIILRMTVRARQDLVAARVAMANQLRAHLQTTLPGVIGLFRDIDSAITLRFLTRFPSQDKADWLSPTRLGNWLRSIGYNHLANLDRLWDHLNQAPRGTTGAQAAARAEITLALVAALTGLRVQIKALEKQIADQLAGHPDAAIFTSLPRSGTVRAARLLAEIGDARGRFPTPESLVCLAGAAPSTRQSGKVKVVTFRWAVDKQLRGAVVDFAGDSHHANPWAADLYQRARARGHDHPHAVRILARAWLHIIWRCWQDNQPYDPAKHRALQRLQHQAA

SEQ ID NO: 193976 - protein, 356 aa, unidentified
MTVIIGIDPHKATHVAVAIDGDELAVARLEVTADRAQTQRLLAWAAPLGDQRMWAVESADGLGKLLSQELLAAGEHAVDVPPTLSARVRLLGSAKAAKNDGNDALSTAIAGLRHCGLRMVRGDDHNTALRLLAGRYDDLVSLRTQAACRLHAVLRELVAGGAPRRLSADRAAKLLRSVHPEGLVADERKRLAAELLADVRRLDRELVAIKTRIRDAVETSATTLLQLHGVGPIVAGLILAYVGDPARFPTPERFASYNGTAPIEASSGPRKRHRLNPRGNRKLNHAMHLIAVTQIAHDTPGRVYYQRKIVESKTNKEALRALKAHQRRRLAPTPSRPRRTLRKGVREHPGTTLNPA

SEQ ID NO: 193977 - protein, 420 aa, unidentified
MFATTDLLVGVDVHRRTNVVQVMDGQGQVLTPPLRLPNNRSGTAELSGRLAQMAQAGNCSTVHIAAEATGNYWLPFFCQLEQAPELASWPVSLYPFNPKVIHNFRPSLGDWDKTDDLDTAVITERLRFGRKLPYPFHMEERYLPLRTLTRYRYHLVGELVRVKSHALSLVYLQSSEYTVDPAFSNIFSKTSQAVLKEFPSLENIAAMPFDDLVEWLDVKGKRRFAQPEENARRLQRIAQDSYRLPDDWLAAVNTALTLSLRHLTVLQQLLARTDAAIADQMTQFPNSLTTIPGIGPVFAAGIIAEIGDLARFDFNEAKVASYAGLKWSRHQSADFVAEETRLKRSGSQFLRYYLCEAAQLVRMHDAEYQAFYQKKFNEVRHHRHKRAIVLTARKLVRLVVRLLTTNEPFRARQAPSEKNG

SEQ ID NO: 193978 - protein, 367 aa, unidentified
MKKVSTILAKQSRKSSQRELIVGLDLGDRNSWYCVLDEAGHIQLEQRVRTTVKALGEVFSGMPRSRVALETGTHSPWISRLLREFGHEVIVANARKVRLIGESRKKDDRLDAQTLARLARIDPELLCPVKHRSAQAQADLMMIRARAGLVRARTGLVNTARGLAKSYGERLRGCNVRNMNPEKAEGLSAELQAALEPLLAAIESVSDRIAEYNQRIEKLAQESYPQVAVLKQVKGVGTLIALTFLLTLEDPHRFDKSRDVGCYLGLQPGRRNSGQSEPQLHISKEGDPYLRTLLVQGAQHILGPFGVDCDLRRWGLKLADRGGRNGKKRAIVATARKLAVLLHHLWVSGEVYEPLHNNRRVAVTAAA

SEQ ID NO: 193979 - protein, 315 aa, unidentified
MHLGIDVSKYTLDCCLISDGIFYERKFYNDSSGMNKLQKWLDEHGADHTLHCCCEATGTYYEESAKALVRRYKMSVVNPRTIKGFGTAVMNRSKTDRQDARLIARYCQTMKPEEWKPPESAHRQLQELVSYIARTKHQRASEQTKYKTAPDFIKPHIQETINHFTKLIASLEQELQAYYRNNPQQDKRRKTLKSIDGIGENSATVLCSIITERFTHAKQLVAYLGLDPKEHQSGTSVKGRTRISKIGKSETRAALYMPALVAYRMGAFPNFTARLEAKGKPPKLIIVAIMRKLAVIAFNLLKNGEEFDRSRYRKI

SEQ ID NO: 193980 - protein, 337 aa, unidentified
MKRIPVYVGLDYHQSSVQVCVMDVAGQTLMNRRCRNDWLAVVEAVAGYGQVAGAALESCCGAADLAEELIEHAGWSVDLAHPGFVSRMKQSPDKSDFSDVQLLADLERVGYLPKVWLAPQEVRELRRLVRYRQQLVADRRNTKLRVGALLRDQRVREAPARPWTRIWTAWVIETPQLSEQSRWLIGRHLHRLGLVVEQIEEVEARLEELTRDDSVVRTLRSHRGIGPVTAWTLRAEIGRFDRFRTGKQLARFCGLSPRNASSGMRQADAGLIKAGNRQLRATLMEAAHRLIEFDPYWKAFAMDLITRGKPKCLAVAAVANRWVRWLFHQMQPASLAA

SEQ ID NO: 193981 - protein, 345 aa, unidentified
MNVLIGVDPHKATNAAAILNDHGELLECANFAQDRAGLRALERWAKRFPVRRWAVEGANGLGRPLAQKLVAAGETVVDVPPKLSAKVRVLSTGNARKNDALDATFTALAALRNERLARVHPEDRTEVLRLLSERREDLVAERTRFLNRLHGLLRDLVPGGVPGTLSADRAARILRRLRPRRKWRSAAESVRRRLASELLRDVRALDRRISNLDERIRKEVEESGTSLMEIFGVGPILAAKIIGMVGNVTRFPSKAHFASYAGVAPVEVSSGEVVRHRLSLAGNRRLNWALHMIAINQARYKGQGGSYYRKKVAEGKTHREAMRCLKRRVSDAVFKKLMLDLEEAA

SEQ ID NO: 193982 - protein, 379 aa, unidentified
MTCKECGQVVKLTRTMNKCHSNIELSSLEETRCQFNGGTGAIKLGIDVHQDFYVVVEQAGGSNPKPPQRFPKAAFLHWAAKLKSQATEVYAVYEACGFGFSLQRKLSALSIKCYVVCPQKLDEQNRRVKTDGLDAKALCLKLDRFVQGNRDALAIVRVPSEEEEQARAIHRQREQLVKARKQLEAQGRSLMVNHGLEPVPNWWKPRTFTALPAPQWMKELLANSQPILVGLQQKIAALTVQLQSAASPEQPRGLGKMTSVVIDREIGDWNRFSNRRQIASYTGLCPGEYSSGNTRLQSCVTKHGNPRLRAALVELAWRLVRFQPNYHPLRKWRQILAKGALATGAARKKAIVAVARQLAVDLWRIKTGQLRSEELGLIN

SEQ ID NO: 193983 - protein, 319 aa, unidentified
MGIDVSKDSLSVDAGALFKGDVPNTPAGIRSLVRKIRKRAGDGGVPHFCFESTGPYSESLFIECCGAGAAASVLNPVKVRRYAEAMSESAKTDPIDARVIRLFAEAKKPEPTPPPSASEISLRKLVLARDALTKCVVQLSGTMEGASGGDAGSVLKSTVVQLRGKIKKLDRLIAEALKGDARLAGLADALTGIAGVGVLSAAKIVALVPELGTLGRRRSAAIAGLAPFTRDSGRYKGKTFISGGRAEVRRALFMPATVAIKHNPVLKAAYQNLRKSGKAYKVAITAIMRRLFAHMDAVAAKWLRETAAAASSAALTALP

SEQ ID NO: 193984 - protein, 497 aa, unidentified
MNNSAASEINAGGRPAPARSRSYRSDPQRIKGRPPGEPEALATTSNRMKPQEGRYISSMDGRAKRRQHQKQQSTAMNNPPDQGSDNWLEHRGFGGLDWASQKHSVVVVDSQGRVVEDFEIEHSALGWKKFRERIKPYDSIPFAIETSQGAAVEQLLEAGMEVYPLNPKSAQAYRQRKAPSGVKDDQLDAWSFADALRVDGQNWRPLRPEDPLIKELRLLCRDEVGLIEQRTSFINQLRHALAEYYPTALEAFEDWDSVSAWMFLQRFPTPQLLQKAGKRRWEKFLHSRRLWRNESGPRRLELFAHATEFGGSEPTANAKSMLALSLVQMLFAVEKQLGQYRKRIEELFSRHPDHDLFGSLPGAGPKLAPRLLSEIGDDRERFEGDAQNLQCLAGTAPVTRRSGKYRTCHQRWACNKYLRHAVHLFAEKSLSRSAWAEIYYQTHRAKDHSHARSLRCLGQRWLKIIHKMWMDRRPYDPELHRRNQAKHGSWVFRFQGT

SEQ ID NO: 193985 - protein, 353 aa, unidentified
MDNRKYIGMDVHQASISIAVSDAAGKVLMECIIETKAATVLEFIQGLRGSLWVTFEEGTSAAWLYDLLKPHVTKVVVCDPRKNALLKAGNKNDRVDARKLGELLRAELLTPVYHGESGVRTLRELSRGYLAVSKDLTRVMNRLKAIYRSWAIPCAGQQVYSPRHRAAWLEKLREAGVRRRAEQTYQQLDFLMEIRKETRKELLAESRKHPARKLLEQIPRLGPIRVALLIALIQTPHRFRTKRQLWNYCGLGLRTRSSGEYRYTGGQLQHARKPPALRGLNVNHNHDLKHLFKSAATQAGNDPLGAFYQNLLAGGMEPPMARLTLARKIAAIALKIWKKGERFDPAKLKQQAA

SEQ ID NO: 193986 - protein, 353 aa, unidentified
MTKHFWAGLDVGVETTAVCVISDAGELVHEASCPTALNSVHRELACLRRRRFARVGLEASTGMNLARGLRTLGYQVDLYETRQLSKFLRIRRNKTDAGDASGIAEAGRLAASTVSKVHLKTLECQSLQSRLVIRRHLIKHRVAAVNLLARQLELYGGRIHRAKTKQLRLEAESEIRKLFGKAATPLTRELRHLIDHCERLLDYQQMVDRELKGWAFDNEICRRFMEIPGVGPLCALTFYAVVGDPHRFRRSADIGSYFGLTPRVHQSGLTARLGRISKMGNRAARTVLVQASVAHMRFSSSDSGLRAWTERIEARRGRGKARVALARKLATIMLAIWRNGETYRPRLRDAGQI

SEQ ID NO: 193987 - protein, 387 aa, unidentified
MPSAISPPKAVLGIDVGKSSHWACLVTREGEVALNRRVRNSEGDLDGLFSQVACDTIVVVDQCRNIGLLAISRARLAGLGVAYLPGLAAHQAARLFAGDAKTDERDALVIAKTALGIPDALLPVPEPDEALEAARSLAAQRSHMVTCATRDKNRLRSILLESCPAFEALADLGDRHWLNMLEKLGGPWGCIDAGKPAFGAVTKGANRARMDAAWNAAMASTRPSKRRVDAENPQVRMLARRIREALEEADGIDREITALLAGDGTYECLVTIPGIGSRTASELVIGINIEDFPDHDHLASYCGIAPRNRQSGTSISSVSASRQGNRRLKNLLIFSCNSLVRSENRFGEYYRACRGRGMCHGEALKAVARKRLKVIYAIMRDKVPYSA

SEQ ID NO: 193988 - protein, 374 aa, unidentified
MGKVESSFAKGKLIFVGLDVHKEIWTVTILCQGEELYHAVVVADTEALVRLLKRFEASEVHTVYEAGPTGYRLHDALVDAGFDSMVTPPSLVPQIGGRVKTDRRDSRKLAAMLSRGFLKRIHVLTAEERSDRQLLRTRNQIEDHRRQTQAQIKSMLLFHGKQAPTTLKEHWSEVYIRWIETLAWEYPAQKTSMDALLKMYRDLTEQYKVLTDDIEKLAMTQSYQERVGLLTQIPGIGIFTAMAILIELQNVERFGRAEQLASFLGLTPCQHSSGERIRLGHITRCGNHQVRTRLVESSWTLIRYDANAKAAYERIKHQTGSRRKAITAIARRLAIRIRRVLIKKGKPPALLGDSKSLTFTETIRISFMCEPLEA

SEQ ID NO: 193989 - protein, 407 aa, unidentified
MICVGIDVSKRKSTVCFMAPGDKIIRRPFDVKHTKEELQPLVDEIRVQAKYDEIKVVMESTGVYHLSIAYFLQQNGIFVSVVNALKVANFNKAENFRHTKTDSIDSTNIARYGIAYWAKLPQFDLNGDKYFLLKRLCDAYLNFSEERSRILLQLQSQLEQTMPGIFDLFGGFDINSGKDKLLDFLERYCHIEDIIAKSEAEFVASYREWAKEKGYRSNESKAATIYAQAKNGIPSIPNNPIVRETIMWYVKLLRRADEALMASLTRMEDIAKDLPEYELVGEMGGVGRVTRVALIAQIGDVRRFKNKHSLICFAGLTPSIHESGKFRASQNHIVKKGPARLRKVLYQVMMSLVMHKIPKDDAVYRFIKKKEAEGKYKKVAKVAGMAKFLRIYYGRVMHLYRDLGLAA

SEQ ID NO: 193990 - protein, 399 aa, unidentified
MDCNPVVATVAIDLAKSVFQLVGADADGRVVASHRLSRSAFIAYWHNRSAVRVVMEACGSAHHFGRWLRSLGHDVKLLPAQYVRPYVRRNKTDAADCLALLEAARATDMKPVPIKTEQQQVIQMLHRSRQQWQQTRTARINLARGALREFGIAIPEGSQRGQSAMRDVLGHEALDQRIRDLIGALLEEIRALEQRIVETDRALAEMAKNDPVISRLESLPGIGWVTATAMRASIGDIQRFKDGRVLASWLGFTPKEHSSGSTRTLRANEQTWRRVLSDAADPARAPCSQQPSARRSRANPWIDCAAGRLRSPSVAASTRLQSHWPTNLRASSGPHGITIAASTPTTRHASIRRCRCAPPSPDQRKRSVNSPFLFTRQTRQRIDQIKLITSGSAAVRKGR

SEQ ID NO: 193991 - protein, 398 aa, unidentified
MTESSDYESVQVFIGVDVGKDTHHAVAINRSGKRLFDKALPNDENKLRSLISDLKQHGQILLVVDQPATIGALPVAVARSEGVLVGYLPGLAMRRIADLHAGEAKTDARDAAIIAEAARTLPHALRTLKLADEQIAELSMLCGFDDDLAAQTTQASNRIRGLLTQIHPALERVLGPRLDHPAVLDLLQRYPSPEKLASLGEKKLAAQLCKLAPRLGKRLAADIAQALAEQTVVVPGTNAAAVVLPRLALQLITLRKQRDEVALAVEQRVLAHPLYPVLTSMPGVGVRTAARLLTEVACRAFASVAHLAAYAGLAPVTRRSGSSIRGEHPSRRGNKALKRALFLSAFAALRDPLSRAYYTRKMSQGKRHNQALIALAKRRCDVLFAMMRDGTFYTPQAS

SEQ ID NO: 193992 - protein, 307 aa, unidentified
MTSKNYIAIDIAKDSLAVASDSFKGSFPYTDSALGKLLKKIEVLDSPLVVCEATGGYERKLMGLLFKKEIPVALVNPARVRNFARSEGTKAKTDPIDALMLLRFAESKDLRPTPAPSEQQQSLQALMDRRSQLTESLAREKNRLQKSPPSVRKSIEKMIAFIEKELKALEEQIQKVIESDQTMNRQNLTMQSISGVGETTAWSILAYLGEITSLKRNELVALAGVAPYNKDSGKFKGKRRIEGGRAKVRKCLYMAAQSAAVHNPHIKAYVDGLRARGKPYKCAIIAAMRKLLIHLQSLLKNPQKALA

SEQ ID NO: 193993 - protein, 343 aa, unidentified
MEHYAGIDVSLEESSVCIVEATGTIVREVKIASEPAVLVRYFDELELPVGCIGLEAGPLSQWLHAGLVAAGRDAVLLETRHVKAALSAMTVKTDRKDARGIAQLLRMGWYRPVHAKSVTCKDSRALLVGRKLLQGKLLDVELSIRGILRGYGLKVGEVSRGKFEARIRELTAGHITLETVIGAMLAARTALWCEFTKLHREMLKIARADKVCRRLMSTPGVGALVALTYRSAVDEPMRFGKSSTVGAYFGLTPKKYQSGETDRDGGVSKVGDAMVRTALFEAAHIMLTRATRFSSLKHWALNVAKRRGMKRAKVALARKLGVVLHRMWVDATDFRWSRTAAMA

SEQ ID NO: 193994 - protein, 397 aa, unidentified
MYIVGIDIAKRKHEAAVIDGEGTVIIKPFSFTNNCSGYNRLLAMLTKAKLPLDEVSFAMEATGHYWLALFTRLQKEGFRVQVINPVQTNSIRSFYIRQAKTDPRDALLIAEVIRFGHFSESTLHPENIYELRELCRGRHAIVSMQADVKRKVVALLDQVFPEYETAFTNMFGDTSMAILQTCPTPKELSEMPLEELCHLIEVSSHKRFRMAKAQELQALARNSFGFAMAGDVFSTMIRLYAKHLDFLKQQVREMDRKIAEIMDTLDTPITTITGIGPTLGAYILSEIGDINRFSSSAKLAAYAGIDPTMRQSGEYNGVRNRMSKRGSPYLRHAIWLAASSAVLHDPALKLYFQKKRDEGKPYMASVGHACRKIVSIIYAVMRDNKAYTPCIPNEISA

SEQ ID NO: 193995 - protein, 387 aa, unidentified
MQEVKSRPELAAIRTDLAAIFVSMELSRSTWVITSLAPGAGETMSKHSLPSGDVAKLLQRFSLLKQKARTRTGADFPIIVIQEAGLDGFWIHRVLESEGIESHVVDPASILTSRRRRRAKTDTIDGETLVRTLLAHKRGEPRVCAMVRPPTRQEEDRRRICRERRTVLAERIEHVNRIKGLLFAQGVFDYEPLHRNCRARLDALKTGDGCVLPDHLKAQIGRELDRLELVVTQLKAVEAERDALLEQTREIVTVPARALANLKGIGAEHAAVIWSEGFFRSFANRRQVAAYAGLAPTPWQSGSVDREQGVSKAGNPRLRTAMIQLAWLWLRHQPGSALSQWFHERVRRHGGRSRKTTIVALARKLLIALWKYATAGVVIDGAVMKAS

SEQ ID NO: 193996 - protein, 432 aa, unidentified
MRSTKMAKQNEETIAAYIGLDWADSEHEVTMLVVETGEVESRKLKQESEALAGWVQSLRERFSGRKVAIAIEQRKGALIYALMCYDFLILYPVNPKTLARFREAFNSSGAKSDPGDSGLLLDLIRLHRDKLRPWVPEDADTRLLQMLVEERRALVDEGTRLTNRLKGTLKQYFPQALEWAGELDSRQALDFLTRWPTLESIRKAGAVAVEKFYRRHSMRNQDKIEQRVKAIKEALALTTDRAVLAASRMKALAIVRQLRALGKSIAEMEARIQELFEQHRDHEVFSSFPCAKKVLGPRLLAAFGGDRTRYESALELQSFSGIAPVTRSSGKSKTIHKRMACPKFLRQTFHEYAAQSIKKAGWARVYYRRHRDKGVKHHAAVRALAYKWIRIMFRCWQEQEPYDEAKYIASLKRRSSPLVSGLPPAPGSLVEV

SEQ ID NO: 193997 - protein, 423 aa, unidentified
MPGPLLDKPAYHLEMLWGERRENGIIVAATEPTGCPMPQPNDLSKSLAALDENSTLIAVIEMSQSSGLVAGIIPGVERHPAKKLNPDELGLLQLLHRWRDEAEKAGRNINRIAVAFEAGRDGFWLARWLRAHAIEAYVIHPNSIAVSREHRRAKTDRLDTTLLKRAFLGGLRGEREHCSMAAIPSLEEEDAKRPSRERENLVGERTRIGNRIKSTFARLGIRGFKPSLRTAAQQLERLRTPEGAPIPPNTLAELRREMARLRLLAEQIREIETARLERLERQPDHGAHPMIRLLAQVRGLGIETADMLAHEAFSRSLRDRRAVARYGGLTGAPDESGARRREKGLARAGNARVRRGMIQLAWRFLMFQKDSALAQWYRARTADARGATRKALIIALARKLLVALWRLVTTGEVPRGVVLRPAA

SEQ ID NO: 193998 - protein, 315 aa, unidentified
MEQPSVSPNFVGIDVSKDRLDVHVRPSARAFSVPRDATGLERLVDDLRVLSPTLIVLEATGGFEITVAAALASASLVLAVVNPRQIRDFARATGRLAKTDALDAQVIALFAERIRPEPRPIADADSRTLAELVARRRQVVEMVGMEANRSRQARNPGVQRTIEATLKTLEAQLAELDRDTSKTVKGSPVWRAADDLLTSVPGVGDVTARTLIADLPELGRLDRRRIAALVGVAPVNRDSGQMRGRRTIAGGRSTVRNVLYMATLSATRWNSVISQHYKSLVKRGRPKKVALVACMRRLLGILNAILRTKTPWQDA

SEQ ID NO: 193999 - protein, 377 aa, unidentified
MKKELYLGLDVHKECMATVVAEEGRTGQVRDTGVISNDLHALEKWIARLRKAHGKEVLLRACYEAGPCGFGIARRLRQLGVECEVVAPSMTPMRTGDRVKTDKRDARKLARLLRAGELTAVYIPEATDETMRDLCRARSDAVDDRRRSRHRLKGFLLRHGYRYQGKSAWSAAHERYLRELVLPHPAMKVILEEYLQAIAAAGERIERCEMGMRDLLEKWRLAPAVRALMAMKGFQIVAAMILVSELGEVHRFSHPRQVMAYLGLIPSERTSSDRRRQGAITKCGNAHARWLLVECAQHYATPPKVSHQLSRRQQGQEKEVRAISWRAQHRLHSRYTRLLGRRLLRNKAMVAIARELCGFVWELLRTQPCYQAKSTLS

SEQ ID NO: 194000 - protein, 354 aa, unidentified
MNLAGDADLIIGVDTHLDTHTAAICDTRGRVVAQLQVPATAVGYGQLLAWARSAAGDSPVLWAVEGTRHYGLGLARHLAGAGEQVSEIDASRHVGKRRAGKSDAIDAVRAARELLARPHPAQMRADGDREALRLLMIDRDNAVASAKTARTALAAVLVTAPAPLRERLRCLPRQRRAKECAALTCPANADRQTRVLHQTLIRLGQRIATLASVAAELEAQIAAIVEEMAPGLVTAEDGLGALSAAQLLLSWSHAGRIRSEAAFAMLSGTAPVPVSSGRTDRHRLNRLGDRQLNRALHVVAVNRMRFHPPTLAYTQRRLAEGKTERDIRRCIKRYLARHLYRALSNQLNQAPQTT

SEQ ID NO: 194001 - protein, 391 aa, unidentified
MSLYFAGIDISKYKHDCCIISAVDQQIVSKFTFKNDKDGFSELLTVLHSLSSPEDIRIGFESTAHYALNLELFLEKAHHSFMEVNPVLISEYKKSTTLRRTKTDRVDCESIARWLMTVEYKPHSKGFYHAYSLKSLTRLRDKLIRQRSFYLVKITNVLDHTFPEFKPFFNERFSKTALYLLENYGSAEKMARMNTASYEKLRSLSRGKFSPQQFLALKSLAANTVGVNNSIFDTELRSLLTLYKATAEQISILENQITELIEEVHPHYMSIPGIGPMSAAVIYAEYGDISNFSNPSQMLAFAGLEPGINDSGTESHGGRMVKRGSSQLRYVLMNCALPLIRFDMTFASYYAKKRAEGKPHRVAMSHVTKKLVRVIFALERQNTDFVAQALR

SEQ ID NO: 194002 - protein, 405 aa, unidentified
MFSLDRKKGYRMMQVHAVMSAAAPSLLGGEKEARGGGRREIDCVSEALDPVTKRDPRRAAGLKPEQSLERRLQHRQLACARKGISMSGSAHPPLFGGIDVSKDTLDVVLRPTGEYFQVPNTPEGHQQLCVRLKVLPVVCIVLEATGGYERACVAALLDVELPVAVINPKRARDLAKGLGILAKTDKIDGGTLAFCAEYCDLPRAKKTPEIQAQLEALVVRRRQLVALRAMELPRLEQTAHPQTRKDLQQTITFLTKHINAIEKKITALIDSDDHWAGLAQRLRSVPGVGATTAAVLLAELPELGQLNRQEIAALAGVAPFNRDSGKHKGKRVISGGRAALRHALYMAALTATRSNDKIRAFYDRLIAAGKPFKVALVACIRKLLTILNQMAKNRTQWNEHVATTV

SEQ ID NO: 194003 - protein, 443 aa, unidentified
MLRESTRVCVLAEVPPDRRGEAKVASGAGKGTGMEVMFDRVAGLDVGKDSVTVCLRTPGPRGGRRSETRTFKTMFGSLRVMRDWLVEAGVSIAAMESTSTYWKPPFYCLEEVMEVWLLNAAHMKAVPGRKSDVRDAEWIAQLLEHGLLAPSFVPPPEIRRLRMLTRYREQLMGDRSREMVRLELMLEDASIKLSSVASSLKTVSARAMLTAMIDGETNPLTLANLAKGRMRRKIPDLAQALTGTFEAHHAQLARSMLRRLELIEVALAELNAVIAEACRPWQHQIELLQTIPGVGDTVAQVIVAETGADMARFPTAAHLAAWAGLAPAMHESAGRQVPAGKRHGNKWLTAMLVEAAGSVGRMHGKNYLAAQHARLLKRRGMRRAQIAVAHSILVAAYWMLKRDEPYHDLGADWHRRRSDEAHAQRLVAQLERLGHTVIIDPAA

SEQ ID NO: 194004 - protein, 407 aa, unidentified
MPEQVVTTHVVGIDIGMESCTMSCLTLDKRQVIKSTPFANTLQGFDWLFERLEGLGVAPKEMLVGLEATSRYGENLLQALLKRGYQVCLLHPAQMHAFAQQRGLRAKTDQLDAVTIARALLSGEARFGYVPSEQVATYRELMRLQKQLSDDVVRYKNEIHALLVVLFPEFTQVFVDPTRPTALAVLKRYPSAQAIAQTEVEALGKFLHELAPRHYGRPTAQELVGLAKSSISSGVAVAARSSSLRILCDQLEHTQKNLEQLQREIDQLLDQDPKATGMLGVPEFGPTTVAVLRAELGDLTRFTRIDQVVAYVGLDLQVQQSGKWKGQTKLSKHGSGRVRRILYLAALRSIHLEASPFGAYYQRLVARGMKKGMAVVAVMRKMLIVAVHLIQTEESYDPGKVAMQAGS

SEQ ID NO: 194005 - protein, 421 aa, unidentified
MKEWKDITHYAGFDWARDHHAVVIVDSEGTIVADFDFEHSLEGWKNFQEKTVPFPNLAIAIETSQGAAVDQLLQRDYTLYPVNPVASESYRQRKAPSGTKTDHVDGWGLADALRVDGQGWKTLQPMDPLTHQLRLLCQDEVSLIEQRTLLINQLQQALVEYYPAARQAFDDWVNRSTWDFIIEFPTPELLAKAGKRRWEKFLHAHRLWRSETVDKRLAIFSQADQFKASAAITSAKSQLAVSLCKLLRTLQQQLDQYREQIEALFKNHPDHDLFGSLPGAKKMLSPRLLAGIGSDPTRYGSFEVLQCYAGTAPISFQSGQIHKAKIRWACDKFLRHTLHLWADCFRKTSAWGQTYYQKKRDQGMSHACALRCLGQRLLKILFKMLTDKKPYDAELHARNQQKHGSWVLQLINENPTPQPCE

SEQ ID NO: 194006 - protein, 313 aa, unidentified
MTQSLPQAIGIDISKIHLDAHAYPCGDARQFANTAPGFAALLKWIGQWPVERIAYEATGVYHRAFEQALASLPLVRINPLRARRFAQATGTLAKTDRMDAGILARMAATLQPDVRPGKSPELAQLAELMNARDGLVRDRTALKNREKNLALPLLKRQARARLEQIARHIEAIDKQAQALINADAALLRKREIIVSIKGLGPITAAQLIATMPELGSLENKQAASLAGLAPLTRQSGQWAGKAHIHAGRANVRQSLYMPALVAARFNPDIKAKYTQLISAGKPAKVAITAVMRKLIVMANALLKADRLWQESMA

SEQ ID NO: 194007 - protein, 347 aa, unidentified
MNFYTQQHSFYCGIDLHAKQMFLCIIDQKGDVLIHRNMNNDSKFFLKLIKPFQSDLVVCSECIFSWYWLADLCHDNSIPFVLGHALYMKAIHGGKAKNDRIDSLKIARLLRSGMIPQAYVYPKKMRSTRDLMRRRSHFVRTRANLLSHIQITNYQYNLPSFEKKINAKGNRHNLIDHFEDTSVKKSMEANSAVLDQLDQTIRKIELFIESQVRYHDIHSYRLLRTIPGIGQVLAFSILYEIERIERFPRVQEFLSYSRLVKCAKESAGKHYGSSGSKIGNVHLKWAFSEAAVLFLKKNEPAKKWLLKKQKKHGKAKALTILAAKIARCVYQMLKTQRRFDSVTFFNN

SEQ ID NO: 194008 - protein, 339 aa, unidentified
MKFAGCDLHKQTITICVVDQLRRVLERRTVRCGEERTILAFFERLGDFEAVVEATASYEWFVRLIEPVAHRVLLAHPKKLRVIAESTRKSDRLDAQILAEFLALDMIPTSYRATPRQHEHRRLVRQRGGVQRRLTSVKNRLRRILCDYNADRPSLFTVDGLAYLAQVPLLGADRFAVDQMVEELHFGRRQLLAVNARLKEFAEAAPLCEQEARTLLRTIPGVGFVTTEVVLAELADIDRFGSQKRVVAYAGLSPGQRESAGKSRELHLEKNGSTLLRSTLVEAAWRLVQHSLRWRRIYERLKLRVRAKKAIVAVARRLLCLMTAILKTGQPYSLSQQPT

SEQ ID NO: 194009 - protein, 394 aa, unidentified
MKLIGIDIGKNKHFFCIMDQQTGEIISQPVSFSNDKEGFDFLIQKIKSYSKDSVLIGMEDTGHYHFALLKYLLDLQYTVALINPKTTDFNRKMQGGITKNDKLDTINICDVLDTPERKKQYRISKVNSFDLYEQKQLTRHHHNLKEEENVYKNRLQKCIDIVFPEFNKLFNSKYGTVYMNILKTFGSAENVANTDIRTIRKCFEIEGRGNRISLTPERLKECARSSIGISSSAEVIQIKHLTAQIELIEEQLTEIDKKIEEFSIQNNSPILSIPGISHFSGTSILAELGDISNYSKPSQIIKFAGVAPLHYESSQFNAQHTSITKKGSKYLRKTLYQIILPVIRHNQVFYKYYQLKISQGKGHRCAQGHCVRKLLRIIYHLLKTNQQFDPQLLR

SEQ ID NO: 194010 - protein, 400 aa, unidentified
MNVNATVNCVGIDVSKGKSTIAIMRPLGEIIRSPYEVKHTSSELKMLADILNDLEGETRIVMEYTGKYYLPIARYLYDAGFFVCVVHAKIMHDFANNSIRMIKTDKADAVKIANYGFANWESLKPFSAEDETRMLLKALNRQYNRYIKQSVSSKNSLISLLDQTFPGLNDLFPGGRKPDGRLKWVDVASKFWHCECVSNHSLQYFKKAYNKWCTENNYRGSDDKAEAIYNLAKECIPSLPKNDCTKALIQEAVRDLSNTYLSISATQKEMDRLASMLPEYPVVLGMNGVGTTLGPQIMAEIGDVRRFPKRENLIAFAGVDAPPFQSGKFESKSRHISKRGSSELRRSMFQVIGCLCQRSIESDPVYQFVIRKKIEGKPYYVCMVAGCKKFLRIYYARVKE

SEQ ID NO: 194011 - protein, 352 aa, unidentified
MQQASTQPVDSCFGLDLGDLSSNHCLVDGQGQIVREGTVETTREALMQLFSAVPRSRVVMEATRNTHWVRQVLKAAGHEVIVANPRQLHLISKSLRKTDRNDARILARVGRLDLELLRPVHERSDLSMQVRLVMRSRTSLVRMRTKLINLVRGSVKVFGYRMPTCTAEHFHIKARLAMPAELRETLTPLLDTLEGFGEKIKAYDRQIAQLCEQFPQTKVFQQVRGVGPLVSLTFLMCVEDPRRFKDSRSVGVYIGLTPGSRQSGNSDPRMRITKQGDGELRALLVTAATHIMRRSAPDTDLKRYGRRIAQSGTPRDRGRAKIAVARKLAVLLHRLWLTGEVYEPLRSTAAAA

SEQ ID NO: 194012 - protein, 343 aa, unidentified
METITTIGLDIAKSVFQVHGVDADGNVILRRQLKRRYVMAFFQKLPPCLVGIEACASSHYWSRELQACGHTVRLMPPAYVKPYVKRHKNDAADAEAICEAVTRANMRFVATKTAEQQSCLTLHRTRHLFIRQQTSVINAIRAHLAEFGIVAPVGRSGVEQLLGVVADASDKRLPDVARACIAVLGTQLRTLKAQILEFDRMIRTWHRSSEVSRRLDDIPGVGPALATALVASIADPKAFRSGRDFSAWIGLVPKQNSSGGKDRLGSISKRGDRYLRSLFTTGALAVIRYAKIHGTKHRPWLTALLARRPTKVAAIALANKIARMTWAIMAKGERYKEPAALAA

SEQ ID NO: 194013 - protein, 338 aa, unidentified
MFVIGIDPHKASHTAAVLDCHEQLVSEARVRADRSQRDQLLAFAASFEPRCWAIEGATGTGALLAQQLVAAGERVVDVPPTLSARVRLLDSERSDKTDAHDARSAAVVALRHSKLRVVALEDHSAVLRLLAKRHHDLVAHRTRAICRLHAVLCQLVAGGIPKHLSATRVATELRRIRPADAVGVERRRVAVELLSEVRRVDTDLVELKTRLAAMVAASATTVTDVFGVGPIMAAYLIGYSGDITRFATSGHYARYNATAPIEASSGPNARHRLNPRGNRQLNHALHIAAVTQVRNDTPGRAYYLRKQADGKTKKEAMRALKRRISDAVYRRLHTDATR

SEQ ID NO: 194014 - protein, 356 aa, unidentified
MSRDLKYIGMDVHKEAVVIAVLNSSGKLVMESIVETKASSILQFIHGLRGELHVTWEEGTWAAWLYDLLQPQVARVLVCDPRRNALLKEGSKSDKVDARKLADLLRTGMLRPVYHGEHGLRTLRELGRSYQTLGQDLNRVMNRIKALYRGWSIPCAGTQVYAPRYREQWLQKIEHAGVRRRAELLYQQLDGLQALRRTLRPELLAESRKHKASKLLRQIPCIGPIRAARLIALMQTPHRFRSKRQLWTYSGLGIETRDSAQYRFVRGQLQHAKKPQQIRGLNQNHNHEMKEIFKGAATRASCGVGPLRDFYLSLLAKGMKPEMARLTLARKIAAIALTLWKKEERFDAEQLKPQAA

SEQ ID NO: 194015 - protein, 314 aa, unidentified
MDETKHFVGIDVSKAALDVHVLPVGKSQRFPNDGDGHAALEGWLSSHPVERVVLEATGGYERKAVQALQQQGYHVCVVNPARPRDFAKAGSRLAKTDRLDAAVLAHYAQVFDPPSAPRPGDVEAKLARYASARDSFVAEKTRLRNQLGLNDDADLERMHRDILETIEAKLAELDRMIQSCIREKAELSQRYDQLRAVPGIGPVAAVSLLAFLPELGQVSRRAIAALVGVAPFARDSGMMRGQRRIAGGRAKVRRMLFMASLSAARHNPIIKTFYERLIKGGTGKKQAIIACSRKLLTILNAMVRDNREWQPMST

SEQ ID NO: 194016 - protein, 343 aa, unidentified
MGEVSTIGLDIAKSVFQVHGVDGTGAVVIRKRIGRSKVLEFFAGLSPCLVGLEACPSAHYWSRELQALGHTVKLMPPSYVKAYLKRSKNDANDAAAICEAVTRPSMRFVPIKTQEQQTGLMLHRTRQLLVRQRTMLSNAIRGHMAELGIISAKGRNGTAELLQIVGDVADDRIPPVARFCLDLLARQYLTLNAEVYAVDKRIHAWHRACEESRRLEEIPGVGPIVATALVAEIGDWGAFRSGRNLAAWIGLVPKQHSTGGKERLGSITKQGNRYLRWLLVTGAMAVIRYARAHGTKRPWLTRIMDRRPAKVAAVALANKIARMAWAIMVRAERYKEPKLLLAA

SEQ ID NO: 194017 - protein, 390 aa, unidentified
MQVMHPVCCGIDVHQKSIVCCILDGPLTSNEPKKYQTSFGTTTKELKAALDWLLEHQVTHVFFESTGQYWIPLFNIFSDSDLELVLANPQHIKNVPGRKTDVKDAEWIAQLGRCGLINQSYIPSQEVLQLRYLTRYRLSVKQRLTQIKNHIHVILQRANIKITSYLADIFCKTGQALLTLFIDGEVINEDNVESCIHGRIKASTRQLIEAMDGKLSTVDRFLIKECMEEYKLQKKISDELNKEINEYILEHFSEEYQLLLTIPGISDNCCATILAEIGPNVEAFKTDKNLASWAGMCPGSNESAGVKKSSHTTQGNKYLKQALVMSVLSVQRAKEETFSLFYQRISSRGSKMKAIIACGHKMLRIIYKILQSHQPYNSQKALGLRQQTNA

SEQ ID NO: 194018 - protein, 390 aa, unidentified
MPEDTPRPAQPAIRTDLGAIFVSLELSRRAWLITSLSPGGGEKMSKHAVPASDVSGLLRRFAELRRKAALRTGRDFPIIVIQEAGLDGFWIHRVLQSEGIESHVVDAASILTSRRRRRAKTDRIDGETLVRTLMAYKRGDPRVCSMARAPTPQEEDRRRVCRERRTLVGERVRHVNRIKGLLFAQGVFGYEPLRKGRRERLEDLRTGDGRPLPVHLKAQIIRELDRLELVLAQLKSVAAERDGLLKPASEEAASPAAMLARLKGIGPETAAVLWSEGLFRQFDNRRQVAAYAGLAPTPWQSGSIDHEQGVSKAGNPRLRTTMVELAWLWLQNQPTSALSLWFHERVRLGGRMRKTIIVALARKLLIALWRYTTTGVIIEGAVMKAAPATI

SEQ ID NO: 194019 - protein, 343 aa, unidentified
MGRKIGVDLHKNSFRVCYYQNDKKYDFETYQMSVKGLEHFKKGLKKTDELAVESTGNTGHFFRAVEGKVKRIRVVNPMQFKVISESVKKTDDEDALKIAKFLSKDMIPEVRMKSKAESQLGSLIGTRDKFVKLRTALKNKVHNILNANGIVTKTELLTSDKSLDRVLKQKLDETCLFELEIIVKEIRNLNEAVVKIDEQIKDKGSKLDGHKNITSITGIGDTSAAIFLNTIGDVKYFKDDKALASYFGIVPRMRISNETVHMGRITKMGNKIARTALVQCTFVAIRYSPYLRAFYDRLKAKKGSGKAIIATARKLLGIIYNTLKNNWIFEDFNNFKLAPQCAH

SEQ ID NO: 194020 - protein, 349 aa, unidentified
MTIVGCDLHTRKQQVAVLHTDTGEVVEQELVHAGDAVERFYRTLPRPVTVGIESTGYALWFHELMQHLGHTLLVGEAAKIRAMVVRKTKTDRRDAQHLLDLLKHDRFPAVWIPDPATRDLRALVTHRMRLVRMRTMVKNGLHAIAMNRRLTLGPSLWSQRGLAQLQGLALAPHTTQRRDESLQLLTWLTARIEALDDRVAAAAQADPGARLLLTHPGVGPLTALTTVVVLGPVARFPDSKHVVSYTGLAPAVHASADTCRLGQITKQGSPLLRFVLGQAGLIAAHAEVDLKRHYRTLLRRRGRPKTIVAIARKLLVRLYIMLRDQIDYEEFRRRGRTPRGQEVPPPALA

SEQ ID NO: 194021 - protein, 344 aa, unidentified
MEISTIGLDLAKSIFQVHAVGEDGKVVVRKSLRRSQVLPFFRKLGPCLVGMEACGTSHHWARQLAALGHEVKLMPPAYVKPYVKRGKTDANDAEAICEAVTRPTMRFVAVKSPEQQAALALHRARDLLVKQRTQLVNMIRGILAEQGVETPRGLHHALALSARLVDGDGPQVPALVQRVVEGLARQIAALQTELGAIEKEILAWHRSSEVSQRLATIPGIGIISATALAASVTDPQQFRSGREFAAWLGLTPLQSSSGGKERMGRISKMGDKYLRRLLVVGMTSLVRQARVSPTSVDPRIVELLARKPVRLATVAMANRTARIVWAVMARGETYHRPANMALGA

SEQ ID NO: 194022 - protein, 382 aa, unidentified
MRNYVKKGLEISGSLLIIKEKTKEGTVMDNQSIDYTNQDFFLGIDVHKKSWKVTVRTQNMELKTFSMDPSPEELYRYMNKRYPGGNYHSVYEAGFCGYWIDRELRRYGFKNIVINPADVPTTQKEKSTKTDKVDSRKLGRELENGTLRGIYVPDELHQQLRSLCRLRFKVVQSQTRLKNRIKGHLAFYGYVIPGHDEVSHWSLGFIRWLKTLEFSYGMGRDYLWLCLEELESHRRRLGEVLRLLRRYCREYGIQEEVKNLRRVPGVGFVTAMTLYGELMDMRRFKSIDYLASYVGLIPSVSASGERESSLGLSFRRNRYLRYLLIEGAWVAVREDPALGYVFSRLIRRMSRQKAIVRIAKKLLNRIRHVWNHKEGYACGLIS

SEQ ID NO: 194023 - protein, 386 aa, unidentified
MPEDAPRPAQAAIRTDLGAIFVSLELSRRAWLVTSLSPGGGEKMSKHSVQAGDIAGLLRRFAQLKEKARARTGRDFPVITIQEAGLDGFWIHRVLQSEGIESHVVDAASILTSRRRRRAKTDKIGETLVRTLLAYKRGEPRVCSMVKSPTPEEEDRRRICRERRALVAERVQHTNRIKGLLFAQGAFDYEPLKRNRRAHLEDLKTGDGRPLPVNLKAQISRELDRLEVVLQQLQTVEAERDALLEPASEASPAPAAMLSQLKGIGPEFATILYTEGLFRGFDNRRQVAAYAGLAPTPWQSGSVDHEQGVSKAGNPRLRTTMIQLAWLWLRHQPDSALSRWFQDRVQRNGGRMRKTTIVALARKLLVALWKYATSGVVIEGAVLKAA

SEQ ID NO: 194024 - protein, 336 aa, unidentified
MTYVGVDWSDNFHVVYVTDETGDSLAAFKVDHTPEGIESLFLKVKEHAQNPAEVLFALETPKGLLSSAILEAGFTLYPINPKAVDRYRDRYKVSGKKDDYFDAMVLANILRTDRQNHRALVPDSLLTRELRAYTDGYQALVKTQTRLTNQITSCLKNYYPVALGIFGKIDQSITLSFLSRFPTPDSFRRGSKAKIENLLKKNHYPGAREKMLEIYALSKKPQFEIEEPIARANSLLLLSLVRQTKETLTSLKEFELKIAELLEQHPDTDVFSSLPGAGKITTAKLISNFGDNRERYGKVSCVQADAGTCPVTIGSGKSLRVSFRYSCRKPFRAAIT

SEQ ID NO: 194025 - protein, 310 aa, unidentified
MTTACYVGLDVAKRHLDLATSPATTARRFAHDEAGLSALVAHVRTLGPALVALEATGGYEADVAAAVALAGVPVAVVNPRQVRDFAKAIGRLAKTDALDADVLARFAAHVRPEPRPLPDAAQQDLTALVARRRQLVEMLTAERHRLALARDRVKRDVQTHIHFLEQRLKETNTDLRACVQASPVWRAQDDLLRSVPGIGPTTSATLLAELPELGRLSRQQIAALVGVAPLNRDSGTRRGPRVIWGGRAGVRAPLYMATLVATRRNPRIRSFYQRLRAAGKPTKVALVAAMRKLLTILNAIVKAQRPWQPA

SEQ ID NO: 194026 - protein, 370 aa, unidentified
MLNTTTFVGLDVHARSIKAVALDAMTGEVRSATFAYDAAAVAEWVGSLDPAAKCVYESGVTGFDLQKKLTALGVDCVVGAVSKMIKPSADRKRKNDRNDAEFLARMLSVGNVVEVCVPDDECEAARDLVRALDDAREDLKRCKQRLSKFLMRHGYAFSETTPTGRRKGNWTAAHWAWIRSIEFPEKADDEVLAYYIDAVRQAMENKKRLEKLVEAEASKPRWKKRVDSLRCLKGVDAMTAADIVFEAGEFSRFKSARSFAAWIGLTPSEHSSGESVRQGGITKAGNKHLRRVLVEAAWHYISASPHPKDLAKGQAPDPAARRHAAKGIRRLVKRREEMLGRGVHKNKANVATARELACWCWAVGRMVENG

SEQ ID NO: 194027 - protein, 366 aa, unidentified
MKKISTVATNRNEIFKEPKLTIGLDLGDRSSHYCILDEAGEVILEHGLPTTPKGIHQVFSRIPRSRIALETGTHSPWVSRQLTQLGHEVIVAHARNVRLIGESSRKDDQLDARTLARLARIDPELLGPVRHRSAKAQIHLTGIRARAALVSTRTALVNAARGLTKSYGERLRKCGTGQMNREIAKGLSQELRDALEPLLGEIESLNERIAEYDGRIEQIAKEVHPEVALLKQVKGVGTLIALTYVLTLDDPHRFRRSRDAGCFLGLRPGRRNSGMSEPQLHISKEGDRYLRTLMVQGAHYILGPFGQDSDLRRWGLKLAERGGKNAKKRAVVAVARKLAVLLHKLWVSGEVYEPLRNNHQVVSAVA

SEQ ID NO: 194028 - protein, 379 aa, unidentified
MTIVADTCPPSPLGVLGVTVGVDTHADFHVAAVIDPLGRHLGHASFDTTVAGFKALLAWANDIGPIAAAGIEGTGAYGAGLARFLTAEGVTVVEVDRPDRKTRRDQGKSDPIDAYAAARAAASGRASGTPKARTGDVEAVRVLRVARTGAVRARAKALTQLKSLIVTAPDALRAQLGGLDGAKLVTTCARLRAARSDAPTPSRFAKRPPRPGRLVDPTAATKRALASIAQRVQQLDIEIAELDDDLEALLKPLAPTLLDVFGVGYDVAGQLLVTAGDNPDRIASEAAFAHLCGVAPIPANSGKNQNNFRLNRGGDRAANAALYRIVMCRLRYDERTRAYVEKRTKQGKPKKHIIRCLKRYIAREVYAAIQADLNPQITP

SEQ ID NO: 194029 - protein, 502 aa, unidentified
MVPVSCDQNSGDVSPTMLGEMIPFGRVLRFATRTIGLGKSNSTEDNMARKRIKTIKKVTLPVMNPDAAGIDIGATEIYVAIPPDRDSESVRMFATFTRDLNALADWLQQTGIRTVAMESTGVYWIPLMQVLEARGLEVYLVNAKHVRNVPGRRTDVSDCQWLQYLHSVGLLRASFRPAQEICAIRSLWRHRNTLVEMGTCHVQHMQKALDQMNLQIHHVISDITGTTGLAIICAILDGERDRQKLALLRDPRIRASHDTIAKSLEGDYQQEHLFTLRQSVEMYQQYRKKILESEAEIQCLMEKLEGQADPSSLPPAKDSVKKCKVMNPAKALTLRSEGYRILGVDLTTIPGISVLHVQTIVAELGPDYSKFRSPAAFSSWMGLCPDNDISGGKVLWSGTRKVKNRIALALRMAAQSLQQSQSSLGEFYRRMRTRLGAPKAITAAAHKLARIVFHLLTTKEPYDDSVFVRSEERCKQRTKKRLSAQARELGFNLVPVHADITS

SEQ ID NO: 194030 - protein, 398 aa, unidentified
MSSTPASTPAPSPVVIGMDPHKRSVTIEVMAADEQVLDKARFATDQAGFAAMLAFVDRFRDRVWAVEGCAGIGRHVATRLIAERERVVDVPAKLSHRVRLLTSGNGRKTDDADAHSIALVGVRVSGLVPVVDDAQVELLRVLLDRRRMLGEEHTRKVSQVHRLLLELIPGGAKRYLSARQARKLLAPVRPSDAAGKARKHLALELVTDLEKVYARSKAADKDLTAALQQTGTSLTQLHGIGPSGAAMLLVEVGDITRFPDRNHFASWTGTAPIDASSGDVVRHRLSRRGNRQINRVLHIMATVQLRHPTEGRAYYDRKKATGKSSMEAMRCLKRRLSDLVFATMLHDLSTAAGTGPGGQLSDGSDSSATGSQLTTGSSDQPLPGPATDQRRTSLATAS

SEQ ID NO: 194031 - protein, 420 aa, unidentified
MHGERQWFVGIDWASQEHVVSLCDGQGKKIGQRNFAHGGTGLSDMIAWLLKMSGGEPTEIHVAIETPHGPIVEALLERGFNVYSINPKQLDRFRDRFTVAGAKDDSLDAYVLADSLRTDMHLFRKLTIAEPLIVELREWSRIDEELKVERVRLANRLRDQLWRYYPQMLELGHLDEHWMLDLWEAAPTPEKAARASKAAIERVLKKHRIRRFDAAQVLSALRRPALSVAQGTIEAAIAHIKVTIERLRLVHRQLADAELQLDRLCKKLAEPVANDGENVPGQRHEHRDATILDSLPGVGRTVLVTMLAEAPHALQRRDYHALRNLCGSAPVTRRSGKSCLVTRRRACNRRLSNATFYWAQTATQCDPTSKAKYQALRARGHSHARALRSVVDRLLYVACAILEKGTLFDPSFAEQKDAAA

SEQ ID NO: 194032 - protein, 388 aa, unidentified
MLVTADQPETPIAIHTDLRAIFVSLELSRKTWLITSLSPGAGEKMSKHAVGAGDMAGLLARFAQLREKARARTGQDYPVITIQEAGLDGFWIHRVLQSEGIESWVVDAASILVSRRRRRAKTDRIDGETLVRTLLAYKRGEPRVCSMVKAPTPEEEDRRRVCRERKTLTAERVEHINRIKGLLFAQGIGDYEPLRRNRRARLDELKTGDGRPLPAHLKAQISRELDRLEIILAQVKAVEADRDAMLEPVAEQASTPATMIAQLKGIGPEFAGVLWSEGLFRHFDNRRQLAAYAGLAPTPWKSGKIDHEQGVSKAGNPRLRTTMIQVAWLWLRHQPDSALSLWFLERVQRNGGRLKKTTIVAMARKLLVALWRYATSGVVIEGAVLKAA

SEQ ID NO: 194033 - protein, 428 aa, unidentified
MEQIQPIVKAEPEPEFAALVAIDWADQKHYWSLRVVGQKGLQRGTLDNTPEAVEVWIMELHMRFGGRPLAVALEQRRGALAVMLSKYAHVHLYPVHPTTLAKFREAWYPSRSKSDPSDADLLLEILTAHRSRLRRLDPDTVEMRFLQNLVENRRRLVDERTALSNRLTDQLKLYFPQILGWFNDVASAVVGDLLQHWPSLQDLQQVKPAKLEKFLRDHHCSEIPERLTQMRQAIAATHDRALLDSAPYLVTAWVRQMAVLRESIRQLEKRIAERAAQQEDWHIFQSLPGAGAALAPRLMVALGTQRDRYCSAGDLQSFSGIAPVKEASGNTQWVHFRWACPKFLRQTFHEWAACSIAQCEWAKDYYEQQKARGKKHHVAVRALAFKWMRILYRCWKDRQPYREEIYLASLTKRRTALVAALAQAVQMS

SEQ ID NO: 194034 - protein, 387 aa, unidentified
MPQPNDLSRSFVALDQNSTIIAVVELSQSSWLVGGVLPGIERQPCKKLEPSAERLLGLLHRWRDEAVRAGSNITRIAVAFEAGRDGFWLARWLQAHGVEAHVIHPSSVAVSREHRRAKTDRLDTELLKRSFLGWLRGERGHCSMARVPTMLEEDAKRPNRERECLVGERTRIVNRMKGTLARLGIRTFKPTLRKAAERLATLHTPEGSPLPPNVSAELQHDMARLSLLISQIKEIENARQERLEQEPETGPHAMVRLLARIVGVGIETADMLVNEVLSRPMRDRKAVARYAGLTGSPDESGTKRREQGLARAGNARVRRGMIQLAWRFLLFQKESALALWYRARTADSRLGTRKTMIVALARKLLIALWRLVTTGETLEGVVLRPAG

SEQ ID NO: 194035 - protein, 351 aa, unidentified
MYLIGVDYHPSFQTIAFFVEETGECGEQELNHSGGEAERFYRDLQQRGVNVRVGMEATGYSRWFERLLAELGFELWIGDPAQIKAKRVKKQKTDRKDAQLLLRLMQEDNFPRIWVPSPENRDLRQLLWHRHRLVQMRTRIMNQLQALAMNEGKRMKKKLWSEQGRAVLEKLALGPWASRRRQELLELLDRMNPKIEELTAAVEQEAKKRPDALRLMTHPGVGPLTALAYVLIIGTPARFPRGKQIGTYVGMVPSEDSSAGKQGLGHISKQGNSLLRFLLVEAAQAAARIHPDWRRRYIHLAMRRHKSIAKVAMGRRLAIQLYWMWRNGCEYSQSGKCGSYAGQLGSTHGAK

SEQ ID NO: 194036 - protein, 322 aa, unidentified
MLIVGIDISKATFDCVVLDKDILPHRQFVNDVTGFKALSIWLKQYQEARLFCMEATGIYGVLLAKYLHQQDHNILVVNPIKTHAFAKMAMTRNKTDKVDAKCIAHFCQHLVNQGDWQRQLFRPKALGFERLQHLVTRLEQLNKLLNQENNRLQVSQDKATTKSITAMIKSIKTQLRCVEKTLSEITEQEPELKKQVALLNTINGIGNKTAWAILAYLGDITLFDNAKQVASYAGLNPKIEQSGSSVNRSRLSKIGNPRLRKALYMPSLVAIQHNPLMTQLYERLQQNGKPKKVALCAVMRKLLVLSYGVLKSGEAFDVNYAK

SEQ ID NO: 194037 - protein, 338 aa, unidentified
MKLYAGIDLHSNNSMVAIIDEQDRVVLQKRFANALQQILLALASFKEHLLGVVVESTYNWYWLVDGLMEAGYTVHLANTAAIVQYEGLKYSADEHDARWLAHLLRLGILREGYIYPREARAVRDLMRKRMQLVQTRTTQLNSMQTQYMRSTAQRPSTNELKRMLPEEVDAHLHQPNVASGIRANLAVVHTLSGEIARLEREVLEQVRLAAQFEPLLSIPGVGRILALAIMLETGEIERFESVGNFASYARCVQAKRMSNDKKKGEGNSKCGNKYLAWAFVEAANFAVRYNARIKRFHQRKTAKTNQIVATKAVAHKLARAAYHVMRERVPFDETRAFA

SEQ ID NO: 194038 - protein, 380 aa, unidentified
MGNRVAGSRRVGKELRLLAGEVAFVGVDVHKRSYSVSVWTHERGHVCRWTQPADAGALCRRLEAVQEQVGLVVYEAGPTGYGLARVLWDAGFPAEVVSPTEVPKRAGAVDKCDRLDADELAWYGGTGVLRSIYVLTPEEEAARQVERRRDQVRADLGRAKRRIKSFLLQHGLGEPAGLENWSRASVEELRQMPLGDKLRLCLESLLRDYEHAKEEMRGLDKVLGEMAASEAHREDVSAMRQVPGVGLLTGLTIALEMPRPERFRNGDEVSSYVGLSPRTSRSGGTSKGGPIRKAGNRRVRRVLVEAAWQWVRRDARGRAIYRHLLHCTGTAQKAIVGVARRLGVLLWRLRVSRERYVPGRLPEKPAAVPPSEDRKEAPRC

SEQ ID NO: 194039 - protein, 341 aa, unidentified
MSDFSYFCGIDLAKNHFSLHAVDQNGKVILHKSVTRSKLLTTIANIPLMRIGVEACGGAHYWARTLNTLGHDARIMAVKYVIPYRTKGKNDLNDAVAICEAVQRPSTRFVPVKSPEQQAILSVHRMREHWVRERTALMNRMRALLSEFGLIIPVGRSSLMKHVPLMLEDAENELPHLARTVIADAYHHLGELNQRIADTEQVFDSFAKVSANVQRVMKVRGIGPQTATAILASIGNGSQFDKSRDFSAWLGLVPKQYSTGGKPRLGRITKHGDKYLRTLLVHGARTVIANLGDKQDKLSQWCRGVLERRGMNRAIVALAAKNARIIWSLLHNQTEYENYAA

SEQ ID NO: 194040 - protein, 370 aa, unidentified
MLDTTTFVGLDVHARSIKAVSLDVMTGEVRAATFGYDAGAVAEWVRSVDPRARCVYESGVTGFDLQKRLSGLGVDCVVGAVSKMIKPSADRRRKNDRNDAEFLARMLSVGNVVEVWVPDDECEAARDLTRALEDARDDLSRSKQRLSKFLLRHGLVFDERTPTGRRKGNWTRAHWSWIESIRFAERADNDVLAYYVDAVRRAAEEKARLEGLVEAEARKPRWRKRVDSLRCLKGVDTATAADLVFEAGEFSRFRNARSFAAWVGLTPSEHSSGESDRRGAITKAGNKHLRKTLVEAAWHYLTCSGRPKDLARGQAPDRVARRHAAKGVRRLVERREALLARGVHNNKANVATARELACWVWAVGLMAEEA

SEQ ID NO: 194041 - protein, 345 aa, unidentified
MPVVTVGLDLAKTVFQAHGVDEAGQTVLRRRLGRSELIAYFAKLPPCLIAMEACSSAHHWARELGDLGHDVRLIPPHYVKPYVKRNKTDAADAEAICEAAGRPSMRFVPIKTRDQQAVLVLHRSRSLLVRQRTASINAARGLVGEFGLIASKGRYRVSELRQRMNAMASDQIPAIACQAINTLFDHIDVLEEQIAAVERQIVEWHRNNEDSLRLATAPGVGPITASAIVAAVGEGRQFQSARHFAAWLGLTPRMHASGKKERIGRISKGGDRYLRALLIHGARAIVGTLFRKNVTPRPWLLALAARRPTNVAAVAVAHKTARALWAMLTRGEKYRRPVAATPSAA

SEQ ID NO: 194042 - protein, 317 aa, unidentified
MAQDNAFVGIDVAKHELVVHLYPDGEGWRVTNSASGLRELATRLARVARNRVLRIGFEASGGYERSLAILLESKGFEAYLLDPARVRSFAKAEGKRAKTDPLDAAVIARALATLHTGLKPWRHDPAAQRLAERIRLRDQLMAQMIQSQNLLETTADAAAQRMTRAHVANLKAKIQRLDKIIADLIAENPTLCQRAKLLRSAPGVGPVVAATMLAHMPELGTITGKQAAALAGIAPFDRQSGTSTKPGRCQGGRPAVRRALYLAALSIMRTKKSYLATLGLRLKAQGRPYKVAIIATARKLLVALNAMLKDGQSFLSA

SEQ ID NO: 194043 - protein, 353 aa, unidentified
METAYDGRQIVGMDLHRRRSVLVRMTEDGRRLGTARITNSAQELRREIARAGKSPKVALEATYGWYWAADTLAAAGAEVHLAHPLGVKAFTCRRVKNDVRDAADLADLLRMGRLAEAWVAPREVRELRELTRYRHKLVHLRTSCKDQVHAVLAKLGVPVTCSDIFGKAGSAWLDGLGLPQPYAGKVTSLRQLTAELSAEITMLSEVIADLLAGDRGAQVIQQLPGIGPVLAAVITAEIGDVTRFKNAAQLCSWAGLTPRHRESDVKVTRGHVTKQGSRLLRWALIEAVQHAPADSPAGALKAAIIARRGKEARNIAKVAAARRLLTLVFYGLRDGQIRCLPRSAAGQLPARAA

SEQ ID NO: 194044 - protein, 334 aa, unidentified
MDTHAGTHVAAALDSVGGLLGVREFPATAAGYAGLLGWLGGFGTVALVGIEGTGSYGAGLARHVTAAGIRVVEAVRPDRQDRRRQGKSDPLDAVSAARAAQSGRARGAPKGRDGAVEAIRTLMVARRSAAGERTRTINQARALVLTGPDDLRTRFARHTPAALITGLASLRPRPGSTVGYATRIALRELGRRAQFLDGQLTRLDELIVPLVTARAPGLLALYGIGPRTAALLLIAAGDHPGRLRSEAAWAHLCGAAPIPASSGKVTRHRLNPGGDRQANHALWRIVFTRLGSHPATRAYAERRTAEGKSKAEIIRCLKRYVAREVYPHLRPAGG

SEQ ID NO: 194045 - protein, 368 aa, unidentified
MLRFRLMVETRSALSGLKHQKEKRSMDYFAGLDVSVKETSVCIVDDTGRIVREVKVASEPEALLQVLTNPAYRFKRIGLEAGPLSQWLFSVLTEASLPVTCVETRHMKAVLKAQINKTDRNDARGIAQMMRVGLYRPVHVKTLRSQKLRMLLTHRKLLQSKTIAIENDLRGTLRNFGLKVGMIGKVKFETRIKELIENVPDLAVLVEPLLIVRRVLREQIGILHRRLLAIVRDDDVCRRLMTTPGVGPVVALTYRATVDVPARFRNSKAVGAVFGLTPSQHQSGEIDRIGSISKCGDAMMRTMLFEAAQAMLMRSAKWSWLKAWAMKIARHRGMKKAIVALARRLAVIMHRIWVDGTEFRWTREVAAA

SEQ ID NO: 194046 - protein, 338 aa, unidentified
MKLYGAIDLHSTNNVTVVINEHDQVLYQKRLPNDLSLIAQELSTYRRSLQGIVVESTYNWYWLVDGLMEKGYRLHLANTAAIQQYNGLKYTDDHSDARWLAHLLRLGVLPEGYIYPKQERAVRDLLRKRGQLVHQRTANLLSIQSLISRTTGNSISTQYIKALNIERVDGVLPNPDLVLALKANLAVMNSADAQIEILEKAVQDRVKLHPQFRFLKTVPGIGPILALTIMLETGEIERFASVGNYASYCRCVGSKKISNGKRKGSGNTKNGNKYLAWAFVEAANFAIRFNSRIKSFYQKKKSKSHKIVAIKAVAHKLCRACYYIVKDQVPFDITKAFA

SEQ ID NO: 194047 - protein, 341 aa, unidentified
MDKFIRVGVDLGKGYFQVHGLRVEDGSAVNRKLSRSKMRPFFASIAPCRVGMEACGSAHYWARELVAMGHEVVLMPPGYIKPYVKRGKNDAVDAAAICEAMSRPDMRFVPIKSAAQQAVLMQHKTRELLVKQRTMSVNALRSHLAEFGLVVAKGIGRIDELSELAENDPSLPPEAREMAKLLTLHIEALTRSIDATERKIAKAAAGSKTTRLLDRIPGVGPLTASAIAASVPDPGVFKSGRDFAAWLGLTPKQNSSGGKAKLGAITKQGNPYIRRLLVVGSTSVLRHAGKRKGALAEWIAALRARKPERLVAVALANKLARTCWAIMITGEFFRHEAFAKA

SEQ ID NO: 194048 - protein, 375 aa, unidentified
MKEKLRFLGLDVHAETIAVAVADPDGEVRSLGTIPNRVESIRKMIRKLGPVEKLRACYEAGPTGYVVYWQLAELGVQCEVVAPTLVPVKAGDRVKTDRRDAEKLARCYRSGDLTAVWVPDEGSEALRDLVRAREAAKQDQMRAQHRLSKFLLRSGQRPPTGVRPWTRPYLIWVAQLRFTQLAQESTRQDYLHEVEHMRARVTRLEQAIMEAVKLASPSLQQVINDLQALRGIADISAVTIAAELGQVSRFGSARQLMGYCGAVPSEDSSGKRIRRGGITKTGNAHLRRIVGEAAWSYRRPPCIWYGLRRRQESISEEAKEIAWKAQHRLHKRYMRLGAAGKPQGKIITAVARELLGFIWAIGTKAETTVSQRAAA

SEQ ID NO: 194049 - protein, 401 aa, unidentified
MVSDFRKGRYNLMKIFVGIDIAKLNHFAAAISSDGEILIEPFKFTNDADGFQLLVSKLESFDKNSIIIGLESTAHYGDNLVRYLVAEFYQVCVLNPIKTCQMRKKNVRKTKTDKVDTFVIAKTLMMQDDLRFITFFDLDMMDLKALGRFRQKTIKQRTRLKIQLTTYVDQVFPEIQYFFKSGLHQNAVYALLKEAPSPKEIASMHMTHLANLLKVNSHGHFTKEQAKELRVLAQKSVGANDSAISIQITQTIQQIELLDSQLEKIEAEMTDIMKFNDSVIMTIPGIGYINGGMILGEIGDIHRFSNPNKLLAFAGLDPSVYQSGNFQAKTTRMSKRGSRVLRYALVNAAWNVVRNKATFKAYYDAKRSEVRSHYNALGHCAGKLVRVIWKMLTDEVEFNLE

SEQ ID NO: 194050 - protein, 313 aa, unidentified
MSVSYFAGIDVSKPYLDVHILPSRTAERFANAPAGHRQMIKLLREFDVCLVVLEATGGYERPAVVAMVNAGLRVHVAQPQVIHAFGVSLKQRAQNDKIDAATCARYAQDRHQDLLVIDTIDKTQQALQALVVRRGQLVEMQTMEQNRVQQVHDKQALKSVERSLKALKKEIARIEKQIDAIIHADATLKAKAQKLQETKGVGPQTTRTLLAYLPELGKVSVKRLNSLVGVAPYASDSGDKKFIRHITGGRAIVRNGLYMACLSAISTNPVIQPYYQKLVERGLAHKTAMMACIRKLLAYLDKQVRLALQPATP

SEQ ID NO: 194051 - protein, 347 aa, unidentified
MNSVGIDLHRNRSQIAVIDEQGELSLSRRIVNDRETFLELLAGLEGESRIAVEATYGWEWLAELLEDAGYEIHLAHPLRTRAIAAARVKTDAVDAKTLAHLLRADLLPEAYVAPRELRDLRELLRHRIALTGMRSALKNRVHAILAKHGITRQHSDLFGKGGREFLDALQLREASRRRLDSLIALIDDFDREIEATTREIEQRAKADDRVDVLTQIRGVGRYTAMLIIAEVGEIRRFPNARHLCAWAGLTPTVRSSDGKARLGRISRQGSPALRWALVEAAQKCTTGGGPLRESFERIAKRRGRKIAKVAVARQILTLSYYGLRDGEIRCLARRSRASAKEKLAVAP

SEQ ID NO: 194052 - protein, 422 aa, unidentified
MLEQTQDEQEIITRVAALDIGKAELVCCVRVPDPQGGTRRVQEVRSYSTMTRSLQVMADRLLDLGVTRVVMEATSDYWKPPFYLLEAHGFETWLVNARDVKNLPGRPKTDRLDAVWLCKVAERQMLRPSFVPPVPIRRLRDLTRYRVGLVSDQTREKNRVEKLLEDAQIKLSVVASDIFGVSGREMLAALIAGERNPHVLAQLARTRMRTKIPQLEEAFVGHFTDHHRFLLTKMLTRIDALDEDIADLDTQIEAHLAPFADAVARLDEIPGVGATAAAVIIAEVGLDMTRFPTPAHLSSWARFAPGVKESAGRKKGTGATGHGDRYLARVLGEAAVGASKTNTFLGERYRRIARRRGKKKAIVAVGRSILVITWHLLSDPEARYHDLGSGYYDSRINPESKKRNHIRQLEALGYKVTLQPAA

SEQ ID NO: 194053 - protein, 362 aa, unidentified
MPKMIWLGMDVHAASITVAQYEDQAPTAMVQTIANDPAQVRRLVRRLPAGSDVRACYEAGSCGYGLHRQLTALGVHCDVIAPALIPRRPGERIKTDRRDAEKLGRFYRSGELTTITVPTPSQEGVRDLVRAREDVRRDRTAARQRLAKFLLRHGHRYPGSHWTKRHWEWVCGHTFDGPARTVFVHYCDHVLALNERLAHLEREIRTLAESAAYQPVVTRLSCLRGLATLSALVLIAELYDLRRFRTPRELMAYLGLVPSEHSSGARERRGRITKTGNALARRLLIEAAWAYRHPARQTRRVHQALTTQPPEVHAISDRALHRLTARYRRLLSRGKTPHHAVTAIARELCGFVWAIALVPDLA

SEQ ID NO: 194054 - protein, 400 aa, unidentified
MDILYPVCAGLDVHKDSVVACVRRVDAKGKVQRQTRTFGTMTIHLLALADWLTEQGVTHVAMESTGVYWKPIWNLLGGQFDILLVNAQHIKQVPGRKTDVKDAEWIAQLLQHGLLRGSFVPATPQRELRELTRQRRQLIGAKASVANRIQKVLEDANIKLGSVATDVLGVSGRDMLRALIAGEDDAEKLAELARRRLRAKLPQLQLALKGRVSAHHRFLLKLLLEEVEQHEAWIARLSERIVEVLPAPFAEAVQRLATIPGIDERAAENILAEIGTDMAQFPSAGHLASWTGMCSGNRESAGKRRSGRTTKGNRWLRATLVQVAWAASHTKNTYLSAQYHRLAGRRGKKRALVAVGHTLLVIVYHVLRDQTTYRELGADYFDRLGVGVSFVGKSPHQAAV

SEQ ID NO: 194055 - protein, 358 aa, unidentified
MDRSTKQDDVTIGLDLGDRRSQAAVLDAGGVLIEERSVATTKEGMAEVFGQYGGCRIVMEVGTHSPWVSRLFKERGFEVIVANPRQVRLIAASQRKTDRYDAQMLARLGRLDPALLAPIQHRGVEAQQHRAMIQARDGLVRCRTLLINQVRGLTKAMGVRLPRSGAGAFACQARATLGDKLFLGMDTLLSTIEQLSSDIRAMDKQVKELIESTYPEAAHLQQVSGVGPITSLWYLLTLEDPNRFAKSRVVGAYLGLCPGQRSSGEQRPQLGISKAGDETLRRYLVQAAHCILGPLGPDSDLRRFGQGISSRGGSNGKKRAVVAVARKLAVLLHRLWVTGETYVPLRNADLTASQPEAA

SEQ ID NO: 194056 - protein, 320 aa, unidentified
MMAQNDLVVVGIDVAKDKVDACIRRFTLRQTFPNTAQGHRKLVAWLRKYQVGKAVMEASGGYEREWRNVLHNAGIEVRIVDPRRVRSFAQSAGRLAKNDPIDAEMIAWFAETFSQAPGQIPDAAREELATLAKARKALVDVKIRLQAQDEHAAPEPARKAYARVLKSLAAEIDKLEAAISAKVKATPEFAERAEIIESVPGLAQATSAILIAGMPELGQVSDEVAAALIGVAPYDDDSGKRRGERYIKGGRRWVRNAIYMPCLGAATQYNPVLKAFYQRLLAKGKEPKVALVACMRKLIIILNTMLARRQKWNPGRHAMA

SEQ ID NO: 194057 - protein, 423 aa, unidentified
MDRIYERSAGIDVHRDTLVVTVRIHERGRRESTETRTFEAFHDAVVELARWLVDCQVQLVGLESTGDYWKAPVRVLQQHCPGILIWLVNPAEVKKVPGRKTDRIDSQWLSKLVMFGLVSPSFLPSPEQEDLRKLTRLRTKVVADQTRYSNRVVKHIEASGIKLASVCSDVLGKTGRRILDAILAGTTDPQALAALACGNLRAKKDQLARAVQGSVSEATKFVLRELLGELDRTDELLARLDAEIAQRLQPLAREMELLKSVDGIDEVVASTILAECGADMSVFPSDANLASWGGFSPGSNESAGKVKSTRTRKGDKYLRTILVQAANSAVKVKNSFWKQKFSQTIARLGHKKAIFAIAHKMIVAIYHILRDAVPYRRPEVKPPSPKRLAQMLKTYGERIRELGFDLVITPKQAPEIPGGAVQT

SEQ ID NO: 194058 - protein, 317 aa, unidentified
MTTPTASFVGIDVSKHQLDVAVRPRGETWTVAHDEAGLSALVARLRALAPTLIVLEATGGLEVALAGALATAPLPVAVVNPRQVRDFARSTGTLAKTDRLDAQLLAQFADTVRPEPRPLPDAQAQELTALLQRRRQLVEMLTAEKNRLTFASRRIRPQLQAHIEWLHKQLAQFDDDLRQLVHASPLWREKDDLLRSAPGVGPVLSTTLLAALPELGRLTRHQIAALVGVAPLNRDSGTLRGRRTVWGGRAHVRAVLYMSTLVATRHNPVVAAFYRRLRAAGKAPKLALTACMRKLLTILNAMLKHHTHWAPVSAQHA

SEQ ID NO: 194059 - protein, 352 aa, unidentified
MAKNNFDELMSVGVDIGKDVFHLVGFDRDGQRVLRKKIKRMALIATFEELPHCIVGMEACLSAHFVSRTLRKMGFEPRIIPAIYVKPFNKGQKNDYNDAEAIAEAALRPNLKTVSEKTQEQLDLQALHRVRSRLVSRRTATMNQIRAFLIEQGITVRKSVAALRSSLDAILENRSSEISLRMRKLILGLQQDWIWTDKRIEMTTAEIKAVSESEASCQRLMTIPGIGPIISTAVVAAVGTGEAYDRGRDFAAWLGLVPRQHSTGGRTILGRITKRGSRYLRMLFVQAAQVIMMRPKNWPKFSFGAWLESASTRMQHNKLGVALANKLARIAWSVLNSGRDFDWKEKELATAI

SEQ ID NO: 194060 - protein, 328 aa, unidentified
MQAGEGILGIDISKESFDVVLRGTGGEQHRVFSNDQKGFKALVGWAEKQPERVVHICMEATGSYWEGLAEALYQGGYRVSVVNPYQIKRYGDHLLNRNKTDKADASLIAEFCEKDRERLRAWKPFSPEIKALRSMGRRLDELQGMKQQEQNRLKSGVTDLVVIESLQENLKQLDAQIKALWKKIKEHVNRHPDLREKQRLLTSIPGIGKLTAIKLIAEIGEIKDFTSASQLAAYAGLAPKQFQSGSSVHKQTRISKQGRTELRRCLYMPAVVASEHNPIVMDLKRRMLASGHVMMEVIVAAMKKLLHLVYGVLKSGKPFDPDYGNLFC

SEQ ID NO: 194061 - protein, 528 aa, unidentified
MQLMYYIGLDVHKRIISFCVKEGSGKLHSEGKIPATRFDLNRWMKTLPQPWSAAMEATMFSGWIYDHLKPHAAALKVAHPLMLRAIAAAKKKNDRIDANKICDCLRCDFLPECYMAPTAIRERRRTLRYRNLLVRQMVQMKIKIGTLLMEAGVSYNKQKLHKAGYFRELLTSNPDINEGLRPLLRLCRETVVRLSKLESALVRSLERDQFLVERVERLMSIPAIGPITALTWALEIGEVQRFSSIKKAISYCGLCGAEKSSGNTVQRTPLSKQRNKHLQTTLIEAAKMAPRNSSQLAMLYDKERQKGNANCATLAVARKCPAFASAGQRTQEECFQIPGRKPGKGHLFMDEEYSTTQSKPASRVQILRPFIPAWVREILCELKGAPLSVLVAYWSHANREGIAWPSNRFLARTTGYSETTVKAAKKQLLALGLLNAGGQLRKGGKFGRKEFSTVVKKPDHSAEVKKPADCGKTDVGKPDHKGLPSEGFPSNNKEGRPGGSAWPHRSAHPRMRNFEKQEEAYRPEVVYA

SEQ ID NO: 194062 - protein, 412 aa, unidentified
MQVLYARCAGLDVHCKTVSACVSVCESQARKIQKVRVFSTFTRDLLEMARWLKEEGVTHVAMEATGVYWRPVWAVLEDQFQQMLVNPQHMKAVPGRKTDTKDCEWIADLLQHGLLKGSFVPPTPIQDLRDLTRYRAQLRQDQGRAANRIQKLLEQANIKLSSVASNALGVSGRRILKEIIDGEVDPGQLAQLARGALKSKIPVLMQALEGRVREHHRFLLAKFLSEWEWYEEEIASLDHRIEEQIRPFEVAATLWQTIPGVSQVTAWSLVAEIGVRMEQFPSAQHLASWAALCPGNHESAGKRKSGRMRDGNKWLRRSLCQAAWCATRKKDCYLASQFRRLGGRRGLKRAIIAVAHTMLVIGYHMLKTNQGYCELGANYLDRLHKESLQRYHVKRLQSLGFAVRLEPAPIAF

SEQ ID NO: 194063 - protein, 355 aa, unidentified
MNAIKYIGMDVHLATISIAVLDVNGKLTMEVTIATQSSALLDFIRGLSGTLNVTFEEGTAAQWLYTLLEPHVAKVVVCDPRQNPRRLGEKKSDRLDARKLAEGLRLGTLKPVYHGNALGPALKEVSRSYRTLVSDTTRVMSRLKALYRARGIRCAGSRVYSPRFRDQWLQQLREPGVRGRAERLYKQLDLLLPLRQEARAALLSESRKHPAQKILRSIPTLGPVRVALLLALLQTPYRFRGKRQLWTYAGLALVTRTTADYQVLDGQVTRSRKPALVLGLNANHNHFLKALFKDAAVTTLTRPGPFRDFYTTRVAQGMEPELARLTLARKIAAIALTLWKKGECFNAEHLKTQAA

SEQ ID NO: 194064 - protein, 413 aa, unidentified
MSQKAYLGIDLAKGNSKVAAIDEDGDEIVSSFSISNSREGVEKLMSKLHSYKKNNIVCAMEVSSNYWENMYSYLNQKDIVCILLNPYQVKKYRQALGSKIKTDSIDAAAIASLVRAKKYDSLCVSDEAVLELRELVRIAHSFGRRVKDLKRSVLALLYLTFPEYTKIISYPFSKVSMQILSKYPTSFHMAKDGTVGRLVKVFRRYQGCNFGADKAKELIAVAKDSFYSGKAARSRGMSICMQIEEIASLSLKIQEIESEIKSILNPDDPKDGLHQDFDILNSIKGVGIGTIAAFIAAVGDVNRFSSSDKLVSFIGFYPKIFESGKYKKKNPTIVKAGPKDLRYMLYMSSVAAVKHNTHLKKYYYDMVSAGMPVKKALIKVAVKITRMMYSMLKHKQYYDPCRVFLQQAPAVAA

SEQ ID NO: 194065 - protein, 366 aa, unidentified
MKKTSTIRVNGNMIFKGHKLTIGLDLGDRWSFYCVMDEAGQIILEQKLPTTPEAMKQTFGKIPRSLIALETGTHSPWISRLLSELGQEVIVAHAQKVQWITKSSRKDDRHDARTLARLARVDPELLGPVRHRSAQAQLHLTVIRARAELVSARTALVNAARGLVKSYGQRLPKCGTYQVNRELAAALSTELRDVLEPLLKEIESLNERVKEYDERMEKIAKEVYPEVSLLKQVKGVGTQIALTYVLTIEDPYRFPKSRQVGCFLGLRPGRRNSGESEPQKGISKEGDRYLRTMMVQGAHYILGPFGEDSDLRRWGLKLAERGGKNAKKRAVVAVARKLAVLLHRLWVGGEVYEPLRNSQKAMPAVA

SEQ ID NO: 194066 - protein, 310 aa, unidentified
MNVVGIDIAKHHFDLHLLPEGTTARYTNDSQGIHQCRLFLAQSQPERIVLEATGGYETALTVELQNVGMPVIVINPRRLRDYAKSTGQMAKTDQIDARIIAEFATNLRPTVRELPDAKARQLKAFLARRDQLLGLHVAERNRLEHTTDPLLVKTIRQLLRIVAKQIAVLDQTIAAQVEADEKLQRKAQILDSVPGLGQTTAAMLVTQLPELGRLNRRQIAALVGLAPMNRDSGQFRGKRMTGGGRVRVRTALYMPMLAAIRHNPKIRKFYQHLLDNGKAKMLALVAAMRKLLTILNTLIEKNQLWNPEIT

SEQ ID NO: 194067 - protein, 361 aa, unidentified
MPNGTRWVGLDVHAAQTAAAVFDTATGEVRSRMLAGRPHEVLPWLLELPRPVRAVYEAGPTGYGLARRGRAAGIDVQVCAPGMVAKGPGDRVKTDKRDALKLARLHAAGQLVLVHVPALEHERLRDLSRAREDVGGDLMRARHRIGKFLLRREIYCTGRAKAWTRAHRTWLAALRFDDRPSELVFADYLHAHDVLLARRDTLDRAIDEIAVDSSWAQIIGRLRCLHGIDTLSAFGLCAEVCDFERFLAPTAFSAYLGLVPSEHTSGDKRRQGAITKAGSAHARRLLVEAAHHYARPPRIGGALQRRQDGHEPWVIDLAWRAQRRLHNRWRHLRTDRRRPGGVTAVAVARELAHYCWELAVH

SEQ ID NO: 194068 - protein, 368 aa, unidentified
MSRIAEQAMLVTGGVDTHADVHVAAVVDQVGRVLGTRAFPATAAGYRAAVAWMSAQGQLARVGVEGTGSYGAGLARYLAGCGIEVAEVIRPNRQARRQRGKSDAADAVAAALAALSGEASGVPKSRDGAAESIRALKVARAGAVKARTQAGNQLRDLILTAPEPLRQQLAGLPSKRQAETAARFRSGHLTSPAEGAKAAMASVARRHQDLTAEITRLDAALEELVTRAAPAGFLAKQGVATIVAATLLATTGDNPSRVRREASFAALCGASPVDASSGKQIRHRLNRGGDRQANSALWTIAMTRLAHDPRTKAYAARRTAEGKTKKEIIRCLKRYIAREIYKTLCRPQRPGTPSAPQVKQDLSAPVLT

SEQ ID NO: 194069 - protein, 339 aa, unidentified
MDTSKHIFQLHGVNIAEEPVLRKKLRRTEMVVFFEKLPPTVIAIEACGGSHHWARLLQSFGHQVKLIAPQFVKPYVKRGKNDAADAEALCEAMSRPAMRFVPVKTPDNQAALMLVGLRDRLIRNRVQLANAIRGYAAEFGLTAAKGVCKIEPLLDRAAADKTLPALARELFAFHAAEYAQLQEQLEKVEAKLVAWHRADECSRRLAQIPGVGPIGASMLVMKTPTPEVFRSARHFAAWLGLTPKDHSTAGKVRHGVITRAGDEALRSVLVVGATAVIRQIRYGRGALSPWLLDLLKRKPPKLAAVALANKIARIAWKLMVSGQTYRATGSRSPASARAA

SEQ ID NO: 194070 - protein, 425 aa, unidentified
MLKINPLSTLYVGIDVSSKSNYVCALDFYKNKYINSSFANNQPGAEELALKILECLKEHPDITTIVAALESTSVYSIHIANYLSSCEELMRFKPYVFVLNPKCTANYKKSYIGLGKSDPIDAFVIADFARAGNIESEPWRGSQFLALKRLTRHRLHLVECMTREKTYLVSNLYLKFSQLQMLEGDDQPFCDIYGATSSSVLMEYFSPEEILDSSEEDLIAFLAKKSRNRIKDISKTADLLKKAARDSYRLDKALYEPLNVSIASSFNCIETFKREIKVIDNAIEKEIKGLNPNAFIILQSIDGIGPVFAGGIIAEIGDITAFHSSDALAKYAGLTWKSNQSGDFDGEDTPMIKAGNRYLRYYLGEAANSMRKHNVEYGTYYRKKYNEVPKHQHKRALALTSRKFVRLVYGLLGRCEIFSVNLDLL

SEQ ID NO: 194071 - protein, 411 aa, unidentified
MHNRQNYLYVGVDLHKEQHTAVIINCWQEKLGEIQFDNKPSAFSKFLLEVETYVSDGLSVVFGLEDVGGYGRALAKYLVDHEQVVKEVNPALSFLERKSQVMIQKNDSWDAECVARILGNKFNQLPDVKPNDLFWSIQQLVSRRNALVKAQSALKNQLHIQLNHHYPSYKKFFSELDGKTALAFWQQYPSPSCLEGTNIKRLTAFLLDVSNNTCSIKKASDILKLVKEDGHTMKEYQETRDFLVRSIVRDIEFKKTEMKYIERELKQLVNLLDYQLETMPGIELVTASALIAEIGDVRRFSNANKLARFAGIAPVYFGSGGKGKTHKSKQGNRALHALFYNLAVQQVQVAKGSKLPRNPVFHAYYQKKLKEGKTKGQALVCIMRRLVNIIYGMMKYKTAYELPIVEEKEVV

SEQ ID NO: 194072 - protein, 341 aa, unidentified
MGQVSTIGLDLANSIFQVHGADASGAVVFRKRLRRSQVRPFLAAQPPCTVAMEACGSAHDWAREIAMLGHAVRLIPPAYVKPFVKRQKNNATDAEAICEAAQRPTMRFVAPKSEQTQAAALVFRARDLLVRQRTQVINALRGHLFEFGIVVAKGPAHVPQLVQAVANPDEPLPEIARPVLQILIDTLHRLDEQIADLDREIVQRAKADETAHRLMTIPGIGPVTAVALTALAPPAQTFRRGRDFAAWVGLTPLQHSTGGKQKLGATSKMGERTLRRLLIIGASAVLRWTARHGAPAGSWIARMLACKPPMLVRVALANKMARIVWALMAKGGTYQAPAARA

SEQ ID NO: 194073 - protein, 369 aa, unidentified
MQDTTFIGLDVHKATISVAVARGERGGEVRNWGSVPHRADHIRKLVEKLAAGGARLQFCYEAGPCGYGLHRQLVEMGHDCVVVAPSLIPTKAGDRVKTDRRDAVMLAKLHRAGELTAVWVPDAAHEAMRDLIRARATAMRVTGKARQHLQGFLLRHGRVYPGKKGWTGAYRRWLATVHFQYPAQQIVFQDYVDAASDAEARVERLTGQIADLLPSWTLAPVVEAIQAMRGVAFIVAVTVVAEVGDFQRFDTPRQLMAYLGLTPSEHSSGASVRRGGITKAGSGLARRALIEGAWSYRMQARVSPKLHARLEALPRAARDIAWKGQLRMCLRYRHLVAAGKAKVVVITAIAREMVGFIWAIARAVSTVPV

SEQ ID NO: 194074 - protein, 412 aa, unidentified
MADKTFRWFAGVDWGSAKHQACLLDEVGTVVGERAFAHGGAGLAALCDWLMSMAGDPGSVAVAIEVPHGPVVDALLDRGFAVHAINPKQLERLRDRVSLAGAKDDRRDARVAAGGLRTDLHLFRPVEAGDPAVIALREWSHLAEELQQERVRLSNRIRQQLWRYYPQLLEVSDDVTAEWVLDLWTLAPTPAKAARLREATLARLLQEHRIRRLDAEQVVGLLRQRAITVAEGVTEAAVLHLRSLVARLRLANREFHQAGRKLNELCTALSEGAAAAGGAPRDAVILSSLPGVGTVTLAILLTEAAGPISRRDYAALRTLSGVAPVTKRSGKSCIVTMRYAAQVRLRNAVFHWARVAVLNDPKCRSRYAALRARGHSYGRALRSVADRLLGMACVLLQRQVLFDPDYGSSAAA

SEQ ID NO: 194075 - protein, 430 aa, unidentified
MKSNTQNAKIEAITEKTLVLGIDVGSETHYARAFDYRGIEYSKKPFKFSNTEAGFVTFKEWILDLKERHEKDKVVLGMEPTGHYWFNLGKFLQDNEMKPVLVNPHHVKKSKELDDNNPTKNDRKDPKVIAGLVREGRYMIPYLPDGVYADLRTASNIRFQLQAELTRIQNRISRWFNIYFPEYKTVYGKPDAKSGILILKEAPLPEDILTLGIDGVNQIWRDAKLRAVGKARAKTLIEAAEHSVGSKEGAVAARMEIRMLLEDYESRNIRLQEVMTLIEGLVKQIPMAEKLLEIKGVGIRTVSGFLAEVGDISRFNNPKELQKLAGLALVENSSGKHKGETTISRRGRKRLRYLLFEVAMSLVAKNPEFRELHNYYTTRRLNPLKKMQSLMAIAAKLIRVFYVMLTKGVNYDQKKMVNDIKRPAVYLQAA

SEQ ID NO: 194076 - protein, 432 aa, unidentified
MSKFFNLPVAGIDVSADYSMVAILAPNGAIYRKAFKITHNAEGFLYLLKEMRKVEEEFSMKPSLFMESTGVYHLTLFHFLKNNKLDTFVINPLVTNSNKNSGIRKVKNDKKDALTIANIAKYQNIKMSDYLDIQIFSIRSLCRDYYSLVDNRSEFKKKLSSDLRTFFPGYHEVFSDVAGVTSLAVLAKFSSPKAIVDAPKDDIIAMLKESSRKSTEWCTNTYNKLLSTAESAVQIGISDSTFKITIDINIKLLSTLDEQIAALLNEIEATIKSESTPNSYKNNVALLLSFKGIGFITAATLMSEIGDPTRFRHPKELVAFFGIDPSVSQSGKFNSDQNKMSKRGTRFGRRALYAAALAAVRKTKTGKPINSVLYQYRNENLSGKKKKVALGAVMHKLVKYIFAVLRNQQPYEIRDPRLHNQMYVNNSSRKAS

SEQ ID NO: 194077 - protein, 366 aa, unidentified
MGMLAEHTDHVIGVDTHRDAHAAAAIATRTGVVVSRTTIAADAFGYKRLLRFARRHASGRRVWAIESSGSFGAGLTTFLLAHGEWVVEIDRPKRAARRNGAKSDELDAIRAGREALERDHLAQPRARGDREAVRVLLITRRGAIRARTKAINHLKALVVTAREELRHQLRNTPTYELVYRCARLRTLPSHSAEHRATVIALRHTARRILALEAEANDLETEIERLVKQTVPELLDEIGVGPISAAQLYCSWSHRGRLRNDGAFAMLGGSAPIPASSGQTIRYRLNRAGDRQLNCALHTIVLTRLQHDPATRAYAARRVAEGKTPREIKRCLKRYLARRLFRILEATGPHPTAHDRPPRSRTIGHCS

SEQ ID NO: 194078 - protein, 347 aa, unidentified
MSQTLNAVGIDIGKNSFHIVGQDDRGAIVLRQKWSRSQVEARFANMPPCLIGMEACVGAHHLSRKLKALGHDARLMPAKYVRPYSKGQKNDFRDAEAIAEAVQRPTMKFVATKTADQLDLQALHRVRERLVSQRTGIINQIRAFLLERGIAVRQGQRSLRAELPRILATPPDVLSPGMVRVIEGLAADWRWLDERIEGLSREIEELAKRDAGCERLMSIPGIGPIISSAMVAAIGTGDGFAKGRDFAAWLGLVPRQISSGDRTILGKISKRANRYLGVLFGQAAWVVLVKVKPTRWEGHGLKHWIEAASKRLHRNVLAIALANKLARIAWSVLARGPAFEASKLQAA

SEQ ID NO: 194079 - protein, 366 aa, unidentified
MPSIPQPPPSGQRDTGAQDVVLGVDTHKDIHVAAVLTVLGMVLASATFPTTAAGYRRLLAWARGFGPVGEAGVECTGSYGKALARYLRAEGVKVTEVNSPDKATRRRRGKTDAIDAEGAARAVLSGRATTTPKAGDGPVEMARMFKLAKASAIKSRTQAINQLKSILVSTDPELRESLAGPGYKSLVRRCVALAATAPTTATTAAVYTLRLLAQRIQHLSTEILQLEAQITAVIAAHAPKLLQRVGVGPDSAAALLITIGDNPERMASEASFAALCGASPVEASSGKTQRRRLNRGGDRQANAALYRIILTRLRWDLHTRAYLDRRITEGKSRREAIRCLKRYVARELYPLLQAAGTSTDPAAATA

SEQ ID NO: 194080 - protein, 400 aa, unidentified
MVFVGLDWASTAHAICVLDPTGTIRWRGSIPHSAEGLTELVRRRRQCGPPETVQVAIERPSGVVIDTLMEAGVQVVPIHPNVVKATRARYAAAPAKSDDGDSYLLADLLRTDGHRFRPLLPLRDETRARRALVRGRDDLVGQRVALANQLRALLERFWPGAAVIFADVDSPIALAFLARYPTPQSAEHVGEHRLTQFLRRHAYCGRRPAAELLARLRGAPVGRAGEAECDASGELVRSLVTVLLPLVAQIQQLSAAIAAALADHPDGPVLQSLPRSGQVNAAQLLAELGDDRARFPTAEQLAAEAGAAPVTRASGKHRGVVFRWACNKRLRQAITTLADNSRHASPWAAAVYARARARGCDHPHAIRILARAWLRVIWRCWQDRQPYDVTHHRAATRSAA

SEQ ID NO: 194081 - protein, 387 aa, unidentified
MEKLIKYSIGVDGAKDKFDACLMSVDITLGSKVKASRQFGNSLAGFKEFLSWGRKHCKEKVPVQVLMEATGVYHEKLAIWLTEQGTEVFVVLPNKARRYMQALGLKTKNDSVDARGLAMMCIQHRFEVWKPIGKYNYELRLLTRHYQSTQELKTVFLNQLHALEHSGYTSKHVSKQLKKTIGLFEKQVKAVKKNIVDHVESNEDVKRKVGHICKIKGVDILTVATIVAETNGFELFHKQAQLVSYAGYDVVENQSGDHVGKTRISKKGNSRIRRILHMPALNVVRYKETPFQRLQERVYEKTKIKMKGYVAVQKKLLLVMYTLWKKNEPYCKDYEEKMISGNDEQKLLFPFFSEGESKKVVPQQSGTTQDKLRYNESHEVLFPLVQN

SEQ ID NO: 194082 - protein, 343 aa, unidentified
MIIIGVDAHKRSHTMVAIDEQGRALGERTVQATTPGHHHAFRWARKSFGSELLWAVEDVRSLTVRLERELIDAGHRVVRVPTHLMARSRKTSRTPGKSDPIDALAVARVALRESDLPVATHSPRTRQLKLLLDRRDDLLQYRTAATQRLLWHLHEIDPTYEVKPGALSWSTTQAAVADMLTRHHGLVAEIAGEELWDVQDATPRINELQRRIGTVVRSAAPSLLELHGCGPLTAARIVGETADVGRFKSEAAFARWAGVAPIPDWSGTTRGQLRPFRGGNRQVNAAVHIIALTQIKKGAPGEQYYRQVRDRKGSHGAAFAALKRRVVRSIYTRLRADRSLLSD

SEQ ID NO: 194083 - protein, 402 aa, unidentified
MQVDHPVCGGIDVHKDTLTACLRRVDANGHVSKEGRECATTYPSLLALSDWLVEQHCPIVAMASTGVYWKPVYHVLVGTVEVYIGNAHELRSRPGKKTDKRDAAWIAELLAHGLIRPSFVPPPDICALRDVTRTRVALVQTRSQSKNRVHKLLEDTNLKLGSVVSDLFGVTGRRMLAALVAGERDPQVLASLALGTLKHKRPQLERALTGQFTAHHGTLLALLLELIEMLDRQIATLDQQIGELVAPLQAQIAQLDSIPGVDIIAARDILAEIGTDMSRFGDAARLASWAGVCPGNHESAGKRYRGKTCKGNRYLRRVLVQCAWGARKTPTFLGRTFRRLEVRLGKKKAALAIAHKILVIVYHLLAAGTCYEEARYDQWNPRQEARERQRAIKTLERLVQFQ

SEQ ID NO: 194084 - protein, 382 aa, unidentified
MSVTQNEKIRQVTDTTMVIGVDIASELHWARAFDWRGLELGKTVKFENSAEGFNFFLRWVSELTVEQKKDSVMVGLEPTGHYWFTLAAHLQGGDFKLVLVNPYHVKRSKELDDGHPSKSDKKDPKTIAKLVLEGRYVYPYIPQGLYAELRVAMNCRWRIRKELASLQNQIQRWLKIYFPEHSKVFGRFTGTGNMALLHSAPFPSDLISLGVEGISGIWKQMKLRGIGRKRAQRIYEAAQTSVGCTTGMEAARMELQILLEDYDAKLQQYERVMQVVENLCSQIPAVAELLKIQGLGLVTVAGLFAEIGDIRRFESPRQIQKLAGLAITENSSGKHKGPTEISRRGRSRLRAILFRAVIPLLANTCKKPRISASSPLLHHTAK

SEQ ID NO: 194085 - protein, 370 aa, unidentified
MGNRSMFVGLDVHKETIDVSIAEGERQGEVRHYGVIASDLEPLDKVVRALRAPDRTLHFVYEAGPCGFGIYRHLTGRGEHCVVVSPSMIPKRSGDRVKTDRRDSQMLARLHRAGELRAIYVPDDTDEAMRDLVRAREDAVGVGTQAKYRLKAFLLRQGRRYPGREGWTLPYRRWLTDLSFPSAAQHIALQEYRDAIAETEQRIDRLTEQLRQLAPTWRWAPVVAALQALRGVSFLTAVALVAELGDLTRFRHPRELMAYLGLVPSEHSSGPSVRRGAITKAGNPHVRRLLAESAWAYQGIPRIGRQHAYRQEALPKVVCDIAWKAQLRLTTRFRRLVARGKAKPKVATAIARELSGFVWAIAREVSPTPR

SEQ ID NO: 194086 - protein, 349 aa, unidentified
MSQNLNSAVAVIGIDIGKNSFHVVGLDNRGAIVLRQKWSRGQIEARLANLPPCLIGMEACVGAHHLSRKLQALGHDARLMPAKYVRPYSKGQKNDFRDAEAIAEAVQRPTMKYVVTKTVEQLDLQALHRVRERLVSQRTGIINQIRAFLLERGVAVRQGLRFLRAELPRILATPPDVLSPRIVRVISDLAEDWRRLDDRIDQLSSEIAVLARQDAGCERLMSVPGIGPIISSAMVAAIGTGDAFSKGRDFAAWLGLVPKQMSTGDRTILGKISKRGNRYLRVLFVQAAWVVLIKPMSWDRHGLKHWIEAAKKRLHRNVLAIALANKLARIAWGVLAGGRTFEASKLQIA

SEQ ID NO: 194087 - protein, 445 aa, unidentified
MVHPDAAAIDVGATMHMAAVRADRAPEPVRSFGTFTADLHRLVDWFTECGVETVVMESTSVYWIPIFELLDARGFNVFLVNARDAKHVPGRKTDVSDAQWLQRLHSFGLLRASFRPKGQIAELRAYVRQRERLLEYAASHIQHMQKALTEMNLQLHHVVTDITGVTGLRIIRAILAGERDPEALACLRHYSCRSSAETIAKALTGSYRAEHLFALEQALALYDAYHEKASACDARIEAVLKELSFHRGHGHGSAPRVSRRRNRTDQANAPAFDVREALFALLGKDLTAIDGLGPYLSLKLIAECGDDLSSWPSAKHFTSWLGLAPSNKVSGGKMLSSRTRRSGGRAAALLRLAAVTVGRTDTALGAFYRRLSARIGKAKAVTATARKIAVLFYNAVRYGMDYVDPGASSYETRYRMRVVNNLHRRAKAFGFVLHPLEPKVDAAVS

SEQ ID NO: 194088 - protein, 431 aa, unidentified
MKNRTNQRLEEITAGTLIVGVDVAKSLQWARFVDYRGVEQGKALSFPNNRKGFESIVAKIWEIRNMKILRYPIETVMIGMEPTGHYWKPLANYLMNLGYRVVGINPYHTKKAKELDDNSPTKSDKKDAITIARLVKDGRFFNPYLPQEEYGELRGLTNARVSVMKRSSAVKNTITAILDEYFPEIRTVFKYPLKGKASRQILRSCPFPALILAMGEAGILFQIKKAVKKTVGMKKVRDLMDAAKDSIGVQNGLNAAKMRLGWLLDELELMEKQLAEVEQAMETALRNTGYAEQMLGIKGVGVVTAASFLGEVGDPLRFQNARQIARYAGYNLVEDSSGKNKSGTCISKRGRKQLRSVLYQMAFTMVGHNTEMKLLYQYLTRRKDNPLKKKQALVVVSKKIITVIYSLLKKREAYDPALVLGTVRQEMLMAA

SEQ ID NO: 194089 - protein, 353 aa, unidentified
MAPVTYRPCNYNVFIGIDVDKKSFSFTTTDRDVMINRSKTIPANEDNLFRYIQNSFPDKNVLCGYEAGPTGFYLYDYLIQKGVPCIVMPPSSIPKPPDSRVKTNRIDSERIANCLRSGEARAVRVPDESYRDLRQLIASREQYACDIRSAKQRIKALLLYAHIDCPIKDSWSGACIANLKRIEAPGGIRERLNLLLEDLAYSRLKMARILRSLKAFSSAHKEIDRYRGYLETIPGIGMQTALTILARIGDPKGLTNVQEIGSFFGLVPSERSTGERVQRGPITHLGNNAARTLLIEAAWVAIRYDKELKEFYYRIHSRHHPACAAKKAIVAVARKLTMRIYSVLAEERPYIVR

SEQ ID NO: 194090 - protein, 309 aa, unidentified
MDHCAIDLGGKKSQVCLRSPDGRVLLEARYDTLSLPDFLRQLPHSRVILETAAEAFRIADAAKTAGHEVRVVPATLVRTLGVGARKTKTDRRDAQMLSEVSCRIDLPSVHIPSARSREWKTICGMHDALISSRTKLINNLRGWLRGQGLRLSSGSAETLAGRIAEIESLPEYVASQVAMLALLTEKIRTSEQRIEDLAKSDELCKRLMTVPGIGPSTAARFVAAIDDIRRFESAHKVEAYLGLAPGESSSSERQQRLSITKAGPSKSAEASASPRSPSHESWRESFTLFGATERLTSCARSRGALLQDI

SEQ ID NO: 194091 - protein, 380 aa, unidentified
MGWPGRAQRPRTTVVPDGEASKLKELTMHTHQQSTEPVATIGLDIGKNTFHLVGLDRRGAIAMRIKVSRNQLVRRLVNLPPCLIGLEAGSGSHHIARQIQSLGHDVRLIPAQYVKPFLKGHKNDYRDAEAIAEAVQRPTMNFVAIKTPEQSDLLSLHRVRSRLVRQRTAIINQIRGFLIERGITVRQGPGPLRKVLPEVLSSPPEALSPRLLHLISELDQDWRRLDDRLEVLSGEIESLSENDAACQRLMTVPGIGPIISSAVVAAIGTGSGFKQGRDFAAWLGLVPKQESTGDRTKLGRISKRGNKYLRTLFVQAAHVVLERRPAAAMRALWPWIAQASKRLAHRNLLAIALANKLARIAWAVLARGRDYEPRITPNAP

SEQ ID NO: 194092 - protein, 343 aa, unidentified
MEYYVGLDVSLKQTAICIVDRTGAIKHEAMIPSDPVSIAGFVESHTKSVIRIGLESGPTSTWLWTELNDMGLPVICIDARHAKAALKMQINKSDRNDAAGIARIMQTGWYREVRVKALDSHAIKSLLISRALLVKIKCDLENQIRGVLKNLGLVIGRAKMNTFVTRARELIEDKPTLIAIIEPLLIAREAVEKQVSDLDRKVMHLARNDAQVRRFMTTPGIGPITALCYLATIDDPTRFKKSRNVGAYIGLTTRRYASGETDWTGRISKCGDAMLRSYLFEAASVLLTRVAKWSALKAWGMRIAKRSGIRKAKVAVARKLAVILHRMWIDGTEFNWSSKETAV

SEQ ID NO: 194093 - protein, 362 aa, unidentified
MTTQDKNSITIGLDLGDRRHRFCVLDGNGKVTEEGTLANSRERLSELSKRYPRALIVMEAGCHSAWISRYLKEAGCEVVVSNPRKTRAIYQHERKSDRRDALMLARIARMDRALLYPVRHGSEQAQEDLLRIKLRDSLVRARVGLINAVRFTLKSLGYRITNPSTERFHKVIEGQIPESVKNVIAPSVQAIEELSLRIKVLDREIMTLAHNYTETAWLQQIPGVGPITALYFVLKIGEPARFERVRDVGAFLGLCPRRDQSGESEPQLRISKRGDVYLRRLLVSAAQYILGPFGPPSALREYGLTLAAGGTARAKKRAVVAVARKLSVLLLTLWKNQSAYEAFPGHEDKMRTSDRERLRSIV

SEQ ID NO: 194094 - protein, 356 aa, unidentified
MSSNIKYIGLDVHKEAISIAVLNNVGKLVMESIIETQAATLLQFLQGLQGELHVTLEEGGWAAWLYDVLKPHVHEIVVCNPRRNALLKEGSKSDQVDARKLAELLRAGMLRPVYHGEHGLRTLRELARSYQTISKDLRRVMNRLKALYRGWGIPCAGTQVYAPRYREQWLNKIRQAGVRRRAELFYQHLDGLQALRRQVRGEFLAESRKHKAVKVLRQIPCIGPIRAALLLALMQTPHRFRSKRQLWTYSGLGVETHDSAQHRYVNGRLQRCKKPPQVRGLNQNHNHEMKEIFKSTATNASRCAGPFHDFYADLLAKGMKPEMARLTLARKIAAITLTLWKKGARFDAEHLKAQAA

SEQ ID NO: 194095 - protein, 360 aa, unidentified
MSDGSKEQPKITAGLDLGDKYSYLCLIDTESGEVIEEGRLRTTPEAFKRHFCSEQPLRIAIEAGTHSPWVSRVLEEECGHEVLVANPRKTRLIYSNKRKTDEIDAENLARLARLDPKLLYPLKHRAEECQAHLAIIRSREALVSCRTQLVNHVRGAVKSFGGRLPKCPAVSFHNKAPEHIPEAFWPALGPILKTIGSLTERIREYDRQLETISKEHYPQTDLLRQVEGVGVLTALTFVLTLEDPYRFAKSRTVGAYLGLVPARDQSGDRDPQKHISKEGDEMLRKLLVSSAHYILGPFGSESDLRRHGEKIASRGGKNAKKRAVVAVARKLSVLLHRLWVSGEIYEPLYNAHRRGEQQAA

SEQ ID NO: 194096 - protein, 385 aa, unidentified
MAPPTRPRIVIGLDVGKSAHWACVVTREGEVLASGPIPNRENAIDGLYAQYPGALVVVDQVRNIGSLALSRAKLAGMPRAYLPGLAAHGASKLFAGDAKTDERDAMVIAKTALGIPDALLAVADRPPEIEAARSLAAQRDFLTCENTRSKNRLRSILLESCPEFEAQADLSDPATLKLMAAVGGPWSISGASPRAVGALTRGCRRAKVAALVESVGSSSRPHPAAVACEDRAVRLLARRISENAAEIESLTSKISALLAADETYRCLLTVPGIGPRTASELVISIDIADFADHDRLASYCGLAPRNRRSGTSISSVSASRQGNKRLKNLLIFSCNCLARSRNRWGEYYARCRNRGMPHGKALKAVARKRLKVIYAIMRDKVPYAA

SEQ ID NO: 194097 - protein, 355 aa, unidentified
MNSVKYVGLDVHQSTISVSVLNAEGKLVMQSVIATEAAAVLDCIEGLRGTLHLTFEEGTYSAWLYGLLVRRVARLVVCNPRKNALLKAGNKSDTIDARKLAELLRAGLLSPVYHGETSIMTLKQLGRSYIVLTEDTTRVMSRLKALYRSQAIGCAGKKLYGARHREEWVAQLTEGGLQRRAERLYKELDALQALRRQAKHELILECRKHTASKLLRTVPFLGPIRAALLIGWIQTPHRFRSKRQFWAYCGLALETRSSADYRFVQGQLERAKKPVLIRGLNWNHNHDLKYVFKAAATTATQKEGPFRQFYEALLAKGMQPAMARLTLARKIAAITLSLWKKGETFNPELLKPQAA

SEQ ID NO: 194098 - protein, 329 aa, unidentified
MKQVTTIGLDIAKSVFLVHGVDAAGEAVLRQKLSRSRVLEFFAKLPRCLVGIEACASSHYWARELMALGHEVKLMPAQYVKPYVKRGKNDAADAEAICEAVARPTMRFVGVKTPEQQSIMMLHRVRLILTRQRTQLSNALRSHLAEFGIVSPIGREGLDRLLTIVADTDDGRVPAEARASLEMLAVQLEGVKAQILANDRRIIASARATEVGRRLLEVPGIGPVLASAFVASVADPAIFKSGRDLAAWIGLVPRQNSSGGKERLGGITKAGNGYLRQMLMVGAIAVIRYPQRNSARRPWLVQLMGRRPTKVAAIALANKTARTVWALGT

SEQ ID NO: 194099 - protein, 418 aa, unidentified
MKLFVGIDVSSEKLDTCFLTDDDSLTVLAEMSLGNDVVGATTIKEKILACHEAWHFTQIVIGMESTSMYSFHPAMFFNEDEALRALPTVVTVENPFRIKQFSRMFDEDKTDKNDALRIADFLRIQRFTTSPIKEEKYMALQRLTRARYQMIGQLVEAKQHFLENLTYKCNTLTRELKASDSSTSVFSATLLSLFTEDYSLDDLAEMPLEDFASLLQEKGRGRFKQPEALAKTIKKAIRGSYRLGSVAQESIDAVLSAIAAQIRGLENSIQALDKSIEQLVVAIPEYQCLTSIPGVGKVYAAGLIAEIGQIDRFEDQTKLAKYAGLSWKVKQSGNYQSEHTPLTKQGNRYFRYYLVEATNSVRRHLPEYGEFYAKKYQETPKHQHKRAIVLTARKFVRLMDTLLRNHQLYTPPRSVLET

SEQ ID NO: 194100 - protein, 418 aa, unidentified
MRFIALDVHRDFSEVAIAEGGQVRLAGRVETTPAGLELFAQSLGADDQVVLEATGNALAIARVIEPHVARVVLANPKAVKGATQTAKTDKLDARTLAQLLAAGFLPEVWTPDERTRALRRRIARRAQLVRQRTREKNQIHAILIRNLKLRPPVTDLFGVQGRNWLSEQGLPDDEREMVEACLRGIDFLDREVAAIERALAELVLASPEMCRLMTLPGVNFVTAAGLLAAIGDAKRFPTARHLVSYLGLDPRVRQSGSEPARHGRISKQGPGEARHVLVEAAWHAARTTGPLRAFHERVAARRGANVATVAVARKLAVIAWHMLTRGEDYAFVRPSLVREKIRRLELMVGAERRQGRRNPVRVFATSEQHRLEKELAAQAELAYRRLMLDWTAQKKGTGAAPGRASSAARQGTAPHPAL

SEQ ID NO: 194101 - protein, 342 aa, unidentified
MEKIATIGLDIAKSVFQVHGIDVVGEVVVRKRLSRARVIPFFAKLPRCLVGIEACSTSHHWARELIALGHDVRLMPAQYVKPYVKRGKNDASDAEAICEAVTRPTMRFVAVKTPEQQSVMMLHRVRLMLNRQRTQLSNATRAHMSEFGIVAPVGRIGLDRLLAIVADKDDERIPPDARICLEMLGAQLTVVKEQILENDRRIRASARDTEVGRRLMEIPGVGPLLASAFVASVADPQVFKTGRDLAAWIGLVPRQNSSGGKERLGGISRAGNQYLRQMLVVGAMAVIRHAERHGTKRAWLIELMKRRAKKVAAVALANKTARMVWALMTSGEHYREPQVAHA

SEQ ID NO: 194102 - protein, 406 aa, unidentified
MRVYTGIDWSENKHDVVFMNQAGAVFAQLTIAHTVGGFLQLDAARQQLQVRPAECLVCLETAHNLLIDFLWSRGYVHVYVIPPSVVKANRGRQGQSQARTDPSDAELIADILRTDRGRLQPWHPDSVLTQQIRAQVSLVRHLTRDVVRTSNRLRAALVRYYPAALHVFSSLRTQVALDFIRAYPTRQAAAALSFAEFEAFAKAHRYPRPSQLRGNYARLQGPYPEALPETVSVFQAEAVQLAGLLLEELQANKEAKRRLKTLFDQHPDAPIFASLPGAGDLLAPALLAKFGDDRQRFPKAASVQALAGTCPVTVSSGKRCSVRFRFSCDRAFRDIAQKWAMCSLSQSLWAAAYWQQTRPRCHSDSHAYRCLANRWLSIAWAIWQKRECYDESYHLQQRALRSKKHP

SEQ ID NO: 194103 - protein, 451 aa, unidentified
MSSKKKEAAAPLPPPRVVRPDAAAIDVGGEFHVVAVPPERESEPIRTFGVYTDDLKTMAAWLRQCGVTTVVLESTGVYWMALCDYLEGQKFEVLVVDPRALARNLKKKTDVCDAAWLQELHAFGMLKGCFRPDPEVRHLRTLWRHRDHLITEAAKLLQMMQKVLVQMNVHLHLAVADIAGATGMRILRAIGRGQRDPRSLATLRDANCKKSVEEIAKALDGTWDAAHLFELKQLLKAWDFYQGQLQTCDRQYAKLAGALPDKSEGRPLPEAQKRVQTHRNAVTEFDAEEMVYKMTGVRVTDVDGLGASTVLTVLSETGPNLGAKFATGKKFAAWTTLAPRKHQSGRRTKFPAQTASRVALAFRLAARALINSKSVLGSFLRRLRARLGIGTAIRATACKLAKLFYRLVTKGEAYRRSSTEAEEAKQKERQVKALERKARELGLQVVPLPAA

SEQ ID NO: 194104 - protein, 336 aa, unidentified
MNYCGIDLASKASAICVMDRAGAVLEEVEIPTDADGFRVALSRWSELKCVLEASPLAEWAAQQVEALGHEVSVIDPRQAKAVTQTKKKTDRRDAHNLAQLGRTGWFTAVHRKSAEGRLLRTLLQARNGLVETGEAMNARIRGLLRAQGLKVGPVSEGKFAQRVGELCKSQSPSLWPLIKPLVAIWQQARRQAAQLHRRIRQQSREDEVCRLLMSVPGVGVVTASAYVATIDEPGRFETGEQVAAYLGLVPRVYQSGETEYRGRITKEGDKLLRWLLVEAAHVLLTRVRKSCALKRWGKKLEKRKGHGKASVAVARKLAILLHRLWVRGECFDWKRA

SEQ ID NO: 194105 - protein, 339 aa, unidentified
MGTYAGIDLHSTNNYIGVIDGNDKRLYSKRHGNQLEHVLKALKPFKKTLKGVVVESTYNWYWLVDGLEENGYKVHLANPAAIQTYSGLKHTDDKWDSFWLAHILRLGILPEGYIYPKEQRSVRDLLRRRLMFVRQRTAQLLSLQSMITRNRGFNYPGSAIKRFGEEFIDKLFHYDSTLAFMAKKNLSTIQYLGKIVTEIEVEVKSQLALKKEFKLLLTTTGIGNILGLTIMLEVGNINRFPKAGNYSSYCRCVESKRISNGKKKGENNKKNGNKYLAWAYVEAANHAVRNCKKAEKFFQRKMAKSKRVLATKALANKLTKATYYIMRDQVPYDVDKLFR

SEQ ID NO: 194106 - protein, 321 aa, unidentified
MNLKEKHYVGVDCHKDTIACYINGRFKEFKTDFKGFTKALEWVKKIEPNCAWAIEGAYSYGLTLSKFLLSSGCEVYEFNALVTAKARKALSISGEKNDMGDAKVISIFAKQVKMQEVSLKTIELKRLITTRRLLVKQRTEIILSIKNHCMKEGIILPFNSLTTKKAISWLLNCDDFNLNIMANNLKVQYESIKKLEEQIQKATPEKVNKLREITGIETLTASIFYTETKGKKMSKAEFASYCGVAPVECSSGLSTRFRNNKRGNRTLNSLLYSISIFQSRFDEEGSKYFQKKLAEGKSKRLARKCLARQVSNLIWKILFAA

SEQ ID NO: 194107 - protein, 373 aa, unidentified
MGSIAYVGLDVHQEDVKVAVFEQTGETPVVETLVSNTEDRVRTVVRKLSKRWELRCCYEAGGCGYVLQRWLASMGIACVVIAPSLVPNKPGERVKTDRRDARKLALLLRAGMLTEVHVPSPEQERGRGLVRLREVMRREVLRSRHYVLKFLQYRGLAYRDGKNWTQRHWDYLRRVQLDGLDAVTYRELLTLLEFKLDGLKRVEAQVAQLSTEEPYREVVSRLRCYRGIETLTAMVVVSELWDIRRFPTAESLMSYLGLVPSEDSSGGRQHRGSITKTGNAYCRRVLVEAAWHYRWAPRTGIRLKQRQRGQAPETIKRSWKAQYRLHAKYWRVSRHSEKRKAAVAVARELAGFIWAEMHAAARESVPAVTSDAA

SEQ ID NO: 194108 - protein, 407 aa, unidentified
MKEKNAIEFEQVVEIGCGADVHKDVIVVTVLGKDTKPETRSYKTYTSSLIKLREWLLSKRVTHMAMESTGVYWKPVFNVMGDEIKILLVNARHVKNVPGHKTDKGDSRWLAKLLLSGLLKGSFIPERPIRELRDLTRYKTNLIQMISSERNRFMKTLEDANIKLSSVLNDVFGVTGTKIMNHVLVFENYRPEELIQYVHGKVKAPRPEIMEALTGYITPHHRFMLKTILENISQIERTIRTVEAHIEACIEPYKVERELLETIPGVHKESANRIIAEIGVDMSQFPDQNHLASWAGVCPGSNETAGKNKSGRITHGNKYLRSLLVESGWAASRTKNTYMSAKYKSLVGRRGKKKAIIALGHKILIATYFILRDKVQFKELGEDHLNNYRKDRLIAYYQKQLEKLTAA

SEQ ID NO: 194109 - protein, 403 aa, unidentified
MRLFAGLDWGGSRHAVCVVGDDGAIAAHFEVSHDAEGLRELRVQLAKLAPATEIPIAIERPTGLLVDSLVEAGHAVVPIHPNVVKACRPRYRAVGAKSDLGDSYLLADVLRTDGHRFKPLVPQSDAIKALRAFVRTRDDLVAERVGIANQLRALLESFWPGAIAIFADIDSPIALSFVQRYPTPKAAGALGVKRLASFLAQHQYCGRRPASELLDRLRAAPVGLARGAEANAKGELVRVLARVLETVVAELVKLTSRIEHEIAQLPDGKVVMSFPRAGRINAAQILAELGDVRERFQTEEQLAAEAGVCPVTYESGKSRGVGFRWACNHRLRAAVTTWADNSRHTSPWAKHVYASARARGCDHPHAVRVLARAWLRVLWRVWTARGAYDPAKHGGMKRLAPAA

SEQ ID NO: 194110 - protein, 320 aa, unidentified
MRNTVGLDISKLTFDATAIVGNAEYSAKFDNDSKGLDQFSDRLKSLGCQNLHICMEATGNYYEEVADYFAQYYSVYVVNPLKISKYAESRFKRTKTDKQDAKLIAQYCRSAKESELVKRQKPTDEQYRLSRMIAAYAQIKSECAAMKNRHHAAKDEEAAKAYAEIIKAMNEQLEVLKEKIKEQTEKPNCKEGVKRLETIPAIGRMTAAVLFHHLTSSKFETSNKFAAFAGLSPQQKESGTSVRGKGKLTKFGNRKLRAVLFMLTMVAYRIRAFPDFIKRLEEKKKPKKVIIAALMRKLAVIAYHVHKKGGDYDPSRYKSA

SEQ ID NO: 194111 - protein, 424 aa, unidentified
MKPWQEFTHYVGLDWAKDHHSVVVVDRDGNIVADLEFEHSAEGWKSFAEKTAAWPNLAVSIETSQGAVVDQLLQRDYTVYPVHPVAAQSYRQRKAPTGTKTDHLDAWGLADALRVDGHGWKALQPMDPLTQELRLLCRDEMALIEQRTALVNQLQQALLEYYPAALEAFEDWTKPSAWEFVLGFPTPQVLSLAGKRKWDKFLHSHKLWRTGTVEKRLEVFARADQFKASRAIVQAKSQLAVSLCRVLITLSKQLELYRQQIEELFEKHPDHDLFGSLPGARKVLAPRLLAALGSDPNRYGSQEVLQTIAGTAPVSYQSGKINHVHIRWACDKFMRCTVHLWANCFRRSSGWGQAYYRKKREEGMSHACALRCLGQRLLKIVFRMISDKAPYDAELHARNQQKHGSWVLKLVTKSTGSDRGEQLA

SEQ ID NO: 194112 - protein, 499 aa, unidentified
MAKRKQSTFERLKNGTLNRKQRKQIMRRLSSDDPGLEIVHRHVAGIDVGNESHFVAVAPGDDAQPVREFGSWTEDLHKMVEWLKACGIQHVVMQSTGVYWIAVYDVLEKAGFQVCLANARDTRNLPGRKSDVQESQWLLKLHTYGLLRNSFRPPEEIRMVRTIWRLRTRLVQDAAREIRHMQKALTTMNVQLSNAISDISGTTGLAIIRAILQGQRDPFQLAKLKDYRIRAGEEEIARSLEGNWQEDVLFELRQALGTYDFHQQQIADCDVQLQKYLAVLPDHAPAEVVKSEAGTGEQSENAPAAEKSEKKQKKSGKKSGKKSQRNQPKFDLEAEFTRICGVNLRCIDGVDVMTIATFVSEPGTDMSKWKTENHLVSWLKLSPFQATSGGRPVKQKRPKFRNRVADVLRMAAGSLVHSDSYLGARYRYLSSRRGAPKAIKAMAAHLARIICRMLKHGQAWVDRGAQQHEAKRAERERLSLQRKAAALGFRLEPAARVVH

SEQ ID NO: 194113 - protein, 391 aa, unidentified
MICVGIDVAKDKHDCCILDSEGTTLADCFTIPNNLDGFKRLLQTIKDCTQKSDKIKVGLEATGHYSYNILGFLLDNDLPVYVMNPLHTNLYRKSLSLRKTKTDRVDAKTIATMLLSDVDLKSYTDTAYHNEELKSLTRYRFDKVQERAKLKQSVSRLVTILFPELEQLVSSIHGTSIYALLSEYPGAKQISEAHLTRLANILVKTSRGHYRKDKATHIRDAARISIGSVMPAKSLELKHTIKLIQELTSEINEIEDAIRKIMDELKPPILSIPGMGFYSAAMILAEVGDFSNFNSPDKVLAYAGCSPSTYQSGKLTNCYAHMEKRGSRYLRYALYTATKYVCYWNPVFTEYLTKKQAEGKHYNVALSHATKKLVRLIYALQKSGKAYLAIT

SEQ ID NO: 194114 - protein, 367 aa, unidentified
MKKHTSVDQSLSSSDLSICTTVAVDLAKRVFQVAGEDDLGQVHFERRIKSREGFYEFLRQLPPHMVVLMETGPGAQAWARQLQEQGNVARILPAGPVAKHRIGPKNDRNDALAILSAGRNPKILAVPVKSATGLAMQALHRARQGYVRRRTAISNQMRGLLLEHGVALAQGDVAISQKIPRLLEDATQPVPHLLRELIDELLAEWRHLGERINVLTGRLEAVANTDQTAKRLMTVRGIGPIIATALVAKETQPERFANARQFASYFGLVPEQHSSGEKVRLGDMAKRGDGYIRSLMIQGAHSVLQQVRPDSEQPDDRRLLRWLSRLGRKQTAVRLANRNLRIVWILLQNDQTYRRQPANGQQAAMSH

SEQ ID NO: 194115 - protein, 337 aa, unidentified
MFFAGIDAHLKYVQVAVLDRLGKLTLKTRLSTREPQQLLEALAPFRPLDVVVETCPFWPWIHELLVPAGIRFHLAHAKELRAIAAAPQKNDAVDAELLARMLLSGLIPEAYPRPVHQREQLRLLRHRAALVRQRTRLASRIHSQLHQQRLSLPREKLLRQATREWLHTTAWPQLTDEQRALVTTHLELIDQLTPMIRALDRRIGAAAAEDSTATRLATIPGIGPYRSLLLAAELSPIQRFPRPEQLVSYAGLAPVTRSSGGHTRHGSIPRGANRWVRGALVSAIPSHVQHAPESTITATYEQLKARLGWRVARVATARKLARIIYHMLQRYSLGREW

SEQ ID NO: 194116 - protein, 366 aa, unidentified
MKKSLVYVGLDVHKDSIVVAMAAGRQPAVVVQRISSDWVQLLKVLDRLGAKERLRVCYEAGPTGYELARRLNATGICGIVVAPSLIPVRPGQRIKTDRRDARQLADLHRAQQLVEVHIPEVETEAMRDVERARDDAKNAERAARHQLDKFLLRQGRSWSRTKWTRLHWAWIERQEFSAEAFRRVLADYMRAVREATARVERLEKDIEELVETWALAPLVKALQALRGVRLLTAVILAAEIGDYARFGTPRELMAYLGLVPSEDSSGQRRRQGRITRTGNGHVRRILTEAGWNYRFYPRPSRAIRKRRESLPAKVVAIAEKAEQRLSRRYRDLIQKGKSSQKVVTAVARELAGFVWAIAQEVTSKAA

SEQ ID NO: 194117 - protein, 409 aa, unidentified
MRYYLGVDWADQEHAVWSLDDAGQKVAARMVPHTAEGLSEWGRELDEWRGQEIELWAAIERPEGRVVDMLLDHGVVVYPINPKALDRARDRFRQSGAKSDLFDARVLADFLRTDHAHLTALRPSSEAAQELKALTEDCQRLIRQQTRLVNQLTATLKAYYPRALDVAELPTALARGFLQAFPTPETVTRLTARQWQRWARAHRLRETRTAELWALLQQPQLPVPAHVVRAKARLMLALVAALTPVVEAIAAYREAIEDCFADMPAAGWARTLPIGEHGITVPTLWARLGDAPERWASFRHLQAQAGTVPVTKRSGKQQVVIFRFACDKHLRFVVDQVAFLSLQRSAWARVYYDQQRARGHRHRHALRALGAKWLKIIFVMWQRQVPYDESHHLATMARQALRHPEKKIA

SEQ ID NO: 194118 - protein, 409 aa, unidentified
MRPILRSCCGIDVHKSMIKACVAKGPLNKSPKIEIRTYSTMTSDLLKLSEWLKENKVQAVAMESTGVYWKPIFNILEADFPVSIANPKYLKKVPGKKTDVSDSEWIATLLRCGLIPKSFIPPMAIRELRDLNRTRRKMVEHMASEKNRLQKVLEDANIKLTSVVSKVDGVSSMNMIQALLTQDEISREDIAAMVHGKLKNKIELLVQALHGRLTDHHRYLLRLHLKQIAFLADQIKELDDVIQKKMKAFKKESDLIKTVPGIGDTTSSAIIAEIGTDMSQFPDEAHLSSWAGICPGNNESAGVKKNGKIRKGDKFLKATLCEAAWSASKKKGSAYSAYYNNIAKRRGKKRALVALAHRMLMDIYRTLKTGEPYVDEGAEAVFERNSSGRQKSAIRFLEKAGYAVTKASA

SEQ ID NO: 194119 - protein, 358 aa, unidentified
MKEETAGHPGVVGGVDTHKDLHMAAVVDEHDRVLGSECFATTRHGYRQMLVWMRSFGELLRVGVECTGTYGAGLLRYLQHAEVTVLEVTAPDRSDRRKRGKDDTLDAENAAHAAFAGVRTVTPRTRDGMIESLRVLKVCRKTAVAARRVALQLIHNTVVCAPDELRESLRTMTRMQLIRTLAAWRPDLSDYRNLTSAYRITLKSLGRRYLELHDEIADLDVMIAALVNELAPDLISRNSIGYESAAQLLMTAGDNSERLQSEAGFAALCGVSPVPASSGKVTRHRLNRGGDRAANSALHIIAIGRLRTDPRTKAYVERRVSEGHSKLEAIRCLKRYIAREVYYVIRKRNHQIGQVQVA

SEQ ID NO: 194120 - protein, 448 aa, unidentified
MKRTPKMPENGQRLQGKTSIGIDPAKNKHQAVILRPDGSVCGRSFSFETNHTGFTETLPQRIQQRLATLDETDVVYAIEGSCALWQNLAFHLSEQGQEVVLISPLATYHARPSITGDFSRTDQKDAELIARLAQQGSYRQMPGHTDHERALHRMAICYDKLRKSRQRHYARLRSLVERLFPEFLSVLTLDTKTARYLLSEALLPDEFLSLEPGRTVLGMQRASRKQHGRATLLRLQELARHSVGQTRGPAERGVEHLAAETWLAVLERIEAQIKTLTEALVEAASESPCFAPIKSLRGISSLMAALFIAELRDPGLFTHWKQIEKMAGVNLYVSDSGQYRSRRRISHLGNSRLRWLLYQMASETSKYVPEVRIKYLERRLKHGGSRTKHLVACIPQLLQLLMALMREGRCYEQRPESLAQMQQLETRYQAVQKSKGKRRAQGTRQKAA

SEQ ID NO: 194121 - protein, 375 aa, unidentified
MRHRLGQLDSYLERIAGPAGKDQLACIVETTHGLLIAHLLEQGWAVYPVNPRTVERRRAPWGAKTDTSDAYLLAKTGRADCADLRRLNPDSEQVQELKTLTRDQDGLIQMQTRLVNQLTACLKAYYPVVVELFGKLQQPSTLAFLRAYPTLQAARAATVEELAATLKQAKYPGARQKAQQIARDLQQPALQANEVTTRTKSRLLPGAWALVDQLEPLLKQIAEYDKEIERLFLRHADSELFQSLPRAGQRLAPRLLAELGDDRSRYESAASLQALAGTSPVLFQSGTYQKAHRRLGCIKPWRNALQQFAWQSTHQEAWARDYYQRKRAEGKSHTVAVRALANVWARILYAIWKTKEPYQTTTFEQARQAHAPRAA

SEQ ID NO: 194122 - protein, 410 aa, unidentified
MSLFCGIDWATDHHDAAVIDGDGVMVARARVSNDAAGFAQLLTLLAQAGDSAKSPIPVGIETDRGLWVAALRETGRLIYPINPLAASRYRTRYAVSGAKSDATDAVLLANIVRTDAGAHRPLPADTELAQAIRVLARAQQDAVWSRQQISNQIRDLLKDFYPAAIAAFAGLSDGGLARADARTILAAAPTPAQAAQLTPARLRRLLVKAGRQRHLDRDVERLRDVFTDTYLHQPALVENAMGIQLTALLGQLEAACTAVGQLTEAAIAHFEQHPDAEIITSFPGLGMLAGARVLAETGDDRSRFADARGLKAFAGSAPITRASGKKTVVLHRHIKNRRLAAVGPIWALASLRASPGARRHYDTRRAAGDWNRQAQRHLFNKFLGQLHHCLQTGQLYDEHRAFPPPLPLAA

SEQ ID NO: 194123 - protein, 368 aa, unidentified
MLSIGIDVSKGKSTVCGMKPGGEIVYTPFEVQHTREGMSELVSLLRSSGEEVRAVLESTGSYHCPVVTALLENGIFVSVVNSLRMKRFCSQSIRKVKTDRIDAMQIALYGLAYWQELQPARLPEDTYRELQLLARQYYQMTSLLIKAKVDFNAICDQVLPGMQELMSDHAGRHKLSNFVLRYCHTTHILEMGETRFRKDYCKWAEKKGYRNCERMAALIFATAQNGIPVLPNAPSTQIVITEAIRVLHTVEASRDAILTQMQALAKTLPEYSLVREMPCIGDTLAPRLIAEIGDVRRFHSKRALIAYAGIDAPPYQSGKFCANNRHISKRGNRYLRKTGYEVMQSYGDKHAERGICKDSRWYKSHSSL

SEQ ID NO: 194124 - protein, 343 aa, unidentified
MTKISMIGLDLAKNVFQLHGVDASGAVVLKRQLRRAAVEKFFAQLPPCLVGMEACGSAHHWARVISRYGHEVRLMPPAYVKPYVKRNKNDGRDAEGVCEAVSRPTMRFVPIKSIAQQATLAVHGTRALLVRQRTMVANALRAALSELGIVAAQGYEGLRELMARLEEPSDEIPESMRGALVVLARHWQALDADERVLEQQIAKAVRCDRDAKRLMEVPGVGPIIASTVLAKVPDAKMFRSGRDFAAWIGLTGKDHGTGGKHRPGRISKQGDHVLRALLIGGASAHLRQQMARGVSDPWLRDLLARRPYKVAMVALAAKTARIIWAMLVKGEPYRDRASAPAAA

SEQ ID NO: 194125 - protein, 347 aa, unidentified
MTIVGPARAVTGGVDTHRDVHVAAALDAVGGLLGTAPFATTTAGYQALLSWLESYGDVAKVGVEGTGSYGAGLSRHLQAAGVIVLEVNRPNRAERRRSGKSDPLDAIEAARAALSGKAKSIAKTKDGAVEAIRALVVAKRSARVARTAALVQMRHLVFGAPDELRSRLRGLNVRSLTAEAARLRPARRGDPVLMATKASLSSLGRRVQGLDDELADLDARIKTLLTGHCPDLLGLFGVGPDTAAALVICAGDNPERLHSEAAWAHLCGVALIPTGSGQSSGRVRVDYGGDRQANAALWRIAMVRVAHDPETTAYFERKRTEGRSKAEIIRLLKRYIAREVYRYLPRG

SEQ ID NO: 194126 - protein, 337 aa, unidentified
MRFCGIDLHSNNSVVVVTDETDKVLVSRRCPNDLQGILALLAPHRDELAGVVVESTYNWYWLVDGLMAEGYDVRLANTVAMKRYDGLKHSDDETDAAHLAHMLRLGILPTGYIHPPAERALRDLARKRIQLVRSRSQHVLAVENILARSTGSRPSAAAIKRLAPTDIGTLGLATDVALAVQTNLAVIATLNLEIGRIEARLLEGVKLRPDYVRLKTIPGIGEVLAIVIMLETGDVSRFAQVGNFASYARCVDSARYSNGKKKGEGNTKNGNAYLVWAFVEAANFARRYSEEARRFFERKKARTNSIVATKALAHKLARASYHILKEKQPFDVKRCFA

SEQ ID NO: 194127 - protein, 381 aa, unidentified
METVYNKKDQKPINGEVKASYFGVDLHKDQITWHCIMLMTNGELVRTTGVTSTDCITTDFVSMLTKNNSYVIVEASGSTFFFHSLVSAHCTKAIVINPLAFREMYMTGKKTDKVDAKKLADRLMYHIEMGDADDGFPEVFVPDAEAQMVRKLVAAYDSTVKKITQCKNRIKAILRGKIINTIGDTVVNYMEKVLEHPRLDQADRIMMKALKAEYDTLCTQKEALKDAIQEIGVKRFHAEIKVLISVAGVGILGACVFMSDIISVDRFKSVKHMTSYLSSVGKVDSSGNTTRNGGLNKRGRKASYRFILQGLEHIVNSNVMLQAFKERHKGTKTNKVRAAEVRKTFVAMYFMLKNNEPYRYTNKSLHNKKIVEVNKIYEKAA

SEQ ID NO: 194128 - protein, 417 aa, unidentified
MPYTVAGIDIHKKVLMVVVAIAGEEAVDPAGEAIEFECRRFGTGAAERNHLVGWLRERNVTEVVMESTAQYWKPVWLDLEPHFAKLHLAQAHSNRAPKGRKSDFRDGKRLTRRLLADELILSFVPDAEQRLWRTVTRGKHQLIRERVRLQSQLEALLEEARIKLSSVISDLLGVSGRRILQAMADGETVPERLAELGDDRLQCSKEELVDALNGSLEPIHRQLLRLYMERLHLLDQQIDKLDLMTAAALKQHQDAVIRVAEIPGFGVDSAQQLIAEMGVDAGAFQSAGNFTSWAGLCPGSEESAEQNHSSRSAKGNRFVRRILTQAAQAAVKKKGSYFQTLFRRFLPRLHYNGAIWAIAHRLGRLVWKILHDGVSYIEQGQETNPAAKKRRAQKMVQALRKLGYAVALTPIPDPSRG

SEQ ID NO: 194129 - protein, 340 aa, unidentified
MHATMIGLDIAKNVFQVHAEDASGHLVLRKRLSRAAMEGFFAKQPSAVIGIEACGSSHHWARTLSAMGHTVRLIPAGYVKPFVKRNKTDARDAEAICVAMQRPGMRQVPIKSVDQQAARGLETARDLLVRQHTQLMNAIRGLLAELGVIASQGVSGFTLLCAKIDAGDPAIHPVLRPALQAMLEQWRAVGAASTLLEAQIKARAKTDATMRLLMTIPGVGPLTAHAIVAAIGDGRQFSSARDFAAWAGLTPREHQSANRRREGSISRQGDAGVRRLLTLGASSLMRHLRAKPEKASVWVRGILARRPMKVAVVAQAARTARIAWAIMRSGQTYRAAGAAA

SEQ ID NO: 194130 - protein, 351 aa, unidentified
MPRTTTLHAVTAIGIDMGKNTLHMVGLDSQGAIVLREKVSRVRIASRLANLSPCLIGIEAGMATHYVARELAALGHDVKQVPSSYAKPFRQGHKNDFRDAHAVAEAVQRPTTRFVPAKTNEQLDLQALHRVRSRLVSERTALINQIRGFLLERGIIVRQGLRFLRQLLPDILAKRTDVLSPRMIRIVVDLAGDWRQLDERIKTVTDEIEVLAKSDDSCRRLMTVPGIGPIISSAMVAAIGGGAAFARGRDFSAWLGLVPKQMSTGDRTILGRISKRGNAYLRMLFMQAARVILLRPANWPKHGFGCWLVHAAQRLHPNVLAAALANKLARIAWTVLTQERSYEARVTKAVA

SEQ ID NO: 194131 - protein, 279 aa, unidentified
MTEEKRRYVGIDLGKREYTMAVIGKNGKMSIHLGKTSAQARQTLYKKLEKTDKAAPEAGNLAFKTAQEIIQQAGSEVRVLNAAKLPFIWDAPTKTDKEDAMKPAHLIEERRDEKLPLAPLPSGKEMEMRKITANKDRETRNRTRHINRLHSIFHNQGHTEIVKKDMATAERRREAVKLLTGIDREEAEWLLKYLELHEQRIKELEDTIKGEAKNNEGIKRLQTISGIGPITAYAFVAHVGDGSRFSAGAQVSNYIRFVPRPDYSGTIKRHGHITKRGNG

SEQ ID NO: 194132 - protein, 351 aa, unidentified
MMIIGVDYHPGFQQIAFLVEETGACGERRLNHSDGEAENFYRDLKARGISVRVGMETTGFSRWFERLLAELGFEVWIGDAAEIKTRRAKKQKTDRLDAELLLKLLLEDRFPRIWVPSPENRDLRQLLWHRHRLVQMRTRIMNQLQALAMNENRYWKGKLWSERGRAELEKLPLAPWTSRRRQELLELLDRMNPTIEELTAAATLEANKRPEALRLMTHPGVGPLTALAFVLIIGTPERFGCAKQICNYVGLIPSEDSSGGRQRLGHISKQGSSLLRFLLVEAAQAAVRCNADWRRRYRHLAMRRQRNIAKVATGRRMGARLYWLWRNGREYSPSLEFGSHAGKLGTGNGVQ

SEQ ID NO: 194133 - protein, 393 aa, unidentified
MQSVLAIDVAKGKSMVALINSCGEVLIEPYEISHSIKDFSNLLNRIKQLKLDNISVIMESTGIYHRPVERFFLENNFKVYTINALYSKMYKRNLRKTKTDKLDCLSLSELYFTNNFKQYIRPDNIYLNMNALARQYFALDQLCANLKNRYKNLVYLCFPEYELLFKKEAIYSDIALSFIADYPHTEIISNTRIDHLQHYFKNNNYKRWKQKPTLIKEAAKNSYPSVSKDDEIVSDLSQLAKLIRNYQNEIDSIKLKLINYGKQTKYFTAINSIFGIGEFTASIMIAELNDINRFNNIKELTAYCGLDPSIKQSGKSINIHGPISKSGNKYMRKLLFVSCLNIIRLSSKCHVKNDIEIYYRKKRNEGKHHYVAMIACTTKLLRQILALCKQLDK

SEQ ID NO: 194134 - protein, 341 aa, unidentified
MITVGLDVHRSRTNAALLDESTGELLSSRSVPTAEVPELIASLPVPVRVVMEAGTTSMVLARTLKSCIDDVSVVNCTEARRQLKSMATAKTDRIDAENLAVAHSKGRLEYGFIWVPDPLTAELRVLTRTRIRLVRLRVSCQVQLRNVLDQINHPRVGGSMTSQATRRWLEELDLRSSESEVVDAFVAPMDKLTERIDLLEAQIGALSSDCEMCALLMTLPGVADVLAPTMRAEIGIIERFPSARHLASYSGLPPATAESGGRDSGRGMQSDGNRWLRWAFIETAQHFAYASATQELSPVKRFHRLAMRKHRNVAKVALANELTGIVFAMLRDRRPFDPGLL

SEQ ID NO: 194135 - protein, 411 aa, unidentified
MRRVIGMDIHRTFAEVVFWEDGKLHPAGRVSMTRAGLEGFGRTLDKEDEVVIEATGNAMAVVRVLAPHVARVIVANPLQVKAIAHAHVKTDKIDAGVLASLRAANFLPEIWLPDADTERLRRLVARRNQVVRHRTRIKNEVHAILHAYLIPPCPHADLFGRLGRIWLARQVIPGDERAAIERHLRELDRLGEDLGVLDREIAQAALNDPAVKRLLTITGINLIVAAGLVAAIGNVRRFPDPQKLVSYVGLNPRVRQSGLGLAQHGRISKRGRSHARAMLVEAAWAAAKAPGPLRAFFLRIRARRGHQIAAVAVARKLAVLCWHLLTKSTDYQWARPGLVANKLRAMELQAGQPARKGNKRGAAYTYNIKEMRDREIELARHAEQAYERFVSRWQRHGNKKQRTGAANEERR

SEQ ID NO: 194136 - protein, 403 aa, unidentified
MNNVAGIDVSKGKSMVSVLRPFGEVVAKPFSIGHTGSELKELADYLKSLDGETRVVMEHTGRYYEPVARFLHDEGVFVSAVNPKLIKDYGNNTLRKVKTDKADSRKIARYGLDNWAELRQHTPMDTIRMQLKTLNRQQSLYSKTKTMMKNNLIALLDQTYPGVNALFDSPVREDGSQKWVDFATTFWHVDCVRNMSLTAFAERYRKWCKRHGYNFSQSKAVEVHAGAQDLIAMLPRDALTKTMVRQAIDALNAISASLERLKAEMQALAAQLPEYPVVMAMHGVGDSLGPQLMAELGDVTRFTHRNAITAFAGVDPGADQSGTHEAKSTRVSKSGPPELRRALFLVMDCLLKTMPQDDPVYRFMDKKRAEGKPYLVYMTAGANKFLRIYYGRVKEYLASLEGN

SEQ ID NO: 194137 - protein, 353 aa, unidentified
MSISPLPSFSESRWTCGLDISSKTFTARLLDWQGKPCGSVQDFTNNSSGFQSFEKWLKENGVVTSVKRGVDGSPQQLLIVMEATGVYWEECAIHLHGRGFRVNVVNPSQIKAFARTTLRRIKTDATDADLIARFAFSVPLPVWTPPDLDLENLQLIMRQRAALVDMLTEERNRLHAYNRRPQVPSSVIKTTREHIAFLESKIDEMEDSFKDDLKKSPQWQKSFELLTSIPGIGEVTAAVLLTETGAFGSFLQSRQLTAYAGIAPAKFSSGTSVNRKAQISKIGNSRLRRIVYIAAWSAGQSNTFLGDFYRRLIARGKPGKVATVALARKLLVLAMAVVKSGIPFDKSYGLAPA

SEQ ID NO: 194138 - protein, 315 aa, unidentified
MRMAQISPKVGIDCSDARLDIHIFPLDIVFSVANDQEGWNALDRRIAAVNAEIVGLEASGGCERDVIRFLQERGYCVRLLDPFRVRQFAKAAGKLAKNDRIDAAIIAEFVAVMRTRPLVRHKHLEKLTELVTARAQLVEQATVAQNQARRREHTLLRRLDARRAKTIQADVKSIDAQIARLVDADDALKAKSTILRSMKCVGPVLAHTLLALLPELGQLTRKQIAALVGVAPFEDQSGKRQGVRYIQGGRPAVRAPLYMAALVAGNHNPVFKALKERLRANGKKPKVAITAVMRKIITTLNAMLRDAKKWKNAQA

SEQ ID NO: 194139 - protein, 281 aa, unidentified
MKKISTMQAFSNEILKEQKLTIGVDQGDRWSFYCVLDEAGKILLEQKVSTTPEAMKQTFGKIPRSLIALETGTHSPWVSRLLTELGHEVIVAHAQKVELITKSNRKDDRHDARTLARLARIDPELLGPVRHRSAKAQIHLTVIRARAELVSARTALVNAARGLVKSFGERLPKCGTYQVSEKLAAELSAELRDVLVPLLREVESLNERIKEYDERMEKIARESYPQVELLKQVKGVGTQIALTYVLTIEDPYRFPRSREVGCFLGLRPGRRNSGESEPQKK

SEQ ID NO: 194140 - protein, 374 aa, unidentified
MSKQKIISEQKNRLYMAMELSKKIWRLCFGDGKRERQRTVPAGQIHSLMEEIAKAKVKFNMPPNTPVTSCYEAGRDGFWIDRMLHKNGIDNVIMDPASIEVSRRARTRKTDRLDAGRLLRLLLRAKLWGEVKVFSSVKVPSEEQEARMRIGRERERLVKERTGHRARLRSLCNLHGITIGNPARVKLEELRDWAGQELRPEVAEELRREQERLIMIEEQIKGLEAEQAKAVELAENVADEKAQKLQRLKSIGMQTGWTLSNEAFGWRTFRNRRAVGSFAGLTGTPFDSGESLREQGISKAGNSRIRTTMIELAWSWVRWQPDSALTQWFVDRCMAENTSRAKRKAVVALARKLLVALWKYVEHDIIPEGAILKS

SEQ ID NO: 194141 - protein, 320 aa, unidentified
METQKKQVVEFEQIVERGCGMDVHKETVVATVSGTGIKQETRTFSTFTSSLIELKEWLKILGITHAAMESTGIYWKPIFNILEEDFEILLVNARHIKNVPGHKTDKKDSKWIAKLLLSGLLKGSFIPPKEIRELRDLFRYKRKLTGQISSEKNRLQKILEDTNIKISSVVSDTFGVSATKIIDAMLAGEQDVEKLVALCHGRLEIKKEQLKEALVGNITAHHKFMLRTIKESIFNIEKVVKKVERQIDKQTKDYQVEIELLQSIPGVGKDTAQGIVTEIGVNMDIFPNEHHLASWAGMSPGNNESAGKKKVDAPLTAIRI

SEQ ID NO: 194142 - protein, 391 aa, unidentified
MIYVGIDVAKDKHDCFITNSDGEVLFKAFTIANNLDGFNNLYRKIESVMEDVTKVKVGLEATGHYSYNLLGYLIDKGLPAYVINPLHTNLYRKSLSLRQTKTDKVDARTIASMLMSDVNLKSYSDTSYHNEELKSLTRYRFDKVKERAKLKSSVSRLVCILFPELEKLVPQLHMASIYAMLSEFPGAKHVANAHLTRLTNLLSETSKGRYGKDSAITFREAARASIGSNMPAKSLELKHTIKLIQELDSEIDEIESEIKIIMDETNSPILSIPGINYRMGAMIIAEIGDFNRFDSPDKILAYAGFSPSTYQSGQLDGCYAHMEKRGSRYLRYALYNAAKYVCHWEPTFAQYLAKKRAEGKHYNVALSHAVKKLVRVIYHLEKSKQQYIQAA

SEQ ID NO: 194143 - protein, 382 aa, unidentified
MQTIDAINPTILLAIELSASTWLVAARVPGLEKPHLHRIDGGDTAALLAWISSLQARAARGLDATIGVVCCFEAGRDGFWLHRLLTAHGVVCHVLEPTSILVNRRARRAKTDRLDAEGMLRVLAAYLRGDHQACSMVRVPTPEEEDAKRTHREREKLVQERLRIENRIEALLFTQGIRKRPSLRSWERDLAVLRTGDGREIPRHLRAELDRLRRRLVMTLELIREVEAERDQAAKTKPQDRACHKIAALSRIRGIGENFAAVLTREVFYRSFDNRRQIASYVGIAPMPYQSVGMDRDRRISRAGNPRARTTMIQLAWLWLRYQPGSELAEWFRERVGTLAGRTRRIAIVAMARKLLIALWRYAETGVIPAGAEIRAEITVAA

SEQ ID NO: 194144 - protein, 431 aa, unidentified
MVSSGSTLVAPVLGHHRSRRKGEVMLFVGDDWAEDHHDVYLMNDAGSHLASRRLPEGLTGIGELHDLIAEHAQRADEVVLGIEKDHGLWVTALATSGYQVYAINPMAVARYRDRHSVSGAKSDAADAKLLADLVRTDRHNHRLLAGDSVQAESIKVLARTHQNLIWMRARQISTLRASLLEYYPAALRAFPNLGDRDRDKDALAVLGRAPTPEDGARLSLSKIVAALKAGGRQYAVDKRAREIQPLLRGQHLCAPAAVNAAYGATTRATVAIVVELTNQIAAVETELAEHFRKHPDADIYLSLPGIGVILGARVLGEFGDDPNRFTTAKCRKNYAGTSPVTVASGRKRAVLARHVRNDRLYDALDRWAFATLKCSPGSRAFYDQHRAAGDTHHQALRALANRLVAILHGCLRHHRAYNEDTAWAHRTPTAA

SEQ ID NO: 194145 - protein, 360 aa, unidentified
MAKTKAVHSSYVIGGVDTYKDLHVAAVVDQNNCVLGSEFFATTCQGYRQLLAWMASFGTVKRIGVECTGSYGAGLLRYLQSAGVDVLEVTAPDKMERRRRGKSDTIDAECAAHAAFSLIRTVTPKTRGGMIEALRVLKVCRKTAVAARRTALQMIQMNIVSAPDELRDQIRSLTRMQLIRTQASWRPDVTAYRNVQDAYRIALKSLARRYLELHDEIADLDVMLASIVDELAPELIKRNSVGYECASQLLITAGDNPQRLHSEAGFAALCGVSPVPASSGKKNRHRLNRGGDRAANSALHIIAIGRLRTDTKTQEYIGKRVAEGHSKMEALRCLKRYISREVYTLLRNQNRQINSTQITT

SEQ ID NO: 194146 - protein, 427 aa, unidentified
MSYRIAAVDVHKKMLAVVVADVAGEGDYQFERRKFGATPGELHVLAQWLDQQEVEEVVMESTAQYWKPVWGTLERYWKPVRQKREGASQMCGTLHLCQAKSNRGPRGRKNDFADGERMIKRLVAHELVLSFVPDPEQRLWRTVTRRKHQLTRAKVVYKNQLESLLEQAHLKLSSFVSDLLGVSARRMLKALAEGETDPAALAAMADCRLRATPEQLRDALGACQQLDGVFRRLLKMALEELELIETHIEQLEREAMGLMQEHQDAVQRVAEVPGFGLDSALQMIAEVGPKAAAFEVAKALSSWVGVCPGNEESAGESHSTRSPKGNHHMRRLLDQAAQSAVKVKGSIFELTFHRLLPRLGYQQAIWAIAHRLCRLLWLILHKGVRYEERGPAVSAKSKRTRTARMIRELHKLGYRVEGGPLPAGARA

SEQ ID NO: 194147 - protein, 361 aa, unidentified
MNATTVAVDLAKSVFQLAVADDRWRVVETHRLSRTQFERWFANRDVRLVIMEACGSAHHWARWLTGLGIEVKLLPAQYVRAYVKRNKTDAADAAALLEAARASDIRPVRVKSVEQQALQGLHRIRSLWMGTRTSRINALRGFCREFGIPIPVGARTGLEAIGRVLADPHTAVPELIRGTASLLMEEIRLLEARIAQLERELSHMARLSPACKTLLSVPGIGLLTATAMVAATSGDVSHFKDARHFASWFGLTPKEYSSGSTRHLGRISKRGDRYLRMLLTHGARSVLRAAKVASGAGREVCGVRRWALDVQGRSNHNKAACALANKLARICYATLRDKEPFAEGTVPLAKKINRQAFVMPA

SEQ ID NO: 194148 - protein, 344 aa, unidentified
MLTLFCGIDFHKNFCTICLLSADGKFKETSNKEPETVIKYLANKKIELITIEASTGVHDFVSKLKSCGHTVKIINPSRFRSVGVGGKKTDKKDAELLAEFAKLNLTPGVHHKSLKARELKSLLVMREFTIQSRVSLSNHIRGVLREFGIPIPAGKDNFCSEGLGAINKIENGFLRNTLIDMFAKFKELLVMENEIDEKLLNMGDVEEKNRYKTIPGVGEIISLTFMATVDDVSRFKNSKHFASYVGLVPREDSSGGKQRMGSITRSGPEMLRRNLIHGARSILKHPLKKEEKDSNIIWAQKLKERIGMNKATVALAHRLARILYVIASNKTTYGEYTPSKNNAA

SEQ ID NO: 194149 - protein, 345 aa, unidentified
MKITTIGIDLAKAVLQVHGVDKHGKVALRKQLKRKDVLGVFANLEPCLIGMEACGSAHYWARKLSELGHTVRLMAPQFVKPYVKTNKSDRNDAEAICEAVGRPNMRFVPVKTAPMQAVLALHRARQGFVKARTAQANQIRGLLAEFGIVIAKGIGHIAKRLPEILEDVENGLPGMMRELLLRLGENLKDMDRQVGELERQIMLWHRENEPSRKLEAIVGIGPITASALVATLGDANSFKNARQVPAWLGMVPRHEGTGGNVKLGGISKRGDAYLRTLLIHGARAVIAHTERKPDHTNEWLRKLLARRNKNVATVALAAKNARIAWALLAHERSYQHDYVATRMAA

SEQ ID NO: 194150 - protein, 344 aa, unidentified
MGTIIRVGVDLAKNVYHIHAVDENEKTVWQGKYARNTWLKAVMKRVPYTAVIGMEACGSSHYWARELIKAGYTVKLIAAQFVKPYVKTNKNDKVDAEAICEAINRPNMRFVSVKTSEQQDIQSMHRVREELIAQRTARVNQIRGLTAEYGIIAPVGISNLRKHIPCWLEDAENSLSFQFRELLQLLYEDLISLDERIDKVTDKIKLNLSGNPVAQRLMKVIGIGPLVCSALLIDLGDGMSFKRGRDFSASLGLVPRQHSTGGRERLLGISKRGNGYLRKLLVHGARAAFRYVKDKTDALSLWIKKLSITKHPNVAIIALANKLARISWAIVVKNVEYDASLAAA

SEQ ID NO: 194151 - protein, 460 aa, unidentified
MGSKSRKKAPRVPFRRSPGFDGFELIHPNAAGLDIGSAEIWVSVPEDRDEPPVQEFGTFTPDLYALADWLTACRIDTIALESTGVYWIPVYEILQERGFQVCLVNARHIKNVPGRKTDVLDCQWIRRLHTCGLLRASFRPEAEMCALRAYLRHRAGLLEHRAAHIQHMQKALLQMNVQLTQVLSDITGVTGLAIIRAIGAGERDPVQLAKLRNPKCQSSEEKIARALTGHYREEHVFALKQALSLYEVYTDQVRQCDDEIERKFAAIRPEWEEELPPLEGGDKRNSHSKNAPDYEARSLLYQVTGVDLVAITGLNGITVETILSEVGLDMQAWPTEKHFCSWLGLAPHHDISGGKVLRSRTLPTHNRAGQAFRLAAQAVSRSDHAFGAFYRRMKARLGPEKAIVATAHKIARTFYHMLKHREAFQSTSAAEYEQQFRDREIANLKRKAAQLGLTLTPAPA

SEQ ID NO: 194152 - protein, 345 aa, unidentified
MKITTVGIDLAKNLFQVHAVDERGKAVLRKQLRRAQVAVFFGNLPPCVIGMEACASAHYWGRTLQRFGHTVRLMAPQFVKPYVKTNKNDVADAEAICEAVGRPNMRFVPIKSIEQQAILSVHRVRKGFVKARTAQANQIRGLLGEFGLIIPQGIINVTKRVPELLEDAANELPLAFRQLIERLAQHLKELDRQVKEFEKEIIAWHRSSELSRKLEKIPGIGPLAASALVASIADAHSFDNGRQVSAWLGLVPRQSSSGGKATLLGMSKRGDAYLRTLLIHGARSAILAAKNKTDNTNGWLVNLLNRRHPNIAAVALADKNVRTVWALLAHGGEVKANYVPARMTA

SEQ ID NO: 194153 - protein, 372 aa, unidentified
MNYNTVYVGMDVHKESFTLCSMTIEDEKASHYQKTEADYKKVLKYLEFLRTIYGDNAKFICGYEAGCLGYTLYHQLMSQHVECVILAPTTMLEQRSRKRIKTDKRDAEIIAKCLAQRNYSPVHIPTATDEQTKEFLRMRDDHKLALKKIKQQILAFCLRHNYRYDGNSHWTAAHLRWLKSLQPEALYKEILDEYLLTYTTLSDKLERLDKRIEELASKDEYKEAVKKLCCFIGVKTHTALSVLVEVGDFNRFASAKNFASYLGLVPGENTSSDDRNLLGITKAGNRHVRLLLTEAAQSYARGQIGYKSKDLKSRQSGNSAQVIGYADKANERLRRRYYKMVLGQSKKHNVAKVAIARELACFMWGIMTDHIA

SEQ ID NO: 194154 - protein, 337 aa, unidentified
MKYCGIDLHSNNSVVIVSDEEDRIVFNKRLPNDLGRIRAALEPHRKELTGVVIESTYNWYWLVDGLMDAGYWVHLAHPAAIKKYEGLKHSGDFADAAYLAQLLRLGLLAEGYIYPRAERGARDLARKRMQLVRYRTAQILAIEGILMRQTGARMKGEAVKRLTTEQVDAFAFAPDVALAVEANRAVSQALGQQIEALERRLKERVSLRPEYRLLKTVPGIGQTLATTIMLETGAIGRFAQVGNFSSYCRCVDSLRESNGKKKGEGNTRNGNKYLAWAFVEAANFALRYCPQAKSFYERKKSKTNRVLAIKALAHKLARACYHMLRDQKPFDVRLCFG

SEQ ID NO: 194155 - protein, 408 aa, unidentified
MEILYPRCAGLDVHKDSVVARIRCVSEPVHDEVKTFATTTSALLELNEFLSAQGVTHVAMEATGVYWKPVWHLLEGDFELILANAQHIRNVPGRKTDVSDAGWIADLLAHGLIRSSFVPPAPIQELRDLTRTRKQLVREVSQHSSRIQKVLEDANLKLGSVLSNVLGKSGRAILQALIAGQSDPEKLADLAQGTARKKRAELVEALHGRIRPHHRGLLKVHLELVSALEQALADIDATVGKALASIHESARLLSTMPGISDVTAHVIVAEIGVDMTRFASDAHLRSWAGLCPRNDESAGKRRSTRVRKGAPWLKTTLVSAAWAAVRTKDSYLQSQFHRLRARRGAKKAILAVASSMLTAAFHMLKNRLPYQDLGASHFTRRDREKIILRLVRRINDLGCQVQLVPQAA

SEQ ID NO: 194156 - protein, 340 aa, unidentified
MSEVSIIGLDIAKHVFQAHGVDSSGHAVLRKKISRARLLPFFAAQPHCRVVLEACGGAHHWARELIKLGHDVQLIAPAYVKPFVKRQKNDAADAEAICEAAQRPTMRFVAVKSEAQQAAAMVFRGRDLLVRQRTQISNALRSHMAEYGWIAPKGLAHLDKLAALIADPSAVPEGVRSVCVVLLDSLAVLDRQIALLDREIARRAREDEVARRLMTIPGVGPITATAIAALAPPPGTFAKGRDFAAWVGLTPRQHSTGGKQKLGAISKMGERTLRRLLIIGSSAVVLQASKRGAPRGSWLEQMLARKPRMLVTVALANKTARIVWAVLAKNEDYRAPVAAA

SEQ ID NO: 194157 - protein, 355 aa, unidentified
MQSNKISFKGQNIYVGIDVHLKTWHVTTLTESGCKYSFSQHSDARELFDRLNKRYPEAHVMSAYEAGFCGFSVHYSLTELGIENIVVNASDIPTTGKEKVLKTDAVDSEKIAWSLKRGELTGIYVKERRYMDDTNLMRLRQRLITDLARQKNRTKHLLYTQGVTYPDCFSRTGTHWSRNFMRWLREDVVLLSEEKRTLILLCDQVDHVRRDILAVTREIRRLSTTDRYRDNFSLLTSVPGFGLITSMSMLTELDNNPMRFRNERRFVAMLGLIPTCHDSGEKKVGGEKINRGSKQLGPLIVEASWVAIHRDYQLGCYYGNCCQSMTPQKAIIKVARKLACKAYAVMKTKKPYVLP

SEQ ID NO: 194158 - protein, 477 aa, unidentified
MVSTRASALNRQQRKDLKRQLRAEDPGLEVIHPNAAGIDIGNSAHYVAVRPDRDPDSVRRFECFTVDLHRIADWLQQCEVTTVAMQSTGVYWIPLYEILDSRGFDVYLVNARHTRNLPGRKSDVQESQWLLKLHTYGLLSNSFHATADIRMLRIYWRQRNDHVQAVSMCIQRMQKVLTQMNVQLANCISDLSGATGQRIVRAILAGERDPQVLAKLRDPRVRASVDEIAKSLEGSWQPALLFLLKQEVDMYDTYLQRITECDREVEAHLKRFADRDTTSAQDATTSPEATTSPEVPRRKRRKTAHSHAPQFDLASELRRISGVDLTRIDGIDVGVAQTLISEIGLDMSCWPTEGNFASWLGVCPDNRITGDKVRSKGTRRVISRAANALRIAASTLLKSRSYLGAQYRRFRTKLGAPKAITAMAHKLARLVYRMLKYGQEYVDKGVQYYEERHRQQQITLVKKKAAKLGLLLVEPVV

SEQ ID NO: 194159 - protein, 361 aa, unidentified
MLTITIGVDLAKNVISVCELDAGGRVLRRRDIGREAFALWLAQLPAGTVVAMEACSGAHHWARRCLEHGLQPKLMAAQFVKPFRKSRTTKNDRNDAEAIATAARQGNMRFVSIKTIDQQARLSWHRVREGYKVEALAIGNRLRGLLAEFGVVVSRGDAALRALLADLSAHALPASLIALLGDLNAHWQQVHARIAASDRQIGQHAKSDARCVRVQALIGIGPITADAVVATVGSAHEFNNGRQMAAWLGITPTQHSSGGHDRLGNISCRGDAYLRTLLVQGARSSVQRALAVPREKATPEQIWIQSLSARLLFGKVLVAVANKHARQLWAMLARGEDYDPNAWMKHPMAQRAASKRSAASI

SEQ ID NO: 194160 - protein, 449 aa, unidentified
MKKADTRMDIGSIINANAAGIDVGAHEMWVCVPVGRADPRVRAFGTFTPDLHQLADWLVACGVTTVAMESTGVYWIPLFEILEARGLQVYLVNARHLKNVPGRKSDVLDCHWIQKLHSFGLLTASFRPEADLCRLRAYLRHRAALLQHRAPHILQMQKALLLMNLQLPQVLTDITGMTGLAIVRAIVAGERDALKLAQLRQPSCRSSQDTIAKALSGDWKPEYLFILQQSLALYDFYTQQVATCDVEVQQQFAAIKPTWPTADLPPIPPAKLSTKSKNAPLPTTRAELRRITGVDLVAVPGLSASLAQTILSEIGSDMSKWPSAKHFASWLGLAPHNDISGGKILHSRTLPTSNRAGQAFRQAAATVTRTQSVFGAFYRRKRIYLGPQQALVATAHKIARTVYYLLKYHIPYQEVGAIPYEAQQRERDLALLRKKASKFGFVLVPPVPT

SEQ ID NO: 194161 - protein, 387 aa, unidentified
MTVCTVNHQPAATHGETARCLFAIELSRKSWVIGIITPLSAKISRRILSGGDWRGLLELIEEVRARVSRETGRAVEVISCYEAGYDGFWLHRQLEAHGIRNYVIDPASLQVDRRVRRVKTDRIDTERLLRSLMAYLRGEPKVWSVVRVPSVAEEDARRLHRERDRLVSERVQHVNRIKGLCALQGIYDYQPLRPQAMAGLEQLRTAQGAALPPRLKSEIKRELHRLELVVEMIASLEAERDTIVEDKASTHVNAKKIQNLHKLKAIGPEFAAVLVGEIFHRDFNNRRQLASYVGYAPSPFQSGNVAHDQGISKAGNRKGRTTGIELAWLWLRYQPDSDLSVWFRARVGTVKGRIRRIAIVALARKLLVALWRYLETGLVPRGAVLKG

SEQ ID NO: 194162 - protein, 358 aa, unidentified
MCLCVCVSVCSTVAVDLAKNVFQVAGEDTLGQVIYEARIKSREAFLLLLHKLPTGVTVLMETGPGAQAWARLLQTQGKLARILPAQHVADHRSGAKNDRNDVLAILRAGRDQNIAAVPIKSTAQLAMQALHRARQGYGRRHTAMGNQIRGLLLEHGIAMAQGATILGRNVPLILEDATQPLPQLLRELIAEMLGEWSHLGGRIEVLTGRLEAAAREDETAKRLMTVRGIGPIIATALLAKQTEPERFANARMFAAYFGTVPEQHSSGQTVRLGKMCKRGDAYLRSLAIQGAHAVLRQVRPDSEHPDDHRLRRWLSRHGQKGAAVRLANRNLRIVWVLLQNDQTYRRQPAGCQEATMNH

SEQ ID NO: 194163 - protein, 402 aa, unidentified
MNAVGIDVSKGKSMVAVMRPFGEIVFSPFEVSHTDKDLTDLVRKLKSLPGETRVVMEHTGHYHAPIAAALHEAGIYVSAVNAMLVHDYGNNSLRKAKTDKKDAVKLANYALDRWLSLPQYHPAGDTRLMLKTCCRQYEQFSKISVMQKNSFISLLDNVFPDVNRLFTSPPRSDGSEKWVDFVAQYWHCECVSGMSVKAFTRSYEKWCYKHGYHFSEDKALDIYASACGHICLMPKCEATRQLVQQAVSQIRASSAALATLKQQMQELASTLPEYPIVMQMYGVGKSLGPQLMAEIGDVRRFHSKSALVAFAGIDAPPYQSGTINVRSRSISKRGSPRLRRTLFLVMASILKSSPPDEPIYQYMNKKRSEGKPYLVYMMASANKFLRRYYATVKAYLDGLDFA

SEQ ID NO: 194164 - protein, 320 aa, unidentified
MEAVLGIDIAKAKFDVALQFSDGRVRRKSVPNTPAGFTALGAWLTQQRVTRVHACLEATGSYGEALATWLHDAGHRVSVVNPMTIHAFAASRLSRTKTDRTDAALIAQYCATQHPAPWQPAPREIRELQALIRRLEALQDMRIQETNRLSSGAVTPAVVRSLETVIATLSDEITAVQQQIRDHFTQHPGLRAQRDLLTSIPGIGDSTAAVLLAELFDKQYRSARQAAAFAGVVPRIAESGTLRRRGRLSKIGPSRLRKALYFPALAGLRFNPSLQALRTRLRAKGKVPMVIVGAAMRKLIHLAYGVLKSQRPYDLTIVRT

SEQ ID NO: 194165 - protein, 363 aa, unidentified
MKIMTGIDLHSNNALCGLMDESGRRLVHKKLPCDLPSILQLLKPYKKRIASVAIESTYNWYWLADGLQDHGYPVVLANPARMKPYDGLKHTDDVSDAFFLTDLLRLGILPTGHLYERKTRPVRDLLRRRMLLVHQRTSLILSFKSLNERTLGQRVPLARVKSMSVEEARARFTQPADQLLSGQQIQLMGHLQRAITEIEEHVLGVAGPWTTYQRLQTLPGIGKILGLTIALETGEAKRFAGAGNFASYCRCVKSLRQSNGKKKGENNRKCGNRYLAWAFVEAAHFACRHDEDCRRFYDRKKQQTNPIIATKALACKLAKAAWHVMAQDMPYDGERVFGPGNKTDLGETGREPAKGSGPPSQPD

SEQ ID NO: 194166 - protein, 352 aa, unidentified
MSKQVTTDSPKLFIGLDIHKKSWRFHFTTDLFSGSGHTFPPGSNLIQNYVLKNYTDYEVSIAYEVGCFGYMPARDFESFGWDTYVVNPADIPRPSKSKFMKTDKIDAKNIAQQLKSGNLKKITIPEPVRESLRALTRQRTALVRDYRRIKTRIKSLLMYYHIAIPEGMDSPKWAKRFLEWLTELELDYDNTKRTLGSMLRQYHYIDQEIKELSNEIRKYCKQHHKKDYMLLRSVPGIAGLTAAYILSELGDLRRFTSFKRLASYVGFIPSMQQSGEGLYTGGSTPRANRHVRNMIVEASWQAVRKDPVMQNYFRSHAGKNSKAAIFKVGRKLLSKIHAVIRTEIPYSVGVLS

SEQ ID NO: 194167 - protein, 355 aa, unidentified
MKTNLKKAEIILGVDTHLDVHVGAVISEAGKLLGTRSISTSSAGYMDLLSWASSLGVLRRAGIEGTGTYGAGLCRYLVEQGVRVFEVNRADRSQRRLQGKSDPTDAESAARSVLAGIATAIPKQQSGGCEAMRITSVARRSAVKARTQAINQLRAILVSAPQEVRERLWKVKALDCVNACVRIRSLGESDLLQTMTITLKALARRWLALSNELKDLDKTLERLTDKYAAGLRERFGVGPHTAAILLSVAGDNPERLKSEAALAALCGVNPLPASSGKTIRHRLNRGGSRAANNALWTIAMVRMRSDPRTRLYVERRTNEGRTLKEIHRCLKRYIIRELYPLILRDLSAAQTPLLT

SEQ ID NO: 194168 - protein, 327 aa, unidentified
MHRKRSQVAVVTEDGTVQLNKNTVNGTAPILRLIGDLPSGTPVAFEAAFGWSWLAQLLEDYGFEAHMVHPLRCKAIASARLKNDKVDAATLAQLLRADLLPEAWIAPPAVRQLRALLRHRTGLVRLRTQLQNRIHAVVADFGYDRSGSYLSGPGRGWLAELELPAVSREIITDCLTFIDALAPEIDRIDGELRQHAKTDPRVKILTTLPGVGQFTALVMLAEIGDITRFPSARKLASWAGLTPTVRGSDLKVRHGHISKMVCAGGMVPLRRPEVCDGGGWRIGFAPGSADVRLCRYRDGRELAWPDLACRPGEPARVAAPVRRRAGC

SEQ ID NO: 194169 - protein, 390 aa, unidentified
MTTKALYIALELSQDKWLLACATAAAEKPRFRPVPARELARLDQEIAKAKERFGLPAEAPVSTCYEAGRDGFWLHRALTSRGIHHVVVDSSSIEVDRRKKRVKTDPVDAAKLLNLLCRYHSGERKVWRVVQVPSVADEERRQLHRGLKDLQRQQTECSNRIKGLLASLGLTAEVDAKFRTTLAELRDWAGQRVPAALAQRLLQEYAVWEALHAQVREACTEQERRLRTGTEPYLEQVRRLLGLKAVGVRGAWILVAELFAWRGIKNGKELGALVGLTPVPYNSGRSERDQGISKAGNKHVRGLIVELAWLWLRWQPGSALSQWYEQRFGAGNKRARKVGIVALARKLLIALWRCLERGEWPDGALAKDWRLTVDSTARRHATKARAVAAA

SEQ ID NO: 194170 - protein, 456 aa, unidentified
MRKKRSPRNQKQNKRVLEQINHNAAGADMGSDSIWICVGEHASNEPVRRFGTTTAELRASAEWMVSVGVDTVALEATGVYWVAAYEIYQEYGLDAILINSRAIHNFNGLKKSDFIDCQWIQLLHTFGILQASVRAEKVMIELRAYMRQRKTLTEQCSEQIQRMQKALILMNVRLDQAVTDITGVTGMRMMREILKGERDAAKLALLRDPACAKSERQIAEALTGHWRDEQLFALEQAVKLWDFCRGLMVECDEKIEAVIRKMPGPAKAPEATTGSKSRAKARKNQVTFDGRTLLHERLGVDLTEIKGVDVLTILTVISESGLDLSRFPTDKHYTSWLGLAPGTKKSGHRVLSSRSRRTTNRASTALRLAAQSLLKSQSELGAFGRSLRARIGAEKAITAVAAKLAKRIYLSLRTGRVLVDRGAEYHDQQHHDRHLASLHKRARKLGLELVPIQHTA

SEQ ID NO: 194171 - protein, 383 aa, unidentified
MKNTIVHDEGAASLEVAVQRIKLSGSMIKIGLDMHARLYVAVAQYDHLLPKPARRLAPMEFLPWVEQLLRAGHTVHVVYEACGFGFGLYRELKALGAHCYVTAPRKLDEQCTRVKTDPRDATTLCQRLSRYLDGNTGELAVIRVPTEREEQDRHVSRQREQLVRLRQKLEAQGRSLLISHSLASPAHWWKNQTWSRLRRLLPAWICIRLEVHRPGLLILQKQIDALSVQLQAAAPADVPLGIGKLSTVVMTREICLWERFNNRRAISCYTGLCPGEHTSGTKRVPGSVTKRGNPRLRAVLVECAWRMVRFQPNYPPVKKRLSVLAKGAHATGAQRKKAIVAVARHLAVDLWRIHTGRCSAAQLGLNNAETLRCSRGTVVNPST

SEQ ID NO: 194172 - protein, 326 aa, unidentified
MTVRPSTDNVFIGIDVGKTTLDVQWHRGDSAQYANRPDAIAELVRRLLAGPKVTRIAIEPTGGYEKPMVEALRQAKLPVELVHTSRFKGYRTMVGVKAKSDTSDARLLAAYAAAPDDVRGRKADRVELPQDALREELRELASRRDQLKHMIHAESCRLGIARHATLRQSILAHLETLRSEDKQVLQMMHALVRQRLDLRRDQKLLQTVKGLGVVSALTLIAAVPELGHLDNKQAAALIGVAPFVHKSGTLTAPARIHGGRAAVRRILYMAAVTASRYNPVLKSFYERLIAKGKPAKLALVALMRRLVVFANAVLRSGQPWKGAIPT

SEQ ID NO: 194173 - protein, 312 aa, unidentified
MLPSLVYVGMDIAKATLDLHALSTPPQSRQFANSPVGHRALVRWLQGLGCVHVVGEASGGYERSVVLALHQAPIAVSVVNPRQARDFARAQGQLAKTDRLDARVLAEFGQRLQPAATPALSVAQRQLAELVARRQQVQQLRSAEHNRLEHVTHPAVRRQVQRHLRGLERQLEQLDAWITELIQAEPVLALKVARLCAVVGVGRITAVVLLATMPELGALNRGQAAALVGVAPFNRDSGPRRGHRLIGGGRSVARRALYMAALVAAFSNPRFRVFYQRLIAAGKAPKVALVAVMRKLIILLNQLLKNPEFQLT

SEQ ID NO: 194174 - protein, 359 aa, unidentified
MSKLTKIETFFSNANLTADDQLFVGIDVHKKSYHVALYLNDAPSIDFVMPAKKKQLSSKLITTAPALRQVAYETGPSGYGLARHLYHHGLPVAVAATSRLPRPAGGDDKTDKLDSKKLAEYAAKGLLKPVQVPTLKQEADRQLYRMRHRQARNLARVKVQIKSFLLMHDLDEPTGLSNWKRDAVEELRTLPLRKTLRLSLDELLGDMDYYASRIKALDKSLAKQLDKGRLGQRMALLKTHPGVGTVVSCQFATELFHYRDFNSTREVFKYLGLSPRIHQSGDRSVRGSINRVSNARLRSNLVQAAWRWIAVDVQAKKTYYHLLNNCGGIKQKAIIAMARKLSGHLWTMLVKNQPYDPKK

SEQ ID NO: 194175 - protein, 417 aa, unidentified
MANPLIVGIDVHSRTNRTCLLDREGEPLGQRFSTANNRPGTATLIARLEEALQQGQFDSLRVAVEATNWYWFPLYQALSQAPELALWPQTFYTFNPRVTARYKDSFSDKDKSDDVDAYVVADRLRTYSRQELPAPFVPDLRYLGLRFLTRYRYHLVKDLVREKNYCLSLLYLKANEYREAHPFADVFGATSRAVIAECASLEAVAAMPLAELAVWLDAKGKGRFPDPAKVARELQRVAQDSYPLDPQLQEPINYVLTWSFQHVNCLERQVQRVNTAVADTMRDIPHTLDTIPGFGPVYSGGIIAEIGHAERFDQDEAKVAQYAGLHWRQHQSADFKAEDTRLTKRGNAYLRYYFCEAANAVRMRDAEYAAYYQRKHDEVRTHQHKRAVALTARKLVRLVVRLLTTNQPYQPRRQPSG

SEQ ID NO: 194176 - protein, 483 aa, unidentified
MKPKQVESNKKASCRATPNHWQRMNHKQRREMLRKIQSADLSLEVVHPDAAGIDIGNESHYVAVPSARDRQPVRRFGCTTAEVKAMADWLKQCKIQTIAMQSTGVYWVSVYDILEEAGFEVYLVNANETRNLPGRKSDVQESQWLMKLHTYGLLRNSFRPSREIRTMRTYWRQRNDLVRAAGRHIQRMQKALTQMNIQLANVLSDVSGMTGQAIVKAILAGERDPYQLAALRNWRGKASQEEIARSLEGNWQEEHLFVLQQEQDGYQFCLKQMAECDQRLQQYLQLQEDRSHGASLPEEKRKERLRKKKKGNTPQFDLRTELFRMTGTDLTQIDGIDVTTTMTILSEAGWDMSKWKTEHHFVSWLRLCPDNRISGGKIIGKGRLPTNNRVTNALRMAASTLRLSSTYLGAQFRRLRTKLGAPVAIKAMAAKLARLVYRMLCYGMVFIDRGAEFYESQHRKLQINYLKRKAANLGFQIIEAPAA

SEQ ID NO: 194177 - protein, 322 aa, unidentified
MEMLSFGGIDVSKDRLDITVLPDEQCSSVSNDAAGWAELIEQLRGSLITAIGVEASGGYERGVVRALLAAGMSVRQINPYKLRQFAKASGILAKNDRLDARMIASFVAIMPTRPAQRQTPMIEQLAAMLTVRRQLSDHKVATENASRLLEDAMLQRLSRRRVARLTADIDLLDQRLVEIVTADPALAHRFRLLTSMPGVGAVLACTLIALLPELGQMSRKQVAALVGLAPYDFDSGKLKGRRCIWGGRARVRHVLYMAALSASNWNPALKAFHDRLEATGKKPKVVIVAVMRKMITTLNAMLRDGTAWVDRYSGRRRASTAR

SEQ ID NO: 194178 - protein, 419 aa, unidentified
MSNNSTSAGIRQDQPDCLHVGVDLALEENMVVILDERAKRLDRFSFPQDRGGYDYFFQRVESVRQRNEALGVALSMEPTNYFWKLLAQEAEARQIPYRLVNPYTAKKHREGNQLDPSKDDPRDAGQIAELSRTDHYTQTRLQKGAYEELRQYATLHDQIRQSIRREEQVLWGLTGQAFPELIQVFRDLEGKTSWAVLQTCGCAAAIRVLTEEAFLTQVRANYAGKRLQLSKLHRAYRLAVTSIGLKEGLEALQLALRLHLAQLECLKSQMDQLTEAMTACLQTLPEAPFLLSVPTLKAPSVALFLAEVGDPRRYRTAAQWVKLAGIQPAPNTSGQKQRSKTPMSHHGRPRLRTLLYFACMRLVRWDAYFARLYSELQRRSKNPLTKMQALGVLMNKLLHILWALVKNQTGYNPAFAQSI

SEQ ID NO: 194179 - protein, 330 aa, unidentified
MKQVNQVGVDVDSEELVCAMQRDGQRLPLARFANTVGGHTKFIRWVTKSARPARVCLEATGIYSLEFALALHRAKGIEVMVVNPRAIKDFARACMQRAKTDAVDAGGILEYLERMPFTAWQPPAPEILELQAINRRIDQLHTELTREKNRRHAAQFAGASAEAIAHDIEVNIHHLERRIARMQESGLQLVRRVPALVTKLAHLVSTKGIGEVSAMRLLAELLVLPDDLAAPQWVAHAGLDPRPYESGTSVHRPRRITKVGNRHLRAALYMPALVAIQHEPNVKAFYNKLVTAGKKPMQAVIAVMRKLLHAIWGMLKHDQDFDGNKFFRTA

SEQ ID NO: 194180 - protein, 365 aa, unidentified
MGMLADRVDHVIGVDTHRDNHAAAVVAALSGAVTVDTTITANPFGYKRLLRFARLHAPGRRVWAIESSGSYGAGLATFLLEQREWVVEVDRPARPARRNGAKSDELDAIRAAREALTREHLAQPRQRGEREAVRVLLVTRRGAILARTKAINHLKALVVTAREELRHQLRGLRTDELVTRCARLRTLPSHSAEHRATVIALRRTAQRVLALEAEANDLESELEKLVAQAVPALLEETGVGPITAAQLYISWSHPGRLRSDSAFAMLGGSAPIPASSGQTVRYRLNRGGDRQLNCALHTIVLSRLIHDPATRAYAARRAAEGKTPREIKRCLKRYLARRLFRILEATGPPATSSRPPRTRTIGICS

SEQ ID NO: 194181 - protein, 311 aa, unidentified
MNIAPGIVGIDISKRFLDVFDPRIGRPERVANTEPEVQALALRLAASGDRAVFEATGVYDRILRRALEAAGVGFSRVDPSRARAFARAAGFLAKTDAVDARMLAIMGQALQPRLEEAVAPVRERLAGLHARRDQLVAMRVQERNRRAEHRDDPDIQASLDQHLDWLDAQVRDLDVRIRNLIAADAELRQAEHRLRSVPGVGPVAAATLLARVPELGRRSPKAIAAPVGLAPFNADSGARRGHRSIRGGRKRVRDALYMSAVTAARSNTVFATFYSRLRAAGKPPKVALVTVARKLLVTLNAIARTQTPFNA

SEQ ID NO: 194182 - protein, 412 aa, unidentified
MKDLLEISCGLDVHKEKIVACILTGPLGKPTRSEIREFSTLIPDMIALRNWIVSKNCHHVAMESTGIYWMPIYEILEDAFYGDITLLVVNARHMKNVPGKKTDMRDSEWISTLLRAGLLNGSFIPEKRIREFRDLNRYRKSVIRDITSQKNRIEKFLQSSGFRLSSFISDIFGASGRNIILHLIEHGQIDKTALDSCLKTKTRNRIDEILMSVNGTLSEHQKAFLRILMTHYDSLKKHLAEIETSLEEDMAPFALQVEQLNSIYGISTTASCAIIAEIGIDMKPFKTAEHICSWAGLCPGNNESAGKRKSTSVTKGNPYIKSMLCEIAWVIAGKRNTYLSAWYWRIKQKKGAKKAIVALARKLLVIIYTMLKQGTVFDESCFETRRKHCEQKQLSRYIRELEKHGYHVEAQS

SEQ ID NO: 194183 - protein, 415 aa, unidentified
MERILERCCALDVHKNQVTACVHVPDQAGKRSELRAQFSTMTAELLALRDWLQGLGVTHVAMEATGVYWKPVYYLLEDDFELSLVNAQHVKNVPGRKTDVQDAQWLCQLLEHGLVRASFVPPKPFRELRDLTRYRKSLTWERSREANRLQKQLEDANIKLASVASRVLGASGRAMLDELCEGNNDPKALAELAKGKLRKKLPALRQALEGRFSSHHALLVSHLLAHIDYLDETIGSLSAEIEERLRPFEHELELLCTIPGVGRITAEVMLAELGPDMSRFPSDRHAASWAAICPGHDESAGKRRSGKTRKGNRWLRTALIEAANSAAGRTRGTYLNAQYLRLKSRRGHAKAIVAVGHSILVSAYHVLERDQTYEELGGDYFISRVDTEHLTRRLVRQLERLGQTVTLTPSTAEAG

SEQ ID NO: 194184 - protein, 429 aa, unidentified
MRTESTPGARGPVFCGVDTHADSHWLCVLDWRGRKVLSRQFPADAAGYEALAGAIAAAGEPACVAMEGTSSYGAGLTRHLASLGMPVREALSPARTQRRRPGQGKCDEADAERAARAAMSGSKLGTPKSQDGWVDGVRCMLAARSGAVKARTSAINTARSLLTTAPEGLRSRFRGMGGPRLMEELPSVRAEGALGAALGALADLWEAARDAALDMERAIEASLEENCPALLAMYGCGPVSAAKLAVAAGDNPGRLRSEASFAAICGACPIPASSGKTVRHRLNRGGDRQANSALHEIARQRVMRDPETAEYAERARGRGKSDREVMRCLKRYVAREAYRALMHPHEIRRPEDASELVAARRAAKVSQVRAASILGTSEKYISMLERGQRELKPIRRAYEAWVEAGLPLDWDRRAFEAERKMDSKKHLAK

SEQ ID NO: 194185 - protein, 413 aa, unidentified
MEALVARAAALDIGKKTIVMCVRTPDGAGGRRQQVETFETFLDDLVRLRDWLVAEGVTQVAMEATGSYWKSPWYVLEEMDGVELLLCNARHVKQVPGRKTDVKDAVWLCELLEVGLLRSSLIPEPTIRQMRDLTRYRKRLVQNRTSEVQRVEKTLEDAVIKLGAVASSTLTKSGRAMIEALIAGERDPAVLAELAKGRMRAKIPQLLRALDGRFADHHAKMLRLHLDHIDHLDAAIATIDEQVEELVVPFADVRDRLQTIPGVGQKIADVIIAETGADMSAFPSSRHLASWAGVCPGNNESAGKRFSGRTRKGDVWLQSALVEAAWAAARTKDCYLAAQFWRLAGRIGKKKAAVAVAHSILVIAYHLMSDPEAVYQDLGADWFTRRTNPDARRQRLVNQLEHLGYDVELTPAA

SEQ ID NO: 194186 - protein, 360 aa, unidentified
MIVLGIDPHKKSHTAVALEAATGELLGELTVQTTAAGQAQLLGWARRLGSERRFALEDCRHLTGRLERFLIERGEASVRVPPKLMAQTRRSARTRGKSDAIDAAAVARAALREPHLPEACLPGPERELRLLCDHRSDLVAERTRIQGRLRWHLHDLAVKLEVPAKALDRACWLTRLAEALATLPAGVQVRIARDLTERCRTLTAEINALERELTTLTAELAPELLALPGCGALTAACLVGETAGALRFASEARFAMHAGVAPVPVSSGRTDRYRLNRRGNRQLNCALHRIAVTQMRMHEPARAYMARKRAEGKTKREALRCLKRHLARTVWRALRAAETRREAMLASIDPSTQPALALAS

SEQ ID NO: 194187 - protein, 339 aa, unidentified
MKELKSSVGIDISKDSFEVCIKQLKDERVIIKATHSFQNDFKGFENFLKWSLSKVLQPVFVMETTGVYHEDLTHFLYSNDQKVSVVLANKMKHFAKSLNIKTKTDKADAQMIAQYGLERQLEWWQPMMPQMKNLRDLCRERLSLKKDLVRCKCQVHALKHAHSTLDVVLQLKEQQIEFLEKNIQIIENEIIRITEEDKEFSQRVKNIETIKGLRLFTIVTVLCETNGFEQFNNIRQVVSYAGLDIAERQSGLFKGKTRISKKGNSRIRESLYMPALSATSYNEHIKALYQRVIERNPTIKRKGVIAGMRKLLILIFVLWKKNEAYNPQYQWNAPLIDIG

SEQ ID NO: 194188 - protein, 417 aa, unidentified
MKEGEKSSVCRYIALDIHKHYSVVAGVNRDGEEILPACRVEHPDLEDWLAKHLLLTDRVVIESTTNAWHVYDLLEPLVAEVLVANPIKVGQIACARVKTDKKDTLILARLLAANLVPTVWVPPKQVRELRQLISQRRKLVGMHTQVVNRMHSVAHRHHLNHPKGKRFLPKNTGWQQDEGLSGLEKLQLELDMETKAHLQGQIERITGELRRMSNEKPWAGQMMYLMQIPGFGVVTGMTVLAAIGDVARFETPKALASYSGLVPGLEQSGVKLRGKSITKEGRREFRWAMVEVAQRAVKADPHWKRLFSELERRMHRNQAIVAVARHLLTVVWSVLSHGKSYCHYSDERIAYKYYTWSWQLDETQRKGLTRPQFVRYYLMRLGIGADLHRVALDPKHPHRLVSESEILEIMPGLQPSG

SEQ ID NO: 194189 - protein, 314 aa, unidentified
MGEITTIGLDLAKNVFQVHGLDEMGAPVVVKRLRRSQVIGFFASLRPSLIGMEACATAHHWARELTKLGHAVRLMPPQYVKAYVKRNKNDAADAAAICEAVRRPSMRFVPVKTIEQQSALLMHRTRDLLIRQRTMLVNALRGHMAEFGFVEAQGLHKVAGLIAIVTNDGDERLPNLARQALNLIAEQITELQNRISALERQILAWHKNNPVSQRLATIPGIGPIIATAIAATVADASVFSSGREFAAWLGLVPRQSSTGGKARLGGISKRGDSYLRRLLVNSTARIRCCSVQRQPRSIRGSSPCAAESRDLSSP

SEQ ID NO: 194190 - protein, 316 aa, unidentified
MQTAWDVGVDVASQSVVVASAGRDFAPHSVGNERGALRRWLQALPAGSRIGMEATGAYHQLLAELAHAAGMTVYVLNPRDIKKYAEGVGRRGKTDRLDAEVIARYVAHEHAELHVYAPRSAAAERLEQLLKRRAKVVQLQVTLAQTWRGVAGVKAELAEVAAAQARLLTRVDGLLEEAVDALPEVRTRAQQVRAIPGYGRLGSVAVAHALQRLPFTRVDAFIAHTGLDPRPCDSGAKHGRRRISKRGPAALRTLMHMCAMAASRTPTWRPYYQRQLAKGLSGTEALVILARKMARTAYGVCRCATPFDPVRVLSGT

SEQ ID NO: 194191 - protein, 344 aa, unidentified
MNITRAGLDIAKQVFQVHGVDEHGKAGLRKQLARAKVLEFFVQLPPCLIGIEACASAHYWGRELTKLGHTVKLMAAQFVIPYRRRGKNDANDAEAICEAVGRPDMHFVAIKSEEQQSVLMVHRARTLVMANRTAQVNQIRGLMGEFGIVVAQGVARLRRELPGILEDAENALPVLAREVLAGLLEQFHELDARITAYDRQIRTIAEASEPARRLMKVEAIGPQTATALVASIGDPHVFKNGRSFAASLGITPRQHSSGGKERLGQITRRGDRYLRTLLVHGARAYLRVVDKKTDAKSAWAKRLKERRHVNVAAVALAAKHARIVWAILAHGTEYRPAGPEVVAA

SEQ ID NO: 194192 - protein, 433 aa, unidentified
MKVLYERVAGIDVHKDMIKVAIRSPGEKPWTRKTEILEFRTFYGVLQETARELRRRGVTHVVMEASGIYTDPVYYALCEQDFEQVAVINPAHAKALKGHKTDAKDCARLAELFECGLLRGSYIPPAELKEVRDLTRYRIKTVQARTSEIQRLGKALEMAGIKLGSVASSITGTASTAMSEALIDGERRGAVLADLAIGRMRTAGKLADLSMALAGRFTGHHALLCRLHLDRIAVFDAAVGGLDERIAGKAARWQREQGLLTSVPGFGDVVAQAWLGEIGPAPHRHFATHEKLACWVTLCPGNNISARKRKHGRTGHAGTYIKPMLIQAAWAAIRVRGRLQARYNRLVRRFGGAKNPAAKKKAITAIAHTLLKIAYQVLKSGTPYQEPGADFCTRRESPEQKHAWLERQLQKLHPGCTVTITISPPEAALPPGA

SEQ ID NO: 194193 - protein, 368 aa, unidentified
MVGVSAGTTGRVMIAVDPHKASWTAAAVDDRLQSLTTIRVAVGDEGYRRLRRFAGRWPGAEWAIEGATGLGAVLTRRLAQDGIVAVDVPAKLAARVRTLSTGHGRKSDDADAVSVGVAAMTASGLRTAEIDQILTALRALVEHREDLVKARTQTVNRLHGLLTSLMSGGAPTALTAGKAAELLRSVRPRSLSGRTIRRLAVELVAEVRHLDRRLASATGELTAALEASGSTLTELAGIGPVTAAKIVARVGPVTRFRSEAAFASYTGTAPIEASSGDVVRHRLSRAGNRQLNSALHMAAITQIRLDTPGRAYYRRKRAEGKNHKEALRCLKRRLSDSVYRHMQRDAREALGAGPEGHSGAALSSCAAG

SEQ ID NO: 194194 - protein, 401 aa, unidentified
MDRQIRVGIDVGCKTHRVGIADPRGSILEEFDISHTDAGFRDFFRRIDHYKQELDLPVAVAMEGFNGYARPLDRMIQEHGYLLYNVNNLKLARFKEVFPGAAKTDSIDTRKILELFHLKDHLPLAKDALQKVVSAPLVNDKLKRLSRRRRQLVNEKVRVANRLQSDLQAVCPELLAITNNVSNLWFLRFLTCRDDLAQLPLLRRTTLLAIPSVGQKYARIIQEWQRKASFSAEVEYVGPMIIQDAKRLLELRQQIHALDEAMAELADQSELACRIASMQGFGKTCIAELAGEIGTTERFAGERSLALYVGMSPLSRDSGQHHGSKRPRSVNHRAKAAMMTAVAHHIRCVPQSRAYYDKKRAEGKSHNQAVRALGRHLVRVIWSMLKNERDYELREVIPSVT

SEQ ID NO: 194195 - protein, 337 aa, unidentified
MSVYVGIDVHRKRSQVAVVTEDGTVQLNKNVVNGSEPFLRLIGDLPSGTPVAFEAAFGWSWLAELLEDYGFEAHLVHPLRCKAIASARLKNDKVDAAILAQLLRADLLPEAWLAPPRVRQLRALLRHRASLVRLGTQLRNRIHAVAADHGYDRSASYWTGPGRGWLAELDLPAASREIVGDCLAVIDGLAPVTGRIDGELHAHARADPRVKVLRTLPGVGEFTALVMLAEIGDITRFGSARKLASWAGLTPTVRGSDLKVRHGHISKQGSAWLRWVMNQAAQTAKRSPEFAASYAAIAKRRGKKIATIAVARKLLTRAWHLLNEMQATDTNAPLRRP

SEQ ID NO: 194196 - protein, 377 aa, unidentified
MVAPQPNWRGTIHVAIIAQIFSFVIGVDTHAKEHVLSVLRSTGELIETKSFRTNSLAAAIRWATKITSGNLETLWVIEGTATYGATLAAQVTAAGYRVVEAARMNTRAHHAIGKTDVLDSQRIAQAVLPLDESRMRKPRTHNGVLAALQVLVTAREQMTTQRTANINYLTALLRQWNFGIDARRPLTNKQVTTVSQWRPRKDEDLGIRTARNDAIRTAKLIVSLSVEIADNYKEIAALVQTSLARVLLSEPGIGPITAAVSFCAWSYKGRLRNEDAFKSLAGVSPIPASSGNTTRYRLNRGGDRRLNSALYTATIVREHRDEETRAYILRRTAEGKTRKEIRRCLKTYLARKIFRLLNEAAKAETLNELAKKQTLAA

SEQ ID NO: 194197 - protein, 364 aa, unidentified
MKRKVYVGMDVHKETIQIAILPSNTKALVKEQQIKHEEGQIKKFIQKLKSEGTEIHCCYEAGVTGYPLYRYLKTLGVNCIIAAPGKIPRQSSDKIKTDKRDAIKLARLLRSGELESIHVPSEEDEAVRDYLRSRDSLRLDLGRNRQRLMKFLLRKGIKYSTTKYWTASHYKWLNNLHFENEILQATFNDYYSRVRVQEENLKAMDQKIQEIAKSEPYREKVGILRCFRGVDYLTAMFLLSEVNDFKRFKTAGSFMSFLGLVPGEYSSGPKRKQTGITKTGSPRLRRILVEAAWQHRFPGTGSKVVVARRVGQSALVVSLAEKASLRLHKKFKSMQLRGKTPQVMITAVSRELSGFLWAAMNLVA

SEQ ID NO: 194198 - protein, 449 aa, unidentified
MGNCAGVDWAGEKHDVRVCDEAGEELLAASFVHDEKGLRALCRTLLRLKVELVAIERPDGLLVERLLDAGLRVLPMHPKQVAASRARFRAAGGKSDRFDAFVICELARTDSHRFRVLEPDSDQTKALRALTRTREDLVHARVALSSQLRAELERFWPGPIGLFTKLDSPISLAFLERYPSPADARGLGAQRLAGFLTRQHYSGGQKPAELLAKLRRAPEGRVGDAEMVARRAIVLALVAAITPLVDQIKQLTEQIATALREHPDGEIFLSLFRDPRSVVTAAELLAEIGDCRARYPTRDALAADAGQAAVAVESGKRKTANFRWGCNKRLRGAFCTLADSTRHWHPWAQDRYAAARARGHEHPRALRTVGRAWSRIVWRCWQDRTPYDPACHRALQQHIAVTIPTPSGPRPDLAATQRMAGEAFTETAARRAEREAFDGKPTSATALGG

SEQ ID NO: 194199 - protein, 386 aa, unidentified
MHHPTTLPVSEQTCSREDCATLFVSLELSRSTWVATSLALGSRKMSKHTLVGGDARKLLDLLARLKSRAEQRIAAPVKVVAIQEAGLDGFWIHRLLEANGVESHVVDPASIAVPRRHRRAKTDAIDGETLLRTLMAWQRGEPRVCAMTVPPTPSEEDRRRVSRERATLLRERIRHTNRIRGLLFGQGITNYNPLHKNRREGLEKLRTGDGQPVPVHLKAEILREIDRLELVLRHINEVEAERDEMLRPGQASSPVALLMRLKGIGPEFAAVLYLEGLFRHFENRRQLAAYAGLAPSPWKSGSVDHEQGISKAGNPRLRTTMVELAWMWVRYQPASALSCWFRQRVGSERGRIRRISIVALARKLLIALSRYINHGEIPAGAVVKPV

SEQ ID NO: 194200 - protein, 360 aa, unidentified
MAKARTLVGLDVHATKIVAAVLDAETGEIAFFAMTAEIETTAAFCAGLPRPVRVAYEAGPTGYGLARELVKRQVECLVAAPSKIPRASGDRVKTDRRDAELIVRLLFAGKLHAVRVPGLEEEALRDLVRARESVRVDLMRCRHRLSKLLLRHGIRFDDGDAWTDRHRAWLNGVELDWPAAQATLLDCRGAIDALAHRRDELERQIVAIIPSSPWRAQIGLLRCLRGVDTLTAVGLCAEVGDFARFARAEQLMSYLGLVPSENTTGQQRRLGSITKTGSAHARRLLVEAAWHYRPRPNRGKALTERQADQPQQAVAVSWSAQQRLHRTWVRLEKRGKRRTIIAVAAARELAGFVWAITQIE

SEQ ID NO: 194201 - protein, 420 aa, unidentified
MSDPEQWWQQHRVFGAVDWASEKHSVIVVNQAGKIIEQFEIEHSALGWKKFREKLQAYGSIPFAIETSRGAAVEQLLEAGMIVYPLNPKSAQAYRERKAPSGAKDDWLDAWSFADALRVDGHGWKALRPEQALIKELRLLCRDEVSLIQQRTAFIEQLRHALAEYYPAALEAFEDWTSVSAWMFLERFPTPHELAKAGKRKWQNFLHSRRLWGSNEGTRRMEIFARAIEFAGSLPTVKAKSLLALSLVQMLFAIEKQLAIYRQRIEELFARHPDHELFGSLPGAGPKIAPRLLSEIGDDRQRFDDVQALQCLAGTAPVTKRSGKKRKYCHVHQRWACNKHLRHVLHLLADKSLSRCVWAETYYQFHRQKNQSPASALRRLANRWLKIIYKMWLDRTPYEPELHHHNQLKHGSWILQLKQP

SEQ ID NO: 194202 - protein, 362 aa, unidentified
MMKNPIAAAVQAALNAERRVELDQPPATLEDEPCSRQNLATTAVQPPLHPECWVGIDVAKAHLDVATWPTQDRLHVTRDEAGLAELIAWLRPRAPQMIVLEATGGLETLVVGTLIEAAFLTAVVNPRQARDFAKALGRLAKTDALDAEMLARFGQVIRPDPRPWKDEDTQALAAVLQRRRQVVEMLTAEKNRLASAHRQIRPDIQTTIDWLEGRLQDLDGDLQRRVRASPVWRERDDLLRGVPGIGPVTATTLLAALPELGTLNRRQISALVGVCPFNRDSGQCRGRRMIFGGRAGVRAVLYMATVSASRCNPVIKAFYERLRAAGKPAKVALTACMRKLLTILNAMLKAKTPWQPPEECRS

SEQ ID NO: 194203 - protein, 335 aa, unidentified
MPLYCGIDLHAKNSYLAIIDEQRKRIFKRNVTNDRKLILALLDPYRSELQGVVVESTFNWYWLVDTLMDDGYAVHLANSGAIGQYKGLKYVDDKHDAFWLADLLSLGILKEGYIYPKEQRPIRDLLRKRGHLMKLRTSLLVSLTNTLANVCGTKVPSHRIKGKEDHVSVHLDHHESLALMGQVSKAAIDMLTDQIKTIESHVEKQCKFDTPLLSLPGVGKILGLTILLETGPIGRFPAVGNYVSYCRKAESTWKSSEKVKGRGNRKNGNRYLSWAFAEAAEHARMFDTASRNFYNRKLHERNSPVAHAALANKLSRAAYYIMRDRVPYEEAKLFG

SEQ ID NO: 194204 - protein, 351 aa, unidentified
MKEAITLGMDLGDRKSMICELDAQGQQLSMLSVSTSASGLRKYLRDRPNCLIALEAGTHSAWISRLLEELGHRVLVGNPRKLRVIWDCDNKQDTRDAEMLARIARFDPSLLYPIHHRGERAQSHLTIIRARDALVRARKVLVGSARGLVKTQGGRIGKCAAGCFHKRLLAEMPEVLEPALEPIARSLESISEQIRHFDRQIEKLGQEHYPETQVLRAINGVGALTSLAFVLTIEESSRFKKSRQLGPFLGLTPKRDQSGTTDKPLSITKAGDTYLRRLLVQSAQYILGPFGQDCDLRRHGLKLAARGDKIAKRRAVVAVARKLAVLMHSLWKNNSPYDPDYQLPSTGQLAA

SEQ ID NO: 194205 - protein, 342 aa, unidentified
MKLTTIGIDLAKSVFQVHGADEKGKAVMKKQLKRAQVLPFFANLTPCRIGMEACGSAHYWARKLQALGHTVQLIAPQYVKPFVKRNKNDAADAEAICEAVTRPNMPTVPIKNAEQQATLSVHRARQGFVKARTAQANQIRGLLAEYGIAIPQGISHIAKRVPEIIEDGEIELPGSFRLLIQRLVDHLKELDRQVGELETEIQRWHRDNAASQKLAKIPGIGPMTATALVASIGDARNFKDGRQLAAWLGIVPRQHSTGGKSTLLGISKRGDTYLRTLLIHGARAVIRVAERKPNADPWLMSLLARRNKNVAAVALANKNARTIWALLTHDREYEAHYVRAAA

SEQ ID NO: 194206 - protein, 403 aa, unidentified
MNNVAGIDVSKGKSMVSVLRPFGEVVAKPFSVGHTGSELKELADYLKSLDGETRVVMEHTGRYYEPVARFLHEEGVFVSAVNPKLIKDYGNNTLRKVKTDKADSRKIARYGLDNWAELRQHTPMDTIRMQLKTLNRQQSLYTKTKTMMKNNLIALLDQTYPGVNALFDSPVREDGSQKWVDFATAFWHVDCVRNMSLTAFAERYRKWCKRHGYNFSQSKAVEVHAGAQDLIAMLPRDALTKTMVRQAIDALNAVSASLERLKAEMQALAAQLPEYPVVMAMYGVGDSLGPQLMAELGDVTRFTHRNAITAFAGVDPGADQSGTHEAKSTRVSKSGPPELRRALFLVMDCLLKTQPQDDPVYRFMDKKRAEGKPYLVYMTAGANKFLRIYYGRVKEYLASLEGN

SEQ ID NO: 194207 - protein, 341 aa, unidentified
MSLVMGMDQHRAQISAEWIDTVTAEVFRARIAPADRAGVRKFLKRFAGEGLEVALEATTGWRFVVEELERVGAEVHLAEPTETSGMKSKKKRAKTDWADARHLRELLLLGRLPESWIPPAHILDLRGRVRLRHTLSHQRTEWQQRIQAVLYHHGIPQRRDLLTLEKRQWLARQKLPAGAREQVTIALEMIDALDIQLAPFDVALRAYARKQLGCRALIDQIYGVGELTSVTILAELGDARRFPSSRDTVRYSGLDITVYQSDQRRAPGHLSRQGPPALRWALYEAAQRARFPASPDRDYYLQLAERIGGNRACLALARKLLKRSYHILKTLGDDALKPAAA

SEQ ID NO: 194208 - protein, 415 aa, unidentified
MEDWSGGFHLSFPKISEGGAILYKLFVGIDVSKDFSSARGLDPEGQSCFSLSFPMNATGFSEVWRVIRSHCEDLTKVMVAMESTGCYHLNLYSFLISQGMKTVVINPLLIANFAKLSLRKTKTDKKDALTIAQFLLIHKDAISQISLSQDVQDLRDLSRERESLTVLIASMKNDIKRILQSTFPELESLCDVFSETMLQFLKEFPSARLIKGANPRRIAKVLMHSDKRKRVSVSAGEMIKAATGSVASMSAAKEFILPEKISILFHLIEKQEKITKALVKLCESMMIEDLEIITSIKGISDKTGATFLAEIGRFNDFDSPKKIIAFAGIDPTIHQSGKFEGTSKISKRGNRHLRRVIFLMAKHVSREDTLFKRYYLRRRMEGLSFKEAVLATAHKLIRVIFAMLTNRTYFCAKEN

SEQ ID NO: 194209 - protein, 407 aa, unidentified
MDVIYPRCAGLDVHKQTVVACVRIVGDGPLLQEVRTFSTTTSGLLALCDWLDAFGVQHVAMEATGVYWKPVWHVLEGHFDLVLANAAHVKNVPGRKTDVNDATWLADLLAHGLIRASFVPPSAVQELRTLTRTRKQFVRERVSHVQRIEKVLEDANLKLSVVISDILGKGGRAVLQALIDGHSDPEVLASRITTRVKASRAELLEALRGRASAHHRFMLKLHLSHIDALDQAIAAVEKEVGLGLEPFRQAAKLLSTMPGLSAVSANVVVAEIGIDMSRFATPGHLLSWACMCPRNDESAGKRRSTRLRRGGKWLKTTLVQAAWAAVKVKGSYLQAQFHRLRARRGAKKAIVAVAASMLTAAWHMLRNGTEWHDLGAAHFDRADATKTANRLIRRLQQIGYVVQATPA

SEQ ID NO: 194210 - protein, 411 aa, unidentified
MSYKIAGIDVHKKVLMVVVIDGTTPEEKPERRRFATMPSDLHRLLIWLREQGVEEAVMESTAQYWRSVWLELEPHMRLHLAQAFSNRAPRGRKHDFKDAERLVRRLIADELILSFVPGGEQRTWRSMTRMKLQMTRDRVRLQNQIECLLEEMRIKLSMVVSDLLGASGLRMLRALAAGETDPKQLAQLGDKRLQCTEEQLVDALTGRPQPMHREMLALQLERLQLIDMQIAKLNGLIAQAMKPHQEAVMRLAEVPGLGVDSAQQIIAEVGEQASTFPSAAELTSWVGTCPGKDESAEQNHSSRSAKGNKYLRRVLNQAAHAAVKKKGSYFQVVFRRLLPRLGYQSAIWAVAHRLCRVVWKILHEGVRFIEHGIEPDPKAKIRHARRLAQALRKLGYQVTITPTNLASEMQM

SEQ ID NO: 194211 - protein, 340 aa, unidentified
MNATTYGLDVAKRVFQMYWVDAQTGEIVNRRFGRDELIRFLAQRPAGRVALEACGSGHWWARKLKALGHEVVLLHAKFIRPFVQTNKTDAADARAIWTAVQQPGMRTVAAKTEDQQAMLALHRMRALLVKFRTMQVNQLRGLLYEFGATFRSGRVAGLSEIRARMAELEGALPGTMVCSLRDQLNRIDEVQQDIDRLEKRIGSWQKQDAACRAIAEVPGIGKLTATALVATMGDAKTFKSGREFASFLGLVPRQSGTGGKIRLGSISKRGDPYLRTLLIHGARSVMCHAKVPTTWQREIQARRPANVAAVALAHKMARTAWAILAHGRAYQKDYVSVKPA

SEQ ID NO: 194212 - protein, 416 aa, unidentified
MNAVGIDVSSRKSTVAVLRPLGEVVCLPFDVTHDIAGLASLVEKLKALDGETRVVMEHTGRYYEAVEKALHEAGLFVCAVNPLLIKEYGANSLRRVKTDKADAVKIARYALDNWADLRDFTPMDAIRYDLKTLNRQFQLASKQRTASANNLIALLEQSFPGIRKCFDSPVRSDGTQKWVDFAHSFWHVDCVRKQPFAAFCERYRKWCKRHAYLFKQSNAEEVYALAKRAVVLTPKSKVVKVLVQEAANQLSSISRSVEVYRAEMDRLAAMLPEYPVVMAMYGVGKSYGPQLMAEIGDVRRFERKQALVAFAGIDPMPNQSGDKNVRSNKSSKRGSPYLRKTLFNVIRTYLQCAPQDEPVFQFLNRKRAEGKPFYVYMLAAANKFLRRYYAKLRDYFASLDTLQPVAPIPTILKALP

SEQ ID NO: 194213 - protein, 344 aa, unidentified
MKDITTVGVDLAKNVIQVHGVDRRGKTVLKKQLRRSRFVEFFANVPACLIGMEACSSAHHWARELEKLGHQVKLMAPQFVKPYVKTNKNDAADAEAICEAVSRPTMRFVPIKNAEQQAVLALHRARAGFVKARTAQANQIRGLLGEYGIILPQGIAHITKRLPAILEDGESELPGAFRQLLIRLGAHLKELDRQVGELEGQIETWHRADAASRRLAQIPGIGALTASALVATVGDARSFHNARQLAAWLGLVPRQHSSGGKALLLGISKRGDAYLRTLLIHGARSVVRVAERQAGDLPAWLQQLITRRHKNVAAVALANKNARTVWALLVHGRDYQATYAGAAV

SEQ ID NO: 194214 - protein, 418 aa, unidentified
MKSIKAEKIKTINEKMLVVALDIGKKVHYGYFRTPKNQDIKPFPFHNTGQSFNKFWEKLCRFKEKHMLDEVVIGFESTGPYAEPIANYLRKKPLKLVQVNPMHTKRIKELTGNSPNKTDKKDPRVIADVISLGHSLTVVVPEGAAAQLRRLIHARERAMERRTAMNNQLQDLVFVIFPELGDIIKPSTKTGMYLIKNYPGPERIVSIGIETLCNIVRKISRGKFGIDRAEKLYNAAKESVGITEGKESILLETSHLVSNIETENRYIKSLEEQMIVYLDQIPYSHSILSIKGIGNITVAGLIGEVGDFRKFRTISEVMKLAGLDLFEVSSGIYKGKHHISKRGRALMRKLLFFAAINAVKSHGIMHARYQKMLNNGTPKIKALIAVSRKLLRIIFALARDNAQYEKNYNRKHDFKLAA

SEQ ID NO: 194215 - protein, 346 aa, unidentified
MHYIGMDCHITTLDFAVVNEAGRLVKANSVATSVNGLIEFVKTVAPPRTIYMEEGTLAAWALETCVRFREKLVITDAKKNRWIGSSGQKDDAIDALKLAQLARGGYIKEINHPVGQRRRFRELMIAYHDTVRSTTRIKNKIKAKFRQNGIQCTGVTVYSETYREEWKGKLPQEATLLLILEGLWRQLEQSEQTEKELLAAARAQAKHYPEIKHFGALPGIGFISAATISAMLETPYRFADKRKVWMYAGLGIMTRSSGDKIYSEKLSKDYNRLLKYTLKQAAEAAIQAKNNPFRRKYSDMTLLHGIAPHRAKLTIARDMLATMWAMWRKGEKYSPEIREKAVYKQG

SEQ ID NO: 194216 - protein, 352 aa, unidentified
MKDTLLSFVGQVFYIGIDVHLKSWTVTIRTSGLELKTFKMNPVPDQLAVYLHQRYSGGRFKTAYEAGFCGFWVHHDLINLGIENIVVNPADIATTLKEKQHKCDPRDSRKIARELECNNLVPIYIFSLEDQTLKSLCRLRITLGQDMTVIKNRICGYLNLYGQKVSVEETRWTGGYINKLESISEKLPNGETLKHLVISLKTKKKEILDITRDLKKAIIRAGKEKLFKLLRTIPGIGFLTAATFITEVVDINRFRNFNAFAAFVGLMPCIESSDEKEKIKGLSKRKNKYLMKMIVEAAWVAVRKDPVLLKSYTELTKRMKGQKAIIRIAKKLLNRVKAVWLKQTEYIICTNI

SEQ ID NO: 194217 - protein, 457 aa, unidentified
MMETKRRREQRSMLPVHPDAAAIDIGATVHVAAVGPARDPEPVRSFGTFTGDLHRLADWFAQCGIKTVVMESTGVYWIPIYEILEQRGFEVRVVNARDAKHVPGRKTDVSDAAWLQRLHEFGLLRGSFRPQGAIAALRAYLRQRERLLDYAAAHIQHMQKALTQMNLQIHHVISDITGATGMRIIRAIVAGERDPDTLASHRDIRCHSSAETVRQALIGNYREEHLFALAQAVELYEVYQAKVATCDEKIEGVLERLKQPCRAPAKPLRAARHKTRQPNAPAFDARGALYAVLGVDLTQIHGLGPYLALKLISECGTDLSAWPSAKHFTSWLSLDPGNKISGGKILSSRTRPSGNRAAALLRLAATTVGRTETALGAFYRRLSARIGKAKAVTATARKIAVLFYNAVRHGMDYADPGASYYEERYRRRVLTNLQRRAKAFGYVLQPTEIKVVPMAVS

SEQ ID NO: 194218 - protein, 456 aa, unidentified
MSKLSKANVGMAEARPFAGMSQVHEHAAGVDVGAHEIMVCVSGAEGMQMVRSLGSYTVDLQAIGKWLAEHGVETVAMESTGVYWIPLFEELEHRGFHCHLISSRSLRRVPGRKSDVVDCQWIQTLHSYGLLESSFRPEADLVALRTLLRHRAQLIQHRAPHILHMQKALLQMNIQLSQALSDVSGETGQAMIRAIVAGERDPHKLAALRNYRCKKDEQEIAKALTGTWREEHLFILKQSLELYDFYTRQLEACDAEIEHAYSLVRPEWEVEEKQDMPESKRNSHSKNAPKKVQVRKHLKRICGVDLTAVHGVSASLAQTIVLEVGTDMSKFPNEKHFCSWLGLAPKKEISGGKVLKNNTLKTHNRAGQAFRMAAGSVMRADCAFGAFYRRQKARLGPAQAAVATAHLIARIVYRMLKHKVEYEPLSLAQYEQHYREQQLKYLHKKAAKLGIQLTPI

SEQ ID NO: 194219 - protein, 376 aa, unidentified
MQAVQQQGYEQEAVLYMAMELSNSSWKLGFSSGERIRRKSIEARDRARLIEEVQLAKHKLGLEQEAGVVVCFEAGRDGHWIYRWLSAEGFKVLEIDSSSIETPRGRKHVKTDRIDVENLLDLLLRYCLGFRKAFRIVRVPSEEAEAGQRLHREDEFLIRQRARVSNRLKGLLVTQGVMKVPLKRGFETWLESVQRWDGSGLSAALKAELTRLYKQYQLMNAQIVEVAQSYQQELLGDTAVADKRRKLEQLKSIGPKTSRILSAEVFSWRVFRNGKQVGGMSGLTPTPAQSGDVQREQGISKAGNRRVRRVMIELAWLWLRWQPDSHLSQWFTQRFAHGGKRMRRVGIVALARKLLIALWRYVEWGVIPEGAVLRAA

SEQ ID NO: 194220 - protein, 433 aa, unidentified
MKKHAYRAKNINELSVESMRAKLSGERIIVAIDVAKRNFVVGFAGSDGEVVEHAKFTHPIQTRQFLELLGRVRGQAVVEVLMEPTGTYGDAMRGQLAAQGFATFAVSPKRCHDAAEIFDGVPSLHDAKATMILARLHVQGLSKPWPMEDEARRTLRAAIARRELYAAPLEADQGRLEALLSRHWPEFFEHLDPRSRKTPLALLAEFPGPQEVSGAPDAAAKRMATFSRGRLSGDTIGKVVLSAKSTLGVPMHEQERKLLRELAHQMLELWRQVDRTDDEIAELARSQPATSALAPTVGLVTSAVLVAMLGPASSYPSAGAYVKAMGLNLKEHSSGTSKKPGTGLHLTKRGPGLVRKYLFLAALRLIQTDPLCRAWYETRQAHRRGEKLKAVIALMRKLARALWHVGRGQPFDAAKLFDTRRLAVQEPARVVNG

SEQ ID NO: 194221 - protein, 425 aa, unidentified
MEVIHRRCSGLDVHKQTVVACVRLVSDGKITREVRTFETTTSGLLLLRAWLTEMGCTHVAMEATGVYWKPVWNILSDGDFELVLANAAHIKNVPGRKTDVSDAVWIADLLAHGLIRSSFVPEQEIQELRELLRTRKQLTRQQSRHILRLQKTLEGANIKLDSVITDIIGKSGRAMIQALIGGETDPVKLAALADRRIKASPQELREALHGRVTDHHRFLLHLHLQHIEFADAAIQDIDRNVTALITRMDQEVEAGQTRATFQSLILLLMTIPGIDVLSARIILSEIGRDMSRFPTAGHLLSWAGLCPRNDESAGKRRSTRLRKGAPWLKTLLVQCAWAARRKKGSYFNAQFCRLKGRRGPKKAACAVAASLLTTIYHMLKDGTQFQDLGANHFDRRSKDLRAKRLVAQLANLGFDAKLTPLAQAA

SEQ ID NO: 194222 - protein, 354 aa, unidentified
MSQTPNTGIAVIGIDIGKNSFHVVGHDARGAIALRQKWSRGQVEARFANMPPCLIGMEACVGAHHLSRKLASLGHDARLMPAKYVRPYSKGQKNDFNDAEAIAEAVQRPTMKFVATKTAEQLDLQALHRVRERLVSQRTGIINQIRAFMLERGIAVRQGIGFLRTELPTILATRTDALSPRMLRVIEELAGDWRRLDQRIEGLTGEIAALAHQDQACSRLMTVPGIGPIISSAMVAAIGTGDVFSKGRDFGAWLGLVPKQISTGDRTILGKISKRGNRYLRVLFVQAAWVVLVKIKDWERYGLKSWIEAAKKRLHHNVLAIALANKLARIAWAVLAKGRAFELTRTDDASVRPA

SEQ ID NO: 194223 - protein, 426 aa, unidentified
MPFAALDLHKKIVEAVVLDEHGAPAWRGRFPATRPALEQFARAHLSPQHHLALEATTNTWAVVALLEPFVAEVVVSNPLRTRAIAEAKIKTDRVDALVLAQLLRSDFLPRVWTPDPATRQLRSVSTERANLVADRTRLKNRIHAVLHQRLIEAPAGDLFQPTSRAWLEQLELDPLGRQTLDRHLRQLRRLDEELTALTDGLAVQAHADPRTRLLMTLPGVDFPVAQTLLAALGEIDRFPSADRAAAYLGLVPSTRQSAAHCYHGPITKQGNSHARWMLVQAAQSLARHPGPLGVFFRRLQKKKNRNVAVVATARKLVTIAWHMLRANEPYRYAQPATLEAKFSRLRIRATGKRKRTAPAKGSPRAAAYGTGKRTRAVPSLDQVCAAAELAVLPEAAPGELRMLDESGTAGFAQAIRKPKRVARRSA

SEQ ID NO: 194224 - protein, 343 aa, unidentified
MQAFTTIGLDIAKSVFQVHGIDAEGKVLIRRQLKRRYVLAFFQKLQPCLVGIEACATSHHWSRQLKALGHTVRLMPPAYVKPYVKRQKNDAADAEAICEAVTRANMRFVETKTPEQQSCLMLHRTRQLFIRQQTSVINAIRAHLAEFGIVAPVGRKGVEQLLAVAADASDHHVPEMARACVVALGAQLRMLKAQILEFDRRILAWHRSNEICQRLDELPGVGPALATALVASVADPKSFRSGRNFSAWIGLVPKQHSSGGKDKLGGISKQGDRYLRSLFTAGALAVIRYAKTHGTQHRPWLTALLARRPTKVAAIALANKIARMAWAMMAKGERYKEPVALAA

SEQ ID NO: 194225 - protein, 416 aa, unidentified
MSITPSAPSSEGATIKYVCGIDIGSQSCAGCMCRPDKSVVLKPITFANAREGWQIWEEKLNRLDALPNQILIGMEATSRYGENLYHELEQRGYVLRLLHPGQTHHFHQQQGLRAKTDRLDAMTIARVLLSGEARIGYVPSEQIATYRELVRLHTQLSDTAAGYQNEIQALVVVLFPEFTQVFADPCLLTALAVLKAFPSAQALAEAGVEPLLQLLRAQPSAHYGRPTAQKLVAFAKQSVSSGRAIAGRSVSLRILCDQLEHTRANLARLDAEIEQHLRTDPGAKGLQQVPEFGPKTLAVLRAELGDVQRFARTDEVIAYGGMDIQIKESGLWKGKAKLSKRGSGLLRRMLYMTALRCIHREDSAFGVYYQRLVERGLKKGSALMAVMRKLLAVAAHLLMHEGEEYDPRKVCGSSAG

SEQ ID NO: 194226 - protein, 369 aa, unidentified
MVIRITTYRKERRYEPREIYRQWTSTKQRSQLQSWIPGGKLIMESILETKAATILEFLQGLHGSLSVTFEEGTSAAWLHDLLKPHVTRLVVCDPRKNALLKDGSKSDRIDARKLAELLRGNQLTSVYHGEHGMRTLKELGRSYVTITQDLVRVMSRIKALYRSWAIPCSGTSVYAPRHRAEWLGKIPEPGVRLRAERLYQQLDLLQPVRQRARRDLLTESRKHHAVKLLRQIPSIGPIRAALLVAQLQTPHRFRTKRQLWAYSGFALETHDSGEYRYVRGKLQRNRERMTVRGLNNNHNPDVKNLFKGAAISASTHPGPMYDFYVALLEKGMRPTMARLTLARKIASITLTIWKKGVDFDATQLHRQEA

SEQ ID NO: 194227 - protein, 418 aa, unidentified
MNESFRWVVGIDWAKELHTVALQDNEGRSVAERKLAHSGADLAAFCSWLIEKTGAEPGEIAVAIETPRGPIVDVLLERGFKVFSINPKQLDRFRDRFTVAGAKDDSRDAKVLARSLCSDPQAFRLLRIEDALVIELRAWLRIHDELTQDRTRLSNRMGDQLWRYYPQIGDVTDDLAATWFLDLWELVPTPGEAARLSEKKVARILKSHRIRRFAADEVLQTLRRQPLAVAPGTTEAATAYIRSVVARLRVVNEQLKEADRRLEEITTAIQAKAEVEPGQICEQRDVAILRSMPGLGRTSVAALLSEASEPLRRREYSVLRLLTGAAPVTRRSGKSRYVVRRLACHRRLRNALYYWAHSAVQHDPVSRKRYEALRQRGHGKARALRSVGDRLLYVLCTCLQRQTLYDPNVKSTQSALAA

SEQ ID NO: 194228 - protein, 343 aa, unidentified
MIGVDPHKGSHTAVAIGAAEETLGQVRVRASAAQAERLLAWAAPWPQRTWAVEGAGGLGRLLAQQLLAAGERVLDVQPKLGARVRLLAAGAVNKNDPNDARSVAVAALRSASRREVTADDHAAVLKVWSKRHRDLGRTRTQVACRLHAVLCELIPGGVSKRLTAAHAGGLLEAITPSGAVEAARCELAAAFLEDLRRIDAQMRDAKKKLTVAVAASGTTVTEVFGVGPVVAAIVIGAVRDVSRFPSRDHFAAYNGTAPIEVSSGPRKIYRLSRRGNRRLNHAIHMAAVTQVSHRHSDGRAYYERKLAEGKTPKEALRALKRQVSDTIFARLQADAQRAAAGTR

SEQ ID NO: 194229 - protein, 367 aa, unidentified
MRKISTVAAKESSDFSQPKLTIGLDLGDRSSWYCVLDERGELQGEGKVSTTAKAMRGAFHGMPRSRIALETGTHSPWVSRLLSELGHEVIVAHARKVRLIGESRRKDDRRDARTLARLARIDPQLLSPVKHRSAQAQADLTVIRARAGLVRARTALVNTVRALAKSYGERLRSCNVRNMDPEKAEGLSPELQAALEPLLRTIESLSEGIREYNQRIEALAERSYPEVALLKQVKGVGTLIALTFLLTLEDPHRFRKSRDVGCYLGLQPGRRNSGQSEPQMHISKEGDPYLRTLLVQGAQHILGPFGADCDLRRWGLKLAERGGKSGKKRAIIATARKLAVLLHRLWISGDVYEPLHNSRQLVVSAVA

SEQ ID NO: 194230 - protein, 399 aa, unidentified
MLAVGIDISKSKSVAAILNQDGSMHTSPFEFHHTQPELDAFIKYILNSKQSATILMENTGHYHYPVLKAFQEAGLPVCMVNAYQIKKFGDMDLRKAKTDKKDAVRIARYALEKSYSLVPYTSMEQKYEDLRFLARQYNQRMLTLKTNKVFLLNLLDETMPGITNILPLTTRTPETSLSVLFINRFKSYDRIKKMGKSRFLDAFEKIARKSRNRQTKTYGLAIYEAALRNITTRGENEYTLAAQDQCLELVCESQKAADSIILKMKTLAETLPEYAVLRSMAGVGNRLGPLILAEIGDIRRFHSGKALNAYAGNDAPPYQSGTFESHNRHISKRGNAALRKYCFEVMQALKLTRPQDDPVYLFLLKKEQEGKPYNVAKMAGVNKFLRIYYARAMETLKQQ

SEQ ID NO: 194231 - protein, 331 aa, unidentified
MKFKEFIGIDISKLSFDVRIHSNQQKSVFKNNNPGFKEMMKCVNKNLSCGKDEMLFALEHTGIYSLPICIFLSENQYHFVLLPGLEIKRSMGIQRGKNDKIDSGRIAEYAYQKRDKITPTQLPFKNVLKIRRLLSIRDRLVKHRKGFLKDRGENKKFLKQSENKILFEVIEKSIYDINKQIDKVEKELDNIVKSDELINKQYNLIISIKGVGKQTALFIIAFTNCFTRFDNWRKFASYSGTAPFPYSSGTSINGRTKVSNLANKKIKVLLNMCARSSIEFNPEMKSYFQKRKAEGKNGMSTLNIIRNKLLARIFAVIQRGTPYVDTHKFAA

SEQ ID NO: 194232 - protein, 425 aa, unidentified
MAAAVDRNGSEPEFAAIVAFDWGNDKHAWAAQDTESGTRERGELEAKPEEVDAWMTTYLARYPGRRVAVALEQKRGALLYMLMKYEQVVLYPIHGATASKFRAALYPSGSKDDPKDAELLLDLLTQHRDHIRRLDPDTEETSQLQLLVEKRRTLVDERTRQSNRLTAELKMYFPQMLGWFTDVQSPLVADFLNRWPTLPEAQRARPETVRRFLHQHNCRKAERIEQQLEELQHAIAVTTDPAVVEPTVIMVRALVEGIASLSKGIKEFEDKIEAVMAVHPEAKLFRSLPAAGAALAPRLVAFFGTDRQRYASGEEVARFTGIAPVRERSGKRDWIHFRYACPKFLRQTFHEWASHTIGQSVWARAYYDQQRANGSGHHAAVRALAFKWIRILFRCWKDRKPYDEQTYLAALRRRGSPLAAALPNA

SEQ ID NO: 194233 - protein, 425 aa, unidentified
MNYKQNEKINQVKESTLVVGIDIGSTTQYARAFDWRGIELGKVFTFSNSREGFEAFKAWMRHLQDKYRKSDVIAGIEPTGHYWFDLGAYLEDEGILLVMVNPYAVKQTKELDDNSRSKNDRKDPKVIAKLVTEGRYSAPYTPDGVYADLRIMVANRKRLIREMTQIKNRFARWFAIYFPEYTDVFGDYEAQSSMLLLKKVCTPEAIVELGAEKINQIWRDAKLRAVGMKRATTLCETAKRSIGLKKGSSAAQYEMKLLLEDYEYKKAQLDSVMEEIEKLCRKIPESEQMLAIKGIGVITVAGFLAEVGDVRRFESPRQIQKLAGLSLRENSSGKHKGQTTISKRGRSKLRAVLFNAAIPLIAKNPEFKSLHEYYTTRANNPLKKKQSVIAISCKLIRVFYAILAKGVTYDAQKLISDIHRQPQVA

SEQ ID NO: 194234 - protein, 393 aa, unidentified
MRAIGIDIASEMHTVAIVNEASELVHKATEFAEDAEGYRRLFELLGEPKDCLVAMEATGHYWQNLFAALAAAGFPVALLNPLRTRRFSEIDLERTKTDAIDAVGIARFAAQKRPPATRLTDSATQDLRELVRLRDRLVQDFTDRKNQLHRLVDLGFPEFTRYVKTLASELATTILHAYPTAAAFPATPRQLSKLCYDGKHKVGAELAHALVEAAKVSVGRHHGEPYRLQVRYACEDLDVLRRRLRDLERDIEQTLKTHEVGTLLTTIEGIGPQTAARLIAELGDPASFRNGAALASYVGVVPGLKHSGKRKPKRAGLAPIGHARLRRSLWMPVLTAVHKNPWLRAFYRRLRSDGKLPKVALIAAMRKLLHAVYSVAKNRKPFVPILNAAGVAS

SEQ ID NO: 194235 - protein, 292 aa, unidentified
MKRNTKYVGLDVHQAPTVASVREAGGRVIARSILATDAHAIREFVAGMRGTIHVALEEGTQAQWLYDLLKPQVDRVVVCDRRGEERTGNKGDQVDADGISEQLRCGTLRSVYHGNLHQADLKELTRAYRSLVEDGTRVMLRLKALFRARAIRSPGTSVYQPSNREQWVGPLAERGARLRAETLYAELDLIRTLQTKAKSAMVAEARKDPAWSVLDSIPFFGPVRISLLIATISTPWRFRTKRNLWAYAGLAVVTHSRNCRGVPARRCSPWRRYQLGPRAADPPRRGGRWSRS

SEQ ID NO: 194236 - protein, 426 aa, unidentified
MAVVMIGVDPHKTSHTAVAISPAEEPLGQLRVRAPAVQAERLLGWAQAWPERAWAVEGAGGLGHLLAQQLLSAGERVLDVPPKLAARVRLLATGNVNKNDPDDARSVAVAALRSAQVREARRDDHATVLKVWSKRGQDLGRARTQVACRAHQVLCELVPGGVPGEITAGQAGQVLASITPAEAVQAARCELAAELTEDRRGVDIRIRETRKKLTEAVRAAGTCLTGLFGVGPVIAAAVIGDVRTVSRFASRDRFASYNGTAPIEVSSGGRKACRLSRRGNRRHGHAIYMAAVTQIRYRHTKGRACYDKKLAEGKTPKEALRALKRQISDAIFACLQEDARRAAAAAGKSPGGQPGNHSASRAAGSHPDHRLFGQATPGPASHPTTAAPFPAPLPSRASEGPGQGPGAARPRSGARRASSTRPPASR

SEQ ID NO: 194237 - protein, 346 aa, unidentified
METVTWVGMDVHARSTHAAAVIAAAGELRRARFGGGAEAVVAWLGGLPAPVRACYEAGSTGYGLARAAQSAGVAVGVIAPSKTPRAPGERIKTDRRDAELLVRLLMAGQLHPVAVPTPRVEALRDLTRARDRIRGDLLRARHRVSKLLLRYGRVWPSDRGTWTQEHHHWLRRQRFDDPNLELAYLDALAAVDALMRRRDLLDQRLLVAAQDADVAAAVARLRAFRGINTLTALALHAEIHDWHRFGRPGRLAAWIGLVPSLYQSGESAQSGAITKSGSRHARRLLVEAAWHYRRRPGRGVTLTRRQEGVDQHTIDIAWRCQHRLYRIHTRLRDRRKPANVARPPAP

SEQ ID NO: 194238 - protein, 481 aa, unidentified
MSRRKMSTFERLQRGEKLSRRERKQIGRQLQAEEPGLEIVHRNVAGIDVGDESHFVCVDPQRGQPPVREFGSWTAALHEMVQWLKSCAVERVVMQTTGVYWVPLQDVLERAGFAVVVVNARATKNLPGRKSDVQECQWIRKLDRYGLLRPCFQVPETIRSIRTLWRLRGRWVEDAGRTIQQIQKALTTMNVQLANAISDISGKTGMAILRAMVEGEHNPWALAKLRDERIRASEEEVAHSLQGNWREDVLFELDQVVKAYDFQQQQIAACDQQLEKYMKAQPTHSKAPAVPVEEGKPKAKRCRKKARKPRKNQPAFDLEGELKRVLGVDLTAIDGVKLMTIQTLYAEVGADLSAFPSEKHFTSWLMLAPKREVSGGRVIKHTSLHGRNRLANALRMAAESLKESDSYLGARYRSLRGRLGGVKAVKAMARYLGCLIYRMLTKGKAWVDRGAAWYEQKRRERELSHLQRRASAMGLQLVPTK

SEQ ID NO: 194239 - protein, 339 aa, unidentified
MELYSAIDLHSNNSHVGIMVVQQNRVFYRKLPNDKRVIENAFAPYREQIKGIVIEATLNWYWLADHLMEKGYRVHLANPCGIQKYSGLKHSDDKHDAFWLAQMLALKILPEGYIYPKQERPLRDLLRKRSHLVRIRTSLILSLQNIVLRNYAVKLCSKDLKKLTADPAAEFLKDQEELALAGKASKETIDFLTRQIQRIEKAVQRKVVLKEPYSKLLTLPGVGIILAVTILLETGPIERFKEVGHYASYCRKVSSRWTSNEKKKGRGNTKNGNRYLSWAFSEAADHARQVHSRSSDFYNRKLSQTNAVVAHNALAHKLARAAYFIMRDHVEFKEDKMFG

SEQ ID NO: 194240 - protein, 346 aa, unidentified
MMTQILKQVVGIDVAMDELVCVAAQLDIDQRVQILEKKSFTNNHEGFTQLVEWKATCFKEISYPLGSASKVWFVMEATGVYNQHLAYYLVGAGEEVSIQLANRVKNFSRSLNVKSKTDLMDAEVIAKMGLERKMEAWNPPSDKMRQIRSLCREYSERIRKRAKLRNQLHALGKAYGTSPKIMRRYKREEAFVTELIEEIEVELKMIVQEDDLLRDKMKKLKTIPGLGFMTLIILIGETQGFSLIENGKQLASYAGFDVVEKQSGRSRGKSYISKKGNRFIRQALYMPALAASRCNQPMKDFYQGLAERKPAKRIAVTAVARKLLILTYTLWKNDTVFDPNYGVKAA

SEQ ID NO: 194241 - protein, 367 aa, unidentified
MSIVKYIGLDVHKNSISIAIADEGRDGEVRYYGKINNDFKQLYKIARAQISNGAEPRFVYEAGPCGYQLYRFLSEQGFSCVVIAPSKIPRKSGERIKNDRRDATSLARLYRAGELTPVYVPDPEDEALRDLVRARDDAQKALRKSKQQLGAFLLRHNLIYSGRTPWTAPHFNWMADITMKHPAQQVTLQEYIDTIECCAKRVERLTDQIRKLADQSRLEPLIKSLQAMRGVSLIVAATIATELGDLQRFENPSQLMAHLGLVPSEHSSGDKVKRGAITKTGNSHVRRALIESAQAYRLPARKSRTIRKRQENLSEKICEIAWKAQVRLCGRYKRLSATGKASNVIKTAIARELAGFSWAIAQEVNIC

SEQ ID NO: 194242 - protein, 371 aa, unidentified
MISVGIDVSKGKSTVCILKPYGEIVSKPFNITHTHKDLSELSSMLFRLNDEVKIVMEATGIYHLPVLTYLQEKGFFVSVINPYLMKSYRNESLRKAKTDKIDSRIIANYGIDHWFKMKEFQTSGEIYEELKLLGQQYRHYMKLHLLSLAELTHLLDLTMPGIKNLLASWNETNRKDKRSDFVERFWHYDVITSMSEQEFTEEYILWAKEKKYVPSQEKAKVIYTLAQESIPTLPSETSSVKMLVTEAVRVLKEVDATLGLILSRMQEIAKTLPEYSVVREMGGVGNTLAPKLIAEIGDVRRFRNGKALVAFAGIDPPPYESGQFVGCNRKISKRGSASLRKVGYETMRSLKMRSRPEDPVYRYVVKKGIRR

SEQ ID NO: 194243 - protein, 344 aa, unidentified
MKFTRCGLDIAKQVFQVHGVNEHGVVKGRKTLPRAKVLEFFAQLPPCLIGIEACGGSHYWGRELTKLGHTVKLMATHYVMAYRKRGKTDANDAEAICEAVGRPNMRFVAIKSEEQQAVLMVHRARTLAMTNRTAQVNQIRGLLSEFGLVVAKGVVRLRRELPRVLEDAENALPSLAREVLSGLLEQLRAADLRISAYDRQIRALAEASEPARRLMRMESIGPQTATALVAAVGDPHVFKNGRGFAAWLGITPRQHSSGGKRRLGQITHQGDCYLRTLLVHGARSYLRVVDKKTDAKSAWARRLKERRHVNVAAVALAAKHARIAWAMLAHGTEYRVAGPQTAAA

SEQ ID NO: 194244 - protein, 321 aa, unidentified
MNKSNQIYGVDISKNVFDVVDSEGNHSQFKNDGSGFKVFLKALPDDALVVMEATGYYHYRLAQFLYEQDVKVSVVNPLSVKRFIQMKLSKVKTDKSDAKAICEYATVNEVPLYTARDKNQAECLQLMRLIDIYLKQSTALKNKLHGEKTLGKPSKTVYHSLNRSLKAVQREIKVLEDRLTEIVKEEQQKQLTLLKSIPGMGNKTAIMLIVLTDGFSNFENARQLCSYTGITPSLRESGTSVRGRSRITKMGNAKLRNLLFMCSFSACKHNKACREIYERIIAKGKSKKLALIAVCNKLLKQAFAIAKSGLPYQENFVSKLA

SEQ ID NO: 194245 - protein, 344 aa, unidentified
MTKIETIGLDLGKDLFQVHGVDSTGRVTFQKTLMRAEVTKYFGSIRPCLVGIEATGTSHHWARTLRRCGHSVKLMPAAYVKPYVKTNKNDAADAEAICEAVRRPTMRFVPIKTEKQQASLMMHRVREVLVRQRVTLSITLRALLAEFGIVARRGHAGLRETLAFVEAPRPTQIPKPARKTLQCLVDAIRSLIDKIKAREADIAAEHDANARSRLLTTIPYVGRVTAHALISTIGDASQFRSSRELAAWIGLVPRQHSSGGKQRLGRISKAGDRYLRKLLYFAARRAVHDQKLARHQVFRWARNLRKRKTPRVANVALAAKLARIIWAMLRHNRAYSPTPTPATC

SEQ ID NO: 194246 - protein, 343 aa, unidentified
MKLTRVGVDLAKDIFQLHGVDRAERPVWCKRLKRNRWIKEIEQNVEPGVEIGMEACGGAHHWARLLQSKGYRVRLIAPQFVKPYVKSNKTDANDAQAVCEAMSRPSMRYVAVKSIEQQDIQAVHRVRASLISERGAKANQLRGLAYEYGLVAPREIAALRLAVPAWLEDASNGLTVRLRALLCGLYADLRALDERVRELDKEIRAIGRENEAVGRVQQLRGIGPLIASALVAMIGDARQFKNGRHVAVALGLTPRQHSSGSKERVLGISKRGDSYVRTLLIHGARSALRTAPGKNDRMSRWALALAKRSHVNVAVTALANKMARVAWAMLRHGTTYEPNGLAA

SEQ ID NO: 194247 - protein, 258 aa, unidentified
MSDLSSSFFVGADVSKSRLDIHHLDIHHTGRIGALALANDARSIGRLVRRLGKCSPRLIVMEATGGYERPLLRGLMNAGLPVVRVNPLHVRRFAQSRGILAKTDRIDAAVLADFGRLNVDRLRPMRPISDNARMLQELIARRRQLVEQCVANKSQREHATLKLVRQSIDRTIKHLCGEIVSVETEIQRLIDSDSRLKDKQAKLQSVTGIGKRVSRVLVSELPELGELDRRQIAALVGVAPFNDDSGAHRGTRHIRGGR

SEQ ID NO: 194248 - protein, 336 aa, unidentified
MKKTEFVGIDISKDYIDCALLNADRPGSFKDKKFKNELEGFEDMQQWLIKNKIDLNSCLFCMEHTGTYGLVLFAWLSQQELDFCVEPGLRIKHSLGMVRGKDDKVDARRIADYALTHNAKLKLFSFPSEQIVQIKQLLTYREQMVRIRTSLKNSIKSHEKYEQITKKNIVTKDISTQINDYNKRIKQIEKEIIDAIKSDPQLMKNFKLATSVKGIGLVIASFMLVTTNNFSGFEDGRKYACYAGVAPFENSSGISIRGKTSVSHLANKTVKTMLARGANSAAKHDPEIKAYFNRRSIEGKDHKVVINAISCKLINRVFAVIKRQTPFVITYQQKIA

SEQ ID NO: 194249 - protein, 332 aa, unidentified
MKFSETIGIDVSKSWIDARMHLARLERRFDNTIGGYKKLIKWVEKNLLLPKESILFAFEHTGLYSYGLSSFLSSGGYSFILIPGLELHRSMGIVRGKEDHIDATKIALFAYRRREEIIPYQMPARIIDHLRHLLSLRDRLVVQRAGYQASLKENAHFLQKNQDPDFFQIHEKMIHYLSKQIDKIDLKLATTIQQDQNMNHLFEMICSIKGVGPQTAYYMIVLTHGFILFSEWRKFASYAGTAPFPYQSGSSIRGKTKVNHMANKKIKSLLHSCALSAMLYNPEMKAYYNRRSESGKSKMSTLNIIRNKILARIFAVATRGTPYVDTHKYAAA

SEQ ID NO: 194250 - protein, 487 aa, unidentified
MTRRKMSTFERLKQGKKLNPQQRKELGRRLQAQDPGLEIIYRDAAGIDVGSESHFVAVPPGRDPQPIREFGSWTAELQQMVGWLKKCEVGTVALQATGVYWMALCDMLEEAGIQVWVVNAQGTKNLPGRKSDVQECEWLRRLHTYGLLRNSYRPPEQIRGVRDLWRLRERWVKDAGRAMQQMQKALTEMNIQLTNALSDLSGVTGMAIIRAMLAGERNPWKLAQLRDKRVNASEEEIAHSLEGTWREEKMFELRQVVEHYDFMSKQMGELDRELQKRMAAMPGREIAGSAVAEEEKAAEMPQKKCKKPRRKKPPKNAPVFDLRAELRRLLGVDLLTIDGVNVMIAQAVYTEVGPDLSAFPSEAHFSAWLGLTPQRSISGGKLIRHEKRKVKNRLAIALRMGAETLERSDSYLGERFRCLKSRLGARKAVKAMARYLACLIYRLMTKGQAWIDRGKAYFEQKKAEREVRTLTRRAKAIGMQLAPLATT

SEQ ID NO: 194251 - protein, 378 aa, unidentified
MGRVFGLDVHNRYVHGYEWHEGQGRHFRFANTPEDWNSFLSTVTSGDEVALEATGSAFALYYRIAPHVRRVVVANPLEMRRLGSGRHTDRVDAERLVFMVLLGTLKEVWVPPTPIAELRRLLQYRERIQNGITRLSNQIWATLRGLGVATAGGDPLKLLAQDDIEVLPTAERVIVLSALRRLETERRELAILDAEIARQTRDVPEVRLLLSIPGVGRIVAAQIYAALGDARRFRTPRQVARYAGLDPTVVQSGDRSYRGHISKNGSRLLRRAMVEAAHIIALHDCGSLREFYRRKVDELGYTKTIVALARKLLIVAWRVLVTGEPYRAVRPSLWETKQRQLTRLAGRVDQEAEAVLLRLPRRGHSYVALVLSRQATTG

SEQ ID NO: 194252 - protein, 349 aa, unidentified
MVNFKTKAMKKTKRMQSYVGIDVSKLTIDVCLLNQELFQEHQQFENSAKGFSELKSWLRNKDFFSEKKSLFCMEHTGLYTRQLVSMLLHWGCSVWLESALHLKRSMGITRGKSDKVDAYRIARYAMTNADKAVLVQLSSSTLQQLKDLMRNRSRIIKALQALKVSTNEISRVDRATGKELLKLNTPAITGLLKSKSKVEKRMLEIIRIDEKLNTLYDLVTSVKCVGEVLATELIVYTNAFTKMENTGQLACYCGVAPFEHSSGTSIRGRIGTSNFANMNLKSTLHMAAVSATRYVPEIKMYYERKVAEGKNKMCVINAIRNKLIKRIMAVVKRGTPYQENYQEISLELS

SEQ ID NO: 194253 - protein, 421 aa, unidentified
MNQLTDTEYIAYVGIDWAAAKHDICVQSGAGGRCEFDRISSQPEGIEAWAQALYRRFGGPIAVALELSKGPIVSALQKYDFMVLFPINPLQLARYREAFTPSGAKDDPSDAELAVDLITRHPERFSPLEPQSVNMRKLIALVEQRDKFLGDRGRLVNRLGHALKQYYPQVLEWFNEHHTVVFCDFLSRWPTLNQVKRARKASLERFFRSHHVNSSQLIERRITAIKAAMPLTADAAVIEPHRLPVEILIEQLRITIRALKRFDDEIAATAQKLPDYDLLFSPLPGAAQVLAPRLLAAFGEDRQRYPQADALQKYSGIAPVTKRSGKTTWVHWRWQCPTFVRQTFVDWASQTINKSAWAGAYYRQQRAKGCSHQVAVRALAFKWIRILHRCWQNRTPYNESKYLEALRRKGSPLLKYLAEAA

SEQ ID NO: 194254 - protein, 387 aa, unidentified
MARKRTLSTLDTSIAYEAVGLDLAKEDTAIAAFGPDHEGPYLIDRMPYDKLYELLADMAPTLVAMEPCSGAHQIAEQIQELGHEVMMISGRHVQAWVKDHCNGQKTDLNDAFAILNLAYDRWLTPIRGKTREECRLLALQASYRQLKGQRTKTMVHVKATLHAWGFPIRAGSFNQKVLHELIDTNREAFGDEVVETLHLMINRVRDLDHDIATVLKLLTEATKRDPRASLLRSIPGFGVLTTSRWCAVVGDIARFDPPKQTMAFIGLVPNNRITGHHTETSSGREARGQGRMSKRGDKMLRSLCILGAASLCLMVRNDRLPDCPFVASIKERLASPRPWFKVLVYVAAKLVRIATALLKYGETFSFEKAGISKAVLKQWELEQAKAA

SEQ ID NO: 194255 - protein, 412 aa, unidentified
MDVIHPRCAGLDISKRDAKVCVRINGAGRRKTTETVATFGATTRQIMAMRDHLAAQKVTCVVMEATGDYWKPFYYLLEDLTGVEVMLVNARHVKNLPGRKTDVADATWLAQLGAHGLVRGSFVPPEPIRQLRDLTRTRTAVTRERTREIQRLEKLLEDAGIKLSSVAADLNGASSRAMLDALLAGETDPATMADLAQKQLRRKIPQLTEALYGRFNAHHAFLTRMHLDLIDQHTAAIEALTERIEVVMKPFRRFRDLICTIPGIGGYTADVVVAETGADMTKFPTAQHLASWAGTTPGNNESAGKIKSRRTRPGNPYLQGALGTAAMSISHTRDTYLAAKYRRITARRGPLRANVAVQRALLVAIWNIATTNTAYHDPGGDYFTRLNPQKARSNAVRQLEAMGYHVTLEQAS

SEQ ID NO: 194256 - protein, 409 aa, unidentified
MADYDIYVGIDWGTLTHQVCMTDAHGQPLDELAVAHSGPGLTALVAALRRSGGEPARIAVAIETPRGAVVDTLLEQGVHVYTLNPKQVDRFRDRHTVAGAKDDRRDALVLADALRTDRGAFHRLQPDDPRIVQLRELSHLTEDLTQERGRLANRLRAQLLRIWPAVLTLAPAADEPWLWTLLERAPDPVQAQRLPRRALRAVLATHRIRRITAEGLHAVLQEPCLPTAPGTVEAAREHVAVLVPRLRLVATQQTHCARRLEELLAALAAPDTAKRREHRDVTILRSLPGVGRVVAATMLAEAARPLAARDYQMLRAYAGVAPVTRQSGKTRLVSMRRSCSGRLRTAVFHWATNSIRLDPRWRAHYDRLRQRHSHARALRGVADRMLGVLVVMLNTGTLYDPARRATRAA

SEQ ID NO: 194257 - protein, 414 aa, unidentified
MAGIINKSCGLDIHKQFLIATILSVFGEKKQLRFERTDEGILALKNWVISEKCDVVACESTSDFWVPIYESLINHLTVIVGNARDMKAFTHKKTDKIDSEFIAQLALNNMIKPSRVFSKNHREFRSYIRLRHKLVQKRTDIKNVAHAILASEMFRLNDVLTDIFGKNGIIILSGISSGKNVDQIIGSLSPNVRKKSDKIREVLDREMSLSAAIRIQTCLSLIKNIDEQINILETEIFRYAYENHNREMKLLMSSPGVGEISAATIIAEIGDFNDFSSGDKLASWLGLVPNVYQSADKYHNGRITKRGSKVARWILIQVAQAAARKNGSKLKEFFDRKKKTIGHSKAIVALARKIVTILWHLITNDEMYEDEMGYKKGDVQKRKIVERVAFSVDDRISIISEIFAIVNKKEPDIT

SEQ ID NO: 194258 - protein, 402 aa, unidentified
MIFINCLGIDIGKSESVVAHYKDEVLVKEMVIQNNQNGYRYLKNYIKHLDSLFILFESTGIYSRGMKRFCEIHKIDYLEMNPLEAKFKTSSLRSWKTDKSDAHKLALLAFRMKDSKVQRQSEEIYFELRERARFHLEMEINQNRLKVELVETLHQTFPGLEKLFTNRYSKIALSIAKAFPHPDFVSTLTHDELVEKVLHSTDKGISVNKAHKYVQKLIEIQINSFPNVDKSSFLLQKVQYLCDKLLIGIEEMKEFDQEMIDLAKNTTEFENIISIPGIGELTAALLIGELGNIREFKTNKQLNAFVGIDIKRYQSGTSKSRDTINKRGNKKARRLLYLIIMNIIRGRNHYQSHIVDYYYKLKEQPHGKPHKTAVIASINRLLKTIHYLIVNDKLYDYQKAPH

SEQ ID NO: 194259 - protein, 399 aa, unidentified
MSEVESVRQEPQFAAFMSIDWADKKHVWCLQVAGSQQRESGELEHTPEAVEAWVGQLCQRFAQGLIAVALAQSQGALVFMLTKYEFLHLFPVPSTMSASMRKALYPSGSKDDARDADLLLDLLLQHRDKLHRLSPDTEATRRLQNLVEERRQLVDEKAEQTNRLTSHLKIYFPQMLDWFERLDTELVCALLERWPTLEELQKVPTAKLRAFFRKRHCRDQELVEGRIIAIRQAIPAIRDRAVVEAKSMVVKVIVQLVRSLIEGIADLDEKIEEAAAAHPDFFIFESLPGAGAVMAPRLLAAFGSQRERYGSAREVQSYTGIAPVTERSGEKQWVHFRLAAPKFLRQSFHEWAGHSVAQSGWARSYYQQLRSQGKGHHASVGFQMDSRSISLLEYLHRRC

SEQ ID NO: 194260 - protein, 354 aa, unidentified
MRIVCALDVHRGQITYLTLDVGSGEVSRGRISPATRQSVRAWLAQFDGVDDLHFALEGTTGWRFVVEEIERAGHRAHLADPAETAARRGRKRRAKTDRTDCELQLRLLLAAELPESWIAPAQILELRTRVRLRKTLIDERTAWQQRLQAQLFHQGAPAGLKPRTRAGRDALASVELSPAGGELVGLALRMIEAIDRELVPLDRTLALYGRRQPGCRALIGRLYGVGPVTATAIVAELGDARRFGRSDDAVRHCGLDVTVHQSDRKRAPGHLSHEGPELLRWALFEAALQACRPASPDYEYYRQVARRIDHNRACLSVARKLCRRAYHILRELDDEALAPIEPAPIVEEVVAAAA

SEQ ID NO: 194261 - protein, 348 aa, unidentified
MAIVGGFDVHRAQITFDYIDTDSGQVTAGQIRPATRPALRNWLQRFDGRDDVAFAVEGCTGWRFVVEELVRAKVEPHLAEPADTANLRGRKKRAKTDRADARLLRELLAQHRLPESWAPPSHVLEVRTLGRLYVTLMDERRAWQQRIHAQLFHQGVPSVRALLTSDGRVALSTAELSPDGVQMLQTALGAVDALSLQIGPLRAQLQTIGTNQPGVLALTRQYGIGLLCGTIIWAELGDCRRFSNADQAVRFAGLDVTVWSSDTKRSAGRLARQGSPELRWALFEAAKSAARQTSPDHAYYDAVRDRLGGKRPALSVARKMVRRCYHALRELGDQAWLASAPSSEQQAA

SEQ ID NO: 194262 - protein, 332 aa, unidentified
MLNCIGIDVSKSTLNVHIRKNNQNLEIENNLKSVKKLYAKLKKIYKKELDKIVFIFEPTGSYSELLRKFCFEQQIKCFIINPKQFSNYAKALGEEVKDDDIDARVLSQAIGLAKEGQVKVPTYDTDVEKMKELMSFYKFTTKQTSQLKNHLESLVSKEGDNFAIKELQKSIKFSKEKEKKIILKVQEMIDANPSYKKAFENITSIIGIGQIGGIALLHLFIKYPEANQRQITSLVGLNPIYKKSGSSLQSLYRISKSGSIFYRGSLFMGVMTAIRYDENFKAFYARLKAKGKHTTQAQIAVMRKMIIVAHSLYKNDKKYLKPIKNTEVITMD

SEQ ID NO: 194263 - protein, 356 aa, unidentified
MKYVGIDVHKKMCQAAVLDDEGELLDQIRFLNEKEDIKEFALKLTTFRDGVKAVVESTGNLWIQIYDILEKFGFEVFLSNPGKTRLIAEAKNKTDKIDAKILARLLRADMLFTCYVPGEEIRNRREFLRARVDFVKNKTQVKNRIHSILDKHGLRFPGTPFSKKSIPWLREQDLGFMDNAVVKGQLALYETLEEQIQIFEDKIAAMGMEDPQVKLLMTMPGIGYFAASMLVAEIGDINRFSNDKRISSWAGLAPRIHQSGGTTRIGRVGRGNKKISGLLVQCAHNARQHDPRFKRFYDRYHKRSGKGKALVAVAHEMIRIIYFMLRDNEPYRGQNVEMTTRKLKSMKYRASVGLRT

SEQ ID NO: 194264 - protein, 347 aa, unidentified
MVEYVGMDVSLEEISICVLSEEGRVLVRGTTPTDPTAIAAFITEHAPEVVRIVHESGQISIWLTRALRALGAPVICIDARMAHKALSARPNKSDKTDAEGLAHLARSGWYQEVHVKSEVSDRLRTLIGARDRLLRIRRDIEGHVRGVLKTYGIRLAPVTSARNRAGFRDQVRAVAEGDPVLEVVAASFIVAHEAICRECAAIEEELVTLARGSALARRLMTVPGVGPIVALSFMATIDDATRFSKSSQVGAYLGLTPRRHQSGEVDHSGRISKCGDAAMRALLVEAASSLITRVKRFSPLKSWAVRLASRKGFKKAAVATARKLAVILHRMWCDGTTFAWGREAATA

SEQ ID NO: 194265 - protein, 354 aa, unidentified
MKTYYVGMDVHRASIWIVVLNGAGKLVMQSVIETGAERVRGYLKQLRGKVYVTFEEGTQATWLHDIVRSLVTAVVVCDPRHNKLLQSGNKNDRVDAQKLAELLRNGALKAVYHGDHGMRTLKELVRNYDCLVSDSTRVMLRLKAIYRGRAIPCAGHDIYRSDRRAQWLEKLREPGARQRASFLYAQLAALKPLRHEAKLVMVKEARRQAAYPWLMSVPQLGSVSVAQLMAVIGTPHRFRTKRQFWPYVGLAVVTRSSADHEIVNGVLRRSRRPLATRGLNRNHNHLLKKVFKSAATSACHSGPFKAGYDARVAQGMDPSLARLTIARQLAAITLAVWKRGEKFNMQMMKQQLAA

SEQ ID NO: 194266 - protein, 454 aa, unidentified
MTKKQDKREYSDFDALQQINLNAAGVDIGAEEIYVAVPMGRDDESVRTFGTFTADLHEIAHWLTACKIDTVAMEATGVYWIPLYEILESYDFDVNLINARHIKNVSGRKTDVIDCQWIQQLHTYGLLQASFRPPEHICSIRSLVRHRDMLLRYRAAHIQHMQKALELMNLKLTTVLSDITGVTRMQIIRAIVAGERRREVLASYRQGGCAKSESEIAKSLEGNYKHEHLFALQQALELFDFYSQQIQACDLQLETMYAQFDPAEEPGTPPPSKKGKHSKNHPDFDLAQSLYRMTGVDLTTIDGLEALSVQTILTEVGTDMSKWPTVKHFTSWLALCPNNNVTGGKVKQRGRDKTKNRANLAFRRAAQSLARSNSALGAFYRRIRAKQGGPQAVIATAHKLARIVYFMLTRREPYHDPGAGYYDQQYQARVLRHLTHRAAKLGFKLEPIAADQVS

SEQ ID NO: 194267 - protein, 348 aa, unidentified
MVLLGVDPHKSTHTAAAVAADSQQQLSSVTIRSSLSEYRRLLRWARQWPQRSWAVENANGLGRHLVQWLIARGERVIDVPATATSRVRELSRGGGRKNDQIDAAAAATVAHLHGDGREVEAENHSTALAMLDERRVNLAQARVRAVNQLHALLRDLLPGGAPEQMSADQAAALLRTVRPAGPVEKVRKGLARDLVAEVRALDKQLAANAAHLEELVAAADSTLMQTPGIGPVLAARLIARVGRASRFPTAAAFANYTGTAPVEIASADKSRHRLSRSGDRQLNSVLHTIAVVQIRMPNSPGHAYYQRKVSEGKTSKEAKRCLKRRLADHVWKVMLADERRAQSPAATP

SEQ ID NO: 194268 - protein, 400 aa, unidentified
MSTSGRRIWVGVDAGKGHHWAVALDADGEALFSTKVINDETQILTLIETAREKADEVRWAADISGRASTLLVALLVAHGQQVVYVPGRTVNRMTGAYKGEGKTDAKDARVIADQARMRRDFAPLDTPPELVSTLRVLTNYRADLIADRVRLINRLRDLLVGICPALERAFDYSAAKGPVVMLTEYQTPAALRRIGVKRLTTWLERRKVRGADAVAAKAVEAARSQQIVLPGEKRAAKLVCDLAHQLLALDERIKDNDREIRETFRTDERAEIIESMPGMGPILGAEFVAIVGDLSGYRDAGRLASHAGLAPVARDSGRRTNNYHRPKRYNRRLRHIFYMAAQTAMMRPGPSRDYYLKKRGEGLLHTQALLSLARRRIDVLWAMLRDGRHFTSAPPVTQTA

SEQ ID NO: 194269 - protein, 329 aa, unidentified
MNYLGIDVAKAKLDCCLLLEGNRRKSKVVLNSEEGFQQLIAWCKKQGCLPVDLHAVMESTSCYHEPVACALVRAGMRVSVLNPARVREFAKSQGLLSKNDKQDSFAIARFGVSSKLEFWQPPAPEVSHLRALLSRLEAIEQDLQRETNRQEKTDFTHAPAAVQASLMKHIAYLEKERDRLSKEIERHIDQHPDLKKDRALLQSIPGVGPKVSTVMLASLRQYQFTCAEQSAAYLGLVPIERQSGSSVRGRSRLSKNGSAKVRAKLYMAAVAAKTYNPHIRDLAQRMAMRGKCNMSIIGAAMRKLVHLCFGVLKNQLPYQPNYASKGLTG

SEQ ID NO: 194270 - protein, 311 aa, unidentified
MTNDTIGVDISKDHLDAHRSSDGASRRFGNDTKGHAAFIDWLGQPGCRIVYEPTGPYHRAFERRLAQAGLALVKVNPRQARRFAEATGRLAKTDRLDAAMLARMGAVLDLEARPVRSPALNDLKDLHMAREALVKNRTATKNRAKNLTLAILKRHNGEQLRQIERQMAAIEAEIMAIIKADPALARRFGILVSIPGISAITAFALLIDMPELGTLENGQAASLAGLAPATRQSGKWTGRAFIRAGRANVRQALYMPALVAIRFNPDLKAKYDRLKAAGKASKVAITAVMRNLVILANALVRDNRTWQPSMH

SEQ ID NO: 194271 - protein, 411 aa, unidentified
MQVIYERCCGLDVHKRTITACVLKRVGGAWHKEIRQFGTMTTDLLALSDWLTGEGSTHVAMESTGVYWKPVYNILEGQFELLVVNAQHLKAVPGRKTDMRDAEWIAELLAHGLLRGSFVPPPHVRELRELTRYRTSLVRDRARTINRLQKVLEAANIKLASVVSDIDGVSARLMLTALVAGERETEQLASLAKGRLKEKHGQLVQALSGRLKPHQSFLIAEHLAQVDYLDGAIERLSGQIEERLRPFEQELSWLDTIPGVNRRTAEVLWAETGGAMSRFASARHLASWAGMCPGNNESAGKRRTGRTRKGSPWLRHCLVEAAHGAARTKNKYLSSQYHRIGARRGKKKALVAVGHSILVIAYHLLTRKQAYCDLGANYFDERDRQAVTKRCLTRLQKLGYQVTLEKLHMAA

SEQ ID NO: 194272 - protein, 401 aa, unidentified
MNDEYGVYLGLDVGKGDHHAVGLAPDGKRLHDAALPNTEARLRQLFDKLARHGRLLVVVDQPASIGALPVAVARACGHQVAYLPGLAMRRIADLHPGSAKTDARDAYVIADAARTLPHTLRRVDTGDETLAELEVLVGFDDDLAGEATRVSNRIRGLLTQIHPALERVLGPKLHHKAVLELLSRCGGPVGLRKAGRRKLLSIAAVHAPRMGQRLVEQIMTALDEQTVTVPGTTAAETILPRLADSLRDVLRQRDQVATQVERMLDAHPLAGVLTSMPGIGVRTAARILLEVGDGSSFATPGHLAAYAGLAPVTRRSGSSIRGEHPPRGGNKNLKRAFFLAAFAALADPVSRAYYERKRAEGKRHNAALICLARRRCDVLYAMLRDKIPYQPRPRDQAPVPA

SEQ ID NO: 194273 - protein, 343 aa, unidentified
MEAKRYIGIDLHRDCFTACVRLENGREYLKRWKLEDMPTFADKLRPTDQVAVEMTGNTRLFHDQVAPLVDRVVAVNPAQFQVITHSVKKTDPNDARLLALYLAKDLLPEVRMKDKTQAQIASLTQTRDTMVKLRTALKNKVNNICSANGVNLNRESLASEKGLRAVGEMPFDPLVNLEMKIIVDQIRSLNKSIAELEELIGKEGQKLDGHKNLTSIKGIGKLSGGILLSIIGDIRDFADEGKLASYFGIVPRVSNSNETEHSGRITKRGTKLGRTTLIQCALIAQRYSPYLKTYYEKMKARRGAGKAIVALARKFLGIIYRTLKNNWVFEDFPNFVLAEEATA

SEQ ID NO: 194274 - protein, 405 aa, unidentified
MARVFVGHDWAEDHHDVFVEDASGKRLASARLPEGVEGIARFHELVASHVDEPGEVLVASETDRGLFVGALVAAGYEVIAVNPLSTSRYRERHSTSGAKSDPGDARVLAELARSDGHNHRRVAGDSELAEAVKVLARAHQSLVWTRQRQTNQLRSTLREFYPAAVEAFPELAAPEALAVLATAPTAILGRGLSRSRIAAVIRRAGRKRRVEERAEEIQAALRAEYLEAQPLVASAMGAAAAALTRVIAECNRQITELEEQLSEHFEQHPDAKIIRSLPGLGMVLGARVLGEFGDDPNRYSDAKCRRNYAGTSPITKASGKHRVVLARYARNRRLADACHLWAFAAITASPGARAFYDERRASGDTHHRALRALSNRLVGILHGCLSHGTLYDEVIAWEHRQPAAA

SEQ ID NO: 194275 - protein, 415 aa, unidentified
MALKIVYKICCGIDVHKTFVVACIASTNKQGVTTYRSHRFSTYTKGLKELLQWLLESNCKDVCMESTGKYWIPVYNVLEKDCSIVLAHPKYVKAIRGKKTDKKDAKWIADLFKHDLVAGSFMPPADIRQLRDLMRYRYKLTCFMSSEKNRLQNCLTVSNIQLGNVVSDTFGKSSKRILDRILENPLDTSFDIQPLIHGSMKDKIPELELAIDGYITPEQAGKLKIIKKHFEDLESRKTELEELILALASPYQQKLDLILTAPSFKNTFSAITVISEIGVNMESFPSAKHLCSWAGLTPTNNESAGKKKSVRVSKAGCYIKPLLVQCANSVVKSEKHPEIRNRYLRLRKRRGHKKAIIAIARMLLTALYNMLKKNEPYNAELYRNSDIIPVNREITVEQALQLAKFQGYRIKSATE

SEQ ID NO: 194276 - protein, 344 aa, unidentified
MTTKYMAGIDLHSNNLFCAIVDLKGQRVFEKKLPCDLAVVLQALKPFKKRLEKIAVESTYNWYWLVDGLEKHGYPVVLANPAAMEQYDGLKHADDKSDGFFLAEMLRLNILPTGNICDKAVRPVRDLLRRRMGLVHKRTSLILSLKSLHTRMTGRDLGTGRIKAMKPEEAEKLFEHPADQLIARLDLQLVEQLGRSLEQIEAVILAQVKGLPNYQVLQTLPGVGKILGLTITLETVDPQRFASPGDYASYCRCVDSRRMSNGKKKGENNAKCGNKHLAWAFVEAAQFARRYDDLCRKFHDRKSAQVNGMVATKALACKLAKAAWHMMSNNTPYDAGRMFPGAKK

SEQ ID NO: 194277 - protein, 430 aa, unidentified
MKSNTQNAKIEAITEKTLVLGIDVGSETHYARAFDYRGIEYSKKPFKFSNTEAGFVTFKEWILDLKERHEKDKVVPGMEPTGHYWFNLGKFLQDNEMKPVLVNPHHVKKSKELDDNNPTKNDRKDPKVIAGLVREGRYMIPYLPDGVYADLRTASNIRFQLQAELTRIQNRISRWFNIYFPEYKTVYGKPDAKSGMLILKAAPLPEDILTLGIDGVNQIWRDAKLRAVGKARAKTLIEAAEHSVGSKEGAVSARMEIRMLLEDYESRNIRLQEVMTLIEGLVKQIPMAEKLLEIKGVGIKTVSGFLAEVGDISRFNTPKELQKLAGLALVESSSGKHKGETTISRRGRKRLRYLLFEVAMSLVAKNPEFRELHNYYTTRRLNPLKKMQSLMAIAAKLIRVFYAMLTKGVDYDPKKMVSDIKRPAVYLQAA

SEQ ID NO: 194278 - protein, 421 aa, unidentified
MNAWNEVTHFAGFDWAKDHHDVLVLDNTGKIAAELRFEHTAAGWSLCQQKLAAFPHLAIAVESGHGAAIERLMVLGYRVYPVHPRSSKSYRTRKLPSGTKTDHIDCWALADALRLEGESWHMLNTPEPLVQRLRLLCRDEVALIEQRTALINQLQQALYEYYPAALAAFDDWTSLSAWAFVARFPTPQALVKAGKRQWEKFLHTQKLYHPEWYQKRLAIFAKADEFCGPEAVTAAKSVLATALVKLLQTLELQLASYRLLITECFKQHPDYHVFASLPGAGPKLAPRLLAELVALQPLADQPQVLQCLAGMAPVSYQSGKVSVVYLRRQCNRFLRATLHLWVDLSRHYCDWARIYYEAHKKKGQSHACALRCLGMRWLKILAAMIRSHTPYDAALHARSQLQHGSWVLQLQPKLSITKDAS

SEQ ID NO: 194279 - protein, 356 aa, unidentified
MSRDIKYIGMDVHKEAVVIAVLNSRGQLVMESIVETKASSILQFIHGLRGELHVTWEEGTWAAWLYDLLQPQVAQVLVCDPRRNALLKEGNKSDKIDARKLADLLRTGMLRPVYHGEHGVRTLRELGRSYQTLSQDLNRVMNRIKALYRGWSIPCAGTQVYAPRYREQWLQKIEHVGVRRRAELLYQQLDGLQTLRRTLRPELLAESRKHKASKLLRQIPCIGPIRAARLIALMQTPHRFRSKRQLWTYSGLGIETRDSAQYRYVGGQLQRTKKPQQIRGLNQNHNHEMKEIFKGAATRASCGVGPLRDFYVALLAKGMKPEMARLTLARKIAAIALTLWKKEERFDAEQLKPQAA

SEQ ID NO: 194280 - protein, 399 aa, unidentified
MLAVGIDISKSKSVAAILNQDGSMHTSPFEFHHTQPELDAFIKYILNSKQSATILMENTGHYHYPVLKAFQEAGLPVCMVNAYQIKKFGDMDLRKAKTDKKDAVRIARYALEKSYSLVPYTSMEQKYEDLRFLARQYNQRMLTLKTNKVFLLNLLDETMPGITNILPLTTRTPETSLSVLFINRFKSYDRIKKMGKSRFLDAFEKIARKSRNRQTKTYGLAIYEAALRNITTRGENEYTLAAQDQCLELVCESQKAADSIILKMKTLAETLPEYAVLRSMAGVGNRLGPLILAEIGDIRRFHSGKALNAYAGNDAPPYQSGTFESYNRHISKRGNAALRKYCFEVMQALKLTRPQNDPVYLFLLKKEQEGKPYNVAKMAGVNKFLRIYYARAMETLKQQ

SEQ ID NO: 194281 - protein, 426 aa, unidentified
MTYRIAGIDVHKRMLAVVIADVAVEGEYQFERRKVGTSPSELCRLADWLVAQHVEEVVMESTAQYWRPVWATLEQRWRLQRLQESDGARSGQLHLAQAQSNRGAAGRKKDFPDAERLVKRLVAQELRLSFVPDVEQRLWRTIMRRKHQLTRNRVQFQNRLECLLEEAHIKLSSLVSDLLGKSARYMLQAVAEGETNPETIAALADHRLRATAPQLRDALGACRDLHPVYRQLLKMALEELKLMEEQIDKLEQEMANLLSAQQDVVQRLAEVPGLGVDSAQQIIAEVGPEAAAFPSAKHLASWVGVCPGEEESAGINYSHRSPKGNRQMKGLLNQASNAAVKTKGSIFEFIYRRLVVRLGHAQAIGAIAHRLCRLIWMILHQAIRYEERGPAVSPSTTERRAAKMIRELRRLGYQIEPVECKAEGSV

SEQ ID NO: 194282 - protein, 444 aa, unidentified
MAMRKREDEVFPSAAGIDIGASSHWVAVPRQLAEGAGCEPVREVGAMTEDLNALAAWLVSLGVDTVAVESTGVYWIPVFEVLEQHGLKVWLVDARQLKYVPGRKSDVQDCQWLQKLMSLGLLRAAWRPSAEVCVLRAVARQRETLLTEQASWVQRMQKALVQMNIQLTEVLTDVMGVTGQAIVRDIVAGVRDPVQLARHRQRRVKASQAEIARALQGNWREEHLFVLGQSLALYDDIGRHLADCDARLDGLLDARARTEVALGKLPRAGSKTRVEHDVRQRLANWAGVDLTRINGLGVTVVMRLLTEIGPDVSRFASVKHFCSWLGLCPGTKISGGKVLSSGTKRSANRARQALKMAAQSLWRSESALGAFYRRLSARMDKPKANTAAAHKLARMVYFMLTRGEAFVDQGQQRYEEQQRQRSIAALKRRAAALGFQINPVGTAA

SEQ ID NO: 194283 - protein, 346 aa, unidentified
MDDITRIGMDTSKNVFQLHGVDATEQPVLRRKFGRAAMMRFFEKLPPCVVGIEACGGSHHWARVLEGFGHEVKLMPPQYVKPYVKRGKNDAADAEALCEAMSRPTMRFVPVKTQDNQAALMLLGVRERLVRNQTQISNMIRGYAAEFGLIEAKGLARIGPLLARIEDDESLPEGARELFARLGQELARLSVQIDELEAQLEVWHRQNDCSQRLDAIPGVGMIGAALLAMKTPDPHGFASGRQFAAWIGLTPRDHSTAGKVRHGVITRAGDEALRAVLVAGASAVLQHVQCGRGKPRPWLAALLERKPYKLAAVALANKIARIAWKLMVSGERYDPKHMAPPPGVAA

SEQ ID NO: 194284 - protein, 324 aa, unidentified
MNDAWLGIDVSKNTLDTDCARGRRRQSRSFANGPEGWRQLLGWLKAMGIHQAHVCLEATGHYSRGVALALHDAGHRVSVVNPAQIRDFARTKLGRNKTDAVDAALIREYAELFKPAPWAPPSPALRRLRELQTVRAGLVGSLTEWKNRSTSGLAEDTARAVAAATIDHFTTQLKAVDRAIAETLDRDPDLRGQRDLLLSISGVGETLAGIVLAEMPGPEVLRRGADVTAYAGLNPSHYRSGTSVDRPTRISKIGNAVLRSALYMPALTAMRFNPAVAALAARLKAAGRLKPKQIVVAAMRKLLVLCFGVLKTGKPFDPKLAMPA

SEQ ID NO: 194285 - protein, 427 aa, unidentified
MTYRIAAIDVHKKMLAVVVADVAGEGEYQFERRKFGATPDQLQLLAQWLCQQEVEEVVMESTAQYWKPVWGALEQYWQPARQKREGARKMSGKLHLCQAKSNRGRRGRKNDFADGERLIKRLVAQELVLSFVPDAEQRLWRTVTRRKYQLTRDKVRFQNQLESLLEQAHIKLSSLVSDLLGVSARRMLKAIAEGETDPAALAALADYRLRATPEQLRDALGACGQLHGVYRRLLKMALEELKLMEEQIEQLEQEASKLLQQHQNAVQRVAAVPGFGVDSAIQAIAEVGPEAAAFATYKNLSSWVGACPGEEESAGETKSTHSPKGNRTMRRLLNQAAHAAIKVKGSIFEMTFRRLLPRLKYQQAIWAIAHRLCRLLWKILHEGVRYEERGPAVSAKSKRTRTARMIKELKALGYRVEGGPLPAGTPA

SEQ ID NO: 194286 - protein, 416 aa, unidentified
MAEELQKSCGLDVHKEFVIATVLSRGNEGKIQKRFERDDNGILSLKSFVLSENCDVVACESTNDFWMPIYDSLCDHVTVIVGNARDIKGQTHKKTDKVDSEYIALLALNGMIKPSRVFSRELRQIRSHVRLRHKIVRKRTDFKNIISSILSSEQFNLKSKLTDIFGKTGQTILEGIIRGLPVDTIIQKFPACMIGRGDEFRELLQRELSQEAILRLKECMESISQLNRSIKHLGDQIFKWAHTNCKRKMDILMSVPGIGEIGAITLIAEIGDFNDFPDSDRLSSWLGIVPNVYQSANKHYNSCITKRGSKVARWILIQIAQVVASRTKDNILRDFFHRKKATIGFNKAIVALAHKIARTIWHLVVNDEFYSDNLGYEKKIKKFSHPIGLKEISVDECISIIFQANAVLRQKDPDIL

SEQ ID NO: 194287 - protein, 349 aa, unidentified
MIIIGVDFHPEFQQIAFVDTDTGELEERRLHHPDEAEAFYRALVSQGKTVRVGMEASGHGHWFERLMSELHIELWVGDAAEIRTKRVRKQKTDRQDAQLILKLMLKDDFPKIWVPSWENRDLRQLLWHRHRMVQARTRIMNQLQAVALNEGLRCKKRLWRTERPRLESFQLAPWASRGRRDLLELLDRLNPTIAELSQAVEQEVEKCPEAQRLATHPGVGPLTAMAFVLIIGQADRFQCGKQVASYLGLVPMEDSSGNRRRLGHITKQGSSILRFLLVEAAQVTVRSLPEWRSRYFHLMMRRGRKIAKVAMARRLAVCLYWMMRQGWDYQQWVEFGSYAGQPGNRHGVQ

SEQ ID NO: 194288 - protein, 413 aa, unidentified
MEKVVCVVGVDWGEGKHAYAVRSLEGVENSGQLKTEPETVHEWVRELRVRHAEGTIVVGLEQSRGALMYALQRYDFLQLVPINPRAAKAYRDSLYLSGAKDDPVDAELIREFVFAHRSMLRPWRADEAMTRKLRLLVEGRRTLVDQRTSLTQALTAALKHFFPQILTWFGPANSRLTRAFLSRWPTLEAATAARRDAIERLVRANSRKKPAQIDELVDHVRTTVALTEDRAIIDAMSLLARSYVTLLDALEEPISRYDDEIAELWSEHPDHDVFWSFPGAGPVMGPRLAAAFGTDRDRYQHATEIQKYSGIAPVMERSGKQSWTHARWRCPKFLRQSFHEYAEASLPFSPWACAFYRQQRERGAGHHAAIRSLAFRWIRILFHCWKKNVPYDELTHIDNLKRRHAPIVARLAA

SEQ ID NO: 194289 - protein, 354 aa, unidentified
MATMTHPAPPVMVIGGIDTHSQTHTVAAVTTAGAMLGSATFPANRSGYGQAAAWLAGHGQVVKVGVEGTGSYGAGVTRHLQAAGLQVVEVNRPDLPTRRRVGKSDPIDAESAARAVLSGTAEATPKDTTGAVEGLRNLRVARRHAVKQQGDAARRIRSLLITAPEQLQRQLTGLTMLALARRAAGFRPDLAAAATGDVTAAVKTALASLARTWLNARDEIRAITAVTTPLVERLAPNLLALTGVGTEVAGQLLVTAGQNPHRLHSDAAFAALCGVSPIPASSGKTNRHRLNRGGDRQGNNAIWRIAITRIAHDEQTKTFIAKRVAAGDSKREAIRVLKRHLARPIYRALLLDMT

SEQ ID NO: 194290 - protein, 418 aa, unidentified
MEVEHDEQEIIQRVAALDIGKAELVCCVRVPGPGRRRMQEVRTFLTMTRSLLVLSDWLRSLGVTRVVMEATSDYWRPPFYLLEDSFETWLVNAGDVKHLPGRPKTDRLDAVWLCKVAERQMLQPSFVPPPPIRVLRDLTRYRVDLVTARTAEKQRVEKLLEDAQIKLSVVVSDIFGVSGREMMAALIAGERDSRVLAEMARGRMRSKTTRLVEAFIGRFSDHHGFLLTTMLARIDALSADIDAVQHRTEQELVPFASAVARLDEIPGIGATAAAVIIAEIGVDMTRFPTPAHLSSWAKFAPGVKESAGHKKGNGATGHGNRYLARVLGDAAVNAGRTDTFLGERYRRIARRRGKKRAIVAVGRSILVIAWHLLSDDNAQFRDLGPGYYDSRVNLNRKMRNHVRELQALGYKVTLEAAA

SEQ ID NO: 194291 - protein, 339 aa, unidentified
MNIFKQIIGIDVSKDSLSVVYASQDYTQTIKASSVKEFANSIQGFKKLLVWSLQQKREETLPMHFLMEATGVYYENLAYFLTDHKQSVVVVLPNKAKYFARSLEIKSKTDDLDAVMLAQLGLSRNLKQWVPPSNDLRKLKALCREYHATIKLLTQLKNRLHAKQKAYDTPKEVLAYLQLEIRSLKNIVREILADIGTLVEGTPDLRQKVKNITTIKGVGLITAASIIAETDGFAQIHNTKQLASYAGLDVVANESGTIHHRTKISKKGNSHIRQAIYMSSLSACRYNKSLKDLYVRLTIKNNIKMIGLIAVARKLLILIYTLYKKNEPFNPEYGVRIAV

SEQ ID NO: 194292 - protein, 435 aa, unidentified
MGADAHWVAVPRDRDEQPVQCCGAFTADLYALAEWLRQCQIATVVMESTGVYWIALFEVLEERGFDVKLVDPHAVRQVPGRKTDVKDCQWLQELHTYGLLRGAFRPKDEICVLRSYLRHRSMLVAMAARTVQHMQKALEQMHLKLTEVVSEITGKTGMTIIRAILAGERDPQLLATYRDKRCKHDHTTIAKALTGHWRAEHLFALQQAVDQYDCIEQQLRACDAQIEGCLQAFVPDVEADAPQSTPVRTWRSSRSNPPSFDVQAYLEAMTGVDLTQIDGIDSLTALKVISEIGLDMPRWPTSKHFASWLGLCPGNNMSGGKRYRMRSKPSANRAATALRLAAQGVANSHSALGAYYRRMRARLGAPKAMTATAHKLARLVYSMLRYGTAYVDAGQQAYDQKYRDRVLTNLQRKAKAFGYKLVHVEDIDGGVPSTF

SEQ ID NO: 194293 - protein, 353 aa, unidentified
MTGTKYIGMDVHKESISIAVRNDAGKLVMECVIETKANVILEFIHGLRGELQVTFEEGTWATWLYDLLKPHVTKLVVCDPRKNSRQGNKNDRIDARELADRLYMNKLSSVYHGGAGVRTLKELARSYLTISKDLGRVMSRVKAIYRSWGIPCAGKQVYAPRHRAAWLAKITEVGVLRRAEFYYQQLDALRVLRQAVRRDLLTESKKHKAIKLLRQIPSIGAIRAALLIALIQTPHRFRTKRPFWKYSGFAIEMHSSADYRAVKGELQKSKKQISVRGLNRDCNHDLKNLFKSAATIASVKPGPFQEFYAALVAKGMRPEMARLTLARKIATIVLIVWKRGVSFDAKYLKPQTA

SEQ ID NO: 194294 - protein, 342 aa, unidentified
MEEVVTVGLDIAKSVFQVHGVDAEGRVVVRRRLTRAKVIPFFEKAPRCRIGIEACATAHHWGRRLAALGHDVKLMPPSYVKAYVKRQKNDAADAEAICEAVSRPSMRFVPVKTPDQQSVQVIHRTRMTLMRHRIELSNTIRAHMAELGLVAPIGRLGLQGLIEIVRDDSDARVPTSARTCLKMLADQLDLVNRQALENDRMVRTDARSSEVGRRLMAVPGVGPVLASAMVAAVPDPRAFRSGRNLAAWIGLVPKQNSSGGKERLGGITKQGNRYLRQLLVVGALAVIRYAERHGTKRPWLVQLMARRTTKIAAVALANKMARMIWAIMASGEAYRDPAPRAA

SEQ ID NO: 194295 - protein, 394 aa, unidentified
MKLVGIDVGKNSHHFCVMDKETGEFNVTPTSFSNNKEGFDFLINSLKPYSKKSILIGMEDTGHYHVALLKFLLSNGYTVALINPKTTDLTRKMEGGITKNDKLDTITICDVLDTPERKKQYRITKVDRFDLYEQRQLTRHHHNLKEELNVYCNRLQKSIDLVFPEFNTLFSSKYSIVYMNLLKTFGSAEAIASTDIRTIRKCFEIKGRGNRISLTPEKLKECAKNSIGISSEVETIQIKHLVSQITLIKEQIAEIDKKIEEFSITNNSPILSIPGISHFSGTSILAELGDIGNYSKPSQIIKFAGVAPYHYESSQYNAQHTGISKKGSKYLRKTLYQIILPVINNNPVFKKYYRLKISQGKGHRCAQGHCIRKLLRIIYHLLETGQSFDPALLR

SEQ ID NO: 194296 - protein, 376 aa, unidentified
MADEFYSTKDTHAYCTFYPSTGEYLYEYTSIASTKDTLSYINKVKKGIKKETNKECKVVCGYEAGPTGIKLKRDLMKKGIDCRVMAPTTILSPKAGKRVKTDRKDAQDLSEALCKDNYKEIEILDEESEAVRDFLRMRSDFKNALKVKKQQLKSFLLGKGIRYPGRGNTWTIAYIKWIKALEFEHPLAKETCEFYMSEVSRLIQKIEELDKRIEELAQGDKFKEPVSKLRCFAGIDTMVALSVVSEIGDFSRFASAKHFASYVGLCPGQHSSGLKLQMTGITKAGNSRVRTLLTESANSMARTYTNVKSKRLKSRQSGISEDIIDYADRGNKRIRYKMNKLKRSGKSHNVAKTAAARELSCFIWGMMTNNIYGEIA

SEQ ID NO: 194297 - protein, 401 aa, unidentified
MDPQIRVGIDVGCKAHRVGISNPDGSILEEFDISHTGAGFRDFFRRIDHHRQKLDLPVAVAMEGFNGYARPLDRLIQERGYIMYNVNNLKLARFKEVFPGAAKTDPIDTRKILELFHLKDHLPLAKDVLQKVVAAPLVNDKLKRLSRRRRQLVNEKVRVANRIQSDMQAVCPELLAITNKASNLRFLRFLTCRDDLTQLPRLRRTTLLKIPSVGQKYARIIQEWQRKASFSAEVEYVGPMIIQDGRRILELRQQIHALDEAMAELADQSELACRIGSVQGFGKTCVAELAGEVGTTERFAGERSLSLYVGMSPLSRDSGQHHGSKCPRQVNHRAKAAMMTAVARHINCVPESRAYYEKKRAEGKSHNQAVRALGRHLVRVIWSMLKNERDYELREVIPRLT

SEQ ID NO: 194298 - protein, 376 aa, unidentified
MGQFSVKIYTSPGSLLSANQQVAIRASTSREPPEMEISIIGLDLAKRVFQVHAVDGSGKAVVRKALRRSQLLPFFRKLSSCVVGMEACGTSHHWARELASLGHEVRLMPPAYGKPYVKRGKTDANDAEAICEAVTRPTMRFVAVKSPEQQAALSLHRTRNLLVKQRTQLVNMIRGLLAEFGLETPRGLHHALALSARLARVEVADVPALAQRVVAGLARQIETLQAQLSAIEKDILAWHRSSDVSQRLATIPGIGVISATALAASVTDPQQFQSGREFAAWLGLTPLQNSSGGKERMGRISKMGDKYLRRLLVVGMTSLVRRARVNPACVDPRINDLLARKPVRLATVAMANRTARIVWAVMARGETYRRPASIVS

SEQ ID NO: 194299 - protein, 340 aa, unidentified
MVHAGIDVSAKTLHVAVKRDKGEVRYGVFDNTLAGHKKLAKFIRGRSRSVRVCVEATGLYSLDLSLHLSANPHFEVMVVNPRAAKHFGEAQFKRSKDDTIDSELLLAFVQRMAVVRWMDLQRWTPPEPVFLVLRAITRRMSACIDQGAREKNRLHAAKASKTTPQCVLDDIADNIAQLKARALALEKEAEGLIKQHEWLKKHYRLLVSVPGIARRSGVRILGELVLLDPEMTSNQVVAYAGLDVRRCKSGTSIHKKPRISKVGNARLRAGLYMPAMNAITHCVEARVFYDRLVARGKVGLQPMVAVMRKLLVAIWNMFGTETVFDASRFCGPVQTAAKAA

SEQ ID NO: 194300 - protein, 429 aa, unidentified
MEPKSNLEPESVSIVAWIGLDWADQQHHICLQPVGSARVEMEVVAQRAEALQEWVRRLRARFPQGRVAIALEQSRGPLIYALMSYDFLLLYPVPGKTLADYRNAFFGSGAKGDPTDAELLLEVLRCHRDRLHAWVPDDVPTRHLGLLNEQRRKLVDDRTALTNRLGALLKESFPQALDWVGDLNRPAASEFLAQLSSLAAVQQAQPSDLRQFYRRHFRLQPEQLQQRLAEIRRAQPLTSDSAVLETDALIVSLLAAQLQTLLSSIERVETAIADLFSQHPDHALWEILPGAGAALAPRLLVAFGNDRKRYRSAGEVQTFSGIAPVTASSGKSRWVHWRWACPKFVRQSLHEFAAQSIPRSIWAKAYYLEQIKRGKHHHAAVRALAFKWIRILYRCWQNHTPYSEEQYLQALVRRGSPLVACIQNLGAAV

SEQ ID NO: 194301 - protein, 409 aa, unidentified
MKVCLGIDWSQDTHAACFVNEAGRDIARLSLPHSLDGLDKLDRARAQLGVTPDECWVGIETAHSLVVDFLWARQYTHLFIIPPAATHSASKRYRQSGAQNDASAAFVIADMVRTDQQRLIPWRPDSALIQQMRAKVSLLLYLTQQLTRTSNRLHAVLVRYYPAALAVFSQPMPPLTWHFLLAYPTPKAIERLTFAEFETFARQHHYRQAQRTLLASFARLQQPQPQASEAVVLAYAPEASLLSQQLLTLTQAKTTQMKELGDLFDQHDDAELFRSFPGTGDFLAPALLAKCGDDRERFPSPIGWQCLAGTCPITDESGHRHRVLFRKACDHEFRAITQQWAICSLSQSVWAATYWEQMRPNCHSTSDAYRRLANRWLAIAWRCWQDRKPYDEAYHLQQRTQRQQPRSAH

SEQ ID NO: 194302 - protein, 479 aa, unidentified
MWGSLPCLYISGGQDCDGGGGSPEEGRRAVLEAKSSCLRAAPSTGVQGSNGISRAERTPRIHKQEQGHRPRGFRRTARKAERKVRYAGIDIGSQEHAVAVVDADGEVLAKPTVLGDLKEGYERIKEVLGKTEDLLVVMEATGHYWQNLYGYLSEQGYSIAVINPLRTRRYAEEELARTKTDAIDARGLARFGAEKKPAATVLPDAATLELRELVRMRDRFVQELADKTRQLHRLVDLGFPEFKRLVKDLDGAVALALLSEYPTAAAYERTTPGRIAKLAVGDRKIGRELAQAVFMAAERSVGRHNGPVYDRQVRYLCSDLELLKKRIREIEGDIGRLLDKHDVGKLLMTIPGIGPQTSARIIAEVGTPTQFASPATLAAFIGLVPALRQSGRNRSTKARLTPFGHARLRKGLWMPTLVAIRCNPWLRASYQRLRARGKPAKVAIVACMRKLIGAIYSVAKNRRPFVPILLPAPTNEVST

SEQ ID NO: 194303 - protein, 366 aa, unidentified
MLEVTAFVGLDTDKTGIDVAVAEGVLGGEVRWHGRIANTAEALAKVLDRIQKPGVRLEVCYEAGPCGYGLYRRLNARPGVSCQVVAPSLIPRRPGDRVKTNRRDAVGLAKLHRAGELRAVWVPGPDHEAMRDLVRTRSQTMADLTRHRQRITSFLLRCEIGYAGKAWTKKHRAFLAGLTFAHPAQRLMWSELLSALDQAAAQLKRLDQLIGEQIAGWSLAGLVEAWQALRGFGRLNAAILAAEIGDPGRFQSPTQLMSYLGLGVSEDSTGEKRRQGRLTKTGNGRARKVMIEAAWTYARQAKPIDRASDHVPTVAAIADKARHRLSQRYRKLRARGKSAPLAIAAVARELSGFVWAVAKAAETAKA

SEQ ID NO: 194304 - protein, 342 aa, unidentified
MQVTTIGLDIAKRVFQVHGVDCTGAVVIRKKLRRSELAQFFAHLAPCLIGIEACATAHHWARELMALGHQVRLVPPSYVKAYLKRGKNDAADAEAICEAVTRPTMRFVPVKSEEQQGVLVLHRGRELLVRQRTMLVNGLRAHMAEFGIIVPQGIQRVPELVAMLKDETTGIPQIAREVLAAMVVQINNLTTSIRQMEKRIIAWCRASDAARRLATIPGVGPITASALAATITDPTLFRSGRHLAAWLGLVPRQHSTGGKAKLGRITKMGDQYLRKLLIVGMTAVIRSARRTKAPAFAWVNALLERRAARLVSVALANKAARIAWAILIRGETYRAPTMKVAA

SEQ ID NO: 194305 - protein, 362 aa, unidentified
MEVVGNAVGIDLGKRTYEMCAVSQDGKKTRTGGKTDFAGIDSLCKKLKKDDVVAMEACSLAFRIERAIREKVCCRVIILNPGRLAIIFMSARKTDKEDSLKLAKFLRSHEENEMPIVTPPTDEEWARRKLLSEYRSLKSLRTKEINRLHAIFEHAGFTQFKRKDMCVQKNREEILPLLKGYEKDEALRLAERLALIEKQVGELCQKIDTEVKNDGMVQKIMTVPGIGPVTALSYVAYVGNVNRFDNAHQVSNFIGFVPKVDRSCTINRMGHITKLGNSHLRSLLVQAAWSCVRSKNGGALKDKYNYMAATRNIGKGKSIVTIARKLGELLYTLLKNSQTYEPQKFISPESRISELAEEAVGA

SEQ ID NO: 194306 - protein, 345 aa, unidentified
MKNYFIGIDVSKEKLDATLIHYESQSDSEQQLAYTTVANNPKGFRSLVSWSKKNAGRGVKTDTMLFCCETTGGYDRALCDWLYGNGLDIWRESALQIKRSMGLRKGKDDKADSEMIAHYALRFRSQATLYEPMDGNMRSLRDLFLYRQSLVAERQAKMVSAKEKQHISSKSKVDNFIYRDAQKTIDLLTKSIKECERRMLEIIKEDEEMYRNYLHLISCKGVGLVTSVMLIVYTDNFKGWNAKKMASYCGIAPFYESSGSSVFHKANTSGYSNRRLKGILTQAARSAITHNPTLRQYYLRMKSQGKPYGVILNNVNNKLVHILFSLVLHDCDFELDHEAKRALRA

SEQ ID NO: 194307 - protein, 466 aa, unidentified
MKDNRRRRANWPRVSPSVLDRINPNAAGIDCGSAEHYVAVPPDRSPTPVQCFKTFTTDLVRLADWLIACGVTSVAMEATGVYWIPIYEILEARGLDVVLVNARHIKHVPGRKSDVTDCEWLRDLHSVGLLRGSCRPTAGIVALRAYVRHRQSLVESAGTYVQRMQKALVQRNLQRPLVVSDITGVTGLKILRDIVAGRHDPQQLATHRDYRCRASHTEIQAALTGHYRPEHLFVLPQNLELFDTCQIQLAACDRAIEAQVQTLTATREAPATPLPAPRVHRRIADNDPHFEIRTPLHQLTGGVDLTQIDGIGPYTALKLIAEIGTDMDRWATEKHFTSWLTLAPKNRVSGGRLLSSRTEPSANRAAGILRMAAMTLGRGQTALGAFYRRLAGRIGKPQAITATARKLAVLVYRALKGELCYRDPGADAYDLQQRTRVLRRLRQTATKLGFDLLNRDTGDILRATPA

SEQ ID NO: 194308 - protein, 395 aa, unidentified
MFIVGIDIAKRSHEAIIIAEDGQVVRKAFSFRNNCTGYNLLLEQVRKLTLVKSQIVFAMESTAHYWLALYARLLKDGYTVMVLNPIQSHSLRELYIRKTKTDARDSLIIADFVRFGRCKASNVPQDKILALRELCRSRAYLVDMAADLKRKLIALLDRIFPEYESLFDSVFSKASIAVLSKYSTPQKVKNANLRKLTDILMESSNGHFGEWKAHQLKEAACSSFGIDDSGGAYSTLLGMFLEQILSLTAQADSLEKQISVFFQEFNNPLTSIPGVGTVLAATILSEIGDITRFSSADKLLAYAGLDPSVKQSGEFKSNQNRMSKRGSPYLRRAIWLASTVAVHRDPMFQTYYEKKISEGLHYMNVIGHVSRKMTAVIFAVLRDGQPYQPILQSAG

SEQ ID NO: 194309 - protein, 385 aa, unidentified
MKPPPRHVRRRSALLPLQPKGDQVIVVGVDPHKRTHTAVAIERASGELRAELTVAARAAGHEELLLWARQQSQVRLFALEDCRHVSGALERFLIGRGERVVRVAPKLMGQSRRGSRSYGKSDSIDALAVARAALSEPRLPEARLAGAELEVKLLLSHREDLVGEANRTSNRLRWHLHDLDPEIALARGRLDRTAWMERLSRRLQRGEQTVRVRICRQQLRRLKALAREIKGAEAELDALIRTQAPELLELPGCGTLCAAKLVAEVAGVERFPDDAKLAMLAGVAPLDASSGRQQRHRLNRKGNRQLNLALHRIAVTQARFHQPARVFLERKRAEGKGRREALRCLKRHLVRVVWRTLRAASSERMISISPNLQEIKMPTPEPVLT

SEQ ID NO: 194310 - protein, 428 aa, unidentified
MNYNTQNAKIASITEKTLIVGIDVGSETHYARAFDWRNFEFTRKPLVFSNTEAGFLTFKAWIEEIQEKNGKTAVIPGMEPTGHYWFALGKFLQDNGMKPVHVNPHHVKKSKELDDNNPNKNDRKDPKTIAALVNEGRFSYPYIPTGIYAEIRSLSNLRFQTQEEVTRIKNRIARWFAIYFPEYKDVYRDLKAVSGRMILKAAPLPEDIGKLGVEGVNQIWRDAKLRGAGMKRAKTLVSAAEHSVGSKEAPEAARMELKNLLDDMDVYTSRLEELVQKIEGKLKEIPYIDKLLEIKGIGMVTVSGFIAEVGDIRRFDNPKQLQKLAGYAIVANDSGKHNGESRISYRGRKRLRYVLYEAAISLVGKNAGFREIHGYYRTRKENPLKKMQSVVAVACKVIRVFYTILTKGVDYDAARLLGDIKHPQMQTA

SEQ ID NO: 194311 - protein, 362 aa, unidentified
MESMRWVEVDVHAKESVAVVLDQATGEITAQRIAGRPNEVVEWLSTLEPPFRAVHEAGPTGYGLVRRARERGLDVVVCAPGHILKNATDHIKVDKRDAVRLARLLSAGELRLVRVPEPEEEQLRDLVRSREDLRVDLTRIRNRIGKFLLRREIYAPKHTETWGVLHRKWLQSLRFEDRASEPVFEDAMHAHDILVARREQLERALAEDRRDLALGAHHRPAQVLARHRHPIRARPGRRGGRLPPLPTPTFLSSYLGLVPSEHSSGEKRRQGGITKAGSKHARRLLVEAAWQYRHVPRTSHHISQRQLGQDPRVIDIAWRAQRRLYKRWQRLHEERRKRSTVVAVAVGRELAAYCWEIATLAG

SEQ ID NO: 194312 - protein, 305 aa, unidentified
MTHAHIIGIDLGKNSFHLVGHQLFRKKLSRPKLLEFLSTQEPVIIAMESYGCAHWLARKCQDFGHTTKLILPQYVKPYVKTNKNDFIDAHAIAEAASRPTMRFTSTKSESAQVISTIRKVRAGYIRERTACMNRIGSILLEFGISLPKGHVCMKSLFQWLVDKNEYLPPQIIFELSELHEHYQQLNERIEAQEKKVEKILIDNDQMKLLQTVPGIGPIIASACISSVCNPQDFKNGRNFAAWIGLVPVQYSTGGKSTLLGIPKRGNKELRTLFIHAARSVLWRDKSVDKYLVHGLQNLRRESHLT

SEQ ID NO: 194313 - protein, 408 aa, unidentified
MQRRENLLYVGLDLHKQTHTAVLVNCWNEKLAAIVIENKPSAFKKLAEKVNKKANQLGLYPIYGLENACGYGRSLAVWLVEKGCIVKDVNASLAYNQRKSAPMMSKNDEYDAYAVATVLINQLHKLPDANPTDHYWTLAQLVNRRDIIVKDGIRLKNGIHEQLMSAYPNYHKFFSEIDGKCAMYFWKTYPSPSHLENKTAEELTEELKEISKSFRKDKAELILDCVRSDGNTYRDYQESRDFITRGLVKDLEHQKATIAEMDKEIERMLLCFDYKLTTMPGIGTAVASKLIAEIGDIRRFPNADKLARYAGVAPVKFSSAEKGKEQSSRQGNRQLHGLFYMLAITMVAVPKSGRPNHPVFHAYYMRKISEGKTKSQALFCIMRRLVNIVFGMMKNKTEYREPVTQEEH

SEQ ID NO: 194314 - protein, 343 aa, unidentified
MSEITVIGLDLAKHVFQVHGADPDGRPVLRKRLRRGQVLEFFASLSPCLIGMEACAGSHYWGRELQALGHEVRLIPPQYVKPYVKTNKNDAIDAEAISEALTRPTMRFTAVKSAEQQSVLMLHRTRELLVRLRTMLVNALRGHCGEFGIVAAQGLSRAGDLIKRIEDPADTALPDLARQALQCLTSQIRAIQEQIALIEKKLLAWHFSCEASRRLAEIPGVGLITATAVVASVGNATQFRSARQFAAWLGLVPQQHSSGGKERLGHISKRGDGYIRRLLVHGARAHLSWSRRKKQIRSAWLTGLLARRPTNVVLLAMANKTARIAWAMLSRGERYQEMIAAAA

SEQ ID NO: 194315 - protein, 310 aa, unidentified
MSELFVGIDISKNSLDVHILPENQSETYSYEPQAVKRFIEKLKVLAPTIIVMEATGGYEISIAAQLADAALPVAVMNPRQIRDYARALGILAKTDKIDAQVIARFAQDLRPEAREQFTAKELELKELVARREQLTDMRTAEKNRLSRARGPKVIAGIKHVIETLNAQIKAIEKELDKGIKNNPLWDKKVELITSVPGIGRRTAHTLLFCLPELGSLNRQQIAALVGVAPMNRDSGLMRGKRAIVAGRANVRRALPMPVLSAVTNWNRRLKDFYNHLRAQGKKHKTALTACMRKLIVILNAMVKKGQPYVQ

SEQ ID NO: 194316 - protein, 354 aa, unidentified
MAHANPAQPITVGVDTHLDLHVAHANDQLGRRVGTRSVPTTPTGYQDLLAWARGLGQPIAWGVEGTGSYGAALARFLAANGQVVVEVNRPDRQARRRRGKSDPTDAEAAARAVQAGQATVAPKAGTGQVEMIRSLRVARQTAIRARTQAINALKALLVTAPAELREQLRDLPTATLVAAAAALVPGPITSPLAAAMLALGTLAHRHQALSREIKALTTELDRLTATAAPKLVALFGIGQDNAGALLVAAGDNPQRLRSEACFSMLCGSSPIQASSGKTVRHRLNRGGDRQANAALYRIVLVRLRYHQPTKDYLARRTAEGRSKNEIIRCLKRYIAREVFAALQPLRHEFLTPPT

SEQ ID NO: 194317 - protein, 356 aa, unidentified
MRYLGMDVHSAATVYCVLDAEGAVVERGSIATTATDLGELARRLSAGEELLAAQEVGTQCYFVHDAISAVGVRILSFNAAQLRMIAASRKKTDKRDAYWIAKALQTGMTPHPVHVPGAEVRRLRGLLHQRQALVAERKRWLLRARSYLRSAGMPLRKGASRITRLLDDARKSSDGLPTSVADGLELCARQQAQLGEELAVVEEVLLAEAKEIDAIQRLKTIPAVGDWVAITLYAAVGDIDRFGSARLLAAYAGLVPSVHQSGATLRNGPITKAGSGPLRAALVQAGHVLLWKCNAEDAKPLRALAARVHTARARRKIAVVAAARHILRIAFYVLRDGTTYDPKRIHVEISKEGAAA

SEQ ID NO: 194318 - protein, 364 aa, unidentified
MLYVGIDQHRKQLTVSVRDESGNVVLRRQVSTRWEKVRAFFSETRDRAAGDGGYLAVVEVCGFNHWLLALLAELGCRQTIVVQPEEQAKHKTDRRDASQLSEVLWVNRTRLQQGLPARGLRRIQLPGAEEQADRRLTSLRHNAGRELTRTINRIKAVLRRHNLEQECPTKGIHTKTALRWLHTLQLSPVERIELDEQLHRAGLLREQVRHLQLEIEARFEKNPQAQLISTLPGAAAYSALGLASRVGDVRRFRHPRSLANYWGLTPGSRNSGEATDRLGSITKQGSALARFLLGQLVMHVLRDDPWMRGWFRGIKHRRGAKIARVAVMRRLATIIWHMLTSHEGYVCGGPPQARLKRKPAIAGN

SEQ ID NO: 194319 - protein, 353 aa, unidentified
MSYDYHIGVDYHKAYTHLVVQDGGGKVLRSGKVKNDPRSLAGFLAPYLENSHAVMEASRNWTVMYDWLDELCDDVVLAHPLRVKAIADAKIKTDKIDATILAHLLRADLIPESYVPCEAARQLRQALRERMFFVRLRTMVKNRVVTIFDRYPEQTRALREMSDLFGKIGRVQLELLSVSVIDREHIDRALAFIDDINQRIRESEKTIRRFSKDNADVKRLKTMPGLGEFFARLIAAEIDDVTRFRSAKKLAAYAGLVPSTYASGGKCWNGRIIKAGNKWLRWAFVEASIPAMRAEPALKFEYERLKATKGANRAKVVMARKLLTIAYQMLRDQRDYEHRDALGERPSDPSRLS

SEQ ID NO: 194320 - protein, 361 aa, unidentified
MSIAFQSFVGVDLHKCTVTLTAVDAAGEITRLKISTKSTGKIDAWLRALRGPVWMAVEACPFVEWFIDRFRDCVARIDIADATELSSRRGKRRKTDWNDSLDIAMRLSRGECPLGFIADEELMQLRKRGRHWRHLSRLLSRSKHAMKSMLNAANIRGPKFDGAAAQRWLLANRDLLKPVQQQTFADFIDVVMLTERHRERLRREIIFATRSARFAPVISLLTSVPGIGEIWAAIIAAEIGLFDRFPNADTLEFWAGLTADMKESAGRTQSGNITKAGSVTLRWALCQAAVTLCQCDARQEAIRQRLVKRLGKPKANVAMGRRLLRVLYAMMRDGKTFERGPARDRTSAANNARLGRRKQVA

SEQ ID NO: 194321 - protein, 345 aa, unidentified
MQITTVGLDLAKRVFQVHAVDASGSVVVRKALRRSQVLPFFIKLPPCLIGMEACGTSHHWARELTELGHKVRLMPPAYVKPYVKRGKNDAVDAEAICEAVTRPTMRFVAMKSAEQQAALSIHRTRNLLVKQRTQLVNMIRGLLAEFGMDIPEGLERALALAREIAAKETTPDVPAVAMQILGLLCGQVLDTHVRLQAIDRSILALQKSDEVARRLSTIPGIGPVGATAFAASVADPRQFRSGREFAAWLGLTPSQNSSGGKDRLGRITKMGDRYLRKLLVVGATSLIRRARYKPETADPRLVALLGRKPVRVASVAMANKMARVVWAVMVRGEIYRSRHAPNLAV

SEQ ID NO: 194322 - protein, 421 aa, unidentified
MQVLYERCAAVDVGKDVIAVAVRLPGDGPDGRQTVKRTFKTYYGVLAEAARWLVWLGVTHVAMEATGIYSMPVYHALIEHGDFAQVLVCNAGHVKNVPGRKTDLADADWLVHLLECGLLAGSFIPPAEIKAARDVIRYRAKVVQSRTSEVQRLGNVLQDAGIKIDSVASSVVTKSGRAMIEALIDGERRGTILAELARGRMRAKIPDLAMALEGRFADHHALMCRLHLDHIDHLEAMTARLDAQIEAMMTPFRAARDLLTTIPGIGPTAAAAVISEIGADVREFFPDAAHLASWAGICPGNHESAGKRRSGRRRHGNTHLQPVLVESAWSAVRHDGYLKSLYHRHVMKWGGYRSQVAKKKAIIVVAHALLVIIWHVLATGTPYDELGTDYFTRRQDPERETRRLIARLEALGHQVTLQPAA

SEQ ID NO: 194323 - protein, 364 aa, unidentified
MKRKVYVGMDVHKETIQIAYLTSNSKEILKEQQIKHNEVQIKKFIKKLKTEWNEIYCCYEAGVTGYPLYRYLKSLGVNCILVAPGKIPRQNTDKIKTDKRDAIKLARLMRSGELESIHVPSEEDEAVRDYLRSRDSLRLDLGRNRQRLMKFLLRKDIKYSTTKYWTVSHYKWLNNLHFNNEILQETFNDYYSRVRVQEENLKSMDKKIQEIAESEPYREKVGILRCFRGVDYLTAMFLFCGVNDFKRFKTAGSFMSFLGLVPGEYSSGSKRKQTGITKTGSPRLRRILTEAAWQHRFPGTGSKIITARRSGQPALVVALAEKASLRLHKKFRNLQLRGKTPQVMITAVSRELSGFLWAAMNLVA

SEQ ID NO: 194324 - protein, 372 aa, unidentified
MDQDNRLFVGLDVSKLKISVAVADGERGGEVRFFGDIPSDPASVSSIVKKLAKRRAKLHFCYEAGPTGYELYRQLTEMGHDCVVVAPALIPKRPGDRVKTNRRDAVSLARLHRAGELTAVWVPDRGHEAMRDLVRARDAAQEAQKRARQQLQSFLLRHGRIYPGRTVWSQAHMRWMSTLKFEHPAHFIVLKEYCQAIEDAEVRLRRLTDLITETVKSWTMEPVVHAYQALRGVSVMAAIVFVVEIGDIRRFESPRQLMSFLGLVPSESSTGEHVKRGGITKAGSGRARRVLIEGAWTYRFPARVSRTKQRQLTGLPRAVREIAWKGQVRLCARYRAMLAAGKHKAVTITAIAREMGAFLWAIGQEVLPAVQA

SEQ ID NO: 194325 - protein, 303 aa, unidentified
MRFYTGQHRYYCGIDLHARTLYLCVLDGQGKIRLHKRLRCEREALLRALEPYRSDLVVGSECIFCWYWLADLCAREQIDFVLGHALYMKAIHGAKAKNDKIDSHKTAVLMRGGAFPIAYVYPPGMRATRDLLRRRLYFVRKRGELLAHIRNTFHQYNLPGPTGQLLYKKNRQGLAQAFDDAMVQRTIEADLALADRYDPVIRGLEHTIEEEARVHDSDTLERLRTIPGVGRILALTLLYEIHDIARFSTVQRFSSYCRLVKPEHRSAGKRVGSGGAKIGNAHLKWAFRPPCSSSGTTHAARLI

SEQ ID NO: 194326 - protein, 369 aa, unidentified
MEQHSEVFVGLDAAKERHAVAVAEEGRKGEVRYLGEIDTDAASVRKLVARLEKRHGKLDFCYEAGPTGYGLYRQLIAMGHACTVVAPSLIPRKPGDRIKTNRRDAVQLARLLRAGELTAVWVPDEAHEAVRELIRSREAAVDDLRRKRQAISSMMLRYGRNYPGKTTWTKQHKQWLQGQKFDHPAQHLVLQDMILAAQHAQERLAQVEDVIAEFLPSWSLAPMVQALQSLRGIRLVTAATIMAEIGDLRRFATAGQFMSYLGLVPGEHSTGEQVRRLGITKAGNGRVRRALVESAWTYRHLPKTSAQKSYVHESVAPAVRDIALKAQTRLCARYRALSNRGKKLVVAVTAIARELAGFIWAIGQAMHTA

SEQ ID NO: 194327 - protein, 313 aa, unidentified
MKAVQSNVFIGVDVSKARLDVAVAPSGETISFANSEDGIALLVDFLKPRNPELVLFEATGGWEMNAVHHLAAQRLPLAVLNPRHVRDFAKATGQLAKTDAIDARILARFGQAVRPEVRPLKPLELRKLDALNTRRRQIVEMLTAEQNRLVSAPEWVRPDIEELIAILKKRVAAIDRDLNKLIRKSPLWREKDKLLQSFPGVGPVTATSLIAELPELGSLTRRQIAALVGLAPLNCDSGSHKGKRKIWGGRADLRSTLYMCALTASNHNPLIRPFYQKLLRAGKPRKVALTACMRKILVILNAMMRSGSCWQPT

SEQ ID NO: 194328 - protein, 366 aa, unidentified
MKKISTVQSFGNEIFKEQKLTIGVDLGDRWSFYGVLDEAGKIILEQKVPTTPEAMKQTFGKIPRSRIALETGTHSPWVSRVLTELGHEVIVAHAQKVQLITKSNRKDDRHDARTLARLARIDPELLGPVRHRSVQAQIHLTVIRARAELVSARTALVNAARGLVKSYGERLPKCGTYQVSRELAAELSTELRDVLEPLLKEIESLNERIKEYDERMEKIAKEVHPEVSLLKQVKGVGTQIALTYVLTIEDPYRFLKSREVGCFLGLRPGRRNSGESEPQKRISKEGDRYLRTMMVQGAHYILGPFGEDSDLRRWGLKLAERGGKNAKKRAVVAVARKLAVLLHRLWVSGEVYEPLRNSQKAMRAVA

SEQ ID NO: 194329 - protein, 409 aa, unidentified
MAVFCGIDWAEAPHDVALVDADGTLLAKLRISDNADGYQQLLELLAEHGDTPEHPISVAIETGRGLLVAALRTGNRPVYAINPLAASRYRDRHSVSRAKSDPGDALVLANILRTDAAAHRPLPADSEQVRALAVVARAQQDAVWARQQLVNQIRSLLRDYYPAALEAFQSKQHGLARADARTVLAAAPTPNKATRLSLAQLRSALKRAGRRRGIEEEARRLRGIFRSTWAHQPQRIEDAMGTQLLALIRQLDAACTAAEELATAVQESFRAHPDAEILLSFPGLGVLTGARVLAEIGDDRARFADARSLKAYAGSAPITRASGRKRFVGRRFIKNDRLTNAGFHWAFASLTRSPGAYAHYRRRRDRGDWHAQAQRHLFNRMLGQLFHCLQTGQSFDEQRAFTSGLAVAA

SEQ ID NO: 194330 - protein, 347 aa, unidentified
MLADELDYVIGVDTHRDEHALVVVSAGGAVLAERAVRADLSGYRSALAFADRFAAGRRVWAIEGAGSYGAGLARLLVECGEAVLEAGRPARAQRRSRGKDDALDALLAARGLLASEAGTVPRDGGRREALRLLLITRRSAVDARRHALVQMRAVIVTCPDALREQLRRLPTTRLLDYCSRLRRRAAAPPEELAARLTLRMLARRALAATAEANELEREIVEHVRVLAPALLDEPGVGAIVAAQLLVAWSHHGRLRSEAAFARLAGVAPLPASSGQTVRYRLSRGGDRQLNRALHTIVLHRRHHDPTTKDYIARRIAEGKSPREATRLLKRYVARHLYRLLEQQPLMT

SEQ ID NO: 194331 - protein, 520 aa, unidentified
MASTRTRCHSYRRRSPMSLGKLRGVLHPRVQQVGPEHFGIVCFDCHKASSKFLLADFYGRQLIAPTKVHHNRPELDAAIAQIRQAFEQHQLGDGLVVIERTGRYHRVVQRAFAAAGFETRIIHPFVTKQYRQPVDPSQKTDDADLGAIHRATVTGCALLEATRDEAWTILQLLIRHRRDLVRKGAALNCQIRDHLEAALPGYAACFDKLWESTIPWHLLRHFPTAGQLRDAGLTTLCHSLDEAGIRFQQRTIQTVVDWAHQAAPGDIGASLHRRIALALYEDRQRKTQEITALEREIAGRLVQTPYVLLLSFPGINVVSAADFGGEAGPMEHYLNAKSITGRAGLRPSRYQSDQVDLANGPLVRNCNRSLRAAILGIADNLVVCNHHFQVLATQWRAQGKDPRHTRVKIGLRFCRIAFQMVAGRQVFRHPSIQGRHYILDKLTAFHLAHGTKMPDLLRDLQAAIGQIPRRQYAAEAKPLQDEYRKIHDGRRRGPQLLGDILPIVLARLGVDVVQSNESGE

SEQ ID NO: 194332 - protein, 420 aa, unidentified
MKAKKRQKLDQITGDTLIAGIDIGKRKHYLRIINQRGYEMGKVFSFKNNRDGLDKAVGMIEKVKKDNNLSKAVIGIEPSGQYWKAAAYYFQDRGYPLALVNPYHVKKIKELEDNSQTKTDIKDCILVAKLVKDGNYFIPNLAHGIYAELQRLSRLRLKVKKSYIREKTKLKVLLDEYFPEYEGIFYDLLGASSTYILKKYFLPETLAGTNLIELTKSLYAVSRGKIKTDRAVRLVDAARTSIGIKSATDTAILEKDYILENIEDLQKKLVEITLRIKHCLSNIEQSQYLLSIPGVGPVTAAGFLGEVGDISKYRSSKEIIKLAGLNLVEISSGIKKGKKKISKRGNSFLRLYLYQCAVVAIAKNSQLKRYFLFHTKTKNKMKILVAVQCKLARIMFALLKHKRYYDPKEVEKHIFAEAAA

SEQ ID NO: 194333 - protein, 438 aa, unidentified
MSRSYARLLDPVLEDDDNPFAHYDAHNEPLEDRLYLPVGVDPHGDICGVVFAHPFPQCKEILAQRIVRNNNLQDMLWMIETADHLAAPFQATPIFIFESTNVFWRAQRNFLHRAGYPTATVCGRQTKHARDTVTRKTKNDLKDAYNITKIFKQGESHATRILPEPLASLREYCRLHQFLVSYSVAIQNRIHCACYQIHPEFTNLFSEPICATTLALMEAELVHPLHLLDCNLDDLTQVIRRASHGKLGQKRAEELFLSAQFAFPPPYAVEGFSFSLKLLAQAYQHIHSCLLPPLLERVQDTLAASDFPIQHHLDEIPYFGPIVIGTYLSELGLPEWFRSVDSVVAWFGLDPAVSISADKPTGATHLTKRGSKTGRRMMWLVGHNWSRYVPQGRRLFLKERQQHQRSYDAAVCVVAAKLVRIAFAMVRDGSHFDIDKAF

SEQ ID NO: 194334 - protein, 330 aa, unidentified
MQGKVMSEHSASTLVDVGIDVCKEWLDIHILPAGTVLRVANNKKGHKQLMAALRGLRVHIAVVEATGKFHRGVHRFLHDAGVAVAVVNPLRARLFAEALGVLAKTDKVDAQMLARQGQIASLKATPPLPEPLENLREIVRNREGALAARIVLENQLTTATLDGVKKQIVLQIRTAVRAAEAFETLALAAIEADPALARRFEILVSVPGIGPVTALGLIANMPELGSLDAKQAGMLAGLAPVACESGQRNGPRHIKGGRHSVRRGVYMAAQTAARHNPHLKRFYEHLVAAGKLKKVALTAVMRKLVVLANTLLKEDRLWTLEKPNPVPVHA

SEQ ID NO: 194335 - protein, 457 aa, unidentified
MNYYLGIDVSKGYADLILLDSQKNIIEKNFQLDDTFQGHNQLSDLISNFFSKHSKDILYAAVESTGGYENNWLNTLQKLQTQFNLFAVRLNPKGVHHNSIAGMKRIITDKVSAQNIAEYMINHPEKINLQANDPFASLRSQWNYIRMLSKQKVQLVNQLEKLLYRASPELMVYWKKKLPNWMIQLIIRYPTSKKLSKAKADKVAQLSYITVDKARKIVEKAKNSVASANDPYTETLITSLGQEILHKQQLIDRQTELMISRCHLPEVKLLETIPGVGTYSAIGLVLEIGTVSRFASAKKLSSFFGLHPKYKQSGDGTWGMRMSKEGRSQPREILFMVTLVAIQHNPIIQEIFAKNLSKGKCKLDAIGVCMHKMLRIIYGMLRTNTPFNPEIDRQNQKKSHQKRKGSMDKKLRRYQKQDPDAPISYRQTKTRKEQHQSQGDQVTKHEIRVSALSSIDT

SEQ ID NO: 194336 - protein, 355 aa, unidentified
MDSKKYIGMDVHKESISIAVMNGAGKIVMECVVETKASMILQFINGLRGDLQVTFEEGTSAAWLYDLLKPYVTKLVVCDPRKNASMREGNQSDKIDARRLAELLRLNHLNPVYHGEHGLRSLKELVRSYLTVTKDLARVMSRVKAIYRSWAIPCTGKQVYAPRHRAEWLGKIGEPGVRRRAEFYYQQLDALRTVRQEVRRELLAEGKKHKAWKRLCQIPSIGPIRSAVLLGILQTPHRFRAKRQLWTYSGLGIETQSSADHRSVNGQLERAKKQISIRGLNRNCNHDLKNLFKGAAVVASSKPGPFQEFYTALLAKGIRPDMARLTLARKIATIVLIVWKRGACFDAQHLKPQTA

SEQ ID NO: 194337 - protein, 430 aa, unidentified
MNHMTDTNTTHAPEQFAAFIAVDWADEKHAFCLQAAGQKQKESGTLQQKPELIGAWVAALRERFGGRAVAVALEQSRGALIHALLGYDFLVVYPIHPTTVAKFREAFKFSGVKSDPLDTDQILEILTKHLDLLKPLRPDTQETRLLARLVEDRRKAVELRASHIQALKASLKEYFPQALEILSGNVTSRLAYDFLKKWPTFENFQQAQPSTVKRFFYGHNVRSPQRIEQVLQVALKSRALTTDTPVVESGVRLSQMHGEVIHTLNPLIEQYDRKIEAAFNDHPEAKLFTGVPGAGPALAPRLLAAFGTDRSRYDAADNVQSFSGVGPVTKSSGKTRVVYARSACPKFLRQTFHEFARLSVAQCQWARNYVDYYTGQGKKYQTVIRALAFKWIRILFRCWKDRTPYDDQKHMKRLKQRGSIFATLHLQKSS

SEQ ID NO: 194338 - protein, 378 aa, unidentified
MNSSQAQLEATENLEVIWSGVDVAKETFDAAVWLPGAPARGWALRAVPKQTFARTEEGVRLFLTWMDAVVAPLCDEQGQAPTVRVVMEATGSFSVELAIWMLKERLTLAPAIINPKTAHAFLESLELRNKSDGIDAYGLSRYGAERQPAPYEPMSQERACLRSLTRYRQAIIGMRTAEQKRALEPHFDPAARKMIQKHIHMFQKDEAALEKKMLEVVESIPDLKRDAQTLDAVYGVGILTAVTVLAELGDLRRFHQARQLTATAGLSPRNRTSGTSVHGKPRLSKKGNGHIRKALYMPAVAAIRGQNDLADLYQRLIAEGKAHKAALAAVMRKMLLVMRAILISGERYQKRHPRQPRRPVENPVENVCTKPAKSMVAS

SEQ ID NO: 194339 - protein, 305 aa, unidentified
MVTFGCDSHKRTHTLVVVDQNGCQLGERRVVATASGHLEALDWARQWSERQWALENCRHLSRMLECQLLSAGEVVVQVSPKLMGSVRRSGRELGKSDPIDALAVARAALREPHLPVAQLEGREREVKLLVDHREDLVGERTRIQNRLLWHLHELEPGYQVVASGLLRSVVLAEVSRRLERHTGVVAEIACELVVRLAELTQSVKRLQQRLESLTRELAPSLLTLPGCAALSAAKLLAETADVSRFRSSAAFAMHNGTAPIPVWSGNHNRHRLNRGGNRQLNVACTASPLLRSGLEDRRRLTSLVV

SEQ ID NO: 194340 - protein, 332 aa, unidentified
MLYENYVGIDVSKLSIDAFIRESRIHRQFRNEESGFKQLIQWIKKHIGETWESLLICFEHTGLYSLSLALFLEREHIAYAMVPALDIKRSLGITRGKNDQIDAKRIAEFAYRFNDRVMPTSLPAKDIRKLHSLLAMRDKMMRNMGGYITSRNELFRVIPDRELPVLTSVYENIISTLKNEVHELEREIRSIIMVNKELKTTFELITTVKGIGFIVASFLIVYTCNFTRFENWRKFACYSGIAPFEYQSGTSVHARTQVSSIANQQMKRLLHLAAMTAIHFDAELHNYYVRRQAEGKSKMATINIVRNKLIARVFAIVKRGTPFVDIQKYVYL

SEQ ID NO: 194341 - protein, 379 aa, unidentified
MSGKAAIVVVVGVDTHKATYTLVGADAGGRPVGELTVRATDAGHLKALGWARELFGADLVWGIEDCRNLSSRLERALLDAGQQVVRVPPHLMARTRASARTRGKSDPIDALAVARAVLREPDLPVASHDDVSRELKLLVDRREDLVGHRTATINRLLWRVHELDPSHAPGPSALVGVRARQVLGAWLATVPNLVAVLARDELAEIGEFTEQINALERRIAARVRVQANSLLRIVGCGELTAAKILGETAGVSRFRSEAAFACYAGVAPLPRSSGSTRVRVRAGRSGNRQLNVALFRIALTQARHPGPGQVYYQKRRAAGDTHAEALRRLQRRAARRVFGCLCADDTRRTTPSPTGRPFSFSELERINTEWSRALTLLGL

SEQ ID NO: 194342 - protein, 353 aa, unidentified
MRIVCALDVHRSQITYLTLDVGSGEVSRGRISPATRQSVRAWLAQFDGVDDVHFALEGTTGWRFVVEEIERAVHRAHLADPAETAARRGRKRRAKTDRADCELQLRLLLAAELPESWIPPAQILELRTRVRLRKALVDERTAWQQRLQAQLFHQGAPAGLKPRTRAGRDALASVELSPAGRELVGLALRMIEAIDRELVPLDRTLALYGRRQPGCRALIGRLYGVGPVTATAIVAELGDARRFGRSDDAVRHCGLDVTVHQSDSKRAPGHLSHEGPELLRWALFEAAQQARRPASPDYEYYRQVARRIDHNRACLSVARKLCRRAYHILRELGDEALAPIDAPTAEEVVAAAA

SEQ ID NO: 194343 - protein, 350 aa, unidentified
MKIIGCDFHTRYQQISMLDDETGELIERRLEHENGEANKFYRDLSKPIRVGVEATGPLHWFERLLAELGHELWIGDSAKIRASEVRKQKTDQRDAQLILDLMVANRFPRIWVPTTTERDLRQLLWHRHKMVRMRTMLGNQLHFLAMSQGLCRKKKLFTEAGRSELSRLPLGPWASRRRAELLYLLDQLDPAIDDLDRAVMQEAKARQDAVRLMSHPGIGPVNALAFVLTIGPVSRFHRGKQIASYLGLNPSEHSSGGKRRLGAISKQGNTMVRWLLIESVHHVVRLDPEFRQDYQRLKSRRGNAVAKVAIARKLAVRMYWMLRSGADYARLVRMQASPGATLVNASSSLG

SEQ ID NO: 194344 - protein, 354 aa, unidentified
MAQPIEVIGGIDTHTDVHQAAVIDTIGRHLATEAFPTTPAGYRDLLEWLQSHGRVLVVGMEGTGSFGAELGRYLRGNQIAVIEVDRPDRRARRAAGKSDSIDAYAAATAVLAGRATGTPKHRDGAVEAIRGLRVVRASAVKARTQTVNQMKSLIITAPTEVREALRSLTTTELVRRLAASRPGTDLATPVAAVRLALKRLARRYRHLSEEIADADADLRVLITRAAPGLLALTGVGTETAGQLLVTAGDNPDRLASEASFAHLCAAAPVPASSGRTDRHRLNRGGDRQANRALHTIVLVRMRHDQRTRDYVARRTLEGLKTKDIFRCLKRFVAREVYHHLTSTNSGTPCLSSTA

SEQ ID NO: 194345 - protein, 421 aa, unidentified
MFERVAGLDVHKAMVVATVRIAAGGKVKRECRTFETTTAGLLELLAWLTVSGCNHVAMEATGVYWKPVWSILSDGEFELILANAAHIKNVPGRKTDVNDATWIADLVAFGLIKASFVPGEDIQELRSLQRARKQLVREQTRHTQRIQKTLEEANIKLDSVISDILGVSGRKMIEAMIDGVRNPAKLAALADRRIKASPKELYDALHGRLTDHHRFMLKLYLKQFDALEASIIEIDQTVAAAVARMDEEAQAAGRATFQSLILLLSTMPGISAQSAVTILSEIGTDMSRFPTAGHFVAWAGLCPGQNESAGKKKSSRLRKGAPWLKTAMVQAAWSAIKQKDSYYRAQFHRLKARGGAKKAICAVAASMLTAIYHMLKDGVEHHDLGANHFDQRSTEFKAKRLVAQLTKLGFEVVLQPLEKAA

SEQ ID NO: 194346 - protein, 407 aa, unidentified
MSSMHVQHRQVTGGVDTHGEVHVAAVIDATGRILGTESFPASLVGYRSLLRWLRRHGAVASVGVEGTGAYGAGLARHLTQEGVVVVEVNRPDRQRRRQRGKSDTVDAEAAARAALNGEATAAPKAGDGPVESVRVLRLARRSAIKARTQAANQIRDLIVTAPDQLRSRLRHLDTNDRVALCARFRANDLADHAEATKAALRTLARRHLDLSLEIDLLDNQILQLCAAINPALLAASGVGPEVAATLLVTAGDNPHRMNSEAAFAALCGASPVEASSGKITRHRLNQGGDRQANNALWRIVLVRMSSDPRTKTYVARRTLQGKSKKEIIRCLKRHVAREIFRLLIDPPAVPAGADLRSLRLDAGIILATVAEALGTWPTRISQLERGLLHDAELARRYHLWLRLEQAA

SEQ ID NO: 194347 - protein, 315 aa, unidentified
MTTSSGKFVGIDVAKDKLDIAVLGEKKASQVGNDEGGISKLIKKLEMQEIELIVVEATGGYQRSVVLGLYEAGLPVAVVNPSRVRQYARASGLFAKTDKLDAFNLAEFGKQMKPRRFEAKSEAGRYLSALLVRRRQLEEMLKAEKSRLRTVPPKMRGSVERMIEVLKEEIKRLEKELDQFMKENEGWQAQEQILTSAKGVGRITATTLLAELPELGKLDRKKIAALVGLAPMNADSGKKRGYRKTKGGRMEVRNVLYMSTLVATRYNPLIKAQYQELLRRGKVKKVALTACMRKFLTILNAMMRDKVPFRQRDIA

SEQ ID NO: 194348 - protein, 364 aa, unidentified
MNKCHSNTELSSHEGTRCQFNGGRCAIKLGIDVHQDFYVVVEQVGGTNPKPPQRFQKQAFLHWAAKFKQSGAEVHAVYEACGFGFSLQRQLAALGIKCHVVCPQKLDERNKRVKTDGLDAKALCLKLDRFVQGNRDALAIVRVPTEAEERSRAIHRQREQLVGARKRLEAQGRSLMVNQGVDPVQNWWKPRTFAALPVPQWMRELLLNSQPILLALQEKIAALTLQLQSAAAPNQPRGLGKMTSVVIDREIGDWHRFNNRRQVASYTGLCPGEYSSGNTRLQSCVTKHGNPRLRAALVELAWRLVRFQPHYKPIVKWRQILAKGALATGAVRKKAIVAVARQLAVDLWRVRTGRCKPEVLGLVN

SEQ ID NO: 194349 - protein, 443 aa, unidentified
MTETVKGNPAEPEFAAFVGIDWADQKHCWKLAVAGTQATESGELKQTPEELSNWAAALHHRFSGRPVAVALEQSSGALIYQLSQYPHLWLYPVHPATAAHYRQAFYPSGSKSDPTDTGLLLELIVHHRDRLRPLAPETPETRLLRMLVEQRRQLVDEKTRWNNRLKAALKIYFPQVLDWVDIDTIIGCDLLERWPTLQQLQRAHPGTLRKFFHEHNCRAEALMTERIQAIYQATPAVQDTALLEGETASAGSCVAQIRTLLASIAKLDGQIKSRSSEHPEASLFAEVPGAGAALQPRLIVAFGTQRDRYANAGELQAYSGIAPVTESSGHSRWVHVRWACPTFLRQTFHEFAGCSISRSEWARVFYDTKIAAGKSHHEAVRALAYKWIRVLFRCWKDGRPYDEQTYLRALAKRNSPLKPSAGSPTKVVWKTVGGFKKLSIENS

SEQ ID NO: 194350 - protein, 339 aa, unidentified
MPLYAGIDLHSSNNFVGIVEENGKRAFRRKLRNDPEEILLTLGRFREDMVGVVVESTYNWYWLVDLLGDAGYRVHLANPTAIQKYSGLKHADDQHDAFWLAEMLRLGILPQGYIYPKEERPIRDLLRKRGHLVKLRTSLILSLQNIVVRNCGVTLSGNDVKKLKEDVVGPLLEENEDLAMAGKVSKDAIDYLTRKIREIEVMVESKVKLKDSYRHLQTIPGVGKVLSLTIMLETGPISRFAEVGDYVSYCRKVSSKWTSNEKTKGKGNKKNGNKYLAWAFSEAAEMARRADAKCRSWYERKKQKTHFMVAHQALAGKLARAAYCVMKQQIPFSAEKLFG

SEQ ID NO: 194351 - protein, 355 aa, unidentified
MAAKPTSSPPKGRIRPVCGLGIDVHQDFYVVVMQEGGSNPKPPQRFQKEAFLYWAAKLAGSGAQVHAVYEACGFGFGLQRNLTALGIDCYVVCPQKLDEQNRRVKTDGLDAKALCLKLDRFVQGNRDAMALVRVPTEQEEQQRAIHRQREQLVKARKQLEAQGRSLMVNHGLEPVKSWWKRGNFGALQVPEWMKELLGNSQPLLLALQEKIGALTLQLQVAAASKQPRGLGAMTSVIIDREIGDWRRFNNRRQVGSYTGLCPGEYSSGNTRLQSCVTKHGNPRLRAALVELAWRLVRFQPNYKPIVKWRQILAKGAFATGAARKKAIVAVARQLAVDLWRVRTGRCKPEVFGLVS

SEQ ID NO: 194352 - protein, 375 aa, unidentified
MKEKVRFLGLDVHAETIAVAIAEPDGEVRSLGTIANRAESIRKLVKKLGLAEQLKACYEAGPTGYVVYWQLAELGVACEVIAPTLAPMKAGDRVKTDRRDAERLARSYRSGDLTAVWVPDEGSESLRDLVRAREAAKQDQLRARHRLSKFLLRTGQRPATGVKAWTQPYMVWIKQIHFTQVARESTLLDYLHEVEHMAERVKRLEQAIAEAVKLASPEVQEVVAGLQALRGIAQISAVTIVAELGKISRFQSARQLMGYSGMVPSENSSGGRTQRGRITKTGNAHLRRIAGEAAWSYRMRPCVGPALRKRQEGVAEEIKEVAWKAQYRLHKRYMRLGAAGKDQKKIVTAIGRELLGFIWAIGIKAEAAARQRAAA

SEQ ID NO: 194353 - protein, 403 aa, unidentified
MNNVAGIDVSKGKSMVSVLRPFGEVVAKPFSIGHTGSELKELADYLKSLDGETRVVMEHTGRYYEPVARFLHDEGVFVSAVNPKLIKDYGNNTLRKVKTDKADSRKIARYGIDNWAELRQHTPMDTIRMQLKTLNRQQSLYTKTKTMMKNNLIALLDQTYPGVNALFDSPVREDGSQKWVDFATTFWHVDCVRNMSLTAFAERYRKWCKRHGYNFSQSKAVEVHAGAQDLIAMLPRDALTKTMVRQAIDALNAISASMERLKAEMQALAAQLPEYPVVMAMHGVGDSLGPQLMAELGDVTRFTHRNAITAFAGVAPGADQSGTHEAKSTRVSKSGPPELRRALFLVMDCLLKTQPQDDPVYRFMDKKRAEGKPYLVYMTAGANKFLRIYYGRVKEYLASLEGN

SEQ ID NO: 194354 - protein, 356 aa, unidentified
MNEGSCVGLDVHARSVVAGVIDMGSGEVRSLRVPPGNEGTVAWLKTLPAPVRVVYEAGPTGYGLARLCAEAGISCVVAAPSKIRPAADRVKTDRRDAERLARLLRLGEITPVRVPGPVEEAARDLVRAREDARGDLMRARHRLSKLLLRHGAVYDATAWTRAHDAWLRKQRFQDGPLAIVFDECYSRMIDAKTRRDTLDKAIAELAASEPYVDVVERLVCLRGVSTLTAFALTVELGDWNRFRPESLAPFLGLTPSESSSGERRRQGGITKTGNTHARRLLIEAAWHQRSAPRSSVTLERRRTGKSLAVRAQADRSARRLHGRWGALEARGKPRSVVVVAVARELTGHCWALATME

SEQ ID NO: 194355 - protein, 409 aa, unidentified
METLHERCSGLDVHKDTVVACVRIASGRTAHREVRSFSTTTSGLLKLHDWLQESGVTHVAMEATGIYWKPVWHLLESSFELVLANASHIKAVPGRKTDMNDATWIADLVAHGLIRASFVPPTPIQELRDLTRLRKQVVQEKNRHVQRIQKVLQDANLKVDSYVSDLLGKSGRAVLDALVEGHTSPDVLVSLTTGRLKASKDELREAFRGRVTRHHRFLLQLHLRQIDQIDRSIEELEAQARQAIEPFRHHVEQLTAMPGISVTTAHVILAEIGSDMSVFPSASHLLSWAGMCPRSDESAGKRRSTRLRHGAPWLKSTLVQAAWSAARKKDSYFRALFGRLKSRRGAKKAIVAVAASMLSTAYHLLRDGTAYQDLGPLYFDQLHRDRTAKNLVRRLQTLGFDVNLKTVAT

SEQ ID NO: 194356 - protein, 351 aa, unidentified
MDATTVGVDLAKNVFVACLADCAGRIVARLEFNRAGFLTWLGTLPAGTVVGMEACGSAHHWGRTAQRLGLAPRLMAAEFVRPYRKRQSVKHDRADAEAILIALRSPGMRFIPVKTEAQQQRLAWHSLRIGWVEERTALLNRIRGLLAEFGLIVDPGPRHLRAQLAEREFDTALSPALRGLIQSVRDQLDALDARIGECDRQITAQQADDPLAKRARDLPGVGLITADAVTASVGDASMFRNGRQFAAWLGLTPSQSGSGGKTKLGRITRRGDDYLRTLLVQGARSVLAVTLRKQRRESPDRLTRLQQWIVALNGRIGYHKTLIAIANKHARQLWAVLAKGEAYNAQAWQRA

SEQ ID NO: 194357 - protein, 359 aa, unidentified
MKTIVSNKQNWFNKINLTKDDEVYVGIDVHKKAYAVAVWLNDAPAIDFVMPADNQKVLTMLDKLRIALKQVVYEAGPTGYNLARLLQDAKLPIRVIAPSKTPRQSARESKTDKLDCRKLAQYAAKGLLRPIAIPTKQQESDRQLFRFREQLVEKQRILKLQIKSFLLQHGISEPAGLKSWSVLAVEKLHTIALPDKLRYCLDIFLDELAFLKTQIKKTEQHLKETFSAPQHAKKIELLLTHPGVGPVVAGQFCTEIFNPKRFKNATEIGKYVGLSPMVTQSGQSRKDGPVLKTGRPQLRSNLIEASWVWIRKDPHAYKTYIRLLHNTGEKNKAIVAMARRLAIHLWKMLSDNKPFVQAA

SEQ ID NO: 194358 - protein, 328 aa, unidentified
MTPSNVRFVGLDVHKEMAEACLVDPAGQVVGRMRFAVNRPTLESFATQILRPTDQVALEATTHCWAVAEALRPHVARVVVSNPMATKAIAQAKVKTDKVDACVLAQLLRCGYLPEVWPPDLGTQRLRELCGRRSALVGQRTALRNRIHSVLAMRLVETPHRLFSPAGRHWLETVALDEQARVLINSDLRQLDAVQAEIDALEEILAGRGYASPLVRLLMTLPGVDVTTAEALLAAWGDPTRFPDAEHAASYLGLVPSTRQSAKHCYHGPITKRGRSQARWMLIEAAQHLDRHPGPLGHFFRRLARKKNRKRSGGRRGAEAGHHRRSGC

SEQ ID NO: 194359 - protein, 337 aa, unidentified
MDKIIRIGLDTSKHVFQVHGVDAAERAAVRKKLRRSEVEGFFAALPPTLIGLEACGASHHWARLLVRLGHEVRLLPPQYVKPYVKRGKNDAADAEAICEAMARPSMRFVPVRTAENQAELMLHRARDLLIKQRTMLANAIRGHAAELGVTGAKGVGRVRALLERIALDPALPELAREIFAQLGEQLEAVDAKVLALEARLKAWHRANERSQRLAAIPGIGPIGATALAMKVPDPTVFRSARHFAAWLGLTPKDHSTAGRQRLGGITRAGDETLRRLLVSGAMAAIQRAKPGRASPWLLDLLARKPKKLAAVALANKTARIAWALMARNQTYRSAAAE

SEQ ID NO: 194360 - protein, 345 aa, unidentified
MKYYAGLDVSVKETSICIVDQTGKICREVKVTSHPDDLIVVLKDPAWNMERIGLEAGPLSQWLFEGLARAGLPVICIETRHTKAFLKAQPNKSDRNDARGIAQMMRVHFYRAVHVKTLTSQKRRALLTARKLLQDKAIAIENDLRGLLRNFGLKVGVVGSAKFEARIRELVEGTLDLVEIVEPLLDARRKLREHFATLHRKLLMIARDDEVCRLLMTIPGVGPVVAVAYTATIDIPQRFKNSKAVGPILGLTPVLNQSGESHRVGRVSLCGDGMMRTLLYDAAQVLLNRVAKWSWLKASAMSVAKRRGLQKAMVALARRLAVIMHRMWSDGTEFCWSREKLPASA

SEQ ID NO: 194361 - protein, 346 aa, unidentified
MPIVGGLDIHRKQITFDYLDTVTGQVCRGQISPADREHLRAWLVRFAGHGDTAFAVEGCTGWRYVAEELAAAGVTVHLAEPADTAFARGRKRHAKTDKTDCRHLRALLAEGRLPECWIPPGHILESRALLETYHDLRREHTAWVQRIHAVLFHQGAPALGEGALRGEQGLAALREVSAAHLSLAGQLQIATALEVLEALEARLHELRHQLLDAARHLAGARVLAERLYGVGPVTALAMTCWLGGASRFSSSRKAVRFAGLDVTVYSSDRKGPPGRLSRQGPPVLRWAVYEAGKTHARASAPDYRYYAQVKDRCNGKRAALSEARKILRQACHILTELGDDALVLAA

SEQ ID NO: 194362 - protein, 409 aa, unidentified
MQVMYQRCAGIDVHLRFLVVCLIIIEAGQRRKEIRTFRNETADLLALRAWLLEEQCTHVGMESTGVYWMQVYRRLEGFFELVVANAQHIKGVPGRKTDVQDAEWIADLLQHGLVTASFVPSQEQQDVRDLTRTRVSLVQERARLVNRVQKVLEGAGIKLSTVLSDVMGLSGRAILNALCAGESDPVHLAKLMHRSVHATQEQVIAALTAEVREHHRFLLRELLSLIDAQDRSIKHLELEIERHLHPFEEQIKRCEKINGVSCHVLHVLMAEVGTDMQRFPDAEHISSWAGVCPGHKESAGKRLSGRARHGNRYVRAVLVQAAHGVRRSHTYLGEQYRRLKKRRGSKRAALAVGHSILVIYYQMMKTGEAYQEKGEAFFLRKDHGKVERQLVRRLERLGYQVTSPPQPAA

SEQ ID NO: 194363 - protein, 417 aa, unidentified
MEVLVARCAGLDVHKKSVMAAVRVAGPDGKRRQVVREFPTFTRNLVQLRNWLVSQGVTEVAMEATGVYWQPIWQVLEDMPGVELKLVNAQHVKNVPGRKTDVSDAAWLAQLLECGLLRGSFIPEPAMARLRDLTRYRKKLVEERAREVQRIQKLLETAGIKLDSVATDIVGKSSRRMLEALIAGERDPDTLAELALTRMRAKLPALRLALEGRFSEHHALMARLYLDHIDHLSETIDRLDAQVVSETTPFAQQIDRLCTIPGMGRRVAEVVIAEIGVDMSRFPTAGHLASWAGMCPGNHESAGKRRSGRARRGNDDLRTALCEAAWAASHTKDTYLSAQYRRFVARFGKRNGGETKAIFAVGHTMLVIIWHVLAHSGTYEELGFDYFEKRNETEAYKRRLVLQLEKLGLKVTVEPAA

SEQ ID NO: 194364 - protein, 331 aa, unidentified
MNYSHFVGLDVGKKTFDASLMSADEKELSHKSFDNTPTGIQSLLDWIAGYHLSLSKLLFCAENMGSYVTELSVSSVSMGFSLALVCPLTIKKSIGLQRGKNDRIDAKRIANYAVLHYRKLELYKLPDKDLVRLRGWIIIRDNLVKQKVSSIKLLETFSRMAKLADVTESISFLEEQLKSIKERILEVEEDMEQLIAASTSLYTNYLLLRSIKGIGIINAIVLLCVTDNFQRFDNPRKFACYCGVAPFEHTSGISIWGKTQTSSLANKEVKVYLTRAAITAISWDPQMKAYYKRKIAEGKHKASVINAVRAKIIARSFAVIRRQTPFVTLAV

SEQ ID NO: 194365 - protein, 332 aa, unidentified
MKKFSGIDLHSNNSVVVVSDEVDHIVYQRRLPNDALQIRAALAPHREELEGVVIEATYNWYWLVDALLADGYHVHLANPAAIRQYEGLKYSGDFTDAAHLAQLLRLGLLPEGYIYPADGRQVRDLARKRMQLVQCRTAQILAIGNLFARHTGSQMHGPQVKRLDGAQVSRFGFAPDVTLAIRANLAVLGTLQQQIEIIEKRLMQQVKLNPDYALLNTVPGIGPVLATTIMLETGTISRFATVGHFSSYCRCVDSRRESNSRKKGEGNTKNGNRYLAWAFVEAANFAIRTCPQARRFYERKVSVSGSRLELRHSECEGGAFVRTRAMRWKTRT

SEQ ID NO: 194366 - protein, 355 aa, unidentified
MSSEKYIGLDVHQATICVAVMDAKGKVVMESILETKATTILEFFAGLRGTLSVTFEEGTWAAWLYDLLKPHVANLVVCNPRKNALLKHGNKSDKIDARKLANLLRLNDLEPVYHGETGVRMLRELARSYLTIVKDVSRVMSRLKAIYRSWAIPCAGRDVYYTRHRGEWLGKIPEAGCRRRAEQLYQQLDMLQPLRQQARRELLAESRKHTITAKLRQIPSLGPIRSALAVALIQTPHRFRTKRQLWTYSGLGLETRDSGEYHYVEGQVRRRKKQVFIRGLNKDHNHDLKGLFKAAATRASVQPGPFQDFYQRSLAKSIQPTMARLTLARKIAAITLTLWKKGENFDAEKLKAQAA

SEQ ID NO: 194367 - protein, 327 aa, unidentified
MKSIHVGIDISKATLDFCVMEPQRVTYHNIKNKVSAIRKLLKAIAELDPGALICMENTGYYNFKLYEALEKFSFATYVVDPKHIKRSIGLVRGKNDKVDAKRIAVFIERNHGDFEPWEPASEAVKTIKILLSQRRHKIKQRTGLKQQNSDLKAIAFNKSTRRLIKINQKSIKEISAHIKETEGLIRQEINTDAQLRQQVKRIMTIPGIGKISAWTLAVKTDGFKRLKDPRKLACFAGVVPFEQQSGTSLRTKPRVSKMADMQLKSVLQMAAMRAVRMDNDLRVYYLRKVGEGKNKMSVLNAVRNKLIHIAMALIKNQNYYKNRLELS

SEQ ID NO: 194368 - protein, 400 aa, unidentified
MNPELRVAVDVGCTRHRVAVGLSEGRLLEEFDINHDAAGLREFFERVRRHERQWGRPVAVAMEGYNGYARPLDERVLLHGYRLFNVNNMKLARFKEIFPGPAKSDPVDARKMLEMFSLKDKLPLAREALQEVAPVAEVNLQLKALTRRRKQLVNERMRVSSRLQTDLQAVCPGLLDITGEADNLWFLNFLTCRTDLTKLKTVRESSLLALQGVGKGYAGKIRHWQRQATFSGTVAWVGPMIIEDARRMLELRKAIGALQTQIDALAVDSEIACRIDTLPGFGRVCAPALAGEIGSLQRFRGESSLALYLGVAPLDDKSGARSGSKPPRHVNVRAKAAMMIAAAQNAASVPESKAFYDKKRAQGKTHNQALRALGRNLVRVMWSMLKHGRDYQLASPSKRT

SEQ ID NO: 194369 - protein, 393 aa, unidentified
MSKAWVGVDAGKGQHWALVIDVEGQTLRSRPVANDQTAISELLAEVSGLAEELVWAVDLSNGCSALLLALLWANHQQVVYVPGRAVNRAADGYPREGKTDARVIADQARLRRDFAPLAPTPELVADLRVLTGYRQDLTGDRTRMVTRLRQHLTAIFPALERALDFTHLGPLVLVTRWQTPQAIRQAGAEVITAWLRAHHVPKAAMLARTALAAAEQQTVRLPAEQLTAQVSAELAGELLALRRRVKELDKLLRTRLAAHPQAAILTSLPGMGVLLAAEFAVAVKDLANFASPDHLAAYAGLAPVPHDSDRRVNNLHRPHRYNRDLLRVFYVSALIAAQRPGASRHYYQRKRREGKHHIQAVLALARRRVNVLWALLRDNRPCTLTPPATPSTT

SEQ ID NO: 194370 - protein, 349 aa, unidentified
MNTTTTPQAASPFQRRCWMGIDVAKNTFDAAVWTPLELGEERSSRKLPTHSFPRTPEGVAACLAWARQYATDCLGAVMEATGKYSIQIAQWFAATEPMVQPAIINPRLAKAFAQSLSVNNRNDKTDARTLARYGAERQPAPFTLPTPDMEQLRDLTRYRQTLVEALTEQKNRDAEGAVSAAVRHMRTRLMGQLKRDIARIEKEIRNALKKLPEVQSDIDKLDGIFGVGLVTAVTVITELGDLRRFRRARQLTAFAGLAPTSHDSGTSVHRKSHTSKNGPTRVRRVLYLAAMAAIKGDNDFAELYQRMTAAGKKPMVAIVAVMRKLLLVMRAILISGKAYNPHQRTSACG

SEQ ID NO: 194371 - protein, 403 aa, unidentified
MFVDLTSRQKGSASMFFIGIDVGKFNHCCAVLNSEGEVLVEPFFFQNNSDGFDLLLHNIKSFHSSRHMCGLESTGHYGDNLLRFLLDNHFEVGLINPISTDAKRKEKIRKTKNDKKDSLTVCAVLQSREYTHMTKNKLSLREGKQLTRYHHDLTRSLHQAKNKLQKCIDIVFPEFNDVFATKYSKTYMAVLKECGSAKAVRNTHLTHLKKIISDASNGKLNSVYPARLKESAKTSIGEDNAVITLEIKQLIDSIELILNQLSIVDKKIEELARQLNSPIFTIPGISWITGMSILCELGPIDHFSSPSKVIAYTGLDCTVYQSGQYNADKTAITKRGSPHIRLSLYQAALPVCRLNTTFNVYYNRKRSEGKSHRCAQGHVVRKLLRVIFKLLTENICFDPALLK

SEQ ID NO: 194372 - protein, 348 aa, unidentified
MHYKNIHADHFAGIDVHPNRSQVCVMDKTGQVMLNRNFKNSISNLKKLIQPYQANIAVGCESTYTYYWLADGCHKSDIPFYLGHALYMKAISGNKQKNDPLDAKTIANLLRTNYFPEAYPYPRKMRPTRDLLRRRHRLVSIRGEAYSHIKMTAHQYAIDNIGSMNLKLVSDQNLVLSIFRELDLDHMILADLDIIRALDPVIEGIEKHIRVSAINHNPKDYALLQTVPGIGDMLAMVILYETHDISRFPKHQNYASYSRVVRCDRTSSGKKVDRKNQKIGNPYLKWAFSAVIVKGQSSKLIGKYNKRLESKYGRARARARIAHKYCKAVYYMLKNGQPFDENQFVRTS

SEQ ID NO: 194373 - protein, 361 aa, unidentified
MRIIGCDLHARQQTLAMLDTTTGEVVNHTLMHDGNQVREFYAQLPRPVLVGIEAIGPMQWFLDLLQELGIECQVGDATKIRAAEPRKQKHDRRDAELILKLLVEKRFPVIWRPSTEQLDLRALLLHRHHWVRLRTQIQNALQAIALANGLRRGPGLWSHDGQAKIAFLPLPPHASYRRSALQTLYRKMAEEIENLTEQVAEQAGQRFGARLLMTHPGVGPVTALATDVFLGDPGRFADGKALASYVGLIPREYSSGERQRLGAITKQGSPLLRFLWNEAGAHAARRDPELQSFYHRKLVQKGLGKARVAVARKLGIRLWIMLRDQIDYGEFCRRGQKQQSGDACAGMLETRFGANRHRPVD

SEQ ID NO: 194374 - protein, 343 aa, unidentified
MQFTTIGLDVAKNVFQVHGVGSVGGAVVRRRLRRGEVLPFFEDRTPCLVGLEACASAHHWAREIAKLGHEVRLMPPQYVRPYVKRNKNDATDAEAICEAVTRPTMRFVPIKSIDQQAVLMLHRSRDLLIRQRTALVNALRGHFAELGIVVGQGIWNVAKLVEEVTTASLERVPTIARAVLEVLTSQLGALQQQIRVLEAELLAWHRGNAASQRLATIPGVGPITATAIVATITSAAQFRSAREFSAWIGLVPRQHSSGGKDRLGGISKRGDAYLRRLLIHGARTALRWRRGRAAAGSTWIRGLLDRRPPNIAAVAIANKTARIAWAVLARDEPYRSPATAEAA

SEQ ID NO: 194375 - protein, 415 aa, unidentified
MKDQALCFAGVDWASASHHVVLTDGDGRKIGERIFPHGGEGLAEMATWLIATSDAADANHVLVAIEVPHGPVVETLLERGFPVHAINPKQMDRFRDRFTLAGAKDDSRDAEVMASALRTDRGCFRLLAVAEPVVIELREWSRITDDLVAERTRLTNRMREQLWRYFPAMLELGGHLEAEWLLDLWELAPTPARAARLRATTIEKLLKRHRIRRLDAAEVLAVLRQPPLTVAPGTTEAACDHIATLMMRIRLVNRQIKNAHQRLDTLTARLVPDAETKPGQEEQHDVAILASVPGIGRIVLAALLAEAFDPLQRRDYAALRSLAGVAPVTKRSGKSCIVLRRYACNRRLANAVYHWARTATQHDSRSRAKYAALRARGHTHARALRSVGDRLLAVACSMLKSGSVFAPSRETAIAA

SEQ ID NO: 194376 - protein, 416 aa, unidentified
MKKWQEMTHYAGLDWAKDHHAVVVVDAGGRIVADFEFEHSLEGWKSFADQTSAWPNLAVAIETSQGAAVDQLLQRGYTLYPVHPVAAQRYRERKAPTGTKTDHLDAWGLGDALRVDGHGWRPLQPLDAMTQQLRLLCRDEVSLIEQRTALVNQLQQALLEYYPTALEAFDDWTDAFTWEFILAFPTPQALVQAGKRRWEKFLHTHRLWRPETAPKRLALFAQADQFKASDPIVRAKSQLAVSLCKLLVTLGKQLALYRQEIEALFRDHPDHDLFGSLPGAKKVLAPRLLAAVGSDPQRYGSQEVLQSIAGTAPVSYQSGKLNKVRVRWACDKFLRYTVHLWADCFRKASAWGQAYYDQKRQEGMTHACALRCLGQRLLKILFRMLSDKKPYDAELHARNQQKHGSWVLKLANPAAA

SEQ ID NO: 194377 - protein, 341 aa, unidentified
MEKTVFIGIDFSKKTLDVTYFIVGAMHDYKHMQFSNSEQGCLDLITWIKEQHSITSRWLICGEYTGIYSMTAAMVFNDKDLDIWLENPNQIKLSSGMSREKNDKIDSYQIALYAARFMDRVKLYKPQSKVLLQVRELVRFKDRLTKVKTQLGVAAGELKSVRKDWKETEYICDSSKLLIDQINTQISDTEKEMLQLLNTDPELKQMYKLINSVVGIGMQTAIYLLIHTWGFKAFEDPRQLACYCGIVPFAKRSGTSLKGRPHVSHMANKKLKTLLHMCALNAIKYDPYLKMYYQRKVEEGKHKMNVLNNVRNKLIHRICAVITSGQEYDKDYYMRNLVVAA

SEQ ID NO: 194378 - protein, 449 aa, unidentified
MVINRVEEILDEPYEQVVQRVCAIDVAKDSGKVCVRTPAESGSGRRVSRVWDVQARTNAIIELGDHLACQSIEKVTLESTSDYWRIWFYLLEARGLDVQLVNARDVKNVPGRPKTDKLDSVWLAKLTEKGLLRPSFVPPRQIRVLRDYTRLRVDLTAERVRHWQRLEKLLEDALIKITSVASRIDTLSVRDMIEALIAGQRNPKVLAGMARGRMRLKHADLVEALTGQFDDHHAELARMLLDQIDALTAQIDTLTERIDTVLADVPVSPPPDGPEPDPDDHQPGRRNRVEQAPQVRGNGSGTAPAPGAAPRPVTALSLVDILDEIPGIGRHNAQEIIAEIGLDMSRFPTPEHLVSWAKLCPRTIQSGSRSSAGKTGKGNRYLRAVLGDAAAGAAKTQTFLGDRYRRLIKRRGKIKTLVAVARSILVIIWHLLANPGMRYQDLGVDFHTK

SEQ ID NO: 194379 - protein, 349 aa, unidentified
MTKRVWAGLDVGVETTAVCLIDDEGCVVRNTTCATSVQAVHGELRHLRRRRYARVYLEAGVGTTLARGLRNLGYQVDIYETRQLSRFLRLRRNKTDASDAYGIADAGRLGAASISKVHLKTLQSQLIQTQLTIRRHIIRQRVAVVNLLGRELEEYGGRLKRQNLSQLRCNVEIEIKKAFGRSSSEVITELLNLVSLCEDLLRRERVITSRLHRIAGDVETCRRFMQIPGVGPLCALTFYIVVGDPHRFVRAANIGSYLGLTPRIIQSGLTIRHGRISKMGNTSARTLLVSSSLAFMKYADERSNLYVWTRRVESRRGRQKARIALARKLSTVMLAMWKCGSSYRAIGHT

SEQ ID NO: 194380 - protein, 331 aa, unidentified
MQTIFEQTIYHNCCGMDVHKDSVVACIIKTRNPTALETNQSSIEKEIRVFKTFLNDLAQLRAWLESEGCQHVAMESTGIYWCPVYEALECAFDGKMEILVTNARHMRNVPGKKTDIKDAEWIAMLLRAGLLSGSFIPPIEVRELRQLTRYRKNVVEDICTQKNRIEKALQQAGFKLSTFLSDVFGVSGRNILKILIRQGYLVPSDVDSATRRISSAKKEDIKISLNGRLSTHQRQFLQLQLSLLDELQHHLEVIETSIAKISSKFEAEINLLDTIPGIATTSATAIIAEIGTDMSKFPTAEHFCSWAGLSPGNNKSAGKKKVQESLLAIPI

SEQ ID NO: 194381 - protein, 455 aa, unidentified
MARKRKSNPKSDQKTGASLLSCLNLNAAGVDIGATEIYIAVPGDRDPQPVRHFSTFTEDLHAAAAWLKACHIETVAMESTGVYWIPLFQILEARGFKVFLVNAHHVKNVPGRKSDVSDCQWLQYLHSVGLLRGSFRPEQAVCSVRSILRHRDSLVQMASSHVQHMQKALDQMNLQLHHVISDITGLTGIAILEAILAGERNPHTLAALRDRRIKASADTIAKSLVGDYRREHVFTLRQSLAAFRHYQELIAACDREIAQSLEEFESKLDPPPGSTSLSKDGSKPKTSEPGFDLQTHLHRIFGVDLTQVPGINILTTQTLLAEIGPDFSHFANGPALTSWLGLCPDNRVSGGKVLSVKTRKVKNRAATALRMAAQSLHRSQSFLGHFYRRMRTKLGAPKAITATAHKLARIIYHMVTTGHAYDETICAQNEAQNRKRMEVRLRKQARELGLQLVAI

SEQ ID NO: 194382 - protein, 344 aa, unidentified
MDISVLGIDLGKNVCSVVGLDASGAVVMRRKVRRETLIALAEKLPPCVVGMEACCGAHHLGRVFAAHGHDVRLMSPEYVRPYIKAQKNDDRDAEGIAEAATRPTMRFVELKSQDQLDMQTLHRSRDRLVGERTALINQLRAILLERGMVAPQGKRKLEQFLAVLMDEQGGAGLSSRMIVLVADARTQWAEIDRRIAAFDGEFARWVKENEEARRLMTIPGVGAIVASALVAAVGQAESFERGRDLAAWLGLVPRQFTTGGKPKLLGISKRGNKYLRRQLIHGARAALPYVAERDTPLGRWAKELMSRAHHNVAVVAFANKLARIAWAVLRRGERFAVTGMPVVA

SEQ ID NO: 194383 - protein, 410 aa, unidentified
MIKENYIYVGIDLHKETHTAVMIDCYNQKLGEITFPNRPAAFPKLVTKVKKCNTDGKEVVYGLENAYGYGRALAVWLIDKGYLVKDVNTAISHRQAKHRGAMYRKSDSDDAKAIALATLNMLDKLPDACPNDAYWSLGQLVHRRDNIMKQRTRLVNQLHEQLCIAYPSYKQFFNDISRPTALYFWEHYPSRKYLKGKSVEDLRAELVPVSHNKCSTKTCEKILDAVASDKVKNNAYQDARDMVTLSIVSDLQHYDKQLAEVDKMLKQMYKMLGCTLTTIPGVNVITAVKILSEIGDIERFANANKLAQFAGIAPLHLSFSGKGKDVATKQGNRRLQATIYFLAIQMVQVSSKGTPRNPVVRAYYEKRKAEGKTSQQALICISRRLISIIYGMLKHGTEYRMPVVESAGEK

SEQ ID NO: 194384 - protein, 338 aa, unidentified
MEWTVAIGVDTHKEVHVAVALDALGAELDSREIATTPAGYRCLLTWAQELGVPAFAVEGTGSYGAGLVRFLERAGVAVYECERPRRQERRRGKSDLIDAALAARRLLSGERLSIPRGGGRRENLRLLLLERRSAMQARTAARNQLSALLVTAPEHVRERLGALSGERLAQAAARLRPGPDVLNGVLRRLGKRVERLSKELAEAERALAALLAEVAPDLLEECGVGPVCGAQLLVSSGDPNRMTSEASFAALAGTSPVDASSGKQRRHRLNRGGDRQLNWALHVIALQRIRHHPETSAYYERLLAAGKSTREARRCVKRALARHFYLRLREIPRLPLTT

SEQ ID NO: 194385 - protein, 411 aa, unidentified
MGLTCGIDWAEGHHDVAVVDESGNVLAERRIGVGAAGFTDLLGLLAECGDSPDQLIPIAIENSGLLMVAALVAGGRQVYAINPLAVSRYRDRHRASRAKSDARDAIVLANILRTDAHAHRPLPSDSDAVKALRVLTRAQQDAVWDRVGLTNRIRGALRRYFPAAIAAFERGGKHRLDSAACRVILRAASTPAAANVLSVAHLQALLRRAGRRRGIDAEARRLQSYLRRPELRQPLVVEDAMGLHLQTLVDQLDAVCRAIEVLTAAAEQRFLSHPSAVIITSMPGAGPVTGARLLAEIGDDAGRFADARALKSYAGAAPITRASGKSHHVGYRRAKNDRIAATGYVWARAAIQHDLACRRYYQARRQSGDRHVGAQRNLFNKLLGKLYHCLQTHQLYDSATAFPHHQLATAA

SEQ ID NO: 194386 - protein, 329 aa, unidentified
MKRNWFIGIDISKKTLDVVIYDQEKKNASKHFKVNNDLKGFKKMNKTLKAEGVVLDEAFICLEYCGIYGLELGLFLERKVDFCFCSPLHIKRSLGLTRGKNDELDAYKIAWFSYLFRDELSPSKMPTKTMFKLKSLMGERYRVVKAAATEKQVLKELFKQLDSKSIRRIKHRLKILTADIKAIEDEVKELVQSSPALKKNYELLISITGIGLVNATMMILCTNNFEGITNARAFACYCGVAPFEYSSGTSIRGKTRVSNLANKRMKTDLTNAARSAIVHDPEMRIYYKRKRAEGKEYGKVINAVKFKIITRAFAVIKRGTPFVKLRQAG

SEQ ID NO: 194387 - protein, 374 aa, unidentified
MKHYSTLYVGMDVHRNSFTLAHFALDMKQPTGIVQTDNDYRRIVAYVHRLREKYGQETRIVCGYEAGCLGYTLYHQLTKAKIECIILAPTTLPSPRGGKRVKTDGRDAANIAQCLAYGTYSPVHVPSAGDEQVKEFIRMRNDHCQMLKKLKQQILSFCLRHGYLYSGTRSNWTQAHMKWLDALQPEGLLGDTLEEYLTSFRYHQNKLERLDRRIEEISREERYREPVGRLCCLLGVKPLTALSVVSEVSDMHRFSTAEKFASYLGLVPCEHSSGNSVRRGGITKAGNVHVRALLTEAAQSYTRGKVGYKSSALKKRQSGQSETVIAYADRANERLRRRYYQMTLQNGKRGNVAKTAIARELACFMWGLLTDHVA

SEQ ID NO: 194388 - protein, 369 aa, unidentified
MEKRIKYIGLDVHKNSIAIAIAGQGPDQEVRFYGTIPNRLDLIDKFTRNLISDGSELRFVYEAGPCGYQLYRHLTKNGFECMVTAPSQIPKKSGRRIKNDRRDAIDLARLYRAGELTAVYVPDAEDEAMRDLTRAREDAKFATRKAKQQLGGFLLRNGHIFTGKSNWSKAHFNWIADIKLAHPCQQITLQEYVDAVKTGCERVDRITEQIQNLTKTWRMAPVVKALQAMRGVSTIVATTTVAELGDLGRFDHPQQLMAYLGLVPSEHSSGEKVKRGAITKTGNGHVRRVLVEAAQAYRLPARISRVLLKRQDGLPPQIREIAWKAQLRLCQRYRRLLGRGKPANVVITSIARELIAFMWAIAKQVAPVV

SEQ ID NO: 194389 - protein, 422 aa, unidentified
MLQEDEQNEEIIARVAALDIGKAELVCCARIPHEGRPGRRLQEVATYSTMTRSLLRMADRLVELEVTRVVMEATSDYWKPVYYLLEAHGFETWLVNARDVKHLPGRPKTDKLDAVWLCKVAERQMIRPSFVPPPEIRRLRDLTRYRCDLVEARTAEKQRVEKLLEDAQIKLSVVASDIFGVSGRQMMAALIAGQRDPKVLAQLARGRMRPKISQLEEAFTGYFTDHHSYLLVKMLARIDALNADIAELEDHIEEMVAPFATAVERLDEIPGLGPVAACAALAEVGPDMTRFPTAGHLVSWAKFAPGVKESAGKKKGHGSTGHGNRYLAKVIGEAAVAAGKTDTFLGERYRRIARRRGAKKAIVAVGRSILVIIWHLLSDPEARYHDLGSDFYDKRINPERKKRAHIHQLEALGYKVTLEPAA

SEQ ID NO: 194390 - protein, 371 aa, unidentified
MYIVGIDIGKNHHEASIVSPKGKQIGRSLRFATTHKGADSLMSFIFKNIGNSPCVFGMEATGHYWYPIYSFLKAKGYTIYVINPIQSDSLRKMYIRQTKNDSIDSFLIAEVIRFGQFGTTSMADENILAMRQLCRYRDSVISSRTEIKLRIGTIMEQIFPEYEKQFSSLWVSTSMGILEKYLTPENIENTPIDELFEIIKDKSHNRLTRAKAISIKEAAADTFGIKIAQDAFSFQLKQLIDRMNFLDKQIEALDCQILEYYEKFDCYLHTIPGIGMIAAATILAEIGDINRFKSSSALVAFAGIDPTVRQSGEFSSTHNHMSKRGSPYLRHAIFLAATTRSFHNSPLNAYYKKKRDQGKHHLTATGAVARL

SEQ ID NO: 194391 - protein, 483 aa, unidentified
MAKRKMSTFERLQQMNRKQRRELGRRLNSENPGLEVIHPNAAGIDIGNESHFVAIPPDRDPAPIREFGSWTADLCQMASWLIDNGIQTVAMQSTGVYWIAVQEVLEQAGLEVYLVNARGTKNLPGRKTDVQECEWLRKLHAYGLLRNSFRPPEEIRALRTIWRQRDRWVKEAARSLQQMQKALTTMNVQLANAISDISGVTGQAILRAIAAGQRDPWELAKLRDKRIAASQEEIANSLNGNWKEDVLFELRQVLEAYDFYQKQIADCDQELKKYTAAVPTREIAEKQDPPTDASPLPPKKSRRSKPKSTNNYKKKPGIDLVPELQRTMGVDLTLIDGIDVITAQTIFSEIGPDFSAFPNEDHFASWLTLSPKRDISGGKVIRHVHATGRQRVANALRMAAQSLSRSNSYLGARYRRLRARLDGPVAVKAMARYLACLIYRMVTKGQAYVDRGAAHYEAKRQEKELMALQRRAANLGLKLVPAA

SEQ ID NO: 194392 - protein, 403 aa, unidentified
MISVGIDVSKGKSTVCILKPYGEIVSKPFNITHTQKDLSELSSMLFRLNDEVKIVMEATGIYHLPVLTYLQEKGFFVSVINPYLMKSYRNESLRKAKTDKIDSRIIANYGIDHWFKMKEFQTSGEIYEELKLLGQQYRHYMKLHLLSLAELTHLLDLTMPGIKNLLASWNETNRKDKRSDFVERFWHYDVITSMSEQEFTEEYILWAKEKKYVPSQEKAKVIYTLAQESIPTLPSETSSFKMLVTEAVRVLKEVDATLGLILSRMQEIAKTLPEYSVVREMGGVGNTLAPKLIAEIGDVRRFRNGKALVAFAGIDPPPYESGQFVGCNRKISKRGSASLRKVGYETMRSLKMRSRPEDPVYRYVVKKESEGKSKKSAKIAGLNKFLRIYYARVTELYKIYNLI

SEQ ID NO: 194393 - protein, 343 aa, unidentified
MQCKTIGLDLAKNTFQVCGVGEHSTPIFNRKLKRNQLVQFFAQQPPTTVVMEACYSAHYWGRELAKLGHHTKLIPAQHVTPFVRGNKNDHNDALAIVEASQRPHVRFVPVKTEYQQEILSLHRVRERLQRNRTSLVNQTRGILSEFGVIAPVGVKNLRAKLAHVIGDTSCSQGLRNIVANAYIELLDTEQRIEDIEQRLKAFLDEHPCRDIIMSLPGVGLINASAFLASIDKGQAFHSPREFAVWLGLTPQLYASGDTHRMGGITKRGDRYLRTLLVHGARAALSRARNKTDALSVWGNHLVHRRGYNKAVVAFAHRLARLMWILLQRNECYQPQPALEACQG

SEQ ID NO: 194394 - protein, 374 aa, unidentified
MDKFSRQEETVVGLDVHKETIVAAVLPPTAERPIETGTIPHTPETLAQLVRRLATNGPVTFVYEAGPCGYEPYRQLTALGHPWTVVAPGLIPVRPGDRVKTDRRDAEKLARLFRAGELTPVGIPTSEQEAARDLVRAREDVVQERLQATHRLRKFLLRQGRVYRASGGWRCATQQAWLQTQRFEWPALQQTFEGYVRGVTDAEARLAVVDQQLMDLAAQPPYAAAVHALSCLKGVKTVNALTLAVELFGWARFTQPRQLMSYTGLVAREHSSGGRRRQGGITKVGNAHVRRVLVEAAWSARHPAVVSRELAARRAHGTPAVVAIAHKAQTRLHRTYWRLLQRGKAPQVAVVAVARELAGFVWAILHQVSREATA

SEQ ID NO: 194395 - protein, 417 aa, unidentified
MKDNERKLYVGIDIHSREHRAAVIPILLLERPGAAWRKVKTFSIRNNISDFENLDTAIKSHIASTDEVAIAVDHTGGHYSEPLVHFLQARGYTIYYLETKAVKAARERFLDQESKSDVIDATSAAYLLYLRDIHGLSFRISAMTPELGSRASALNPLVLQRWQFNKLANQATNRLHQFLLAVFPEGEAQYFNKLLKIIPYYPTPKDILASNCLETIEGLCRKDKEKIVELAGNTVGVPSEIYRWLIEALSSQRSEFIAKRDALTSIIREQVAIHPYGDILLSFPYLGEIAAATIIGIIKDIERWPDKKKFKKALGVYSSLTQSGSGPGHTRRGKEGSRHGRRVLFQICLGCVTSNAHDNDFRDYYLRQVARGKVRIKALVSTMGKLAEIIYHCLKAGEPYQYQGIYRATATSTDKKS

SEQ ID NO: 194396 - protein, 353 aa, unidentified
MHTHQNSSHPVATIGVDVGKNTFHLVGLDKRGAIVLRTKVSRSQFERRLANVPCCLVGLEAGCGSHHIARQIRSLGHDVRLIPAQYVKPFLKGHKNDYRDAEAIAEAVQRPTMNFVAIKTPEQSDLLSLHRVRARLVGQRTAVINQIRGFLIERGVTVRQGPAPLRKALPAILSSPTEVLSPRMVRLIADLSEDWRRLDARIEAVSSEIETLAENDGSCQRLMTVPGVGPIISSAVVAAIGNGSGFHQGRDFGAWLGLVPKQESTGDRTKLGKISKRGNKYLRTLFVQAAHVVLVRRPAAAMLALWPWIERASKRLAHRNLLAIALANKLARIAWAVLARGRDYEPRITTNAA

SEQ ID NO: 194397 - protein, 341 aa, unidentified
MTIVGGLDLHRRQLTFDYLDQDTGEVTTGRIVPADRLQLRDWLERFAGTQQVAFALEGCTGWRYVVEELQRAGIAAHLAEPAETAGLRGPKRRAKTDRADARHLRELLLGGRVPESWIAPAHVLEARATIRLYKDLLDERTAWLQRVHATLFHQGVPVIAKLTTPEGAARLAAAELSAAGRQAVAVGLRQIQRLSEEMGPLREQLADLSVRQVGCRALREAHYGVGALTSVAIWAELGDCRRFGSSDDAVRHTGLDITVYASDGKRTKGHLARQGPAVLRWALYEAAVFAGRASSPDHRYFRQVKQRLDGQRALLSVARKLARRCYHTLRGLGDQAFAPAA

SEQ ID NO: 194398 - protein, 341 aa, unidentified
MGEVNTIGLDIAKSVFQVHGVDAADAVVIRKRISRAKVLEYFGELPPCLIGIEACPSAHHWGRELQGLGHTVRLIPPSYVKAYLKRGKNDANDAAAICEAVTRPSMRFVPIKTKEQQTALMLHRARQLLVRQRTMLSNALRGHLAELSIVSAKGRNGTAELLRIIADGRVSPAACGILKVLARQYSAIGIEIVSIDKSIMALHRRCEASRRLAEIPGIGPIGATALVAEIGDWKTFSSGRSVAAWIGLVPKQHTTGGKDRLGSITKQGNRYLRWLLVVGAMAVIRYARKHGTQKRPWLGRLMERRPTKVAAVALANKMARMAWAIMAGGERYKEPRLLLAA

SEQ ID NO: 194399 - protein, 344 aa, unidentified
MKIAVLGIDLGKNSCSVVGLDSRGAVVKRRRMRPGSIAGFAEDLPPCIVAMEACCGAHHLGRQLTAQGHTVRLMSPEYVRPYVKAQKNDDRDAEAIAEAATRPTMRFVELKSEEQLDMQTLHRARDRLVGERTALINQLRAILLERGIAVPQGRHQLAQYLAATLGQEGEIAISQRMRLLIEDMRAEWRELDRRIAAFDDEFAAAARRDPAARRLATIPGIGVLNATALVAAIGNGQTFARGRDLAAWLGLVPRQISTGGKPRLIGITKRGNKYLRKLLVHGARSAMPSLANSATPLGGWLRGLLDRVHKNAAVVALANKLARIVWAVLRRGQDFDAKATVAAA

SEQ ID NO: 194400 - protein, 453 aa, unidentified
MKGRQQEGDGTAGMPLVNLNAAGLDIGAAEIWACVPADRDVEPVRRFGTVTPDLQAMAEWLVGCGIDTVAMESTGVYWIPAYEILEERGLRLYLVNARHIKNVPGRKSDVQDCQWIQRLHSCGLLNASFRPDSDICALRAYLRHRANLIENRAVHIQHMQKALLQMNLQLTQVLSDITGTTGMAILRAVVAGERNPLKLAALRNDRCAKPQADIARALTGNYRPEHLFALKQALALYDAYTQHIRECDAEIERQFSLIRPRHDDNLPPLHNSDKNNTHSKNGPSYDARTLLYRLLGVDLVAITGLNASTVQTLISEIGTDMTRWPTVKHFCSWLQLAPRNDISGGKVLRSRTLQGHNRAAQALRLAAQSLTRSPSALGAYLRHMRARCGPKKAIVATAHKLARILYTMLKNRQPFHDIGADEYEHRLRQRRVATLQKTAAKLGFTLQPIQVSE

SEQ ID NO: 194401 - protein, 387 aa, unidentified
MQASTVGTPTSGHCGTIFVAIELSQKTWLVTLHSPDRDRISRHKLEGGDHAGLLALIAQVRSRATEKLGSTPRVVSCYEAGYDGFWLHRLLLAAGITNYVFDPASIAVDQRARRVKTDRIDGETMLRTLMAYLRGEPRVVRIVRVPAPEQEDARRASRERGRLVKEQTAHTTRIKALLRLLGMAVGNPRRRDWLNWLAAQRDWQGQAVPPRMLAEIKYEHARLMLVREQLEALAQASAQADPAPAAVQMTERSELLLRLKCLGPAFASTLANEAFYKDFRNRREVASYFGLTPSPWQSGGIDRDQGISKAGNPRARCAAIELAWLWLRHQPESALTRWYRSRTHNNASKRNKRIAIVALARKLMVALWCYLTTGLVPEGALLKAAKA

SEQ ID NO: 194402 - protein, 359 aa, unidentified
MREQRNKISFRGQKIYVGIDVHLKSWSVTVLSETSVLKKFSQHPSPEALYGFLTRSYPGAEYHSVYEAGFCGFWIHERLTALGIDNIVVNPADVPTKSSEKLRKTDTVDSGKLARSLRANELKGIYTPDSVSLEMRSLIRLKNSITKDTTRQKNRLKSQLRYLGIEIPQEFLTPFSNWSKRFFAWLKEIETLTPSGRQALDIHIRHLEELRRQKLEMTRALRTLAKTDRFREPLRLIMSVPGFGQATGMAFLSEICDITRFRNAEQLAAYIGMIPMCHSSGEKDGTGDITIRKHAVMRRNLIEAAWVAVRQDPAMNLFYTEQCKRMPKSKAIVKVARKLVNRLFFVLKHQTEYVNSIVS

SEQ ID NO: 194403 - protein, 404 aa, unidentified
MRVFVGHDWAEAHHDVFIEDEAGARLAAARVPEGIEGVARFHALIADHIDDPSEVMVATETDRGLFVGALVATGYRVLAINPMSVARYRERHATSGAKSDAGDAWVLAELARVDGQHHRPISGDTDLADAVKTLARAHQSLIWARKRHTNQLRSALREFYPAALDAFDDLASGDALAVLAMAPTPTAGRHLASPRIVSALRRGGRQRLVDQRAGEIRQALRAEHLRAPDVVADAMGATVVALVGVISELRIQIRRLEGELADRFEQHPDAKIIRSLPGLGTILGARVLAEFGDDPNRFDSAKSRKNYAATSPITRASGKHRVVLARYARNHRLADTCHLWAFATITASPGARAFYDHRRQSGDTHNRALRALANRLVGILHGCLRHGVPYNEHTAWAHRNDLAA

SEQ ID NO: 194404 - protein, 430 aa, unidentified
MKSNTQNAKIEAITEKTLVLGIDVGSETHYARAFDYRGIEYSKKPFKFSNTEAGFVTFKEWILDLKEKHEKDKVVPGMEPTGHYWFNLGKFLQDNEMKPVLVNPHHVKKSKELDDNNPTKNDRKDPKVIAGLVREGRYMIPYLPDGVYADLRTASNIRFQLQAELTRIQNRISRWFNIYFPEYKTVYGKPDAKSGMLILKQAPLPEDILTLGIEGVNQIWRDAKMRAVGKARAKTLIEAAEHSVGSKEGAVSARMEIRMLLEDYESRNIRLQEVMTLIAELVNQIPMAEKLLEIKGVGIKTVSGFLAEVGDISRFNNPKELQKLAGLAVVENSSGKHKGRTTISRRGRKRLRYLLFEVAMSLVAKNPEFRELHTYYTTRRLNPLKKMQSLMAVAAKLIRVFYVMLTKGVDYDPKKMVGDIKRPAVYLQAA

SEQ ID NO: 194405 - protein, 375 aa, unidentified
MTKIIRIGIDTSKSVFVLHGVDAAEQPVLRKKLRRSQVLEFFAKLEPTKIGLEACGAAHYWARELMALGHEVVLLPPQYVRPYVKRGKNDAADAEAICEAMSRPTMRFVPVKTVEQQAALMLAGTRDALIRRRTQLTNAIRGYAAEFGLTAAKGLDKIEPLLARIAAAAELPRLAQELFAGYGKEYAQLKVQIQKIEAKLMAWHKDNELSRRLVEVPSIGPIGASLMAMKVTDPHAFRCGRNFSAWIGLTPKDHSTAGKTRLGVITRAGDESLRSILVVGATSVIKQVRRGKGHPSPWLVELVGRKPPKLAAVALANKTARIAWKLMVSGERYNPAAAARAGRGSPLTRGCAPRPALAARIRSRGAALPAAGTEA

SEQ ID NO: 194406 - protein, 352 aa, unidentified
MEHFIGCDAHKKFSVFASINEKGEYGRTIQVRHDLEMFREFLKELPAGSKIALETSGCYYWIVDEMERAGHLPQLAHALTAKRRMEGRHKTNDRDAKGLAMLLRNGTLPVVWIPPAELRDQREMLRWRMYLSQMRTQIKNRIHGVLQRYNIDIAVSDLFGDGGRVKLLARKGELPPHSRESVLEQLQTIDSLETQIGECEQILEEILYPSVERDLLDSLPCVGKILSAVLALEIGDVRRFPGPDRLVSYAGVVPRARESANWKRKDKCPRDCNVYLKWAYVEAANLISAHSKHWADRHVVQLYQRVKESTKMHGKAAVAVARHLAEASYWMLKKQEVYREPQTRQVLSSTHG

SEQ ID NO: 194407 - protein, 385 aa, unidentified
MANQNDLSRSLVAFEQDNTIIAVIEMSLNSWLVAGIVPGIERRPLKKLSCDEQMLLQLLYRWRDEAVKAERKITRMVVAFEAGRDGFWLARWLRSRGIEAYVIHPTSVAVSREHRRAKTDRLDTELLIRAFLGWLRGEPDHCSMAAIPNLQEEDAKRPTRERENLVGERTRIVNRMKACLIRFGIRNFNPILRRATERLNALCTPEGVSLPPNTLAELRRDMARLRFVMDQINEIEAARLRRLEQAPAEEPHAKVRLLARVIGVGLETADMLVHEILSRKLRDRRAVARYAGLTGAPDESGSKRREKGLAKAGNARVRRGMIQLAWRFLLFQKNSALSQWYRTRTESAGKKRKTMIVALARKLLIALWRLVTTGEVPAGVVLRAA

SEQ ID NO: 194408 - protein, 360 aa, unidentified
MQTKVNEKLFDGQSIYVGIDCHKKNWTVTILGEQYEHKTMSQNPDADILASYLRRNFPGADYSAVYEAGFNGFYPCRRLRELGINCNVIHAADVPTRQKEKIQKMDPVDSRKLARSLRSREFEPIHVPEQSLESDRALVRQRFRAMKDVTRTKARVRSLLFQFNISVPDRFTLGQARSWSKVYMNWLKELKIEHESLKQTLDNYIRIGELQRKELLSVNSQVRSLSQTDAYRGNHNLLISIPGIGFLTAMTFLVQIGDIRRFERLDDLCDYIGLVPMMHGSGDKMYTGKLINRGRKELKIMIIEAAWEAVRLDPALMARFNELARRMNKNKAIIRIARKLVSRMRFVLITQEPYTLGITE

SEQ ID NO: 194409 - protein, 477 aa, unidentified
MVRRLVGIDLGIASAHTVRVLDETGATIARRKAVPTVDSLAAVEAVALAGCPAGTRMEVIMEPTGPAWLPVAVFFSARGHVVHRVSSQKAADLRRFLSRHTKTNGIDADTLARLPLVDPSGLRPLELPGAERAALDRRVRATDRLTRLASEHKVRIKDLVRQVLPMTPLTGDLGAADLAVLERWADPNLLVQAGLKRVTAVIVRASHNHQGADRAGEWLTAAEAALELYAGHPAVSFADLAAEIATEVRLLRAVQTELADHACERERIYRWVDPLELARSLPGLAEIGAPAVVAVMGDPARFPTGKAFRAFTGLTPRASETGDTDRKGQPMSKAGSSLLRTTFVRAADHARKQDPQLARLYYVQMVERGKDHLGALCVVAAHLAERTWTVMTRGMPYVICGTDDQPVDPDRARAIIAERWTVPAEVRARRRSKKMGKAPQQVHTAQVKSHPKVDGRGDLPHPPASTEHITPVKRRTA

SEQ ID NO: 194410 - protein, 384 aa, unidentified
MTKHNIIFIGLDTHKTFTEVAYIEDQRGAKSIHLGKILSNKAAFKKLARRLQSKYPNATLHFVYEAGPCGYWMYRLLTSLNHCCYVIAPSLIPKKPGERIKTDKRDALKLAKLLKSEDLTPIYVPEPEDEAVRDLSRARETSMDDLKDAKYQLKALLLRNNINCKVKDNWSLQHLRWLAELVLPHPCQQIVLQEAVSTITERLKRLKRLDNELTHQVKSWRYYPVVKAVQAMRGVRLLVATGVIAELGDLTRFDHPRKLMSYLGLVPSEHSSGGKRRLGAITKCGNSRARRLLVEGAHSYKHNANISKEMLLRQEGLSKEIVDMAWQAQLRLCRRYNRLMHKGKHRNVVVTAIAREMIAYVWAISREVVLPVIDVKLRLARVPA

SEQ ID NO: 194411 - protein, 315 aa, unidentified
MSEVPCFVGIDVAKAQLDIALRPSGARWAVPNAPDGCMTLVERLQAVQPTLIVLEATGGLERAATAALATAGLPVVVVNPRQARDFARATGQLAKTDALDARALAHFADVIRPTPRPLPDTPTQALRALLGRRQQLIGMRTAEQNRLAGPNAYLAKDIEAHITGLNERLATLDNDLETLLRASPVWRENDDLLQSAPGIGPVCAQTLLLELPELGTLTRQQIAALVGVAPLNCDSGTLRGRRMIWGGRAHVRTVLYMGTLVATRYNPRIKAFYERLLAAGKVKKVALTACMRKFLTILNAMLKHRTSWQCQEVQG

SEQ ID NO: 194412 - protein, 411 aa, unidentified
MNYQNYLFVGIDTHKNQHTAAIINCFHQKLGTIEIPNNQSDFDQLIDEINSLNLNNKTLVFGLEDTQGLGRSLAQWLIQNNYQVKEVNPAYTKEQRSSSPNPDKSDPVDAEAIANVLYSKWNNLPNVQKDANFKALTQLNNQRANLIKQRTQVKTRLDNLIHQQYPNYKKFFSDPTGGKTALAFWEKFPHPSQLKYYGEKRLQKFLKNQARGISKDKASTILNLVNKNKPVDKAVETRISIIPMLVEQLRLLNKQLEKINAKLKVAVEQTSYKLTTMPGINYKLAAKFIAEIGDISRFDSADQLARYAGLAPARKNSGTFNRHISKKYGCRQLNSAFHILAQQQVTTNHGKPRNPVAYKYYQKKLAEGKPRKIAFTCLQRRLVDIIYAMMRDKSAYKMPKVPEYEILDKAS

SEQ ID NO: 194413 - protein, 410 aa, unidentified
MNLFIGIDVSSRQLEVVMLTSEKTILFKATVSNDLIGVSEIKKQILDFQSKYQFSKIVLGMEATSIYSFHPAFFFKEDQELKALKLQVVVINPRSTKRYKDVFEDNKTDRIDAYYIADYLSIGRYSVGIVKQEEYQALQRLTRSRFEITKSLTRAKQHFLENLYYKVNKLATGALENSSVFSATMFDLITGELTMDELAQMPLKDLAELLNKKGHGKFSQPEKLAQALQKVIRGSYRLDKVLADSVDIVLSIYANEIRNYQRLIKQLDKSIEKVVTILPESQILESIPGIGQVYTAGIIAEIGQIERFSDETKLAKYAGLAWRQHQSGNFKGDQTPMTHSGDNYLRYYLIEAAGSVIRYDDTMRTYYQKKYSEVIRSPRKRALALTARKLIRVIYTLLSRHQIYQKEELV

SEQ ID NO: 194414 - protein, 353 aa, unidentified
MSYIIGCDAHKHYSQFAVFEADQTRGKQVRVEHERGAIREFLSEFPEGTPVALESIGNWYWIVEEIEQAGCVPLLAHPAKAKAMMGNVNKTDKLDARGLAILLRNGTLPTVWIAPSEVRDERELPRTRMALCKIRVALKNRIHATLAKYNLSLPTESDIFAPKWSSQLNQVIEQLPSETQKCLKQELELLDKVQGQIGAMEERMKACIALTPDMQLLKSIPGVGDILAIVIGTEIGLVERFSRAEQLASYAGTVPAVKSSGGKVRYGHTPKESNHYLKWAFVEAANAPAQYGKKPNWQHRHVTHLYDRVRLRKGHSVAVGAVARHLAEAAFWILNKKEPYREPTRPKVLPKQA

SEQ ID NO: 194415 - protein, 368 aa, unidentified
MNEPTTVFVGLDAHAESTAIGVAEPGRAPPRFVGTVGARFAQLTQALAKVGKPATLMIVYEAGPCGYALARELSGAGYRCEVVAPSKIPRRPGERVKTDRRDALMLASLARAGELTAVNIPDERDEAMRDLSRARIDAVRARLKARQQLKALLLRHGRRYTGKTSWTAAHERYLAKLSFTHRAQDIAFVEYRQAVSEAQARVQRLSEALAQELQLWRMRPLVQALMSLRGVDQLVATTLVAELGDFRRFAHPRQLMGYLGLVPSEHTSGERRRLGAITKTGNTHARRVLIEAAWNYRFPARITHSLQKRQEQQPAPIRTIAWRAQLRLSYRYRRLKARNLQHNKICVAIARELTGFLWSIGQHVTVGS

SEQ ID NO: 194416 - protein, 403 aa, unidentified
MELSEIGVYVGVDMAKTDHFAQATTTTGVELFARSVLNDQAAIEKLIEDAAGHGGVAVVIDMTASNAQLLLAVAAERQVPVAYVTGLQMRRAADLYAGSAKTDPRDAWVLADFARRNADRLAWLDVGDELLLELRVLNGRDVDLATDANRIINRTRDALTALSPGLERAVGQRLVQAGVRDLIAKWSTPTALRAAGKAKVRNAIKKRSPRLANKITDEIWAALDAQTVVLPAEETWGQVVGELLADLDRIQTQRARLAAQIEEVFLAHPLGQVLVTLCGFGPRTGARTLAEIGDPTRFANGSRLASYAGLSPTDWRSGSSIKGAFQHRGGNHRLKNAMFLAAFVATQHDPNARAYYQRKRAEGKKHNAAVICVARRRCDLIHAMLTTATPYDPSRSKKIAEAA

SEQ ID NO: 194417 - protein, 338 aa, unidentified
MNIVFLGIDLAKNVFQLCGLNQAGKPVYTKRTGRKELLQTLANIPACLIGIEASTGAFYWQREFEKLGHKVKVISPQYVKPFVRGQKSDGNDAQAIAVALMQPTMQFVPPKSPEQQDIQALHRARQRIVNHRTATVCQIRGLLLDRGIPIGSAVSRARRAIPLIPEDAENGLSSRMRRTIAELYDLFNDLGRRIHFFDKEIETVFRQSEACQRIAKVKGIGPKTATAVVAAIGKGTEFKNGRHFAAWLGLVPRQHSSGDRQVLMNMTKKVDRHLRTLFIHGARAVVRVATNNNDGHMNQWVNQLKERRGFNKTTVAVSNKNARIIWSMLRNDTGYQVV

SEQ ID NO: 194418 - protein, 356 aa, unidentified
MNKLYLGVDLHKQSCWVTVLDADGHLLESRKLGTEKWELLEFFGKVEKPAAVAVEATFNWYYFLNVIEPLGLELHLVHPWKTRAIASARIKHDKLDSRVLAELLRTGFLAEAWIAPRAVREQRQLLRYRVHTVQWATRAKNCIHAILNRNGIRAPLRSPFGPQGREFLTEVELPGTDRWEVDGQLARLDLLRGQLRELDQEVRRHCRTSPLAQALEAIPGIGPFIAWLLIAEIGDIQRFPSAKHLASYTGLAPSLYASGEHRWGGAITKQGSTVLRWALVQAAHRAALSPRFQEFYQRQRERHGAGKATVALARKLAVIAYYRWRQALRGGAPPREQVRERSCAGAWSEDRPLGSD

SEQ ID NO: 194419 - protein, 427 aa, unidentified
MAKVEHTSDARVLVGIDISKNRHEVLIAVPGRARRRRMTVLNTADDYRRLIDVLQGFELPVMIGFEATGNYHRALMFALGAAGFDLKLVSSIALARTREALHNSWDKNDPKDAQVILRMLEIGAVQVFHDPLVAGTCDIQELSKTYEMVARAKTELWHRILTHYLPLYFPEADRFHRSSRGDWFLAFLEAFPSPHMITSMAKEAFIEAAWPVIGRRVSKAALLADIYETSKASVGLPVAPDSDAIRMFRLVLAQGRSLIQQRNAIEERAAELLSAHPDYQLLRSIPGIGPVNALAVLAEAGDLRRFRHHRQFLKFCGMDLATVQSGLFRGRSKISKYGNARLRRTLWIAAQAAVLKPANSFRDKFERYIAQDRHNPDVRRKAYTAIAAKMARTIHAVIKSGEPYRPFFEGVSPGGRTPLCRAVEAGS

SEQ ID NO: 194420 - protein, 351 aa, unidentified
MEHTTIAVDLAKSVFQVAVSHRAGRVDAERRLSRDRFLAYFAQQPPATVLLEACGSSHHWARQLEQFGHVVRLLPAHDVHRYVRRNKTDRTDAKALLEAGRNEEIHPVPVKTVEHQAITSLHRLRSTWLATRTARLNTLRGLLREFGIFIPIGAQHVVPRVRELLGEPTATVPVAVHSTLANACTEIEVLETNMRDVERQLAAIARQLPDVGLLQTVPGIGLMTATALIALVGDIRRFGSGRHFASFLGLTPKEDTSAARRRLGAISKQGDVYLRMLLIHGARSVLWHAKSCAHPSDFQAWARCTEQRRGHNVAAVAVANKLARIVWAVWSQQRPFAANHRPADTTSVSNT

SEQ ID NO: 194421 - protein, 313 aa, unidentified
MKKTICGVDVSKARLDVCIEPGRRFASFDNDAAGIAELARFCREHAVTLVVMEASGGYERRAFVELWERGISCALTNPRNVRRYAEAMGILEKTDRIDAFIIARFAEAKNLVPTPLPSQAQQRLKALVARLRQVTDDLTVQKQRRASLLDNPEMLASLDEVIALLKRQSRSLEGEIASMIDDDPLWAKLAETWREVKGVAGRTVARLHAEIPEIGTLSNKAIAKLVGLAPIANDSGKRKGKRPTRGGRAGVRSILFLVAAIAAQYNKSLGEFRDRLLKAGKEKMVIRIALARKLLVRLNAKARDARAEYANAT

SEQ ID NO: 194422 - protein, 457 aa, unidentified
MEDTLAQRNRISPPRSGKTRAALSLTHPNAAGIDIGSASHYVAVPADRDDEPVREFQSFTADLHRLADWLAACGVDTVAMESTGVYWIPLFELLDARGFTVLLVNARHVKNVSGRKSDVLDCQWLQQLMSFGLLRGAFRPADEVCALRALSRQREMLLRSQSRHVQHMQKALTQMNLQLANVISDIVGATGQKILRAIVAGERDGLALAALKDARIKASTNEIAQSLQGSWRAEHLFALKQALALFDFYATQLAECDAAIEAQLQVLAAHSADPQPGKKRSRSRNAPKFDLRSRLFRMCGVDLTRIDGIDVTTALVVVSEIGTDMSRFPTVKHFTSWLGLCPGTKITGGKLLSGKTKRCANRAAQALRLAAAALRSSKSALGAYFRRMCSHMDKPKAVTAAAHKLARLIYTLLTKGEEYTDQGQDYFEERYRERVIRQISQRAAKLGLSVVPTPHAA

SEQ ID NO: 194423 - protein, 312 aa, unidentified
MTEIVCGVDVSKRRLDAHVEPAGTFDSFSNDAAGIAELAAFCRRHGVTLVAMEATGGYERTAFLLLWQAGIACGLTNPRSVRRYAEAMGILEKTDRLDAGVIARFAIAKGLKPTRPPTAGQQRLNALVARLRQVTDDLTVHKQRRSIAINDEMTSSINEVIGVLKRQARTLEGEIASLIDDDPLWAHLDAALRTTKGVANRTVARLFAELPEIGIYSNKAVVKLAGLAPLAHDSGAKVGKRHIRGGRAGIRSILFLVAGIVSRFDDSLAAFHRKLTAAGKPKMVVRIALARKLLVRLNAKARQARQQYALAT

SEQ ID NO: 194424 - protein, 361 aa, unidentified
MDSSKVQPKVTAGLDIGDKYSYLCLIDTDSGEVIEEGRLRTNPEAFRRRFASEEAPMRIAIEAGTHSPWASRVLEECGHEVLVANARKTRLIYANKGKTDEVDAENLARLARVDPKLLYPLKHRGEESQAHMAIIRSRQALIGCRTQLVNHVRGAVKSFGVRLPKCPARSFHKRASEHIPEALRPALGPILETIGSLTERIRDYERQLETIAKDHYPHETDLLRQVEGVGMLTALTFILTLEDPYRFEKSRSVGAYLGLVPARDQSGERDPQKRISKEGDEMLRKLLVGSAHYILGPFGKDSDLRRHGQKIASRGGKNAKKRAAVAVARKLSVLLHRLWVTVEVYDPLHNTHRRTKQEEAA

SEQ ID NO: 194425 - protein, 338 aa, unidentified
MNSVTILGIDIGKNSFHLHGQDAQGHQVLRKKLNRSQLLPLLAQIPPCKVAMESCGGSQFLAREITKLGHQVQLIAPQHVKAYVTGNKNDFIDAEAICEAASRPRTRSVQVKSVDQQVLSTVHKLRKSLVSRRTGVINQVHGFLLEFGVIFPAGYAALDRVPALMEEHNLPLRLRQAISRMLDDIRQLTSEIKALDTEIKQQVNGSDAGKRLQSVPGIGPLIASALVADVGDASMYKSSRDFSASLGLVPRQYSTGGQTTLLGISKRGDRYLRTLLMQGAQTLLYRIDKRNDALGVWARNLLARKPLNKVACALANKMARIVWALLTKGGTYNGHFTA

SEQ ID NO: 194426 - protein, 406 aa, unidentified
MNAVGIDVSKGKSKVAVVQPGGVMVCKPYDVSHTVFELNELADFILSLDGETRVVLEHTGRYSEPVVNILSKAGVFVCAVNAKLMHDYAGGGNTIRRDRTDKIDSIKIARYCLDKWENLSQYKPEDEDRKTLKVFNRQLSEYMKIKIMLTNNLIALLDQVFPGVNKLFTSPARESDGHEKWIDFVGTFYHSDCVSSKSLGAFSERYEKWCHRNGYSYSYEKAVEIYQLAKQSVTTLSRNSFEKSLVTNLVLQINSLCETIACTKHDMTQIASELPEYDIVLDMHGVGKNLAPQLIAEIGEISRFPKRSSLARFAGIEPPANQSGTYNQHSRRISKQGSPHLRKALFMVMKAVLLNKNLDQPTFQFIDKKRSEGKPYKVYMIAGANKFLRIYYARVMECYELSGESA

SEQ ID NO: 194427 - protein, 419 aa, unidentified
MQAIIERCCGLDVHQETVVACLLVGAPGAQPNKEVRTFRTVTRELEALRDWLREAGVTHVGMESTGVYWRPVYAVLEGHFELIVGNARHMRNVPGRKTDVKDSEWIADLVRHGLIEKSYVPPQPLRELRELLRYRRKLVESQAAERNRLLRLLETANIKLASVASDVFGVSGRAMLRALIEGEASPEAMADLARGQLRRKRTDLILALDGRVEEHHRFLLAVQLRRLEAIEADIAALDLRIGERLEPYSAPHALLMQIPGVDWLVAAVLIAEIGVDMSVFLSVYHLSAWAGVCPGSYESAGRQKSGRARKGNIHLRAILVGAAMSAARTKGSYLKDKFHRLKARRGALRAALAIAHKILVCAYHMLAKNLPYRDLGEAYLDQIGQTRTVANLKRRLERLGYRVILEPNAPAQATPAPAR

SEQ ID NO: 194428 - protein, 432 aa, unidentified
MTNRLQVGIDFSQKGADFCLLFPDGRPLELHQAFDNSRSGYSLAKQLLLDALDSYLFDGVDVSGEATGYYWLPFFLQLAADPDLEPRDLKLFLLNPRWVHWFKKCFAQDHKSDEKDPFYIAERTRTRRPDVAWSPCVGTLALRFYTRLRFHLVQNLAREKCYFSAFLFLKASSYRRLKPFSDVFGVTSRLVLTQMPSLDQLATLPIDDLALHLHELSGHHLPDPCNNARKLQRVTQESFPLNEALMLPVQRILDLTLEHIRFLEAQIEQVNAWIATELQPHPAIRQLTTIPGVGPVFSSGIGAEIGDTQRFLQGQKWDKKRKRFRPRNLRNAEDAIAKIAGLWWPRAASADFEAEDRRMAKTGNRYLRYYLIQAADKMRKSMPDYAEFYARKYREASKHHHKRALVLTARKGVGLFVGLLHRNEPYRPQEER

SEQ ID NO: 194429 - protein, 344 aa, unidentified
MKIAVLGIDLGKNVCSVVGLDPSGAVVLRRRVRRDTLIDLVAKLPSCIVGMEACCGAHHLGRLFAAQGHDVRLMSPEYVRPYVKAQKNDDRDAEGIAEAATRPTMRFIEMKTEDQLDMQTLHRSRERLVGERTALINQLRAILLDRGIVVPQGKRKLEQYLVILMNEHNGEGLSARMRMLVADIRAQWQELDRRIGEFDAEFVRWAKENEDARRLVTIPGVGVTTSTALIAAVGKAETFEHGRDLAAWLGLVPRQSTTGGKPRLMGISKRGNKYLRKLLIHGARAALPYVAEKDTALGRWAKSLLSRVHQNVAVVAFANKLARICWAVLRSGQRFAAQEAPLVV

SEQ ID NO: 194430 - protein, 358 aa, unidentified
MSSKSRQLDFHGQNIYVGIDAHLKNWGVTILLENISHKTFSMDPSSEILSNYLNHHFPGGTYYTAYEAGFCGYSIHKSLEDYGIKNIIVNPADIPTSDKERKQKEDKRDSRKIARSLRNGELEAIYIPCQSTLELRGLVRYRRSLVKDINRNKTRIKAFLHFHGIKIPNELESASRHWSSNFSSWLETIRLTTSFGHTVITNTLKTVHLLRAVLLTINKELRIIAKSNNYVNKVNCLTSIPGIGLITALSFLSELEDINRFKCLDKLSSYVGLVPTTNSSGESEKVGNITPRSNKYLRGMLIESAWIAARIDPAMALAYNNLCKRMKANKAIVRIAKKLLSRIRFVLKHETKYQYSVT

SEQ ID NO: 194431 - protein, 341 aa, unidentified
MEEYIGLDVSMKETAVSIRREGKRIWRGRCASDPRIIAELIRKRAPAAKRVVFETGPLSVWFYHALQEEGMPAICIDARHAKAALDMAANKTDANDADGLAHLAEVGFFREVRVKGFESMLTRTLVAARTRLVRITTELSNQIRGIMKTFGLLVPAGKGSTFEKNVRVLLVDQEGLAPIVLPMLEAWRSMRMRAAEMGRQLVAAARQSQACQILMSIPGVGVITATSFATAIEDPGNFKKSRSVGAWLGLTTRRYQSGEVDYDGHISRRGDRHLRGLLYEAATVILTRSLADSALRTWGLKLRERVGFKRAAVAVARKLAVTMHAMLKTGELFDRNAGATA

SEQ ID NO: 194432 - protein, 347 aa, unidentified
MQILSLDLGKNKTVGCDYERESGKHRFKTAFSTRAGLAQLVKEVKPDRVVIEVCSIAGWVCDLLREMGIEVQVANTSDDAWRWRKVKKKNDRCDALKAAQLSAVNQIREVHIPSIDVRQWRALIAFRQQLVQRRTRVKNHVRDLLLREGQILPGGGKCWTRLGVAGLEAMAQPLSEVGMNELWRGELAIELRQLRAVQAEIEVAEEKLDAIGAADPRVRLLRTIPGVGPRLAEAIVALLDRPERFRKGSEVSAYIGMVPKELDSGETQRRGKITRHGSRLVRSLLVEVAWAGLRHNPWVRETYQRISGGKKSRKKIAIVAVGRRLLVRCWAMLRDGTSWQSPATKVA

SEQ ID NO: 194433 - protein, 374 aa, unidentified
MKEFSKYVGMDVHKETIAVAVAEGRGGEVRYLGEVANSPEALLKLVKQLRKGDAELSFCYEAGPCGYGIHRQLTELGWACQVVAPSLIPKRAGDRVKTDRRDSLSLARLHRAGELTAVWVPDGAQEALRDLTRAREDMKHLQRQAKQRLLAFVLRHGKSYAGKCHWTQAHYRWLEGVKFSQPVQQIVFQEYVDTVKMLSQRVAALDQQIERAAAASVFWPMIEALMALRGVNLLTATTILAEIGDLQRFASAPQLMAYLGLVPSEHSSGGSKSRGSITKTGNGHVRRVLVEAAWTYRHPARKTACLQRRAERTPEAVQDIAWKAQKRLCTRYRLMEGRGKLKVQACTAVARELAGFIWAIGQALPPPTAQAKGQ

SEQ ID NO: 194434 - protein, 406 aa, unidentified
MGGDAMSGLKVSFDCFVGIDVSKDKFDACGITGSEAKLFQFSTTMDRKGFEKLKGYLVAFSISSILIGMESTASYHVNLFSYLVSEGYKVLLINPLLISNYVKMQLRKTKTDKKDAVVIAQFLLTNGDTLLQRASPSLISDLRDLSRQRESLVDEMTSRKIEIKQLLNITFPELEHMTGIFTKAILKLLQQYPSAFALRDVDLGQLSQMLIADSYGHKREAFAAELIKTAHSSIGSKSTAKEMILKQKIALLLHIEDALQEITVMLIEMSRKLMEEEINIMTSIKGIGDKSAANFLIEMGGDINQYERSGKIIAMAGLDPAVYQSGKHDGKGRITKRGNRHLRRIIWLMTTSVIQYSDVFKIYYLKRRKEGLPYKMAVLATAHKLVRVIYAMLTHRTTFCSQVENS

SEQ ID NO: 194435 - protein, 340 aa, unidentified
MTDPTPAYAHHGGIDVAARTLQPALGAGAAPAADLAAVANTPAGWEALQDALRAGGATPATTLLVLEATGPYWQGAATALTAAGWHVSVVSPASARHYARARLHRAKTDTVDARGLAAYGRDLRPARWAPADADVQALQLLVRARDDLVAQRTQARNRQHALAQLPAVPDEVRAAGAAVLAALAAQIAALGAAIERRATTAAALADDIARLRTIAGVGLLTAAIVVAETRPWRHGATPRQVVAHAGLDPAPHESGTSVRGAGHISKTGNARLRQAVYMAAISAARCNPPLKAFYERLRANGKKPKVALVAVARKLLVLMMTLLTHQRTFDPAWAARRPAR

SEQ ID NO: 194436 - protein, 328 aa, unidentified
MCTLGIDVSKNKIDLCLLTAGPGGKKKHKVLTNEPAVARKVVDWLNAQKCVPESVTVVLEATGIYHENLAYGLHEAGVSVCMANPCRVREFAHGMDILNKNDAVDAFVLACYGELKSPAVWVPPSPEVRKLRALLRQRDALREDVQRTVNRLEKANSTSTPQEVIRSLERMKSWLNEELARIEKLITDHTDNDPGLKADLDLLKSIKGVKDQVGREMLALLKDGTFKSASQVAAYLGLTPVEKTSGSSVRGRPHMSKTGPSGVRAKLYVAALTGSRWNKQAKAIYERLVAKGKAKKAAPGAVMRKLVHLCFGVLKTRLPWDENYVATA

SEQ ID NO: 194437 - protein, 409 aa, unidentified
MRYYLGVDWADQTQAVWVVDASGAKITARAVAHTAEGLGEWGRALDEWRAQGIDLWAAIERPDGRVVDFLLDHGVVVYPVNPKALDRARDRFRQSSAKSDPFDARVLADFLRTDHTHLRALQPSSEAAQELKLLTEDCQRHIRQQTRLVNQLTATLKAYYPRALEVAEVTSALAREFLPAYPTPAAVTALTERQWQRWARAHGLSAARAGDLWAVLRQPHLPVPAHVVRAKARLMQALMEQLMPVVTAVAQYRKAIDDFFASMPAARWARTLPIGKHGITAPTLWARLGDAPGRWESFRHLQAHAGAVPVTKRSGKQQVVHFRFACDKALRHVVDQVAFLSLLSSAWARAYYDQQRARGHSHRQALRALGAKWLKIIFVMWQRQVPYDEQYHLATMTRQQRQRGQKQCA

SEQ ID NO: 194438 - protein, 334 aa, unidentified
MDKVTTVGIDLAKSVFSLHGVDGAGCVVLRRTVRRDQLVRVVAGLSPCLIGMEACSGAHEWGRRFQEHGHTVRLMAPKFVAPYRKSGKNDGNDAEAICEAVTRPSMRFVPVKSLEQQALLAMHRVRQGFVVERTATINRLRGLLCEFGVVLPLRSVTVRRQAAQAAENLPELVRHVIGDLLDELRSLDERIGGYDREIEVQAKLCEPAQRLMKIRGIGPTTALAIVATVGNAREFKNGRQFAAWIGLTPSQYSTGGKPRLGHISKRGDAYLRNLLVQGARSVLNSAGMHQDRMSRWILELQPRRGYYRTLVAIANKNARIAWALLAKNETMRSV

SEQ ID NO: 194439 - protein, 402 aa, unidentified
MNCVGIDVSKGKSMIAVMRPFGEVVVSPFEVRHTANELSELAGLLKSLDGETRVVMESTGNYHAPVAWLLHGAGVYVSVVNAMLVHDYGNNSLRRGKTDKKDAVKLANYGLDHWLTLPRYVPEEDTRLMLKTCYRQYQQYSKVQTMLKNNLISLLDTAFPDANRLFTSPPRADGSEKWVDFVATFWHCECVCGLSKKAFTAKYQKWCRKHGYNFSQDKALDIYASACGRFGVMPKTNTAKLLVEQAISQLQTTSAALAALKQEMQSLAASLPEYPVVMGMFGVGPTLGPQLIAEIGDVRRFHSKKALVAFAGIDAPPYQSGQIDVRSRSISKRGSASLRRTLFLVMGVLLQCAPIDEPVYQFMNKKRSEGKPYRVYMMASANKFLRIYYASVKAYLDSLEHD

SEQ ID NO: 194440 - protein, 368 aa, unidentified
MAKSSLIYVGMDVHKDSIDIALADAGARGEVRHYGTVGGGLGDVDRALRKIIAGGNEPHVVYEAGPCGYALYRHLTAKGIDCTVVSPSRIPKRAGDRVKTDRRDAEMLARLHRAGELEAVYVPCADDEAMRDLTRAREDAKAAQTRARHQLKAFLLRNGISYAGKTAWTPGHVRWLASVKLPEPVRQQVFQEYVAAVTAAGERVERLEAALRDTVVGWRLYPVVQALQTLRGVQLVIAATLVAEIGDIGRFDNPRQLMAYLGLTPSEYSSGQSTHRGGITKCGNSHARRMLTEAAWSYRLPARVTPIIAKRQDGQSRKVRDIAWKAQVRLCGRHRLLRARGKEPNKVIIAVARELAGFVWAIARAVRA

SEQ ID NO: 194441 - protein, 335 aa, unidentified
MVKENFIYVGIDLHKETHTAVMIDCYNQKLGEITFPNRPADFPKLVTKVKKCNTDAKEVVYGLENAYGYGRPLAVWLIDKGYFVKDVNTAISHRQAKHRGAMYRKSDSDDAEAIALATLNMLDKLPDACPNDAYWSLGQLVHRRDNIMKQRTRLVNQLHEQLCIAYPSYKSFFNDISRPTALYFWEHYPSRKYLRGKSVEDLRKELVPVSHNRCSTKNCEKILDAAASDKVKNNAYQDARDMVTLSIVSDLQHYDSQLAEVDKMLEQMYKMLGCTLTTIPGVNVITAVKILAEIGDIKRFANANKLAQFAGIAPLHLSSSGKGKDVATKQGNRRL

SEQ ID NO: 194442 - protein, 449 aa, unidentified
MSRPQVIDDEEHERIHDKVAAIDVAKDAGVVCTRTPHPSRPGARRSRIWTVKARMNTIRALGRQLHKDGIEIVTLESTSDYWRIWFFVLEAAGLAVQLDGAAQAKNLPGRPKTDKLDAQWLARLTEMGLLRASFVPPKAIRDLRDYTRARTRLVQERTRCWQRLEKLLEGAQVKLSSVASKLTTVSAQDMIRAMIAGQRDPRVLAALARTGMKAKHDELVQALDGMFDDHHGELAQLLLDQIAGLDGKITQLGTRIEQAVTALPDAWGINADGTTGPQAGTGPDAAVIPAVTRLAEIPGISENLARAVIAETGLDMRRFPTAGHLVSWAGLCPTARQSGPRTRAGKKGQGNTWLRGHLGQAAAGAARTATFLGERYHRIARRRGKAKAQVAVARSILVIIWQLLADPAARYTDLGPGYYQARTDKDKKIKNHIRQIEALGFTVTITTAT

SEQ ID NO: 194443 - protein, 348 aa, unidentified
MLIIGCDYHPGFQQIACVDTETGEADERRLTHREEAEQFYRALKTRRVRIGMEASGHARWFERLLNDLQFELWIGDAAEIRTKRVRKQKTDRQDAQLLLKLLMEDRFPRIWVPDAENRDLRQLLWHRHRLVQMRTRVMNQLHVVALNEGVRRKKALWRPAGRSELESLVLAPWALRRRRDLLDLFDQLTPKIHDLTRALEEEVEKRPLARRLMTHPGVGVLTGLAFELVIGTPERFGCGKQIASYVGLVPSEESSGDRRRLGHISKQGNALLRFLLVEAAQVTVRSQPQWRSKFFHLAMRRGRKIAKVAMARKLAVHLYWMWRQGLDYGQFEKLGSHAGEPGNRHGAQ

SEQ ID NO: 194444 - protein, 476 aa, unidentified
MKAKSSAQSSRAVKSIRPAKKLPVVHPDAAGIDVGATEHSVCVPEDAVTASESPVRQFKAFTGDLDRLVEWLQACKIKTVAMESTGVYWIPLYQKLERAKMQVVLVNARHLKRVPGRKTDILDCQWLQQMHSYGLLSGSFRPSDDICVLRTYLRHRSNLVAGMGEQVQHMQRALNQMNILLHHVVSDLDGDTGLAILDAILAGEHDPKELVKLRHARCSKSTAAEMEEALKGDWREEHLFVLQQSLQSYRALQRQMMECDLAMEKVLEQVAVNPSAVPESDRPNNPVAEPTPEKEKRKKRTRGNAPQKDLTAQLHRICGVDLTKVVGFNVLSVLIIISEIGVDMSKWPNAKAFCAWLGLCPGNKISGGKVLSSRTARVVNRVAILLRTLAPTLGRTDTWLGSFHRRMKGRLGPAAANTATARKLATIIYHLLKYKEEYIDVDRLVYETRFHRHRVSRLRRQAQELGYEITEIKQAA

SEQ ID NO: 194445 - protein, 355 aa, unidentified
MSSEKYIGLDVHQATISVAVLDSTGKLVMESILETKAATILEFFAGLRGTVSVTFEEGTWAAWLYDVLKPHVAKLVVCNPRKNALLKDGNKSDRIDAHKLAELLYLNKLSSVYHGETGVRMLRELARSYLTIVKDLTRVMCRLKAVYRSWAIPCAGRDVYYTRHRDEWLGKINEAGVRRRAERLYQQLDMLQYLRQQARRELLAESRKHAITVKLRQIPSLGPIRSALAVALIQTPHRFRTKRQLWAYSGLALETRTSAEYCYVKGGLRRSKKQISIRGLNKDHNHDLKGLFKGAATRASVLPGPFQDFYQRSLAKGIKPTMARLTLARKIAAITLTLWKKGENFDADKLKSQAA

SEQ ID NO: 194446 - protein, 340 aa, unidentified
MEAIAVIGVDLAKSVFQVHGVDAQGQVVMRKRLSRAKLLPFFAKLPPCLVGMETCASANYWARELKGIGHEVRLMPPQYVKPYVKRSKNDASDAEAICEAVTRPTMRFVGVKSPEQQSVLMLHRTRSILTRQRTQIGNAIRAHLAEFGIVAPVGRQGLDRLIAVIGDEGDRRVPIPARRCLAMLVEQHRLVLAHLLDTDRAIRADSRASELGRRLQEIPGVGPLVASALVAAVPDPHVFKTGRGLSAWLGLVPRQNSSGGKERLGGITKAGDTYLRKMLFVGAMAVIRHAERYGTRRPWLTKLLGRRSPRVAAIALANRIGRTAWALMTSGERYREPVVA

SEQ ID NO: 194447 - protein, 413 aa, unidentified
MQNNVITAVGIDVSKGKSMAAIRRPGGEIVQMPFEVKHTVLGLKDLVKLLHKTGGEIRIVMEHTGIYWCPIARALQEAGFFVSIVNAILIHDFSDNSLRKVKTDRADALKIANYALSFWDSLCELSSEEETRVLLKTQSRLYERTIDASVVLRNGLISLLDQTFPGVNKLFSSSSRNRSGHYKWIDFAKRFWHCDCVAGLSFQSFSETYGKWCKREGYVYYLSAAERIYDAAKQAVAVFPKNDRTKAIIVQSVNTLNAIYESLQTMREEMDRLASLLPEYDVVMEMHGVGKITGSQLMAEIGDVRRFTNKSALVAFAGVDAPPFQSGTFDAKSRRISKRGSPHLRRTAFMVCSSIIQIGNTDDPIYAFMDKKRAEGKHFYVYMVAGAAKLLRIYYARVSERMSSLNHGLKQSA

SEQ ID NO: 194448 - protein, 428 aa, unidentified
MSTTLFVGIDISLKKAACCFLNQNGKLFKKVFEVDNNISGFEKLQEQIEILMPANDLSLVCIGLEATGMYGFHLMDYFSSAALKYPVEVRLYQVNAKYVSKFKKAFPEKEKTDLVDCRVIAEYLRFGRLPAEYKPECLFLPLRRLVRYRYHLIKNLEKEKKIYMANLFLKFPGWVQNKPIGTLGKTALDITGEFTPDQLAEMPLEQLAVFVAKAGNNRSPDPAAIADEIQKAARESYRIRPELASSVTFVLASISRTISALKDNLKQVDKAILAETKGFINPLISIKGIGPVYSAGILACAGDVKRFASHDQLARYAGLVWKRKQTGNTESEEKRIVRECDKYLRYYLVEAANSLRMHNEKYRLFYQKKYQEVPKHKHKRAIVLSARKLVRLVFALLSKNQLYDPLWVPQSPRLSGLNQNCQRANLQV

SEQ ID NO: 194449 - protein, 370 aa, unidentified
MSHSSTLFIGMDVHKDTIAVAYVAQDHGAEVTSLGTIGTRQCDIDQLIRKMQSKAKHLIFVYEAGPCGYGLYRYLRKKDYDCWVVAPSLIPQKAGDRVKTDRRDAMQLARLARSGDLPAVYVPKVQDEAIRDLTRAREDAISDLKDAKLRLKAFLLRHDIRYTGRATWGPAHLRWLAEVVCPTPTQQIVFQEYVRAVHEHTERLQRLEQELHEHVKAWRLYPVVEALQALRGVQFTVAVTLVAEMGDLTRFDSPRELMKFLGLIPSEYSSGEQRRQGSITKAGNTHARRVLVEGAWAYRYPAKVSRHLHLRLETQPKIIQDISWKAQVRLCKRYRRLVSRGKHANVVTVAIARELAGFMWAIAREVAITP

SEQ ID NO: 194450 - protein, 374 aa, unidentified
MTEYSEVFVGIDTSKLRNAVAIAEGGRNGEVRYLGVIDNTEVATSKLVKKLAAQHRRLTFCYEAGPTGYGLHRLIKTLGHQCVVVAPSLIPKKPGDRVKTNRRDALNLAKLLRAGELTAVWVPDARHEAMRDLVRAREAAVDDLKSKRQQVLSLLLRLGRHFTGKRTWTRAHMNWLVSQKLAHREQRIAFEEMLLAVRQANERVIRLERAIAAAVPDWSLAEVVTALMAVRGLDLISATIFLAEIGDLSRFASPRQLMAYLGLVPGEESTGDRVWRGGITKAGNHRARRILVECSWSYRHPPRVGKKKLAKVEAAPPAVQEIAWKAQARLTARYRALARRGKRPTLVVTAIARELSGFIWAASRAVGVPATPAK

SEQ ID NO: 194451 - protein, 322 aa, unidentified
MAKHTTSCAGIDTGKRKLDVAIAGCREPLQVMNTPEGHQALLAWLRQQRVKRVGIEASGGYEQPVVAELRRKRFVVVVFQPAQVRAYAKFHLQRAKNDKIDAALIAACTAAVRKIHAAPDPRLLPFAEQLTMIDQIGEDIARLKNRIESCRNVGINKLWHEDIARLEQREKAVLKALVASIRKHPDLAKRLALINSVDGIGLPTAVAILVRLPEIGQLTREQAVALAGLAPYDDDSGDQVGVRHIEGGRKRLRRALYTASLAASFRWNPQLIQLYQRLTAAGKEHKRALVACARKMLIFANTVVARGTPWCDEPPVRSFSVS

SEQ ID NO: 194452 - protein, 420 aa, unidentified
MPDDRCRLGSDDVVIGLDLASAEHQAVVLTAAGQRLTRFRIPHTRAGLEELLRRTTPAALGRAGGARVFAFEATGHLWEAVAYVLRARAERYVVVNPLATFRVREARQLSREKTDLTDAEQIAELCRTGLVTRPQLETRPYLALRRAWGEYVRLREERARLKVLVAHQLYGLFPEFLRVWADLLQPGALAVLRTGLTPAAMATLSLSEFVAQVRAHGAGHRIWRFKLAQVHREAAQTIACPDGLDVLAREVQRTVARMDMLTAHMTAVAAEIDIVLAELAEVPYLRTIPGLGWASVAGLLAHVGAITKYHHGRQLIKLAGTNPSRRDSGQTVGRGQRMSHRGRAGLREVLYLATISCLQHNPRIRAHYDRLIQRADRPLPKMQALGACMNKLLLYAFAVMHRREAFQLDHDWQRTMARVA

SEQ ID NO: 194453 - protein, 457 aa, unidentified
MNLKRSKPKNDRTMPMIHPNAAAIDIGATMHTAAVRADRTPEPIRSFGTFTTDLHRLVDWFAECGVETVVMESTSVYWIPIFELLDARGFAVFVVNARDAKHVPGRKTDVSDAQWLQRLHSYGLLRASFRPKGQIAELRAYVRQRERLLEYAASHIQHMQKALTEMNLQLHHVVADVTGATGLRIIRAILAGERDSKVLACLRDYRCHSSAEAIEKALTGNYRAEHLFALELALALYNIYQDKASACDARIEAVLKELSISRGRDAGPLPSPRRRLHGKANGPDFDVRAALFKLLGKDLTQIDGLGSYLSLRLIAECGDDLSAWPSAKHFTSWLCLAPSNKISGGKVLSSRTRRSGSRASALLRLAAVTVGRTDTALGAFYRRLSARIGKAKAITATARKIAVLFYSAVRHGMEYVDPGSSYYETRYRTRVVENLHRRAKAFGFVLLPLESKAGAVS

SEQ ID NO: 194454 - protein, 429 aa, unidentified
MNTAHPYDLIIGLDRSDKKADLYLIDPHTGPTGRQVIDTSPEALHDWLAQLREQHPEAKVAICLEQPAASVILFLETYSWITLYAINPITLQKFREAFVTSRAKDDGKDAQYLAELLLTHHAKLKPWQPDDAPTRQLQQLVSHRRAVIDERTGLSNRLKALLKQYFPQALALCGEDLWRPLATAFLRQWPTLPALQKAKPGKIKQFYYLHGSRSQKRIAERLALIEKAVALTDEVAVVQSHTLRVQLICRQLELLQKTIAEFDEQIAAVFQAHEDRPIFESFPGAGPVLAPRLLASLGSERERFARAENLQCFSGIAPVTKQSGGKCYIHRRYCCPKFLKQTFHEYAKESVLWSRWAAAFYLQQRQKGSSHHTAVRALAYKWQRIIWKCWHSRTPYKEETYEAVLKKNRSPLVALFDQIELGKSPVKKT

SEQ ID NO: 194455 - protein, 415 aa, unidentified
MLKIVYRVCCGIDVHKTFVVACIAATNNEGVTTYRSHRFSTFTKGLKELAEWLKANSCSDVCMESTGKYWIPIYNILERTCKIVLAHPKYVKAIRGKKTDKRDAKWIADIFKHDLVAGSFIPTLVIRQLRDLMRYRYKLICLMSSEKARTQNCLTVSNIQIANVVSDTFGKSAQAIISKILENPLDTGFDIAPLIHCSMVKKIPQLEFAVDGLITPEQASKMKIIKQHFDSLMLCKLNLESIILGIAQPYLEQIGLVLSVPGIKDPFTAIAIIAEIGVDMSVFMTSKHLCSWAGLTPQNNESAGKKKTTRISRAGAYIKPLLVQCANAVVTSNKHPEIRNRYLALKKRRGHKKAIIAIARMMLTAIYQILKKNEPYNADLYKKADLLPQNREVTVEQAIFILQRQGFVVTKADAV

SEQ ID NO: 194456 - protein, 362 aa, unidentified
MEFFCGLDVAIEETAVCVVDDRGEVHLTVKVATEPDALFTVLKPFVARLRRVGHEAGSLSPWLHPELLKLGLPVICLETQHVRAAMSAQRNKTDEKDALGIAHIMRTGWFRAAHVKTESCYRMRLLLTHRRNLKRKFLDLENAVRHSLKSFGIKLGGTSRGKFDQAVREAAADDPLTAELMDAMLTARAALWKEYCRLHDLVVKMVARSELCRRFLAIPGVGPVTALSFMTAIDDPSRFRRSRDVAAYFGLTSRRWQSGTSIDVKGRISKAGDADVRRALYEAASGLMTRFKGKDKVKTWGQQIAKRSCHRKAVVAVARKLAVIMHAMWSDGTFYVGDSTEAETDAARRAQIKARKHLGAHA

SEQ ID NO: 194457 - protein, 341 aa, unidentified
MKKFIRIGVDLAKNYFQVHALANDGGPAITRKVRRSEMHEFFSQIEPCLIGMEACGSAHYWARELETIGHEVLLMPPVYTKPYVKRGKNDAVDAEAICEAVSRPGMRFVPIKSAEQQAALMLHKTRELLVKQQTMSINALRGHLSEFGIVVAKGIGRVDELLELAETDTTLPEPAKSAVKVLAQHLEGLDKSIDDLEKQIGRAHAQSERSRLLDKVPGVGKIIASAITASAPDPGVFKSGRDFAAWLGLTPRQNSSGGKQTLGGITKQGNRYIRKQLVLGATSLLNVVSKRKGALRDWIVALLAKKPARLVTVALANKLARILWAMMKTGECFRAEMFAKA

SEQ ID NO: 194458 - protein, 427 aa, unidentified
MNDSTYKPTLCVGADVHLDEIVFRAVDKALGHEVLERFRVTNNLPGAQRAAATIAQTAMDLSYARIEIGWESTGMLWIPFHRYLCTEPLLHPFDLELVCFNPKLVAKFKDGLVLRSPKNDERDAFDVAARLRFGELPVSYVPSDFWQGLRRLTRYRFRLSKALSQEKNRFQSYAYLKCSDWKRVKAFSDVFGATSIALLTEFTVAEVQVMTHDQLVDLITRRGRGRFDDPAATARAVRQALHTSYPIDPQMDEMVTATLAAGWDHIRYLKRAMKRLDHLIARYIDLVPNPIITIKGLGAVITAGILAEVVDVLRFPEEKHLAQFMGLTWRKSSSGAFVSQNTRLTKVGNVYLRYYFILGANLLRQHNLEYKAYYWRKYQEVSKYQHKRALVLTARKLVRLVHALLTKNQPYVRPRTSHCVQEDDLLQ

SEQ ID NO: 194459 - protein, 344 aa, unidentified
MRYFAGLDVSLNETALCVVDEVGTIIREGKAGSEPAALIMWLADLGMPLDRIGLEAGPLSPWLYEGLREAGYPAVCIETRRVEGATAAMAVKTDRNDARAIAQAIRVGWYTAVHVKTALSQELRLLLTNRKTLLATQLAIDNEIRGKLKAFGLKIGPVTPATFHDRVVDLLADRPRLMAMVVPMLKARDDLRRQIDVLHRMLLRATKEHPVCRRLMTVPGVGAVVALTYATAIDAPERFARSRDVGAHFGLTPRKYASGEIDRNGRISKSGDHMVRQALFQAALSLITRTQRWSALKAWGMALAKRRGLKRATVAVARKLAVLLHRLWSDGTDFRWTRDAAAAS

SEQ ID NO: 194460 - protein, 351 aa, unidentified
MLLIGVDYHPSFQTIAFFVEETGECGEQELNHSEGQAEKFYRDLKQQGICVRVGMEATGYSRWFERLLAELGFELWIGDPAEIKAKRVKKQKFDREDARLLLRLLRENNFPQIWVPDPENRDLRQLLWHRHRLVQMRTRIMNQLHALAMNEGYRWKKKLFSEQGRGQLEKLALGPWASRRRQELLELLDRMNPTIEELTAAVEREARKRPEAMRLMTHPGVGPLTALAYVLIIGAPTRFQRGKQIGTYVGMIPCEESSARKQRLGHITKQGSSLLRFLLVEAAQAAARINPDWRRRYMHLAMRRHKSIAKIAMGRRLAVRLYWMWRKGCEYSPLLEFGSYAGQLGTRNGVK

SEQ ID NO: 194461 - protein, 320 aa, unidentified
MACLIVFVGIDVSQDWLDVHLHPLREELRVANTAAGWRELADRLAVHPNAKVAAEASGGYEKGVLRHLCAAGFAVHCLNAGRVRQFAHAGGRRAKNDRIDARVIAHYLATFVLTPERFDAALERLAENVTYRRQLVDQRGAVANQARLLGDPSLVRLSRRRLAQLDALIERQNQRLAALIAADRALSAKAAVLRSVKGVGPILAATLLALLPELGTVCRRAIAALVGVCPYDFDSGKFRGQRHIAGGRMHVRNALYMPTLTAIQHNPRLKAFYETCREGRNDKKPAVIAAMRKLLTILNARMRDHIAERHDSLKTVKHAA

SEQ ID NO: 194462 - protein, 329 aa, unidentified
MYSKIPIAPKTTCLGIDVAKAKLDVCLLHNGKRHRTQFLNTLKGLRDLVSWLHALHSGPLSVVMESTGNYSMLAATILHNQGHAVSVVNPRWIKDHARSDGRRNKTDSLDAEIIAHYGLTHDSDRWQPVTEAQSVLRALLRRLAGLEEMAQMEARRAETCEAVVCKSIKRLAKHIEKEKASLEAAIQAHLAENAELLSDCERLCTIPGIGIKTARWLCAELPRHLPNSRAAAAWCGLTPRLRQSGTSVHGASSIGREGNRFLRKILYMPAVAARRFNPRLKSFADSLESRGKSKMSALLAVAHKLLRHAFAILKNNSTYDPTHHPLKTS

SEQ ID NO: 194463 - protein, 409 aa, unidentified
MQEATQHDAVDVFVGVDVDVDVDADVGKGRHHAVALDRNGKRLYNKALPNDEVKLRALIAELKTHRRLLFVVDQPSTIGALPVAVARAEGVLVAYLPGLAMRRIADLHAGEAKTDARDAAIIAEAARSMPHTLRSLRLADEQLAELTMLCGFDDDLAAQVTQTSNRIRGLLTQIHPALERVLGPRLDHPAVLDLLERYPSPSALAAANEKTLANRLTKLAPRLGKNWAAEIVQALNEQAVIVPGTQAAAIVMPRLAQQLAALRKQRDEIAAEVERLVLAHPLWPVLTSMPGVGVRTAARRLTEAAPKALATAAHLAAYAGLAPVTRRSGSSIRGEHPSRRGNKVLKRALFLSAFAALRDPVSRAYSSCKIQQGKRHNQALIALARRRCDVLFAMLRDGTIYPPKSAPNA

SEQ ID NO: 194464 - protein, 310 aa, unidentified
MNKTLVGIDIAKAHFDLYDSLTHKHLRFDNNSSGIKKCTRYLVPLKPTLIVLESTGGYELDLVLSLQETKLPVAVENPRRVRDFGRASGRLAKTDRIDAVLLSEYAAALNPLPQPVKSPQSRKMKALVARRHQLLQMRTAELNRRDHAKDKDIDQSIKTIIAVFEKEIDRIEQQLRTLIEVTPDYRKKLQILTSVPGIAETTATMLLVELPELGQLNRRQIAALVGVAPINRDSGTFRGKRMTGGGRRLVRTRLYMPTVVACHHNPQISAFYKRLVEKGKTKMTALVAAMRKMITIINTMIAKNQSWCLQ

SEQ ID NO: 194465 - protein, 349 aa, unidentified
MNLYAGLDLHSSNTYIGVLDQQFNRIFKKRVSNDLDLILKTLEPFQARLKGVVVESTYNWYWLVDGLMDAGYGCVRLANPCAIKQYEGLKHSDDQHDAFFLAQLLVLGILPQGYIYPREARPVRDLARKRLFLVQQKTAHILSLQSLLARCCGKRVSSNQLRMVTGHDLRQWLKEGHLVLSAQSNLDNIVFLKQQIGRLETAIQKQVKLSEAFNCLLTVPGIGKILAMTIMLEVGDIRRFATVGNFASYSRCVSTQRLSDGKSKGRGNRKNGNRYLSWAFTEAAQMARRFNSRFRSYYDRKAAQTNSILATRALSNKLARVCYYIMRDQVEFREELTAHSLGSETVIPA

SEQ ID NO: 194466 - protein, 467 aa, unidentified
MSAPLQPRPKTLHVDGLPTIHPNAAGIDIGADEMVVAIPPDRDDEPVRAFRTFTPDLHALVDWLLACHIDTVALESTGVYWVPIYELLEQHGIVPYLVNARHVKTVPGRKSDWNDAQWLQKLHALGLLAASFRPDGEIAALRTLVRYRNELIQHRAPHILHMQKALQQMNIQLERVLSDIMGVTGQAMVRAIVAGERDPLTLAKMRNPACKSSEETIARALTGTWKDEQVFVLTQALVIYDVYTAQIAVCDGQIEQYLQRMESRQTHNAPLPDLPAAKKKSKSKNAPASASRAQYARIVGVDLVAVMGLSASGVQTILSEIGTDMSRFPTVKHFCAWLGLAPRNDISGGKVLRSRTHKVVNRATQAFRQAAQSVSRSDSAIGAYYRTMRARKGPQQATVATAHKIARVVYHLLKYGEAYEAESAEQFEQQRQERERRQLERRAQKLGLTLTPIATSQGERVTEPVPR

SEQ ID NO: 194467 - protein, 344 aa, unidentified
MSEVSIIGLDISKHVFHAHGVDGRGRAMFSKRISRGKLLDFFATQPSCTVALEACGGAHHWGRQLGQLGHEVRLIPPAYVKPFVRRQKNDAIDAEAICEAAQRPNMRFVAVKSQEQQAAGLVFRTRDLLVRQRTQLINAIRGHLTEYGWVAPKGPSHVAMLADLIEEEEMANSLPGAARAMFRVMLGLLTGLSSKIAALDKEIARRAREDEVSRRLMTVPGIGPISATAIAALAPPAETFAKGRDFAAWPGLTPLQRSTGGKQKLGAISKMGERTLRRLLIIGSSAVVKQASKRGAPRGSWLEQMLARKPRMLVTVALANKMARIVWALLVTQETYRAPVAARA

SEQ ID NO: 194468 - protein, 406 aa, unidentified
MELTTIYPRVIGLDVHQAQITACAIIQETDGTTRVEQRQFGAFKRDRRELAEWAALLKPDQVVMESTGIYWKSPYAALETVGIRGLVVNARHVKNVPGRKTDIGDAQWLATLARAGLLRGSFVPPAKLRELRLISRQRQKLIGQLSSEKNRLHKLLTDSGIRLGVVVSDIHGQSARAMVKAIIAGQQPHEVIHLASRRLKATREELFDALQGELTINHRFVLNEIMCHIEEIEARIVRFDARLLEELEDEQNKLALLQTLPGVDLIGAAMLLVEIGGDMNAFGSADRLASWIGICPGNNESAGKRKSGRVRKGNIYVRRLLCEFAHAASRTKSVFHSKFQSLLVRRGYKRSIVALAHKLLRTIYFMLSRGEHYRDSATDYEALSTQRNAPRWIKALIRFGYIPKPV

SEQ ID NO: 194469 - protein, 342 aa, unidentified
MDRLSPVTRIRKVGFTMENELHFIGIDVAKAKLDVDILRPDGRHRCKKFDNTLSGLEALVRWLRGHDVNRAHVCMESTSTYMEDAAAHLSDAGYTVSVINPALSKAFAQSEGLRSKTDKVDARMLAHFCREKRPPAWEAPHPTERALKALVLRHQALTEMQTQEKNRRETAPEVQLTSIDILLGCLSAELARIEKQIKDLTDNDPDMKQRRKLLNSIPGIGEKTAAVLLAYTGLKLKFGTARQFAAYAGLTPVQHESGSSVMRASRMSKAGPVHLRKALYMPALSALYHTAWGKAFRKRLEGNGKRAKVIIGAMMRKLAQVAYGVLKSGKAFDASQHELLIA

SEQ ID NO: 194470 - protein, 416 aa, unidentified
MTVDLVHPRCAGIDISKRDAKVCVRVASAGRAKATSTVTTWGSVTNQVLALREHLVAEQVTLVVMEATSDYWKPFYYLLEDSPFEVMLVNARHVRNLPGRKSDVSDAAWLAQLGAHGLVRGSFVPPEPIRQLRDLTRTRTSIVRERAREIQRLEKLLEDAGIKLSAVATDITGVSGRAMLEALIEGQRDPVVLADLAKRRLRSKIPELTEALTGRFGEHHGFLARLHLDLIDNHTHAISELAARIEVVIEPFRGARDLIVTIPGISTNVADVIIAETGADMTRFPTAGHLASWAGTCPGSNESAGRIKSTHTRPGNPYLKGALGVAAMSASRSKNTYLAAKFRRIASRRGPIKAVVALEHAMLVAVWNMLDTGTFYGDPGEDFFTRLNPDRAKSRALEQLRKMGYAVTLSPLAASA

SEQ ID NO: 194471 - protein, 347 aa, unidentified
MQILSLDLGKNKTVGCDYERESGKHRFKTAFSTRAGLTQLVKEVKPDRVVIEVCSIAGWVCDLLRDMGIEVQVANTSDDAWRWRKVKKKNDRCDALKAAQLSAVNQIREVHIPTIDVRQWRALIAFRQQLVQRRTRVKNHVRDLLLREGQILPRSGKCWTQLGIASLEGMAQPLSEVGMNELWRGELAIELRQLRAVQEEIEVAEEKLDAIGAADPRVRLLRTIPGVGPRLAEAIVALLDRPERFRKASEVSAYIGMVPKELDSGETQRRGKITRHGSRLVRSLLVEVAWAGLRHNPWVRETYQRISGGKKSRKKIAIVAVGRRLLVRCWAMLRDGTSWQWPAAKVA

SEQ ID NO: 194472 - protein, 346 aa, unidentified
MKKIFIGIDFSKEKFDATVIKAEGVEERAARQHEVFDNKVGGFRRLLKWVRNVVEEQDASMWLFCGENTGGYSKALCNYLYGSGYDMWLENALSIKRSSALQRVKSDKADSGIIAEYAMRNYDQMRLYKPLSRNLERLREVFLYRHNLVKLKASMMTRKGEKQITQEKSDISRFMVMSSKHLISEFNKKIAECDKRIQQIIDEDEELQRNFEIITSVPGVGVLNAVCLMVYTDNFGRFDYNSRKIACYYGVAPFGRQSGTSVNTPAHVSPFANKLIKSLLTQAALASVNFCPQMAIYYHRLVEAGKKKQVAVNNVKNKLLHVIMAMVRKGEKYNPDYDYHATIEAA

SEQ ID NO: 194473 - protein, 388 aa, unidentified
MFFLGIDIGKNTHVASLLDEKAKIIFKAYSFANTLDAAEALLVKLEPYKDSLEIGMEATGHYWLSLYSFLAEHKFIVHVLNPIQTDGWRKGIEIRKRKTDVIDSVLIADLIRYGNFLETSLADEDILSLRNLSRFRVYLVNSVSDLKRKAIAVLDQIFPEYASVFSNVFGQTSKELLKSLSLPSDYENLSATKIEEVLSNITKKKKASKTISTLSDKASRSFGISFCKDSFAFQLKLIIEQICFIEEQIASVELEIDQLMSKLGTNIKTIPGVGSVIGAVILGEIGDIERFDNPSKLVAYAGLDASVSQSGEYEASSGKLSKRGSPYLRKALYMAAQRAEFCDPVFHAYYEKKRNEGKHHLVATNAVARKLCHTIYAILKKDVPYEVQ

SEQ ID NO: 194474 - protein, 340 aa, unidentified
MGVFVGIDVSLENSAVCAVDEHGKLLKETKVASDPGALNACIRSMPGVVEAIGIEAGPLSQWLHKSLTDLGLPVVLMETRQVKAALKAAPVKTDRRDAAGLARLLQMGWFRPVHCKSLSAQELRVLLGARRSVQDAAINIEMSIRGMLRNFGLRLGRIGKVSFEDRVRELTDGNKLIQLSIEPMLRARAALRSELVRLERLARDITREDPVCRLMMTMPGIGPVVALTVRSTIDDPGRFRRSKDVGPSIGLTPRRYQSGETDIIGGVTKAGDLDMRTALYQAATVVIHRSKKPTWLRAWAERVVRRRGVKRAAVALARRMGVILHRMWVDNTEFQAARMA

SEQ ID NO: 194475 - protein, 348 aa, unidentified
MEHYAGIDVSLECSSVCVVDVAGKIVREGKVASEPEALNAWFGSLDFELVRIGLEAGPLSQWLFAKMRAAGLAVELLETRHVRDAFKAMTVKSDRNDARGIAQLMRLGWFRPVHCKSTGAQETRAMLTARKLVQSKLRDIENSLRGILRGFGLKVGKTTQRSFAGRVRELTAGHPALQTIAQALLAAHAVLLREFNGFEKRVRVMARAHAPARLLMTTPAVGPIVALTYASAIDDPGRFKSSKAAGPHFGLVPKKHQSGETDRTGRISKIGDAAVREALYQAAHVMLTKAVKGCSQLKSWAMRIARRAGMRKAKVALARKLAVILHRMLADGQAFNPAPRAKMMSTPA

SEQ ID NO: 194476 - protein, 465 aa, unidentified
MKNKAPKAKKKKQKIDLSQCWELINPNAAGIDIGSREHWACVPAGRTEKPVRPFGTFTADLEALADWFQECNVTSVALEATGVYWIPVFQILERRGFQVILANARQTKNVAGHKTDVMDCQWIQRLHTYGLLQGSFRPKDEYCVVRAYLRYRDELVSARSAQCQHMQKALQQMNVQLHHVLSDVTGVSGLALIQAILGGQRDPVKLAALVDRRVRASQGAIQKALVGDDRTEHLFVLQSAFELYHTYEGKMNACDEQIVRELAQLPDAVGVTAQPLPVRKEGRPARADQMAGQDLRAALYPKLGVDLTAIEGIGSLTALVVLTEVGPDLSRFRSEKHFASWLGLCPDNRISGGKVLGSRTRRVINRVSDALRMAAMTLERSQSALGAFHRRMKARLGAAEAITATAHKLARLIYRLLKYGEAYVRQGMADYEKRFQERKLYALQKTAQVMGFQLVAKQPTTESVS

SEQ ID NO: 194477 - protein, 341 aa, unidentified
MEEYIGLDVSMKETSVSIRRAGERIWRGKCASDPRIVAELIRKRAPSVKRVVFETGPLSIWFYHSLRTEGVPAICIDARHAKAALDMAANKTDANDADGLAQLAEVGFFREVRVKGFDSMLTRTLVAARTRLVRITTELSNQIRGVMKTFGLLVPAGKGSTFERNVRSLLADQDGLASIVLPMLEAWRGIRIRAAELGRQLVRDARQSQACRILMSIPGIGAITATAFTTAIERPDNFKKSRSVGAWIGLTTRRYQSGEVDYDGHISRRGDNHLRGLLYEAAAVILTRSSTDSTLRTWGLKLRERIGFKRAAVAVARKLAVIMHTMLKTGELFNPNAGATA

SEQ ID NO: 194478 - protein, 413 aa, unidentified
MKLFVGDDWAEGHHDVELMDAGGRRLAKARLPDGVAGIARLHAMIGGQLGGDAEEEDAGQVAVGIETDRGPWVAALVAAGYTVFAVNPLQASRYRDRHGVSGAKSDAADAHVLADMVRTSSHQFRPVAGDSAQAAAVKIVTRTHKTLIWERTRCTQRLRHALLEYFPAALEAFGDLDGPDVLELLARAPDPASAAALTAAQVSGALKRAGRRRVAEKAAQVRAVLRAPHLGQPEVVTAAYAVSVRALLTVLSALDEQVKALQGQVEAYFGQHPDAEILLSQPGLGPVLGARVLAESGDDPARYASAKARKNYAGTSPITRASGKKKAVLARHVHNNRLIDALMAQAFSALSASPGARACYDRQRARGAGHNAALRQLANRLTGILHGCLKTRTRYDEATAWPQHAAHREKTAA

SEQ ID NO: 194479 - protein, 417 aa, unidentified
MPMSIVLYVGTDVAQAMNRTRFYDAEGKEVGRRYSSANDLPGSQALVAEAVLRADTIGAEEIRWALEATNLFWWHLAVHLTTSPELIARKLRLYSFNPRVVAKFRESYPDLGKDDWADAMVIADRLRFGRLPAECYLDERYAPLQRLTRYRKHLVDTVVREKQVALGYVWLKLSGYELEEEGLTNTFGATSQAILERYLTPDEIVAASFEELVNVIADESRGKADAEAVAKAVQQAARRSYRLPGSMVEPVNLVLSSSLATIRTLTAQLKPLDKAIARALEAAPAQTLRSIPGLGPVFTAGIVAEVGDITRFGNEEKLAKFAGLTWRRHQSGEFEGEDRNLTKTGNRYLRYYLVEAANSVRQHCPEFGSYYGIKYQEATRHKHKRGVVLTARKLVRLVDSMLRSGQIYRPPGVRKAS

SEQ ID NO: 194480 - protein, 369 aa, unidentified
MKYTKFVGLDVHKDTIAVAVAREGREAAEPLGTIINSPEAIAKLVRKLGPAKNLYFCYEAGPCGYGIYRQLTAAGSTCMVAAPSLIPRKPGEKVKTDRRDAKKLAQLLRSGELTPVWVPDEKQEALRDLVRAREDAQEDIIRKRNQISKFLLRLEKRPPSGVKNWTMKYWQWLNSLAFSQAAQGIVLKEYIHALEEAEAREKRLEKEITELVRYSEQAPIIAAFQALRGVGLITAATVVAEAGDLSRFDSPKQLMSYVGLVPSESSSGGSRYQGRITKSGNAHIRRVIVESAWHYRRQPSIGAGLKKRQEGQSEEIKAISWQAQHRLNLKFRRLSGRGKPSQTAAVAVARELLGFMWAISQEIRQKNNL

SEQ ID NO: 194481 - protein, 369 aa, unidentified
MKKDSTLYVGLDVHKDSIVAAYASSEGGDPVHLGAIGTRQCDIDALVRKLQSKGARLVFVYEAGPCGYWLYRYLTGKGLACLVVAPSLIPRKPGDRVKTDKRDALTLARLARSGDLTPVYVPQVADEAIRDLARAREDALGDLNDARFRLKALLLRHDIRYTGRANWGDEHRRWLARFVFPTPAQQIVFQEYVRTVTERTELLGRLEAALLEQAKTWRMYPVVEALQALRGVQFTVAIITVAELGDLTRFEHPPELMKYLGLTPSEYTSANRRRLGGITKAGNGHARRALVEAAKAYRHRAKVSEQIQARQQHLPRAICDIAWRAQVRLCGRYRKMLARGKHPNTIAAAVARELIGFMWAIAKEQPVAA

SEQ ID NO: 194482 - protein, 342 aa, unidentified
MQISTIGLDIAKNVFQVHGIDAHGSVVVVRQLRRGRLLAFFETLAPCLVGMEACATAHYWARALARLGHTVRLMPPSYVKAYVKRGKNDAADAAAICEAVTRPSMRFVPVKSAQQQSALMLHRTRDLLIRQRTQLINAMRAHLAELGLVAAQGRDGVHRLMALVAEESDACIPELARFACQSLAVQLAALQGQIDALERRLCVAHGESQVSRRLKTIPGIGVIGATAIAATVTDPKAFRSGREFAAWIGLVPRQSSTGGKVRLAGISKQGDRYLRRLFVIGAMAVVKQARAHPDKHPWLTQLLARRPAKVVAVALANKMARTAWAVLVKGENYRAPALMPVA

SEQ ID NO: 194483 - protein, 347 aa, unidentified
MSDHAIHIIGIDLGKNWFHLAAMDAHGKLIYRKKFGRNQLADFIFTLKPCIAAMESCPGSQFWGRRLRDAGHTVRIIPAQFVRPYLKSNKNDFNDAEAIAEARSRGGMRFVALKTTDQLELQALHRVRQRFIVERTAVVNQMRALLIEHGIVIPVGRALFARRLPKILEDVENGLSMRLRGLIERLRRRWLLIDDELESVSGEITQVATDSELCRRVRTVPGVGPIVSTAIVAAVGTGTAFRRARDMSAWLGLVPSQYSTGSKPNRGRISKRGNAYLRMMLIQGARALLIHMKREQSRMGLWLRELEKRSHPHVALIALANKIVRICWKVLTSGNEYQPFQERPKMS

SEQ ID NO: 194484 - protein, 348 aa, unidentified
MYYVGIDKHESQSRICVLDGSGKEVRSWTQWGPPERTAEALRELEEPFAACFEASCGTGFFYDLLKPMASRVEVAHPRKSALIWQSKRKNDRGDARKLAKMLYLGEVPRVYVPSKRVRAWRGMIEYRRRLMGRRTALKNSLRALLRERGKRPPRGLWSRSGLAWLGAVAFEMAFDAFRRDEMLSELTALEARIRRATAALNRVSLRDARVKLLMTIPGVGVRTAEAVAAYIDRAARFRSVRDAGAYAGMIPVQDQSGPVERWGHITKEGPPALRWLLVEATWQGLRRSPRLQRFYHRALKGQPARKKIAVVAAARHLLTVMVSMMKSGTPWREAVVDESAAKRLRAVV

SEQ ID NO: 194485 - protein, 418 aa, unidentified
MKIAYPICCGVDVHKSIIVATIASTDKSNITQYKTETFSTLNSDLIRFRTWLIDHSCFQVCMESTGKYWIPVFNILEAANIRVLLTHPKYVRAIKGKKTDKKDSKWIADLFKFDMVRSSFIPPKEFRAMREIGRYRYKLVCMRSSEKNRYQNGMTVSNIGLASVLSDPFCKTAVDIMQHVLTSSVLDEDYCKTLIRKSAKKKTELILESIRGCNVEPDQQFKMNEAKAHMEYLDQAILKTEVELYTSMNPYMSHIHLLSSQLPGITQLSAALIISEIGADMSVFESSKHLVSWAGLSPANNESAGKKKSVRISKAGQFLKPLLVQCALAAVKSGKEPYFAVKYQKIKKRRGHKKAIIAIARMMLTCIYHMISTGETFNPSDYEEFMNPAPRKAVLTDETAIAFLAAQGYDVSSLKKTV

SEQ ID NO: 194486 - protein, 354 aa, unidentified
MTNLEAASRVIVGGIDTHKDLHVAAVLDTAGVVLATQSFSTTRAGYRALVRWMRSFGDVRQVGIEGTGSYGAGVTRHLHDAGIEVFEVDRPDRSDRRLRGKSDTLDAESAARAVLAGRRTTTPKTKDGLVESLRVLRLTRSTAVKSRTVALQLLRNHIVSAPEELRDQVRNLTRMQLIRTCASWRPDTSGFRDPVVATRIALRSLARRFLELNDEVAQLDDLIAPLVQELAPALIKLHGLGIENAGQLLVTAGDNPERLRSEAGFAMLCGAAPLPASSGKTQRHRLNRGGDRDANSALHMVVICRLRSDERTKRYMRRRVSEGLSKMEIIRCLKRYVAREVYTLLRAELAPAGA

SEQ ID NO: 194487 - protein, 377 aa, unidentified
MGNRSMFVGLDVHKETIDVSIAEGQRDGEVRHYGVIASDLEPLDKVVRALRAPDRQLHFVYEAGPCGFGIYRHLTKRGEHCVVVSPSMIPKRSGDRVKTDRRDSLMLARLHRAGELRAIYVPDDTDEAMRDLVRAREDAVGVGTQAKYRLTAFLLRQGRRYPGREGWTLPYRRWLADLSFPSAAQHISLQEYRDAIDETERRIDRLTEQLRQLAPTWRWAPVVAALQALRGVSFVTAVALVAELGDLTRFRHPRELMAYLGLVPSEHSSGPSVRRGGMTKAGNPHVRRLLAEAAWAYQGIPRIGRQHAYRQEGLPKVVCDIAWKAQLRLTARFKRLVARGQGETEGRDGDRPRAHRLHLGHCARDGARAALRFDARA

SEQ ID NO: 194488 - protein, 375 aa, unidentified
MGDYSDAFVGFDTSKLRNAVAIAEAGRGGEVRFFGEIENTPAATAKLVLKLSAKYKRLTFCYEAGPTGYGLHRQIKDLGFECVVVAPSLIPKRPGDKVKTNRRDALSLAKLLRADELTPVWVPDGAHEAMRDLTRARETAMLDLRTKRQHVSAFLLRLGRPYPEGRKTWTKAHVSWIASQKLEHPQQRLVLEEMMLAIRQAQERLARLEQAIAAAVPEWSLAPVVTALMAMRGIDLVSATTLLAEIGDLSRFRTPTELMGYLGLVPSENSTGDTVKRGPITKAGNRRARRMLVECSWSYQHPPRVGQAKQPKVDAAPPAAREIAWKAQCRLYRRYRTLIRKGKLKTVAIVAIARELAGFIWAVARAATTAPVAAG

SEQ ID NO: 194489 - protein, 344 aa, unidentified
MEHYVGLDVSQLETHVCVLDRDGEVCWQGRTASNPEDLAECIRRRAPQAVRVGLETGPLSTWHWHGLNDLGIPIICLCARHAKAALKMQINKTDKNDARGLAEIMRTGWYRSVQVKSMQSHAVLSKLGVRAKLIDIRRDLASQIRGIMKTFGLVVGTARRQIFERRVLELLDGCKEIAAIVEPLLSAWRNIGDQIAKVDKVLLDQARDNEDCRRLMTMPGVGAMTALTFVSNVDEADRFTRSRSLGAYFGLTPRRYQSGEVDLSGHISKCGSGMMRSYLFEAALTLLTRVKKWSALKAWAMQIVRRNGVKKAAVALARKMAVTMFAMLRDKSEFRRSTVEGATA

SEQ ID NO: 194490 - protein, 336 aa, unidentified
MHTWDNESGEFGKRRLDQPEEAEQFYGELKQRNLAVRVGMEASGHARWFERLLRELEFELWIGDAAEIRTKRVRKQKTDHQDAQLLLRLLTGDRFPRIWVPDAENRDLRQLLWHRHRLVQMRTRVMNQLHVVALNEGLQRKKALWRPAGCKEMESLALAPWAGRRRQDLLELLDQLTPQIQKLTQALELEVEKRAVARRLKTHPGVGPLTALTFELVIGTPDRFHCGKQIASYVGLVPEENSSGNRRRLGHISKQGNVLLRFLLVEAAQVTVRSQAQWRSKFFHLALRRGRKIAKVAMARKLAVHLYWMWRHGWDYSQFKRFGSHAGEPGNLDGGK

SEQ ID NO: 194491 - protein, 347 aa, unidentified
MNITTIGIDLAKSVFQLHGIDSYGKVLIKKQIKRAQMAEYFVNLKPCLIGMEACGSAHHWARKLEGFGHTVKLMPPQYVKPYVKTNKNDAADAEAICEAVTRPNMHFVPIKSTEQQAILSLHRIRQGYVKARTAQANQIRGLLAEFGLEIPQGIGYIAKRVPDILEDASNELPGILRIEIQSLLEHLNELDTRADNCEKKIVAWHKQSETSKKLEAIPGIGPLTATALVASIGEAKNFKNGRQVAAWLGLVPRQHSSGGKQNLLGISKRGDIYLRTLLIHGARSVIYRSGQKENPTDRQSWLNQLTQRRNKNVAAVALANKNARIVWALLNHDRDYQDNHKTLRVAA

SEQ ID NO: 194492 - protein, 389 aa, unidentified
MKIFVGIDIAKLNHFAAAISSDGEILIEPFKFTTDADGFQLLVSKLESFDKNSLIIGLESTAHYGDNLVRYLVTELYQVCVLNPIKTCQMRKNNVRKTKTDKVDTYVIAKTLMMQDNLRFVSFFDLDMMDLKALGRFRQKTIKQRTRLKIQLTTYVDQVFPEIQYFFKSGLHQHAVYALLKEAPSPKEIASMHMTHLANLLKVNSHGHFTKEQAKELRVLAQKSVGANDSAISIQITQTIQQIELLDSQLEKIEAEMTDIMKFNDSVIMTIPGIGYINGGMILGEIGDIHRFSNPNKLLAFAGLDPSVYQSGNFQAKTTRMSKRGSRVLRYALVNAAWNVVRNNATFKAYYDAKRAEGRSHYNALGHCSGKLVRVIWKMLTDNVEFNLK

SEQ ID NO: 194493 - protein, 366 aa, unidentified
MKKISTVQTFKNENFKEQKLTIGLDLGDRWSFYCVLDEAGKIILEQKVSTTPEAMKQTFSRMPQSRIALETGTHSPWASRLLTELEHEVIVAHAQKVQLITKSNRKDDRHDAQTLARLARIDPELLGPVRHRSVQAQIHLTVIRARAELVSVRTALVNAARGLVKSYGERLPKCGTPQVSRELATALSTELRDVLEPLLKEIESLNERIKEYDERMEKIAKDVYPEVSLLKQVKGVGTQIALTYILTIEDPHRFLKSREVGCFLGLKPGRRDSGESKPQKGISKAGDRYLRTMLVQGAHYILGPFGADSDLRRWGRKLAERGGKNAKKRAVVAVARKLAVLLHRLWVSGEVYEPLRNSQKAMRAVA

SEQ ID NO: 194494 - protein, 341 aa, unidentified
MYSIGLDVSKASISVHVPLNSLDFEIKNTLKELKSLYSKLKKLYKKDMDKLVFVYEPTGSYSSLLTKFCALKNIKSFIINPKQSSNFAKALGYRSKSDKIDAHMLSQSISVARKDEIKVPVINATTEDIKELMSYYMFTLKQRVAVNNHHEALNSKDGNTYALKDLKKRIKELKNKEAEILKKIKDIIQEDENFAQGYSNIKTIVGIGEVAGIVLMHLFIKYPDANQKQIVSLTGLDPVIKDSGTSVKSRPRISKSGSKLYRAVLFMATMVSIKYNDEMKEFYDRLKENGKHSTVAQIAVMRKLIVIAHSLYKNNATYNTEVYKKASGKKQEKDTNKEIAA

SEQ ID NO: 194495 - protein, 386 aa, unidentified
MGQKTFIPQEYEVFAGLDVDKKSISVTFSNHQQGFMRSLHMPYSVENLLNHVRKQFPDQKVAFVYEAGPTGYGLYDGLTAQEQKCLVVAPSMIPRAPGQRVKTNRLDSRALSENLRGGQLKSIHVPSPIYRELRHLTQLRDTLVSEVVGMKQRIQSLLLFEGIAFPSAPAGSRWSLKVKAQLRKLECSRSVRFKLDQLLDNVEFSEKQVVKATQEIRKFCQNDPELAQCIKYLMSVCGIGWIVASQLLARIGDWRELKNVRQLAGFLGLGPSENSTGERTDRGSITRTGAGRLRSKLIQAAWSAIRQDAELRDFYISVCRRHTRQAGPRVAIVAVARKLSTRISAVLMKQRPYVVRQKVQSAPSNQEETSPQGTTRRPGEPGEQNS

SEQ ID NO: 194496 - protein, 361 aa, unidentified
MSIVYYGGLDVHQESIVAFLFSPETGEYFEDEVPNDRKHLEHAAKRWRKRGELRLCYEASSAGFVVKRWLDELGIPCEVVAPAFIPKGPGDRIKTDRRDARRLAILYQSGMLRPVRVPDEREEMVRSVVRHREDLTRDMTRTKNRILKFLGLLGLRYTEGRNWTEKHRKWLRSLNLEPLQAMVVESHLRVLEQLEAERREVDQKIAEIAETPFYREKVQRLMCLRGIALHTAMVLITEIGDAHRFRGAPELMSYLGLVPQEYSSGERRRSGKITKVGNSHARWVLSEAAWNQARPLGRSDRLAKQRRNQPPEVVAISQKAERRLHHKFWKVAVRKDRNTAAIAVAREMAGFVWALLTLDAA

SEQ ID NO: 194497 - protein, 353 aa, unidentified
MIIIGVDFHPEFQQIASVDTDSGECQEKRLAHREEAENYYRALAGQKVRVGMEASGHARWFERLLAELQFELWMGNAAEIQSKRVRKQKTDRQDAQLILKLMLKDDFPRIWVPSWENRDLRQLLWHRHRMVQARTRIMNQLQALALNEGLRCKKRLWREHGRQQLESFPLAPWGSRRRRDLLELLDRVNPTIAELSQTIEQEAEKHGDAQRLMTHPGVGPLTALGFVLIIGKAERFQCGKQVASYLGLVPLEKSSGNRRRLGHITKQGSSMLRFLLVEAAQVTVRSLPEWRRKYIHLTMRRGRKIAKVAMARRLAVALYWMWRNKWNYEQSKSSVRTRASSEQAMVCSRTPSK

SEQ ID NO: 194498 - protein, 339 aa, unidentified
MEQITTVGVDLAKSIFQVHCNDSNGRMVLNKKVRRRDLLMFMSTIRPCLVGMESCCGSHYWARKFTECGHTVKLIPAQYVKPYVKTNKNDAADAEAIAEAVTKPNMRFVPIKEPYQQNIQMLRRIRSRLVGNRTALCNSARGFLMERGIIMSKGIQKLRKDLPNIISDAENELTDMAREEMHNLYSELCSIDVLVTEYDRKIQLIYDNDEACKRIGKINGVGIITATYVRAVMGDPRTFKNGRQFAAWLGLVPRQHSSGGRNNLLGLSKRGDIYLRMLLIHGARTVVMYSEGKKDRLNRWAQDKIATRGFNKACVAVANKNARIIWAMLAHGEEYKMAA

SEQ ID NO: 194499 - protein, 391 aa, unidentified
MIFVGIDVAKDTHYAAVSDDSGAVLVKPFAFQNNAEGFCLLLKKLSEFDRSKLLIGLESTGIYSENLICFLYESGFRLAVINPIQTATLRKTAIRKTKTDKVDTMLIIKSLMVNSYRLYSQRDADSLKLKTLCRFRQNLKKSMARLKIQLAGYVNLVFPEFGKFFKSGIHIAASYALLKKYSSPKEIAALRTSTLCTLLSKASHGRFGKDTAEALKSLALSSVGVKNPYISIQIAQTIAQIELLEQQIKDLNSAIEEAMESINSVLMTVPGIGAVNAACILGEIGDIKRFSKPCKLLAYAGLDPTVRQSGQFTAKSTRMSKRGSALLRFALINSAWQLTLNDTTFKAYYDLKRSQGLNHYGALGHVAHKLTRVIFKLLTSDTPFNPAKLVA

SEQ ID NO: 194500 - protein, 369 aa, unidentified
MTSIVFIGMDVHTTNFTLCAYSMNTQECFAETQINPDVKEFDKYLKALDAGMGGDTHFVCGYEAGCLGYSIYHDITKLGYECKIIAPTTMAKSIDQKQRKNDRRDAKMIAKCLAYGTCSFVYVPTAKDDSVKEYIRMRDDIKASLKQIKQRIIAFCSRHGKLYERGYWTQMHVDWLRNIKFEEPILLETLEEYLLEYERLTEKIEMLDRRIEDIALEDEYREKVMKLRCFKGIETHTALSLVCEVGDFNRFPTADHFASFLGLTPSEHSSGNSTKIGGITKAGNSHLRMLLTESSQCFARSTATKTKALKKKQEGNSEAVIKYADRANDRLRKKRAKMAFTSHNGNVIKTAIARELACFIWGMMTGNIA

SEQ ID NO: 194501 - protein, 390 aa, unidentified
MLLWSGSRPQPSVALIVVVDGVDGPLRHRCARMRLLKSQTREPSVNQIIRIGMDTSKHIFQLHGVDAAEQPVLRKRLRRKEVLAFFAKLPPTVIGMEACGASHYWARELGRLGHEVKLIAPQHVKPYVKRNKNDGRDAEGTCEAMSRPTMRFVPVKTAEQQAALMLAGIREALIARRTQLSNTIRGYAAEFGLVAAKGLDKIEPLLAQIAQDENLPTLARELFAMQGHQYAQLQTELKVIEAKLKAWHRANAASRRLAQIPGLGPIGATALVMKTPDPHAFSSGRRFAAWLGLTPKDHSTAGKTRLGKITRAGDEVLRRLLVVGATAVIQQVRNGRGRPSPWLLALLKRKPPKLAAVALANKIARIAWKLMTTGESYNGARMPGASAFAA

SEQ ID NO: 194502 - protein, 360 aa, unidentified
MALNYSQEEMQLIKAREERKGEEGIKEQRLSIVGVDTHSDTLACYCDGKFKEFKTNEKGFKEALNWAKDIDKDCVFAIEGAYCFGLPFSSFLTKEGCRVYDINPLLTKNWRSALKVANPKNDYGDAKVISLFANMNNMNEVSLKAIKLKEKLTARKSLIKQRVQITNQVKMLFKTRGNKLPFDMIETNKGVKWLLNYGESNNDVIIKTNAIILRTLMDSIKEIEEDLKKALDNELPPQVKKLTELKGLSTILAITIYTETKGKLYTKSKFASFCGVAPIEYSSGKSQKRKNNKGGNRMLNSVFYTLSIHQKRYNPVAKEYYERKLKEGKTPRHARKCLARQLCNIVFNILKDGNKDNNIV

SEQ ID NO: 194503 - protein, 320 aa, unidentified
MYSIGLDISKSTINVYVPLNDLDLVIENSLKGIKTLYSKLKKHYKKELDKLVFVYEPTANYSFLLKQFCANQNIKSFIVNPKKSSNFAKVMGHRSKNDINDARLLSKMILTAKEEEIKVPIIDAIKEEIKELIGCYKLIIKQQVQIKNHISTLKIKGSSIKELELQYHFLKKQEEKIITKIVILITQNKELYQAFLNIQTIKGIGKISAIVLLCHFIHYPKANQRQIVSLAGLDPIEKTSGTSVKGKTRISKAGSKMCRASLFMPMMVAIQHNERLKEFYNKLKEKGKHTTVAQIAVMRKMIVIAHALYKNNESYNLEKI

SEQ ID NO: 194504 - protein, 343 aa, unidentified
MVSHYIALDVHCGFSEIAVVTERGKLVRRERCETAIPSIVERLSAVRRPRRVTFEEGPLADWLSRELRPHADEVLVCEPRRNHWIARDADKDDPIDAFKLAELYRGGFLKKVHQADSLERSLLKQQVLLYHDRVRDRVRQGHQLVAVCRRHGAFVKAADLRDDAEWKQCLDRLPAGSLLRRAWESGREVYLLMIERERELWTELVGTARNIEVVRRFEALPGIGWIRGMTFYALIDTPHRFRGKSALWRYCGIGLERRHSGNGPVRTRVTRQGHRRLKDVLLGAAKSAVAQADNAFADKHRAWKEEGLHPANARRNVARAIASTMWSLWKTGQTYDPQKATSK

SEQ ID NO: 194505 - protein, 423 aa, unidentified
MENTAARKRKQVPEGYLIIGIDPHKKRHAAVAITQDFTTRDKFKFDNTREGLETMLRRARMEMVKSDCRGVMFAIETGGHYWRNIAYFLDEQGIPFRFINQFTLKRRREGKDLNRRKNDYRDSEVAAQLLCTGEFTESTIPQGVYAELRTAHNAYRRLVKERTRIINLVKGLLDGLFPEFTCVFKDPCGLTALSVLSTCTIPMVIAGMTEEEFVAAIEAQHQGRLMRRKLRVLHYSAITSIGIAAGALSVATEISFLVDKLKLIKQHICLMERTLVRLVDETEEGKYLLSIRGLNYIAVAGLLAELGCFKSYRSAKQMIKMAGSNPTESESAGKKRARTPMSKQGRPVLRYCAWTSVIPMLRLNPDFRAWAKRLRERPVHANPLGGREIVGAALNRLLRLAFALVKNQTYYQVSKPELTPVAV

SEQ ID NO: 194506 - protein, 350 aa, unidentified
MTTLTEARPVVTGGVDTHLDVHVAAALDSVGGVLGTASFPTTVTGYRQLLTWLRSHGQLQRVGVEGTGSYGAALARHLTAQGVSVIEVLRPNRQVRRRQGKTDVLDAIAAARAVMSGEATSTPKTHDGAVEALRTLKVLQRSANKARTQAINQLRNLIVTAPDDLRARLRNLSIKELLEVCSGFRIPADDDSLNAITRLSLRDLAHRILFLDASREQTRRRLDRITNKVAPDLLAINGVGPDVAATLLMTAGDNPERLRNEASFAALCGTNPIPASSGKTTRHRLNRGGDRDANSALWRITIVRLSSDKRSKDYLARRISEGKSKPEAIRCLKRYIAREVFRALPVKVAV

SEQ ID NO: 194507 - protein, 376 aa, unidentified
MENDSTLYVGLDVHKDSITVAYALGTGEVELLGKIGTTKTDIDRLCKRLQSKARYIRIVYEAGPCGYGLYRQLLAKGIDCMVCAPSLIPKKPGDRVKTDRRDAIKLVRSLRAGDLSAVYVPSVEDEAFRDLARAWVSAKDDLKRARQRLKAFLLLHGVRYAGRANWGAAHRRWLSAYAFDSVWQQLAFEEYRRTIEDRLAQCDRLEAALREAVVNWRFYPAVLGLQTMRGVQFTTAVGMLAELGDLSRFAHPRQLMAWLGVTPSEHSSGDKRRQGSITKNGNSYARKLLVEAAWSYQHPARVSPEIQRRHEGIPKSIVDRAWDAQMRLCRRYRKLVARGKQKNIAVVAVARELAGFIWDISQLAMSLSVRPEVHMA

SEQ ID NO: 194508 - protein, 315 aa, unidentified
MSENKSEMFVGIDVSKATLDVRIEPLGEWFQVGNEDEGIKALCSRLSELAPTLIVMEATGGLEMRAAGELAARGLQLAVVNPRQVRDFAKASGQLAKTDRIDTTVLCAFARAIRPAVRAIKDELTQQLDDLVTRRRQLVQMRVQESLRLHAASKVQAKSLKAHIAWLDKRIKEIETDLGARLRGSDAWRVKDDLLLSIPGVGEITSRSMLTGCPEMGRLTRREIAKLVGIAPLNNDSGKYRGQRHIWGGRADVRSVLYMATVSAMRCNPVIKAFAANLKQTGKAPKVVIVACMRKLLTIMNAIIKSNTPWKAETA

SEQ ID NO: 194509 - protein, 343 aa, unidentified
MDHFAGLDVSVKETSICIVDDTGRIVREVKAASEPQALLKVLGNPTYRFKRIGLEAGPLSQWLFSGLAEAGLPIVCVETRHMQAVLKAQINKTDRNDARGIAQMMRAGLYRPVHVKTLRSQKLRMLLTHRKLLQSKAIAIENDLRGTLRNFGLKVGMVGKMRFEARIKELVESLPDLAELVEPLLIVRRTLRAQIVILHRRLLAIVRDDEVCQRLMTTPGVGPVVALTYRATVDVPARFRKSKAVGAVFGLTCARYQSGEIDWSGRISRCGDEMMRVMLYEAAQSMMRSKKWSWLKAWAMQIARRRGMKKAIVALARRLAVIMHRIWVDGTEFRWTREHTAAA

SEQ ID NO: 194510 - protein, 433 aa, unidentified
MVNQEPEIKGCWVLGVDCGEQKHRFVMLDESRARQGALWVTNRMDKVREALVKMLTKLPEGYELEIVTEGLRSIGGMLMQGATELGVRIYQVNPKALDSYRSVEGQPRKDDDRDAELLAKMRLNRAQGCRLALDPRPEELVLCRLTRLHTQLVGQKRQAVSRVRSRLLELSPEVVDSQWDGPGYSSTGMRAVLERWPGFEGMGNTRVSTVERVLRPVTRQGKACTKMARAVKEMARRITLGAQERRVISMELDMAMQLLRLTETSLAKVDKEIKTAVELHPKGRNLLEMPGVGQFTAGVLIGEILPLARNQSEGKSATYGGITPLSRRSAKSEGRSKLARGVNKHAVRALYLSAVSARQCSALDSAYFQKQLERHKGHPKAHVKSFLSLARQRFKVMYKILTTDARYDKETLIRSHLKRQELERTKKEGHLIA

SEQ ID NO: 194511 - protein, 327 aa, unidentified
MNASELNFIGIDVSKDSLELAMDDKGKTQYLNNDETGIAKLLAAINSVGGNVGAVVLEATGGFERLAAVALCRAGLPVMVVNPRQARDFAKAMGYLAKTDAIDARVLSHFARMLYQSDRREQLLMKLPDANQEALQALVTRRQQLIQMRVAEDNRLALSNKSQRKSIEAVRKVLNKELARIDHDIDGQLKEHFAEKVALFQGFKGIGAGTQASMMAALPELGSLSHEQIGKLVGVAPLNCDSGKQKGKRITWGGRADVRSMLYMATLSAMRFNAVIKLFYERLLAKGKPKKVAIVACMHKILTILNAIVKSNKPWDEHHFVPKTAGL

SEQ ID NO: 194512 - protein, 355 aa, unidentified
MTVTTVGIDLAKTVSHLVGLNRAGKIVLRRRLSRAQLHRLTAQLKPCLIGMEPCCGAHHLGRRFVEQGHEVRLIPAQFVRPFVKSNKNDYNDAEAIAEAVGRPRMRFAALKTVEQLDLQALHRVRDRLVGRRTGVINQLRAFLLERGLAVRQGRLHLQRRLPELLEDAEVALSTRMRALLHSLWQEWRQLEQEIETLTQEIRQIAHGSPDCQRLMQIPGIGPLVATALVAAVGSGHGFRCGRDLGAWLGLVPRQHTTGGKQKLLGISKRGNSYLRRLLLHGARAARLHAHREQHRFGAWLSRLEQRVHANVAVTALANKLARIAWAVLYHKQDYRRKAPAPTAAAAADLPSPCSS

SEQ ID NO: 194513 - protein, 349 aa, unidentified
MSRKQSNPTVIGIDIGKNNFHLIGLDDAGEIVMRRKLSRRQLAERLVNLPSSLIGMEACVGAHYLSRRLLALGHDARMMPAQYVKPYLRGQKNDYRDAEAIAEAVQRPRMRFVTPKSVDQLDLQSMHRVRSRLVRHRTSVINQIRTLLLERGIVVRQGARFLFAALPEILGQHGDLLSPRMEQLMMDLSEDLRHLDERLEAITDEIGTIAKENQACQRLMTVPGVGPVIASAMVATVGDGTAFDRGRDFAAFLGLVPRQMSTGGETILGRISKRGNTYLRTLFIRGAKIILMHSKNWPKHRFGPWLEAASKRMHKNVLAVALANKLARIAWSVLRHGDDYDPKGAFPAA

SEQ ID NO: 194514 - protein, 362 aa, unidentified
MYYAGLDVHSQYVTIAVVDKSGALVRETEVSTREPEVLRAVLTRFRPLEAVVEASGFWPWVYDLLVPSGITFHLAHAKKLRAIAENAQKSDQVDARLLARMLLSGLIPPAYPKVAAQLERMRLVRHRAALVQQRTRLANRIHGQLRQRNIVLPREQLLRQATRRWLHSEAWTQLTAEQQAILTTHFAIIDQLTELLRPVDRRIQQLALSDPVAGLLRTVPGIGVYWAVLVTAEVLPLERFRRPAHLVSYAGLAPRTRSSGGHTRHGPIPAGCNRWLRWAFVSAIPSHVRHAPQSQLTAAYLELKARLGWRVARVAAARKLARIIYHMLRTNEPWCAALTSTETARDALQQNAVAQTTCSYSD

SEQ ID NO: 194515 - protein, 340 aa, unidentified
MNIKRIGLDLAKNIFQIHAVDHHEQAVLHKTLRRDRMMAFFSQLSPCLIGIEACGAAHYWARELTRMGHTVRIIPPQRVKPYLKGQKNDANDAEAICEAISRPGMRFVAVKTERQQTLQAEHRVRARLIRARTALSNEIRGLLGEFGLVLPVGIRQLRKALPEILSQQERWDDRFIRLPGELAEELQILDERVARHDRRLEQSARDDIRIKRLLTIEGIGPVVASALVAAVGDGRQFKSGREMAAYLGLVPRQHSSGGKERLGHISKRGDSYLRTLIIHGARAVLNACQNKTDRRSQWLQALSERRNRNIATVALANKNARIAWAILSGEKEYHGQQGAG

SEQ ID NO: 194516 - protein, 351 aa, unidentified
MIIIGCDFHTRYQQIAMANDETGELLLERRLDHESGEAHAFYRGLQGPVRVGIEATGPIHWFERLLAELGHELWIGDSAKIRASEVRKQKTDERDARLILDLLLAKRFPKIWVPTPAERDLRQLLWHRHKLVCLRTMLGNQLHFLAMSQGLCRKRKLFTKKGRTELTGLALGPWTRRRREELLKLLDQLDPAIAELDRAVLEEAQRRDDAVLLMTHPGIGPVTSLAFVLAIGPITRFPRSKKIASYLGLNPSEESSGGRQRLGAISKQGNTMVRWLLIEAVYPAVRKDLALRQDYQRLKFRRGHAVAKVAIARKLAVRMYWMLRSGADYAQLVRRQGSPGATLVDASPSLG

SEQ ID NO: 194517 - protein, 397 aa, unidentified
MNKIVHYIGLDVHKDSIAVAIAPQNSTEVRRYGIIGGTLDAVDKLLKRLSQPNIELRLVYEAGPCGFVLCRHLRSKGIHCDLVCPSLIPKKASDRVKTDRRDADQLARLYRAGELSPIHVPDQEDEAIRDLIRARTAAVHDQRRARNRLKGFLLRLGFRYTGKTSWNDGHKRYLSGLLMPRPAQQIVFQECIHAIDDAAGRVARLTQAVEDALPGWKWEPVVRALMTLRGLQVLSGMTVIAEAGDLSRFENPRSLMHFFGLTPSEHTSGDKRVLGGITKCGNAHCRRVLTEAAWHYRLKPLVSQAMQKRQEHQNKELRLIAWKAQQRLHKRFKQLAVRKKSVVAVTAIARELVGFVWAIACKVKPAQRPPAPEIIRTCRGKVYRLDPEKKMPKAKSS

SEQ ID NO: 194518 - protein, 343 aa, unidentified
MTLFVGLDVSQRMTAICVVDDAGRRVWRGQCASDPEQIEQMVRRHAGDDARIGLETGPMTPWLVHELRGRALDVTCLDARHARAALKMQINKTDQNDAEGLAQIMRTGWYRSVHVKSFDSHRARALLGARAQLVGMTTRLSNNIRGVLKTFGMLPGAMRGLPFDRRVEEMLVDRDDVAPIVRPMLAAWRQLRVQIAAFDKAVRSLTKSNPTCRLLMSVPGIGVLSVLAYVSSVEDPTRFSRSRSVGAHFGLTPKRYQSGEIDRSGRISKYGDSLTRTLMYEAATVLLRRVKRPSSLQDWAQAIARRSGEGKARVALARKLSVILHSIWRSGEPFRWSELQVAA

SEQ ID NO: 194519 - protein, 332 aa, unidentified
MNYELFVGIDISKLTIDAVAFTAETFKAPTHCIFNNNYDGFTEMLEWLAEYGITDDKILFCCEHTGIYICPITAFMDVKGLSLWVENGLHIKRSIGIKRGKSDKADALSIANYAFSNRFNARIYHFPSVTASKLRHLLAHREQLVRHQTSLKCTCSELKGFDKENALYCIADSQEMLAIYAERIKKVDAELSTVIEEDQELNVKFRLVQSVHGIGKQTALFILIYTEGFASFSDYRKFASYCGVAPFPYSSGTSIRGRNRVSSLANKKLKSLLTMCALNTIKKDNEFKRYYDRKKAEGKNSMCVLNVIKNKLLSRVFAAVKRGTPYHDEIAA

SEQ ID NO: 194520 - protein, 447 aa, unidentified
MGKRQVVADEEHERPFERVAAVDVAKGSGVVCTRLPDPSGGRAAEWGTVNATVRAVRAEAARLVALGIEKVTLESTSDYWRIWFYLFAAAGLDVQLVSASQARQLSGRPKTDIKDAMWLARLTEWGMLRPSFVPPAAVRALRHYARARTRMVQDRTRCWQRIEKQLEDALIKVSAVASKLTTLSVRAMLDALVEGERDPAVLAGLARGRMRARLDALAEALEGQFEDWHGEIIGMLLAEIDALTRQIGRLDLLIREQLDSIPQAWGADSDGVTGPGAGTGDSAAALPAIGRLDEIPGITAGLAASIVSETGLDMTIFPTADHLVSWAGLCPRTLQSGTRNRTGKKPGNTYLRGYLGQAAIGAAGTETFLGERYARIARRRGPAKAQVAVARSIAVIIWHLLSDRDARYIELGPDHYQHRIDRHKKTRQHIRQLQALGYQVTLTQTAA

SEQ ID NO: 194521 - protein, 387 aa, unidentified
MPASGPRPGQVAVQVSLAAIFVSLELSRSTWLITSLVPGGGDKMSKHSVRSGDVAELMTHFAKLRDKAHVRAGASFPIIVIQEAGLDGFWIHRVLERAGIESHVVDAASILTSRRRRRAKTDRIDGEALLRTLLAYKRGEPRVCAMVRAPSPEEEDRRRLCRERRTLVAERVAHVNRIKGLLFAQGIADYEPLRGDRHQRLEALRTGDGRPLPPHLKAQITRELDRLELLLEQIKAVEAERNALLESTNDAVSTAVQALAGLRGIGPELTAMLWSECLFRSFRNRRQIAAYAGLAPTPWQSGSVRHEQGVSKSGNPRLRSTMIQLAWLWLRHQPTSELSLWFRERVKRNGGRGKKTAIVALARKLLVALWKFSSSGVVIEGAMMKAA

SEQ ID NO: 194522 - protein, 354 aa, unidentified
MKRSTKHVALDVHQATTLASVREDSGRVIARSILPTEEPAIVEFFRGMRGTIHVAFEEGTQAQWLHDLLTPLVDRVIVCDRRGETRQGNHGDQHDADALSEQLRRGGLRAVYHGSGPGAGLKELTRSYQNLVADATRVMLRLKALFRARAIRTPGKSVYAPTRRAQWLAQLPDGGARVRAAALYAELDVLRTLRPQAKAAMLAAAQQDPGWTVLRTIPCFGPVRVALLLATMQTPWRFRTKRNLWAYAGLAVVTHSTADYELVAGRPQRRCRAPLTRGLNRNHNRVLKEVFKGAATAAKARPGPLQDWYDGLVARGMREELARVTLARKLAAITLRLWKKGERYDPTQLTTPAR

SEQ ID NO: 194523 - protein, 387 aa, unidentified
MARKRTLSTLDTSIAYEAIGLDLAKTDVALAAFDSDHKEPYLIDRIPYDKLYELLADMAPTLVAMEPCSGAHQIAEQIQELGHEVMMISGRHVQAWVKDHCNGQKTDLNDAFAILNLAYDRWLTPIRGKTREECRLLALQASYRQLKRQRTKTMVHVKATLHAWGFPIRAGSFNQKVLHELIDTNREAFGDEVVETLHLMINRVRDLDHDIATVLKLLTEATKRDPRASLLRSIPGFGILTMSRWCAVIGDIARFDSPKQTMAFVGLVPNNRITGHHTETSSGREARGQGRMSKRGDKMLRSLCILGAASLCLMVRNDRLPDCPFVASIKERLASPRPWFKVLVYVAAKLVRIATALLKYGETFSYEKAGISKAVLKQWELEQAKAA

SEQ ID NO: 194524 - protein, 384 aa, unidentified
MAATVQQGFVPRDFEVFVGLDVDQKRIVGTFRDHGWLLKSLQLPYSAEQLLRYTEKHYPGRKVAFVYEAGPTGFGLYDGLTGGGHCCLVVAPSMVPRAPGQRVKTNRLDSRKLSENLRGGQLKSIHVPSGPYRQLRHLVQLRDSSVGQMKAAKYRIKALLLYEGIAFPDAAERWTRNVLKPLQELEANPAVTFKLASLRAALEFARLQAANTQREIRRFCRQEPELRESIQFLMTIPGIGWIVGSHLVARLGDWRQLGNVRQIAAFLGLVASEHSTGDQVERGPITHLGDARLRCKLVQSSWTAIRKDAELREFYRRIYGRHPRHLAARKAIVAVARKLTTRIHAVLTQRRPFEVRPERSSTPLTSEEIAGPRGRLVTAQNDGL

SEQ ID NO: 194525 - protein, 480 aa, unidentified
MRPYRRLSLFKASGLDEAFIYSQVKTMAKKAKKIKTNKGLKLEIVNPNSAGIDVSSTEMQVCVPEDRDGENNRRFGTFTQDLHLISDWLKACGIETVAMESTGVYWVQLYMILESEGFDVLLVNAKAIKNISEKKTDRVDAETIMVLHSYGLLRASFQPQNHARRIRNVSRHRDGLLKASSREVLHMQKAMELMNIKLGNVISDILGKSGQEIIRAILAGERDARKLSALADPRCKSPKETIAKSLQANWDEDLLFMLKQSYELYVYYQNLMKDCDKQIEGILQEYLKDVKPEETSKPEQRAKKAKAQKNAVTIDIEKHAIRLWGVNAMRIPGVSEAALLRLAGELGHDFTDKFDSYKQFCCWCNLTPNNKISGGKLQSSKIPKRKNPVGQILRSSANSLKTSKTPLGYYFRRIQAKSGYLPAIIATANKLGRILYTMVKYKVEFDDSFTQTSETEILRRKLIKTQRTLEKLQNQIKECG

SEQ ID NO: 194526 - protein, 397 aa, unidentified
MFYVGIDIAKRTHEAIIIDDQGKIVQKSFRFQNSCSGFNQLISHVLRITNVRSQVSFGMESTSHYWLALYTRLMKEGYQVHVLNPIQSDALRNLYIRQNKTDSRDSFIIAEVIRFGRFSETQVPQDKMLALREMCRNRFFLVDSVSDLKRKVVALIDQIFPEYETIFSSNFVDSSVQLLTKYPTPEKMCNAKLNSMTDLLLKASNGRFGQAKAMEIKELAKNTFGVKDTCGVYSDLIRCYMEQIQFIQQQIETLDQKIQIIMDSLESPITSITGIGTILGATILSEIGDISRFSSADKLAAFAGIDPTVKQSGDFVGVKNHMSKRGTPYLRRALWMASTTAVQHDPMFRAYYEKKAAEGMRYMKIIGHVSKKMSSVIFAVLRDNKTYEPVIQTAKSA

SEQ ID NO: 194527 - protein, 424 aa, unidentified
MNNTQNKKIAQVSDGTLVIGVDVGSNTHYARAIMARGYEVSKKPFDFENTRDGFDRFVSWANHLAVVYQLKKIFVAIEPTGHYWFNLADYLKAYDVTLVMVAPQHVKHSKEMDDNTQMKNDQKDPLVIARLVAEGRYMIPYIPEDVYAELRSAFNRRCDLVEALTRNTNRMIRWFDMYFPEYRTVYGKGDAISGLLILKRAPLPSDILKLGVDGIRRIWREAKLRGVGINRARKLVAAAESSIGLKGGEAIRQELWQHMEAHELFKKQLGDIMQMIDGLIAKIPGADRLLKVPGAGIVTVAGFLSEVGDISRFTDPKQIQKLAGLAVVENSSGKRKGKPGISRRGRSRLRWVLFQLAMTTVKSNKEMKAYHLYYTTRKNDPLKKMQSLMAIAGKMTRIFYGILKNGTEYDPAIVMKDFKKEVAV

SEQ ID NO: 194528 - protein, 446 aa, unidentified
MSKNQKNEANDIRMGIIYPHSAGIDVGSMNMMVSYQGLHGGSQVKEYGSYTQELHDLAQDLKESGVTHVAMEATGVYWMAVYEVLEQYDLQVTLVNARHYKNTAGQKTDVSDSQWIHQLHAHGLFRASHIADESYRELRCYIHERGIFQKQKSDTLNRMQKVLTQMNIKYQHLLSDIEGVIGMQILERIATGQNHAETILANLKLRQLKTSREDLLKSLTGIYKPHLVSVLNHHLEAYKFYKDQMLSYEKEIENLLKKMLPEETAIPVKSSKVRKNQYHFNLKDYLHHLVGIDLTEIDGLDENTVLTIIAITGLNMEKWPTAEHFASWLNLAARPKISGGKVLGHQKRFTKNPATQAFRMAAQTMWQNKGILGHLYRRLSASKGSKKAIKAVARRLAVIFYNMVKKKMKYDPKIVALDQEQLRARKIARLQKEAEKMGCTLHIKVA

SEQ ID NO: 194529 - protein, 339 aa, unidentified
MNVMIGIDPHKASHTAVAIDGDEDQLSSVKVRATHRQVDQLMSWAEPFEKRTWAIESAGGLGYLLAQQLVARGEDVLDVPATLASRVRTLATNRSNKNDPNDAHSIAIAALRAPMLRCVERADHGEVLRLLAKRNMDIGNHRTRVVCRLHALLAELAPGGMAKEMYVSEADVFMAKLRPETPAQQMRFDLALELLDDVRRLDAQLKESHRRIRVAIKASGTSLIELYGVGPIIAATLIGYSGDITRFANRDAYASYNGTAPIEFSSGGRIVHRVSTRGSRKLNHALHMAAITQLRNPGTPGRIYFERKVAEGKTKKEALRSLKRHVSNAVYRQLLLDAQ

SEQ ID NO: 194530 - protein, 370 aa, unidentified
MAKRSMFVGMDVHKETIDISVAEDGRQGEVRRYGVIAGDLEALAKVVRALRAPDRVLHFVYEAGPCGFGIHRYLTAQGEACVVVNPSSMPKRSGDRIKTDRRDGDALARLHRAGELTAIYIPTPDDEALRDLVRAREDAVGLSTQAKHRLKAFLLRQGRRYPGRAGWTVPYRRWLADLSFPRAPQHIALQEYRDTIDETERRVERVTDQLRQLTPAWRWAPVVDALQALRGVSFVTAVGLVAEVGDIRRFTHPRHLMAYLGLVPSEYSSGPSVRRGGITKAGNPHARRLLAEAAWAYQGMPRIGRQMLYRQEALPQAVCAIAWKAQLRLTARFRRLVARGKAKPTVATAIARELTGFIWAIAREVPAPAA

SEQ ID NO: 194531 - protein, 377 aa, unidentified
MSNISKWPGEADGPNPNQFLYVGVDIHKDKHTAVAANCFGHKLMEMEFANTAKDFKQFVASMQSLADRQNRQFIFGLEDSFGYGLHLAKHLFDSQLPVKMVPPVLVDRARKYETHPEKSDSLDALGVAKVLIQRIDTLPDYSISITDELAKEIKELAMDRDFLVKEQTRIKNQLHRLLHKTYGSEYQTKFKNTFSLKALRYWKKYPTGKAYILVDDSILKNQVRRKIKRLMDIREECQEIENELKIMLDRSGQKLPTMNGCGIVLASAVMAEVRNIERFHSPAALAKYAGLAPRQKSSGKTIRHVKSKSGNRKLNMAIHRIALSQISNSGNQYAKAYFKKKVSEGKSKNQALCCLKRKLVNIIYMMLKHKQAYNYQK

SEQ ID NO: 194532 - protein, 346 aa, unidentified
MKITTIGIDLAKEVFQIHGVDVHGKAVLRKQLRRSEMARFFANLEPCLIGMEACGSSHHWARKLGEFGHTVKLMSPQFVKPYVKTNKNDMADAEAICEAVNRPNMRFVPIKNVEQQAILSIHRARQGFVKARTAQANQMRSLLSEFGIVMPQGIRSINKRMPDILEDAENGLPGTLRKLLERLNDHLKELDRQVEELELQIKLWHKENEASQKLEAIPGVGPITASAIVATVGGAAEFKNGRQLAAWFGLVPKQRSSGGKQILLGISKRGDTYLRTLMIHGARAVIRFAENKAEPESWVRKLMARRNKNVAAVALANKNARIIWALLAKGTTFHPKHTSAAPATGA

SEQ ID NO: 194533 - protein, 340 aa, unidentified
MKQLYVGIDLHSNNNYLAIIDEQDKRIYKHRWSNKADVILAELEPFKESMVGIVVESTFNWYWLVDILMNEGYKLHLANPTAIQKYKGLKYSDDSHDAFWLAHLLRLGILPEGYIYPKAERPIRDLLRKRGHLVKLRTSLINSLQGIIYRNCGYKLNVNKIKQCNENHVRPILSGQYDLELSGEVSKDTIDYLTRQIRKIESVTLKEIKLRNSFKKLQTVPGIGNILALTIMLETGSIKRFSKVGNFASYCRKVPSTWTSNDKKKGKGNSKSGNKYLAWAFSEAAEFARRYDESIRAFYNRKAARTNRMVAHSALAHKLTRATYYIMRDNVEFECRKLFA

SEQ ID NO: 194534 - protein, 362 aa, unidentified
MSDITTTTERSKLTVGLDMGDRFTQVCVLDEDGTVMEEGRVATTPRAFQQRFAAMLPTRLVLEAGTHSLWASRLLGELGHEVIVANPRMLRFIYGNDSKNDRADANYLARVGKLDPGLLHPIVHRSEEVMAHRALLRSREALVGSRARLIIHARSLVKPFGFKLPHCSTTAFVKKAQEHIPEILVPALGPVFGIISALNDQIRELDSKVEALAQKTYQETALLTQVPGVGTLTTLAFMLTIEDPNRFPRARAVGSYLGLRPRQDESGTLKPQLHITKAGDKFLRHLLVECAQYMLSSRGADSDLKRWGLKLAERGGKAAKKRAVVAVARKLSVLLLRLWVTGEVYEPLRNAKRRGELLPTPS

SEQ ID NO: 194535 - protein, 354 aa, unidentified
MSQTPSTAIAVIGIDIGKNSFHVVGHDTRGTIVLRQKWSRGQVEARLANMPPCLIGMEACVGAHHLSRRLASLGHDARLMPAKYVRPYSKGPKNDFNDAEAIAEAVQRPTMKFVATKTAEQLDLQALHRVRERLVSQRTGIINQIRAFMLERGIAVRQGIGFLRTELPTILATRTDALSPRILRVIEELTGDWRQLDQRIDSLSGEIEALARQDQACSRLMTVPGIGPIISSAMVAAIGTGDVFSKGRDFGAWLGLVPKQISTGDRTILGKISRRGNRYLRVLFVQAAWVVLVRIKNWERYGLRSWIEAAKKRLHHNVLAIALANKLARIAWAVLAKGRAFELTRTNDAGVRPA

SEQ ID NO: 194536 - protein, 420 aa, unidentified
MWMPAAGAAGEAGPRDRRTHVIDTSDVGAFLGLDVGKGEHHATAITPAGKKAFDKRLPNSEPKLRELFEKLQAKHGTVLVVVDQPASIGALPLTVARRAGCKVAYLPGLTMRRIADLYPGEAKTDARDAFIIADAARAIPHTLRALELEDETVAELEMIVGFDDDLAGEATRVSNRLRGLLTQIHPSLERVLGPRIQHPAVLLMLDQFGSPAQLRKAGRRRLVHLIRAKAPRMAERLVDDVFTALDEQTVVVPGTDAASLIVPSLANQLKSVLDQRKLLAARIEELLEAHPLSKVLTSMPGIGVRTGARILIDVGNGSSFPSAAHLAAYAGLAPATRSSGSSIRGEQPSRRGNKQLKRAFFLSAFAALANPASRAYYNKKIAQGKHHTQALLCLARRRADVLFAMLRDGTFYDPQPTPTG

SEQ ID NO: 194537 - protein, 354 aa, unidentified
MSKFLKYAVGLDVSKDSFHVCLSVIDTLQKVTIKASRSFANQSKGFQELVQWVKNHGKEEDIPIVYLMEATGVYHENLAWFLHHLGCHVTIILPKKAKHYFKSLGLKSKNDTIDAKGLAQMAAEQNLDVWKPISPQIEELKALTRHYSNLQEQKTVYNNQIHAIESSHHQDKLVLKDLYELVELMETKLVAIKKQIDVVIEKDPFLKEKFGLVSPIQGVGTLTIATIVAETNGFEFFDNQRQVTSYAGYDVTERQSGKFIGKRAISKQGNSRIRKILHLPAFNVVRFQQQPFTNLFERVYERTNMKMKGYVAVQRKILVLIFSLWKKNEKYNPNKVASMNEATLDEVQELLLQE

SEQ ID NO: 194538 - protein, 351 aa, unidentified
MIIIGVDYHPSDQYIAFVDTETGECGERQLNHSDREAEKFYRELAARGVSVRVGMEATGYSRWFERLLAELGIEVWIGDAAEIKTKRVRKQKTDREDARLLLRLLRENNFPRIWVPSPENRDLRQLLWHRHRMVQMRTRIMNQLQALAMNEGNRRKKKLWSEAGRAQLEKLPLATWASRRRKDLLELLDRMNPTIEELTRAIEQEAKKWPEVLRLMTHPGVGPLTALAFVLIIGTPERFQCGKQIGSYVGLIPCEDSSAGHQRLGHITKQGSSLLRFLLGEAAQAAVRWDSDWRRRYLHLAMRRQRNIAKVAMARRLAVRMYWMWRNSWEYAEWVKFGSHAGQLGTGHGVK

SEQ ID NO: 194539 - protein, 409 aa, unidentified
MRYYIGVDWADQEHAVWVSDEAGRKVTARGVPHTAQGLSEWGRELDEWRAQGLELWAAIERPEGRVVDCLLDHGVVVYPVNPKALDRARDRFRQSGAKDDRFDARVLAEFLRTDHGHLSVLQPSSVEAQELKRLTEGYHRLIRQQTRLVNQLTATLKAYYPRALEVAELTTALARAFLQRFPTPEALGQLTERQWPRWAKAQHLSAERTQELWGLLQAPQLPVPAHVVRAEARWMQALVKQLAPVVDEAAAYRREIETFFAALPAATWARTLPAGQGGITVPTLWARLGDAPGRWSSFRHLQAQAGMVPITVRSGKQQVVAFRFACDKLFRYAVDQLAFLSLQRSTWARADYDQQRSRRHSHRRALRAVGAKWLKIIFVMWQRQVAYDEQYHLATMARQALQRPDRKIA

SEQ ID NO: 194540 - protein, 341 aa, unidentified
MLIIGCDYHPSMQQIAWVDTETGECGERRLTHCAEAERFYRELKPKGVGVRVGMEATGHCRWFERLLAELGYELWVGDPAQIRAKQVRKQKNDRRDAEHLLKLLQEDTFPRIWVPTPDNRDMRQLVLHRHRLVGMRTRVMNQLQAIAMNEGVRRQRGLWSKKGRAQLESLPLPPWTSRRRQELLELLDRFDPSIDQLRQAIKQEAEQRPEVQRLLTHPGVGPITALAFVLVLGTPNRFGCGKQVASYLGLIPCEDSSAERWRLGHISKQGNALLRYLLGQAALSAARCEEEWHRRYIHLVMHRNHAIAKVAMARKLAVRLFWMWRRGWDYQQLKKFGSHVG

SEQ ID NO: 194541 - protein, 320 aa, unidentified
MTQNDRLVGLDVAKDWLDCHVLPSGEAWRVRNDAAGHVALLERLTALGVRCAVLEASGGYEKAVASALRALGLKVRVVDPKRVRYFAKALGLAKNDRIDAHVIARFGQATADDRDTTILPDARREALGELLGARQDLLEHRTALNQQARWLSADTARMLAGPLAACEQAIAELDGEIAQAIAAHAPFAELARRLDSVPGLGPVAIAALIAWLPELGKLSRRKLAHLVGVAPFDDDSGQRKGVRVIKGGRTKLRNVLYMAAMVAATTACNPTLNAHYKALCAQGKAAKLAIIACLRRLLGMLNAMVARGQDWRPAPVATIA

SEQ ID NO: 194542 - protein, 351 aa, unidentified
MLIIGVDYHPSFQQIAFLDQDTGECGERRLNHSDGEAEKFYRDLQQRGVRVRVGMEATGYSRWFERLLSELSVEVWIGDAAKIKTKRVRKQKTDRQDAQLLLKLLLENNFPRVWAPSPENRDLRQLLWHRHRLVQMRTRIMNQLQALAMNEGTRWKKRLWSEQGRSQLEKIRLAPWASRRRQDLLELLDRMNPTIAELTAAVEQEAKKRPEVLRLMTHPGVGPITALAFVIIIMTPDRFPCGKQIGSYVGLIPCEDSSAGRQRLGHISKQGNALLRFLLVEAAQAAVRYDPDWRRRYLHLAMRRERRIAKVAMARKVAVRLYWMWRNGWEYSQSVEFGSHAGQLATGHGVK

SEQ ID NO: 194543 - protein, 422 aa, unidentified
MDGTQRRCIGLDVHRDFAQVAICQAGQVVQAGTFATTPEGVREFAGGLGPADEVALEATGNTWAIVTVLASRAGRVVVANPGKTRAIAEAKVKTDKVDAAILAQLLAADYLPAVWQPDAAIGALRRQVLRRAHIVRQRTRLKNQVHAILHRNLVPRCPAADLFGIKGRAWLAAQQLPPDERAAAAALLRQLDFHAAELALIDADLGQVALARPEVLRLMTIPGVDATVALSIVAAVGDFTRFRTPQHLVSYLGLNPRVRQSGGQPASHGRITKAGPAHARGMLVEAAWSASKAPGPLRAFYQRVRARRGMQIAVVATARKLAVLCWHLIIKQEDYAFALPSLVAHKQRKLELRAGQPAARGRKGTAARYSLKAVRAAERDLAAQGEAAYRTMVAAWQPARPARKKVTGAAASNRTRLIKPTG

SEQ ID NO: 194544 - protein, 403 aa, unidentified
MNAVGIDVSKGKSMVAIMRPFGEIVSTPFEIKHSSSDISSLAKLIHSIEGESRIVMEHTGRYYEVLAHQLSEANLFVSTINPKLIKDFDNDSLRKVKSDKADAVKIARYALDKWQNLKQYSVMDELRNQLKTMNRQFAFYMKHKTAMKNNLIGILDQTYPGVNTYFDSPARSDGSQKWVDFASTYWHVDCVRKMSLNAFIDHYQKWCKRKKYNFSQAKAEEIYGKAKELVPVLPKDEITKLIIKQAVDQLNNASTTVEELRTLMNDTASKLPEYPIVMEMKGVGPTLGPQLMAEIGDVTRFTHKGALTAFAGVDPGVNESGTYEQKSVPTSKRGSADLRKTLFQVMDVLIKTMPQDDPVYQFLDKKRAQGKPYYVYMTAGANKFLRIYYGRVKEYLSSLPDSE

SEQ ID NO: 194545 - protein, 429 aa, unidentified
MVSYNHGIGSPVVFVAIDISKAQHEVLIEPPDGKRKRLRVANTKPDFDELVTVLQRYRIPCHIAFEATGDYHRPLASVLGQQGFQLHLVSSIATSRTREALYNSWDKNDPKDAQVILHLLKTGGTQIYHDPIVSGYNDLQELANTYQQLSLRKVRLYHSILTHFLPLYFPEAERYMGTSRAEWFIHLLLLTPCPAAVLAHSKARFIKAASRVRGRKVDKVRWLGDFYETAKHSVGLPVPASSEAIRMFRLVLEEYAALCERRYQLEEHIESKLGGHPDFRRLQTIPGIGPVLAMLILAEAGDLRRFNHYRKFLKYCGLDLCTDQSGKFRGTTRLSKRGNARLRYAFWMAGTGAIRVRQNSFREKFDNYVRSDPQSADLKRKAYTAVAAKVARVAFGLIKTGTDYRRFPEATIPSGRIPSLGAVEALSTS

SEQ ID NO: 194546 - protein, 343 aa, unidentified
MEHYAGIDVSLEQSSVCIVDGTGKIVAEAKVTSEPEALIGWLRAQPFTLSRIGLEAGPLSQWLFARLEVDGLPAELLETRHVRTAFKTMPVKTDKKDARGIAQLMRLGWFKPVHCKSLAAQETRALLTARKLLQTKRHDVEMSVRGVLRGFGLKVGPTTPRTFEARVRELVDGHPTLVMVADALLAARAELQQQFKDLEKRIVAIGRADERVRRLMTVPGVGNLVALTFTTAIDDPARFRSSRQVGAYFGLTPSRYQSGETDVAGRISKIGDHGVRTALYEAANVMLTRPVKGSSLKDWALAVAGRAGPRKAKVALARKLAVILHRMLVDGTTFVPRPTTTAA

SEQ ID NO: 194547 - protein, 363 aa, unidentified
MPSSVDKESSGIAPNRLDRRFDREVTPACGHPSKHTLALGDLRMQTTVTAPLYIGVDVSKDGLLICVHGSSVRRTLANQRSAIEAWLKALPAGSAIGVEATGSYHELLADLAHRKGLTVYVLNPKDVHHYAKGVGMRGKTDGVDATLIARYIAHEHTKLHVYRPPSPEQRQLQRLLTRRAKLSRSRASVQQSLQGIAGFAAPVRQLLERFDALIGLIDARIGALMNACPQRQAAGQRLRTIPGVGPVVAPALLCPLQRFAFAHADSFVAYTGLDPRPDDSGKRQGRRRLSKHGPSELRRLLYNAAMAAVTSRAWKPLYQHHLAKGLERTEALVIIARKIACTAWSIYTHNTTFDPKRITLSLT

SEQ ID NO: 194548 - protein, 338 aa, unidentified
MSLYAAIDLHSSNSVLAVMDGDGKPVLRCRRPNDLSRLLNDLAPYRDELVGVAVESTYNWYWLVDGLMDHGYAVHLVNTTAIPQYDGLKHGDDDSDALHLAQLMRLGLLPEGYIYPREQRGTRDLLRRRFSLVRQAVRLMLSIQSSFSRSTGQQMSANKLRQLSPLQLVDLFPDLSTRYGVLIQFKLWLTLQDQITALERWIRKDLARPDLLVRLQSVPGIGPILGMTILLESGAIERFASVGDYASYCRMVESVRLSNGKRKGHGNRKCGNRYLCWAFMEAANYAVRFDPLIRRWYERKRARKHRVVAIKAVAHKLARACYHMLHEGTTFDLTRAFG

SEQ ID NO: 194549 - protein, 389 aa, unidentified
MLLDHHCDGPTAIRTHIAAIFVSLELSRSSWLVTSLSPGKGEKMSKHSVTAGDVAGLLKLFAEFKRKAEVRTGQSYPIITIQEAGLDGFWLHRVLQQEGIESHVVDPASIATPRRRRRAKTDRLDGETLLRALLAYKRGEPRVCAMVVAPSPEEEDRRRLCRERRTLIEERVTHVNRIKGLLFAQGISDYEPLRRNRRVRLEALRTGDGRELPSHLKAQIGRELDRIELLLEQIRSVEATQEALLAAAKNPAGEKAVSDAVTLLLALKGVGANFAAVLWSEAFYRTFANRRQVAAYAGLAATPWQSGCIRHEQGVSKAGNPRLRTAMIQLAWLWIRHQPQSVLTRWFKEHSQHGRKRAIVALARKLLVALWKYVTQGVIIEGAVMKPAA

SEQ ID NO: 194550 - protein, 387 aa, unidentified
MPQPNDLSRSLVALDQNSTIIAVVELSQSSWLVGGVVPGIERQPRKKLEPSPERLLAVLHRWRDEAVRAGRTITRIALAFEAGRDGFWLARWLDVRGVEAHVIHPSSVAVSREHRRAKTDRLDTELLKRGFLGWLRGERGHCSMARVPTIAEEDAKRPNRERDCLVGERTRIVNRIKSTLARLGIRNFKPTLRKAAERLATVHTPEGMPLPPNTLAELQRDMARLGLVVSQIREIEEARQKQLEQQHETDSHAMVRLLARIVGVGVETADMLVHEVLSRPMRDRRAVARYAGLTGSPDESGARRREQGLARAGNARVRRGMIQLAWRFLMFQKESALTLWYRARTADSRSGTRKTMIVALARKLIIALWHFVTTGEPLEGVVLRPAS

SEQ ID NO: 194551 - protein, 352 aa, unidentified
MKYVGLDWAYRTAQWCALDPGGEIAGEGRFAADRDGLARLVLELGDEVTACLEMMSGALWARDELVACGWQVQVADARKVKTVAPLAAKTDKVDARLLAELSRRQLVPALWLPSLDERALRERLRRRMHLVRLRTSAKGRIFGLQTQWGIRISLRRLRRADGMTLLERAGMPAVWRHSISECLALIDFLDARIVPLDAELRPFAQADPRAVLLDTIPGVAELLALTIAVEIGEISRFAGPEKLVSYGRLAPRVRQSGEGRPHTGPLNKSGSRLLGWAAVEAAQQAWRESNPWHQLYLDVSRRSRNHNSAKAAVARKILIAAWHMLSRNEPFKPAPRTGATSVPASSRLALAA

SEQ ID NO: 194552 - protein, 362 aa, unidentified
MEFFCGLDVGMDETAICVVDGTGKVALEVAVVTDPDAIKTALEPYRGRLRRLGHEAGSLSPWLHPELLKLGLPAVCLETFHVRAALKAQRNKTDRTDALGLAHLMRTGWFRKAYIKSAACYRLRLLLTHRRNLKRKFLDLENAIRHSLKVFGIRLSHVGRGGFAQAVREAVAGDALVSELIDAMLNARAALWKEYCRLHDLVVKLVAGHELCRRFMQIPGVGPVAALSFMTAVDDPSRFKRSRDVAAYFGLTSRRWQSGTSIDVQGRISKAGDGDVRRALYEAASALLTRFKRKDKIKTWGLAIAKRTSHRKATVAVARKLAVIMHAMWVDGTFYCGDPGASRADVSARAATKDRKLLGAHA

SEQ ID NO: 194553 - protein, 344 aa, unidentified
MQHYVGLDVSVKETSVCIVDKAGKVIREVKVATKPAEILAVLTEEALAIERIGLEAGPLSQWLYGALAEAGLPVICVETRHMKAALSAQINKSDRNDARGIAQMMRVGLYRPVHVKTLASQKRRMLLTSRQLLQAKALDIENDLRGTLRNFGLKVGMVGTVKFEARIRELVADHPDLAAIVEPLLIARRVLREQLGVLHRQLLEIVRQDEVCRRLMTTPGVGPVVALTFRATVDVPSRFNNSKAVGAALGLTPRRQQSGEIDRMGGISKCGDAMMREMLFEAALVLMTHSRKWSWLKAWGMKIARHRGMKRAIVAVARRLAVIMHRMWVDGTEFRWSRKEAAAA

SEQ ID NO: 194554 - protein, 421 aa, unidentified
MRLLYSRCAAIDVHKDQVTVAVRTPGEGPGRRQTQVRKFRTFYGVLTDMARWLVSLQVTHVAMEATGIYTMPVYHALIEQGRFEQVLVCNAAHVKNVPGRKTDAVDATWLAELLECGLLRGSFIPEPKIKAVRDITRYRKKIVGARTSETQRLGSVLQDAGIKLDSVASSIATVSGRAMIEALIDGERRGPVLAELARGRMRAKIPDLTLALEGRFDAHHALMCQLHLEHIDHLDEMIARLDAQVEEMMIPFAPRRDLLVTIPGIGPIAAAAILSEIGTNPAEFFASDAHLASWAGLCPGNHESAGKRKHGTPRKGNQHLKPMLVEAAWSAVRTNGRLHARYHRLVLRFGGYRNPAAKKKAIVAIAHTLIVIIWNVLASDSPYTDLGAEFYQRRTEPERETRRLIAKLNALGHTVTIEPAA

SEQ ID NO: 194555 - protein, 428 aa, unidentified
MKKHSFSKLAAITPKTLIIGVDIAKNIHWARFTDYRGIPLGKALKVLNNKEGFENILTRIKGVCKQNDLHKVILGLEPTGHYWKPLAHYLTSHGIKVVLINPYHTKRAKELDDNSPTKNDKKDALTIARLLRDGRFSQLYLPQDIFGELRVLSNTRISIMRRHNAIKNTIRAVLDEYFPELVTVFKYPLKGKACRQILKSCPFPSLILELGRDKVLTQIKKAVKKTIGQKRVEKLLRTARNSVGVTYGIQSANLKLTLLIEELELMEKQLTHLATAMEQALTLTGFKEIILSIPGVGIITAASFLGNTGDPLRFAHPRQISKLAGYNLIEDSSGENKSKTTISKRGRKQLRNVLYQMARTLVAVNAEMKVLYHYLKTRPHNPLKKKQALVVISKKMITIIHSLVKKQTTYQPELVFNQFRLNQLKQVA

SEQ ID NO: 194556 - protein, 359 aa, unidentified
MNTTTVGVDLAKNVFVTCVADGAGRVIETREFNRSGFLAWLSTLPRGTLVGMEACGGAHCWGRTMQSLGLEPRLMAPEFVRPYRKRQAVKNDRADAVAIVAALLAPGMRFIPVKTEAQQQRLAWHSLRLGWIEERTALLNRIRGLLAEFGMVVDTGAMRLRRKLAEHEFDTAQPAPIRQLIQGVRDQLDALDARIAECDRQIATQQADDAAARRVRDLPGVGLLTADAVVASVGDATMFHNGRQFAAWLGLTPSQYSSGGKPKLGRITRRGDDYLRTLLVQGARSVLAAALRKARNTREALTRLQQWIVTLHARVGYHKTLVAIANKHARQLWAVLAKGETYNPEAWRQRPDSATEPAR

SEQ ID NO: 194557 - protein, 360 aa, unidentified
MDHLQSKSEIYIGMDLHKKTSTFVVKEKFGRVLTKQKLNTDREEISNFLSPYQGAKLAVEPVSQWYVYADLIQNLGIDVHLAHPMKVKAIAFAKVKTDSIDAGVLCDLLRSDLLPEAYFSPKEVRTWKETARFRTSLVAMQTQTKNKIHSILFKNSVISPHQHPFGTNGRKWLEQLELPEPFAFHLKEYLKLLDDIAIRIDEAEKEVITKVGNHPQAKLLMTIPGIGYISALTIIAEIGDIHRFRSAKKLMGYAGLVPSTYSSGDKVRHGKITRLGSMWLRTILIECAHRQPRYEKSGSVKEFHDRIKERSDTKTAAVATARKLCAVIWRILKDNRPFEKFPPKRDSKKLTVCASSPLTR

SEQ ID NO: 194558 - protein, 449 aa, unidentified
MTVPSKVVSQAEWSIVHPHAAGLDIGLQEIWACVPPTEARPAVRPFSTFTPDLEALADWLQACHIETVAMESTGVYWIPIYDLLEARGMDVYLVNARHLKNVPGRKSDVQDCQWIQRLHSYGLLTASFRPTAEMCVLRTYLRQRRMLIEYRAAHIQHMQKALQQMNVQLTQVLSDITGETGLQIIRALVAGQRDPVRLAQYRDPRCKHSHDEVVRALTGHYQPEHIFTLTQALAAYDFYTTQIQACDEAMEQHYHHCPPAQDDLPPLPPSTKTNTHSKNAPTFDVRAELYRLTGVDLTAIDGLNASTAQEILTEIGTHMEKWPTDKHFCSWLHLAPHNAISGGKVLSSHVLPGVTRAAQAFRLGAQAVSKTDTALGAFYRRLRARLGPERATVATAHKLARLVYHLLKYHEAYNPVTPDVYEQALRQREIATLTRRAKQFGFTLTPQPT

SEQ ID NO: 194559 - protein, 384 aa, unidentified
MTVAISEPPQFTIAVESPRTIFAGVDTHKDTHHAAIVDDHGQPIADREFLAVGSGYRKIIDFVHAYGIVDAVGVEGTGSYGAELVRVVANAGMRVLEVNRANRAERRLRGKSDPLDAHQAAMSPLAGRGLSTPKQRDGDVESMRVLLAERSSAAKTRTASINAIHALLVSAPDAIRQDFRRYDGNKLAIALSRTRPTPGTTPALIVRASAKRLALRHQALRADIALIDSQLGQLASRQNPALIAASGVGPFVAAHLLATAGDNPEHISTKAPFAALCGVALIPASSRKRHRFRLACGGDRQANAALHRVVLLRKRHKEPRTMAYIARRTAEGLSDRDIVHCLKRHVANEIFALLTQKSRCSSASSSPTQPNSSTSPTSAYANSK

SEQ ID NO: 194560 - protein, 364 aa, unidentified
MKIIGCDFHPSFQQIAMVDTETGETIELKLPHSTGEAKRFYESLSGPVLVGVESTGNMRWFQRLLARLGFQLLIGDATAITASNPRKQQTDKRDAQHILKLLLEDRFPAIWVPSMEELDLRQLLKHRHTLVQIRTRVKNQLQHIAMNEGFQKKRKLWTEAGMEFLLNLELPLWTKRRRDDLLKILEELNGHIGELSQAVEAEAEKLRLVRLLMTHPGVGPILALATVLTLGDVQRFRNGNHVSSYVGLIPREASSGSRRWLGAISKQGNSFMRFLLVQAGITAARKDAELGRFYKRLAHKKHHGVAKVAVARKLLVRLYWMLRTNTEYPELVVRMQGSSSHPVAQKAKAERLSERPASRSQKQQ

SEQ ID NO: 194561 - protein, 345 aa, unidentified
MEIRTIGIDLGKTVFHFVGVNARGQVVVRKKGSRTQLLRFTANLPQCLIGMEACGGSHFLGRALREQGHDVRLMPAQYVKPYVKTNKNDYIDAEACSEAVTRPTMRFVPIKSDDQLDLQSLHRVRERWVVRRTAVINQIRGMLLERGITIRKGRHHIEESLPGILEDPDNKLSGALRVLLTQLRLEMQYLHGQIEETDKLVARICGELEQCRRLVAIPGIGPITATATVAAIGNGAAFKKGRGFSAWLGVVPGEHSTGGKQKLTGTSRRGNKYLRKLFVQGAHTVLLQKTKQSSGLSTWLVNLTSRKRKQVATVALANKMARMAWAVLFKGEAYRPPTVPQVIAA

SEQ ID NO: 194562 - protein, 325 aa, unidentified
MDVLGIDVAKATLVVVLLVGERQQRAEFANTSAGHTKLLRWLAKRGAAPVHACLEATGTDGDDLAQALYDAGHTVSVVNPARIAAYAKVQAARHKTDQADAALIARYCQREQPAAWTPPPPELRELRALVRHLDTLQQQRQAEQNRLGAGGHPSVVTQAIQAHLTFLSEQIATVEQQIAAHFDQHSDLKRQRELLDSIKGIAVRTATRLLAELGDWKQFTNARAVVAYAGLNPRQYRSGSSVQRRTRLSKSGNAAVRAALYFPAIVAKQHNPLVQALCARLTARGLCPKAVIGAAMRKLLQIAYGVLKSGQPCDPNYAQAVTAQG

SEQ ID NO: 194563 - protein, 398 aa, unidentified
MTESSDYESVQVFIGVDVGKDTHHAVAINRSGKRLFDKALPNDENKLRSLISDLKQHGQILLVVDQPATIGALPVAVARSEGVLVGYLPGLAMRHIADLHAGEAKTDARDAAIIAEAARTLPHALRTLKLADEQIAELSMLCGFDDDLAAQTTQASNRIRGLLTQIHPALERVLGPRLDHPAVLDLLQRYPSPEKLASLGEKKLVAQLCKLAPRLGKRLAADIAQALAEQTVVVPGTNAAAVVLPRLALQLITLRKQRDEVALEVEQRVLAHPLYPVLTSMPGVGVRTAARLLTEVACRAFASAAHLAAYAGLAPVTRRSGSSIRGEHPSRRGNKALKRALFLSAFAALRDPLSRAYYTRKMSQGKRHNQALIALARRRCDVLFAMMRDGTFYTPQAS

SEQ ID NO: 194564 - protein, 341 aa, unidentified
MGEVTTIGLDLAKHVFQVHGVDAKGATVLRKQLRRAQVLAFFSRLPPCLVGLEACATAHYWARELRALSHEVRLMPAQYVKAYIRRNKNDAADAEAICEAVGRPTMRFVPVKTADQQATQLLHRGREQLVRQRTMLVNALRAHLAEFGMVAAQGLRNVGELIAIIRDDGDRRLPAVARQVLQVLANQIEQIEAAIAALERQLLAWHKSNPVSQRLASIPGIGPIIATAIASTVADPNVFRSGREFAAWLGLVPRQNSTGGKIRLGGITKRGNRYLRRLLINGASANLLRSRATKADPWVIGLRRRRPPLVVAVALANKTARIAWAVMLRQNEYQPRAVAAQ

SEQ ID NO: 194565 - protein, 381 aa, unidentified
MTTAVTHKTNVHTTEATLFVAFELSEKIWKLGFTMGHGQKPRERNVTARHQERVLDEISLAKHRLGLPETAPVVSCYEAGREGFWLHRFFLAHGITNHVVDSSAIEVSRRQRRAKSDGLDVRKLLSMLIRYEQGEHQVWQVVKVPSVEAEDQRHLHRDLETLKRERASTTTRIQGLLSSQGIQVSTLAKLPEQLDTLRLWDGTPIPPGLRRRVLRVYAHHTFLTEQIAAIEAERRAQLQTSSDASIDQIRQLMMLKGIGINGSWLLVREFFGWRAFKNRREVGGLAGLTPTPYQSGESAREQGITKSGNPHVRWMITELAWSWLRFQPESALSVWFRARFGDGGKRLRRIGIVAVSRKLLIALWRFLETGVLPEGAVLKEG

SEQ ID NO: 194566 - protein, 339 aa, unidentified
MKYIPVGVDIAKHLMQVHFIDETTGEIVDKQIKREKFLEYFSNREPCLIGMEACGGSQHWARELQKLGHKVRLLKGRFVKAFVMGNKNDVMDARAIWMAVQQPVKSIAVKTKEQQTILTLHRMRQQLVKFRTAQINALHGILLEFGETIHKGRAALSREAPEALERLKKDLPPYLITLLNEQYQRVTDLDLQIDNIDKQLSAVARQNEICKRLLDIPGVGPLIATVAVATMGDSSAFKSGREFAAFVGLVPKQTGSGGKVHLLGISKRGDTYLRTMFIHGARAAALLTKEPSQWITELKSRRPATVAIVAMANKLARIVWAIAAHNRKYDKNYISIRPY

SEQ ID NO: 194567 - protein, 350 aa, unidentified
MIIIGVDFHPEFQQIASVDTDSGEFQEKRLEHREDAEKFYRGVAAAGQKVRVGMEASGHARWFERLLAELQIELWVGDAAVIRTKRVRKQKTDRQDAQLILRLLLEDRFPQIWVPSWENRDLRQLLWHRHRMVQARTRIMNQLQAVALNEGLRCKKRLWRERGRQQLESFLLAPWASRRRRDLLELLDRLNPTIAQLSQAIEQEVEKCPEAQRLRTHPGVGALTALAFVLIIGRAERFGSGKQVASYLGLVPLEESSGNRRRLGHITKQGSSILRFLLVEAAQVTVRSLPEWRSKYFHLAMRRGRKIAKVAMARKLAVRLYWMMRQGWDYEQLKKFGSHAGQPGHRDGVQ

SEQ ID NO: 194568 - protein, 343 aa, unidentified
MDHFAGLDVSVKETSICIVDDTGRIVREVKVASEPEALLQVLGNPIYRFKRIGLEAGPLSQWLFSALAEAGLPVICVETRHMRAVLQAQINKTDRNDARGMAQMMRAGLYRPVHMKTLRSQKLRMLLTHRKLLQSKAIAIDNDLRGTLRNFGLKVGVVGTVKFEARIKELVENLPDLAVLVEPLLMVRRVLREQFSILHCRLLAIVRDDEVCRRLMTVPGVGPVVALTYRATVDVPARFRNSKAVGAVFGLTPSKYQSGEINRTGAISKCGDEMMRVMLYEAAQIMLVRTAKWSWLKAWAMKIARHRGMKKAIVALARRLAVIMHRIWVDGTEFRWTREVTAA

SEQ ID NO: 194569 - protein, 401 aa, unidentified
MSGLKGHFDCFVGIDISKDKFDTCGITGEEVKLFQVSATMNRKGFDKLKGHLASVSVSSVLIGMESTASYHVNLFSFLVSEGYNVILINPLLISNYVKMQLRKTKTDKKDAFVIAQFLRTNGNTLIQRVTSSLISDLRDLARQRESLVDEMTALKMEIKRLLNITFPELEHMAGIFTKSILKLLQQYPSAFALRDADLGQLSQTLIADSYGHKREAFATELIKVAHASVGSSSPAKEMILKQKIALLLHLEEALQEITDVLIEMSRKLMEEDINIMTSIKGIGDKTAVNFLVEMGCDINQYDRSGKIIAMAGLDPAVYQSGNHEGKGRITKRGNRHLRRAIWLMTTRVIHYSDIFKAYYLKRRKEGLPYKMAVLATAHKLIRVIYAMLKQRTSFCPQANSL

SEQ ID NO: 194570 - protein, 325 aa, unidentified
MFVGLDLHKRYSEFAIMDIFGKVLRQGRIENTLEEMTTFSESIPAHSSIAIESSSTWYWAHRLLSGRHKVILSNPVKNKAIASAKVKTDKIDSLMLATLLRGGFVAESYVPSRETMELRELVRYRANLVRQRTRMKNQVHAHLLMNNISIEAGPFTKGFVEEVRKIDDARVQGYLRLIDGLNREIREASVAIRQKAGSNEEANLLMTIPGISFYSALLIVSEIGEISRFEDSSSLVAYAGLAPSTHSSGEKTYHGPIMKSGSRYLRWIAGQCTRVHMRAEPDGTVAIFYARLARKKGDQKAIVAASAKLLKVVYWVLKERRAYHS

SEQ ID NO: 194571 - protein, 407 aa, unidentified
MFAGIDWASEEHAVCVHDAAGRKMASFAVAHSGDGFDDLARRLARFGEPSELPVAIERPDGRLVDRLLEAGHPVVPVSPNAIKAWREAEVTSGAKSDAGDAETICEYLRLRFHRLRALRPYSDHTRGLRALVRARTDLVTQRVAANNQLEATLDAFWPGAKAVFADVTSKIALAFLERYPTPASAASLGEKRMAAFCSKHGYSGRRSPAELIQRLRGAPAGIADGAESSARKEVVLASVRVLRGLNQAIADLDRAVTARLGEHPDAAVFTSLPRSGQINAAQMLAEWGDCREAYESPDSVAALAGVSPVTKKSGKYRSVEFRWACNKRFRNAITTFADNSRHASPWAAGVYQAAVQRGHDHPHAVRILARAWIRVIFRCWHDRVPYDPALHGSLKRREAAQTEELAA

SEQ ID NO: 194572 - protein, 389 aa, unidentified
MIVIGVDTHKRTHALAAVDDGTGRVRGSREIKAEEPGHLAAVRWARALDEQRVWAIEDCRHVSGRLEQALLTAGERVVRVPPKMMGASRRGERERGKSDEIDALAVARAVVKDGVDRFPTAYLDEQAMEIRLLFDHREDLVKERTRMQNRLRWHLLELCPELEAKLPRGSLSDLRQLDRLDRRLRRIGSRARARVAREEIQHIRSLTRQANALESELLELIRAYRPRLLAEQGCGTLTAALLIGRTAGAERFRSDACFGRQSGTAPIPCSSGQRTKHRLDRGGDRQLNRALHTIAITRAQHDPATKEYLARKQAEGKTNKGALRCLKRYLARRFWRLLTEPPVEPEQATPAEHAAEPAEPEQTTIRQRAAPRREVDHTVTGPVPITCIT

SEQ ID NO: 194573 - protein, 409 aa, unidentified
MRLFVGLDVSSFDIKACILNGEGKKLDSFSVNNDLPGATALKERVLQCIANQEIETFKIGLESTSVYSFHPSMFLHYDEDLQRFGAKVFLMNPKQIANFKKSYSDMDKTDEIDAFVIADYLRFGRNQMSIVKESQYVALQQLTRSRYQLVRMLTKEKQHFLQHLSYKCNTFSQEVDSSIFGNAMMELFLEKFSLEELADMPLEELAEFLQTKGKNRFGDPKCIASTIQKAVRSSYRLDKVVEDSIDVLLGTSIAVIRTYQQQIKELEKSIKRIMAGLTQTLESIPGIGPVFAAGIIAEIGQIERFDDETKVAKYAGLYWRTHQSGRFTAENTSLSRNGNHYLRYYLVEAANSVRRHVSDYQEYYVKKYNEVPKHQHKRALVLTARKLVRLVDALLRSHQLFTPERCVKV

SEQ ID NO: 194574 - protein, 428 aa, unidentified
MSYRIAGIDVHKKMLAVVVSDVEIESEYQFERRMFSSNPEQLRSLAAWLVEQKAEEIVMESTAQYWKPVWETLERYWKPLCEKREGARRRSGTLHLAQALSNRGRRGRKRDFVDAERLVKRLVARELTLSFVPDTEQRLWRTVTRKKYQLRRDVVRLNNRLESLLEEAHIKLSSLVSDLLGVSARRMLKALADGETNPAALAALAHERLRAAPEQLCDALGACTELKPVYRRLLKMTLEHLQILEQQIGQLDQELATLLHPHQDAVERLAEVPGFAVDSAQQIIAEVGPAAATFPSEKCLSSWVGACPGEEESAGVNYSHRSPKGNRHMRRLLNQTANAAVKAKGSIFEIIYRRCVPRLGHNQAIGVIAHRQCRLIWLILHQGTRYEERGPAVTKRSRYQRTWRMIRQLRNLGYRIELPNPQASQAPA

SEQ ID NO: 194575 - protein, 400 aa, unidentified
MISVGIDVSKGKSTVCILKPYGEIMCSPFEMLHGEKELNALDDLLNKLDGEIRIVMEATGIYHLPILTFFHEKGYFVSVINPFAMKKYAKDSSIRGAKTDKLDSIMIANYGIEKWFKLQRYKGDEEIYAELKLLGRRYRHYMELHVKALQELTHILDYVMPGIKKMFNSWNEANGKDKLSDFVEQFWHFDLITAMSLEKFTEEYLDWAKEKKYHRSRSKAEAVYELASNGISTLSSGTPSTKMLVQEAISVLRTVDSSLFLILTRMQELAKTLPEYSTVREMGGVGDVLAVKLIAEIGDIRRLHSAKALIAWAGIDPPPYESGQFIGSKRKITKRGSSTLRKVGYEVMRVLKSHPAPKDDAVYNYILKKESEGKSKKHAKIAGLNKFLRIYYARVMAIYQ

SEQ ID NO: 194576 - protein, 348 aa, unidentified
MVLIGCDFHPSWQQVSWLNQETGETGDRELVHAPGEVEKFYRQFAAGTIIGMEATGNCQWFVDVVTGLGHEVWIGDAAKIRACDTRQQKHDKRDARLLLQLLAERRFPRIWTPSRAQRDLRQLLIHRHKLVRIRVQVQNGLQHLAMNQGLLKKHKLWSKAGQQALRELPLAPWASRRREDLLKLKNELDEKIRLLDQAAEEAAAQNEQARLLMTQPGVGPITSLAFVLTIGDASRFPRGKQVASYLGLIPREHSSGGHQKCRSISKQGNIFLRMLLVEAAQSVVRCDPEFRNEYLHRCYGMKKGIAKVAAARKLAVRLYWMLRSNTAYPEIVRIESSSRVPLVVRHGG

SEQ ID NO: 194577 - protein, 315 aa, unidentified
MLYDGIKGRIKTRNIQNNRHSVENILRWLRLQHCSPEDVHVVMEATGVYHERLATELHDAGFRVSLANPHRSREFARGMGIMTKTDKVDAYMLACYAFLKKPHRWEPPAPEIRYLGALLRRRDVLLGDALREENRLEKYLSTDTPADIISSCRRMAQLLREEVSNIERQIKAHIKASPALRRDYTLLTSIKSVGPQLGMHMLVVLRSHNFVSAEQAAAFLGVVPIEKRSGTSVRSRPRMSKIGPPQLRAKLYMSALCGKIYNKRMRNIYDEMCLRGKPKMVAIGALMRKLVHWCYGVLKTGTVFNDEDLKPVLST

SEQ ID NO: 194578 - protein, 413 aa, unidentified
MEQVVERPAALDVHKAQVTAWVRVPDGRGGREDLRARYSTMAADLLALRDWLKELGVTHVAMESSGVYWKPVYYVLEDDFELLLVNAQHVKNLPGRKTDMKDAEWLCQLLECGLLRGSFVPPREFRELRDLTRYRKSLISERGRQANRLHKVLEDAGVKLACVATDVLGMSGRAMLEALVSGTRDPEVLAELARGKLRKKIPALQQALAGRFCGHHALMVGHILAHLDFLEEQIASLTGEIEERIVPFAQKAERLDEIPGVGALTLQAIIAELGIDMSRFATHRHAASWAKLCPGNHESAGKRRSGRTGKGNRHLRAALIEAAQGAARTKNTYLRAQYEQIKRRHGHNKAIVAVAHSILVAAYYMLRDDVGYHDLGGDYFTRRADPERMTRRLIAQLERLGHKVTLQALPQAA

SEQ ID NO: 194579 - protein, 310 aa, unidentified
MDSIYVGIDVSKDRLDVHVLPSGQAFAVARDGKGLSELIEQLGSVRPQLIAVEATGGFETIVAAAIAGAHLPLAVVNPAQVRHFAQAVGKRAKTDPIDAAVIARFAEAVKPEPRELPNEAARLLSELVGRRAQVIEMLVAERQRERRASAVRVRKSLARHIAALEKELPEIDRDIDTMVRGSPVWRETEDLLISFPGVANTIARSVMADVPELGRLTRREIASLVGVAPFTRQSGRWKGKSMIAGGRPFARSAIFMAALSASRCNPVLREFYNRLLARGKPKMVALIAVARKLLTILNAMIRDKKQWQPA

SEQ ID NO: 194580 - protein, 522 aa, unidentified
MSQIASGMSFPAIKGQQANDEYYIVMCPLKRLKRIFSFDEGQLPVDKRAQRIINEERIPDIANYILDNRDNYVFSALTACIDGLSEFVAIGDSKHEQKIGTLIIDEDAELYITDGQHRNAAIQEALKQDPTLGNETISIVFFASKSLEERQKIFKDLNLYPVSSQIRHPSAMIEFELTIKREKTKMKITTIGLDIAKRVFHVVCCNKEGRLLKKKMLKRAEVLAFFHSHPQCLVAIESCATSSYWAREIQGCGHEVKLVPPQHVKAFLVGNKNDYNDALAIAIAARQPHIRSAGIKSVEQQDNQAQHKARALAVGQRTALCNQIRGLVAEYGICIPQGVHTLRKHISIWLQDGNQQLSIQFKALLLQLNEQLHTLDSSIDVYDKAIMQYAKNNAICQRLLSVPGIGPMISSAYFNEVGNGRAYRKGRDVSASLGLVPKQHSSGGKDVLLGISKKGNRYLRCLLVQGAKAVVSRAKSKDDKLSLWINHLVCTRGHNRACVAYANKMARMAWAITVSGEEYSPV

SEQ ID NO: 194581 - protein, 423 aa, unidentified
MEVLYPKCAGLDVHKDSVVACVRLASEQEVVRHLATFGTTTSALLDLGEWLSSYGVTHVAMEATGVYWKPVWHALSGSALPAELTEGEVREDAFHLVLVNAMHIKKVPGRKTDVSDAQWIAELIAHGLVHGSFVPPTPVQDLRALTRTRKQIVRERAQHVQRIQKTLEDANIKLSSVVTDITGKSARAILEAISKGETNPEKLATLVTTRIHASHQAVLEALRGNIRKPHQFLLRLHLDQIVALERAIDSIDTEVGERLEPFRKAAKILTTMPGVGDVVAQAILSEIGPDMQRFPAAAHLVSWAAMCPGQAESAGKHRSRRTRKGPVWLKTMLVQAAWSAIKPKATYLNALFHRVKRKGGAQKAIVAVASSMLRAMYYMLRNGVPYRDLGPQHFTTVDRDKTAKRLLKQLAQLGVEVELKQVA

SEQ ID NO: 194582 - protein, 352 aa, unidentified
MTTDGKPDEETEMPLYGGIDLHANNSVIVLLNEQDQVLYQKRLPNHLPTILEPLSRHQREIEGVVVESTYNWYWLVDGLMEVGYRVHLANPAAIQQYSGLKYTDDHSDARWLAHLLRLGVLPEGYIYPKGERAVRDLLRKRAHLVRQHTANVLSVQNIMARNTGARFSVKRMQALTQQALTTLLAEEAQVLAVTSSLVVLDCLRQQIKTLEKTIHTGLHHTPAYEQLLTVPGSGTILAQTIKLETGAISRFPTVGHYASYCRCVDSTKISNGKRKGTGNVKNGNPYLAWAYMEAAQFALRFQPAAQRFYQRKLAQSRNNTILARKAVAHKLARACYYIMRDLVPFEAAKAFG

SEQ ID NO: 194583 - protein, 309 aa, unidentified
MAATEVFVGIDVSRDSLEIATRPTGDCWHVGNDPAGISALVARLATGGLEVAVLAALGSVGLPVVAVNPRQVRNFAKAIGKLAKTDALDAQVLAHFAEAVRPAVRPLPDAATRELSALVTRRRQLVEMLTAEENRRKTAASAIRVDIQEHIAWLRKRLHGVDRELGQAIRSSSLWREQEDVLRSVPGIGPVVSATLLADLPELGTLGRKQIAALVGLAPLNRDSGTLRGKRTIWGGRATVRAALYMGALVGSRCNPVLYAMYTRLVAAGKTKKLALTACMHKLLTILNAMLKHRTPWARPTAASAHTTS

SEQ ID NO: 194584 - protein, 416 aa, unidentified
MEYPPETLPAVPPGGVTCGIDWANDDHAVCVVDLAGTVVQRFTAQHTGEGLAGLVRRLRRAAVGEAAIERPDGTVVDTLLEAGFTVVVISPNQLKNLRGRYRSAGKDDRFDAFVLADTLRTDRARLRPLLPDSPATVTLRQACRARKDLVRHRVAVCNQLRAHLKGAFPGAVGLFCDLDSPISLAFLARFDCQDRAGWLSPRRLAAWLKGQGYCGRKDPAVLHARLAAAPRGATGDDGAAKAHITRALLAVLTSLVTQIKALDAQIAEQLALHADAPIFTSLPRSGTIRAARLLAEIGDCRARFPTPEALICLAGVAPSTRQSGKVTHVGFRWAADKQLRDAVCDFAGDSRHASPWAGRLYDDAIARGKDHPHATRILARAWLYVIWHCWQHRTAYDPARHKALQRILAEQKPAAA

SEQ ID NO: 194585 - protein, 425 aa, unidentified
MNVDSTDEPRFAAYVAIDWGDSKHVWSLQPADSDRRERGEIEHSPEAVAAWAAMLSARFGGQPVALAVEQSRGPLVFMLGKYEQLHVYPIHPRAAAQFRAALFPSGAKDDPSDAELLLDLLVHHRARLRRLKPDTEQTRLVQHLVEGRRKLVNERTRQTNRLTAQLKLYFPQVLDWFDAVDSPLVGALLKRWPTLEALQKARADTVRSFFTAHNCRSQELIERRLDQIRQAVPAVRDKALIEAAQAMTKVLVELIATLREGIASFDRQIAQAVAAHPDFAIFDSFPGAGPALAPRLLAAFGSQRERYQSAADLQTFSGIAPVTERSGKSQWVHVRWACPRFLRQTFHEWAAHSIGFCDWARAYYQQQRGRGNDHHAAVRALAFKWIRIAFRCWKHAVPYDDARYMQSLRRRGSPLIAALAKPELP

SEQ ID NO: 194586 - protein, 357 aa, unidentified
MLALGDSALRKEADVMTFVGCDLHTRMQQVAVLDTGTGEVSERQLAHDGNAIEEFYAALPGPVTIGIESTGYAVWFHTLMQRLGHTVLVGDAAKIRAMVVRKTKTDRRDALHLLDLLRHDRFPAIWVPDPATRDLRALLTHRMRLVRIRTMVKNGLHAIALNYRLARGSKLLRQAGLAQLHALALPPHTAQRRDQSLELLAGLTTQIRALDDAITTAALAHPDGPRLITHPGVGALTALATIVVLGPVARFHDSKHVVSYVGLAPSLNASADKYHLGHITKQGSPLLRFALGQAAAHAARMDADLKRTYFTLVHRRGRPKAKVAVARKLLVRLFIMLRDQIDYDEFQRRGRPAPVSA

SEQ ID NO: 194587 - protein, 403 aa, unidentified
MTGVMIGVDPHKLSATIEVVDHHGHLLGSGRFTTDKTGYTAMRAYVKAWPDHVWAIEGANGAGRPLAQRLVEAGEQVVDVPAKLAARVRLFDTGHNRKTDALDAHSIAMVALRTAGLRVVTPDGDLEALRMLTDRRDELARLRVQTLNRLQRLLTELIPGQRKKDLSALQAKAMLATVRPRDIAGRTRRRMAAEELADLVAVDKKLKKIKAELKAAVAARGSTLMEVHGIGPAGAARILADVGDIARFADRNRFASWTGTAPLDASSGEQIRHRLSRAGNRRMNHVIHIAAIVQLRHDTEGRAYYRRKLAAGKTPLEALRCLKRRLSDVIYRRLLADARTAHTQTGDTGPGGHCGATQESSAVDLPPHIDTSDQPLPGPAGPTLRPVPRTRKTHAARKIAATG

SEQ ID NO: 194588 - protein, 343 aa, unidentified
MAIVILGIDLGKNICSLVGVNEDGAVVLRRRMRRQTVLTFAAKLPSCVVAMEACCGAHHLGRLLTAQGHTVKLMSPEYVRPYVKAQKNDDRDAEGIAEAASRPTMRFVDLKSQEQLDLQSLHRVRSRLVGVRRTLLNQLRAILLERGHIFPQGRRKFEAAIDTLVADPAYEISSRIRQLVIDIRSEWQALDSRIEALNGEFVAIARHDETARRLVTIPGVGVLNATALVAAVGDGAAFRRGRDLGAWLGLVPKQHTTGGKPKLLGISKRGNKYLRMLFIHGARAAMPSLSASQSPLGEWLRGLLARTHRNIAIVALANKLARIAWATLRRSTSFEPRHLAVTG

SEQ ID NO: 194589 - protein, 337 aa, unidentified
MIIIGCDFHPSYQQVAMLDTETGRIEDHKLMHATGEAVRFYRGLPSPALVGIEAVGNDQWFVYLLQKLDHEVWIGDAAQIRASYVRKQKTDRRDAKHILQLLMEGRFPRIWVPDAEMRDHRQLLVHRHKLVQIRTRVKNELQHLMLNQGMQKKQKLWSAEGRASLASLPLEPWTDRRRQDLLNLLSMLDAQLEKLKDAVTQVAGHYPDVHLLMSQPGVGAVTALAFVLTVGDVRRFPRSKQVASYLGLIPREYSSGGKQRMGGISKQGNRLLRFLLVEAANIAVRFDPVFRKEYLHRCHQKHFTVAKVAAARKLAIRMYWILRTQTPYPQVLSSRAA

SEQ ID NO: 194590 - protein, 319 aa, unidentified
MTFLLLFSSEKYVGIDVSKDRLDLAVLGKERVWQAENNCEGISRLVQQMQELQPELIVVEATGGYQRAVVEALFWAGLAVAVVNPARVRQFARACGLLAKTDKLDAQVLAVFGEKVQPRRYESKSAAGKQLSALLVRRRQLDEILKAEQNRLRTISASLRGSVERIIACLKAEKKLLEEQIQQFVADQEAWQEPTQILKSAPGVGKVTIATLLAELPELGKMDRKKIAALVGVAPMNSDSGKKRGYRKTKGGRGDVRSVLYMATLVATRRNPLIQAQYQQLLKRGKLKKVALIACMRKFLTILNAMIRDKQPFRWTASA

SEQ ID NO: 194591 - protein, 314 aa, unidentified
MICGVDVSSISLDAFVGPAGPARSFPNTAEGIAELASFCQQQKVALVAMEASGGYEKQAFALLWTAGLPVALLNPRGVRDFAKAMGLLEKTDAIDARVIAWFAAVKGSAPTHPASAEQQELKALVTRLRQLTELRAAQQNQRRLVSETTVLESIAELLQLVTAQIRKLEAKIATILASDPLWQKLDQAMRSIKGVADRTVARVLAEMPEIGTLSNKAISKLAGVAPLAQDSGKRDGKRPVRGGRRNVRAILFVVAGVVRRHDPDFAAFHQRLSAAGKPRKLIRIALAHKLLVRLNAKARDTRKAFAGAIVHESA

SEQ ID NO: 194592 - protein, 371 aa, unidentified
MRKFIRVKRGEVDREAGRKVATVGLDLGDRFSQFCAIGVDGEIVQEGRLPTTAAGLQGYFGPMGSVTVAIETGTHSPWVSRVLSSLGHKVLVANSRKLRLIYENRRKRDQVDARYLAKLARLDPELLFPVHHRSELAQKDLAVLRSRETLVSARTQMVNHVRGSVKSMGSRLPKCSTRSFHKQAGERMPEALKETLSPILETIAVVTEQIRRFDRRIEVLAREVYPEAQRLMQVKGGGALTALAFILSLGDPGRFGRSRTVGAYLGLVPATDSSGESDPQLRITKHGDVFLRRLLVGSAQYILGVFGEDCDLRRHGLGIAERGGKNARKRAAVAVARKLSVLLHRLWRTGEAYQPLYNTQARQMRGQENVA

SEQ ID NO: 194593 - protein, 332 aa, unidentified
MLSQQEVSPPWWRDAQRRHDSRHTLDLDRWIKTLPQPWTAAMEATVFIGWIYDHLQPHASALKVAHPLMLRAIAAAKKKNDRIDAKKICDCLRCDFLPECYMASTAIRERRRTLRYRNLLVRQMVLMKNKISMLLMEAGVSYNKQRLHKAGYFRELLATNPEINEGLGSLLRVCRETVVRLQRTESALVRSLERDSLLMDRVERLMTIPGVGPITALTWALEVGERKRFSSIKKAVSYCGLCGAEKSSGNTIQRTPLSKQRNKHLQTTLIEAAKMAPRYSPELALLHDRERRKDNANRATLAVARKLVAYLMAVDRGQRNFRVVEASSCVAA

SEQ ID NO: 194594 - protein, 317 aa, unidentified
MDSQTLFVGIDVGKYRVDIALSDEGPVAQFKNDDEGISQILRLLEGRSVGLVVLEASGGYERQILASLLGASVPAVAVNPRQARDFAKALGKLEKTDAIDARTLAQFARSVRPPVRARSPEGLGEVQDWLTRRRQLVEMMVAEKNRAQQAKGGVLKDIRAHIDWLKKRIQENERDLQSLLKGAPEWNAEVELLDDVKGIGRIAALTLLTALPELGRLNRKQIAKLVGVAPLCRDSGTLRGKRTCWGGRADVRACLYMAALVAARFNDSMRAFYRRLVAAGKPKKVALVACMRKLLTILNARLRDHRAALSAPTSVTP

SEQ ID NO: 194595 - protein, 323 aa, unidentified
MNKYNEIFGVDISKDVFDVYGSKSGHNQFKNAASGFMFFLKNLPKKSLVVMEATGYYHYSLAQFLFKQGVLVSVVNPLSVKRFIQMKLAKVKTDKSDAKAICEYGQINQVPLYSALSDVQSECLQLFRLLDSYLKKRTMTKNKLHGEDVLGIPSKHVYRSLKRNRKHLDTEIESIETKLLSLVKQDQQAQLTLLKSIPGLGVKTALFLIVITDGFTKFETAAQLCSYVGITPTIRQSGSSVRGRSRISKVGNKKLRNLLFLCSFSACKHNKSCREIYERIVNKGKSKKLALIAVSNKLLKQAFAIAKSGNPYDETFVSVLMAK

SEQ ID NO: 194596 - protein, 406 aa, unidentified
MEEKGKRYIGLDVHKHYLVALGVDADLNVVFSLRRVELSNLESWMKKNLTKQDEVVLEMTTNTWQLYDELIEYAGSVTVVHPPHVGLITRSQVMTDKIAASILARLLAKGLLAGIWVPPQEVRELRGLVAQRQKMTRLATQAKNRLHAVIQRHHLKPPLGNPFAKTNNGWWQALPLGKLEKMNLQSDLETLQFAEQQEARIEKEMTSIAAEDEKIGRLLQISGFGVITAMTVYAAIGDIGRFPEAKKLVGYAGLGTRVHDSGMTTRTGKITKAGRRDLRVALVEAANVVVGSNPYWKAELARLEPRLGRNRAIVAIARKLLVTVWHVLQGKTDKHAEPKAVAQKMLRFAYSVGKANRAGKTAAQFARERLDGLKMGESLSSIPWGAKKPIPLPPSTLKGRSDVPNR

SEQ ID NO: 194597 - protein, 367 aa, unidentified
MSSVARPAGPVHVGMDTSKNTIMAAVLWPGEESRVTERILNEEPSVRRLLGRLTGKTGGRECLRCCYEAGPGGYDLYRLLDSMGIACDVVAPSLIPKGSGDRVKTDKRDSRRLARLHQAGELTPVRVPSRDEEAVRDLARARTALLEDRKTAQKRLTAILMRHGRTWRGPTYWTRAHRDWIAAQKFAEPALATAVGYYRAALATREAEMAAIEAELLPWVSREPLVGPAARLMCYRGIAELTALTLAAEVVDWRRFPAARAFMGFTGLCPAEASSGDTARRGHITKAGPQPVRTALVESALAYRHPAAIGACCAGGSATRPRTPWPAPGRPSGGCTPGTFTWSATARPRRRPSPRPPASSPGSPGPR

SEQ ID NO: 194598 - protein, 329 aa, unidentified
MEEKSLPRIEPGYVGIDVAKACLDVALLPGEAHQQFANDAAGRAALVVWALERGPHLCVLEATGGYEAAIAADLTAAGLAVAVVNPRQVRAFAQAIGQTAKTDTLDAAVLARYAQTLQPRPRPLPDAKRQELLAVVERRRELVAMRTAELNRLAMLTSPTVATWVRAHIAWLNTQIHEVERTLRAAVKAHPLWRTQERLLCSAPGVGHITAAVLVAELPELGILSRQQIAALVGVAPLNRDSGTLRGRRSIWAGRASVRSTLYMATLTATRCNPLIRAFYLRLCDAGKPRKVALTAGMRKLLTILNAILKQQIPWQTPHETEFAAPLLC

SEQ ID NO: 194599 - protein, 343 aa, unidentified
MKLRVLGIDLGKTVFHLVGLDSTGRVVIRKKCSRTQLLAFTANLEVELIGMESCSGSHFLGRALREQGHQVRLMPAQYVKPYVQTNKSDFLDAEAIAEAVQRPRMRFVPIKTEEQLDLQALHRVRERWVMRRTAVVNQIRSLLLERGLTLPKGRGYVDRQLPRILEDGELRLSGCFRVLLAQLKLELDQLTARIEEMDRVIQKTAKENEACQRLTEIPGVGPVTATALIAAVGNGSTFQKGRNLAAWMGIVPGEYSTGGKQKLLGISKRGNKYLRTLFIQGARSVLQQRHKQAPGLSSWLAQLLARAHQNVVIVALANKLVRMAWAVLCKNERYRAPVLAVTT

SEQ ID NO: 194600 - protein, 368 aa, unidentified
MFTERTSLGLDVHARSIKAAAIDTLTGELIERTMPSDAGEVMALVAGLRAGHGDVKVTYEAGPTGFELARALAEEGIACQVAAPSKLLRPSGERVKTDRRDAILLARLARNDDIVAVRVPTRSQEGARDLVRSRADARGDLMTARHRLSKMLLRRGIVYDGARTWTRIHDAWLRRVRRDHVIGMGPSALAAFDDAYDTVVHTTARRDRLDEAIAGLYHDGELAPTARRLACLRGVSALTAVSLAVEIGDQGRFKGSTIASYLGLVPSEHSSGTSRSQGPITKTGNTHARRLLIEAAWHHAPAYRPSKAIRARWALAPAPVAERADAGNRRLHARYQALTARGKKHAVVATAIARESAGWLWSLATMDA

SEQ ID NO: 194601 - protein, 429 aa, unidentified
MDNSASPALPIAAWVGLDWADQSHAVCLQAGGSSPLERCELPHTPEALQLWVAELRRRFPQGQVAIALEQSRGSLFYALMTYDFLVLYPIPPKALADYRKALYPSGSKDDPADAQLLLEFLRKHRERFRPWVADDVPTREIALLVEHRRQLVDDRTALTNRLQTLLKGYFPQALEWAGDLTAPLAGDFLRQFPRLEEVQKASRLKVRKVYRAHTRRTPEQLEQLLDQIRTARPLTTDPAVIESSALMALAQVDQLRALAAGLERLEEKLKQLFAAHPDHAIFTSFPGAGPALAPRLLAAWGTDRQRYAAAQDMECLSGAAPVTDQSGKKCWVHWRLACPKFLRQTFHEFAGQSILWSPWARAYYQQMRQRGLDHHPAVRSLAFKWIRIIYRCWKDHTLYDETRYQKALERRGSPLAAALRQLSTQEART

SEQ ID NO: 194602 - protein, 420 aa, unidentified
MIAPRHYSCVVGAAEKIKVCLSPGTRVTPVREPIRMDEEVKPTTKNGDKHMKKTDKYVGLDVHQDTTVIAVADCGRVGEVRIYGTIPSDLQALAKVLGKLGGEGVRLHVVYEAGPTGFVVYRRLKQLGINCIVVAPSKTPQPKGVRLKTDRRDALQLARLHRAGELTGINVPDEVDESVRDLTRARADAVHDLTRAKQRLKAFLLRQGYRYPGKANWSEAHQRYLRKLTLALPALRSVLEEQLLAIDQVTERVKRLDELIEVQVPQWRYYPAVQAVMCLRGFQLNAATVIVAELGDVRRFAHPKNVMAFLGLVPKEETTGNTRRLGSITKAGNAQARWCLIEAVQKALTPPKVSARLSLRQEGQPAAYRELAWKIQVRLHKRGWHLLQRGLMKAKVNVALARELAGFLWDLLRQVPAPEA

SEQ ID NO: 194603 - protein, 427 aa, unidentified
MSEKQPIEIRVSVDVGCRNHQVAIGLSSGEVLEEFQIPHRVEGFEDFFSRIEKHHKQRNCPVAVAMEGYNGWARPLDSMVRQRDHRLYNINNLKLARFKEIFPGAAKSDRIDARKGLELFQLSDHLPLAKEVLQEVVGTPQENEVLKRLSRRRRRLVDERVRVVNNLQADLQAVCPGLLEITKDAANQWFLNFLISADSLPKLARLKRTSLLKITSVGVKCAGIIQDWQKRAHFSEEVQWVSEMIQEDARRILELDQTIKALEVKTAEVAQRSKIAKLLRSIPGFGAIGTSELAGEIGTIERFGKEGSLALYLGMATLDNSSGKYQGSKRPKQVNTRAKAAMMTAIDRHRKYVPESQKYYEKKRAQGKAHNQAIRALGRHLCRIIYKMLKEQREYQIRLPKGDTQAKVKSRSSRIGQIRKQQIFAKG

SEQ ID NO: 194604 - protein, 417 aa, unidentified
MSQFFLFFVGIDWGTEKHSVCVLDREGNKVAECQAQHSGTGLQQLIDWLRQQTGMVPDQVAFALEAPAGAVVDTLLEHSYQGFHINPKQVDRFRDRHSVAGVKDDSLDAYVIADSLRTDRHCFHPIQPDDPLIHRLRTLSRLEDDLGQDWSRLTNQLRQQLHRYFPQMLQLSPAADESWMWELLQTAPLPTMAGKLRCSQVQKILTRYRIRRFSAQQVREQLQTPPLPVAPGIAEAASEACLLLILRLHLLAQQIKHVAKCLKSILADLAEDTHRKQHRDVQVLSSLPGVGRIIAATMLVEAAQPLVNRDYHALRAYGGIAPVTRQSGKRRQVIMRYACNQRLWNALYHWARVSLQKDDRSRVHYHRLRQKGHSHGRALRGVADRLLAMLVSMLRSGTAYDPKRRSSNQLAAELLAL

SEQ ID NO: 194605 - protein, 309 aa, unidentified
MKQSIVYIGIDVAKAHLDVAWQEQSRRFANDKCGQAALIKWLKQSAFPVQLICEASGGYEQALVESLEHTDITASVVQANRVRQYARAAGILAKTDKVDARVLAAFGAAMQPKATPPLCPEQKRLRQYEAQRRHLSAVLVAEQNRLAQLSYAELRVLSRSLISKIKKQIATIDARINGLIAQDKQLCQKAQKLTSITGVGARTAALVLAQMPELGQLNRRQAAALGGLAPFNRESGTLRGKRTIFGGRRALRSGLYMAAMVAARRNPILCSFYQRLRAKGKPHKLALTAVMRKLLLVLNQNLKPITSPA

SEQ ID NO: 194606 - protein, 360 aa, unidentified
MAKARTLVGLDVHATKIVAAVLDGETGELEWFTLGGDVGQAAGLCAGLPRPVRAAYEAGPTGYTLARELARRGVDCVVAAPSKIPRAAGDRIKTDRRDAEHLVRLLLAGKLHPVRVPGAEEEALRDLVRARDTVRADLMRCRHRLSKLLLRHGHRFDDGPTWNQRHRDWLAELVLPHAAAQATLSDAIGAIDALVHRRDQLERGIVALLPESAWASQVGRLRCLRGVDTLTAAGLCAEIGDFERFARAEQLMSYVGLVPSEATTGQQRRLGAITKTGSGHARRLLVEAAWHYRKRPAIGKALHERQDGQPAHAVAIAWSAQQRLHRTWTRLEQRAKRRTIIAVAAARELAGFCWAITQIE

SEQ ID NO: 194607 - protein, 350 aa, unidentified
MLIIGCDYHPGFQQIAFVDTDTGELSERRLGHREQGEQFYRELKLRNLAVRVGMESSGHSRWFERLLHELGFELWIGDPAEIRTKRVRKQKTDRQDAQLLLRLLMEGRFPRIWVPDAENRDLRQLLWHRHRLVQMRTRVMNQLHVVPLNEGLRRKKALWRPAGRQELESIVLAPWASRRRRDLLDLLDQLTPMIQELTQALEVEVEKRPVTRLLRTHPGVGPLTAVAFELVIGTPERFYCGKQIASYVGLVPEEKSSGDRRRLGHISKQGNVLLRFLLVEAAQVTVRSQPQWRSKFFHLAMRRGRKIAKVAMARKLAVHLYWMWRQGLDYTQSKKFGSHAGEPGNRDGGN

SEQ ID NO: 194608 - protein, 464 aa, unidentified
MTAGKQLWRNRKEKKEWARRLQSEDPGLEVVHPHAAGIDVGNSTHYVAVRPDRDPEPVRRFECFTADLHRLADWLQSCGVKTVAMQSTGVYWIPLYEILEEHGLKVYLVNARHTKNLPGRKSDVQESQWLLKLHTYGLLNNSFQPVSEIRVLRTYWRQRGEHVRGAATCIQRMQKALTQMNVQLANVISDISGLTGQAIIRAIVAGEHNPLKLAMLSDPRVHASHEEIAKSLEGNWRPELLFVLHQEVDMYDTYQKRIAECDQRLQKHLASFTRPLPIQPPTQKLKPKKPAAKNAPRFDLSSELQRVTGVDLTRIDGIDVMVAQTLLSEVGLDMSRWITESHFASWLGLCPDNRISGDKVLSRGTRRVVNRAATALRQAANTLMRSRSYLGAQYRRLRTKLGAPKAITAMAHRLARLVYRMLKYGQTYVDKGTEYYEERFRQQQIQLLRKRAAKLGLQVAEIHA

SEQ ID NO: 194609 - protein, 412 aa, unidentified
MNQDKLYVGIDVSSKNNVCYLMYSDGSKHSSFSVPNNRNGAKTIVDRVTSVLLSQDIPQVVIGMEATSVYGDNLMRFLRESGSLGQFERSLHMLNPKQVKKFRDAYSDLPKNDHVDSYVIADHLRFGRINKEVYMDDYKYQALKMYTRARHQLVQELTREKQRLLNNIFISFSGLAQEKIFSDKFGATSMALIEEFSSLDELAYMSTDELADFIRKEGKNHFENPEEIAEAVQRAAKNSYHPPQVIADAAKQMLAISMTTIRLLQKQIKEYDKAIEKMLEAFPQTLTSIKGIGNIYAAGIIAEIGDINRFPSQASLAKYAGLVWTQHQSSDFEAEDKRMIQGGNHHLKYYLCEAANALRRCDPEFKRFYALKYKEANKHNHKRALALTARKLVRLVYTLLKTNRLYIPPEEY

SEQ ID NO: 194610 - protein, 334 aa, unidentified
MSSLVCGLDVHKDSVFATVMSYAGEVVERRKLSNSEVVSFLDQYPVDKVAMESSTSIVPVYRALRGRGYKVLVSHPKKTRLIAESRIKTDRVDSWAVTELARLDALPLSYVPPDEIAALREKVRRRAFLVRMRARLKVKIKAHLTMNGITPPVEYGLFTRKGVEWLHSLQSDPVESYLPVLSTLTVQIERLSKELREIAPEDEDVQLLMTIPGVGYYSALLIKSEIGDISRFPDGEKLCSYAGLVPSVSSSGPYRHYGSITKEGSRWLRWIMVESVRIHVKYDTSITRAYHAIAERKGRSIAKVAAARRLLMCCDSVLRNHKPYYDPAGHYQPS

SEQ ID NO: 194611 - protein, 418 aa, unidentified
MKKHNNSRKKREPTSKRAKTRGPMRRDTKEVLAELVGKLKEKLDPKKVSATSTGEEHPRGELRPNLDRLTVGVDLGDQWSHYCILGLEGETLAEGQLRTTQEDIAEFFQALNAARVVFEVGTHSPWVQEVICGCGHEVLVANPRLMEGSKRRKRKNDRIDANKLARLGRVDPQSLHPMQHRSREVRQDLVVLRARDALVAARTELINATRGLVKSMGSRLPQCSSPSFAQKVEETVPVELRDALLPLVRMAATLSDCIQGYDEKIEKLGREKYGHTALLRQVKGVGPITALAYVLTLENPDRFVKSRDVGPYLGLVPKQEDSGESQPQLGISKAGDTMMRRLLVGSAHYILGPFGADTDLRRYGLRLCERGGKNAKKRAAVAVARKLAVLLHCLWVSGEVYEPLRQGMSATIAPAVAA

SEQ ID NO: 194612 - protein, 400 aa, unidentified
MDSNRIVAGLDVHKDTIYLCVLDNTETIIFSNVYGTLTPDLQLMCSDMVSHGVTEAAMESTSTYWVPVWNALCESMSLKLVNPYFIKQLPGRKSDVKDAQWIAECLLKNLIRGSFVPDKTVQDMRKYNRRIFDLNEDLTYNTNKLDAALQRCGFRLSNYVSRVNGKSYQKCVRAIITGITDPEELVKLIHGKTIRKYGCNIIKDAVTGDFHRADICLLKQYAELIGIIERQIEECRNALVAMCQEHFPKQFKRLQSIPGVKERAASAIIAETGADMKPFEKATNLVGWCGLKPRNDISNNKVKSNRTTHGNRFLRQILIEISWVASRTRNCFFSNFSYVQCTQRHKNKMKIQVAIARKILVAVWHMLTKDEDFTDVYLKRLEKETEWQNEIRTLESLLVR

SEQ ID NO: 194613 - protein, 350 aa, unidentified
MDYGAIDLHKRESQVRILTEDGEVIDRRIPTTRDRLTALWWGRPHARILIEASTESEWVAQHLETFGHEVVVADPNFGLMYGHRNRRVKTDRRDVAALAEACRHGIYRPAHRRSTRQRTVQWHLNIRRELVAARTRAISVIRAITRGMGYRIPGGATETFGQRLAALDLPADVTASLSPLRHVMDVLDEELVRADAHFADLVTADPVVKRLTTCPSIGPITAAAFVAALDDVHRFEKRRGAGQVTSYLGLVPREYSSGEQQQRGRVMRSAHPYVQALLVQAAWRMCRSVDPRLAGVRTWAQGIEHRRGKRIATVALARRVARILYAMWRDDADFQPARLRIGVAARRPAA

SEQ ID NO: 194614 - protein, 356 aa, unidentified
MSRGIQYIGMDVHKEAIVIAVLNDGGKLVMESIIETKASSILQFIHGLRGELHVTWEEGTWAAWLYDLLKPHVHQMLVCDPRRNALLKEGNKSDKVDAHKLANLLRTGMLRPVYHGEHGLRTLRELARSYQTISKDLARVMNRVKALYRGWSIPCAGTQVYAPRYRQEWLGKIEHAGVRRRAELLYQQLDGLHALRRTLRPELLAESRKHKAAKLLRQIPCIGPIRAARLLALMQTPHRFRSKRQLWTYSGLGIETHDSAQYCYVNGQLQRSKKPQQIRGLNRNHNHEMKEIFKGAATRASCGVGPLRDFYVALLDKGMKPEMARLTLARKIAAIALTLWKKEERFDGEQLKTQAA

SEQ ID NO: 194615 - protein, 339 aa, unidentified
MNTLTIGVDVSLKTLDVAVAIDSERATTLGRFTNSEAGFKELAAKLEREAQGATIHLIMEPTGGYELPLAQFASERQWLVSLPNPRKVKDWASSQGRRAKTDRQDAQKLACYGKAHALPIWQPLPPAVAELEALLARRKDLEDILQQERNRQQALQAQAAFKGPVATSLEQSIGWLQQAIDAVEAAIQQHVDEHPDLRDQARRLRTVPGIGRRNVLPILVLLHRWGTLTKNQGTTRGLTAFVGLDPQPFESGSSIRKPAMISRQGNPAMRSLLYFSALGGTRGNNPLRHFYHRLVAAGKPKKLALIASARKMLSWAWVIFRDQTVFDPSRTGFLAPTVS

SEQ ID NO: 194616 - protein, 350 aa, unidentified
MARHSKRSSQSSQSSQSSQTSQSYVLGVDIAKASFDVALATAAGKVVDTAQFSNDEGGFRALRKWLEQHKAKQMHACLEATGRYGEALAYYLYAQGSAVSIVNPVRIHAYGQSKLQRNKTDSEDARLIADFCATQKPDRWTPPPAEQRQLHDLTRRLDTLKQMRQQERNRLESAVGGLAPAAHRSLQESIAFLDRQIAQLEAEIADHTGSHPTLQHQADLLDSIPGIGPATAYALLGELPDLANFAEASQLAALAGLTPTIRCSGSSVRSKSTLSKTGNAHLRAILYMPALSAMRYSPAFRSFADRLAANGKSKMAIIGAIMHKLIRVIYAVLKHQKPFDPNHYLADAAS

SEQ ID NO: 194617 - protein, 321 aa, unidentified
MENIALIGIDLGKNSFHIHCQDHRGKAVYRKKFTRPKLIEFLATCPATTIAMEACGGSHFMARKLAELGHFPKLISPQFVRPFVKSNKNDFVDAEAICEAASRPSMRFVQPRTESQQAMRALHRVRESLVQDKVKTTNQMHAFLLEFGISVPRGAAVISRLSTLLEDSSLPLYLSQLLLKLQQHYHYLVEQIKDLESQLKRKLDEDEVGQRLLSIPCVGTLTASTISTEIGDGKQYASSRDFAAATGLVPRQYSTGGRTTLLGISKRGNKKIRTLLVQCARVFIQKLEHQSGKLADWVRELLCRKSNFVVTCALANKLARM

SEQ ID NO: 194618 - protein, 340 aa, unidentified
MSLVLQPLLPFPDGCQGMSPHQQGRGTKMTEHCYGGIDVSKDRLDVMVLPDRKAFSVDNNAAGYSELVKRLRGLSIAAIGIEPSGGYERAVIRALLAADLSVRRINPNKLRQFGRARGVLAKNDRLDARLIAEYVAIMPTRVVQRDPATEQLAEVVTMRRQLCDEHVAVENQTAHLEDAMLRRLNKRRLARLAADILLLDRRMAQIVASNANLTRRYELLTSMQGVGPTLAFTLVALLPELGQMSRKQIAALVGLAPYDFDSGRLKGHRCIYGGRLPVRNVLYMAALSACRYNPALKVFHHRLAATNKKPKVIIVAVMRKMITTLNAMLRDNVAWQPKSA

SEQ ID NO: 194619 - protein, 363 aa, unidentified
MNSVYHTELSSLEETRGQFNGGKADIKLGIDVHQDFYVVVMQVGGSNPKPPQRFHKQAFLLWAAKLKSRSAEVHAVYEACGFGFSLQRQLSQLSIHCYVSCPQKLDEHNKRVKTDSLDAKTLCLRLDRFVRGNREALAMVRVPSEEEERSRAIHRQREQLVKVRKILEAQGRSLMVNHGIEPVKNWWKGNNFAALPLPAWIKELLQNSQPILIALQQKISALTLQLQVAAAFNQPRGLGAMTSVMIDREIGDWHRFNNRRQMASYTGLCPGEYSSGHTRLQSCVTKHGNPRLRAALVELAWRLVRFQPNYSAVRKWKERLAKGTLTTGAARKKAIVALARQLAIDLWRIRTGRLSAEALGLEI

SEQ ID NO: 194620 - protein, 341 aa, unidentified
MNDTTSIVGVDIAKQVFQIHTVDLASGEIVRVQFKRAKFLAWFVNRPPCVIGMEACGGAHHWARELIALGHTVKLLPAQKVRPFAVGNKNDMADAQAIWMAMQQPGVKTVAVKTPAQQAVLAMHRMRTQLVKFRTAQSNALRGLLTEYGEVMPKGRGALNRAIPEVLGRLADQLPTVLIETLREQFARLGEIDTHVLDIERRLLAWLKEERACQTLADIPGVGLLTATAVVATMGDPRAFKSGREFAAWLGLVPRQVGTGGRVKLLGISKRGDTYVRMLLIHGARSVLTHSKAPPAWATPLLQRRPLNVVVVALANKMARTMWALLAHQRTYQPGHESTPV

SEQ ID NO: 194621 - protein, 345 aa, unidentified
MEIRTIGIDLGKTVFHLIGVSARGEVVVRKKCSRTQLLRFTSNLRACLIGMEACGGSHFLGRALREQGHEVRLMPAQYVKPYVKTNKNDYIDAEAIAEAVTRPTMRFVPIKTDDQLDLQSLHRVRERWVVRRTAVINQMRGLLLERGITMRKGRQHLAASLPGILEDADNKLSGALRVLLTQLRQEMQYLDRQIEESDKLIVRIAGELEPCRRLVAIPGIGPLIATATIAAIGNGAAFQKGRGFAAWLGVVPGEHSTGGKQQLTGTSRRGNKYLRKLFIQGAHTVLLQRTKQSSGLSMWLASLVARKRKQVATVALANKMARMAWAVLCKAEAYHPPLLPQPAAV

SEQ ID NO: 194622 - protein, 338 aa, unidentified
MALYCGIDLHSTNCWITIIDEDRKVVQASKFGNDLAAILGFFEPHRTELEGIAVESTFNWYWLVDGLMDAGYRLHLTNTCAIKQYDGLKYTDDRHDACWLAHLLSLGILPEGYIYPKQERAVRDLLRRRAFLVHKRTSFLLSMRGAFECRTGMRINSNDIKKWTPADVEQHIADPLEALGVTCLLEPMATLTEQIKILEKEALKRGNLRAEFRSLKTVWGIGKVLGLTITYEVGDIGRFAKVGNFASYCRLVKSNRLSNGKSKGSGNSKNGNPYLSWAFSEAAHFAVRHHESAKKFVQRKRAKTNGIVAIRALAHKLARASYYVMKDNVDFDPDKMLH

SEQ ID NO: 194623 - protein, 358 aa, unidentified
MKYVGIDVHKKMCQAAILGDDGELLDEIRFPNDADGIEEFSGKLTTFRDEVRAVVEFTGNLWIQIHDRLEEHGYEVALSNPSKTRLIAEAKIKTDKVDARTLAGLLRADMLPTCYVPGEELRSRRELLRHRLNLVKIRTEVKNRIHALLDKHGLRMPGTTPFSKGNVAWLRERSLGFMDDAILRSDLALLETVDVQVGLIEEKIAALAAEDRRVRLLMTMTGVGYFTAMLIVSEVGDVSRFRSDKAFASWMGLAPSVHQSGERTRIGGVSGPGNRRLKWAMVECAHAAVHHDARLGALYERRSRRMGEGRAVVAVAHEMARIVYFMLVRDEPYRGENRGLTERKLKNMSKRALDGLRN

SEQ ID NO: 194624 - protein, 337 aa, unidentified
MNIVFLGIELAKNVFQLCGLSQASKPVYTKRTGRKELLQTLANIPACLIGIEAPTGAFYWQREFEKLGHKVKVISPQYVNPFVRGQKNDGNDAQAIAVALMQPTMQFVPPKSPEQQNIQALHRARQRIVNHRTATVCQIRGLLLDRGIPIGSAVSRARRAIPLILEDAENGLSSRMRRTIAELYDLFNDLGRRIHFFDKEIETVFRQSEACQRIAKIKGIGPKTATAVVAIGKGAEFKNGRHFAAWLGLVPRQHSSGDRQVLMNMTKKGDKHLRTLFIHGARAVVRVATNNSDGHMNQWVNQLKERRGFNKTTVAVANKNARIIWSMLTNETGYQVV

SEQ ID NO: 194625 - protein, 443 aa, unidentified
METVSDRETIFARCAFLDVHKKTVEATVRLLQGQQVQAETRRWGTMTGQIQALAEWLETQGVTHVGMESTGVFWKPIYNILETRFTVVLTNPGHMKQVPGRKSDVRDSQWGAYLLQYGLLRGSFIPARWQRELRDFTRYRAQLEAERTRVANRLHKHLEDANIKLGSVATDILGMSGRAMIKALMEGEQDAAQLADMAQGKLRTKLPELQLALEGKVTPHHRLMLRLLWKELEAVEELMAEVDRQVQEVTRPYTPQIEQMDPVPGVDRRVAEVVLAEVGPNVDPFPSDQHLSSWAGMCPGNEESAGKRRTGRTTKGNRWLRAALVQAAWAASHTKRSYLGAQYRRLAGRRGKKRALVAVGHSILVILYHLLKDSRPYSDLGRDFFDRMNHDRLIRYYSRRLAELSQKVTVEPLPEVIPGEGMVNVHPLAKAKGMTAGGICNDP

SEQ ID NO: 194626 - protein, 317 aa, unidentified
MTESVKVNVGIDVSKDFLDVHVGDVALRRVPNRSSGLSVLKRILSRYTVSLVLLESTGGYENLAVTYLQSLGYDVCVINPRQARDFARSMGRLAKTDKIDAQILCRLADVIDASPERARFVKPLTDERRQRLVSMVRRRRQLCDLMIAERNRRAKTDAYGSESISTVLDFLTDEVARIDRDIAEHVDSCFSDISSLLQTFTGIGPVTASTLLGELPELGKLNRRQITALVGVAPFNRDSGYMRGRRRISGGRSGVRNVLFMAVLSAVRFNPVLKAFFARLVAAGKPKKVALVACMRRMVCILNAMLRDGSRFEVAPG

SEQ ID NO: 194627 - protein, 352 aa, unidentified
MERYVGLDSHARSCTLGVMSAGGRRLKSLVVETNGKALVDAVRGVGGRVHVCLEEGTQSAWLYELLKPHVAEVVVAVAPERKGSKDDQRDAWARANELRTGAIETRVFKGPEHLAGLRNAVRAYGFAVTDVVRAKNRLKSVFLSRGIGTDASVYDAAKRKAWLKQLSSPHRELAEWLGGQLDQLEPLREEAEGLLLAESKKHPIIRKLSTAPGMGPIRTAQVVAIVATPERFRTRRQLWSYSGLGIVTRSSADWVQDRTGKWVRGQHAQTRGLNRKRHPRLKAVFKGAATTVIAQLADDPLHADYERMLTSGIKPTLAKLTLARKIAATVLSMWKHQEVYDPKRHRPTPEQK

SEQ ID NO: 194628 - protein, 365 aa, unidentified
MTKIAYVGIDYHLNSLSIAVMIEGEKDLFQMIHLKNDDRVIRRYMSKISQDFHIKACYEASTNGYSFQRKMTAWGYHCDVIAPSLIPRKPGNHRKNDFRDARDLAQNYAHGMLSLVHLPSEEEESVRSLVRCRYAFKDTVKRVKHQINSFLLGQDHRWKASKWTHQHRTWLRKLKMASPYLQQVLEEHLAHLDYLETRLVHLDEQIEQIAARPVYAPVVQKLRALKGIQTLTAMLLIAEITDFRRFPNPRALMAFLGLIPSEDSSGDKRKDGAITKAGNHRCRTALIEAVQHYGKSSHISPRMKEALSQVDALTATIAVKCLNRLHKRFWALILKGKLRPVAITAIARELVGFIWAIMQPQPSIG

SEQ ID NO: 194629 - protein, 418 aa, unidentified
MNTKNDNFSAYIGLDWADKKHDICVQVKDEESRAFSVISHSPESIHDWVEALHEKVKGNIAVAVELNKGPIVYALQKYSFVTVYPIHGLTLARYRQAMFPSGSKDDPSDAELALDMMLNYPKKITPLKPSSEKTRILALLVEQRRLLVDDKRRHANRIINALKQYYTQPLEWFSHRDTELFCNFLIKFPNLNELKRVRTNTVAKLLNSRGGPTVKKTPERIASIKEAIPLTNDESLIIPYQTFVIALAKQLLVLINNIREYDSQINSIFTSMDDASIFASLPGTGPCLAPRLLAALGEDKSRFSSAQEIQNYAGLSPVTERSGQKSWVHWRWQCSKFVRQSFIEWASKSVGQSYWAGIYYAQQKAKGNSHQSAIRALAYKWVRILFRCWKKGKAYDESKYLKALKEKGSPLLVVEKAC

SEQ ID NO: 194630 - protein, 404 aa, unidentified
MDITPIHRRVIGLDVHQNKITACALIEQADGSVAVEQREFGGFKRDRRALAEWVHGLAPDIVVMESTGIYWKSPYAALEKVGIAAWVVNARHVKNVPGRKTDISDAQWLATLARAGLVRASFIPPADIRHLRLIARQRQKLGGMLAAEKNRLHKVLADAGIRLNVLVSDLHGQSARAMVKALLADEPIHAILDRAGRLRATREDLFEALQPEELSAKHRFVLNEIMAHIEYLEATMARFEQELLDGLAPWQPQMSLLQTVPGIDRMGAAMLLVEIGTDMDSFGSAERLASWVGICPGNNESAGKRKRGRTRKGNAWVRRLLCEFAQAASRTRCALKDKFSALSIRKGHKRSIVALAHKMLRIVYAMLANTTPYQDRTVDYEALMVGRNAPRWLKMLTKHGYLAA

SEQ ID NO: 194631 - protein, 342 aa, unidentified
MTLFQSFVGVDIASASFMACVGTTPWKLTVKPVKFENNEDGFVSFLGWLREHHLSPEYTVVCMEATGVYGEGLAYFLHASSYTVAVEPPLNIQRKFPVNASKTDELDCQYIAEYACRYVDKLSVWKPRAEILEQVKVLLTTRQHFSVQLTGHKNVLHAVNRKKVSSELAKQVHQNMVEQIAKSIKAIDQEIRRLIESDPTFKQTLLLLLSVPGIGLQLAAHLLIAMQETLDPKVLAAFIGICPIQHESGSSVFATPTSRHYGPSVLRKLLYLGACSVRTHKKQFQQYFFRKVAEGKHKKLVLNNIQNKILKIACAVVRSNQPYIPSYVSVNPLVFQKTLTPS

SEQ ID NO: 194632 - protein, 353 aa, unidentified
MDKYIGLDMDCKKTVGYTIVPGQSESSATFGPDVESICRYFRQERKGGYRLHAAFEISGQAGFLYDQLLDAVDSLHVANPTKMTWIYRTAKKNDRIDARKMAVLLSIGELPEVYMPSREVRQWRQTILHRQKIVQKVGQVKNRLRATLKSEGHRKPAHSGGWWKRANRVWMEQLCDECAGVGSLWRLQIQNLLDELNLLETQRDRITRYLDGYLDKQSAAKLLMSIPGVGPRTAEAVLAYTDGIERFSNYKKYCAYFGVTPKLDESGSFRRLGHISKQGPAVVRWLLCESGWKVVRHCPGLRAFYERVMAGQQSRKKIAIIALTRKLLCIMRAMLMTGELFNEKLVFDVLKAA

SEQ ID NO: 194633 - protein, 475 aa, unidentified
MNSTVLPASVQPNIDCNYIGLDVHSDNVVVCVRRNILKVGGELQGKTIKLKKVSICDSQDSLTQLLSEYADGQQHVMTAESTFNWYWLADIAEEHGWNFRLADPCTVSQANIKAANDETDAQYLAERLRMGSLKSTTVLPRALRGARDLTRHRMRVMQEVSEKKIRLSNLYHNHCAHPLHGKQLQDLQFAYEENGIDAVLASGISGNGSELIIADLLAGLHDAQMRLERIEAQVYERLDQIDTYREGRLLLKNSMKGCGDVLSAVIITEIGDISRFRTMGEFVSYCRLAPASKLSNGKSKGQGNAKNGNAYLSWALTELATLMARYNKSIQHYLERKVKKTGLRVIGIRALAAKLARCVYQVLRKKEAFDLLLAFGGSHPQEPSASRAKTEESSQRKTATKSSETKVTGMTRTVVTDKKKIPGKKPALAVTQTQRLKSAVGQKTASVASRLKAPCALTTTKPAYADRGCVKSRRE

SEQ ID NO: 194634 - protein, 355 aa, unidentified
MDSKKYIGMDVHKESISIAVMNGAGKVVMECIIETKAGMILQFIDGLRGDLQVTFEEGTSAAWLYDLLRPHVTKLVVCDPRKNKSMREGNQSDKIDARRLAELLRLDHLTPVYHGEHGLRTLKELVRTYLTVTKDLTRVMSRVKAIYRSWAIPCTGKQVYAQRHRAAWLGKINEPGVHRRAEFYYQQLDALRVVRQEVRKDLLAESKKQKAWKRLCEIPSIGPIRAAVLLGILQTPHRFRTKRPLWNYGGLAIEMHSSADHRRVNGQLQRSRKNVLVRGLNRNCNHDLKNLFKGAAAVASSKSGPFQEFYTALVAKGMRPEMARLTLARKIATIVLIVWKRGVCFDAQHLKPQTA

SEQ ID NO: 194635 - protein, 412 aa, unidentified
MKRIYQRCCGIDVHKATLTACVRVHGAGRKLSQEIRSFGTTGDELLSLHDWLMTHRVSHVAMEATGVYWKPVFYVLEQGFTLLLVNPADVQRMPGRKTDVSDAAWLAQLLENGLLRPSFIPPRAIRELRDLVRYRSELKHDHTRVANRLHKVLQDADLKLSSVMSDILGVSGRQILRQLAAGHSDPAALAELARGSLRAKRPALRQALTGRFSEHHAFLIGQALTELDNLEESMRALAARVEQHLVPFAQQIEQLTTIPGIKRVAAAVILSEIGTDMSCFPDTAHLASWAGMAPGNHESAGKRRRAKARHGNRWLRTILVECGHAAGRTRDTALAAIYRRMIIRAGRKHAAFVTGRHILNIAYHLLTKHDTYRELGPSYFEQRRAEQLKRRCLDQLRNLGFQATLAPLPTAA

SEQ ID NO: 194636 - protein, 340 aa, unidentified
MPIVGGLDLHRKQVTFDVVDTATGVCERGRIAPADRESFRFWLAGFEGQPVDLAVEGCTGWRFVVEECQAAGVHAHLAEPADVAGLKGRRQHAKTDRFDARHLRELLEAGNLPECWIPPQHVLEVRAKVRLYKDLLEERGGWQQRIHATLFHLGAPAQPDLLGPDPDRLVRLAALSPATRQTTVVALRMIDCLDRELITLRAEIVAFGRRQPGCLALQNEYGIGALTSVVIWSEMGDARRFANSRNAVRHTGLDISVYSSDGKRSRGHLTPARAADVALGGCLKLVASPRRRTSPYHAYYEQVARRVGKQRAALSVARKLARRCHHRLRALGDDAFAPVA

SEQ ID NO: 194637 - protein, 376 aa, unidentified
MREKLRFLGLDVHAETIAVAVAEPDGEVRSLGTIANREDSVGKFIKKLGPAEQLRACYEAGPTGFVLYWQLTQLGVECAVVAPSLVPKKAGDRVKTDRRDALKLARSHRSGDLTAVWVPDEDSEALRDLVRQREAAKQDQLRARHRLTKFLLRTGRRPTLGLKAWTERYMAWLEQIRYTQPAQQATLVDCLNEVEHMSARVKRLEEAILEVVKLAPQSMQEVIRGLQALRGVAHISSVTIAAELGNISSRFESARKLMGYCGLFPSEDSSGKRIRRGGITKAGNAHLRRIVVESAWSYRHLPRVGAKLRKRQQGVPAEITEIAWKAQNRLHKRYMKLTMAGKDQRKIMTAVGRELLGFIWAIGIKAEAACQQQLAA

SEQ ID NO: 194638 - protein, 390 aa, unidentified
MANIIYIGLDVHKEKIQACAFLAAYGFGEDRVLANIELGGNYQEIIKFASTLKKKFGKETRFVCGYEAGCLGYSLCRHLQRCDIECHIMAPTTMSKEPGVRIKTDRRDAEMIARCLAYNTYKGVHLLDEEDESVRDYIRMRDDFKQMLKVVKQKILALLLRLGIRCDTCKTPWTQKHLQWLKNVDMGKGLNRETLDEYLKELDHLKDRIDNFDTRIHELCDLERYKENVKKLICFPGIKEHTALSFISEIGDFTRFGKAKNFAAFLGLVPGEQSSGSKVHRTALTKSGNIHLRRLATEAAQAAIRSSPSYKSKALKARQEGAPEEVIAYADRARDRIIRKYKKMIRGEDLLGGHKAHNVVVAAVAREMSCFICGMMNGWYDGADSDKLQT

SEQ ID NO: 194639 - protein, 377 aa, unidentified
MIYVDINIAKLNHFAAAISSDGEILIEPFKFTNDYDGFYLLLSKLAPLDQNSIIIGLESTAHYGDNLVRFLISKDFKVCVLNPIQTSSMRKNNVRKTKTDKVDTFVIAKPLMMQDSLRFMTLDYIELKEFDRFRQKLVKQRTRLKIQLTSYVDQVFPELQYFFKSGLHQNSVYTLLKEAPTPNDIASMHMTHLTHLLQTASHGHFGKDTARGLRILAQKSVGVNDSSLSIQITHTIEQIELLDSQLFHTELEMANLVTCLHSVIMTIPGIGFINGGMILGEIGDIHHFSELKKLLAFTGLDPSVHQSGNFQAQRTRMSKRGSRVLRYALINAAHNVVKNNSTFKAYYDAKRAEGRTTLQCPWTLCWQACQSHLEDAH

SEQ ID NO: 194640 - protein, 411 aa, unidentified
MSEQYRWFVGIDWATQNHEVCIVDCDGGVVDRKTIEHTGAGIAQLVKRLEELTRAEPGLVAVGIEVPRGAIIECLIEHRFAVYSLNPKQMDRFRDRHTVAGSKDDRRDALVLADSLRTDRPLFHRVRLDDPLVMRIRELSRTEQDVQQQQTRLANQLRELLWRYFPQLIKLSPSMDEGWLWDLLELAPTPEKARGLKRSRIEKILRAHRIRRWSGEEIEAALQVQALELAPGSAAATSEHVLLLLPVLRLLQSQHKEIARRMETVLEEMEQQEQESEHRDVTILRSMPGAGRVVAATMLAEASQALAERDYRALRSYTGVAPVTWQSGKRKVVGMRRSCNPRLRNAVYHWSMVSIQHDERSREHYAALRKKGHSHSRALRGVADRLLAVLTAMLRTGSNYDPALRSAASRQ

SEQ ID NO: 194641 - protein, 398 aa, unidentified
MTESSDYESVQVFIGVDVGKDTHHAVAINRSGKRLFDKALPNDENKLRSLISDLKQHGQILLVVDQPAPIGALPGAVARSEGVLVGYLPGLAMRRIADLHAGEAKTDARDAAIIAEAARTLPHALRTLKLADEQIAELSMLCGFDDDLAAQTTQASNRIRGLLTQIHPALERVLGPRLDHPAVLDLLQRYPSPEKLASLGEKKLAAQLCKLAPRLGKRLAADIAQALAEQTVVVPGTNAAAVVLPRLALQLITLRKQRDEVALAVEQRVLAHPLYPVLTSMPGVGVRTAARLLTEVACRAFASVAHLAAYAGLAPVTRRSGSSIRGEHPSRRGNKALKRALFLSAFAALRDPLSRAYYTRKMSQGKRHNQALIALARRRCDVLFAMMRDGTFYTPQAS

SEQ ID NO: 194642 - protein, 328 aa, unidentified
MNEATLPTLGIDISKDSFHLELSCNNKLRHRKFTNRQEGFAELGVWLVKHQAQRVHACLEATGPYSEDLALYLYQHGHRVSVVNPAQIKAFGQSELRRNKDDQPDAGLIRRFCEKQQPAAWTPLPAPVRELQALTRHLENLHETRQQQLNRLEGNKTKGVVKSLRKLVAYLDTEIARTEKQIEDHIDNHPDLKGRCQLLESIPGIGKRTAAKLLAEIDDLSQYKSARQVAAYAGLTPKNNRSGTIRGKTRLSKTGNARVRKALFLPAMTAKRYNPIVRSFCQRLASHGKSKMQIIGAAMRKLIHIVFGVLKSGKTFDPNHELLLNSAP

SEQ ID NO: 194643 - protein, 353 aa, unidentified
MQRPRQGQVIIGVDTHKEIHVAAAVDWQGTLVGEECFPTTRQGYRQLESWARSLGDVLRVGVECSGSYGSGLTRHLAKNGFAVLEVTFPDKTVRRKRGKDDFIDAEMAAEAAFTGARTVTPKSRDGMVEALRMLRKTRSTAVAARRVALQMIRADVISAPEELRDQLRGMTRMQLIRHLVATRPDSTDFRTPLGAAKIALKRLAKRYVDLDDEVSELDDMIDAILADAAPLLVQLKCVGAQSAAQLMVTVGDNPERLRSEASFAMLCGVAPVPVSSGMTYRHRLNRGGDRQANSAIHIIAIGRLRTDERTKEYVAKKMSEGHTKMEAIRCLKRYIAREVYYVIKRQSELVNCS

SEQ ID NO: 194644 - protein, 371 aa, unidentified
MKSILSVGMDVHKNSFSLCAYDGYTGEIVSESTFASDVKLVIKFIETLKSRYENDVEIKCGYEAGCLGYSLYKSLTARGVDCVILAPTTMQVSAKNKMVKNDRMDALNIAKNLASGSYKSVYVPDEEDVEIKEYIRMIHDFKKELKRVKQEICAFVLRHGYQYDGKSKWTIRYMNWIRELEMSEIQRETLNEYIAEMENLNDKINRFMNRIDGMYQSERYHEKVSKLRCFKGIETFAAMTIQVETADFERFPSAKAYASYTGLTTGEHSSGDKNNRIGITKQGNTVIRKTLVECAQSLVKGNVYAKKSQGLKSRQKGMDVNIIAYADKATERLKKKYQKLIERNVPRNKAIVAVARELACFIWGMETGNIH

SEQ ID NO: 194645 - protein, 355 aa, unidentified
MPSKADTAVARTIGIDTGKNTLHMIGLDEKGAIILREKVSRTRIAARFVNLPPCLVGIEAGMASHHVARELVALGHEVKQVPPAYSKPFRQGHKNDFRDAHAVAEAVERPSTRCVPIKTDGQLDLQALHRVRSRLIGNRTAVINQIRGFLLEHGIPVRQGHHFLRKQLPLILATRTDVLSPRMIRIIGDLMADWKYLDERIERVTDEIEALAHADEGCQQLITVPGIGPIISSAMVAAIGNGAAFCKGRDFAAWLGLVPKQMSTGDRTILGRITKRGNRYLRMLFIQGARAVLLRPASWAKHSFGSWLTAATRRLHRNVLTVALANKLARIAWTVLAQGRRYEARVEPRVEPAAA

SEQ ID NO: 194646 - protein, 302 aa, unidentified
MSSVVLSKFQVVMTKDRKIYGIDISKSVFDIYNQDTGHFQLQNDEKGFKTLLKSLSKDALVVMEATGYYHYRLAQFLYKKGVLVSVVNPLSVKRFIQMKLAKVKTDKSDAKSICEYGIFNEVPLYNALTDVQAECLQLFRLLDSYVKKSTATKNKLHGEETLGIPSKTVYRSLKRDLNHLKKEILILEKRLLELVKQDQQEQLTLLQTIPGIGLKTALFLIVVTDGFKKFESAAQLCSYVGITPTIRESGSSVRGRSRISKVGNKKLRNLVFLAAFSAYKYNRSCKALFDRIVAKGKRAELA

SEQ ID NO: 194647 - protein, 401 aa, unidentified
MMSHPVPHGWAGVDVGKGHHWVCLIDEAGRTVWSSKVVNDEGPILEAIGAVLTRAGQVVWAVDVTGTMSGLLLALLAAHGQQVKYAPGRTVNQMATAYRGEAKTDARDAYVIAETARHRGDLQEVEVASALVTELRLLVAHRTDLVGDRVRLVNRLRDVLSGYFPALERAFDYAHSRGPLVLLTGYQAPCAIRSRGATRVQAWLVKRNVRNAVKIATAAVAAAKSQQTVVPGQDVAADIVADLAAQLLAIDTRINDLETRIATTFRDHPQAAIIESLPGMGPILGAELIAAAQNLSGYANAGRLASAGGLVPVPRDSGRRTGNLHRPARYSRKLRRVFYLSAQASMMREGPNRDFYLKKRGEGLKHVQALIALARRRVDVLWALLRDNRVFETAPPVLRTA

SEQ ID NO: 194648 - protein, 375 aa, unidentified
MGDYSEAFVGLDTSKLRNAVAIADVGRGGEVRFFGEIENTQAATAKLVRKLSAKYKRLTFCYEAGPTGYGLYRQIKDLGFECVVVAPSLIPKRPGDKVKTNRRDALSLAKLLRADELTAVWVPDGRHEAMRDLTRARETAMLDLRTKRQHVSAFLLRLGRPYPESRKTWTKAHMSWIASQTLEHPQQRLVLEEMMLAIRQAQERLQRLEQAVAAAVGEWSLAPVVTALMAMRGMDLISAATLLAEIGDLSRFQTPHELMAYLGLVPSEQSTGEDVRRGPITKAGNRRARRMLVECSWSYQHPPRVGQAKQPKVDAAPPAVREIAWKAQCRLYRRYRALIRNGKLKTVAIVAIARELAGFIWAVARAVTTARAAVA

SEQ ID NO: 194649 - protein, 421 aa, unidentified
MLNLGVCRPTHKPAVDQRLRAAPYKKHAAACRRPSPAGRHKILDQRPAHPLAVDVKQTTKSSPLFTNLRSCVVKKIATIGLDRAKNVFQVHAADADGSTVFNRKIKRADLLEFFAKLPPCLVGLEACSTAHHWARRIAEFGHEVRLIHPAYVKPFVKRGKSDFNDAEAINEALTRKTMRFVPVKSAEQQASAMIFRARTLAIRQRTQAINALRSHLAELGVATAQGTTGLKALIAIANDEHDGRIPASARFALQQILKQIEFLGEYIARLDREILARTKNDADIKRLMTIPGVGPIIAVAITALAPDLSGFKSARHFAAWIGLTPKSHSSGESQALGNISRMGNSHLRTLLVTGAMSVIRSAKTAERVSPWLAKLRKRRPFKVAAVALANKTARIVWALLDKGRQLHQAWRHRRRWDDGVS

SEQ ID NO: 194650 - protein, 419 aa, unidentified
MANLKPTEQNTVLVAIDISKHRHEVLIAIPGKKRNRRFTLTNSLEDFDRLIAFLKNLDASVRVGFEATGNYHRALFFALGKAGFELKLVSSVAMARTREALHNSWDKNDPKDAQVILHMLQIGVVQVFCDPLVSGNNDIQELSKTHDIVSRSKTELWHRILTHYLPLYFPEADRFHRSSRSDWFFAFLEMFPSPYLISTLPKSMFLEQAWDVVGRKVNKKALLSDIYETAVHSVGLPVEPDSEALGMFRLVLAQGRDLIRQRNLIEAHAIELLAHRSDYQLLTSIPGIGPINALTILAEAGNIQRFVHHRQFLKFCGMDLATIQSGTFKGQSKISKYGNARLRRTLWMAGQTAVLQRANSFRDKFERYISKDRHNPHLRRKAYTAVAAKMARTVHAVIHSGELYRPFYEGASPGGRTSL

SEQ ID NO: 194651 - protein, 330 aa, unidentified
MKQYKYFFGVDISKKTIDVTLAKDGQLIHRQFSNDSKGMDELMQWLKELDVSFADALFCMEATGLYCFPLTQFLAGNAIDIWIEHAAQIKKASSLDRGKNDKIDSKRIVMYAAKNLDRLRLWKPMSSTLEKLKQLAGLRERLVETKKRLITPIKEFEEIGNAAMAKLLAKTIKNSLSAIDKDLKNVETRIIDIVNEDENLKQLYKLITSVVGIGFVTAINLMIYTKGFTILKDTRKLACYCGVAPFEYSSGSSVRGKTKVHFMANKKLKCNLHMASLSAVKLDADLKAYYERKVAEGKNKMSVLNAVKNKLLARVIAVVNKQEEYVRKAV

SEQ ID NO: 194652 - protein, 389 aa, unidentified
MLLDHPSDGLAAIRTHIGAIFVSLELSRKNWLVTSLSPGKGEKMSRHSVTAGDVAGLLALFAELGRKAEAGTGQSYPIITIQEAGLDGFWLHRVLQQNGIESQVVDPASIAVPRRRKRAKTDKIDGETLLRTLLAYKRGEPRVCAMVVAPSPEEEDRRRLCRERQALIAERIRHVNRIKGLLFAQGISDYKPLRRDRRARLEALRTGDGRELPSHLKAQIGRELDLIELLLKQIKSVEAERDALLAAARKPASEAAAPNPVTMLLALKGMGANFAAVLWSEAFYRQFANRRQVAAYAGLAATPWQSGGIRHEQGVSKAGNPRLRTTMIQVAWLWIGHQPNSALTRWFKERSPQGRKRAIVALARKLLVALWKYVTQGVVIEGAVMKTAA

SEQ ID NO: 194653 - protein, 492 aa, unidentified
MGCVIDIGEPVPGRLGLGTGIPFERVIKTTYPSRCHVPPFIMEDAMAQRKRPATQSAISLTHPNAAGIDIGSATHFVAVPPERDDQPVREFASFTTDLHRLADWLEACGVDTVAMESTGVYWIPLYELLESRGLTVLLVNARHVKNVSGRKSDVLDCQWLQQLMSFGLLHGAFRPAEQVCVLRSLSRQRTMLLRSQGRSVQHMQKALTQMNIQLANVISDVAGETGQRILRAIVAGERDGHALAKLRNARIRASEDEIAKSLQGSWRAEHLFALKQALDAFDFCGTQLAECDVQIQAQLQALHVREDEPAQGKKRGRARNAPKFDLRTQLFQMCGVDLTRIDGIDVSTALVVVSEVGADMGKFPSDKHFASWLGLCPGTKITGGKVMSGKTKRCANRAAQALRLAAAALRSSQSALGAYYRRLCARMDKPKAVTAAAHKLARLIYSMLTHGQEYTDRGQDYFEERYRQRVLHNLAQKAKAMGMQLVASDNPA

SEQ ID NO: 194654 - protein, 466 aa, unidentified
MENNYILYVGMDISKGKADAAILKVSDRRSVKPKFIRKKLSFKFVKSEVASFLETVRSYSDVNCTSICFALEVTGIYSTNVYNYIKVNLYENESIKFLNTDFVNQWRNAHNIAKSDPLDAQTISTIIGTDSNVQYVNDNVFENKNGYQDLKALVHRHYQIKKIYSQEINRLIAQCDCLFPELQYVFEPKSAAFIAVLSSYPTTHDIINTSRVEVFDVVYEATKHRCSMDKIDKLFELCQDTLVPDDISSYGKSIILDLVENIKNIKGQLKSIERYIREVASLNPAYKLLLTITGYGPITAATVIAETGNIRRFKNADCFVSYSGTSPRNKRSGTSVETMGKISKKGSRYLRHAIYMIAEFARRHNPVLKHQFERIKNGNKKRHMLANIAIANKIARYIYSIMKNKSSFVILHDHIMRLPEETRYTFFNSISLDFPKNTRKQIYQYSDINGEVHKFVYTKTDEMIPA

SEQ ID NO: 194655 - protein, 369 aa, unidentified
MEERIKVYVGLDVHKDSIVIAAAEAGRRAGRLIGQLAHDVPKLLKALAKLGEPSALHVVYEAGPTGYGLQRALSAKGYGCEVIAPSLIPRRAGDRIKTDRRDCVRLAELSRAGELRAVWIPDAGDEAIRDLARAREDAVNARTQARHQLKAFLLRHAIRYSGKTAWSKTFYRWLGELNFGDPSSQVAFTEYHLAVQAGDQRLERLTKALTASVAGWRFEPVVQALQALRGIDVVSAIGLVAEIGDFARFDHPRKLMAYLGLVPSEHSSGDRLRKGSITKTGNAHARRLLTEAAWNYRFTPRIGRAAQARQEKLAEPIKAIAWKAQLRLSARYARLNGRGVHHNKVCVAVARELAGFVWAIAQTRSAQAH

SEQ ID NO: 194656 - protein, 340 aa, unidentified
MQITTKFYLGIDVSKHWFDLSLLTVINHQKQVMTTERFDNNETGIKEMGQWLKKQNVSFNNNTLLVIENTGIYHRLIWEFCSTHGLPIHIGNAAHIKWSFGIARGKNDVIDSQRLCNYAHKHADELKATPELNPVFIELKDMMTSRSKLVSQSGSIRSHLKELKLSNNKATQKLIEQAHKPVLDGLKKSIALIEKQILNIIHKDDTIKTNYDLLITVPGIGHLTAVYILCCTNNFIDKISGKQLACYAGVVPFQDKSGSSIKGRNKVHKMANKELKKMLHLCALSAIKCYPEFKQYYERKKKEGKHVMSILNAIRNKIVLRAVAVVNNQKPYVENYRKAA

SEQ ID NO: 194657 - protein, 375 aa, unidentified
MKGTSPSRGARLEAAYGNEVPRWEVRRLINSLQKGKSMAIVYVGIDLAKNVFAVHAVDEAGKPVLVRPAVPRARLHELIASLPPCTVAMEACSGAHHWARLFAARGHTVRLIAPKFVTPYRMSGVRGKNDAADAAAICEAVQRPNMRFVPLKSQQQQSQLMVHRARQGYVQARTACINRIRGLLAEFGQVLPLKANTVRRQAGALLEDLPGWANTVIGDLLSELHRLDERIAQYDRHIAQIAREDERAQRLMALPGIGSTTATAVVAMIGNGHEFNCGRQFAAWLGLTPGQYSSGGKTRLGRITKAGDSYLRSLLILGARAVLARAKASTDAIGSWALALQQRRGYWKAVVAVAAKNARLAWAVLRRGEAFKMPA

SEQ ID NO: 194658 - protein, 350 aa, unidentified
MSQTPNAAIAVVGIDIGKNSFHDQRGAIVLRQKWSRGQVEARFANMPPCLIGMEACVGAHHLSRKLRALGHDARLMPAKYVRPYSKGQKNDFRDAEAIAEAVQRPTMKFVATKTAYQLDLQALHRVRERLVSQRTGIINQIRAFLLERGIAVRQGQRFLRAELPRILATPPDVLSPRMVRIIEDLTSDWRRLDERVEGLSNEIATIAHQDAGCSRLMSVPGIGPIISSAMVAAIGAGDVFTRGRDFAAWLGLVPKQISTGDRTILGKISRRGNRYLRVLFVQAAWVVLIKPKIRERHGLKPWIEAARKRLHHNVLAIALANKLARIAWSVLARGRAFEARKMDQAANQSA

SEQ ID NO: 194659 - protein, 419 aa, unidentified
MKSKEQTMYYVGIDIAKRTHVAVIMNEDNSLEVKPFSFNNDKAGFKKLLIYLQTLCCDLSDIVIGMEATGLLFENLYRYLQSLDYNVVLLNPYQTAKFREMDTMKRVKNDNIDSVMIAALLKSGRFSEGYVSQEQLQSLRELYRHRASIENQLKALKRQTSTILTVVFPELETVIRDPFNVTGLALLDKYPTAKHYTNASVDRILKTFRGIKGNNFNRTKAQALLDAAKRTVYSGVAKDARAFNIRTNIEQIRLLQKQLERTLEMMQLLFTSKEVKQEDKEVMEALIDNLRTIPGVADKTILALLAECGNLDRFYAPKALIGFLGLYPTLSQSGDSTRNGRLAKRGASLAKKAIYLASISAIRHNDEMRTIYMNYRSKGRAKKEAIIIVARKLLTIIYTIYTRNVPYDPQRVFVAKPNQ

SEQ ID NO: 194660 - protein, 340 aa, unidentified
MSEINIIGLDIAKHVFQVHGADALGRAVLRKKIGRARLLPFFASQPRCRVVLEACGGAHHWARELARLGHDVQLIAPAYVRPFVKRQKNDAADAEAICEAAQRPSMRFVPIKSEEQQAAAMVFRGRDLLVRQRTQISNALRGHMAEYGWVAPKGLAHLDKLAELIADPSAVPEGVRSVCTVLLESLALLDRQIAALDKEIVRRSREDEIARRLMTIPGIGPITATAITALAPPPGTFAKGRDFAAWVGLTPRQHSTGGKQKLGAISKMGERTLRRLLIIGSSAVVLQASKRGAPKGSWLEQMLARKPRMLVTVALANKTARIVWALLVKNEDYRAPLAAA

SEQ ID NO: 194661 - protein, 470 aa, unidentified
MVAVMIGIDPHKASHTAVAIDPAEVPLGQLRVRASAVQAERLLGWAQAWPERAWAVEGAGGLGHLLPQQLLSAGERVLDVPPKLAARVRLLATGNINKNDPNDARSVAVAALRSAGVREVRRDDHAAVLKVWSKRYQDLGRARTQVACRLHQVMCEQTPGGVPGEITAGQAERILASITPAEAVQAARWELAAELTEDLRGIDARIRQARTKLAAAVRAAGTSLTGLFGVGPVIAAAVIGDVRHVARFPDRDHFAAYNGTAPIEVSSGGRKIWRLSRRGNRRLNHAIHMAAVTQIRHRHSQGHAYYQKKLAEGKTGKEALRALKRQVSDAIYACLQADARRDAAHVKSPGGQPGNGSDSSAAGSHPGHRLFGQATPGLRHHTTTAASDPAPGPASARGRAGHSSIAATSPLAKPQVQVQRPQRSEDERPGGAASQRPYSAARKARGQGSQAKPQRPKTASRAHENDRRNP

SEQ ID NO: 194662 - protein, 440 aa, unidentified
MISTYAGVDWASEKHDVLIADETGEEILAATFAHDEPGLRSLCRTLVRHEVTLVAIERPDGLLVERLLDAGLRILPLHPNQVAATRDRFRVSGGKSDRFDAFVLCELARTDHHRFRVLEPDSDETKALRALTRAREDLVGIRTALTNQLRAELERFWPGPLGLFTDLHCRISLAFLERYPSPPDARGLGEARLQGFLAREHYTGRQKPAQLLAKLRRAPAARVGELELATRRQLVLSLVATIKAINEQIKQLQAQIATAMREHPDGAIFLSLFKKPSSVICAAELLAEIGDCRERYPTRDTLAADAGQAAVAVESGKRKAASFRWACNRRLRQAFVTLADSTRHHNPWAQGLYASARDRGHEHPRAIRTLGRAWCRIVWRCWQDRVPYEPARHRALQQHITVTIPTVSGPVLDHAATERMLAGALAAGANSRQQEVTATQ

SEQ ID NO: 194663 - protein, 387 aa, unidentified
MEIRIENTPSARTNNDPVHCFVAIELSKSSWVVGFQTPLSKQTSRYQVKACDAEPLLQLIERVRTRVTREVGRPVEVTSCYEAGYDGFWLHRVLEAHGIRNHVLDPASLQVNRRARRPKTDRIDADRMVRALIRHLRGEPEACSVVRVPSPEQEDARRLHRERGRLITERVGHVNRIKGLCATQGIYNYEPLRSDRLERLDKLRTGDGRALPARFKTEIVREIKRLEVVLEMISTVEAERDAILKDKKSTHLNADKIKMLAKLKAIGAEFSTTLVGEVFYREFANRRQLGSYVGLASSPFCSGSLDRDQGISKAGNSKARAMMIELAWTWLRYQPDSALSRWFQARVGNLKGRPRRIAIVAMARKLLVALWRYLQTGVIPTGAELKA

SEQ ID NO: 194664 - protein, 391 aa, unidentified
MIFVGIDVAKDTHYAAVSDDSGAVLVKPFAFQNNAEGFCLLLKKLSEFDRSKLLIGLESTGIYSENLICFLYESGFRLAVINPIQTATLRKTAIRKTKTDKVDTMLIIKSLMVNSYRLYSQRDADSLKLRTLCRFRQNLKKSKARLKIQLAGYVNLVFPEFGKFFKSGIHIAASYALLKKYSSPKEIAALRTSTLCTLLSKASHGRFGKDTAEALKSLALSSVGVKNPYISIQIAQTIAQIELLEQQIKDLNSAIEEAMESINSVLMTVPGIGAVNAACILGEIGDIKRFSKPCNLLAYAGLDPTVRQSGQFTAKSTRMSKRGSALLRFALINSAWQLTLNDTTFKAYYDLKRSQGLNHYGALGHVAHKLTRVIFKLLTSDTPFIPAKLVA

SEQ ID NO: 194665 - protein, 317 aa, unidentified
MTAIDKFVGIDISKRHLDIAITPGDQTFTCPNTEAGIKKLVHRLQKLNPHTILLEATGGYEVLLVAALREADLPACFINPKQVRNFARSVGIAAKTDRLDAQVLAQFASSLRPSPRPLPTAAQQELKHLLTRRRQLLDMIQMEKNRLDPTPSPRIAQSIQDTIRSLEDQLAALLREMDDFFHQHPLWVELALLLTSVLGIGHLTALMLIAYLPELGRLNRKEIAALAGVAPFNRDSGQWRGQRHIEGGRSRLRQALYMATLVATSYNPVIKAFYQRLLAKGKAKKVALVACMRKLLTILNAMVKKHQPWCPAAPQIT

SEQ ID NO: 194666 - protein, 356 aa, unidentified
MILIRNLIQQKQRGSRYGITAIGIDLAKNVFQVHGVNSQGKGILKKRLSRVQVVPFVANLKPCLIGMEACGGAQFWAREFVKLGHQVRLIAPQFVKPFVKSNKNDAADAEAICEALLRPNMRFVAPKSIEQQDIQTLHRIRSRFVGNRTSLTNEIRGLLAEYGIVLPQGINFVRKNLLQTVETAQEQGRISENGKTLFSLLFQELKGIDEKIEEMNRKIELTHRSIEACQRLSGIPGVGKITATAVVAAVGDPAVFKNGRAFSAWIGLVPRQHSSGGKERLLGISKRGDVYLRTLFIHGARAFIRYLDRQPESNNKQWLMKLVERRGKTRAIVALANKNARRAWVLLARQEEFKAA

SEQ ID NO: 194667 - protein, 369 aa, unidentified
MNDITYVGLDVHKATVCVAIAESGRGGEVREVGVFANRHDVLRKMVDRLGKHRRRLNFCYEAGPCGYGLHRLLTGLGHDCVVVAPSLIPMKAGDRVKTDRRDALMLAKLHRAGELTPIWIPDAAHEAMRDLVRARATAVRALSKARQHLQGFLLRHDRIYHGARAWTLAYRRWLTTVRFDHPAQQIVLQDYIHAVEDAESRRDRLTRQIEELMPSWSMAPVATSLQAMRGVALVAAVTVVAEVGDFRRFTNARQLMAYLGLVPSEHSSGSTVRRAGITKAGNALARRVLIEGAWTYRMSARVSRKLHDRLEPLSAAIRDIAWKAQVRLCARYRRLAAIGKPKVVVTTAIAREMVGFIWAIARVAQPELI

SEQ ID NO: 194668 - protein, 338 aa, unidentified
MKITTVGVDLAKSVFTVYGVDEHGKPALRKTVRRGKLLELFAQLPACVVGMEACSGAQHWARELRELGHTPRIMAAEFVEPYRRGGKNDTNDAAAICEAVARPQMRFVPIKSVEQQAVLAVHRLRQGLVEERTALANRIRGLLTEYGLVIGVGLDRLRKALPSILEDAENGVPGIAREVFADATRQLIELDARIGEYDRRIAALARASEPAQRLMKMEGVGPVTATAIVASVGDAKMFRNGRQFAAWLGLTPRQHSTGGKQRLGAMTKHGDVYLRTLLIHGARAVLRVTPTHSDAKSRWAESLRHRRPDNVAAVALAAKHARIIWALLARGQHYHPAV

SEQ ID NO: 194669 - protein, 405 aa, unidentified
MTKPNAEVNILPQVEKACGLDMHKDKIVCFISNKDGTVQHIEEFGTFSEHLFKVRDLIVRYGVERCLMESTGVYWISLFGILTESGVNTIVANPQHIKQIPKRKTDRKDARWLCTLALYGLARQSFVPGVTQQALRDLCRNRLFYKQGQTRIKSRMIKILERANIKIRSVVSDISTKSAIEIIRLLAAGNTDIDRLAACCRGRLKAKKEQMKQALVGTLSQDNRWMLHMLMADLDHNQSQIDQLEKQINNLTSQHYNDAAIRLRSITGIGEHCAHIILSEIGDNMDLFPTADNLTSWCGLAPGNNESAGKRRGTAVKKGNKYLRIAMITVAWGAVRTKESYWKALFEKLRKRMKAQKAIVVVARRLLIVIYKTIKNETLYVEKGFNHFLDIQEKNLNRQKSKLAI

SEQ ID NO: 194670 - protein, 366 aa, unidentified
MKKNSTVQQSPKRATVRKEGPITIGMDLGDKTSRYCVLDERGEIVQEGSVGTTKKALAQKFGTLRRSRMAMEVGTHSPWVSRLLKNLGHEVIVANARQVKLISQSSRKDDRLDAQTLARLARVDPQLLRPIRHRSEAAQRHLMVIRVRAALVEMRSSLVNTARGLAKSVGERLPKCDTDQMGVERLEGLPAPLQQALRPLLEQIESVTEKIKASDVTIEQIARTEYPETALLKQVSGVGTLIALTFVLTIEDRDRFQKSRDVGCYVGLRPKRSESGESQPQLRITKEGDVYLRKLLVQGAHYILGYRGPDTDLKRWGLQLAGHGKNAKKRAIVAVARKLGILLHRLWVTGEVYEPLRNSRARPVAA

SEQ ID NO: 194671 - protein, 317 aa, unidentified
MTQAITTTAGIDTSKLKLDIAVHGRTERWQVANALPGWRQLAANLARVGVTRVGIEATGGYERGVVEHLRAVSFTVLVLQPIQVKAYARMHLRRAKNDALDAALIAACAAAVEQPRIAPDPRLVELAGYMTFLEQIEEDIARFKVRLEHIDELRLRRLVTNDIARLKARRAAQMLLIERQLRAHHDLARRLDLVLSIPGLAVRTVLAIIVRMPELGQISREEVAALAGLAPFDDDSGKSKGQRHIAGGRARLRRSLYAAALPAAFRWNKALIDLYARLTASGKSHNVALIACARKLLIYANTVVQRGTPWAERTVAT

SEQ ID NO: 194672 - protein, 458 aa, unidentified
MAPRLKGNPPKVKSSSSPLHAPHPHAAGIDIGAREIYVAVPPGSCADNVRSFPTFTEDLHALRDWLKACGVTTVAMESTGVYWLPLFQILEAAGIEVCLVNARHCKNLPGRKTDVQDCQWLQYLHSVGLLRGSFRPVDQVCAVRTILRHRDALVRGAGRCVSHLHKALTQMNVQLHHVISDLTGVTGQAILTAILAGERDPQKLAALKDHRLKASRDVLAKSLRGDWRAEHLFTLQQTHALWQQHQTLIAECDAQIEAMLRTFDTRADVSTAPLPPQTKTSHKKPQKNEPPFAARAECYRVLGVDLTSVPGLATPTVLVLLCELGPEFAEKFSTAKHFGSWLGLCPDNRITGGKIYSVRTRDVKSRVAEALRLAAQSLWQARNYFGELYRRWKARLGSPKAITAMAHKLARILWHLLKYKQPFNPAVFAKEEEKLKRKKLARLQNMAASLNYQLVPQP

SEQ ID NO: 194673 - protein, 420 aa, unidentified
MTTSKERTIVAIVNPICCGLDVHKESITACILYNDGNGKEHSILQEFSTFTDDLIHLRDWLLTHDCPVVAMESTGVYWRPVHNILEGYVDVVLVNARDIKNVPGRKTDIKDSEWLAGLLRHGLLRASFIPPKEVRAWRDLTRMRRKYVNTLSDFKKRVQKLFESANIKIDSVVSDLFGVTGRNLMLLLASGHTDITMTDIEQCVRGRLKGKTQELNRSIKGFFTEHHRFLLQTLLSTIASLEDTIESLDQRINRLMGNHQELIERMKEVPGISDISARDIIAEIGTTLDAFPNDVALASWCGLCPGNNESAGKRKSGKNHTWKNQVKPVMVEVAWAAARTNNTYYHDKYHRLKTRRGPNKAIVAIAHRIMKCLYHIIKNGVRYKELGMDYLDKKTKTAKLARLQKQAQSLGFSLIPVAGA

SEQ ID NO: 194674 - protein, 421 aa, unidentified
MSKRRYSTVNCKQVDWSALAEAMAGQRAVWAVDVAKIKFVAALQVETGGTLVRVSWQHPCETGELLAGLEVLAAAGSLEVVMESSGVYGDALRWQLQERGIAVYRVEAKRVHDSAEVYDGVPSLHDAKASELIAKLHWAGCSARWEIFPEARRDQLAHLRRLRQAKAREQAERNRLEALLARHWPELPHLLSLGSASLLRLVATYGGPASLTLLGHRARRLLHEVGGHLLAEETIDAVLASARTTLGLPCTAGESAQLRWQAEQVIAAQHDKRQAERQLTHSAAPEHAPAPMHAVLGKVTSAVLLATQGDPKDYPDAASYCKGIGLNLKEHSSGKHQGQLAITKRGPSLARFYLYFAALRLIRRDPVIKRWYTTKTARPGAVKQKQVIELMRKLAKAFWHQANGHAFDVNRLVNLKAVAGA

SEQ ID NO: 194675 - protein, 338 aa, unidentified
MLYSGIDLHKHSLVVHTVAEDGTLVREAEFATARPALTAYFATLPGPHRAVVECLGSWYWVRDLVVPQGIDLRLGHAKYLKAISYAKVKTDRVDARTLAQLLRVGLIPEAHMVSAELRDVRDLLRARLKLVTRATRARHASAGLFTQYNVRAAAELPELVRLQVKLLEDEHTLLTAQVKRCEQELRPRLLPRADVQRLVWIPGIGAVIAYTLVLEIDDVHRFPTARHFHSYCRLVPGADNSGGTTRHKRSRDGNRYLKLAFHHAAVRAIQYVPEIKQEYQRWRRRKGKGIARALVAKELATIVYAVLKKGEPFNGIFHGHVLTTTKRQQWPRLASPPA

SEQ ID NO: 194676 - protein, 345 aa, unidentified
MKYYAGLDVSIKETSICILDETGKVCRETKVMSHPEDIIQALNCPALRLERIGLEAGPLSQWLFSCLAEAGLPVVCIETRQAKAFLKAQVNKSDRNDARGIAQMMRVNLFRPVHVKTLTSQKRRALLTARKLLQEKAIALENDIRGVLRNFGLKVGVVGAVKFEERISELVEGARELAEIMTCLLAPRRTLREQAAKLHRMLLSIVRDDDVCRRLMTIPGIGPVVSLAFVATIDIPARFKNSRSVGPALGLTPILNQSGESSRIGRISQCGDAMMRALLYEAAHVMLTRTIKWSWLKAWAMNVAKRRGKQKAVVALARRLAVVMHRMWSDGTTFRWTRQQEQHTA

SEQ ID NO: 194677 - protein, 414 aa, unidentified
MEVLHLRCAGLDVHKDSVVAAVRLAEPGGAPTEVRRFDTTTPGLLALSAWLAACGCTHAAMEATGVYWKPVWHVLSDGDLVLILANPAHVKNVPGRKTDVADAAWLAELLAHALIRPSFVPEPATQALRVLLRTRKQLVREQASHVQRLQKTLEDANLKLASVLTDVMGLSGRAILEALVAGERDPDRLLALVPPRVKAEPARLRAALTGRLTDRHRFLLRLHLGQHDALAAALAEIDAEVERDLGPFRDAVRLLRTVPGIGDLAARMIVAEIGTDMGRFPTAGHLVSWAGLCPRSDESAGKRRSNRLRQGAPWLKTALVQCAWAASRKKDGYLRAQFQRLRQRRGPKKAICAVAASMLTAIWHMLRDGTFWRDLGPDHFHKRSPEQQAEHLARQIAKLGFACTITPQAEPVSV

SEQ ID NO: 194678 - protein, 354 aa, unidentified
MLIIGCDFHTRYQQIAMAREGTAELLLERRLDHESGEAHAFYRNLQSSHEPVLVGIEATGPIHWFERLLAELGHELWIGDSAKIRAQEVRKQKTDERDAALILDLLLAKRFPKIWVPTPAERDLRQLLWHRHKLVRLRTMMGNQLHFLAMSQGLCRKGKLFTKKGRAELVSLGLAPWARRRREELLQLLDQLDSPIAELDRAVLEEAKRRDDAVLLMTHPGIGPVTSLAFVLAVGPVTRFHGSRKLVSYFGLNPTEESSGGRRRLGAISKQGNTMVRWLLIETVHHAVRQDPELKQDYQRLKFRRGHAVAKVAIARKLAVRMYWMLRSGADYARLVRRQGSPGATLVDASPSLG

SEQ ID NO: 194679 - protein, 342 aa, unidentified
MEKITTIGLDLAKSVFQIHAITEGGHVAVRRALRRSQVLEFFRHIEPCLVGMEACGSAHYWANAIGEFGHTVRLMPPAYVKPYVKRNKTDAADAEAICEAVTRPTMRFVPVKTPDEQAAGKVLKTRELLVRQRSQTANAMRAHMAELGIVAATGMTSIAKLVAILRDDRDGRLPNSARAALSEMADQIERLTERVEALDSKIVAAVKADDAARRLTTIPGVGPIIAASVRAAVQDPAAFRTGRDLAAWIGITPRANSSGGKERLGKISKRGNKQLRTLLIVGATSILKQARRGSKLPGWVASMMARRPFKVAAVALANKMARTIWALLVKGGTYQAPAMAKA

SEQ ID NO: 194680 - protein, 360 aa, unidentified
MHATTVAVDLAKSVFQLAVADEQWRIVDTQRLTRSQFERWFINRSVGLVIMEACGSAHHWARWLNALGIPVRLLPAQYVRAYVRRNKTDATDATALLEAARAADIRPVRVKSVEQQALQGLHRIRSLWMGTRTSRINALRGFCREFGISIPQGARTGVETISRVLADPRSAVPELIRHTAGMLLEEIRLLEARIAQVERELATVARHSPACTLLLSVPGVGLLTATALVAATSGDVTHFQDARHFASWFGLTPREYSSGSSRYLGRISKKGDRYLRMLLTHGARSVLRAAKVADGAGKDVCGIRRWALDVQGRSNHNKATCALANKLARICYATLRDHAPFDEAARLSRKAGRQSFAIPA

SEQ ID NO: 194681 - protein, 430 aa, unidentified
MKSNTQNAKIEAITEKTLVLGIDVGSETHYARAFDYRGIEYSKKPFKFSNTEAGFVTFKEWILDLKERHEKDKVVPGMEPTGHYWFNLGKFLQDNEMKPVLVNPHHVKKSKELDDNNPTKNDRKDPKVIAGLVREGRYMIPYLPDGVYADLRTASNIRFQLQAELTRIQNRISRWFNIYFPEYKTVYGKPDAKSGMLILKAAPLPEDILTLGIDGVNQIWRDAKLRAVGKARAKTLIEAAEHSVGSKEGAVSARMEIRMLLEDYESRNTRLQEVMVLIEELVRKIPMAEKLLEIKGVGIRTVSGFLAEVGDISRFNNPKELQKLAGLAVVENSSGKHKGKTTISRRGRKRLRYLLFEVAMSLVAKNPEFRELHNYYTTRRLNPLKKMQSLMAIAAKLIRVFYAMLTKGVDYDPKKMISDIKRPTVYLQAA

SEQ ID NO: 194682 - protein, 435 aa, unidentified
MEEVEDEPLFCDRVAGIDIGKATVMVTIRVPSEARAKGRQQETREFGTTRRELLALADWLRGWQVERAGMEATSDYWKPVLFTLEQEGFDCLLYQASQVKALPGRPKTDKLDSVWLARITEQGSLAGSFVPPEEIRRLRTHTRCRRKLVQMRTAQKERCEKLLEDAHLKLSSVISDIHGVSGRDMLRAIAAGERNPKVLAQMARGVMRSKIARLEQALDCSFFTGEHAFILTMMLDSIDSLTAQAGVLDARIADMCQPYQRQLEQLDEIPGFGTTTAQDLIAEIGTDMNVFPTAGHLASYARQAPRVKESAGKRKGKNATGRGNPCIGGALGEASISAGRTQTFIGEKYRRLTRRMPKRKAQVAIMRSQLVIAHALLSDPDARYQDLGPDYYERKADIRRRARNHARALERLGYKVTLEAIDPGTGELHLVATAG

SEQ ID NO: 194683 - protein, 356 aa, unidentified
MTTQQKQSCMFVGIDVHKDTHTAVGISPYGEKLFEITVGNYKEDFEKLNLKVKEHGDVLSPYIGLEDVRGYGERLAGYLYGKYPVYHVPSILVDKARQNATHPEKSDSLDALGVAKVMIQSIDTLLPYTISQESEKAKQLKEISIDREDLVLEQTRLKNQVHTLLYRIYNTEYADKFKDPFSLKALRYWRNAKPKCDQFLLKTMKRKVRRLLDIHVEVSELEKDMQTLLNDNYTIQSASGCGVVLASTIVGEIGDIQRFKSPASLAKYAGCSPRECSSGKKTRHVKTRSGNRRLNCAFHRMALSQISRMGNDKARAYFKRKVSEGKSKSQALVCLRRQMVNIVWNMLKYKTVYRIA

SEQ ID NO: 194684 - protein, 400 aa, unidentified
MRVVFGIDVSKVSSEVAILVNGEKVHGYTMPNDAIGFARLLGDLKTVHKPEIIFEATGVYSRRLQAFLEDNGYAYTRLNPLEAKKQLDSLRVRKTDQIDAEKLAQSQFVLNRKPTYVQEEVYQNLRDLSRFYQNLTEDIVRAKNRLHKVLQVAFPELETILSTPTGEQYWKLVMTFPCKELVLDRDGNKLLDSIRQSTSKRISDKRVAYLAEKLTALANQSYCAVKKTSPMFEEIRYYAQELLRLSERRKAVLDQMVTLAKPLPEYEILLSIPGIAETTATSIIGELGDIRRFHSANQINAFIGIDLRNYESGNFLAQEHITKRGNPYARKILFKCIHNIASASHTNPCHIADFYEKRKRQSQTTSTKPHTIASIHRLIRTMYYLITHNKLYDYTSTQNQ

SEQ ID NO: 194685 - protein, 341 aa, unidentified
MNQVITFGVDLAKHVFQAHGVDAQGAVVVRRQLRRREVRPYFAKLPRCVVGIEACSTSHYWAREIAAAGHDVKLIPPVYVKPYVKRQKNDQTDAAAICEAVTRPSMTFVPVKTVAAQASLCLMRVRETLVRQRTLLANCLRSHMAEFGFSANLGHARLMERLDELEPHDLPEPARLALDVLRSEILSIDQRVRTLDTEIRAVHKTNEASQRLTTIPGIGIISASMIAATVSCPEQFRSGRHFAAWIGLVPKQHSSGGKERLGRISKMGNRDLRRLLVMGAVSRMRHVAKAPSRDDIWFQQLKARKSGKLAVVALANKMARIVWAVLKHGTTYNPNFLEGRT

SEQ ID NO: 194686 - protein, 405 aa, unidentified
MNAVGIDASKGKSMVTILRPFGEIVSSPHEVKHTSDQIDNLIREIRSLEGESRIVMEYTGRYHEPMARWLSDAGLFVSLVNPKLIKDFDNDSLRKVKTDKADSVKIARYTLDKWHKLKQYGAMDELRNQLKTMNRQFGYCTKLKTAMKNNLISLLDQTFPGANTFFDSPARSDGSQKWVDFVDTYWHVDRIRSMSLVAFTEHYQKWCKRKGYNFQPDKPAEIYESVRNIIPVLPKDEVTKFIVRQAVNQVNTTSAAVEELRTRMNDIASQLPEYPVVLTMKGVGTSLGPQLMAEIGDVTRFTHKGALTAFAGVDPGKNDSGSYSQKSVRTSKRGSAPLRKTLFQVMDSLIKAMPQDDPVYEFMNKKRSQGKPYYVYMTAGANKFLRVYYGRVKEYLSEHTETAVK

SEQ ID NO: 194687 - protein, 361 aa, unidentified
MKKVSRQLPQMEAGIAKPEMTLGLDLGDHYSHYCLLNGDGAVIEEGRMQSTEAALRRHFEGEPCFRIALECGTHSPWVSRLLTTMGHLVIVANSRKIPAITGSESKNDRNDAEQLARFAAFDPRLLAPIEHRSPERQLDLNLIHARSTLVRARTMIVNALRGLVKSAGGRLPACSTAALPVRAAAVIPAVLVDVATPLINQIALLNAQINGMDKQIEKLCTTYPEISLLRTMPGVGPIVAAAYVLTLDRPDAASNRSAGAFLGLRPSQSQSGASDPQRRISKTGDSFLRSLLVQSAQYVLGRFGPDSELRRWGLKLAATGGKRGKKRAVVAVARKMAVILHSLWRNGERFQPFPKSAAAAA

SEQ ID NO: 194688 - protein, 347 aa, unidentified
MAFIGVDLHTNSFTICRLHDDGSEAFETFTLSASALQAFCMSLDADDEISVEATGNTAWFCDEIRACVGRIVVVNPRQFQVIRKSVNKTDKNDARALAFFLSKDMLPETRLKSTAESELSSLVYTRDVFVKQRTMLLNKIHAMFVRRGTKLKKEGLASKKRLRELDVSQFTALEQVELNALRNQALGLTETLAELDKAIESAGADLPGHEGISSIKGIGSRSAAILLAGIGNIDDFESADKLAAYVGIVPKVSQSNDTDNRGRITKRGNKLMRTTLVQCTLIAIRYSGYLNAFYQRIKERRGAGKAIIATARKLLAIIYDTLKNGWVFEDFSEFKIKQNQRPTGQPS

SEQ ID NO: 194689 - protein, 316 aa, unidentified
MGPELSIGIDVSKDQFDVASEPPSLAGSFDHDASGIRTLVGKLRLLRPCRVVLEATGPYHENLVRALQAAGLPVVVMNPRVVRHFAQGAGLLAKTDGMDAATLALYGARMRPITRELPDELGRELQRLVARRRDLKGMITAEKNRRQGADAWVKRRLDQHIRDLQREVEMIDKRILCRLQSDAQRWANYQLLLTVPGVGSVTAFTLVAALPELGRLNRQEIAALVGVAPFNCDSGRHRGTRHCWGGRAPVREVLYMATLTASTHNPAIRAFHERLYRDKHKPFKVAQTACIRKLLCILNAMLRDRTPWRPELAPAA

SEQ ID NO: 194690 - protein, 369 aa, unidentified
MKKNSKNNKEKTRQRALQAKSRKMKLTVGIDLGDEWSHCCFLGEEGEIVEECRVKTTREAVKSRFGELKLAVIALEVGTHSRWVSQMLSEFGHEVIVANARELRAITGSDRKSDRVDAEKLARYARVDRRILRPIKHRGEEAQVDLVVLRARGVLVKTRTQLVNSVRGVVKSFGYRMPNCSTERFVKLNNEVPEKLREHLAGLMEVLEHVQKQIEEYDQRVEKLAKEKYPETTVLRQIWGVGEITSVSYVLTIEDKGRFEKSRDVGPYLGLRPRRSQSSESDPELGITKAGDCFLRSLLVECAQRILSKKGPDTALKQFGLRIEARGKKKAKKRAIVAVARKLAVLLHKLWVTGEVYEPFPETTVRKAA

SEQ ID NO: 194691 - protein, 314 aa, unidentified
MAKQRERIIVGIDTAKAELEFYRKDTEQGGVFANEPGEVDRFLESLPEEAEIAIESTGRLHELLVLRALELGVLVYSISGFQLSRYRDAVGQRAKTDRSDARLLARFLEREGENLRPVTPRSPEEKRLWQLLRRRASIVHHRTALQQSLRETDAGFPSPDALLDAFKHYIAVLEREALRLAKTLGWREDLARLQSTPGVGPISALGLLLAFRHAPFRNADAYIAFMGLDVRVRDSGKFKGKRRLTKKGEPELRRLAFLAGRAGRRAHAPFKEYFDRMLERGYSKIAADVAVGRKIARIAFALLRDGRPFGPSEA

SEQ ID NO: 194692 - protein, 374 aa, unidentified
MSAPMIYLGLDVHKDSITLAVLPEGTPAPTRVDRLPNDLPKLRRYLTRLARDGTLRICYEASGAGFVLYRALRGWGYHCDVIAPSLIPTKPGVQRKHDKYDAAQLARLYRAGELTPVRVPSEADERIRDLVRCRETIQRELLKSRHYLLKFLARRGFIFRAGKHWTLAHLTWLRELAGPASPLIDEDLEVLREYLALFDYKLGRRQALDQRIAELAQTPTLQTPVQWLQCFRGFQVQGAMVLQTELGDWRRFDSARALMAYVGLIPREDSTGDRERKGSITKAGNAHCRHVLIQAAWSYHHPPKISAALKARQRGQPATVLSHAWKAQHRLHKVYRHLAYRKQPRIAVVAVARELVGFLWAVMRHHEPASVART

SEQ ID NO: 194693 - protein, 354 aa, unidentified
MTSMTTEATGVTGGVDTHSNTHHAAAIDQVGRLLGTREFPANLAGYQQLLEWLESFGVLARIGIEGTGCYGAGLTRFLRGQGVAVIEVNRPDRRSRRVRGKSDPLDAESAARRALAGEDHITPKDTTTIVEAIRVLRIARTGAVKSRTAAYNQLKDLIITAPDSLRESLRGKTLQRVASECARLRPELARLADPTQATKLALRTIALRVADLNGEISALDAQLGRLVQVAAPRTLALLGVGPEHAAQLLITAGGNPGRLRSEAAFAALCAACPIPASSGKTSRHRLNPAGDRDANRALYMIILSRLRYCAATKAYAQRRQAEGLSKRETIRCLKRYVAREIYHAVRADLSAPTA

SEQ ID NO: 194694 - protein, 344 aa, unidentified
MLYVGLDLSRKRLDWLALDQAGQPAEIGAVAPDRDGLAKLGQRLGDAAVLAVIESMSGARFVHDQLELAGWDVRIADALKARGLAPLACKTDRIDCWVLAELARRGLVPEVWLPDPRVRAERERARFRLHLVKHRSSLKNRVHAILFQHGVPNPHRDLFGPGGRHLLRRLELAEPWASTVRASLALIDRLDEQIDECERELRRLGVEHRYIPLLTTLPGVAWVLGYTIAAEIGDIARFPSPRKLVGYTGLTPRVEQSGERDRRGPLRKNGPNYLRWALIEAAHTAGRDPRYRPIVDRMRARHGRARGSKIAAIEIGRRLTEAIWHMLTHDRPFAPAGASTPVAA

SEQ ID NO: 194695 - protein, 420 aa, unidentified
MNVVYPVCCGVDVHKSFLVATIITTTNGVTPSYQKRRFSTFNRSIREFRHWLLDNNCLDVCMESTGKYYIPIYNLLEQDFRVTVANPKWVAAVKGNKDDVKDSKWIGDLFRIGLVPGSFIPEKPIRILREYMRYRFKLVCCKSSEKNRFQNAFTVCNVALDSVVSDMFGKSASAITDYLVNTDTFDPQHCVSLLHRSMLKKADQIIDSIEGFQMTTEQKQRIGFVRCHLDFIENLIAKLDHQVDTMVTPLESSISLLRTVPGIDRPSAITILSEIGTDMSQFGSSRRLCSWAGLTPGNNQSAGKKKSVRITRAGVYLKPALVQVAHAAVTSKGSPYYRVKYERIAKRRGKKRAIIAIARMILTAIFCILSSGEVWNPSDLYLIDMPQELRDKQLATAVKQAAKLLIAQGVVRQEHIRLPA

SEQ ID NO: 194696 - protein, 319 aa, unidentified
MNTTTSAHIDCRERHVGIDIGKSMLDICIFELDVYLQYPNTPEGIRALLKKLSRYNLSRILVEATGGYERGLVEACAEKELPIVIIQPTQVRQFAKAQGIIAKTDKMDSRLIAQFGAVMKPEVRPLNSKKVRYIRDLLSRKRQLNEMRTQELNRQHKAPAMLAATHKRLIKVLDKEIEGINKLLAKAVSEVTEWQRTCEILNSVPGVGDGVTFTLLGELPELGQLSPRKIAALCGLAPFNRDSGIMKGRRRIKGGRAPIRTVLYMAMLSAIQCNPVIKKFYKKLVEQGKHKKVALTACMRKMMTILNAMVRDNCEWQAN

SEQ ID NO: 194697 - protein, 339 aa, unidentified
MTVGLDVHKATAYAAVRKNGQEIATWVMPMDNQTIVASLKRFGPALKKVVYEAGPTGYGLARALKKAGLPVEVIAPGKVPQAPNADSKTDRLDARKLAEEAEKGSLQKAVIAIPTEQEEADRQLARLRDQLIGKQRRVKQQIKSLLLQHGLPEPAGLAHWSAEGLAALKAMRLRHQLQLSLEVLVGELEHLVVLRKRVERHEVWLMKQRRHRRGARLLQTHPGVGVVTATAFRLEVYQPERFATPEQLAKYVGLAPRVRQTGPKRRGGPLIPAGRGSLRSLLIEASWRWIRDDAAAAKTYRRLVRNTGSGQKAVVAMARRMAVHLWCMLCRGQEYRPAA

SEQ ID NO: 194698 - protein, 461 aa, unidentified
MMKKRAASKRKESVQKNVDWKALEIVHPDAAGIDVGGSEHWVAISPDRDPEPVRRFGCFTADLREMARWLVEKGVRSVAMQSTGVYWMPVLEVLEQHGLEVYLVNARHTKNVPGRKSDVQECQWLLKLHAFGLLNNSFQPTDEIRVARTLWRQRGNLVADASSTIQRMQKVLIEMNVQLSNVLSDISGVSGMCMIGAILEGERDPEVLMALVQPGVKATPQDILKSLEGNWRKELLFVLRQQVELYRMYQEKIQDCDQQLREHLESFGSVVDLQAQPIGPKPKGKKGSKNAPQFDLRTELYRITGIDWAQVNGIDVLTAQTVIAECGADLSAFPSEKRYTSWLGLVPTNEQSGGKILRRRTRKVVNRAAAAFRNAATTLLRSESYLGAQYRRLRTRLGAPKAITAMARKLACLFYRLIKHGQQYVDKGNEYYETKYREQQIRALAKRAQKLGLELVIPKTA

SEQ ID NO: 194699 - protein, 446 aa, unidentified
MDVVFSHCAGLDVHKKSVTACRLVSDSTGQVPEGVAELRTFGTMTIDLLALADWLVEAGVTHVAMESTGEYWKPVYNLLEGVVTIFLVNASHVKNVPGRKTDPADARWLAKLMRYGLLQASFIPPVAQRDLRDLTRYRTKLVQERAREVNRVQGVLERANIKLASVASDVLGVSGRAMLEALIDGQADPATMAALAKRRMRSKIPMLEQALTGTMRDHHRCLLRLQLRHIDFLDEQIDALNSAIEGCVRTLSQEIVAGTTPHVPTPADVPAPPEPLPPLTFTRAVELLDTIPGVNQQGAEMILAEIGIDMTRFGTASRLAAWSGVAPGNDESAGKQRSGKTRKGNQVLRAGLTQLAHGAVRTKGTYVATLYRRLAARRGKRRAILAVAHSIMVSVFHMLTRNEPYRELGANYFDERRRHYTVDRLLSRIEHLGYRVHLEPVEAPAV

SEQ ID NO: 194700 - protein, 367 aa, unidentified
MKKVSTAVAKQSRNIARQKLTIGLDLGDRNSRYCVLDEAGRIQLEQRVRTTAKALQEVFGAMPRSRVTLEIGTHSPWISRLLSALGHEVIVANARKVRLIGESRKKDDRLDAQTLARLARIDPELLYPVKHRSAQAQADLMMIRARAGLVRARTGLVNTARGLAKSYGERLRGCNVRNMDPEKAEALSPELQRALEPLLAAIEELSERIVEYNDRIEALAQASYPQVELLKQIKGVGTLIALTFLLTLEDPHRFRKSRDVGGYLGLQPGRRNSGESEPQMHISKEGDPYLRTLLVQGAQHILGPFGIDCDLRRWGSKLAQRGGRNAKKRAIIATARKLAVLLHHLWVSGEVYEPLHNSSGATVTVAA

SEQ ID NO: 194701 - protein, 415 aa, unidentified
MQVRFPHSAGLDVHKASVVANVIKDYDAKGDPIYEGKRFGTMTRDLLALADWLQERGVTHVAMESTGEYWKPVYNVLEDLFTIFVVNAHHAKNVPGRKTDENDSQWLTQLMTVGMLSASFIPPQGQRDLREMTRARASMVRERANLTNRLQKTLESANIKLTCVLSDIQGKSARSMLSALVEGCTDTKVIADLALKRLRSKIPELERALEGRFKETHRFIVGELLIQIDGLDETIARFDEQIERMCVPFERAVAHVDTIPGIAKTAASQIVAEIGDDMSVFASHGHLSVWAGVAPGNNKSADKVLSSRARKGNCSLKRILVEAAHSAVKVKDTYLSAQYHRLVGRRGKRRAIVAVAHSILVIAYHLIKRDEDYKDLGGNYFDNRQPVKTVQSLVNRLQLLGYEVRLDRKTGPAAA

SEQ ID NO: 194702 - protein, 382 aa, unidentified
MTTAKLWRNRKERKDWARRLRSEDPGLEVVHPHAAGIDVGNSAHYVAVRPDRDPEPVRRFECFTADLYRLAEWLESCGVKTVAMQSTGVYWIPLYEILEDRGFEVYLVNARHTKNLPGRKSDVQESQWLLKLHTYGLLNNSFQPPAEIRVLRTYWRQRAEHVSGAATCIQRMQKALTQMNLQLANVISDLSGVTGQAIVRAIVAGERNPQKLAELGDPRIEASREEVAKSLEGNWRPELVFVLRQEVEMYDAYQRRIAECDQQLQKHLASFADTELPQSPKAESKEKRAKSTKNAPRFDLSSELKRITGVDLTRIDGIDVMVAQTLLSEVGMDMSRWNTEAHFSSWLGLCPDNRISGDKLLGKGTRHVVNRAATALRLAAEI

SEQ ID NO: 194703 - protein, 430 aa, unidentified
MNYTQNQKIEQVTESTLVLGVDIGSSEHYVRAFDYRGRELTRKVFRFSTDINGFNSFYDWVTQICIKHGKNEAMIGCEPTGHYWYTFYQFVKDYGMKLAFVNPASVKKAKELDDNSPKKTDLKDPKTIAKLVIDGRYSFPYVSEGIYAEIREVTSSRDRIMKELNAASNRIQRWLKIYFPEYLTVYKKFDTTTGMMILEEVPLPTMVTALGVDNIIKIWREHKVRGKGASFNRAKTLVDAAHDSVGKSGGQGAVMEIQMLLEDYKVKKQQLEMVTSVMEELIMQIPNAEKMLSVDGVGLVTVAGFISEVGDISRFKNPKQIQKYAGFELVENRSGKHKGRTTISKRGRKKLRKIIYQVVLPLIQSNKEFRSIYDYYRKRIKNPLKGRQAMIAVGCKLIRVFFAIMTKGVVYNGSKMIEDIHRPTQLPQAA

SEQ ID NO: 194704 - protein, 343 aa, unidentified
MDHFAGLDVSVKETSVCIVDDTGKIVREVKVASEPEALLAVLKNPAYHFKRIGLEAGPLSQWLFSALAEADLPVICVETRHMRAVLKARINKTDRNDARGIAQMIRVGLYRPVHVKTLRSQKLRMLLTHRKLLQSKAIAVDNDLRGTLRNFGLKVGMVGTGRFEARIKELVENLPDLAVLVEPLLVVRRVLRDQIAVLHRRLLAVVRDDEVCRRLMTVPGVGPVVALTYRATVDVPARFRKSKSVGAVFGLTCSRDQSGERDRPGAISRCGDEMMRAMLYEAAQSMLVRSSRWSWLKAWAMQIAKRRGMKRAIVALARRLAVIMHRIWVDGTEFRWTREAAAG

SEQ ID NO: 194705 - protein, 348 aa, unidentified
MTTMTETPRRITGGVDTHRDVHVVAALDENGTDLGVESFPTTPAGYRAALGWLRRFGTVERVGVEGTGSYGAGLTRFLLSQAIEIVEVSCPNRQRRRSHGKSDPVDAIAAAKAVLSGDAVTEPKSRDGNVEAIRALRTADRSARHARVKALNQMRALLLTGPDELREQFRGSTVWQLARGAARLRPGDPATAVGGTKYALRLLGKRVIELEAELVDLKAILKPLVAATAPELVARHGVGTETAGALLVAAGDNPERLRNERAFAHFCGVSPIDASSGIVVRKRLNRGGNRQANSALWRIVMVRMVSDPETRLYMERRTKEGMSKMEAIRCLKRYVARELYPFLAASAP

SEQ ID NO: 194706 - protein, 336 aa, unidentified
MVYVGVDLHRKTAHVVAVDQGGTAILSRRVATRPDELLRVFGELDHEPLEVAFEATFGWGWFADLLADAGIPAHMAHPLATKAISSARVKNDSVDAKTLAHLLRTNLLPEAWIAPPEAREARRLARMRTSLVRIRSQLRCQIHAVLAEHGVHAEVSDVFGKAGRSLLDDLALPELSAARLAANLRLIDAVSDEVAEAERELRGLFRGDDRITRLTAIPGVGLITAATVVTEVWDVTRFPSADRLCSWAGLTPSEHSSGEHTRRGHISKQGSRWLRWVLVEAAARPQADPDLRAFVDRIASRRGTKIARVALARRLLTLSFYALRDERGCRAFPVAR

SEQ ID NO: 194707 - protein, 317 aa, unidentified
MSATLFIGIDIAKESFQVASRPAQLHGNYLNTCQGHKDFLHALADLSVTQIILEATGGYEKILAAELIQAGYNVVVANPRQVRDFARGLGRLAKTDPIDADTLAYFGEIVQPRPKPPQKPQTEALAELVTRRRQLTDLLTQETNRAQMIHHVKVRKSIRKMIKTIAFQIRELDELIQDHIQANDDFQQKDHIMRSTPAIGPQTSAMLLSHLPELGRLNRHQIAALVGVAPFDRQSGKQTRGAHIAGGRKEIRAMLYMAALTARRCNPAIRSFAQRLEQQGKAFKVVITACMRKLLIILNALIRDQQVWTTEKFLKTV

SEQ ID NO: 194708 - protein, 347 aa, unidentified
MEQIIRIGMDTSKHVFQLHGVNAAEEPVLRKKLRRKEMQDFFTKLPPTVVAIEACGGSHHWARQLQRLGHEVRMLPPQYVKAYVKRGKNDAADAEALCEAMSRPTMRSVPVKTAEQQAALMLVGMRDRLIRNRTQLANAIRGYAAELGYTAAKGVRHIAPLLDRIATDETLPEMARDLFAIHAREYVQLQAEIEKVETRLMDWHRADECSRRLAQIPGVGPIGASLLIMKTPAPELFRSGRDFAAWLGLTPKDHSTAGKVKLGVITRAGDEALRRTLVVGSTSLLRQIRAGRARNASPWLVDMLRRKPPKLVAVALANKIARIAWKMMITGAAYHSRSVAPSAAIAV

SEQ ID NO: 194709 - protein, 420 aa, unidentified
MEVAIANVCGLDVHEALVVACVLIGDGPRPAKTIRTFSAMRRDLIALREWLITLKVTHVVMEGTGIYWRPVYEVLEGAGGALDIAVVNARHVKNVPGRKSDVIDAEWLARLLRSGLLRKSFVPAPAIRALRDLSRYRRMLVQAQTTEKNRILKLVETMGIKLASVASDVFGTSGTAMLEAIAEGTKSTEQIAQLARSALRQKLPELRLALECTIQSHHRTMLRDQLARLHATAAEIAKYDCILQEHAAPYAEWIALLGTIDGVKHTAAIEIFAEVGPDLASFPRESNFASWAGTSPGLNESAGKKKRGRRRRGNPYLTSILVECALAATRKKGTYLSDKYRRLKARRPTLVALFAIANKLAGAVYRAIATRTSYRDLGAAYLDRRNPVRTARTLLKRLLDLGLDRSALLQLLPSPGPSPT

SEQ ID NO: 194710 - protein, 284 aa, unidentified
MRFYTKQHQFYCGIDLHARSMYVCIVNKDGEVLVHRNMKAAPEAFLKAVAPYRDGLVVAVECIFTWYWLADLCAQEGIPFVLGHALSMKAIHGGKAKNDKIDSQKIAALLRGGMLPQAYVYPAQMRATRDLLRRRTHLMRKRAALLAHVQNTNSQYNLPEIGKKIASKANRDGVAQRCAEPAVHKSIEVDLALITSDDQLLGDMALSLLQAAKHHDANTLYLLQTVPGIGKILSLVLLYEIHDIARFPSVQDFVSYGRLVKCAKESAGKHLGTSGQKIGNAHLQ

SEQ ID NO: 194711 - protein, 343 aa, unidentified
MQIRSVGIDLGKTTFHLVALGDNGKVLLKKKFTQKQLITFTANMQTSLIGMEACGGAHFLGRALRAQGHDVKLIPAQFVKPFVKSNKNDFIDAEAIAEAVDRQNMRFVPIKTDDQLDLQALHRVRDRLITRRTSVINQLRAFLLERGLVFAKSPAKLRERMPEILENADEDLTPRMRNLLALLWNEWKDLELQIVQMNDEVEQIASSDAACTRLRQIPGIGPLVATAIVAAIGNGAAFSKGREFAAWMGLVPKQYSTGGKAKLYGISKRGNNYLRKILIHGARAVVLRSKRERIAMGAWMTSLETRAPRNVLIVATANKLARIAWAVLATGQNYRAVQEPTTA

SEQ ID NO: 194712 - protein, 351 aa, unidentified
MTMLAEVAGAVVGGDTHRDTHALEMLAPNGTTIAALAISNDDDGFAGAIAWIAGNVPGPRVVAGLEGTRSYGIGLARAVAAAGLIVVEVQAPRRADRRHRGKSDPIDAHLAGLQVLRMPAGELPAPRADGDREALRILLSARRELTMARTRQTSRLRALLLGGDDTDRDLSRGTLTGARLQAIARRRARASDTTGQSVRRAGARRLANAIRAAAAELAANKRHLAGLVRGLAPALLDKTGVGPVSAAQAIVSWSHRGRCRSDAAFAALAGASPLQASSGRTTRHRLNRGGDRQLNRALHDITLTRWRADPRTHDYIARRRAAGKNDTEIRRALKRYVARELYRALQASPAA

SEQ ID NO: 194713 - protein, 375 aa, unidentified
MKERVRFLGLDVHAETIAVAVAEVDGEVRSLGVIANRADSIRKLVKKLGAVEQLKACYEAGPTGYVLYWQLAELGVKCDVIAPTLVPVKAGDRVKTDRRDAEKLARNLRAGDLTAVWVPDSGSEALRDLVRAREAAKQDQLRARHRLSKFLLRTGQRPVSGVKAWTELYMAWVRQLGFAQVAQESTRRDYLHEVEHMAERVKRLEQAIGEAVKVASAELQEVIRGLQALRGIAGISAVTIAAELGNISRFRSARQLMGYSGAVPAEDSSGKRTRRGSITKTGNAHLRRIAIEAAWSYRLRPAIGPGLRKRQEDVPDEIKEIAWKAQHRLYKRYARLGAAGKDQRKIVTAVGRELLGFIWAIGIKAEAAGTQAMAA

SEQ ID NO: 194714 - protein, 390 aa, unidentified
MEPESSSIVAWIGIDWADQEHHLRLQAVGSEQVESMIVLQRPEALHDWICQLRERFPQGSIAVALEQARGALIYALMGYPFFVLYPVPPRTLADYRKAFYASGAKDDPRDADLLLELVRCHSDRLHVWAPDDPLTRHLRLLVEERRTLVHDRTRLTNRLTSQLKEAFPQSLEWAGQLGRPAACEFLAQWPSLTAIQQEKPSILREFYRAHFRLTPDELEQRLEQIRQARALTTDQPVLKTSALIVPLLAAQVQVLLPAIQALDTAIAELFPQHPDHDLWASLPGAGPVLAPRLLVAFGTDRQRYADAAQLQQFSGIAPVTQRSDKSGWVHGRWACPKFVRLCRKEISCAPGETRTPDVQIRSPILALSAPLRTTWQGKTELPCEPHEYRA

SEQ ID NO: 194715 - protein, 409 aa, unidentified
MQVVHERCAGLDVHKKSIYACALWWDEKGERHQQIRSFGAMTAELLRLGDWLQQHQVSHVAMEATGVYWRPVWAVLEGRFELMLVNPHHVKAMPGRKTDVKDCEWLADLLQHGLVRGSFVPPTDIQDLRDLTRYRAELTQAQNRVTNRIQKVLEQANIKLSSVASDTLGVSGQRMIEAIIAGEDNPESLADMAQKRLRQRIPELQMALTGRVRDHHRFLLREHLDEWKALANRIRRVEQEIDRRIVPFEHAVTLWKTIPGINHVTACSLVAEIGVNIGQFPSAQHLASWAGLCPGQNESAGKRMSTRTRAGDRWLRRALCQASWAASHKKNCYFSGQFKRIAARRGIQRALIAVAHALLIVVYTMLKTGSSYQELGGDYLERIRKDQLQKYYIRRLQRLGLSVSVQPAA

SEQ ID NO: 194716 - protein, 335 aa, unidentified
MGKNTLHMIGLDTRGGIVLREKVPRGRITSRLANLPPCLIGIEAGMATHYVARELAALGHDVKQVPPTYAKPFRQGHKNDFRDAHAVAEAVQRPTTRFVPAKTNEQLDLQALHRVRSRLVSERTAVINQIRGFLLERGIIVRQGLRFLRQALPDILAKRTDVLSPRMVRIVADLASDWRQLDERIEAVTDEIKTLAKSDDNCRRVMTVPGIGPIISSAMVAAIGSGAAFARGRDFSAWIGLVPKQMSTGDRTILGRISKRGNGYLRMLFMQAARVILMRPASWPKHGFGAWLARAAQRLHPNVLAAALANKLARIAWTVLTQERSYEARVTMTAA

SEQ ID NO: 194717 - protein, 343 aa, unidentified
MLAITTVGLDIAKSVFQVHGVDAHGSVVVRRQLKRRYVLAFFKKLPHCLVGIEACATSHHWSRELQALGHTVRLIPPAYVKPYVKRQKNDAADAEAICEAVQRPSMRFVPTKTSEQQSCLTLHRTRHLFIRQQTAVINTIRAHLAEFGIVAPVGRNGVEDLLYAVADQRDERIPEVARACLEALGALLGKLKAQILEFDRQINAWHRSNETCRRLDELPGVGPALATALVASVADPKAFRSGRDFSAWIGLVPKQNSSGGREKLGSITKQGDRYLRSLFCAGALAVIRYAKIHGTKHRPWLAKLLERRPTKVAAIALANKIARMAWAMMAKGECYREPIALAR

SEQ ID NO: 194718 - protein, 270 aa, unidentified
MAKKKSKSFIGIDVSKQHLEVAVHESDCQFRCANKVNAFGKLIVELIVWRPALIVLEATGGLEIPVVNALQAAGLPVVVVNPRQVRDFAKALGQLAKTDRLDARVLAHFAAAIKPPLRPIKSKEEQELAALTGRRDQLIEMLVDEKNRRTSAASDTVRDQIKEHIDWLEGCIAELDEQLKALLQCSASWQAKDDILQSVPGIGPVVSFSMIADLPELGTLNRQQISKLVGVAPLNRDSGQQRGTRHIYGGRAGLRRVLYMAALSAAAITW

SEQ ID NO: 194719 - protein, 403 aa, unidentified
MIFVGNDWAQDHHDIHVMNEAGKKLATRRLPEGVGGVSAFHALIAQHATDPQEVAVGIETDHGLWVASLVAAGYRVYAVNPKAVSRYRERHHVGGAKSDAGDAKVLADLVRTDAHNHRVVAGDSDQVQGIKVLARAQQSMVWLRTRESNRLRNALREFYPAALAAFEDLHDRDALAVLSRAPDPVTAARLTPSQLKAALRAGGRQRNLDTTAERIHAVLRTEQLRAPEAVTAAYASVVTAQVAVITAINTQLAALEAQLERTFEQHPDADILLSLPGLSDVLGARVLGEFGDDPERFTDAKSRRNYAGTSPITIASGKKRAVLARHARNKRLYDAVDQWAFCSLQPSPGARAYYDQRRAAGDTHHQALRALGNRWVGILHGCLTHRTPYNEHTAWGHRQPVAA

SEQ ID NO: 194720 - protein, 428 aa, unidentified
MAAYRIKTCCCGVDVHKSFFIAVIAKFNGSEIIFTKYERFSTFTGGILEFKEWLRYHNCYEVCVESTGKYYIPLYRIVSDEQFHVDVVHPKYVKAPRGKKNDKRDAKRIADMYMRDHIAEYSFIPPADILAIRDLTRYRRKTVNAITAEKNRMANCLTVSCIKLDEVLSDIHGKTGQAIIEQIVEQGGCDFDPEPFIDKRVKAPLEKFEQALDGNVTPSVLTIMGVIRKRLNYLSNQKADLESRMESLAKDFSRQIEILDSAPGIDILSAICIIAEIGVDMSAFNSVKQFLSWVGLVPQNNESAGKKFSTRIGKGNTWLKPIMIQCALSAIKDKKHPEIRKKYLALKKRRGHGKAIVAIAKRLMTAVYFMLLRDEMYNPISCTDPAPNRGSLRIENILAHFQSKGYTIVDENGEILTPESICSNPLVA

SEQ ID NO: 194721 - protein, 359 aa, unidentified
MTDGNRAPTPVVTAGLDLGDKYSYLCLIDQQSAEVMEEGRLRTTPQAFLRRFDSEQQMTVAIEAGTHSPWVSRKLEECGHKVLVANPRKTRLIYGQGRKTDKLDAEKLARLARVDPKLLSPLEHRREASQAHLALIRSREVVVRSRAQLINHVRGTVKSFGARLPKCSTASFHKKVAACIPEELWPALEPLLETIASLSTRVGHYDRELEQLAQEHYPQTKLLRQVQGVGTLTALTFVLTLEDPGRFEESRSVGAYLGLVPSKDQSGERDPQKRISREGDEMLRRLLVGSAHYILGPFGEDCDLRRQGLKIAGGAAKNARKRAVVAVARKLSVLLHHLWISGEVYEPLYNSRQLKDRAA

SEQ ID NO: 194722 - protein, 390 aa, unidentified
MIYVGIDVAKDKHDCCILGPDTEELFPVFTIRNNSDGYGELFHKIESVSKDKSQIKIRLEATGHYSYNILGSLLDHGYHTFVINPLHTNLYRKGQSLRKTKTDKVDARSIAEMLVTDKTLKPYTGTSYHSEELKSLTRYRFELVKERAKLKTSVSRLVNILFPELESLVPTLHMNSVYRLLQELPGAYFIASSNLTHLKALLADASKGHYGREKAIEIRETAKSSIGSLMPAKSMELRQTIRRIDTLTSDIKEVEQSIQKIMDECGSPITTIPGIKYRMGAMILAEIGDFARFSNADQVLAYAGLSPSTYQSGQLISSYARMEKRGSKYLRYALFNAAIYASVWDERFRLYLSKKRAEGKHYYVAISHVVKKLVRTIFRMEITHTSYQPL

SEQ ID NO: 194723 - protein, 353 aa, unidentified
MRTYYVGMDVHRASIVIVVLNGAGKVVMQSVIETGAERVRSFLKQLRGKVTVTFEEGTQANWLHDVVRPLVTEVVVCDPRHNKLLAAGNKSDRIDAQKLAELLRNGSLRAVYHGDNGVGTLKELVRTYDCLVGDTTRVMNRLKAIYRGRAIACGGHEIYRRDRRGQWLEKLREPGAKQRAGFLYEQLAALKPLRHEAKRLMVKEARRQAAYPWLMSVPKLGSVSVAQLMAVVGTPYRFRSKRQFWSYVGLAVVTRTSADHEVVNGVMRRSRRPIATRGLNRNHNHLLKRVFKNAATSACHSGPFKAAYDARVARGMDPSLARLTVARQLVATTLAIWKRGEQFNPERMKQQAV

SEQ ID NO: 194724 - protein, 341 aa, unidentified
MNHSKAVVGVDTAKRVFQLHWIEQETGEIVSLQLKREKFLEHFANRAPCLIGMEACGGSQHWARKLTRLGHQVKLMPAKAVRPFVGGNKSDAHDARAIWTAVQQPNVKAVAVKTEEQQAILALHRMRSQLVKFRTAQINGLRGLLTEYGEVMPQGKAGVKKGVAEALQRLSDRLPGMVIDTLREQWARIGQLDEQIGEIEKRLKAWFKEDAACQRIAEIPGVGLLTATAAVATMGEAKAFKSGREFAAWLGLVPRQTGTGGRIRLLGISKRGDSYLRTLLIHGARSVLTHAKEPAPWITELRQRRPLNVAVVALANKMARTIWALLKHERPYQAGWVSTPA

SEQ ID NO: 194725 - protein, 388 aa, unidentified
MRQTDDLSKSITPFVQGNTLVAIIELSLSSWLVAGVVPGIARQPLKKLEPDEAELLRLLQRWRDEAVKSGCAIERLVVAYEAGRDGFWLARWLRAHEIEVHVIHSTSVAVSREHRRAKTDRLDTAMLLRVFMGWLRGERGHCGMVAVPTIEEEDAKRPHRERENLVGEKTRIVNRMKAALIRLGIRGFKPELRRAPLKLDGLRTPEGLPIPPNTLDEIRRDLARLAMVREQIDLIEQARLERITQGPKTGPNAMVRLVASIVGVGVETADMLVREVLSRDLRDRRAVARYAGLTGSPDESGSKRREKGLARAGNARVRRGLIQLAWRFLGFQKDSALTQWYRARTDGVKGASKTKMIVALARKLLIALWRMVTTGEVPEGVRLRPVEV

SEQ ID NO: 194726 - protein, 332 aa, unidentified
MNQQGIIEKEFFFENNTKGIQHLTSQLKSEDQVVMESTANLWLPLYEAIDNKNIKVVLANPMKTKAIASARVKTDKVDAKILAHLLRADLVAESYVPPQQIREIRALIRHRLSLTKIRTMIKNKVHALTDKYGYRCEFSDMFGVSGLKWLKTLEMGELDLLILENHLLHIESINLQIDKADVAIKEKACEDEDIRLLLSLPGIDVRTALLLKSEIGPISRFVDYKHLVSWAGLAPRVYQSGNVLWNGGISRCGSGILRWAIVEAAVTAVRYDVKFCEFYERVKARRGGQKAIVAVANKMLKIVWVVLVRREVYGGVNQRRYEEKLNSAGFDV

SEQ ID NO: 194727 - protein, 376 aa, unidentified
MKRIKFVGLDVHAETIAVAVAEQDGEVRPLGVIPNRVESIRKLVKKLGPVGQLRCYEAGPTGYVVYWQLTTLGAKCEVVAPTLVPVKAGDRVKIDRRDALKLARNYRAGELTPVWVPDAAHEALRDLVRAREAAKKDQLRSRHRLIKFLLRHGRRPPTGVKPWTLNYLSWVKNEVHFEQMAQEATLLDYLNEVEHAELRIARLNLAIEEAVKLTPPKMRAVIEALQALRGVAQVTAVTIVAEVGEVSRFTGARQLMGYGGIVASEHSSGESTWRGGITKSGNAHLRRVVVEAAWSYRHRPSVGESLRKRQAVVSEEIREIAWKAQHRLHTRYRKLMARGKEKEKVVTAIGRELLGFIWAIGVKAEAAREKTERRAA

SEQ ID NO: 194728 - protein, 323 aa, unidentified
MHIIGIDVAKATFDIALPLGQGKYRTRSKIANNAQGWEQLLAWRQKHAPEAAVGMEATGIYHQALAEHLVAAGVTVYVINPAQIKAYGQSELLRTKTDRTDAKLIARFFQARQLEPERLRPYLPPTPAQRKLQALVRRLDDLQQMRQMELNRLESANEVLVEGIDQVVSTLDGQIAQIKKAITDHIDEDPDLRDQRNLLHTIPGISGTTSAFLLACLGQLTGYTDVGQLVAHAGLNPAQRQSGKHEDKVRISRIGDATLRTKLYMPALVAKRHNPVLAAFAQRLAERGKPPKVILCALMRKLLHLVWGVLRSGKPFDPQHAVA

SEQ ID NO: 194729 - protein, 373 aa, unidentified
MKDHTTVYIGMDVHHTSFTLCSLAEGEEAPKNVQTIPADYLLVVKYINGLRKRYGEGTEFICGYEAGCLGYSLYRSLKDCGQKCVILAPTTMAIEESNRRIKTDKRDAKNIAKCLRNHTYRAVHIPTVEDEQIKEYIRMRDDVKANLKRIKQQLLSFCLRHGWVYSGTKHHWTQAHLKWLEQLKLEDIYQEVLDNYLIELKRLIETVDRYDKRIEELSQRDAYREPVNQLTCFLGVKRPTALSVMVEIGDFMRFPSAEQFAAYLGIVPGEHSSSDSRNRLGITKAGNTHVRKLLVESAQSYGRGKVGYKSKALIKRQEGNPAKVIAYADRANERLRRKYYQMILRGRHSNVAKTAVARELACFMWGMMTGRID

SEQ ID NO: 194730 - protein, 355 aa, unidentified
MAGSTVVVIGGVDTHGHTHQAAAIDSAGRLLGGAEFEACAEGYRDLLAWLRDHGTIESVGVEGTGSYGAGLCRHLVARGVDVVEVDRPDRKTRRAKGKSDPIDAECAARAVLAGTATTTPKDRRGVVESIRMLRIARSGAVKARTAAINALKTTMITAPEGVRAAFDLLTAAKLIDTCRALRPDRTHLEDPVQGAKLALRTIARRIEAFDLEIRELDSTLTRLVGGVAPATLALAGIGVDHAGQLLVSAGQNPERLHSEAAFARLCGAAPIPASSGRTSRHRLSRGGDRQANRALHMAVVVRLRRCPRTRAYAERRTAEGLSKPEIMRCLKRYLAREVYHALQADLRALEGVDSI

SEQ ID NO: 194731 - protein, 340 aa, unidentified
MRIRKVARSGDRGKSPVPYDHYIAVDWSLETMAIGHMSRCDGHPRVFERPSDLKELKEYLTSLKGRTILTLEESGTAHWLYVELLDCAERVMICDPFHNRLLCHGPKTDKIDAGKLCELLRAGLLKEVYHSDNGLYELRTLVSAYQDVVSAGVRAQNQRKALTRDHRDRGKSASFIGGILQENIDLYRRSKQQYERRLADVARRNRLVRYQKEIDGIGTIGAVKIVATVVDAKRFPHAGKYLSYCGLVKHEKFSGGRSYGRRKPRYSRVLKSVYKTATMVALQTAGPIREYYDHLLSRGVAERNARHAVARYIARISYGMLKSGTHYEPYRWRGRVQEAM

SEQ ID NO: 194732 - protein, 319 aa, unidentified
MAQNDLVVAGIDVAKDKVDVCVRSLSLKRTFASTAEGRRELTSWLRRHKVGKAVMEASGGYEREWAKALRAAKIEVRIVDPKRVRSFAQSAGRLAKNDTIDAEMIAWFAETFDEARGQAYDAAREQLHQMVNARQALKDMQAKLENQGEHALPATVQRIHARIIKTIAVELVKIEAAISAMVQATPHFTELAEIIESVPGIGRTTSAALIAAMPELGQANNKIVAALLGVAPYDDDSGRRRGERHIKGGRRRTRNVFYMACLGAATQHNPVLKAFYNRLVAKGKEKKVALIACMRKLISILNIMIERRQKWDANRYAVS

SEQ ID NO: 194733 - protein, 352 aa, unidentified
MRGLKDHVPGGEELFVGIDLHKHRWHVTIRTFDVELFSASIPGTWEALYRVLARYAGHRLAAVYEAGYFGFRLHDRLVDHGIPCIVTPPSLVPQEYGNRVKTDRRDSRKLAHLLAKGLLKRVWVPSEEELYHRQVIRRRRQLVRDRVRTQNRIKAELRFYGIHLEEPRGRWTQIYSETLRRIRFGNRWMQESFNSLLEQYEFLSAQIDKQTQLLRELSENALYRERVEILQSIPGIGVISAMELLLELQDVSRFRRAEQLAAYVGLTPSQYSSADKVRMGRITGIGKNTLRAILVEASWKLITKDQIMREKYERIKIRSGGKRAIVAIARTLLLRMRRMLLDKQVYALDLAA

SEQ ID NO: 194734 - protein, 341 aa, unidentified
MGEDIGLDVSLKETAISVRRDGKRIWRGKCPSDPTLIAEVLRKRAPEPKRVVFETGPLSVWFYHALQAEGLPAICIDARHAKAALDMAPNKTDANDADGLAHLAEVGFYRAVRVKGYDSMLARTRVAARSRLVQITTELSNQIRGLMKTFGLVIPRGKGATFEAEVQRLLVGQDELARIILPMLEAWRSVRSRASALGRQLLASARQSAACQRLMAIPGVGAITATSFTAAIEDPENFKTSRSVGAWLGLTTRRYQSGEVDYDGHISRRGDAHLRGLLYEAATVILTRSHAESDLRQWGLMLRERIGFKRAAVAVARKLAVIMHAMLKSGEPFNRTDSATA

SEQ ID NO: 194735 - protein, 392 aa, unidentified
MKSPCDGEFTAFIGIDWADTKHDICLQPANGAPREFDRFEHKVDCIEHWACSMRERFGGPIAVALELSKGPLVYALQKYDFFVLFPINPSTLAKYREAFKPSGAKDDPTDAEHALELLLHHRDRLKPLKPQSVPMRTLLYLVEQRRRLVNDKTRFTNRLGYALKQYFPQALDWFEQRDTPLFCDFLARWPTLAQVKRARKSTLQAFFKEHNVRFAKVIDERICAIKVAKPLTEDMAVITAHRLQALVLLDQLRATLQAIDRFDAQIAVVAPTLPDYALFSALPGAGPSLAPRLLAAFGEQRERFTGAHELQKYSGIAPVTERSGNKSWVHWRWRQQRDKGSAHQATVRALAYKWLRILYRCWQTRTPYDESTYLNALTKRSSPLLKPLSATM

SEQ ID NO: 194736 - protein, 340 aa, unidentified
MTHITRIGIDLAKQVFQLHGVDERGHPVLRRRLARSQVQAVLTQRPPCVVGLEACGSAHYWARELRALGHDVRLMAPQFVRPYRKNDKNDGNDAEAICEAVGRPQMRFVPVKDVGQQAVLTVHRARQLLIAERTALVNQRRGLLAEFGLIVPAGIGAVRRLWPALLEAPAVPALAREVFTDLADRLRTVDERIAVYDRRVEAGARQTEPAQRLRQAPGIGPVTATALVATVGTAHAFKNGRQFAAWLGLVPRQHSSGGTRRLGRITQRGDVYLRTLLIHGARAVMRQLARRTDATSRWVTALQARRGFNKAVVALAAKHARIVWALLATGRTYQPTAACP

SEQ ID NO: 194737 - protein, 429 aa, unidentified
MTQSTEFAAFVGLDWDDEQHAVCILPAAGGPAQHSEVKQHPEDLAAWVAELRARFGGRPVAICLEQSRGALVYALMHYDFLVLHPLNPKQLSDYRAALYPSGAKTDPADAELLARFLRDHTDKVRAWHPDDAVTRGLRLMTEQRRKWVQDRVALTNELQQRLKESYVLALELCGEDLWSESLLALLEKFPAQRELQRASPQQLEKWLPKRRRTVDDPPAEELLRERIAAIRKAAPNTTDVPVLEHARLVVVNLVAMLRTLNDGIAASDQKIAELFAVHPDGELFASFPGAGKALAPRLTAAYGTDRDKFQDARDMQQLSGIAPVTKASGKSRVVQMRYACPKFLRQTFHEFARCSIRSSRWAKAYVDMRRAQGRKYHEILRALAFKWQRILFRCWQTREVYNEDRYLQRLRAAGSKLVAFLPPDPVPTP

SEQ ID NO: 194738 - protein, 332 aa, unidentified
MLYGAIDIHKHVFQAAVFDADSGEVVEARFPATRERLADWAMEWQGKLAAVAIEATSGWRWVVRELQRDGFIVQLADPGQALALKGKRRRAKTDRLDARWLAMLLAKQMLPSAWIPPEEIQRLRDLTRLRLALSQDRTRWAQRLHAFLGHEGWPCSRSRLLTAKGRLWVASLALDPHAKTQTQRLLRLIAALEQEISELDSELRLLARTDNRLRALQTIWGVGPILACHLLAEIGDARRFRRARQLVRAAGLDPVVIESADSKRRGRLAKNGSPQLRWALVEAAQHACRNGSPDLDTYRSVRARAGAQRATLTAARKVARRCFHTLTDAAAA

SEQ ID NO: 194739 - protein, 316 aa, unidentified
MICGVDVSSKSLDARIGRDGAFASFTNDPKGIAQLAEFCQRHKVNLVAMEATGGYEKKPFALLWAAGIQVAVVNPRAVRNFAQGMGLFEKTDRIDAGVIGWYAQTKQCVAVSPASAQQQQLKAMVTRLRQLTELRAQQRNQRLLVTDKVVLKSFRKLLDLVQKQIRDLEVAIAGLIDADAVWHKLDQSFRSIKGVADRTVARLMAEMPEIGTLSNKRISKLAGLAPLACDSGQWKGKRTVRGGRRTIREILFVVAAGVSRHNADFGAFRERLEATGKAKKVIRIALAHKLLVRLNAKARDVLQQLREATPAAVLLS

SEQ ID NO: 194740 - protein, 412 aa, unidentified
MKDLLEISCGLDIHKEKIVACILTGPLGKPTHSEIREFTTLIPDMLALRDWIISENCHHVAMESTGIYWIPIYEILEDAFSGDITLLVVNARHMKNVPGKKTDIRDSEWISTLLRAGLLNASFIPEKRIREFRDLNRYRKSIIRDITSQKNRVEKFLQSSGFRLSSFISDIFGASGRNIILHLMEHGQIDKMSLDSYLKTKTRKRIDEILMSVNGTLSEHQKSFLKILMCHYDSMKEHLIEIETHLQEDMLPFALQIEQLNTIYGISTTASCAIIAEIGTDMKPFKTAEHICSWAGLCPGNNESAGKRKSTSITKGNPYIKSMLCEIAWVIAGKRNTYLSAWYWRIKQKKGARKAIVALARKLLVIIYTMLKQGTNFDENCFEVRRKNCEQKQLSRYIRELEKHGYTVEAQV

SEQ ID NO: 194741 - protein, 356 aa, unidentified
MTIVAHAHPFVIGVDAHARNHAVAVVACPTGEVVDEAQFPATVAGLQRAVSWVARRTGGDLDVLWVIEGVGTYGARLARVANDTGYAVAEAGRMNARANRGVGKSDPLDARRIAQSVLAVDEGMLRRPRADDGVRAAVRVLVASRDHLSAERTSAVNALTGLIRVADLRIDARRPLTAAQITAMAAWRGRDEDLATAVARREAVRLAKRVIAADREIAANTKQLTDLLNASPARVLLDQPGIGPVTAAVTLAAWSHPGRVRSEAAFASLAGVNPIPASSGNTVRHRINRGGDRRLNRALHMATVTRIRMDPRTRAYVEKRTAEGRTPREIRRCLKRYLARQIYRQLNAAEIALNPT

SEQ ID NO: 194742 - protein, 355 aa, unidentified
MNSEKYIGLDVHQATISIAVMDSTGKVVMESILATKAATILEFFEGLRGTLSVTFEEGTWAAWLYDLLKPHVTKLVVCNPRKNALLKDGNKSDRIDARKLAELLYLNKLSPVYHGETGMRMLRELARSYLTIVKDTARVMSRLKAVYRSWAIPCAGRDVYYRRHRDEWLGKITEAGVRRRTEQLYLQLDMLQHLRQQARRELLAESRRHPITAKLRQIPSLGPIRSALAVALIQTPNRFRTKRQLWAYSGLALETRTSGEYRYVKGQLQRSKKQISIRGLNKDHNHDLKGLFKGAATTASVRPGPFQDFYERSLAKGIKPTMVRLTLARKIAAITLTLWKKGENFDADKLKSQAA

SEQ ID NO: 194743 - protein, 319 aa, unidentified
MTQNDLVVVGIDVAKDKVDACIRTVTERRTFPTTASGRRSLIAWLRKHRVGKAVMEASGGYERVWAKALRQTGLEVRIVDPKRVRSFAESAGRLAKNDKIDAEMIAWFAETFSEAPSQLEDPAHEEIKALVKGRKSLIDLRARLEMQNEHETPPLVRKAHARLLKHLAGEIVAIETAIGTKIKATPAFAVRAEIIESVPGFAEATALTLLAGLPELGQVSNEVAAALVGVAPYDDDSGKRHGQRCIKGGRRWVRNALYMPCVGAATLNNPVFKAFYQRLIAKGKAPKAALIACMRKLIVILNIMIARGEKWDPKRYRVA

SEQ ID NO: 194744 - protein, 425 aa, unidentified
MEEPVKRGCGIDIDSLRLWVTVFITTLTGKVKMDTIEFDNSVDGIEKLITWLRKKKVTHVAFESTGNYWQMLYSFLEYHFTVIVANPRQIKQLKGKKTDPHDAKNIARLLRLGVIEPSFILPHDLREIRDLTRQYQNMIHDWVRVKNRITKTLRHACITLDAYMADIFGVSGQVIIQSLIDGVPGKEAAKLVKGKLKKNIPNIEAALRYPLSNHYREILARYWRQYLFLQDELANLDIEINMRMKPYKAPIKQLQTLPGFGQKMSCNIISEMGDDMSCFPKAENLCSWVKICPGNNSSGGKRKSGRNSKGNKYLRSYLVEAAWAAVRTRGSEFRELYYRRCARLGKKKAIVSVAHKMLRIIYTMLSKGIDYDKAYELHNSQANKKAWKNKGLVSLTNEELVSELLSRGADKVIWSWEDSEAALTI

SEQ ID NO: 194745 - protein, 375 aa, unidentified
MSATVTRRVQDTKKLYVAFELGEKEWKLAMSLSLEAPPRLRSLRARETTRLLEVLEKERQRLAAEQIVSCYEAGRDGFWLDRFLHSHGIDNRIVDSASIEVRRRARRVKTDRLDAQKLLTMLHREALGEKDVWSVVHVPSVTDEDARSLQREYRTLVKERSRSSNRIKGLLASQGLVAPRIDGRLPEWLASARLWDGSPVPSGMRARVEREFARWRFTHDQVLALEKERRDRTKDETNRSLEKVRALYALKGIGLGAAWTWGLEFFTWRNFRNGKQVGALSGLAPTPYQSGDSEHELGISRAGNRWVRGLAIEIAWGWLRHQPDSALTHWYNERFARGGPRARKVGIVALARKLLVALWRYVETGALPEGAVLKG

SEQ ID NO: 194746 - protein, 317 aa, unidentified
MNQTTSVFVGIDVSKAVLDVAVRPSGTTLRFSNDEGGIKALVAEMNALAPALIVLEATGGFETPSVAALAAANLPAAVVNPRQVRDFAKSTGKLAKTDTLDAAILAHFGEAIGPAVRPIKDADLQALEALVTRHRQLLEMLTIEQNRLSMASSQTRKDILQHIAWLKKRLKDIDEQTTRCIKATPLWLVKDQLLQSVPGVGPVTSSILLVALPELGKLNRRKIAALVGVAPFNCDSGTLQGKRRVWGGRAQVRSTLYMATLVAVRFNAVIRAFYTRLCKAGKPPKVALTACMRKLLTILNTMLKTNTPWAQSAPENA

SEQ ID NO: 194747 - protein, 358 aa, unidentified
MSNKRKIMDYIVKNKEIFIGLEDSKTTWVLCVRADREIIHQVSMPARYGALREYLKNYPGCKVHVVYEAGFKGFNLFDDLTGDGYNCTVVPPHTVHQEKCARVKNDRIDAKLLAKNLEDGNCKACHVPDKERREDRQVARTLGTIVKEVVRTKNQIRKLCDFHGIETGISVKNWKKVHYLHVKSLVPGFSSSLRLTFDKLFDDLEHFWKQQKAYKAALAALTRKERYAKTFTIATSLPGIGDLTAIRLILELGEDFERFRTGSEIAAFVGLGGTEHSSGQSERKGGITKQGNAQIRSWLIESAWVAIRHDPALREFYSRIRLNTGNAKKAIVAVARKLVVRLRCCIVSNTEYLIGVIE

SEQ ID NO: 194748 - protein, 319 aa, unidentified
MSKAILGIDVAKLKLDVELVIGEKALKKKFDNNDKGFKLLQGWLTSLHIEQVHACLEATGTYGDGIAEFLYEGGHRVSVVNPFQIKFFAKSTLKRNKTDKADAHTIATFCLKMDPRPWQPLPLEVKQLQALVRRLEALERMLQMETNRRGVASVETQPSIDRMIKNLKKEIDNVQRLIKDHINKNPDLKHKSKLLRSIPGIGEKTARLLLAEIESRHFTSGRALAAHGGVTPGRHQSGTSIDWTKLSKLGSSRLRKGLYFPAITALKYNEVIKQFAKRLDRNGKTPMQIVCAAMRKLLHIAYGVIKNNRPYDPTMAISA

SEQ ID NO: 194749 - protein, 405 aa, unidentified
MSELEKDLVFAGVDTHKDTHTLCLLDHMGRAIGTFRFTADAKGYDALADKIGGPATCVGVGIEGTGSYGAGLTRRLLELGYCVYEVMVPGRARRKPGRPKSDPADAEVAARQVLARANLSKPKDQSGWTEELRQLMIARDRLVQATSAMINAAKSLIVTAPEDLRRSLEGLSRKNLRSALSTLDPAAGGIILALGSLGKAWDLQDREADAIEERMKRVLEANAPALLAIYGCGTVSAAALAVAGGGNPERLKSESEFASLCGVAPLLASSGKTERHRLNRGGDRRANRALYQIAVTRMSYDQRTKDYVGKRKRDGKSKKEAIRCLKRYIAREVFRALRNPLEIKGPSWKDLRPARQARGITLVEAGKALNVGFQRVSYAETGRLMNVRFLEEYDAWLKSQAKRES

SEQ ID NO: 194750 - protein, 342 aa, unidentified
MSVYVGIDVHRKRSQVAVIDAVGEVLANRNVPNGAEPILGVIGGLPPGTPAAFEAGFGTVWLVELLEDYGFTAHLVHPSRCKAIASARLKNDKAGAAILAQLLRADLLPEAWIAPPPVRQLRALLRHRVALVRLRTLLRNRIHAIVAKHGYDRPDGGYWTGPGRAWLAALELPAVSRELAGDDLGLTGALQERVDRLDWEIRQRARSDPRARVLTQLPGVGPFTALVILAEIGEVSRFASARKLASWAGLTPTVRGSDRVAHYGHISKQGSVWLRWVLCEAAQTAKRSPEFAAAFQRIAKRRGKKIATTAVARKLATRAWHLLADAGYAAPPQPAAPQKAAR

SEQ ID NO: 194751 - protein, 383 aa, unidentified
MFSINLVQVLMSIKPILSSVSYMDHSPSTRPKREMATFYTTTKGLRACHDFLSQFHVEAVGMESTGVYWRPVWHALCDDFELILAQPAHMKAIPGQKNDKKDAHWIAKLTRISLLPRSFVPDETIQELRELTRQRKHYVESRNRETNRIHKILQSGGIKLTTYIEDIMGLSGRNLLQLLVDGTPITPRVVHQSVYTSLKKKVPQLLEALDGYFSDHHRFMLKQSLEIYDFYQKQIELLEERITVYLSQYEKHVEILDSIPGIDVITASVIISEVGVDMSQFPTSGHLASWAGLCPGNNESAGKKRSTKIRHGNSYLKKCLCQAAFAVKRQKGSPLAERYYQIQSRRGSQKATIALAHQLLKIAYILLKEQMTYPEFLAQKKDY

SEQ ID NO: 194752 - protein, 349 aa, unidentified
MIIVGVDYHPSVQQVAFLDTETGETGERRLNHSDGEAERFYRDLQRRQVKVRVGIEATGHARWFERLLAELKFELWIGDPARIKAARVRKQKTDRQDAQLLLRLLIEGRFPQIWVPSPENRDLRQLIWHRHRLVQMRTRAMNQIQAAAMNEGVRRKKTLWSKTGRRQLEALPLAPWATRRRQDLLELVDRLNTTIDELTAAAEQEARKRPEVLRLMTHPGVGPITALVFVLVLGSPDRFGCGHQIGSYLGLIPCEDSSADRQRLGHITKQGSSLLRFLLVEAAQAAVRWDPDWRRRFVHLAMRRDRRIAKVAMARKLAAASTGCGVRDSITHRLCSSVRTRESLDTSMV

SEQ ID NO: 194753 - protein, 326 aa, unidentified
MEKLSRIGMDTSKHIFQLHGVGVSEQVVLRRKLRRKEVLSFFAGLEPTQVGLEASGGAHYWGRELARLGHSVRLMAPQYIKPYVKRGKNDAADAEAICEAMGRPTMRFVAIKSAENQAALMLAGMRERLVRNRVQLANAIRGYAAEFGVVAAKGRASIKPLLLRLQSDRTIPAMARELFAEHAKQYAALLVQLAAIDAKLLAFHRGNALSRRLARIPSIGPVVASLLVMKVPDPQAFRSGRQFAAWLGLTPKNHSTAGKSRLGVITRAGDETLRSLLVVGATAVIWQARAARAGRPRPGCSRYSNANRRSWRPSRSPTRSPVSLGS

SEQ ID NO: 194754 - protein, 343 aa, unidentified
MDEISMIGLDIAKNVFHIHGVNASGAPVLRRQLRRGQVEGFFAKLPPTLVGLEACGSAHHWARVISRCGHQVRLMPPGYVTPYVKRNKNDGRDAEAICEAVGRPSMRFVAVKSVEQQATLAVHTTRRLLVQQRTAAGNALRGMLSELGIVAAQGVKGLRTLMQQLEQPSEAIPEIMRGALLLLARQWNELDVAERALEKQITRTANADREAQRLMAVPTVGPMIASTVLAKVPNPGMFRSGRDFAAWIGLTGRDHGTGGKHRIGRISKQGDRMLRTLLINGASAYLLHQKRRGVTDPWLRELLARRPYKVVMVALANKIARIIWALLAKGGEYRTRASVPAAA

SEQ ID NO: 194755 - protein, 459 aa, unidentified
MALKKKIGMEIINANAAGIDVGSKSHFVAVGQSLEDVKEFGVYAEDLVILCEWLLSFGITTVALESTGDYWQNLYVELQKHGLEVVLCNGKFTKHAKGKKTGVKDSRWIQKLHSLGLLTSSFLPDETTEILRTYCRQRTNWIELAASASRKMQKYLKFLNFRLDVVVNDVCGQTGLKIIEDICNGNLDPYSLAEHRHYNCRKPKEEIAKALHGNNRKDFLFGLKQEFDSYNFFQKKIKACDKEIEQLVKQEIKKSPQKQIHKTTDKPYKRINKNAVDIKNFNQIAFQYFGGVDLMAIEGVSHATVMAVMSEIGIDGFRKFKSAKEFCSWLRLAPNNKISGGKVLSNRIPKGSNRLKIALRHSANAIGNLKDTHLSNFFGRIAYRKGRQAAVSATARKLATVIWTMITKKVLYNPPTEYLFLDQKRKMGLVNRIKKQMAKFDIKPEEIGIGNSLIPNYNF

SEQ ID NO: 194756 - protein, 326 aa, unidentified
MEHELHYIGIDTAKEKLDVDVLRPDGRHRTKKFANTTKGHDELVSWLKGHKIDHAHICIEATGTYMEPVAECLYDAGYIVSVINPALGKAFAQSEGLRNKTDTVDARMLAEFCRQKRTAAWEAPPPLERALRALVVRHQALTDMHTQELNRTETAREVQRPSIDAHLLWLEAELKRLEKQIKDLTDDDPDMKHRRKLLESIPGIGEKTSAVLLAYIGLKDRFAHARQFAAFAGLTPRRYESGSSVRGASRMSKAGHVSLRRALYMPAMVATSKTEWGRAFRDRLAANGKKGKVILGAMMRKLAQVAYGVLKSGVPFDASRHNPVAA

SEQ ID NO: 194757 - protein, 411 aa, unidentified
MGKVTQGAPGLLLFLRRAVMIIVGIDVASEKHDYFMLRKETGEVFNSSAITIPNNEAGYKKLHKDIQTFCGAMGDSKVRIGLESTGIYHTNIIAFLLEQNYETMMINPILTNMVRKASKVHTPKNDNLDAQTICKYLVDNESGFVPYTLSLYHIQTLKTLSRKRFYIVEDLRKAKLAVNNLIQLIFPEFKTLFRDIYCESALSVLKAYSSPQKLARAHTAKVAALLHGSCKCTADQLIEAAKHSIGLKLNSYAFELVDAIEELEHIQHRVANYNAQIKHYVNELCPNLLSIPGVGYATAGLIAGEIGDINRFSSTDSLVSFSGIDCTVYESGKYKAQHCIPSKKGSKYLRYALFQVSRVIWQWDPIFKEYYNKKAVEGKHYYVILGHIQKKVIRVIYSVMKSGRSYVPHTA

SEQ ID NO: 194758 - protein, 266 aa, unidentified
MEHLPRFVGLDVHKHYVMVAALDATQHLVLTPRKIPMERFAEWARTQLTTADQVVREATTNAWELYDLLAPLVAHVKVAHPLLIKLISSARVKTDTRDTLHLARLLQAGLIPEVWVPPQPVRELRLLIAHRQRLVRQRVQACNRLQSVLHAHNLVPPTAKPASQEWQAWWESLEMPAVERLRVQHDAAILQQMDTLLEAVEKALYRLSGQSPWAADMTFLMQLPGFGLVNSMTLLAAIGDISRFATASKLVGYRGLGASVHASGQT

SEQ ID NO: 194759 - protein, 404 aa, unidentified
MWEAFIDWADTHHDALVLDEKGHQRGSVRVDHTPEGLAKLNTFLETITGPDQKEQMACIIETNHGLLIAFLLEAGWLVYAVNPRTVDRRRSASGAKTDLIDAYLLAKTGRADLADLRRLTPDSEVVQELKVLTGDQDALIQMQTRLVNQLTATRVTSYPVALQLKASVQHHSTLIFLQTSPTPQAAMGASVQQITEVLKHAGHTTAEKVAPKIFEMLHQPQLTANAMTTRTKSRLMLALVAQLLPLVEQIAQYEKEIPPLFLKHEDNEVWSSLPRAGKRLAPRLLAEIGDERTRSADAGSLQALAGTSPVLFQSGNDAKAHRRLGCIKPRLFALHQFAWQSTQQEGWARDSYQRKRAEGKSHTVAVRALANVGARIIFAMLKSHEPYDPATFEAAQRLHARHVA

SEQ ID NO: 194760 - protein, 328 aa, unidentified
MTTLGIDVSKDKLDVHLLHDDYSQDAQFDNNKSGWRSLRNWLKKRSHSESVNVCLEATGRYGEGVTEFLHKATHTVSVVNPNRIKSYAQSLLTRNKTDMSDAMIIANFCRTQWDTLPIWTPPDPAQHRLQALIRHLQDLEKMRQQERNRLKSGNQDDDIMSRLTDHVDFMDQQIIEVKDNINRHIHQHPNLKDKHDLIISIKGIGSLTAAKLLAEIPNIHDFDSPKQLVAFAGLNPRQRRSGSSIRGKTRISKIGHASIRAALYLPAVVAKNTNPLLQPFVQRLQQSGHCPMSIVVAVMRKLLHLIYGILKSKQPFDPDYLNKKTTYA

SEQ ID NO: 194761 - protein, 345 aa, unidentified
METMHYIGLDVHKKTIDYCVKDGSGRIYAAGSIRATRLDLDMWMKTLPRPWTAAMEATIFTAWIYDHLQPHAAAVKVAHPLMLRAIAVAKKKNDRIDAKKIADCLRCDFLPECYMASTEIRERRRTLRYRNLLVRQAVQMKNKIAVLLMEAGVSYNKQKLHKVGYFRELLATNPDIDEGLKPLLRLCRETVVHLGKTESALVRSLERDSLLVERVERLMTIPAVGPITALTWALEVGDVQRFSSIKKAISYCGLCGAERSSANITQRTPLSKQRNKHLQTVLIEAAKMAPRNSPELAMVYEHEKQKGNANRATLAVARKMVAYLVAVDRRQKGFLVVENKNRTAA

SEQ ID NO: 194762 - protein, 314 aa, unidentified
MAQFITAAGIDVSKAWLDVALWPDDAALLHIERSEAGCFDRLAAWLREHGVSRVGLEASGGYETEVMDALQARGFEVIRYNAYRIRMFAKANGRLAKNDRADAGILAHAAGVLPVKHARARQPQLDPLVELLNYRRRLQDWIGDCTNQLEHLRDKVLRRQTTARRARLHREVTAIDKQLAATLAASGASRELVQRLRNVPGVGPVLSAALVALLPELGTLSRRKVASLVGVAPFDNDSGNRRGERHIQGGRARLRRILYMATLSATQHNPVIAAFAKRLAGKEPKVIITACMRKLLVILNAMVRDAKDWSPNAA

SEQ ID NO: 194763 - protein, 351 aa, unidentified
MFMIGVDYHPSFQQIAFLNQETGEFGERRLDHSDGEVEQFYRRLQSQSVHIRVGIEATGYARWFERLLGELGIELWIGDAAEIRTLRVRKQKTDRQDAQLLLKLLMEDRFPRVWIPNPENRDLRQLLWHRHRLVQMRTRILNQLQAVAMNEGKRWKKRLWNKQGRALLENLPLAPWASRRRQDLSELLDRFNPVIGELTTAIEREASKRPEVVRLMTHPGVGPLTALAFVLIIGDPFRFARGKQVGSYVGLVPCENSSAGRQRLGHISKQGNKLLRFLLVEAAQVAVRFDPDWRRRYLHLAVRRDRRIAKVAMGRKLAVRLFWMWRKGWDYSQFVEFGSHAGQPEANPGVQ

SEQ ID NO: 194764 - protein, 339 aa, unidentified
MGKVYAALDVSDKTTHICVVNVDGTVTWRGVCATDPKVLAAVLKKRCPDVIRVVLETGSLSAFLYHGLVERGIPAICVCARHAKGVLSTRVNKSDPQDAEGLAQLARTGWYKAVTIKGEATHLNRANLKIREQLVAARQAMTNQLRGLLKLFGLRLGTVTTPGKRRERLEALFVQKPALKAVMLPLIESIEALETQIKRSGRLLAASAAADPVAARLMSVPGVGPFVALIYKSSIEDPGRFTSGEDVSAYAGLVPRRNQSGERDYNGCISKAGDPMLRCALYEAANNLLTRVKRPSALQAWGKRLIETKGHKRARVAVARKLAILLHTLWQSGSEFRWT

SEQ ID NO: 194765 - protein, 462 aa, unidentified
MQMTLGIDVACRAAHQASLADETGRFAWSGRKFRTTAADLDQLWESIPAGAAVLVVMEPTRNAWVLLAAWFRRRGATVIMVPPEQSADLRDYYSKHAKSDRLDSKMLARLPLLHPEGLRPAEGLGPADALRRASVLRSSLVKRRHVILARLDSYLELLGPAWHAAFGGDLANITPLRLLAAGYADPHAVRRLGLARLTRFTWRYSHGAFGEHYAAGILAAAAETLQLWDGELSYPDLAEDIAAEARLALTLTTEIRDLERKIAALLHQADPAGILTTVPGVGAIGAAQILARLTDPARFRSMAGARSFTGLVPSLTASGTSGRHGPPTKSGDALLREALFMAANQARRIDPVLAARYHRLMVTCGKHHNSALCHISTAVLTRIIACWRAGTPYQIRDLDGTPLTTAQARAIVTQRYHVSDELRALRRTSHLSAKAGRRHQESPSAPTPARPQPNATARSRNT

SEQ ID NO: 194766 - protein, 326 aa, unidentified
MHYLGIDVSKATLDASDASGDNRLSSANSRVGIRKVIKWAQGKHANNDELQFVIEPTSTYHHVLLDELSNSDIAFTVINPARTKAYSTSLGKRAKTDRVDAQLLASLGETQQTAPSHQPERFQEQIKSLRRHRESIEQQIRSLRNQFGSVTCSPWADHEVLRSLRSIIRHLEKEVLSADQRLEQLISEDETYSTISELLQTIPGVGPKTAQLILSEMPPAWQCASSRVWVAFAGVCPQPYQSGQSSYSRLSRMGSRRVRTGMYMAAIVAMSYNPAIAELVARLKERGKGGKLIVMAAMNKLIRICYGVIKSRKPFDPTLNIAPQNT

SEQ ID NO: 194767 - protein, 327 aa, unidentified
MPDKPASSAAFTYLGIDVAKDWIGIARAGCKTTQRIANTPAAIQAWLQTLAAQPIALAAFEPTGGYERTLRRCLAEAGIAFARVHPNEVVAFRTRRGVRAKTDALDARLLAEFAEQALARRGLQPLIEADETLRDLVARRRQLVAMLHAERCRVATTTQPAVKRTLDAVTLALKQAVDEIERELHAHIAECPPLAAIAKTLRSLKGVGPITVFTVLGELPELGRCTGKEIASLVGLAPHAQHSGKSHRRAVTGHGRPGVRAVLFNAARCAIRHNPVMRDFHQRLVNQNQRPGKVALVAAMRKMLITLNAIAREGKPWSHADASHADA

SEQ ID NO: 194768 - protein, 367 aa, unidentified
MSSIAHRGFVHLGMDVAKDSIAVAVLSPDRDAAEVDKIFHDSDSVRRLIKRLGKPKGIWACYEAGPTGYDLQRLLTSMGVRCDVVAPSLIPKGSGDRVKTDRRDARRLAGLHRAGELTPVAIPTPAQEGVRDLCRTRGDMVQDLTRARNRLSGFLLRHSVVWRGGSPWTERHRRWLTTLSFDDPAIATTYSHYLATVKLRDTALESVEADLVPWCTQDPFGHQVPRLAAYRGVTRIGALCLAAEVFDWRRFPRARPFMSFTGLVPGENSTGLTQRRGSITRAGNAHLRGQLCEAAWAYQHSPNVGAGIRERQVGVPPETVARSWAAQIRLSRRFRQLAAHKNVRSVVAAAIARELAGFLWAEMVAEV

SEQ ID NO: 194769 - protein, 339 aa, unidentified
MQLYAGLDLHSRNTYIGIMDKEFKRVFNKRIANKLPLILATLKPFQNQLKGIVVESTFNWYWLIDGLMDAGYDCLHLANPSAMKQYEGIKHTDDQHDAFFLAQMLILGILPQGYIYPKEDRPVRDLARKRLFLVRHKTSHILSLQSLIARCCGKRVSANEIRKFTVEDLQQLLEREYIVLSAQANLDTIVFLKQQILQLEKAIKNKVKLSKAFQQLLTVPGIGLILAMTIMLEVGDIGRFHQVGNFASYSRCVSSQRLSDGKSKGHGNRKNGNRYLSWAFTEAAHLSRRYNERFRSYYNRKVAQANTSLATKALSNKLARICYYIMRDQVPFRENLLSQ

SEQ ID NO: 194770 - protein, 413 aa, unidentified
MQTGYTVVAGIDVHKRVLMVVVGQAGGEECATAQGKFTPTRTGLRDLARWLDEHDVDAVVMESTAQYWWPVWMELETQWPLYLAQARSNAAPHGRKTDFRDAARLVRRFFSGDLRYSFVPKPEQRAWRRLSRTWKSLGEQIIETGNEIEALLEEGQIKLSCVVSDQLGVSGKRVLRALAEGQSDPEQLARLFDRRVRASEQERVDALDGRLPAAHRLVLKQHLDRIELLERQRDELQKCLEQLMEHCAPAVKRLTAVPGINVVAAQHLIAEIGPEVSAFPSAGQLASWVGVCPGRQESAGISRSNRCAKGNRFVRALICQIAHAASRTKGSYWEGLFQRWQKRLGPNKALWAVAHRMLRLIWKMLAETVDYIEQGPRVLDAARLAARMKRLRREFRLHGIDLDCKPINGESMA

SEQ ID NO: 194771 - protein, 351 aa, unidentified
MMVFGVDPHKQAHTAVAADELGRKKAEKTVRARHEGYRELIAWARDLEPGRRKWAVEDVRHVASGLVRELLAAGEEVVFIPTRLMAGTRAGGRERGKSDPIDAQANARAVLREDVFLPAARLNGRVLDVRRLADHRDDLVAERTRLMNRLRWLVHDLEPGLAPAPRALAGNKGRLLLDQGLRGLPEGPGRRVALSQLAAVTRLSAEIRGLDKDLQALLQDLCPELLAIPGVGTVTAARILGETGDIRRFRSPAAYARHNGTAPIPASSALKDVHRLNRGGNRQANAAIHRIALTQARCHDGARALLERRAGSIRETRKAALRVLKRHLSDVIYRTLKTAAWRLDEPSPQAA

SEQ ID NO: 194772 - protein, 341 aa, unidentified
MKLMRVGVDLAKSVFQVHGVDRSERAVWRRKLTRATWLKVFLDTVEPGCEVGMEACGGAHHWARILQSHGFIVKLIAPQFVKPYVKSNKNDANDAEAICEAMSRPNMRFVAVKSIAQQDLQAAHRVRAELSNQRKAKANQIRGLVSEYGLVAPKELVHLRAAIPMWLEDGENGLTGQFRRLLSALSHDLRELDHRMLELDREISAIAGVDPVAQRLQQLRGVGPLIATALVATVGDAKQFANGRQMAASIGLTPRQNSSGGKERLLGISKRGDTYLRTLMIHGARSALRTAKNKDDRLSRWVTRLAETRHHNVAAVALANKMARIAWAMMKNGTEYQPHLT

SEQ ID NO: 194773 - protein, 398 aa, unidentified
MKTTLKTSARVADPATKISRAQDFSNHDLSVGIDVHKKRWQVAVLCDGVCLGNVSLEADSDLLIRHLRGRYGNAQFRCVYEAGPFGFALCRALWAAGMECIVVNPADIPGTDAERRGKTDAVDARRLANHLAAGLLRGIHVPSEKLQKHRSLIRFRKKLWGDLTRCKNRLKSELRFQGVTIPPPFDNPHWSHNFLHWIEATASKDADLQDTLELMLEEVRHLRLLLLKTEKKLRALMRTEAYERQEQLLRSVPGIGPITAQLFTLEVGDVARFKNFDALNRFVGLCPDEHSSGERQQHTGITQRRHNQLRSHLVEASWQLIRRDPAMLDAYKKLCSRMKPEQALIRIARRLLRRMRAVLLSGRMYVRGIEQGSSEEINAPEPPEKKRKGRQPKQETTN

SEQ ID NO: 194774 - protein, 326 aa, unidentified
MTLPTLGLDIAKAKFDAALLYKDQLKQRTFPNDATGFRQLATWLTKAQATQVHACMEATGTYGEALAQFLYEAKHTVSVVNPVMVKGFAHSELLRTKTDKTDAALLARFCLKQNPRAWSPPLPEVRELQALLRRLESLNHMHQMETNRVSSGIASPIVEGSVQSTLEFLEQEIRKIKKHIHDHIEQHPELKRQRDLLVSIPGIGEQTAAMLLAEFRDILNFESAREMAAFAGLTPKHRQSGSSVHGKSRLDKMGAAHIRKALYMPAIVALRYNAVIQVFGERLRAAGKHSLVIIAAAMRKLIHLAYGVLKSGQAFDPDWATHKVGA

SEQ ID NO: 194775 - protein, 464 aa, unidentified
MSKHNKTHGRKGSGPAASLPAVRPLVAGIDIGSKTHWVCGPQRADDKPNVRVFRTTTPELEALADWLTAEGVESVAMESTHVYWIPLYEILEARRIEVVLVNARHLRSVPGRKTDMKDCQWLQLLHSCGLLQGSFRPGEQICALRALERQLDNLVAQRGRCVQWMQKALDQMNVQIHRAVTDLAGKTGMAIVRAIVAGERDPVRLAAYRDRRCRHTEAEMMEYLKGNWRDEHLYNLASALRLYETFNAEIATYEAELAEKLKALQPPERRDQPPPSHPNPNKEKAIRRRGEADKRTDLYRFAGVDLLHIDGIGVGCAATILSEIGTDLSAFSTEKKFVAWLRLSPRTAISGGKPIRKRRNSLGANRIAGVLRMAALTLQRSKTALGAYYRRIARRKGGAVAVFATARKIAIHVYRMLRYGQSYHDIGEAAYQAAYRNRKLAVLKNTANSLGYTLTPQSTPAPVG

SEQ ID NO: 194776 - protein, 442 aa, unidentified
MNNSNSIARYIGLDVHKRQITFCILSAAGQVLARGQIPTTAAAIKAFATAHLQPTDHIALEATTNCWAVVELLEPHVAKVVVSNPLTTRAIAYAKIKTDKIDARVLADLLRCNYLPQVWQPDPQTLRLRRLTHRRAALCADRTAIKNRIHATLAMNLIQAPLQDLFSTKGIQWLQNCTTDPELDPDTRAALASDLRLLQAVQAEIDALDQQLATLAYTIPQVKLLMTLPGVDYPTALALLAAWGTVQRFSTPAQAASYLGLSPSTRQSDLHCYHGPITKHGNPHARWMLVQAAQHADRHPGPLGVFFRRIAHKKNRNVAVVATARKLATIAWHMLQDNQPYWYALPRPTETKLARLRVRATGQKRKPGTPKGQKAMSNSPDGGRTRTIKALPQLYHFEGLPQMHVPKPAEQRALAAMGLAEFVSALGKHQVIKRATNSHKNR

SEQ ID NO: 194777 - protein, 370 aa, unidentified
MGDYSGAFVAFDVAKGKHAIAIAEGGRSGEVRFVGEIENAPATIARTIKKLAGRHGRLHVCYEAGPTGYGLCRQIHELGHDCLVVAPALIPQRPGERVKTNRRDAVTLARLHRAGELTGVWVPDAKHEAVRDLVRAREAAGDDLRRKRQQLLSFLLRHGRLYTAGRDHWTQAHRRWLARQSFEHPAQQIVFQESVDAIEHAEQRLRRVDEQLAGIVPSWSMAPVVEAYQAMRGASFLVAVTFAAEIGDVRRFDTPRQLMAFLGLVPGERSTGNTVRRTGLTLAGNRRARRVLIEAAWTYRFPARVSQALRARLEGQPKAVREIAWKAQIRLCARYRRLSATGKKLPVVVAAIAREIAAFLWAIGREVAPT

SEQ ID NO: 194778 - protein, 346 aa, unidentified
MASVTIGIDLGDKNHEVCVLDSAGDVIERFEVDNTKIELQKAFAKYAGAVVAMETGTHSPWVSRTLEALGCKVLVGNARKLRAIWGSSQKSDVRDAEMLARIARLDPKLLYPIHHRNPKAQVDLEQIKARDLLVGLRTALINHVRGVVKSLGFRLSKYSAPTFHKKALKELPDELRTTLIPLLEQIGSLTRQIRAYEKQLELLAETVYPETACLRQVQGVGLITTLAFILTLESPDRFDKSRAVGPHLGLTPRKDQSGDSDKRLRISKQGNVYLRCLLVNCSQFILGPFGPDCDLRRYGERLIARGGGSAKRKAVIAVARKLAILLHHLWSTGEVYQPLHKGKPAA

SEQ ID NO: 194779 - protein, 403 aa, unidentified
MICVGDDWAEDHHDVCVLDEDGRVLVSARFDEGVEGLTRFHEVMAGLVSDPSEVAVGIETDRGLWVHGLVAAGYAVYAINPRKMAGYRSRFRVSGAKSDAGDARVLADLVRTDRHLHRQVAGDSGEALAIRELARGHQTLVWDRTRHANRLRSKLREYHPAALDTFDKLTDRDCLAILAIAPTPAEGASLSRTRIRTALKRAGRQRRLDERADEIKQGLKAAALTAPEEIVEAMAATTRSTVAILEVLNRQISELEHAINDHFEQHPNAEIYLSMPGMSHIIGARVLGGFGDDPDRYANPKSRRNYAGTSPLTIASGKAETITSRWIYNNQLHDAVIRWAFCSLTVSPGAKAFYTQRRQAGDSHYAALKRVANRLISILHGCLHHHTTYDEHTAWAHRQPNAA

SEQ ID NO: 194780 - protein, 343 aa, unidentified
MEYYVGLDVSLKQTSICVVDQTGSVVREGVVDSDPEAISVYVRSKAPDAVRIGLETGPTSTWLWTELKQFGLPVICIDARHAKAVLKMQINKSDRNDAIGIARIMQTGWFKEVHVKDIDSHSVRALLASRALLVKIKRDLENHVRGLLKNLGLVIGCAKFKVFSVRAEELIEGRPELIAAIRPLLEARNAVGQQVSELDRKVMKLARHDAQVRRFMTAPGVGPITALAFKATIDDPARFARSRSVGAYVGLTCRRHASGEVDWSGRISKCGDAMLRSYLFEAAGVLLTRVPKWSAVKAWGVRLVKRNGLRKAKVAVARKLAVILHRMWIDGTEFNWSKQEIAA

SEQ ID NO: 194781 - protein, 357 aa, unidentified
MAKRLKQSLGIDVSKLNLSLSLGFLTDKLEKEFISHEDVTNDKSGYTILLKWLKKSVDSSVDLLIVMEATGVYHQGIAHYLYEQGYTVSVMQSGRVKRYAQSLDQRSKTDALDSKMLSMLGLERTIRLWQPPSAELQQLKGLSRERSSLLKDKVTENNRQGAIDSSVYSNSKALRRHKNRLKLLNTQIAIIEQEMQDLISENKELESKISFMISIPGISFISAATVIGETLGFESIVNAKQLTSYAGYDIVLRESGNFKGKTRISKRGNSHIRAALHMPSMTCVRCNPTLKHFYNRLKPNKAKPLVALIAVQRKLLILMYTLWKNEEVYDAEFETKKQQKHEALAARDNKLIAQFVS

SEQ ID NO: 194782 - protein, 341 aa, unidentified
MKNKSFIGIDISKNVIDVSIFCEETPIKDFSHDVFNNSRKGFGEMCTWLKKNHVVLSNCLFGMEFTGSYSMELEKFLNARNYQFCMLSTHVVKHHPMGPKDKSDKIDSAKIADFLYRYDGTECVKPYKMPDKTMLRLKALTNERKFLVEQRTCFMNRRQLCTTKEDAQLYDGYIKKFSRDIENIELEEQKLLATDDSLLATYKNLLTIPGIGFVNAINVIVITRNFTAFETARQYASYVGVAPHSHTSGTSVKWRPRPSARCDGQAKADLSMAATVAVQYDAELQSFYNRKLGGKQDSDTKRKALNAVKFKLILRMFAIGKQNRKWEPLDSKSSNEKLAIS

SEQ ID NO: 194783 - protein, 307 aa, unidentified
MSGIGIDVCKKYLDAAVFQGEARQFSNTASGHCKLVHWLRTLPVRQVVLEATGGYELDALDALHQAGVPVARANASRARHLANGLGLAKTDRLDAAMLACMAEKIELHPYVPLAPWRRHLGEHVRARRQLIDLLKTAKQQLLQVPDRSLRKLLQANVNQLMRSVARLDELIAGQLKTLLIEQPHLAALKTLKGVGPVLLAVLACQLPELGTLNGKQISRLVGVAPLSRDSGTMRGKRGIGAGRADIRQALYMAAMSSARHEPRLRDFYRALRRRGKEGKVAIVAVMRKMLVILNVRVRDERAAMQPA

SEQ ID NO: 194784 - protein, 453 aa, unidentified
MAQGSGLTRGDRNRNRRVDAVRGAVRRDRAVLAIDLGEDKQVAVVLDHEGRALARKIVKAKAHQLAGLLAWAAGRAVKAGFAGLAVACEPTGHRWKALMGLADGAGHGFVCVQSLAVARAREGDDYTRDKTDHRDAYLIGKLVIRLDCYLPERADEDWARLRHLGARRFAQVGDVTSCMQQAGDLLGCAWPAPLAAARRPLESVTWLAGMAVITGRCCGQPSRLRRMGYDKFLAAVRRELPRWGGKYVRHSIVRALWEALADAGGVAAQRRGALERLHLLLEDWRALRARLAGTEERMTVLLDELGLTALVTSIDGVSALSGAVMLAETGDLARFTSGRAVVKHAGLNPSERTSATISGQARISRRGRPALRSAAWRAVWGALRHNKVLAAKHAHLTGRDGNRLADGQARTACAAAILRWLWAVITTSTLWDARVAAGEIPAPGRAVTRAAAA

SEQ ID NO: 194785 - protein, 428 aa, unidentified
MADPIHDVRPQTWVAIDIAKQFHAVLIETSQGQRQRFKMASTACEHDRLIALLSSLPQPCRIAFEPTGNFHRTLAWRLLAAGFDVVTVSTVAAARYREARFNSWDKNDPKDAQVILEMLKQGLTQFYHEPLLTGCHDLQELSKTYHQVALARKRLADTLLNHYLPLYFPEMARYWEATRAEWFIAFLQRFPTPGAILTLNESEFVQVAGPLLGRKVNKTGKLLEMYALAQHSSALPVLEDSLAVQTFRQQLAHMAHVAALRRTLEQQAQVLLQDRWEFRCLSSLPGVATILALIILAEVGDIRRFGHHRQFLKYCGLDLAKSQSGQSKGKERLSKRGNARLRYAFWMAALVAVRMTENSFRDKYERYLASAPHDADRKRMALTAVAAKMARVAYGLLKTRTMYQGYFEHALPGGSTSLALAIEATMTS

SEQ ID NO: 194786 - protein, 325 aa, unidentified
MTYYLGLDVSKDTVDAQLCKDARCIHYKITNDAAGWQQLVDVLRALPEQDVHACCEYTGVYYLGLARAIHAAGYRMSVVNARSIKAFAQLMMVRTKTDKKDAQLIARYCEVNQPRTWSPPSGDAADLKALNRRLHQLNKLRTAEKNRLQVAQEICRESHFAMIEMIDGQIDEVRTKLNEMIAACAERRKRQQRLQTIPGIGPVAAAALQTVLMEVEKFPTAKQFVSYLGLSPVIKESGKSVRGRSKMSKMGDAYIRASLYMPARSACLRSRAFSGWAKAKMAAGKPAKVVYVAMMRKLATYAYYVVKNDKDFALPTLGGIGPAPG

SEQ ID NO: 194787 - protein, 312 aa, unidentified
MDALFVGIDVSKERLDVHVRPAGESFSVPRSGAGVDDLIVRLQALTPTLVAVEATGGFENVVTAGLAGAGLPVIVANPAQVRAFATALGRRAKTDPIDAAVIAHFIEATKPQPRPLPDDATRLLADLVGRRRQIVEMIGAESQRQKRASQKRLQKSIGRLKKALEKELAEIDADIDDNVRGSPVWRVKEDLLVSVPGIGPTIARTLIAELPELGSLDRRQIAALVGLAPWTRQSGQWRGKSFIGGGRTSVRTMLFVGAMVAARHNPVLKSFRDKLVAAGKPKMVALVAVARKLLTILNAILRDNRPWHLKTA

SEQ ID NO: 194788 - protein, 348 aa, unidentified
MLHVGLDLSRTRLDFCLLDELGERVEVGGVPPDGDGLAGFVRRVEERHGRASVRAAIESMNGARFVHDSLERLGWEVEIADAVKVKGLAPLACKTDRIDAWVLAELSRRDLVPAIWLPSFGLRQERERARWRLFLVRKRSSLKHRVHAQLLAFGHACPVSDLFGARGRELLDRLEFPEPWRSNVLAAVRMIDELDEEIGAIEKELRALGADHRYVPLLMTVPGIAWVLGYTIAAEIGDINRFASPKKLTSYTGLCPRVYQSGESDRRGPLTHAGPRYLRWALIEASTHACRHEFYRDRYQHTKKRLGKQRGPKIAQVDLARQLSQAIWQMLTRNQPFAPAGATPALAA

SEQ ID NO: 194789 - protein, 377 aa, unidentified
MWSASSEAQDGGVRVTVGVDTHTDQHVGVALDQFGRRLGTRSVPTTPAGFAELVAWARDFGAIEQIGIEGTGSYGAGLTRWLRARGLAVIEVERPHRHDRQARRRRGKSDPLDAEAAARAVQAGTGSGQPKAGDGQVEMIRTLRLTRRSAMKARTQAANQLHALVVTAPDDLRARLRPLPMAGLITLVAAFRPVRAGPVLSTPVAAAKLALKGLGIRYRQLSAEIDALDVHLGQLVATAAPELLAVKGVGTDIAGALLVAAGDNPDRLRSEAAFASLCGVAPIPASSGKTNRHRLSRGGDRDANRALYLLTVGRMGWDPATRTYVTRRTAAGLSKPEIIRCLKRYIARELYRILTASAASPPHSTDGDVAPSSAIAS

SEQ ID NO: 194790 - protein, 337 aa, unidentified
MDYFAGLDISMDETHICVLDREGEVVYESKTASTAQAIADELAKAPSCRRIVFETGRMAPILFHGLRELGFPVVCIESRQAYQALKSLATHKTDRNDARGLAHLARTGFFKPVHVKSLSAHAVRSLIIARKKLVGQRVALENQIRGLAIVFGVRLPRALTAAFIDQALKASEGVAGLSAAMRGLIAARTAVMTAVAAIDADMRRMTRASEACRRLMAIPGVGQLTALAFVAAIDDPSRIRRSRDVGAYLGLVPKRYQSGEIDYVGGISKCGDRRVRTLLYEAANVMLTRYKGQLKLKNWAFGVAKRSSMRKARVALARRLAIIMHAMLRDGTEFVAA

SEQ ID NO: 194791 - protein, 349 aa, unidentified
MGIIGGLDVHRSQITYDWIDSVSGQRQRGQLAPATREHLRMWLGQFAGQQAAFAVEGCTGWRYVVEELGRAGIAAHLAEPADTSAARGPKRRAKTDQLDARHLRELLAAGRLPESWIPPGHVLEVRTLVRCYKALTDEHTAWLQRVHATLFHHGAPAERNLLAPDRRARLERGTGLSPAARQLVKVALGTLDQLDAELDRLRAELVSVARRQPGCQALDALYGIGPVTAVAIWAELGDVGRFTSSRHAVRHTGLDVTVYSSDGKRTPGHLARQGPPVLRWALFEAAKCAARASSPDHAYYLQVKQRLGGNRAALSVARKLVRRCYHTLRALGDHAYAPPSEPSIGGQVA

SEQ ID NO: 194792 - protein, 350 aa, unidentified
MLIIGCDFHTRYQQIAMMDQATGELVERRLEHQSGEAHAFYRSLPKPVRVGIEATGTLHWFERLLAELGHELWIGDSAEIRARAVRQQKTDQRDAAHILNLLLTNRFPRIWVPSPAERDLRQLLWHRHKLVCMRTLVTNQLHALAMSQGLCRKQKLFTRKGRAELSSLALGPWASRRREELARLLDQLEPSIVELDRAVLNEAKRREDAVRLMTHPGIGPVNALAFVLTIGPVTRFHRSKQVASYLGLNPSEHSSGGKQRLGAISKQGNTMVRWLLVEAAQIAVRMDPELRQDFWRLKSRRGNAVAKVAIARKLAVRLYWMLRSGADYARLVRMQGSPGATLVNASSPLG

SEQ ID NO: 194793 - protein, 341 aa, unidentified
MSDYSYFCGIDLAKNHFSLHAVDQNGKVILHKSVTRSKLLTTIANMPLMRIGVEACGGAHYWARTLNKLGHDARIMAVKYVIPYRTKGKNDLNDAVAICEAVQRPSTRFVPVKSPEQQAILSVHRMREHWVRERTALMNRMRALLSEFGLIIPVGRSSLMKQIPLMLEDAENELPHLARTVIADAYHHLGELNQRIADTEQVFSSFAKVSTNVQRVMKVRGIGPQTATAILASIGNGSQFDKSRDFSAWLGLVPKQYSTGGKPRLGRITKHGDKYLRTLLVHGARTVIANLGDKQDKLSQWCRGVLGRRGMNRAIVALAAKNARIIWSLLHNQTEYENYTA

SEQ ID NO: 194794 - protein, 366 aa, unidentified
MKRLSGGIDVGSESHHIIILDDEDNVLYNQKISHKLNEFAENAKLFKQIEKKEGGKLSFALEGKNGYSAPLDRILLDKGFTLYNVDNFKLKRFREAFAGEWRDDERDSLMLSKMLKLKEHINSQREKVFIKIEKPSPLTESLKLLSRHQQTLIDEKVRLTNRLRKKLLEVCPQILKLAKLKNKKIIAILTKYPDFSKYKRITLKSLLKIKGIGKKRAFFLLKRLNHIDYMPGLTDIYKTIIFSYAKRILELQREIKDIDKKLDEIGEKDKAVKHLKTIPGVATKLASRLIGEIGDVNRFHSEKQLAVYCGIACVNNDSGKVTKARAVYKANKICKQTLITMAGGSIPLSSQCKVYYLKKTGRGEDS

SEQ ID NO: 194795 - protein, 396 aa, unidentified
MDVHRSFAQIAVVEDGMCRDEGRIGVRPEELRAWAAGLRPDDEVALEATTNSDAIATMLRPLVRRVVVSNPRKTRAIAEAKVKTDKVDARILAQLLAADFLPGTWVADDRTRMLRRLVMRRTHLVKQRTRVKNQVHAIMARNLVPTCPHADLFSGIGQRWLGRQDLPADEWRSVEALLRQLDFHGEELTQVDRDIALEALDDPIVARLMTVPGIDVTVAISILAAVGDFNRFDSPDRLVSYLGLNPRVRQSGNGPATHGRITKAGPAQARGMLVEAAFSAARAPGPLRAFYRRVKERRGFQIATVATARKMTVLCWHLITNGEDYAFARPSLNAHKRRKLELAAGAPSKRGPARGASHAYHVKQLRDQERALVEQAERSYEVMIAHWQPQRPPARA

SEQ ID NO: 194796 - protein, 343 aa, unidentified
MNYYAALDVSLRSVHLCVMDEKGEIQAEGQVDSEAEAIDAFLRKLGLEIMLVGLEAGTLTQYLTYGLRDAGYQVVCMEARQVKVALSAMRNKTDKNDARGIAQLLRTGWYSPVHVKSIESHQIRALLSSRKAVLTKCVDLENEIRGLFKVFGIKLPPRLGHGSFDRAVRETIETDRALCHALLPLLDARLVLYHTFRELDNRTRNMAHQDPVCQRLMSTPGVGFVTSLTFKAAVDDPTRFKHSRTVAVHFGLTPRRFQSGEMDNPGHISRAGDPDVRCTLYVAANAMMTRSSRWSPLKVWGMQLAKKRGHKRAVVAVARKLAVILHRMWLDGTTYRWGTEGAP

SEQ ID NO: 194797 - protein, 321 aa, unidentified
MKNSTNPVAVGIDVAKASLEVSIGTDGSTLQFANDIEGHDRLLAHVRDLAVSLIVLEATGGYEAAIAGALQAAGMPVAVVNPRQARDFAKAMGILAKTDSIDARVLARFAQTLFQRDDLQRFIKPLADEALKALQVQLLRRRQLCSMLIAERQRLSTSHHSTRADIEASIDFLKGRLNKADAELAHLIERDHAELNTLLRGVKGIGPNTLATLIAELPELGHLTRREIGAPVGVVPLNRDSGQFRGRQTTWGGRATVRRALYMAALVASRHNPAIRRFYAHLIEQGKAPKLALTACMRKLLTILNAIARDQVPFNPALHQC

SEQ ID NO: 194798 - protein, 368 aa, unidentified
MAGKESYYIGMDVHKEFVQMAVFAGKGDDPIYERKLNNDNGLPVKEVTAFVKKGTTEAAYEAGCLGYVIRRAMENAGITCYVLPADKVAKKRNNKIKTDKRDARLIGRELRSGSIRPISVPDSTDEAARDLLRCREDAKEDLRRCKQRLLKFLLRHGYMWTDGETNWTIKHRRWMDMIAFPHEHERIVYGEYRSQIKTHEERLTRLEEQITTTAESTRYRAKVQTLRAFKGIDYIIALSVICEIGDFKRFGTAKSFMSYLGFVPSENSGGGKRSRGGITKAGNGHLRRLLVEAAWHYTRGTRPGKRLEQRRQGCSAREIGIADRALHRPGKKYLRLIVVRGKHKNAAVTAVARELAGFIWAVQTGNVA

SEQ ID NO: 194799 - protein, 346 aa, unidentified
MKKIIIGIDFSKETFDATLLDCRRSELSQAPALHGQFENRGAGFRACLSWVEKCVGPVPAEDLLFCGEKTGKYSLRMSNFLYVGGYCMWLESGLRIKLSLGISRGKSDKADSLKIARYAYRYQDGEVCYEPPSENLSRLRELFMFRQKLVSMKKGMDVRRNLTEEFGDCLGDVGFVVESSGRIVEAMKQEIAACEKEMRELISEDPDIRTTYTSITSIRGVALINAVAFITYTDNFREFGGNARKIATYWGVAAFARESGTSVRHKAKVSKMASKMLKALITQAAESAVRWEPKFRDYFKSLQARGKAYGVALNNVKNKLIHVITALAISRQTYDPVYQRPNSYVK

SEQ ID NO: 194800 - protein, 412 aa, unidentified
MKDLLEISCGLDVHKEKIVACILTGPLGKPTRSEIREFSTLIPDMIALRNWIVSKSCHHVAMESTGIYWMPIYEILEDAFYGDITLLVVNARHMKNVPGKKTDMRDSEWISTLLRAGLLNGSFIPEKRIREFRDLNRYRKSVIRDITSQKNRIEKFLQSSGFRLSSFISDIFGASGRNIILHLIEHGQIDKTALDSCLKTKTRNRIDEILMSVNGTLSEHQKAFLRILMTHYDSLKKHLAEIETSLEEDMAPFALQVEQLNSIYGISTTASCAIIAEIGIDMKPFKTAEHICSWAGLCPGNNESAGKRKSTSVTKGNPYIKSMLCEIAWVIAGKRNTYLSAWYWRIKQKKGAKKAIVALARKLLVIIYTMLKQGTLFDESCFETRRKHCEQKQLSRYIRELEKHGYHVEAQS

SEQ ID NO: 194801 - protein, 355 aa, unidentified
MFKSKILSFAGETIYSGVDVHKKNWKVNIRTADMELENYNQDPDPASLVKHLKTRYPGAMYKIAYEAGFSGFWACRNFREDGVDCIVVNAADIPSSDKDKKQKNDTVDARKIARELSKNNLQSVYIPTVENQNFRDLVRTRQQMVNDQTRCKNRIRQKLMFNNIKVDEEKEKYWTIAFINALEVYDYKNDWLQQSILSMIDHLKETRKQVLKLTTAVRKLSQSDIFKNKVDLLRSIPGIGLINAMVILTEIMDISRFPTLDQLCNYVGFVPSTHDTGDKKSNNGITQRCNYRLRTALIESCWSLIRKDPAMLMKYSQYCKRMEKNKAIIKIGKHLLSRIKYVLVNNTKYVAGVVA

SEQ ID NO: 194802 - protein, 313 aa, unidentified
MNENPCYVGIDVSKESLEVALRPSGKQQTFQNDDKGVARLVQLLRAEAPALIVMEATGKYEQRVARALAVEGLLFNIINPRQSRAFAKATGILAKTDRIDALMLARFAEVLQPEARSLKTEETEALGELVTRRRQVVEMITAEKNRQGTASKRVRRDIQAHIRWLEKRLEDLNDEIDDLIRKSPLWRQKDKLLQSVSGVGPVLVSTLLGALPELGTLNRKQIAALVGVAPFNRESGRHRGKRTILGGRGPVRSVLYMGTLAAIRANAVIRAFYQRLVLAGKPRKVAITACMRKLLVILNTMLKNGTCWKYQPA

SEQ ID NO: 194803 - protein, 343 aa, unidentified
MPHYVGLDVSLKTTAICVVDEQGKRLWRGVCATDPGPISARISQHAGVDAKVGIETGSMTPWLVHGLRAAGLDVACLDARRVKAALQMQLNKTDENDAEGLAQIMRTGWYRAVHVKSLDAHRARALLGARAQLVGMTTRLSNMIRGVLKTFGLLPGAGRGLRFDRKVEALLEGAPQIALIVRPLLATWRQLREQIAVFDKAVLQQVRADPICRLLMTVPGIGALSSLMYVSTVENPSRFSRSRAVGAYLGLTPRRYQSGETDRSGHISRCGDGLARTLMYEAAIVILHRVKRSLHLKDWAQAIERRSGSGKARVALARKLSVILHSVWRSGEPFRWAAPAMAA

SEQ ID NO: 194804 - protein, 373 aa, unidentified
MPRYSTAFGMDVHLRSTTVCALDAETGEAVTRRFRGNPWGEVAEWMSGFPGPSLAAYESGYLGFAPQRELSGLGVDCVVAAVSKVPRSAADLSSKNDRNDAARMAKAILSHDVTPVWVPSPEIEGLRDLAAAHDAATARLAAAKQRLLAFLARRGYVYGGTTPAGNPRKYWTYGFLRWLDGIHPADDGGIRALAALRNEVEAADETREALLAEYRAAVAAGPLSAEVEALQSIKGCGSALAAAFASEVGDFSRFRSGRQVTAYFGLAPKQRSSADSVRLGGISGAGNALVRKLAVEGSWCYAQAGHQPKLMPKGSGVPLEIRMHGRKGSERLLRRREEMLERGMPQAKANAATAAELVRWLWALGTMCREAGE

SEQ ID NO: 194805 - protein, 311 aa, unidentified
MRITIGIDISKDTLDAYQLPDNQHIQVANDKTGHKTLSRWIGAYNQPLVVFEATGAYHRNLEAALTASDTAFAKVNPLQARRFAEATGRLAKTDRVDATGLAKMGAVLELKGHKPRSEALLILRELITARRALVKDKVAAKTRLQTITQTLLKNQINARLKQIDIQIRQVDVAIAQKVAQDETLSQKLGILISIPGIAEATAFSMLIEMPELGTLEGKQAASLAGLAPISRQSGKWQGKERIQGGRTFLRRAIYMPALVATRYNPDLKAKYDQLIGAGKPGKVAITAIMRKLLITANALLRDGRKWSAIRP

SEQ ID NO: 194806 - protein, 399 aa, unidentified
MNPQLRVAVDVGCYRHRVAIGLSEGELLEEVEISHDGPGLTEFFARVERQAQRWGRPVAVAMEGHNGWARPLDQRVLLHDYRLFNVNNRKLARYKEIFATPSKSDAIDTRRMLELFTLQERLPTARGVLQEVAAVPLVNAQLQTLTRRRRQLVNERKQLGARVQAALQAVCPGLLAITGRLDNRWFLSLLTARTDLRQLPRLRERTLRGLRGVGRTYAATIRAWQREATYATSVDYVGPMIVQDARRMVELGTQIGALETQIEALAADSALARRIDSIPGYGLISAAELAGEIGRIERFEQEASLAMYLGMAPVDASSGERQGSRSPRHVNRRAKAAMMIAVMRHQTQVPESAAFYAKKRQHGKTHQQALRALGRHLVRVIWSMIHQGRDYRTTEPTPI

SEQ ID NO: 194807 - protein, 373 aa, unidentified
MQDSKLPNAIDFKGQKFYVGLDVHKKSWSVTVRSLDKQVAHFTQPPSANSLVLTLKKKFPGGVFYSAYEAGFCGTSAHEQLCKLGITNIIVHAADIPSTDKQKKNKTDLHDSRSIAENLERNNLRGIYVPTREQQELRSLFRLRETKVKEVTRANNRLKSSLNYYDIVIPEKVTKKEFISTKVLEWLDNLELASEAGTITKQEQIEELRHQRKQLSKITRQLRQQIQTIHGEDYPRLLTIPGVGAITSMAFLAEIADFARFDNPDKYCSYLGLMPWSDSSGDSIKTKGIQPRCNKHLRPLIIEASWVAIRTAPELFAYYSKHAVKNNKHAIIKVARRLALIVRGVVIKKEGYKANYLQQKLQKERSDKQLKQA

SEQ ID NO: 194808 - protein, 387 aa, unidentified
MPQHHDLSRSLLTLDQTSTLIAVIEMSQASWLVAAIVPGIDRHPLKKIAADEADLLALLRRWQAEAAKAGQAITRIAVAFEAGRDGFWLARWLRARDVEAHVIHPTSIAVSREHRRAKTDRLDTELLKRAFLGWLRGEPDHCTMAAIPSLDEEDAKRPSRERENLVGERTRLVNRMKAALARLGIRSFRPTLRNASERLDTLRTPEGAPVPPNTLAEMRRDLARLRFVREQIREIEQARLAQLAKAPGERRNTMVCLLARVVGVGVETADMLVNEVLSRTLRDRRAVARYAGLTGAPDESGAKRREKGLAKVGNARVRRGMLQLAWRFLRFQAESSLARWFRARTVDGRGATRKSMIVALARKLLIGLWRLATTGDVPEGVVLRPAA

SEQ ID NO: 194809 - protein, 364 aa, unidentified
MEKISTVKTKGKKILKGQLTIGLDLGDRSSCCCVLDENGEIIREQKIPTTPEGMQQTFGKMARSRIAMETGTHSPWVSRALTELGHEVIVAHAQKVRLIVKSRRKDDRLDARTLARLARIDPELLSPVQHRSAQAQLHLTEIRARAGLVSARTALVHAARGLVKSYGERLRKCGTQQFRRETMSGLSAGLREALEPLLREVESLNERIQEYDRRIEKMAREAYPETALLKQGKGVGDLIAVTYMLTIEDSHRFRKSRDVGCFLGLQPGRRNSGESEPQMHISKEGDEYLRTLLVQGAHYILGPFGEDSDLRRWGQKLAERGGKNAKKRAIVAVARKLSVLLHRLWVSGEVYEPLHHSQVMSAVA

SEQ ID NO: 194810 - protein, 314 aa, unidentified
MSTEYFVGIDVSKDTLDVCVYPTQDTFRVPNSPDGVDELIKRLKPIQPRLVVFEATGGYETLAVSSLSAAGLPVVVVNPRQIRDFAKSIGRLAKTDVIDAGVIAHFASAVRPELRPLKDTASQELTERVTRRRQIVDMIVAETNRLKAATRRNQRDIQAHIRWLQKRQTQIDDEIKRNIKNSPLWRTTDEILQSAPGVGIGTSSMLISGVAELGQLNNKKISCLIGVAPLNRDSGRYKGRRTIWGGRAQVRAVLYMSALSAIQYNPVIRQFYQRLRDAGKCFKVAIVACMRKLLIILNAMVRNQTKWRDCENNP

SEQ ID NO: 194811 - protein, 431 aa, unidentified
MSRFLHDFVVGIDVSSEFSIVAMLAPTGELIRKPFRIDHNPAGFHKLLDILKKEEERLNRKPIYFVESTGIFHLPLFFLKSNDLKGFVLNPLCVHSTKNFNIRKVKNDNKDSEAIARLAKYQDVKVSIVPEPQILALRMMTREYYTLSDMLTEMKNRLCTDLYLLFPGFLNLFSGTLGKTALAVLKNYPSPGAVQEANTEALTLLISKTSRKSSEWASKKVLLLRDCSQLASSMPSEFSLLDAKIKLHISNIENMQTSLDGVEVHIHTMIESKQFPAIAKHNIVLLDEIPGIGFLTAATLIAEIGDVTLFKSPKALTAFFGIDPSVQQSGKFEGDRNIISKRGTSLGRRVLFTAAMSAIRTKRNGEEINPVLRDFYTSKCVSKKKKVALVAVMHKLLHYIFAVLRDQKPFEIRKPEDHETWRKANHQPAVA

SEQ ID NO: 194812 - protein, 316 aa, unidentified
MIVLGIDIAKRKFDCALLLGERFRTKVFENNSSGIELCVSWIARHAAEPVHACIEATGPYAQAVAETLFDAGHRVSLINPARSRAFAQSLGARSKTDAVDARILARLCQALDPEPWIPAPRSVRELQELVRRLDALIQMHTQETNRLGSAHERVRGYIEESIAFLERAISDIRQAINQHIDRHPDLRTQRDLLQSIPGVGAATCAWLIAELNAKRFVCARSAAAFTGLTPAHWLSGSLQRKARLSKRGNAQLRKALYWPAITALRCNPIVRALAQRLLARGKHKMVIVAAAMRKLIHIAFGVLKSGKPFNPTLAGA

SEQ ID NO: 194813 - protein, 360 aa, unidentified
MQTQNTKKAAIDFTGQNIYVGIDTHYKSWMVSIYSDEFELKTFGQDPDVNRLENYLYKNYPNANFRLAYESGFCGFWIQRSFAKKGLHCDVVHAADVPGSNKELIRKTDKVDSRKIAKGLRNNELNCIFIPDEQLESDRQLMRSRSKIVRDTTLVKNRIKAFLKLRGISIPADYKSNKWSKKFISWLQSIQFNIISSKAAFNSYLDELIFLLEKQKQLNKVIEELSKSDGYSSNTHLLRTVPAIGLLSAMTILTELGDINRFQKQDHLYSYCGLTPDCHSSGDTERIGKISRRGNVFVKTVLIECAWVAVRKDPALLLYYKQQLPKMEHNKAIIKVARKLLNRIRYVLKNKQKYQIGIVE

SEQ ID NO: 194814 - protein, 336 aa, unidentified
MYSGIDLHSNNSVIAIIDDGDRVVAQKRLPNDVTKIAGFLARWQEQLAGVVVESTYNWYWLVDGLQDAGFHMHLANTAAIKQYEGLKHSGDETDAQHLAHLLRLGILPTGTILPREHRAVRDLARKRMQLVQSCTAHVLAVENIMARQLGGRMTSNQIKRLTNDAIDNLPVAADVGLAIKANVAVIATLQSQIELLEKRLQERVKPRPQYGLLTSVPGIGQTLATVILLETGPIDRFAEVGNFASYARCVDSVLTSNRKKKGEGNVKNGNKYLAWAFVEAANFARRFCPEAKRFHERKKAKTNNIVATKALAHKLARACYHILKEGKPFDVTRCFA

SEQ ID NO: 194815 - protein, 346 aa, unidentified
MDHIGIDVHKRESQICLLAEGGELMERRIRTEPERFAAVLGGRPQARIVIEASTDSEWVARCLEALGHEVVVADPNFAPMYATRTRKVKTDRRDARALADACVLGAYRRAHRLSDPQRHVRGRLLVRDALVRTRTRYISLIRALLRQQGYRVPSGSAEAFVPRVRALALPGPLLSLIAPLFAVMRHLNRQLVYSDAMIEHVTAHDERVRRLRSVPSIGPVTAAAFVATIDDVQRFAHAHQLEAYLGLVPREYSSGDTQRRGSITKAGSSRTRWLLIQAAVSILRRRPPEAEALRAWALRIAARRGKQIAVVALARRLAGILYAVLRDGSVFTPRRTSPPVATALPA

SEQ ID NO: 194816 - protein, 315 aa, unidentified
MRIPQAFMVGIDVSKAHFDVAVEGKSAVGRFDNDAPGRTALATAIAGAELVVVEATGGYEMAIVRALMAAGIPIAVVNPRQVRDFARASGRLAKTDQVDARVILHFARAMRPAQIPHIDDGRIALAALVARRRQLIDMAVAEKNRLEHAPQAVAALIGETLAALKSQLARVDAAIALAIEAEPDMAARRDLLLTVPGIGEVGAAVLIAELPELGAIDDKKLAALVGVAPVAHDSGTWRGQRHIAGGRATVRCALYMATLSAIRCSPTIKAFHKRLRDAGKPPKVALVAAMRKFIVMINTIIKRRTPWSEPQQHGC

SEQ ID NO: 194817 - protein, 412 aa, unidentified
MSKNTASWTYVGLDVHADTITVAVAEGSSRGRGRGVGTIPNQPDAIRKAMKKLGRAKSLRVCYEAGPTGYALYWQLNKMGLACEVIAPTLVPVRAGDRVKTDKRDALKLAQAYRAGELTPIFVPDAEHQALRDLVRAREAAKKDQLRARHRLGKFLLRLGRRRDTQSNAWGQAHWRWLDSQVFDHTAQEEAFVDYKNEVQHATERVARLDKAIDRAVEQAPPRMQELVLALQSLRGVAMLTAVTVVSEVGSFERFPSAQKFMGYLGLVPSEHSSGRSRHQGGITKTGNAHLRRVLGESAFCGRLRPRRSPSLKRRQQGQSQAIVDMAWEAQKRLYRKHGRMRIRAKSHQVTVTAMSRELAGFVWAVGRQREAEMNTPGPPVERFKEAGKHPHGKDNPRNQHAIGTAVPNSRH

SEQ ID NO: 194818 - protein, 386 aa, unidentified
MAVAYIAEEHGAEVTSLGTIGTRQCDMDHLIRKRPSKAKHLVLVYEAGPCGSWLYRDLTKTGHVCWVVAPSRMPKNAGDRITTDRRDAVPLARLMRSGDLTPVDVPTVEDEAMRDLPRAREDALRDRTSAKFRLNAVLLRQDIRYTGQATWGPAHRRWLSDVVCATPAPQMVFQAYVRAVHAHTARLQRLEHARHDQVNTWRLPPVVEALQAVRGVQFTVAVTLVAALGDLTRVEHPRQLMTYLGLIPSAYSRGERRRQGSITTAGHTHARRTWVEGAWADRDPAKVSRHVQRRLANQPTIMQDISWKAQVRRCQRDRQLLARGKHATVVTVAMARELAGFLWARAKQVPVTPEGHDRSRLHDELRRVAHVHRMRRIPGVVFPSAA

SEQ ID NO: 194819 - protein, 370 aa, unidentified
MKKPVTLFVGLDVHKDSISVAHVPDDRRADVTYVGRIGTRPADVDRLLARLEARADHLIVAYEAGPCGYVLHRQLTRRGVRCLVVAPSLIPKRPGDRVKTDRRDAVQLARLMRSGDLESVYVPSVEDEALRDLCRAREAAVVTLKAAKYRLKSFLLRLGLQYTGRATWNDAHLRYLSRVVCPTPAQQIVYQEALGAVDEQVERLKRIESQLAELVPAWRLAPVVRALQALRGVQQTVAVTVVAELGDITRFDSPRQLAAFLGLVPSEDSSGDSRRQGPITKAGNSHARRVLVEGAWAYQYPAKVSEHIRKRLEGLPKPVQAIAWKAQVRLCKRFRRLVAKGKHPNVVVTAIARELAAFMWAIAREVPVTV

SEQ ID NO: 194820 - protein, 408 aa, unidentified
MQVTFGIDVSKSNSTVCELIGESKNELTITNDRPGFIQLLHELTAFSKHPQIIFEATGVYSRRLQAFLEDYGYEYVVLNPLKAKKEMNMGLRHNKTDKTDAYHLALIQRLYHHPINQLQSQTYKQLNALSRFYDQLTADLVMAKNRLHQALQSTFPEIENLFSSAKGKNYWQIVVRYPHCDLVRREDKKQLINWLMSLKGIAFKHALRTADKLIELAYQAYPVVSCSSIEVEQVQYYAHRLLNLSDQRENLIARMVKLAKSLPNHDLENLESIPGFAQTTAVRVLAELGDLRRFSNPNKINAFIGIDPGRYQSGEMDSNLSITKHGNAVARKLLYRAIGQIDNAAKTNPCHIADYYESKKLSSQTKGFKKIAIASIHKLIRTIYALIINDQPYDYNVATHNQKDFSRN

SEQ ID NO: 194821 - protein, 369 aa, unidentified
MARNGTLAKSQELQPSFHATTEQITIGIDLGDRFSHCCVLGPDGKILTEGRLRSTPETMARHFRDLPPSRIAIEVGTHSRWLSQLLSEWGHEVIVANPRNLRMIADSIRKSDQVDARMLARLARVDPKLLSPIVHRKQGIYPDLIQLKARDLLVKNRTRLMNAVRGVLKSAGLRVPPSGTSCFPSKAATCIPDELKPSLTPLLETISHLNKQIYSLDKAIESTAQNRYPETNRLRQISGVGSITALQYVLTIGDPGRFAHSRDVPAYLGLTPRRHQSGSVEQQLRISKAGNKQLRSLLVQCAQYLLGRFGPDSDLKRWGTRMFERGGKNSKKRAIVAVARKLAVLLHRLWVTGDTYHPLYNASISSVTR

SEQ ID NO: 194822 - protein, 374 aa, unidentified
MLKIVYRICCGMDVHKSFVVACIASTNENGVTTYKSKRFSTFTGDLRRCAAWLAENNCKDVCMESTGKYWIPIYNILEPTCNIVLAHPKYVKTIRGKKTDKRDAKWIADIFKHDLVAGSFIPPADIRQLRDLFRYRWKLTSFTTGEKNRAQNCLTVSNFKLDDVFSDVFGKAASAITARILENPTEKITDVSSFRTKRLKATDEEILAAVDGEMCEEQAEKLRIIRSHMDSLELCKLNLESLILATAEKYLPQLDLVMTVPGIQSFAAIGIISEIGVDMSVFPTSKHLCSWAGLTPQNNESAGKKKTTRISRAGAYIKPLLVQCALCAIRAKQFPEVRNRYLAIKKRRGHKKAIIAIARMLLTAIYNMLKKNEP

SEQ ID NO: 194823 - protein, 376 aa, unidentified
MSKTTMIGCDLHDRNMLLKVAVGRSKPSQMEFRNNAKGRCRMITALKKIASEKGNGKIMFVYEASGLGHGLSDQLDESGIECHVLSPNQLPKTPKSAKLKTDAKDAMMLLEQVRGFVLAGNSMPVVWTPPKQLRADRELVRARVDSGDEITRVKLKLKSFMKVNQLSLRSPTTKLWTKAHIRAIRKSLLEQLGFSLATKLDLLLKRLEYYLQEQLELDRALKTLSRTKRYAAPCEKLRGLPGVGLLVAMTFLTEMGDLNRFNNRREVAAYLGLCPASYESGNTDDRKGRITRQGPARLRKMLCQAAWVSIQHCQAAGKAYQRIRQGQQKRTKKALVALMRKLAIKMWHEAMSMGVSPALEGRGGPHSLLEHTAASA

SEQ ID NO: 194824 - protein, 443 aa, unidentified
MLSDALHVCNPHAAGIDIGEAEHWVAVPPGRDPQPGRRFGTFTVDLDALADWLIDCGVITVAMASTGVYWMPLFELLEARGVQVLLIDPRQAKRAPGRPKTDRLDCQWLQRLHAYGLLAGAFRPDDQVCVLRAYLRHRQMLLTYAAHHIQHMQKALQQMNLKLTQVVSDLTGVTGMAIIKAILAGERNPQHLAKLRNPHCHHDADDIAKALQGTWRAEHLFALRQAVELYEVSHQQMAQCDQQITRHLETFADKSDGQPLPPKARRHKKTNEPRFDARTPLSRLAGVDLTTIEGIEENTALILLSEIGTDMHRWPSVKHFCRWLGLCPQHKISGGKVLSRRVRPGAHRVTVALRLAARRLHHSQSALGAFFRRMKVRLGTPKAITATAHKLARLVYSLLQHGSAYVQQGLDAYEAQYRERKVTTMAKQAKALGYTLVLLAAQG

SEQ ID NO: 194825 - protein, 334 aa, unidentified
MLGGADNPNGELLSYIIGADSIDVSKLTLDVHVSPAQLHQTVSNNESGFAELKTLLSMQQVSLVLLESTGGYEDAVVCFLQSLGYDVSVINPRQARDFARSMGRLAKTDRIDAELLAQLASVIHARPDRERFVKKITDDRRRKLACMVARRRQVVNMISTEQQRKSAASNYSTDSINKVLSFLRSELKSIDADISLHVRSHFADISGLLASFKGIGPATIGVLLGEVPELGRLNRRQISALIGLAPFNRDSGFMRGRRTVWGGRAMVRNALYMPTLSAVRFNPAIRVFYMRLISQGKPRKLAQVAAMRKLLCIINAMLSSGTMFNPALHPGPGA

SEQ ID NO: 194826 - protein, 337 aa, unidentified
MTVAVLGIDLAKRVFHLHGVDARGRPVVSKRVSRAKLAEAVVRLAPRVVAMEACCGAHYWGRRFRDLGIEVRLIHARFVRPYVKSAKNDARDAEAICEAALRPHMRFVPIKSPEQLDIQALHRVREQLVRWRTALINQTRGLLAEHGIVLPQGAWRLRPGVVTILDDPASELTTLAAELFRGLLDQLRGLEARIATLDHRIVQLCRASETCRRLAALPGVGPIIATALVASVGDARQFRCGRDLAAWIGLVPRQHSSGGRPKLLGISAGGNHYLRKQLIQGARSVLPHLGSKDDRRSRWLRGVLDRRGSNRAVVALANKTARIAWVLMARAEVYRAA

SEQ ID NO: 194827 - protein, 351 aa, unidentified
MNYVGVDYHKKYSYMVVKNEDGRVEGRGTVNNTKEEVQHFLEPYRPGMAVVEATRNWGLIYDWLDEVLDDVALAHPLKVKAIAEARIKTDKISADILADLLRADLLPKAYAPSKQTRDIKNILRQRMFFVRIQTMVKNRIYDILDRHPEVLPQVPKASDLFGAAGMQWLGETTLSGEDNVLLSSELRLLKYLKEEITQSNGIVKKLAKKGARAGLLQSIPGIGPFFSVLILYEIDDISRFRDEKKLCAYAGIVPSTHASGGKVFHGRITKTGNKWLRWAAIEAAQTAVRSDSEFRAYYQRVKVRKGSNAAKVATARRLLTIVYRLLCQGRFYKRKTTPQEKSIIPAALVIS

SEQ ID NO: 194828 - protein, 267 aa, unidentified
MYCIGLDVHKKTISYCVKDVAGHVHREGKIGSTRRELDARINTLPQPRMIVMEATIFTGWIYDHLLPHAEKVKVAHPLMLRAIAAAKKKNDRIDAGKIPYYLRCDFLPECHMASTEIRDRRRVLRYRNLVVKQMVQMKNRVSGLLMETGVSYNKQRLHKVGYFGEPMSTNEDISQAVRPLLNLSRGMIRHSGKLEYDLVSSLERDPLLKERLRRLRTVPGVGSITALTWALEVGDYTRFSSNKQAISYCGLCADEKSLADEVMRMPL

SEQ ID NO: 194829 - protein, 457 aa, unidentified
MMETKRRREQRSMLPVHPDAAAIDIGATVHVAAVGPARDPEPVRSFGTFTGDLHRLADWFAQCGIKTVVMESTGVYWIPIYEILEQRGFEVRVVNARDAKHVPGRKTDVSDAAWLQRLHEFGLLRGSFRPQGAIAALRAYLRQRERLLDYAAAHIQHMQKALTQMNLQIHHVISDITGATGMRIIRAIVAGERDPDTLASYRDIRCHSSAETVRQALIGNYREEHLFALAQAVELYEVYQAKVATCDEKIEGVLERLKQPGRAPAKPLRAARHKTRQPNAPAFDARGALYAVLGVDLTQIHGLGPYLALKLISECGTDLSAWPSAKHFTSWLSLAPGNKISGGKILSSRTRPSGNRAAALLRLAATTVGRTETALGAFYRRLSARIGKAKAVTATARKIAVLFYNAVRHGMDYADPGASYYEERYRRRVLTNLQRRAKAFGYVLQPTEIKVVPMAVS

SEQ ID NO: 194830 - protein, 313 aa, unidentified
MMASPDVFVGIDVSKDRLDVHVRPLGQGFSVSNEAAGHAALIARLRPLRSKRIVLEATGGYERALWLALSEAGLVAAVVNPRQVRAFARAAGRLAKTDRLDAAVIAHFAETFVPRLGKPDPVADRLGEHVLYRRSVQDELVGLEHQLRRLETPALRQRAERRVAALRAEVKELEREMRAIVDSDPAKKALFACLTAPKGVGLILACTLIANMRELGALSRHQAAALIGVAPLNHDSGVRRGYRAIAGGRRRVRNVLYVATLSAVRCNPTIREFYRRLAAGGKPAKVALVACMRKLLVMLNGRVRDQLAVTVSP

SEQ ID NO: 194831 - protein, 394 aa, unidentified
MRFAGIDIAAETHVVTLVNEASQVLVPPTPFGEDAAGYHALRTLLGGPEDLLVAMEATGHYWQNLFAVLAAEGFAVALLNPVRTRRFAGEDLARAKTDAIDAIGIARFAAQKRPAITRLPDAATQELRELVRLRDRLRQEFGDRVRQLHRLVDLGFPEFTRLVPDLKGRLATALLAAYPTARAFAGMSVARLAAVRYDGVHRVGADLARALLAAAKESVGQHHGPAYQRQVRYLCEDLELLQRRIDALEDDVATTLKAHEVGTLLTTITGIGVQTAARLVGELGDPAGFRSAAALAAYVGVVPGTRESGKRRLTHARLAPTGHARLRAALWMPTLVAVRTNPWLRAYYERLRARGKLPKVALIAALHKLLFAVYSVAKHRRPFVPHLTVQGVQA

SEQ ID NO: 194832 - protein, 418 aa, unidentified
MKKHSKSSQRSEPSLKRTKARGPVQRDAKEVLAEVLGKLTGKLDGPAVSTSAKENYRGNPVGPNRDRLTVGVDLGDRWSQYCILGLEGETLAEGQLRTTQEDIREFFQALPVARVVIEVGTHSAWVQDVITEWGHEVLVANPRLMEGSKRRKRKSDRIDANKLARLGRVDPQSLYPIRHRSREVRQDLVVLRARDALVSVRTELINTARGLVKSMGTRLPRCSSPSFADKVKDAIPDEVREALLPLVQLVETVKDCIARYDQKIEELGREKYGHTTLLRQVKGVGPITSLAYVLTLEDAQRFSSSREVGPYLGLVPKQEDSGDSQPQLGISKAGDRMLRRLLVGSSQYMLGAFGPDTDLRRYGLRLCERGGKNAKKRAVVAVARKLAVLLHHLWVTGDVYEPLHHTGAEPRTAQATAA

SEQ ID NO: 194833 - protein, 356 aa, unidentified
MIAISQPKVPGIIIGVDTHKDEHVAVAVDRLGVRIGQRNVPTTDTGYAGLEHWARSLGEIDAFGVEGTGSYGAGLARFLRGQNHRVIEVNRPDRSTRRRLGKSDPTDAEMAARAVLSGVARDRPKSGVDKVEMIRMLKSTKDSAMKGRTQAINQMKALVVTAPVELRAELRDMNASKLVACCVKWRHGYLETTTSAAKYTLWSLARRHVQLTREIEALNAELARLTAEFAPALMESLGIGPDTAAALLITSGSNPERLKSEAAFAALCGVSPIPASSGKTNRHRLNRGGDRQANAAIHRLVIVRLRYDNRSRAYLQRRMEEGKSKMEVIRCLKRYVAREVFGILHDIGKRRAFQNA

SEQ ID NO: 194834 - protein, 323 aa, unidentified
MNKGIKYFGIDISHLVFDVTDSDGNYYQFINNVSGFRKFIKLLDSNSHCVMEATGYYHYQLAYYLFENGKKVLVENPLSLKRFIQMGLSKIKTDKSDSKLICAYAAQVELTLWKGSSKQVQECLQITRVLSLYTKQRTMIKNKLNGESVLGEPSKAVVKSLKRSLKQLDKEMKILEDQLLIIVKESHQDLFSRIKTISGIGRKTAIMLIVLTGGFERFTSAGELCSYAGLIPVIRQSGSSVKGRPRISKMGNQKLRNLLFMCSFTACKYNKACRDLYERIVAKGKSKKLALIAICNKLLKQAFAIAKSGLIFDNEYKSTLVKN

SEQ ID NO: 194835 - protein, 316 aa, unidentified
MAETTVRSFVGIDVSKKWLDVAVIPSGETWRTENTIEQIGVLVERLKETGVARIVVEATGGFEVRLVAELYAAGLPVARVNPARVREFARSIGQLAKTDKLDSIVLARFAEAVQPPLTRLPSEAEQALSALLARRKQVLDMLTAEQNRLGTAPAGIRSSLQEHVQWLKDQCRKLDREIDQFIQDHPDFKKKDEILQSTPGVGKITASMLMANLPELGECDRKQIAALVGTAPFNRDSGFKKGRRSVQGGRSNIREVLYMAALSATRYNSAIKTFYQRLLAAGKKKKVALVACMRKLLTILNSMIAHNSFWKPSLST

SEQ ID NO: 194836 - protein, 398 aa, unidentified
MKSDRLAVCKRHEVLACFWRSACKGADAGGATPPSRADGTEPDKVHGGRLGGPRSEARSPYRLFAKPARLHGHETECKEGITKMSRMVVIAGIDVSKDKLDIHVLPSNQTFVVGRDPRGLASLARRLRKAGVEQVALEASGDYERIVIEALEADGFVVQLLNPARVRAFAEAIGMLAKTDPIDARLIALYCQHFPDTGLTRRPEQARKLGEFLNMRAMLLKLAGEIRNSLEHVREPGLKALADTLSADIAAKLKDVDDRIAKVIAGHDATMRKARIIRSFTGAGPVLTSGLLARVPELGGVTRHAAARLCRAAPTDRQSGRTRHRSSIEGGRDQVRPVLHMAALAAIRSNPIIKAFAHRLSAAGKPKPLVIAACARKMVVILNAMLRDNTEWKYAKAA

SEQ ID NO: 194837 - protein, 342 aa, unidentified
MEITTIGLDLAKNVFQVHGVDDEGAVVIRRQLRRSRVLPFFEKLPPCLIGIEACATAHHWARQLSGLGHRVKLMPPHYVKAYVKRNKNDAADAEAICEAVTRPSMRFVAVKTMEQQSVLMVHRVRELLVRQRTMLVNAIRAHMAEFGVVARVGLPQVKELLAVIADPDDERIPPPARTCLEGLARQLLSLEREITTTEQRIHAWHRSSQASRRLETIPGIGPITASALAATIADPEVFRSGRELAAWIGLVPRQNSTGGKQRMGRISKQGDHYLRWLLVVGAMTVIRHGRRTNFEKNPWLGDLVRQKPTKVAAVALANKIARTAWAVLVTGEPYRQPAPAKA

SEQ ID NO: 194838 - protein, 341 aa, unidentified
MKLYGGIDLHSNNSVINLIDENSIVVLKKRIANNLKTILLLLEPYRDAIAGLVVESTYNWYWLVDGLMEAGYKVHLANTAAIQQYSGLKHGDDDSDANWLANMLRLDILPTGYIYPKEERMLRDLLRKRLQLVQQKTRNFLSIQGLYDRHLNIRLNNNKLKTLTQEQLKIDFCDLNVRMAVNGNLTIQQCLTLQINTIEQALKKQLKLRDEFINLTSIDGIGLILGLTIMLETGDISRFDKVGCYASYCRCVSGARYSNGKKKSKTNTKNGNKYLAWAFVEAANFAIRYNDTVKRYYQRKLAKTQVIIAKKAVAHKLARACFYVLRDRVEFDVNKAFGYSK

SEQ ID NO: 194839 - protein, 349 aa, unidentified
MRMVGGLDLHRRQITYDVLDVDSGEIWRGRLWQPDRSRFRHWLEREVRPRAEGSSVALAVEGCTGWRYVVEEISAAGFAPFLAEPADTQAARGRKHRAKTDRTDAQLLRELLQAGELPESWIPPQDVLEWRERVRLYKSLVDQRTLWCQRIHAVLYHHGVTIPEGAIRTERTRSMLADDHLGVSSAARERIDVGYKMIDAADAQALPLKHALQRFGTRQPACRALVEAQYGIGGLLAVVLWTELGDCRRFSRSEQVVRHSGLDVTVDASDRRRAGGHLSRQGPETLRWALYEAAKNSSHGRSPDHGYYAKVKERHDGKIAAISVARQFARRSYHVLRAVDPDEVYAIPA

SEQ ID NO: 194840 - protein, 337 aa, unidentified
MNFKRISIDTSKSVFTLHGIDEHDRAVLRRDLGRAAMERFLAKLEPTEIALEACGGSHHWGRRLTAMGHRVRLLPPQYVKPFVKRGKNDRNDAAAISEAAGRPGMASVPIRSAENQAAGLVIGTRDLLVRQRTQTINALRGHAAEFGVVAAKGTAQVAGLMARVLSAEAGVPEAAQRMLCVLADQVAHLDEQIAALDAQVREAVKADAAACRLCQVPGIGPLGAMTLSLMVEASQFRSGRHFAAWVGLVPRQRSSGGKTRLGGISRAGNERLRQLLVVGAMAVIRHVKPGSRNASGWLLGLLERRPRKLVAVALANKMARVVWAMLARGEAYRAAVG

SEQ ID NO: 194841 - protein, 405 aa, unidentified
MDVHKTFVVATIITTPADSLQPIYQKKRFSTFNSDLNRFADWLLEHGCLDVCMESTGKYWVPVFNILEKRGIQVVIANPKWVKAVKGNKDDTKDSKWIGDLFRIGLVKSSFIPDLNIRILREFTRYRYKLISMKSSEKNRFQNAFTVCNVALDSVVSDMFGKSATAITDYLTSDESFDPEHCVSLLQRSLKKKAEQVLESIDGFSIAEEQKARIKIIREHYDFIEKMIAKVDTCVNEMVVTYEGEINFLCTIPGIDRNSAITIISEIGTDMRQFGSSKRLCCWAGLTPGNNESAGKKKSVRISRAGVYLKPALVQVAHAAVKDKENPYYALKYERIAKRRGKKRAIIAIARMILTAIYSMLCTGEIWNPVDLYKIDMPEHLKEQQLAKAIKQATRFLEKHGLSVA

SEQ ID NO: 194842 - protein, 338 aa, unidentified
MKVYAGLDLYATNTYVAMIDAENKVLYKHRHSNDVPSILSALDPFKEDIQGVVVESTFNWYWLVDALMDHGYRVHLANVSAIKQYEGLKQIDDRRSSLWLANLLRLNILPTGYIYPKEERPTRDLLRKRLQFVRHRTSHVLSVKNILARNLGMRMKTYDIKKLKASEVSTLFADTEMRLAILSSVGLIQHFQEEIDRIEQVIIKKFKVKEEFKKLLTVPGIGEILGLTIMLEVGHIDRFPTVGDYSSYCRCIRSIRTSNGKVTGYGNSRNGNQYLSWAYLEAGHFARRHHEMIQRYYERKRAKTNKVIAIKAVSHKLARASYYVMRDGVDYDEARLFV

SEQ ID NO: 194843 - protein, 370 aa, unidentified
MKNAITYVGLDAHKKDIYVAMLVSHERVPVTWQLANEPHAVRRLVRKLERETAGPIECCYEAGPCGYALQRQLTTPRVKCQVVAPALIPRKPGDHIKTNRRDARKLAELLRAGLLTEVAPPTPADEAVRDLARARDDAREDLVRARHRLSKLLLRRSVRFPGAQRAWSDPHRRWLRSLTWEHAADRRVADDYLLAIEQLEARLRELDAALQEIARTDPYREPVAWLRCFRGIDTLTAMIIVAELHDFRRFQSARALMAYLGLVPSEHSSGEHPRRGRITKAGNVFVRRVLIEAAWHYQHRPGVGRGLRGRQTGQPARVIAIADRAQQRLCRRFRRMVVERKPTPKVAVAIARELAGFIWAALQRSRPQAA

SEQ ID NO: 194844 - protein, 310 aa, unidentified
MDIIIDKGCGLDVHKETVVACVMGSGIKKEIRTFSAMTGDLLRMKGWLTDLGITHVAMESTGPYWKPVFNILEDSFEVILANARHIKNVPGRKTDVKDSEWICKLLRSGLLTASFVPPQVIRDLRDLTRYRQKLIQAASAEKNRIQKVLEDANVKLSSVVSDTFGVSASRMIKAIMSGNFDTDSLAELAVGKLKGKKEKLKEALQGHFRDHHGFMIQASLDHIASLEKIIADLDRQISEKLKDYHAKSELLKSIPGISEQGSSSILAEIGADMNVFPSEGHLSAWAGMSPGNNESAGKKKVERQPTAIKT

SEQ ID NO: 194845 - protein, 372 aa, unidentified
MNPKSTIFVGLDVDSKNFHATLINRADGEIVSFRVPAKIADLVKKLRPFQKKGHELRICYEAGFHGFSIQRDLVRAGFHCDVIAPSNIPRSPGQRVKTDRIDAQKLAELYMNSLLTVVHVPDEVVESDRDLIRARGFLQKQVRSNKQYIVMYCRKLGLNYKEFTGSKQYFTGEHLKWLRDRVATLENSSQRSSLILLLKQYQQTIDLVADYDAELEKLAADDRYRKKVAALGCFRGISRVFALQLITEIGDVHRFRHPRQLTSYAGLDIIEYSSGGRERRYSITKTGNSQIRTAAVEACQSLNKTPRATKHLIARRKELGSTPAQIAVADRCMRRLYKKSTRLIMRSKHTNKVKVACAREMLGFVWEALKSA

SEQ ID NO: 194846 - protein, 391 aa, unidentified
MTKPKVKTVNDLSRCLDPLDMDATVIAVIEMSQSSWLVAGIVPGVERQPLKKLAIDEHALLKLLSRWRAEAEKKGHRITRIAVAFEAGHDGFWLARWLAAQGIESHVIHASSVAVTREHRRAKSDRLDTELLKRGFLGWLRGERGHCKMVAVPTLAEEDAKRPSRDRETLVGEASRIITRVKAAFVRLGIRSFNPKLKAAAARLGPLRTPEGEPIPPNTLAALKRDLERHRIVKQQIREIEQARLALLEKAPAKGPNAMVLLLARVVGIGIETADMLVQEVLSRNMRDRRAVARYGGLTGSPNESGAKRREKGLARSGNARVRHGMIQLAWRFLLFQKDSALAQWYRQRTADAPSTRKTLIVALARKLLIALWRLARDGVVPEGVRLRPAA

SEQ ID NO: 194847 - protein, 426 aa, unidentified
MAVVMIGVDPHKASHTAVAVNAAEVPLGQLRVRASAVQAERLLEWAQAWPERAWAVEGAGGLGHLLAQQLLSAGERVLDVPPKLAARVRLLATGNINKNDPDDARSVAVAALRSADVREARRDDHAAVLKVWSKRYRDLGRMRTQVACRLHQVLCELIPGGVPGEITAGQAARFLESVTPAGAVQAARWELAAELTEDLRGVDARIRETRTKAAAAVRAAGTSLTGLFGVGPVIAAAVIGDVRHVSRFGNRDRFAAYNGTAPIEVSSGGRKVCRLSRRGNRRLNHAIHMAAITQIRYRHTKGRAYYDKKLAEGKTPKEALRALKRQISDAIFACLQEDARRAAAAAKSPGGQPGNHSVSRAADSHPDHRLFGPATPGPATHPMTPAAPVPAQLPSRASERLSPGPGAARPRSGARRASSTRSRTSR

SEQ ID NO: 194848 - protein, 428 aa, unidentified
MHNKNYISVGIDVGSAFSFMTILAPDETVILKPFKITHNNKDSLERAVSEIKKAEELYSLESRIFLESTGIYHFPLFCYLVDCGFNASIINPIITHSTKNGNIRKVKNDKIDSKGIAKLGLSKDIPVSQFPAKLVLELRSLTRKYYDLTDERSAHINKLKGDLHTVFPQYLDVFCDVTGKTSTMILRQYGTPDKILRGHKKTMIEKISKASRKGLAKASERYEKLCAAANAAKTFGCQIDSIYFNIFLTLDLVEKLDSALDSILNRIRQLITFNKNEKFIQQIKLLNTIPGVGFLTAVTIMCEIGDFSAFRNPKQLFAYFGLDPEVNESGKFVGTQLHMSKRGSRIARRAIFAVALASIRTKRNGEGINPYLRKYYELKSGQKPKMVAIGAVMHKVCNIVFAVLRDEKAFELRSPEAVSYTHLRAHET

SEQ ID NO: 194849 - protein, 344 aa, unidentified
MITFGVDAHKRTHTIVAVDDRGTPVGQTTVGTTSHDHLVLLRWAARFGAERRWAVEDCRHLSRRLERDLLAAGESIMRVPPKLMAHVRDSARTYGKSDPIDALAVARAAQREPNLPLARLDGPDREVRLLVDHRESLISERTRLICRLRWHLHELDPAWEPKARSLDAQRTLDEVRGRLQDHVGVVARLAVELTERCAELTITIKALEKEITDLTTQLAPALLELPGCGALTAAKIIGETAGVDRFKSRDAYARFNGTAPLPVWSSNKARHRLSRTGNRQLNAALHRIALTQARWHPPAKGMIERRKSGGNSGREALRVLKRRLSDAVFQALLHDQTAGLTLAA

SEQ ID NO: 194850 - protein, 438 aa, unidentified
MKVMHERVAGIDVHKKMIKVAIRSPGDKPWTRKTEILTFRTFYGVLREMARELRRRGVTHVVMEASGVYTEPVYYALLEEDFAEVLVVNPAHAKALKGHKTDAKDCARLAELLECGLLQGSYIPVAELKEVRDLTRYRSKTVQARTSEIQRLDKALESAGIKLGSVASDITGKGPVAMIEALIDGERRGKVMADLAKGRARAAGKLADLSMALEGRFTGHHALMCRLVLDRIRVHDAAVADLDQRIAGLAAAWQREIDLLKTIPGFGDVVAWTWIAEIGPAPHQWFGSQEKLASWVSLAPGNYISAGKRKHSRTGDAGTYIKPVLVQAAWAAIRVRGRLQARYNRLVRRFGGAKNPAAKKKAIVAIAHTLLKIAYKVLKSGTPYQDLGEDFYTRRETPAQRQAWLERQIQKLHPGCTVTITISPPPGHAPEAALTAGA

SEQ ID NO: 194851 - protein, 394 aa, unidentified
MFYLGIDIGKRTHVASVMDDTGKVLLKGFSFSNSLEGGHSLLTRLRTISDDPTHFLAGMEATGHYWLALFSFLDEADYFIHVINPIQTDGWRKGIEIRKRKTDIIDSVLIADLIRYGSFEDTTLANEEMFSLRQLTRYRSYLVGTAGDFKRKIIAVMDQVFPEYDTVFSKVGVFGKASKAVLIEYSTPDAFNEISADALAETLRMASRNRVRLMKAESLKTAASNSFGIRFAQDAFTFQLRSMIEQLNFLETQIKQTEEEIKQLMVSINSVIETIPGIGPITGATILGEIGDIHKFSNPKKLVAYAGIDTSVSQSGQFDATRNVMSKRGSPYLRKALFQAALVASRSDPVLKAFYEKKRSEGKHHLTAIGAVSRKLCYIIHAILTKNEPYEIRQ

SEQ ID NO: 194852 - protein, 382 aa, unidentified
MTGTEPQAWGTGLMDDITFVGLDVHKATVCIAVAEGGRGGDVRQLGVFENRPEILSKVVSRLSKGGRRLSFCYEAGPCGYGLHRLLTGYGHECVVVAPSLIPMKAGDRVKTDRRDALMLAKLHRAGELTAIWIPDAAHEAMRDLVRARATAVRVLAKARQHLQGFLLRHERIYRGARAWTLAYRRWLSTVRFEHPAQQIVLQDYIHAVQEAETRRDRLTQQIEELLPNWSMAPVVAALQSMRGVALVVAVTVVAEVGDFRRFANPRQLMAYLGLVPSEHSSGSSVRRGGITKAGNALARRVLIEGAWTYRMSARVSRKLHDRLEGLPAAVRDIAWKAQLRLCARYRRLAAMGKSKVVVTTAIAREMVGFIWAIARLAQPALV

SEQ ID NO: 194853 - protein, 354 aa, unidentified
MSRKTTSVEAVATIGIDIGKNTFHLIGLDKTGAIALRQKLSRGQVNVRLANMPPCLIGMEACVGAHHLGRQLKALGHDARLMPARYVRPYSKGQKNDFRDAEAIAEAVLRPTMKFVAIKTVEQLDLQGLHRVRERLVCQRTSVTNQIRAFLLERGIAVRQGLRPLRAEIPIVLAMTDKLSPRMIQMIQDLCTDWRYLDGRIEMMSDEIETLSEQDEGAKRLKTVPGIGSIISTATVAAIGNGDAFSKGRDFGAWLGLVPRQMSTGGRTVLGPISKRGNRYLRMLFVQAAHAVLLHPQSWEKHGLKSWIEAAARRLNRFKLAIALANKIARIAWGVLHGDRNFEVRPTRPVSQVA

SEQ ID NO: 194854 - protein, 349 aa, unidentified
MTIVETTCSVTAGVDTHADVHVAAVVDHVGGVLGIEAFDTTVAGCRRLVEWLRGHGEINLVGVEGTGSYGAGLTRHLTSAGISVVEVDRPNRQLRRREGKSDPVDAVAAARAALSGQGLGRPKSRDGDVEAIRVLQAACRSAASERIATLCQLRHLVICADDQVRSRFEGLSVARLTAEAAALRPRPTDTVRYSTLFAIRTLARRVASLDDELDELNAVMRPLVDRAGPGLLGMYGVGYDVAAKLLVAAGDNPERLRSEAAFAHLCGVAPLEASSGKTVRHRLNRGGNRQANSALYRVVVTRMASHPATKAYAIRRRAEGKSTGEIIRILKRYVAREAFKHLRPAAAMT

SEQ ID NO: 194855 - protein, 351 aa, unidentified
MDTEVSPKLFIGIDVHKRQWSVCIFTANCHHKTFSQAPDPKALKSYLDKFFPKHKIICCYEACKFGFWIYRDLNSFGYECLVINPADLPTTNKESSEKTDPVDSRKMAKALRAGLLRGIHVPTLETEGDRQLFRYRKRLWADLVRVKNRIKDKLLQNGVETPPKYDNPYWTKDFLDWLAVVELPSDSSRLVMDLLLDQFEFTYRHFLKVSISVRALQRKAKYKTNSKLLRQIPGIGPLTTVQLLTEIEDIHRFRNFKHFNSYIGLKPMVHSSGESDRKGYMTYRHHQGLRSSLIECAWTTVQRDPVMLNRYEELLQRHTGKRAIVIIARKLLSRIYNVLKTGEPYQVGYST

SEQ ID NO: 194856 - protein, 341 aa, unidentified
MKNLFIGIDFSKEKVDVAIIFADGLTETAARVFNEFKTTVSGYKQLVKWVELNSYGIDSSMWLFCGENTGDYSKGLCNFLYGKGYDMWLENAKSIKDASGLRRLKSDRADASMIAEYAMRNYDKAIMYEPLSESLAQLRELFLYRQMVVRHRCSFQVRRGEKRLTMEKSPVKTMISQSGRHIVYELNKEVEKIDKRIAELIKSDEELTEVFTIVTSVSGIGTQNAVCLMVYTDNFRRFNYDSRKIACYYGIAPFGKDSGTSVHSDPHVHYMANRQIKAMLTQAALAAVNFNPVIARYYMRLVERGKKKQVALNNVKNKLIHLITAMVRNRQLFSPEYKISA

SEQ ID NO: 194857 - protein, 319 aa, unidentified
MAQNDLVVVGIDVAKDKVDACIRAFALRQVFPSTAHGNRKLVGWLRKHKVNKAVMEASGGYERGWARLVREAGIDVRVVDPKRVRSFARSAGRLAKNDTIDAEMIAWFAETFSEAPSQTHDAAQEELLALVKARIGLVDLKMRLQSQSEHAAPVPAQKAHAGVLKTLADEIVKLEASISARIKSAPHLAERAEIIESVPGFAQTTSANLVAGMPELGQVSNKIAAALLGAAPYDDDSGKRYGERHIKGGRRWVRNAIYMPCVGAATQNNSMLKAYYDRLIAKGKKPKVALVACMRKLIVILNTLIARRQKWDQSRYVLN

SEQ ID NO: 194858 - protein, 344 aa, unidentified
MVAKKAKFVHFIGIDVSKGKIDVWLCVNLGNQGHYWGQFEQSKKGFSAFKKWLEGFIGKDMSLVFACLENTGLYDDALLYFLADHNIAACVENGATIKAAKRDQRQKNDKLDAREIAMYAIRYLNELEIWEKPREIVEQLKQLLSLRSASIEHLKGLKQRIKEMDGFKWARIQKVKNYTAGIKGLRKDIDDIEKAIWELIKSDAALYKMYALIISIPAVGKITAWHFICYTNEFKRVRNGKNLAAYCGVVPFKEDSGTSVRKPPRLPNRANMTLKTLLHLCALTAIKMKGEFAIYYQKKIQEGKHVLKALNSIRNKLVLRIAAVIRNDRPYDQHYDYKSICSGA

SEQ ID NO: 194859 - protein, 341 aa, unidentified
MQITTIGFDLAKNVFQVHGIDATEKVVIRKPLRRGQVIKFFAGLSPCLVGMEACASAHYWGRELTRLGHEVRLMPAKDVKAYVKRNKNDAADAEAICEAVRRPTMRFVQVKSADQQGRLMQHRARDLLLRQRTQVINALRAHLAELGIVAAQGREGLKELLAIIADERDVRLPLNARTSLIVLAAQLQALQTLIGSIEKRLVVQHRANEASKRLESVPGIGIIGASAIAATVTDPKVFRSGRDFAAWIGLVPRQDSTGGKQKLGPISKQGDRYLRRILVVGAHSVLRRAKLNPEKYPWLTQLLARRPFKVVAVALANKMARVAWALLATGGTYRMPALAAA

SEQ ID NO: 194860 - protein, 321 aa, unidentified
METEKGQIAFEQVIECGCGIDVHKKVLVATVRGKGIKEETRTFSAFTESIEEMRDWLKDLQVTHVAMESTGVYWKPVFNIMEEDFEIILVNASHLKNIPGDKTDKKDSKRIAKLLLAGLLKGSFIPGKSIRELRDLTRYKRKVIGQIASEKNRIHKFLEDANIKLSSVVSNLSGAVATKLIDAMIGGQEDVKELVKLRHGKMKATIEELASALTGKLTDHHRFMLGMVKKSIGDKESLIEELDKEIDRLLKENEMVLDTDLLSTIPGIDKDSAASILAEIGNKMEQFPSEQHIASWAGLSPGNNESAGKKKVPGSHMATIG

SEQ ID NO: 194861 - protein, 338 aa, unidentified
MKNSTTISIDLAKTVFQVALFNKYGVLKSNNKMSQAKMVQFIAQHPEATICMEACGTAHYWGRRFQQNGHKVLLVLAHIAAKYRTGNKNDALAIYESIKRPKTYFVQVKNLDQQDLASLLKLRQGYVKQRTQTANRIRGLGLEYGVKIPQGIAKIRKNLPRFLEDAENELTTSSRFILRNLLDQLLLLDSQVEEATNKLVARAKEVPVCSRLIALPGVAWIIASALYARLGDGSAYKCGRDASASVGVVPAHSGTGGNNKLLGITKRGDRCLRSLLVHGARSVVSRIKDKQDGLSCWIREQLSKNHLNKTAVAYANKLVRMAWAILKSGEDYRTPLAQ

SEQ ID NO: 194862 - protein, 339 aa, unidentified
MMIIGCDYHPSFQQIAWVDAATGECGERKLTHTVEAESFYRGLRGQEVRVGMEATGHARWLERLLVELQFELWIGDPGEIRSKRVRKQKTDRQDAELLLQLLVENRFPRIWVPSPENRDLRQLLWHRHRLVQMRTRVKNQLQAIALNEGLRRQKGLWSKLGRAQLEALELAPWSARRRQDLLELLDRLHPRIDELSAAIQQAAEQRPEAQRLMSHPGVGPITALAFVLILGVPSRFRCGKQVGSYLGLIPCEESSGGRQRLGHISKQGNTLLRFLLIESAHAVVRYEPDWRRRFLHLALRRGRPIAKVAMARKLAVRLYWMWRKSWDYQQISKFGSHVE

SEQ ID NO: 194863 - protein, 365 aa, unidentified
MARIPQQGPIHLGLDVHRNTISIATLLPACASAEVEQIPSDETAVLAFLGRFPEPSRLRVCYEAGPTGYELARLLHRQGVACQVIAPSLIPRAAGDKVKTDRRDCRRLARLHRAGELVAIRIPTPREEAVRDLCRARADLVDDRSRARRRLQAFLLRHGRIYRAGACWTGKHQRWLGTQQFDDPQLQATFAHYRAVAATRDAQVTAIEADLAEAAIQPPFADAVARLAAYRGVGQLGALSLAAEVGDWRRFAHAAAFMAFTGLVPSERSSGDSIWRGHITRTGSKHLRFQLVESAWSYHHRPLIAGALRERQQHISPDTLARSWAAQLRLCRRFRQLERRKHITGVAVVAVARELAGFLWAEMQA

SEQ ID NO: 194864 - protein, 428 aa, unidentified
MSRRDCSKQAERRQRIKKTTLVVGVDVGSEFNAVALMSKEGEVFGEYPKVYNSREGFEYFLQVVEAVKRRKGLKEVFIGLEPTGHYWRKLAFFAKEKGYQVRFIRTTALKHQRELDESSSAKSDIKDALTIANITREGKYIDTVIEGGIFRQLRTLAKVREKTLKYSVSTQNTLGAVLDDYFPELKKIFHSMKTRSLWAVLKSCPFPQDVLRFDLSTISEIISKSSYRKVSAAKKARDLFAAAKESIGLKEVAEADRYRLKRCLEEAMRSEILLKEVGIQMKSLLKQIPCSEYLLSIPGIGPVSAAVFLGELGNPAHFSHPKQIIKYSGYDPQESDSGNRVGRKRISKKGRWLLRKILFFMTMKVVQECTFFWDYYQRKLENPNRFGQLLKKKEALCAVTLKLIKVIFALVRDKRGYQEEAPAFTLAA

SEQ ID NO: 194865 - protein, 354 aa, unidentified
MLQNLDRAIAVIGIDIGKNSFHIVGLDGRGAIVLRQKWSRGQVEARLVNMPPCLIGMEACVGAHHLSRKLKAFGHDARLMPAQYVRPYSKGQKNDFRDAEAIAEAVQRPTMKFVATKTADQLDLQALHRVRERLVSQRTGIINQIRAFLLERGVAVRQGLRFLRAELPRILATPPDVLSPRMVRVIEGLAEDWRRLDERVDHLSGEITALARQDVGCERLMSVPGIGPIISSAMVAAIGTGDAFSKGRDFAAWLGLVPKQISTGDRTILGKISKRGNRYLRVLFVQAAWVVLIKPMSWERHGLKPWLEAAKKRLHRNVLAIALANKLARIAWSVLARGRAFEARLATKSVAQSA

SEQ ID NO: 194866 - protein, 360 aa, unidentified
MFTERTSVGLDVHARSVAAAAIDGVTGEVFKARLVPAPEVVIRWVESLPGPSAAVYESGPTGFGLARALTAAGIRCEVAAASKLQRPAGDRVKTDARDALHLARLLRLDEVVAVRVPSEVEESARDLVRCREAARADLMRARHRLSKLLLRHGIVYSGGKAWTQAHDYWLLRLSFPLAGTQAAFQDAYETVVLAAGRRDRLDAAILEMAADGQFTAVVRRLSCLRGISTLTAFSLAVEIGDWDRFTGAGIGAYLGLVPSEHSSGASRSQGPITKTGNAHARRLLVEAAWHHRKPYRPTAVLRRRWQLAPPAAVARAQAGNHRLHQRWVGYADRKKRPVIANVAVARELAGWCWSLAMLPE

SEQ ID NO: 194867 - protein, 425 aa, unidentified
MEVIHPRCAGLDVHKETVVACVRLVLDGKISRAVRTFETTTSGLLLLLAWLTELGCTHVAMEATGVYWKPVWNILSDGDFELVLANAAHIKNVPGRKTDVSDAAWIADLLAHGLIRSSFVPEQEIQELRELLRTRKQLTRQQSSHIQRLQKTLESANVKLDSVITDIVGKSGRAMIQALIAGETDPVKLAALADRRIKASPQELREALRGRVTNHHCFLLHLHLQHIEFADAAIQDIDRNVTALINRVDQEVEAGQTRATFQSLILLLMTIPGIDVLSARIILSEIGRDMSRFPTAGHLLSWAGLCPRNDESAGKRRSTRLRKGDLWLKTLLVQCAWAARRKKGSYFNAQFLRLRGRRGPKKVACAVAASLLTTIYHMLKDGTQFQDLGADHFDRRSKDVRAKRLVTQLANLGFDAKLTPLAQAA

SEQ ID NO: 194868 - protein, 360 aa, unidentified
MAVAVADGRPMHLWDTKPVGERGSSSAVPLNPNSRQGRLRKQSPLRQGWDQMEKIVGIDVSKDRLDVAVAPQGEVFAVGNDHAGIDDLIVRLKAIGADAIALEATGGFETLAVAGLSSAGLTVLVVNPAQVRAYAHAIGRRAKTDPIDAAVIAAFVLATKPEVRPLRDAETQALSELVARRRQIVQMIVAEENRLRMVLAKQAQKSVKRLLAALRRELESLDADLDDHIRKSPVWRVREALLTSVPGVGPTTARTLLAELPELGSLDRRQIAALAGLAPWTRQSGKWKGKSFIGGGRGKVRAVLFMAALVASRHNPGLKAFRDKLVASGKPKIVAIVATMRKLITILNAIIRDNKPWQNA

SEQ ID NO: 194869 - protein, 443 aa, unidentified
MPNDTPLTRGDRRRNEKLARLRAVVRPDLAIVGVDLASAKQAAVVADHDSITLGRRMFEGDPWVIDEILDWALPIALEAGFTGVVVGCEPTGHRWKPLLERCRARGVDLVCVNPMLVHRGREEEDFTRDRSDFKDSTIIARRVADRHCYIPYALEGDWCRLRHLGARRNDQLVQSTAARQQLRDLLECVWPAVLRVAAKPLESTTWRAAMAVSVDPSEITAMGWPVFAAAVADELGRWGGKRRNLRVLRAVWAAAQHPDGVERERAAALERAAFAVRDWRRALDELDDVGDRMLTVLDQLGFTELVTTITGLSALGAAAILAETGDPARFDCARTWVKHAGLCPRANESGTFAGQTRISGRGRPALRTAAWRAVWGALPHNAVWAARYTHLRNRNENPLKDGPARTAIAAAMLRQLFIVVSRRVAWDPTVAAGAHQEVTAQAA

SEQ ID NO: 194870 - protein, 434 aa, unidentified
MTLINFVAANQKYYAFNLLSVFIMVFWSVQYLLQHLLVQTQLSDQLLQRLILILQLPQTPQFRHARPGKFFLPVNGMDYLLPLRLTVRNVLTRRITMNIVFLGIDLAKNVFQLCGLNQAGKPVYTKRTGRKELLQTLANIPACLIGIEASTGAFYWQREFEKLGHKVKVISPQYVKPFVRGQKNDGNDAQAIAVALMQPTMQFVPPKSPEQQDIQALHRARRRIVNHRTATVCQIRGLLLDRGIPIGSAVSRARRAIPLILEDAENGLSSRMRRTIAELYDLFNDLGRRIHFFDKEIETVFRQSEACQRIAKVKGIGPETATAVVAAIGKGTEFKNGRHFAAWQGLVPRQHSSGDRQVLMNMTKKGDKHLRTLFIHGARAVVRVATNNNDGHMNQWVNQLKERRGFNKTTVAVANKNARIIWSMLRNETGYQVV

SEQ ID NO: 194871 - protein, 348 aa, unidentified
MKFYNKQHEFYCGIDLHANSMHVCVVDQGGEKLLHRNFNTKKPERFLIALQPYDKHDLIIGCESTFNWYWLADLCHDQNLGFLLGHALYLKAIHGGKTKTDRIDSEKLAMLLRGGNFPTSYVYPKDMRGTRDLLRRRCTIVRRRAATIVHVQMVNHQQNLPAFPKSISYKTNRVGIPDRFEGDSVQRMMKLDVDLIDFYDEQIKKLDLYLEQHAKVDDADAFYRLMSIPGVGRILAMTFLYEIHDIRRFPKVGDFLSYSRLVKGTNSSAGKQYKPTGAKIGNPHLKWAFSEGITLLKRECPEAKAFAEREEKKHSKARANTLLAIKLGRAVYWMWTRKTSFDPKVFLP

SEQ ID NO: 194872 - protein, 318 aa, unidentified
MSGDGEVLGCVKIPSQPMELAEAMADAGENPEVVLESTYGWYWAADLLSELGANVHLAHALGNNWGNRRVKNDERDARDLAAMLRLGRLAEGWIAPPETRELRELVRYRARLVHHRSSAKAQIHGVMAKNGVLPVRGNIWGPSGSAQLDALSLPEAYALRIASLRGLIDIYDTEVRRLDAHIHRQCKDDRGYQAILRLNGVGKVLGAIFVAEIGDVSRFDSPEKLCSWAGLTPKHRESDDKVQRGPITKQGSPLVRWAAIEAISKNHGGTKLRGDFARIAERRGKFKARVAVARKLLTLVYYGLRDGEVRSLDRQEAA

SEQ ID NO: 194873 - protein, 408 aa, unidentified
MSKEKTLPKRFIGLDIHKHYLIATGLDADLDPVYGPRRVQLEHLENWMRKTLTVEDAVVLEMTTNTWQVYDELLPHVHSVIVVHPPHVKAITQAQVMTDRIAAYNLAKLLAKGLLVGIWVPPENVRDHRALVAQRTKMTRLATQAKNRLHAVLHRHHFAPPDASLLAPEMRLWWLALPVSALERVRIQSDLDTLTFAQAQIANLEEALAALAAQDERLPLLVQLPGVGWLTAITILAAIGDITRFPDARHLVGYAGLGGRVHDSGLTTSSGGITKAGRRDLRAGMVETAQIAANTHPHWQAELARLEPRLGRNKAIVAMARKLLVAIWHVLTEGCADRHAEPERTARKLMQVTYQLGKANRPAGQSAAAHVRQQLDRLDIGQDVTHIAWSGKKRPIPLTPSALPLSPV

SEQ ID NO: 194874 - protein, 354 aa, unidentified
MLAEMVDHVIGIDPDRDWITAAVVEASTAGVLATGRFRANSAGYRQVVAWADGYSTATERAWAVEGSASYGRGVTAALGRGGEWVVEFDRAKEKPAKDGSKTDELDAIRAARETLGRTRLASPRAHQGFREALRVHAVARDSAVRARTAAINELKAFVVTADDTLRGELRGLPTAGLVKRCAGFRHSTNRPVHQAHTRAAMRAVALRIRHLNDEIRDHTQALTILVDQAAPQLVAEIGIGPVTAAGFYIVWSHPGRCRNEAAYARLGGAAPIPVTSGQTQDRHRLSRRGDRQLNKALHQVAVTRLRCHPPTRAYKTRRSAEGKTDRDIRRCIKRYIARRVWRLLEHQTPPQTTT

SEQ ID NO: 194875 - protein, 410 aa, unidentified
METVVERPAALDVHKEQVTACVRVPGKAGRREEHLAEFRTTVQGLLGLRDWLKAYGVTHVAMEASGVYWKPPWAILEDEFECLLVNARHVKQVPGRKTDVSDAAWLCQLLEAGLLNASFVPPKPIRTLRNLTRYRKTQIQERQREANRLHKILEDTGIKLDCVVTDILGASGRAMLDALVAGTTDPAVLAELAKGKLRQKLPALREALEGRFDAEHGIVVSAILAHIDFLDEQIDRLCEAIEEQLRPFAAAVELLCSIPGVQRRTAEVIVAETGAEMSVFPSAAHLASWAGLCPGNDESAGKRRSGRTRKGSKWLSIALTEAAQANTRSRDTYLSAHYRRIRSRRGHKKAIGAVKHSIIVACWHMLTTGELYNDAGGDYFTRLDPDKQTRRLVAQLERLGHVVALQKAAA

SEQ ID NO: 194876 - protein, 366 aa, unidentified
MAQDSALQYVGIDAHQETLAISVLVGDSKEPLPCRTIANREGPIRQLFKKLLEQGSVIAVYEAGAQGFVLHRLLTSLGVQCVVAAPSHLPRIPGDHRKTDRLDAQRLASFLRAGQIVAVTPPTPEIEALRTLTHTRDAMREDVVRARHRVLKLCQARGTVYREGQNWTAKHLAWLRKLELRVEDDKQTLDYLVDELERRVGALATLDRRIEQRAEQKDVAESVRSLMAFRGVRALTALCVVAELADPRRFKNARQVASYCGLIPSEHSSGTKVRRGPITRSGNARLRRLLVETTQHFARPFPATSAVHRRRPLAPPKAQRIAARADDRLKKRYRALAARKHTNLAKTAVARELIGFLWAAINPDIN

SEQ ID NO: 194877 - protein, 345 aa, unidentified
MEIRTIGIDLGKTVFHLVAVDARGKVVARKKCSRTQLLRFTSNLPSCLIGMEACAGSHFLGKALREQGHDARLMPAQYVKPYVKTNKNDYIDAEACAEAVTRPTMRFVPIKTDDQLDLQSLHRVRERWMARRTAVINQIRGMLLERGITIAKGRRHVEESLPGILEDADNKLSGALRSLLGELRLEMQYVHRQIGESNKLIERIAGELEDGQHLMTVPGIGPMIATATIAAIANGSAFKKGRGFAASIGVVPGERSTGGKQKLTGTSRRGNKYLRKLFVQGAHAVLQRRTKQDPVLRAWVERLAARKRPQLVAVALANKMARMAWAVLSKGEVYRPPLAAQAAAA

SEQ ID NO: 194878 - protein, 465 aa, unidentified
MQLTLGIDVACRAAHQASLADESGQFAWSGRRFRTTPADLQELWDLVPDGAGVTVVMEPTRNAWVPLAAWFRRHGATVVMVPPEQSADLRDYYSKHVKSDRLDSRLLARLPMLHPDGLRPAEGLGPADPLRRAVQLRGSLVKRRSVIVARLDCYLELLGPAWHAAFGGDLTLYTPLRFLAAGYADPHAVRRLGRTRLTRLIWRWSHGAWAEDHAARILAAAAETLQLWDTELSYPDLADDIAAEARLALALCAEVRDLDTKIASLLRDLDPAGIMTSVPGVGAVNGAQILARLGDPARFQSLAGARSFSGLVPALDASGVNGRHGPPTKSGDASLREALFLAADHARRADPSLAARYYRLMVCEGKHHNSALCHIAPTLLTRIIACWRAGTPYQVRDTDGTPLSAAQGRAIVAERYRVSDELRARRRTSHAKAGTSRRHQESPGAPTPARPRTTLRRPAEPLDTD

SEQ ID NO: 194879 - protein, 407 aa, unidentified
MTDAPNRYIGLDIHKEYFVAVGVNDKLETVFGPQRGSNYQLDDWISRYLTPEDAVVLEMSTNTYQFYDALLPHVHSVMAVHSPNVAMVTNVRVKTDKKAALALAQLHATGLLTGVWIPPCPIRDLRSLVARRDKMVRLSTMAKNRLHSMLHRHHLIAPEKPFEPEQRTWWENLPLSANEQLLVSCDLEMLDFAQKQAAQIEGCLKQASAEDVRIPLLIQLPGIAMLTAITILAAIGDITRFPSAKKLVGYAGLGTRVHNSGLTCSSGRITKAGRKDLRYAMVNAANHAVEHHVHWKKELARLAPHLGRSKAIVAIARKLLVAVWHVLSKQAADRFADPRDVASSFIRYAYRIGVKNLPNQQPATVFTRDQLDRLDIGKELKEIPWGSKRFKLPPSKLLLEKSERRPK

SEQ ID NO: 194880 - protein, 368 aa, unidentified
MSNYVTAIGLDVHARSIKAFALNPMTGECERASFGYDPAAVAEWALGFDSPRAVYESGVTGFHLCRALSALGLECVVGAVSKMQRPAADRGRKNDRRDAEFLARLLATRNVVEVWVPDGRTEAARDLSRALADARDDLQRAKQRMSKFLLRHGHVFDEATPTGARKGNWTRAYWRWADAIEFDEPDDAAAYEHYRDCVRRCQEARDALARRVAEAAGRPGWKPVVDALRLVKGIDVATAFLLACEAGDFSRFRTAPEFASWCGLVPSEHSSGETSSRGGITRAGNAHVRSALVEAAWHVPMSSREPKPLAPGQEAAPAVRRHAAKCNRRLQDRREAMEAAGKRPVVANCATAREMACWVWAIAGMASA

SEQ ID NO: 194881 - protein, 375 aa, unidentified
MNKCHSNTELCSHEETRSQFNGGRCTIKSAEGRIRRYVGLGIDVHQDFYVVVEQVGGSNPKPPQRFQKQAFLHWAAKLKRERGEVHAVYEACGFGFALQRQLSALSIQCHVVCPQKLDEHNKRVKTDGLDAKALCLRLDRFVQGNRAALALVRLPSEQEEQLRAIHRQREQLVKVRKQLEAQGRSLMVNHGIEPVKNWWKRRCFATLAVPEWMQELLRNSQPILIALQEKIGALTLQLQAAAASKQPRGLGAMSSVIIDREIGDWNRFNNRRQIASYTGLCPGEYSSGNTRLQSCVTKHGNPRLRAALVELAWRLVRFQPDYHPVRKWRQILAKGALATGAARKKAIVAVARQLAVDLWRIKTGRLRAEELGLIN

SEQ ID NO: 194882 - protein, 343 aa, unidentified
MPHYVGLDVSQKTTAICVVDEQGRWLWRGVCATDPEAISARVLRHAGVDAKVGVETGSMTPWLVHGLRSAGLDVACLDARRVKAALQMRLNKTDENDAEGLAQIMRTGWYRPVHVKSLDAHRARALLGARAQLVGMTTRLSNMIRGVLKTFGVLPGAGRGLRFDHRVEALLDDAPDIALIVRPLLVSWRQLREQIAVFDKAVRRQVGIDPICRLLMTVPGIGALSSLMYVSTIEDPGRFSRSRAVGAHLGLTPRRYQSGETDRSGHISKCGDGLARTLMYEAAIVIRHRVKRSLHLKDWAEAIERRSGPGKARVALARKLSVILHSVWRSGEPFRWAPNATEA

SEQ ID NO: 194883 - protein, 354 aa, unidentified
MNDKYVALDVHKASIVIGVRDAAGKYIMESIVETKASTVLDFVKGLSGTIHLTLEEGTQSAWLYDLLKPQVAECVVCDPRRNKLLDEGNKGDVIDVKKLSHLFQAGLLRSVYHGDHGTRALKELAQNYESLVGDRTRVKNRLKAIYRGRGISYERDEVYKQVKRDQWLAQLSERGVRRRAESLYQALESLDALVTEARQQMLAESRKQKVAKILREVPTLGSVWVALLIATVDTPHRFRTKRQFWAYCGFAVVTRSSSDYRFDKRGELRKSRRPVSTRGLNQNYNRRLKKIFKGAALIGTVKPPFKPYYEQLIAKGLRPELARLTLARKIAAITLAVWKKGERFDPEKLTKLTA

SEQ ID NO: 194884 - protein, 356 aa, unidentified
MNFNNNTLYVGMDLHKNTSSFCVKDYAGTILRQEKILTDKNQIRDFMLSLGKSASIVLEPVSQWYTYADMLEQLGHDVHLAHPMKVKAIASARIKTDKIDASVLADHLRSNLLPEAYFANKEVRKWKEIVRFRASLLNLRTQVKNKIHAILHKHALKHNFSNLFGKSGRIWLSNLSLGEPFASNLAQYLSLLDFLTKQIDEAEAQVEKQVSNHPHAKLLTTIPGVSFVSALTIMAEIGDINRFPSAKQLMGYAGLVPSTYSSGDIARHGRITKTGSKWLRYIMVEVAHHQVLCKKIPGFGSYYLGMKKRKGSGTAAVATARKLLAVVWRLLKDNRPYQETPPHRGKSGPLAQKYSS

SEQ ID NO: 194885 - protein, 344 aa, unidentified
MHIASIGIDLGKTTFHLVALGERNKILVRRKFSRSQLLAYTANLPSSLIGLEACAGSHFLGTVLREQGHQVRLIPAQFVKPYRKTNKNDFIDAEAIAEAVTKQNMRFVQIKSQEQLDIQAMHRVRDRLVQRRTALINEIRGFLLDRGLTFAARPIHLRKNLPSVIEDAEQNLSSRLRWLLDRMWQEWKQMEVDIKAITEAIERIGNENALCRRLRQIPGFGPLVSTATVAAIGNGAAFRRGRDFAAWLGVVPRQYSTGGKQKLFGMSKRGNTYLRRMLIHGARAVLLRVKYDTGGFGQWVHRLAQRAPHNKVVVAIANKLARIAWAVLSSGHDYQHQRLQPVAA

SEQ ID NO: 194886 - protein, 507 aa, unidentified
MTAPATRRQPASSPPPSGQHAQTQAQRRAYNRRKTRAKAKSEALHQKEAARVEALPVQHPHAAGIDIGSRSHWVCVGFATEAGSCLIQEFPAHTAGLKAIAAFLREHQVTTVALESTGVYWIPLYELLQAEGFEVLLVDPSYTRQLRGRPKTDRRDCQWIYRLHSVGLLAAAFRPDEQTCQLRAYLRQRGNLIRQASRHVQHLQKALEQMNLKLTEILSDITGVTGRSILRAILRGTRAPEKLAKYRDKQCKASEAEIAQALTGSYREEHLFALKLAYEAWQFTLGQVAKVDEQIARQLGRMKCDRALPPLKPKARPKRRVNSPGFDVRTALYYVVGLDLTEIEGISELTALTVISEIGPEVSRFATVKKFGSWLGLCPNWKKTGGRVKSSRTRRGVNRAAQALRLAAQSLHHSRGALGGFLRRLKGRLGAQAAVTATAHKLARIVYLALKHGMTYVRHSQEEYEAQMKEKQIKALRRKARQLGLEVIEKTSGSVASATAAAAAVEG

SEQ ID NO: 194887 - protein, 344 aa, unidentified
MAYFAGIDVSLKDSTICVVDTDGEIVREAKVASEPESLVAFFDTVGFVVSRIGLEAGPLSQWLYDGLTRAGFEVVLLETRHVKAALSAMVVKTDRKDARGIAQLLRMGWFQPVHAKSLGARDTRALLAARKLLQSKLIDVELSIRGILRGYGLKMGKIRKGRFEARVLELIEGHAMLEEIMAAMLRARDTLQEAFCKLHRQILAIVRVCPISRRLMTAPGVGALVAITYKSGIDDPHRFARSKSVGPHFGMTCKKYQSGETEVTGGISRVGDAAVRTALYQAAHIILSRETPYSSLKRWAMEVAKRRGLKRAKIACARKLAVILHRMWVDETNFRWGKETISAA

SEQ ID NO: 194888 - protein, 345 aa, unidentified
MKYIGIDYHKQYFVATTMNEKGKVIRKDKVSTDRDSIRHYFKNARTGETKAVMEACYGWEYFYDEVDNLIDDLIMAHPLKTRLIAEARIKTDSIDSETLAHLLRADLIPEAYAPSSETRDKKNLLRYRSSLTAIKVRIKNTIHSILARNHIEDKGFTSLSDKFGKKGRAYLRSVKLRGNDTMILNQYLDLLGETETKIAAAEKQIRAVCRQDEICKLLGSVPGIGDILAVTIRYEIDEIGRFVSGGKLCAYAGLVPSTYSSGNRTYQGKITKQGNKWLRWAMIEAAQRAPLNDMWLREFYNRISKKGKKIARVAVARKLLEIIYRMWIDRKPYCKKPVTAALQVV

SEQ ID NO: 194889 - protein, 383 aa, unidentified
MDHKRGNQSREQSAQVPVLYVAFELANSSWKLACSDGSKLRHVTVTSGDLAQVQGAIIGARRHFGMGDEVRTVSCYEAGRDGFWLHRYLQSCGIDNVVVDSASLEVNRRLRRAKTDRVDAGKLLSMLMRYHGGEKQLWKVVRVPSREDEDARHLHRELEALKRERTRYRNRIHGILIQQGLRINNPSKKKFVHELELLRTWDGRELPPEMKVRLIRVYERLRMVEDQISTLVKEKTQRLKDENARMAQVAQLLRLPGIGPVSSWTFVMEFFGWRRFRNRREVAALAGLTPTPYNSGSRLREQGISKAGNRRVRTLAIEIAWTWLRFQPQSKLSQWFLDRFAGGGSRMRRIGIVALARRLLIDLWRFLEYGVVPEGAQVKALAV

SEQ ID NO: 194890 - protein, 326 aa, unidentified
MQGKEASEQETKAKSSVGIDVSKDWLDVHVLPDDQRLHVPNNGAGIRQLKRWLTRFDLALVVVEATGKWHRHVQRSLAASAIAVAVVDPFRVRMFAKARGILAKTDRLDARVLALFAATMSPAVRPPAPQALADLAELVTARLTAVEAQTMLKNQRAAATVKFLKRQLDRRIERGDQDIAALDAAIERHIQQDQDLARRYAILTSIPSFGFLTAAILIACLAELGSITAKQTAMLAGLAPIADQSGKRDGARVVFGGRPRVRRILYLAALSAARFNADMRVFYQRLRAAGKPPKAALIAVARKLVVLANTLISQDRMWQPQAPQYA

SEQ ID NO: 194891 - protein, 485 aa, unidentified
MAKRKQSNFERINLERMNRKQRRELGQRLEKSDPGLEIVHPHAAGIDVGNESHFVAVPGNRDPQPVREFGCWTGDLVKMAAWLKGCGIETVLVQATGVYWIALKDIVEQQGIEVVVANAQHTKNLPGRKSDVQECQWLMKLHTYGLVRGSFQLAEDMQGVRAVWRLRGRHVEEAARSVQHMQKALTQMNVQLANVLSDISGKSGQAIIGAILEGERDPGKLAKLCDRRVQASTEEVAESLRGNWRDEMLFELSQARESYRFAQQQIQSCDRKLESYLKVLPTRQVEIMLPAPPVPSPATPVRARQAPRKQGNTPEIPGMRDELVRICGVDLTTIDGISIVTAQTILAEIGTDTSRFRTEQAFVSWLGLAPNRDISGGKVIRVVRRKVPSRASTALRLTATSLKSSDSYLGARYRHLQRQLPSKASAVKAMARYLGVLVYRLMTKGQAWVDQGAARFEQKRKALSLATLQARALANGYRLVPVTAS

SEQ ID NO: 194892 - protein, 398 aa, unidentified
MLSIGIDVSKGKSTVCGMKPGGEIVYTPFEVQHTREGMSELVSLLRGSGEEVRVVLESTGSYHCPVVAALLENGIFVSVVNSLRMKRFCSQSIRRVKTDQIDAMQIALYGLAYWQELQPTRLPENTYRELQLLARQYYQMTSLLIKAKVDFNALCDQVLPGMQELMSDHAGRHKLSDFVLRYRHTTHILEMGETRFRKDYCKWAEKKGYRNRERMAALIFATAQNGIPVLPNAPSTQIVITEAIRVLHTVEASRDAILTQMQALAKTLPEYSLVREMPCIGDTLAPRLIAEIGDVRRFHSKRALIAYAGIDAPPYQSGKFSANNRHISKRGNRYLRKTGYEVMQSYVMHKPANDPIFTFIEKKRSEGKSGKLAMVAGLNKFLRVYYGKVTELYRSLPQ

SEQ ID NO: 194893 - protein, 421 aa, unidentified
MNQLSGEPYTAYIGIDWASSKHDICLQLAGGEERVFERIKHTPEAIEEWAQALYQRLGGPIAVALELSEGPVVSALQKYDFLVLFPIDPKRLARYREAFVPSGAKDDPTDAEFAMDYLMRHPEKLKALKPESAAMRKLRYLVEARNRIRGDQSRYVNRLIQALKHYYPQAVDWFNDHNTLVFCDFLKQWPTLATVQRARKARLERFFKEHNVRFARLIEDRIQAIKAATPLTRDAAVIEAHRLQVEILVEQLRLTIKAMKCFDEEIAAIAAQFPDYELLYTALPGAGKVIAPRLLAAFGEDRDRYNCAAQLQKRSGIAPITKRSGNSTWVHWRFQCPKFLRQTFIDFAAQTINKSAWAGAYYRQQRDKGASHHVAVRALAYKWIRVLYRCWQQRTPYDESKYLETLRRRGSPLLKQLAEAA

SEQ ID NO: 194894 - protein, 340 aa, unidentified
MTPIRIGLDIAKNVFQVYGVDDKGTVVIRKRLRRPDMLRFFASLPPCLIGIEACSASHHWARELIRLGHEVRLMPARYVKPYVQRGKSDALDAEAICEAVGRPTMRFATIKTAEQQAVLTLHRARELLVKQQTMLANLIRGCLGEFGIVAPLGIRRVSELIAVINDDADTRILPEARIAMRAVADQLCDLQTRIKQIEQAIRAWHRSNEASRRLATIPGVGSITASAIVATVANATEFKSARHFAAFLGLTPKQHSTGGRQRLGRISKQGDVYIRRLLVLGGTSLVRYARGAGGSVWAKQLLARRPTRIVTVALANKAARIIWALLTRGEVYRAPQPQTA

SEQ ID NO: 194895 - protein, 423 aa, unidentified
MTKYLSTPTNAVLVAIDMSKHRQEVLIERPEGGRRRRMTVMATKDDYDRLVEELASMARQIVVGFEATGNYHRTLAHKLLMAGFQLQLISSVALARTREALHNGWDKNDPKDAQVILHMLRIGATQVYVDPLEAGINDLQELSKTHEVISKAKTQTWHRILNHYLPLYFPEIAHFAGNSRSDWFLALIERFPTPSSITSLGREAFVAEAWSLVGRKVSKARLINDIFETASSSVALPIAEDAVAISMFRMIIGQGRSLIRERNRIEQIAQSLLADHRDYQLLCKIPGIGPINALTILAEAGDLRRFRHHRQFLKFCGLDLATSQSGTFRGRTKLSKYGNARLRRTFWMAAQVASRQRDNSFRDKLGRYMAGSANDADRRRKAMTALTAKMARVAHAVIKTQTEYRPFIERPETRWKDPSLQVP

SEQ ID NO: 194896 - protein, 345 aa, unidentified
MPAAEVNTFAGIDVSGRELSVALRRGEGDHKPAMGKFPNHPSGHKALVAYLLRSGGRIRVCLEASGNYSLDLALTLQAHRQVEISVINPRRARRFAESLGERSKTDPVDARVLCEYAARMPWVSWQPPSPVALHLRALTRAIADLGAIHTQQNNRAHAAAASQALPVLVVKEMQRHQKYLEQRMTRLRREALRLIAHDPELDRRFRLMLTATGIAETSALQILGELAVLPDMLDARQWVAFSGLDPRVFKSGKSVEKRPRISRGGSRHLRRALYMPALVALRRDPYLRGFYQNLLARGKARLQAVVAVMRKLLHALFAMFRSNQPYDGSKLCAPHLALDAAAACA

SEQ ID NO: 194897 - protein, 353 aa, unidentified
MEQFIGCDAHKKFSVFVSIDTNGVYGRTIRVGHERGVFRKFLQELPTGSEIALETSGCYYWIVDEMERAGHRPRLAHALTAKQRMQGRHKTNEKDARGLAMLLRNGTLPEVWIPPAELRDQREMLRWRMCLSRTRTRMKNRIHGVLQRYNVEIDYADLFGDGGRAELLARLGELPPHSRESVVEQLQTVDWLESQIGECEEKLETMLYPSAERDLLDSLPCVGKVLSAVLALEIGDVRRFSGPDRLVSYAGLAPAARESADWKKRDHCPRDCNVHLKWAYVEAANLISIHRKKWAQRHVSQLYERVKHSSKMHGKAAVAVGRHLAEASYWMLTKQEVYQEPQSKRQALSSTHG

SEQ ID NO: 194898 - protein, 354 aa, unidentified
MNKKIVAQNERVTIGADVHMRTHVVTAMIGKEIVDRRILPSCRGGWRGYLEKFPGCELNVIYESGPQGYNLYDWLTEMEKQEGQTVRVYVAPPGNVPKAPGKKRVKTDRRDSLALIHAYQSGAFEPVVVPEKDTRAERELVRTKEQLSEDVTRCKNRIHSLLKFHEIEPDEGKAFSEGWRKEALNKAKSSDPTGEIAASLKLKFKMLKQTQEALDSVKARIRKLFSKGTRSHLAQKICKQVGIGIESAMVIATEVADFHAFRNSDSFASYVGLVPGAHNSGETFRPGPITKEGNPRLRHVFVECAWTWVRYDKEAARRYAALKARRGAGRAIVAMARRLAVIVYHLVAHPAPAC

SEQ ID NO: 194899 - protein, 377 aa, unidentified
MLYTIDGTNQYYNKEKERPIMQKNNTKVDFSGQDIYVGLDTGKKSWKVTILTKEFEHKTFTQPPQPATLVKYLRNNFPGARYLCVYEAGYFGFWIHDALRQQGVDCLVTHPADVPTKDKERRNRNDTVDARKLARSLRNGELTALYVPERKALEDRSLVRMRTSMVRKQTRCKNQIKGALSFYGYIIPDELAKSHWSRNFINWLESLEFQRESGKQALQALLDELKHLRQSIAQLTRQIRALAQQEPYRTNVQYLKSIPGISVFSAMVLLTEIVDINRFKKLDHLASYVGLVPGEDSSGEQERNTGISRRRNAYLRALLIESSWIAVRKDPALLMAFDKLTQRMPKNRAIVRIAHKLLNRIRYVLKNQQLYETCIVA

SEQ ID NO: 194900 - protein, 312 aa, unidentified
MKIICGVDVSKARLDACIEPGAIFASFDNDAAGVAELAAFCRQHQAGLAVMEATGGYERSAFLLLWEAGMPCAMTNPRSVRRYAEAMGVLEKTDRLDASVIARFAHAKNLQPTPAPTPAQQRLKALVARLRQVTDDLTVQKQRRASLLDNAEMLASINEVIALLKRQSRTLEGEIASMMDDDPLWEKLAEAWRSVKGVAGRTVARLMADLPEIGTYSNKAIAKLAGLAPLADDSGKRQGKRSIRGGRASVRSILFLVARIAANYDKTLADFRDRLLAAGKPKMVVRIALAHKLLVRLNAKARDARAQYANAT

SEQ ID NO: 194901 - protein, 341 aa, unidentified
MKKNLFFIGLDISKADFAASIYKTPGQSIITKEAIPNDRKGFEMLLLWLNDHHIDKKNCRICMEATCVYSQAIAYYLLFQGFPLSVEPPLKVKRAFDPVGHKTDPVDSKQIAEYAYRFQDELTSWKPRDEILEKIRQLLSVREQFTKQKVALDNSIQAYSKQRVQVALIKKAQKETLNQLKKQIARIDKELEKLIKQDPEIFQRANNLDSIPGCGMLLAAHLLVITENFTKIQNFKRLAAFIGIVPYQHQSGSSVSKMAKIRHFGPGPSRKLLRLAAQSVATHNVTFRRYYLRKLDQGKPKPLVLNNIANKLLKIACTIIRNNTRYIKDYRSIHPMYLKSA

SEQ ID NO: 194902 - protein, 366 aa, unidentified
MRKVMAGMDLHGNNVMVGIVDDQGARLQHRRLACELPEIIEFLAPYKAELESIAVESTFNWYWLVDGLRAAGFPVVLANPAKIDQYSGIKHADDKNDAYFLAELQRLKILPTGYVYDPELRPVRDLLRRRMSLMRQRTTLFLSAKSLHQRTTGRGLELRRLKAMEPEEAAALYTHPANQLIAQIQKEHIDSLDQSIRQIEKAVLKVALQQPYYQRLQTIPGVGIILGLTISMEVGNIDRFAGPGQFASYCRTVDAKRISNGKTKGDNNQKCGNKYLAWAFVEAAHGARRFDATCRRWYDRKAGKKCTTVATKALACKLAKAAWYVMAKGTEYQAGKIFPGLTEPKAEEISGEQASASKGVGPNPED

SEQ ID NO: 194903 - protein, 391 aa, unidentified
MIFVGIDVVKNKHDCFITNSEGEVLFDVFTIPNNADGFQNLYQKISSLSNDLSNIKVGLEATGHYNYNLLGFLIDKGLPTFVINPLHTNLFRKSLSLRQTKTDKVDAHTIAFMMMSGVNLQSYSDTSYHNEELKSLTRYRFDKVKERAKLKTSVSRLVNILFPELEKLVPTLHIASVYALLAELPSAKKIASCHLTHLTKLLQDASKGHYGREKALEIRAVARQSIGSNMPAKSLELKHTIKLIQELSSEISEIENSIKSIMDSIHSPILSIPGINYRMGAMIIAEIGDFNRFSSPDKILAYAGLSPSTYQSGQLDSSYSHMEKRGSRYLRYALFNATKFVCIWDNQFSAYLAKKRSEGKHYNVAISHAAKKLVRVIYQLEKSGQLYHRAA

SEQ ID NO: 194904 - protein, 319 aa, unidentified
MKTVEFEQLISVGCGIDVHKDVMVATIRSSGKDFETRNFTGFTSSLIEMRDWFKENQVTHVAMESTGIYWKPVFNILEEDFEIILVNARHVKNIPGHKTDKKDSAWLSKLLVTGLLKGSFTPPKDIRELRDLVRYKKKKTQFIASETNRIIKVLEDCNIKLSSVVSDVKGVSATKIINAIIDGVEDVAQLVSHAHGKIKASKEDIKEALTGKITDHHRFMLKIIRETIEENEKLITKVETQIDKSVAQYQVELELLQTIDGVGKDTAITIISEIGVDMDCFPNEHHLASWAGLSPGSNESAGKKKAPESSTETNISNQH

SEQ ID NO: 194905 - protein, 377 aa, unidentified
MTATPRFVGIDVSKFRLDVATRPESDRFTIGNDEVGVRALIRQMNDLQPLAIVLEATGGLEMLVVSQLAAAGLPVVVANPRQIRDFARATGQLAKTDALDAEVIARFAEAVRPGTRPVKDKALRDLESLVTRRTQLSGMLTAERNRRTMASDVVACSLDANVQWLKRNLRDIDQAIAKLIRSTPLWRAQDALLQGVPGVGPVLSVTLLAGLPELGRLNRKQIAALVGVAPLNRDSGLFRGVRCVWGGRVADRRGREWLVSWAMAASGGCALIIGLTFGRSLLLLVPIALLWGFFVIADSAQFSVLVTESVPAHAVGTALTVQTSIGFLLTMLSIQLVPPIQHVVGWRWAFVMLAIGPIAGIAAIRRLALLRRGTLRA

SEQ ID NO: 194906 - protein, 335 aa, unidentified
MQIYGIDFAKDKFDVSFLAPTLKNVSNKPAHKVVRNNESGITKFIKTLPADAVLVAEHTGVYGDRLLKHCTESHINIAYVGGYVIHTYKSAPDRSKTDMLDCAVLREFGERFTDKLIYKTFPKEELYELKQLARHRTMLVEDRKRYVTADKGEDCRPCRSMQVKESMERIMEILTEEIARTEKQMLDIIRAHEELSRNYDIITSVKGVGLITAVELIVKTENFTTIKTASQYAAYAGTAPYEKSSGKMNKGAHVSKIGNRRSKTLLYICAESARMHNKEIKLYYERRTIIDKKPHFYVLNAIVNKLLKIIFSLVTKGQMFDSDFIRKDPRVIKDN

SEQ ID NO: 194907 - protein, 344 aa, unidentified
MITIGIDPHKSSHTAVALDPSGRILGELRVPASKATHGRLLRWAKDWPERIWAVEGATGLGHLLAQQLVVREETVLDVPATLAARARLLGRGHGRKTDGIDARSVATVAQSQPDLRRVGPEDHSMVLRLLSDRRDELTGERRRVVNRLHRLLRDLLPGGAPTELSTEAGARLLNRIRPTTAVDLERKVMARMLVADLRRIDRALVENRARCTAAVAASGTTLAAVFGISDVLATKILGHVGDVSRFGSADRFASYSGTAPIEVSSGEVTRHRLSRNGNRALNSALHLAARVQTMHAGLGRDHYQRKLTEHKSSREALRSLKRQLAKVVYRHLVADRAHRLALAS

SEQ ID NO: 194908 - protein, 268 aa, unidentified
MQAVTTIGLDIAKSVFQVHGVDAAGQVLIRRQLKRRAVLAFFQKLPVCLVGIEACASSHYWSRELQALGHSVRLMPPAYVKPYVKRQKNDMADAEAICEAVARANMRFVPTKTPEQQSCLMLHRTRHLFIRQQTAVINSIRAHLAEFGIVAPVGRKGVTELLHIVADPSDKRVPEVARVCLAALGNQLLSLKEQIVEFDRMIMVWHRSNETSKRLHYIPGVGPMLATALVASVADPRTFRSGRNFSAWIGLVPKQHSSGGKDRLDRGI

SEQ ID NO: 194909 - protein, 335 aa, unidentified
MTQSLSSGPISSGPIFIGIDVAKAKLDLARSDHPQVLTVTNDTGGIGQILQMLSDLKPAIIVVEATGGLERPLLDALLDADLPAALVNPGRVRHLAIGLGILAKTDAIDARVLVEFARLAEPRLSEKRSKHRVELQALITCRRQLVHVKTEQTNRRATTSSKPALKAIDAVLLTVDKQIRKLDGQIKDLIDGDDDLYRQDKMLRAVPGVGAVLSTTLLAELEELGRVDRRQISALAGVAPMNRDSGQTTGARSIRGGRTAVRCTLYMATLAAMRFNPVICAFARRLAGTGKKGKVLIVACMRKLLCLLNAMLRDNLQWHELNVVRRTLAPAGGAK

SEQ ID NO: 194910 - protein, 413 aa, unidentified
MEQGLITAVGVDVSKGKSMVAVRRPGGQIVMPPIQVNHTAEELAGLAERLQGFGGDIRIIMEHTGMYWRPIAHSLKEAGFFVSVVNAILIHNFSDNSLRKVKTDKADALKIANYGLTFWTELRNFSDEDETRQMLKMQCRLYERTQKTSVELRNGLISLLDQTFPGINEILPAHYCTKRGHYKWVDVSKRFWHKDCVKKLSESAFTNTYQKWCKKEGYRFSRIEAEKIYSAAQNTVATFPQNESTKTLIVQAVDCLNAVYESMAVLRTEMKRLASLLPEYEVVMAMQGAGDVTGPKLMAEIGDVRRFTNKNALVAFAGVDAPPFQSGSFEAKSRHVSKRGSPHLRRTLFQVMSVVLQRSSTDNPIYSFMDKKRAEGKHFYVYTVAGAAKFLRVYYARVKEYLLALETKQETAA

SEQ ID NO: 194911 - protein, 413 aa, unidentified
MQKNHIEFEQVVERGCGMDVHKEVLVATIQGKGIKTVTKSYSTYTSSLIKLKRWLKKHGITHIAIESTGVYWKPVFNVLGEDFEILLVNARHVKNVPGHKTDKKDSRWLAKLLLSGLLKGSFIPNQAIRELRDLTRYKTKLTNQVSAEKNRVHKILEDANLKISVVLSDIFGVTGRKFLNEIIKGKYKPETLLYMVHGSVKASKEDMKEALTGYVTDHHRFMLQTILKNISRIEETLQELEDQIAKVTEEYGDIIELLETIPGVGHDGAIGIIAEIGLDMDKFSTHKHIASWAGMCPGNNESAGKNKSGRITYGNQHLRSLLVEQGWAASRTKNTYLSSKYKNLVGRRGKKRAVIAIGHKILIAAYFIIKDKVAFNELGEDHLNNFRKDQLVKYYKKQLEKLEPNLNFDNEAA

SEQ ID NO: 194912 - protein, 312 aa, unidentified
MHLSPTFVGVDVSKAHLDIAIAGNKPWRLGNDKAGIAALTRRLVKLESPHLVCEATGRLTRALQHKLAEHAIPMSRINPRQVRDFARASGRLAKTDAIDAAIILSFAQRMQPLATPVPSPAQMRLADLVRRRRQLVDIVVMEKQRLKEPAEPLLQSSLARHLDYLKAEIGVFEQEIATAVAADAELEARARLLTSVPGIGALTASGLVAELPELGRIGNKQIAALTGVAPINHDSGLYRGEAHIAGGRQSVRCMLYMATLSAIRCNPPIKAFYKRLRAAGKPPKLAIVAAMRKLITLLNIMLERNQSWHPQP

SEQ ID NO: 194913 - protein, 414 aa, unidentified
MEKQWNIVCGADIHKKFLIATILSRDGTKITNRFGMTLNDLLNFKNWVIQNGCEQVAVESTGTYWVPIHTVLEGSVGLIVGNAYKIKHTPGNKNDLADADWIAELCLNGMIEPSRIFPKADRDLRRLTRIREGYVNDMTREKNRIHHALDSCGIKLSSALSDIFGKAGQTILNGLLEGRTIDDILKDINLKRLKATDEEIKEAIKGSLDFTQILLIRGSLEQMAAIQKRIDEIRKEIKGRIAYRKDDLKIAISIPGVGFTSASTLLAEIGDITDFKKPEQLAAWAGLVPSVYQSAGKLITGSITKHGSRHIRWILVQVARVIARGRNSKLKRFFLRVKAKKGSNVAVVALARKVLCILHHLLINREMYKEDGINKKVKIDIGNEIPQREMDLEEMITYLVRAGYEVRKGSTGGG

SEQ ID NO: 194914 - protein, 317 aa, unidentified
MNYIGIDISKSWFDCFDHAKKSHQRLTNDPQGWEDFIGGLAKDTWVVMEASGPYYLGLASWLYHQGIPVSVVNPLVIRRYSQMLLSRTKTDAKDAQIIARYASEQTLKRWSPPSQANQAMRQLMSLSQGLIRQKGILIGQKEAFTSNPIGEELVLDLLNEQLGNIQNALQRIEDRLKELVLTHYRTCYEAVTSIPGIGPKTATMLICLTDGFTKFEDARKLASYAGICPRIFSSGSSIKGRGSISKLGSADLRKLLYLCTWTAKTCNPGCQQMYQRMKQAGKPEKVIKIALAHKLLRQAFAVGTSAEHFDGKKALAA

SEQ ID NO: 194915 - protein, 307 aa, unidentified
MFIGIDVAKDRLDVHVRPGGEAFAVARDGEGVAALVERLQGVGPGLIVLEATGGFEQVVAAGLAGAGLPVVVVNPRQIRDFARALGRLAKTDRIDAEVIALFAERVRPELRPLPDDQARELDELVTRRRQVIEMMVAEGNRARRLTSRRLQKRIARHQAVLQKELTEIERELDDTIRKSPIWRETEDLLKSVPGIGNATARTLIAELPELGTLDRRKIAALVGLAPFNRDSGTLRGRRMIAGGRAPVRAVLYMAALVASRRNPLIRAFYQRLLAAGKPKKLALTACMRKLLTILNAIVRDRTPWQTA

SEQ ID NO: 194916 - protein, 317 aa, unidentified
MTTDHSVTVLGIDLSKDSLDAHSLPDGQSWHVNTDPDTLAEWVKQLPEGITLAVMEATGGLQNIPAAVLAKANIPVAIVNPKQVRDFAKAIGQHAKTDAIDAKSIAQFGLKIQPSPRKLPDEAQTLLVELLRRRRQLIHNRTAEENRLGATRAKSIRRNIEAHIDWLNKQIKKIDEEIDRQVRNSPMWLVNEKLLMSVPGVGPVNAHVLMGQLPELGKLSRREIASLVGLAPFPRESGKWRGKRFVCGGRAHVRASLYMAALSASRYNPPLRDFYRRLLDNGKPKKLALTAVMRRLLTILNAIMRDQKPWQHCTINP

SEQ ID NO: 194917 - protein, 332 aa, unidentified
MEEVTVVGIDLAKSVFQLHGATASGVPVFRKKLSRAQMLKFLEALPPCLVAMEACASSHYWGREITKLGHDVRLIPPIYVKPFVKRQKNDANDAEAIAEAAMRPTMQFVPVKSAEQQSRSMVFKTRDLLVRQRNAIINALRGHLMEYGIIAPAGRLFVKKLVEQIEAPDNGLPTLVIECCRTHLEQLDILNEKIAEIQADLKEAAKTDPETVRLQTAPGVGPVTAMALKAFAPDYAGFRRGRDFAAWLGLVPVQHSTGGRQILGRTSKMGQRDIRRLLIIGAMTRVRWALKNGAPKGSWLEQMLERIWILELTLQPGLPLSTLKKSICCMNP

SEQ ID NO: 194918 - protein, 471 aa, unidentified
MIWLVEASFIAGSSCHMQGCELTREGMERFKFKFIFVKEAFVMNVLPVAGIDVGKEFSEMAILSPTNKVYARMKVFHDSFKKVDKAIDLLKKAEKDFAIRPVIAMESTGHYHKILFHAFAEAGFEIVITNPLQTNCINNLGIRKVKSDKVDARKVALLYRFQELKTTSIPNDTTDCLKSLCRQYYKMTDQLTAYKNKLIGIVDQVMLNFTDVFKDVTSKTALALLEKYPTPTLMLEGKRDEIISLISKTSRMGVKRATSKYELLIQKAKDFEPLSISSPANISLIQININMVRTLEKSISDIEDAIAKLIEDDSNKDMPVLALTLELLCSIPGIGLMTAATILAEVGDFSKFQKPNKLVAFFGIDPSVKQSGKFEGTQNKMSKRGSRFLRKALYISALANIRKKRNGELNNPVLYEYYQKKCVNKPKMVALGAVMHKLVYIIFAVLRDKKTFELRTPEQHAKHLAAKNDAA

SEQ ID NO: 194919 - protein, 416 aa, unidentified
MKIVRPICCGMDVHKNIIVATIGITNKKTRITEYIQETFSTLNPDLLNLKQWLINHKCFDACMESTGKYWIPIFNILEDEINIYLTHPKYVKAIKGKKTDKKDSKWICDLFKHDLIKFSFIPPKEIRALREISRYRYKLVGMRSSERNRYQNCMTVSNIGIGSVFSDPFGKSAQAIMKEVLESDIIEDEKILKCIHRSCKNKDKILDSIKHCNIETDQRFKMNESMTHMEELQVHINNCEIEMMKRAAPMFDQFKHITQLPGISTLSAILIISEIGVDMKQFESDKQLTCWAGLAPANNESANKKKSVRISKAGQYLKPLLVQCALGAIKDKEGYFGIKYSRIKKRRGHKKAIIAIARMMLVSIYHMILTGETFNPSDYESFRNPNPPIKQQVLTEESAIEFLKKSGFDVSKLTKP

SEQ ID NO: 194920 - protein, 338 aa, unidentified
MKLYAGIDLHSSNNFIGVINEKDERLFQKKMPNELNQVLAALNPFKKELESIVVESTYNWYWLVDGLMENGYKVNLANPNAIQQYEGRKHRDDKWDSFWLAHLKRLDILPEGYIYPKDERHVRDALRRRQLFVQHRTSHILSLQSAITRNHGYKMSVREIKRLNDSDASNLFNDPFLIMTARNNISVIRFLDNKIDEIESEVLSHTKLRPEFDKLLTVPGIGKILGLTIMLEVGDIRRFPTVGNYSSYCRAVKSIRLSDNKKKGEGNKKNGNKYLSWAYIEAANAAKRSYPEITSFYERKKAKRNNIVAIKALSNKLARASYYVMRDKVSYNAEKLFR

SEQ ID NO: 194921 - protein, 362 aa, unidentified
MQIIGCDLHARQQTLAMLDTGAGEVVNRTLTHEGNSVREFYSALPGPVRVGIEATGSMKWFLHLMEELGIDCQVGHPATIRAAEPRRQKHDQRDAELLLKLLVENRFPSIWQPSKELLDLRGLLLHCHQWVRLRTRIQNALQAIALANGLRRGSSLWSESGQRDIASLPLATHTAHRRSELQAMYARFEAEIEKLNQQVLEQAVQRPTAELLMTHPGVGPITALATDVFLGDPKRFSDGKALASYIGIIPRGNSSGGRQRLGGLSKQGNPLLRFLWCEAAAHAVRRDPELRRFYRRKLVQKGLGKARVAAARKLGIRLWIMLRDQIDYNEFCRRGQMQQKNGDACAGMPGARYGAKSHRLID

SEQ ID NO: 194922 - protein, 320 aa, unidentified
MEVTHGNYVGIDVAKDRLDVVLRPTGEYLGTTNDERGIKAVVRHLRKQEEIALVVLEATGGLEQPAAAALALAGVPVAIVNPRQVRDFAKAVGRLAKTDRIDAAVLAHFAEAIRPEARPLANEQARELAAVLLRRRQLLAMITAEGNRVRTAPKTVGKRIEAHLRWLRKELTRANEDLARTVRESPVWREKDDLLRSVPGVGPALSATLLAELPELEHLDRRQLAALVGVAPLNRDSGTLRGIRTVWGGRSGVRTTLYMATLSATRHNPAIREFYGRLCAKGKPKKVALTACMRKLLAILGAVLRNRTPWDAEHLTQEVT

SEQ ID NO: 194923 - protein, 345 aa, unidentified
MQSMYYIGLDVHKKTISYCVKDGSGIVHAEGAIPATRWDLDRWMKMLPQPWTAAMEATIFTGWIYDHLKPHAAALKVAHPLMLRAIAAAKKKNDRIDANKIADCLRCDFLPECYMASTEIRERRRTLRYRNLLVHQAVQLKNKISGLLMEAGVSYNKQKLHKVGYFKELLATNPDINEGLRPLLRLCRETLVRLQKTESALVRSLQRDSLLAERVQRLMTIPAVGPITALTWALEVGDVKRFSSIKRAISYCGLCGAEKSSADTVKRTPISKQRNKHLQSVLVEAAKMAPRLSPELALIYDREKQKGNANRASLAVARKLVAYLVAIDRSQRDFLVVEKENCAAA

SEQ ID NO: 194924 - protein, 371 aa, unidentified
MHDTIFVGMDVHKATISIAVADGARGGEVRQLGDFLNRADHVDKLVQRLSKTGGQRLRFCYEAGPCGYGLHRQITTLGHECVVVAPSLIPMKAGDRIKTDRRDAVMLAKLHRAGELTAVWVPDAAHEAMRDLVRARATAVRVLGKARQHLQGFLLRHGRVYAGKKGWTLPYRRWLTTVRFDHPAQQVVLQDYIHSVHDAEERIARLTKQIEDLVPTWSMAPVVEAFQAMRGVAFVAAVTVAAEVGDFTRFDNPRQVMAYLGLTPSEHSSGTAIRRGGITKAGNALARRVLIEGAWTYRMQARVSRKLHDRLEGLPQIVRDIVWKAQIRLCSRYRRLAATGKPKVVVTTAIAREMAGFLWAIARQTQIGSAA

SEQ ID NO: 194925 - protein, 343 aa, unidentified
MTVIAVLGIDLGKNSCSVAGLDEAGRVVLRRRVSRDSLAALLAKLPGCVVAMEACCGAHHVGREAQAQGHQVRLMPPEYVRPYVKAQKNDDRDAEAIAEAATRPTMRFVPLKDAAQLDVQALHRARERLVAERTALINQIRALLLERGIVLPQRRHSLATWVDAPMADGEPDPLSPRIRLLVADMRAEWAELDRRIGVFDDEFLASARQDEAARRLATVPGIGPINATALVAAVGDASAFRRARDLAAWLGLVPRQATTGGRPKLLGITKRGSRYLRKNLVHGARAVMPRLAATDTRLGHWLRDLLARAHKNTVVVALANKLARIVWAVLARGRSYEAAAAAG

SEQ ID NO: 194926 - protein, 340 aa, unidentified
MTHTLHAVVGIDVSTDTLAVVLLTEPNQTHPLTTSVPNTPEGYQRLHEWCQQHLEMQCPERIAWAVECTGGLEQTVARFGHEQGYRVYLLNPKGVYALGKASPRRAKTDQSDAVLIARYVWVHTDLPCWHPPAEEIAELQAWMRRREELVARRQQLRAQKRWAQRRGLPAAVVSSYERELAAVEAELRLVERAVRAWLRSHPAWGDLVRRWQTVPGVGIWTACVVLSEVGDFSRFGDGRSLASYMGLVPYVSQSGRRSGGGCGLVAEGNRRLRSGLYLAGWAAVRAGGVYGEVYARLVGGGKCHLVAICAVARRLVMVLYALWRDGTEWREDVVRYKMSA

SEQ ID NO: 194927 - protein, 362 aa, unidentified
MRIIGCDLHSRQQTLAMLDTATGEIEKTTLKHEGNHVREFYSKLPRPVRVGIEATGSMQWFLNLMEELGIECLVGHPAEIRAAEPRKQKHDRRDADLLLSLLVEGRFPSIWLPTKELLDIRVLLRHRHQWVGLRVKIQNALQAIALANGLRRGSSLWTQAGQRAIAALPLSPHAAYRRNELQAMYVKFETEIETLNQRVEQQARERFGARLLMTHPGVGPITALATDVFLGDPARFADSKALASYVGMIPGEYSSGGRQRLGGLTKQGNPLLRFLWSEAVIHAVRRDPQLKHFYRRKLIQKGLGKARAAVTRKLGIRMWIMLRDQIEYNEFCRRGQKQQKSSDACAGMPETPYGAKSHRPVD

SEQ ID NO: 194928 - protein, 421 aa, unidentified
MKVLYERCAAVDVGKDEIAVAVRRPGPGPEGRATVKRTFRTFYGVLAEAARWLVSEGVTHVAMEATGIYSMPVYHALIEHGEFEQVLVCNAGHVKNVPGRKTDLADAEWLAQLLECGLLAGSFIPPAEVKAARDVVRYRAKIAQQRVSEIARLGNVLQDAGIKIDSVASSIATKSGRAMIEALIDGERRGPVLADLALGRMRPKIPDLSMALEGRFGEHHAMLCRLHLRHLDGLQEMIAELDAQIEKMMRPFRAARDLLTTIPGLGPLSAAAVISEIGTNVREYFPDAAHLASWAGLCPGNHESAGKSRSGRPRHGSSRVRAILVECAWAAVRHDGYLKALFHRHVMKWGGYRSRAAKQKAIIVVAHALIVIIWHVLATGKPYHDLGADYFTRRTDPDREAQRLIAKLEALGKRVTVEDAA

SEQ ID NO: 194929 - protein, 303 aa, unidentified
MGEYIGLDMSLKDTAICVRRDGKRVWRGKCASDPAVIAGVLRKHAPEARRIVFETGPLSIWFFHALKAEGLPAICIDACHAKAALVMAANKTDANDAEGRAHLAEVGFFREVRVKGYDSMLVRTLIAGRSKLVRVATELSNQIRGLMKTFGLIVPGAKGGSFEAEVRRLLSGEDGLARVILPLLEAWGTVRRRAAELGRELMAGARQNQDCRRLMTIPGIGAITATTFVTAIEDPTNFRSSRSVAAWFGLTTRRYQSGEDDYDGHISQRGDAHMRGPLYEAATVLLTRSRVDSDLRTWGLKLR

SEQ ID NO: 194930 - protein, 465 aa, unidentified
MGQQKKHVQGQRGEAFVELIRDVPRDQIACVSIDVHKYYHQVMIHNDYGEILVPSFRVDIFRPGFEHLCEVIDTVVTEHDIRVLFLGMEPTGHYFENLAQHLRKRYAHLCLVNSYAVKENRNQSMLGTQKTDDVDLGAIGELVLRNKCFPYRPLEEVHLHLQYWSRFRESKVKIRTMLRNQVIGHLDRTFPGLVRPKHDLEHGGPPQLFARFWKCQTAQHLVRLCPNPRLLAQMAPQELIELFHTRGWRLGPVMAKRIIAFAQQVLCPDQEVIEARQPLLELDLQMLEALEQAIAEADKQIASYLAQTQGQILTEIRGIGPIRAAAYVAGIGNPDHYEHAGQTFKRSGLISGRNDSGVHQDHGRGHHVTKVGDPHLRRALVEITHGLCQWQPYFGRYKQRLEARGKHPGVALVATARKVNGVLFALMRDQSQFQPVDAHGRPVPPQGSIRGKKKATTGGSSQGST

SEQ ID NO: 194931 - protein, 388 aa, unidentified
MSKPFDLSKSLAALDQDSTLIVVIEMSQSSWLVAARAPGLARDPLKKLAPEPEQLFKLIDRWREESRKAGRVVRRVCVAFEAGRDGFWLARLLRQHDIEAHVIHPTSIPVKRDHRRAKTDRLDTELLMRAFLGWLRGEADHCSMAAIPTLAEEDAKRPTRERESRVNARSRLVNRMKGALARLGIRGFNPKLRKAAEKLEELRTGAGEPLPPNTLAELRRDMAQLRFVADQIKQIEKAREARLEKAPREGAHPMVLMLASIKGVGLETAEMLVAEVLSRKLRDRRAVARYGGLTGSPDESGSRSREKGLARSGNARVRRGMIQLAWRFLMFQKESALAKWFEARTANGPRGVRKTMIVALARKLLIDLWRFVEDGTVPVGVELFDSRA

SEQ ID NO: 194932 - protein, 370 aa, unidentified
MEQGIRAYVGLDVHKDSIAIAVAEAGRSAGRMVGQIAHDVPKLLKALARLGEPGELYVVYEAGPTGYGLQRALFAKGYRCEVIAPSLIPRRAGDRVKTDRRDCLRLAELSRAGELRTVWIPDRGDEAIRDLSRAREDAVNSRTQARHQLKAFLLRHEIRYSGKTAWTKSFYRWLGELNFGDASSQVAFTEYHLAVQAADQRLERLTKALAVSVTGWRFEPVVQALQALRGIDVVSAIGLVAEIGDIARFDHPRKLMAYLGLVPSEHSSGDRVRKGSITKTGNAHARRLLTEAAWNYRFTARIGRAAQARQEKLTEAVKSIAWKAQLRLTARYARLNGRGVHHNKVCVAVARELAGFVWAIARASVAATPH

SEQ ID NO: 194933 - protein, 326 aa, unidentified
MEHELHYIGIDTAKEKLDVDVLRTDGRHRTKKFANTTKGHDELGSWLKGHKIDHAHICIEATGTYMEPVAECLYDAGYIVSVINPALGKAFAQSEGLRNKTDTVDARMLAEFCRQKRPAAWEAPHPLERALRALVVRHQALTDMHTQELNRTETAREVQRPSIDAHLLWLEAELKRLEKQIKDLTDDDPDMKHRRKLLESIPGIGEKTSAVLLAYIGLKDRFAHARQFAAFAGLTPRRYESGSSVRGASRMSKAGHVSLRRALYMPAMVATSKTEWGRAFRDRLAANGKKGKVILGAMMRKLAQVAYGVLKSGVPFDASRHNPVAA

SEQ ID NO: 194934 - protein, 342 aa, unidentified
MNYYAGIDVSLKCSSVAVVNANGEIVREAKVETDPTSVLEWLRSCGLPMERIGLEAGPFSQWLYAAMKEAGLAVELLETRHVRNAFKTMSVKTDRKDARGIAELVRVGWYRPVHCKSMDAQETRTMLAARKLVDQKLRDVEMSLRGLLRGFGLKVGKTTPTRFADRIKELVSGNAILQVIAESLLAVHQVLLREFKSFEKRVRIMARDSAEARLLMTTTGVGPIIALTFAAGIDDPGRFKKSKAVGAYFGLAQRKYQSGETDITGRISKAGDAGVRTALYQAAHIMLTKPVKASALKSWALRLAKRVGMSKAKVALARKLAVVMHRMLVDGKPFNPAAGAVA

SEQ ID NO: 194935 - protein, 411 aa, unidentified
MDKVYDKCCGIDVHKKLIVACFRKGSKQELRNFGATTRELLELANWLQNGGCEMVAMESTASYWKPLYNILESSELKAMVVNASHMKAVPGRKTDTKDAEWIAELLQHGLLKASYIPDKQQRELRELVRYRKSLVSERTRELNRLQKMLEGANIKLSGTVSDINCMSARNILEYLLTGEFFDEAKYDEMYKKKIIAHNLKASKEQLIDDLNGVMTPLQRRMMKELLSHLDELNVHINNLEDEIDNFMKPEEKQATQAIQDVTGIGKNSSQAIISVIGTDMSRFPTAGHLAAWAGLCPGNNESAQKRKTGKMRKGNALLRSTLVVCAHSATRNKNSYFYAQFMRISSHRGKKRAYVAVAHSMLIAIYHILKDGVVFKDLGADYYNQFNKERKINAYLKKLKALGWEVPVVAA

SEQ ID NO: 194936 - protein, 415 aa, unidentified
MEQVYERCAALDVHKAQVTVCVHVPDQAGERAELRAEFATMTGDLLGLRDWLKGLGVTHVAMEATGVYWKPVYYLLEDDFELLLVNAQHVKNVPGRKTDVQDAQWLCQLLEHGLLKSSFVPPQPQRELRDLTRYRKSLVWERGREANRLQKMLEDANIKLASVASRPLGASGKAMLRELCEGNNDPVALADLAKGKLRAKLPLLRQALEGRFRGHHALLVSHLLAHIEYLDQTIGELSEEIEERMRPFARERELLCTIPGVAERTAEVILAELGPDMSRFATHRHAASWAAVCPGHDESAGKRRSGKTRKGDSWLRVALIEAANSAAARTKDTYLRAQYLRIRRRRGHKKAIVAVAHSILVSAYHVLQEGVSYQELGGDYFLTREDRQRMTRRLVRQLERLGQSVTLEPMAAEAG

SEQ ID NO: 194937 - protein, 387 aa, unidentified
MPATALGVAQPAIDVNLAAIFVSLELSRSSWVITSVSPGKGEKMSKHSVHSGDVTGLLSHFTRLQAKAQAHTGKSFPVIVIYEAGLDGFWIHRVLEQEGIESHVVDAASVLTSRRRRKAKTDRIDGEALLRTLLAYKRGEPRVCAMVRPPSPEEEDRRRLCRERKTLVAERVAHVNRIKGLLFAQGIADYVPLRCNRRQRLEELTTGDGRPLPAHLKAQISRELDRLELTLQQLKAVEAERDALLAPEGEAAPAPVAALAGLRGIGPEFAAVLWLECFFRSFSNRRQVAAYAGLAPTPWQSGSVDHEQGVSQSGNPKLRSSMIQLAWLWLRHQPTSTLSRWFKERVKQNGGRGKKAAIVALARKLLVALWKFVSNGVVIEGAVMKAA

SEQ ID NO: 194938 - protein, 354 aa, unidentified
MHYANRVDFSGQTIYIGMDVHKKSWTVSLFMEHLEHKTFTQVPDVAVLAAYLQRHFPGARYSAVYEAGYSGFWIHDKLLESGIACMVTNPADVPTRDKERRRKGDRSDSRKLARCLRSGQLEGIHVPPRATVEDRGLIRTRQAMVRKQTRCKNQIKSLLLFYGLPVPDAASGWSRNFIRFLEETRLERESGDLALKAHLTELIHLRQIIAQLNRDILALSRTDEYRERVQLLKSVPGISTLSAMIFLTELGELSRFPSLDKLCGYVGLTPDTHGSGEKQGIGDITRRCNQMLRSLLIECSWVAVRKDPALALAYHSFCKRTLKTKAIVKIARKLLNRIRFVLNNRCRYVSSVAA

SEQ ID NO: 194939 - protein, 415 aa, unidentified
MTHSALDARPARPAAVVTGGVDTHKDTHTAAVLDATGRLLGHRQFPTTPAGYGLLLAWLRSHGELDKVGIEGTGAYGAGLALHLRVAGVELVEVDRPDRKARRQQGKSDPVDAEAAARAAQAGRATGIPKDRVGAVEALRALRVARRSAVAARAQAQTQMKSLIVTAPDPLRSQLRELGVRQLVAHCAARRPDRGAAAEPTTATLIALRALARRHQRLSAEIDDLDALITPLVTQINPALYALRGVGPDIAGRLLVTAGDNPHRLRSEAAFAMLCGAAPLPASSGRTQRHRLNRGGDRQANCALYRIVLCRLRWDPRTRAYAQRRTAEGMGKKEIIRCLKRYVAREVYTALLNPDPSSVPATSCAAQEESTCSARSAARTNEVDTDKRCETIKHGGSTRESTPPPTIAGNPASAA

SEQ ID NO: 194940 - protein, 371 aa, unidentified
MKKDSTTKFIGLDVHSKTISVAIADEGRKGEVRHYGTIENTFDAIDKTIKSLTATGVELKFIYEAGPCGFALYRYLTGNGFKCIITSPGLIPKRSSVRIKNDRRDALTLARLYRAGELTGIYVPEPEDEAIRDLARARDDARVAERKAKQRLNSFLLRNNLIYPGKTKWNRTYFNWLGSVGMKYPAQKVALQEYIEAVNECTGRVARLREQIGLAVEEWRMGPMVKALQALRGVSLICATVTVAELGDLSRFQNPKELMAYLGLVPSEHSSGETIRRGGITKTGNGHARRVLVEGAWTYKHHARVTAPLIKRQRDLPKSICQISWKAQLRLCARYRKMVARKKPNNVVVIAIARELAAFMWAIAQEVRAAT

SEQ ID NO: 194941 - protein, 345 aa, unidentified
MELHTIGIDLGKTVFHRVGVNLRGEVVVRKKFSRKQLLHFTANLRVKLIGMEACGGAHFLGRALQEQGHEVRLMPAQYVKPYVKTNKSDYIDAEAIAEAVGRPRMRFVPIKTDDQLDLQSLHRVRERWVARRTAVINQIRGLLLERGITLRKGRCHVDAALPGILEDASAKLSGALRVLLAQLRLELAHLETRINEADAVINKTAGENEACQRLVAIPGIGPVTATAIVAAIGNGAAFRKGREFAAWLGVVRREYSTGGKQKLLGISKRGNSYLRRLFVQGARAVLQQSAKQSSGLSAWLAQLTSRTHRNVAGVALANKLARMAWAVLAKNEKYRPPMLAGAATA

SEQ ID NO: 194942 - protein, 400 aa, unidentified
MNELERCRRAKGTIWIGMDVHKKSCTMTAIDDAGREISCWKMPTTPAQLNAFVRGVPAGAKIALEASTTGKAVAHWLRNAKLDAHMASPRELAAIRASGVVTDERASYHIAHLFRNNYFPESYIPTVETDRIRDLTRFRIGLGRDVARIKNQVHALVSKNLLDSEISQSDMFGKAGLQKLVSLPFPDQDRSILKSHLEHLKLLIRQEEQYTDELARIGKGMPDVELAMSIPGIDFYGAIGMLGEIGDVHRFATRRKLYSYSGLVPGADNSGEQVSKHRRCKRGNAVLKFFLCNAVQGAVRASKPNSIAKFYHRKAKQIGHAKAQVAAARKLAGILWTILVSGEPYREENPALTQRKKARMELRAKAPQQPVTTEQLNELANDITAKEQVLKRLLPEDEEE

SEQ ID NO: 194943 - protein, 317 aa, unidentified
MEQSQSNTKIAGIDVGKRMLDVAAHGLEDATQVQNSPEGHTALIGWLRARHVGRVGLEATGGYERGVRAALEAAGFEVVVHQPLEVRLFARLKRLRAKNDRIDARLIAQATAQVDTVRAAQDPRLAELAERLTAYEQVADQIAELKTFLEHVTLKDVLRSLKVQLASLERLKARLLAQVLQVLKAHEDLAARFRLLLSIPGFGPVVAASLTIRMPELGQLRRGQAAALAGVAPFDRDSGQWKGLRFITGGRARVRRMLYLASLAAKRYDPRFKAFHQALLARGKPIKLAIVAVMRKLVEAANLILHRGQPWVKTQPA

SEQ ID NO: 194944 - protein, 355 aa, unidentified
MIGEKYIGLDVHQATISVAVMDSKGKVVMESILETQAATILEFFAGLRGTLWVTFEEGTWAAWLYDLLKPHVAKLVVCNPRKNALLKHGNKSDKIDARKLADLLRLNDLEPVYHGETGVRMLRELARSYLTIVKDLSRVMNRRKALYRSWAIPCAGRDVYYTRHRSEWLGKIPEAGTRRRAEQLYQQLDMLQHLRQQARRELLAESRKHTITAKLRQIPSLGPIRCALAVALIQTPHRFRTKRQLWTYSGLGLETRDSGEYHYVQGQLRRRKKQVSIRGLNKDHNHDLKGLFKAAATRASVQPGPFQDFYQRSLAKGIKPTMARLTLARKIAAITLTLWKKGENFDVAKLKSQAA

SEQ ID NO: 194945 - protein, 326 aa, unidentified
MDWTVAVGVDTHRDLHVAVALDPVGRRLGALEFEVSGDGFARLQRFACGHGRPAFVVEGTGSYGASLTRALLAAGFAVFECERPQRKARVGKNDLLDAERVARKLLAGDRLALPRTGSERERLRLLLVERRSCQHARSQALNQLKAAIVTLDPPLRAQLARLAAKPLARSLTSRRGPELAALKRLARRSEYLAGELAEIDNELSQLTRQLCPRLLAEPGVGPVCAAQILVSSADPNRLHSEASFAALAGVSPIEATSGANKRHRLNRGGDRQLNWALHMSALNRIRYHPETRAYNQRLLERGKTKREAIRCIKRVLARRLYRTLTT

SEQ ID NO: 194946 - protein, 346 aa, unidentified
MLYAGLDLSRKRLDFHLLDADGGTVEVGAAPPDADGLRGLTERIDRHGAPIRAAIESMNGARFVHDRLELAGWKVEIADAQKVKGLAPLACKTDRIDAWVLAELARRELVPAIWLPDPTVRGERERARWRLHLVRHRSSLKQRVHAVLLAHGKPCPVSDLFGVRGRQLLARLDLPEPWQGTLEASLRLIDELDREIGDCERELRRLGADHRYVPLLLTVPGIGWVLAYTIAAELGDINRFPTPRKLTGYTGLCPRVYQSGERDLRGPLAKQGPRYLRWALVEAATHACTHPAYRDRYQQTKTRIGKQRGAKIAQIDLARRLTEAIWHMLTREQPFAPKGATDPLAA

SEQ ID NO: 194947 - protein, 317 aa, unidentified
MLNRAGQVLRNRRVANDVTAIVAAIHGHGGVHGVALECSTGSAALADALIQRTGWDVHLCHPGYVRRLRQNPDKTDLSDAHLLADLVRVGYLPRVWLAPPAIRDLRTVVRYRQQVVDALRNTKLRIRALLREHRVPDVPQYLWTRRGLLWLRNLKTWPVLAGWVLESHLAEVDSALARLARVTARLREVAGQDALISALLAQAGIGLVTACVLRAEIGHFRRFRTGQQLSRFCGVSPCKASSGARQADAGLIRGCSRLLRDTLIEAAHRLGRCAPHWQAFRAQLRARGQAGSLIAAAVANRWLRRLFHELCALELAA

SEQ ID NO: 194948 - protein, 408 aa, unidentified
MSESSVPMAAPAPLVYVVGIDIGMESCMMCSLTMQKRQMIKPSPFANTAEGFKNLFERLGRLETPPDQILVGLEATSRYGENVYHALLKRGYRVRLLHPAQMHAFAQQRGLRAKTDQVDAATIARALLSGEARFGYVPSEQVAIYRELVRLQQQLSDDVVRYKNELHALVVVLFPEFTQVFADPTGPTALAFLKRYPSAQAVAQTEVVTLSQILHQLAPRRYGRRTAEKLLALAKESISSGVALSARSTSLRLLCDQLEHSQANLKRLQQEIEALLDHDPKVAGVLGIPEFGVMTVAVLRAELGDLDRFTRMDQVVAYVGLDLQVKQSGKYKGQTKLSKRGSGRVRRILYLAALRSIQLDDSPFGAYYRRLVHRGMKKGMAVVAVMRKLLILTEQVYESGKVVGLAVR

SEQ ID NO: 194949 - protein, 311 aa, unidentified
MGFHVGIDVGKEQLDWTLGPDAPIQRVANAPAAIRQLVRQLAKLEVERIVLESTGGYERLLYTTLAEADLPVVRINPWRVRRFAEGMGILAKTDPLDAHVLALFAERAQPPERPHPGPAERRLAAWIARRRQLIAMLTAEKNRLDTAPPEIASDIRSLVRVLEGRITKLDAKIDAALLADPDRADIAERLQAVPGVGPGLVRTILIDLPEIGALGRRQISALAGLAPFAKDSGKKHGTRRIRGGRAPVRTALYLSAMNGARFNPVLKTTYDRLRDQGKPPKLAFIAVARKLLTILNAMVRDGSQWGELATP

SEQ ID NO: 194950 - protein, 411 aa, unidentified
MELLVARCAGLDVAKDEVVACVRLPDGHGGRAQQVRTFSTFTSGLEALAEWLTVEGVTQVVMEATGQYWKPVWYVLEEAGFELMLVNARHVKILPGRKTDVCDAAWLAELLEHGLLRGSFVPPAPIRELRDLTRYRKRLIQTHAAEGQRIQKTLEDAGIKLDSVATDILGVSGRAMLAALVAGERDPGVLAELAKGRLRAKLPQLRQALRGRFGAHHALLVRLALVHLEQLEASIAELDTHIDQVLAPFAAARDRLDTITGVGKRAAECIIAEIGVDMSVFPTAGHLASWAGRCPGNNLTGGKRRSGKPTRGNRWLGEVLIECAWAAARSRDTYLSAQFWRLARRIGKKKAAVAVGHSILVIAWHLLTDDCDYQDLGGDYFVRRDTERQRQRAIAQLQALGYRVVLEPLAA

SEQ ID NO: 194951 - protein, 350 aa, unidentified
MEQQYFIGIDLHRQYFTCYATDGKGNKFLKERLSNCQEAVDYLINHFPFPPKVVIEATRNWMWLVKALKEKGCQVNLAHPLKTKAIACARIKTDNLDAKTLCHLLRSNLVPASYIASEEEQDNRELTRGRIALVHYQTMIKNKIRAILGKENLSYSYSNLFGKGGRDWLKKQPLPEIKRKMVEIYLERLDDLIFALRKVDKFIQEKSSRLPQVKLLKSIPGIGTTTAFLLASEIGDIKRFNTAKQFASYFGLVPRLNQSGNHRYYGRITKLGNPYVRWALVQASHRLARIEKNYKRFVNRIAYRGGKKKAIVALARKLATIIFWVLKENREYIKDYQSPKVCPAILPDPD

SEQ ID NO: 194952 - protein, 317 aa, unidentified
MSVASEVFVGIDVSKAELEVCWLPQLGRLQVAREEAGLMQLVERLKALGPSLVVLEASGGYEMPVVMALAGAGLPCVVVNARQVRDFAKASGKLAKTDRIDAQVIAEFAQAIRPQVRALPDAAAAHLIALVARRRQLVEMLTAEQNRLALSHAAVREDLKQNIAWLKSRLQDLDGELSRAVRESPLWRESDKLLQQVPGVGRVVSAVLLALLPELGRLSPKKIAALVGVCPFNRESGRWNGKRAIFGGRAGVRSVLYMAIVSAIRWNPLIKTFYQRLLAAGKPKKLAMTACMRKLLVILNAMMRDRADWNPNGALAT

SEQ ID NO: 194953 - protein, 353 aa, unidentified
MITIGVDAHKRMHVALALDDAGQELGQWRGLNSAAGWRSLAQWAEELGRPRQWAIEGAWNYGRGLAQHLVAAGETVYEVNPRWTALGRRSARKPGKTDRLDAHAVALLARREASTLPRVSPEDDTAILALLTTEREAALGEATRLGNQIHALLMQLDPEYDSRLPTLRSRAGLDALETYPSPGGSLIQNERAAAVRRLATRFRLTLTQAEELARQIAAYAEAGFSPLARLCGVNLLTAGMLAGILGPGRRFSTDAELAAYAGVAPLEASSAGTTRHRLNRGGNRRLNAILFRIALTQAHHSPEARAYLDRRVSEGKSRREAIRALKRFIVRAIWRLWQECETSPVSSPVENVA

SEQ ID NO: 194954 - protein, 430 aa, unidentified
MKSNTQNAKIEAITEKTLVLGIDVGSETHYARAFDYRGIEYSKKPFKFSNTEAGFVTFKEWIRDIKERHEKDKVVSGMEPTGHYWFNLGKFLQDNEMKPVLVNPHHVKKSKELDDNNPTKNDRKDPKVIAGLVREGRYMIPYLPDGVYADLRTASNIRFQLQAELTRIQNRISRWFNIYFPEYRMVYGKPDAKSGMLLLKAAPLPEDILTLGIDGVNQIWRDAKLRAVGKARAKTLIEAAEHSVGSKEGAVAARMEIRMLLEDYESRSIRLQEVMTLIEGLVKQIPMAEKLLEIKGVGIRTVSGFLAEVGDISRFNNPKELQKLAGLALVENSSGKHKGETTISRRGRKRLRYLLFEVAMSLVTKNPEFRELHNYYTTRRLNPLKKMQSLMAIAAKLIRVFYVMLTKGVNYDPKKMVNDIKRPAVYLQTA

SEQ ID NO: 194955 - protein, 427 aa, unidentified
MNNLPVAGIDVSKEYSDYCILTPDNTVFSRGKIFHHPASMDKLCRQLDDVEKAFGFKPICIMESTAYYHRILYRYLTKHGHKVMLINALQSKAAADFNIRSAKTDKIDAYKLALLYGMKHLKPSVVPDSIIQELRDLCRNHCSLEEQLVVSQERLRSYVEQTLPGFEKAFSRLVSKSGLMLLSQYASKEELNAAGIEKIAEIISTVSGMGQSWSETKAQMILSSVNNGQEFISSQSHSAIIKSIAITILGIFDAINENDSALELLFEQNLSLAEDRSLLMTIPGVGKQTAAVLISETGNFDSFKNYRQLTAYYGLDPKVNKSGKGSRKHLGVSKKGSPLVRKMLRMAVQNSVYATKKGKAANPVLAQFYKTKAKDKSPKTAETAVMRKLTAIIFAVMRDRKPFELRTPEEHIAIMGIERLQNKSISA

SEQ ID NO: 194956 - protein, 373 aa, unidentified
MVEGTEGSHHKEGSTKMSKDITVCAGIDIGKHKLDIAIDGSAERLQVDNNSEGRRSLSSWLRQRRVERIGLEASGGYEQAVVVSLRADGFVVIVFQPAQVRAYAKFVLQHAKNDAIDAVLIARCTAAATDIREPPDARLAFLAQHLTMIEQLTEDVGQLKTRREASREQRIREFWKREINRLKVLLNSELKQLVAVIREHRDLAHRLDLIASVDGVGLRTAVAILVRMPEIGRVTREQAGAIAGLAPYDDDSGLRRGSRHIKGGRQRLRQSLYAAALPAVFYWNPQLKVFYKRLLAAGKSHRLALVACARKLLIFVNTVVARGTPLDAFSSHHIMVAHHEAGRERHWIKHPAAPFPVRERGAPTSNPTVIDSR

SEQ ID NO: 194957 - protein, 352 aa, unidentified
MNITTVGIDLAKLVFQVHAANERGKTMLSKALKRADLIKFFANLAPCLIGMEACSGAHFWARKLSEFGHTVKLMAPQFVKPYVKTNKNDARDAEAICEAVARPNMRFVPIKNVEQQALLGLHRARQGFVWARTAQSNQIRGLLVEFGLVIPKGVCALLRKLPEILEDAENGLPGTSRQLLARLLGHFGELDRQAKELEAQIKSWHAQSAASQRLEAVPGIGPLTATALVASVGDAKTFTNGRQLAAWLGLVPRQQSSGGKERLLGISKRGDTYLRTLLIHGARSVLFRLKQRAKQRPAENDGWLARLAARRNHNIAAVALANKNARIVWALLAHERDYQTGGYRSLAVPTAA

SEQ ID NO: 194958 - protein, 343 aa, unidentified
MQTITTVGLDIAKSVFQVHCVDANGSVMLRRQLKRRYVLAFFQKLPPCLVGIEACASSHHWSRQLQALGHTVRLMPPAYVKPYVKRQKNDATDAEAICEAVTRPNMRFVPTKTPEQQSCLTLHRTRHLFIRQQTAIINSIRAHLAEFGIVAPVGRNGVEQLLEVVADAKDARLPEIARACVAALGAQLLALKAQILAFDRRIMAWHRSNETSKRLDAIPGVGPALATALVASIADPKAFRSARDFSAWIGLVPKQSSSGGKEKLGGISKQGDRYLRSLFTAGALAVIRYAKIHGTKHRPWLTALLARRPTKVAAIALANKIARMAWAMMTRGERYKEPVALAA

SEQ ID NO: 194959 - protein, 479 aa, unidentified
MPTITKSKANLKSRGAAPVTALASRDRVDVPTAKRRARRRSGQADTPTMPVEENKVAENRATLPPPGEYPDSAPTRFETQISQGAEGRMTMRIVALDLGAKKTSYCELSQGQVVHRTTVSELSSLQPLLGPDQPAAKVAIEACREAWFVHDLLVEWGNEVVLVDTTRSRQLGIGQHGRKTDRIDAETLARALEAGRIPVAHVLSPKRRELRRVLGVRRALVESRAQLVTTVRGLVREQGGKIPSCNTEHFVSKVREQKLVSNIAQLIEPLLVLVHGIDTQLVNVEGQLAALCAQEPIIAALTTTPGVGAVVAATFMSVIDEAKRFQSAHQVESYLGLVPSEDSSGGKRRLGAISKKGNCYLRSLLVQAAWTIVRSSDKSDPLYLWVNQLIQRRGKRIAVVALARRLVGVLWALWRDGTVYDAPHLAHQGARGLRGAVQSLEQQTAAIAQAIKKSSIKHPATSSIATSRRSRKTLAANAA

SEQ ID NO: 194960 - protein, 396 aa, unidentified
MPTMTYSTATQLTPSEQTHQAHHEVTGGVDTHKDTHTVAALDASGRLLGHREFAATPAGYAGLLGWLRGFGQLVRVGIEGTGVYGAGLAGYLQGVGVELVEVDRPDRKTRRWQGKSDPVDAEAAARAAQSGRATGIPKTRGGQVDALRALRTARRSAVAARAEAQTRMKALVVTAPDPVRTALRGLGDRQLVEHCATRRPDRAAAGDPATATVLALRALARRHQQLTAEIDEFDTLIGPLVAAINPALVALSGVGADVAGQLLVTAGDNPHRLRSEAAFAMLCGVAPLPASSGRTHRHRLNRGGDRQANAALYRIVLSRLRWDPRTRAYATRRTTQGMSKPEIIRCLKRYIAREVYTALLAPGPSSVPALPSTVPEESTWSARSAARTNDVDTDKR

SEQ ID NO: 194961 - protein, 343 aa, unidentified
MNTYVGLDVAQKKTAVCVVDDEGKTVCHGAVETRPEMIKDFLEAKGCGNAKIGMETGPLSVWLYHSLRRFDLDIDCIHARHVHAALTVQLNKTDQNDARGIANLVRSGSYRATYVKSLECHNERLMLSARDRLVRVRVSINNQIRGLLKTFGVVLSPGRNEVFRREVLAADPSVEAVRSVVLMLLETWRHVSQQIRECSKMLEKRAAQDPVCKVLTSIPGVGALTALSFKTAIDDPTRFRRVSDVGAYLGLTPRKYQSGDVDRSGAISKQGNRHTRSLLYEAASCLLSRYGTETSLARWADMIRQKKGYKKAVVALARKLSTVMLSMWKSGELYKDAGLQAGR

SEQ ID NO: 194962 - protein, 428 aa, unidentified
MSIPFALDTVLAVGVDPHRESLDAIAIHFPEEIVLDETFDNTRDGHRALWSKARALAEEQSLRLIFGLEDGSNYGYALGRYLVNQGICAKEINPRMTSRQRDFYGEDKTNRLDALATAAIIFRAYDRLPDVTVVQEATEATQELSRYREQLVKEQTANLNRLHRHLANQYPTYKTFFSELNGVTALHFWTTYPTPAHLRATTPQELADFFREKSKHSLGRQAARHKARQIFNVLDDVPISEPGLLVEAQGALIRDLAKRLLQLKRSIEDIEAKLEETVPSTGQQLETFQGIGTVSAAVLIGETRDTARFNHDKDRFAKYNGSAPVTKGTGKHARQVENHWCNRRLKSTLGQVALAARHNEPLSAEYYQACLDRGLNPGEAHKRLMRRLSDIFFAMMRDKTPYDPEIHHRKQQRHKRKGKSVAPAVAGD

SEQ ID NO: 194963 - protein, 452 aa, unidentified
MRTSKLPKGKKMKLPKHLQHINPYAAGIDIGGRSHFVAVPEGSCEKPVREFSSFTDDLHQMADWLLDCGVTSVVMESTGVYWIPVFEILESRGLEVRLVNARHVKNVPGRKSDVLDCQWLQRLHSYGLLEGAFRPAEHVCTLRAYVRQRMNLVRYAASHIQHMQKALAQMNLQLANVVSDITGATGMRIIRAILDGQRDPLVLAGLRDRRCKNSESTIARSLHGNFRPEHLFSLKQAVDLYEFYQGQIAECDRQILHQLASFDTAEASGNGPGATLPASLEEALQRMSGVDLTRIDGIDSNNALKIIAEVGIDMSRWKSSKHFASWLGLCPGTKVSGGKVLSAKSKPVSNRAAAALRMAAFALFKSKSALGAYLRRQRSRLGAPKAITATAHKLARLVYTMLKHGTAYVDAGQEYYEERYRTRVVQNLKRKAQKFGFSLVEISGLQTQNATS

SEQ ID NO: 194964 - protein, 407 aa, unidentified
MDLLKTVFGIDVSSRKSNVCIMVNGQKVNDYAISNDMVGFNRLIGDLKQVTKPQIIFEATGVYSRRLQAFLDMHELRYVMMNPLEAKRKTKDDLHQNKTDKLDALYLAKLQSEHPQRLAYVQNKEYQELMANNRIYEQASHDLITNKNRLHKAVQLTFPEIEHLLANPRGKNYWSIALRFPHPDIVLETKEADIIDFLKGLSGIGKKRANDITQNLIRLAKVACPAVKKNSAHIRGLKMAINNILSAEEECQTALQEMAKLAPKRDLEILTSIPGIGENTALRIISELGDIRRFNNPSQLNAFVGVDPQVYESGNLTAHLSISKRGTAIGRKVLYLAINQIQSAKKAGNPCHIADYYEKRKRSSETASHKKAAIASIHKLLRTIFALIKNDQLYSYDVAKHNQRLLS

SEQ ID NO: 194965 - protein, 337 aa, unidentified
MEYFAGLDVSMAETHICVVARSGAVIHRAKVPSTPADIAAELARVPACRRILFETGRMAPMLFHGLNQLGLPVVCVESRQAYQALKSLATHKTDRNDARGLAHLARTGFFKPVHVKSLPAHAVRSLIIARKKLVGQRVTLENQIRGLAVVFGVRLPRALSPAFIKQALQASDGIPGLSAAMRGLIGARAAVLAAILAIDADIRRMVRASDACRRLMSIPGVGQLTALAFTAAVDDPSRFRRSRDIGAYLGLVPRRYQSGEIDYTGSISKCGDRRIRTLLYEAANVMMTRYKGPLKLKDWALAIAKRSTMRKAKVALARRLAIIMHAMLRHGTEFEPA

SEQ ID NO: 194966 - protein, 418 aa, unidentified
MPHIDHPARTATRADNALAIDMDATLFMALELSVTSWVVVASAPGEDKASKHGVAACDGPGLLALLDRLRRRAEQRRHGPVGIVVMQEAGRDGFWVHRLLEAHGVRSQVVDPSSIAVNRRSRRAKTDRIDAEAMLRTLMAWARGERQVCAMVRPPTREVEDARRVSCEREALLAERIRHANRIKGLLATQGVFGFEPTLRDRRTRLAAVRTPEGAMLPPRLSDEILRQVDRLELTMQQLAAVEAARDAALAAERVANPAHDAVAATDRETGGTVATLPEIEGPGARLLRLKGIGPETASVLAGEAFFRDFRNRREVASYAGLAPSPWQSGGVDREQGISKAGNARVRKTMGQLAWLWLRNQPDSMLSTWYRDRVRDGKGRVKRIAIVALARKLLVALWRFVTQGLVPTGAELKPAKAG

SEQ ID NO: 194967 - protein, 350 aa, unidentified
MAIVGGLDLHRKQITFEVLDADSGEVRRGRISPADRQLFRGWLGEFTDRHVELAVEGCTGWRFVIEECQAAGVVAHLAEPADVAALRGRRRHAKTDRIDARHLRDLLLDGRLPECWIPPQLVLETRAKVRLYKDLTDQRTGWQQRMHATLYHLGAPAQRGLLTGERDRLARIQGLSPAARQAISVALRVIAALDAEIAVVRAELVGFARRQPGCRALQAEFGIGALLSVVIWCEIGDARRFAHSRDVVRHAGLDITVYSSDGKRSPGRLSRQGVPLLRWALYEAGRCAARAASPDHIYYTQVAERLGGQRAALSVGRKLARRCYHRLRALDEQALAPPPPRRTGPPARAA

SEQ ID NO: 194968 - protein, 347 aa, unidentified
MMKILALDLSKFKSVGCMYVAESGAHSYRRVNTTPVAIHDLLVEEEPDRVVIEVSSVSGWVSDLVRALGIELQVVNTNGEAWRWRSVKQKHDQADALKLGRLSAMNQLDLVHVPAAEIRQWRAVIKYRQHLVGRRTDIKNHVRELLVREGVILPRGRKCWSQEGCAGLEEMTRSWEEVGISELWRGELQSEMQQLQVIQERIREVEAKLDTLAAADDRVSLLRTIPGVGPRLAEAMVALIDDPHRFKRGRDVGAYLGLVPRQYQSGEMNRLCRITKRGSKLLRSLLVEVSWVSLRYNPWLRSLYERMNRGSKTRKKIAIVAVARHLAIYCWAMLRDGTRWRPPCPTQ

SEQ ID NO: 194969 - protein, 355 aa, unidentified
MNVTHYIGFDVHKKTISFCVKTADGQVVEEGKLIAERGSLRKWASERRQPWRGAMEATLFSGWVYDTLKPYATQLDMAHPAMMRAISAGKKKNDKIDARTIADMVRCDWLPICYVAPPEVRELRRLLRYRGLVVRESVRMKNKIAGLLMETGATYNKERLHGRKYFAELLKNLQEVPESVKDLLRLSRGAMETFEATQKQLVNRLLADPTLTQRVERLASIPGVGEITALTWALEIADANRFSSSADVMSYCGLTSALKSSAGKEQHGPISKQRNAWLQTALIEAAKLAPHWNSQLKAVHQRELERGHRNRATLAVARKLAAYLLAVDKSGKPFHLRTPPHPQETAAASPSEKAA

SEQ ID NO: 194970 - protein, 404 aa, unidentified
MWFVGVDWADTHHDVLVIDEASRQVGSCHVAHSVEGLRQLQDFLLAICGPERKEEMACIIESTHGLLIAALLEAGFPVYPVNPQTVDRRRSASGAKTDQIDAYLLAKHGRAEVADLRRWEPDSSLVQERKALTRDQDRLIQSQTRLVNQLTACLKAYYPVVLTFFSKLHQRSTLLFLQTYPTPEVALAASQQQIALVLKNAGHPTAEPVAAKIFQTLHQPHLMADAITTRTKARLMQVLIKQLLPLLEEIAAYDKEIARLFLRHEDKQVFSSLPRAGKRLAPRLLAEIGDDRERYAHTASLQALAGTAPVPYASGTYSKPHRRYACIKPLRNALQQLAWQSTQSEAWAQDYYRRKRKEGKSHSEALRALANLWVRIIFAIWNKKERYQTSIFETAQRLHAKPAS

SEQ ID NO: 194971 - protein, 359 aa, unidentified
MTSIALGRADVIVGIDTHKDQHVAVAIDGLGGIIDQPRFVAANPAGYVELLDWAHSLGTVHAFGVEGCGSYGSGLAKFLRRHDQTVREVARPPRRGERRMSGKSDAIDAEHAARTVLSGSGTATPKLADGQIEAIRVIKIARNTAVKAHSTTMVTLKTVVVTAPDDLRGTLEPLTDHQLILACAALGTDGDIGDPAVAIRHCLASLARRYLDLHEEIKTHSAHLEQLVTSTAPQMLERFGVGFDTAAEMLITAGDNTDRVKSEAAFAKLCGACPVPAGSGKTNGRHRLNRGGNRQANAALYRVVIVRMRWHPPTIAYVKRRTAQGLSKKDIIRCLTRFVARELYHLLPEPATTRLRPAA

SEQ ID NO: 194972 - protein, 366 aa, unidentified
MDAIYIGVDFHSRQQTICYLKTETGELVIRELKHQDKEQVRAFYQQFQERVIVGLEASGYSPWFEAMLEELSHEVWLGDATEIRRRARWRYKDDRRDAELIWDLMVHHEFPRLHQPLPQSREILRMLRYRQKLIKVRTMTKNSLQAIALQAGLAKGRQLFTAAGQVEFKAVAMSPVLQYQRDHWFELLKPLNQELLETMKWFKAAAHRDAAIARLRTHPGIGLLTALCLLHTLQPVSRFRNQRKVVAYAGFDPLVRRSADSAIHLGISKAGSRLLRYLAVEAVHTAIRYDEDLKRFYQRLAERRGRPKAKVAAARKLLIRAYIMMRDEIDYAEFKRRAVAARLARRSQGPPSVPVVLIGQSASPGA

SEQ ID NO: 194973 - protein, 352 aa, unidentified
MSMLADLVEVVIGVDTHKDTHTAALLDTRTGGVLARATVATDPDGYAQLVALAEQHSGLRAWALEGSGGYGAGLARHLADAGELVVELDRPLRPARRAGAKSDPIDAERAARDALARTRLAQPKTGAQRAALQVRLTARRAAVEASADAQRQLHALVITAPEVVRARFRGQSTRIMLTTATRLRPTTSANVDVFTCLTVLRDLARRVRFLEAEAADHEKAIRAIVRTWRPDLLTLTGVGPIVAATVLTAWSHPGRCRDDAAFAMLAGAAPIPASSGKTVRYRLNRSGDRQLNRALHTIVLTRLQRDERTRAYADRRRAQGKTDREIKRCLKRYVAREIYRRLETPPQPLDAA

SEQ ID NO: 194974 - protein, 349 aa, unidentified
MTLYIGVDLHPHQQTLSWCDSRTGETGTLDLVHDLEQVRQFYTSLPEPSVIGIEASARASWFENMLFETGHKLLVGNPVLIRKRATSRHKSDRRDAELILTLLLRDEFPAIWRRSQESEQVLEIIRLRSSLVRQRTQVYNRLQALAHNVGMPKGRMKSIARQEMLRKIEMNETGALCRSHLFSMLSHLDGRICELEEWLKPKADQNREARLLRTQNGVGYLTALTFVHTVGDVNRFEKGTKGITSFAGLDPVEHSSAGRKGFGPISKAGSALLRYQLGQAAQIAARSDAMLKAFTKRLAKKKSRRVVKTAAARKLLVKLSIMLRDNITAEEFDLRGRTVGNARVIQGLQ

SEQ ID NO: 194975 - protein, 345 aa, unidentified
MGNMYYIGLDVHKKTISYCVKDGSGRIHAEGKIPATRFDLDLWMKTLPQPWTVAMEATLFTGWIYDHLRPHAAAVKVAHPLMLRAIAAAKKKNDHIDANKIADGLRCDFLPECYMASTQIRERRRTLRYRNLLVRQTVQLKNRVSGLLMEAGVSYNKQKLHKVGYFRELLKTNQDIDESLRPLLQLCRETLVRLQKTESALIRSLARDRFLVERVERLMTIPAVGPITALTWALEVGEVSRFSSIKKAISYCGLCGAEKSSGEHIQRTPLSKQRNKHLQCVLVEAAKMAPRLSPELALLYDRERQKGNANRATLAVARKLVAYLVAIDRRQKDFLVVEKQNHAAA

SEQ ID NO: 194976 - protein, 422 aa, unidentified
MDESTRLAMFRQMKEEIRGSRKYLAVGIDIAKEKHNAFFGTSTGTSLLRRLVFDNTQEGFKKLCLHAETLKKQHLLDRIIFGVEPTADYHKPLGEYLIREGYMTVLVSGNAVKKNRELLDGRWDKHDTKDAANVADLITQGKCLFYEFPSLAIRQIRSLLSLKRRLKKNEQGYRVRIRNHCIAQYFPEFDPYYGYGEGPAIVKKCFDPSYIADLPFGEFISLVASRNGGEKQRVRIKQIWDKAHISIGCRVNKAVAFEAAILMEELQLIRMMINKTDKSITEVCSHLPEYSCLLSIPGFGPDVSAMVIGAIGNPYRFENERQVIKTAGYDLSADRSGKRSDTTPVLSKRGKADLRYALYQAALIASVRNKHFMRYFTNKLAGRERDQGIRTKMRVKLAAKMLVIAWTLMKKKEVFDPGYITI

SEQ ID NO: 194977 - protein, 409 aa, unidentified
MQVVYPRCAGLDVHKKDVYACALVVDENGQKRQQIRKFSTVTVELLKLADWLQSHAVTHVAMEATGVYWRPIWAILEGQFELLLVNPHHVKAMPGRKTDAKDCEWLAALLQHGLVRGSFVPPTEIQDLRDLTRYRIELTQSQNRVANRIQKVLEQANIKLSSVASDTLGVSGQLMIQAIIDGEEDPERLADLAKRKLRQRIPELQVALSGRIRPHHRFMLREHFDEWKTLSERIQRVEQEIDRAIAPFEQAVMRWKTIPGIDRVTACCLVAELGVNMAQFPSAQHLASWAGICPGHNESGGKRMSGKIREGNRWLRRALCQAAWAATRKKNSYLSAQFKRLSSRRGVKRALIAVAHSILIIAYTIMKNAQDYKEVGGDYFERLNHTQLQRHLIRRLQRLGLTVTVQLAT

SEQ ID NO: 194978 - protein, 415 aa, unidentified
METQKNRVCGADIHKKFLIATILFRDGTKTTKRFGMILDELLKFKNWVIENQCEQIAVESTGTYWIPLHAVLEGSVDLIVANAYKIKHTPGRKTDVIDSEWLAELCLNGMIEPSRIFPREDRYLRRLTRAREGYVNDMTREKNRIHHALESCGIKLSSVLADIFGKSGRYLMNSLLDGVGIEEVIEGIPVKRIRKKADQIKESIRGSIDTTQVILIRGGLDQIVSIQKRIDELDSEIKGRVASRKEDLRIAMSIPGIGFTAAVIILAEIGDFKDFDKPEQLAAWAGLAPAVYQSADKLVTGSITKHGSRHIRRILVEVAQVIARTNKSKLKKFFLRVQAKKGHNVAAVALARKVLCILHHLLMNREMYQDEGVKKAKSVDFGSSSKQTEISFEEMIRSLVRAGYEVRKRNQGTGG

SEQ ID NO: 194979 - protein, 308 aa, unidentified
MPQPVIGCDLSRAFLDLCDLPSGRMQRIPNTRDAIAEWAETLTPDVLVVFEATSGCDDTLIATLTERAHPFSRVNPRQARELARATGILAKTDRVDARVLAQMGAALDLPVTRPVSPARATLADFLRRRRQLVDMRKAEKLRRHSAGHDDIAEQIEAMIALLSTQISVLDQRIKAIIAADRALAEQAALMSTVPGIGPTVMAVLLGELPELGTLCRRKIASLAGLAPHARESGSWKGARRIWGGRRKVREALYIAALSASRRVPALIVMRDRMRAKGKPPKTILIAIARQLLVILNAMIQKSQPLQIT

SEQ ID NO: 194980 - protein, 394 aa, unidentified
MEAGILQAEGEGEVVVHAALELSRSGWLLAVQGPSDGRPSHHKIAAGDAKRVLHLMAQARCASARRLGHDHVRVASCYEAGYEGFWLHRVLAAAGVESFVVDPSSLRVDRRAKRRKTDRIDVETILRALIAWRHGARDECSMVVVPETAAEDERRLSRERGRMVQERTAHVNRIKGLLMTVGIYDVAPLAADWRARLAALVTGDGRPLPPRLAAEIGREIERLVVLQEQIAIVERERDGRQGEQRAGTPAAGQATDPTTPRGRIAQLQKLRAVGPETASVLQSEVFYRHFDNRRQVASYVGLDPSPWSSGTTMREQGISKAGNRRARHALIELAWMWLHWQPASALAIWFRKRVGVAKGRARRTMIVALARKLLIAVWRFLEFGVVPTGAVVRG

SEQ ID NO: 194981 - protein, 352 aa, unidentified
MMIIGVDYHPSDQYIAFVDTETGECGERRLNHSDGEAEKFYRELRQREVSVRVGMEATGYSRWFERLLAELGIEVWIGDAAKIKTKRVRKQKTDRNDARLLLKLLLENTFPRVWVPSPENRDLRQLLWHRHRLVQMRTRIMNQLQALAMNEGQRRKKKLWSNQGRAQLEKLPLATWASRRRQDLLELLDRMNPPIEELTRAAEQEAKKWPEVLRLMTHPGVGPLTALAFVLIIGTPERFQCGKQIGSYVGLIPSEDSSAGHQRLGHISKQGSSLLRFLLGEAAQAAARCDADWRRRYVYLAMRRQRNIAKVAMARRLAVRLYWMWRNGWEYSQWVEFGSNAGQLATGHGVND

SEQ ID NO: 194982 - protein, 406 aa, unidentified
MEGPIITVDVSKGSCHYQPFIENGHPMRKPKQLSATIDGFQKLGQTIKDLEAKTEREDIPVIFEATGVYHRPLQKYLEDHKIRYYIISPLLSATYRKTDLHSNKTDALDCAHIAKAYYCEKELRQYQAQPQEYKRLYQLSRIYESELVHLRKRKVSLRSMLDIIYPRIDKTFKGNQNLYDPIPMEILKRYPHPSLLLSHREDTIVKAVGHRTGHLKGYTERIVHKIYEKAKECYSGCDIDDIEVLKLPSLIENVQEQKKKCDSLLKEMIEIARTCPYFASVVSIVGIGENLAARIIAELGDVNRFDNRAAIVAYAGLNPKIQQSGDIDGLHLKISKKGNKHLRCLLYLGAQCNYRLRKEDPLYEFTKKKRQQTQCPLSSKAAYTASAHKLLVIIYSLCKNGTLYHS

SEQ ID NO: 194983 - protein, 411 aa, unidentified
MEVYIGIDWSESKHDVIFMNEAAAVLALFTIPHSPDGFHKLDVTCRQQGFHVDDCLIALETAHNLLIDFLWARGYTQVYVIPPSVTKSQRKRYRQSGAYTDVDDAYLLADLLRTDKHRLQPWRPDLPLTQHMRAKVSFLLHLTQNNVRLTNRLRAVLLRYYPGIVGVFSKLNSPIALEFIRAYPTPQAAATLDFDEFRTFARQHCYTQLKKLPGCFARLQTAQPEAAPDIVHIYHGEAVALATLLLDMVRLEKTTQKELNELFVQHPDHQIFASLPGVGDLLAPALLVKFGDDRQRFPTPGSVQALAGTCPVTERSGNRKVVKFRKACDREFRYITQQWAGHSKDESVWANAYYQQALARGGSKSHAQRCLANRWLSILWTLWQTGEPYDEAYHLRQRAERSRPKNVTLMG

SEQ ID NO: 194984 - protein, 452 aa, unidentified
MAKQSTSKRKKRMTTLQVLNERAGGLDVGSEKIHVSVAGDRPRVFGTMTPDLHKLRDWLLEQKVETVALEATGIYWLPVYEVLERTKIKPIVVHGRHVKNLPGRKTDMSDCQWLATLHVHGLLRGGFVPENSIRELQDYMRLRSDHISMASAHIQHVQKALERMNVKVHDVISRITGVSGLAIVRAILAGERDPARLAGLADPSVLARKGARLVDALQGQWRPEHLFALRHAFELWEFYQTKIVECDQAVAALLQKMNENRPPAPPASGPRKPLRGPNVPQIEKLNESLRQLCGGVDVSQLPGIGDYSALLLVSEVGTDLSRWPTAKHFTAWLGLAPSSHQSGKRRGRVSRQRNRAGRTFCTIARSLAKSTDKALGGFYRRLKGRRGGLIANQALARKIAELYWRAFVKGLQHVESGLAAYQEKLHQQEKRVAEKLAAKMGCRLVPITTVHG

SEQ ID NO: 194985 - protein, 369 aa, unidentified
MSIVYIGMDVHKDSYSLCAYMPEFDAFLGETKCASEPKNVEKFIDNLREHLEDDVEFVTGYEAGVLGYSLHNTLEKMGITCKILAPSTMSKSSKDLVVKNDRRDAKMIAKNLANKTYKAVYVPDDEEVEMKEFVRLRKNACKARGVIKKQINAFVLRHGFNYQRSKWTVAHIKWLKQLELSAILRETLNEMLLQYYDLNDRIERFDARIEAFSQQERYVKPVQQMRCLKGVDTITAMTIQVETSDFSRFPNAKAYAAYLGLIPSDHSSGAHVRLGAITKQGNGTIRTTLIEAANALVRSNIGYKSKKLKARQKGMDANVIAYVDKAADRLGRKYRRMIRMGKPHNVAVTAIARELACYIWGIETGNIAV

SEQ ID NO: 194986 - protein, 363 aa, unidentified
MLYVGIDQHRKQLTVSVRDESGSVVLRRQVSTRWEKVRAFFSEVRDLAAEDGGYLAVLEVCGFNHWLIALLGEHGCRQTIVVQPEEQSKHKTDRRDASQLSEVLWVNRARLRQGLPPRGLRRIQLPGAEAQADRRLTSLRHNAGRELTRTINRIKAVLRRHNLEQECPTKGIQTKAATKWLHTLKLSAVERIEVDEQLHRAGLLREQVQHLQAEIAARFERNAAARLLSTIPGAAPYSALGLASRVGDVRRFKHPRSLANYWGLTPGSRNSGEATDRLGSITKQGSALARFLLGQLVLHVLRDDAWMRSWFKAIKRRRGSKIARVAVMRRLATIVWHMLTRNEAYACGGPPRARLQPRPAGAR

SEQ ID NO: 194987 - protein, 336 aa, unidentified
MDTSKHIFQLHGVDAAEQVVLRKRLGRKQMVEFFAKLPPTVIGMEACGASHYWARVLEQFGHEVRLIAPQHVKPYVLRNKNDGRDAEGVCEAMSRPRMRFVPVKRAEQQAALMLAGVREQMVARRTQLSNTIRGYAAEFGITAAKGLDKIGPLLAQIAQDESVPTIARDLFALQGRAYAQLQVELKAIEARLRAWHRTNADSRRLAKIPGVGPIGATALVMKTPDPHAFPSGRHFAAWLGLTPKDHSTAGKTRLGKITRAGDERLRSVLVAGATAVIQQAKHGRGHPSPWVVALLKRKPPKLAAVALANKIARIAWKLMATGESYDGARMLGALTA

SEQ ID NO: 194988 - protein, 426 aa, unidentified
MRVLHERVAGIDVHKDMIKVAVRSPGDKPWTRKTEILEFRTFYGVLQHMASELARRGVTHVVMEASGVYTEPVYYALCERDFDEVAVINPAHAKALKGHKTDARDCARLAELFECGLLRGSYLPAPELKEVRDLTRYRMKTVQARTSEIQRLAKALESAGIKLGSVASEITGKAATAMIEALIDGERRGAVLADLAIGRMRTAGKLADLSQALAGRFTEHHALLCRLHLDRIKVFDTAVTDLGGRIAGKAARWQREVDLLTTVPGFGHIVAWAWLGEIGPAPHQHFSSHDKLASWVTLCPGNNISAHKRKHGRTGDAGTYIKPMLIQAAWAAIRTRGRLQARYNRLVRRFGGQKNPAAKKKAITAIAHTLLKIAYQVLKSGQPYQDLGADFYTRRESPGQRQAYLLRQLQKLNPGATITITPPEAA

SEQ ID NO: 194989 - protein, 385 aa, unidentified
MAPPTRPRIVIGLDVGKSAHWACVVTREGELLASGPIPNREDAIDGLYAQYPGALVVVDQVRNIGALPIRRARLAGLPVAYLPGIAAHEASKLFAGDAKTDERDAMVIAKTALGIPDALLAVADRPPEIEAARSLAAQRDFLTCENTRSKNRLRSILLESCPEFEAHADLSDPATLKLMAAVGGPWSISEASPQAVGALTRGCRRAKVAALVESVESSSRPHPAAVACEDRAVRLLARRISENAAEIESLTSEISALLSADETYRCLLTVPGIGPRTASELVISIDIADFASHDRLASYCGLAPRNRRSGTSISSVSASRQGNKRLKNLLIFSCNCLARSRNRWGEYYARCRDRGMPHGKALKAVARKRLKVIYAIMRDKVPYAA

SEQ ID NO: 194990 - protein, 343 aa, unidentified
MQTVTTIGLDIAKSVFQVHGVDAAGNVIVRRQLKRRYVLPFFQKLPPCLIGIEACASSHHWSRELKALGHTVRLMPAAYVKPYVKRQKNDAADAEAICEAVTRANMRFVATKTLEQQSCLMLHRTRHLFIRQQTAVINAIRAHLAEFGIVAPVGRNGVEQLLNVVADPGDKRLPDVARACVATLGAQLQMLKARILEFDRLIMAWHRSSEASKRLDEIPGVGPALATALVASVADPKAFRSGRNFSAWIGLVPKQHSSGGKDKLGSISKQGDRYLRSLFTAGALAVIRYAKIHGTKHRPWLTALLARRPTKVAAIALANKIARMAWAMMARGDRYKEPVALAA

SEQ ID NO: 194991 - protein, 376 aa, unidentified
MNESTVYVGLDVHKETIAVAVARAGREEPEYRGEVLHTAQGIAKLLKKLSPAGEVLDVCYEAGPCGYGLYRELVARGHRCTVVAPALIPRKAGVRLKTDRRDAVLLARLHRAGELTAVWVPGEEQEAIRDLSRAREDMKAIELKARQRLGAFLLRHGQVYRDGASHWTQRHWHWLEAVRMPSPVQQLVLQEYIEAVKEAQRRVAGLEEQVRQVVADWSLRPVVEGLMALRGVSLIAAVTILAELGDLSRFDSPRELMGYLGLIPSEHSSGGSRRQGGITRTGNGHARRVLVEAAWNYRFPARKTRDIERRAERTPVAVQAIAWAAQKRLCARYQALLRAGKQKPQVTTAVARELAGFLWAIACEVMGKPHASKALA

SEQ ID NO: 194992 - protein, 419 aa, unidentified
MVQDVTAPELVAYIGLDWGDERHAVHLQAAEGGPVERVELEQKPDVLHAWVAQVRERFHGRPVGIAIEQRKGAVMHALMMYEFFVLYPVNPKALARYREAFRTSGAKDDPADAALLLDLLCKHRDQLRPWLPDTVEARTLQSLCEQRRKLVNHRVAVTNRITSLLKQYFPQALDWVGDVASLQGCDFLRKWPELAAVQRVRPNTLRTFYQQHNCRTATVIDERIRQIASACPLTSDPAIVNPLSLSVQTYATQLRVVIEAVQAFDTRIADVFAHHPDQALFDSFPGAGQVCAPRLAAAFGTDRSRWQSATDLQSHSGIAPVTERSGKALWVHHRLACPKFVKQTFHEFADQSIRFSQWARAYYDQQRGRGNDHHAALRALAYKWIRILFRCWKDRKRYDEATYMDALRRHGSSLVKNNA

SEQ ID NO: 194993 - protein, 385 aa, unidentified
MTATTRRFDPTALENMLCLSFELGEGSWTLSFTSGFGAPVHRRRVPARDRDGVLRQIEAIKERLGLAASCRVVSCYEAGRDGFWLHRFLEAHGIENLVVDSSSIEVSRRSRRAKTDRLDGESLLDLLLRHLSGSQKKVFSVVRVPTVEQDDRRHLRRELRSAKQDRTRVTNRMKGLLANQGLPLDLKRDMPTQLASLRRWDGSPLPAGLRARLSREWERVVLYTALIERREAERREILQRGQDPVLEKVRQLNLLRGIGTNSAWLYGMELFGWREFRNRKQVGAIVGLTPTPHTSGMQERERGMSKAGNRHVRAMAIEIAWGWLRFQPRSALSQWYQHRFGRGSKRLRKIGIVALARKLLIELWRYLETGVVPEGAELKTDVRVR

SEQ ID NO: 194994 - protein, 410 aa, unidentified
MEVLYPHCAGLDVHKDTVVACVRHIVNGSVRRAVRSFKTTTKELLALSDWLTGEGCTHVAMEATGVYWKPVWHVLSDSDFTLVLANAAHVKNVPGRKTDVNDATWLADLLAHGLIRSSFVPDEQTQEMRTLLRTRKQLVRECSRHVQRLQKTLEDANIKLDSVISDIVGLSGRRMIEALIAGETEPGVLAAMAHRRIKATPDELEAALRGRVTRHHRFLLQLHLQQIDAVNAAIDQIDQEVDAYVEPFRATVRLLTTIPGIDELSACVILAEIGRDMSRFPTAGHLISWAGLCPKNDESAGKRRSTRMRKGAPWLKTTLLQCAAAAARKKASYLQAQFHRLRARRGAKKALGALAASILTSVYHMLISGELYRDLGPHHFDQRAKAVNTRRLVTRLQNLGYAVQITPLAA

SEQ ID NO: 194995 - protein, 310 aa, unidentified
MEAIFVGIDVSKDRLDVHVCPGGEAFAVSRDGKGLEELIDRLRALAPQLIAIEATGGFETTAAAALAGAALPLAIVNPAQVRHFAQAVGKRAKTDPIDAEVIARFAAAVKPEVRPVPDAQARLLGELVARRRQIVEMIVAERQRGQRTVIARVHKSILRHLKMLEKELADIDREIGTLVRGSPAWRDKEDLLVTFPGIGNTLARTLLAEVPELGRLTRREIASLAGVAPFTRQSGRWKGKSMIAGGRAPVRAALYMAALSASSHNPPLKLFYQRLLSAGKPKMLALIAVARKILIILNAMLRDRKQWQHA

SEQ ID NO: 194996 - protein, 351 aa, unidentified
MVTMIGVDPHKATHTVTAVDGNGRVLGDLTVRARSSGHAELIGWARQNYPGERRWAVEDERNMAGLLIRDLLAAGERVIPVPAHLAAEKRRTRRSGKSDGIDSATVAQTALRESLPEIVLDESSRELKLLSDHRQALVNERTRAANRLRDLLHQLDPDYADSFPASAFSRYRALEHVIDRFENNDSVVAGIVLDLARACHANLTKVNELDKKIKARTQASAQPLLDLPGCGETTAAIIVGEVANVHRFHSPAALAAYAGIAPLDASSGKHEHHRVNRGGNRRLNYAIHIIALTQLRIYEPARTYRERRIGQGSTPKVAIRALKRQIIRKIHNILARCTDKPQARPLTIAIT

SEQ ID NO: 194997 - protein, 402 aa, unidentified
MNCVGIDISKGKSMIAVMRPFGEVVVSPFEVLHTDSELSKLARLLKSLDGETRVVMESTGNYHAPVAWLLHDAGLYVSVVNAMLVHDYGNNSLRRAKTDKKDAVKLANYGLDHWLTLPRYVPEEDTRLMLKSCYRQYQQYSKVRTMLKNNLISLLDTAFPDANRLFTSPPRADGSEKWVDFVAAFWHCECVCGLSEKAFTAKYQKWCKKHGYNFSEDKALDIYASACGHFGVMPKTDTAKLLVEQAISQLRATSAALAALKQEMQSLAASLPEYPVVMEMFGVGPALGPQLMAEIGDVRRFHSKKSLVAFAGIDAPPYQSGQMDIRSRSISKRGSASLRRTLFLVMGVLLQCAPMDEPIYQFMNKKRSEGKPYRVYMMASANKFLRIYYASVKAYLDSLEHD

SEQ ID NO: 194998 - protein, 350 aa, unidentified
MRRPNEKLIAGLDLHSNNVMIGLMNQDGKRVAHRKLDCNLKEVADYLEPLKSQLQSLAVESTFNWYWLLDGLRERGYPIDLANPAKIEQYNGLKHVNDKDDAFHLAELQRLNILPKAHVYDPKLRPVRDLLRRRSGLVHQRTALLLSFKSLYARTTGQALDLSDAKRMDPKEAPKLYEHPANQLIAQVQAEHIQALEKSVQRVEKAVLACAREIPLYGKLLTIPGIGKILGMTITMEVGDIKRFKTDGDFASYCRTVDAKRLSNGKTKSDNNQKCGNKYLSWAFVEAANFAKRYDENCRRWFDRKKSRTSTVIATKALACKLAKAAWHMMAHQVDYDPARMFPALASRKK

SEQ ID NO: 194999 - protein, 391 aa, unidentified
MIYAGIDVAKDKHDCFIMNSEGEILCDVFTVPNNTEGFNDLFQKITSTSEDLSKVKVGLEATGHYSYNILGFLLNKGLTTFVINPLHTNLYRKSLSLRKTKTDKVDARMIATMLASDVNLKSYTDTAYHNEELKSLTRYRFDKVKERAKLKSSISRLVNILFPELEKLVPTLHLVSVYSLLSEYPGAHQIAEAHLTTLKTLLHNASKGRYDRDKVITIRDTARNSIGSRMPAKSLELRHTIMLIRELDKEIEEIETAIQAIMEDIASHILTIPGIGYRMGAMILAEIGDFSRFDSPDKILAYAGLSPSTYQSGQLTSSHSRMEKRGSRYLRYAIINSAKYVCHWEPTFAAYLAKKRAEGKHYNVAISHAAKKLVRLIYALEKSGQSYIPAA

SEQ ID NO: 195000 - protein, 341 aa, unidentified
MFAVRGAHGELVEERRVNHERGAIQAFLSRFPEGTPVALESVGNWYWIVDEIEAAGCVPKMAHPAKAKVMMGNIHKTDKLDAAGLATLEHLGSLPTVWIAPGEIRDERELPRTRMAYAKVRAAIKNRVHSTLAKYALSLEAASDLFAPKWRGQLLQLVRQLPEETHRCVGRELELLDTVQVQIGRLEERIRERTQLTPSMRLLKSLPGVGDILAIVIDRELGTIGRFSSNVHFASYAGVVPRVSSSGGKYRYGRMVKQANNYLKWAFIEAANAVVRQRHHPRWQQKHVCQLYERTRRRKGHAVAVGAVARHLAEATFWVLTKGESYQEPRKVSHKQGQARA

SEQ ID NO: 195001 - protein, 456 aa, unidentified
MSQERTRSKPTGLPIIHPFAAGIDIGSRFHVVAVSPDLCDEPVQTFQAFTSDLQRMADWLMATGTKTVVMESTGVYWVAAYEVLEACGLEVILANAREARAVPGRKSDVNDAQWLQRLHACGLLRASFRPGRAIAELRAYLRARERHTDYAAAHIQHMQKALTFMNIQLHHVIASITGTTGMSIIRAIVAGERDPDKLAAMRDVRCKESQETIRSALVGNYQPEHLFALKQALALYDFYQHCIEECDTEIEHAVAALNIDRPIPEAPLPKPKHRGKMPNAPAFDVRRALYQLTGTDLTQIHGIGPFLALRLVGECGTDLSRWPTAKHFTSWLTLSPGCKISGGKVLSAHTRKTSNRVTVALRLAAVTVGKSHTALGAFYRRLAARIGNAKAVTATARKIAVLFYNAMRFGMDYRDPGADYYEQQYRNRVIKQLHRRAAQFGFNLQPQDPLQKGGVS

SEQ ID NO: 195002 - protein, 340 aa, unidentified
MGELTTIGLDLAKHVFQVHGVDVAGATVLRKQLRRAQVLGFFGKLPPCLVGLEACATAHHWARELRSLGHEVRLMPAQYVKAYVKRNKNDAADAEAICEAVVRPTMRFVPAKTAEQQAAVLLHRGRERLVRQRTGLVNALRAHLAEFGIIAPQGLRNVGRLIAIVRDERDTRLPTLARQVLAVLATQIEQLDASVTELERQLMAFHKSNAVSQRLATIPGIGPIIATAIATTVAEPNQFRSGREFAAWLGLVPRQNSTGGKTRLGGISKRGNQYLRRLLINGASANLLRSKATNADPWIIGLRRRRPSLVVAVALANKTARIAWAVMHRQEDYRRVAAAA

SEQ ID NO: 195003 - protein, 322 aa, unidentified
MAMLSFGGIDVSKDRLDITVLPDEQCSSVSNDAAGWAELIEQLRGSSITAIGVEASGGYERGVVRALLAAGMSVRQINPYKLRQFAKASGILAKNDRLDARMIASFVAIMPTRPAQRQTPMIEQLAAMLTVRRQLSDHKVATENASRLLEDAMLQRLSRRRVARLTADIDLLDQRLVEIVTADPALAHRFRLLTSMPGVGAVLACTLIALLPELGQMSRKQVAALVGLAPYDFDSGKLKGRRCIWGGRARVRHVLYMAALSASNWNPALKAFHNRLAATGKKPKVVIVAVMRKMITTLNAMLRDGTAWVDRYSGRRSASTAR

SEQ ID NO: 195004 - protein, 447 aa, unidentified
MAQRNRMISRGGLSLTHPNAAGIDIGCASHFCAVPPDRDDEPVREFKSFTADLERLGDWLDACGVDIVAMESTGVYWIPLFELLERRGFTVLLVNARHVKNVSGRKSDVLDCQWLQQLMSFGLLRGAFRPADEVCVLRALTRQRATILRTQARHVQHMQKALTQMNIQLANTISDVAGETGQKILRAIVAGERDGRKLAALKNSRIHASESEIAASLPGSWRAEHLFALKQAVDAFDFCGTQLSECDTEIDAQLQRLHTHDGDLAKGKKRGRARNAPKFDLRKQLFQMCGVDLTRIDGIDVTTALVVVSEIGADLSRFPSDKHFASWLGLCPGTKITGGKVMSGKTKRCANRAAQALRLAAAALRSSRSALGAYFRRLCSRMDKGKAVTAAAHKLARLIYAMLTRGEEYTDAGQDYFEERYRERVLRNLTERAKKLGMQIVPVAQVA

SEQ ID NO: 195005 - protein, 343 aa, unidentified
MTRFVGLDVSQKLTAICVVDETGRRLWRGQCATDPGQIERAVRGHAGEGAKIGVETGPMTPWLVHELRGRELDVVCLDARHASAALKMQMNKTDQNDAEGLAQIVRTGWYRPVHVKSLDAHRVRALLGARAQLVGMTTRLSNHIRGVLKTFGMLPGAMRGLPFDRRVDELLADRDDLAPIVRPMLVAWRQLREQIAAFDKAVRALAKASPTCRLLMSVPGIGVLSVLAYVSTVEDPARFARSRSVGAHMGLTPRQYQSGEVDRSGRISKCGDTLARTLMYEAAVVLLTRVKRASRLKDWAQAIAKRSGPGKARVALARKLSVILHSIWRSGEPFRWSEQPADA

SEQ ID NO: 195006 - protein, 404 aa, unidentified
MRRPSWVSAKEKNVNTSHPYIGIDIGRYKLFVAVTPEHERLTPKQHPTVELDLKDTDWWKHLLDLIADDAHIAAESTGFHLLAPIARLIEAYRPNATIWQVEGKLTMHIRSSQVSKNAKNDRLDAISLRLIAVMCGQGSPPLGARPYDYEHESVVQALRLHHNTYYRIDRDRVRLINRLKVLARSIAPILDQRIDSYLTAIRFGIVTPQHFRALAALTPKDRRSLSIPSGTRANIMYIANRIPPIDPDETTATAIIDLAAALEKLDQDQSRESGHITALIDTPPLADITHRWRTVYGAKDTWLAALHIATRGQATTITKDEFRAAVGVAPSTAITGEDDSTRLTKKGYRPARAAMHLWTLVCLSPNAQDNAIARYFHASDKRSLGAAKNKLARVLWGVARDPKL

SEQ ID NO: 195007 - protein, 387 aa, unidentified
MEVRIENTPSAGTNNDPVHCFVAIELSKSSWVVGFQTPLSKQTSRYQVKACDAEPLLQLIERVRTRVTREVGRPVEVTSCYEAGYDGFWLHRVLEAHGIHNHVLDPASLQVNRRARRPKTDRIDADRMVRALIRHLRGEPEACSVVRVPSPEQEDARRLHRERGRLIAERVGHVNRIKGLCATQGIYNYEPLRSDRLGRLDKLRTGDGRALPARFKTEIVREIKRLEVVLEMISTVEAERDAILKDKKSTHINADKIKMLAKLKAIGAEFSTTLVGEVFYREFANRRQLGSYVGLASSPFCSGSLDRDQGISKAGNSKARAMMIELAWTWLRYQPDSALSRWFQARVGNLKGRPRRIAIVAMARKLLVALWRYLQTGVIPTGAELKA

SEQ ID NO: 195008 - protein, 370 aa, unidentified
MLDTTTFVGLDVHARSIKAVSLDVMTGEARCATFGYDAGAVAEWVRSVDPKAKCVYESGVTGFDLQKRLSGLGVDCVVGAVSKMIKPSADRRRKNDRNDAEFLARMLSVGNVVEVWVPDDECEAARDLTRALEDARDDLSRSKQRLSKFLLRHGLVFDERTPTGRRKGNWTRAHWSWIESIRFAEGADNDVLAYYVDAVRRAAEEKARLEGLVEAEARKPRWRRRVDSLRCLKGVDTATAADLVFEAGAFSRFRNARSFAAWVGLTPSEHSSGESDRRGAITKAGNKHLRKALVEAAWHYPTCSGRPKDLAKGQAPDRVARRHAAKGVRRLVERREALLARGVHNNKANVATARELACWVWAVGLMAEEA

SEQ ID NO: 195009 - protein, 305 aa, unidentified
MPHVTSIGLDVHARSVAAAAFNPFTGEVVRRSFGTDASEIAEWALGFEDPRACYESGPTGFHMARELRALGLDCAVAAVSKMQRPAADARRKNDRRDAEFIARMLATHNIVEVPLPDMAVEAARDLDRALDDATRELRRSRQRLNMFLIRLGHVWDERNADGARKKAWTRAHWRWVSEIRLEGPQRDALEYYVTAARCAESDRRQLERRVVALAGTDRWRATVEALSCIKGVDTLTAFRLAAEAGSFSRFRSAPAFASWCGLTPSEHSSGESERRGGITKAGNALARTALIELSLIHISEPTRRS

SEQ ID NO: 195010 - protein, 366 aa, unidentified
MQKISTMRATGKEIFSGRQLTIGLDLGDRFSCYCVLDEAGEIILEQKLPTTPEAMRRAFEKMPRSRMALETGTHSPWVSRLLKQLGHEVIVAHARNVRLIGDSRRKDDRIDARTLARLARIDPQLLSPVRHRSAKAQIHLTVIRARAGLVSARTALVNTARGLAKSYGQRLRKCGTQQVSREMAAGLSAELREAREPLLTEVESLNERIKEYDRRMEQMAKKDYPEVQLLQQVKGVGELIALTYVLTIEDPHRFRKSRDVGCFLGLRPGRRNSGQSEPQMHISKEGDRYLRTLLVQGAHYILGPFGEDSDLRRWGLKLAERGGKNAKKRAIIAVARKLAVLLHRLWVSGEVYEPLRNSQKAVRAVA

SEQ ID NO: 195011 - protein, 478 aa, unidentified
MRADRRWRTRKEKKEWARRLQSNDPGLDVIHPQAAGIDVGNATHYVAVRPDRDPEPVRQFECFTADLHRMADWLKSCGVRTVAMQSTGVYWIPLYDILEERGFEVYLVNARHTKNLPRRKSDVQECQWLLKLHTYGLLNNSFQPSSQIRGLRTYGRQRAEHVQGAASCIQRMQKALTRRNVQLAKVISDLSGVTGQWIVRAIVGGERDPRKLAALRDRRIHASSEEVAKSLEGNWRPELLFLVKQEVDTYDTYQKRIAECDAQLQQQLASFASAASAVAAAPVTEPQADEQPKETRVKRKKLAKNAPRFNLQQELQRVAGVDLTRIDGIDVMVAQTIVAEVGRDMGRWKTEGNFVSWLGLCPDNRITGDKVIGRGTRHVVNRAATSLRMAANALWRSQTYLGAQYRRLRTRLGAPKAITAMGHRLARLVYRMLKYGQQYVDKGAENYERRYRNQQIQSLRKKAAQLGFQLMAPSAAAD

SEQ ID NO: 195012 - protein, 348 aa, unidentified
MTEAYAGQQQFVGVDLARRRSVITRMDAAGTVLECVQIDNSPAALVAEVGKAGPAAPVAVEATYGWYWAVEALQGAGFEVHLAHPKGNASMHNRRVKTDARDATELARLLRMGDLAESWIAPPVVRGRRELVRHRHKLVRTRASLKASVHAVLGKCGVLLPWNDLFGPVGLAALAAVELPQPYASRIASQCRLITAISTEIDLVETAIAAEFTDDPGYRNLLTINGIGPVFASVFVAEIGDITRFPTPQALASWAGLTPRHYASDDKTRRGHITKQGSRLLRWAATEASQRIREPYLADKRRLITDRRGRTAANISKVAAGRRLLHVVYYTLRDGHARCLDQPARKPA

SEQ ID NO: 195013 - protein, 324 aa, unidentified
MMLIGCDYHPSWQQICWFETATGETGELKLEHGSGEAEKFYRGLLGHALIGMESTGNCQWFVEMATTAGHDVWIGDAAQIRASEVRQQKHDRRDAALILKLLMEGRFPRIWTPSGAEKDLRQLLIHRYKLVRIRAQVKTELQHLAMNQGVTRKRKLWSKAGEKVLRELPLKPWASRRREDLLKVREMLNGQITLLDQAVVEAAEKNEKARLLMTQPGVGPITSMAFVLTMGDVNRFQRGKQVASYLGLIPREYSSGGHQRFGSISKQGNRFLRMLLVEAAQGAVRCDPGFRNEYLHRCHKKAKGVAKVAAARKLATVEEEVKVM

SEQ ID NO: 195014 - protein, 425 aa, unidentified
MANRIAGIDVHKRVLAVVVADVSIEGEYQFERRRIGTRPSELRAMAEWLVAEEVEEVVMESTAQYWRPVWAALEAIWRPSRRNREDAGPMAGALHLAQAQSNRGAAGRKKDFPDAERLVKRLAAHELTLSFVPDGEQRLWRTITRTKFQLTCNRIQLRNRLECLLEEAEVKLSSWVSDLLGLSGRRMLDALANGETNPTTLAALGSPRLRATPEQLADALGACREMHSTHRRLLKMMLQQLRLLDEQITELDQEMAKLLSAHEQAVKRLAEIPGLGVDSAQQIIAEVGPQAATFPSAKHLASWVGACPGEEESAGVNYSHRSPKGNRQMRRLLNQAANAAAKTKGSIFEVVYRRLVVRLGHAQAIGAIAHRLCRLVWLILHKGVRYEEHGPAVVRSRAQARAAKMIRDLRKLGYHVQIVQAPSET

SEQ ID NO: 195015 - protein, 367 aa, unidentified
MSEDSTYVGMDVHRKTIAISMLRPGSSQAVEWQIPHESSAVGRLIRKLRRERPVRCCYEAGPLGYTLKRDFDRSDLPCIVVAPSLIPVRHGDRIKTDRRDARKLSELLRADLLTAVQPPTESEEAVRDLCRCREDAQLDLARARHRLNKFLVRRGRFFNEGYAWSQSHRTWLHKQQFEHDADRAVFEDYLLVVEQGEARVAALDEQLEDICQTAPYRDAVGALRCFRGIATVTAVAIVAELHDLRRFASAPRLMAYLGLVPSEYSSGGKRRLGAITRAGNRHVRRLLVETAWHYRHKPAVGVQLRKRRLGQPPEIIALADKAQRRLCRRYRRMVMRKKHHNTIVVAIARELVGYLWETLRIVAPART

SEQ ID NO: 195016 - protein, 346 aa, unidentified
MLHVGLDLSRKRVDVCLLSDGGELLGQFPAPVDRDGLYGLTSRVGVYGEPVRGVVESMNGARFVRDELTRYGWEVLIADAQKVKGLAPLACKTDKVDARVLAELSFRDLVPAVWLPTPEQRSEREQARFRLYLVKHRTSLKNRIHATLIAFGYPRQMADLFGVQGRRLLERLDIPEPWLSTLATSLALIDDLDRRISEIEQELRRSGADHEYVPLLMSAPGIGWVLGYTIAAEIGDIARFPTPVKLVSYTGLCPRVKQSGESDLRGPLSKHGPRYLRWALIEAALHASAHPHYTERYQRTKRRLGKQRGPKVAKIELARQLAEAIWHMLTRHQPFAPAGAGTHLAA

SEQ ID NO: 195017 - protein, 356 aa, unidentified
MSIVAHSHPFVVGVDTHARNHVFAIISTATGEVLETRAFPATGTGINRSIAWVARRTGADLGTLWVIEGAASYGALLAGAVGAAGYPVAEAARMDARAHRGIGKSDPLDAHRIAAAVLPLQEEQLRRPRLNDGIRAALRVLVTARESMTTDRTRAVNALTALLRVNDLGLDARKPLTGTQIAEVSRWRGREEPLAVSVARSEAVRLANRISGLDADIKANNAQITELVEISEAAPLLRETGFGPVTAAICLTAWSHHGRVRSEAAFASLAGVSPIPASSGNTVRHRLNRGGDRTLNKALHMIALSRMTFDAQTLGYVQKRQAEGRTKKEIRRCVKRYLARRIYRTLNATTPTPCHA

SEQ ID NO: 195018 - protein, 343 aa, unidentified
MERTDGIETFVGIDAHSQQCSIKAITRQGEELREVDVPTRGAALRKALKGLRRPVWVIVESSYLAPLMVDLIGGSVDRLIVCETRENRWISHSDDKSDQADADRLCRLLRMGEFKPVHVPSGHGRDRLEVLRMYQKAQGDVSRTKNRIKGKYREHGVTLHGKRVYGEVHRKDCLKQVARPQGRFLLEVLYQKLEAEERSCDDVLARLVELMRGDARYESLKEIPGLGKVLSAVVTAVIDDPDRFANKRKLWSYAGLGVRSRWSGDPSKAKVSGSKGGNRLLKYAAFTAATAALRGENRFSRHYRKMVAEGADPSMAKRTVARKILATALVLMKTGAAYEDDQV

SEQ ID NO: 195019 - protein, 340 aa, unidentified
MNPTTYGLDIAKRVFQMHWVEGESGEIVNRHFSKSELIEFLGHRVAGRVALEACGSAHWWARKIKALGHEVVLLHAKFIRPFVQNNKTDAADARAIWTAVQQPGMRRVAPKTEAQQAMLGLHRMRALLVKTRTMQINQLRGLMYEFGVVFKTGRKAGLAEIRQRIDEVEQAVPGLLFDALREQLEHIGQLDSEISKLEKRLAAWQQQDAACRAVEQIPGIGPLTAPALVATIGDPAAFKSGRELAAFLGLVPRQSGTGGKVRLGGISKRGDSYLRTLLIHGARTVLFRAKHKSKWWEDIVQRRPANVAAVALANKMARVAWALLARGGTYQRDYTSAKPV

SEQ ID NO: 195020 - protein, 387 aa, unidentified
MSKPNDLSKSLVALEQGSTMIAVIEMSQSNWLVGAMVPGLARDPQKKLAADEAALLALLERWRGEAEKAGAGITRIAVAYEAGRDGFWLARWLRARGIESYVIHPTSVAVSREHRRAKTDRLDLALLKRAFLGWLRGEEKHCSMAAIPSLAEEDAKRPNRERETLVGERTRLVNRMKSALARLGLRDFNPKLKKAPTRLESLRTPEGVPLPANTLAELRRDMERLALVNGQIKVIEAARLARLQAAPETDGHRRVRLLSQVIGVGIETADTLVHEILSRDLRDRRALARYAGLTGSPDESGRRRREKGLARAGNARVRRIMIQLAWRFLRFQSDSALAQWYRERTASGQRAIRKTMIVALARKLLIAFAHMVKTGLVPDGVVLRPAP

SEQ ID NO: 195021 - protein, 310 aa, unidentified
MENIVVGIDISKDQLDIHALPSQASFCVARDAIGLEELVQRLLVLKPKLVVMEATGGFETIVASTLAAAGFPLAVVNPRWIRAYAQALGRLAKTDRIDSALIAAYGRDAKIEAQKVPDEAAQMLGELVARRRQIVETMGVERNRRRSLTRSKLIKGLDRILAALQKELSDLEQDIDQAIRGTTAWREKDELLQSVPSVGPRISSMLIAELPELGTLTRRKIAALVGVAPMSDDSGKHRGRRHIKGGRIRVRCALYMAALVASRRNPVIAAYYQRLIAAGKKPKEALTACMRKLLVILNAILRDHRPWQPA

SEQ ID NO: 195022 - protein, 344 aa, unidentified
MEHYAGIDVSLELSSVCVVDATGRIVREAKVASEPEALIAWLRGLGLELARVGLEAGPLSQWLYAAMRDAGLPVELLETRHVRDAFKAMPVKTDRKDARGIAQLMRLGWFRPVHCKSVSAQETRALLTARKLLQTKRLDVEMSLRGVLRGFGLKVGPTTPRSFAARIRELVAGHPALTAVAEALLAAREVLGTQLRGLERRLRDRAREDERARLLMTTPGVGVIVALTYVAAMDDPGRFRSSKAVGAHFGLTPKRYQSGETDVTGRISKVGDAGVRTALYEAANVILTRPVKGSALKSWAARIANRAGLRKAKVALARKLAVVLHRMLVDGTPFVAERAAAAAA

SEQ ID NO: 195023 - protein, 422 aa, unidentified
MLDTMQIQSMEVFIMYNAVGIDVSKGKSTITIIRPQGVVIRKPFDVSHSAKELRNLTDFIVSLEGETRAVCECTGRYHEPVLKAFSEANIFISAVNPKLVKGMGENTLRTIKTDPADSRKIAKYALDNWAELRQYSSMDDTRTQLKALNSQYSFILKQRTAAKANLISLLDNTYPGVNKLFDSPARDDGSEKWVDYAYSFWHADCVRKIGLKAFSERYSAFCKKHHYCVRKNKAQELFEASKELVTVFPKDSTYKLLIQQQINQVNLLSGQLAAIRKEMNDLASTLPEYTTVMGMYGIGETYGPQLIAEIGDITRFTHREALTAYAGVDPGANQSGSRDQKSNRASKIGSSKLRKTLFQIMTTLLQNKPANEPVYEFLNKKRSEGKPYLVYMTAGANKFLRIYYGKVKAHLRELEQAQETAE

SEQ ID NO: 195024 - protein, 345 aa, unidentified
MNYVGIDLHKKTIVLCVMDQHRAVRHRGSFACGDTEAILAFVRRLGPFRAVVEATASYEWLVELIEPLAEKVVLANPKKLRVIAESTKKTDKLDAQVLAEFLARDMIPEAYRPSPRQREHRTLVRHRQYLRQRATALKVKMRRIVSDYNADRRDLFTAAGWQAALKGIKLRDGDRFVLDQLHAQWQGLEDQVRELKRRLQTFAAAAPPREAEARAKLETIPGVGPVTINVVLSELGSDVRRFASAKAVTAYAGLAPRVRQSAGKGKDLGITKEGSPLLRWALVEASWRVVHHSASWRRIYESIKKRAGGKKAIVAVARRLLCVIYAMLRDGTNYDLLRVGEPQPS

SEQ ID NO: 195025 - protein, 370 aa, unidentified
MLDTTTFIGLDVHARSIKAVSLDVMTGEVRAATFGYDAGAVAEWVRSVDPRARCVYESGVTGFDLQKRLSGLGVDCVVGAVSKMIKPSADRRRKNDRNDAEFLARMLSVGNVVEVWVPDDECEAARDLTRALEDARDDLSRAKQRLSKFLLRHGLAFDERTPTGRRKGNWTRAHWSWIESIRFAEGADNDVLAYYVDAVRRAAEEKARLEGLVEAEARKPRWRRRVDSLRCLKGVDTATAADLVFEAGEFSRFRNARSFAAWVGLTPSEHSSGESDRRGAITKAGNKHLRKALVEAAWHYLTCSGRPKDLAKGQAPDRVARRHAAKGVRRLVERREALLARGVHGNKANVATARELACWVWAVGLMAEEA

SEQ ID NO: 195026 - protein, 394 aa, unidentified
MKLIGIDIGKNKHFFCVMDQQTGEIISQPVSFSNDKEGFDFLVQKIKSYPKDSILIGMEDTGHYHFALLKYLLDLQYTVALINPKTTDFNRKMQGGITKNDKLDTINICDVLDTPERKKQYRITKVNSFDLYEQKQLTRHHHNLKEEENVYKNRLQKCIDIVFPEFNKLFNSKYGIVYMNILKMFGSAENIANTDIRTIRKCFEIEGRGNRISLTPERLKECTRSSIGISSSAEVIQIKHLTAQIELIEEQLTEIDKKIEEFSIQNNSPILSIPGISHFSGTSILAELGDISNYSKPSQIIKFAGVAPLHYESSQFNAQHTAITKKGSKYLRKTLYQIILPVIRHNPVFNKYYQLKISQGKGHRCAQGHCVRKLLRIIYHLLKTNQQFDPQLLR

SEQ ID NO: 195027 - protein, 341 aa, unidentified
MEQATTIGLDIAKHVFQVHGADGAGHVLFRKRVTRAKLLSFLAAQARCVVAMEACASAHYWAREIAKLGHHVRLIPPAYVKPFIKRQKNDAADAEAICEAAQRPSMRFVPVKTEEQQANGIVFRARDLLVRQRTQCVNALRGHLMEYGYVFPKGITHVETLVAVVEDLQSSLPDGVRVILKLLVDTFTALEAQITALDAEINQRSKSDPTARRLMTIPGVGPITSTAITALVPAAEGFRAGRDFAAWLGLTPLQKSTGGKQKLGAVSKRGERTIRRLLIIGASAVVQQASRRGAPKGSWLAQMLARKPKMLVTVALANKMARIIWALLVKGGTYRTPAVAA

SEQ ID NO: 195028 - protein, 374 aa, unidentified
MPTTSITKIAMDTHKKQHHVAWFHPKTGELQVFTVNNTVKDLAKMVKKLSKQAPGPVHFCYEAGVCGFTLKRRMEALGGRCSVIAPSLVPTARGDRIKTDRRDAKKLLGQFMAGTLTEVYPPSVEQEAARELTRCRQSVQEDLKRSRHRLIKFLTRHGYIYHDGRHWTQKHDRWLLSLAFDQTDLREVFDLYYAQVQHDQQRLASLDKQVAALAEREDYREIVGLLRCFKGIETLTAVTLMTELFAFGRFDSPRQLMGYLGLVPSEHSSGERRRPGAITKAGNGRLRRLLVESAWHARHRPRVGKGLQSRRQDQPPWAIDLADRAMGRLHKRYWRLMERGKNPNVVVVALARELAGFLWAMVRDYQVHQMDKTA

SEQ ID NO: 195029 - protein, 333 aa, unidentified
MHYVGIDHHRQYSHITILDEKGEMVRSGRVANFRRELEKFLQGTGKIKAVIEAGRSSYTMVDVLDDMGIETSVAHPRDVKAIAKAKVKTDERDSYKLAHLLRTGYIPEVYKRSRENRSSQRVLRQRAFYVGKQTSVKNRLRALLAQQGEEIRVEDLFTAKGMKVLTGLALPEREAKMVEALLKTYRHLQDRICETNALVDELYEKMPYARLIQSVPGFGVFLSVLVAVEIEDLKRFEDVSKLHGYAGVIPSTHSSGERSWHGKIIKEGHRWLRWAAVEAVWPALRADFDLRCYYDRMKRRKGANSAKVATARRLLTIIYRMLKENRPYIPYKR

SEQ ID NO: 195030 - protein, 374 aa, unidentified
MIVIGTDTHKKTHTCGAVDALTAAALGELTVPARKGSFGKLLRWARALDSERVWAIEDCRHVSGALERFLLARGERVVRVAPKHMAGARRSSRERGKSDSIDAFSVARAALREGIENLPGAHLDGAALDIRLLVDHREDLIAARTGDQQRLRWHLHDLWPELEIPAGALDTRKWLGKVSRRLARTQQTTRVRVARELVRQIAARTTRIRELESELAALVESYAPQLLAERGCGPLTAAKLIGEIAGADRFATDSKLARTGGAAPIPASSGNTNRHRLDRGGNRQLNCALHRLAVNKARCCPDTAAYLARKQAEGKTRKEALRSLKRHLARRVWRLLRSPAATEPAPAGTAIPKRPSTSETVTVEAAPYLMPCVR

SEQ ID NO: 195031 - protein, 339 aa, unidentified
MNYLGIDVSKAKLDCALLREAGTAKRLDKTFTNDAAGIKALLAWRDSKLSSKHNADANAASGKARVHVLMEPTGVYHERAALWLVEAGLTVSLVNPARLRSYAVAIGVVSKNDRLDSAVLARYGAAETPEPWQPPTLAAQTLNALLARREALCQDIQREQNRHEKTRFALNTPATVLDSIAQTLEFLNRQLGALEKEIDQHIDSDPTLKHNDQLLRSIKGVGPRVAQRMNALMSSHRFKSAEALAAYIGLTPCERLSGSSVRGKTRLSKKGPAQLRHLLFMPAIVAKTHNPHVKAIYARLIAKGKPKMSAIGAAMRKLVHLCFGVLHSGKPYSPEWKHV

SEQ ID NO: 195032 - protein, 370 aa, unidentified
MNNSITGYVGLDVHATSTAISFAAAGRAKPRFVGTVGAKCPQLAKALGQLGKPKSLVVVYEAGPCGYKLARELTDQGYHCEVVAPAKIPRSPGERVKTDRRDALQLASLARSGALVPVVVPDARDESVRDLSRAREDAVRARLKARQQLKALLLRHGRRYSGKTSWTAAHERYLATLTFEHPAQDIAFAEYRQAVAACQGRVERLTQALAQQVEQWRMRPVVYALMTLRGLDLVAAATLVTELGDLRRFARARDLMGYVGLVPSEHSSGAKRRLGAITKTGNGHARRILVEAAWNYRYPARISRVLQVRQEGQPAAVRDIAWRAQLRLCNRYRRLSLRQKTLCRAGGGTGLPLSLYPPGRYRQQPIAHPG

SEQ ID NO: 195033 - protein, 419 aa, unidentified
MVQEDDNSLVSVVHPICCGLDVHKETLAACLLITGADGRIQSEIKEFATFTDDLLRLREWLAVNDCPVMAMESTGVYWRPVHNVLEGQVTVILVNARHIKNVPGRKTDVADSQWLAGLLRLGLLKGSFLPPQEVRQWRELARLRKHYQESIADFKRQVHKLLESSNIKLAAVLSDIFGATGRLILERLAHQDGIPDLSDLERGAGRPLRHKTQELRRAVGGFFTAHHRFQLCLLLRSIRQLEGQLGEVLARLEEQLTSHQELRQRLQVVPGISQVASAGILAEVGPSLADFRSSDALSSWCGLCPGNNQSAGKRKSGRSPVRSHPLKTLMVQVAWAAVKKKGSYYKDKFHRLRYRLGPKKAIVAIAHRLLKAVYHIIKDGAAFRDLGEDYLQRRHHPGRLNHLKKQAQLLGYQLIPATA

SEQ ID NO: 195034 - protein, 341 aa, unidentified
MATAAIGVDTHKDTLAACLVDGLGIARDEQAFRNDSPRHAALAAWVRELETPVRVGIEGSASFGSALARHLVAAGFDVVEVPPQLSRRERTRIRRPGKSDPGDAFAIARVTVAEEHLPPVRLADRTRDLQLLAAARDAVVVAQTQARNRLHAHLVVLVPGYTATAARLVSGPELAAARRLLRGHHGVEADLARAEFDEVVRLGGRAAILERRLRSLVGDDPLLAIPGCGHLSAAVIRGETGDVTRFRSHDAFAMFAGIAPVPASSGKTRRVRFNRRGNRRVNRAVWTIATWQAKFDPRARTYLARKRAEGKRSKEAMRCLKRHLVRHVFAALVAGCQPAAN

SEQ ID NO: 195035 - protein, 370 aa, unidentified
MEKIVYVGLDVHADTIAVAIADDGRNGEIRFHGVIDNTADSVRRLTKRLVATNTHPTFCYEAGPCGYGLHRLLTKLGFDCAVVSPAMIPRRTGDRIKTDRRDAEMLARLWRAGELTPVWTPDEEQEAMRDLIRTRKQSLDALKIAKQQLQSFLLRHGLRYTRPTYWTKIHWRWINDLRKFRFPHQQLAFEELKRTIRQIEERISTLDKAIEDAVKDWRFGDLVDALRSLRGVNTTIAATLAAEIGDISRFENPRQLMAWLGLVPSEHSSGSTVRRGRITKTGNALARTMMVEASWSYRHPAREGQPYLMRCQHQPQEIKDIGWKAQTRLCKRYRDLSKTGKPQPRVLTAVARELAGFIWDIARHVPIQAR

SEQ ID NO: 195036 - protein, 424 aa, unidentified
MKVVYSTCCGVDVHKSFLVATIIKTSSGIEPSYQKRRFSTFNNSILEFKKWLLENECLYVCMESTGKYWIPVFNLLEDEINVTIANPKWVKAVKGNKDDTKDSKWIGDLFRLGLVKGSYVPCKKVRILREYTRYRYKLVSCRSSEKNRYQNALTVCNVALDSVVSDIFGKSSTSIIDYLLEQSGTSINHEEIASKLLRSLKSKEDAVIESIEGYQMTDAQKYRMRLIRAHMDYITAEINDVDKMIENMISSNPDFENAVQFLCTIPGVKRDSAITIISEIGTDMSQFSSSKRLCCWAGLTPGSNESAGKKKSVRITRAGVYLKPALVQCAHAAVKSDKSPYYKKKYESLVKRRGKKRAIIAIARMILTAIYQMLSTGELWNPSDLYKIDMPVALVEKQKAKAIRQAKKLLQREGLLPPDESLAS

SEQ ID NO: 195037 - protein, 429 aa, unidentified
MEEVEDVELVVERIAALDLGKAGLEACVRVPSPQRPGRRMQELRGYGTTTAQLLEMVAWLWQWRVQRVVMESTSTYWKGVYYLLEAEGFECWLVNAREVKNVPGRAKTDRADAIWLAKVAERGMCRPSLVHPTEIRRLRDLTRYRRALVQDRTREQQRIEKLLEDAQIKISSVLSELHGVTGRAMMEALIAGQRDPRALAQLAKGRARKKTEWLEEALRGFFTEHHAAILRMMLDNTDRISAQVASLDARIEEEIGPFSAQAARLAEIPGVDAVAAAELIAEVGVDMTRFPSDTHLVSWAKFCPQTHQSAGRSRSKGRGRGNPWLAGTLGRIAFANSRADTFLGARYRRLARRRGKQKAIVATGNSVLTVVYYLLSNPEATFCDLGPGYYESRINVHRRARDLATQLQALTGQHIVIRDGKAVITDAAA

SEQ ID NO: 195038 - protein, 349 aa, unidentified
MNKITRVGADLAKHVIQVHAVDAAGQRITSRALVPEKFMAWCAQLPPGCLVAMEASSSAHHWARRLIALGLDARIIAAHLVAPYRLQGKSGKNDANDAAAICEAASRPQMHFVPVKSVEQQSMLCIHRLREGFKEERTACINRIRGLLAEFGLVFPQQPAALRLALPDVMEDASNELGAQARLALQRALMQWQELDGHLAWCDERIAAHLKDSAQVRQAGQLLGVGPVTASAVVASVGDFKQFRNGAQFGAWLGLVPRQNSSGGKNHLGAITKRGDMYLRMLLIQGAKSAVMTAHRRDDPISMWAYQLRERSGWQKAVVALANKNARILWAVFVRGTPFDAHHVSVKPA

SEQ ID NO: 195039 - protein, 447 aa, unidentified
MLQEGMKAATWRELETNGKFTKNDKLTFISDDMLIIGCDIGSEMHYVRAIDSRGRELSQDAFPFSNSSEGFQSAKAWALELAAANDKHQIVLGLEPTGHYWFCLAAWMVSNDISVVRVNPYAVKQTKELEDNSQRKDDRKDPKLIANLVKDGNYGMPYLPEGLYADLRRLSMLRDQLTEDRIRNINRLHREMKIYFPEYRDAFGKLDGAFTLEALKAAPFPEDIVRLGVDGLKDIWHRAKLRGRGYSKADQIVQYAKESIGLEHGRAGGRKAVKIFAEQIESLSEALEEIEAELHQKCREIPYAENILEIRGIGENILAGILAEMGDITRFDDASEIQKLSGLGLVACSSGKHKGETKISHRGRKRLRYWLFQAAKSAVSHGEEFKELHAHYTTRKDNPLKKMQSLIVIACKLLRIIFTLLRTGCRYDPMKMLRDIKRPERAAAQAA

SEQ ID NO: 195040 - protein, 350 aa, unidentified
MTRYVGIDVGKARCRAALMNQKGIIEQEFFFENNQKGIEHLTSQLTCDDKAVMESTANLWLNIYESLDNKNIKVVLANPMKTKAIASAKVKTDKVDARILAHLLRADLVAESYVPPKQIREIRALIRHRLSLMKMRTMVKNKVHSLTDKYGYRCEFSDMFGVSGLKWLKSFEMGELDLLILENHLRHIEVINLQIDVADEAIKMRACEDEDVRLLMSLPGIDVRTALLLKSEIGPIERFEDYKKLVSWAGLAPRVHQSGDVLWNGGITRCGSGILRWAMVEAAWTAVRYDEKFCEFYGRVKARRGSQKAIVAVANKMLKVVWVMLVRRESYSGVNKELYEGKLNRSGFVM

SEQ ID NO: 195041 - protein, 361 aa, unidentified
MKKVIKQVLGIDVAQKELVVCLGRMHDDWTPELYANKTFANTSKGFLLVLSWIKKLTIPDLPVRYVMEATGVYHESLAYFLKDQGLQVSIVLPNKISNYARSLTIKTITDKTSSEAITQFGLERSLDEWKKPTPIYKRMRQLTRERDQIVLERTMVKNNLHAELSEAQPNETSLQRINKRIVFLDKQEKEITAELSELIKEDEKVSGYVNVLCSLPGVGLLTAATVLAETNGFDLIRNKRQLTSYAGLDVKEKQSGTSVRGKSKISKKGNKYLRKTMHMPALCAIRYDNRFKGLFIRLVSRHGIKMKAVVAVQRKLLEMMYTIFKNNEKYDKEYLKKQLAGDPAAGDPEQTQPENINKMAV

SEQ ID NO: 195042 - protein, 348 aa, unidentified
MNKNITIGMDLGDKFYIAVVFDGQGNELESSKVINTQSDISKFFGKYPSARVAMEAGTHSPWISRLLTEMGLTVYVGNPRKLRVIWDSTDKSDERDARVLGMVCRLEPKLLHPLRHRGRQAQTDLCMIKSRDMLVKSRTQLINHARGVVKTSGERLPKCSSASFADRCRALVPRELKEALDQIFETISHLSEQIKNLDRKIEQLSVERYPETQYLRKISGVGPITALCFVLTIEDPQRFGKSRQVGPFLGLTPKLDKSGTIDKQLPITKAGNEYLRRLLVGSAHYIMGPFGQESNLKRHGLSIAARGGKNAKKRAVIAVARKLAVLLHRLWSSQAIYQPFYGVKEKPA

SEQ ID NO: 195043 - protein, 410 aa, unidentified
MEVLHAHCAGLDVHKDTVVACVRHMVGGTVKREVKSFQTTTKEPMALSEWLSVEGCTRVAMEATGIYWKPVWHILADGEFELVLANAAHVKNVPGRKTDVNDATWLADLMAHGLIRGSFVPDEPTQDMRDFLRTRKQFVRQRSSSIQRIQKTLEDANIKLDSVISDIIGLSGRAMIEALIAGQSEPDKLAALAHRRIKASPAELEAALRGRVTDHHRFMLRLHLQQIDALNAAIAEIDRQVEANLEPFRTATTLLITIPGVSELMARTIGAEIGTDMSRFPTHGHLISWAGLCPRNDQSAGKRRSNRMRKGAPWLKTALVQAAWAAVRTKGCYLQAQFQRLRARRGAKKAIGAVAASILTAAYHMLKQGTFYNELGADFFDRSAKNSHAKRLLARLQNLGYDVQLTPINA

SEQ ID NO: 195044 - protein, 322 aa, unidentified
MSSAVSYLCRRMKGSTALVIIGVDPHKRTHTASVVETGTDKVLATLQIDASLAGYRRLLKWASGFEQRRWAVENARGLGRHLAQWLVAREEVVDDVPSTATARVRELSRGGRRKNDVIDAAAAASVAALRGDANPVVADDLTTVLALLDERRDNMVTQRTRLINQLHALLRDLLPGGAPTDLTAGDASRLLTGVRPAGPVEAARKHLARDLVTEIRDTDQRLKTLRTQIADILDAHGTRLRDVAGIGPVIAGRLLGRTRRAGRFRSASAFASYAGVAPIEVASGDHARHRLPRGGDRQLNLALHIVALTQVRMRESTGPTTT

SEQ ID NO: 195045 - protein, 350 aa, unidentified
MIIIGADYHPGFQQIAFVDTETGELQERRLEHREEAEKFYRDLGTQGATVRAGMEASGHARWFERLLGELQFELWIGDAAEIRTKRVRKQKTDRQDAQLILQLLLEDRFPRVWVPSWENRDLRQLLWHRHRMVQARVRIMNQLQAVALNEGLRCKKRLWRDAGREQLESFRLAPWASRRRRDLLELLDRLTPTITELTEAIEQEVEKCPEAQRLQTHPGVGALTALAFVLIIGRAERFQCSKQIASYLGLVPLEESSGQRRRLGHITKQGNSLLRFLLVEAAQVTVRSDPEWRRKYFHLAMRRGRKIAKVAMARRLAVRMYWMLRKGWDYEQLKKFGSHAGQLGTGDGVR

SEQ ID NO: 195046 - protein, 347 aa, unidentified
MYQDNVIALDLAKNVIQVCILDKQNQIKSNRELRRQQVLGWLAKQSPSVVAMEACGSAHYWAKQARALGHQPVLLSARFVKKFVEGHKTDKNDAIAIGIAVRQPSVKPVAIKSNDQLALQALEKMRQHYQDVAIATSNMVRAIVYEFGMVIPQGEKAFRERIPDILEDAENGLPMMLRVPLHQQYQFWISLKQQVREAEKQLRAQLKTHEQCNELQKLDGVGPVNALNLYLALGTRGEAFKNGREAAACIGLTPKQHSSGGKVVMLGISQRIAKKQLRANLIQGALAKIKVVAKRAPRNTREVWMKQLIERRGLRRAAVALANKTVRIAWAMVHYQQPYQAPESVAS

SEQ ID NO: 195047 - protein, 342 aa, unidentified
MYYIGLDVHKKTISYCVKDAAGKIHSEGKIGSTRRELDAWIKTLPQPRMMAMEATIFTGWIYDHLLPHAEKVKVAHPLMLRAIAAAKRKNDKIDASKIADCLRCDFLPECYMTSTEIRDRRRTLRYRGLLVKQMVQMKNRISGLLMETGVSYNKQRLHKVGYFTELMSGNEEIDCVRPLLKLSRDTINRSQKLDYALVSSLERDPLLAERLKRLRTVPGVGPITALTWVLEIGDVVRFQSIKQAISYCGLCGAEKRSADKVVRTPISKQRNKHIQQVLVEAAKLAPRYSHELALIYEKEMQRGNRNRATLAVARKMVAWMVAVERRKQDFVPAEKRGGTVAA

SEQ ID NO: 195048 - protein, 360 aa, unidentified
MQTKVNKNLFDGQSFYVGIDYHKKSWTVTIMGEQYEHKTMSQNPDPDLLASYLKRNFPGASYHAVYEAGFSGFESCRRLRELGIDCVVYHPADVPTSQKEKLQKTDPTDSRKLARSLRSNDIESIHIPDPQLEADRAIVRQRFRMMKDVTRTKNRVKSLLFQFSIDIPERFSAAQTRHWSKVYINWLKELPVQHENLRQTLDNYIRFGEYQRKELLMLNRQVRNLSQSDAYIDNFKLLVSIPGIGLMTAMTFLVQIGDIARFKSLDDLCNYVGLVPKMYGSGDKMQTGKMIKRGRKELKIMLIEASWEAVRLDPALMATFNELSKRMNKNKAIIRIARKLLNRMRSILLNKKQYELGIIE

SEQ ID NO: 195049 - protein, 437 aa, unidentified
MVTRVIGIDLAVKGKHTAAIYDPATRTFIAKRLHFRTCPDEMENVLQRARQGAPSDVQIAVMLEATGMSWFPVGLFFHRHGAKVYRLNGRATKAQRKVNWPNGRSDRLDSMTLASMYAALPSRRLIRWKPPSADLMALQRMVRELQRLVEHQTAIILRLQALDQWAWGGWHGLIPKPYQQWVRSNFYDPWEVLAHGTEALVALLRKDYPDAQVDWIPKWVARAQIMQALYANPETVGYKYLSDLSKRELEHLQWLSEQRTKLVEEEFLPLYRRLFPDDVLLSFQGIGERSAAIYHAFIGDVSRFPNGQAFAGWTGMVPRSNQSGESQSPHMPLSKRGPNLIKNTLYQNAEVARQWDVQLAKVYYTQMVKYGKHHTQAVCAVASHLARRIYAVLRDRKPYELRDLKGRPISKKDSRALILKEFQVPESLRKQRRKHRR

SEQ ID NO: 195050 - protein, 348 aa, unidentified
MEEYIAFDSHKRYTWVEREEVESGRTVSGRLEHARGAIRRYLAGCAPGTPVAVEATANWYWIVEEIEQAGLQPLLVHPRKAKLMRGLINKTDKLDAHGLNRLPRNGTLPVVWIPPEELRDLRELTRTRVVLVQQRTRLKNRLTATRAKYGLGVEASDPYGKRGRAEWESQLEQLPPQTRWVSQQLWAQLDFLTQQIEQVEERFEELIEMTPAMQWLLSLPGVGVILAATIALEIGDITRFPSAAHLASYSGTTPRVQASGGRVRYGRLRPDVNRYLKWAFAEAANSVAVNHLRQPPRHVSRLYRRLRERKGHAKAVGAVARHLAEAAFHVLSRQEEYRDPEAGRSSEV

SEQ ID NO: 195051 - protein, 423 aa, unidentified
MKTRLLNLTPSQTFSRSIGLDVHRDRIYVTELFILEGTYKQYEISTQEKEFEAFLATLRSDDQVALEATRGSNYYVRRLLTRVASVSVANTSKLPSSHAKNDRNDSYHLAFLLSIGMLPTIWMADKETQEDRELLHYRANLVQDQTRLKNRIRALLAEHGMNWDGSDIKSACAQRFLMRLKSLLSSASREVLANQLEQLDFLDTRLQRLEPIIQVRAARWPEVALLMTIRGINVLTAFTIMAIIGRMDRFPSADSLANYSGLVPRQYSSAGKSRLGKITKAGSKMLRWALTEAVQSLCKADGPYRNLCKRLERKKKGKGIAATACARKLLTAIWCMVTRGETFRQAEPKLTESKVQRREQRLKAARPFVEEQKKRHHQVIMSQLALVQALASRRALMPVPDQLLASLGRLSLPERAVAAMATG

SEQ ID NO: 195052 - protein, 346 aa, unidentified
MLYAGLDLSRKRLDFHLLDAEGATVDVGASPPDADGLAALSQRLERHGAPIRAAIESMNGARFVHDRLELHGWQVEIADAQKVKGLAPLACKTDRIDAWVLAELARRDLVPAIWLPDPRVRAERERARWRLHLVRHRSSLKQRVHAVLLTHGKPCPVTDLFGVRGRQLLARLELPEPWQGTIEASLRLIDELDREIGDCERELRRLGADHRYVPLLLTVPGISWVLAYTIAAELGDINRFPSPRKLAGYSGLCPRVYQSGESDRRGPLAKQGPRYLRWALVEAATHACTHPAYRDRYQRTKTRLGKQRGAKVAQIDLARRLAEAIWHMLSRGEPFAPKGATDPLAA

SEQ ID NO: 195053 - protein, 377 aa, unidentified
MIYVGIDIAKLNHFAAAISSDGEILIEPFKFTNDYDGFYLLLSKLAPLDQNSIIIGLESTAHYGDNLVRFLISKDFKVCVLNPIQTSSMRKNNVRKTKTDKVDTFVIAKPLMMQDSLRFMTLDYIELKEFDRFRQKLVKQRTRLKIQLTSYVDQVFPELQYFFKSGLHQNSVYTLLKEAPTPTAIASMHMTHLAHLLEVASHGHFGKEKARELRVLAQKSVSVNDSSLSIQITHTIEQIELLDSQLFHTELEMANLVTCLHSVIMTIPGIGFINGGMILGEIGDIHRFSELKKLLAFTGLDPSVHQSGNFQAQRTRMSKRGSRVLRYALINAAHNVVKNNSTFKAYYDAKRAEGRTTLQCPWTLCWQACQSHLEDAH

SEQ ID NO: 195054 - protein, 349 aa, unidentified
MNFYTNTHPYYCGIDLHTRLLYVCIIDNENNILVHEKIDDSPDKLLALLKPYLGNIVVGVECMHCWYWVSDFCEEHNIDFILGHALYMKAIHAGKTKNDKIDALKIAKLMRGGNFPLAHAYSKEHRSIRDALRRRTHIMRMSAQLKAHVSSTISQYNLPALESRLNLQNSPDREKMHHFFPDEAVQKSMDLNLNIIETMVSELYKIEHYVKTQAQTHRATDLHILKSFPGIGKILALTILYEVGDIKRFPSVQKFASYSRLVKCKAESAGKTHGTQGNKIGNAHLKWAFSEAAVLYLKGNDNAKRYLAKLQKRMSKAKALSALAHKIGRCTYFMLKNQQVFDEERFLNG

SEQ ID NO: 195055 - protein, 336 aa, unidentified
MLIIGCDYHPSFQQIAFVDTDTGELQERRLEQREEAEKFYRGLGVQGMKVRVGMEASGHARWFERLLGELNFELWIGDASEIARKRERKQKTDRQDAQHILRLLLKDDFPRIWVASWENRDLRQLLWHRHRMVQARTRIMNQLQAVALNEGLRSKKRLWREHGREQLESFRLAPWASRRRQDLLELLNRLNPTIAELSQAIEQEAEKFSEARWLMMIIGEADRFQCGKQVASYLGLVPLEDSSGNRRRLGHITKQGSSMLRFLLVEAAQVTVRSLPEWRSKYFHLMMRRGRKIAKVAMARRLAIRLYWMWRKGWDYEQVKKFGSHAGQLGTGDGVQ

SEQ ID NO: 195056 - protein, 359 aa, unidentified
MANKVILNQSLGIDIAKDSFSYCFCFLNSDLSKGFELGEDLSNEEKGFKTLEKRIKKSGIPKDSLTIVMEATGVYHEAIAYYLHDKGYRVCIMQSGRVKKYAQSLDQRSKTDALDSKMLSMLGCERKLTLWEPPSETMEALRFLSRERATIIKERSIEKNRHHAMTAARFEHKKAIRRFNKRMKLLNIQIAEIEKELQELISSDSVLKQKIAYLSSIPGVSFVSSITVVAETFGFSLISNSKQLISYCGYDVVLRESGNYQGKTRISKKGNKHIRAALHMPSMTAVRVNPTLKPFYERLKPKKAKPIVALVAVQRKMLILMYSLWKSNSYYDGEFEIKKAARKQILTAQDSHKNELVTS

SEQ ID NO: 195057 - protein, 366 aa, unidentified
MKKNSKKQTEKTETQASKTKRTVGIDLGDKYARYAVLEDGNDFIEQDRLPMTKAAFGSRFGHWKPARMAIEAGTHARWISELLRAMGHEVIVANPRELKALTQSAHKTDGEDARKLARYARADVGLLKPVQLRSEATQLELLKLQTRDALVRSRAQLTTTVRGWTKAFGANIRQCTTQGFALRAEQELPEALRCALQPVLDVIALLTELIKKADRQVEKMVAEHPVAARLDGVAGVGVVTAMAFVLTIEDPGRYRRSRDVGAGLGLTPRKDQSGDSDPQLGITKQGNGLLRRLLVQCAQQLLGPRGRDCAIRQWGLKLAGEGKNKRLKKRAVVAVARKLAVVMHRLWITGEQFVAFPQGQPAKVAA

SEQ ID NO: 195058 - protein, 347 aa, unidentified
MRFYTQQHRHYCGIDLHARTMYVRIIDQDGTILVEKNIPARPDPFLVLIAPYRDDLVVAVECIFTWYWLADLCHEEGISFVLGHALYMKAIHGGKAKNDRIDAGKIAALLRGGMLPRAYVYPREMRATRDLLRRRLHLVRHRGRLLAHIQNTNHQCNHDAFGAKLTYKANREGVAERFDDPSTRKSVEVDLALIGHYDGIIRDLELFIVRMAKQHDADMFHRLRSITGVGKILALTILYEVHDISRFQTVQQFASYSRLVKCSRESAGKRMGTGGAKIGNVHLKWAFSEAAVLYLRANPTGQKYLARLTGKHGKGKALSILAHKLGRATFYVMTRSRTFDGKKFLAA

SEQ ID NO: 195059 - protein, 377 aa, unidentified
MKRIKFVGLDVHAETIAVAVAEQEGEIRSLGVIPNREESVRKLVKKLGPVEQLRFCYEAGPTGYALYWQLTRMGAKCEVMAPTLVPVKAGDRVKTDRRDALKLARNYRAGELTAVWVPDAEHEALRDLVRAREAAKKDQLRARHRLSKFLLRHGRRPPVGATPWTVKYLEWVKRDVHFAVKAQEATLLDYLHEVEHMAARIVRLDSAIEEAVKVAPAKMRAVIEGLQALRGIAKISAVTIVAELGEVTRFSKARELMGYGGIVASENSSGERQRRGGITKTGNAHLRRVVVEAAWAYRHRPAIGFTLRKRQENLSEEVKEMAWKAQHRLHARYGKLMAKGKNKGVVVTAVGRELLGFIWAIGVQVEAQQKESLRQAA

SEQ ID NO: 195060 - protein, 463 aa, unidentified
MNIKGSKKKNQVLSVNIFEQQEIIAKADAIKAELKASTWHELETKVKFDKNDKLSFVSDDMLILGCDIGSETHYVRAIDTRGRELSKSAFGFSNTAEGFESMLDWSTKLAAANDKKQIVLGLEPTGHYCFCLTTWLVAKGISVVQVNPYAVKQTKEVEDNSQLKDDKKDPKLIANLVKDGNFGMPYLPEKLYADIRRLSMFRDQLNEDRIRNLNRLHREMKIYFPEYKDAFGKIDGAFSLELLKEAPFPDELAALGTEGMKQIWHETKLRGRGYANASSILEYARKSVGIKDGADAGRQAVKWFVSRIIELDEQLSDIENQLNQKCNEIPYAKNILAISGIGENILSGILAEMGDISRFDNVKEIQKLSGLGLVACSSGKYTGETKISHRGRKRLRYWLFQAAKSAVAHSEEFKKLHVYYTTRKQNPLKKMQSLIVIVFKILRVILIIFCMEGRKIKALILGE

SEQ ID NO: 195061 - protein, 338 aa, unidentified
MQLYAAIDLHSNNSVLAVIDENDALKVRRRLPNDIAAIRAALEPFREQLVGVVVESTFNWYWLVDGLQESGYTLHLANTAAVPQYCGLKHGDDDSDARHLANLLRLKILPEGYIYPREQRRLRDLLRQRQRLVQKSTALMHSVQALFSRLTGSGISANGFRDLDHAQLERMLPHPLDRHAALAPMHVWGAARQQIEAIEAVVREDMRGRSDLVKLKSAPGIGDILGPTILLETGPIERFASVGDYASYSRMVGSKRLSNGKKKGEGNRKCGNRYLAWAYIEAANYAIRYYPQVRHWYDRKLSKRHRVVALKAVAHKIARGCYHALRDQVPFDIKLAFG

SEQ ID NO: 195062 - protein, 344 aa, unidentified
MKIKLLGIDLAKNVFQLCALNQANKVLFNRTVRRAQLLSTIVKLEPTTIAMEACSSAHYWGRTFEAMGHKVLLVPAQHVTPFVRGGKSDARDALAICEAAQRPGLHLVPIKSIDQQDIQLLHRLRQRQVQHSTALANQIRSLGREYGVIFPTGIKSLISHLPEALEDGSNELSPVARYALADQHRCLIEVRQAMKAFLLQIEQLAGQHPTYANLLPLPGIGPMTASAYIAAIGNGNQFKCGRQVSAWLGLVPRQYGTGGQIQLKGISKSGDRYLRTLMIHGARAAITRGLKKSPELTQWVQPIIDRQGFNKAVVALANKMTRICWVIVTTGEAFDMKQAFKPVT

SEQ ID NO: 195063 - protein, 358 aa, unidentified
MTLKHTQPDFTGQHIYVGIDVGKKKWIVCIVTQFSEHKVFTQAPQVSILAKYLHRTFSGATYHCVYEAGYCGFWIQKQLQEHHIDCMVVHPADVPTKHREKAFKTDRIDARKLARALRNGDLEAIYVPSRQAQEDRSLVRLRYMTVKDQTRCKNQIKALLSYYGIDLPQEIVGSHWSKNFLKYLDSIRMERATGDAVLKTQLAKLLSLRQFLVSITKQIRALAQDNRYCQSVAYLISAPGISTLTAMILLTELVDIHRFKTLDDLAAYCGLVPGEHSTGEDEIITGITSRRNPFLRRILIESAWVAARKDPALIMAFNTLAKRMPKNCAIVRIARKLLNRIRFILLHQQPYQSSVMAA

SEQ ID NO: 195064 - protein, 391 aa, unidentified
MIFIGIDAAKDKHDCFIVSSDGEVLCDVFTISNTLDGFNDLLSKIKSFSKDLSKTKVGLEATGHYSYNLLGFLLDNGLPTYVLNPLHTNLYRKSLSLRKTKTDKVDARTIASMLMSCQSLKPYTRALYHNEELKSLTRYRFDKVSERAKLKTSVSRLITILFPELEKLVSQVHCVSVYALLSEFPSAKHIANANLTRLTNLLYSASKGHYNRDTAIRIREAARNSIGSVMPAKSLELKHTIKLIGELDDEIIEIEAAIKQIVDSLGTTILTIPGIGYATAASIIAEVGDFSNFETSDKILAFAGMSPSTYQSGQLTNCYAHMEKRGSKYLRFALYNATKYVCKWDSNFAAYLAKKRSEGKHYNVAISHAAKKLVRLIFALEKSRLPYMPVA

SEQ ID NO: 195065 - protein, 341 aa, unidentified
MWIIGCDYHPRFQQIAWVNTEGGECGQRRLEHVGEAEQFYRALQGQAVRVGMEASGHARWFERLLAELGFELWIGHPAAIRAAAPRKQKTDARDAEHLLRLLLEGRFERLRIWVPGAEERDLRQLVLHRHRLVEMRTRVKNQLRAVALNEGVGRKPGLWSRKGQEQFQALVLPAWTARRRQDNLELLEELVRRTDPLDQAVEQEAARRPEVVRLRTHPGVGPITALAFVLTIGDPTRFQCAKQVASYLGLIPAEDSSGGRQRLGHISKQGNALLRGLLVEAAHSAVPRVPELGRWYRRLAMRKNRSIAAVAVARKLAVRLWWMWLRGLDYGQWRESGSHAG

SEQ ID NO: 195066 - protein, 423 aa, unidentified
MDVIHQRVAGLDVHKETIVACVRITADARVSRECRTFATTTAGLQDLLAWLTASGCSHVTMEATGVYWKPVWNILSDGDFELLVANAAHIKNVPGRKTDVNDATWIADLMACGLIRGSFVPDQAFQELRTLLRTRKQLTREQTRHVQRLQKTLEEANIKLDSLISDVMGLSGRRMIEAMIAGERNPQKLAALADRRIKASPKALYDALHGRLTDHHRFRLRLHLAQYDVLAAAIEAVDQEVDAAIDQMDETMKAGQAFFRSLIRLLSGIPGVNTLSAATILAEITPDMTRFATAGHLVAWAGLCPGQNESAGKRKSSRLRKGAPWLKTTLVQCATSAVKKKDSYFKAQFQRLKSRRGPQKAICAVAAAMLTTIYHMLKDGTQFQDLGAHHFDRRPPEAKARHLVAQLTKLGYTVQLQPLAEAA

SEQ ID NO: 195067 - protein, 367 aa, unidentified
MKKVSTAAAKQSSNFSQQKLTIGLDLGDRSSWYCVLDEAGGVLLEQKLSTTPKAMKEVFGAMPRSRVALETGTHSPWVSRALSELGHEVIVAHARNVRLIGESRRKDDRLDAQTLARLARVDPQLLCPVKHRSARAQADLTVIRARAGLVRARTALVNTARGLAKSYGERLRGCNVRNMNPEKADGLSPELQTALQPLLAGIELLSEQIREYNERIERLAQESYPQVQLLKQVKGVGTLIALTFVLTLEDAHRFRKSRDVGCYLGLQPGRRNSGQREPQMHISKEGDPYLRTLLVQGAQHILGPFGADSDLRRWGLKLAERGGRNGKKRAIIATARKLAVLLHRLWVSGEVYEPLHNSSRVAVPAAA

SEQ ID NO: 195068 - protein, 370 aa, unidentified
MLNSITTHFVGLDVHQATIAIAVADPGRGDPRVMPTIPNDFKTLIKSLKRLGDLAHLVCCYEAGPTGYGLYRQLKKAGVRCVVIAPSLVPVKSGRRIKTDRRDAAKLAGYLRSGDLTPIHVPDEATEAIRDLERSRDDAKRAERVARHHLSKFLLRQGRIFTGATRWGKPHTGWIAGQTFEHPASQHVFSDYREAVELATARVERLTLRLREVADAWDRAPLIKALQALRGVEMVTSVTLVAEIADFRRFASAAELMSYVGLVPSENSSGSSRRLGGITRAGNGHVRRILVESAWQYRRPPGMSKALRARNEGVEPEVRAIAWKAQHRLHSRLKKLLARGKPANQAVTAVARELVGFIWAIARTEVLMAK

SEQ ID NO: 195069 - protein, 421 aa, unidentified
MTPTSHDTFAAFIGIDWADAKHDLCLQAAGTAQRERFQLEHTPEALDAWATTLRTRFNGQPVAVCLELDKGPLVSALRKYDFLVLFPINPLTLARYREAFTPSRAKDDPTDAELQLELLLTHRDKLQPLQPQSPTMRALAQLVEHRRRVVGDKVRITNRLTSALKNYFPQVLQWFQDKDTRIFCDFLSRWPTLKAAQLARRSTLETFFRDHHVHTADVLATRLHAIKTATPLTTDEGVIAPNTLLVQTLVSQLRVTLDAIEAFDHAIAQRAQHHPDFPLFQALPGAGPVFASRLLVAFGEQRERYASAAALQKYAGIAPVTERSGKKAWVHWRLQCPKFLRQTFVEWTAESIRHSFWAQVYYQQQRDKGNTHQAAVRALAFKWIRILYRCWQERTPYDESTYLQALTRRGSSLLQNLAKVS

SEQ ID NO: 195070 - protein, 425 aa, unidentified
MRNSITIVSLDVHRDSIVGGALPPDVDVIQDEKRLAFNLSKLVKWLRRLEGKWGEIEVIYEAGGCGYVIYRELTSLGIRCLVIAPSLIPIKPGERKKKTDRNDVRRNALAHRAGNLTMVCVPDQEDEALRSVMRLRRVLVKDKTRSRNQICSHLLRHGQVYRAGNNWTTAHWDWLKALSLPLSDEQFSLDRYVEKQQLIEGQLSEVEHRIRERARTAEHVDRAARVMCLKGLDVIGAMVLTAETGDFLRFAEAKKYMDWVGLVPGIWQSGESCKGLGITKAGNSHCRHVLIQAAWSIVRNHPTASQKLRIRWKGQPAWVLRLSVRAMKRVHHRYWHLIHRGKEKQVAIVAAARELAGFVWAIMQPPEIANCRPTERGNRRAGPKTVRHAAFPPEGKGGGKSSPTPPSADPKAERRTEVGSTELLV

SEQ ID NO: 195071 - protein, 413 aa, unidentified
MTTKQKPILHIGIDWATQKHDVCIQCPDGSRKFIVIDSSPESIDEWVTDLRNKYKCHIHAAVELCRGPIVYALQKYNFITIFPVNPAMLAKYRETFYPSGAKDDPTDAEFALDLMIKYPNKVKPLKLASDPMRKLSFLVEQRRRLVDDRRRFSNRLINTLKQYYPQLLTWFSHRDTKLFMDFIMRWPSLQKLQRSHENTIRKFFHSHGGNAVTLAEKRIDLIKKSTVLTNDNAVLESHELLSTTLARQLQTVISSIRDFDIEIEKIYKEMPDAELFNSLPGTGACLAPRLLVAMGENRDKFNTASEVQMYAGIAPVTERSGKKCWVHWRWQCSKFLRQSFIEWSEKSVSRSFWAGLYYNQQRAKGSSHQAAVRSLAFKWIRILFRCWKSQKVYSEAKYLQALHDRKSPLITNI

SEQ ID NO: 195072 - protein, 334 aa, unidentified
MVMQLLAIDLGKQSFHLHGIDADGVVVSRKVSRGKLMELVAGLDAQTIAMEACASAHYWGRELQAAGRQVRLINPRFVKPFVKGSKNDAADAEGIFEAATRPTMRFVPVKNIAQQDLQSLHRVRDRLVGQRTSLINHSRGLLAEYGIVLPQGPWRFAQQAPAAIAAAGLSELARALFADLLDQLRDVNVRLESLDARIVAICRANTACRGLAKLPGVGPIIATALVASVDDGRQFRNGRELAAWIGLVPRQYTTGGKPRLGGIGRRANHYLRRQMIHGARSVISRLAQHDDARSRWLKALVERRGVNRAIVALANKTARIAWALLARGEEYATA

SEQ ID NO: 195073 - protein, 312 aa, unidentified
MIQEGYGGIDVSKDRLDVMVLPERQFFSVENSTAGCGELVQRLRGWSVATVGLEPSGGYERGVIRALLAAGLSVRRINPNKLRQFARARGVLAKNDHLDARLIAEYVAIMPTRVVQCDPVTERLAEVVTMRRQLCDEHVAVENQTAHLEDAMLRRLNKRRLARLEADILLLDRRMAEIVASNASLARRYELLTSMRGVGPTLAFTLIALLPELGQMGRKQIAALVGLAPYDFDSGRLKGHRCIYGGRLPVRNVLYMAALSACRYNPALTAFHLRLADANKKPKVRIVAVMRKMIVILNAMLRDNVAWQPNST

SEQ ID NO: 195074 - protein, 411 aa, unidentified
MESKLVIAGIDVHKRMLAVVLVEADNPQKELERRKFATGTRALDACAAWLESQGVSVAVMESTAQYWKPVWLALEGKFLLHLAQAQSNGAPRGRKSDFVDALRLARRFLAAELKLSYVPDEEQRGWRCLARSKHQLRSQRVRLQSQIEALLEESRIKLSSMVSDLLGATGRRILGALVKGETDAEKLAALAANNVKASREELADALRGPMQPAHRKVLGMWLEQVEMIDRQIVDLHLELGKALRGHQEPIARLCEIPGLKEDAAQQIIPELGPGAAVFERAAQMASWIGVCPGREESAGESTSNRSPKGNRTMRRLLNQIAWGAVRTKDCFFKELFHRLVPRLGVHKAIWAVAHRIAKVIWKVLHDNVRYIERGPRALDPQVMKRRVTALARQMRKLGYTVELKPLAGTTE

SEQ ID NO: 195075 - protein, 390 aa, unidentified
MIYVGIDVAKDKHDCCILGPDTEELFQVFTIRNNSDGYGELFHKIESVSKDKSQIKIGLEATGHYSYNILGSLLDHGYHTFVINPLHTNLYRKGQSLRKTKTDKVDARSIAEMLVTDKTLKPYTGTSYHSEELKSLTRYRFELVKERAKLKTSVSRLVNILFPELEPLVPTLHINSVYRLLQELPGAYFIASSNLTHLKALLADASKGHYGREKAIEIRETAKSSIGSLMPAKSMELRQTIRRIDTLTSDIKEIEQSIQKIMDECGSPITTIPGIKYRMGAMILAEIGDFTRFSNADQVLAYAGLSPSTYQSGKLISSYARMEKRGSKYLRYALFNAAIYASAWDERFRLYLSKKRAEGKHHYVAISHVVKKLVRTIFRMEITHTSYQPL

SEQ ID NO: 195076 - protein, 405 aa, unidentified
MDIIVERGAGLDVHKGTVVACVMGTGIKKEIRTYRTMTNDLFRLKEWLKENRVTHVAMESTGVYWKPVFNVLEDSFKVMLVNARHVKNVPGRKTDVQDSEWLCKLLRSGLVRGSFIPPKPVRELRDLTRYKRKLIQTITSEKQRVEKILEDANIKLSSIASDTFGASGARIIQELLKGELEPEEMAELSKGRLRKRKEELKEALVGNVEEHHKRMIRTSLGHIKAMEEILFSVEQKIQENIEHHFKEEYELLKTLPPMKDNASVIIAEMGVDMDLFPTDGHLSSWAGMSPGNNESAGKKKPGTTTHGNKHLKTILTEFAWIASKMKGTYLWAKYQSLVGRRGKKKALVAVGHKILIMCYHILKSKVPYKELGPNYLDVRKKDRIAKSYIKRLANLGYAVTLQEVA

SEQ ID NO: 195077 - protein, 383 aa, unidentified
MLKTPTLTPVDYDTALVLALEISNKSWVVAAHVPGIGQVKAKQVIAPNANALEAAVERYRGRAAASARTVERVILVYEAGYGGFWLARWLEARGIGVHVIQPSSVPVERKKRRAKSDTIDAELLLRTLLAWLRGEPRVCSMVPIPDEDQEDERRRSREREELLGERISITNRIGAVLTTLGINGFKPLRKDRRAQLEALRTPSDQPLPEHAKAKILRSIDRLELVMAQIAALEDQRDAVVVKEDPGAAEKMIQALVLLRSIGAQTATVLVYEAFVRQFCNGKALGSYAGLTGTPFNSGGSEREQGISKAGNQRLRATMGELAWLWVRHQPESALSKWFRERLGGAKGRMKKALIVAMARKLLIALWRYATLGVIPEGAVMKPV

SEQ ID NO: 195078 - protein, 420 aa, unidentified
MKEYNVDDFAALIGIDWADKKHDICEHPKNTEQYHYTVIKHKPEALQKWAMDLKWRYPDQKIAIVCELKKGPLIYALAKYDHLVLFTVNPSAVANYRKAFTPSGAKNDPTDAFIQVEMIKFHIDKLSVIVPESTSMRALAQLVEYRRSLVQDSVDLSNKITATLKNYYPQALEWFKEKDTFIFCDFISQWPSLTAVKKARKQTLLDFFNRHNSHYETVNNARLLSIKAAVPLTEDEGVIAPNQLLVEVLIAQFKVLLTGIEQLDKAIKQLYKKQQDKAIFDSLPGAGPQLAPRLLVAFGHNRERYTDASQMQKYAGIAPVIESSGKKTWTHWRYSCPTFLRQTFVEWAGFSIRYSFWAKAYYEQQKSKGKPHNSIIRALAFKWIRIVFRCWKTNTPYDESKYLEALKRRGSPLLKFAINS

SEQ ID NO: 195079 - protein, 351 aa, unidentified
MYYAGLDLHKKYFTLCVLTSEGQVVTDHRRLPAALEPLTTILRELEGPITLTVEATLQWAWLHDRLAEAGIPVVVAHPQQVKRISQARCKTDPIDARKLAELTRASLLPAIWVPTPEIRAWRQLLRGRAALVRWRTRAKNRIHGALAAENLRVAATDLFGAAGRAWLATAPVTPATRRQITVQLAMIGALDEQIAGYDGEVKRLAQHPEARRLMTIPGIGPFGAALLVAEIGTITRFHSAAELAAYAGLVPSTRSSGDKTSHGGVGVANNHWLKWILIEAVQTLKQRPGPVQFHYDRLLRAKGKPKATVAAARKLCLYIYWMWHNGLDYATWLQAEAKRMGCSKRTLASPA

SEQ ID NO: 195080 - protein, 346 aa, unidentified
MKHSVGLDVSVKETAICIVDEAGKVVREGKVATEPQAIIAFLSSAGVEYARIGLEAGPLSQWLVNGLSEAGLPVICVETRHMKAVLKAQQVNKSDRNDARGIAQMMRVGLYKPVHVKTLASQQARMLLSSRKLLRDKLQDMENELRGTLRNFGLKVGVVSPGHFEARIKELVAGQPPLEMIVVPLLTVRRVVREQLAKLDKMVLDQVRDDKLCRRLMTVPGVGPIVALTFRATVDQAQRFARSKTVGAHFGLAPRRFQSGERDYDGGASKCGDAMMRTALYEAAQVLLTRTQTWSWLKAWGMQVARRRGAKKAIVALARRLAVVMHRMWVDGTEFRWRKEADTAAT

SEQ ID NO: 195081 - protein, 349 aa, unidentified
MKVTTLGIDLAKNTFQLHGIDQRGVAVLRKRLTRQQLVPFLTKLSPCLVGIEACGGAHFWAREISRLGHQVRMMSPHLVRPYRKSSKNDSNDAEAICEAVGRPSMRFVPAKSQAQQDIQAIHRIRAQLIKWRTALANEIRGLLAEYGIVIAKGIAPLRRILPGLLAQEENGLSGLFRDLLAEMSERLRLVDQRIKHYDQQVERVFRHDERCQRVAQIQGVGSLTATALVAAVGNAHEFKSGRELSAWLGLVPRQRSSGGRERLLNISKRGDRYLRMLLIHGARAAVRTAERRKDPQALWISKLKTRRGPNVAAVACANHNARVAWALLKRGDTYRTRVVPATSRLSIQR

SEQ ID NO: 195082 - protein, 345 aa, unidentified
MELFTLGIDIGKTTFHLVGMNQRGVVMVRKRFYRNQLLQFTANLKVELIGMEACGGSHFLGRALREQGHEVRLIPAQYVKPYVKTNKSDYIDAEAIAEAVGRPTMRFVPIKSDDQLDLQSLHRVRERWIMRRTAVVNQIRGLLLERGITLRKGRRYVDEALPRILADPATKLSGAVLVLLTELKLELAQLAEKIDRADQSMAQMAGENEACRRLVTMPGVGPVIATAIIATIGNGAAFRKGRDFAAWLGVVPEEHSTGGKQTLWKIPLRGNQYLRKLFVQGARAVMQHRTKQSSGLSAWLEQLTARTHHNIAIVALANKLARMAWAVLAKNEVYRPPLLARTATI

SEQ ID NO: 195083 - protein, 381 aa, unidentified
MIDGEGAVIIKPFSFTNNCSGYNRLLAMLTKAKLPLDEVSFAMEATGHYWLALFTRLQKEGFRVQVINPVQTNSIRSFYIRQAKTDPRDALLIAEVIRFGHFSESTLHPENIYELRELCRGRHAIVSMQADVKRKVVALLDQVFPEYETAFTNLFGDTSMAILQACPTPKELSEMPLEALCHLIEVSSHKRFRMAKAQELQELARNSFGFAMAGDVFSTMIRLYAKHLDFLKQQVREMDRKIAEIMEALDTPITTITGIGPTLGAYILSEIGDISRFSSAAKLAAYAGIDPTMRQSGEYNGVRNRMSKRGSPYLRHAIWLAASSAVLHDPALKLYFQKKRDEGKPYMASVGHACRKMVSIIYAVMRDNKAYTPYIPNEISA

SEQ ID NO: 195084 - protein, 410 aa, unidentified
MRSIGLDVHRDFCEVAIITDGVVASAPRVPTTPHDLFSFAKNLRPTDQIVLENTSNARAIAAILEPHVARVAIANPLAVKLIAHARVKTDKIDARVLAQLLAAGFLPEVCFGDEDTRALRRRVSRRGALVKQRTAAKNEIHAVLMRTLTARPPATDLFGVRGRAWLARQLFAPDEQETVAGCLRQIDMLDSEVAVMDQALATIALGSSVIRRLMTIPGIDMLTASALASVIGDVSRFPTSRHLVSYLGLNPTVHQSGIAPARMGRISKAGSSVARWALVEAAWTASKAPGPLHAFAQRIGARRGKNIAAVAVARKLTVLAWHMLSKGQDYAFARPSMVATKVRKLELTSGAKPKRGVRGTTYASDAMIAKERAIVAQAEVAYTRMVSDWKATRPAGEKKGAGATTGARIH

SEQ ID NO: 195085 - protein, 421 aa, unidentified
MKHPTEDRFAAVIGIDWAHAKHDLCLRAAGSEVLERSVLKHSPEAIDDWVRELRKRFGQGLIAVALELDKGPLVYALQKYEGFVLFSVNPTTLAKYREAFTPSGAKDDPTDAELALQLLLRHPEALKGLEPQSPSMRALVQLVHDRRRLVSDKIRITNRLINALKNYFPQPLEWFRDKDTVLFCDFLTRWPTLKHAKRARRSALEAFFHEHNVRRSAVIDGRIRAIRSALPLTEDPGVIGPQSLLIAVLVAQLRTVLLALERFNAAIAATTEQLPDYAIFSSFPGAGPIFAPRLLAAFGEDRERYQRCEELQKYSGIAPVTERSGQKSWVHWRYRAPSFLRQTFVEWAGETIPRSFWAKAYYQQQRAKGLSHQAALRSLAFKWIRILFRCWQDRTPYDEAAYLMALQRSGSPLLKNLTASS

SEQ ID NO: 195086 - protein, 328 aa, unidentified
MCTLGIDVSKNKIDLCLLTAGPGGKKKHKVLTNEPAVARKVVDWLNAQKCVPESVTVVLEATGIYHENLAYGLHEAGVSVCIANPCRVREFAHGMDILNKNDAVDAFVLACYGELKSPAAWVPPSPEVRKLRALLRQRDALREDVQRTVNRLEKANSTSTPQEVIRSLERMKSWLNEELARIEKLITDHTDNDPGLKADLDLLKSIKGVKDQVGREMLALLKDGTFKSASQVAAYLGLTPVEKTSGSSVRGRPHMSKTGPSGVRAKLYVAALTASRWNKQAKAIYERLVAKGKAKKAALGAVMRKLVHLCFGVLKTRLPWDENYVATA

SEQ ID NO: 195087 - protein, 410 aa, unidentified
MEALLSRCAGLDVHQENVVACVLYGEPGQKVNKQIRTFGTTTKALLALSDWLLKMEIRYVAMESTGVYWKPVWNILEEEFELVLANAQRIKHVPGRKTDISDAQWIAKLLLNGLIEASFVPPVDIRNLRDLTRYRRSLMQMATAQKNRIHKVLQDANIKLTSYMSNVFGVSGRLLLESIMNGESLTLEQVRRLIKTKLKVKAPKLVDALNGKVRAHHRELMRRQYDLLLVLEDNIGEIEAKIDHSVQAYKEELGLLVTVPGIDQDAAAEILAEIGPDMTRFPTAAHLASWGGLSPGNNESAGKKKPTRTLRGDKALKSILCQVSWAAARSKKTRLSAYYYRLVKRRGPKKANMALAHLILRMIYSMLKKKEPYRELGPDYLPKKKSNAEYHQRQLEKLLGYEIEIHEKTA

SEQ ID NO: 195088 - protein, 348 aa, unidentified
MNALHYIGFDVHKKTISFCVKTAAGEIVEEGSLLAQRAVLRRWASARPQPWRGALEATLFSNWIYDTLQPYGEQLEMAHPAKMKAISAGKKKSDTIDARTIADLVRCNLLPACYVAAPQIRELRRLLRYRSLVVSEAVRMKNKMAGLLMETGALYVKEKLHRKKYFASLLEELEEVPESVIDLLRLSRGALEMFESTQKRLVRELLADPELAERVERLMTIPAVGEITALTWALEVGDPQRFRSSSDAMSYCGLTAALKSSAGKQQRGPISKQRNRWLQTTLIEAAKLAPRWNPQLAALQARELERGHRNRATLAVARKLVAYLLAVDKSGQPFQVRAPSEVPTQKAA

SEQ ID NO: 195089 - protein, 339 aa, unidentified
MNKITTVGVDLAKNVFHVVCCDAQGKIVKKKQLKRYQLKAYFAQLPACLIGMEACASAHYWGREFRQWGHQVKLISPQYVKPYVRGNKNDYNDALAIAEAVIRPEMRFVTIKTIEQQDIQALHRLRERRIQDRTALCNQLRGLLAEYGLILAQGVNVLRRSIPDFLEDAENGLTPFFRTLLAQGYEQLQQLDAHIEAYTQMLNVHSQQHEACQRLQDIPGFGPIVASAFYSAIGNGSGYRRGRDASASLGLVPRQHSSGGKDTLLGISKRGDRYLRSLLVHGARAVVSRAANKEDRLSRWINRLVAQRGFNKAVVALANKLARIGWAVLAHNTVYQAAK

SEQ ID NO: 195090 - protein, 406 aa, unidentified
MDKPSVETAVLKTDRGGKRLYFVGIDISKFKHDCAIVDELGDVITPSWSFQNDYEGFSLLRELLGALDGEKKIGLESTGHYGQNLKLFLENNGFSFMEFNPLLINRFVRSKSLRKTKTDSIDALMIAQYMMTVEYKPYPPSFYTLEKLKSLTRFRDTLIRQRSRQMVELTNILDKVFPEFKPFFKGRFSATALYILSHYASPEKISNMNSKSYEPLRRLSRGRFSMVDFVELKTLARNTVGSAHDYLLQEMEITIDIYDQLQSKVEEIELQINDCVLGLAPPMLTIPGIGVASAAVILAEFGDLSKFSSPSKLLSFAGLEPGYFQSGISESTGKMVKHGSSHLRYAIMNCAQTVINNEPTFAVYYAKKRAEGKEHRVALTHVAKKLLRVIYTLQTKDLSYNPDLVR

SEQ ID NO: 195091 - protein, 335 aa, unidentified
MNNNKYSVGIDISKSKLDICVLEGKKVILELCIENTSKGLTAFKRQLQKMNVLPDNALICCEHTGIYTSNLVEWSTEYGYNLWIEKPIQIKKSIGLQRGKNDKIDAYRIATYAFRYQDEARIFERPRKVIEELKYALTMRRRLINIKKQLQVPLKELSGYIPKKQEKAIFSDCKKSLKGIEHDIKKINKKIEQIINQDDKLSKSVKFASSVAGVGTITAASIITATNELKSVRSGKELACYVGVVPFTYQSGSSVRGKNKVSHFANKPLKSLLHLGALSAKTHSEEFREYYERKIAEGKHVMSVINAIRNKIVRRIYACITNQRIYEEEYSKILA

SEQ ID NO: 195092 - protein, 316 aa, unidentified
MKTVTSQNINVGVDTGKQSLDIFIRPLDVYFTVTNDEKGVKEAISLIKKHCPQRIVIEATGRLELLFVMACAKANLPFVVANPVHVRRFAGAIGLNAKTDKLDAQLIAHYGEAIQPKLSTLKPESMRLMADLVARRNQILNMQTMEKNRLQIMPKGLHSTINPILTAYKNQLAKIEKQLVKLIESCPDYQEKNDIVQSMPGIGKVSAAALIGYFPELGYVSNKQAAALVGVAPMNRESGRYQGKRTIKGGRPQVRTVLYMAMMSAMQCNSVFKRTYQALLAAGKPKKVAIIACVRKMVVILNSMVRDGKKWEENMA

SEQ ID NO: 195093 - protein, 343 aa, unidentified
MKLFVGLDVSLEKTAICVISEHGKIVKEAQVASEPKALSCWICDQDGAIAAVGLEAGPLSQWLHRGLSDAGLPVVLMETRQVKGALKAMPIKTDRRDAEGIARLIHLGWFRPVHCKSVSAQEVRAVLSARKAVQQGFITLEMSLRGLLRNFGLKVGTISRGRFEQRIRELAAGNPMLEAATEPMLRARAALRRELAGLERNVRQLSQEDPVCRRLMSMPGIGAVVALTYRSAVDDPARFTSSKKVGPWVGLTPSRNQSGERDISGGITKAGDVNLRRALCQAATVMMHRGRASWLRTWAAKLARRRGAKRAMVALARRIAVILHRMWKDDTDFRFDIPVLHAG

SEQ ID NO: 195094 - protein, 410 aa, unidentified
MEVLYAVCCGLDVHKARVTACLRAPGDGPQRRQEVRTFGTTTRELLRLADWLSAAGCTHVAMESTGIYWRPVYNLLEGRFELSLVNAQHVKMVPGRKTDVRDSEWLARLLELGLLRRSFVPPAAPRELRDVVRYRKRLIEERAREANRVQKVLETANIKRGSVVTTVLGVSARAMLKALITGEGAPEQLADLAKRRLRRKRAALGEALTGRVTAHHRFLLDHLLRHIEFLDGAIAVCDRQVETRTAPDADALARLDTIPGVARRPAEVIAAELGCDMSRFPTAGDAASWTGLGPGNRESAGKRLSGRTRHANRTLRQALVESARGAVRKRDSYLAAQYRRLVKRRGDKKAIVAVAHSILVIAYHLLRDGTSYRELGGDYFERLNADRLTRYHTKRLAALGYAVTLTKCAA

SEQ ID NO: 195095 - protein, 392 aa, unidentified
MIYAGVDIAKMDHVIGAVDETGAEVARPMPFKNSEAGFERCVAWLESVAESEDGVFVGMEAAGPNWMACFAYLTAAGYRVCVVNPMQVHAMRKLKSLSGVKNDRIDSWLIAETLRQGDYDETRLATDEVQALKQLTRYHQGLKQELAAVKTQAICVLDAYFPEYAALFSDMFGAASLKVLAECPTPSEVARKRASSIAKLLSEGSRGRLGDAKAAEVKAAAKSSVGIRLGEEAASFQIRTMVSQVEFLNATIAKVEKEVASLLARVEPDITTIPGVSTTTGAQIVAEIGDVKRFRNAASIVKYAGLNSGVDESGKYSAEGVPITKHGSPYLRRSLWLAANRARQYDPRLKEYYDKLRRKGKPHRVAVTAVARKLCHVVYAVMRDGKPYDPAK

SEQ ID NO: 195096 - protein, 370 aa, unidentified
MSAKTLAAKRRRKNEGKDEAKEFPNDAAGHRELLKWIGRGARLCMEATGVYHLQLALMLVAAEVEVMVVNPRVAKDFGRALANRSKTDRIDAGTLLEYVARMDFVAWKAPSSAVMELRELGRRLSELVHAGTEEKNRFHAKNVAAISRAVISDVQAHVAQIEKRVTQIEKAAALVIRADADLREQFEILTKVPGIGRRSAILLLSELAVLDPTMTVKQIVGHAGLDPREYESGSSVQKPPRISKAGNAHLRAILYMPALTAIRHDRGARLFFAQLVARGKKKMQAIVAVMRKVLHGIWIVLQRRVAFDSSVLFAVSLAKAESSDSAVAANQPEPSQDHPKGRSEAEELRQQLDPGSAQATRSRKKRSKAA

SEQ ID NO: 195097 - protein, 316 aa, unidentified
MKTKTETKAAPAYVGVDIGKAGLDVSFPGQVPCRYANSAAGITELIKVLGKLPGSQVVCEPSGGYERDLLESLWAAGLAVSLVHAARVRSFARAQGRLAKSDPIDAVVLREFGELLRPGTLAEPSPERERLAAFVQRREQLVNILSMEDQRLTQTRDSVVRKMSERLLKALETQIEEMDELIAAHIAADATLKSQSERLQQVQGVGPVTATTLLAELPELGTLSRNESAALGGVAPYNNDSGEHRGRRTIRGGRVKVRRVLYMAALVATRFNPILKTFYDRLVAAGKPKKVALVAVMRKLIVLLNHVLKNPQFTLA

SEQ ID NO: 195098 - protein, 341 aa, unidentified
METDIIIGVDLAKNVFQVHGANRSGAVLFRKKLSRPQFMKFMTAQPGCLVAMEACSTSYYWARTLSDAGHDVRLIPPIYVKPFVKRHKNDAADAEAIVEAALRPNMSFVEPKSADKQALSMMMRTRDQLIDHRTATVNALRGHMAEFGLIVPVGIKNIERLQELVAADDALPSLVSEMASIHFEQIIELTRQVDRLTEKIKTYSRSNATVRRLQTMPGIGPIGAMIIETFAPDMATFKRGRDFAAWLGLIPLQKSTGGKSRLGQITKMGQKDIRRALVIGAMSRIAGYARQKSRAEPWLQDKLDRKPKMVAAIALANKMARQIWAMVTKEAAYKPRVVAAA

SEQ ID NO: 195099 - protein, 465 aa, unidentified
MAGKHEIESSEGSRRQLQGLPVIRRNVAGIDLGSERHWVCAPTPDGSGREIASFGATTAELIRMAEWLKARRAESVAMESTGVFWIAPHEVLEAQGLQVLLVDTRQLARVPGRDKKTDPTDCEWIQRLHSCGLLRGSFRPEEAVCMLRTLVRDKANLVAARGDWLRRMQKSLDQMNVRVHRAVSDIDGVTGMAILRAIAGEERDARKLAKLRDRRCSKTEQQIAEQLSGHWREDHLFSLQQALQMYDAVEERIAAYEKEILRKLGEMERDEQRGQTAPPLQNANNANKIKNRGQEPMRQALYRMSGVDATHIDAIGVETLEVVLSEYGPDLSRFPTEKPFISHVTLAPHVPTSGGKPLRKRKRNSASTRVAAALRMAALSLPHSQTALGAYYRKMAQRLGGDIAVFATARKLATLIYRLLRWGQPYVDEGAKAYETRYRQQRIGRLAATAKQLGYQLAPLNASIA

SEQ ID NO: 195100 - protein, 475 aa, unidentified
MNSTVLPASVQPNIDCNYIGLDVHSDNVVVCVRRNILKVGGELQGKTIKLKKVSICDSQDSLTQLLSEYADGQQHVMTAESTFNWYWLADIAEEHGWNFRLADSCTVSQANIKAANDETDAQYLAERLRMGSLKSTTVLPRALRGARDLTRHRMRVMQEVSEKKIRLSNLYHNHCAHPLHGKQLQDLQFAYEENGIDAVLASGISGNGSELIIADLLAGLHDAQMRLERIEAQVYERLDQIDTYREGRLLLKNSMKGCGDVLSAVIITEIGDISRFRTMGEFVSYCRLAPASKLSNGKSKGQGNAKNGNAYLSWALTELATLMARYNKSIQHYLERKVKKTGLRVIGIRALAAKLARCVYQVLRKKEAFDLLLAFGGSHPQEPSASRAKTEESSQRKTATKSSETKVTGMTRTVVTDKKKIPGKKPALAVTQTQRLKSAVGQKTASVASRLKAPCALTTTKPAYADRGCVKSRRE

SEQ ID NO: 195101 - protein, 427 aa, unidentified
MADVMIGIDPHKSSHTAVAIGLGEERLGDLQVRACPSQAGQLLAWAQEWPERAWAIEGAAGLGCLLAQQLVAAGERVLDVPPKLAARVRLLATGNINKNDPNDARSVAVAALRSATVREARRDDHAAVLKVWSKRYQDLGRARTQVACRLHQVLCELIPGGVAKEITAGQAAHILASVMPADAVAAARWELAAELTEDLRGVDAAIRQTRKKAAAAVRAAGTGLTGLFGVGPVIAAAVIGDVRHVSRFPGRDHFAAYNGTAPIEVSSGGRKVYRLSRRGNRRLNHAIHMVAVTQIRYRHSPGRAYYDKKLAEGKTGKEALRALKRQISDAIFACLQADAKRAAAACAKSPGGQPGNHSSSRAAGSHPDHRLFGQATPGPATHPTTPAAPFPAPLPSRASGRTGQGPGAARPRSGARRASSTRPRASR

SEQ ID NO: 195102 - protein, 316 aa, unidentified
MTETETYVGIDVSKARLDVAVVPGEQTWSVSNDDDGITALVDKLKRLTPKLVLLEATGGLERRVLARLVGGGLPAMAINPRNVRDFAKSLGKLAKTDRIDAIVLGRFAQAVRPELRPIADEQSQELQTLLTRRRQIVEMITAEKNRLFTTDLPATRRRIKEHIEYLQKELNINDYDLDQSIKQTPIWLEKIDLLESVPGVGRVTASTLVALLPELGALGRKQIAALVGVAPFNRDSGTLRGRRVIWGGRATVRAVLYMAALTSARCNPAIRALYRRLKAAGKPSKVALVACMRKLLTILNAMLRTRAPWRSPEIPA

SEQ ID NO: 195103 - protein, 374 aa, unidentified
MTQTSCSLSHPIALDYENTLVLAIELSNASWVLAAQVPGLPRVKAKQTIEPRTEALLAAIDGYRDRSRAVGHNVERVVAIYEAGWSGFWLARWLARHGVETHIVQPSSVPVDRRARRAKSDGIDAELLLRTLLAWFRGEPRVCSMVPIPDEADEDERRGVREREDLVAERGSLVNRVDAVLATLGVRDYNPLRRDRRARLEALRTALGDPLPPHAHARIIRILDRLELVCAQIAELEQKRDAVLEEEAPDKAKEMIRQLAGLRGIGIQSATVLVREAFVREFANGKALGSYAGLTPTPFSSGATEREQGIGKAGNRRLRTVMVELAWLWQRYQPGSAQVIWFRERVGGAGRRMRKVMVVAMARRLLICINSDLV

SEQ ID NO: 195104 - protein, 334 aa, unidentified
MKEGIIKQNVGIDVSEEDIKAALSSLTLDYQVIVRSTRTFANTQIGFKELQALVNGKKDSTKVIHLTLEATGVYYESLAYYLYEQDFMLHVVLPNQAKKYGQSLGIKSKTDGIDARVLAQMGLERELRVWQPISPALLGLKQLIRERDALVRIRTTASNHLHAYCHQGKPNKDSIARSEEHIAYMDGQVKQIEKEITEFVNRNEKLKDRMAYLLSIPGVGLLTAATLVAETNGFAAFESIKQLTSYAGLDIRITESGKGKGKSKISKRGNSHIRKALFMPSLSKIRSDQTSKLFYQRLKAKKGIGMVAVVAIERKLLGLMFSLWKKEEMYRSAS

SEQ ID NO: 195105 - protein, 422 aa, unidentified
MLEETQDTEELIERVAALDIGKAELVCCIRVPGEGKRGRRLQEVRTYTTMTRSLLVLADRLGELGVTRVVMEATSDYWKGPFYLLEAHGFEVWLVNAKDVKHLPGRPKTDRLDAVWLCKVAERQMLRPSFVPPPAIRRLRDVARYRADLVGVRTAEKQRVEKLLEDAHIKLSVVASDIFGVSGRAMLAALIAGERDPKVLAELARGRMRAKRSVLEEAFTGVFTDHHGFLLARMLGRVDGLDADIAELDHKLEELIIPFTAAADRLDEITGVGRTAACAIIAEVGVDMGRFPTPGHLASWARFAPGVKQSAGKTKGKSSTGHGNPYLARVLGEAAAAAGRTDTFLGERYRRIARRRGAKRAIVAVGRSILIIIWHLLADPDARFHDLGAGFYHTRINPERAKRNHIRQLEALGYKVTLQPAA

SEQ ID NO: 195106 - protein, 313 aa, unidentified
MAKPVSQITLGIDVAKDELVIADWDTGEVTTLINEPLAIKRWIGSLPGPVRMALEPTSHYHLALADRAQAAGHRVYLVNPRQLAHYREAVGERHKSDPRDALLLARYLAHEAPKLRLYEPQSAAARELWTLLTRRATAVESCKRVRQSFLGTGISIQALRSEYRKVLKRIDRRMEALIDACGWQQSYQFCLSIPGIGPSNATALVAAFHRGAFSSQDAFIAYLGMDVRTRESGTYKGKRKLTKKGPSELRRLLYCAAIAGRSYEPFARYHQRQLDKGLPKIAANCILARKLARLAFVLMSRQENFKKEPLPID

SEQ ID NO: 195107 - protein, 365 aa, unidentified
MREQDKGGRITIGLDLGDRRHRFCALDKEGHVLQEGTLGNTRECLSELSCRYGGALIVMEAGCHSPWISRYLEQLGCEVVMSNPRKTRAIYQHERKTDRRDALMLAHIARMEPALLYPVRRGSEQAQQDLLRIKLRDSLVRARVGVINSLRFTLKSLGYTIANPSTERFHKVIEGRIPEPVGRVIAPSVRALEELSLQIKFLDREIIALARSKYADTAWLEQMPGVGPVTALYFVLKIQDPARFDRVRDVGAFIGLCPRRNQSGENDPQLRISKRGDAYLRRLLVSAAQYILGPFGPPSALRQYGLALATGGTPRAKKRAVVAVARKLAVLLLTLWKNESAYQAFPAHNGEKLRTSDLERLRCIA

SEQ ID NO: 195108 - protein, 344 aa, unidentified
MKVTTVGIDLAKNVFQLHGVNEFGKTVIKKQIRRDQMAEFFVNLPACLIGMEACGSAHHWARKLQSFGHTVKLMAPQFVKPYVKTNKNDAADAEAICEAVARPNMRFVPIKNIEQQAVLALHRVRQGFVKARTAQANQIRGLLSEFGLIVPQGIGYIASRVPELIEDASNELPGSFRLLIQRLLDHLKELDRQVDEIEAQIVKWHRQSDASSKLAQVPGIGPITASALVASLGDAKNFDGGRQVAAWLGLVPKQHSSGGKQNLLGISKRGDTYLRTLLIHGARSVIYRAQHRPESCGWINGVVIRRNKNVAAVALANKNARIVWALLAHDREFRSDYAAAKAAP

SEQ ID NO: 195109 - protein, 344 aa, unidentified
MEVMIGIDPHKRSHTATMLDRRQRELRRITVRAGRRQVVELLAWADGMRPRTWAVESAGGMGYLLSQQLVAAGETVLNVPATLASQVRVLSTGQSTKNDPNDARSVAVAALHAPSLALVRPADHVTVCRLLAKHHSDLARWRNKLCCRLHALVAELVAGGISKEVVVNQARSLLEGIEPDDVAAVERHRQAVELVDEIDHLETVMRDSRARITTAVAASGTTLTEIFGVGPIVACMLIGFSGDPLRFITSSRYAAYTGTAPVEFSSGGRITHRLSRRGNRRLNHALHIAAVTQIRHHHSTGRRYYERKLAEGHTPREAIRALKRRLSDIAWRHLVADARRVTAR

SEQ ID NO: 195110 - protein, 343 aa, unidentified
MKISRVGVDLAKNVFQIHGADAHGNTVWKRKLTREKWIEAICTRAPDGCEIGMEACAGAHHWARRLSEYGYQVKLIAPQFVTPYVKSNKNDANDAEAICEAMSRPNMRFVKAKTVEQQDIQAIHRVRSEIMSQRVAKMNQIRGLVSEYGLVAPKQVCALRKALPLWLEDAENGLTDRFRHLLSDLWCDVKYLEERLSNLDAEIKVIAETDPMAIRLQQLRGVGPLVATALIASVGNGEQFTKGRQMAAAIGLTPKQFSSGGKDRLLGISKRGDAYLRTILIHGARSTIGHAKHREDRLSIWVTDLAKRSHTNVAAVALANKTVRMAWAMMRNETDYDPERAAA

SEQ ID NO: 195111 - protein, 417 aa, unidentified
MDALLNVVLPICCGIDVHKKTLTACLLKTGASGEPIKEIRTFRTVTAQLQELARWLQQEGCRPVALESTGVYWKPVHNVLEGAGREVILVNAAHIKNVPGRKTDVKDAEWIATLLRVGLLRASFVPPKEIRELRDLTRYRTQVVRQRADECNRIQKLLEDCNIKLASVASNVLGASGRDMLHALTEGVDSPDVLANLARGRLRDKIPQLEEALRGVMSETQRWLLREQLHKVSELDEAIRRLDAKIGELCLPFAQALALLDQIPGVSQRTAQVIVAEIGLDMSRFKTPAQLASWAGLCPGNRESGGKQKSGRVRKGNRWLKAALVEAGWAVAHTKGTSLRTTYDRIAGRRGGKRACLAVAHRILRMAYVLLRDRQPYREEGPDYYRPADKDRVKDKLVRRLQRLGFVVEVRPEQPAA

SEQ ID NO: 195112 - protein, 367 aa, unidentified
MSSVASPEGLIHLGMDTSKNTIVVATLLPGEENPVTDRVFNEEEAIRRLVGRFPDRSVLRAWYEAGPGGYDLYRLLTSMGVACQVVAPSLIPKGGSDKVKTDKRDSRRLARLGRAGELTPVRVPSPAEEAVRDLARARAVVLDDRKRARQRLTAVLMRHGRIWRGATYWTAAHRAWIAAQRFGEPALAAAIGYYRATLAVREAELAALEAELMPWAAREPLAGPVARLGCYRGIAELGALTLAAEVVDWRRFPAARAFMSYTGLVPAEYSSGERTRRGHITKAGSEPVRTALTEAAWSCRHAPAIGAGLRRRQAGAAPDTLARSWTAQRRLHDRYVHLVHHGGKAAPEAAVAVARELAGFVWAEMTA

SEQ ID NO: 195113 - protein, 370 aa, unidentified
MKEYSEAFIGFDTAKKKHAVAIADVGREGEIRYLGEIDSSPLTIERMIRKLAGRYEKLHFCYEAGPTGYGLYRQVRGLGHDCTVVAPSLIPKKSGERVKTNRRDAVSLARLFRAGELTSVWVPDTVHEAVRDLVRARETASQDLRRKRQQLLSFLLRHGRIFSGRQHWSRAHLRWLAQQKFDHPAQQIVFQDAVDAIDDAAARLRRLDAQVAAIVPSWSMAPVVEAYQAMRGVSFAVAVTFVAEIGDLRRFDNPRQLMAFLGLVPSERSTGERVRRAGLTLAGNKRARRVLIEGAWSYRYPARVSQTLQARLEGLPKAVREIAWKAQIRLCARYRRLNAAGKKLPVVIAAIAREMAAFLWAIARHVAPAA

SEQ ID NO: 195114 - protein, 355 aa, unidentified
MDSKKYIGMDVHKESISIAVMNGAGKIVMECVIETKASMILQFIDGLRGEVQVTFEEGTSAAWLYDLLKPRVTKLVVCDPRKNASMREGNQNDKIDARRLAELLRLNHLNPVYHGEHGLRSLKELVRSYLTITKDLGRVMSRVKAIYRSWAIPCTGKQVYAARHRAEWLGKIGEPGVRRRAEFYYQQLDALRTVRQEVRRELLAESKKHQAWKRLCQIPSIGPIRAAVLLGILQTPHRFRTKRQLWTYSGFGIETQSSADHRRVDGQLQRARKQISIRGLNRNCNHDLKNLFKGAAIVASSKPGPFQQFYAALLTKGIRPEMARLTLARKIVTIVLIVWKRGACFDAQHLKPQAA

SEQ ID NO: 195115 - protein, 325 aa, unidentified
MTNETREPVYVGIDVSKDSLEVALADKAASVRFVNDEQGVKALLEHLAGHNVAVVLLEATGGLEKRCAHALYLAGMTVVVANPRQAHEFAKSMGYLAKTDGIDARILSHFARTLHGSERFDKLQLKMATPQQEQLQALVTRRSQLVQMRVAESNRLALAHALSAKSIQAVIKLLDKQIKTLDEDIGNRLKQHFAQKLKLLEGFKGIGEGTKAVLMAALPELGQLNRREIGKLVGVAPLNHDSGKMRGKRSVWGGRADVRSALYMAALSAVRFDPTIKAFYERLRAAGKPPKVALVACMRKILSILNAVIKSNTAWEQRCPQASTA

SEQ ID NO: 195116 - protein, 345 aa, unidentified
MNILKQTIGIDVSYKSFDARFGTINTQQQISLSSSKSFNNSPAGFKLFLRWIKSLILSSDIPLIFVMEATGVYYEHLAHFLLEHGYHVAVILPNKIRNYAKSLESKSKTDPLDAAVITSFGLERRLSLWTPPSETLKALRDLCREYQCLKANCTQIKNQLHALNVSFKPHRESFKRKTLLLKFLERQIVLIKKELRALVKTDSTLELRFKQIKTAKGLGDITILTVLAETRCFELVTNQKQLASYAGYDIVFNDSGLKKGRTSISKKGNTFIRKALFMPALSACRANPKMKELYLRLVSKGKNKKLAIIAVARKLLLLIYTLWKTNSPFIPDYKPLQSVPEGFSS

SEQ ID NO: 195117 - protein, 308 aa, unidentified
MLLNEEHFIIDNNEDGFIKLNKWIEQHNLDKALLWLVFEYTGIYCANLCKYCTENKIAYTQVAALEIKKTMGITRGKNDKVDAQRIAEFACLKRHKLMLSTPVNNAIEDIKRHMTLREQLVKQRAGFMSTVKEYKHALSLKNVALEISIQQELIEVLTLKINAIEAHIKAILKQHLEIQKNYKLLISIKGVGFVVAIYTIIYTHNFTKFNNGRKFACFAGIAPFEHSSGKKIMKSRISHLANKKMKALLNQSAIIAIQHDTELRQYYQRRIEIGKNKMSTINVVRNKIVARIFAVIHKQKEYEIKIAA

SEQ ID NO: 195118 - protein, 399 aa, unidentified
MLAVGIDISKSKSVAAILNQDGSMHTSPFEFHHTQPELDAFIKYILNSNQSATILMENTGHYHYPVLKAFQEAGLPVCIVNAYQIKKFGDMDLRKAKTDKKDAVRIARYALEKSYSLVPYTSMEQKYEDLRFLARQYNQRMLTLKTNKVFLLNLLDETMPGITNILPLTSRTPETSLSVLFINRFKSYDRIKKMGKSRFLDAFEKIARKSRNRQTKTYGLAIYEAALRNITTRGENEYILAAQDQCLELVCESQKAADSIILKMQTLAETLPEYAVLRSMAGVGDRLGPLILAEIGDIRRFHSGKALNAYAGNDAPPYQSGTFESHNRHISKRGNAALRKYCFEVMQALKLTQPQDDPVYLFLLKKEQEGKPYNVAKMAGVNKFLRIYYARAMETLKQQ

SEQ ID NO: 195119 - protein, 404 aa, unidentified
MQERTAGLDLASEQHRLVIVDGDGGELEQRRIGHTEPGIAALVRRLLELRVARVAIEQPNGIVVDRLLDAGIAVVPVHPNQLAAARERYRSGGGKSDGFDAYVLAELARTDMHRFRLLEPDSDETKALRALTRSREDLVEQKVALANQLRAQLDAFWPGAKWIFADVDSPIALAFLERYPSPADARALGERRLAGFLARNGYCGRRSAAELLARLRSAPEGRAGEAEQEARRVVVLALVAALKPLVEQIKLLTSQIGGALRTHHDGDIFLSLFRDPKSVVTAAELLAEIGDNRQRHPTSASLEAIAGQAPVAVQSGKKKVACFRWACNKNLRSAISVLADSSRHHNPWAADIYQRARSRGHDHPHALRILGRAWLRIIWRLWQNQTTYDPHRHGSLNRLLTAQG

SEQ ID NO: 195120 - protein, 423 aa, unidentified
MDVVHQRVAGLDVHKETIVACVRIMVDAKVSRECRTFDTTTAGLQDLLAWLTASGCSHVAMEATGVYWKPVWNILSDGNFELLVANAAHIKNVPGRKTDVNDATWIADLMACGLIRGSFVPDQAFQELRTLLRTRKQLTREQTRHVQRLQKTLEEANIKLDTVISDIMGLSGRRMVEAMIAGERNPQKLAALADRRIKASPKALYDALHGRLTDHHRFRLRLHLAQYDVLAAAIEAVDQEVDAAIDQMDETMKAGQAFFRSLIRLLSGIPGVNTLSAATILAEITPDMTRFATAGHLVAWAGLCPGQNESAGKRKSSRLRKGAPWLKTTLVQCATSAVKKKDSYFKAQFQRLKSRRGPQKAICAVAAAMLTTIYHMLKDGTQFQDLGAHHFDRRPPEAKARHLVAQLTKLGYTVQLQPLAEAA

SEQ ID NO: 195121 - protein, 410 aa, unidentified
MAYKVAGIDVHKKVLMVVVLDSSEPDAEPERRRFGTTSSELRRLSNWLRERGVQQAVMESTAQYWRPVWYELEPHMNLQLAQAFSNRAPRGRKHDFRDAERLVRRLLAGELILSFVPEPEQRAWRTITRMKVQLTRDKSRLQSQLEGLLEEMRIKLSSVVSDLLGVSGYRILRALAQGETDPNELAALGDDRLRCSEEQLRDALSGDPKPLHLRLLALYLDRYRMLVEQIVQLDGLIAAALKPHQEAVLRLAAVPGFGPDSAQQVIAEVAPDAGTFPSAAHLASWVGTCPGEESTAEENYSSRSAKGNKYMRRVLNQAAHAAVKKKGSHFQAVFRRLLPRLGYQAAIWAIAHRLCRLVWKILHEGVVYVEHGVELSAKAKRRRTQQLVRTLRKLGYEVNLKPIAPAFAPA

SEQ ID NO: 195122 - protein, 367 aa, unidentified
MKQQTSAATETKIKGRNIIDFSGKTICVGIDTHEKDYQVAKVINGICLGNHRMKANHQELIEHLRSHYPGATFRCVYESCAWGFTLQRRLQQAGIECIVVHAADVSTTDKEKRRKTDKVDALKLAHDLESNHLKAIYVPDEDLQKERNLVRFRKRLKGDLIRSKNRLKSLLKYQGINIPAQFGKGCWSYKFMNWIEEEAKKDFLLQDTLLLMLEQIKSLRQLLLKTERALRKLMQTRYNEKAALLMSAPGIGRTLAMLFLLEVGDISRFKGFDPLNDLIGFCPDTDSSGDTVRDRGITTRRHKQLRSGLLQAAWRAIRIDPALMEAYQQLIKRMKPHQAIIRIARKLLRRMRAILISGIPYQKGLIA

SEQ ID NO: 195123 - protein, 346 aa, unidentified
MLYAGLDLSRQRLDVHVLDEGGRTVEVTAVRPDADALRTLAAHVLRQGQEVSAAIESMTGARFVHDTLERYGWDVAIADAAKVKGIAPLAAKTDKIDAWVLAELARRDLVPEIWLPTPEVRAERERARFRLHLVHHRTALKNRIHATLMTFSHPVSVADLFGLAGRELLAGLALPEPWTTTLSTSLRMVDRLGAEIDACEGDLRRLGADHPSIPLLLTIPGVGWVLAYTIASEIGDIGRFSSPKKLTGYTGLCPLVRQSGNRDVRGPLAKNGPKYLRWALIEAATHAARDAHYRERHERTKQRLGRQRGTKVARVDIARKLAEAIWHILTKNEPFAPAGPAMLLVA

SEQ ID NO: 195124 - protein, 324 aa, unidentified
MCDAIVGIDVSKETLDVNCARGQRKQAKVFANTPEGWKLVLSWLRAMGSKQAHVCLEATGRHSLGVALALHDAGHVVSIVNPAQIRDFARTKLGRNKTDKIDAVLIREYAALFSPQPWKPPSPAMRRLCELQTVRAGILRNRAEWQNRIASGLGDSTATQLAAMTIDHFTAQLEAIDRAIGETIDQDAELCSRRDLLLSVTGVGETLAGVLLAEMPEPGALRRSGQIVAYAGLNPSHYRSGSSIDRPTRISKIGNATLRSALYMPALSAMRFNPAIAALVARLKSAGRLKPKQIVVAAMRKLLVLCFGVLKTGKRFDPAIAMPA

SEQ ID NO: 195125 - protein, 365 aa, unidentified
MSSVPSAAELIHLGMDTSVKEIVAGVLRPGEEVPVISRIAGDEESVRRLVGRFPDRRLLSACYEAGPGGYELYRLLTSMGVSCDVVAPSLIPKGTSDRVKTDRRDAIRLALMHRAGLLTPVRVPSPAEEAVRDLVRARADLLDDRKRMQQRLNAMLLRHGRIWHGSKWTYEHRAWVDRQVFDEPALAETFALYRGALDAREAELAAAEATMAAWAGRDPLAVPVARLGAYRGIAQLTGLTLAAEVVDWRRFACARAFMGFAGLTPTEYSSGGRSRRGHITKAGPEAVRTALVEAAWAYRYRPAIGVTLKRRQAGQPPETLARSWKAQLRLHAKYKKMTARGKPPGVAVVAVARELAGFVWAEMTT

SEQ ID NO: 195126 - protein, 430 aa, unidentified
MAPINGECMMDKERRWFVGIDWAAQEHVVSLYDGAGNKIGQRKFSHGGTGLTDMIAWLLKASGGEPGEIHVGIETPHGPIVEALLERRFNVYSINPKQLDRFRDRFTVAGAKDDSRDADVLSDSLRTDMRAFRKLSIADPLIVELREWSRIDEELKVEHGRLSNRLKHQLWRYYPQMLELADDVGAKWFLDLFEAVPTPEKAANVREKTIARILKNHRIRRFDAAHVLAELCKPALAVAPGTIEAATAHIRSLIGRIRIINGQLADAGQQLDRLCKKLSEPVADEDGEAAPGQKPEQRDAAILDSLPGVARTVLATLLAEAPDTLQRRDYHALRALCGSAPVTRRSGKSRMVVRRYACNHRLRNATYHWAQNAIQHDHTSRAKYDALRARGHGHARALRSIIDRLLSVACAMLDSGTLFDPEFASKRATG

SEQ ID NO: 195127 - protein, 424 aa, unidentified
MVRPDRAVLAIDLGEDKQVAVLMDHDGRVLGRRLVTAKTYALGALLGWAVVEAGRRAFAGVVVGCEPTGHRWRALMGLADAAGLGFVCVQPLRVHRAREEDDYTRDKTDHKDAVLIGKLIARLDGYLPERAEPDWARLRHLGARRARLVTELITSGQQILDLLGCCWPAVLACAARPLECLTWLACLAAAVDGDGPAGLARLGRDGFFAAARAQLGRFGGQRLSYQVAGRVFAALSDPAGVPAQRRGGLERVGFLLTDRQHTAARLSDVEQRMVGVLDAMGLTGLVTSVPGLSAVGAAVILAETGDLSRFASARSVVKHAGLSPAEHTSATLRGKSTVSRRGRPGLRLAAWRAVWGALPHNPVLAARFTHLTRRDHDRLTAGQARIACAATLLRWLHAIVTRRQPFNPDIAAGRTRTHDLPQAA

SEQ ID NO: 195128 - protein, 332 aa, unidentified
MKKIIHFIGIDVSKETLDIALIRNNDKSNIYSSKVTNNKTGFKKIKQWLKAENVSLQEAVFCIEHTGMYSKPIGQFILSLQGNLWMEMSLKIIRSMGVQRGKNDKIDAIRIALYAQRCQDEMKLYEPPRPIVEKLRTLLQLRKRLINSRNSLQVPCNELTTIDEQAGKEATRLIRSSVSALEKNINVINEEIDELISSDQQLAHEFEIGTSVPGIARITLAYIICFTNEFKNYSGGKQLACYCGVVPFEYTSGKSVKGKPHVHNMANKLLKKLLHMGAIAAITYYDEFKRYYKRKVEEGKPKMLVLNNVRNKMVLRLAAVIKNNKPYQKIAA

SEQ ID NO: 195129 - protein, 369 aa, unidentified
MPHVTSIGLDVHARSVAAAAFNPFTGEVVHRDFGTDAAEIAEWALGFEEPRACYESGPTGFHMARELRALGLDCAVAAVSKMQRPAADARRKNDRRDAEFIARMLATHNIVEVPLPDAAVEAARDLDRALDDATVEYRRARQRLNMFLIRLGHVWDERNADGTRKGSWTRAHWRWISGIRLEGPQRDVLEYYVTAARCAESDRRQLEKKVLALARTDRWRPAVEALSCIKGIDTLTAFRLAAEAGSFTRFRTAPAFASWCGLVPSERSSGETERRGGITKTGNRLARTALVESAWHYLTCTPRPKAPAPGADVPAAIRARADDCTARLCRRREALAAAGKSSCKANAAVARELACWVWEIGCRAEGTLG

SEQ ID NO: 195130 - protein, 354 aa, unidentified
MSPLSSRIAAIGIDIGKNSFHIVGQDARGALVLRQKWSRGQVEARLANLPACLIGMEACVGAHHLSRKLQALGHDARLMPAKYVRPYSKGQKNDFRDAEAIAEAVQRPTMKFVATKTAEQLDLQALHRVRERLVGQRTGVINQIRAFLLERGIAVRQGLRFLRAELPTILATRSDALSPRMLRLIEGLAGDWRRLDERIEDISDEIEALARQDQACERLMTVPGIGPIISSAMVAAIGTGDAFSKGRDFGAWLGLVPKQISTGDRTILGSISKRGNRYLRALFVQAAWVVLVKLGKKWERYGLRSWIEAAKTRLHHNVLAIALANKLARIAWAVLHRGRAFECVKTDAMAPRSA

SEQ ID NO: 195131 - protein, 416 aa, unidentified
MNAVGIDVSSRKSTVAVLRPLGEVVCLPFDVTHDIAGLASLAEKLKALDGETRVVMEHTGRYYEAVAKALHEAGFFVCAVNPLLIKEYGANSLRRVKTDKADAIKIARYALDNWADLRDFTPMDAIRYDLKTLNRQFQLASKQRTASANNLIALLEQSFPGIRKCFDSPVRSDGTQKWVDFAHSFWHVDCVRKQPFPAFCERYRKWCKRHAYLFKLSNAEEVYALAKRAVVLTPKSKVVKVLVQEAANQLISISRSVEVYRAEMDRLAAMLPEYPVVMAMYGVGKSYGPQLMAEIGDVRRFERKQALVAFAGIDPMPNQSGDKNVRSNKSSKRGSPYLRKTLFNVIRTYLQCAPQDEPVFQFLNRKRAEGKPFYVYMLAAANKFLRRYYAKLRDYFASLDTLQSVDPIPATLKASL

SEQ ID NO: 195132 - protein, 427 aa, unidentified
MQAVQKPEQTQVVWEAVTERCCGLDVHQKTVVACLLAGGLDQQPTESIRTFATKTKGLVELRHWLVENRCSQVAIESTGIYWRPVFHVLEDSVTVLLANAYHMSQVPGRKTDLKDAQWIARLLRWGLLRPSIIPPRPVRELRELCRYRKKLTEHAAAEKNRIQKVLEDANIKLSSVVSDVFGVSGRAMLGALKQGQLTPAETANLARGSLRKKMGQLTDALEGHVNEHHRYLIQEQLAHLDYLETLITDLNQSIAEKAKPYAHEVSLMCTTPGIDTVTAQHILAEIGADITLFPSADHLASWVGICPGNNESAGKRRSGQTARGNQWLKTLLVQCAHAASRAKGTYLKAYYHRLAARRGKKRAAIAVAHKQLTMIYHELSNDVPYKELGENFFDRLNQRRLQKNLVRRLEGLGFRVELQPEGNLQTS

SEQ ID NO: 195133 - protein, 353 aa, unidentified
MTIVGGFDVHRKQLTFDYVDTETGEIRSGQIRPGTRKMLRSWLAQHCPNGDGEFALEGCTGWRYVAEELTGVGAVAHLADPAEAAGLRGPKKRAKSDRTDARLLRTLLWEGRLPESAIPPPHVLEVRTLGRLYCALMDERRAWQQRIHAQLFHQGCPPITALLSQTARDGLATAELSAAGRRYVEAALRRIDELTDEIEPVRTELVSLAKRQPGCRALQARHYGVGWLCAAIIWAEIGDARRFSSSDQVVRFAGLDVTVYSSDGKRLPGHLSKQGPPALRWAAFEAAKCAARPGSPDYAYYHQVAQRMRAKRQTSGKNPTLAVERKLLCRCYHTLRELGDAALAPPTPQHQTA

SEQ ID NO: 195134 - protein, 339 aa, unidentified
MSLGSSPLSRTTEQSVDHDRTNKAGYRDEDHLWSGCFKAKLDACIEPGAAFASFDNTPAGITELAAFCRQHQAELAVMEATGGYERPAFLLLWEAGMPCAMTNPRSVRLYAEAMGVLEKTDRIDASVIARFADAKNLQPTPAPTSAQQRMKALVARLRQVTDDLIVQKQRRSSLLDNAEILASLDEVITLLKRQSRTLEGEIASMIDDDPLWAHLSDTFRSIKGVADRTVAWLAADLPEIGTYSNKAIAKLVGVAPIANDSGKRRGKRPVRGGRAGVRSILFLVAATAARYDKSLGDFRDRLLAAGKEKMVVRIALARKLLVRLNAKARDARAQYANAT

SEQ ID NO: 195135 - protein, 344 aa, unidentified
MYFIGVDHHKQASVMTVLDEGGREQKSGRVANRRGEVEQFLEGCRPFRAVLEAGRSSYVMADLLRELGGEVVMANPLELRAIAHARIKTDERDSRILAELLRGGLIPEVYQRGEGNRQAQRVMRLRAHWVAKQTEVRNKIRALLAQQREEVRLEVERHDAGLFSGKGLAMLSRLRLGGPDQGLLEDLLQGHGEIQAHIKKTDGVVAALHAELEDAARIDTIPGFATTLSVLVAVEIADIRRFRRPADLHAYAGVIPSTHASGERTLHGHITKQGSGWLRWAVVEAVYPAIRKDLGLLGLYKRLVRRKGPNVAKIAVARRLLTIIFRVLSEKRDYLPGSSPSSAA

SEQ ID NO: 195136 - protein, 340 aa, unidentified
MFTNFVGIDVSKSKFDLALIKGQNKDHVIQGVFDNTHKGIKSMSKFLEKEHHVQLSETIFCMEFTGVYCRPLTSFFVEQDCHVWIEMPVNIIRSLGLQRGKNDRVDAHRIALYAYKNRDDIKLWKPQRDVILKLRDLLALRERLITAQKSLTMPINELISMGDKKGADMVRRSCQKSLSSLENEIGQIDKNLDDIIKEDPHLKELFQLATSVPGVGKLTALFMICFTNEFSMYTNPKQLACYCGVAPFEHSSGSSVRGRTRVSHMANKVLKRMLHMGAMSVISRDPELRDYYQRKVAQGKNKMLVINAVRNKIIHRLCAVIKRGYGYQTENIFKERLVLS

SEQ ID NO: 195137 - protein, 358 aa, unidentified
MGDVISVLTGLVCGLDLGDKSSQLCVCTAAGEIVERAKVATTTPSLSRRFQSCAAMRIAVEAGTHSPWVSRLLAQWGHEVIVANPRKVRLIGNSRRKNDRIDAQSLADLASVRPRLLFPIEHVSAQAQQDRAVLRARDALVRARASLIGHVRGLVKAMGSRLPSCSAEAFARKAQTMLPDSLAAAVLPLLEQVSGMSTTIRAYDKQVKELLRTRYPQAAVLQQIRGVGPITALAFVLCLGDPKRFSKSRQVGAYFGLVPAQRDSGQCAPQLRISKEGNPFVRRLLVQCANYILGRFGEDSDLRRFGQRIAGSGAKNAKKRAIIAVARKLSVVLHHLLVTQQAYLPLKGEHGHELSAAA

SEQ ID NO: 195138 - protein, 482 aa, unidentified
MKSTRQEQSSPSTQASVSVTWQGMNRKQRREMTRKIQSADIGLEVIHADAAGIDIGNEAHYVAVPPTRDSQSVRRFGCTTAELKDLAAWLKRCQIRTVAMQSTGVYWIAVYDILQAAGLEVYLVNARETKNLPGRKSDVQESQWLMKLHAYGLLRNSFRPSPEIRALRTYWRQRHDLVRSAGRHLQRLQKALTQMNIQLANVLSDVSGATGQAIIQAILAGERDPQQLAAWRDVRVKASQEEIARSLEGNWQEDLLFMVKQEQDGYQFCQKQIAECDQHLAQYLQQQTDRSAGAPLAEEKRKWRRRKKKGNNPQFDMRAELFRMIGTDLTRIDSIDVMTATTVISEAGYDMTRWPTEHHFVSWLRLCPDNQVSGDRVIGKKRLPTNNRLTVAFKMAANTLRKSDSYLGAQFRRLRTRLGAPVAIKAMAAKLARLVYRMLRHGLEFVDRGATFYEAKHRQREINSLKRKAANLGFQILETPPA

SEQ ID NO: 195139 - protein, 348 aa, unidentified
MTMVGGFDVHRAQITFDYIDTDSGQVTAGQIRLAARPALRNWLQRFDGRDDVAFAVEGCTGWRFVVEELARARVEPHLAEPADTANLRGRKKRAKTDRADARLLRELLAQHRLPESWAPPSHVLEVRTLGRLYVTLMDERRAWQQRIHAQLFHQGVPSVRALLTSDGRVALSTAELSPAGVQMLQTALGAVDALSLQIGPLRAQLQTIGTNQPGVLALTRQYGIGLLCGTIIWAELGDCRRFSNADQAVRFAGLDVTVWSSDTKRSAGRLARQGSPELRWALFEAAKSAARQTSPDHAYYDAVRDRLGGKRPALSVARKMVRRCYHALRELGDQAWLASAPSSEQQAA

SEQ ID NO: 195140 - protein, 384 aa, unidentified
MSISSHAAVSTQLNAIFVSLELSRSTWLVTSLSPGRGERISRHQVKGGDVPALLERFAQLQVKARERTGEQYRLVVIQEAGLDGFWIHRCLVREGIESHVVDAASIAASRRSRRAKTDKLDGEALVRTLLAYKRGEPRVCAMVTVPSADDEDRRRICRERRSLVVERIRHINRIKGLLFAQGVGDYEPLRTNRRARLEELVTGDGRSLPCHVKREIERELDRLELVMRQIREVERERDAMLEMATDEAAEPASARLLQLRGIGPEFAGVLYAEAFFRSFSNRRQVACYAGLAPSPWQSGNMDREQGVSKAGNKRLRTTMIQVAWLWLRHQPDSELARWYADRVQANGGRVRRVMIVALARKLLIALWQFSSAGVVPKGALLKAA

SEQ ID NO: 195141 - protein, 399 aa, unidentified
MLAVGIDISKSKSVAAILNQDGSMHTSPFEFHHTQPEPNAFIKYILNSNQSATILMENTGHYHYPVLKAFREAGLPVCMVNAYQIKKFGDMDLRKAKTDKKDAVRIARYALEKSYSLVPYTSMEQKYEDLKFLARQYNQRMLTLKTNKVFLLNLLYETMPGITNILPLTTRTPETSLSVLFINRFKSYDRIKKMGKSRFLDAFEKIARKSRNRQTKTHGLAIYEAALRNITTRGENEYTLAAQDQCLELVCESQKAADSIIPKMQTLAETLPEYAVLRSMAGVGDRLDPLILAEIGDIRRFHSGKALNAYAGNDAPPYQSGTFESHNRHISKRGNAALRKYCFEVMQALKLTRPQNDPVYLFLLKKEQEGKPYNVAKMAGVNKFLRIYYARAMETLKQQ

SEQ ID NO: 195142 - protein, 443 aa, unidentified
MSKKRSAHLQGERGQAFADLIRGIPPEQILCVSLDISKYFHVAMIHNGLGEIVMPTLDIDIYRSGFDQLCQTIEHARVRTQAQVVLVGMEPTSHYFENLARHRLERPQPVKLINSFAVKQNREQQLMRREKTDQIDVAAIGDLLRRGEGTPYKPATGVYLPLQQIDRVRLGKVKIAGILKNQIIGHLDRVFPGLVILDEAAKERCTPLFNTDFWQCQILQDLIRVCPNPHDLVGMSPEQLVQAFHAQQRRLGPVTAAKIITQAHKTLLPDPELAAIRCELLQHDLTLLKAVQAHITLLEQRLIELVAQTPYQFWAKLKGLSVVQVASLAAAIGDPVNYTEAAQIFRRSGLVSGRSDSGNRQRKGKGSHVLKTGDVYLRRALMNAVATLILHQPVLARYSKQLQTTKPAGVARVATARKTIGILWAVLRDQSSNTLIYCKGAEM

SEQ ID NO: 195143 - protein, 322 aa, unidentified
MTGLKDIDMEGTIIGIDVSKSELMLYADREDEQLSCPNSTGAIRRLGNRLAKLEPKLIVFEASGGYEGLAVNIFTELGLPTVVVFPQRVRQFAAGLGVLAKTDAIDARMIAYYARVAMIQPIPPPSSELREMQALNGRRSQLIEMSVAEQQRLDTAHPSITGDIKRHVASLDRQIKRIDKKLAAFIKHSDDLSSRSQILRSVPGVGPVLSSTLITELPELGLISNRAISALVGVAPFPKDSGQRKSRRSIKGGRNCVRRVLYMATVSAIQFNPIIKAFYNNLCSRGKLKKVALIACSRKLIVILNTIVANKSSWTPNHAPFT

SEQ ID NO: 195144 - protein, 350 aa, unidentified
MMIIGCDYHPSFQQIAFVDMDTGELQERRLGHREEAEKFYRDLGAQGVKVRVGMEASGQARWFERLLAELQFELWTGDAAAINAKRVRKQKTDRQDAQLILRLMLKDDFPQIWVPSWENRDLRQLLWHRHRMVQARTRIMNQLQAVALNEGLRCKKRLWRDTGREQLESFKLAPWASRRRRDLLELLDRLTPTIAGLSAAIEQEVKRCPAAQRLQTHPGVGALTALAFVLIIGRAERFECGKQIACYLGLVPLEKSSGNQRRLGHITKQGNSLLRFLLVEAAQVTVRSLPEWRSKYCHLALRRGRKIAKVAMARKLAVRLYWMMRKEWDYEQLRKFGSHAGKPGNRDGVK

SEQ ID NO: 195145 - protein, 343 aa, unidentified
MPHYVGLDVSQKTTAICVVDAQGKRLWRGVCATDPGPISARISQHAGVDAKVGIETGSMTPWLVHGLRAAGLDVACLDARRVKAALQMQLNKTDENDAEGLAQIMRTGWYRAVHVKSLDAHRARALLGARAQLVGMTTRLSNMIRGVLKTFGLLPGAGRGLRFDQKVEALLEGAPEIALVVRPLLATWRQLREQIAVFDKAVLQQVRADPICRLLMTVPGIGALSSLMYVSTVENPSRFSRSRAVGAHLGLTPRRYQSGETDRSGHISRCGDGLARTLMYEAAIVILHRVKRSLHLKDWAEAIERRSGSGKARVALARKLSVILHSVWRSGEPFRWAAPAMAA

SEQ ID NO: 195146 - protein, 378 aa, unidentified
MATFSAFVGLDVHKASISVAIADAGREGEVRFWGAIPNTPEAITKLTRKLGERHGCLEYVYEAGPCGYAVYRQLIAHGLACRVIAPSHTPKKAADRIKNDTRDAITLARLLRAGELTFVWVPDEIHEAMRDLVRARQKASHDVRQARQRIQSFLLRRDRRYAQKSWTKTHGVWLANQSFEHPAQQIAFQSYLNTHGQAMARRVELEAQIGELLPQWSLAPLVHALQAFKGIAQIIAVALVAEIGDFHRFASARQLMAYVGVVPGEFSSGSHIRPRGITKAGNVALRALLFEAAWCYHTPAKVGSFMDARMPADVPQEAKALAWKAQVRLCGRYRRLLARGKKSQVAVTAVARELLGFIWALATQVVPSPRPSANGSAH

SEQ ID NO: 195147 - protein, 339 aa, unidentified
MTVKTVGLDLAKDVFQVHCVSATGRRIINKKVKRAKLLSFFETLPRCVVGMEACGSSHHWGRKLRELGHDVRLMPAAYVKPYVKRGKTDAADAEAICEAVRRPTMRFVEIKSEDQQAVLAIHRARDLVVRQRTQVVNMIRSILREFGHILPTGIEAVSKFAREHGTEEQLEMPEIADGILGVMCHQLNGLNARIDGLTKLIEQHAWLDADARRLMRMPGIGPITASAIVATIGDAKQFETGRDLAAWLGLTPLNKSSGGRERLGRITKKGDRYIRKLLIIGMTSRALMAKNKPEKADTWTAKLLDEKPFRLATVAMANKSARIIWALLTKREEYRQPIC

SEQ ID NO: 195148 - protein, 345 aa, unidentified
MNKNTTPPIREFFMGIDVSKLHFDAALMISDYRRQGDIVTARFENNAAGLKAFDKWMKEYQVSRDENTLLVIENTGLYHRLIWNFCAKHGIRIHIGNGAEIKWSFGIARGKNDKVDSVRLCSYCFKNVDKLKVAPEPDLAILKLKDLISSRARLVSQRAANKKHLKELKATSDPAIYKVVEKANKDAIAGLSKSIKALEAEIKRVLATSETLDTNYKLLKSVPGIGPVIAAYLISCTFNFAANRTGKQLACYAGIAPFGIESGTSVKRKPKVHKMGNKELKALLNQGARSAVQHNPEYKQYYDRKIKEGKDDLWVINAIKNKIVLRAVAVVRRGNPYVDKYRLAA

SEQ ID NO: 195149 - protein, 388 aa, unidentified
MHYVGIDIGKRHHVAVILDANGQQVGKALRFANDRDGFDQLLVRLAELDTDALIGLEATGHYWLALYTLLAEAGYDLVVLNALQIHAYRKSGIRKRKNDRYDAYWIADYIRVSRQPHHQSQQPELLQLRELTRFRASLTDQVGGCKRKIISIIDRVFPEYEQLFSNVFIQTSRRLLAEALTPDEFAEFDLTELTQLLAQSSRGRHGQAKAEELQALARRSVGIGFLTDALRVQMNCLLQQLALLDAQCQQLEAEISALMDQFPQHITSIPGIGPITGAIILAEIGDIHRFAAPEKLVAFAGIDPTVYQSGQFTATQTRMSKRGSPYLRHALWQAAFMATQHDPQLRAYYQRKRAEGKAHGTAVGAVCRKLLHRIYIVLKEQRPYVIRD

SEQ ID NO: 195150 - protein, 355 aa, unidentified
MNDAKYIGLDVHQATISVAILDSAGKLVMEAILETKAETILQFIRGLRGSLHVTFEEGTCAAWLHDLLKPHVTQVLVCDPRKNNLGKVGNKNDRNDARELAELLYRGNLKSVYHGEYGMRTVKELARSYLAITRDLTRVMSRLKAIYRSWGIACAGQQVYAPRHRAEWLAKISEAGVRRRAEFYYQHFDALAALRQQARRELLAESREHFAVKLLRQIPSIGPIRAALLVALIQTPHRFRTKRQFWSYIGLALKTYGSGEYRFVGGQLKRSKKALAIRGLNINHNHDLKNIFKGAATWAAATSGPFQNFYEACLARGMKPSMARLTLARKIAAITLLVWKKGVRFDAEHLKQQAA

SEQ ID NO: 195151 - protein, 340 aa, unidentified
MQYKRIAIDTSKSVFTLHGIVANDQPVLRRNLRRSDLEAFFAKLPPTEVVMEACGGSHHWGRVLTKLGHRVKLIPPQYVKPYVKRGKNDRNDAEAICEAAGRPGMRFVPVKSAEQQAGAMPLAVRELLVRQRTQLVNGLRGHASEFGVVVGKGIENVSGLLAKIAATDSIPDAAREMLAMLGNQIAHLDEQLGTLETRLVAQHRATPMSKLLAGQPGIGPIAALTIVHKVDPTQFKSGRHFAAWLGLTPKERSTGGRQRLGGISRQGNERLRQLLVVGATAVIRHAKPGSKSASAWLLAVLERCPRKVAAVALANKMARTVWAMMTSGEAYRMPVASKAA

SEQ ID NO: 195152 - protein, 440 aa, unidentified
MAMRKREEQVFPNAAGVDVGASSHWVAVPAHSTDAPVREFGAMTDDLTAMADWLLGCGVDVVALESTGVYWIPVYEVLEQRGLKVWLVDARQVKYVPGRKSDVQDCQWLQKLMSHGLLRAAFRPSADVCVIRAVARQREVLLTEQASWVQRMQKALVQMNIQLTEVISDVMGLTGQAIIRDIVAGERDAKSLARHRHRRIKASEEDIVRSLTGNWREEHLFVLKQALGMYDDIARHLRECDEKFRELLAERSAASVDIGKTPRTGSKARAAFDVRQQLANWAGADLTRINGLGLDTVMKILSEIGTDLSHFANVKHFCSWLGLCPATKISGGKVLSARTKRSANRVRQALKMAAMSLSHSDSALGAFYRRLCGRMDKPRANTATAHKLARMVYFMLTRGEAFVDQGQQRYEEQQRQRNIAALKRRAAALGFQINPLQAAA

SEQ ID NO: 195153 - protein, 400 aa, unidentified
MPRLWAGIDAGKTHHHCFVIDEDGTKRLSRRFANTEADILTLMGDVAAVADGDQLLWATDLNHGGAGLMKAVLADHGQTLFYIPGRVVHHAAQTYRGEAKTDAKDASIIADQARVRRDLEAVRVPDDVTAELKILSHRRADLVHDRTRTINRLRALLLHYFPGLEGAFDYAATKGPLILLTRYQTAAAMRASGQVRMTGWLKKQGVRLPAQMAIKALEAANAQLTVVHGEAAAAALVAKIATDLLRLREELLQLDRQIEARLAEHPFAHQLMSIPGFGKRLVADFLASTGTDLTAFGTAARFASFAGLAPAPRDSGKINGNHHRPRRYDRRLMNACFLAAFIASTNCPASAAYYARKRKEGKTHKQAIISLARRRMNVIWAMLRDGTTFNPDTPQLSLTT

SEQ ID NO: 195154 - protein, 353 aa, unidentified
MKCGKYMGMDVHQAMTVVTVMDIDGKVILETMVATEASAIIRLVNSISGPLYVTFEETTQAEWLYDVLRYLVAEVVVCDPRHNKLLGEGSKGDKIDARKLADLLRTGMVRRVYHGNEGSRKLKQLVRGYETLSEDTKRTMVRIKAIFRARGIRTPGRQVYQSQQREQWLQLLTEPGLEQRVGWLYKELDHLKPLRREAKHAMLAESRKHRAVKLLRTIPQLGPIRAALIVATIDTPYRFRTRHQLWSYSGLAVVTHMSSEYEMKDGRVVRSRKPIATRGLNRNCNRRMKEVFIAAATAGIRIEPYRSYLQALQQRGIRPEMARLTLSRKIAALALTIWKKGETFDPKKLNGTT

SEQ ID NO: 195155 - protein, 396 aa, unidentified
MFYVGIDVSKDKSDICVKDEKGNDLIHRFEITNKKADLEMLYEIIESIKSKIPGNSDVVIGMEATGIYSLPLYSALKRDGYKVKLYNPIQTNGYRKMNIRKTKTDPIDSAIIADMLRHSEPPQVSEIQDFHLFQLRELVRIRHRLIEKQSLCKVQLVRNIDAIWPDYESVMKRVFGATSLAILKKYSIPSKLRAESFEQFYELVQKKSRSKISRSKAEELYTHAGSILTIPELDMVIAIEIKTLITQLELYDEQIRSVEGKISQMMKQIDTKIMSIPGIADILGPTILGEIGNVNRFSNAKKLVAFAGLDPVVSQSGRFESKSGKISKRGSPLLRHALFLAANTAIHNDENLKQFYVKKRSQGKHHFSALNAVAAKLLRIVYWVLKNNKEYQIQLN

SEQ ID NO: 195156 - protein, 504 aa, unidentified
MVPGPFGCPIGDTIPFRRFSNDTGPGRNAPNPILRGSVMTKHVGKRKAVPEKGARQENSLPVLNLNAAGIDVGSEEHWVAVPKDRDDEPVKRFGCFTADLNAMAQWLKKCGITTIAMESTGVYWIPLHQILEHYGFEVRLVNASHVKNAPGRKSDVSDCRWIQQLHTFGLLSGSFRPDDQVCVLRSYWRHRENLVRYASDHIRHMQKALTQMNLHLHKVLSDITGVTGLKIIRAIVRGERDPRKLALLREAGVKNTPEVIAKALEGDYREEHLFALQQSVELYDFYQRQIEACDQQIASCLDGFNSKADLASQPLPPSKRGGRKRTRNEPYIDLRSELYRISGVDFTQIPGLDALTVQTILSEIGLDPGRFPTEKRFVSWLGLCPNNRITGGQVKSTRTRKTNNRAANAFRMAGQSAGNSNGAFGGFYRRIKSRLGAPKAITATAHKLARIFYRMWATGRAYVDMGADYYETRYKERVLRNIATRAKELGYELILQPRAAGGVA

SEQ ID NO: 195157 - protein, 342 aa, unidentified
MQITTIGLDIAKNVFQVHGIDANEKVVVRKQLRRGKLMAFFEALSPCLIGIEACATAHHWARELTKLGHEVRLMPAKDVKAYVKRNKNDAADAAAICEAVRRPTMRFVRIKSPEQQGQLMQHRTRDLLMRQRTQVINALRAHLAELGIVAAKGDSGVKELLAIVADEEDTRLPIDARASVIVLAAQLGALQTLIGSIEKRIKMQHRANEASRRLETIPGIGVIGATAIAATVADPTVFRSGRDFAAWIGLVPRQDSTGGKPKLGAISKQGDRYMRRILIVGAHSVLRRALENPEKYPWLTQLLARRPFKVVAVALANKMARTAWALLAHGGTYRAPELAEAA

SEQ ID NO: 195158 - protein, 479 aa, unidentified
MTHRRLVGIDLGIASAHTVRVLDETGATLAKRKAWPTVESLTEVETAALAGCPAGTRLEVVVEPTGPAWLPIAVFFARRGHVVHRVSSAKAADLRRFLSRHTKTNGIDADTLARLPLFDPAGLQPLELPSSERAALDRRVRATDRLTRQASEHKVRIKDLVRQLMPMTPLTGDLGAADLAVLERWADPNALLTAGHKRVCALIVKASHNHQGAERAAAWIAAAEAAVELYSAHPAVAFADLAAEVATEVRLLRAVQAELDAHAVERERCYRWVDPTELARSLPGLATIGGPTVVAAMGDPARFGRGAQFRAFTGLVPRASETGDTDRKGQPMSKAGSSLLRTTLIRAADHARKQDPQLARIYYLQMVERGKDHLGALCVVAANLAERTWTVMRRGMPYVICDTNGRPVTADEARTIIAEHWAVPADVRARRRSKKVGKAPHNVLAGQSKPHARSTGTRGDLPHPAASTTGPANVNRRTA

SEQ ID NO: 195159 - protein, 343 aa, unidentified
MKLYVLGIDLGKTVFHFVGLDSIGRVVIRKRCSRRQLLAFTADLEVKLIGMEACSGAHFLGRALREQGHEVRLMPAQYVKPYVQTNKSDYLDAEAIAEAVQRPRMRFVPIKTEEQLDLQALHRVRERWVMRRTAVVNQIRSLLLERGLTVPKGRSHLDEQLPRILEDAELNLSDSLRVLLAQLKIELEQLAARIEEMDRVLQKMAKENEACQRLTEIPGVGPVTATALIAAVGNGSTFQKGRNLAAWRGIVPGEYSTGGKQKLLGISKRGNKYLRRLFVQGARSVLQQRHKQAPGLSNWLAQMLGRTHQNVVVVALANKLVRMAWAVLCKNERYRAPVLAVTT

SEQ ID NO: 195160 - protein, 346 aa, unidentified
MCSLPVFVGMDYHDSSVRVFVQDTDGSEMANADRANDWKAIADFGDRFGRPVRAAIESCCGAADLAEELVSCAGWSVDLAHPGYVQRMKQNPDKTDCQDAQLLADLERVGYLPRVWLAPRYIRELRHVVRYRLQLTEQRRATKLRLRALLREQRCHAPAGLNAWTKAWQQWVRQTAELSAQGRWLAKQHLRELARLATRIRQVEKRLEHMTANDVEVQRLQQQPGIGPVTAWTIRAEIGHFDRFRTGKQLARFCGLSPRNASSGQRQADAGLIRAANPALRTVLIEAAHRLIQYDPSWQKFAQRLRARGKPGSVVAAAVANRWIRRLYHEMKTPSGELAAAVGPAR

SEQ ID NO: 195161 - protein, 428 aa, unidentified
MNQPSNNDDTQNDYAAFIAIDWADRQHVFSLQVAGQTTKETGTLEQKPEVIGPWVAKLRERFGGRPVAIAVEQSRGALIHALMTYDFIVIYPLHPTTVAKFREAFKSSGAKSDPLDTDQILQILTKHRELLKALNPDTEQTRLLARLVEDRRKAVDLRTSHVQALTAALKEYFPQALELVNGNLTSRLACDFLIKWPTFEAFQQAKPSTIKRFYYGHNIRSPEVMEKVLGLVKTAQPLTTDSAIVQSGSRLSQMYAQLIRTLNSVIVDYEERIEKVFHDHPEANLFNKLPGAGPALAPRLLSFFGTDRSRYEAAGNVQSFSGIAPVTKSSGKTRVVYFRHACPKFDRQTFHEFARLSVAKCQWARNYVDYYTAKGKRFHTIIRALAFKWIRILFRCWKNRTPYDETKYMDNLKKRGSIFATLHLEQKS

SEQ ID NO: 195162 - protein, 401 aa, unidentified
MIDTRDVAVFLGLDVGKGEHHATGLTPDGKQVIDKPLPNSEPKMRAMLDKLAKKYGTVLVVVDQPASIGALPLAVARDAGCEVAYLPGLTMRRIADLYPGEGKTDARDAAMIADAARTMPHTLRSIELTDETVAELHMIVGFDDDLAGEVTRVANRLRGLLTQIHPHLERVLGPRIQHPAVLALLERFGSPKAIRKAGRRRLVTLLRPKAPRMAERLVEDIFTALDEQTVVVPGTEAAAVIVPKLAANLTSLLDQRKELASTIEALLESHPLSELLTSMPGIGVRTGARILIDVGDGTAFPTAGHLAAYAGLAPVTRRSGSSIRGESPSRRGNKHLKRAFFLAAFASLSDPASRAYYERKKAEGKRHKQALMCLARRRVDVLFAMLRDGTFFESHTVPQAA

SEQ ID NO: 195163 - protein, 359 aa, unidentified
MTTEEKHHTLFIGVDVHKDTHTAVGVSPFGEKLFELTFGNYEDDFRTLTEHVRTEADAHLLSPYFGLEDCSGYGARLAAHLSGMYPLVHVPAVLVDRQRRRNTHPEKSDSLDAYGVAEVMIRKIDTLPTFTVSETATRGKQLKELSVEREYLVEEQTRLKNQLHRILHDIYNTHYRTRFKDPFSQKALAYWRIARPQGDSLTVASMKRKVRRLQGIRTEIREIERDMATLLDGTTLMTASGCGTVLAATMLGEIGDIARFRSPAALAKYAGCAPREHSSGTRTRYRKTRAGNRRLNCAFHRMALSQISRTGNLYARCYFERKVAEGKSKSQALVCLRRQLVTIVWMMLKHNEPYRYPQE

SEQ ID NO: 195164 - protein, 412 aa, unidentified
MKNIKEVRLLISVGVDVSKGKSTVCILKPYGEVIMSPNDYEHTLSDLKKLADQMDSFEDEIHVTMEATGNYHFPIATYLKKRDYDVRIINPLEMKRYRCQGIRNPKTDSIDAFMIAQYGIDFWFRPFQDYVVGDERIELKTLGMQYFKTMKTRQDRYLVLESVIDRALPGIGGVLNGYDKSTGKDKKSDFVYDFYHAKKITVYSENRFCDRYESWSTKKGYRYSEKEARQLYSIAKDSIPTLPSSESTKLMVQDAVKILREVDAALHDILTRMNEIAKCLPEYTTVMDMKGVGVSIGPRLIAEIGDPRRFHSAKALIAFAGIDAPPYQSGKFTGTERHMSKRGSRVMRKIGFELMDTINKHQKLYAGDPVCEYFLAKRAEGKKYRVAMFAAYNKFLRIYHSRVSAVLNENVK

SEQ ID NO: 195165 - protein, 336 aa, unidentified
MKKYIGLDAHSSTCSFCVMDEAGKIIDTAQIVTNGRLLVDYLRSIPGRKELTFEECELSSWLHKILRKEVDKVLVCNPVENRQYKKAKTDKLDAMNLAKLLRGDFLKEVYHDGSDREKLRDLMSGYQDLVEDVVRIKNRYKSLFRKEGKRKLGKALYSDENFLGGLDREDFKFIGKHCFDLLGSMEKSRISYVKEIKKLSKKHKEIRCLKTLTGIGDIHAAKIIAQVIDPHRFSTKYKYYSYCGLVRHRQISGGKIYGDKKIWGNRVLKCVYKMAAESVLRGTSKLRKYYDHLRDKGVGHKNAKNAVARKIAAISLAMLKKGEQYREEMIMNNLVK

SEQ ID NO: 195166 - protein, 408 aa, unidentified
MQVYIGIDWSEDKHDVVFMNEAGVDIARLTIPHSLDGFVQLDATRRKLGLIPEACTLGLETAHNLIIEYLWSQAYQQVYVIPPSVVKSNRGRFRQSGAHDDQSDGYLLADILRTDRGRLQPWHPDSLLTRQMRAKVSWIHHLTCATTRLSNRLRSVLLRYYPAALHVFPDLSTGIALEFIRAYPTPQAAARLTLAELMDFAHQQGYSHPKKLPSCYAQLKRDYPEACTETVLIYQDEAVQLASLLLQMTHTNLDALRELQALFRQHPDYPIFNSLPGAGDLLEPALLVKFGDDRARFPTPASVQALAGTCPVTEKSGKRKVIKFRKACDREWRSLSQAWAIALVNRAKSPLAIAYFEQIRPRCRNRHQAYRCVANRWLAIAWKLWQTHQPYDEAYHFQQRLARSKPKS

SEQ ID NO: 195167 - protein, 344 aa, unidentified
MDNHTQYLGFAGVDLAKKVMQIHFVTEDGEITDKSAKRAEFLDFFRNRGKCFIGMEACGSSQDWARKLAAMGHEVHLMSPKAVKPFVSGQKNDHNDAIGIYKAMFNGVRRVPVKSTEIRDLQTLRRIRSQVTKDKVKEINHVRGLLAEYGIVMGKSLNAFNKDISSALEILTERGDVSPLVAEELRTTVEAIKAKIERQKKLDQEIEQLARGCKNYENFLKTPGVGPFTAAMLCVLLCDPSIFANGRQFAAYIGLAPRSRGSGGKNYVTGIPSKFNCDSESRAVLVECAQAIARCKNKSLWVEEILRRKPKKVALIAIANKLARQVWAMANKGESFKQMAVLTA

SEQ ID NO: 195168 - protein, 331 aa, unidentified
MDPAVVIGIDVSKAELVIAAHPAAETWTSETTPAAIDTLVARLRDSRPQLIVMEATAGYELPLAAACAAAQLPVAIVNPRQVRAFAQAIGRTAKTDAIDAAVLALFGARVQPAPRGVADAATRALAGLITRRRPLLEMLGAERRRLEQAPPTGPITRDLRTHIRWLERRVGDVDDEIGTAIHQSPVWRVQEDLLRRVPGLGPTTARTLLAELPELGRLDRRAIAALVGVAPFNCDSGQFRGQRRIWGGRASVRASLYMAALVAARHNPVLAPFYRRLRQAGKRAKVALVAVMRRLLTILNAMLKHQSRWNPKVASTPASPSGPARAATVVA

SEQ ID NO: 195169 - protein, 345 aa, unidentified
MEQIIRIGMDTSKHFFQLHGVDAAEKVVLRKKLRRREMIAFFKALAPTVIGIEACGASHHWARLLRSFGHEVKLIAAQLVKPYVKRGKNDAADAEALCEAMSRPTMRFVPVKSSEEQAALMLVSVRDRLIRNRTQLSNAIRGYAAEFGHTAAKGKAHLTPLFERIQADEIVPASARDLFASQAEEYAELQAKINEIEAKLMAWNKADECSQRLAKIPGVGPVGAALLKMKTPAPELFKSGRQFAAWIGLTPKDHSTAGKVRPGVITRAGDETLRSVLVAGATAVIQHVRRGGRGAPWLIELLKRKPPKLAAVALANKIARIAWKLMVTGDNYNSKSAPAAAGNAA

SEQ ID NO: 195170 - protein, 374 aa, unidentified
MGKNTRYVGLDVHGETIAAAIAQGNSKARSVGEFANRPESVRKFIEKLGGADGLKVCYEAGPTGYALYWQLKKLGVACEVVAPTLIPMKVGERIKTDRRDAEKLAQCYQHGMLTAVWVPDTAHEALRDLVRQRAAAKHDESRAKHRLVKYLLRYGLRHPENRKAWSARWWAWVQNLEFEHEEQKVALGDSIAEVLHMGERVARLDLAIDRAIETAPAQKKAVIESLQALRGVAKLTAVTIVTEVGTFQRFRRATELMGYTGLVPSEHSSGNREARGRITKTGNAHLRHVLGEAAWNARHRPWLNVRLKAMLPRLPAGVSEIAWKAQERLHRKFTKMTYHQKPAGKVATAVARELVGFVWAIGTLVERQAMSASV

SEQ ID NO: 195171 - protein, 371 aa, unidentified
MSCTNDLCLENQTATRADHATLCRRAATKMSKHTVAGGDGDALLALLRRLAAKALARVGKPVNIVSIHEAGLDGFSVHRLLEKNGVASYVVDPASIAVPRRARRAKTDAIDGETLLRTLLAWQRGEPRVCSMVVPPTPEEEDRRRISRERKVLLEERIKHVNRIKGLLATQGITSYQPLRRDRHQRLDELQTHDGRPLPTHLKSQVLREIERMEILLRQIVAVEEVRDTLVCPDSTETPALLLMRLRGIGPEFATVLWLEGFFRHFGNRRQLAAYCGLAPSPWKSGQIDRDQGISKAGNPRLRTTAVELAWLWRRHQPDSALSRWFRERVGAERGRIRRITIVAMARKLMVALWRYVTNGVVPEGAVLRTL

SEQ ID NO: 195172 - protein, 347 aa, unidentified
MKRIAVDLAKSVYQVAESVQIGRVDRRKRLDSGAFARYVQEQVEPVEWVMEACGTAHHWGRLMQEKGHRVVLLHPRYVRPYRRRNKTDRNDCDAILEAARCQDIRPVPVKSVQQQQVQQLHKLREGWKKSRVQRINLLRGILREAGVEAPNGIKPFLRQACELIERPEVRALRGALQVVLAEINLYEQSMRECEEQLARWHADDEIVHKLDEVSGIGLLTASAFKTAVGKPERFASGRHLSAWLGMTPNEYSSGERRRLGRISCKGNVYVRTLLVHGARAALLAAKRCKARTPERLTQLQSWALQTAERIGHNKAAVALANKLVRICWAVWCHERRFSGNWRSTKPA

SEQ ID NO: 195173 - protein, 494 aa, unidentified
MSKHSEDSKDSKVPQVLEKCCGLDVHKKSCTAAIITQDKLPIILEDVENGASGIHNLHQRLVDEGCTTVVMESSGSYWRGVYDFLDLRGINTVLINPRSLKAITGKKTDVHDAVWLAHLYRLNLLQPSYVPPQHIRELRDLTRRHEKITRMITALKNSIQAQVDAFSTGITSIYTDPFGAGGTKILEVLAENMEENRQTHIHIDMHTIQIDKVVARLKEEGLPPAKIEQVKNMLELSFNPTSRGWLIKQGLDTLKALKQQLDELLDRIARHIQDHDDLSRSVKILLSFKGIDLVGAGTIVAELGDPARFEDAKDVGAYFGMVPSVDQSGPRTVLGRITKNGSPHMRRVLCEVSQIVSIKGARFLRRWFQAVKKRRGGQKATVALARKILTVAWAMIRDGACFIDPDITITTAEKANAETLHQKKLKALERRAQRSERSVSVWDALHLLASDEKLRGELGLCRIVPTPAMSGPLHTEISEISKLSSQRATQLASG

SEQ ID NO: 195174 - protein, 367 aa, unidentified
MMGWMAPLRHLSAKLLSDRNSSEWEPSMGEVTTIGLDLAKHVFQVHGVDAEGATVLRKQLRRAQVLAFFSRLPPCLVGLEACATAHYWARELRALGHEARLMPAQYVKAYIKRNKHDAADAEAICEAIGRPTMRFVPVKTADQQAAVLLHRGRERLVRQRTGLVNALRGHLAEFGVIAPQGLRNVGKLIAIVRDEGDARLPDLARQVLQVLAAQIEQLEAAVAAIEKQLMAWHKSNPVSQRLASVPGIGPIIATALAATVVEPSGFRSGREFAAWLGLVPRQNSTGGKHRLGGISKRGNPYLRRLLINGASANLLRSKATNADPWVIGLRQRRPSLVVAVALANKTARIAWAVMHRHENYQRVAAAA

SEQ ID NO: 195175 - protein, 343 aa, unidentified
MNAFVGLDVAQKNTSVCIVNDDGTVVRQGIIPTRPELIKEFLAEKGYSSAKVGMETGPLAVWLFHSLQRLGVDIDCIHARHVHAALTVQLNKTDKNDARGIANLVRTGWYRPTYVKTLECHNQRLILTARDRLVRVRVSINNQIRGLLKTFGVVLSPGRNEVFRQEVLAADPSIEAVKSVVLMLLDTWRHISRQIREFGKMLEKQAARDPVCKALMSVPGVGVLTAMSFKTAIDDPSRFRRVSDVGAYLGLTPRRFQSGEVDRNGGISKQGNRQTRSLLYEAASCLLSRYGKETSLARWASAIRQSKGYKKAVVALARKLSTVMLSIWKSGELYQDRALVLSA

SEQ ID NO: 195176 - protein, 404 aa, unidentified
MIFAGVDWAEAHHDVCVMSRDGRVLEQRRVSHSVTGIGELHALIGAHADEGELVAVGIETDRGLVVTALVAAGYQVYAVNPLAASRYRERHATSGAKSDRGDAKVLADLVRTDRHNHRQVAGDSALAEAVKVLARAHQSAVWSRQRQVNALRSALREYYPAALAAFGTDLADRDATAILAIASAPDQGRALSRSKIAAALRRAGRQRNIEARAGEIQAALRADYLHAPPAVARAYSAAARSAIRLISAYTAEIAELEQALSEHFDQHPDTTIVRSLPGLGTILGARVLGEFGDDRTRFASPKSRKNYAGTSPITKASGRSRIVLARYARNRRLADAVEQWAFCSLTHSPGARRYYDQLRARGKTHRQALRQLANRWVGILHICLQREQLYDETAAWQHLDAAAA

SEQ ID NO: 195177 - protein, 391 aa, unidentified
MIYIGIDVAKDKHDCFITNSDSEVLFKAFTIFNNLDGFNDLYQKIESVMDDVTKVKVGLEATGHYSYNLLGYLIDKGLPTYVINPLHTNLYRKSLSLRQTKTDKVDARTIASMLMSDVNLKSYSDTSYHNEELKSLTRYRFDKVKERAKLKTSVSRLVCILFPELEKLVPTLHMASVYALLSEFPSAKHVATAHLTRLTNLLSESSKGRYGKDTAITFRDSARASIGSNMPAKSLELKHTIKLIQELDSEIDEIENEIKIIMDEINSPILSIPGINYRMGSMIIAEIGDFNRFDSPDKILAYAGFSPSTYQSGQLDGAYAHMEKRGSRYLRYALYNATKYVCHWDPTFAAYLAKKRAEGKHYNVAISHAVKKLVRVIYHLEKTKQQYIKVA

SEQ ID NO: 195178 - protein, 345 aa, unidentified
MTEAYDGRQVVGMDLHRRRSVLVRMSMDGRKLETVRIENSPAALRRVLARCGQRPLVVLEATYGWYWAAGVLAEAGAEVHLAHPLGVRAFSYRRVKNDERDASDLADLLRMGRLPEAWIAPAEVRALREVIRYRHKLVQQRTSCKDQVHAVLAKLGVPVTHSDVFGRGGGLWLDQLVLPEPYAAKVASLRALIGVLDGEIARLGQRAAGMLAAGPGYAAVRELDGIGPVLAAVIIAEIGDVTRFRKPGQLCSWAGLTPRHYESDTKVIRGHVSKQGSRMLRWALVEAIQHQPAGTRPQQAKEAILARRGKEARNIAKTAAARVLLTQVFYALRDGHVRRASHPAA

SEQ ID NO: 195179 - protein, 395 aa, unidentified
MLYLGLDIGKRTHVASLMDSEGKILFKGFSFQNSTEGAESLLQRLASFCPSTDECLIAMEATGHYWLALYAFLDQKGYIVHVINPIQTDGWRKGTEIRKRKNDTIDSVLIADLIRYGSFHSHPKIDENYFALRQLCRYRTYLVGTASDFKRKIIALLDQVFPEYEALFSSSGIFGKASQTILSTFTVPEELNKISAETLTQVIQEASRKRLGKHKAEALKQAAAQSFGIRFAQDAFIFQLRSMLDQLAYIEFQIKQTEEEINHHMQLIDSMITTIPGIGIVIGATILGEIGDIQRFSNPKKLVAYAGIDASVTQSGEYEATHNVMSKRGSPYLRKALFQAALVASRCDPTFRAFYDKKRVEGKHHFTAIGAVARKLCYVIHAILTKNEPYIIQQS

SEQ ID NO: 195180 - protein, 326 aa, unidentified
MSKWYVGVDVSKDELVAVVMGRKPKSFANTVTGSKALSRWAKTTASGATVHVCMEATGVYGYRAAMTLASCSKTEVSVVNPAQIAAFARAQLRRSKTDALDAQVILAFAQSQQPQPWHPQSAVMRQLYALVSQWDALAETKRRLNNRSHSHKHIPDLPPAVAKAQTSVIGCLQRQIARIQKAILELCQGTPELASQVALLSTIPGVKTKTAVHLLAYGKGTFTTHSRKELTAHAGLAPRQHQSGSSIRGKSYLAKQGDKRLRTALYMSAVGGTVNNPVLAPFYRRLLTNGKTKMAALTACMRKLLLIIQAMLKHHTPFNPELKPLT

SEQ ID NO: 195181 - protein, 392 aa, unidentified
MFFVGIDIGKNNHVASMMDETGKAVFKAFSFPNTSDGGNALFSKLTSYSSNTDDFEIGMEATGHYWLSVYSFLFEKKFLLHVINPIQTDGWRRGTEIRKRKNDIIDSVLIADLIRYGQFVETRLADEDLFSLRSLTRFRTYLVESISDLKRKVVCVLDQVFPEYQSIFSDIFGKTSKEVLLQFSSPIDFESVSSQTLAELLAKLSRKQVGPAKADQLKAAASCSFGVTFAKNSFTFQLKTLIEQISFIEKQVKETEMEITGIMEKLDSPITTITGIGNVTGAAIISEIGDISKFDSPRKLVAFAGLDATVTQSGEFEASHNVMSKRGSPYLRKAIFQAALVAAFKDPVLSAYYQKKRAEGKHHLTCIGAVARKMCNIIYAVVKNNQPYVPKA

SEQ ID NO: 195182 - protein, 412 aa, unidentified
MSLALPEALFFTGIDWAAATHAVCVMDAAGKIMTEFTIEHSADGIAALIRRLARYGDPADMPAGIERPNGQLVDLLLEAGHPVVPVSPNAIKAWREGEVLSGAKSDAGDAAVIAEYLRLRQHRLRVAAPYSDQTKALRTLMRTRDDVVVMRVAATNQLSALLDAHWPGARAIFADVESPISLAFLTRYPTPAAARHLGEKRITAFCASQGYSGKRPAAVLLARLRSAPAGTTGPALTVTLRDAVLALVAVLTALNTAVKDLDRSAAARLGEHPDGEIFTSLPRSGQINAAQMLAEWGDCRQAYDGPDAVAALAGCTPVTKQSGKHRDVTFRWACNKRFRQAMTTFAGNSRHASPWAAKIYDDARAAGKDHPHAVRILARAWIRVIWPCWLNHTPCDPARHGAAAALAEPIAA

SEQ ID NO: 195183 - protein, 328 aa, unidentified
MDNPLYYVGIDIAKAKFDVAIKLQNGKHKHKVFKNNPEGFQSLMQWLNTFGETFHCVMEATNIYHEALADFLFQQQITVSVINPKCSANFTKTDNLRSKTDKIDAKMLADYADEKRHKLPIYQPISPAQLELLRKNRQLDHLKKQLAQEKTRLTMLLDSDCIASTQQMIAFIKAQIKALEKTIKQCINADNTLKNNVKLLCTIPAIGFATAVQLIAHLGDGSRFKNAKAAATFAGLTPMIKSSGKSLNTVIGISKIGQSDIRKALFCPAMNFAFGSYKNSVYRSFVLRLLECGKPKMVIITALMRKLVTIAQAVLQKQTAFNLDTFMK

SEQ ID NO: 195184 - protein, 352 aa, unidentified
MTVYIGVDLHVRTQTVCWVDTADGEQHEVTLDHQRNDVRAFYAQFAAPAVVGVEASGYSLWFHRLLEELGHHLLVGDALAIRQCARRRQKNDRRDARLLLDLLLHQEFPAIHIPAPASREVLALLRYRHRLVRIRTMLRNGLQAVALSHRLRLGPKLFTAGGLQQFAALPLTGAFAVQRQHSLALLASLAEQVLAVEAQLQDRAQHDPRVLRLRTHPGVGLLTSLAVVHTLEPVSRFDRARRVAAYCGLDPKERSSGDTQRWGHISKQGNRLLRFLLIEAAHTALRGDDDLCRFFFHLQARKNASIAIVAVARKLVLRLYRMLRDEIDYTQFRRRGRDARRAREDTSQAASG

SEQ ID NO: 195185 - protein, 474 aa, unidentified
MKTNQAEIEEQSREGQGSSASPANANGQALSGGRQAVLEKIKMNAAGLDLGSEELYVAILDQPVRKFNTFTSGIRSALEYIKSAGSDSVAMETTGIYWWPVYEIFESGGLEVYVVNACHAKNVPGRKTDVLDSEWLRELHTYGLVRSSFIPDGDIRKLRVYMRSRADHLQMAAAHIQHMQKHLDAMNIKLHNVLSNITGVSGLAILRAILSGERDTGTLAGLCQERIDPKKLPEVQLSLEGNYKREHLFGLQQALELWEFYQSRIMACDREIEQLLQSLVQNKPKPETVKAPKSISNPNRLNIKGIHSMLVTFTDGRDASQLPGFNDYSLARVISETGIDMGPWATEKNFTSWLNLAPFNNTSGKKKRGTKKRKIQNRAGQMFREMARSVGNSKYQALGAFYRRIKSRHGAKAANKATARKIAVLYYRLMKYGFEYVEQGLEEYEKKYKENMLKSLIRKARQLGMELVPAPAAA

SEQ ID NO: 195186 - protein, 431 aa, unidentified
MLKINPLSTLYVGIDVSSKSNYVCALDFYKNKYINSSFANNQPGAEELALKILECLKEHPDITTIVAALESTSVYSIHIANYLSSCEELMRFKPYVFVLNPKCTANYKKSYIGLGKSDPIDAFVIADYARAGTIESEPWRGSQFLALKRLTRHRLHLVECMTREKTYLVSNLYLKFSELQMLEGDDQPFCDIYGATSSSVLMEYFSPEEILDSSEEDLIAFLAKKSRNRIKDISKTADLLKKAARDSYRLDKALYGPLNVSIASSFNCIETFKREIKVIDNAIEKEIKGLNPNAFIILQSIDGIGPVFAGGIIAEIGDITAFHSSDALAKYAGLTWKSNQSGDFDGEDTPMIKAGNRYLRYYLGEAANSMRKHNVEYGTYYRKKYNEVPKHQHKRALALTSRKFVRLVYGLLARNQLYSGVSLDTSIKDSN

SEQ ID NO: 195187 - protein, 400 aa, unidentified
MSTSHERIWVGIDAGKGHHWAMAVDADGETLFSTKVINDESQILTLIDTARERAGEARWAVDISGRASTLLLALLIARGQEVVYVPGRTVNRMSGAYRGEGKTDAKDARVIADQARMRRDFVPLATPPELVTSLQVLTHYRADLIADRVRLINRLRDLLVGICPALERAFDYSAAKGPVVMLTEYQTPAALRRIGVKRLTTWLERRKVRGASVVAAKAVEAAQSQMTALPGEKRAANLVCDLAHQLLALDERIKDNDREIRETFRADDRAEIIESMPGMGPILGAEFVAIVGDLSGYRDAGRLASHAGLAPVPRDSGRRSGNHHRPKRYSRRLRHIFYMAAQTAMMRPGPSRDYYLKKRGEGLLHTQALLALARRRVDVLWAMLRDKRLFTSAPSVTQTA

SEQ ID NO: 195188 - protein, 341 aa, unidentified
MEHYAGIDVSLEYSSVCVVDGNGKIVREAKVASEPQALIAWFGSLGFGLERIGLEAGPLSQWLFAAMKAAGLAVELLETRHVRKAFEAMPVKSDRNDARGIAQLMRLGWFRPVHCKSMSAQETRSLLTARKLVQSKLHDVENSLRGILRGFGLKVGKTTGQKFAGRIEELVAGHPHLQMIAKALLAVRAVLRTEFAAFEKQTRRMVRSDMQARLLTSVPAVGPIVALTYASAIDDPARFKSSKQAGAHFGLTPKKHQSGETNYTGRISKIGDASVRTALYEAANVMLTKPVKGCSQLKSWAMRIKRRAGMSKAKVALARRLAVIMHRMLADGTPFNAAAAA

SEQ ID NO: 195189 - protein, 320 aa, unidentified
MVIHRASMEAKYQVLSRYLRNNFPECTIHLIYEAGFKGFTLHDQLAGDGIDCVVIPPHVVTEPKVSRVKTDKRDANRLALILENHDFKDACHVPDKERREDRQISRTLIGIQKDIVRTRNRIHKLLDFHGIKVPASRWGRAEFLALATISLPESLRISLDVLLNELEHLWTYRTTLRAALRRLCQKERYHKAWEIARSLPGIGWFTAIRLILELGEDLAHFTSGKKIASFVGLTCSEYSSGETEWKGRITGMGSGFIRTTLIENSWVAIRKDPALLAKFSRIWRSSGSKNKAIVGVARMLIVRLRACMVLGTPYRIGVVQ

SEQ ID NO: 195190 - protein, 320 aa, unidentified
MNKYKETFGIDISKDVFDCYGSKVGHLQFKNNAAGFKKFLKVLPKDSLVVMEATGYYHYLLAQFLYKKGVTVSVVNPLSVKRFIQMRLAKVKTDRSDAKAICEYGQINEVPLYNALTDVQSECLQLFRLLDSYIKKRTATKNKLHGEEVLGMPSKHVYSSLKRNLKHLEKEIAGIDQKLLSLVKADQQSQLTLLTSIPGIGLKTALFLIVITDGFQKFENASQLCSYAGITPTIRESGSSVRGRSRISKVGNRKLRNLLFLCAFNACKCNKACRALYERIVNKGKSKKLALIAVANKLLKQAFAIAKSGRPYDETYVSVI

SEQ ID NO: 195191 - protein, 343 aa, unidentified
MLYAGLDYHQSRSSICLLDQGGNKVCTREVKGSWPKIVEEFKKIKAAHPGAISICFEASCGSGHLYDELCRVADRVVVANPAQLRLIYRSKRKNDRIDALKLAKTLALDAVPAVHVPSLSVREWRGLIVCRSRMVEKRTRVKNEIRSLLRNAGVIAPRGLWTKKGLHWLEREAQLPEGSRLRLDLCLFELLNLKRQLSRVEKELNRQARRHPGVMLLKTIPGIGVRTAEALVAYIDAPDRFGRKTIGAYFGLIPCQDQSGDHNRLGHITKQGPPVVRRLLVEASWMAVRKSKTVRAYFDRIVGDDPDRRKIAIVAVAHYLARVSLSLLQHNECWMEKEDREAA

SEQ ID NO: 195192 - protein, 493 aa, unidentified
MIEIPAVIERCAGIDIGKREVAVAIITGPADQDGEVQTRVFGTTVPALEKLREWLVQTGCTSVAMESTGSYWIPVKNILESAVRIVLVCPRKHKPEPGDKTDFRDAKNLAHLHRHGLLEGSFLPRREVVELRDLTRRRKKLLGNLAAEKNRIQKVLETANVKIGSVASDVFGVSGQAMISVLLSGKVATAEQIAELSKRRLRQRIPELTEALERHHMNDHHRWLIRQSVEHAVLLDRQMEELEAKIAEKLQPFQREYELLQSIPGVKTTTAASILAEIGPDMTQFPSSKHLTSGAGICPGNNRSAGKSKRGRIKKASKFLMAALVQAGWAASRKQGSLFQRRFHRWMRRLGERKANIAIARSVLETVYAILRDGQPYREPDPRAMHETERAKLVRHHAGRLRRLGADEKLIAELVQQIASPVTPVAERTDTSPTLIRRACPAKVCRGALGFRARQTRKQEYSVEKDPSAGALRQRRPATKNKSKSKTTTAKPD

SEQ ID NO: 195193 - protein, 428 aa, unidentified
MDKVNRNRLEEFRQLRQEVRHSEEYLIVGIDIAKDRHHAFFGTATGKTLLRRLVFSNDHEGFRKLLDQGETLRVRHGLKRVVYGMEPTANYHKPLGEYLITLGRTVVLVSGVTVKQNRESLDGRWDKHDTKDSANVADLISQGKCLYYEYPSAELRGLRGLLSLKRRLKKQEHGYRVRIRNHLIAQYFPEMDRDYERLGAAGLSVVRWCFPTSQITELDVEPFIERVTSRRIRMETRRRLEGVWEKAGASIGCEGVPGVEHEAKVMVEGLRQIREVIKETEDKIEELCNRFPEYPYLLTIPGYGPDVSAKVLGAIGDPDRFQNGKQVLKLAGLDLSADRSGKDSDKAIPEISKRGKADLRYALYQAALIASTKNPDFMRYYASKLEGRQKEKGIQTKMWVKLSAKMLLIAWTLMKKKEAFDPAYLTAE

SEQ ID NO: 195194 - protein, 359 aa, unidentified
MTPTMTYVGLDVHARSIHAAAIDVASGELRRARFGGGSEEVIGWLLALPQPLRGCYEAGPTGFALYRAAELAGLALEVIAPSKTPRAPGDRIKSDRKDAELLARLLLAGQLRSVAVPPPQFEAARHLARAREQVRHDLMRCRHRVSKLLLLHGRVYEGSAWTKTHRRWLERQRFEQAATELAYLDALAAVDGLGARKTALDERLSRLACDGEWSTTVARLRCFRGIDTLTALVLCLEIGDFRRFARPAQLASWLGLVPSLNQSGESETRGPITKTGSAIARRLLVEAAWHYLPQPSVGVALAERRVGQPDHVLQIALRAQRRLHRLYQRLRARGKPGNVTTVAVARELACFLWAAAVAD

SEQ ID NO: 195195 - protein, 457 aa, unidentified
MQANGFLGIDVSKGYADFLLLDQRKQVMEESFQLQDNKAGRGQLGELIAKWVSVGLETLYCGVESTGGYENNWYYYLKALSQNLNIKVARLNAKAVKAVSDASLKRTITDEVSSENIAAYLISFPEKIDYRSGQVEESGKTFREGRRHFTYVRMLQKQKVQLTNQLEKLLYQYFGEMLVYCRHGIPMWLLKLLSHYPDAIAVIKAGEKRLSAIKGISAAKAKALIEKATKCEQSVSKQIQHVIAVTSKEILHKEQLLQSEKDFLTAIHRETEEVKLASTIPCIGEESAVALILEIEDIHRFESAKKLTAYFGVHPTYKQSGDGTWTVGMSKKGGGELRAVLYMAALSGIRHNPILKQIYARFRAKGMKHYQAMGVVMHKLLRMIYGVLKNKTKFDAAIDQKNTEQAKEKQEQQKKQFKEVEKIKGQKKYRYQAATTEAPISRIAAQKRKKQAASQAS

SEQ ID NO: 195196 - protein, 359 aa, unidentified
MTTLPVFVGLDYHQSGIQVCAMDGTGTVLLNRACENRRQAIIAAVASAGRPVRVAIEACTGASDLAQELVDHASWSVDLAHTTYVARMKRQPDKTDYSDARMLADLTRVGYLPKVWLPPVYIRDLRRLVSLRNSLVAMRRNVKLRLTGLLRDHRVTLGHSRWSRPWLKAVVAPQTLPAVGHLIAVEILDQLKDVMTRISRVEDQMEVFTQGDPMIAYLRTLPCVGPVTSWVMRAFIGDVSRFKNGKQLAHYCGLSPANASSGKRVADAGLVNSGNTLLRATLVELGQRLARTQDRWKTMRAEMKARGKPHCVIVAAIANRFIRAIYYPWKQTQLDGTAPAPVASPCVINPTTGEVSSSR

SEQ ID NO: 195197 - protein, 338 aa, unidentified
MAIVYVGIDLAKNVFAVHGVDEYGKPALVRPSVPRARLHELIASLPPCVVAMEACSGGHHWSRLFAVHGHTVRLIAPKFVAPYRMSGVRGKNDAADAAAICEAVQRPSMRFVPVKSIDQQARLMVHRARQGYVEARTACINRLRGLLSELGIVLSLKAATVRREAGACLEDLPGWANTVVGDLLSELHRLDERIAQYDQHIQAIAREDERARQLMRLSGVGPTTATAILAMIGNGHEFKCGRQFAAWLGLTPGQYSSGGKTRLGRITKAGDAYLRTMLILGARAVLAAAKNKTDAISRWAMALEERRGYWKAVVAIAAKNARMAWAMLARGESFKLPA

SEQ ID NO: 195198 - protein, 343 aa, unidentified
MEHFAGLDVSVKETSVCIVDDTGRIVREVKVASEPEALLTVLTNPAYHFKRIGLEAGPLSQWLFSALAEAGLPVICVETRHMRAVLKAQINKTDRNDARGVAQMMRAGLYRPVHVKTLRSQKLRMLLTHRKLLQSKAIAIENDLRGTLRNFGLKVGMVGKVRFEARIKELVENLPDLAALVEPLLIVRRVLREQIDILHRRLLAVVRDDEVCRRLMTIPGVGPVVALTYRVTVDVPARFKNSKAVGAVFGLTPTRYQSGESDRAGRISRCGDEMMRIMLYEAAQSMLVVSTKWSWLKAWAMKIAKNRGMKKAIVALARRLAVIMHRIWVDGTEFRWTKEVVAV

SEQ ID NO: 195199 - protein, 409 aa, unidentified
MRAVGRAIGLDVHRDFCEVAIAEDGAVRSAGRVETTPERLELFAQSLGPDDLVALEVTGNAWEIARILEPHVKRVIVVSPADTGIRQARAKTDRLDARTLARLLAAGELDAVWMPDERTRVMRRRLARREQLVRSRSRAKNEIHAVLMRRLKGRPPVSDLFGVKGRRWLRGLELPLEESETIDSALRHVEFLDSEIAAVERLIARDALGSSEARRLMTVPGVNVICAATFLAAVGDIRRFPTSRRLVGYLGLDPRVYQSGSEPARGGRISKQGSASARWALVEAAWSVVHQPGPLRAFYQRVRVRRGHGIAVVAAARKLAALFWCLLTRGEDYAHGQPSLTAKKLRLLEIRAGAPTRKGKPTGTWATRQQMRTAERELAQQAEASYKRTVSDWQAKAKKAGASVTSGRA

SEQ ID NO: 195200 - protein, 341 aa, unidentified
MQAVTTIGLDIAKSVFQVHGVNADGNVVLRRQLKRRYVLAFFQKLPPCLIGIEACASSHHWSRELQALGHTVRLMPPAYVKPYVKRQKNDAADAEAICEAVTRPNMRFVATKTPEQQSCLMLHRTRHLFIRQQTAIINSIRAHLAEFGIVAPVGRNGVERLLEVVADANDTRLPEIARACVAALGTQLLALKVQILAFDRHIMAWHRSNETSMRLDAIPGVGPVLATALVASIADPKAFRSGRDFSAWIGLVPKQNSSGGKDKLGSISKQGDRYLRSLFTTGALAVIQYAKIHGTRPWLTALLARRPTRVAAIALANKIARMAWAMMVRGERYKETVALAA

SEQ ID NO: 195201 - protein, 371 aa, unidentified
MKSILSVGMDVHKNSFSLCAYDGYTGEIVSESTFASDVKLVIKFIETLKIQHENDVEIKCGYEAGCLGYSLYKSLTARGVDCVILAPTTMQVSAKNKMVKNDRMDALNIAKNLASGSYKAVYVPDEEAVEIKEYIRMIHDFKKELKRVKQEICAFVLRHGYQYDGKSKWTIRYMNWIRELEMSEIQRETLNEYIAEMENLNDKIDRFMNRIDEMYQSDRYNEKVSKLRCFKGIDTFAAMTIQVETADFERFPSAKAYASYTGLTTGEHSSGDKNNRIGITKQGNTVIRKTLVECAQSLVKGNVYAKKSQGLKSRQKGMDVNIIEYADKATERLKKKYQKLIERNVPRNKAIVAVARELACFIWGMETGNIH

SEQ ID NO: 195202 - protein, 490 aa, unidentified
MKRQSTTKSKRMKYRFRRGGKLPKHLECINENAAGIDVGSREHYVCVPDDRDAQPVRTYGCYTPDLEAMAQWLRDCGIHSVAMESTGVYWIPVYRVLEAHGLEVHLVNARHVKYVPGRKTDVLDCQWLHKLHTFGLLSGSFVPSHDINALRTYRRQRKNLVQSASREIQHMQKAMTQMNLHLHVVLSDISGVTGMKIIRAIVDGERDPEKLATLRHPSVRKSAGEIAKALTGHYRDEHIFALTQAVELYDVYQDKIADCDRQIEQRLSQFETKADPCELKDAPSKSNKRRRRKNEPHFDLRSELYRITGVDLTQIPGIDAMTAFTVISECEIHAFPTVKQFASWLGLSPNNAITGGVIHRRSTKTVYNHIAGALRMAAQSLHRSTSYLGAYYRRKRQRLGAPKAITATAHKLARLIYGMLTQGQDYIERGQQQEEREYQERRIHYFIKGLTEMGLEVLNPETGEILTGPQDPKNRKNVTAENQELKPCVS

SEQ ID NO: 195203 - protein, 385 aa, unidentified
MYQLSGSTQAALDYNSTIIGALELSEKKWVLAVQLPGVSRYSRHVLEPCGDGLASFVERLKARCAAAGRKIARVILTHEAGRDGFWLARFLARRGIEVHVIQPSSLPVDRRARRAKTDIIDVEMLLRTLMAWLRGEPRVCSMVPIPSEADEEARRAYREREDLTGERRSIVNKIDGILATLGVKGYKALRRDRREQLTAVRQPDGDPIPQKARARIERLLDRLDLVLKLIEQVESARDAVLKKDAPADEAERMIRSLTDLRSIGPDFATLLVREAFVRQFRNRRALGGYVGLGGTPFSSGGSEREQGIGKDGNRRVRAAMVELAWTWLRWQSDSALSVWFRARVGAMGGRIKKIMIVALARKLLVALWRYVMDGVIPDGAKMKAA

SEQ ID NO: 195204 - protein, 339 aa, unidentified
MQNYHVGIDLHSTNSYIGIVDQDGTRIFNKRVPNDLGTIIATLKPFKEKIKGIAIESTFNWYWLVDGLMDEGYLLHLANVPAMKQYEGIKHTDDKSDAFWLAEMLRLKILPTGNIYPKEQRPIRDLLRRRLQLVHHRTALFMSMTSMIQNCTSINLSRYEKKNLDHHEITSLLDHPYQVMSANSIHNVILEINKNIDNIEKEINRKVKPTQRYKRLTSVWGIGEILATTIMLETGDIRRFKDVGNYASYCRCVPTIKLSNGKTKGRGNKKCGNQYLAWAYLEAAYCMQRAYPEAKKWFQRKLNKKGRFVAIKALASKIARACYLIMKNNIEFEPSKLFA

SEQ ID NO: 195205 - protein, 362 aa, unidentified
MPKMIWLGMDVHAASITVAQYEDQAPTAMVQTIANDPAQVRRLVRRLPAGSDVRACYEAGSCGYGLHRQLTALGVHCDVIAPALIPRRPGERIKTDRRDAEKLGRFYRSGELTTITVPTPSQEGVRDLVRAREDVRRDRTAARQRLAKFLLRHGHRYPGSHWTKRHWEWVCGHTFDGPARTVFVHYCDHVLALNERLAHLEREIRTLAESAAYQPVVTRLSCLRGLATLSALVLIAELYDLRRFRTPRELMAYLGLVPSEHSSGARERRGRITKTGNALARRLLIEAAWAYRHPARQTRRVQQALTTQPPAVHAISDRALHRLTARYRRLLSRGKTPHHAVTAIARELCGFVWAIALVPDLA

SEQ ID NO: 195206 - protein, 415 aa, unidentified
MEPVLESCAGMDVHEKKVDICIAHGSLDKSPKFEIRTFSTMTSDLEELSSWLKKYKVTTIGMESTGVYWKPIFNVMEGEFKIVLANAQHLKSIPRKKTDIMDCKRIAKLLRYGLLPNSFIPPREIRELRDLNRTRRKLVGIMTSEKNRLTKVLESANIKLSSVVSKICGVSSLAMIQSLLEKDKLSKEEISILAKGSLKKKVGLLEKALNGKVTDHHRFLLKMHLENIDHLARQIKKIDEQIERKMIPFQKERNLIQTIPGISEISGSAILAEIGTDMSQFPDAAHLSSWAGVCPGNNESAGKKKSGKTQKGNSFLKGTLTEAAWAASKIKGSSYSAFYQNIVRRRGKKRALVALAHRMLNDIYYVLKTEVPYQDTGSEATNERATKRREQSMIRSLEKAGYSVVKTPAAEMAVA

SEQ ID NO: 195207 - protein, 363 aa, unidentified
MLQHTTGTHVGLDVSKASISVALLRPDDQLDEERIANTPDAVRRLVRRWPEPTRVHACYEAGPTGYDLYRQLTGLGVDTTVIAPSLTPRRPGDRIKTDRRDARKLAGLFRAGELTAIRVPTPVEEAVRDLLRARQDEREDILRARHRLSKFLLRHGRIYTDGKAWTQRHDAWLRSQRFDEAAAQRTLGHYRAELDMRLAALKLLDDEIHAIAHHEPFAATVARLCALRGIAELSALTIAVEVGDFARFESAPAFMAFVGLVPSERSSGERRSQGSITKAGNAHLRRVLVEAAWHARRRPNIGPALAKRLAGQPPEVLAIATRAQGRLHARYWRLVGRRKPSNVAVVAVARELSGFCWALGRAA

SEQ ID NO: 195208 - protein, 313 aa, unidentified
MESESCFIGVDVSKASLDVATYPSNETWQVSNDAPGIDELVSQLSDRSVQLIVLEATGGLETPLAGALANRQLPIVIINPRQVRDFAKATGQLAKTDRLDAMVLARFADAIRPELRPLKTEQEQYLSALLTRRRQLIGMVLAERHRLSSAPSGIVKDIRKHIVWLEKHIKEADGDMDKFVKASPLWRAKDELLQSVPCVGPVLATSVLARLPELGQLNRRQIAHLVGVAPLNHDSGQHRGKRRVWGGRAELRSVLHMAALVGVRHNPVLKEFYERLCDAGKPKQVALTACMRKLLTILNVMVKTNTHWKYQPN

SEQ ID NO: 195209 - protein, 517 aa, unidentified
MGRGSGEITHQPECRKEVLMIRSVGIDFGEGGPHKVRCLDEQAQLCDGFTFYTTPEGLATLGERIFRDGANPVIVFEPTGLAWLVVATYLRARRPDCHLVRAKTQKVAALRKYLRGRSKSDRIDALTLAKMPFIDPEQLYEVYLPPMEFHALQRLTRQREQLEKGIAARKARIGTIIDGYLPGLRQAFEDRWSPCARAFYQYRLNPFAVVRAGEKALHTFLTKATPRGKVSSAEAHQVYVACVNITTIYVQSTAAGVISEDFFADLQDEVARELRLMEAEEAEAKALARRIEELYQKLHPEDNLRTIPGVGEHTAPVFLAAIGDPERFRSQSAFANWNGVVPGARQSSQAESKGLKMTKAGPSMMRRALYQAGEVGRQWDPQLAYVYYGQIVYHGKTHQQAMGAVMSHLGARVLAVLREGRPYELRDIDGKPISGQEARSLILSRYKVPDEIRRERRRRNPKKSNASRLPKGKRGMTQNHRICEAASAPQPDIAPVIPQRSVYPVGSARSSPAPDCT

SEQ ID NO: 195210 - protein, 344 aa, unidentified
MYFIGVDHHKQVSVMTVLDEDGRELKNGRVPPFRRYVEEFLRPYRPFVAVLEAGWASYVMVDLLRELGGEVKMANPVEVKAIAHARIKTDKRDSRTLAQLLRAGLIPEVFQREAWNRRAQRVMRLRAHWVRKQTELRNKIRALLGQQGEEIRLEVERQERGLFTQKGLEILKTLPLEGEDKMILDDLVRGHREVASHIKQSDGLVEALYGQIKEASWIDTVPGFATTLSVLTAVEIADIRRFASPAQLHAYAGVVPSTHASGERQFHGHITKQGSAWLRWAVLEAVYPSIKKDLGLRILYQRLARRKGPNVAKVAVARRLLTIIYRILTEGRDYLPGLGKQSAA

SEQ ID NO: 195211 - protein, 391 aa, unidentified
MKKRYGSVAYGGMDVHRKFSNVTLRDARGEVVARERLDHVDRRKLREHLARWPKGTLLVMEASFGWPWLSDEVEAAGHEPRLSNCYKVEHMRKARALPKTNKRDADLVSMLPQELKPWWVVWRAPPDVRDLREWMRHRVGLVGMQSEVKNRVHALFHRHGIFYEEVTDLFGGQGRRFLFALGEKGRHENGTLMEGALESLRSDMRVLTMLRAELATITWRLRGRLKRDPLVRRLMTIPGIGLILAHVIASEMGDIGRFKNHRKLAAYVCLAPQCDDTGEPDPTRAPLGRHLGDRGNRTLKWAFIMAAHGAVKKGGKWRALYDRHTEGGKKDRGRGFIKVARGLVKVVFAIWSKGMEYTETPPSRPGSRPARRRRRDSRPGTGQLGVAMVQA

SEQ ID NO: 195212 - protein, 338 aa, unidentified
MRVKRPILPTLFWVGFDLAKLTLLVALSGDQELGEMTVRTFNRTRKAMKGLLDWLRAMAPEGMPIGIVMEATGTFADEVGGWLLDLDPGLVVAIVNPGQTSAFIRSLGLRNKTDDLDGRALAKYGYERRPMAWERPTPEMAALKDLVRARTSLVNTRMAMTMRLKDHERAAKAAGQALRKVIKALESQIEALDKAIQAHVAGHPDLSWKVKRLCSIKGVALVTATTVLVELGDLRRFARSRQLTAFAGLSPKKKQSGTSINGRTRMCKQGSPRVRAALYMAAGAAARFNPDLKAVYLDLQAKGKTKRSALGAVMRKLLVLMRAVLKADHDWLPMSAVA

SEQ ID NO: 195213 - protein, 346 aa, unidentified
MLYTAFDVHKHYTWARVERPDGTVVREKRIAHEPGAFRQFLAGSEPGSPVAVEAIGNWYWVGDEVEAAGCTLQLVHAYKAKLMLGRVNKTDRLDAQGLVRLQRAGTLPVVWIPPRALRDMRELPRARMVLVAQRTRLKNRIHATFSKYGIPLPEVADLFGKRGRQGLQARVGELPSHTGFVVSRLLVLVENLDREVMAVEQRMGELFEVDEGIRLLLTIPGVGFILAVVIGTEIGDVSRFGRPEQLAAYAGTVPRVHESGGHRHYGPVRSDVNHYLKWAFVEAANGVCRNRRKHPQRHASRVYERVAKRKGHQNAVVAVARRLAEATYWMLTKGEPYRESGSSKGA

SEQ ID NO: 195214 - protein, 325 aa, unidentified
MKIILGIDIAKDKFDCCLLAAGQKLHQEFANTPRGFKQLLRWLAKAQVLPAQLWACMEATGIYGEALLRFLFDARLTVSKVNPAQIKHYARSLLARNKTDRQDALIIAEFARERSASGQLRAWAPPSPLMARLRQLTRLLAARKNQRAREKRRAKMIDRELRAHTRTMLRAFDKEIDDIQGEIDALITSSPELKKRHNLLRSIPCVGPVTAQTVLAELPEDIANARAAAAYAGVTPQREDSGQKKGRARLSKTGNAHLRQALYMPAVSGRKSNPRLKACAQRLTDKGKVAKQTIGACMHLLLRLCVGVMASGEAFDANWGHRAAN

SEQ ID NO: 195215 - protein, 420 aa, unidentified
MERIVERPGALDVHKESVTACVRVWEGRELREQIAEFKTTVAGLLALGDWLAALGVRQVVMEATGVYWRPVWAVLEDSFELMLVNARHVKQCPGRKTDVLDAQWLCQLLEAGLLKASFVPPKPIRTLRNLTRYRKAQINDRQREAARLHKILEDTGIKLGCVASDILGKSGRDMLDALVAGTKDPAVLAELARGQLRKKLPALREALVGRFDDEHALVIGQILAHIDFLDEAIDRISADIEERMRPFAAQRDLLMTIPGVKQRAAEVLIAEIGTDMTVFPTPKHLASWAGMCPGNNESGGKRRSGKTRNGSKWLRATLTESANAAARSKNSYLASQYARLRGRRGHAKAITAVGHSILTAAWHMLSTGELYRDLGSDYLTRQDPDRATRRLVRQLEALGHIVTLQTPTATSTAPVASVAA

SEQ ID NO: 195216 - protein, 354 aa, unidentified
MSQIPNTAIAVIGIDIGKNSFHAVGHDARGAIVLRQKWSRGQVEARLANIPPCLIGMEACVGAHHLSRKLASLGHDARLMPAKYVRPYSKGQKNDFNDAEAIAEAVQRPTMKFVATKTAEQLDLQALHRVRERLVSQRTGIINQIRAFMLERGIAVRQGIGFLRTELPTILATRTDALSPRMLRVIEELAGDWRRLDQRIDGLSGEIEALARQDQACSRLMTVPGIGPIISSAMVAAIGTGDVFSKGRDFGAWLGLVPKQISTGDRTILGKISRRGNRYLRVLFVQAAWVVLVRIKDWERYGLKSWIEAAKRRLHHNVLAIALANKLARIAWAVLAKGRAFELTRTDDAGVRSA

SEQ ID NO: 195217 - protein, 439 aa, unidentified
MPTPCLTVLDPTAAAIDVGCEQLHLSIAGGPPKVFGTTTGELYALRDHLLTQGVRSVAMEATGIYWLCPYDVLEKAGLEVVVVNGKYVKNLPGRKTDMSDCQWAATLHAHGLLKPGFVPPEHIRRLQDYLRLRTDHIVMAGSHEQHMQKALERMNLKIHDVISDLTGVSGLKMVEAILAGQRNPVALVALCDPQIQKHKTKELRAALEGTWKEEHLFALRQAYELWQSYQQKIAECDQAIEAVLQVVAGPEDPKNPAPPATKRGGVNAPQISGLHAMLWRLCGGKDPTQLPGVADYVLLQLLSEVGTDLGKNWKTEKHFTAWLGLAPGSRQSGKRRGSQRRSRNRAGRLFCVIARSVGRSVDKALGGFYRRLKGRRGGLVANLALARKLAELFWRLMVHGVNYVEQGLKKYEEKVAQTEQRLLQKLARKYNMVLQPKLP

SEQ ID NO: 195218 - protein, 391 aa, unidentified
MNPSQRVVIGMDPHKRSATIEVMAGDETILGAGRFGTDRDGYRAMIKYARQWTDRIWAVEGCQGIGRHIANRLLADGELVVDVPPKLSARARVFATGQGRKTDATDAHSIALVGTRMAGLRPLVNDEQLAVLRILADRRRSLGEDHTRMVSQLHQLLLDLVPGGAKKSLSAAQAKVLLATVRPRDTAGKARRRVAAELIADLERVYQRSKQADKELKELVAATGTSLMDLHGIGPSGAARLLIEVGAVIRFPDRGHFASWNGTAPIDASSGDQVRHRLSRAGNRQINRVLHIMATVQLRNPTEGRAYFDRKKAAGKTSMEAMRALKRRLSDIVYRQMVNDAAVAMATGSGGHQGTSTNSSVTGSHPHTDSSEKSLPEPADSKLRTSMQTTS

SEQ ID NO: 195219 - protein, 360 aa, unidentified
MIVIGADSHKRTHTVVALDPVGRKLAEKTVPATSDGHLALITWAAQFSEVRFALEDCRHLTRRLERDLLTAGQQVVRVPTRLMAGARRGGRQPGKSDPIDAEAVALAALRHDNLPVAELDGPTREVKLLVDYRRDLVAQRTRVQNQLRWHLHELDPELHVPSRGLRRYCVIADLPDRLADHPGVVARLTRALLERCRELTGQTNALEAELKALVGRLAPSLLALPGCGVLGAAMILGETAGVHRFRNKDAYARFTGTAPIPVWSGSNSRDGKVRLNRGGNRTINTALHMIAVTQVRGVGPGKDYVARLQASGKTSTEAVQLLRRRLSDAVFAALRADAHSAQAGQTSPAPAPPIGLPTAA

SEQ ID NO: 195220 - protein, 459 aa, unidentified
MLDTTTFVGLDVHARSIKAVSLDVMTGEVRAATFGYDAGAVAGWVRSVDPEARCVYESGVTGFDLQKRLSGLGVDCVVGAVSKMIKPSADRRRKNDRNDAEFLARMLSVGNVVEVWVPDDECEAARDLTRALEDARDDLSRSKQRLSKFLLRHGLVFDERTPTGRRKGNWTRAHWSWIESIRFAEGADNDVLAYYVDAVRRAAEDKARLEGLVEAEARKPRWRRRVDSLRCLKGVDTATAADLVFEAGEFSRFGNARSFAAWVGLTPSEHSSGESDRRGAITKAGNKHLRKTLVEAAWHYLTCSGRPKEPARGQAPDRGARRHAAKGVRRLVERREALLARGVHGNKANVATARELPRRASSPAGYGRSASWPRRRRGGGPPHISQSPRKRFDPKPLRRTSGPFSASAQGATRVHRLSVRRRSLSRSNGLPSERSPRADIKLQRRASVRHAEVAADGLI

SEQ ID NO: 195221 - protein, 372 aa, unidentified
MSSNSITWVGMDAHKNSIAVAALFPDGSEPVEWTETTTPEAIRRLARKLRREAPGEVRCCYEAGPTGYALHRQLEAEGVICEVIAPSLTPVKPGSRIKTDRRDARKLAELLRAGMLTEVHPPSESDEALRDLCRCRDDVRVDLLRARHRLTKFLLRRHCIYRQSKGHWGTRHWAWLEELRFDDAVSQATFDSYRLAVQQLEERQDQLDAQLAEFGGQDPYREPVGWLRCFKGIDTVTAVCVVAELHDFRRFRSARELMSYVGLVPSECSSGERERRGSITKAGNRHVRRLLVEAAWHHRHRPALSAPLRRRREGQPARVLAIADRAQERLSARYRRMTGRGITNPKTIVAMARELTGYLWAVLHPAATVTRN

SEQ ID NO: 195222 - protein, 364 aa, unidentified
MVTQHPAAPKLFIGMDIHKKSWSIHLRTDISDHKSFTTPPDCEVLYNYVEANFPGYQVALTYEAGCCGFSAARYFLNLGWQVLVVNPSDIPRMDKQQYQKTDTIDCRNLSKQLKSDQLKGIYVPGEDQDQLKSLLRQRSEITKQLRSVKAQIKSLLLYHGHPIPTQFDNPNWSKDFINWLGSIKWTYEPGKACMESKLRMYDVIHKEHLQLANLLRSYCRKYYKKDYYLLKSIPGIGGYLASAILAEIGDLRRFGSETELASYIGVVPIMRNSGGTESMQRVTPRCRALLRSYIIESAWVALRMDPVMQNYYRRHAGKNPKSIIIKIARKLINRMLSVIKNETPYQLNTTKIQSQKKQSIKQNY

SEQ ID NO: 195223 - protein, 387 aa, unidentified
MIYYVGIDISKYKHDFCIVSNIGEVIVENSSFENNKKGFQNFLEQLKSYDKSQIHIAFEATGHYSMNLELFLIDKEFSFMKINPLIIKQFLKTRSLRRTKTDKADALNIAEYLMSVPYKPNSLLLYHTYSLKSLCRTREQLIKERSKFAVLLTNELDKSFPELKPFFNNMISSTLLFILDKYKNPSHIALMKDYDSIRKVSHGKFTYAKFAKLKELAKNTVGYHDDNTDLLISTYVSLYNYFNDKIVPIDKQISTIIKELNPSILSIPGIGEITAASIISEYGDISCFSSSAKMLAFAGLEPSINQSGTLESNGKMVKHGSCHLRYVLMNASLTLLKFNPTFYDFYLKKRSEGKSHRVALSHVCKKFIRLIYTLETKHVDFDPSLLK

SEQ ID NO: 195224 - protein, 369 aa, unidentified
MEKDTTYVGLDDSKRKIVAGILHPGAAQPELREIANDPRQIRRLFERLTREGPVAACYEAGVSGYDLYRQISALGVACAVMAPALTPRRPGQRIKTDRRDAAKLVRLFRAGELTAIHVPAEAEEAVRDLVRCRDDIRRDVLRWRHRVLKLLARHGRAYLAGKNWSQAHWRWVREQRFDLPPLQRAFEATLFALEQALARQAELDKEIQALATTAPYREPVGGLRCFRGIDTLSAMILVAEVIDFQRFRRPRELMAYLGLVPSEYSSGETQRRGALTKAGNSHARRVLVEAAWHYRHRPTIGRALASRSQGQPDEIVSHAWRAQQRLHRRYRHLVGHGKRTPVAVAAIARELVGFIWAAMTRHESRHQAA

SEQ ID NO: 195225 - protein, 407 aa, unidentified
MNIAAIDVHKKLLVVVIGDREQPDRPLQSRRFGTGAAELRHLSAWLMQYEVREAVMESTAQYWKPVWMELEPHMKLHLAQAQSNKAAKGRKSDLADCKRLLRRFAAGELMLSFVPEAGQRAWRMVTRGRLQLIRERVQLQNQIESLLEEGRIKLSSVISDLLGVSGRRILRAMSGGETNPETLAALGDEHLKCGQERLVDALTGAMGNIHCSLLAQHLDRIELIDRQIVDLDKLAAGQMQQHQAAVMRLIEVPGIGAAAAQEIIAEIGPDAAAFLSSAQLASWIGVCPGSNESAGENHSGSSAKGNRFMRRLLCQSAQAAVRTKGSHLQSVFQKLIVRLGYVKAVWAIAHRICIIVWNILRKGARFVERGEAINPKAVQRAINHHLKALRRLGYQTDANAAPVTAVS

SEQ ID NO: 195226 - protein, 356 aa, unidentified
MSYDVKYIGMDVHKEAIVIAVLNGSGKLVMETILETKASSILQFIHGLRGELHVTWEEGTWAAWLYDLLQPQVQQVLVCNPRRNALLKEGSKSDKVDARKLAELLRTGMLRPVYHGENGLRTLRELGRSYQTISKDLTRVMNRVKAVYRGWGIPCAGTQVYVPRYREEWLSKIPQSGVRRRAELLYQQLDGLLALRREVRGEFLAESRKHKAAKLLRQIPCIGPIRAAGLIALMQTPHRFRSKRQLWTYSGLGIETHDSAQYRYVNGQLQRSKKPQQLRGLNRNHNHEMKEIFKSTATSASCGRGPFHDFYAALLDKGMEPEMARLTLARKIAAVTLTLWKKEERFDAEQLKTQAA

SEQ ID NO: 195227 - protein, 415 aa, unidentified
MGLRVLYARCAGLDVHKAIIVACLLLTAANGKASREVRTFASTTAGLSALADWLASQGVTHVAMESTGIFWRPVFNLLEGRFEVILVNAQHMKAVPGHKTDVKDSEWIADLLRHGLLTASFIPPKAIRDLRDLVRARKTLVQQRAQAITRVQKVLETANIKLSSVATDVLGTSGRAMIEAMLSGVSDAETLADLARGRLRKKLPALREALEGCVEATHRLLLRQLLAQIDFLQGQIDSLSADIDQLLGPYEHLVARLMQITGIGRIAAAAILAEIGTDMRRFPSAKHLASWAGLAPGNKRSAGKRRHAPTTKGNTHLRAVLAEVVWVISHTHDTYLSAQYHRLARRLGKKKAIVAVSHSVLVIIYHMLSDNQDYHDLGPHFFATLDSTRQRDTAVRRLQALGYKVTLEEVKEVSN

SEQ ID NO: 195228 - protein, 432 aa, unidentified
MNRCLHVGIDFSQKGADFCLLFPDGRALDLHQHFANSQSGYEQARVYLLNTMQTHDFDGLNISAEATSYYWLPFFWQLAHDEQLARWRPNLFLLNPRWVHWFKRSLSPDDKTDAKDPFYIAERTRTRPPAAPWSSQDGWLPLRFYTRLRFHLVQTLTREKNYALLHLFLQHSAYATQEPFSNWLGVTSRQVLNGEIDFTDLTQLPLDELADLLDEWSGHTLPDPQENARRLQQVAAESFLLPEPLATPVRRIFDTTLQHIASLETLIQQVEQWITAEVQAHHPEVLTLTTVPGVGLVLAASIAAEIGGLERFFSGQKWDAHHKRWRPKNLRDVEDAVAKMAGLWWPRSDSGNFHSEDRHMAKSGNRYLRFAFIQAANGMRRSLPAYARFYSLKYRQAAKHKHKRALVLTARKSVGLFVGLLHRKEAFRSKEV

SEQ ID NO: 195229 - protein, 335 aa, unidentified
MNYRLFAGIDVSKMKTDVVFFLTENPDEQFHGTFSNNEEGCKEMMAWMQELTGLSITEMLFCAEDTGLYTLPICTYFDGQGGNLWVENALRLKRSLGLKRGKSDKADAAEIANYGFLHRRKAVLFKLPSKTISKLKHLLSCRKQLVKQQTALKNASGELEAFDGDSADFTLEIRKSLIKEYDKKIDMIEAELIRCVKADKLLEKQYRLVNSVYCIGPQTAMFIVVLTQGFSLFDDPRKFACYCGIVPFGNTSGTTLKGKPKVSHLANKRIKTLLTMCALNTIKKDNEFKRYYDRKIQEGKHHSAVLNVLRNKLVSRAFAAVLKDRPYKKDLYNAA

SEQ ID NO: 195230 - protein, 338 aa, unidentified
MVGHLNPNEDGLMTEPMVGIDVAKATFDVAVPLEPKGKYRTKAKLPNTPAGFTLLGDWLDHHAPGAAVCMEATGVYHEALATFLVERGVTVYVANPAQVAAYAKSELSRTKTDRTDAKLIARFAMAQWQVGTALRPWVPPTPAQRKLRALVHRLDDLEGMRQMECNRLDVSDSAVRTSITRVIETLDAQIAALKKEISEHIDSDPDLRRDTDLLASIPGIGELTAAFLLGCAGDLRRFDDPRKLDAFAGMNPAVRESGKWVGQSRLSKLGHGLLRAKLYMPAMTAIRHNVAVRALFDRLVARGKPRKLALGAAMRKLLHLAWGVIRSGKGFDPSIALA

SEQ ID NO: 195231 - protein, 451 aa, unidentified
MNIMPLFAGLDLHKKEVEACILDEQGKVLKRDRFPATRDAITGFATQHLSNAKVALEATTNTWPVVALLQPLCLSVTVSNPLRTKAIAQAKIKTDKVDACVLAQLLRTDFLPEVWAPDQQTRRMRDLTTQRAIVVSDRTRIKNRIHSILHQRLIPAPAGDLFSKANLAWLRSSITIDNDGRAALDCQLRLLDQIETETQQITNVLAALAYQDPQVQLLMTLPGVDFPIAQALLAAFGDIHRFASGDKAAAYLGLVPSTRQSGDHCYHGPITKQGRSHARWLLVQAAQHLDTHPGPLGHTFRKLSRKKNRNVAVVACARKLAVIAWHMLKNNEPYRYAQSRTVDEKLRRLRVQATGERRKTGPKKGAPRSTNHGTGKKTRALPGLDSIYKEAGLPPLQDLKPGEAKMLAEKGSADFAAQIRTDRRVEKRIGGPKGRPKKVRVSAAKAEPLAQ

SEQ ID NO: 195232 - protein, 366 aa, unidentified
MSAISKTTDRVVIAIDPHKASWTAAVVDASSQPVATIRVPVSRDGYRALRRFADRWPDPTWAIEGASGLGAPLTARLRTDGIDVVDVPAKLAARVRMLSTGHGRKNDDADAVSVGIAARSAPRLNSAAVDDTVTALRAIVEHRDDLVKTRTQTVNRLHVVLTNLIPAGAQRDLTAERAAELLRGIRPRDTAGKTLRGLATDLISEIRQLDRRIAKAAADIQTAVTASGTALTELCGIGALTAGKILGRVGTIDRFRSAAAFASYTGTAPIDVSSGDVVRHRLSRAGDRQLNLCLHVMALTQIRQDTPGRAYYLRKRTEGKSHKEAMRCLKRRLSDVVYRQLRHDANRLEAGPGGHSGAALSSSAAS

SEQ ID NO: 195233 - protein, 370 aa, unidentified
MSVRRILAKTINTDLEYEAIGIDLAKNCVSAALLTTDGEVVCIDRLDYSELEKSAQALSSTTFAMEPCTEMNYLVQKLEAWGHRCLVIGGKNVQNYVENHFSGQKTDLNDAQALAFLAQDTQLRTIKAKDMEQQKYASLTTLREQYIKQYRQTIVSLKGICQAWGLNISKGISGKARLKDLIENHAAFPEELKESLVDMVTHAQTAQKALNKITKTLEELAKSDKVCQLIQTIPGLGSICSCRLRATVGDIKRFKSPKDFPAYYGLVPRSIATGHNERKGKITHRGDRTMRSLMVQAAGSLVNMATKGKLKSKQLTKWILKKQKEKMPWGKLVCAVAAKLLRIVRAVLISNKPYNSKIAGVAKCSLPKGS

SEQ ID NO: 195234 - protein, 389 aa, unidentified
MYENGKKVIYVGIDVHDETFTCCFYDPDDKQAKKGLRTVKIFSSAAQVRRCLADFCKDNPFNISEFTFRCAYEACGYGYELARSLHSSGIDCVLLAPSTINEYHNNQRIKTDKRDAFTIAKSYANGEASPVHIPDKHDEEVDNLIRVRDMYKDTAKRYKQQIIAFVKRLGYKYEEHGHYWTQKYMKWLANLPLSTVNRYVLDNLLNSLAQASDSLAELNGQIASIAENDKRYAERVRRLRGLFGIDTYTAMAIVVKSGDFKRFAKAKSYMAYLGLIPGEASSGGTVHKKSLTKTGNPRLRQLLTESAQCYLRKPNLLKSKAFKKRQEGLPEEFITYADRGLMYIVRKGKKMLYNKKNWNVIVSALARTLAGFIWGAMTNHLDRNPKAAA

SEQ ID NO: 195235 - protein, 376 aa, unidentified
MSLTPSTIYLGLDVHKDSITIAILPEHARAPDRVERIPNDLARVRRLFTRIARAGLIRACYEASGAGYVLHRALHEWGYHCDVIAPSLIPQRPGVQRKHDKRDAVELARLYRAGELTPVRIPTETEERVRDLVRCRETFQRELLKSRHYILKFLARRGFVYRDGAHWSRGHMIWLQGFAARATPLAAEDAIVFREYFALLEYKLARRVELDAQIEALALTPAFATPVGWLQCFRGVKVHSAMVLTTEIVDWRRFETPRQLMAYLGFVPREHSSGPRERRGGITKAGNSHCRHVLLQASWSYRHPPQIGTSLKARQRGQPAAVIAHAWKAQHRLYKRYQHIAHRKPPQVAVVAVARELIGFLWAVMRDLEPRRALAA

SEQ ID NO: 195236 - protein, 332 aa, unidentified
MNEITMLGIDLAKNVFQLHGVDAAGHVLMRRQVRRKQLMNTIAQVAPTTVAMEACAGAHEWGRRIARLGHRVLLIAPNFVKPFVKSHKTDRNDAEAICEAALRPTMRFVALKSIEQQQMLALHRLRAGAVKTRTATANRLRGILLEFGIVIPQGIARLRSELPSVLEDAENSLPPLLRAELASQMQRLRDVDAEVAGITSQIEQLAAAHEPCRRLMQRRGIGALTASAFVAELGDHRAFRNGRQVGAWLGLVPRQQSSGGRAVLLGISKRGDKYLRTLLIHGARGVVRLADRHDDPLNRWIQKLRERRGTNKTIVAVANKTARQLWAQLAYG

SEQ ID NO: 195237 - protein, 411 aa, unidentified
MEILHPRCCGIDVHKASVCACISIKEAGVVEKHKRRFDTTTAQLRELVLWLQQQQVSKVAMEATGVYWKPVWNLLEEEFELLLVNPQHLKSIPGKKTDFKDGERIADLLQHGLLRGSFVPPRPIRELRDLTRMRATLAQERSSIINRIEKTLEDPNLKLGVVASDVVGASGRAMLEAVVRGETDPAVLADLAKGTLRNKIPQLKLALQGKITDHHRFMLRQWLDMLDLVDRKIALLEQQIVEHSRPFEAMIHTWMQVPGLRRINAFSLLAEIGADMSQFPSAAHLASWAAVCPGNRESAGKQSSGKIRSGNPWLRRTLCEAAWAASRTKNSYFRALYQRLARVRGKNRALIAVAHSLLVTVYSFTVAGQPYQDLGLDYFNRLHKHHLEKTLIKRLEKLGHRVILEPRGNAA

SEQ ID NO: 195238 - protein, 335 aa, unidentified
METIYFLGIDVSKKKLDSALTIDGKNYQQDEMENTAEAIQIFFRGIKKMFGMRSSQMIVCMEHTGIYCLPLLDFLAKNKIKTCLESALQIKKSQGITRGKSDRIDALRIAQYAYKNREELHYWKPQRGVVQQLKALLVTRERLVKIRTQLEVPIRECEEFIIESIRKDMIKNCRRTLKALDLDILRVEKAIDELIKADPTLAEQVKLATSIPGIGRITATNMIIATGEFTRISDSKKFACYAGVAPFPHKSGTTIRGKTRVSNLANMNLKKLLHLAAMSAIQCSEELRTFYKRKQQEGKNKMSVINAVRNKLISRVFACVKNQRMYEKTYQHALA

SEQ ID NO: 195239 - protein, 388 aa, unidentified
MQTAADHPEAPTAIRHDLGAILISLELSRSTWLITSLSPGGGEKMSKHSVRGGDVAGLLERFAQLQEKARARTGRTFPIIVIQEAGLDGFWIHRVLQNEGIESHVVDPASVATSRRRRRAKTDRIDGEALLRTLLAYKRGEPRVCAMVKATTPEEEDRRRLCRERKVLTNERVQHVNRIKGLLFGQGVSGYEPLRRNRRQQLNELRTGDGRPLPKHLKTQISRELDRLELLLEQIKAVETERDALLAAQKVALPGPAAMLLDFNGIGPEFTAVLWSEGLFRHFDNRRQVASYAGLAPTPWQSGSVDHEQGVSKAGNPRLRTTLIQLAWLWLRHQPQSALALWFKERVARNGGRHKKTTVVALACKLLVALWKYVTAGVVIEGAVMKTA

SEQ ID NO: 195240 - protein, 355 aa, unidentified
MSGEKYIGLDIHQATISVAVVDSQGKVVMESILETKASTLLEFLAGLRGSLFVTFEEGTWAAWLYDLLKPHVTEVLVCNPRKIPLLKQGNKSDKIDARKLAERLRLHDLKPVYHGETGVRMLRELARSYLTVVKDLSRVMNRLKALYRSWGIPCGGRDVYYTRHRREWLEKIPEAGTRRRAEQLYQQLDMLQPLRLQARRELLAESRKHVITAKLRKIPSLGPIRSALAVALIQTPHRFRSKRQLWTYSGLGLETRDSGEYHYVRGQVRRRKKQATIRGLNKDYNHDLKGLFKGAATRASVKPGPFQEFYQRALAKGIKPTMVRLTLARKIAAITLTLWKKGEDFDINKLNSQAA

SEQ ID NO: 195241 - protein, 310 aa, unidentified
MDKIHAGIDVSKATLDVAVTSRKEVKSFPNSESGIKEITSYLKKQAPDLTVMEATGGLEKLLAASLVQESVPVVVVNPRQVRDFARAKGKLAKTDTIDAEILAEFAREIHPEVRPLSDKQTDEIKALLVRRHQIVDMITMETNRLSSADMRVKPSIQEHIGWLKQELKNMDKDLEKKIQNSPVWREKDNLLQSVPGVGPVLSMTLLGALPELGNLNRKQIAALAGVAPFNRDSGRLRGKRTTKGGRVRVRAALYMATLVATRFNPLIKSFYNHLLETGKVKKVALVACMRKLLTILNAMLRERRTWEYAN

SEQ ID NO: 195242 - protein, 341 aa, unidentified
MVAADAVGRRLAVKTIGTTSEDHLKAVEWARQWPDTKFALEDCRHVTRRFERDLLGAGLEVVRVPTHLMAAARRGGREKGKSDPIDALAVAHAALREPDLPTARLDGPAREVKLLSDYRHTLVTERTELINRLRWHLHELDPGLEIPSRGLRRYCVIDDLAQRLTEFDGLVAELARAMTARCRELTQQVNDLERQLRDRIRALAPSLLAVPGCGVLSAAVIVGETAGAQRFRNKNAYARFTGTAPIPVWSGATSGKVRLNRGGNRWINCALHMIALTQTRGHGPGKEYVDKLVGRGKTRVEAMRLLRRRLSDVVFRALISDERTVAQQSTAVTEIAALHAA

SEQ ID NO: 195243 - protein, 343 aa, unidentified
MELYVGMDVSLKDTSICVVDDDGEIQCEGTVISEPEAITEFIRTHAPHAKRIGLETGPTTTWLWHEIRVLGLPVICIDARHAKAALSMQINKSDRNDAVGLARIMQCGWYKEVQVKRLSCHEIRAVLGSRAQLVKIKRDLENQIRGLMKNQGLMIGKAGGNVFRRRAEELLGPHGLLCDAVRPLLEVREKVSREIAALYRKLMGLARIDADIRRSMTVPGIGPITALAFHSAIDEPIRFRRSRSVGAYVGLTPRRYASGEIDWSGRISKCGDRMLRTYLFEAAGVLLTRVPQWCKLKAWGHRLWKRIGFKKAKVAVARKLAVILHRMWRDETNFIWSSKEVAA

SEQ ID NO: 195244 - protein, 440 aa, unidentified
MSNVISFEVKNEQAAAIDIGSRHIFVSWDGITSKSYESFTQGYSACIADLKQQGVKHVCMEATGVYWIALHHMLEKAGFDVCLVNPKEVKQLQGRKTDVSDSCWMYQMFSAGLVRRSYVPKDLLKELRMLIREREDIISMGSTYINKMQKALELMNIKLTEVISQINGASGIGVIKAIIAGERDAQKLLLLCHKTIKENKAEQVLKALEGDYNETWLFLLEQNLILWEFHQRQLDIIDARVQQILERLQQDKQIIEITGKPKPIRHHPPKIKNLHQTLLNIYGVNANCIPGITNYSLLKLLAEVGTDMSRFATVKHFVSWCGLAPGHNQSGTKRKKSKFKNRSNAGQIFRELAWGLMNSKYIAIGAFIRRLKGRKNSGIAIKAGARKIAEAFYNLLTRGVDYVEQGVRKYEQQLKEKQRLYLEKMAKQHGFKLVDNPQVG

SEQ ID NO: 195245 - protein, 465 aa, unidentified
MRTDEKRWRNRKAKKELARRLQSENPGLEVVHPHAAGIDVGNGAHYAAVRPDRDSQSVRRFECFTADLYRLADWLQSCGVQTVALQSTGVYWIPLYNILEERGLEVYLVNARHTKNLPGRKSDVQESQWLLKLHTYGLLNNSFQPPSEIRTLRTYWRQRLQHVTGAATCVQRMQKALTQMNIQLAHVISDLSGVTGQLIVRAIVAGERAPQKLAELSHPRIQASRAEIAKSLEGNWRPELIFVLQQEMEMYDTYQRRVAECDQELQKHLRDFADTVPPPVKKELPPKKKKKQNKNNPHFHLADELERITGVDLTRIDGIDVIVAQTVISEVGLDMSPWKTEAHFASWLGVCPDNRISGDKVLARGTRHVLNRAATALRLGASTLLKSQTYLGAQYRRLRSKLGAPKAITAMAHRLARLVYRMLKYGQHYVDKGAEYYEQRNRQQQIEFLRKKAARLGLQLAPALP

SEQ ID NO: 195246 - protein, 307 aa, unidentified
MEKHFSTYWGIDVSKNWLDISINQKTYQINQTKKDIQLFIKEHAKLPSSILATMESTGGYETLVAQLLDQSGVTVHVAHPNKIYHFAKAKRQLAKTDKQDAMIIEEYGKFIEADEICPLPNDFMRELKDLSVRLDELSAMRHQEICREKMNHSTATKASILNMIKILDKQLKLIETEILKLIKSNEAYKTRFELLQTMPGIGPKISLTIVAELPELGDANKKQIAALVGVAPIIRESGQQKGKARTQFGRAHVRRKMYMGVLSAVRHDERLLDLGKPKKVAQIAVLRKMLVILNTMIMKNEAYQKCI

SEQ ID NO: 195247 - protein, 416 aa, unidentified
MRVHRNCCGLDVHKQTIAACLISEKEDGTSSQQKRIFGTMTQQLRELAQWLSEAKVTAVAMEATGIYWVPVWNVLEPHGFELLLINPEHYKAVRGKKTDLKDGTRIAELLQDGRLAGSYVPPVAIRVLRDLTRYRTKLVQYQSSIANRIQRLLEQCNIKLASVASDVLGVSGRAMLRALAAGETNPQRMADLAKRQLRKKIPTLQLALEGCLLPHHRFLLSDMLEELDHIGSKIARMEQAIEEQMRPYEKAVDAWMTVPGVKQRLAWNLVAEVGPTVDAFPSAADLVSWAGICPGNNETAGKRKSGTTRNGNRWARKALCEAAWAASKTKATYLQAQFRRLAAIRGSKRAIIAVASTILTIGYHMLKQGTTYRELGGNYFDKRNLLRTTRRLVKRLEALGHTVILEPTQSPFQSSD

SEQ ID NO: 195248 - protein, 380 aa, unidentified
MQTVNRSRTFFVGVDVHKDTHTAVGLSPFGEKVFEMTIGNETADFISLVEKTKQEAGGIGLVPCFGLEDIHSWGERLSSFLVEVGLPVVAVAPILVDHRRSKMTHPEKSDSLDAHGVAQVMIQRIDSLPLYKLTEEAQKAKQIRELSLEREWLVKERSRLKNQLHILLHRIHNTGYRTKFKDPFSKKALRYWMRSIPQNTDAILEQRMKRAVRRLLDLWEEIQEIEEELEATMKENQQTLSTVSGCGTVIAAELIGEIGDINRFHSPGALAKYAGCAPREHSSGKTIRWRKTRSGNRRLNRAFHRMALSQISRSGNDAARAYFKRKVSEGKTKAQALVCLRRQLVNVVWMMMKHKTEYRLPAEASAQTGYPQGKLVDFFS

SEQ ID NO: 195249 - protein, 339 aa, unidentified
MSKLIQPIQAMVFCGIDVSAASLAVAVQLQDRRFEERIFDNSASGHKALIRWLHKLKARARVSLEATGVYSLDLALALDGADGIEVAVLNPKLIHRFAQTLRRSKTDSADAQVLAEYSARMPFAPWRAPGRNGLELRAISRHIQSLVVEQARQNNRLHAAESSTSTPRCVVNDIKRSMASLKLRIVRLRGEALELVRRDEAMQKRFELLIGIPGIAAISALALLGELVLLSPEMSVRQWVAHSGLEPAHQESGTSVHKPSRISRAGNRHLRRALYMPALVAVRRDPHLKAFYETLLSRHKAKLQALIAVTRKLLHAIYGIFKSQMPYDGSKLFPQLQIA

SEQ ID NO: 195250 - protein, 349 aa, unidentified
MDRTTYGLDIAKSVMQLHWVDAETGEIGRKKLARAKLSAHFAQLQPVRIVMEACGSAHHWARVFTGLGHEVELLPAAQVRPFVRSNKDDAADARAIWLAAQQSDIRRVPQKSAEQQGVLALHRTRSHWISVRTATVNSLRGLLDEFGVVLRGGRQAGLKALVDQRAAIDEQIPAPMRSLVDGQLRTLAQIGERIDALECEIAALQKQLEGARQLDQVPGIGVLGSTALAATLGDARVWRSGREFSASLGLVPAHAGTGGKVRIGHLSKRGDPYLRTLLIHGARAVIEHAKHKPKWLEDLLARRPKNVAVVALANKMARTAWAIVAHGRTYQRDWKSSRPGSGAAQAAAA

SEQ ID NO: 195251 - protein, 344 aa, unidentified
MKDVRILGVDLGKNSCSIVGLDGEGRVLLRRRTRREGVIALAAKLPGCVVAMEACCGAHHLGRLLVEQGHEVRLMSPEYVRPYVKAQKNDDRDAEAIAEAATRPTMRFVALKSEAQLDVQVLHRVRDRLVGQRTSLTNQIRSILLERGIVVPQGRRSLLEALAVLSSEPDGSRVGTRVQRLLDDMLDQWRALDARIKALDDEFAEMARNDPAARRLATIPGIGVLNATALVAAIGDGRTFSRGRDLSAWLGLVPHQATTGGRPKLLGITKRGSKYLRKLVIQGARAALPSLARTATPLGGWLRGLLARAHGNTVVVALASKLIRIAWALLRNETRFVAGGAAVA

SEQ ID NO: 195252 - protein, 420 aa, unidentified
MADICEEAAELVARVAALDVGKKELVACVRVPREDKPGQRRQEVRAFATTTRSLLELRDWLVCQQVSLCVMEATPVYWKPPFYLLEDAVECWVVNARDAKNVPGRPKTDRLDAVWLCKLAERGMLRPSFVPPPWQRELRDLCRYRRTLIQERSREKQRAEKLLEDTQIKLSSVISDIFGKSGRAMLEALIAGQRDPQVLTGLADGRLRASRTVLHEALTGHFRDHHGYLLRMMLDHVDALTAQIEDLTGRIEEAIAPFARQVAQLDEIPGVGKTCAQELIAEIGVDMSRFPTAGHLASWAKFAPLARQSAGRTKPGTTGKGNPWLASALGDAAKGAARTKTFLGSRYHRLARRRGKQRALVAVGNSLLIIAWHLLSDPDARFADLGPDWHDRLAPLRRKRQLIAELERLSGKKVLLQEAA

SEQ ID NO: 195253 - protein, 344 aa, unidentified
MANLNQFCDFTKLIGIDIAKSVFQIYSCDTQTGEITNVQIKRDKVLESLANCGKCLIGMEACGSSQYWARKLQALGHTVRLMDPKLVKPFVRHNKSDKADAEGVYHALVSGVRSVAVKTETERDIQTLLTMRALLVKQRTARINHVRGLLAEYGHVMPKSVDQFDKKVDECINSLEGDAVQLVIDMLRDTNKSIRDEHDRIKTLQREISRLANQTRNAKHFLTVPGIGETIMAYMCVLLADPTQFSSGRQFAAYLGLVPMHTGSGGKTVTTKIPGRCDKALRALLVQGAHAVARSKYWTDWVKNILAKKPKKVAMVAIANRMARQCWAVASKGQDWRRMPVTAA

SEQ ID NO: 195254 - protein, 354 aa, unidentified
MQIERSGTFPNLTIGIDIGDRSCAVCVVGGSGEVVRRDRVRTEEAELRGWFDGWERARVVIEAGTHSPWMSRMIESLGHEVVVANPSRMRGTGKRKTDRVDAEYLARQGRAYVRLCYPVRHRGEEAQRGLIAIKSRDVLVRSRGSLIRSVRGSAKSLGVRIGKCSAESFVAQARRDFSEDLERMFEGILRAIEELSREIRSYDKAIERSCEEEHPETKLLQQVAGVGPLTSLAYVLIIDDPGRFRRSRTVGAYVGLIPGRNDSGERSPELPIHKEGNVLLRRLLVQSAHYILGPFGPDTDLRRWGLRLADQGGARAKKRAIVAVARKLAVLLHRLWVTAEVYEPLRKTELKRVA

SEQ ID NO: 195255 - protein, 318 aa, unidentified
MTQTTHTTALYVGIDVSQKTLTIALYPTDEVWTIDNTSQHHTALVQHLAQLPIQRVLLESSGGYEKAVVSALQQAGLPVVVVPAQRARYFAKSMRGDLKTDRADARMLAYFACCYPVQPVAPCSPVQAELKELWARREQLVQQVEREKKRLHTVQSEAVRASLERMLAVLKDEIAQIEARVEALMASDAALAQKAALLQTAVGVGRVVAYGLVAELPELGQVSHRAIAALAGLAPVRCESGDWVGRARVRGGRPRVRRLLYQAAVVAVSHDGRWRAAYAGLLGRGKVKKVAFCAVARQLLVVLNAMVRDGRAYERVSE

SEQ ID NO: 195256 - protein, 400 aa, unidentified
MRVVFGIDVSKVSSEVAILVNGEKVHGYTMPNDAIGFARLLGDLKTVHKPEIIFEATGVYSRRLQAFLEDNGYAYTRLNPLEAKKQLDSLRVRKTDQIDAEKLAQSQFVLNRKPTYVQEEVYQNLRDLSRFYQNLTEDIVRAKNRLHKVLQVTFPELENILATPTGEQYWKLVMTFPCKELVLDRDGNELLDSIRQSTSKRISDKRVVYLAEKLTALANQSYCAVKKTSPMFEEIRYYAQELLRLSEKRQTILDEMVELAQSLPEYEILLSIPGIAETTATSIIGELGDIRRFHSANQINAFIGIDLRHYESGNFLAQEHITKRGNPYARKILFKCIHNIASASHTNPCHIADFYEKRKRQSQTTSTKPHTIASIHRLIRTMYYLITHNKLYDYTSTQNQ

SEQ ID NO: 195257 - protein, 389 aa, unidentified
MEARTVNNLPPAGIDDDAVRCLIAIELSKKSWIVAVNTPLSDKISRHTLKACDGKELLDLCERIRTRAARETKKRVEIVSCYEAGYDGFWLHRLLEAHGIRNYVIDPASLQVDRRARRAKSDGIDVEKLLRSLMAYLRGEPKVWSVVRVPSVAEEDDRRLHRERGRLINERIQHVNRIKGLLAIHGIYNYQPLRRDRMQQLERLRTADGRTLSPRLKAEIRRELQRLELVIGMIKTIEAERDAIASTKTETEHTSAKKIQDLVKIKSIGPEFATTLVGEVFYRSFDNRKQVASYVGLTPAHFQSGAMCRDQGISKAGNAKARTVMVELAWLWLRHQPDSPLSVWFRERVGKLKGRIRRITIVAVARKLLIALWRYLETGLVPTGAALKV

SEQ ID NO: 195258 - protein, 358 aa, unidentified
MSTYYIGADVHNNSTELAIEKRNKIVARYSVPTTIPAISNVLDSLQGNKYMAIEEGPMSGWLYRNLNKKLDKFISSDPRRNKLISSDGDKDDKIDSAKLASLLRGGFLRPIHHSDDDSRAELKHWVSLYHDRVRDAVRSINKIRARCRMHGITISRSALREPASRFNWLLKTNHRPLANQLKMLWIGYDATVKQVRFARRQLSALSKKYGIIKQWSLLPGIGLIRATTIFAYLDTPWRFKKKNKLWKYCGVGLQRTTSGTDRKGRPKPARLKLPWAVNRILKNAVLGAAQTAINQKDNAFKDYYERMVQNGMITSNARHAVARKMLTVMWAMWKSNSPFDESLVSNKSNSSTVPALSR

SEQ ID NO: 195259 - protein, 344 aa, unidentified
MVTFGVDAHKRTHTIVAVDDRGTPLGQITVGTTSKDHLGLLRWAARFGAERRWAVEDCRHLSRRLERDLLSAGERIVRVPPKLMAHVRDSARTYGKSDPIDALAVARAAQREPDLPVARLDGPDRELRLLVDHRESLVAERTRLICRLRWHLHELDPGWEPKARSLDAQRTLDEVQARLQQQTGVVARLARDLAHRCAELTAVINALEKEIAQLVEKLAPALLALPGCGPLTAAKIIGETAGVDRFKSRDAYARYNGTAPLPVWSSNKARHRLSRTGNRQLNAALHRIALTQARWHPPAKALIDRRKNGGNSGREAIRILKRRLSDAVFQALLHDQTHALVPAA

SEQ ID NO: 195260 - protein, 352 aa, unidentified
MKIIGCDFHPSYQQIAMMDTETGELWEGRLEHEQGEARRFYQALQGQTVRVGMEAVGNSHWFEQLLAELGHELWIGDAAQIRRLVVRQQKTDRRDAKHILDLLLDGRFPRLWVPSPQMRDVRQLLRHRQKLVEIRTQVKNQLQHLALNQGVRRKSRLWSVQGRAVLEQLPLPPWTARRRGDLLAMLDRLQEQVGELDRAVRAEAEQRPEVRVLMTHPGVGPVVGLAYVLTIGPITRFPRGKQVASYLGLIPSEHTSGGHQKFGPISKQGNTMMRTLLVEAAQTAARFDEQLRRQYGRLKARKHSALAKVMVARKLAVRMYWMLRENKPYAQLYAQRPVARMQGSPSHSVVAS

SEQ ID NO: 195261 - protein, 410 aa, unidentified
MRRVRDRVAGIDVHRDTAVVCCQLWDHQQLTVEKQTFSTTATGLRSLRDWLASHEIELVVMEATGDYWKPVFYPMEGLFAEVWVVNAQHVKNVPGRKTDMADAEWLADVAAHGMVRPSFIPPPEVRAVRDLTRYRKTQIKARGQEIQRLEKVLQDAGVKLTSVASRVWSKSSAAMVEALIAGERDPAKLAELAKGRMRSKIPELVEALEGNWRPHHSVVAGRILAHIKFLDTQIESLNTEIVEATCPFDAAVTLLETIPGVSTLTAQTIVAEIGTDMTRFPTAGHLAAWSGLAPGSRESAGKHKPTGTRKGGRHLRTAMIEAAKSASRANGTFFAARYRRVARRRGHQRATVAVAHSMICAVWHMLTTGEVYNDLGEQHYDRYQQPERRHQRAVTELQAAGYTITAPRAA

SEQ ID NO: 195262 - protein, 318 aa, unidentified
MKTQSRYLGVDIAKDLLVVAFEHNRWQFANSKEGHRKLIAQIRKQSGSIHVVCEATGVYHLAMGLALQEDGIALTVSNPARIKYFGRSEGVLAKNDPIDAALIERFANARRPEADPPISREQIALNELVNHRAQLVASRKRLLATRQQLLDAGVRKEVDRAIAALDRCITAAERRLKEKIESNPNWKAKLACLSSVSGVGFITAVVLLAKMPELGSLSRGQCAALGGLAPYDNESGAHSGKRSIHGGRSDVRSALYMSALSATTYNPVLRQFYQRLIAAKKPCKVAITAVMRKLLVYLNSLLKSLRQAPALSGGQTYP

SEQ ID NO: 195263 - protein, 332 aa, unidentified
MVAGTHGSLNKAGSTKMTQISRTAGIDTSKAKLDVAVHGGVERWQVDNTPVGWRRLAAELTSAEVMRIGIEASGGYECGVVGHLRAKGFVVLVLQPIQVKAYARLHLRRAKNDTLDAVLIAACAATIDRPRIAPDERLAKLAQYLTFVEQIEEDIARFKVRLEHVGDARLRRMVVADIARLKARRSGQLLRIVAALRAHDDLARRLDLVLSVPGLGARTALALIIRMPELGRISREEAAALAGLAPFDDDSGKHKGERHIAGGRRRLRRSLFAAALPAAFRWNKALIALYGRLTARGKAHNEALIACARKLLIYANTVVQRGTPWTERTLTT

SEQ ID NO: 195264 - protein, 459 aa, unidentified
MYTIGLDLAVQAAHKAVVADEQGRFITPILTLRTRPRELDQLLTRARNGKPDMALRVVMEPTGMAWFPIAVYLIRHDVTIYLVNSQEVADLRRYYKRHAKSDRIDARVLARLPLVNPEHLHRLHLPSAKASACQRSCKQLDRLGTLISAIQNRVQAIDRFAWPGLEEQVFADPFAPAARWMRTHWYEPQRVLEAGVAKIREQLQASSEAADSTGEWVEALVDLATEVIALYGAENQYLDFAQLQAEVCREQEWLTALEQQHQTLRKKIVRPLYRHIHPSRNLETLKGVGQDSAAVYASFIGEAERFSSTRVFRGWSGMVPDSAQSADSEAKGLHITQAGPGLIKKFAYLDAEIARRWDPQMAAIYYDQVINKGKHHKQAVCACATHLLDRVLVVLREDKAYELRDVDGTKVSVEQAQAIIAERYTVSQEARQRTTKRHRKAQAERQAERNSKGKGAEAW

SEQ ID NO: 195265 - protein, 356 aa, unidentified
MNKRSKLDFSGQPIYIGLDVHKKSWSVSIFTQYGEYKTFSQPPEAETLSQYLQHHFPGGQYRSVYEAGYCGFWIHDQLKDKGIQNIVANPADIPTRDKERKNKRDRVDCRKLARALRGDEIEGIYTPPRWKLEDRSLVRTRLSMGRKQTRCKNLIKSMLLFYGVGIPERREMGHWSRRFIRWIEEIRMERASGDMALQSHVEELCHLRQLIAKLNRTIVALARTEQYRSWISLLKTVPGISTLTAMIVLTELHEITRFGSIDPLCSYVGLIPDIQGSGEKEHVGGVTQRRHSQLRWLLIEASWIAVRKDPVMMEAFQQYCKRMRKTKAIIKIARKLLNRIRYVLKNQVEYVTGVIE

SEQ ID NO: 195266 - protein, 423 aa, unidentified
MKPLATHQFSAYVGIDWADTKHDICLQVPGNASREFDCIAHRVAAIDQWAQSLRQRFGSPIAVALELAKGPIVYALQKYDFLVLFPINPSTLAKYREAFKPSRAKDDPTDAELALDLLMRHPERFAPLQAQSEDMRALLSLTEQRRELVADKTRFTNRLTHTLKQYYPQALDWFDQRDTVLFCDFLTRWPTLTQVKRARPSALKAFFYAHNGRRAHLISARLDAIKAATPLTQDLGVIAPCRLQVLVLVEQLRTTLQAIERFDREIAELAPRLPDYSLFRDLPGAGQHLAPRLLAAFGEDRRRFQRADELQKYAGIAPVTERSGKKSWVHWRWQCPTFVRQTFVEWAGQTINKSFWAAAYYRQQRDKGSSYQAAVRSLAFKWIRILYRCWQTNTPYDESRYLNALKKRRSPLLKNLDLGAQNA

SEQ ID NO: 195267 - protein, 346 aa, unidentified
MDQQCHYVGLDVSLETTSICVVDDAGAIIWRGKCGSDPDTITATVRQHAPGAVRVGLETGQLSNWLTLSLRRRGLPIVCMDARHAKAALSLQINKTDANDAFGLAQVVRTGWYREVAVKSMDAHTLRMLLVARSRLVSQRQATANTIRGLLKTFGLVVVKGSKGLFSVRVREQIAGNPALVAIIEPLLAVWHAVRDQVAMLDRQMLARARNDQVARRLMTIPGVGIVTALAYTAVIDDPARFRRSTSVGAYLGLTPRRYQSGEVDATGHISKCGDSLLRGYLYEAAAVLLYRDGRASVLKSWGLGLAKRIGMRRAKVAVARKLAVIMHRIWSDHSEYRWTATQITA

SEQ ID NO: 195268 - protein, 322 aa, unidentified
MDTLYTHCAGLDVHQKEIVVCVLMGSSDEELMKEVRTFPTMTKNLYEMLRWLEELRITHIAMESTGIYWKPVFNILEDYFDITLANAQRIKNVPGRKTDVADAEWIAKLLRYGLIEKSFVPPADIRELRDLTRLRKKWIGDMTAEKNRIQKTLECSNIKLGSVISDVFGVSGRKLLTRLVERGYVSPKEVEETIHTRMMPKASAISDSLFGTLNEHQIFLIRQSWNHILFLEQSIEQIEVRIQELLVPYQEQVELLLTIPGVKQNSVASIIAEIGMDMSQFPSASHLASWAGLSPGNHESAGKKKVPEPPKGTHISNQRFAK

SEQ ID NO: 195269 - protein, 342 aa, unidentified
MLIIGCDYHPGMQQIAWFDNESGECGELRLEHGTGEAEKFYRELKRRGVRVRVGIEASGHTRWFERLLVELEMELWIGNPAKIAAQRVRKQKTDRGDAQLLLQLLREDRFPRVWVPSPENRDLRQLLWHRHRLVQMRTRVKNQLHAIALNEGVQRRSRLWSKQGRAQLESFALDRWTARRRHDLLELFDHLTPQIAELSQAIEQEAERRPEVQRLRTHPGVGPITALAFVLVLGTPDRFRCGKQVGSYLGLIPCEDSSAGKQRLGHLSKQGNTLLRYLLVEAAQAAVRCDAQWRRCFVHLAMRRQRNVAIAAMARKLAVSLYWLWRNAEDPPAAPQSGSHVG

SEQ ID NO: 195270 - protein, 320 aa, unidentified
MDRIIGIDISKQDFVVAILTNNKPIIKKFVNNESGFHKLVKYLKMLKIDNAKICMEATGKYGEKLANFFYDLGYKVSVVNPACIKAFAKTNLSRNKTDSADALLIANYANKCDPKLFIPKKPILKEIQEIHRCIQDLKSQLNQVTNRLENVDLLTQVVSSTWQDLASSIRLKIEALQNHLVKLALSDENIKKDYENLQTIPGIASISAIAIIAEVPDIDILPNARALAAHAGLNPKHTLSGSSVKGKSRISKIGSGNLRKILYFPAIVSSSVNHNFQEFKQRMRAKGKHNMVIIVALMRKLLHIIFAILKNKSIFSYELA

SEQ ID NO: 195271 - protein, 397 aa, unidentified
MEEVTDEPLYRDRVCGIDIGKAELYATIRVPSDKDPARRASETRRFATTRRGVLALADWLRCWQVPAAVMEATGDYWKGPFYRLEAEGFECVLADARQVKNLPGRPKRDRSDSSWLAQCFERGAIRPCFVPDPEFRVIRLHTRYRRDLTEERTREKNRAEKLLESAAIKLSSVVTELEHALEGAEFFTPEHAALLKAMLERIDGLTAEIGKLSEVIERLLAPYEEQLQQAESMPGWGRRSAEDAVAETGADMSKFPTGGHLSSWGGRTPLDHQSGKRNGRARHKKGNKYLGAITGETAVAAGKTQTREGARYRKLARSRGKNKACVAVGNTQLKVYHKLLSNPGMRYQDLGPDYYERRAQTRRKIAYHVRELEELGLEVTLCRPGPAQDDPEPTQAA

SEQ ID NO: 195272 - protein, 335 aa, unidentified
MKKYELIVGIDISKLKLDATLLWVSDVKKTKHLVVTNDKKGISKLFKEIEKTGVVLENVLVNFEDTGVYSLPLCCFFSEIKQDYWMIPAIEIKRSKGISRGKTDKSDSSDIAFYGLTHLHKLRLSVLPEKDLMKLRLLFTEREKLMKALRLLDSTKEGNNYIPKEIMKEVLKFNAQIIKNLRSTVLKIEKKMELILNENEILKKQNELIQSVPGVGPLTSIYLILVTKGFQSFENARQLACYAGVAPFEYSSGSSIRGRTKVSNLADKKLKSLLNLCALNAKKHDVELKHYFERKVAEGKSKMLVLNNIRCKLLGRIFATVQRGTPYVNTQKFAA

SEQ ID NO: 195273 - protein, 436 aa, unidentified
MRGCRCSMIMGFTKPIEHFNLKRKEVITMNTLYVGIDVSSRSNVVYLMLPNGNKHSNFSVANSHEGSVQLVKRIHSALTSHSLDTVLIGLEATSVYGDNLVYFLREDAALAPFNRKIHVLNPKQVKKFHDAYNDLPKNDYVDSFVIADCLRFGRINKEVYLGDYRYKALQNLTRARYFAVQNLTKEKQRFINVLFKKYSTLTQEKVFSNTFSTTALAVYNEFESAEALANMDLHELTDFIMEKGKNRFPDPDTVAKAIQKAARSSYRLPKTVNDSVNQVLSISITSMKALEAQIKEFDKAIKSQMELLSNVLISVPGIGPVYSAGIMAEIGDINRFDNQAALAKYAGLAWKQHQSGGFEAETTRLIPSGNRFLKYYLCEAAFSLVRCDKEYSDFYHLKYKEVNRYQHKRALALTARKFVRLVFRLLKDNRLYCPAK

SEQ ID NO: 195274 - protein, 401 aa, unidentified
MKKNTTAKRNQKAVPKRHKNQIRHMAAKQRLTIGLDLGDRNSRYCILDEAGEVVSEGQLPTTKTGFRALFEKMPSSRVALEVGTHSPWCSRHLAGMGHEVIVANPHQVKLITQSTRKNDRIDAEQLARLARVDPKLLSPIRHRGEEAQGDLAVIRARAELVEARTGLINCARGLVKPMGERLKKCDADQVGESLLGGLSDQVGRVVGPLLKSVEGLNEQIAEYDRRIEAVAQRYPEVELLTQVYGVGILIALTFVLTIEDAERFAHSRDVGAYLGMVPKQRDSGDSQPQLGISKSGDRLLRSLLVQGAHCILRKGAPDSDLRAWGMARLPSGDYPGKQPGGGKNAPPPRSGSKRGKRRTIVAVARKLAVLLHRLWVTGEVYDPLYNRKAMQAGQGKAQVAA

SEQ ID NO: 195275 - protein, 343 aa, unidentified
MQTITTIGLDIAKSVFQVHGVDTAGQVVIRRQLKRRYVLAYFQKLSPCLVGIEACASSHHWSRELKALGHTVRLMPPAYVKPYVKRQKNDSTDAEAICEAVARANMRFVETKTPEQQSCLMLHRTRHLFIRQQTAVINSVRAHLAELGIVAPVGRKGVMELLHVVADPSDKRVPEVARACLAALGTQLLSLKEQIVRFDRMIMAWHRSNEASKRLQYIPGVGPMLATALVASLSDPKAFRSGRNFSAWIGLVPKQHSSGGKDRLGSISKQGDRYLRSLFVAGALSVIRYAKIHGTKHRPWLTALLARKPTKVAAIALANKLARMAWAMMAKGERYKTPVALAA

SEQ ID NO: 195276 - protein, 312 aa, unidentified
MHGLFLGIDVAKDKVDVHVRPSGERLTVGTDETGLGELLTWVRERAPALVVLEATGGYEVVVAATLGSAGLPVAVVNPRQIRDFARATGQLAKTDALDAAAIARFAEAVQPPGRPLATAAAQALGALVARRRQLLDMLGAERNRQAQTRDPQLHRQIGAHVKWLTKALADIDRKLHDTIRATPLWREQDALLKSVPAVGPVTAHTLIAEVPELGQLGRRQIAALIGVAPLNRDSGTLRGRRMIGGGRAPVRRVLYMTTLVAVRYNPVIAAFYARLTAAGRPKKVALVAAMRKLLTILNAILREKRPWQPELA

SEQ ID NO: 195277 - protein, 422 aa, unidentified
MHLLGVGIDWAESFHDVALGRPGQGVIEQFRIEHSTAGVARLVARCLELEPDPAEVRVVLETRHGVLVETLVDARFTVLPVNPDLVARRRGPANKKDDAEDARICCLLALDQFADLRKLIPHGELAGELRAIARDDERAARDQRRLLNRLRADLLATFPAALAIAGDDLGSPIMLKLLANWPTHAALVQLDAETLEAFARSARHGWPDRFAARVVDALAAEQLPVRDYLVRAKATTIALTATQLLALREARRDWERRMGELLLGERRRGRAKQPENPDPGKAVPGGEIYLSFPGLGNRLAARIAGEIGDHIEQFNSPNALQCYAGTAPVTRRSGRSELVVARRLAHNRYLGTAVHQWAFCSLRRSRWARAFYDTKIANGKSHHSALRALANRWLEILWHCLTHTVRYDETVHIRNLHTQPAA

SEQ ID NO: 195278 - protein, 332 aa, unidentified
MQGRALKEEKLMEKEKVYVGIDVAKASIDMAVHQSKQRWSFTNDDEGISQAVSCLQELAPVLIVLEATGGIELPLTAALAAAGLPVAVVNPRQIRDFARATGKLAKTDALDAQVIAHFAAAVKLTPRPLPDAQAREFSALLTRRRQVVEMITAERNRLRSTYSKVVREFIKDHIARLERELAKLDNNLRRSVRGSSVWREKDDLLQSVPGVGPVLSATLLADLPELGTLDRKQIAALVGVAPLNRDSGNFRGKRTVWGGRAKVRATLYMATLAATRHNAVIRAFYQRLCAAGKDNKVALTACMRKLLTILNAMLKHRTPWRYEAAFIIGPCS

SEQ ID NO: 195279 - protein, 345 aa, unidentified
MSGAYEGRQIVGFDLHRRRSVVVRMTETGERLETVRISNDPDYLRQVMVRAGEAPEVVLEAAYGWYWAADTLAELGATVHLAHPLGVKMFSLRRVKNDARDAADLADLLRMGRLPEAWIAPPATRELRGWVRHRAKLVALRSCLKNQIHAVLAGAGVAVPMSDLFGPGGRELLAATRLRVESGSRIDSLLRVITVLDFEIDLYARLVAGRLRSDPGYVAIQQIPGVGPVLAAVFVAEIGDIARFARPEQLASWAGLTPKHHESDTTVHRGRITKQGSTLVRWAAVEAVQRVSAHTRLGQTRDRVGERRGRNIGTVAAARELITLVFYGLRDHHIRCLAARDTTAA

SEQ ID NO: 195280 - protein, 404 aa, unidentified
MTESPPNQSTTAQPALGPKGRAVGLDIHPDTFAAAILKGRDPLSARVVHNVTRQPLDALCAWAARHTTKDDVLVIEASANTFAIAERLIAIDRQVFILESHRAGQIGKSYLANDKVDAAKIARIYLSGLAIKVWQPDPETRQRRELLSTYQRCVKDSTRAQQHLRSFLNEHALRLPKGFRLCRPEAVHRLLGLKEWSARQKLLLQEMHGSLIATRERRQRLRRMMALEIEEQPDFLRLYKLAGLNLITTYALVAIIGDINRFATSKKLVSYLGLNPSVVESGEFEGGGALRQHGRGSLRTLLIQASKRLLTTHNPLQKWGLSVALRRGTNKAAVAVARKLTVAVWHVLKGHWNQALEETTTLLTKLTKLTKLATELGVTTLKELGYASKIAFQDQKLRVLRTHP

SEQ ID NO: 195281 - protein, 457 aa, unidentified
MESYYMGIDISKGYADFVILDAKKNVVEPNFQLDDTFSSHCKLFEILKRFFDHHCESVIFAAVESTGGYENNWLHSLNGFHGSLNIRSARLNPLGVRANSKASLRRVITDKISARDVAEYLIAHPEKVTYQQEDSLASLRRQWGFVRLLVKQKTQILNQFESLLYTANPELITYCKSGVPAWLLKLLKQYPTAAKLAKAKASSVARTPYVTADRAKKLVDQAKKSIASATDETTGKLVSAMAEQIIRMEETIRIQTQQMVKQCAIPEIALLKTFPGISDASAIGLMLEIQSVKRFSSVKKLAAFFGLHPAFKTSGDGTSSVRMSKQGRKEPRKILFMVAMVSLTANPHIREIYEAHTEKGMKKMAAIGLCMHKILRIIYGMLKNNQAYDSQVDQENRKNRTTREATHTAKNENRRYEMFNQQAPISRRQNNKRKEWEQSQGDNITQCGIDVSTPSAA

SEQ ID NO: 195282 - protein, 353 aa, unidentified
MKYVGLDWAYRTAQWCALDPGGEIAGEGRFAADRDGLARLVLELGDEVTACLEMMSGALWARDELVACGWQVQVADARKVKTVAPLAAKTDKVDARLLAELCRRQLVPALWLPSLGDRELRERLRRRMHLVRLRTSAKGRIFGLQTQWGIRISLRRLRRADGMTLLERAGMPAVWRHSISECLALIDFLDARIVPLDAELRPFAQADPRAVLLDTIPGVAELLALTIAVEIGEISRFAGPEKLVSYGRLAPRVRQSGEGRPHTGPLNKSGSRLLGWAAVEAAQHAWRESNPWHQLYLDVSRRSRNHNSAKAAVARKILIAAWHMLSRNEPFNPAPRSTGGASVPASSRLALAA

SEQ ID NO: 195283 - protein, 415 aa, unidentified
MEPMHQRVAGIDVHRMKHVVTILIGQEDGAVSSETREFGGFKRDMRALVAWLQTHRIQQVVMESTGIYWKSVFAHLEAAGIAALVVNAFHVKNVPGRKTDVGDSEWLAQLARFGLLRGSFIPPKDLRELRIVSRYRRKLTGMLAGEKNRLHKLLDDAGIKLGGVVADIDGVCASKMVEGLIAGGKPDELAALGRGKVRATTDILEAAMDGELSARHRLVLDMAYDHLRYLEGKLTALDRYLLAAMQPYAWAWRLLQTIPGIDAISAAMILIEIGDDPHRFGSPARLASWSALCPGNNESAGKRKSGKTRHGNPIVRYLLCEAANAARRTKTVFRAKYESLVIRRGHKKTIIALAHKLVRTIFCVLVRRKPYRDSTVDYEAASVAKNAPRWIRALKKYGYWPQVAAPSAPIVATAS

SEQ ID NO: 195284 - protein, 391 aa, unidentified
MIYVGIDVAKDKHDCFITNSDGEVLFKAFTITNNLDGFNDLYQKIETVMKDITKVKVGLEATGHYSYNLLGYLIDKGLPTYVINPLHTNLYRKSLSLRQTKTDKVDARTIASMLMSDVNLKSYSDTSYHNEELKSLTRYRFDKVKERAKLKSSVSRLICILFPELEKLVPTLHMASVYALLSEFPGAKQVANAHLTRLTNLLSEASKGRYSKDTAITFRDAARTSIGSNMPAKSLELKHTIKLIKELDSEIDEIENEIKIIMDEINSPILSIPGINYRMGAMIIAEIGDFSRFDSPDKILAYAGFSPSTYQSGHLYGAYAHMEKRGSRYLRYALYNAAKYVCHWDPTFTAYLAKKRAEGKHYNVAISHAVKKLIRIIYHLEKTNQQYIKAS

SEQ ID NO: 195285 - protein, 444 aa, unidentified
MKEQKKKKRANQKLLIMNPKVAGIDVGASCHYVCVGNLSEESIRRFGTFTQDLEALADWLVSLGVESVAMESTGIYWVNLYDTLESRGLELCLANARYVRNVPGRKSDVSDSEWIQQLHSYGLLSGSFIATGKIRELRAYVRQRENLEQQKSMQLNLMGKSLQLLNVKLHQVSSNLEIQVCMKIIRAIVDGERDAKKLADHRHPQMKASKEDLEKSLAGNWRSEHLFSLKQGLTFYDFIKTQMLLCEGEIEGVLQEMNQKNMVSSQRPKQTLVRQNDYHFDVKNYLKEITGIDLTKIDGLSEKTILTILSETGSDLSRWKTAEHFTSWLGLAPKMKKSGEKVIGHFKQSVANRANQAFRMAAWALTNSKSYLGEFYRKLAFRRGTLTANKATARKIAVVFWNMMCRKTDFIPQSQHDYEEKYKQKQLLKLEKQAAKLGLVLQKL

SEQ ID NO: 195286 - protein, 383 aa, unidentified
MEYCTTIGIDVSDKTSKICVMQKMPDGERRIIIETTCATTREGFSEVLMKLDRSWPTIFETGTHCRWMDKCIKSLGFKTIIANPSKVPSITKSNTKNDRNDARELARLAIADVSMLHPVKLREEVYQQMLRLHRGRNELISVRTKLISQLRGFAKSMGYRIENCSTERFHKINKNLWPSELESIGWPILDVLEVVNLKIKAFEKLIRDLSKTLEFKDMVDRVRTVYGVGEIGSTAFIAIIGGDPERFEHSRDIGAYLGMIPKQDQSGDKDKQLRITHAGSCLIRTVLVECAGVVLQANAKETDIKLKGLRIAMNGGRIAKKKARIAVARSLAVTMLALLKNPQVEYIPLSEEGKRGFERYYAEMEYLATQKAMKKDRKGFKAA

SEQ ID NO: 195287 - protein, 342 aa, unidentified
MYYIGLDVHKKTISYCIKDASGQVHREGTIGATRNELDAWVRTLPEPRMIAMEATIFTGWIYDHLLPHAEKVKVAHPLMLRAIAAAKKKNDRIDAGKIADCLRCDFLPECHMASTEIRDRRRTLRYRHLLVRQMVQMKNRISGLLLETGVSHNKQRLHKVGYFRELISKNEEVQENIRPLLRLSRETIVRCQKTEYALVSSLERDPLLAERIKRLRTVPGVGPITALTWALEIGDVARFRSVKQAISYCGLCGDEKSSADKVLRTPLSKQRNKHIQHVLVEAAKLAPRQNHELAVVHERETQKGNRNRATLAVARKMVAYLLAVDRREREFVPAEGGSTAAA

SEQ ID NO: 195288 - protein, 337 aa, unidentified
MERQYVGIDLHRRSSTIYRMSGDGEMLGCDKIPSQPTELAAVMAEAGDAPEVVLESTYGWYWAADLLQELGAKVHLAHALGNNWGNRRVKNDERDAKDLSAMLRLGRLSEGWIAPPQTRELRELVRYRFRLVCHRSSCKAQIHGVMAKNGILPVRGSLWGPSGSAQLDALVLPEAYAMRIASLRSLIDIYDTEVRRLDAHVHRELKDDRGYQAILRLHGVGKVIAAIFVAEIGDISRFDSPEKLCSWTGLTPKHRESDEKVQHGRITKQGSPLVRWAAIEAISKNHGGDKLRADFVRIAERRGKYKARVAVARKLLTLVFYGLRDGEVRCLERQEAA

SEQ ID NO: 195289 - protein, 339 aa, unidentified
MFYVGLDIHCKYITICILNDEGKVHGRWTVRQLDQLMTVLERLPGPFQVCYEASTGYGVYFELLTQVADHVAVAHPGLLKLIFRSKRKNDHRDAEKLAKLLYVGEVPRVHVPPPDVRAWRELITFRGTLVEKRTRAKNGIRGLLRSLAIRPPQRPGLWTKKGLDWLKRHRFDNSMHALRRDLLLEEIATLSEQIRRVEAELARYSADSVAVQILRSIPGVGLRTAEAVAAFVDDPHRFPDSKRLGAYFGLVPSQDQSGSTNRLGHITREGSATVRHLLVEAVWQARRRSPTVAAYLDRIQRGEKDRRKIAIVATAHYLIRVMWAMLKHKTLWRETVVAA

SEQ ID NO: 195290 - protein, 356 aa, unidentified
MTSSTKYIGMDVHKESISIAVRNAAGKIVMESLIETKASMILQFIDGLRGDLHVTFEEGTSAAWLYDLLKPHVTKLVVCDPRKNKSMREGNQNDKIDARRLAELLRLNHLNPVYHGEHGLRTLKELVRSYLTVTRDLARVMSRVKAIYRSWAIPCSGKQVYAQCHRAEWLAKITEPGVHRRAEFYYQQLDALRGLRREVRRDLLAESKKHKAWKRLCQIPAIGPIRAAVLLGILQTPHRFRTKRQLWNYGGLAIEMHSSADHRSVDGELQRSRKNVLVRGLNRNCNHDLKNLFKGAAAVASSKPGPFEKFYAALVAKGMKPEMARLTLARKIATIVLIVWKKGVSFDANHLKPQTA

SEQ ID NO: 195291 - protein, 316 aa, unidentified
MNKKTQVEINVGIDTSQSQLDIYVRPTGDYFSVENTPRGAKQAASKIRKYQPTRILIEATGRLELNFVCAANNAGLPVVVCNAGQVRQFARSTGRLAKTDKLDAQDIAHFGEALQPPLTQIKPEKLRQISDLITVRRQCLDMSTMQKNRLLRMPKSVQPPIQRILKTIQKEIECIDQKLDKLVDAIPQWREQRDLLMSAKGVGKVVAYTLMSELPELGKLNRKEIAALVGVAPMNRDSGSYRGKRRVSGGRSKVRTVLYMSMWSTIQYDPKIKATYERLLAAGKPKKVALVACMRKQLTVLNTMMKNGTHWNEKFA

SEQ ID NO: 195292 - protein, 337 aa, unidentified
MKRIPVSVGLDYSMSGVQVCVQDASGKVLRNKKCDDSWRAVAGMVGEGEVVRTAVIEACTGAADLAEELKAHAGWPMKMAMPGIVKKMKLNPDKTDWQDAHVLCDLGRVNYVPPVWLAPKPVRELRLVVRYRQQLVNQRRAAKLRMGAILREQRIVLQGRRWSKPWQAAMAHNKDLSEQARWVLQQHVRAVVKLTSELAQVEAHLEAIAANDWMVRQLMTCKGIGLVTACVIRAEIGSFERFKSAKSLARYCALTPRNASSGARQADAGVIQAGNRMLRTILIEAAHRLARFEPRWKALAAAMRARNKHGSVIAVAIANRWMRSLYHQGKQLEQAAA

SEQ ID NO: 195293 - protein, 467 aa, unidentified
MVCFNPSTKLIRVRPAELIVAMPQGMSTRRKFVSYFAPLVGRGSDEECVSREVGTDMQVVHERCCGLDVHKKTVVACILITLANGEVQRHIRTFSTMTAGLLALSDWLESLAVTVIAMESTGIYWRPVFNLLEEGRSVILVNAQHMKAIPGRKTDSKESEWLADLLRHGLLKASFIPPAPVRELRDLTRYRKTLVQERAQEVNRLHKVLETANVKLTAVATDVLGKSGRAMLEALVKGATDPEILAELARGRLRQKLPQLQEALDGRVEPHHRLLLKHILAHIAFLEETLEQLQRDIEERLHPFEEAMTLLMSIPGIQALAAATIVGEIGDDMTRFPSAKHLVSWAGVCPGNKQSGGKRRSSKTTRGNATLRAILAEVVWVLSHMKDNYLSAQYHRLARRLGKKKAVMAVSHSLLVIIYQILSTKQPYSDLGADYFEQRDSARLTQRSVRQLEALGYAVTLVPKEVA

SEQ ID NO: 195294 - protein, 362 aa, unidentified
MRIIGCDLHARQQTLAMLDTTTGEVVEVTLKHEGDNVREFYSLLPRPVRVGIEATGSMQWFLNLMEELGIECQVGHPAQIRASAPRKQKNDRRDAELILKMLVEGRFPAIWLPSKELQDLRSLLRHRHQWVRMRTRIQNALQSIALANGLRRGTALWSHDGQSRIASLPLAPHTAYRRSELQAMYEKFEAEIEKLNQRVEEQACKSPGARRLMTHPGVGPITALATEVFLGDPARFADSKALASYVGMIPREYSSGGRQRLGGLSKQGNPLLRFLWGEAGAHAARKDPELQRFYRRKLVQKGLGKASVAVARKLGIRLWIMLRDQIEYNEFCRRGQKQQKSSDACAGMPETRYGANSHRPVD

SEQ ID NO: 195295 - protein, 444 aa, unidentified
MDIINPNAAGIDIGSRSHFVAINQEHSDVKEFGVYAQDMKELLEWLLINDVKTVAMESTGSYWQNLYAELQNSSIEVILTNGKFTKNIKGKKTDVLDCMWIQKLHTLGLLSGSFLPDLQTEHLRTLVRHRGNLIYTTSKASKRMSQNMRLMNLRLDVVVKDIVGLTGLKIINEICNGETSGKELAKLRHGNCRKSEEEIAKALQSNNRQDYLFVLKQELHKYQDAQQLIIECDVEIKKLLDEFINQDDVKKSLYIDKKVHKRINKNTPKNIDLNLMSYQYFDGVDLYAIEGFSHGTVLSLMSELGEKGIQKFQNAQHFTSWLRLAPNNKISGGRILSSRTPKGSNRLKIALRQAANAIGNLKDTHLSNFFNRIAYRKGRSVAVSATARKLAAILWNMLYKNQQYNPPTVYEYLDQKRKKKVLELQKQIANLDARMSNLQTSVSC

SEQ ID NO: 195296 - protein, 344 aa, unidentified
MKQYVALDCSLKQISVCVMTEQRRIVKEAVIAADAGSIAEFVWSQVPDPELIGLESGPSSAWLFHALRAEGLPVVVIDARHARAVLSLRINKTDRNDAVGLAELLVSGWYKPVTVKSLESHRVRTVLTNRALLVGIRQDLENQVRSVLKTFGFVLGKGRGSFADRVSEILAGKRLLLRLVRPLLKAWAAIREQLLSVDKEALAIAAQDDTCRRLMSVPGVGAITALAFKTTIDNPWRFSSSDKVGAYLGLTPRRYASGETDRAGRISKCGDGLVRTYLVEAAGVLLTRSKATSDLKDWGLRLAKRASAAKARVGVGPQALRDPAAAVDRQQRVPAASERHRRMS

SEQ ID NO: 195297 - protein, 360 aa, unidentified
MRIIGCDLHARQQTLAMLDTVTGEVVNRTLMHEGKEVREFYSQLPRPVLVGIEAIGPMQWFLNLLEELGITCQVGDATKIRAAEPRKQKHDRRDAELILKLLVEKRFPKIWMPSKEQLDMRALLLHRHHWVRVRTQIQNALQAIALANGLRRGPGLWSYDGQAKIAFLPLPPHASYRRYALQTMYRKMEEEIENLTEQVSAQAGQRCGARLLMTHPGVGPITALATDVFLGDPQRFTDGKALASYVGLIPREYSSGERQRFGAITKQGSPLLRFLWGEAAAHAARRDPELQRFYRRKLVQKGLGKARVAVARKLGIRLWIMLRDQIDYEEFCRRGQKQSSAACAGMPEVGFGAHSHRPVD

SEQ ID NO: 195298 - protein, 415 aa, unidentified
MNRLIERCAMLDIHKSQITACVRVPDDVGGRRQEVREFRTTTAGLITLADWLRSWSVTVVGMESTGVYWRAVFYLLEDEFECQLFNARHLRHVPGRKSDVQDAEWGCQLIEHGLVRPSFVPPRPLRELRDLVRYRKAKIQERGREVQRVEKTLQDAGIKLSSVASEVLGVSARKMLDALISGTHDPEMLAELAKGALRKKIPALKEALQGRFTGHHALLVGQMLAQIDFLDETIQTLSEQIEELTRPFSRELELLDTIPGVDKRAAEMLLAEIGPDMSRFPTEHHLASWAGMCPGQRESGGKKHSAATRKGSKWLRGTLTECAKGIVRTKGTYLSARYHRIKSRRGHAKATIATGHKIITAAYHVLSRGVPYHELGEEFFYRRDTEATERYRRRLIHQLERLGHKVTIEPLPEAA

SEQ ID NO: 195299 - protein, 439 aa, unidentified
MKVMYERVAGIDVHKDMIKVAIRSAGEKPWTRKTEILEYRTFYGVLQHMAAELRKRGVTHVVMEASGVYTEPVYYALCEQDFEQIAVINPAHARALKGHKTDAKDCARLAELFECGLLRGSYIPAPELKEVRDLTRYRMKTVQARTSEIQRLAKALESAGIKLGSVASDITGKSATAMIEALTGGERRGQVLADLAIGRMRTAGKLADLSQALAGRFTEHHALLCRLHRDRITGLGAAVADLDQRIGGKAAAWQREADLLKTIPGFGDVVAWAWLGEIGPAPHLYFPDHEKLASWVTLCPGNNISARKRKYGRTGDAGTYIKPMLVQAAWSAIRVRGRLQARYSRLVRRFGGDKNPGAKKKAITAIAHTLLKIAYQVLRSGQPYQEPGADFYTRRESPQQRQAYLQRQLQKLHPGCVITITISPPEPPDRPALTGTAIA

SEQ ID NO: 195300 - protein, 422 aa, unidentified
MLEETHDSEEVIQRVAAPDIGKARLVCCARVPSEQGSGKRLQEVATYATMTRSLLGMSDRLRQLGVTRVVMEATSDYWKPVFWLLEAEGFECWLVNARDVKHLPGRPKTDRLDAVWLCKVAERQMLRPSFVPPPPIRRLRDLTRYRADLVVARTAEKQRVEKLLEDAQIKLSVVASDIFGVSGRDMMAALLAGQRDPKALAQLARRRMRAKLSLLEEAFHGRFGDHHAFLLAKMLGRVDQISADIAELEAKIAEEIGPFAQQADRLDEITGVGQAAAHVLIAEVGVDMGRFPTPAHLASWARFAPGVKESAGKTKGKNATGHAVPYLARVLGEAAIAAGRTDTFLGERYRRIARRRGKQKAIVAVGRSILVIVWHLLSDPNARFCDLGPGFYDTRSNADRAKRNHVRQLESLGYKVTLEPAA

SEQ ID NO: 195301 - protein, 324 aa, unidentified
MIDGILGIDVSKNTLDASVSSCSKVRARCFANSPDGWRHLLDWLITQKIRRVHACLESTGRYSLGIACALYEAGHVVSIVNPAQIRDFARTKLGRNKTDGVDASHIREYCELFKPQPWAPSSEAHRRLGELQTIRAGIIAGLTEWKNRKNSGMVDAVAQSLADVTISHFNNQLEAVDEAIAQTIDNDSGLRRKRDLLLSISGVGEILAGVVLAELPGPDVLRSSAAVVAYAGLNPRQHQSGTSIDRVTRISKIGNAVLRAALYMPAMSAMRFNPAIVALVTRLKSRGRLNPKQIVVAAMRKLLVLCFGVLKTGKPFDPAIAMGC

SEQ ID NO: 195302 - protein, 340 aa, unidentified
MFTVGLDVHQRQSTMCVLNQDGRIVNERKVEGSFVAVAEALRGIEAPIQVCYEASCGAGKLHDLLAGVAGRVVVAHPGQVRLIFRSKKKNDRVDARKLAKLLYLDEVPPVYVPGVDVRAWRGLIEHRRRLIDKRTRTKNSLRAIVRSHGVLPPRRPGLWTAKGRAWLAGLPLPTETESLKRDMLLEELVYFDGAVARVDAALNRIAAGQPGVALLRTIPGIGARTAEAVAAYIDRPERFGRIKAIGAYFGIVPSQDASGPVNRLGHITREGPATVRKLVVEAAWHSIRCSTRVRGYFERIHGGDRERRKIALVATAHYLLRVMLAMLKSGEAWRPEDQTA

SEQ ID NO: 195303 - protein, 337 aa, unidentified
MKLYCGIDLHSSNNVVAVSDEQDRPLYEKRLSNDLDTILDVLKSFKGELVGCVVESTYNWYWLVDGLMAAGFPVRLAHTGAMAQYAGLKYTNDFSDARYLAHLLRLGILPTGYIYPKEERGLRDLLRRRLLLVRQKTLHHLSLQSLIARHSGQRLTANEIKQLETTQIAAYLDAPILLGGQITLQARCWLDEAITRIERELQKHIQPREDYQLLQSIPGVGSVLGTTIALETGTIQRFPSPGNYASYARCVKSEKISNGKCKGQGNKKNGNKYLAWAFMEAAHYGAIWSTPIKRYYQRKQAKSHILIAKKAVANKLARACYHMLKRGEVFDVTRAFG

SEQ ID NO: 195304 - protein, 392 aa, unidentified
MYIVGIDIGKNHHEASIVSPKGKQIGRSLRFATTHKGADSLMSFIFKNIGNSPCVFGMEATGHYWYPIYSFLKAKGYTIYVINPIQSDSLRKMYIRQTKNDSIDSFLIAEVIRFGQFGTTSMADENILAMRQLCRYRDSVISSRTEIKLRIGTIMEQIFPEYEKQFSSLWVSTSMGILEKYLTPENIENAPIDELFEIIKDKSHNRLTRAKAISIKEAAADTFGIKIAQDAFSFQLKQLIDRMNFLDKQIEALDCQILEYYEKFDCYLHTIPGIGMIAAATILAEIGDINRFKSSSALVAFAGIDPTVRQSGEFSSTHNHMSKRGSPYLRHAIFLAATTCSFHNSPLNAYYKKKRDQGKHHLTATGAVARKLTTVIYAVLRDSKPYEPKKFC

SEQ ID NO: 195305 - protein, 322 aa, unidentified
MYAAIDIHRHAFQVAVLDPESGELVEERFAADRESLARWAEAIEATTGWRWVWRELVERGFEVRLAEPLQTRALLGRRRSAKTDRLDARWLARLLAKEMLPQSWIPPEQIQQLRDRTRLRKALAEDRRRWGQRLHAYLLHEGWPCSRSNLLRAPGLRWAAALRLPADARLQVDSLLAVIAALEAQLDTLDAELRRFARADERCKALQSIYGIGPILACHLLAEIGQARRFRRAEQITRLAGLDPDESGESRRRGHLAKAGSPHLRWALVEAAVHAHRPTAPDLELYRATRTRRDTSVARLTVARKIGKRAFHVLREHELASA

SEQ ID NO: 195306 - protein, 414 aa, unidentified
MGDHGRIAGIDVHKKMLAVVVAEGSSEGQLRFERARFGTMDSELRRMGEWLRERNVGEVVMESTAQYWKPVWQQLEGQCQLYLAQAQSNRGPRGRKRDFVDAERLVRRQMAGELILSFVPDGEQRMWRIMSRTKYQLRRDRVRLQNQLETFLEEARIKLSSFVSDLLGISSLRILEALSKGESDLPKLAAMADANLRATPEQLQDALQGAKHLSEPQRQILGLFLARLKLIDEQIEALNSNLGQSLRQYNDAVVRLAEVPGLGADSAQQVIAEVGPGAATFPSPQELCSWVGTCPGKEESAEVSKSNRSPKGNRMMRRLLNQAANAAVKTKGSVFQNLYRRWVPRLGHNKAIWAIANRLCRLVWKILHQGDRYIEYGDRSNPKTIKERAKRMVRELKALGYQVQIAPPAEPSVE

SEQ ID NO: 195307 - protein, 344 aa, unidentified
MTIIRIGLDTSEHVFHVHGVDGHEQPVLRRRLQRSQVEKFFAKLPPTRIGLEACGASHHWARVLRSLGHEVVLIPPQYIKPYVKRGKNDAIDAEAICEAMSRPGMHFVPVKSRDEQAALMLLKVRDLLMKQRTMLTNAIRGHAAEFGVIATKGPQNLAELLERIGEDANVPAPARELLNSLAGQIAALEVRLEALEAKLMAHHKADPRSRLLATIPGVGPITALSLTLKVPDATVFRSGRHFAAWLGITPREHSTAGRQRLGKISRQGDEGLRQSLVLGATAVIQQVERRIKAQRVSRTDSPWLLQLLARKPEKVAAVALANKMARIIWAMLVSGELYRQPQEV

SEQ ID NO: 195308 - protein, 422 aa, unidentified
MEGTESNYQWYVGIDWGAERYEVCVLDRQAHVVARRSVAHSGTGIAEFVDWLVKFCEGKPERVAIAIETPRGAMVESLVERTFAVFAINPKQVDRFRDRYTVAGAKDDNRDAFVLGDSLRTDEHCFHRVGLDEAAILRMRELSRLEENLQQESNRLSNQLWEQLHRYYPQMLALSKAADEPWLWELIEWAPRPVEAGKLELARVQQLLGSHRIRRIRAEQVIEALKKEPLRLAPGAEEAASEHALLLLPRLRLAHEQRTQVAKRIQRMLGEMSAAEPTEKADKREHSDVKILLSLPGVGRVVPATVLAEASGPLRERDYHRLRNYGGIAPVTRQSGKKKVVSMRYGCNMRLRNALYHWARTSVQKDAAAKKHYAALRQAGHSHGRATRGVADRWLAVLIAMLKAGTLYDPERRGKGQATKVS

SEQ ID NO: 195309 - protein, 394 aa, unidentified
MNRIVYIGMDVHTSNYTLCSLDPGYGVEKDNYFAEVQFTNNFVTNVVNYVTNLKKKLKDCEFVCGYEAGCLGYSTYKDLTKVGIKCVIMAPSTMAVQKGGKKVKNDRRDARVIAQCLAYQTYKEVYVLSEHDEAVRGYLRMRDSHNKALKRIKQQIIAFCTGHGLFSPTKSNWTVAHLKWLKDLKFNDPVEQEILNEYLSSLTFLSDKIKAMDVRIEELASEKQYCENVKKLRCIKGIETNVALTLLAEIGDFNRFSKPTDFASYLGLIPGEQSSGDKVRGTGITKAGNSTLRRKLTESAKGYWRGRIGIKSATFKKLEKELPKEVTEYALKANTRLQRKFFNMTHVKGKNMNVAASACAREMACFVWGLITNHYDKAPAVPKTDEELLDLNLG

SEQ ID NO: 195310 - protein, 392 aa, unidentified
MEWIRTTVQSHKRKGTVMKEKVRFLGLDVHAETIAVAVAEQDGEVRSLGTIANREESIRKLVKKLGPVEQLRACYEAGPTGYVLYWQLTELGVECAVVAPTLVPVKAGDRVKTDRRDAEKLARSHRSDDLTAVWVPDEGSEALRDLVRAREAAKQDQLRARHRLSKFLLRTGRRPAMGLKAWTERYLAWVQQIQFSQPAQEFTLLDYLHEVQHMDERVKRLEQAITEAVKLAPLQVQEVIRGLQALRGVAHLSAVTIAAELGNISRFESARKLMGYSGAVPSEDSSGKRQRRGNITKTGNAHLRRIAIESAWSYRFRPAIGPRLRQRQEGVPEEIKEIAWKAQIRLHKRYLKLMAAGKDKQKIITAVGRELLGFVWAIGIKAETADKLQMAA

SEQ ID NO: 195311 - protein, 338 aa, unidentified
MKVYGAIDLHSNNNVTVLIDEQDRVVYEKRLPNDLSMITQQLSAYQDSLQGIVVESTFNWYWLVDGLMDQGHKVHLANTAAIQQYQGLKYTDDTSDARWLAHILRLGVLPQGYIYPKQERAVRDLLRKRGQLVRQRTTNLLSIKNLITRNTGSSIRSNRIKTLDAQLVDDLLPNPDLTLAVKANLAMMQCADGQIDILERTLTDRIKLRGDFSFLKTVPGIGQILALTIMLETGEINRFPTVGNYASYCRCVGSQKLSNGKKKGSGNTKNGNKYLAWAFVEAANFAIRFSPRIKSFYQRKKAKSHGVVAIKAVAHKLCRACYYIMKDQVAFDVAKAFA

SEQ ID NO: 195312 - protein, 370 aa, unidentified
MLDTTTFVGLDVHARSIKAVSLDVMTGEVRAATFGYDAGAVAEWVRSVDPEARCVYESGVTGFDLQKRLSGLGVDCVVGAVSKMIKPSADRRRKNDRNDAEFLARMLSVGNVVEVWVPDDECEAARDLTRALEDARDDLSRSKQRLSKFLLRHGLVFDERTPTGRRKGNWTRAHWSWIESIRFAERADNDVLAYYVDAVRRAAEEKARLEGLVEAEARKPRWRKRVDSLRCLKGVDTASAADLVFEAGEFSRFRNARSFAAWVGLTPSEHSSGESDRRGAITKAGNKHLRKTLVEAAWHYLTCSGRPKDLARGQAPDRGARRHAAKGVRRLVERREALLARGVHGNKANVATARELACWVWAVGLMAEEA

SEQ ID NO: 195313 - protein, 365 aa, unidentified
MSEDITYMGLDVHKRSIAVAIRAPGAPVLEEQLPNEKVAVARWARRWKRRSGGRLLCCYEAGACGYALQRQLEALGIECQGVAPSWVPRKPGDRIKTDRRDARKLAESLQGGHLTPVRPPTLAQEAARDVCRAREDAKQDRMRCRHRLSKFLLRRGQSYTPGRKHWTEAHRVWLSKLCFDEPAAQIVFDDYRLAAAQVDARIEALDRQIEILAQQAPYRAAVGALRCFRGIDTRTAFGLVTELHSIEHFERAGGLMAFVGLGPSESSSGERQHRGAITKAGNSHVRKLLVESAWHARHKPAIPVALRKRREGQPPEVIAMADVAQQRLHQRYWRLVQRGKPTPVAVTAVARELAGFVWAALHAVA

SEQ ID NO: 195314 - protein, 444 aa, unidentified
MPDPHPKPLAVIHPHAAGIDVHSDTHVVCTGPGQVRSFGAYTADLRDLADHVRRAGVTAVALESTGVYWIPLFDLLEAEGFDVKLVEPGQLSSCGARPKTDVLDCQWIQRLHSYGLLRGSFRPPAAVRALRTYHRLRQMVVRGAAGHVQHLQKALEQMNVKLTEVLSDITGVSGSKIVEAILAGERDPVALALLASPKCAKSRAEFALALAGTWQREHLFELRLAYELFRGYQTRLDDCDAKLAEELARLPAKSDTPLSPKARKRGRKKNDLRFEAAAPLHRALGIDLTAIEGIDAQTALVILAEIGVDVGAFATEKHFASWLGLCPQTAKSNKTEKRRRVRKGSNRVKQALRMCAQSLGRTQTPMGAFYRRIRSRIGGRGACTATAHKLARLVYRMLKHGAEYVAKGMAEYEAKQREQAERNLRKRARQLGYDLTPKAAPAPA

SEQ ID NO: 195315 - protein, 345 aa, unidentified
MENMYYIGLDVHKKTISYCVKDGSGRIYAEAEIPATRLDLDMWMKTLPQPWTVAMEATIFTAWIYDHLKPHAAAVKVAHPLMLRAIAAAKKKNDRIDAHKIADCLRCDFLPECYMASTEIRERRRTLRYQNLLVRQAVQMKNKIAVLLMEAGVSYNKQKLHKVGYFRDLLATNQDIDEGLKPLLRLCRETVVRLGKIESVLVRSLQRDSLLRERVERLMTIPAVGPITALTWALEVGDVQRFSSIKKAISYCGLCGAENSSANVIKRTPLSKQRNKHLQTTLIEAAKMAPRNSVDLAMLYDREKQKDNANRATLAVARKLVAYLVAADRRQKDFLVVASENRTAA

SEQ ID NO: 195316 - protein, 422 aa, unidentified
MNENGTVAAGLDTHRDTHALCVIDRVGRVLRTGTYSADAAGYDEIASAIGEPGDCAVVGIEGTGSYGAGVARRLAELGYDVAEVVRPRREKRMAGRDKNDPADAERAARDALAGRASGAPKAGSGWAEALRFRMVARETAVGESTRAANSVHALVVTAPAPVRERLAGMRTPTLMKELSRRRRARDELERSLWDSLRSLALAWRAAKEAAAEQEAAMRSILETNAPALLDVSGCGAISAARLAIAAGDNPERVSGEAAFASLCGASPIEASSGKVKRYRLNRGGDRQANRALHTIARQRMRRDDRTKAYVEKRTKEGKSRREIERVLVRYIAREVYRAIMHPMSASRASSEGAARSARAARVRMGVTQSQAASALGVASARISELERCVLIDETLLQRYRGWLESIASDGRWKSIESTLDSK

SEQ ID NO: 195317 - protein, 342 aa, unidentified
METRRHIGIDLHRNCFTACVRLENGRNYLSEWRLEDLPRFARKLRASDEVAVEMTGNTRFFHEAVAPYVARVVTVDSNQFKVISQSVKKTDPHDARNLALYLAKDLLPEVRMKEKTEAQIASLTQTRDTLVKLRTALKNKVNNILAAHGINLAKEALSSEKALAGVLEMRFDEMVEVELQVIVEQIRGLNQSIGKLEQTIHDRGQKLQGHRNLTSIKGIGNLGASILLSVIGDIDDFADEGKLAAYFGIVPRVHNSNATERSGCITKRGSKLGRTTLVQCALVAKRYSPYLAQYYGKIKSRRGGGKAIIALARKFLGIIYRTLKNNWVFEDFPNFVLAEATT

SEQ ID NO: 195318 - protein, 320 aa, unidentified
MERVLGIDIAKATFQVTLAWPDGKRRHKSCPNTPAGFQQLADWLQRLQVTHVHAGLEATGTYGDALATWLHDAGHVVSVLNPAIIAAYARTQLTRSKTDRIDADLIADFIATQRPPAWTPPAPEIRQLQALVRRLDALHGMRTQEANRLAAGVVVAAVRDSIEAVLVHLEAQIAQVQQLIRDHLDQHPGLRAQRDLLTTIPGIGEATAAVLIAELFDKSYTSARQAAAFAGLVPRLVESGTQRGRSRLSKIGPGRLRKALYFPAIAALRWNPTIRAVRLRLHAAGKPTMVIIGAAMRKLIHLAYGVLKSGKAYEPTCAHR

SEQ ID NO: 195319 - protein, 350 aa, unidentified
MIVIGSDPHKRNHCFAAADAATGELRSSEAVAASGAGFERALGWGRSLGQQRVWAIEDCRHVSGRLERFLVARGERVVRVAPKLMAGQRRSSRQAGKSDPIDALAVARAALREGVASLPAAYLDERALEIKLLLDHREDLVRERTQVQGRLRWHLHDLWGEDGVPAGGLDRAKWLDRLSRRLARGEQTVRARICREQLTRLRALARRATELEREIGRLVSAHAPELLQLPGCGALTAAKLVAETAGAQRFATDARFARHAGIAPIPASSGRNQRVRLHRGGNRQLNCAIHRIAVTQGRVHPPAIDYLARKQAEGKSRIEALRCLKRHLARTIWRTMTTNTNAPANTLELT

SEQ ID NO: 195320 - protein, 344 aa, unidentified
MQITTIGLDLAKSVFQVHGIDAAGQVVVRKSVRRAQMLAFFSKLPPCLVGIEACGTSHYWARELIKLGHEVRLMPPAYVKPYVKRGKTDAADAEAVCEAVTRPTMRFVPVKSPEQQAALSMHRTRDLLVKQRTQLINMLRGLLAEFGVDIPKGLERALLMARQVIEGNAPEVPIEAARIANTLSQQALDIHVRLRQIDRDLAIWLRGNDVARRLMTIPGIGTVGATALVASVTDPHQFRSGRQFAAWLGLTPLQKSSGGKERLGRISKMGDKYLRKLLIVGMTSLVRRAKYAPDKIDPRLADLLARKPTRVATVAMANKTARVIWAIMARGETYRTGHQPALAA

SEQ ID NO: 195321 - protein, 465 aa, unidentified
MSKLSRRHRARSAQGEARPFAGMRKITAQAAGVDIGAHEIVACVPDGEDQQLVRTFGTYTADLQTLADWFVDRGIQTVAMESTGVYWIPLFEELEARGLQCCLISAASIKRVPGRKSDVLDCQWIQTLHSYGLLTASFRPEADLVALRTLLRHRAQLLEHRAPHVLHMQQALLQMNIQLSQALSDLTGLTGQRIIRAIVAGERAPQQLATLRNYRCKKEADEIAMALTGTWREEHLFVLAQALALFDFYTTQLSACDTQIERVFSVIKPRFETTDEAARPALPSTPPRRKPHSHSKNAPEVNTRAHILRITGVDLVAVHGMSDSIAQTIVSEIGTDMSKWPDEKHFCSWLGLAPKNDISGGKVLKSRTMKNRNRAAQAFRMAAQSVIRSHCAFGAFYRRLKGRLGPAQALVATAHKIARTVYHMLKHRVPYHDIGAEEYNQRFRERELQYLQKKASKLGYTLALV

SEQ ID NO: 195322 - protein, 402 aa, unidentified
MKKSSRMSVIHPHAAGVDIGAEFHVVAVPPDADAAPVRAFQRFTADLHRMSDWLKTCHITTIAMESTGVYWLPAFEIPEAAGFNVILVNAREAKNVPGRKTDVNDAQWLQKLHSFGLLRASFRPEHDISVLRSYLRQRERLTEYRAAHIQHMQKALMQMNVQLHHAVSDITGVTGLSIVRAIVSGERDPSVLIQYRDVRCKKTPEVLQQALTGNWQPEHLFAPEQSVAFFDFYQEKIRECDDQIETSLLQLSTGTEEPEGVLPSARHRTKQPNQLSFDVRPLLWKITGADLTQIHGFGPYLALKFVAECGTDMNRWPDASHFTSWLCLSPGNKISGGKVLSPKTRRSSSRIAAALRLAATTIGRSDTALGAFYRRLSSRIGKAKAVTATARKLAILFYNALK

SEQ ID NO: 195323 - protein, 431 aa, unidentified
MKEMEKPIEAWIGLDWADQKHDVSLYEVRTGKTERYEIRHSPELLQEWLGQLRRRYGSGGGYVAVVVEQGRGALLNVLISCEFLVLYPINPKSLSCYREAFYGSGAKDDPVDAELMREMVRQNPSRFRAWRPEDVLTRSLRLLTEGRRDLVDESTALTNRLTSLLKSYYPQALRWTGKLDTEWACNFLEQWPTLQQLQQSSRRQILGFYERHPRHSIDVEQQMLEFQQAQALTQDFAVLEYSALMVQALIPQLRVLITSIVDFDRKIAEVFRKHPDRLIFESFPGAGAALAPRLTAAFGADRDRFQEATEIQEFYGIAPVTQKSGKQKWVHWRWACPKFARQSFQEFADHSRRWCAWARAHYQLQTQRGKSHHAAVRSLAYKWIRILFRCWKDRVPYREEIYSKSLLKHHSALAAMIVATAVEKPMKASTI

SEQ ID NO: 195324 - protein, 387 aa, unidentified
MYYIGIDVAKHHHDAIGLDEKGQVVLPAFRFNNSVDGVKHLINRLSSLTGPMQIGMESTAHYWIGLYEYLLERDYQVVVFNPLQIKGYRQVRLRKAKTDRLDSHLIADFLRVRPLEPVIIPSARRRQLRHLARFRFKLVDRGAALRRRAHMLLDLVFPEYPALFARPFQGSSRTLLRRAVTAQAFETWPLADLTQTLQRASRGRLGEEKAQAIHAAAQTSLGIRSLNQVAALEMTWLLEQMDLLDQQIKAIDQTLTQLLADEPQHLTSIPGLSTVLAATILAEIGDIDRFASVKPLVAFAGLDPSVHQSGHFLATQSALSKRGSPYLRRAIWLAATPARLYNPDLAAFYQRKRKQGKHHNIAMAALAHRLLARIYVILKQQRPYQVR

SEQ ID NO: 195325 - protein, 387 aa, unidentified
MTVRTVNNLPAATHGETVRCLFAIELSKQSWVIGFNTPLSEKISRRTLSGCDWKGLLELIEDVRARVSREMGRAVAVMSCYEAGYDGFWLHRQLEAHGVRNYVIDPASLQVDRRARRVKTDRIDAERLLRSLMAYLRGEPKVWSVVRVPSVAEEDARRLHRERDRLVLERVQHVNRIKGLCALHGIYDYHPLRPQATARLEQLRTAQGGELPPRLKSEIKRELHRLELVVEMIATLEAERDAIVEDEASTHLNAEKIQNLHKLKAIGPEFAAVLVGEIFHRSFDNRRQLASYVGVTPSPFQSGSMAHEGGISKAGNRKGRTTGIELAWLWLRYQPDSDLSIWFRARVGIMKGRIRRITIVALTRKLLVALWRYLETGLVPRGAVLKG

SEQ ID NO: 195326 - protein, 407 aa, unidentified
MSGAAGIDVHKKTVVACLITPGASGAPTKETRTYGTMTADLLEMMDWLLDAGCTHVAMESTGVFWKAPYNLLEGALEVYIVNAAHIKTVPGRKTDVKDAEWIADLLRHGLLRPSFIPDRPQRELRELTRYRTSLLQERSAEVNRLQKTLEGANIKLAGVATDIMGKSGRDMLAALVAGRTDVAALAQLARGKMREKLPQLEKALRGQFAAHQRFLVAQQLAHIDGLDDIIERVSAEIAERVQPFEEAIEQVDTVTGIGRRTAEVLVAEVGTDLVRFPTPRHLASWAGLCPGNNESAGKRHGGKTRKGSPWLRAALVEAAKAAGRSKKTYLGAQYRRLKARRGAKRAAVAVAHSILVIVYHILTRHEPYHDLGVTYFDERDRQAVERRLVKRLQGLGYAVSLQPLTAA

SEQ ID NO: 195327 - protein, 318 aa, unidentified
MQSPLLIGVDVAKAEVVVACSQNTRPVHSVANTEPALRKFLRSLPPGSSIAMEATGAYHLCLADLAHQLGFVVYVLNPKDMRHYAKSLGLRAKTDQVDARLIARFLAHEGSRLRAYEPPTPEQRQMDQLIRRRAKIVMLKQGLRLSCAQVPALKAETNKLQADFAALLKKIDRQIAALTQTIPQRAEQSKRLRTIVGVGPLVSAWLANLLSRVQFENSDALVAFVGMDPRPFDSGQRRGKRRLSKRGPSEGRRLLFNAAMSASKSKVWAPIYAHYLQLGWPSTAAIMIVARKILRVAFAVFKTHSDFNPQMLGAQRLT

SEQ ID NO: 195328 - protein, 343 aa, unidentified
MQFFVGIDVSLESSSICVIDERGIIIKEGKVESDPQSVAKFIRHKGRKIEHVGLEAGQLSEWLFVGLSKEGFKVSVLESRHVRAAFAAMRVKTDRNDARGIAQLIRLGWFKSVHVKTLNARETRATLNARQFLVDKITAIENTIRSSLRNFGLKMGQVTRRGFAPRARELADGSSCLQLVTGSLLKVRETLLDELKKLDRKLIDAARADPVTQMLMTAPGVGTIVALTFRNAVDDPGRFAKVKSIGPWLGLTPRRYQSGETDRTGHVTKAGDLGTRTALYEAATTLLGRNGGWSTLKRWGLHIAARHGIKKARVAVARKLAVILLCMWQSNCPFRWSNQGAVA

SEQ ID NO: 195329 - protein, 381 aa, unidentified
MIIKYSLGLDVSSKDIKACLVSLDIELRIRTVSSKTISNSKKGFIELQTWIKKWYSQVNVSISVCMEATGVYHENCAYFLHGKGYDVSIVLPNKAKKYLQSLGLKSKNDSIDAQGLARMGAEQKLDIWEPMGTFFLELRVLTRQYQSIQETKIAHQARLHSSESSATQVAFEIKQIKSLINFLDKQIAQIELQIAQLIRSNEVTKAKFDKILKLFGISLISGATVIAETGGFNLFKNYKQLVSYAGYDVVENQSGNHVGRTKISKKGNSRLRRILHMPSLVAIRQKDSVFGQLYLRIYDRSGIKMKGIVAVQKKLLIMIYYIWTKDIEYNPSVKNIQEEKQVPSSQFKKNEQKKPYKSMASQGRRPVSYHSIPPLSSVNVD

SEQ ID NO: 195330 - protein, 410 aa, unidentified
MEAIVERVGGIDVGQATVVATALVGAAHERTRKETRTFRTVTRELLALRDWLLAQGVTHVAMEGTGIYWRPVYELLEDAFELIVGNAHHIKNVPGRKTDVKDSEWLADLARHGLIAKSFVPPKPLRRLRELLRYRRKLMESRTAERNRLLKLLETANIKLASVASSVFGVSGRLMLQALIDGVATPAAMAALARGRLRKKATALERALEGRLDEHHRFLLQLQLRRLDAVDTDLLSLDARIDEALLPYREQCEVLEQIPGVSRVVAAVIVAELGTDMTVFHSARHAAAWAGVCPGNNESAGKRMRAGVRKGNVHLRTALIEAAVAASHTKGSYLRDKYYRLRARRGSKRAAMAIAHKILIAAFNMLATRSPYRDLGATYLDGLEKRHTTRNLVRRLERLGYEVTLGPKAA

SEQ ID NO: 195331 - protein, 415 aa, unidentified
MRIVYARCCGLDVHKKSISACLLTPDERGGTQQQLRRFGTMTRDLLELSDWLTGNGVTHVAMESTGVYWKPVWNILEGTCTILLVNAQHVKAVPGRKTDAKDCQWIADLLQHGLLRGSFVPPSPIRQLRDLTRTRASLRQDHTAVANRMQKVLEDANIKIASVASDWLGVSGRAILSRLLDGEEDSGKLADLCCGRLREKIPEMQLALQGRMTEHHRWMLQLQREQLEFLEGQIAQLEAKIQEHLRAYQQAVELCMTIPGIEAVAAANLIAEIGVNMDQFPSAQHLASWAGLCPGNNESAGKRLSGKARNGSVWLRRSLCQAAWAAWHSKNTYLSAQFRRLAARKGKKRAIVAVGHTILVILFHMLKNQQPYRDLGADYFDRHNSEQLKRSLIRRLERLGLQVSVLAPTPASQPA

SEQ ID NO: 195332 - protein, 416 aa, unidentified
MNAVGIDVSSRKSTVAVLRPLGEVVCLPFDVTHDIAGLASLAEKLKAIDGETRVVMEHTGRYYEAVAKALHEAGFFVCAVNPLLIKEYGANSLRRVKTDKADAVKIARYALDNWADLRDFTPMDAIRYDLKTLNRQFQLASKQRTASANNLIALLEQSFPGIRKCFDSPVRSDGTQKWVDFAHSFWHVDCVRKQPFPAFCERYRKWCKRHAYLFKLSNAEEVYALAKRAVVLTPKSKVVKVLVQEAANQLISISRSVEVYRAEMDRLAAMLPEYPVVMAMYGVGKSYGPQLMAEIGDVRRFERKQALVAFAGIDPMPNQSGDKNVRSNKSSKRGSPYLRKTLFNVIRTYLQCAPQDEPVFQFLNRKRAEGKPFYVYMLAAANKFLRRYYAKLRDFFASLDTLQPVAPIPTILKATL

SEQ ID NO: 195333 - protein, 338 aa, unidentified
MTVVTVGIDLAKNVFAVHGVNAAGKAVLVKPLVRRAKLLELIATLPACLIGIEACTGAHFWAREFQKMGHTVRIMAPQLVSPYRMGGRHGKNDAADAAAICEAVTRPNMRFVPIKSVEQQGQLFVHRAHQGYVSERTALINRIRGLLSELGIVLPQAFKAFLSGVAQVLEDLPGYCNQVIGDLLNELYHIEEKIKNSEKLIQQLARDNSAAQLLMQFRGIGPMTATAIVASIGNGHDFKNGRQFSAWLGLTPRQQSSGGKARLGRITKAGDSYLRTLLVLGARSVLLGAAKNDDPVSRWALQLKERRGYGRALVAIAAKNARMCWAMLYLRDEFRFPA

SEQ ID NO: 195334 - protein, 413 aa, unidentified
MLLFIGDDWAEDHHDLEIEDETGRRLAKARLPEGLEGISRLHALVAEHAPAEWAELPSEEVASRVYIGIETDRGPWVTALQAAGYQVLAINPLSSARYRERYSTSGAKSDAGDAHVLAEIVRLDRDHHRQIAGDTDLVDAVKLVARAHQTAIWERTRQVLRLRSTLREYFPAAIEAFEDLAAKDTLLLLARAPSPARVARLTRSQVVSALRAARRHHVEAKADAVLAVLRAPGLRQPATTEAAYAAVVVGQIGIIGALNEQITQLQEVVAEHFGRHPDADIYLSQPGFGVVLAARALGEFGDDKKRFHDARARKNYSGQSPITRASGKKTVVLARYATNRRLGAALHAQAFSALAASPGARAYYDALRARKIGHHAALRQLANRLVGILHGCLKTGTKYDENTAWHHQITAAA

SEQ ID NO: 195335 - protein, 338 aa, unidentified
MKTYAAIDLHSNNGVLVVTDETDRVLRQKKLANKLELFVAELEPFRATLQGVAVESTFNWYWLVDGLLKHGFPMMLVNTAAIQQYEGLKYTDDPYDARWLAHMLRLGILPTGHIYPREERAVRDLLRKRSSLVQQRTANILSVQNLEQRNRGTKISSREVKKLTEESIGELYDNEDLGLALTTTIKVIEALTEQIRCLEKAVLKKARLRDEFKLLLTVWGVGDILGLTIMYEAGDMSRFADAGPFASYCRCVQAQRLSNGKKKGENNRKNGNRYLAWAFVEAAHYAIRYYPEAKRFYDRKAARTLPVVAIKAIAHKLARASYHVLRDQKPFDPKKVFS

SEQ ID NO: 195336 - protein, 323 aa, unidentified
MSTKATKKRRSFIGIDVSKKLLEVGVHQSDYHFRCPNDPKNFPALITELISLRPARILLEATGGLERALLQALHAAGLPVVVVNPRQVRDFAKALGLLAKTDRLDARVLAHFAAATQPAIRPVKAQQETELDALMGRRTQLSDMLAQEKNRRGSAATKDTRDDIEAHIEWLEERIQELDEKLKEQLKCSAVWQQKDQILQSVKGIGFVTSLSLLADCPELGQLNRHQIAKLVGVAPLNRDSGQQRGARHIWGGRAQVRGKLYMATLAAIRFNPVLKSFYQRLLVKNKLKKVAIVACMRKLLTIINVMVRENKLWNVKAQPVSA

SEQ ID NO: 195337 - protein, 344 aa, unidentified
MNEVITIGVDLAKNVFQVHGVNAEGTVIIGRQLRRSQVLPFFKKLAPCLVGMEACATSHHWARQLIGLGHEVKLMPPHYVKPYVKRSKNDAADAAAICEAVTRPTMRFVSVKSMEQQSVLMLHRTRELLVRQRTMLINAIRAHMAEFGIVAPVGVPQVKKLLGIIADTDDARLPPLARTCLESLVRQFLSLHEEIALAEKQIHAWHRSSAVSQRLETIPGIGPIIASALAASITDPEVFRSGRELAAWIGLVPRQNSTGGRERLGRISKQGDQYLRWLLVAGAMSVILHAKRRGTTSLPWLAKLIASKPTKVAAVALANKTARIVWALIRHGGTYQKPAAASAT

SEQ ID NO: 195338 - protein, 326 aa, unidentified
MFFIGIDVSKAKLDCSLLLDVTSSKRRAKSVANSKTGVSELLTWCAKQNTSPQELHAILEGTGVYHEQAALALADAGVTVSIVNPAQVKDFGRSLGVRTKTDGIDSLVLARYGALLNPRPWTPPAPEARVLQALLSRREAIAQDLQRERNRLEKADATNTPLSISQSIEESIAFLEQQLEKLQHDIDDHIDKHPNLKADRDLLISIPAVGPQVGNHLLAVMHNHQFQSAEQLAAYLGLVPAERQSGTSILGRPHLSKAGPARIRAILYMAAIVATQHNPHIKALYQRLQERGKTKMSALGAAMRKLVHLCFGVLKTRKPYQPNYAL

SEQ ID NO: 195339 - protein, 343 aa, unidentified
MKDITTIGMDLAKNVIQVHGVDQRGKAVLKKQLPRRRFVEFFANLAPCLVGMEACGSAHHWARQLEKLGHQVKLMAPQFVKPYVKTNKNDAADAEAICEAVSRPNMRFVPIKNGEQQAVLALHRARAGFVKARTAQANQIRGLLGEYGIFLPQGIVHVTKRLPAILEDDESELPGAFRRLLVRLGEHLNELDRQVGELEAQIQDWHREDAASRKLAQIPGIGPLTASALVAMIGDARSFQNARQLAAWLGLVPRQHSSGGKTLLLGISKRGDAYLRTLLIHGARSVVRVAERKADIPTWLTQLIGRRHKNVAAVALANKNARIVWALLAHDRDYQAAYAPGPA

SEQ ID NO: 195340 - protein, 395 aa, unidentified
MQTLFVGIDVSKDSFSVAGLDAQGGTAFSLTAGMNKTGFSELFKAISSHSLTLSDVVVAMESSGCYHLNLFSFLSSKGLRTLVINPLVVANFSRLSLRKTKTDRKDAFTIARFILSHRDSVEPFTILQAHQDLKDLAREREFTLKMISSIKNEIKRLLQSTFPELEHLGNVFSDTMLEFLSVFPSARLITIAEPQAISHAFEQRDKRKRISVPPETIRRAARDSIAAVSPAKEMILPGKIATLRHLEERLAQLTKMLVKLCETTMQEDLRILTSIHGISTITAAPFLAEMGDWRGFRSYKQLIAFAGIDPSIHQSGTIQGVSRLSKRGNRHLRRLIWLMTFCAIRMEGPFKAYFTRRKTEGLPFRKALFATAHKLVRVIFSMLNNRTCFAAQQTA

SEQ ID NO: 195341 - protein, 343 aa, unidentified
MHSTTIAVDLAKSVFEVAVSQRPGKVAERHRLSRGQFSRFLAEQAPATVVMEACGTAHFWGCEAGACGHRVVLLPPHAVRPYVLRNKTDGADAKGLLEALRNDNVRPVPVKSVDQHVLAGLHRMRSAWMATRTARLNTIRGLLRELGFSIPVGARQVVPHVGVLVSDADSGLPEALRPVLAEAAREIRELEARVREVERSLEAMARGSEVLVRLRTIPGVGLLTATALVAFVGDVRRFPSGRHFASYLGLTPRESSSGLRRRLGAISKRGDPYLRMLLIHGARSVLCHAKKGTGERDRLREWALERERARGHNKAAVALANKLARIVWAVWRSERAFAIRPQN

SEQ ID NO: 195342 - protein, 316 aa, unidentified
MNTHIVVILGVDVSKSMLDVGVQDGSWRASFPNDATGIKSLIRMARKRFGSFIVGLEPSGGYERSLVEALLDENLDVRFADARRVRDLARAHNAPAKTDAIDACFIARFIAETGGRVIKRDPATQALSAIMSARAFLVESAQRLEQRLSHEHQVDARRALTRQLRRLKAEICALDLAAQKHVAAHAHLAEASRRLQTAPGVGPIVAMTLLGELPELGSLNSKQIARLVGLAPFIRESGQWKGRAHCSGGRMRPRNILYLAAMAAKRCHKPSKAFFDKLVSNAKPKMVALNALMRKLITQLNAMMRDHTDWAITTPS

SEQ ID NO: 195343 - protein, 341 aa, unidentified
MSIITVGIDLAKSVFAVHGVNDSGKAALVKPKVARADLLPLIAQLPPCLIGMEACSGAHHWARQFRQYGHTVKLMAPKFVAPYRMTGKRGKNDAADAAAICEAVTRPTMLFVPVKEEHQQIILCLHRTRQGFVEERTASYNRLRGLIAEFGIVLPQKVVCLRRDIGAHLEDVPGYANLCVGDLLAHADELDKKIEEYDRAIAKAAREDARSKRLMKLPGIGPVTASALLASMGSGHDFDSGRQVAAWIGLVPGQYSSGGKARLGRITKAGDGYLRSLLVMGARAVLNSLGDKQDRFSRWARSLEERRGYWRAVIAIAAKNARLAWAVLKYGEDFRLEPGKE

SEQ ID NO: 195344 - protein, 348 aa, unidentified
MTVYIGVDFHARQQTISYLTTETGEIQHLVLLHQDLATVRAFYGQFVGQHVVVGFESSGYAAWFEELLEELGHEIWIGHALYIRQFAKRRQKNDRRDADLILDLLVKGDFPRIHRFSRPTRAILQQLRYRQRLMKMRTMAMNMLLFMASSRGVSLRTQLTSKRGQARLAELALPHPLGSQRDELLKLLQDLDEKIKNIEQWLQRETKTDAAVQRLQTHPGIGLLTSICVRYTLEQVDRFTTTRKVTAFAGFDPMQDQSDERQRMGAISKQGSRWLRFYLVEAGQIAIRKDADLARVYKRLSLRGGHAKAKVAIGRRLLIRAFIMLRDEVDYDEFLRRGVAARSSRGTA

SEQ ID NO: 195345 - protein, 349 aa, unidentified
MDRTTYAVDLAKNVMQLHWIDAQTGEIGRKKLSRAKLLEYFARLQPVRVVMEACGSAHHWARLLGALGHQAELLPPGQVRAFVRSNKDDAADARAIWVAGQQTDIRRVPVKSVEQQSVLALHRSRQHWVSVRTATVNALRGLLYEFGVVLPGGKKAGLRALRAHRAQIDEQLPAPMQRLVDVQLRALADIEQHIDQLEAEIAAAQRQLSAALELSRVPGIGLLGSTALAATLGDGSGWKSGREFAASLGVVPAHSGTGGKTRIGHLSKRGDPYLRTLLMHGARAVIQHAKHKPQWLERLLARRPLNVVVAALANKMARTAWALVAHHREYQRDWQGTGSKGCVAQAAAA

SEQ ID NO: 195346 - protein, 371 aa, unidentified
MVSKRKASDKFSTVAIDRLARGAKTVGERGSSRGLIPKIPNSCADPKSVYRKAGSRKKAMSEPIYVGIDVSKGTLDIGTSQGELWSCANRENDYAELIQRLQGAKLIVLEASGGYEGAVVGTLNAAGLPVIVVNPRQVRDFAKAMGRLAKTDRIDASVLAQFAQRIQPELRPLKDEQTQELDAWLSRRRQILAMIVTERQRLAIAAGSVRTDIREHINFLVRRLKDTDRGLDELMRQSPLWREREELFKPVKGVGVQTLRTLCASLPELGRLSGKKIAALVGVAPYNCDSGTMRGKRRCWGGRAEVRSVLYMASVTASRCNPVIRAFYERLIKAGKPKKAALTACMRKLLTILNAMARDNSAWNEALHVTA

SEQ ID NO: 195347 - protein, 320 aa, unidentified
MTYIGIDVSKDSFVAAYPAKSGYATKTFKNTSSGVHQFIQSLPAECHCVMEATGNYSMLLLYLLQQANIIVSMENPQKIKHFARAMLSTTKTDDIDAKLIAMYGEKMEPAPYKIPSESIMLLKQKRTVLRQLKKQLTMLLNLQHSLAVLPKQDPTAKVATEKTIKFLRKQISKLEDEITHLSNKEFKRQMDLLTSIRGIGKTLASALIVATGGFAYFSNAKQISRFLGLCPTYQQSGTSVNFKGHINRNGDTYLRSQLYIAAVSSIKFNAACKETFKRLKDKGKSGKVAVIAVANKLIRQAFAVVTNNRPYVDGYVSALP

SEQ ID NO: 195348 - protein, 340 aa, unidentified
MNEITTVGLDLAKNVFQVHGVDAEGTTVLRKQLRRAQVLAFFSRLPRCLVGMEACATAHYWARELRTLGHEVRLMPAQYVKAYVKRNKNDAADAEAICEAVARPTMRFVPAKTAEQQAAVLLHRGRERLVRQRTMLVNALRGHLAEFGVIAPQGLRNVGRLIAIIRDEKDARLPGLARQVLQVLAVQIEQLEAAIAALEKQLMGWHKSNPISQRLATIPGIGPIIATAIAAMVAEPSGFRSGREFAAWLGLVPRQNSTGGKNRLGGISKRGNQYLRRLLINGASANLLRSKATNADPWVIGLRRRRPSLVVAVALANKTARIAWAVMHRQENYQRMATAA

SEQ ID NO: 195349 - protein, 403 aa, unidentified
MNSVGIDISKGRSTVAVMRPFGEVVISPFEVRHTDSELSELARQLKSLNGETRVVMEATGNYHAPVAKLLHDAGLYVSVVNAKLVHVYGNNDLRRVKTDRKDAVKLANYGLDRWLTLPRYVPEEDTRLLLKNCYRQYRQYSKVQTVLKNNLISLLDTVFPNVNRLFSSPIRGDGSEKWVDFVAEFWHCRCVSEKSKKVFTGKYQRWCRKHGYNFSEEKAHTIHAEASGYIGVMPKSETTKLLVEQAVAQLRATSAALTALKHEMLALAAQLPEYPVVMGMFGVGPTLGPQLIAEIGDVRRFYSKKALVAYAGLDAPPNDSGDVTGKHKSMSKIGASSLRRTLFLVMSVYLQNAPLDEPVYQFMDKKRAEGKPYRVYMMASANKFLRIYYATVKAYLESLEHTA

SEQ ID NO: 195350 - protein, 415 aa, unidentified
MEIEHTHCAGLDVHKKTVVAAIIVPDGQSGQRKEVRTFGTMTSDLLTLSDWLLSFGVTHVAMESTGEYWKPIHNILEENFEVLLVNARHIKQVPGRKTDVMDAEWIADLLRHGLLRGSFIPPVGQRELRELTRHRTNFVRERATLVNRIQKTLESANIKLASVASNVMGVSGRAMLEAIITGTANATEMAGLAKGRLREKREQLDKALEGRVKPHHRFVLSELLCQVDNLDETIARFDAEIEKYCRPFEEAVELLDTIPGVARRIAEVIVSEIGSDMQRFPTAGHLAAWAGVAPGNNESAGKRYSGTTRHGDRALTVALVLAAHAAARSRKTYLSAQYHRLAGRRGKKRAIVAVAHSILVIAYHLIQRKEPYHELGSDYFDKQRPETTAKRLLRRLERLGYDVSHIEQPLLSLAA

SEQ ID NO: 195351 - protein, 417 aa, unidentified
MDSDKEIVCGADIHRDFLIATMISRSGLKLQERFNMNRDGLLAFRSWILDHRCQRLAVESTGGFWYPIFTILEGHVEFILANAYQIRNIEHKKTDKLDSERIAKYCLNNLITPSRIYPKDYRDLRSITRARETLVNARSKVKNQIHQLLSTCCIKLSSVISDSFGKSGRYIIDRLLEGKTIDQILSGIPSKRVRKKEDELREAIRNGIDPVQVFLIKANLDVIDDISKKIKILEAEIAIKVKPFEEDLKIALSVPGVGFISAATIIAEMGDYRDFSSADKMAKYFGIVPSVYQSAGKLRTGKITKTGSKHMRRILVEVAKAISRTKKNSKLKRFFQRILARCGKKNIAAVALARKVLCILHHLLMNHENYQEPEVKKTKPRIPSSVSPISMMDIDEMIKVISRAGYLVEKDLKEGCG

SEQ ID NO: 195352 - protein, 392 aa, unidentified
MVISVGIDVSKDKHDCFIVSSEGEVLADVFTIPNTIEGFHCLLQRIRDCTAPQDKIKVGLEATGHYSYNLLGFLLDNGLATYVLNPLRANLYRKSLSLRKTKTDRVDARTIASMLLSDAGLKPYTNTAYHNEELKSLTRYRFDKVKERAKLKSSIARLVCILFPELEKLVPSLHIASVYALLEEFPGAKQIAAAHLTRLKALLETASKGRYKRDMALEIRDAARNSIGSWMPAKSLELQHTIRLIRELDVEIAEIEEQIQSIMDELHSPITTIPGVGFRMAAMILAEVGDFTRFDSPDKLLAYAGMSPSTYQSGQLKNCYPHMEKRGSRYLRYALYNAAKYVCHWDPTFAAYLAKKRAEGKHYNVALSHAAKKLVRLIFAMEKSRQPYCSAA

SEQ ID NO: 195353 - protein, 431 aa, unidentified
MNDELEFYVGIDLGSENHRACLLNRAGKVLAEIVFEHSGSGMADLIRFLEKTTGVSAARVGLALETPRGPVVECVLERGYAVFSIHPKQLDRFRDRHTVAGAKDDRRDAFVLADSMRTDLALFRSLGAESAAIVRLRELSRLEDDLIQDHHRLINQLREQWHRYFPQLLELSSAADDAFVWDLFEMAPKPELAAQLGRSRIERVLQRHRIRRLSVDEVIAALRTPALTLSIGSADAASEHALLLLPRLRLVRQQQVDVAGRMEALLKDLARVPSETVSEEVDQPTDVAVLRSLPGVGRVMAATLLAEAAQAIRDRDYGALRSYTGVAPVTRQSGTKKVVVMRRGCNNRLRNALYHWSRVTTMCDERSRTQYAKLRQKGHSHGTALRALADRWLAVLVAMLRARQLFHPQKWNRCVVDAIGGAGDQPILRRH

SEQ ID NO: 195354 - protein, 339 aa, unidentified
MKEVTVLGIDLAKAVFQIHGNDSRGKTLFNRKISRSKLVEFVANTPPCIIGMEACGGANHWAREFEKLGHKVRLTAPQFVKPFVKSNKNDKADAEAIAEAVMRPNMRFVSVKRIEQQNIQAIHRVRQGRVKARTALINECHGLLLEYGVVLKRASKAFFQDLAELVSPESKTLTADMKELVAGMIEELHQLDVYIAKADAKLRQIAHQNEDCRRIHEIPGIGVITATAIIAAVPDPKTFKNGREFSAWLGLVPRQNSSGGRSVLLGISKRGDSYLRTLLVHGGRSVVRLADQRSDRLSRWAAEKQRTRGTNRAIVAVANKNARIIWAVLAKKEEYRQAA

SEQ ID NO: 195355 - protein, 367 aa, unidentified
MMGWMAPLRHRRAKLVFSRITRNREPSMSEITTIGLDLAKHVFQAHGIDAEGTTVLRKRLRRGQVLAFFSRIPRCVVGLEACATAHYWARELGALGHEVRLMPAQYVKAYIKRNKHDAADAEAICEAVQRPTMRFVPVKTTEQQATALLHRGREQLVRQRTMLVNALRAHLAEFGMVAAQGLRNVGELIAIVRDDGDTRLPDVARQVLQVLAAQLEHIEAAIAALERQLMAWHKANAVSQRLASIPGIGPIIATAIATTVADPGVFRSGREFAAWLGLVPRQNSTGGKTRLGGITKRGNRYLRRLLINGASANLLRSKATKADPWVIGLRRRRPPLVVAVALANKTARIAWAVMLRKTEYQPRAVAA

SEQ ID NO: 195356 - protein, 401 aa, unidentified
MKTQTFVCGLDVHKDSVYAALYNGKDRTDVEVFGTFTSQIKELIRWLEQHDVKCVALESTGIYWVPIWNLLEEKGFELTLVNPWFIKQMPGRKSDVKDAQWIATLLYKDMLRKSFVPPVHIRALRNYSRQYVKLQWSITRILQELSKQLEMCNIRITSVFTHTDSVSIIRVIRLLIAKCKDIEHLMGCISPVILKRKGDVIRASLEGYVTEDSRFMLELLMQQYDLLNLQLNSVEKQMTAICEQHYSEQLALLQTIPGIKQQSAMQIISETGGNMEAFESSSKIVGWAGLRPGNDESAGKIKSTKITKGNRYLKRILIQTSWGAARTKGSTFNIKYNQLAKRISRKKALVAIGRKQLTVIWNVLSKKEPYKVSYDAAANEAQVQAQLKYHQRMAEQLKHLN

SEQ ID NO: 195357 - protein, 340 aa, unidentified
MSDIRVVGLDIAKSVFQLHGVDAGGATVLQKRLTRSRLLAFFAKLPPCLIGIEACASSHYWARELTSLGHDVKLMPAQYVKPYVKRGKNDAADAEAICEAVTRPTMRFVGIKSPEQQSAMMLHRVRLILSRQRTQLSNALRAHLAEFGIVAPIGRNGIDRLLGVIADPADDRLPAEARICLEMLAAQLSIVKQQILENDRRIMASARSTELGRRLMEIPGVGPLLASTMVATVPDPAIFGSGRNLAAWIGLVPRQNSSGGKERLGSITKAGHGYLRQMLIVGAMAVVRYAERNGARRPWLVQLLARRKAKVAAVALANKNARIIWAMMNSGERYREPQAA

SEQ ID NO: 195358 - protein, 341 aa, unidentified
MEQDSTIGLDLAKSVFQAHGEDAAGAVVFRKRLRRGQVLEFFASQPACIVAMEACGGSHHWRREIGNLGHTVRLIPPAYVKPFVKRQKNDAADAEAICEAAQRPSMRFVAVKTATAHAAAVVFRTRDVLVRQRTQIINALRGHMAEFGVIVAQGPAHVAKLMMAVADPAAPLPDAARPILDILIETLRSLDVKIRRLDVEITRRAKEDEVARRLMTIPGVGPVIATALAALAPPAETFKRGRDFAAWLGLTPRQRSTGGKQKLGETSKMGERSLRRLLIIGASTVLRWAARKGVPAGSWIARMLARKPPMLVRVALANKMARIIWALMAQGGIYRAPVART

SEQ ID NO: 195359 - protein, 410 aa, unidentified
MIEAVIERCAGIDVGKKFVLVCVMTGGAKDEPRTQIKKFGTIVSELDRLAAWLVSEGCTHAVMESTGSYWKPAFNLLEAHVRVILANAADVQNRRGHKTDPNDSRWLAHLLRHGMIRPSFIPPLAIRELRDLTRRRRQLIGENSRERNRVQKVLEDANVKLGDVLSDVFCVSGRLMLQALLDGHLSAEQIAELAKKKARMKIPQIAASIAGHRLTDHQRFLIRHALRHLQFLEEEVEALSQEILRRMEDPALAEAFQLLQSIPGIKEESAASILAEVGADMQQFPSAAQLSSWAGLCPANHESAGVKKSVRTNRGNVWLKGTLTQSAWAATNRKGSRLQARYHALRVRCGNKRAIVALGHTLLITVHAVLSTRSPYREAQLTEETQRQEERARYHLRCLKKLGYPTLAGE

SEQ ID NO: 195360 - protein, 415 aa, unidentified
MDVLYPRCAGLDVHKDTVVAGVRLAGDGPVRTEVRTFDTTTPGLLAVSAWLAEQGCTHVAMEATGVYWRPVWHVLSDGEFALTLANAAHVKNVPGRKTDVADALWLADLLAHGLIRASFVPEAPTQELRALLRTRKQLVREQASHVQRIQKTLEDANLKLGSVLSQVMGVSGRAILQALIDGQSDPDLLLTLIQRGVKAPPEKLRAALTGRITDRHRFLLRLHLRQFDALAAAMTEIDAEVDRDLDPFRQAVRLLRTIPGVSDLTAQVIVSEIGVDMGRFPTAGHLISWAGLCPRNDESAGKRRSTRLRKGAAWLKTTLVQCAWAASRKNASYLQAQFQRLRHRRGPKKAICAVAASILTAAYHMLRDGTFYQDLGAEHFRRTSPESHARRLARQIAQLGFVCTITPATEGAVSV

SEQ ID NO: 195361 - protein, 344 aa, unidentified
MSIKVVGIDIAKNLFQVCVLGTNGQILSNRKVKRDKLLDTVLQLPEQTALAMESCATSHHWGRIFQELGYTVALIPAQHVKPFVGRQKNDANDARAICEAYSRPNLHFAPVKSVEQQDLKAIRSVRKRLVENRTALANQIRGLAAEYGVVFPLSIKALRSHLPLALEDAENALSPVMRNLLQTLYCDFVSLSEEIDEMTQSVTMLSQQNPKYEAIRNIPGFGPILTAALISEVGAGNQFQNGRQFSAWCGLVPKQNSTGGKSSLGSLSKNGNRELRALLIHGARAVVRCGANKADAMGVWLRGLIARRGKAKAIVALANKLGRVAWHILAKNSEYDINQAFKPV

SEQ ID NO: 195362 - protein, 407 aa, unidentified
MDVIYPRCAGLDVHKQTVVACARIAGDGAPMQQVRTFETTTSGLLSLADWLESFGVEHVAMEATGVYWKPVWHVLEGHFELVLANAAHVKNVPGRKTDVNDAMWLADLLAHGLIRASFVPPLAVQELRTLTRTRKQFVRERASHTQRIEKVLEDANLKLSVVLSDILGKSGRAVLQAIVDGQTDPQQLASHIGTRVKASRAELHEALRGRISTHHRFMIKLHLAHIDALDKAIAEIETEVGRGLEPFRYAARLLSTMPGVNAVAANVIVAEIGIDMSRFATPAHLRSWACICPRNDESAGKRRSTRLRRGGKWLKTTLVQAAWAAVRVKDSYLQALFHRLRARRGAKKAIIAVAASMLTAAWYMLRDGTPWQDLGASHFDRADAQKTANRLIRRLQQMGYTVNATPA

SEQ ID NO: 195363 - protein, 482 aa, unidentified
MKSKPQKRTKKATDHPTQRHWHEMNRKQRRETMRKIQSEEISLEVVHPNAAGIDIGNESHYVAVPPSRDSQPVQRFGCTTAELKAMAAWLKQCGIRTVAMQSTGVYWIAVYDILEQAGLEVYLVNARDTKNLPGRKSDVQESQWLMKLHTYGLLRNSFRPAQQIRTMRTYWRQRNDLVQSTGRHIQRMQKALTQMNLQLANVLSDVSGVTGQAIIKAILGGERDPHKLAEFRDPRVKASEEQIAQSLEGNWQEELLFVLKQEQDGYEFCRKQMAECDRQLAQYLQQREDRSQGAPLPEEKRKTRLKKKKGNAPQFDLRQGLFRLSGTDLTRIDCIDVMTAMTVISEAGWDMSKWKTEDHFVSWLRLCPDNRISGDKIIGKGRLPTNNRVNIALKMAASSLRLNNTYLGAQFRRLRTRLGAPIAIKAMAAKLARLVYRMLRYGMKYVDRGAAFYELQNRQLQIKRLKSKAAKLGLQIVQAPAA

SEQ ID NO: 195364 - protein, 369 aa, unidentified
MWVAPERTLGSAQINRFGSRRPLMDTGYAGQQVVGLDLHRRRTVMVRMTEAGERLEAVRFVSDPAVLAEQIAKAGPAPRVVVEATYAWYWVADVLDAAGAQLHLAHPLGVKGFAYRRVKNDFRDAADLADLLRMGRLPQAWIAPPPVRAQRELVRHRHKLRQLCSGIKAGAHAVLAKNALFIPRSDMFGLDGRRRLSALNLPEVFRLRLDSQLRLIDTIEQEIDELDKRIRVMFADDLGYRALLRLPGVGPVFAAILRAEIGEITRFPSPGQLSSWAGLTPRHRESDTTIHRGRITKQGSRLVRWACVEAVQRARRGTPMRNRYDQIVARRGGNAKHLAKVAAARELCECVFYALRDGHVRRLGEHGAA

SEQ ID NO: 195365 - protein, 381 aa, unidentified
MKTVHTKRTGQAGRPSVGADRCVARVVPSLLPKSSNSCQGYPSPHLSQGRASLEQIKSIKEDCLLEAPLIFVGIDVSKAQLDVAIRPSAQSLSVTNDRAGIKSLIKHLKKLRPQLVVLEATGGLERQVLSALIAGEIPVVMANPRHIRDFAKSIGQLAKTDRIDASVIAHYAEAVRPKPRPLPDEASLELRALSARRRQVLDMIVAEKNRLATASKVVKKRITAHIAYLEQELNDADQDLDRFIEKNAAWKQNQQILCSTPSIGPVSSPTLLVELPELGALDRKKISALVGVAPFPRDSGTLKGRRTIWGGRASVRSALFMASVVATRFNPVIRDFYKRLKAKGKPSKVCLVACMHKLLTILNAMIKNKIRWSENFTHQTT

SEQ ID NO: 195366 - protein, 420 aa, unidentified
MKKINQVKESTLVVGIDIGSTTQYARAFDWRGIELGKVFPFSNSREGFESFKAWMQHLQDKYKKLDAIVGIEPTGHYWFDLGAYLEDEGILLVMVNPYAVKQTKELDDNSQSKNDRKDPKVIAKLVTEGRYSAPYTPDGVYADLRIMVANRKRLIREMTQIKNRFARWFAIYFPEYTDVFGDYEAQSSMLLLKKVCTPEAIVELGAEKINQIWRDAKLRAVGMKRATTLCETAKRSIGLKKGSSAARYEMKLLLEDYEYKKAQLDAVMEEIEKLCRKIPESEQMLAIKGIGVITVAGFLAEVGDVRRFESPRQIQKLAGLSLRENSSGKHKGQTTISKRGRSKLRAVLFNAAIPLIAKNPEFKSLHEYYTTRANNPLKKKQSVIAISCKLIRVFYAILANGVTYDAQKMLSDIHRQPQAA

SEQ ID NO: 195367 - protein, 334 aa, unidentified
MNFKSYVGIDVSKNQLDFAVLDLHGKLLKSSQFENTSAGRKAMLNWLKEHACLKDALFCLEHSGVYGLPLCVFLEENELAYSIQSGLQIKRSMGIRRGKSDRADAMAIARYAYRNRDEIECSKLPSRIIMKLKKLISYRERLIRAKVAIQTAAKEMKEFTDKELHAEIVRDSQQHEKRLLKSIGEIDSKLKELIQSDEDLQRIFELATSVKGVGLQIAANLIVATHGFTRFSTWRKFSCYCALAPFEYRSGSSIRGKTRTSSLGNRRIKAIIGNGIASAIQHDPEIKQYYHRKLEEGKHKMVVMNAIKNKLVSRVFAVVKRGTPFVPLHQHLAA

SEQ ID NO: 195368 - protein, 421 aa, unidentified
MALCPHHWKIGETICNDPQVCRIVDLPVYYELETNNGNRDYRIQIGGHYMNYNTVYVGMDVHKESFTLCSCKYEDEKASHYQRTPASYKNVLRYLAFLRTIYGEYTRFVCGYEAGCLGYSLYHQLENFNVECVILAPTTMLEQRSKRRIKTDKRDAEIIARSLAQHNYSPVHIPTETDNQTKEFIRMRDDHKAELKKIKQQILSFCLRQGYQYDGSGNWTAKHVKWLRSLKPAGLYKEILDEYLLTYTILTDKLNRLDQRIEELASKEEYKESVSKLTCFLGIKTHTALSVIVEVGDFQRFVSARKFAGYLGLVPGQHSSGDDRNGLGITKAGNTHVRRLLVESAQSYTRGKIGYKSRVLRSRQAGNSPQVINYADRANERLRRRYYKMVLKDGKKYNIAKTAIARELACFIWGMMTDNIY

SEQ ID NO: 195369 - protein, 374 aa, unidentified
MKNRITYVAMDTHKKQHQIALQYPGQTEIVAFTIANTLRDLQKMVKKILRQASGPVHFCYEAGVCGFTLKRRIEELGGRCFVIAPSLVPRKPGERVKTDRRDAKKLLELFQAGLLTEVQAPNEVQEAARELTRLRETAQENLKRIRHQILKFLTRHGYVYAEGRHWTQKHLTWLHALEFSDPQLTGVFEHYFAEMVHCLSRLQHLDQEVTQLAQSPDYREIVRLLCCFHGIDTLTAITLLTEIFEFGRFASPRQLMSYLGLTPGEDSSGERQRKGAITKTGNARVRRLLNEAAWHYRHRYLPSGALQKRRAGQPAWAIAIADAAGRRLSQRFRHLVYNGKLPTKANIAVARELAGFIWFLVTQYQARKKNGQAA

SEQ ID NO: 195370 - protein, 345 aa, unidentified
MTIVADRVDAVIGVDTHTDTHTAAVVSPIGGVLAELTVAATGAGYTQLIAWATAHAPGPRLVWAVEGTRSHGTGLTRALTAVGHQVAQAPNPPAARRRRGGKSDTLDAVTAARTVLASQQLATPRADGPREDLRLLDACRRHYTDTRTATVNVFKSVILTAEDTLRAVLRGLSTARQVSYLLTHTLPGGEPTRAAVLLGLARQIRILDQDLAANLRQLRQLVHAVMPTLLNEPGVGPVSAATLLITWSHHNRLRSEAAYAALAGTNPIPASSGRTTRHRLNRGGDRTLNAALHTIAKSRRRHHQPTIDYTTRRTNEGKTPREITRCLKRYLAPTLYRHMQAHNPA

SEQ ID NO: 195371 - protein, 506 aa, unidentified
MQKDLHNKQPRLSELIRNPDSVIEDFDTIPDDDIEYVKEYGIGIDCHSRFIEVCVRYRNGKLINKAQGHFSTDWTSLVAAREWCINILSTKADPVPDLSEPLHYLVESTASYHMPVCMAFNGNPTIINPTIAGATKRKTDVLDSRLLALHDQINIWSECYMPSEDVKTLRILIDQRERFIHDANAAGNRINNIITRFGFTVGRSGSVVKDPMIRAIVEDQISDGPSSIEGLCPIPIPLEVRMVLRNEYEKYDYFTARANECKSRIFQKARSMEWETDTTTIPGDEMIRILATAPQIGELTAVLWLARVITPRRFRNAKALSAYCGLDPSLKISAGKVTSTVKRGGNKPLHKALNMCAHRLIHRHNEMFGIWGYNLQQQTGKKKKAANAVARKLSVAMYYMMKTGSEFTYDNYHSIRNIDVFDIPVEDLVLINGDFKRYIRILKENDIYTTTDLATAYISCSLGSCHGLGKKFFGLLKDVLDHHVTYKEMYDDIKSKLNHKEETVYE

SEQ ID NO: 195372 - protein, 342 aa, unidentified
MSGRQSTVSYSLFVGVDIAATTATVSWMRPGENACRPVTIEQTPDGYASLERKLRATGQAPDQVLVVMEATGSYWITLATQLVHAGFQVSVINPAQAHHFAKALLKRAKTEAIDAQTLAQLAMMLQPTPWTPPPPIYYELQQRLAQRDALLDLQQQVRNQLHALDQLPEVIETVRQRFEQLLTTFATQLATVEAEILEVWQQDAAWATAAQRLQSIKGIGWVTAAWILVTTLNFTTCDTVEGLTAYAGLAPMPRQSGTSVWHRPSIGHTGNGRLRTAFYMATLSAAQHNPMIKAFYTRLRAAGKPEKVARCAAARKLLHIAWAVVTKDQWFDPSYALQMQRT

SEQ ID NO: 195373 - protein, 411 aa, unidentified
MNAVGIDVSKGKSMVAVRRPFNETVAKPFEVRHTGSELKQLADYLKSLDGETRVIMEHTGRYYEPVAQFLHDAGLYVSAVNPKLIKDYGNNSLRKVKTDKADSKKIAKYGLDNWVELRQYTPMDTIRYQLKTLNRQCNLYTKTKTMMKNNLIALLDQTYPGVNALFDSPVREDGTQKWVDFAASFWHVDCVRGMSQTAFTERYHKWCKRNGYNFSGGKAVEIHAGAKDQIAVIPKDDLTKRLIRQAIDSLNAVSKTVEQLKTEMLKLSAQLPEYPVVMEMRGVGDSLGPQLMAEIGDVTRFVRRSSITSFAGVDPGANQSGTHEAKSVRTSKSGSPELRKALFLVMDCLIQTKPQDDPVYQFMDKKRAEGKPYLVYMTAGANKFLRIYYGRVKEYLAKLENPTESTPQSPA

SEQ ID NO: 195374 - protein, 385 aa, unidentified
MGNIYGLYIKSKSQDYNELGVILSIGLIDRNRRHLSTLLALKNGVRTVGGSKRSNHNPVQHLHYYLIIFIGTKMARTVFIGIDVSKETLDISINNKHQRIENVETAISEFIKSKMANVFVKLCVVESTGGYKKLVIKLLREHNIAVHRAHPNRVYAFAKACNHFAKTDKLDAKLLEKYAEFITKNDEVVEYIVSQKQEELKELRAVERNLNDEVHANKCRLHKVTGKAREYIEKQIEFAKKQLEQIRQDIEDIINSDPDLKEKSKLLTSYKGVGRKTASILLIEVPELGRLDNKEIACLVGVAPKTSESGRKVSKAQIIGGRFYARKALYMSAVVAMRHNKKMKVFYQRLVDSGKAAKVALVAVMRKIIICLNAMIKNNNFYLDV

SEQ ID NO: 195375 - protein, 339 aa, unidentified
MNATPVGIDIAKSVFQVHYVAPETGEIVNKQIKRSQFLEYFANRAPCMIGMEACGSAYHWARQLMQMGHQVKLMPAKFVKAFNVGNKNDAMDAQAIWLAVQQPRKAVAVKSEMQQAVLMMHRQREQLVKFRTMQINGLRGMLAEFGEVMGKGRTAMIKAVQDALARAEARLPKLLIDTLREQWARVNKLDEEIATIERRLREWKKDDKAVQAVIEIPGVGLLTATAAVAMMGDPKAFKSGREFAAWAGLVPKQTGTGGKVSLHGISKRGDTYLRTLLIHGARYVLTNAKEPGPWVEGMKKRRPSNVVVVALANKMARTIWTVLAHDRPYRKDHVSVKSA

SEQ ID NO: 195376 - protein, 377 aa, unidentified
MKAPSTRPAAVLGLDVGKSSHWACLIDRGGEVLASAPVRNREGALDALFSSAPAGTLVVVDQFRNIGSLAVRRARAAGLAVAYLPGLAASRAAGLFAGEAKTDERDAEVIARTALGVPDSLSGVPGRGEALEAARALSSQRDHVVACATRDKNRLRAVLLESCPALEAAVDLSDRRWLELLAGFGGAWGIARSGAGGPRAEAAGEAAAASTAPPPALVEAENRQVRFLAARISEALDEAGALEAETAALLEGDETYACLLTVPGIGPRTAAQLALSVDIGRFPDHDHLASYCGIAPRVRSSGTSVRSVRASRRGDARLKSLLIFSCNSLVRSSGRYGEYYRACRARGMGHGRALKAVARKRLRAIYAVMRDRVPYRE

SEQ ID NO: 195377 - protein, 428 aa, unidentified
MKRKAAVCLPFILTRGLLWFLPEQSRTNGRDTRVPEALQCKQFELANTPMKTELYVGLDVDKEWIVTAVAEWGRNGPVHDLGAISNDLHALEKLLARLRKRYGPDVRICACYEAGPWGFGIARRLHQLGVECTVVAPSLTPTRSGDRLKTDKRDARKLARLLRAGELTEIYIPEPTDEALRDLCRARSDAVDDRRRSRHRLKAFLLRHGYRYQGKSAWSTAHERYLRELVLPHPAMKVILEEYLISVQLASERIARTEAAMSDLLGKWRLEPAVRALMAMKGFQTVAAMIVVSELGALDRFTHPRQVMAYLGLVPSEKSSSDRRRQGSITKCGNAHARWLLVECTQHYAAPPKVSKELSRRQQNQSRAVRLISWKAQNRLHQRYVRLMARRLQRNKVIVVVARELCGFIWELLRSQECYHAPCPSGMN

SEQ ID NO: 195378 - protein, 437 aa, unidentified
MIREGRSRAAIGIDAAIVANHQIAIRGETREDFSVPPNLSGLAKLTERLAPYAGSLVVAEPTGMSWLSLSGAVADAGCELALVESRHSAKLRSAIAGRNKTDVIDADMLASCASLFGLEPAAVPGANQIALRRAVRRRHSAVVDAHRAECRLWAVGNWAFPDVWRACGGHGVAQPLLTRWGHLDQLARAQTGSIAEIVAAHTRSTDPTKRAEKIRDAAAGWVRFWHGRVDLNALAWEIGELLGDIAAADARVDRATAEAGRNWKAGWGDDEVLLSIKGIGPNAACHVRAWMGEATQFATAKQAAAFVGLNPSNWESGLMASPSRPITKEGPPDLRLALYQSANIARQHDPQLAEQYRRLMVDRGHNHTSATCAVARKLTCRIWAVLNNGKPYVLRDLDGTELTTEQATARAVALAVPEDVRRRSRARNNAARRGRLA

SEQ ID NO: 195379 - protein, 313 aa, unidentified
MAQMVPNVGIDVSKERLDVAVLPAGPQFNVSNDTAGWRELCRRLKPLEVRAIGIEPSGGYERGVIGALLEAGLSVRSVNAWKLRQFAKAAGLLAKNDRLDAQVIALFVATLPCREVRRDPMREHLAELVGARRQMVDLRQVLENHLEQMSDRGLGQMRQRQIRQLNADIVRLDRRIAEAVAAVPAFAARYNLLCSMRGVGPVLAATLLAWLPELGSITRRQVGALVGVVPYDFDSGKMKGLRCIFGGRANVRHVLFMAAQAGTIHNPVLHAFKQHLLAKGKEAKVAVVAIMRKLLTILNAMLRDQRPWAHAQT

SEQ ID NO: 195380 - protein, 336 aa, unidentified
MYSGIDLHSNNSVIAVIDDADRVVAQKRLPNEITKIVGFLARWKDELAGVVVESTYNWYWLVDGLQDAGLHVHLANTAAIKQYDGLKHSGDETDARHLAHLLRLGILPTGTILPREHRAVRDLARKRMQLVRSRTTHVLAVENIMARQLGGRMTSNQIQRLTADAIDKLPLAADVGLAIKTNVAVIATLQAQIEVVEKRLQERVKPRPEYALLSSAPGIGQTLATVILLETGPIDRFAEVGHFASYARCVDSVRRSNRKKKGEGNVKNGNKYLAWAFVEAANFAVRFCPEAKRFHARKKAKTNNVVATKALAHKLARACYHILKEGKPFEVTRCFA

SEQ ID NO: 195381 - protein, 453 aa, unidentified
MPRSKKTRGKSSGRLSTINPEAAGIDVGSTFHVVAVPGDRDDTPVRTFRTFSGDLYRLTDWLEETGIKTVAMESTGVYWIPVFEILEARGFEVLLVNARDVKNVPGRKTDVNDAQWLQQLHQHGLLRGSFRPRDGVVRLRAYLRHRERMVDYAASHIQHMQKALMQMNVQLHHVVSDITGATGMRIIRAIVSGTQTPDTLAEFRDVRCAASEETIREALTGNYRPEHVFALRQSLELYDFHQAKIAECDTEIEAVLQTLNEERATPEQPLPAVRHAKGRNEPDFDVRPALYTLLGGDLTQIHGFGPYTVLRLVAECGDDMRKWPTAKHFTSWLCLAPGNKISGGRLLSSKTRRSSNRAAALLRIAAVNVGKTQTALGAFYRRLAARTGKAKAVTATARKLAILFYKALRFGMTYVDSGASYYEERYRQRVIQNLHRRARDLGFTLVAGPATNG

SEQ ID NO: 195382 - protein, 315 aa, unidentified
MYIGIDIGKADFHCALLLEEKVATKSFPNNGKGFNQLAAWLRNRRVEHGHACMESTGGWSEELATFLHDRGYVVSIVNPLAVKAFGRSELSRTKTDKADAALLARFCAAHRPKPWIPPSPQERRLRQLVRRRSDLVASRTAESNRLGAPGTDAVRTSIETSVAFLNEQIAAIEEQIKNDIDSDPKLQNNRKLLESIPGIGTTSASSLIAEVQDMQQFDSARKLAAHAGLSPQVRQSGTSIHSSSLTPIGNRALKQIFYMPALSAMRHNPIIIAFAQRLRERGKRPMQIVVAVMHKLLVIAYGVLKSQRPFDPNRA

SEQ ID NO: 195383 - protein, 338 aa, unidentified
MYYTGIDLHKFTSYLTTVDSAGKIIKQADLKNVDHNFIQYFDSIPGQHKTTVESTMTWYWLNDLLSSIEIPLTLAHAKYVKAIAYAKVKTDKVDSHTLAQLLRMDYIPEAYKISKDKRVLRDALRARLKIVQRHTSVTNSMHLLLAKYNYDSPSQLTGIAEYQYEQLADVEELLKEQILDLEKQLYPSLIPNEDIQRLLWIPGIGKMNAFNILLEIDTINRFPDVKNFFSYCRLVPSARNSAGKSKQRSSKDGNKYLKVVFMDASVHAVQYYPIIKKYYNSKLRKKNKFVAKSIIAKEIAKIVYYTLKYKTNFNNNFKGIELQHKKSLQWPRVVSPDA

SEQ ID NO: 195384 - protein, 342 aa, unidentified
MTFVGCDLHTRMQQVAVLDTGTGEVSEHRLPHEGTAVEEFYAALPRPVTVGIESTGYAVWFHTLMQRLGHTLLVGDAAKIRAMVVRKTKTDRRDALHILDLLHHDRLPAIWVPDPATRDLRALLTHRMRLVRIRTMVKNGLQAIALNSRLACGSKLLRQAGVAQLQALALPPHTARRRDQSLELLAGLTTQIRELDDAITTAALGHPDAPRLITHPGVGALTALTTIVVLGPVSRFHDSKHVVSYVGLAPALHASADKYHLGRITKQGSPLLRFVLGQAAAHAARMDPDLKRTYGAIVHRRGRPKAKVAVARKLLVRLFIMLRDRIDYDEFRRRGRAALAAA

SEQ ID NO: 195385 - protein, 344 aa, unidentified
MDYYAGIDVSLELSSVCIVDAAGKVVKESKVETHPDALVKFFKNLGLPLTRIGLEAGPLSQWLHGGLIAAGFETVLMETRHVKKALSASMVKTDRRDARGIAQLLRLGWFRPVHAKSLGSQEVRALLVARKQLQHKLTDIELSIRGILRGFGLKVGKVTDSTFEGRIGQLVTGHKTLEEIAAAMLSARATLLTEFTKLHKAVLDIVRGDEVCRRFMTTPSVGAIVAITYKSALDDPHRITKSKNAGPLFGLTPSRYQSGETDVSGGITRVGDEMVRTALYEAANVLLSPRTRFSPLKRWGLEVAKRRGSKRAKVAVARKLAVILHRMWIDGTTFRWTKTATAQA

SEQ ID NO: 195386 - protein, 423 aa, unidentified
MDILYEQVAGLDVHKDTVVACVRIVAEGKTKRECRTFSTTTDQLVELRAWLEECRCTQVAMEATGVYWMPVFRILGEGLFELIVANAAHIKNVPGRKTDVNDATWIADLLACGLIKASFVPNEEIQELRSLTRTRKQLVREQTRHVQRIEKTLAEADIKLDSVISDIMGASGRRMIEAMIKGVRQPRQLAELAGKQIKATPKELYDALHGRLTDHHRFLLDLHLKQWDGLDKTIREIDREIDQRIGRLRTKGESGEVPFRTLIELLSTVPGISTVSASAIVSEIGCDMSRFPTAGHLVSWSGLCPGKNESAGKRKPSRLRKGAPWLKTMLVQCAWAAKRKKDSYYRAQFFRLQSKRGPQKAICAVAASILTAVYHILKNGIEHHDLGGTYFDRRPVELKAGRLVARLKKLGFNVQLQPIAEAA

SEQ ID NO: 195387 - protein, 355 aa, unidentified
MASSKYIGMDVHKESISIAVRNAAGKIVMESVIETKASMIVQFIDGLRGEVHVTFEEGTWSAWLYDLLKPHVSKLVVCDPRRNALLQEGNQNDRVDARKLAELLQNNQLRPVYHGDHGLRTQKELVRSYLTITKDLSRVMTRVKAIYRSWGIACSGTQVYTARHRAEWLEKIREPGVRRRAEIYYLELDGLRLLRQEARKDLLAESKKHQVWKRLHQIPSIGPIRAAVLLGIIQTPHRFRTKRQLWTYSGFGVEGHSSADHQVVKGQLQRKKKPIEIRGLNKNCNHHLKNLFKSAAVNASTKPGPFQEFYAALIAKGMRPEMARLTLARKIATIVLIVWKRGVCFDANHLKPQTA

SEQ ID NO: 195388 - protein, 440 aa, unidentified
MAVRTRDDEVFPNAAGIDVGASSHWVAVPNRARDESVREFGAMTDDLNAMADWLLACGVDTVALESTGVYWIPVFEVLEQRGLKVWLVDARQMKYVPGRKSDVQDCQWLQKLMRLGFLRAAFRPDGEVCQLRAVARQRDVLLAEQASWVQRMQKALVQMNIQLTEVLSDVMGLSGSLMIRDIVAGERDPRALARHRHSRVKASPQEIIKALSGNWREEHLFVLRQSLGMYDDIARHLAECDTKLQAELANLGHKKVDLGKPPRTGSQQRADFDVRQILANWAGVDLTRINGLGVTAVKKILTEMGPDLSRFPTVKHFCSWLGLSPGTKISGGKVLSSKTKRSLNRVRQVLKMAAMSLSRSDSALGAFYRRLCARMDKPSANTAVAHKLARMVYFMLTRGEEFVDQGQQRYEEQQLARSVAALKRRATALGFVIAPAAQTA

SEQ ID NO: 195389 - protein, 316 aa, unidentified
MDAILECCAGLDVHQETVVACVLHGTLDHKPKKEIKTFGTTTKELLALSDWLEEYNCSHVAMESTGVYWKPVWNILETGSFQLLLANAQRIKNVPGRKTDVKDAEWIAQLLRSGLIEGSFVPPVEIRDLRDLTRYRKKLLHDSTQEKNRIHKVLQDANIKITTYISDIFGVSGRNIIESLLDGEVITITTISQMVKGPLKNKVPSLVEALNNRLRKHHREMIRFSWEHLKFLEQSILDVEKQIEQCLRPYEQEVELLDSIPGVNRKSAAMIIAEIGTDMSVFPTDNHLSSWAGVSPGNNESAGKKKEAKLHQETKH

SEQ ID NO: 195390 - protein, 340 aa, unidentified
MSTIQVIGIDLGKSNFHVYALGSNPQASFKKHFSRKQLIDFLANQPPTIVAFEACGGAHWLARKCQELGHDAKLIPPQYVKPYVKTNKNDFVDAEAITEAATRHNMRFVSPKTEEQQVIAICHRVRDGYVKERTAVMSRIGATLLEFGLSLQTGHKCMKELFCWLARQAHVTLPPLLLRELEVMHSDYHRLNDQIAEQDRKLKEWAKQEELCELVKSIPGVGDMVATALVMEVGSAVQFRNGREMAAWMGLVPRQYSTGGKHKLLGISKRGNKHLRCLFVHGARAMMSRLGRNKGPYDVWLLKLRESKPFNVVCIALANKLARIAWAVLTTRTPFQGTAC

SEQ ID NO: 195391 - protein, 355 aa, unidentified
MSNITRVGVDLAKNVFQVHAVDASGNVVTNRMLKRDRFLAWCCDLPPGCLVAMEACSGAHHWCRQLRDRGLDARMIAAQFVAPYRIQGKSGKNDANDAAAICEAASRPHMNFVPPKTLAQQGMLCVHRLREGLKQERTACINRIRGLLAEFGIVLPQSPQVLRQHLSDLIEDAGNDIAGMARLVLQRAQEHWREIEEHVQWCDQRIAAHQKDDEQVQRAAELKGIGPVTASAVVATVGDFKQFKNAAQFGAWLGLTPKQNSSGGKSSLSSITKRGSNYLRGLLIQGAKSVVLVGKHNDDPISQWAQRLRERCGWQKAVVALANKNARILWAVMTKEKRYDAFHVSIPPSAIAATA

SEQ ID NO: 195392 - protein, 282 aa, unidentified
MAQNDLVVLGIDVAKDKVDVCIRSPSSRRTFASTAEGRRELASWARRQKVCKAVMEASGGYEREWAKALRNAKIEVRIVDPKRVRSFAQSAGRLAKNDAIDAEMIAWFAETFDEARGQAYDAAREELVQIVNARQALQAVIAALTKASPHFAETAEIIESVPGLGKITSAGLIAAMPELGQVSNEAISALLGVAPYDDDSGKRQGERQIKGGRRKVRNLFYMACMGAATQHNPVLKTFYRRLIAKGKKPKVALVACMRKLIVILNIMIARREKWDASRYAVS

SEQ ID NO: 195393 - protein, 383 aa, unidentified
MKAVCGLDVHKDSVYLCILSEFGELIEKVFGVLTYQLEEMRDLMLHHHVVEVSMESTSVYWIPIWRVLSPHFKQNLANPYFIKQLPGRKSDVKDAQWIAECTMKELIRGSFVPPETIQQLRQYDRRIFDLNEEIVRKLSKLDAVLQRCNIRLSNYVSNVDSKSYKAVVRAISQGITAPEELVKLIHGRIINHHGIDVITASLKGVVSLAEIDMISQLRDELDMAEAHKEKCQAKMLEICEREFPEELKRLQTIPGIKERAATSLIAEIGTDMNKFETANHLASWSGLKPRNDESNKKIKSRSITHGNVYLRKTIIECAWAASRTKDCFFSRFSFHQTQVRKKNKMKVLVAVARKMLIAVWHVLHDNTIYIDFTTDRKTSRTKG

SEQ ID NO: 195394 - protein, 323 aa, unidentified
MNTLDFLGIDIAKKTFDVALLRGDKFRHKKFPNNAEGFKQLDAWLLKQSVIRIHACLEATGTYSEALAVHLYQAGHTVSLVNPARIKAFGQSELQRNKTDRADATLIARFCEKHRPAAWVPPPIEIRELQALVRHLDDLIGTRTQLTNRVSDGPKVESVLESLRSVIKTVNAEIKLTRKKIRKHINSHPGLKEDCDLLETIPGIGERTATILLGEIQQLGHYKHARQAAAYAGLSPRLENSGNSSKRSRLSKTGNARVRKALFLPAITASRYNPVLRQFSQRLKRRGKTKMVVIGAVMRKLLHLAFGVLKTRKPFDANHAIAP

SEQ ID NO: 195395 - protein, 410 aa, unidentified
MRRIRNRVAGLDVHRDSVTGCVECFDGVDVEVSKRRFSTTARGIRELAEWLATLEVELVVMEATGVYWKPVFYGLEDLFDEVWLVNAHHVKNVPGRKTDMSDAQWLADVAAHGMVRPSMVPPPEIRALRELTRYRRTQVQARGVEIQRLEKLLQDAGIKLSSVASKVWSKSSRAMIETLISGQADPATLAELAKGRMRSKIPALTEALESRWQPHHTVVARRILAHIDFLDSTIAELSDEIVERLRPFDALISLWTTIPGVSTLTAQIMVAEIGADMGRFPTAGHLASWAGVAPATYESAGKRRPAGTRHGSRHLRQALIEAARAASRTKGTFLSARYSRIARRRGPNKAAVAIAHTILVSAWNMAVTGETYTDLGDDFYNQRRDPARRVNHHIHQLQSAGYTVTLTPAA

SEQ ID NO: 195396 - protein, 346 aa, unidentified
MTIVEATRAVTGGIDTHSEVHVAAALDEIGGLLGAESFAANPAGYEALFTWMSAFGDVTKVGVEGTGSYGAGVARFLARAGVEVVEVDRQNRQARRQSGKSDTLDAVEAARAALSGKARGQAKSRDGSVEAIRVLVVAKRSARGARIKALAQMRQLTYSAPDQLRSRLKGLPIAEFVAVAQGLRPTRSADPVTAATKASLSSLAHRVADLEEEINELDARITPLLKATAPELLAVYGVGIDTAAALLVAAGDNPERLRSEAAWAHLCGVAPLEASSGKVTRHRLNRGGDRQANSALWTIVMSRLASDPKTQAYMERRVKDGRSKREVIRILKRYVAREVYRYLPRA

SEQ ID NO: 195397 - protein, 430 aa, unidentified
MTPLIECDQDDALATRLSTKDKKNPCKSVVGVESVMLADSAGDHVRDDSRVTKYTPNHTELDMNILAIDLGKFSSMCCFFDTKTQEYRFQAVATNRRYLTTVLTKHKIDLVVMEACGPSGWISDLCQEHNIKTLVCSTNEEAWRWKNVKRKTDKDDALKLARLAMMRQLKPVHVPTHQGREHRTLVKYRKTLDGRINRIKNSIRSLFANRGIEIDRGRRAWGAGRELIDSYRKPLADCSMEELWQGQLDIELTQLDSLSEQRSEVERRLEEIAEEDERIQRVRTIPGVGRKTAEVLVTALDDVNRFDNARQVSAYIGLVPRQYQSGETDRFGRITKRGSRLLRAMLLECAWVSLQYNPWARATYDRIHGGQKTRKKKAAIALARKIAVVAWSMLKHETDWDPRRMGIEIAEEPEDRAAGSRQRTDAAAIT

SEQ ID NO: 195398 - protein, 348 aa, unidentified
MQRIYIGVDFHARQQTICYLKIETGELITSELKHQDKAGVRAFYAGFSVPVIVGLEASGYSPWFEQMLEELGCEVWLGDATEIRRRARWRQKNDRRDAELILDLMLHNEFPQLHRPSAQSREVLRMLRYRQKLVKMRTMGKNSLQALALQSGLSKRSHLFTKNGQQELRALRMSPVMEWQREQWLQLLEPINDRLLETMHWLKQQSLNDERISRLRTHPGIGLLTSLCLVHTLWPVSRFRNQRKVVGYAGLEPMERSSAERKHFLGISKAGSRLVRFLLVEAAQTAARKDQELKRFYQRLVARRGRQKALVAVGRKLLTRSYIMLRDGIDYAEFLRRGVEARPARRDA

SEQ ID NO: 195399 - protein, 347 aa, unidentified
MKTVNVIGIDLAKTIFHVHAVDGNGVEIYRKKLSRKKLIELINNTPPCIVAMEACGTAHHWGRTFASMGHDVKLIAPQHVKPFVRGEKNDWNDAKAIAQCANISDMRFVAVKSVAQQEIQSLHRVRERYVGNRTALGNEMRGILAEYGYVIVTGYTKLKARVLEIIQSEDCKLSAELKRVLRDLREELIELDEKIFNIEKIFMGLCKDVDVCKRLIKIPGVGVITATAIWSHIGDAQVFKNGRAFAAYLGLVPRQNSSGGKAKLGRITKRGDKYIRRLLIHGARAVVRFCESKEDKRSLWIKRIDHERGRNKACVALANKNARIIWAMVAHGTEYQINFKRTLEQAA

SEQ ID NO: 195400 - protein, 344 aa, unidentified
MAEVSTIGFDIAKSVFQIHGVDVEGAVVIRKRVNRAKVLEFFAALPSCLVGIEACPTAHHWSRRLQALGHTVRLMPPSYVKAYLKRSKNDANDAAAICEAVMRPSMRFVATKSEQQQSILMLHRSRQLLVRQRTMLSNAIRGHMAEFGIVSAKGRNGTAELLAILANEQDDRFPIAARFSLDALARQYAVLTTEISIIEKRIHAWHRTCEESRRLQEIPGVGPIVATALIAEVSDWKAFSSGRGLAAWIGLVPRQHSTGGKERLGGISKQGNRHLRWLLVAGAMAVIRYARKHGTKRLWLIRLMGRRPIKVAAVALANKIARMAWAMMVRGERFKEQNLLPAAA

SEQ ID NO: 195401 - protein, 352 aa, unidentified
MIVVGVDPHKKTHTAVAAADNGRPLGEVTVPARHRGHERMLEWARGLDVDRVFAIEDCRHVSGSLERFLIERGEKVVRVPPKMMAGARRAARVAGKSDPIDALAVAHAALRSPDLPEAHLEGPERELRMLVDHREDLVNERTRIEGRLRWHLHDIDPTIFVPLRSLGAFKWLDKLEELLAKRDQTVQVEIARELIEDCYRLGRRVNRLQRRIERLVAEHHAPLLAIPGVAALTAAKLVGEIAGIERFATDGKLAVHAGVAPLQASSGNRQRHRLSRRGNRQLNAAFHRIAVTQIRCHRPARDYIERKMREGKTKREAIRCLKRQLVRVVFNTLKSNRMTPTEAAPALQPTAA

SEQ ID NO: 195402 - protein, 344 aa, unidentified
MKITTLGIDLAKNVFQIHGVDELGKVIVKKQLKRDQLAAYLVNLPPCLIGMEACGGAHHWARKLMSFGHTVRLMAPQFVKPYVKTNKNDAADAEAICEAVARPNMRFVPIKDVGQQSVLSLHRVRQGFVSARTAQANQIRGLLAEFGVIVQKGIAHLYTRVPELIEDGSNEMTGSFRLLVQLLLEHLKALDKQVDEMEAQIVQWHKHSKASLKLAAVPGIGPITASALVASLGDAKNFENGRQVSAWLGLVPKQHSSGGKEKLLKISKRGDTYLRTLLIHGARSVLYREQSRADSCSWVNGVAVRRNHNIAAVALANKNARIAWALLTREKGFDAKHVSLKAAA

SEQ ID NO: 195403 - protein, 391 aa, unidentified
MSMYFVGIDISKYKHDCCIISAADQQIVSKFTIANDKDGFEHLLTTLNSLSNPEDIKIGFESTAHYALNLELFLENANHSFMEVNPVLIKEYKKSTTLRRTKTDSVDCESIARWLMTVEYKPHSKGFYHAYSLKSLTRLRDRLIRQRSFYLVKITNVLDHTFPEFKPFFNERLSKTAIYLLENYGSAEKMAHMNSASYDKLRCISRGKFSIQQFLHLKELAANTVGVNNSIFDIELNSLLTLYNSLCKEIKNLEAEITRLIEEVHPHYMSIPGIGPISAAVIYAEYGDISNFSNPSQMLAFAGIEPGINDSGTESHGGRMVKHGSSQLRYVLLNACLPLIRFDLTFATYYAKKRAEGKKHRVAITHVAKKLIRVIYALERQDVDFNAQKIR

SEQ ID NO: 195404 - protein, 426 aa, unidentified
MSDPIMHYLGCDRSDAYLDFTLLGDDTPTESFRLPSRAAALETWLAQWCRRFPQHLLCVCFEQPASNLIVLFSRFDFVRLFPINPATLKNYRQAFVFSRAKDDATDAAWLADLLRTHREKLTAWMPHSPAVRQLTALVEQRRSLINACTAWSNKLTSLLKDYYPEALDMTGEHTASTLAIEFLRRWPTLQKFQAAHWATVEKFCRSHHSGRKEPLARRQEVHANARPLTDDPAILGPAEFYLGAILDQLEPLIAAIDRYDTAIAKVFAEHPDHALILSFPGLGPILAPRMLTALGDDRTRFTDASELQCFSGIAPVLKRSGLTTDQVVRRRACPHFIRQTFHEHALESIQLSRWARAYYDQLKQRGLQRHTIARALAYKWQRIMIRCWHNHQPYDETIYMRSLEKRNPTLHAAALKIILPKEKKAA

SEQ ID NO: 195405 - protein, 418 aa, unidentified
MEVIHERVAGLDVHKKSVVACVRLQSGSKVRRESRTFETTTAGLEALLAWLSEMGCTHVAMEATGVYWKPVWNILSAGDFELILANASHIKNVPGRKTDVKDAEWIADLLACGLIRASFVPDQVIQDLRSLLRTRKQFVREQTRHVQRIQKTLEEGNIKLDAVISDILGVNGRRMIEAMIAGESNPQKLAALADRRLKASPTELRDALHGRLTDTHRFLLRTHLKQWDELDGTIAEIDRQVDAVISGMAKPAVFRALILLLCTIPGVGKLAAITILAEIGPDMSRFRTSGHLVAWAGLCPGQNQSAGKRKSSRLRKGAPWLKTMLVQCAWAAKRQKNSYYRAQFYRLAGRRGPQKAICAVAASILTAVYHMLKDGTQHVDLGADYFDRRPTEAKARRLVAQLNKLGYEVQIQPIAAAA

SEQ ID NO: 195406 - protein, 318 aa, unidentified
MNIGDICRKTADMKEIGFTQMVSVGCGIDVHQSLIVASIRKSNTEVETREFEAYTSSLTSLREWCKSEGVTHVAMESTGVYWKPVFNVLEEDFEVILVNARHVKNVPGHKTDKKDSRWLSKLLLSGLLKGSFIPPRDIRELRDLVRYRKKVVGQIASEKNRIIKVLEDANIKLSSVLSNVDGAVGTKVINDLINGETSVDKLMRYYHGKQKVSRSEFRKALEGRITEHHQLMLRIHKDSISDKEAQLKRLDEAIDKASEAYRLEIELLDTIPGVGKESAVSIISETGVDMSRFPDETHLSSWAGMSPGNCETGGKKKV

SEQ ID NO: 195407 - protein, 340 aa, unidentified
MNRIGLDAHSASFTVAVVNDLGKVTRCLSRPTSAENLIHVVGEVPGPKELVVEESAVAQWVKDTLEPYVDKLVVCDPRRNRWIAKDDFNDDRTSAIKLAQLLRGGYLKEVAHPDDWQAQLRRVFCHYADLNEQLVRFKNKLKATYRQALVPANGAGIYSESRHAEWLARLKDAPALHRQAGQLFVLIDTVEAMKEDCLKAMVAQARKDPGYTLLRTIPGVGSVLACGYIALIATPHRFSRKNKLWRYAGLGNALHISDETVYQDRPSKSGNKLLKWVATQHFMGAVERAQADNLFKRRYERLLREGHSKKVARRQVCRSLLSVVRAVWMKGEAYREMPLS

SEQ ID NO: 195408 - protein, 410 aa, unidentified
MDAFCGIDWAEDHHDVALVDRDGGVLARLRISDDAAGLTRLLELLAEHGDSPEDPVPVAIETPRGLLVACLRAGRPVYPVNPMAVARYRDRHSVAGRKSDKGDAAVLANVLRTDMHAHRPLPADSELAQAIAVLARAQQDAVWDRVTAHNKLRSHLREYYPGFLAAFAGAKGGIMRPEARAILAAAPTPATAARLTLAQLRALLRKAGRSRGIDAEAARLREAFRQEQMRQPPLVEEAMGRQALALLRQLDAACQNASDLEAAAIGSFNQHPDAGIITSFPGIGALTGARVLAEIGDDRSRFADGKGLKAYAGAAPITRASGKTRSVTRRHVKNNRLAAAGYIWAFSALTASPGARAHYDRRRDAGDRHAAAERNLFGRLLGCLHHCLATGQHYDEATAFPSHPAIPAAA

SEQ ID NO: 195409 - protein, 356 aa, unidentified
MKHTILNFINQHFFVGIDVHLKQWKVTIRSAGIELKTFSMNPFPQELYQYLQNHYPGGTYHLVYEAGFCGFWIQRTFTELGVQCIVVHPADTPTSAKEKVHKTDPVDSRKLARELEHGSLKALYVPQVASEQLRSLMRLRFRLVQQQTRTKNRIKGFLRVNGIAIPAVHLTNPRWSGAFILWLKGVHPVSGAGGFTLDNLILQLEQTRLHLSGVLRQLRREATSKNLAATVEAIDSAPGLAFITTMTLVTEIIDVRRFSRFEHLCSFVGLVPSIYSSGDTTYTRGMSFRHNQYLRPLLIEAAWTAVRKDPAMTLRFNELCRTMSKQMAIIRIAKKLLRRIFHLWKQQDRYAYALVA

SEQ ID NO: 195410 - protein, 427 aa, unidentified
MLKHNTEPNPAEEFAAFLAIDWADEEHVFHLQVEGQSKVETGTLEQKPEVLGPWVAKLRERFGGRPIAVGLEQSRGALIHGLMAYDFLVLYPIHPTTVAKYREAFKSSGAKSDPLDAGQILEILTQHRDRLHRFNPDTVETRLLGRLVEDRRKAVDLRTTHVQALGANLKEYYPQALELTNGNLSSRLAGDLLLKWPTFADFQQAKPSTLKRFYYGHNVRSPQVLERGLALAQKSQALTTDPAIVESGSRLSQMYVRLIQALNPVIEKYDQRIQRVFDAHPEVKIFTGLPGAGPVMAPRLLAFFGTDRSRYAAALNVQSFTGVAPVTKSSGKSRVVYARAACPKFDRQTFHEFSRLSVSNCQWARNYVQYYTDKGKKYHTIIRALAYKWIRILHKCWKERTPYNDDLYMEILKKRGSIFATLHLQTK

SEQ ID NO: 195411 - protein, 419 aa, unidentified
MSYWIAGIDVHKRMLAVVIADVTVEGEFQFDRRMVGTSPDQLRGLAEWLVAREVDEAVMESTAQYWRPVWETLERVWQPARRQCPDARPSAGALHLAQAQSNQGPRGRKKDFPDAERLVKRLVAHELTLSFVPDTDQRLWRTLTRRKYQLTRDRVQLHNRLECLLEEAHIKLSSLVTDLLGASSRRMLDAIANGETKPEAIAALGSARLHATPQPFCDAVGACRDLAPVYRRLLQMMLEELRLIEGHIDAIDLELASVLRPHQHPIERLAAVPGLGVDSAQQIIAEVGPAAATFPSAKHLASWVGACPGNDESAGVNYSRRAPNGNRQMRRVLNQAANAAVKTKGSIFEVLYRRLVVRLGHAQTIGAIAHRLCRLIWKILHEGIVYEERGPAVTKERAHRRAAKMIRELRSLGYRVEPA

SEQ ID NO: 195412 - protein, 458 aa, unidentified
MQWLRCTSSGESRFERQYRGDETPRLAGKKGEQPEKMTTYRLLAGIDWATQEHQVCVIDPEQRVVAERVVEHTGSGIAEFLDWLSELGGGEPATVAVAIEVPRGALVESLYERGFAAFTINPKQLDRFRDRHTVAGAKDDRRDAFVLADSLRTDQKLFRRVRIDDPLVIELREISRAEEELKEENNRLSNRLREQMLRYFPQVLRLSSSMDEPWIWNLLQLAPTPDKARKLQARQVERVLRAHRIRRLKTKQVLDELRTPPLRLAPGAVQAASAHVLLLLPRLRLVHGQQAECAKRIDSILQKLQPDDSPEGKPREHRDVDIILSLPGIGRVTAATMLAEAPQAVAERDYHALRSLSGVAPVTRSSAKSRVVVMRRACNARLREALYHASRVHSQVDPHSRALYTDQRRRGHSHGRALRSVADRMLRILVAMLESDTLYDANLPRRVPAGASSTEKAA

SEQ ID NO: 195413 - protein, 366 aa, unidentified
MHPTSRRETAITTIAHPEPTRVTIGVDTHLNVHVAHAKDALGRQLATTSIPTTPDGYRRLLGWGQGLGEVQAWGVEGTGCYGAALTRFLHAHAQVVVEVNRPDRAARRRQGKCDPVDAEAAARAVQAKDATGLPKSGDAKVEMLRCLRVARSTAVKARTQAINALKALVVTAPEDLREQLRGLSATKLVRAAASLEPGHLDTTTAATKLALRTLAERHQALSAEVKALDRELRRLVAAAAPGLLELLGVGSESAGALLVAAGDNPGRLHSEAAFSMLCGSSPIQASSGKTTRHRLNRGGDRQANAALHRIVVIRLRWHQPTRDYLARRTTQGKSKPEIIRCLKRYVAREIFAVLKDMTPQHSTQAA

SEQ ID NO: 195414 - protein, 386 aa, unidentified
MLDAPRPALAAIRTDLGAIFVSLELSRRTWLITSLSPGAGEKMSKHAVAAADVSGLLQRFAELKRKAAARTGQDFRVIVIQEAGLDGFWIHRVLEAEGVESHVVDAASILTSRRRRRAKTDKIDGETLLRTLMAYLRGEPRVCSMARPPTPQEEDRRRLCRERRTLMAERGRHINRIKGLLFAQGVFGYEPLLKRRRERLEDLQTGDGRPLPARLKAQILRELDRLEVLLAQLKALQAERDALLGSARADAASPVASLARLKGVGPEFATILWSEGLYRHFDNRRQLAAYAGLAPTPWKSGQVDHEQGVSKAGNPRLRTAMVELAWMWLQHQPTSALTLWFQARDQALGGHKRKTTIVALARKLLVALWRYASAGVVIEGAAIRAA

SEQ ID NO: 195415 - protein, 355 aa, unidentified
MNQEKYIGMDVHQATISVAVMDAGGKLIMECLLETKASTIVEFIQGLQGTLSLAFEEGTSAAWLHDLLKPHVSRLVVCDPRKAALLKEGNKSDRIDARKLAELLRTNQLKPVYHEEHGIRALRELGRSYLTITKDVTRVMNRIKALYRSWGIPCTGSSVYAPSHRAEWLAKLVEPGVRVRGEHLYQQLDSLQPLRLQARRELLQESHKHSGVKLLRQIPSIGPIRAALLVALLQTPQRFRTKRQLWAYSGFAVETHDSGEYRCVRGKLQRNRERITVRGLNDNHNKDVKNLFKSAAISASTRPGPLHDFYVARVEKGMRPTMARLTLARKIATITLTMWKKGVGFDPQNLPRQAA

SEQ ID NO: 195416 - protein, 457 aa, unidentified
MQTFYLGIDVSKGYADFIILNSQKKVVVENFQLDDTFDGHCLLFELLSRFFRDHPESIIYAAVESTGGYENNWYNALLAFQGSLNLQTARLNPLGVYHDSKAEMKRNVTDKISAKSVAEYMIGHPEKVSYQQQDHLASLRKQWGFVKMLTKQSTQLLNQLEALLYSANPEILVYCKEGVPAWVFELLVKYPTASNLAKAKVTSIARIPYVSSAKAQAIVLNAKRSVASATDKITQQLVVATVKEILHLKKNIKTQTEIMAKECSVPEVELLKTFIGISDYSAIGLILNIQSVKQFKTAKKLASFFGLHPKLKISGDGVVVVRMSKTGRTEPRQILFMVAMTAITKNPLISGIYQEHVRKGMEKMAAIGLCMHKILRIIYGMLKHNSAFDPEIDLRNRQKSVQRRKLSRKDNKIRRYQDYDPKAPISSRHKTKRMEQRQSQSDNGAEYGILAPVPFPT

SEQ ID NO: 195417 - protein, 347 aa, unidentified
MRFYTQQHQFYCGIDLHARTMYLCILNRDGEILVHRNMPAGPEPFLKAIAPYREDVVVCVECIFTWYWLADLCAREGLPFVLGHALYMKAIHGGKAKNDKIDAQKIAVLLRGGMLPQAYVYPAEMRATRDLLRRRLHLTRKRAELLAHIQNTNSQYNLPEIGKKIAYKANRGGVAERFPDPAVQKSVEVDLALIDFYDQLLRDVELTIVQTAKQHDAQTLYRLQSVPGIGKILSLVLLYEIHDITRFPRVQDFVSYCRLVKCAKESAGKRYGTSGTKIGNAYLKWAFSEAAVLFLRNHPAGQKYLARLEKKHGKGKALTVLAHKLARAVYYMLRRDTVFDMQKFLNE

SEQ ID NO: 195418 - protein, 337 aa, unidentified
MGGSEATPETPVESVYVGIDVSSTELEVAVRPSGEQWTIPIDEQSVTKLGKRLAVHAPALVLLEASGGYEMAPVATLAAAGLPVVIVNPRQVRAFAKATGQLAKTDRLDAALLALFAERVRPSPRQLPDEAQQELAELLARRRQLIDMLTAEQHRLRQAVGASRRRVRKSIKAHIRYLELDLKMADTDLTTLVRSSPIWQEQEDLLRSVPGVGPILARSILGELPELGQLTHRAIAALVGVAPFARESGKWRGRRAVTGGRRSIRRVLYMAALVATRRNPVLAAFYQRLLAAGKPKKVAIVACMHKLLTILNAILKHKMRWQAPVGLTTALASQDSC

SEQ ID NO: 195419 - protein, 347 aa, unidentified
MSNTHVATIGIDLGKNIFHVVGLDATGAIALRKKRSRNQLEQSLANISPCLIGMEACAGAHHLGRKLEKLGHKVRLLPAQYVKPYLKGHKNDFRDAEAIAEAVQRPTMRFVPLKSAEQLDLQALHRARSRLVTQRTAVINQIRGFLLERGLPVRQGAAALRLALPRLLSMLTDDLSPRIVRLIHDLAEDWRYLDWRVACITKEIDELADQDAHCRRLMSAPGVGPIVSSAMVAAIGTGDAFAKGRDFAAWLGLVPKQISTGDRTILGRISRRGNRYLRTLFIQGARSVLLRRQSWPKHGFGAWLEAASKRLHSNVLVVALAAKLARMTWSMLAKGRDYDANFLGHAA

SEQ ID NO: 195420 - protein, 316 aa, unidentified
MAKLVTKITLGVDVAKDQLVVCNWQTEEITYLPNQPSAIKAWLKSFHGPLRIAIEPTSHYHMCFVTEALAQGHQVYLVNPRQLMHYRQAVNVRNKTDPLDAWLLARYLEHESAQLRPFQPQDRRAQRLWALLLRRATVVQSRQQLQQSFREVQISIQAMLTQFKQLLVRLDQQIIRLIRELGWWSDYRYCLSVPGIGPINAAALVAAYHRGAFAGSDAFVAYMGLDVRIRESGRFKGKRKLTKQGEPELRRLLFCAAHPARTHQRFADYYQKQLNKGLSKIAARVALARKLARIAFTLMNRQQSFNKQEIIYCTAP

SEQ ID NO: 195421 - protein, 393 aa, unidentified
MICVGIDVAKDKHDCFILNSEGEVLADVFTIPNNAEGFDRLLQTIRRCARPEDKMKVGLEATGHYSYNILGFLLNEGLPTYLINPLHTNLYWKSLSLRKTKTDRIDARTIAAMLMSDVDLKPYTDTAYHNEELKSLTRYRFDKVCERAKLKQSVSRLVTILFPELEKLVPTLHMASVYALLSEFPGAKQVAGAHLTHLKAVLYDASRGRYGRDMATTLREAARCSVGSVMPAKSLELQHTIRLIRELDAEIEDIETAIQSMMDEIQSPITTIPGIGVRMGAMILAEIGDFSRFDSPDKILAYAGMSPSTYQSGQLSLSGTYSHMEKRGSRYLRYALYNATKYVCLWNPTFAAYLAKKRAEGKHYNVALSHAAKKLVRLIYAIEKSQKPYCSAA

SEQ ID NO: 195422 - protein, 311 aa, unidentified
MTYAGIDVSKKTLDCCVLDADNEVYLKVQNSPAGYDELMSLLVLYDDVHVCLEATGSYWQSLVEFLAANDVRVSVENPAKIHYFAKASMLRMKSDKRDALLIADYCKVMTPRLYSPVAEAVAELKLLVGMYQRLKKQKVSERVKLLEAPALVKPLINSNIEHFNNQLLETKEMLKAFFRSNADLAHKHEILQTIPGIGFSSGVVLLSILASGYTFESANQFVAYLGLNPRKMESGTALKGRERISKVGKPEYRAALYMPAVVAYSKNLYPNIVARLQGNGKTPKVIIVALMRKLAIYAYTVYKTNSAYVAK

SEQ ID NO: 195423 - protein, 346 aa, unidentified
MLYAGLDLSRKRLDFHLLDAEGATVDVGASAPDADGLRGLSERLERHGAPIRAAIESMNGARFVHDRLELHGWQVEIADAQKVKGLAPLACKTDRIDAWVLAELARRDLVPAIWLPDPRVRAERERARWRLHLVRHRSSLKQRVHAVLLTHGKPCPVSDLFGVRGRQLLARLGLPEPWQGTIEASLRLIDELDREIGECERELRKLGADHQYVPLLLTVPGISWVLAYTIAAELGDIARFPTPRKLAGYTGLCPRVYQSGERDLRGPLSKQGPRYLRWALVEAATHACTAPVYRDRYQQTKARIGKQRGAKVAQIDLARRLAEAIWHMLNRGEAFAPKGATDPLAA

SEQ ID NO: 195424 - protein, 333 aa, unidentified
MKRSQSTTKKRTKKPGQATTTKTMRVGGVDVGKDWLDAAIHGIAAKPLRRPNTPQGRAALIEFFIEHGVTLIGIEASGSYEFEMVDAIRAAGLKDIVFQPRQVRAYATFRNLRAKTDPIDAALIARCAAAQEEMRDSPDPRLAPMAEHLTFIDQIKEDIARLRTRLDRFRDKRFITAIRDQIAHLKKLERAELAKLRTAVRAHADLAKKLDLLITIEGLGGPTAPTLVIRMPELGTVSREQAASLAGMAPFTRKSGRWQGESHVEGGRARVGKAVFAAAQAASQRWNKALVALYTRIKAQGKHHSVAVVACARKLIIYANTVLARGTPWIAQN

SEQ ID NO: 195425 - protein, 421 aa, unidentified
MGFIGGALQERFAERVRGLDPERLLAVPIDVGKHSAAALVCDFYGQLLEEPFTFPLTGPGVDALLLAVTRAEAARDARWVRIGLEEAGHYHRTLLWRLRGAGLEVVLLNPAQVKENRAQDLLRFIKSDARDLGAMAELLIRGRGRPAPGQDTALLRQAALASHRARKVKARSTIKNHIHASLDLVFPGLSGCFDDVLDTKLGRLLVGQGMDPARVRRLGPQRHRAFCARRGVRVSRSKAHQVVQAARVALVLPPELAEAHARVLAADVALLGSLDEAIERVEGELEEILPHTPAGILTTIPRVAVVRASNYGGALGDPTRFRTASQVYRMAGLVPRLYESAGRRRGRTTISREGKAELREAIIDLGRALRQGHPDFARYARELEARGKRPGVVACALGHRANRVAFAMVRDQVPFDPQRWR

SEQ ID NO: 195426 - protein, 364 aa, unidentified
MNKCHLNTELSSLEGTRSEFNRSKAVIKLGIDVHQDFYVVVEQMEGTNPKPAQRFQKQVFLHWAAKLSKSGSKVHAVYEACGFGFGLQRQLTAQGIHCYVVCPQKLDERNKRVKTDGLDAKALCLKLDRFVQGNREALALVRVPTEAEEQKRAIHRQREQLVKARKGLEAQGRSLLVNHGMEPASNWWKGRTFAQLQVPEWMKELLSNSQPILLALEEKIRALTAQLQAAAISKQPRGLGLLSSVVIDREIGSWTRFKNRRQVGSYTGLCPGEYSSGNTRVQSCVTKHGNPRLRAALVETAWRLVRFQPYYKPVLKWRKILAKGALATGAARKKAIVAVARQLAVDLWRIRTGRVAIETLGLIN

SEQ ID NO: 195427 - protein, 482 aa, unidentified
MKSHSSEKSKNITDRPMQRRWNEMNRQQRRETMRKIQSHDLRLEVVHPDASGIDIGNESHYVAVPPDRNGQPVRRFGCTTGELREMAQWLKQCRIQTVAMQSTGVYWIAVFDILEEAGFEVYLVNAKDTKNLPGRKSDVQESQWLMKLHSYGLLRNSFRPTQEIRRMRTYWRQRNDLVQSAARHIQRMQKALTQMNIQLANVLSDVSGVTGQAIIHAILAGERDPHKLAALRDPRVKASEAQIARYLEGHWQEDLLFVLQQEQQGYEFCHRQIAECDRELEQYLQQCEDRSAGAPLPEEARRGRLQKRNGHKPQFDLRAELFRMSGTDVTKIDGIDVMTATTILSETGWDMSKWADEDHFVSWLRLCPDNRISGNKVIGKGRLPTNNRASIALRLAASTLRLSNTYLGAQFRRLRTKLGAPIAIKAMAAKLARLVYRMLRYGMKYMDRGATFYEAQHRARQVSHLKWKAHLFGFRLVEAPTP

SEQ ID NO: 195428 - protein, 374 aa, unidentified
MLLPRQRFKLARGTKDKEHAMSEKLNTAIAVIGIDIGKNSFHVVGHDQRGAIVLHQKWSRGQVAARFANMPPCLIGMEACVGAHHLSRKLKAFGHDARLMPAKYVRPYSKGQKNDFRDAEAIAEAVQRPTMKFVATKTADQLDLQALHRVRERFVSQRTGIINQIRAFLLERGIAVRQGQRFLRAELPRILATPSDVLSPRMVHLIENLAGDWRRLDERIESLSSEIEAIARQDAGCERLMSVPGIGPIISSAMVAAIGSGEVFTKGRDFAAWLGLVPRQMSTGGRTILGRISKRGNRYLRVLFVQAAWVVLIKPKSWERHGLKSWIEAAKKRLHPNVLAIALANKLARIAWGVLAHGRDFEVRKISEAAAQSA

SEQ ID NO: 195429 - protein, 348 aa, unidentified
MSVQTIGIDLGKMVFHLVGMDSRGEIVVKKRLSRLQLVRYTANLPVCLIGMESCSGAHHLGAVLSAQGHHVRLIPGQCVRPYVKSNKNDYVDAEAIAEAVQRPTMRFVPIKTGDQLDLQAIHRVRDRLIARRTSVINQLRAFLLERGITVRQGRAVLRREMPELLAQAAQSLSPCIQRLLQQLWREWLDLESQIESTTKEIDAVAAQDAACQRLQDVPGVGPLVATALVAAVGNGSSFARGRDFAAWLGLVPRQASTGGKPRLLGISKRGNPYLRRLFVHGARSVLRNANRERHPLTKWISGLESRGAHPNVVIVALANKLARIAWAVLASGEPYRIAGHPAGPLNFR

SEQ ID NO: 195430 - protein, 341 aa, unidentified
MYRTKVGVDLAKNIIQVCTLHGKKVTSNVGMSTVEFSLWLAKSKPVTVAFEACSTSNYWYQQAIKAGHDARLISAKLVKAVRQNQKTDKNDALAIAQTLFLPEVSFINGKNIEQQQLQSIQRLRELAIKSQNASQKQIVSLLLELNIRLPNTQAGLLNGLEGVLEDGENNLSDTFRATLLVAKVQLENMISAIREYDKYLEQSIQSLPDCKKLLKLEGVGRVNAVNLYIALGANQSQPFKSGKNASACIGLTPIQHSSGGKEVMGTIGKYCKNGSLRSQLITGAMSVVIKVIKYGAKTKKELWLQGLMQRRGNRCAAVALANKTVRTAYSMLQNNTEYHAA

SEQ ID NO: 195431 - protein, 344 aa, unidentified
MLDNQTGELTERVIRHEGNAVREFYAALEGSVVVGLEATGSMQWFLELLDELGIQYRVGHPAKIRAAEPRKQKHDRRDARLILELLTANRFPDIWMPSIEQRDLRTRLRDRHQWVKMGARLQHTLQSIALNHALRKGISLWRAAGLETLQRLPLPPYTRQRRNQLLSLYAELQKRIQELDRQVEEQAQQRSQARRLLTHPGVGPLPALASEVFLGDPSRFTTAKQVASYIGMIPREYSSGQRQGLGTLTKQGNSLLRYLWTEAALHAVRKDPELKRFYRRKLIQKGMGKARIAAARKLGIRLWIMLRDQIEYEEFCRRGKLRQNGEAHAGMPDFNSGPATAVTG

SEQ ID NO: 195432 - protein, 343 aa, unidentified
MQVVRIGLDLAKYVFEIHGVDGQGNVVIRKTLRRGSVSTFFANLPPCLVGMEASNGTHYWARVLTELGHQVRLISPQFVAPYVKSNKNDRNDAEAICEAVGRPTMRFVPPKSPEQLAIQALHRIRQRLVRSRTKLVNQIRGILAEHGIVIARDIWRLRRALAEITGHATDDLNTLVRVLIMEAQAELMELDRRIASCDRRIRELYRTSELCQRLGEIAGIGPVTATALVAAVGDRSCFKNGRQFAAWLGLVPKQRSSGERHRLFGISKRGDRYLRTLMIHGARAALGKAGGKQDPRSRWLASLRQRRHANVAAVALANKNARIVWAMLAGNVSYEPGRTVQAA

SEQ ID NO: 195433 - protein, 461 aa, unidentified
MKSKAAKPNHRKKKIKQVQLNEHWEKINPDAAGIDIGARESYVCVPAGRDPQPVRRFGTTTPDLEELGGWLQKCGIKTIAMEATGVYWIATFQILEKKGFQVTLVNPRQIKNVSGRKSDVQDCQWIQKLHTFGLLGASFRPADAYCVARSYMRLRDELVAGRSAQIQRMQKALHQMNVQLSHVLSDISGESGLAIIQAILAGQRNPVDMAKLANKRVKASQGQIARALVGDYRAEHLFALQTAYDLYLAMEAKIQQCDEQLIEQLGSLPDKVNLKEKPLPPSAKKQTDQTLRAGLYLKLGVDITAIEGIGALVGLTMLTEVGPDLSAFPSEKHFCSWLGLCPDNRISGGKLLSVRTRRVVNRLSDALRIAATTLQQSQSALGAFYRRMKGRIGAAEAITATAHKLARLIYRLIKHGQTYVQEGLEKYEKKNQERKLKAVRKMAESLGLKILEPQAVALSVS

SEQ ID NO: 195434 - protein, 403 aa, unidentified
MVFVGIDWAEAHHDICVVDQEGQVLAKRRVPEGLEGVGKLHAIVAEHAEDPASVVVGIETDRGLLVGSLVAAGYQVYAINPLASSRYRDRHATSGAKSDSGDARVLADLVRTDRHKHRPLAGDSNLAEAVQILARAHQGLVWTRQRQVNQLRNALREFYPGAISAFDDLDAPDAVAILERAPTPVLGRALSQAKIISALRHGGRERNLEAKAAQIQAQLRLPQLEAPALLAEAYGHSVAATVAVIKQLNLQIAALEQELAASFELHPDAEIYLSLPGLGVVLGARAMAEFGDDRTRFLNPKARKNYAGTAPITRASGTRKVVLARVARNRRIADACYQWAFSALTRSEGARHRYDVLRARGQTHHQALRALGNRLVGILHGCLTNRQIYRESLAWSTQVDVAA

SEQ ID NO: 195435 - protein, 410 aa, unidentified
MEAIVERVAGVDVGQATVVATALVGAAHERARKETRTFRTVTRDLLALREWLLAKEVTHVALEGTGIYWRPVYEVLEDAFEMILGNAHHIKNVPGRKTDVKDSEWLADLARHGLIAQSFVPPKPFRRLRELLRYRRKLLESRTAERNRLLKLLETANIKLASVASNVFGVSGRLMLQALIEGAATPSAMAALAQGRLRTKVAELEHALEGRLDEHHRFLLQLQLRRLDHGDADLASLDARIDEALLPYRAPCEVLQQIPGVSRVVAAVIVAELGTDMTVFRSAQHAAAWAGVCPGNNESAGKRMRAGARKGNVHLRTALVEAAVAASHTKGSYLRDKFYRLRARRGTKRAAMAIGHKILIAAYHLLATGAPYRDLGPTYLDGLDKRHTTRTLVRRLERLGYDVTIAPKVA

SEQ ID NO: 195436 - protein, 323 aa, unidentified
MDKNTNYFGIDISKDVFDVMNIKDQHFQFQNSDKGFRAFKKILTPDSFCVMEATGYYHLKLAYFLLESNIKISIVNPLSVKRFIQMKLSKIKTDKADAKMIRLYAQNNELKLWKGQSKNQIETLQIARLLDVYSKQSTALKNKIHGEQTLGNPSQMVTKSLKRSLKLIKKEQTILEQSLLELVKVDNQQLLSNLESIPGLGRKTAIILIVLTDGFSRFDSAAALCSYCGITPIIRKSGTSVNGRPRISKMGNQKLRNLLFLCSFSASIYNRSCKEIYHRITNKGKSKKVALIAVSNKLLKQAYAIAKSGLPYDEKFKSALSHV

SEQ ID NO: 195437 - protein, 400 aa, unidentified
MPHHTIVLETEWEIGTHYRLDFPQKHQTEVIMTFFIGVDLHKTQFTVHVRTEEKIESLEQIKQYPTTAAGYAEFLTRIETYKASGAAVKIGVESTGNTRFFKNQVEKAGAEVTVINTLKFKVINESTKKTDKHDASTISEFLSKDMLPESYLCGKETENIRRLLKSRERLVRSVVGQKNEVHALLVSMGLPDELRSLQSKKGRRNILDTLESNNDYVLEAQSVKLMFQIIDRMTESVKTIEKQLAELTKDDEMVNRLMTIRGCGKITAWTIRAYTEDISRFASAKKYAAFCGLVPWVQDSNATIHHGKITKRGPQELRTCFVQLVLGIRRCKDTSEWRMMQRYEYMKKNKGSGKSIVAAARKMAEIVWAMLSAKQDFNADKMKGIYKPMTLADEALSAMN

SEQ ID NO: 195438 - protein, 468 aa, unidentified
MGRKGKRTKGMEEAHPFAGMSRVNPNAAGVDIGAVEIVVCVAGDGETQIVRAFGNYTADLQAIGRWLKEHGVKTVAMESTGVYWIPLFEELERQGFECLLTLAPHASAGVSSRSMRRVSGRKSDITDAQWIQTLHTYGLLESSFRPQAELIALRTLLRHRSQLVEHRSPHIQHMQKALLQMNVQLSQAVTDVTGVTGQAIMWAILAGERDPQKLAALREPGCKKSEAEIGSALTGTWRAEHLFVLKQSMEMFGFYTQQIQACDDEIERVYTLTRPDWDAGELKSLSIRKRSSHSKNKPQNSESIRKHLKRISDVDLSAVDGFGASLAQTVIMEVGTDMGKFPSEKHFCSWLGLAPKHEISGGKVLKNKTLKTKNRAGQAFRMAAQSVKQADCVFGVMYRRLKARLGPAQATVATAHAIARVVYRMLKYKVEYETISVEEYEKKYRDQQLKYMKKKAAKLGFQLVPIPG

SEQ ID NO: 195439 - protein, 342 aa, unidentified
MTQFTFFVGVDIASASFMACVGSAPWKLTVKPEKFENIEDGFASFLNWLKNNSLLPEKTVVCMEATGVYSEGLAYFLFANGYTVAVEPPLNIQRKFPANASKTDELDCQYIAEYACRYVDKLAFWKPRADILEKVKVLLTTRQHFSVQLTGHKNALIAVNRKKVTSELAKQVHQAMIGQINTHIKAIDQEIRRLIDDDPSFKQTFLLLMSVPGIGLQLAAYLLIHMQATLDPKVLAAFIGICPLKHESGTSVYSAPTSRHYGPPVMRKLLYLSACSVRTHKKQFQQYFFRKVAEGKHKKVALNNIENKILKIACAVVRSQKPYIPNYVSVNPLVFQKTLTTS

SEQ ID NO: 195440 - protein, 340 aa, unidentified
MTITTVGIDLAKNVFAVHCIDQNGKAVLVKPKVSRAALSELIAGLPPCVIGMEACSGAHYWARLFRQYGHDVRLMAPKFVSPYRMAGKTGKNDAADAIAICEAVQRPHMRFVPVKDESQQAMQCLHRTRQGFIQERTATYNRLRGLISEFGVIAPQSTDALRHVVSDQKETLPVQVRLCIDDLLAHVTNIEEKIAEYDRVLSRVAKTDHRSQQLMELKGIGPTTASALVASIGNAHDFKNGRQLAAWLGLTPSQYSSGGKSKLGRITKAGDAYLRTLLVQGARSVMVGAENRTDPFSRWVCSLIGRRGYWRAVVAIAAKNARLCWASLHYGDDFRLYSTT

SEQ ID NO: 195441 - protein, 324 aa, unidentified
MENIALIGIDLGKNSFHIHCQDRRGKAVYRKKFTRPKLIEFLATCPATTIAMEACGGSHFMARKLEELGHFPKLISPQFVRPFVKSNKNDFVDAEAICEAASRPSMRFVQPRTESQQAMRALHRVRESLVQDKVKTTNQMHAFLLEFGISVPRGAAVISRLSTLLEDNSLPLYLSQLLLKLQQHYHYLVEQIKDLESQLKRKLDEDEIGQRLLSIPCVGTLTASTISTEIGDGKQYASSRDFAAATGLVPRQYSTGGRTTLLGISKRGNKKIRTLLVQCARVFIQKLEHQSGKLADWVRIYCVGKATLSSLVLWQQAGQNRPGP

SEQ ID NO: 195442 - protein, 359 aa, unidentified
MEYFAGLDVGMEATAICVIDREGKVVLETSVTTDPDAIFEVLKPYAAKLRRVGHEAGSLSPWLQVELKQRGLAAICVEAWHTRAALSAMRNKTDKADARGIAHIMRAGWFREVHVKSEESYRLRLLLTQRRNLKRKFLDIENAIRHSIKTFGLRLGKVSRGEFEARVRELVAGDALIAELTECMLRARAALWQEYVRLHKVVVATVRRDELCRRFMRIPGIGPINALAYKTSIDDPQRFRRSKTVGAYLGLTSRRWQSGTSIDVQGHISKAGDGDVRHPLYEAANIMLTRYRGFCSLKAWGLKIAKKRGHKRACVAVARKLAVIMHAMWRDGSEFRFKEPKASTDRTAAAAPELIGTAA

SEQ ID NO: 195443 - protein, 314 aa, unidentified
MTSQIAVIGVDVAKDSLSICRAPTGEVLELPNESRSIRDWLKTLPSGCSIAIEATGIYHVLIATLAHARGHRIYVINGYRLSNYRKGVGGRNKDDRSDAQLLARYLAHEQAQLDPWQPPSKVYCRLQALLHRRAVVVRSAISLRQSFSQDRELASELKPVLKRMAALERRLEKAIQCVLDEAGLTAQSKRCQKVEGIGPLTAAALTMAFLRGHFRHSDAFIAFIGLDVRQKESGLYSGRRKLTKQGDPEIRRLLHNAAMAAARTQRWKSVYQSYLARGLKKIEALTILARKLARIAFALMKTQQPYRPTADTAG

SEQ ID NO: 195444 - protein, 372 aa, unidentified
MDRVCGLDVHKDSVFMCILTANGEKIEDVFGTLTPELDRLRDTLVSHGVGKVAMESTSIYWVPIWRILECDFDVKLVNPYFIRQLPGRKTDIKDAQWIATVLQKELIKGSYIPDSKIQELRQYSRRIFHLTRRKQQAESAIDLTLQRCNIRLSNYVSDIGCKSMRKVVNALICGETDSEVLALLVHKRIRNKHCHEVIKSSLTGIVSSSDRDMLKMSLEEVELYDRQLLECKEKMRIICEGHYAEELEILQTAPGIKEESAMRIIAEIGVDMKVFLTASALVGWAGLRPRNDQSAGKIKGRKTLHGNKYLRVMLTQCAWGACRTQTSKFYSRYHTLKKRMNHNKALMANARKLLVVIWNLLAKKQPYMPFVN

SEQ ID NO: 195445 - protein, 449 aa, unidentified
MKKSSSERHGLPVIHDRAAGIDIGSRFHVVAVPADITEEPVQTFKAFTADVECMANWLVHLGITTVAMESTGVYWIPVYEILESHGLHVVLANARDARAVPGRKTDVNDAQWIQRLHACGLLRASFHPDREIAALRSYLRLRERHLDYAAAHIQHMQKALTHMNLQLHHVVADITGATGMRIIRAIVAGERNAATLATMRDTRCKSSPETIQSALVGNYQPEHVFALAQALSMYDAYQAQLEICDQQIAQSLQRLSQQNPTPSEPLPKPRHRTRQPNALNFDVRTLLYQLVGVDLTQIHGIGPYLALRLVAECGTDLSRWRTAHHFTSWLTLAPGCRISGGKVLSAHTRKTKNRVTAHLRLAAVTIGKTNTALGAFYRRLSARIGKAKAVTATARKIAILFYNAMRFGMAYQDPGADHYEQKYRERVVKGLHRRAAEFGYTLQVVDGVS

SEQ ID NO: 195446 - protein, 348 aa, unidentified
MQKLFVGIDVSKKNLDVAYWQQNENKDSKSIFLGKFANDADGFQTIAQAVEKIKDIEGCESIFLVMEPTGGYEQPMTYFAYNLGWQVSLPNPKQVKDWIRGTGTRAKTDKIDALMLAKYGAVQNPLDWKPLPEEVAQLDSMLSRLQVLKDMLASEKNQCESLGYRVVNHPIVSQNLGENMASLERQIKELEKAVQEHYKKHQHLREQRKRLKTVNGVGDRIADVMVVAMHRFDSLTDSSGTSKGITAYYGLDPKPYESGSSVRKRPGISRQGNTEIRHYLFMGALGGVGGRSGRKVDTPLRSFYKSLVDRGKPKKVALVAAARKILVWCWAVFRQGKPFDPTRCQHSH

SEQ ID NO: 195447 - protein, 376 aa, unidentified
MSNVRCIGLDVHAETIAVAVAEPDGEVRSLGVIPNRPESIRKLVKKLGPAEQLRVCYEAGPTGYVVYWELTALGVQCEVVAPTLVPVKAGDRVKTDRRDALKLARSYRAGDLTAVWVPDAAHEALRDLVRAREAAKKDQLRARHRLGKFLLRHGRRPSPAMNPWTQTHLTWVKTVHFEHPAQEATVLDYLHEVEHMADRIERLERAIDDAVKTAPERMRVVIEALQALRGIAQVSAVTIVAEVGELSRFTKPRQLMGYSGAVASEDSTGERIRRGGITKTGNAHLRRVVIEAAWAYRYRPAVGAALRKRQVSVSPEVNAIAWKAQHRLHARYRHLTARGKCKQETVTAIGRELLGFIWAIGVKVEAEGRNGQSAAA

SEQ ID NO: 195448 - protein, 418 aa, unidentified
MLDTLHVGIDVSHHRHDVCLLDEAGTRVSKPFTVPNNAPGAAELIARVAAVAPGYERVLLGLEATGIYWWHLAQVLTRAPALAPYQPRLVVFNPRLIQGFRDAYAAMDKTDPDDAFLIAERLRFGRLPVGPPPDPRYFPLQRLTRYRFHLVQTLVRAKAHALTLLFLAASEDDRLEPFADPFGATSLAVLTEFRSLDELAALPLEDLIAFIEERGRHRFADPAEPARLLKQVAADSFRLDEEAVEPVHFALTHALAHIRFLAQQLKPLDRRIAKELERFPNTLLSVPGIGPVYAAGLVAEIGDIARFPDDDALAKYAGLWWPRRQSGAFEAADRPLSKAGNAYLRYYLCEAANSLRLHNEPYRRFYERKYQETPKHPHKRATVLTARKLVRLVYALLRSNQLYAQPTALSPQKPPRRR

SEQ ID NO: 195449 - protein, 429 aa, unidentified
MNYTQNEKIEQVTDSTMVVGIDIGSQIHYARAFDNRGRELTKRIFSFHNDLEGFNSFNLWAETLKTENKKTAVLIGCEPTGHYWFAFAKYVNDHQKRLVMVNPFSVKKIKELDDNSPKKTDSKDPKTIAKLVVDGRYSIPYMPEGIYAEIRDLVYSRDRIMKQHNISANRIQRWLAIHFPEYLGLYTRFDAISGLAVLEKAPLPKDVIALGVNGIRKIWHDKKMRGRGVTKDRAKTLVEAAHNSVGLDGGIGTKSELYMLLEEHRLWTSQLEAVNKVLEEMILKVPHVEKLLAIKGVGSITIAGFIAEVGDIRRFDSPKQIQKYAGLELVENSSGKHKGRTRISKRGRRKLRKILYQVMVPLLARNKEFRGIYDYYVTRVKNPLKRRQAMVAVSCKLIRVFYAVLTKGVEYDRFKMMSDIHRKSDIIAA

SEQ ID NO: 195450 - protein, 409 aa, unidentified
MQVVHEVCCGLDVHKKSVTACVLWASGRRRQTREFGTFTRELLELTDWLGGCGVTHVALESTGVYWKPVWNLLEGQFEVLLVNAQHIKAVPGRKTDQKDSEWIADLLQHGLWRASFVPPTPTRELRDLTRYRASLAQEINRIANRIQKVLEDANIKLASVATDTLGASGRAMLEAMVNGEQDSQRLAEMSRGLLRNKIPQLQQALEGRVTAHHRFLLRELLDHHSFVESKMRRIEQEVEERLGPFQSEVARLCTIPGVDRVTAWGLLAEIGLDMRQFLDAQHLASWAGLCPGSHESAGKRKSGKIRKGSLWLRRCLCQAAWAVSTKKNNYLSALYRRLAARRGSKRATIAVAHNLLVIAYYLLRDKTCYQDLGADYFDRLNPEGLRRRLTKRLEGLGFKVVLEPVTQVI

SEQ ID NO: 195451 - protein, 347 aa, unidentified
MRFYTKQHQFYCGIDLHARTMYVCIMDHEGTILTHRNMPATAETLADVLQPYREDLVVECIFTWYWVADLCSRIGVEFVLGHALYMKAIHGGKVKNDKIDSQKIAALLRSGMLPMAYVYPQQMRSTRDLLRRRLYLSRQHAQLQTHIQNTNTQYNLPSFEKRIDRRSNRTGIGDRFTDPMVRTTIEVDVALLDALHEQILAIERQINAQVPEHDPVAVHLLRSIPGVGKILALVIFYEIHDINRFPKVGNFISYARLVKCAHESAGKRRTGKNSKIGNVHLKWAFSEAACLFLRRNERAKHYHKRLVSKYGNAKALSIIAQKLGRTVYSMLKRRTPFDPKRFFETVG

SEQ ID NO: 195452 - protein, 351 aa, unidentified
MTEHITETIGCDLGDKYSHLCVLDGAGEVTERARIKNTPAGFDKWFCSRSLATVIVEVGTHSRWVQQQLEQLGHEVVVANARQLRLIYHGRRKSDRIDAEKLARLGRMDRTLLHPIRHRGEAAHTDLMVLRCRDQLVKTRTELMNHVHGLAKSFGLRLKKGYIPTFCRTARQLLSTELLVAVEPMLCCIEQLSERIKQYDRMIAKMADDYGEAGAILTIQGVGALTAMAYVLTLEDPERFERSRDVGAYLGLVPRERQTGDSDPQLRISKAGDAFVRKLLVNCAHHILGRFGRDSYLRRYGLRLVERGGKNAKKKAVIAVARKLAVLMHHLWVTGEVYEPLRGCRDVKAAA

SEQ ID NO: 195453 - protein, 343 aa, unidentified
MQTISTIGLDIAKSVFQVHGVDAAGQVIVRRQLKRRQVLTFFRKLPPCLIGIEACASSHYWSRELQSLGHTVRLMPPAYVKPYVKRQKNDSTDAEAICEAVTRPNMRFVPTKTIEQQSCLVLHRTRQLFIRQQTATINSIRAHLAEFGIVAPVGRRGVEQLLEVIADSNDARVPEVARACVAALGVQLRQLKAQILELDRRITAWHRSSELSRRLNEIPGVGPALATALVASIADPKVFRSGRDFSAWIGLVPKQNSSGGQDKLGSISKQGDRYLRSLFTTGALAVIRYAKIHGTKHRPWLAALLARRPTKVAAIALANKIARIAWALMTRGERYKQPAALAV

SEQ ID NO: 195454 - protein, 364 aa, unidentified
MLDSSTLVRKIRPQEYDVFIGMDVDSRSIVMTEVDHLGIEKSVSMPHQGRSLLRYVGNHLRGQRIAFVYEAGPTGFGLHDTLSQAGYPCLVVTPAAVPTARGRRVRTNRLDARKLALQLRGGGLEGIRVPSEDYRVLREYVQLRKLHMTEAARCKQRIKALFLRHGLEFPPAPAGGYWSQELIRQLREYPCAPALRFKLASLLTSLEFSRLQAVTAQAEMRRFVAGNPEIAASVRYAMSLPGVGWIVATYAVARIGDWRLLGDSKEMASFFGLTQREDSTGKGAQRGSITKAGDPVMRSLLIEGAWSAIRTDPELRGFYQRVKDNHAQDKGARIAIVAVARKLACRLHCVLKERREYQIRKTEE

SEQ ID NO: 195455 - protein, 309 aa, unidentified
MRATSRQVEHLLRWAEPFEKRIWAIESVGGLGYLLAQQLVAKGEEVLDVPATLASRIRVLATGRSNKNDPNDAHSIAIAALRAPGLRLVEPADHGEVLRLLSKRNSDLGRQRSRVICRLHSLFAELSPGGIAKEMYVSDAEELLAKVRPESPAQQMRYDLVLELLDDVRRLDEQIKTSHRRIRLAVRASGTSVTEVYGVGPIHAAEVIGYSGDVRRFTNRDAYASYNGTAPIERSSGGRIVHRLSQRGNRKVNHALHMVAVTQIRNPGTEGRVYFERKVSEGKTKKEALRSLKRQISNAVYRQLVLDAG

SEQ ID NO: 195456 - protein, 332 aa, unidentified
MSNCIGIDVSKASINVHIPKNNQDLVLENSLKGFKSLFSKLKKIYKKEIEDVIFIFEPTGSYSEALRKYCSEKQIKCFIINPKQFSNYAKALGEEVKNDANDARVLSKALHLAKENQVDIPLFNEDVEHIKELMSFYKFTKKQTTQQKNHLESLTSKDGDKFSIKELKKSIKESQAKELRIIEQVQTLIDSTDEYRNAYANITLIKGVGQIAGIVLLHLFLKYPEANQRQITSLTGLNPIYRQSGSSIQSGYKIAKSGASLYRSILFMSVLAAVQHDKNFKTFYERLKSNGKHTTSAQIAVMRKIILTAHSLYKNNSKYDENLNSQKASRMQ

SEQ ID NO: 195457 - protein, 462 aa, unidentified
MPAREERETADKSRRQLEGLPVIRASVAGIDLGSEQHWVCAPTRDRSDREVASFGATTAELIRMAEWLQARQVESVAMESTGVYWIAPHEVLEGQGLQVLLVDTRQLAGVPGRDKKSDPTDCEWIQRLHSCGLLRGSFRPEAAICILRTLVRDKANLVAESADWLRRMQKSLDQMNVRLHRAVSDIDGVTGMAILRAIAGGERDAQKLAQLRHGRCSKSEQEIADQLSGHWREDHLFSLQQALKMYDAVQERIAAYEQEILRKLGEMEREEQRGQTAPPLNNTNKARAIKNRGQEPRRQALYRMSGVDITQIDALAVETVEVVLSEYGPDLSRFPTEKQFVSHVTLAPRVAKSGGKPVKKKKRNSASTRVAAALRMAALSLRHSQTALGAYYRRIAQRRGGDIAVFASARKLATLIYRLLRWGQPYVDEGEAAYENRYRQHRIGRLAATAKELGYQLTPVPA

SEQ ID NO: 195458 - protein, 331 aa, unidentified
MSIVYVGLDLGSSNFQQVALNHHGVSKVNRDFSTSEANLVKAFSDLKGEIHVHLEAGELAPWAASVIAPLVTRVVCSHPQSNAWIAKDADKCDRIDAYKLAELLRLNRFKEVHYAPDQPRRNFKQLVQHYDELTAQQARLKTKLKARLRMQGVIVTGERLFSATGRKEVLARVESRDLRTAITQLYEVLDQSVAAQEQARLLMLRAAQAFREIKLLRTVPGVGPIGACRFSAYIHTPNRFSSKRKLWKYCRLSVSHRSSNGKPLRRPRLDRSGCGRLKDVSRKSFRGGHPVAPRQWLQAGLPASTRDHPRCDSCAPDRAAQDRLDAASHVA

SEQ ID NO: 195459 - protein, 344 aa, unidentified
MPQPYYVGLDISVKETTISVVDELGHVAHRAVVATDPAALVEHLVRLGFTYSRIGLEAGPLSAWIYAGLVDAGLPAICVETRHMHAALSARINKTDRNDALGIAQMMRVGLFKVVHVKTPASQQRRLLLTARKLLQRKVNDIENDLRGQLRNFGLKVGTVRPSAFEQRVRELVADMPFVAAVVIPLLDARSALRAQLAKLHKMLLDIVRADPVCRRLMTAPGVGAIAALTFRTCVDNPARFSRSKCIGAHYGLTPRLYQSGETARIGRVSKCGDAMMRVALYEAAFVALTRSQGRWNPLKAWGVAIAKRRGIQKAVVAVARKLAIILHRMWRDETDFRWTAAKV

SEQ ID NO: 195460 - protein, 349 aa, unidentified
MNYYTTTTEYNCGIDLHARQMYMCLMDRQGNKLVHTNIQGNDFAYFLTKVAPFKHDLTVVSECTFNWYWLADACEAAGIKFVLAHALYAAHIHGGKNKNDRIDSEKLAHLLRTNLIPPAYLYPAERRPIRALLRQRMSYVWHRAELMTHLSMNQTAQGFVPVLKGGHNRDVWQERILAQYTNPYHQLAARCDLDAIRVYDELIEKLDGTITFHARQYQSRDYNLLLSVPGIGPVLAMTILYEIDTITRFPTVKDFSSYCRLVKGSVASAGRIKGLTGGKMGNAYLRWAFGEAAVLCKRSHRLVSPYADRLVAKHGTFKGNAILAHQIARAVYYMLQSGQVFDAERLVAA

SEQ ID NO: 195461 - protein, 428 aa, unidentified
MNNSLTATLFVGIDVSSKTNYVFAMDFFGKKLLSFEASNNLPGAQIILQSILDALSLNKLTHLTVAMESTSFYSWHIANFLSANEALVWFHPKVYCLNPRIIHAYKKTFVDMDKTDPLDALAIADFARVGKITTTPWKGNQYIALQRLTRCRLHIIENISREKSYILSNIFLKFSELAVLDKKDLPFSNTFGASSMATLTDFLSTEDIANTSIEDLVAFLVDKGKNRFSDPNATAKLLVKAARDSYRLDKALADPLNATIAASLNCIKALEKEVKTLDKAIEKAVKVLDTHEFECALSIKGIGPVFAAGIIAEIGDITKFDNQAAVAKYAGLTWRKKQSGNFTACETFLTKTGNKYLRYYLIEAANSVKNNNEDYYNYYAKKYSEALLHKHKRALALTARKLVRLIFALLRNNQLYTSRDGANRVKTS

SEQ ID NO: 195462 - protein, 346 aa, unidentified
MLAGIDTHKDTLAVAVIDLAGRPVLVTELANTEAGFDALEELVKEHSVSRVGIEGSGNYGRGAAIRLVLIGGLEVVEVPPSLTARERSGRPGAGKTDPGDAVAIARLTARETGLPPVRLAVGRTADLRALADYRAQLVAERTALASRTHAELHGLMPGYQDRVPRLTAPTFITTATDLLAGDTSVRATLTRRRLVRLAELTAEIQEVHGLITDAVKQVQTGLTDLYGLGPVSAATILGEVADIRRYRSRHAFAAANGTAPIPASSGRTSRHRLNRSGNRQLNRVLYIMAITQIRADTEGRAYYLRKRAEGKTGREALRCLKRRLSDVVYRTLHEDLATTAQPVITG

SEQ ID NO: 195463 - protein, 341 aa, unidentified
MRSYLGIDAHSNTGLELAALSEDGKLLWRDRCSLDSEQVVQVAQRAPRPCTVVFEQGELATWLHLTLRNACDEVLVANPRHNRLIATSPDKDDPHDAFVLAKLAAGGYLREVFQPAEKFTVLRLRVRHHYRLGRHLTAVENQIKASYRTQGIRVSGTSVYSAASRDQWLQRLPGPAHLPAEDLYAVLDVVQARKDAALRALARAVRQFAPAKRMLQVPQIGPVTAATFVGYLVTPERFPSRKHLWSYCGFGLMARKSGHRAEPTRLRTAYNRHLKRVIKSTVERQIARSPSSPFAAAYQTRVQRGMLPTRAKLTVSRKLIDVLCVLWTDQEDYDPGRINID

SEQ ID NO: 195464 - protein, 376 aa, unidentified
MLDHTHQNTKPTIYAAIELSKKSWVVAILRPNKDQPSIHRVKGGDVSELIAKLRGAAAHGERLLICYEAGYDGFWLARSLDREGIDCRVLDPASLQVNRRARRVKTDRLDVLMLVRALVAVDRGDRHVCSIVRVPTIEEEDARRSHRERQRLIRERTAHINRIKGLFFGQGIRGIEPLRKRSRVNLSEIRTAEGVPLPARLRAEIEREFSRFDHVEEQLKAVEAERDTADAQNPAVNKKREMLIRLRGLGPASAAILSREVFGRSFANRKQLGSYLGLTPSAYDSGSSTRCQGISKSGNSHARHMMIEVAWLWLKYQPQSALAKWFAQRAAGQSPRIRRIMLIALARKLIVSLWHYVEAGIVPEGAVSVVEGAATA

SEQ ID NO: 195465 - protein, 356 aa, unidentified
MSVYLGVDFHARTQTVCWCDTTDGLIRQRTLDHEHDDVRGFYAQFSVPATIGLEATGYARWFHRLLESLGHHLLVGDAYVIRKCALRRQKNDRRDAELLLDLLLHGDFPSVHIPPIASQAVLRLLRYRQRLVEIRTKLRNGLQALALNYQLRLGPKLWSQQGQQQLRALELDDTDVLQREHSLALLEEIRARIRAIEKELTTRAAQDARTRLLRTHPGVGLLTSLAVVHTLEPVTRFDRARRVAAYCGLDPRESSSGDIVRMGHISKQGNRLLRHLLVEAAHRTVHSKADSDLRSFYYRLMEKKKHSAVAITAVARKLVLRLYRMLRENIDYTEFRRRGREARRARKPASPTAGGC

SEQ ID NO: 195466 - protein, 399 aa, unidentified
MINNHDEVDIFIGVDVGKSNHHAVAIDRAGKKILDRALPQDEAKIRAIIQAVAGKGTVLLVVDQPSTIGALPVAVARAEGIMVGYIPGLAMRRIADLHPGEAKTDARDAAIIAEAARSLPHTLRSIALADEQAAELSMLCGFDDDLAKQATATSNRIRGLLTQIHPALERVIGGHLDHPAMAELLIKYPSPEKIRKAGQTRVRTLLTKYAPRGGKPWSADIFAALSEQTVTVPGSGSAGIVLAQLAAMLKQLRTARNELLTQIEALVEAHPLHEVLTSMPAVGVRTAARIITEVAGKEFQSSGHLASYAGLAPVTWRSGTSIRGDHPSRKGNKTLKRAFFLSAFAALKDPLSRAYYDRKRAEGKRHNQALIALARRRCDVLFAMLRDGTLYDAPTPKAT

SEQ ID NO: 195467 - protein, 339 aa, unidentified
MNNITILGIDLAKNVFQLHGSDATGKAVLRKKLTRSKLVETIAKLEPCTIVMEACGGSSYWCRKFNVLGHKTKLISPQFVKPFVKTNKSDRNDAEAICEAASRPTMRFVAPNTVEQQDIQAIHRIRSRLIGSRTAIVNQIRGLLAEYGIVVAQGVYKIRKLLPEILEDAENELTMLGRQIFFQLNEELRELDEKIEIYDKKIDGVFKSNEQCQRVGKMDGIGKITATAIVAAIGDPSTFKNGRHFSAYLGLVPRQSSSGGKERLLGISKRGDSYLRTLLIHGARSVVRHAKNKDDKRSLWIKNLVERRGTNRAAVAVANKNARIIWSLLAKGENYKKAA

SEQ ID NO: 195468 - protein, 419 aa, unidentified
MKVTYQTCCGVYVHKSFLVATIVKTTSGVEPSHQKKRFSTFNNSILEFKHWLLDNDCHDVCMESTGKYWVSVFNLLEDEINVVIANPKWVKAVKGNKDDTKDSKWIGDLFRIGLVKGSYIPYKAIRILREYTRYRYKLVSCRSSEKNRYQNALTVCNVALDSVVTDIFGKSSTSFIDYLLEQSGTSINHEEITSKLLRSLKSKEDAVIKSAEGYQMTDVQKYRMRLVRAHMDYITAEIKDVDKMIENMISSNPDFENAVQFLCTIPGVKRDSAVTIISEIGTDMSQFSSSKRLCCWAGLTPGSNESAGKKKSVRITRAGVYLKPALVQCAHAAVKSDKSPYYKKKYESLVKRRGKKRAIIAIASMILTAIYQMQSTGEQWNPSDLYKIDMPVALVEKQKLSSKPRNYYNEKEYSLLMNH

SEQ ID NO: 195469 - protein, 348 aa, unidentified
MKKIAIGIDFSKKTFDATIMRREDDSFQELGYFKFDNTPVGFKCFDKWVRTTLKGFPEAKNKFEWVFCGEHTGTYSIPLCDFLVKKRYFMWLESALVIHRRCGIVREKNDRIDSRRIAEYALRNFSDAVRPYELDSKDMKKLKSLYTAHEMLIKDKIAKINQIKSGVLDDSSLALRQIEKQLDSIGSALRTIDRDIRKLVSESDEFKENYGILDSFKGVGTLTIACLIIKTRNFKDMTDPRELGCYIGVVPHHCQSGTSIDKPVRTSRYRDRGANAALTSCATVAIRFNPAIQTYYRRLIARGVHPNKAKNNCKFKIINILLSMLKTRTKFDMEKYGKSVAQWGNASA

SEQ ID NO: 195470 - protein, 333 aa, unidentified
MKNYDVFIGIDVSKLTLDICGIDNCNEVRIKHSVIKNSVNEIKSYFKKVIKNQRKNIIVGFENTGIYGALVASVLNELCIDYSQLPSLEISKSKGISRGKSDKIDALQIAQYLLSHRFKIKLSTIAENHITEMRLLYTHREKIIKSISQYHREFENKNFLPKEIQKDLIKSTNSILKNLNNNLEKIEKKLSDLIKENKTIEKNFNLIKSVPGVGKQTAIYLLLVTKNFTAFKEARQLACYAGVAPFPYQSGSSINGRNKVNNLADKKLKSLLNMCALSANKYDYDLKEYFEKKVTEGKNKMLVLNNIRNKILSRVFAVINRQEPYVNLKKFAA

SEQ ID NO: 195471 - protein, 346 aa, unidentified
MVETMTIGLDVAKQIFQVHGVSADGKATIKRQLRRSEVLAFFGRQPGCIVGLEACGGSHFWAREIRTLGHDVRLIPPAYVKPYVKRGKTDAVDAEAICEAVSRPTMRFVPIKTAECQAALMVLKTRDLLVRQRTQAVNALRGHLAELGIVAAKGLAKVETLIEIVRDEDDRRLPPAARAALKILVEQFETLTARVGTLEHEIVTEVRRDDTMRRLATIPGVGPITAATIQALVPDPGAFTSGRHFAAWVGLTPRLNSSGGKERIGKISKMGNPTLRSLLVVGATAVLQHTRRGATVSPWLTALLARKPAKVAAIALANKMARIAWALLTKGGTFIRKNMVAGHAAT

SEQ ID NO: 195472 - protein, 358 aa, unidentified
MNKITSESGKIYIGMDVSQKKIEIFLLNADSAEGHFLEIPNSRDSLLAFFQAIPEPSRCVAVLETGTHSHWQSRLLEGLVVDVIVAHARDLHLIWKSDRKTDRRDAEMLARLARSDRKLLHPTRPLTRKQQEDILLIKVRSSLVQKRTAMLNELRGWLRSIGEECNGLSTEMMQKEFYGQLPDALKRVFREYLKVLAVLTRSIKEYDKALEKKCKEYPETESLRQVGGVGPVIALTFCLLIHDPYRFKNGRQVAAYFGLVPKRDQSGECDKQLGITKSGSSMMRWVLIQGANYIMGQGKACDLRRMGERISARGGNIAKRKAKVAVARKLCMVLLALWRNDAVPYDPDYKLNRKKRIA

SEQ ID NO: 195473 - protein, 338 aa, unidentified
MKKYSGIDLHSNNSVVVVSDEADRVVYRRRLPNELGKVLEALEPHRAELAGVAVESTYNWYWLVDGLQAAGYQVHLANPARMKRYDGLKHSGDDTDAAQLAHLLRLGILPIGYIYPVAERGLRDLGRRRLQLVRHRTMHVLAVENVQARQTGARMTGDRVKRLSAQAVQALGLPEDVTLGLQANVAVIGALNEEIAKLEKHLAQRLRPRPEYALLGTTPGVGRILGPIILLETGSIERFAAVGNYASYARCVDSARLSNGKKKGEGNVRNGNKYLAWAFIEAANMARRWCPEARRFHDRKRAKTNAIVATKALAHKLARACYHMLKTGEPFDMKRCFG

SEQ ID NO: 195474 - protein, 329 aa, unidentified
MEVKKVIGIDVSKNTLDCCFLSLSGSHHIQISNNIKGFKVLEKWLIKTHGVQYNEALFCMEHTGLYNNPFLHFLSTKETGIWLESAIHIKRSMGLVRGKNDKVDAQRIAQYAIKNMEQMQQWQPKRPAVEKVKALLSLRDNMIMQIKQINAPLNELKTHGDKETVKLITQHSNGTRNALEQGLKKIETSIMTLIQEDESLKRLYAVLSSIIGVGKVTAWLFIVHTNEFKHFTNPRSLACHSGVAPFENSSGLWKGKAKVSHMANKRLKTALHMASMTAVKLDPELKSYYERKVEEGKNKMSVLNAVRNKLVHRIFACQKQDKLYIPKTA

SEQ ID NO: 195475 - protein, 315 aa, unidentified
MTTSSGKFVGIDVAKDKLDIAVLGEKKASQVGNDEVGIAKLIKKLQTLNPELIVVEATGGYQRAVVLGLYEAGQPVAVVNPSRVRQYARASGLFAKTDKLDAFNLAEFGKQMKPRRFEAKSEAGRDISALLVRRRQLEEMLKAEKSRLRTVPPKMRGSVERMIETLKEEIKRLEKELDKFMKENEEWQAQEKILTSAKGVGRITATTLLAELPELGKLDRKKIAALVGLAPMNADSGKKRGYRKTKGGRMEVRNVLYMSTLVATRYNPLIQAQYQQLLKRGKVKKVALTACMRKFLTILNAMMRDKVPFRQTATV

SEQ ID NO: 195476 - protein, 343 aa, unidentified
MEKITTIGLDLAKSVFQVHAIAEDGRVIVRRALRRSQLLEFFRSLEPCLVGLEACASSHYWANAISQFGHTVRMMPPAYVKAYVKRNKTDSADAEAICEAVTRPTMRFVPIKSPEEMAAGMVLKSRELFIRQRSQTANAMRAHMAELGIVAATGMTSISKLILVLRDDQDTRLPPAARAALLEMAEQIEMLTARIEKLERKIVAAVKADETARRLTSIPGVGPIIAATVRTTIQDPAGFRTGRDLAAWIGITPQAHSSGGKERLGRISKRGNKQLRTLLIVGATSILKQARRGALLPSWVISLLSRRPYKVVAVALANKIARTIWALLVKGGIYQAPAIMAKA

SEQ ID NO: 195477 - protein, 356 aa, unidentified
MPATIIGVDPHKRSHTAVVLDDCEEIAAQLRVTASPHQVDQLLGWAPATVQRLWAIENANGLGRLLAQQLVARGEVVIDVPATLSSRARKLSGHSGRKTDEHDARSVAIAAGHNHGLRRVSIENVTVAIGLLLDRRWQLVAQRQPTICQLHALLTELVPAGAATHLTSTKAAALLRKITPSSIVELERKLVARELLEDWRWLDRRIPAAKQRLSDALTAYGTTLTDIHGIGEIGAATVLSIVHDPARFPSRGHFAAFNGTAPLEASSGDVRRHRLSRRGNRQLNKVIHVAARTQIRRDGPGRTYYERKLSEGKSKMEALRALKRQLSDVVYRRLLTDDRQRQAVQGGQAGTRPKSA

SEQ ID NO: 195478 - protein, 399 aa, unidentified
MRQLWAGIDAGKTHHHCVVIDGEGTRLLSQRVANDEAELSVLIDDVMGLSEGGVVTWAVDLNNGGAALLIALMADRNQRLHYIPGRVVHHAAGGYRGDSKTDAKDAAIIADQARMRRDLHPVRAGDEISIELGILTSRRTDLMRDRTRTINRLRALLSTYFPALERALDISNVKATLILLSGYQTPDGIRRLGEARLQAWLRKRKAYNAAQIAAKAINAAQSQHVRVAGQDVAASTVAKFAVQVMNVDAEMAELDRDIEERFRSHHHAEVIESMPGFGPVLGAEVLAVTGGDFTAFGTADRLAGIAGLAPVPRDSGRVSGNLRRPRRYDRRLLRTFYLSAQLSLRSCAASQTYYARKRVEGKRHTQAVLALARRRLNVLWAMLRDNAVYRPEPTVVSAA

SEQ ID NO: 195479 - protein, 335 aa, unidentified
MEFEFFIGIDVSKNELDFSVQQGKCFLFHREIINEPEAIKALLKEISKLKGFSLSNAVFCMEHTGIYSNHLLSCLYQKNANICLEAATQIKKSLGNLRGKNDKVDSMRIAAYAYKNRDELRLWAPRREQVQQLAHLASTRSRLIKAKKMLKTPLKEYGSFVKKNAVKQNTDVCNKALNGIETSLENVEKEIMTIINTDPELKRLFTLVTSVVGIGKVIAVQLIVTTNEFKDIDNAKSYACYAGLVPYLEESGIFKGKGRISHIANKKIKTLLHMAALVAIQYNDELRLYYERKVNIEKKNKMSVINAIRNKLVLRIFACVNQNRPYEKNYLKLVA

SEQ ID NO: 195480 - protein, 303 aa, unidentified
MSGSKLDGRIGLAGPVLQVERTAEGVAQLLAFCREHKVELVVMEATGGYERLAFSLLWAAGMACAIVNPRSVRRFAEAMGLLEKTDRIDAGVIARYAEVKGIVGQEPASAAQQRLQALVTRLRQLTELTVAQSNQRRLVEEPDVLTSFEEVIALARRQIRRLESQISELLDKDPLWRALDQAFREIKGVADRTVARLVAELPEIGLISGKAIAKLVGVAPLANDSGKRNGRRSIRGGRSTVRSILFVVAGVVRRHDADFAEVHQRLIAAGKPKKAVRVALARKLLVRLNAKARDARLALAHPA

SEQ ID NO: 195481 - protein, 319 aa, unidentified
MNETPVFVGIDVAKATLEMAVRPSGAQWASANDEAGIQTLLGQLRALAPTLVVLEATGGYEHAVAATLATAGVPIVIANPRQIRAFARATGQLAKTDAIDAQILALFAERVRPTPRPLPDDATQALEALLTRRRQLLEMLVAEKNRLGVARVGVRRDISQHIRWLERRVADLDRELHAGVRASPVWRAQDDLLQSVPGVGPVLSYTLLAALPELGTLGRKQIAALVGVAPLARDSGTHRGRRTSWGGRAPVRTVLYMATLTATQWNPVLRHCYQRLRAAGKPHKVALIACMRRLLLILNAIVRTQTPWRATPTAARATA

SEQ ID NO: 195482 - protein, 480 aa, unidentified
MNVKATRTKKQVNVENQAIKLLSKEELGIKIEVIKKELRSYTWRDLETNGKFAKNDKLSFITDDMLIAGCDIGSETHYIRAIDVRGRELSSRAFEFSNTSEGFANAKAWMLALAAKNDKKQIALGLEPTGHYWFALAAWMVSNGISVVQVNPYAVKQSKEIEDNSQLKDDRKDPKLIANLVKDGNYGMPYLPEKVYADMRRLSMFRDQLTEDRIRNINRLHRELKIYFPEYMDAFGKIDGAFTLEVLKVSAIPSDITALGAEGIKNIWHNEKLRGCGYSRANEIVSYAEKSVGLTDGTDAGREAVKWYAEQILKLDEQLAVIESTLHEKCREIPYAENILEIRGVGENILAGILAEMGDISRFDDVKEIQKLSGMGLVACSSGKHKGQTKISHRGRKRLRYWLFQAAKSAVSHADEFKQLHEYYTTRTNNPLKKMQSLVVIACKILRVSYTILKTGTTYDPQKLLKDIKRPTASQAPMAA

SEQ ID NO: 195483 - protein, 451 aa, unidentified
MTKEKQTQGKAANKKAVLEKIRLNAAGVDVGTEEIYVATTEGTVQKFNTFTQGINQSLMYIKSKGVDSVVMEATGIYWWPIYEIYTGTGLEVYIVNACHAKNVPGRKTDVLDSEWLRELHTYGLLRSSFIPEENTCKLRVYMRLRQDHIEMAATHVQHMQKNLDAMNIKLHNVLSRLTGKSAIKILEAILGGERDTKKLSALCNERIAPEKLPKVELSLEGHYKEEHLFGLRQALDSWYYYQSKIEECDRKIEELIKSMIKDKPVPEEIKPAKSTSNPNRLKIEGLHEMLMTYTGGRDASQLPGFNDYSLTRLISETGIDMSPWPTEKHFTSWLNLAPWEKSSGKKKSTRRRKIQNNAGQIFREMARSGGNSKYQALGGFYRRIKSRKGARVANKATARKIAVLYYRLMKYGFDYVEQGLEEYEKKYKENILKSLTKKAKQMGMELVPKAA

SEQ ID NO: 195484 - protein, 353 aa, unidentified
MSSLTDLREVVDVVIGVDTHVHTHSAAALDARTGGVLGEITVEATADGYDQLVEFADEHAALRAWAVEGTGGHGAGLTRHLERGEEVIIELDRPARAKRRHGAKSDPLDAIRAAREALSRPRLGGPRSGGDRQALSVLLAARRSAVKAATDAQRQVFSLVIAAPEQIRERFRGQKLPAMLKTAAGLRVHPSWDVETTTTVTALRSLARRVRTLTEEAAEHEKAIRVIVRSWRPDLLEQLGVGPIVAATVLCAWSHPGRIHSEAAFAMLAGVAPIPANSGQVTNRYRLNRYGDRQLNRALHTIVLSRIRYDQATRDYLDRRTSEGKTTREIKRCLKRYIARDLFRLLEHRPPAA

SEQ ID NO: 195485 - protein, 360 aa, unidentified
MKIQRTSVGLDVHARSVVACALDGDTGEVFQRRLTPDHGEIVAWLGDLPGPAAVTYEAGPTGFGLARALTAAGISCQVAAPSKLIRPAGDRVKTDARDAAHLARLLHLGQITAVTVPTASQEAARDLVRAREDCRGDLMSARHRVSKLLLRQGIVYYNGKAWTTRHEAWLRTQRFDNPALQLSYEAAFDATLACQDRRDRLDEAITKLAADSEFTPVVQRLGCIRGVATLTAFGLAVEIGDWHRLSGRSIGAYVGLVPSEYSSGESRSQGGVTKTGNGHVRRLLVEAAWHHRTRYRPGAELRRRWDLASSAARARGQAANRRLHTRWMAFDARKKRPVIANVAIARELAGWCWSLAVMPD

SEQ ID NO: 195486 - protein, 407 aa, unidentified
MKKNSNTQMKSNRTGKPRCPVQREVKEVMAELLIKLGEKLEPRMSGMETNEDGGLNRDRLTVGVDLGDQWSNYCILGLEGEKLVEGRLRTEQHEIAEFFQAMAPARVVMEVGTHSAWVREVVLGCGHEVLVANPRQMDGPKRRRKNDRIDAHKLARVGRVDPQSLFPIEHRSIDVRQDLVTLRAREALVKVRTELINTTRGLVKTMGERLPKCTSLGFARRADEALPQGMREVLLPLVRLVETLTGYIQIYDKRIEKLAREKYEHTELLRQVKGVGALTSLAYVLTLENPERFAKSRDVGPYLGLVPKQEDSGESQPQLRITKTGDKMLRRLLVGSAHYILGPFGPDTDLRRYGLRLCERGGKNAKKRAAVAVARKLAVLLHRLWVTGEVYEPLRHARPPAIEQSAA

SEQ ID NO: 195487 - protein, 426 aa, unidentified
MGGNILRTVYPICCGVDVHKRFFVATIITTEGIEPIYQKRRFSTFNNDILRFKAWLLENNCRDVCMESTGKYWIPVSNLLEDSVNVTIANPKWVRTVKGDKDDDKDSRWIGNMFRIGLVPGSFIPCKDIRILREYTRYRFKLVSCKSSEKNRYQNVFTVCNVALDAVVSDMFGKSASSITDYIVNSNTFDSEHCVSLLQKSLKKKADEVLESIDGFQMTEAQKTRAKIVKEHYNYLLDHIGKIDAVIDELVKPYESAVNLLCTNPGIRRHSAITVISEIGTDMSQFGSSKRLCRWAGLTPGNNASAGKKKSIRIMRAGVYLKPALVEIAHAAVQSNKTPYYKLKYERILKRRGKKRAIIAIARMILTAIFHMLSTGEVWNPSDLDQIDMPPELREKEVQKSLRRAAKLLVAHGLIPSDLIQFSEAS

SEQ ID NO: 195488 - protein, 415 aa, unidentified
MNYVGIDIAKDFHVVTIVDENEVKYYKKAFKVINSNDGYKFLLEKLDKISTNKNDFIIGLEATGIYGENLLEFLKVQGYNVKLLNPYQTKNYREQRTMKKVKNDNIDSHMIALFLKEDRYSSGYVTDDEYQGLRTLYRNRDSIMLDMKDVKKRILTNLAVTFPEFEKFTNPFTKVGLALLDKYPTAHHYKHSSVDRIVNIFRHIQGNNFNNEKALRLLELSKISVYSGKAKDARAIAIKSSIRLLKFYLEEIDTLEQEIFKLLDNYKSSDTLDEISENKIGENTIIQNLASIPGVAYKTIAAVISECGDLKRFPNPTKFIGYLGLFPTENSSGNSKIIGHLSKRGSSIAKHALYMASVSCLIHNPELKQLYDNKKSQGKSAKEATIAVSSKLATIIYAIVKYNVPYDPVRVFAKS

SEQ ID NO: 195489 - protein, 416 aa, unidentified
MNAVGIDVSSRKSTVAVLRPLGEVVCLPFDVTHDIAGLASLAEKLKAIDGETRVVMEHTGRYYEAVAKALHEAGFFVCAVNPLLIKEYGANSLRRVKTDKADAVKIARYALDNWADLRDFTPMDAIRYDLKTLNRQFQLASKQRTASANNLIALLEQSFPGIRKCFDSPVRSDGTQKWVDFAHSFWHVDCVRKQPFPAFCERYRKWCKRHAYFFKLSNAEEVYALAKRAVVLTPKSKVVKVLVQEAANQLSSISRSVEVYRAEMDRLAAMLPEYPVVMAMYGVGKSYGPQLMAEIGDVRRFERKQALVAFAGIDPMPNQSGDKNVRSNKSSKRGSPYLRKTLFNVIRTYLQCAPQDEPVFQFLNRKRAEGKPFYVYMLAAANKFLRRYYAKLRDYFASLDTLQSVDPIPATLKASL

SEQ ID NO: 195490 - protein, 354 aa, unidentified
MTSTKYIGMDVHKESISVAVMNAAGKIVMECVVETKASMILQCIDGLRGDLHVTFEEGTSAAWLYDLLKPHVTELIVCDPRKNASMREDDQNDKIDARRLAELLRIDHLHPVYHGEHGLRTLKELVRSYLTVTKDLARIKTRVKAIYRSWAIPCNGTEVYAACHRAEWLEKINEPGVRRRAEFYYQQLDALRVLRQGVRRELLVESKKQKAWKRLCQIPAIGPIRAAVLLGILQTPHRFRSKRPLWKYSGLAIETCSSADHRSVNGQLQRSKKTSVRGLNQNCNHDLKNLFKGAAVIASSKPGPFHEFYTTLLAKGMRPEMARLTMARKIATIVLIVWKKGVCFDAQHLKPQTA

SEQ ID NO: 195491 - protein, 346 aa, unidentified
MDVYIGLDVSLASTAICAVSAQGKIVKETTAASEPETLVATLRAMPGELIAVGLEAGPLSQWLYRFLNDAGIATVLMETRQVKGALKAMPIKTDRRDAEGIARLLQMGWFRSVHCKSMSAQEMRALLSARKAVQQATINLELSIRGVLRNFGLKMGRVAKGRFEARVRELAEGNPMLEAAANPILAARRALRQELAGLEKVLRNHAKEDPVCRTLMTMPGVGTLVALTVKAAIDDPERFRSSKDIGPWVGLTPRREQSGERDIVGQVSRAGDVGLRTALYQAATVMLHRGRKTWLTAWALNVAKRRGKKRATVALARRIGVVLHRMWKDGTAFRFTREDAAEAAAA

SEQ ID NO: 195492 - protein, 412 aa, unidentified
MDTVIERCAGLDVHKDTVVVCVRVPGPDGGRQQLIQTFGTTTTAVLALRDWLTAQGVTIVGMESTGVYWKPVYYVLEDALECWLLNARHLHKVPGRKTDVADAAWICQLVEHGLVRPSFVPPKPIRELRNLTRYRKAQIEERSRESQRLDKILQDAGVKLSSVASDVLGVSGRAMLGALVEGTRDPAVLAELARGALRKKIPALREALRGRFGPHHALLVGTILAKLEFLDDAIAQLSAEIEQVIAPFAHEAALLRTIPGVDRRNAEALVAEIGVDMSRFGAAGRLASWAGICPGNNESAGRQGSGKTRKGSKWLRTHLTEAAKAAGHAKGTYLAAQYARLRARRGSARATVAVAHSILVAAYHILERRQPYQDLGADHFRRRHSREQQTRRLVRQIQALGYKVTLELVEAA

SEQ ID NO: 195493 - protein, 400 aa, unidentified
MYDIDDVGVFLGLDVGKSAHHGHGLTSAGKRVFDKQLPNSEPKLRAVFDKLAAKFGTVLVIVDQPASIGALPLTVARDAGCKVAYLPGLAMRRIADLYPGEAKTDAKDAAVIADAARTMPHTLRSLEVTDEITAELTVLVGFDQDLAAEATRTSNRIRGLLVQFHPSLERVLGPRLDHPAVTWLLERYGSPAALRKAGRRRLVEVIRPRAPRMAQRLIDEVFDALDEQTVVVPGTGTLDVVIPSLARSLAAVHEQRRALEAQIGQLLEAHPLSPVLTSIPGVAVRTAATLLVTVGDGSSFPTAAHLASYAGLAPTTKSSGTSIHGEHAPRGGNRQLKRAMFLSAFAALHDPASRSYYDRCRARGKTHTQALLRLARHRISVLFAMLRDGTFYEPRTPRLA

SEQ ID NO: 195494 - protein, 444 aa, unidentified
MSKKRSAHLRGDRGQAFADLVRGIPAEQILCVSMDISKYFHVAMIHNGLGEIVTPPFEVDIYQSGFDQLCQKIESTRLQAQAQLVLVGMEPTSHYFENLARHLLEHSQPVKLINSFSVKQNREQQLMRREKTDQIDVAAIGDLLRRGEGTPYQPPSSIYLQLQQIDRVRLGKLKIETMLKNQIIGHLDRIFPGLVLIGDAAQERYTPFFNVDFWQCRTLQALIRICPNPHQLVEMSPEQLIQLFHAQKRRMGPAMAAKIIAQAQKTLLPDPELAAIRCELLQHDLALLESVQAHIALLEQRLTSLLPQTPYQVWTKFKGISAVQAASLAAAIGDPTHYTEAAQVFRRSGLVSGRNDSGTHQRKGRGNPILKIGDVYLRRSLMNAVSTLLVHQPVLYSYYKRLALSKPAGVARVATARKTIGLLWAAQRDQFSNTLINCKGADML

SEQ ID NO: 195495 - protein, 309 aa, unidentified
MSTNNPVIYVGLDIGKDSLQVNLQNQNFPVPNTRPGHRKLMAQLKALAQPLLVVCEATGGYEQAIVAALHQTGIPVTIVEPARVRHFAKACALRAKTDRIDAALLAEFGRQTTPRAQTPPPPNTGAFRELTRHRLQLQAMAQNVVQQARHLTLPALRQQNAALLRQLRGHLQKLQKQIDALLQQDAALQTKAQSLRQVAGIGPKTIVSLLAEMPELGKLNRAQAAALAGVAPHARESGRWQGKRFIGGGRPLARKALYMAALVASRYNPTLKIRYQSLIARGKAPKVALVALMRHLIIHLNSLLKPLAV

SEQ ID NO: 195496 - protein, 336 aa, unidentified
MNKNGEVLGIDVSKSKLDVALLLNGKVKSKVVQNTPAGHQILLEWIGKSKASITALHVCMEATGVYHEAVATTLHAAGFKVSVVNPACIKGFGHGENIRNKNDEIDAGLIARYCLAMAPELWTPPPLEQRQLKGWTLRVQALKDIRQQEANRLEAHTVSGMTDVAENVTEHIVWLDAEIKKLENEIDDHIDRHPALKRDAALIRSIPGIGKTTVPRVLGHLGDIRRFKSAKAFAAFLGVTPRQATSGSSVRGRTIVSKTGNTSLRSALYMPSMVAQRSNPIVSQFADRLLATGMAKKAVLCAITHKLTHLIYGVIRTGKPFDANYLTKGLAIPDGI

SEQ ID NO: 195497 - protein, 432 aa, unidentified
MPNVEHWSIRPSLGVLGSISRLEIQEGALVIFIGDDWAEDHHDVHVMDEAGRRLDSRRLAEGLRGIGELHELIATYVEEPDQVVIGIETDRGLWVQALNAAGYQVFAINPLAVARYRDRHHVSGAKSDASDAKLLADLVRTDRHNHRLIAGDSDAAEAIKVLARAHQNLIWARTQHTLQLRSALREYYPAALEAFADLDDRDALAVLGRAPTPEQAATLGLPAIRSALKRGGRQRSIDARAREIQAALRREQLTAPAPISAAFAASTRATVGIIAELNRQIAELETTLAEHFETHPDADIYLSLPGLGVILGARVLGEFGDDPNRYTDAKSRKNYAGTSPLTIASGKKRAVLARHIRNNRLYDAIDHWAFCAITASSSARAFYDQRRAAKQSHHQALRALGNRLVGILHGCLRHHSLYDEHTAWAHRNTAAA

SEQ ID NO: 195498 - protein, 450 aa, unidentified
MTRYIGLDLHKRVLEVCILDQGGHVEARMRLPVDRDSLASFAKSELRLDDRVAVEATTNTWPVVELLRSYVADVTVSNPMATKAIAQAKVKTDKIDARMLAQLLRADFLPSVWQPDADTSRLRQLTNQRASLVADRISIKNRIHAVLHQRLIPPPSARLFNEHGRQWLDQLEIDPDGRAALRRDLHLLDELEHAVAEVDRMLFRLAGEDPRIKLLITLPGVDVACAQTILGALGDLSRFADGDHAASYLGLVPSTKQSAEHAYHGPITKAGNTHARWMLVEAAQHLGNNPGPLGAFFRRLEHKKNRNVAVVATARKLVTIAYLLLTRGEPYRYAMPARTGDKLRNLRLRSGGARRPTGCPKGTRPIAKLPDGSSRTIKPLATLYADEAVPGLLPPTAAEQSMINRNPAVAAFVASLAEPQVRPRQYRKPQIHAPSVDTGGSTDRARRPAR

SEQ ID NO: 195499 - protein, 421 aa, unidentified
MAEENAMKVHRNCCGLDVHKQTIAACLIREDGMGNTCKEKRLFGTMTRDLRELAQWLRGAEVSAVAMEATGVYWVPVWNVLEREGLHLLLINPEHYKAVRGKKTDLKDGERIAELLQDGRLEGSFVPSTPLRILRDLTRYRVKLVEHQSAVACRIQKLLEQCNIKLASVASNVLGVSGTAMLQALARGETNPERLAELAKKQLRKKIPALRLALDGHLLPHHRFLLRDMLDELAHIEGQLARLEAEIERNMPPFQKTLQAWMSIPGIKQRVAWTLVAEIGPDMQVFPSPAHIASWVGVCPGNNESAGKRKSGKTRKGNCWARRALCEAAWVAAKAKKTYLAAQFRRLAATRGSKRAIIAVAHTILTIGYHILQRGTLYQELGANYFDQRHVLRTTKRLVKRLQALGHRVILESPLPNTRIA

SEQ ID NO: 195500 - protein, 314 aa, unidentified
MSQTNKPTMFVGLDVAKSSLQLNLANQLHHFPNNPKGQRQLIKRLQAQPTLVQVICEATGGYEQTVVQALQEAALTVSVVEAGRVRHFAKAKGLRAKTDPIDAAVLTEYGRAFAPAPTPAASSVQRQLGEITARRRQLVDVRIIELNRADHYADAFSRKQSRQLLALLDKQIAQCDRSLNQLIEQDAELRAKAIRLDAIPGVGPTIATVLLAEMPELGQLSKGAAAALAGVAPYNQDSGYQNNPRRIAGGRKAVRCALYMAALSAVRHDRILKAFYLRLRSSGKKPKVALVACMRKLIVLMNRLLKNPHLQLAT

SEQ ID NO: 195501 - protein, 425 aa, unidentified
MNYKQNEKINQVKESTLVVGIDIGSTTQYARAFDWRGIELGKVFTFSNSREGFESFKAWMQRLQDKYKKSDAIVGIEPTGHYWFDLGAYLEDEGILLVMVNPYAVKQTKELDDNSQSKNDRKDPKVIAKLVTEGRYSAPYTPDGVYADLRVMVANRKRLIREITQIKNRLARWFAIYFPEYTEVFGDYEAQSSMLLLKKACTPEAIVELGAEKINQIWRDAKLRAVGMKRATTLCETAKRSIGLKKGSSAAKYEMKLLLEDYEYKKAQLDSVMEEIESLCKKIPESEQMLAIKGIGVITVAGFLAEVGEVRRFESPRQIQKLAGLSLRENSSGKHKGQTTISKRGRSKLRAVLFNAAIPLIAKNPEFRSLHEYYTTRANNPLKKKQSVIAISCKLIRVFYAILANGVTYDPQKMLSDIHREQQVA

SEQ ID NO: 195502 - protein, 360 aa, unidentified
MKGDQSLMITLGIDAHTRTHTVVAVDDVGRQLGTKTTTATTSADHLDIIRWADQIGPDRQWAVEDCRHLSRRLEVDMLAAGERIVRVPPKLMAHARDAARTYGKSDPIDALAVAQAALRNPDLPVAQLDGPARELRLLVDHREDLVAERTRCLNRLRWHLHELDASWDPPARSLIAIKNLDAITARLESFAGPVARIAAEIVTHVRDLTVRERALEREITDIVNELAPTLMALVGVGALTAAKIVAETADVRRFKHKDAYARHNGTAPLPVWSGNRERHRLSRTGNRQLNAAIHRIAITQMRCHDDAIAYLERRTTQDHKTKTEAIRGLKRRLSDVVYRALLADAQPAQAAPADLLAAAA

SEQ ID NO: 195503 - protein, 415 aa, unidentified
MDAIYERCCGLDIHKRTVVACMIVPGSGRQARKEVRTFGTMTDDLLTLADWLAAESVTHVAMESTGVFWKPLFNLLEDRFQLLLVNARDIKQVPGRKTDVKDCEWIADLLRHGLLKASFVPDRQQRELRELVRYRTTLVRERSAEVNRLQKTLEGANIKLASVASDPLGLSGRDMLNALVDGSTDVASMAELARGKMRAKRGLLERALAGRMAAHQRFLLTEQLCHIDALDEGIARVSGEIAERMRPFAEALERLDTIPGIGQRMAEILVAEIGTDMRRFPSAAHLASWAGMCPGNQESAGKRKSGRTRKGNVWLRAALIESAHSLGRGRGTYLAAQYRRLTARRGKKKAAVALGHSILVIVYHLLSRGDVYHDLGVQYFDEGRRERLEHGLVRRLQDLGYKVTLEPTQPTTSAA

SEQ ID NO: 195504 - protein, 352 aa, unidentified
MKCDKYMGMDVHQATTVVAVMDAEGTIVLETIVETQAASIIRLMQSLSGPLHVTFEETAQAEWLYEVVRYFVAEVIVCDPRRNKLLSEGSKGDKVDARKLAELLRCGMVRAIHHGDGTRQLKELVRGYETICRDTQRTMVRIKAIYRARGIRTPGRSAYQTKQRQQWLQQLDELGVRQRVGWLYEQLDHLKPLRRQAKQAMIRESRKYRGVELLRTIPQVGAIRAALIVATVDTPHRFRTRHQLWSYSGLAVVTHMSSEYELQQGRVVRSRKPIATRGLNRNCNRRMKDVFIGAAAGGSQTEPYRSYLQALQDKGIRQEMARLTLARKIAAIALRIWKKGETFDPKKLNWKT

SEQ ID NO: 195505 - protein, 429 aa, unidentified
MPESKVRQPAQEPQFAAFVGIDWADQKHAWCLQVAGSSQRESGELEHKVETVEAWVAELAQRFGERPIAIAVEQVKGALVYLLAKYECLHLYPVPSTMAASMRKALHPSGAKDDPEDADLLLDFLLQHRDKLHRLAPDTEVTRRVQNFVEERRKLVNEKTAQLNRLASNVKIYFPQMLGWFEHLDTELVCGLLELWPTLEELQKASPAELRGFFHQHHCRKGELIERRIQEIGQAKPAIRDRAVIEAKRVVVKVTVQLIRSLRVAIAEFDGKIAEAAAAHPDFFIFASLPGAGEVMAPRLLAAFGTQRDRYNSANEVQVYSGIAPVLEKSGKMKWVHFRRACPKFLRQSFQEWAGHSMVKSRWARAYYQQQRKQGQDHHAAVRALAFKWIRILFRCWKERVAYDEKKYLAALAKRGSPLSTLLIAGTVL

SEQ ID NO: 195506 - protein, 420 aa, unidentified
MKYVGVDWSDVHHCVYITDDTGDCLSAFSVEHTPEGIQTLFLKVKEIAKDPAEVLFALETHRGLLASAIIDAGFTLYPINPKAVDRYRDRYKVSGKKDDYFDAMVLANILRTDRQNHRPLLPDSVLTRELRSYTQGYEALVKNQTKLCNQITSCLKDYYPVALKAFEKIDQPITLNFLEKFPTPSSFQRASKAKIENFLKKRHYPGIKEKTTELYTFSKEPQFKVEEQIAQAKSFYLLSLVKQLKEILSAVREIEKRIEALLEEHPDKDIFSSLPGTGTITTARFISRFGDNRDRYEKVSAVQAEAGTCPVTEKSGKSTYVHFRYGCRKPFRDTATQFAFTSMKESEWARQKYTQYRQKNGKDHNLALRCLANAWFEVIFPMWRKREPYNVEKHLVGFFKEQGLFLPESKIPAVAGSSVS

SEQ ID NO: 195507 - protein, 338 aa, unidentified
MFDTGIDQHRLRSTLTTFTAAGDRVGEATLPNDRATLRRYFGQFPGPHHAVVEATGRWYWLRELLVPQGIELHLPHAKFLKAIAYAKVKTEAIDAGTLGQLLRGGLIPEAPMISDALRGPRDVLRARLRMVTRRRSAKNSLDRLLEKWNVARVDDLPPLYQVQAASQTALLTVLTEQIHPLEVAVRPALLDSPAVQRLLWIPGIGRLMAFTLFLEVDDFQRFPTIKQFWSYCRLVPGAADSAERRRHRSSKDGNRYLKLAFSHAAVRAVQYCPEVRQWDQRWNRKKPLRVARALVAKELAKSVYHVLKDDVEFNQQFKGTPLTRQKRARWPRRASPSA

SEQ ID NO: 195508 - protein, 353 aa, unidentified
MEYIAFDAHKHYTLASVARPDGQLVREQRIAHERGALQQFLERCEPGSPVAVETVGNWYWIIDEIEAAGCVPRLVHARKAKLMMGEINKTDKLDVRGLNQLQRTGTLPTVWIPPGELRDQRDLPRTRMVLVRQRTQLKNRIHSTLAKYALHDIEVSDLFGARGRALVRQRLELLPPCTAYTTRHLLEQVERLDHQVREFEQQIRTLFKPTPTIQHLLTLPGVGLTLAVVIALEVGDVVRFPTAEKLAAYAGTTPRVHASGGKTRFGPSRPDVNRYLKWAFVEAANAICLNRGRTPRRHVTRLYERVAQRKGHHKAIGAVARHLAEATYWVLTKQQPYREPTTAAVSSTGDKRG

SEQ ID NO: 195509 - protein, 339 aa, unidentified
MEVTTIGLDLGKDVFQVHGITADGTVVFNRTIRRRQLLNFFETLPCCLVGIEACGSAHHWARELIEIGHDVRLMPAVYVKPYVKRGKTDAVDAEAICEAVTRPTMRFVAVKSKEQQALLTIHRVRQLVVRQKTQMLNVIRGLLREFGHVIGNGPVAAMRFIKTFETDDSPDIPDVAKGMLKTLCDQVASLDERVKFYDKLVEYHAKIDERAKRIRTVPGVGPITASAIVATIGDGRQFKNGREFAAWLGLTPLNRSSGGKERLGRISKKGDRYLRRLLVIGMTSQVQRARGYPERVHPWIMQLLKRKPVRLATVAMANKAARIIWAILTKDTYYRQTAA

SEQ ID NO: 195510 - protein, 318 aa, unidentified
MTSIILGIDISKKTFDAALLIDKKTKNKKFDNASKGFHELNRWLKANKVGTAHVCMEATGSYGLKLAQYLYENQFKVSIVNPARVKGFAQSKLCRVKTDKADSELIAHFCKVMNPDLWQPTPLHIKELQDLVNRLESLIANKTQETNRLEKGLSALVEANVKSHITFLNQQIKEMEKLIAAYIKSHNDLSDQYILLTSIPGVGEKTIAIVLAFLSNVQKFDSAKQMVAFVGLNPKPRQSGTSVRRTSRISKTGDADLRRAFYMPAIVSLKFNPIIKDFTERLSRAGKSKMVIVVAAMRKLLHIIYGVLKNNTPFNQNI

SEQ ID NO: 195511 - protein, 320 aa, unidentified
MQSPSAVLNIGADVAKDAIVVACSEGSFPVREVANQRPAVLAFLKGLPAGSRIGVESTGTYHELFAETAHQLGFRVFLLNPKDTHHYAKAVGLRGKTDRVDAELIARMIAHEHTKLHVWNPPTPQQREIDRLIKRRATLISLREAVEMSLHDLGGFADELKALRTRFNQLIARIDLRTKALVEASPERKQNFTRVCTITGVGPVIGTALVNTLERVPVKSADAFVAFTGLDPRPDDSGQHRAKRRLSKRGPGELRRLLFLAAMSAAKTKTWRPRYEHYRAKGLSGTAALVILARRIARTAWSIYTYKTEFDPARLTNPLT

SEQ ID NO: 195512 - protein, 385 aa, unidentified
MQASSKDTPTVGHYGTIFVAIELSQRSWLVTMHCPDRDKISRHKLEGGDHAGLLALIARLRERAAGAQGVAPAVVSCYEAGYDGFWLHRLLMAAGITNYVFDPASIAVDQRARRVKTDRIDGEKMLRTLMAYLRGEPRVVRIVRVPAPEQEDARRDTRERDRLTKEQTAHTTRIKALLRLLGMAVGNPRRRDWLTWLAAQRDWQGQAVAPRMLSEIEREHARLMLVREQLDALTRTPAADLTPAAAQMAQRSELLRRLKCLGPAFATTLTNEVFYKDFRNRREVASYFGLTPSPWQSGGIDREQGISKAGNPRARCSAIELAWLWLRHQPDSALTQWFRSRTLNASKRNKRIAIVALARKLMVALWRYLTTGLVPEGAALKAVKA

SEQ ID NO: 195513 - protein, 416 aa, unidentified
MSLALPEALVFTGIDWASAEHAVCVLDAAGKIATQFTIEHSAEGIASLVRRLARYGDPADLPVAIERPSGRLVDLLLEAGHPVVPVSPNAIKTWREGEVLSGAKSDAGDAAVIAEYLRLRYHRLAPAAPYCDETRALRTAVRTRDDLVEMRVAATNQLAALLDAHWPGAKAVFADVESPISLEFLTRYPTPAAARHLGEKRMAAFLVKHGYSGRRPAAQLLARLRDAPPGTTGDALTEALRDAVLAVVTVLRALNAAVKDLDRSVAAHLGEHPDGAIFTSLPRSGQINAAQMLAEWGDCRQAYAGPGSVAALAGVSPVTRQSGKHRGVGFRWACNKRFRRAITTFADNSRHASPWAAQIYADARAAGKDHPHAIRILARAWIRVIWPCWVNGVPYDPARHGAAAALAGRTPSQSAA

SEQ ID NO: 195514 - protein, 485 aa, unidentified
MQKRRMSTFERLTGGCLNRNERRKLARRVATADPSLSIINCNAAGIDVGNESHFVAVPPDRDPNPVREFGCWTAALKEMAQWLVDCRIDTVAMQSTGVYWIALYDVLEQHGIRVVLANAYHTKTVPGRKTDVQESQWLMKLHTYGLLRDSFRMPQQIECVRTIWRLRDRHVAEAARTVQHMQKALTKMNVQLANAISDISGMTGQAIIAAILRGERDPWVLAELRDGRIKATKEEIARSLEGNWREDIIFELQQAVDAYQFAHKQIGECDRKLQAYLATLPARTLESAEAVETSQPIEPKVKKRKYRKPAANAPQMDLRGELRRICGVDLTAIDGINIMGALTIVSEIGTDLSGFPDENHFASWLGLTGPKDISGGKPVRAKKRKVNNRVADVLRLGAAGLLNSDTWLGARARHLRRKAKTPAVAVKAMARQLAVLVYRLLTRGQSWVDRGAERFEQKQQQRDLAALSAQASARGFRLVPVSQIN

SEQ ID NO: 195515 - protein, 353 aa, unidentified
MERYVGLDAHAETCTLAVVGPSGRRLTSKVVETNGRALVEAIRGMAGRVHLCLEEGTQSAWLHEILEPEVSEIVVVSPPEAKGAKDDLRDAWSRAEELRVGAIATRVYKAPKHWSGLRSAAATYRMATQDVVRVKNRLKAVLRGRGILADAGVYEEKGRRKWLKELPAAGHRPAAEWLGRELDQLVPLREEAEDWLLKEAKAHPIIKTLTTVPGMGPLRTAQMVAIVITPHRFRTRRQFWSYSGLAILTRSSSDWVQGQNGKWTRAEVRQTRGLNRKRHPVLKGIFKGAATTVITQLHGHPLHMDYERMLQSGIKPNLAKLTLARRIAGIVLSMWKHEEVYDPERHKPSLAKS

SEQ ID NO: 195516 - protein, 418 aa, unidentified
MKKHNNSPKKSEPTSRRTKARGPVQRDTKEVLAELVGKLKEKLDRKKVAATSAEEEHQRDELGPNLDRLTVGVDLGDQWSHYCILGLQGETLAEGQLRTTAQEVGEFFQGLNAARVVLEVGTHSAWIRDVLCSCGHEVLVANPRLMEGSKRRKRKNDRIDANKLARLGRVDPQSLHPIEHRSKEVRQDLVIIRARDVLVAARTELINATRGRVKSMGARLPKCSSPSFAQKVEEAVPVEIRDALLPLVRMTAALSDCIQGYDKKIEKLGSEKYGHTALLRQVKGVGPITSLAYVLTLENPKRFVKSRDVGPYLGLVPRQEDSGESQPQLGISKAGDRMVRRLLIGSAHYILGPFGPDTDLRRYGLRLCERGGKNAKKRAAVAVARKLAVLLHRLWVSGEMYEPLRQGRSATTAHAVAA

SEQ ID NO: 195517 - protein, 366 aa, unidentified
MKKISTLATRRNKIFNQPKLTIGLDLGDRTSHYCILDEAGNVILERSLPTTPKGIHQIFSKIQRSRIALETGTHSPWVSRQLTQLGHEVIVAHARNVRLIGESSRKDDQLDARTLARLARIDPGLLSPVRHRSAQAQIHLTVIRARAALVSTRTALVNAARGLTKSYGERLRKCGTGQMNREIAKGLSQELRDALEPLLQEIESLNERIAEYDRRIEQIAKEAHPEVALLQQVKGVGTLIALTYVLTLDDPHRFRRSRDAGCFLGLRPGRRNSGMSEPQMHISKEGDRYLRTLIVQGAHYILGPFGEDSDLRRWGLKLAERGGKNAKKRAVIAVARKLAVLLHKLWVSGEVYEPLRNNHKVASAVA

SEQ ID NO: 195518 - protein, 397 aa, unidentified
MIAVGIDVSKSKSTVAILNADGSKRLTPFDVKHNLPELNALVKYLNDLNENIVILMEHTGHYHYPILKKLNDEGFQVCLVNPYQMKKYGDTELRRTKTDKKDAIRIATYALEKSYLLVPYSSMEQKYEDLRLLSRQYSQRMATLTFNKVHLGNLLDETMPGITSILSLNTRDPDTSLSMLFIKKYKSYDYIRKMGKTRFLESYSKLTKKARNRRVDHLGLSIYELATQSITTHGENTYTIMAQTQCLNLVAESQKAADAIITQMQAIAVTIPEYPILRSMNGVGDRLGPLILAEIGDVRRFHSGKALNAYAGNDAPPYQSGNFESHNRHISKRGNAALRKYCFEVMQALKLIKPQDDPVYLFLLKKEQEGKHFNVAKMAAVNKFLRIYYARVMELEQ

SEQ ID NO: 195519 - protein, 446 aa, unidentified
MVTSWYCRKLIKFTVFKRQVEFTVTLEFTFSIQQTLIVGIDIGSETHFARAFDWRNYEYTKKPFEFSNNKEGFQSFESWMEELSAKHGKTAVIPGMEPTGHYWFALGKFLQDNGMRPVHVNPHHVKKSKELDDNNPNKNDRKDPKTIAGLVNEGRFSYPYIPIGVYAEIRNLSNLRFQAQEELTRAKNRLARWFSIYFPEYKDVYRDIKAVSGRMVLQMAPLPEDIRKLGVEGVNRIWRDAKLRGAGMKRAKTLVTAAEHSVGSKESPEAARIELKILLHDIDEYASRVEELLSLLDAKLSEIPYIDKLLGIKGIGKITVSGFIAEVGDIRRFDDPKQLQKLAGYAIVANESGKYKGESRISYRGRKRLRYVLFEAALSLVARNPEFRKIYEYYRTRENNPLKKIQSLVAVACKVIRVFYVMLTKGVDYDPEKMMRDIRRPELQTA

SEQ ID NO: 195520 - protein, 401 aa, unidentified
MTVPDLVWIGVDAGKACHHVVAVDHLGNVLWSKQVRNDQAAIEQVLALAARSVPEARWAVDLTSAGAALLLALLVTAGQRVVYVPGSMVDRMSGAFAGEGKTDARDAKVIAETARLRRDLTEITTPDELVVELSLLTGHRADLMADWVRGVNRLRELLTRVFPALERAFDYSTRSALILVSEFSTPTAIRSAGADGLTVYLRAGRAHRPSIPGMVAKALAAAQAQTVALPGETTTAQLIGRLARQLLDLDREIKDIDKLITRRFRDHPQAKIIESMPGMGPILGAEFIAITAGDLAAFGTPARLAAYAGLAPVPNDSGRRAGVLHRPKRYHRRLRHVFYMAAFSSLKTDGPSRAFYQRKRSERQRHTKAMIALSRRLVDVLWALLRDNRPWQTSTPAAINA

SEQ ID NO: 195521 - protein, 347 aa, unidentified
MEKASQAEVQVFAGIDVSARELSVAVQCGIKEGIAITTFPNKAAGHQALLAYLLRAKGRARVCLEASGNYSLDLALTLQAHPQVEISVVNPRRARRFAESLGERSKTDPVDARVLCEYALRMPWVPWVPPSLAALRLRSITRAIEDLVAMQAQEKNRQHALLASDALPALLIRELEQHLRYLKLRITRLRREALRLIARNPELNRRFHLMLTTPGLGETSSLQILGELVVLPETLDARQWVAFSGLDPKQFSSGTSVEKKPRISRGGNRHLRRALYMPALVATRHEPFLPDFYQRLLRRGKAPLQGVVAVMRKLLHALFAMFRRDEAYDGSKLCPAEFARHTAVVCV

SEQ ID NO: 195522 - protein, 341 aa, unidentified
MSVIIGIDPHKRLHAACAIDGQETELARLEVRTSSRQVTDLLAWAARFECRSWAIESAGGLGYLLAQQLVARGETVVDVPATLSSRVRLLGSGRSTKNDANDARAVAVAALRAPSLARVRVEDHVTILRLLAKNQLDTSRAKSRACCRLHALVAELVPGGIRKEVVVNQAEHILAGIAPTSASQRQRLDLAYDTLSEIVMLDDRTKRNRARITEEVIASGSSITEIFGIGPILAAMIIGYTGDITRFPSAGHYAAYNGTAPVEFSSSGRTVHRLSRRGNRTLNHALHIVAVTQIRHSHSEGRGYYDRKVAEGKTPREARRALKRQISDRVFKQLRLDAANK

SEQ ID NO: 195523 - protein, 366 aa, unidentified
MKKISTMEVFGNEIFKEQKLTIGLDLGDRWSFYCILDEAGKIILEQKLPTTPEAMKQTFGKIPRSLIAMETGTHSPWVSRLLTELGHEVLVAHAQKVELITKSNRKDDRHDARTLARLARIDPELLGPVRHRSAKAQIHLTVIRARAELVSARTALVNAARGLAKSFGERLPKCGTQQVSGKLAEGLSAELREVLEPLLREVESLNERIQEYDQRMEKIAKEVYPEVSLLKQVKGVGTQIALTYVLTIEDPYRFPKSRAVGCFLGLRPGRRNSGESEPQKKISKEGDRYLRTMMVQGAHYILGPFGEDSDLRRWGLKLAERGGKNAKKRAVVAVARKLAVLLHRLWVSGEVYEPLRNSQKAMRAVA

SEQ ID NO: 195524 - protein, 419 aa, unidentified
MNYVGFDWASRAHDVTVLDEAGGVLDRWAFPHSETGWVTTLDRLARHGSAAELPVIIERTTGLIVDRLLAAGHPVVPVHPTAFYAARPRWGASGAKSDPGDSYKLADYLRTDGHRLRRLTPTDPGLHELQALVRLRDDQVRARTAATNQLTAILDTYWPGPKQLFMSLASQIALAFLTDYPTPTSAAHLGEARMAAFCRRHAYRGGKSPAELLSRLRAAPVAPVGLPPATLAAMVTAQVTVLKTLQTVISDVERLIAVRVVAHPRSNLFENLPGVGMINLAQLLAEVGPILDRVDSAEQAATECGAAPVTRSSGQTRGVYFRWAANTRARKAITSFAHNARMQDDWAAALYADARARGKRNPHATRIVARAWLRVIWACWTSGQPYNPDRHHSSRFLHRCHPAGAQARSRWSPPPEERS

SEQ ID NO: 195525 - protein, 335 aa, unidentified
MKPRKASIPSTSWAGIDLAKLTFQLALWGHQEFPEMKVRSFARTPKVMKGVLKWLREELPAGSSLGIVMEATGTFGQEVGSWLLKLDPTVRIAIVNPGQTSAFITSLGFRNKTDELDAKGLARYGKERNPVPWIPLTPELATLQDLVRTRADLVKTRTAMTLRLNDHARTSAASNALREVIQALASQIKALDVAMASHLAANKSLAHPVERYISIKGIAIVTATTVLAELGDLTRFSRSRQLTAFAGLSPKRKQSGTSVHGKTHLCKKGSARIRAVLYMAAGCAVRFNPDMKATYQNLLARGKEKRAALGAVMRKLLVLMRAVQKADRNWIPRAA

SEQ ID NO: 195526 - protein, 341 aa, unidentified
MPDGPTPPNGNSGTATCISTWFTAAPPDADGLRGLARRLAGHGQPIYAALESMNGARFVHDTLEEQGWHVELADAQKVKGLAPLAAKTDRIDAYVLAELARRDLVPAIWLPAPGVRAERELARFRLHLVRHRSALKARIHASLIAHGHPCPVSDLFGVRGRKLLDDFELPEAWRASTEASLRVIGHLEAEIDACERELRRQGADHPYVPLLMSAPGIGWVLAYTIAAEIGEIERFSGPKKLCGYTGLCPRVYQSGASDRRGPLAKNGPKYLRWALIEAATHAASHPCYAAHYQATKRRLGRQRGAKVARVEVARKLAEAIWYMLARSQTFAPQGPTLPLVA

SEQ ID NO: 195527 - protein, 403 aa, unidentified
MSFNGAPVTAAAVVAVDVGKNKAAMAMTSADRHRLFGPVDFAMTAPALAAVLQRACAVLPAGPIKVGVEAAGHYHRPLLGSGVWPRGWEVLELSPARVSEQRRVQGRRRVKTDAIDLEAITELVLAGHGVPVTPRAAAVTELTGWAMQRGRRVLTRTATKNQLLAQLDRCFPGLAMVLPDVLGTKVGRLVAAEFADPHRLAALGVTRFIRFAANRGLRVRQSAAERLVAAARAALPSLEAQVARQVLADDLVLLACLDVQIVAAEAKLAQLLPDTPFAPLTTVPGWGTVRAGNYGAAVGDPGRWPGARQLYRASGLSPAQYESAGKRRDGGISREGSVALRRALIDLGIGLWRADPAARRYGQQLRARGKKGGVIGCAMAHRANKIAYAMVRDQTGYQPDRWA

SEQ ID NO: 195528 - protein, 429 aa, unidentified
MSYRIAGIDVHKKMLAVVVSDVEVDGEFRFERRMFGSNPEQLRTLAAWLLEQEVEEVVMESTAQYWKPVWETLERYWKPIREKREGASRKSGTLHLALAQSNRGRRGRKRDFPDAERLVKRLVARELTLSFVPDAEQRLWRTVTRRKYQLTRDRVRLQNQLESLLEEAHIKLSSLVSDMLGASAQRMLKALADGETNPAALAALADRKLRATPEQLCDALGACTDLKPVYRRLLKMALEQLQFLEQQIGQLDQEMASLLSPHQDAVERLAEVPGLGVDSAQQIIAEVGSTAATFPSEKCLSSWVGACPGDDESAGVNYSHRSPKGNRHMRRVLNQCANAAARTKGSIFEIVYRRSVPRLGHNQAIGAIAHRQCRLIWLILHQGVRYEERGPAVTKQSKQNRTARMIRQLRSLGYRIEQTNPQPSQAQAQ

SEQ ID NO: 195529 - protein, 357 aa, unidentified
MEYTKVDFTGQHVYVGLDVAKKSWKVSVLVGELFHKRFSQQPDCRTLANYLRRNFPGAQYHCVYEAGYCGFWIHDELRQLGIDCIVTNPADVPTTDKERHHKTDSVDAGKLARHLQSKDLRGIYVPNRSALEDRTLLRTRSRFVRKQTRCKHQIKALLHFYGYTAPDAAVERYWSRAYIRWIETISFRESSGTYSLQALLKELFFLRQTILDVTKQIRHLSHQERYSRRAHLLCTIPGISIITAMTLLSELITIDRFTSLDALASYVGLVPGERSSGEDEYITGISPRRNAALRYMLIESAWVAQREDPALMMSFLELSHRMPKPQAIVRIARKLLNRIRYVLKNDHPYVKAVLRSA

SEQ ID NO: 195530 - protein, 389 aa, unidentified
MGRVWAGVDIGKEHHHCVAIGDHGDRLLSSRVANDEAELTELIAEVVELGEETVWAIDLIDGPASLFCAVLRDHGNGFLFVPGRSLQRIAAVYPGAGKTDARDAAILAQEARVRHGLRPRPPLDPIAVDLQLLTARRTDLVCDRTRTFNRLRGHLTTITPALERALDVRRRGVLTLLTGYQTPTALRRIGPARLTTWLHRRGVQSPRALAERATAAARLQSVRVTGETLAAACVAEPAAEALVLHRRVDDVDHRMKVLFHDHHDAALITSMPGIGDILGAEFIAATGGDMARFPTANHLASYAGLAPVPHDSGKYHGIRHRPRNYHRGLQRVFYQSARISVRCCAASQTYYDRKRGEGKSHTQAVIALARRRVNVLWAILRDRQPYQGR

SEQ ID NO: 195531 - protein, 391 aa, unidentified
MSMYFIGIDISKYKHDCCIISAADQKVVSKVTIKNNKAGFNELLTIIHSLANPADIRIGFESTAHYALNLELFLENSLLTFMEVNPVLISEYKKSKTLRRTKTDSVDCESIARWLMTVEYKPHSKGFYHAYSLKSLTRLRDKLIRQRSFYLVKITNVLDHTFPEFKPFFNERLSKTALYLLENYGSAEKMARMNSASYEKLRSLSRGKFSPQQFLRLKELAANTVGVNNSIFDVELNSLLSLYKSLVKEIDTIEKEINKLIEEVHPHYMSVPGIGPLSAAVIYSEYGDISNFTNPGQMLAFAGIEPGINESGTESHGGKMVKRGSSQLRYTLINCCLPLIRFDMTFATYYAKKRGEGKPHRVAITHVAKKLIRVIYALESQDIDFNAQRLR

SEQ ID NO: 195532 - protein, 318 aa, unidentified
MQTSIIFIGVDVGKFELQVAGANGEIVAGVLHNNRSSIVGWLKRLPDTSVIAMEATGGYQELLARAAHERGFEVYVLNPTHVHHYAISLGNRGKTDRLDAAVIAQYIAQHHKKLHRYEPISPELQEVRALHALRSTVVRVGTSLRLSAQRHGCVSSHQKKALASLTAWSEQLEKEMIAKIKAHSDWAKTYGLLTGICGIGPITGVALTNLFSRIDFATSDAAVAFCGLDPRPNESGRKVGRRRLSKQGDKAARTLLYNAASSAARTAQFKDYYAMLRARGLAPTAALVIIARKLLRIAYGVWRTGQPFDPEKLRPAIA

SEQ ID NO: 195533 - protein, 440 aa, unidentified
MKKVTAFETVYEHAAGIDIGAEKIFVSPDGREVVSFDTFTCGYYQCIEYLQQKAITDVAMEATGVYWIALYAMLESCGFKVCLVNPKETKQVKGRKTDVKDCQWIQKLFSAGILRQSFIPQEKYMEVRQLVRERIDIIEMGSTYVNKMQKSLELMNIKLKEVISQIHGASGIKMIKAILKGQRDKDYLLSLCDKRIVEKKGEAVLKALEGNYNDTYLFMLEQNLHMWEKHQEHIAIIDGRIGQLLEQLSKDKELLIKNSKPKPVRHHAPKIEGLHEMLIRLYGINVSSISGINDYTQLRLIGETGVDMMRFPTHKHFVSWCGLAPKHHKSGKINKRVKATSCNKTGQIFKEIAQSLINSKYIAIGSFIRKLKAKKDSAIAIKAGARKLAIAYYNALTKGMEYVEQGTKKYEEQIAKREKAALHKLAKKYNMEIVEKQQAA

SEQ ID NO: 195534 - protein, 465 aa, unidentified
MKNNRRLGKPRVSLSVLERINPNAAGIDCGSAEHYVAVPPDRDATPVRSFKTFTSDLVRLADWLTTCGITSVAMEATGVYWIPIYEILDARGFEVRLVNARHVKNVPGRKSDVSDCEWLRELNIVGLLRGSFRPTNAIVALRAYLRHRQTLLENAGIYIQRMQKALLQMNLQLPVVVSDITGVTGLRILRDVVAGQHNPHQLAAHRDHRCHASAAEIIAALTGNYRPEHLFVLQQNLELFDTCQTQLAACDRVIEAQVQRLVASIEPPATALPVSRVTRTVRTRDNAPRFEIRASMHHLTGGVDLTQIDGIAPYTTLKLLAEIGTDMSRWPTEKHFTSWLTLAPKNNISGGRLLSSRTQSSANRAAGVFRMAAMSLGRTQTMLGAFYRRLAARIGKSQAITATARKLAILVYRALKGDLVYRDLGADGYDAQQRTRALRQIRRRVASLGFDLVSRETGEILTAVP

SEQ ID NO: 195535 - protein, 379 aa, unidentified
MSSENIAYVSIELSVSSWLVAARLPKIEKLRLHRLEGGDTAGLLSIIADIRSRASAKLGSAVDVACCFEAGRDGFWLHRLLTTNGIAAYVLEPTSILVNRRARRAKTDRLDAEGMLRVLATWLGGDRQVCSMVRVPTPDEEDAKRPHREREHLVQDKLRIENRIEALLFTQGIRGRPSLRSWERNVAALRTGDGRALPQLLRTELDRLRRRLVLVLELIRELEADRAKALEAAEPPDMMIGKIAALQRLRGIGDNFAAVLTREVFYRSFGNRRQLASYVGITPMPYQSGSMDRDRKISRAGNPRARTTMIQLAWLWLRYQPDSALARWFRERVGALQGRTRRIAIVAMARKLLIALWRYVETGVVPDGSVIGTQTAVTA

SEQ ID NO: 195536 - protein, 326 aa, unidentified
MTHPVAASKAELPPASITIGIDVSKDHLDAARHPGGDTVRVANTRKGQTALLRWIGDIKAVARVVFEPTGPYHRTLEERLAAVGIPQVKVNPRQARRFAEATGKLAKTDRVDALMLARYGALLDPVARPVRTDLQNRLAELVAARRSLMRDRTATLNRLKTLTIGLLQRHARHRLRQIEAQVTSLDAATDALVAEDAHLSRRRDVLTSIPGLGTVTAHALLADMPELGMMEEGQAGALAGLAPITRQSGTWRGRSFIQGGRATIRQALYMPAIVAMRFNPDLKRVYDRLIAKGKHAKIAITAIMRKLVVLANALLHKDRLWTPKAA

SEQ ID NO: 195537 - protein, 391 aa, unidentified
MLYIGIDAAKDKHDCCIVDSDGEFKCDGFTFANSKEGFEKFLEIVKQSLSSKDEIIKVGLESTGHYSTNLLSFLNSQGFEVVVFNPLSVSRSRTANSLRRTKTDKNDSRYIVQLLMSGNFKPYHKQSYHILRLKSLSRARFRLVKEIQPLKNRYRRLIHLLFPELQGFFCKLDIPAVITLLTALPGAKDIAACNITKLANILSTASRGRFKRAKAEALKQLAKNSIAEYNQGDAFELKLTLQRIQFLENQKAEIEAEIRNVMSEIKSPVTSINGVGDVLGAAILAEIGDINTFSSSAKLLAFAGCEPSTYQSGKFTATNTPMVKHGSRYLRNALYLAVKSAYLHSPSFRAYIDRKRAQGKHFYTAMSHGIKKMVRVVFVVLKRNITFTEPI

SEQ ID NO: 195538 - protein, 329 aa, unidentified
MDYLFVGVDLSKDKIDVSILDASHQVVLNHAVFANNDSGIQQFLQVLAEYGWGQLWVCMEHTGHYGALIACKLAQAGILFSVINPLEIKRSSGLTRGKDDVVDAYRIASYGVKNHYKLKPHQLLSKALQTLKTKLAQRDFYVKGMVQNKNNLKSLEVLNQSQDCKEEIRMVKRFIRVYQKAIEKLEKQMQDLIEEQTALKTSYDKISKIDGIGPVTALSCIAATDNFTRFTKPRKFCCHAGLAPFSHESGSSIKAPKRTSSLRNRKLKTLLIRAAMTAAIHDPQMKAYKERKIEQGKHKMIVYNAIASKLVNRIFAVALREEPFVKFAF

SEQ ID NO: 195539 - protein, 356 aa, unidentified
MSRDIKYIGMDVHKEAIVIAVLNGSGKLVMESIVETTASSILEFIHGLRGELHVTWEEGTWASWLYDLLQPQVEQVLVCNPRRNALLKEGSKSDKVDARKLAELLRTGMRRPVYHGENGLRTLRELARSYQTISKDLNRVMNRLKALYRGWGIACAGTQVYSLRYREEWLNKIPHVGVRRRAELLYQQLDGLQGLRRILRPELLAESRKHKAVKLLRQIPCIGPIRAARLLALMQTPHRFRSKRQLWTYSGLGIETHDSAQYRYVGGQLQRSKNPQQIRGLNQNHNHEMKEIFKGAATRASCGRGPLHDFYAALLAKGMQPEMARLTLARKIAAITLTLWKGGKAFDAEQLKPQAA

SEQ ID NO: 195540 - protein, 425 aa, unidentified
MSAENPEPQYAAFLAIDWADEKHAWSLQEANSAKRERGEVEHTPEAIAAWVAEISQRFRGRAIAVAVEQSRGALVFLLSKYEPLHIFPVPPAMTANMRKALYSSGAKDDPKDADLLLDIVQKHREKLRRLSPDTEQTRRIQNLVEERRKLVDQKTALSNSLVAHLKIYFPQIPRWFKDADSPLVCALLERWPTLEALQKVRPAALRSFFHKHHCRSEEVIESRIRAIGEAMPALKDRAVVETKVMVVRVLVQLLPVLHQGIAEFDRQIQEAAEAHPDFFIFDSFPGAGAAMAPRLLAAFGSQRERYVHASEMQAFSGIAPVRESSGKSSWIHFRFACPKFLRQSFHEYALYSIRQSEWARAYYQEQCRRGKKHHAAVRALAFKWIRILFRCWKERVAYDESIYLAALAKHASPLAAATKVGAVAL

SEQ ID NO: 195541 - protein, 392 aa, unidentified
MDKKQPYKKGFKVAHTLEGLASLLDFIREVENVSGGRPPIVLESTGHYHTPVVQYFEDRGYLLIIVNPLISYRAKSSSLRKVKTDVIDARHLCELYYKEDLEPYKQRGIQLLNLRNLTRQHENITGLFVQTKLQFQAILDQVFPEYRGVFGDLHSYVSLLTLQTFPTSQKILDTGEEKVAKKIKELCKSRSQKWADSQAEKLMAAAVQNPFQKNLYHSLTLSLDMYINMLLEYKKHLSKLEDEIDALAKGIEECKVIQSIPGIGEKIAATIISEIGEIDRFNHPKKLVAFAGIDPSVFESGTFKGTLNRITKRGSSRLRHALYMAVKCAIRDSRKKKTTDEIIPRNKRLREFYDKKREEGKPFKVAVIACANKFLHWIYALLKSKSTFQDLA

SEQ ID NO: 195542 - protein, 416 aa, unidentified
MDTTYANVAGLDVHHKTIQCAVRQTATGKLLTQSRSFGTMTKPLRALADYLQAMGVTHVALESTGVLWKPVWNILEGRFTLLLVNPRHLKKVPGRKTDVSDAEWIAQLLQCGLLKGSFVPPRAVRDWRDLTRHRAQLTAEKTRVANRIHKLLADTNVKLDTVASDILGVSGRAMLHALLRGETDVEKMADLAEGRWRGKIPQLRLALEGHVTAHHRFVLERLLAHLDFLDHEEQLLDEEIARREAELLPRDDAKRLDAIPGVNVTTIQNVIAEIGPDMSVFPDEHHLSSWTGICPGNEESAGRRLRSATRHGNRWLRRALTEAAWAASHAKDSYLATQYRRLAARRGKKRALLAVGHSILVIIYHLLKHHLEYKDLGRDYFDRLEPERLRRYLVKRLEALGHKVILLPRQPNDQAA

SEQ ID NO: 195543 - protein, 409 aa, unidentified
MFVVALDVSMKKSYAVIYEGTTCLWEGNVTHTRTGFAGLLNEIQNLPQAPEVVFEATGVYSRPVEAFCQKNGLSYTKLNPLQAKKQLEEDTLRSWKTDKQDAHKLAQTHAGKRRTPKVVQEDIYQDLRDLSRFYQEVEEEIKRTRMHLHNCLQLVFPELEQFFSNQINLYALTVISLFPHPDLVLRSTPTKIKNLLIKSTRKNISENRARKKAEELTALALETYPAVAENSVHCQKTSYYAERLQDLLLQKEALKSQMIAMARKLPEHDLYITIPGIGELSSALLIGELGDIRRFETSNQLNAFVGIDIRRYQSGNYIGKDHINKRGNPKGRKILFFCVRNMVRQQKAAPNHIVDYYYKLKKQPIPKKDKVAVVACMNKLLKCMHSMVRNHTKYDYAYTASKGPSTVLI

SEQ ID NO: 195544 - protein, 429 aa, unidentified
MNYTQNEKIEQVTDSTIVVGVDIGSQIHYARVFDNRGRELTKRVFSFHNNLEGFNFFNLWAETLKSENKKTAVLIGCEPTGHYWFAFAKYVKDHQKRLVMVNPFSVKKIKELDDNSPKKTDSKDPKTIAKLVVDGRYSIPYMPEGIYAEIRDLVYSRDRIMKQHNISANRIQRWLAIHFPEYLGLYTRFDAASGLAVLEKAPTPKDVIALGVNGIRKIWHDKKMRGRGVTEDRAKTLVGAAHNSVGLDGGIGTKSELYMLLEEHRLWTSQLEAVNKVLEEMILKVPHVEKLLAIKGVGSITIAGFIAEVGDIRRFDSPKQIQKYAGLELVENSSGKHKGRTRISKRGRRKLRKILYQVMVPLLARNREFREIYDYYVTRVKNPLKRRQAMVAVSCKLIRVFYAVLTKGMEYDRFKMMSDIHRKSDIIAA

SEQ ID NO: 195545 - protein, 334 aa, unidentified
MKYQQVVGMDIAKDSVQASCFDGTTFFDFSFPNQEKLFLKEVQKRISKSDPSHTLFVMEATGVYHLKLATALDKKGYSVAVVNPFIIKKYAEMLLKRAKTDRNDARLIAQFGFDQEVALFAPKESVAEEITQVLKGLDQLKKERTNLKNYQEALIHHNEINPVVRDLYQKQLKEVEKAIKTLEEEAKRLVCQYAPKEYQLLLSIKGIGKYSAIALLGFLQKMDHFSRGKEVASFLGLAPQISQSGKDKGKAWLSKKGNGYLRRLLYLAALSASRSNAQCRELYQRLLAKGKPKKVALIAVANKLLRQAFAVLKSGCPYDPQYLSQKSNLEVVLT

SEQ ID NO: 195546 - protein, 312 aa, unidentified
MNTEIFVGVDISKEHLDVAFGPDQAPQRFPYTPEGLNRLLAHLQALSPTLIVLEATGGLEADLMDALSRAGLPFSRVNPRRVRDFARASGVFAKTDGLDARILAEFGQKMRPPVTVLPDEQTRHLEILVARRRQLVEMRAIEEHHWRTAPETARPYIRKHLEWLDAEIATLEREIADWVNQTPLAETVEILDSAPGVALVGAATLVAEVPEIGRLNRKKIAALVGVAPYNRDSGTQRRQRRVTGGRQAAREVLYMLTIAGIRCNPVLRTFYQRLRAAGKPPKVAIVACMRKLLTILNAMVRDRRKWCLELAG

SEQ ID NO: 195547 - protein, 351 aa, unidentified
MIIIGVDYHPSDQYIALVDTETGEYVERQLNHSAEEAEKFYRELARRGVSVRVGIEATGYSRWFERLLAELGMELWIGDAAKIKTKRVRKQKTDREDARLLLRLLRENNFPRIWVPSAENRDLRQLLWHRHRLVQMRTRIMNQLQALAMNEGQRRKKKLWSEAGRAQLEKLPLAPWAARRRKDLLELLDRMNPSIEELTAAIEQEARKWPEVLRLMTHPGVGPLTALAFVLIIGTVERFQCGKQIGSYVGLIPCEDSSAGHQRLGHITKQGSSLLRFLLGEAAQAAARCDADWRRRYLHLAMRRQRNIAKVAMARRLGVRLYWMWRKGWEYADWVKFGSHAGQLGTGNGVQ

SEQ ID NO: 195548 - protein, 324 aa, unidentified
MTLPSLGIDISKLKFDICLSRQGGKFRHKVFPNSPAGFSQLSAWLIKYKVERVHACLEATGTYGEALATYLHEAGHVVSVVNPAAIKAYGQSYLSRTKTDKADATLIAQFCSERCPPEWQPLPAEIRGLQALVRRLDSLLEMRQMEANRLEVSTAAEAVTESLVGHLAFLDEEVARTERLIRTHIGNHPGLQEQRDLLLTIPGIGGATAAKILGEILDVKLYESARQLAAFAGLVPRLHESGSSIKRKARLSKTGAPRLRKALYFPAIVAIKHNPRIRALAERLKERGKCPMQIIGAAMRKLVHIAYGVLRSGSPFNPELAKTA

SEQ ID NO: 195549 - protein, 453 aa, unidentified
MKEKSVSMKVVNPHSAGIDVGSRSHFVAIGQDDDQVREFGAYNEDLNSLAQWLLANDVKTVAMESTGTYWQNLYTVLQGAGLEVILCNGKFTKNIKGKKTDVQDCQWIQKLHTLGLLSGSFLPDEASEQLRTYCRHRTNLLGLAASTTHKMQKYLQLLNLRLDIVVKDVTGLTGLSIIHAICNGESNPEKLASLRNGNCKKSEKEIAKALQSNGRKDYLFTLTQEYRLYLSLQEKIKECDQEIEKMLQEQINGDEEKKQHFIEKKVHKRVNKNTPKNIDINLLAYQYYEGVDLLAIEGVSHATILTLMSEIGTGINKFSTAKEFSSWLRLSPNTKISGGRVLSSKVAKGSNRLKIALRNAANAIGNLKDTALSNFFRRIAFRKGRVSAISATARKLAVIIWNMLVKKVPYKPETDYEFLDQKRKRKVMEMKKLIHKFDITPDDLGLQLNINNL

SEQ ID NO: 195550 - protein, 392 aa, unidentified
MVVSVGIDVSKDKHDCFIVSSEGEVLADAFIIPNTMDGFHYLLQRIRHCTAPQDKIKVGLEATGHYSYNLLGVLLDNGLTTYVLNPLRTNLYRKSLSLRKTKTDRVDARTIASMLLSDAGLKPYTDTAYHNEELKSLTRYRFDKVKERAKLKSSIARLVCILFPELEKLVPSLHIASVYALLEEFPGAKQVANTHLTRLKALLETASNGHYKRDMALEIRNAAKNSIGSQMPAKSLELQHTIRLIRELDREIDEIEEQIQSIMDELHSPITTIPGLGFRMAAMILAEVGDFTRFDSPDKLLAYAGMSPSTYQSGQLKNCYPHMEKRGSRYLRYALYNATKYVCHWDPTFADYLAKKRAEGKHYNIAISHAAKKLVRLIFAMEKSRQPYCSAA

SEQ ID NO: 195551 - protein, 378 aa, unidentified
MHQTRRSAVHPPGRRVPSPDLGRETAITTIAHPESTRVTVGVDTHGEVHVASARDQLGRRVAITLVPTSPAGYQHLLDWARQLGEVAAFGIEGTGSYGAALARFLRANGQQVFEVNRPDRATRRRKGKSDPLDADAAARAVQAGDAAGLPKAGTGTVEMLRVLRVARQSALKARTQATNALRALLVTAPAELREQLRGLSKTTLPRTAAALDPGQLTSPTAATMLALRTLGQRHAALTALEAEINRLVARHATPLLALFGVGPDSASALLVAAGDNPERLCSEAAFAALCGASPVQASSGKTVRHRLNRGGDRQANAALYRIVLVRLRWHQPTKDYMARRVAEGKTTKEVIRCLKRYLVREVFAVLTQTGQTNHSDAA

SEQ ID NO: 195552 - protein, 307 aa, unidentified
MSEKIYFGVDVCKESLAFCGPGVAGQVANNAPGQRRLLVRLPKGAHLIIEASGGYERELVRMAQQSAVPVSVVNPRQVRDFARGVGRLAKTDPIDAEMLARFGATVNPPPDAVPTAAELALQELLSARQQLLEQRTVLLQQQAQHLNSIVRRLDRARLKLLQRQIAQLELAIGSILEEQSALKQKVERLQQVKGVGLITAVTCVALCPELGSLSRGQTAALVGVAPYDDDSGARKGWRHIAGGRPRLRRALYMAAISAIRSNPILRRFYQQLRQRNKPSKVALVAVIRKLAILLNQLLRNPSFLPAS

SEQ ID NO: 195553 - protein, 351 aa, unidentified
MEKVIKQCVGIDCAKEKLDVSFAVMNSSFDSSILSTTVFTNDRAGWKKMIKWAEQLETKDLQTHFVIEATGVYHEQVCLYLFLLHRQISVLLPNKVKKFAGTLKIKTVNDRVSAQTIAQMGIEKKLDSWQPPHEVFNLLRQLTRERHQLIEEKTQILCELHAEQSGAWPNKKSIQRMKQRINLILKQIVEIENEMKEQVNEHPWLKEKLAHVCSIPGIGFLTAVTVVAETNGFNLVRNKKQVVSYAGLDVIEKESGSSVRGKPRISRRGNKQIRRAMYFPALSAIRAKSKMRHLYDRLEAKHGIKMKAAVAVQRKLLELMFLLWKKNEFYIENYDIKKLEQPKKAALIEMA

SEQ ID NO: 195554 - protein, 344 aa, unidentified
MSGAYEGRQIVGMDLHRRRSVLVRMTETGQHLETVRISNDPEYLREVMTRAGEAPDVVLEATYGWYWAADTLAELGAQVHLAHPLGVKMFALRRVKNDQRDAADLADLLRMGRLPEAWIAPPATRELRGWVRHRAKLVGLRSNLKCQVHAVLAAAGVAVSMSDLFGASGRQLLAATRLSVESRSRIDSLNRLITALDFEIDLYTRLVAGRLRADPGYRTVQTIPGVGAVLGAVFVAEIGDITRFARPQQLASWAGLTPKHHESDTTVHRGRITKQGSRLVRWAAVEAVQRVPAHTRFGQRRDRIAQRRGRNIGVVAAARDLITLVFYGLRDHHIRCLPSGTGAA

SEQ ID NO: 195555 - protein, 322 aa, unidentified
MSVSVLGIDIAKQKFDVALLVDGKTKHKSCKNSVEGFEMLKLWLEKQGTQKVHACLEATGNYGEDLASYLHEAGHMVSIVNPARIKGFGQSELIRTKTDKIDAALIARFCMAMNPEPWIPPAPEIRSLRALVRRVDSLVDMRSQEKNRISTAHESVIALIREHIAYLDKEIEKIRRQIADLIDQNPDLKQKKDLLDSIPGLGKATIPHLLAELNDLEKFRHVREVVAFIGLAPKETLSGSSIKGKPRLCKIGHARLRKALYMPALVSIQCNPVMIAFYNRLKDKGKNGKVIVCAIMRKLVHVIFGVLKSGKKYDPDYKPAFT

SEQ ID NO: 195556 - protein, 385 aa, unidentified
MGTQTFIPRDYDVFAGLDVDKKSISVTFTDHQGFLKSLNMPYKVEHLVNYVRKHYGDKKVAFAYEAGPTGYGLYDGLEAQAYPCLIASPSMIPKAPGQRVKTNRLDSRGISENLRGGQLKGIHVPTPLYRELRHLTQLRDTLVSEMVRMKQRIKSLLLMEGLEFPPAPAGSQWSFLVKKKLRELPCSTTVRFKLDRLLDSLEFDEMQVLKATREIRRFCQTDLELSQCIEYLKTLPGIGWIVASQLLARVGDWRQIKNIRQLPAFLGLVPTENSTGERTERGSITHTGDGRLRSKLIQASWSAIRQDGELREFFRTVAKKHPRHLGSRVAIVAVAHKLSVRASVVLMKQRPYEVRQKVQSAPLTQEETVPQGTTRRLAVPGETNS

SEQ ID NO: 195557 - protein, 338 aa, unidentified
MKFKRIAIDTPKQVFTLHGVDEQERPVLRRELKRANVESFFAKQDATEVVLEACGGSHHWGRLLNKLGHRVRLIPPQYVKPFVKRAKNDRNDAEAISEAASRPTMRSVVVKTVDQQADGIILKHREMLVSQRTQAINALRGHAAEFGVVAAKGIVKVAALLTQLVADSGIPISARAMFEQMGVHIEALDQQVAALDDQLTTLHKANPVSRLLATIPGVGPLGAITMALTVEPGNFASGRDFAAWLGLTPKEHSTGGKQRLGKISKAGNERLRQLLFVGAMSVIRFARPGSKSASAWLLQLLERKPRKLAAVALANKMARIIWAMMSRGEAYRRQPVTA

SEQ ID NO: 195558 - protein, 347 aa, unidentified
MRFYKHTHAFYAGVDLHARSMFTHILDHAGNTVFEADLPASPDAFRNAIAPYRAGLVVGCECMFSWYWLADLCEDDEIPFTLGHALYMKAIHGGKAKNDRIDAGKIAGLLRGGMFPMAYVYPRAKRDTRDLLRRRCFFVNQRAQLTAHIVNTNSQYNHPPLTKKLCYAGNRSEDLAERFTQASTQASIRADLALIDAYDTQIAEVERTVLQHAKINDPVTLKLLRTIPGIGKILSLVLLYEIDQITRFPAVGNFLSYSRLVRCEHESAGKKKGSGGKKIGNAHLKWAFSEAACLMLRAESEAKKWLDRQARKRGKKKALSVLEAKLGRAVYHVWSKQQAFDPRRFFA

SEQ ID NO: 195559 - protein, 369 aa, unidentified
MGKRNMFVGLDVHKDTIDVSIAEGDRRGEVRHYGVIASDLEPLDKVVRALRAPDRTLHFVYEAGPCGFGIYRHLTGRGEACMVVSPSMIPKRSGDRVKTDRRDSLALARLHRAGELRAIYVPNDADEAMRDLVRARADAVTVSIQAKYRLKAFLLRQGRRYPGRDGWTLAYRRWLTDLRFPSPPQHIALHEYRDTIDETERRLERLTEQLRQLAPTWRWAPVVAALQALRGVSFITAVALVAELGDLTRFGHPRELMAYLGLVPSEHSSGPSVRRGGITKAGNPHVRRLLAEAAWAYQGIPRIGRVHAYRQEALPKVVCDIAWKAQLRLTTRFRRLVARGKAKPKVATAIARELTGFIWAIAREVSPVQ

SEQ ID NO: 195560 - protein, 339 aa, unidentified
MKEVSTVGLDLAKKVFQVHGVDARGTVVVRRALRRSQLLAWFAKLPRCLVGMEACATAHYWARELVKLGHDVRLIPPAYAKAYVRRNKNDPADAEAICEAVSRPAMRFVAIKSERQQAAAGIHRVRDLLMKQHTMLRNQLRGLMAEFGIVAAKGRHGLGELLAILADAEDQRIPSPLREGLLLIGATLRETDRKLEIIDRQLAAAGREDATYRHLITAPGYGPILSSAMAAMVIDPAAFRRSSDFAASLGLVPRQEGTGGKVWLGPISKRGNGYLRRLLVNGATSLLNSKRAKQDPWLVKLLATKPRKVVAVALANKLARIGWALMVRQEDFRGLPAAA

SEQ ID NO: 195561 - protein, 401 aa, unidentified
MKTVLSVDVAKNKSMIMLMNSDGEIFIDTKEINHNLEDFEKVKEEIKEINPQNLTVFMESTGTYHLPVERYFKENGFNTLVINSLTTKNNYDTIRKTKTDKKDCYRLAKLFFVNEVEYHDLSKKDLYANLKAMTRQYFYLLQNNVSCKNRYKRLINICFPELEKIFKSTRIYDDTALNFIKEFPHAEIVKEKRIDALYDNLYKTNGRNLNFYKKLATTIKTASINSYPGVDKEHEDVKNLSYMAKIVQNNNNIINELREKMIETAKQSPYYKIINSFYGIGDTLTAEILGELGDITRFDSPKEIIAFCGLDPTIKQSGKSINVKGAISKRGNKYARYILFNCSQMVVKLGASNYPEHPVYIYYQNKKAEGKHYYESLTACSTKILRMLYSMCKNNKQFLEN

SEQ ID NO: 195562 - protein, 410 aa, unidentified
MEVLHERCCGLDVHKEQVTACVVTPQRRETRTFSSMTRGLLELAAWLAEQGVTHVAMESTAVYWKPVYNLLEERFSVLVVNAQHIKKVPGRKTDVSDAEWIADLLRHGLVRGSYIPERSQRELRELVRYRRRLSEQRAQVVNRIQKVLEGANIKLGSVASDVAGVSGRAMLEAMVAGEADPRTLAELAKGKLKEKRAQLEEALLGLMGPHQRMLLQSQLRHLDFLDQEILRLDEEVSKRMHPFHEAIERIDGIPGIGRRLAEQVLCETGVDMSRFDSAEHLASWAGICPGNNESAGKRRSGRTGHGNPWLRSALVEAAWAASRTRQTYLREQFHRIAARRGNKRAAVAVAHTILTIIYHMLRRGTSYQELGANYFDQRQAQSLVRRAVLRIQKLGYEVTLKSPQPAFSQQ

SEQ ID NO: 195563 - protein, 439 aa, unidentified
MSTPSLPVLDPTAAAIDVGSEQLHVSIAGGPPKVFGTTTGELHALRDYLLAQGVRSVAMEATGIYWLCPYEVLEKAGLQVVVVNGKYVKNLPGRKTDMKDCQWQATLQAHGLLKPGFVPPEHIRRLQDYIRLRTDHITMAGAHEQHMQKALERMNLKIHDVISDLTGVSGLKMIEAILAGERNPVALLALCDPQIQKNKAGRLRAALEGSWKNEHLFALRQAYELWQFYQKKILECDQAIAQVLQEIAGPEDPKNPAPPALKRGGVNAPQIAGLHGLLWRLCGHKDLTALPGVADYVLLQLLAEVGTDLAKNWKTEKHFTAWLGLAPGSRQSGKRRGSQPRSRNRAGRLFCVIARSVGRSVDKALGGFYRRLKGRRGGLVANLALARKLAELFWRLMVHGIGYVEQGLKKYEQKVAHTEQCLLQKLARKYNLVLQPKAA

SEQ ID NO: 195564 - protein, 376 aa, unidentified
MNKDTLYVGLDTDKKHIDVALAEALPGGEVRYWGQIANEASAVARLVKRLQAGGRRLEMCYEAGPCGYGLHRLLNDKPGVRCTVVAPSMTPRRPGDRIKTNRRDSVALARLLRAGELTAVWVPDATHEAMRDLVRARGSAVADLVRCRQRIAGFLLRQDIRYAGKPWSKKHRVWLGQLVPALALPAHRLMFGEVLQALDEATARRDRLTDHIAELVPDWSLAWLVDALQALRGFALINAATVAVEIGDPRRFAKPSQLMAYLGLVPCEASTGDRVRRGGLTKTGNGHTRKALIEAAWTYSRPARAPRDGSRHAPAVAAIAAKAYHRLGLRYRRLTARGKRPVIAIAAIARELSGFVWAIAHAAGPAAATPERPARR

SEQ ID NO: 195565 - protein, 402 aa, unidentified
MTYDYVIGMDVGKYFHHACVLDIDGAQVLSKRINQNEKSLRTLFSTFSANDHKVLVVVDQPNNIGRLTVAVAQDIGIDVRYLPGLAMRQLSRIHAGNAKTDIRDAYIIAHAAKNLPESLRSVDRVEEAFLQLKVLNGIGEDLARSYTRLINQIRSALVGCYPQFEQALRGQVIHRKWVLHLLARYGGPTKIKRLGKAKAAAFARRYKARNPEPVIDAIFAAISEQTVAIAGAQYAEMGVAMSAKDALLKLEHRKQIEQEVIELINDIPHTQILLSMPGIGPKTAAQILMTAGDMSDFPTAGHLASYAGLSPRTNQSGTSIMSNSLNRAGNKKLKNALWQSSFASIRFHERSRQFYERKRREGKRHNAAVVALARRRLNVLYAMMSNHEYYRDTDQSQEVEAA

SEQ ID NO: 195566 - protein, 409 aa, unidentified
MRLFVGLDVSSFDIKACILNGEGKKLDSFSVNNDLPGATALKERVLQCIANQEIETFKIGLESTSVYSFHPSMFLHYDEDLQRFGAKVFLMNPKQIANFKKSYSDMDKTDEIGAFVIADYLRFGRNQMSIVKESQYVALQQLTRSRYQLVRMLTKEKQHFLQHLSYKCNTFSQEVDSSIFGNAMMELFLEKLSLEELADMPLEELAEFLQKKGKNRFGDAKFVASTIQRAVRSSYRLDKVVEDSIDVLLGTSIAVIRTYQQQIKEIEKSIKRIMAGLTQTLESIPGIGPVFAAGIIAEIGQIERFDDETKVAKYAGLYWRTHQSGRFTAENTSLSRNGNHYLRYYLVEAANSVRRHVSDYQEYYVKKYNEVPKHQHKRALVLTARKLVRLVDALLRSHQLFTPERCVKV

SEQ ID NO: 195567 - protein, 388 aa, unidentified
MQTVADRPEAPNAIRTDLGAIFVSLELSRSTWLITSLSPDGGEKMSKHAVRGGDVAGLLERFAQLRKKARARTGKVFPFVVIQEAGLDGFWIDRVLRKEGIESHVVDPASITTSRRRRRAKTDRIDGEALVRALLAYKRGEPRVCAMVKAPTPEEEDRRRLCRERKVLIVERVRHVNRVKGLLFSQGISGYEPLRRDRRKRLDTLQTGDGRLLPDHLKAQVRRELDRLELLLDQIKAVEAERDALLAVQQGAASAPAAMLLNIKGIGPEFAAILWSEGLFRHFDNRRQVASYAGLAPTPWQSGSVDREQGVSKAGNPRLRTTLIQLAWLWLRNQPQSALALWFKERVNRNGGRLKKTTIVALARKLLVALWKYVTAGVVIEGAIMKSA

SEQ ID NO: 195568 - protein, 402 aa, unidentified
MPMLSIGIDVSKGKSTVCGMKPGGEIVYAPFEVQHTREGMSELVSLLRSSGEEVRAVLESTGSYHCPVVAALLENGIFVSVVNSLRMKRFCSQSIRKVKTDRIDAMQIALYGLAYWQELQPTRLPEDTYRELQLLARQYYQMTSMLIKAKVDFNAICDQVLPGMQELMSDHAGRHKLSDFVLRYRHTTHILEMGETRFRKDYCKWAEKKGYRNCERMAALIFATAQNGIPVLPNAPSTQIVITEAIRVLHTVEASRDAILTQMQALAKTLPEYSLVREMPCIGDTLAPRLIAEIGDVRRFHSKRALIAYAGIDAPPYQSGKFCANNRHISKRGNRYLRKTGYEVMQSYVMHKPANDPIFTFIEKKRGEGKSGKLAMVAGLNKFLRVYYGKVTELYRSLPAIE

SEQ ID NO: 195569 - protein, 365 aa, unidentified
MTTTDAAAEARETGYVAIELSKKTWVLGIAHPDRDRPSIHRVSGGNIAELVSRLRVAARNNRRILVCYEAGYDGFWLARALAKMGIECRVLDPASIQVNRRARRVKTDRIDVLALLRALIATDRGERHVCAIVRVPSVEEEDARRSHRERQRLVRERTGHINRIKGLLFAQGIRNIKPKLRRTRIDFAALETAEGHPLPDRLRRELEREYARLSLIATQLREVEKERDTADAQDPVVEQKRQLLVALHGVGATSAAILAREVFARSFASRRQLGSYLCLTPSAYDSGSTTRCQGISKAGNSWTQRILIEIAWLWDYQAFRAEVGHERSEEGARQCRDAKNLGSLTPSLTNCWPTPTPRRFSTLTG

SEQ ID NO: 195570 - protein, 339 aa, unidentified
MLIIGCDYHPRFQQIAFVDTVTGECGERKLTNMVEAESFYRALSGGSVRVGMEATGHARWFERLLGELNFELWIGDPAEIRAQRVRKQKTDRQDAEHLLRLLVEDRFPRIWVPGPENRDLRQLLWHRHRLVQMRTRVKNQLQAIALNEGIRRQKGLWSKRGRAQLESLVLAPWSTRRRGDLLELLDRLSPRIEELSLAIQQTAEERPQVQRLMTHPGVGPITALAFVLILGVPDRFRCGKQVGSYLGLIPCEESSGGHQHLGHISKQGNTLLRFLLIESAHALVRYDPDWRRRFLHLAMRRGRPIAKVAMARKLAVRLYWMWRKGWDYQQTLKFGSHVG

SEQ ID NO: 195571 - protein, 338 aa, unidentified
MKITTIGLDIAKSVFHLVGVDKAGKLIKKKMLRRKDLLPFVAKIEPCLIVMEACGGASYWAREFEQFGHVVKLIAPQYVVPFRQGNKNDYNDALAIAEAAQRPNMRFVKPKSVEQQDVQLLHRMRERLTKQSTALINQVRGMLAEYGIVMTKSKSAFKAQLPDILVDEANTLTTKGRAIFYQLYDEVIDIEKRLKSCDTQVLNETQNNVICQRLQTIPGVGPVTATAIYAAVGDGKDFSNGRHFSAWCGLVPKQHSSGGKDNLLGISKRGNAYLRTLFIHGARAVLRHSGSKSDKLSCWAIQLAERRGFNRACVAVANKLARMSWVIAAREEEFRLAM

SEQ ID NO: 195572 - protein, 353 aa, unidentified
MESNELSLHQTQGGSVVLDEAEQIAAKLRVDAGPGQVDALLGWAPGGERVWAIENVNGLGHLLAQQLIGRGEVVIDVTATLSSRARKLSGHSARKTDEHDARSVVIAAAHNNRLRRVTVENNSVVLGLLLDRRWHLVAQRQRTICQLHALLGELVPAGAARHLTSKKAAALLRRIAPASVVELERKLLARELLEDVRWLDKRIPVAKQRLSQALAAYGTTLTDICGIGEIGAATILSIVDDPTRFPDRGHFAAFNGTAPLEASSGDQRRHRLSRRGNRQMNKVIHVAARTQIRSGGPGRVYYDRKLAEGKSKLEALRALKRQLSDVIYRRLLADERARQVVRGGQTGDKPKAA

SEQ ID NO: 195573 - protein, 369 aa, unidentified
MGDRITYVGLDVHKDGVVVAVAEGGIRGEVREYGRIANTAAALDRLVRKLGGEGVRLRFCYEAGPCGYGIQRYLSAHGHECVVVAPSLIPKRAGDRVKTDRRDAASLARLHRAGELTAVWVPDAGHEAMCDLVRARLDAVHALRRARQQLSGFLLRQGCHYGRPAWTKLHRRWLAGLKFEQAVHHIVLEDYIAAVEAAEARRDRLTAQIEAMLPDWTLAPVVAALQTMRGMALVNAATLIAELGDLSRFANPRQLMAYLGLVPCEHSSGASVRRGGLTKAGNSAARRLLIEAAWCYRFPARVSRELLLRQEEQPKPIREIAWKAQLRLCARYRKLARTGKPANVVTAAIARELAGFIWAIARRVPPATS

SEQ ID NO: 195574 - protein, 311 aa, unidentified
MATYVGIDIAKRHFDLAVEGQPNVQQLENDPKGIRRCVRRLVELKPELIVMEPTGGYEVPLFVELQAAGLRAAVINARKIREFARAAGQLAKTDKLDAQIIARFAAVLQPPPQEALDAQTLAIKALVARRHQLVQMHTAETNRSEHARDKAIVRSIRAILKTIQRQIDDIDRQIRDHIDSQPELKRKQEQLESVPGIGETTASLLVTELPELGRLNRRQIAALVGVAPINRDSGTHRGKRMTGGGRCHLRARLFMPTLVAVRHNPTIRNFYQRLVANGKAKMTALIAAMRKLLIILNVMIAKNETWNPKTT

SEQ ID NO: 195575 - protein, 444 aa, unidentified
MSDSLPSVTTEREWAAFAAIDWADQKHFWRLVPADSQHAEQGELDNTPEAVEVWATALERRFGGRPIAVCLEQKRGALVYMLAKYAHLVLFPVHPTTAARYRETFCSSGAKSDPSDTASLLDLLLRHRERLSPLQPDTTETRLLQFLVERRREVVDEKTAQSNRLTDCLKLYFPQILRWFDDVAGPLVGALLERWPSLQDLRRDHPGTLSKFFHEQNCRGEERIHERIAAIYQAVPATQDEAVLEAGAITARGLVAVLATLRDNIAKLDERIAQLVACHPETPLFDSLPGAGKALVPRLIVAFGTRRERYDSAYQVQCYSGIAPVKVASGKTQTIRFRRACPKFLRQTFHEFALHSLKKSEWARAYYQLQRDRHKSHHAAVRALAYKWIRIIFRCWKDGKPYDEATYLQSQRRRSATLGATVASVTAAGWKKVAGFNKFSAIPS

SEQ ID NO: 195576 - protein, 395 aa, unidentified
MFIVGIDIAKRSHEAIIIAEDGQVVRKAFSFRNNCTGYNLLLEQVRRLTLVKSQIVFAMESTAHYWLALYARLLKDGYAVMVLNPIQSHSLRELYIRKAKTDARDSLIIADLVRFGRCKASNVPQDRILALRELCRSRAYLVDMAADLKRKLIALLDRIFPEYESLFDSVFSKASIAVLSKYSTPQKVKNANLRKLTDILMESSNGHFGEWKAHQLKEAACSSFGIDDSGGVYSTLLGMFLEQILSLTAQADSLEKQISVFFQEFNNPLTSIPGVGTVLAATILSEIGDITRFSSADKLLAYAGLDPSVKQSGEFKSNQNRMSKRGSPYLRRAIWLASTVAVHRDPMFQTYYEKKISKGLHYMNVIGHVSRKMTAVIFAVLRDGQPYQPILQSAG

SEQ ID NO: 195577 - protein, 433 aa, unidentified
MSKFFNSPTVGIDVSADFSFVAILAPNGDVFKKPFRIKHDVSGFNHLLKEIKKVEEEFNMKTAIFMESTGVYHLSLFHFLNKNFDNTFVINPLVTKCNKNVDIRKVKNDKKDALSIAQIGKFQNIKLSQSVSMDIFQLKSLVREYYKLTDNCSTYKKKLSTDLRVIFPGYKNVFSNVTSNSSIAILNEFPTPQAILSAPKDLIINILMEKSKKGLIWSEKVYSNLINYANEATIIGLPLHGFSVKITSTIKIIKTLEAEIKNLLEQIESLINSPNFSEQIRKNIEFIDSIPGIGRLTAITLIAEIGDINGFLKTKHLVAFFGIDSSVNESGKFKGNQNKISKRGTRIGRRALYAAALACIRTNRNGVPINKILLDYYQINLNGKKPKVALVAIMHKLINYIFAVLRNQTPFEVRDPRIHKQMYLENKNKNTAA

SEQ ID NO: 195578 - protein, 476 aa, unidentified
MLVPNEEPKKSRKPKKPAKPTKSRERSLAIPVPASSPQLSFVNPDAAGIDVHSNMHMVCVPADRDANPVRQFAANTVDLQEIAAWLKKCRVKTIALESTGIYWIPLFELLESEGFEVYLVEPGQLSRCGARPKTDVLDAQWIQRLHSYGLLRASFRPPNSVLALRGYWRQRQMQVRYAASHVQHIQKALEQMNVKLPEVVTDITGVTGMSIIDAILDGERDPIKLAKLRDERCHHSEEEIALALQGTWRPEHLFELRQARELYRFHHRQMSECDEQVQAELAKFANRAGEKTRTGKQRNRGRKGNDVRFEAKGPLFKALGVDLTLIEGIEVGTALVILAEIGVDVSRFPTEKHFASWLRLCPPQDESNKTTKRRGRRKATNRVTKALRLAARSAGRTMTPLGLFYRRIRSRIGGLGAVKATAHKLACLVYRMLKYGEEYVTQSMEEYEAKIKAKMLDTLKRKAAAMGFQLSPLPTT

SEQ ID NO: 195579 - protein, 408 aa, unidentified
MKRYYVGVDWADREHQLYVGDEEGAKVAEMKVQEIPEEMAQLGRWLDESRATGIELWGAIEKPHGRIVDFLLDHGVVVYPVNPKALDRVRDRYRMSQSKSDPFDARVLSEFLRTDHVHLRPLRPNSEQAQELKLLTRDQHRLVRHNTRLLNQLKITLKEYYPRPLGVFGDLGTKIAQDFLRAYPTPAALSELSRTKWNRFARQQHHLGKARCDELWEKLNKPQLAVPQHVVRAKAQLVEVLLDQLKPSITAVKTYTERVERFFASTPAAELTQTLPGGKSGTLVPTIWAELGDAQGRWESFQHLQAEAGVVPVTRSSGKSHVVQFRFACNKHLRHAAYLFAFAALNRSEWANRYYRDQRAKGHSHPEALRALGAKWLKIIFVMWRDHKPYDENYHLANIARQKMRQAA

SEQ ID NO: 195580 - protein, 387 aa, unidentified
MYYIGIDISKFKHDCAVIDDAGDVVTPSWSFANDLEGFLQFKALLDSLGTETKIGLESTGHYGMNLKLFLEADGFSFMEFNPLLINRFVKSKSLRKTKTDAIDCEMIARYLMTVEYKPYPPSFYHIEKLKSLTRFRDNLVRQRSRQLVELTNILDKVFPEFKPFFGGKFTVTALHILSEYSSPEKIANMNSRSYEPLRKLSRGRFSTTHFAKLKLLAKNTVGHPTDFLLQEMDIVLELYSQLDSKVDETELLIRECVSEIDPPMLTVPGIGVDSAAVILAEFGDFSKFQNPSQMLSFAGMEPGYFQSGTSESTGKMVKHGSSFLRYALINCTQTVINYEPTFAQYYAKKRAEGKPYRVALTHTAKKLIRVIFTLQTRNITYDSDSVR

SEQ ID NO: 195581 - protein, 357 aa, unidentified
MVVIGVDPHKRQHTAAVVEQPTQRQLGKLTIEATLADYRRLLAWARQWPERTWAVENARGLGRHLAQWLLVRGERVQDVPATATTRVRELSRGGRRKNDVIDAAAAASVAALHGDATSVIAEEDTTAVLALLDERRVNLAAQRTRLVNQLHALLRDLLPGGAPTKLTADQAAALLRPIRPAGTVERTRKDLAREMITELRGVDARLKHSEQRIREVVASSGSRLCKVDGVGPVLAARVLGRTGTASRFPSGSHYASYTGTAPIEVASAEHARHRLSRSGDRQLNSALHLVAVTQVRMSNAEGHAYFGRKIDEGKTRSEALRCLKRRIAAHLWGIMLADERRARAAAAPPPDVGMSCA

SEQ ID NO: 195582 - protein, 408 aa, unidentified
MDLTPMHKRVIALDVHQARITGCAVVEHDDGRVEVIKRDFGTFKRDRRALAQWSLEIGPEVVVMESTGVYWKSPFAALEAVGIIAWVVNARHVKAVPGRKTDMADAQWLATLARAGLLRASFIPPLEFRQLRLVARQRQKLVGMCSAEKNRLHKVLVDAGVRINVLVSDIHGASARAMVKALIAGRPMHEVLDLQGRLRASREDLCEALGAEQLSVTHRFVAGEIMQHIEQIESRIARMDQYLLTGLQAWQPQLNLLQTIPGIDINGAAMLLVEIGADMAVFGSAERLASWVGICPGNNESAGKRKSGKIRKGNAWVRRLLCEFAQAAARTRCALKAKFESLAIRKGRKKSVVALAHKILRTIYAMLASGAYYQDKSVDYEALSVAKNAPRWIKMLTKHGFMPRPIAA

SEQ ID NO: 195583 - protein, 449 aa, unidentified
MMEQEMDRSKPRSGRSKLEVMHPDAAGIDVGASVHYVAVPNESAQESVRHFGVYTRDLHEMADWLQACGVKIVAMESTGVYWVALYEMLERRGLEVMLVDARQVKGVSGRKSDVLDCQWLQQLLSYGLLKAAFRPHDQFCVLRELNRLRTRLLREQGRSVQHMQKAMTLMNIQLTRSISDVAGATGQKIIRAIVAGERDAKVLATYRDSRIKASEEEIAASLQGTWRAEHLFALKQALGRFDFCAGQLAECESEIESVMAQLHVHSQEPGKGKKRSKAKNAPKFDVREHLFKMCGVDLTKINGIDVSTALNIVAEVGTDLSRFPSDKHFASWLGLCPGTRISGGKVLGSKTKPSVNRASQAFRQAAAGLRTSQSALGAYFRRLCGRMDKGKAVTAAAHKLARLFYALMTKGQEYVDQGQQYYEERYRQRVIYSLQRRAQRLGMCLVPTT

SEQ ID NO: 195584 - protein, 373 aa, unidentified
MTMRKSITVAREQASNFAEKKYTVGLDLGDRWSWYCVLDERGEVVFERKVSTTPKALREVFGAMPHSRVALETGTHSPWISRLMKELGHEVIVAQARKVRLIGESRKKDDRLDARTLARLARIDPELLGPIQHRSARAQADLIMIRARAGLVRARTALVNAARGLTKSYGERLQGCNPRNMNAEKRKGLSAELQLALEPLLRAIEALSQQILDYNERIEQMARDSYPEVARLKQVKGVGTLIALAYVLTLEDPQRFTKSREAGCYVGLQPGRRNSGSSTPQLHISKEGDPYLRTLLVQGAQHILGPFGADSDLRRWGLKLAERGGKNGKKRAVIAVARKLAVLLHRLWVSGEAYEPLRNQLRNQRAIELPTAA

SEQ ID NO: 195585 - protein, 340 aa, unidentified
MHATIIGLDLAKNVFQLHAEDRSGTVLWKRRLRREELEAFLRKQPPALIGMEACGSAHHWARVITAMGHEVRLMHAKYVKAYVKRGKSDVRDAEAICEAVQRSSMRFVPIKSVEQQIDRSLERARDLLVKQRTQLMNATRALLAELGIVARAGLRGFTTLADKIAAGDAVIPRPSLTALKPLVEQWRALQASIDELEARLVARAHSDERMRRLMKIPGVGPLTAHAVVTAIGDPKRFSTGRDFAAWAGLTPLTDSSAEKTRIGHISRQGDHSLRRLMVLGAANLARHAKAKPCEANAWLNGVIARRPVKVAMVAQAAKTARIAWALLCSGENYRGRTAAA

SEQ ID NO: 195586 - protein, 343 aa, unidentified
MKLTRIGVDIAKQVFQLHGTNRLEQAVWRRRLPRDRWLQALGDVAEPGCEIGLEACGGAHHWARQLQALGYRVKLIAPQFVKPYVKSNKNDANDAEAICEAMSRPSMRFVTVKSTQQQDIQALHRVRASLMEQRTAKGNQIRGLVAEYGLVAPRELSSLRRAMPCWLEDADNGLSACFRQLLDGLWRDLRGVDDRIIELDHAIADLAQVDPDARRLQQLRGVGPLVATALIAAVGDAKQFANGRQMAASLGLTPRQHSSGGKDRLLGISKRGDAYVRSLLVHGARSALRTAPAKEDRLSQWVVRLAQRAHPNVASVALANKTARLAWALLRHQCDYQPALAAA

SEQ ID NO: 195587 - protein, 422 aa, unidentified
MNHLTDNAFTAYVGIDWADSKHDICVQATGDQQRELDCISHQVDQIEEWAQSLHRRFGGIIAVALELSKGPIVYALQKYDFFVIFPVNPSTLAKYREAFTPSRAKDDPTDAELALDLLVRHPERFTPLKPQSVEMRTLVCLVEQRRSLVNDKIRITNRLRSALKQYYPQLLEWFEHLDTVLVCDFITRWPTLTQVKRARKNTLEKFFHTHNMRFAHVLDARLKSIKAATPLTLDAAVVTPYSLQPLVLTDQLRVSLQGIHRYDDEIAELAPKHPDYSLFSALPGAGPSLAPRLLVAFGEQRERFDSAAALQKYSGIAPVTERSGKKHWVHWRWQCPTFLRQTFVEWAAQTINKSFWAGAYYRQQRDKGCTYQAAVRALAFKWIRILYRCWQTRTPYNESVYLNALKRRGSPLLNPSTTVKMT

SEQ ID NO: 195588 - protein, 375 aa, unidentified
MKEKLRFLGLDVHAETIAVAVAEPEGEVRSLGTIPNRAESIRKLIKKLGPAAELRACYEAGPTGYVVYWQLAELGVECEVVAPTLVPVKAGDRVKTDRRDAEKLARCYRSGDLTAVWVPDEGSEALRDLVRAREAAKQDQTRARHRLSKFLLRSGQRPPSGVKSWTRPYLIWVAQLRFTQIAQESTRQDYLHEVEHMRERVARLEQAITEAVKLASPALQQVINDLQALRGIADISAVTIAAELGQVSRFDSARQLMGYCGAVSSEDSSGKRTRRGGITKTGNAHLRRIVVEAAWSYRRPPCIWYGLRRRQESISEAAKEIAWKAQHRLHKRYMRLGAAGKDQRKIVTAVARELLGFIWAIGTRAETISSQQVAA

SEQ ID NO: 195589 - protein, 366 aa, unidentified
MAITHVALDDSKRVIVAGILRADATQPELREIPNDPRQVRRLFARLLQEAPVRACYEAGVSGYDLYRQLTALGVDCAVIAPALTPRKPGERVKTDRRDAANLVRLFRAGELTAIHVPTEAQEGVRDLTRCRDDVRADIIRWRHRVLKLLARHGRVYQTGKNWSQAHWTWIRAQRFEDGALARTLDASLEALEQALRRRAELDRAIEGLADDPRYREAVSALRCFRGINTLSAMILVAEIVDFQRFVRPRALMAYLGLVPSEYSSGERQRRGALTKAGNTHARRVLVEAAWHYRHRPALGDRLARHTAGQAPAVVAEAWRAQQRLHRRYRHLIGHGKRPTVAVAAVARELAGFVWAAMTQRPRRAAA

SEQ ID NO: 195590 - protein, 304 aa, unidentified
MFLIPFRQICLLLLVIYFSIGWSLYFIEGGQIALWIPVNNADPQTLRKKYKATHEDRQEFISSLRKDDVVALETGNSSFVLAKLIKKQVGCTVYVLNAGKLHIIFKSLKKTDKEDALRIAKFIQRIPEEELPTVTIPSDEEMAMPSSATELIRVDRSRTQSINALHNLLWNDGITGFGRNDLRYKKNRDKVIDNLPEEYRAQGIRLLKLIDIYEQCLGEIEEEQKEVLIKHRDESTISISMPGIGPKTAFVLLAFLGNMERFSNSRQVGYFSGGFTPSTDISGQQEHYGSITKRGPKQLRRVMN

SEQ ID NO: 195591 - protein, 371 aa, unidentified
MTTKLNNIDNLIYVGMDLHKKTTTFTAKNKQGEMLSQMKVYTNKDEVTKFVKQFNNQPMTLALEPVSQWYYYADLLERLGVDVHLTHPKKVKAISDKVKTDKIDSETLCELLRVGWLPEAYLSPQEVRGWKEQTRFRVSLVRLRTQVRNKVHAILHKHAYQCEYTDLFGKSGRKWLGSLTFSKEYTRSIKHYLELHDTLTERIDQAAKIIEQTVSDHAQAKLLTTIPSISYVTALTIMAEIGDIKRFPTAKKLMGYAGLVPSTYASGGKVVHGKITKTGSKWLRWIMVETAQRQTRLRKQPGFGWYYRKLKERHGSKTAAVATARKLLAVIWAVLSENREFEERTPDGRKLLNQATDSGVHQEARRKNIVS

SEQ ID NO: 195592 - protein, 369 aa, unidentified
MTSIIYVGMDVHTTNYTLCCYSIEGNQIFAQVQVDPDYREILRYLNQVQSQRGGNCKFICGYEAGGLGYSLYHELTYHGIECIILAPSTMAVIPGKRIKTDARDAEHISKCLAYHTYSAVHIPSQEDDAVKEYIRMRDDAVTTLKRIKQQTIAFCVRHGKQYDGRSYWTKRHLDWLESLKFDHPILQETFQEYLIQYYQASEKVDIYNIRIEELAQRETYREHVQKLVCFRGIAVHTALSLLVEVGDFHRFKTAQHFASYLGLVPGEHSSGGKQIHTGITKAGNTHLRRLLVESSQVFSRGVIGKKSVKLKAKQEGKPAEIIAYADKANERLRRKYTKIASHSKYNIAKTAVARELACFIWGMMTDNIA

SEQ ID NO: 195593 - protein, 459 aa, unidentified
MNKAIGIDPDSKGYVCYLVDTGEGRTTQKGFLTTVPDLESLIRWIKNEWEVIVAIEGSNGHSRPIEKAFREAEVVFYSFRPSDVYKFRKAVLGQNKNNEKDAESVARYALALQNQGKLEQFRRVWFPDESLRLLSRGYERKSKELTEEVNRMWKVLRIASPDLYLALGGFNPEVEISDNVLQNQGILSLLAQKPDLFEWRSLSAEGFWTAMGGRNYRGREKLIEAMQKLSAIFTPISPAVSLMIKNSAQTILQIKGQMVEMQKMIRKTTAENPAVRVLEEYRGISVITAATMVAEIIDIRRFVNNDRLASYVGLARVEYSTGDRSKMITSWQFNHRLKDIFMTAARNFVRYNPDSHLAGYFKNLVKKRGMKANEAYKRVARALVRVIFRKLRALIEEKSTEQKWSENDMAGGSDFRSDISHVSNISLSTPNEDDNEQEGKIKRGKSNSSKEKRALVEKM

SEQ ID NO: 195594 - protein, 370 aa, unidentified
MDQDIKVFVGLDVHKESISISVCEAGREASQFRGTIRHDMPALLKVLRKLGTPAAQLVAYEAGPTGYGLYRRLIREGYGCQVVAPSLIPQRAGDRIKTDRRDSARLAELLRAGELKAIWVPDVEHEALRNLWRAREDALQMRLKARQHLKAFLLRHGRIYAGKTSWNKTHARWLADQSFEHAGDQLAFTEYVLAAQAADERLARLDLALAQSSRGWRFEPVVSALRALRGIDTVSAIGLVAEIGDIQRFAHPRHLMSYLGLVPSERSSGNTVRRGSITKTGNAHARRLLTEASWHYRYPARLSNALKSRQDGQPEAIRRHAWKAQVRLCSRFAHLQRRGVHVNKVCIATARELTGFIWAIARLAAISSAA

SEQ ID NO: 195595 - protein, 350 aa, unidentified
MIIVGCDYHPGFQQIAFVDTDTGELQERRLGHREEAEKFYRDLAARGAQVRVGMEASGHARWFERLLAELNFELWIGDAAKIRAKWVRKQKTDRQDAQLILKLMLKDDFPQIWVASWENRDLRQLLWHRHRMVQARTRVMNQLQAVALNEGLRCKKRLWRETGREQLEAFPLAPWASRRRRDLLELLDRLSPTITELTQTIEQEAEKCPEARQLRTHPGVGSLTALAFVLIIGRAERFQCGKPIASSLGLVPAEDSSGERRRLGHISKQGNSLLRFLLGEAAQVTVRCDPRWRNQFFHLAMRRGRKIAKVAMARRLAVRLYWMWRRGWDYEQLEKFGPHAGQPGNPHGVQ

SEQ ID NO: 195596 - protein, 336 aa, unidentified
MEEAPRRSSTDGFAFFLGIDVGKTALELALRDGEEIVARTTVSNDPEGHSTLVSWLEDQGARPKKACVCMEASGDFEKAIAQRLYEEDYRVSVVNPRRIKGYASSQLQRTKTDSADAALIARFGQREDPRPWKPPSASESRLQELTRARQALKKEKTRAQNRLDEAEDKAVRKAHENLLDEIERQIEDLEEEIEEHIEEDSELNDRCSLLETIPGVGLQTAAIVVSELGAPEQFENARQAAAYAGLVPRHRESGTSVRGKPQMSKVGNGRLRRAMYFPAMTALRFNSAVGAFGNRLKERGKEKMVVVGAAMRKLLHICYGVLKSGRPFDPSLHPGT

SEQ ID NO: 195597 - protein, 345 aa, unidentified
MTYFAGLDVGLEETAICIIDSNGGIVRELRACSEPEALVRALRGLDVRYGRVGLEACPLSSWLFEGLAAAGLPVVCLEVRHLRAALAAMTHKTDRNDARGIAQVLRTGWFKAVHVKTAWSQERRTLLTARKRMLEQAFDVENTIRGLLKGHGLKVGRVTRTTFAPRVRELVAAVPVLAAAIEPLLTAHATLRKSFTELHRQVLAVTRIDPVSRRLMTVPGIGAVTALAYCSAVDIPERFPRSRAVGAHFGLVPRKYQSGTTDRNGRITKAGDAMVRTALYEAANVLLTRVTRWSPLKAWAVRLAQRIGGKRAKVALARKLAVILHRIWIDGTTFTWTRERAMAAV

SEQ ID NO: 195598 - protein, 321 aa, unidentified
MNKNTEIFGIDISKDVFDVYSHQKGHQSFKNDAQGFKSFLKVITKDALVVMEATGYYHYLFAQFLHKKKVQVSVVNPLSVKRFIQMKLAKVKTDKSDAKAICEYGHMNEVPLYTALTDVQAECLQLFRLLDNYLKKRTQTKNKLHGEEVLGIPSKYVYGSLKRDLKHLDKEIKGIEARLLELVKQDQQHQLTLLKSIPGMGMKTALFLIVVTDGFSKFETASQLCSYVGITPTIRESGSSVRGRSRISKVGNKKLRNLLFLCAFSACKHNKACREIYERIVNKGKSKKLALIAVANKLLKQAFAIAKSGRPYDENFVSKLA

SEQ ID NO: 195599 - protein, 340 aa, unidentified
MWYSGIDQHKRDSVITTYGPDGPRVKQVRVANTPLALAQYFADFPSPHKAVVESTGGWYWLADVLAPLGVELVLAHATRLKAISAAKVKTDQVDSDVLALLLRADLIPEAHMIRPGQRGPRDLMRARLRLVEKCVSAQNSIDRLLEKFNVDTVAELEALYQLQAGCHQAQIHLLEEQITTLERALHPHLIPNPDVQRLLWIPGVGKVNAFTLYTEIDGITRFPSVRQFFSYSRLVPGADNSGGRTRHRSGSKAGNRYLKLAFSHAGIRAVQYYPEIRAFFKAKARRKPIRIARTLVALELARIVYQVLVKQEAFNGQFKSRPLSRGKHAQWPRRASPPPN

SEQ ID NO: 195600 - protein, 344 aa, unidentified
MKFTRCGLDIAKQVFQVHGVNEHGVVKGHRTLARTRVLEYFAQMPPCLIGIEACGSAHYWARELTKLGHVVKLMASQYVMAYRKRAKNDANDAEAICEAVGRPNMRFVAIKSEEQQSVLMVHRARSLTVANRTAQVNQIRGLLGEFGLVVPRGVGRLRRELPGILEDAENGLPGLGREVLSGLLQELREADLRISAYDRQIRALAEASEPARRLMRVESIGAQTATALVATLGDPHVFRNGRGFAAWLGITPRQHSSGGKEHLGPITRQGDSYLRTLLVHGARSYLRVVDKKTDAKSEWARRLKQRRHVNVAAVALAAKHARIAWAILAHGTEYRPAGPQTAVA

SEQ ID NO: 195601 - protein, 313 aa, unidentified
MAKQVTEITLGIDVSKAELVICDWDTGEIIKLENNDSTIKAWLEALYGPVRMAIEPTSNYHLEFVEQAHALGFAVYLINPRQLAHYRQAVDIRNKTDPLDAWLLARYLARESDSLRAFKPQCAKAKQLWSLLKRRATAVRARTQLKQSFAEIKLPIKALFSEIQRVLDRIDQSILALIRQLGWWPDYQRCLSMPGIGKLNAAALVVVFHRGAFAGADAFISFIGLDVCVRESGKFKGKSKLSKRGEAEIRRLLYCATQGARSYRPFDDYYQKQLEKERSKIGAKCSLARKLARIAFALMNNQQSFKKQEIAYS

SEQ ID NO: 195602 - protein, 347 aa, unidentified
MRFYTRRREFYCGIDLHARSMYLCILSHDGEIVFHHNLAAAPEPFLRAVAPYRDGLVVGAECIFTWYWLADLCQREGIEFVLGHALYMRAIHGAKVKNDKVDSQKIAALLRGGTFPMAYVYPREMRSTRDLLRRRAYLVRRRADLLGHIQNTNSQYNLPEFGKKIARKMHRKGIVDVFPDPAVKRSIAIDVELIDHLDLLLERLKKEIERTARHHDPQALMLLRTVPGIGSTLGLVMLYEIKTIERFERVQDFCSYARLVKCQHESSGKRSGKSWSKIGNVHLKWAFSEAVVLFLRANPEGMKYKKRLEKKHGKAKAISILAHRLGRAVYHMLKRRKAFDMKIFLAS

SEQ ID NO: 195603 - protein, 463 aa, unidentified
MEGKARRTHRNHKSPSLLERVNHNAAGIDCGSAEHYVAVPVDRDAEPVRHFRTFTAELHRLADWLVSCRIKTVAMESTGVYWIPVYEILVARGIEVLLVNARHLKNTPGRKSDVTDCEWLRELHSVGLLRGSFRPDEEIVTLRSYLRHRDTLVQSAATAITRMQKALVQMNLQLHIVIRDIMGMTGLAIIRDIVNGQTDPGRLAKHRDAHCKASEADIAAALTGHYRPEHLFALKQNLEIFDAHQRQIEACDAQIEVCLTELAEKVAPPSAPLPSRRSRRNRRSNEPRFEVRPMLHRLANTDLSELDGIGPYTALRLISEIGTDMSRWRTDRHFTSWLTLAPNNKISGGRLLSSRTQPSASRAAAILRMAAQSLARTQTALGAFYRRLAFRIGKAKAITATARKLAVLVYHSLKGDFVYKDPGAAAYDARHRDSVIRRLRQRAAALGLSLVDGQTGEILDGVS

SEQ ID NO: 195604 - protein, 420 aa, unidentified
MKYARVPRPEAPPGALSAGIDWASADHAVCIVDAAGAVVSRFTVAHTAEGLKTLVSRLARAGLAEVAIERGDGPVVDALLAAGVTVVVITPRQVKNLRSRYGSAGNKDDRFDAYVLADVLRTDRARLRPLIPDSPATATLRQACRARKDLVRHRVAVGNQLRAHLLCAFPAAAGLFCKLHSAISLAFLARFDCQDRAGWLSQKRLAAWLKAASYSGRTDPADLYQRLTSAPRGATGEAGAASAQVTRALAAVLASLNTQIKALDAQIAAQLASHADGHIFTSLPRSGTIRAARLLTEIGDCRARFPEPQALICLAGAAPSTRQSGKHKAVTFRWAVSKQLRDAVCDFADGSRHASPWAAQIYNAAIARGKDHPLAVRILARAWLYVIWECWHNGVAYDPARHRGLQRLLAAQATGADQAA

SEQ ID NO: 195605 - protein, 342 aa, unidentified
MSIVMGLDQHRAQISAEWIDTITGEIFRARIAPADRAGVRNFLARFGGEGLEAALEATTGWRFVVEELERIGAEVHLAEPAEAAALKGKKKRAKTDWADARHLRELLLIGRLPESWIPPAHILDLRARVRTRHLLSHQRTEWQQRIQAVLYHHGFPQRRGLLTLEQRKWLAALKLCSAARQQIEIALEMIDALDIQLAPFDLELRSYARKQTGCRALIDALYGIGELTAVTILAELGDARRFPSSRDVVRYGGLDITVYQSDEHRAPGHLSRQGPPALRWALYEAAQVSRRGQRSPDRAYYLKTAERVGGNRACLALARKLLKRSYHILKALGDRALEPVAA

SEQ ID NO: 195606 - protein, 384 aa, unidentified
MNKHSMIFIGLDTHKEFHEVAYCEEQRGASAVHYGRIPSSKVSVKKLIRQFESKYPGATIHVVYEAGPCGYWIYRLITSLGHCCYVVAPSLIPKKPGERIKTDRRDALKLVKLLKSEDLTPIYVPEPEDEAVRDLSRAREAAMKDLKEAKYQLKALLLRNNIRYEGTANWSKKHLRWLTELILPHPAQQIVLQEQLQTIEERIRRLERLDNELTHHVHQWRYYPVVKAIQAMRGVRLLVAVGVVAELGDLNRFDHPRKLMAYLGLVPSEHSSGGKRHLGAITKAGNGRARRLLIEGAHSYRYPANISTDIQLRQEGLPKDIVDIAWKAQLRLCKRYQRMSKKGKHYNLIITAIAREMAAYIWAIAKEVVLTPVNPKLRLSRVPA

SEQ ID NO: 195607 - protein, 346 aa, unidentified
MENIALDAHKRYTWARVENTQGEKLYESRLQHARGSIKNFVQRWTPGSAVAVETVGNWYWIVDEIEAGGGKPQLVNARLAKLMMGSVNKSDKLDAKGMNRLQRTGTLPTVWIPPSAVRDARELPRTRMVLSEQRTQLKNRVHATFAKYGFVIEGASDAFGKKGRKIVEELLPKLPPHTEQALGRVLDQLDHVSENLKLIEAKMMEAFAPCPETTLLKTEPGVGDILAVVIWTEIGTIERFARAEQFASYCGLVAREHSSGGKFYYGAVRRDVNVYLKWAFVEAANSAVLNRERCHYNHISRLYERLRARRGHNRAKVAVARHLSEAAFWMLKKGEPYREPMSSTQR

SEQ ID NO: 195608 - protein, 311 aa, unidentified
MYYIGIDVSKKDLSVFDGKDLKFINKEGLTSFKKYLKKKYHLSEVVIIFEPTGVYSLYLKEFCAENSIKAYIVNPKKSHNFTRALGRRSKTDKIDARILYQFHRLIDSKDIKVPKVDQQAKALSSYLVSYEFALKQRISLSHHLESLRDKRLIALMRKDLKRAKKLEDRIFDDIKEYLGKNQNLKEDYQRLSTIPGIGEKAAIALLTLFKTYQGTNRAQITALAGLDPVKRESGTSVKYKVRISKNGKKIYRKILYLPTLCATVHHQKIRVFYQRLLTNHKPKKLAIIASMRKILLIAHAMYRDKTEYVAV

SEQ ID NO: 195609 - protein, 343 aa, unidentified
MLHYVGLDVSLKQTSICVVNETGSVVREGVVDSDPDAIAAFVRLNAPGMVRVGLETGPTATWLWTELKRQGLPVICIDARHAKAVLKMQINKSDRNDAAGIARIMQTGWFKEVRVKDLDSHTLKALLVSRALLVKIKRDLENQIRGLLKNVGLVIGRAKFNVFAMRAAELIEDRPELIAVVGPLLKARKAIEQQTDDLDRKVLKLARYDAQVRRFMSVPGVGPITALCFKATIDDPTRFKRSRSVGAYVGLTTRRHASGEIDWTGRISKCGDAMLRSYLFEAAGVLLTRVPKWSALKAWGMRLAKRNGLRKATVAVARKLAVILHRMWIDRTEFNWSKQEVAA

SEQ ID NO: 195610 - protein, 372 aa, unidentified
MNPSITYVALDTHKKEHTVAWAAPQTGAVTVFTVRNGVKDVTKMVRKLQRPAPGAVHFCYEAGVCGFTLKRRIEALGSVCQVIAPSLVPVKPGQRVKTDRRDARKLLGQFSAGQLTEVHAPDTAQEAAREITRCRQAAQENLKRIRHQVLKLLTRHGYVYSDGRHWTNKHRAWLRSLQFDQADLEEVFTWHLSELEHCQHRLAMLDKQVAALAERPAYREAVGRLRCLRGIETLTAVTLITEVFEFGRFASPRKLMAFLGLVPSEHSSGEKRCPGAITKTGNRRVRRLLIESAWHYRHGVSVSKALQQRRAGQPPWAVDIADRAMLRLHQRYRRLQARGKSPNVVIVAIARELAGFIWALLRGNERGGLERV

SEQ ID NO: 195611 - protein, 372 aa, unidentified
MTASNILFIGMDVHKESIVVSLADDDRGDVRRYGSIGGALPDFKKLLRKLSTTGKDLFFCYEAGPCGYELYRFIVSQGHQCIVVAPSLIPKKAGDKVKTDKRDADQLVRLLRAGELTAVYVPNAEDEAIRDLSRAREDAVLVMKSARQRLKSFLLRHNHRFDGSANWSEKHLRWLAECVSLAFPAQQIVFQEYVNATTQAKQRVTRLEEEILFHTQQWHLYPVVQALMAMRGVRMVVAVTIIAELGDLTRFKNPKQLMSFLGLTPSEYSSGPKQKRGAITKTGNQHARRVLVEAGWAYRFPAKVSPEIQKRQENIPLPIRDIAWKAQVRLTKRFKVMANKGKPHNVIVVAMARELAAFMWAIAHEIPILPRD

SEQ ID NO: 195612 - protein, 340 aa, unidentified
MRRCQRSWARCGRFLARQRGHGDRVHATFEVSGQAGWLYDGLVDVVDRLVISNPSQITWIYRTAKKTDRIDARKQAVLLQIGELPTVHMPGRAVRQWRGQIQHRRKLVERACQLKNRIRAYLKGQGIRRSADAPGWWTQASRRWMEALLPGDVAMEDLLEELSLLEKQIKRVTALLDARLEKTGAWLLMTIPGVGPRTAEAVLAYTDDVSRFRRGKSFCAYFGLTPRLDESGKVRRLGHISKQGPSVGRWLLVESAWRAVNKCEALRTFYERVQHGQTQRKKIAIVAVARKLLSIMRAMLTTGEVFNEALVLRSDDRWGPETSTEGQGRSRTARRRRRRR

SEQ ID NO: 195613 - protein, 312 aa, unidentified
MNTEINIGIDTSQSQLDIFIRPLDVFFSVENTFQGVKNAVRKLRSYNPQRVLIEATGRLEMTFVCAAHKAGLPVVVCNAGQVRKFAGASGRIAKTDKIDAQCIAHFGEAVKPRLTEMKPEKLQQISDLLTVRYQCLDMSTMQKNRLQRMPKSVQAPIKRILKCIQKELTGIDQRLDKLIDAIPEWRATRDLLLSAKGVGKVLTYTLMSELPELGKLNRKEISALVGVAPMNKDSGGYSGKRRVRGGRHKVRTVLFVSMLSAIQCHPKLKPMYERLVAAGKPKKVAIVACMRKQLIILNTMMKNGTHWDENMC

SEQ ID NO: 195614 - protein, 413 aa, unidentified
MPGRKEKTHVLSPPVRYVGLDIHKHYLMAAGVNAEQEETYAPRRVENTRLEAWIARELRSTDAVVLEMTTNTWEMVDLLTPHVYSVTVVHPPEVKAIVRARVMTDSKASLILAKLHAAKLLPSVWIPPQRVRDVRALVSQQQKLLAMVTQAKNRLHALLHRHHIVPPASVNLFDPKQRGWWESLPITRLELVRVQCDLDTLAFASSQKRRLEVVLGEEAAQDERTPLLIQLPGIGKLLAVTVLAAIGDITRFPSAKKLVGYAGLGASVHDSGEKRSTGRITKTGRRDLRRAMVEAANSAVRSHPHWKAELARLEPRLGRSKAVVAIARKLLVAVWHVLTKGEKDKHAEPEKVAQSLLRFVYRTGVHHLPKGQTALQYTRQQLDRLEMGQELTHLVWGNKRFKLPPSSRASPLM

SEQ ID NO: 195615 - protein, 338 aa, unidentified
MEHKRIAIDTSKHVFTLHGVDEQERPVLRRELKRGQVETFFSKLEPTEVVLEACGGSHHWGRVLSRLGHHVRLIPAQYVKPFVKRAKNDRADAEAISEAASRPTMPSVAVKSADQQASAMILRHREMLVAQRTQAVNALRGHAAEFGVIAAKGAVQVKALLDKLAAEEAVPAAAQAMFSQMGEHIEALDRRITALDEQLLALHKANPVSQLLAEVPGIGPVTAITLALTVEPKHFASGRHFAAWLGLTPKEHSTGGKQRLGRISKAGNERLRTLLVVGATAVVRHAKPGGKSASAWLLGLLERKPRKLVAVALANKMARIVWAMMARGEAYRRQPAAA

SEQ ID NO: 195616 - protein, 384 aa, unidentified
MKMAGIDVHKKVLMVVVIETTSPEEKPERRRFATLPGDLSRLSSWLRAQDVQEAVMESTAQYWRTVWLELEPHMLLHLAHAFSNRAPRGRKHDFKDAERLVRRLFADELILSFVPNGEQRIGRNLTRMKMQLTRDRIRLQSQMECLLEEMRIKLSSVITDLLGASGLRILRALAGGETEAKRLAALGDNRLQCTEEQLLEALTGSSQPMHREMLALQLQRLQLIDTQIAKLNHLIAQAMKPHQDAVVRLAEVPGLGVDSAQQIIAEVGAQAGTFSSAAELTSWVGTCPGKNESAEQNHSSRSAKGNKYLRRVLNQAAHAAVKKRGSYFQALFRRLLPRLGYQSAIWAIAHRLCRVIWKILHEGARFIEKSLEPDAQPRRNVPEC

SEQ ID NO: 195617 - protein, 442 aa, unidentified
MEVLYEQCAGLDVHKKTVTACRVRMVGRRREQAVQRFGTTTPELLALADWLAAWSVTHVALESTADYWKPIYNILEGSYELLLVNAQHLKHVPGRKTDVKDAEWLAECLRHGLLKASFVPQRPQRALRDLTRYRSKLVQERARLANRLQKVLEDANIKLGAVATDVLGKSGRAMLEAMIAGEENGEVLADMALGSLRSKQAELAKALTGRMTDHHRFLLRQQLQHYDFLTEQIAVLDARIEQQLAEMDDQKPPIEFANTPEDTIEPEDSADNEPLTHSQAIALLDTIPGVNERTAEVIVAEIGLDMGRFPSHKHLAAWSGVAPGSDESAGKRRSGKTKPGNKALRAALSQAAWAAGRTKGTYLSSQFKRLAARRGKKRAITAVCHSIIVIAYHILSKREPYRDLGAEYFDEYKKERTIKRLIHRLKDLGVEVDVKTQMIVPA

SEQ ID NO: 195618 - protein, 430 aa, unidentified
MRLRLQDPEGGPGPDGTRSKEAGMVYVGIDVAKRSHVLSAVGADGETVIESFKFANADAGFKKLADRLAKAGIGPGSSLFCMEATGHYWVALFDFLSSRGFDAAVVNPIQTDAFRDVWTIRKVKTDALDVAMIADLARYKRYEPSALGDEATDELRALARYRMSLVERSTMLKNRATAILDRVFPELDGLFAGSFSQTQRALLKHAATPRQVLSTDVRTMARILGEASNGHCGRAKAEQLKAAAKSSVGVGFGSDTLAFELRMLMEELDFVRGQIDEVEAELARLLDATAGRWLLTVPGIGPALAATIAGEIGDANRFAGPGQLMAYAGMDPTRSESGETVASDGSMSKRGSAALRWALMQAADCARRYDPYFGECYAKKKSKGKHHYVALSCVARKLMGVCLALMKEGRPYEPAPPAHHKPGHLKEADS

SEQ ID NO: 195619 - protein, 349 aa, unidentified
MKITTIGLDLAKNVFQIHGADARGKAVVRKQLKRDQLVPYFANLPPCLIGMEACGSAHHWARKLQALGHTVRLMAPQYVKPYVKSNKNDAADAEGICEAVTRPTMRFVPVKNIEQQAVLSLHRVRQGFVKSRTAQANQIRGLLGEYGLIVPQGIRQLATRVPTLIEDVQGELPQVFRQLIRGLLDELKQPDSKVDELDVQIKAWHREDELSRRLEQIPGIGPTTASALIATIGDASHFQSGRQLAAWLGLVPRQHSSGGKAVLLGISKRGDAYLRTLLIHGARSVLLRAKHKSETDKSGLSSWLVGLAARRHTNVAVVALANKMARILWALLAHKREFQANYSGATASA

SEQ ID NO: 195620 - protein, 347 aa, unidentified
MLHAGLDLSRKKLDVCLLSDRGEQLDQLAVPPDVDSLRRLARRIEEVHGELVCAVIESMTGARIVHDTLEQQGWSVEIADAQKVKGLAPLACKTDKIDSMVLAVLSHRDLVPAIWLPDPSVREERELARFRLHLVKHKSALKNRIHSTLINFGKPCPVTDLFGLEGRRLLKRLQVPEPWRGNITASIELIDDLERQIAEINRRLKDGHAEHPYVPLLLTVPGIGWVLAFTIAAEIGEIERFSSPEKLTGYTGLCPRVNQSGEKDRRGPLTKHGPTYLRWALLEATMHALRHPAYAERYQRTKRRLGKQRGAKVAQVDIARRLSHAIWHMLSRKEKFAPRGAAFRLAA

SEQ ID NO: 195621 - protein, 350 aa, unidentified
MDKELYIGVDVSKQTLDLAYYDGESIDWKKAHIKVSNNNAGFKKIGSWVAKVSKGFDIVLFCMEYTGLYTQDFRLWLEEKHYIYRMVEPRKMHRFEPDLDDGLRSLDRIKTDELDSFRIAIYCEQNHRKILRNPSKLPPPVYFKLKRLLAERKQTVKQSVLYKQQLHDICAYDTDLSVERKNGQLKTLNDALKGIDNEIDMYIKENADISKNFSLLTSIPGIGRVVALETIVLTENFMAIDNPRKYACYIGVAPFKKESGTSVRKGSSVSKKGFKQAKADLSIACLVCMQHIPNIRDYWERKRKEKCSGIVFNAIKFKMILRMFAVIKRGTPYVETDNYRNGKNKQPEVN

SEQ ID NO: 195622 - protein, 342 aa, unidentified
MQITTIGIDLAKTVFQIHAVDSDGATVIRKRLRRAEVLSFLAGLEPCLIGMEACATSHYWARELTKFGHTVKLMPPAYVKPYVKRGKNDATDAEAICEAVTRPNMRFVPVKSPDQQAVLMLHRTRALLIRQQTMLANAFRAHLAEFGIVVAQGIRHVRALIEKVFGEDTIDLPVLARIALRPLVAQLMELRLQIKMIEKELLAWHRTSQESRRLETIPGVGFITATAFAATVTDPSHFRSSREFSAWLGLTPRQKSSGGKDRLGRISKMGNRYLRSLIVVGATAMIRYAREKGPVSARWINALLEKKPARLVSVAVANKTARIAWALLVRKEDYRAPMPVAA

SEQ ID NO: 195623 - protein, 312 aa, unidentified
MEKNASLFVGIDVAKDQLDVAFSTGTKPQRVRNDSRHLIRLMEELLSLTPALVLLEATGGLERPLVYALEAAGLPYRVANPRLVRDFARATGKLAKTDQIDAQVLVEYAQKLRPEARTLADPDRRVLRELVLRRQQLLDMKAQEENRLRTAPKPVAVSIRAMIRVLEKEIAKLERQMDDFIDQHPMLIAETELLESVKGVGPILSRTLCGLVPELGRVNHKAIAALIGVAPFNCDSGHYRGKRSCWGGRADVRRILYMATVIAVRYNPKFKAFYERLRLAGKPFKLAILATMRKLLILLNAMMRDFYAAQAA

SEQ ID NO: 195624 - protein, 350 aa, unidentified
MNATTVAVDLAKNVFELALADERWKIIERARLTRAQFERWFDNRKVDRVVMEACGSAHHWARTLRARGIEVRLLPAQYVRAYVKRDKTDAADAQALLEAARANDIRPVAVKSIEQQALQALHRTRSGWMSTRTRRINTLRGFCREFGLVVPEGAATGLACIARYLADDRSGLPELLRPSMRLILDEIRLMEARIGQLEQALSQIAKHSPDCQVLQSVPGIGLLTSTAMVAAVADPRSFDSGRRYSSFLGLTPREYSSGNTRYLGRISKRGDRYIRMLLTHGARSVLRAATVAHRAGRPIDRLKSWALAVQARTNHNKAACALANKLARIAWAVWVKQEKYQSASIQALSV

SEQ ID NO: 195625 - protein, 391 aa, unidentified
MHSDGSKHSSFSVPNNRNGAKLIVDRVTSVLLLQEIPQVVIGMEATSVYGDNLMRFLRESGSLGRFERSLHMLNPKQVKKFRDAYSDLPKNDFVDSFIIADHLRFGRINKEVYMDDYKYQALKMYTRARHQLVQELTREKQRFLNIVFICFSGLTQEKIFSDKFGATSMALIEEFSSLDELAYMNIDELADFIRKHGKNHFQNPEEIAEAVQRAAKNSYRPPQVIADAAKQMIVISMNTIRLLQKQIKEYDKAIEKMMETIPQTLTSVKGIGNVYAAGIIAEIGDINRFPSQASLAKYAGLVWTQHQSSDFEAEDKRMIQGGNHHLKYYLCEAANALRRCDPEVKRFYALKYKETNKHNHKRALALTARKLVRLVYTLLKTNRLYIPPEEY

SEQ ID NO: 195626 - protein, 349 aa, unidentified
MSMVGGLDLHRRQITYDVLDVDSGEIWRGRLWQPDRQRFRRWLGTEVAARSRGESVALAVEGCTGWRYVVEEISAAGFEPFLAEPADTQAARGKKRRAKTDRTDAQLLRELLSAGELPESWIPPPDVLEWRERVRLYKSLVDQRTLWCQRIHAVLYHHGVAGPEGAIRTEKTRALITSEQVQLSAAGRERIAAGYKMIDAADREALPLKADLQRFGARQPACRALADAQYGIGGLIAVVLWSELGDCRRFCRSEQVVRHSGLDVTVDASDRRRAGGHLSRQGPETLRWALYEAAQNSSHGRSPDHSYYAKVKDRHDGKIAAISVARQLARRSYHVLRAVDPELVYAIPA

SEQ ID NO: 195627 - protein, 330 aa, unidentified
MEREYIGIDLHKQFFQACAVTPTGIRAWEQRFPRTDGGLVLFRERCTSMTAIAVEATGPTWAFVDALRPSGATVCVVDPRKTRLKAGYAAKTDRLDARRLADALRRESVVSIYVPPPAVRELREVCRGRHQVVRLRARIAQMIRALLLRSGVSDVPVTRVFSARGLAWLSQVQLPSEAAASLERWRRVLIAVQAEAAVAEAMVKARATADAIARALDDLVGIGPVLALTLRAEIGDIARFPRGAALASYAGLVPRVDASADRYWSGRITREGSPWLRWALVHTAIHAIRRQDGLGRWARQLAMRKGVYKARVALARRLCDEVVTVWPRCA

SEQ ID NO: 195628 - protein, 422 aa, unidentified
MLGVGIDWAEAFHLVALGHPDQGVMQVLRVEHTPAAVDQLIAQLATLEPDPAEVRVVLETRHGLLVERLLDAGYVVLPVNPDLVARRRGPARKKDDAEDARICCLLALDRHTALRPLIPHGALAAELRAIARDDARAARDQRRLLNRLRQDLITTYPAALAIAGDDLGAPTILKLLQRWPTRDQLATASRQELISLASAARHGWPDRLADQVAAALATDQFTPRDYLVRAKADTILLTATQLLAIHAQRRVWERRMGELLLGAPGHGQTGQPQEDQPGQALPGGQVYLSFPGLGDRLAARVAGEIGDHPQQFGSPNALACYAGKAPVTRRSGRSELVVATRLACNRYLADAVQQWAFCSLRCSGWAREFYAAQRARGKTHHAALRALGNRWLEILWHCLMRGQLYDEATHIANRNRAQGKAA

SEQ ID NO: 195629 - protein, 423 aa, unidentified
MGRSIGLDVHRDFCEIAVADGGRARSAGRVATTRGRLKLFACSLLPDDRVVLEATGNALAIAGILQPHCREVIVAHTKQVRVISHARVKTDKIDARVLADLLAADLIPAVWVGNERVRALRRLVSRRRGLVKRRTQIKNEISAVLHRNLTPRAPVTDLFGVKGRQWLANQLLPVDERLTVDGCLRQLDFLGEELAKIDTLVAQEALQEADIRRLMTIPGVDVTTAATLVAVIGDVRRFPSAKHLAGYLGLAPRVRQSGIAAAHHGRISKEGSAAARHVLVEAAWITARSPGPLRAFAQRTAARRGRHIATVAVARKLAVLCWHLLARGEDYASQRPSLVRRKIRALELKAGAPRARPGPNSNPTWNRDHEGREQQIAEQAEAAYRRLVSDWQASRPRDGAGATPGRASQRPSKGKAARQATSP

SEQ ID NO: 195630 - protein, 401 aa, unidentified
MVSDFMKGRYNLMKIFVGIDIAKLNHFAAAISSDGEILIEPFKFTNDADGFQLLVSKLESFDKNSIIIGLESTAHYGDNLVRYLVAEFYQVCVLNPIKTCLMRKNNVRKTKTDKVDTFVIAKTLMMQDDLRFITFFDLDMMDLKALGRFRQKTIKQRTRLKIQLTTYVDQVFPEIQYFFKSGLHQNAVYALLKEAPSPKEIASMHMTHLANLLKVNSHGHFTKEQAKELRILAQKSVGANDSAISIQITQTIQQIELLDSQLEKIEAEMTDIMKFNDSVIMTIPGIGYINGGMILGEIGDIHRFSNPNKLLAFAGLDPSVYQSGNFQAKTTRMSKRGSRVLRYALVNAAWNVVRNNATFKAYYDAKRAEGRSHYNALGHCAGKLVRVIWKMLTDEVEFNLE

SEQ ID NO: 195631 - protein, 418 aa, unidentified
MPDPLLVGLDVHHKTQSVCVMNVMGEIIDDKLTVPNTPAGAEALASYLHALASRGGYDALHIAAEATGWYWWHFFRALSSDPRLKQSPLALYPLNPRLVAKLKETYSDHDKTDPGDAFVVADRLRMGRDLPYPFSDELRYLRLRLLTRHRRHLVRNLVREKAFCLAHLYLKASEYTRLQPFGNTFGATSRTIIREYSSMEEIATIPLDDLAETIDRLGKRRFADPFQAAQTLQEVARHSYALPEVLQGPVNLILRQTLQQITALERLIHHTDAAIAEAMQDFPNTLETIPGFGPVFAGGIIAEIGDLSRFEHDQTKVAKYAGLKWRRTQSADFEAEETPMTQAGNRYLRYYLCEAANSVRMRDAEYQAYYERKYDEVRKHQHKRAIVLTARKLVRLVVRLLTTHQPYRPSRDQLRLSA

SEQ ID NO: 195632 - protein, 377 aa, unidentified
MTETTIFVGLDVHKKTIAVATVAAHASASVQFFGTIANTPEAIRSMLRKLGKGGQKLHLTYEAGPLGYNLYRLSTGLGHRCDVVAPSLIPRKAGDKIKTDRRDAMMLAQLLRAGQLTEVWVPDEAHEAMRDLVRMRAQATKDQRKTRQQLLSFLLRHGRTFPGAHWTKAHRRWLGELKFAHPAQHLVLEELLTRIERAEELCARLKAAIVELVPSWTLAPVVAAVQALRGVSILVAATVVAEVGNFSRFESPRQLMAYLGLNPSEHSSGATIKRGAITKTGNSLARTCLVEAAWTYRHPARVTQIIRERLAGLPEPIRAIAWKAQVRLASRYRKLIAAGKPAPKAIVAVARELVGFIWAIARLVEPKAATMGEAKAA

SEQ ID NO: 195633 - protein, 306 aa, unidentified
MDNHTQYSGFAGVDLAKKVMQIHFVTGDGEITDKQVKRAEFLDFFRNRTKCLIGMEACGASQDWARKLEAMGHEVHLMSPKAVKPFVSGQKNDYNDAIGIYKAMFNGVRRVPVKSTEIRDLQTLRRIRSQVTKDKVKEINHVRGLLAEYGIVMGKSITAFNKGISSALESLKERGDVSPLVAEELQTTVESIKTKIERQKRLDREIEQLLARGCKNYENFLKTPGVGLFTAAMLCVLLCDPAIFANGRQFAAHIGLAPRSRGSGGKNFIIGIPSKFNCDSESRAVFVECAQALARYKNKSPWVDGI

SEQ ID NO: 195634 - protein, 359 aa, unidentified
MITLGVDAHKTVHAAVALDDAGREIATWRGPNSPDGWAELAAWAAAHAASSGTERRWGIEGAGNYGRGLAQHLTAAGETVYDINPRWTAQGRRQARRPGKSDRLDARAVALVVWREAASLPPLQPEEQDETAVLDLLVSEREGALGEATRLRNQLHALLLQLDPQYKVHLPALTTPAGVAAAEAYTGPGRTPLQRAQAASVRRLAQRLRLATEQAADLARQIAARAQAGFSPLTRLKGINLLTAGALAGLLGPGCRFTGEAQLAAYAGVAPLEASSAGRVRHRLNRGGNRRLNAILYRIALTQARCWPPAQAYLARRLREGKTKREAIRALKRYLIRAIWRLWQECVSSHPVTSYGQAA

SEQ ID NO: 195635 - protein, 449 aa, unidentified
MSRPQVIDDQEHERVHERVAAIDVAKDTGMVCTRTPHPSRPGARRAAVWTVKARMNAIGALGRQLHKDGIEIVTLESTSDYWRIWFFVLEACGLAVQLVHAAQAKNLPGRPKTDKLDAQWLARLTEMGLLRASFVPPKAIRDLRDYTRARTRLVQERTRCFQRLEKLLEGALVKVSSVASKLTTVSAQDMIKAMIAGQRDAHELAALARGRMKAKHDDLVEALTGMFDDHHGELAALLLDQIAFLDTRIAQLTARAAELTAAMPGAWGVNADGTTGPDAGTGPDDPVLPAVARLAQIPGISQDLARAIIAETGLDMSRFPTAGHLVSWAGLCPSARQSGSRTRAGKKGQGDTWLRGSLGQAAIGAARTATFLGERYGRIARRRGKAKAQVAVARSILVIIWHLLSNPEARYTDLGPGYYQARTDTDRKIRNHIRQIQALGFAVTLTRAA

SEQ ID NO: 195636 - protein, 344 aa, unidentified
MSEVSIIGLDIAKHVFHIHGADERGRAVLSKRISRGKLLDFFAAQPSCKVALEACGGAHHWARQLTQLGHEVRLIPPAYVKPFVKRQKNDAIDAEAICEAAQRPSMRFVAVKSEEQQAAGLLFRTRDLLVRQRTQLINAIRGHLTEYGWIAPKGPSHVARLAELIDEEEMASSLPEAALAMFRLMLDLLAGLNGKIADLDKEIARRAREDEVSRRLMTIPGIGPISATAIAALAPPAETFAKGRDFAAWLGLTPLQRSTGGKQKLGATSKMGERTLRRLLIIGSSAVVQQASKRGAPKGSWLEQMLTRKPRMLVTIALANKMARIVWALLVKQENYRAPVPARA

SEQ ID NO: 195637 - protein, 344 aa, unidentified
MKYFTGIDVSLRFVSICVVDEAGVVQYEGKVPAEVDLIVAALRRFSAEVRQVGLEAGTLTQYLTYGLQKAGYEVLCLEARQTASTLAAMRNKTDRNDARGLAQILRSGWYRTVHVKSLESHQVRALLASRKAILTKCVDLENELRGLLKIFGVRLASQVAHGSFDQTVRAAVSATPELSMSLLPLLDARTVLYKTYLKLDNAVKAVVRHDPVCKRLMTVPGVGPVTSLTFKAGVDATDRFRSSRNVAAHFGLTPRRYQSGETDNPGRISKAGDVEVRQALYTAAHAMLTRSYAWSTLKAWGLRLAKVRGLRRAVIAVARKLAVILHRMWVDGTDFRASRPQEAA

SEQ ID NO: 195638 - protein, 408 aa, unidentified
MNAVGIDVSKGKSMVAALRPMGEAALLPQEFLHTEVGLEQMAYAIIALGEDTRGVMEATGRYHEPVAAALHEYGIYVCVLNPLYIKQRGGGSIRKVKTDKADAMKIAKYGLDNWVDLREYTPMDTVRQQLKLCSRQYNLYMKTVVSLQNNLISLTDKTFPGVNELFSSSERADGHQKWVDFVMTFWHCDCICRVSEKAFTERYRKWCKRKGYHFSAEKALDVYAGSCGHFTTLPKNDNTRLLITTAAQQLLAGKTTLAALRAEMTRLAKQLPEYDTVYSMYGVGETTAAQLMAEIGDVRRFPRRSSIVGFAGVDPAVDQSGKHEAQSTPTTKRGSPHLRKTLYQIVYTYLRKAPEGEPVYQFLDKKRAEGKPYFVYMTASQNKFLRIYYARVKECLEAFDARQAIPQD

SEQ ID NO: 195639 - protein, 378 aa, unidentified
MSEYTTQVGMDVHARSVSCRALRPDTGECWSGTFRGEGFERALLEWLRGLPQPVRCAYESGCTGFWLSRFLEGAGVACGVVAVSTMPRSPRDRRHKNDRRDAAVVLREMCNPASDVSYVWVPDPQTEGARDLARAADAAARDVRSARQRVSMLLLKHGFAWCERTPSGNLRKTWTREWRRWALSRDLGDALSNRALEMEFGAVERLEREAAGLAAAVAEEAGRPRWRPYVDALVRLKGVDVQTAFLACAEFGDFSRFRSGRAVSRWIGCTASESSSGEADRRGPITKEGSSRLRRALVEGAASMPRRNGRPKRVRPGHEVSPAVEEMAAAANERLRRRYERLRGAGKHANVARVAVVSEMARWIWAIGLQVQRELAAA

SEQ ID NO: 195640 - protein, 411 aa, unidentified
MENIFLRCAGLDVHKASVEACVRRMEPNGQLHQQTRHWGTMTRDILRMADWMAAQGVTHVALESTGVYWKPIYNILEGRFTVLLVNARHLKQVPGRKSDIRDGQLISQLLQHGLLKGSFIPSRPQRELRDLTRHRTQLVEEKTRTSNRIEKVLEDANIKLGSVASEVMGVSGRAMIQALLEGEKDSAQIADLARRSLRGKIPELQKALEGHLTEHHRFLLRLLWKELTQQEALIAELEAKIQERTRCFAPQIERLDGVPGVDRRVAEVVLAELGSDMNPFPTHRHLSAWAGMCPGNEESAGKRRKRRITPGNRWLKRTLVQAAWAATHTKNSYLASQYRRLAGRRGKKRALVAVGHSILVILYYLLKEGRHYADLGNDFFDRLEPQRLTRYYVNRLQHLGHKVTLEPCVTV

SEQ ID NO: 195641 - protein, 316 aa, unidentified
MSEPVYVGIDVARASFEVAATGETQTLNLGNDEAGHAELCQVLVPLAPRLILLEATGGHERLLALALAAAGLRVSVINPRQARDFARCMGKLAKTDRIDAQVLRGFAAVLDAQGHEPRALLDEQQRELTALVTRRRQLVAMLVAERQRLALAHPKAKNSILAIMDAIAAQLHDVDGQLREHVRAHHADLAKLLTSVKGVGPTTASTLLAQLPELGRLNRKQITSLVGLAPMNRDSGTLRGQRHIFGGRADVRRVLYVAALVGTRFNPVLKAFYAKLLVAGKPKKVALVACMHKLLIILNAIARTKSPWSNEIARVV

SEQ ID NO: 195642 - protein, 368 aa, unidentified
MAKGMLANSEELRCNIPAVGQAAAVGIDLGDRYSHCCFLGSDGTVLSEGRVRTTPAAMANHFKDLPSTRIAIEVGAHSRWVSQLLQDWGHEVIVANPRNLPMITSSVRKSDTVDAHMLARLVRVDPQLLSPVVHRGREHYPAIAQLRARDLLVRARTRLINAVRGISKTVGVRIPPCSSPSFAAQAEPFLKEELKASLGPLLQTIAHLSKQIYCCDKEISRLGRQEYPETAQLRQVSGVGPVTALEYVLVIGDPKRFATSRDVGPYLGLTPKRDQSGDTDHQLRISKAGNKHLRSLLVQCAQYVLGRFSPDSNLKRWGTKLYSRGGKNGKKRAITAVARKLAVLLHHLWNTGEAYEALHNSSAPHLSC

SEQ ID NO: 195643 - protein, 357 aa, unidentified
MTDLQLPDIAPSGHIIVEVDTHIHVAAVVDTTAGLQSTLSVTADRDGFEKLLAWARSFGRILAFGVEGTGSYGAALTSFIRRHDTLVIEVSRPNRRLRRLNGKSDTLDAENAACAVLSRTATAIPKMTDGTAEMVRQLKVAYDTAVKARTAAMVTLKAMLVHAPDDVRVNAETKTPLALAHKFSRLRPSLLEDTADSIKHTLRSLSRRWISLDEEANALNRMIHELVQKAVPQLIKAYGISTHTAAEILIVVGDNPERIKSEAALAKLAGISPIPASSGMTSGRYRINRGGHRQLNAAIYRAAIVRMRGHEPTIAYVARRTAEGKTKRDIIRCLKRYIIREVYRLLRYGPKLAQYAT

SEQ ID NO: 195644 - protein, 389 aa, unidentified
MQDVADQSAAPTTIGADLCAIFVSLELSRSTWLATSLSPGLREKMSKHSVSAGDIAALLARFSELRRKACARTGKSFPIVVIQEAGLDGFWIHRVLLSEGIESHVVDAASTATSRRRRRAKTDRIDGETLLRALLAHKRGEPRVCSMVRAPTPEDEDRRRVCRERKVLIMERVQHVNRIKGLLFSQGASGYEPLRRDRRARLDALQTGDGRRLPPHLKAQVCRELDRLELLLEQINAVEAERDALLNAEQTKVSAPPLMLLGVHGVGPEFASVLWSEGLSRHFDNRRQVAAYAGLVPTPWQSGSVDREQGISQSGNPRLRTTMIQLAWLWLRHQPGSALTLWFKDRIERNGGRRRKTMIVALARKLLVALWKYVTAGVIIDGAVTRAVL

SEQ ID NO: 195645 - protein, 356 aa, unidentified
MSEITTVGVDLAKEVIVVCAGDAQGRTLYFKQLSFEGFAHWAAMLPACTFGMEACSTAHHWGRFLSAHGHKPKLMAAEFVAPFRKSQGAKNDRNDAQAILAAMRQPDMRFVSVKSLEQQAMLAWHRTRTGYCVERTALLNRTRGLLAEFGVWIGRSSAVLIRQLPQLCEDPRLPQHFRPILASTLEHLRRLDQCIAECDGCIHAHVQQNEAAKRLRELTGVGELTASAVLATVSDARDFKNGRQLAAWAGLVPRQNSSGGKQRLGVITKHGDSYLRGLLTQGARSTLQVALKREPLRRSRLEQWIVALHGRIGYHKTLVAIANKHLRILWAILAHGESYDPNAWRRHAPQRAPVHV

SEQ ID NO: 195646 - protein, 381 aa, unidentified
MTEVIIGVDPHKASNTIAVLDRDETILTRRRFDNTVEGMVEMLEAVGEFSDRVWAVEGANGIGRSLAQRLVAVEEVVVDVPAKLATRVRVYSTGHGTKTDQADAVAIARAAIHSRHLRRVQRDDANVALKLLVDRRREVIASRTQSVCRLHRLIRELIPGGTPRSLTAQHAYDLVTALQVDDPAGLMRVELALDHIDDIGRFDRRIDELTLKITALVKESGTTLTRIYGIGPLNAALILGEVRDVSRFPNRDHLASYTGTAPIAVSSGDVERHRLSRAGNRQLNQAIHIAAVVQVRYDTPGRAYYRRKLTQGKTKREALRCVKRRISDAIWRQLQLDRESNQQQDQTWPRWPSSRGGLPTYRSPDTLRHNGLPKKPQAASV

SEQ ID NO: 195647 - protein, 321 aa, unidentified
MSTSGRTTSYVGIDISKATLDVAVLPTGEHFVVSNDEAGIEELLGKLAEVSDALVILEASGGFERPVAAALAASGVALFVVDPRQARDFAKATGQLAKTDSRLDAFVLAHFAQAIRPAPRAIPDAEAREFQEILARRRQIIQMMTAEKNRLGASTSKAVCGRIEAHIRWLEKELSRTDRDLDETIENSPTLKENEALLRSVPGVGPVLCRTLLAELPELGSLSPRELSALVGVAPLNRDSGTLRGRRTVWGGRARVREALYMGALIASRFNPAIEEFYERLVEAGKPKKVALVACMRKLLIILNALMRERTPWRCPHALNP

SEQ ID NO: 195648 - protein, 402 aa, unidentified
MNCVGIDVSKGKSMIVVMRPFGEVVVSPFEVRHTASELSELAGLLKSLDGETRVVMESTGNYHTPVAWLLHDAGLYVSVVNAMLVHDYGNNSLRRAKTDKKDAIKLANYGLDHWLTLPRYVPEEDTRLMLKTCYRQYQQYSKVQTMLKNNLISLLDTTFPDANRLFTSPPRTDGSEKWVDFVAAFWHCECVCGLSEKAFTTRYQKWCRKHGYNFSEDKARDIYASACGHFGVIPKTDTAKLLVEQAISQLQTTSAALAALKQEMQSLAASLPEYPVVMEMFGVGPALGPQLMAEIGDVRRFHSKKALVAFAGMDAPPYQSGQMDVRSRSISKRGSASLRRTLFLVMGVLLQCAPMDEPVYQFMNKKRSEGKPYRVYMMASANKFLRIYYASVKAYLDSLEHD

SEQ ID NO: 195649 - protein, 343 aa, unidentified
MELYAGIDIHARNSYFAVIDAEGAKVFSKRISNASDQVFKTLEPYKELLRGVVVESTFNWYWLVDGLMDAGFKVHLANPSAIQKYKGLKHSDDKSDAIWLANMLRLRVLPEGYIYPREYRSVRDLLRKRMHLVKLRVSLINSLQNILVRNGSARLGAAKIKQLTKDHVTPLLDWNEDLVLSARVSKEAIDYLTGQITAIERVVAKKAQLKPEYEFLMTIPGVGIILSLTIMLETGPINRFAKVGNYASYCRKSPVSWTSNGKKKGDANKKNGNKYLAWAFSEAAELTRRFDNTARAFYDRKARKTNFMVAHSALAHKLARAAYYIMRDQVPFEKEKLFALSLA

SEQ ID NO: 195650 - protein, 427 aa, unidentified
MTDQQKFKSYCSWIAIDIAKDFNVVMLETVDGQTRRFRMANSGKDHDRLIEVLHGLPQPCHIGFEATGNYHRPLAFRLLTEGFDVSLISSLASSRYREAIFNSWDKNDPKDAGILLELLKRGIVQIYTDPIKSAFHDIQELSKTYYHITLSRTRLQHSILTHYLPLYFPEMGKFWNSTRSEWWINFLLHFPTPTSVTQYTEEEFCSLASPIIGRKVNKQAKLQELYATAQHSIGLPVAPESLACQTFKLQLQRYQELTSQRKRLEQQAESILSENKDYRILKSIPGIGPIIALTILAEGGDLRRFGHHRQFLKYCGLDLAKNQSGNFRGQEKLSKRGNARLRLALFMATISAVRQTENCFRDKFHRYTKAAPNDADCKRKARTAVMAKMARVIHALVKSSTPYQSYFEVSPSGSIPHCRAVGANRTP

SEQ ID NO: 195651 - protein, 421 aa, unidentified
MPGKEEKETSDKSRRQLEGLPVIRQSVAGIDLGSERHWVCAPTLDRSAREVANFGATTAELIRLAEWLKTRQVESVAMESTGVYWIAPHEVLEAQGLQVLLVDTRQLARVPGRDKKSDPTDCEWIQRLHSCGLLRGSFRPAEAICMLRTLVRDKANLVAERSDWLRRMQKSLDQMNVRVHRAVSDIDGATGMAILRAIANGERDAQKLAKFRDPRCNKTEQEIAEQLRGHWREDHVFSLQQALKMYDAVEERIAAYEKEILRKLGEMEHDGQQGQSAPPLNNTNKAKGIKRRGQESMRQALYRMSGVDITQIDAIAVQTVEVLLSEYGPDLSRFPTEKQFVAHLTLAPRVATSGGKPVKKKKRNSASTRVAAALRMAALSLRHSQTALGSYYRRIAQRRGTDIAVFAAARKLATLIYRLLR

SEQ ID NO: 195652 - protein, 422 aa, unidentified
MLEEAHDSEELIERVAALDIGKAELVCCARVPSPDRPGKRLQEVTTYQTMTRSLLVLADRLGELGVARVVMEATSDYWKPVFYLLEAQGFEVWLVNAKDVKHLPGRPKTDRLDAVWLAKVAERQMLRPSFVPPPAIRRLRDLTRYRADLVVGRTAEKQRVEKLLEDAQIKLSVVASDIFGVSGRAMLAALVAGERDPKVLARMARTRLRAKTARLEEAFCGRFSDHHAFLLERMLSRIDQASADIAAVEAKTEEAIAPFAQAVDQLDEICGVGRAAAQVIIAEIGTDMGRFPTPGHLVSWARFAPGVKESAGKRKGKATTGHGNPYLARVLGEAAVAAGKTNTFLGERYRRIARRRGAKRAIVAVGRSILIIIWHLLCDPTARFHDLGPGFYDTRIDAERKKRNHIRQLEALGYKVTLQPAA

SEQ ID NO: 195653 - protein, 427 aa, unidentified
MTRFATDEFAAFIGLDWADTKHDICLQVAGSDKREFQVLEHRPEVIDTWATDLLQRFQDRPIAIALELNKGPIVEALRKYDGLGLFHINPMMLARYREAFTPSRAKDDPTDAELQLDLLLRHRDKLKPLAPQSPEMRALSQLVEHRRRLVADRVRITNRLTSALKTYFPQVLEWFPNKETQLFCDFLSQWPTLKSAQLARRSTLARFFRQHHVHGEQRINERLEAMKSATALTSDEGIIRPQALLVQALVSQLRVTLEAIGSFDQAIAERAQQHPDFALFEALPGAGAALAPRLLVAFGEQRERYGSAAEVQTYAGIAPVMERSGKRSWVHWRCQCPKFLRQTFVEWAAESMQFSFWARAYYQQQRDKGASHQAAVRSLAFKWIRIVFRCWQTGTPYNESTYLAALQRQGSSLIPNLAKSSKKGENT

SEQ ID NO: 195654 - protein, 396 aa, unidentified
MVYCGIDTHKNTHTAKVIDCWTKPLGEITFENRPRKFDQFINDVKKISGDLTIIFGLEDTRGYGRNLAIYLTGHKFIVKHVNPAYTNSARLSAPTVFKDDSYDAFCIAKTLRDMTDTLPDANHQDIFWTIRQLIKRRDSLARSAKMLQNQLHMQLMCSYPSYRKFFTLIDCITALYFWEHYPSPEHLEGITAEQLGVELRKIGGNSCSTRKAQNILTLIEDDGDIQRGYQSERDFIVKSIVREIRYKSEEVKEVDKKLQIILPQTGYKLESMPGINLNTASHIISEIGDINRFPNADKLARFAGIAPVLFSSAGKGKEQRSKQGNRVLNAILYFLAVQLVSARGGTPRNKQCYEYFHRKVSEGKKKSQAITCIQRRLISIIYGMMKNKTEYKILKD

SEQ ID NO: 195655 - protein, 390 aa, unidentified
MTGRRLGKARLPEGIAGMTRLHAMIGEHVGEDDDEPVQVIVGIETERGPWVQALIAAGYLVYAINPLQVARYRERHSVSGAKSDPGDAHTLADMVRTDRHQLRPVAGDSDLAEAVKVITRAHKTLIWEKTRHTLRLRRALLDFFPAALVAYGDLAASDTLQLLDAAPDPVAAAGLDGERIAAALRGAHRRGIPAKVEAIQAALRAEHLRQPPVVAGAYAATVRTQVAILATLNTQIATMQGQVEAHFGRHPDAEIYRSQPGLGLLLGARVLAEFGDDKHRYAHAKARKNYAGTSPITRASGKKKIVLARYVHNDRLIDALGLQAFSALGASPGARAYYDQLRARGAGHRAALRQLGNRLVGILHGCLKTGSTYDENTAWAHHRKDLEPAT

SEQ ID NO: 195656 - protein, 420 aa, unidentified
MPNQPSDFVAVIGLDWADKKHDLCLLETGQTTPEFSILEHDPLAIDAWAAKLKKRFGGRPIAVCVELARGPIVSALLEYDFFVIFPINPAMLAKYRRAFSPSRAKDDPKDAFLALDLFRHHFDRLSPLRRERPAMRALQCLVQGRRSLVEDRCRLINRVTYALKEYFPQVIRWFRDKHTEVFIDFVTRWPTLEAAKRAHRDTLVDFFHDHNVRGRKTAERRVEAIKAARSLTSDVAVIETNRLMAESLLTQMGVLSKAISRFDAEIAARVAELPDYKIFAALPGAGSALAPRLLAAFGENRDRFPDAASVQKCVGIAPVVERSGNKSWTHWRFIGPTFVRQTFVEWVGESVPHSFWAKAFYESRQAKGVPHHVILRALAFKWIRIIWRCWYDRQPYDEARYLLALQKHHSPIITNAAQLS

SEQ ID NO: 195657 - protein, 353 aa, unidentified
MEYIGMDFHKQYTIATRIRENGSQEWCRLANTPASFSEYFAGSQSTTSVVFESGRNWPMLYELLEQEADHITMAHPLKVKAIASARIKTDRIDSKILAELLAADLIPESHLRNESTRTELKVLRQRAFLTKQRTMVRNRLHVLIDEQPYELRKSRPDAQRLWSKAGMAWLTHLQLPNPVQHDLLQAMLRVEANLRQEIETSNRLINELFLNNTHAQLLETIPGLGKFGALLVSNEIDGIERFSSAKKLASYAGIVPSTYASGGKCYHGRITKTGSKWLRWILLEAVQPAVRAHSEIAAYYESHKRRVGVKKARVATARYLLTIAYYCLRDQREFMPVKPRYSVSPSYFTSGTR

SEQ ID NO: 195658 - protein, 350 aa, unidentified
MQNVQSIEQRIEKLIVGIDVSKKDLDVAYWQNHPQSKSIFLGKFPNSADGFGTIVKEVEKKQQETNTAKVFIVLEPTGGYEQKFAHFAHELGWVVSLPNPKQVRDWIKGTGRRAKTDRIDALMLAYYGAMQNPYTWKPVSPEVAELESMLNRLEDLKGMLAQEKNRLEAQQNQVNCHHIASENLQTSIAHLEQQITALEKAIKEHMEQHPHLKEQCKNLKTVSGVGAVLGPRILVAMHRFGELTEFKGTSKAITAFFGLDPKPYESGTSVRKRAGISRQGNSEVRRFLYMGALGGVGGNNPLRSFYKSLVGRGKPKKLALVAAARKILIWCWAVFRQGKPFDATKCGSEC

SEQ ID NO: 195659 - protein, 335 aa, unidentified
MQIKHFIGIDVSKDTLDLSVVVEGNNLQHYCIKNSTKEIKSTVNRIMKTFGAVVDDTVFCMEHTGLYNRPIVKWLHNNQGKMWLESGVHIRRTLGLVRGKNDKIDSSRIAMFAYTNRHQIKLWTPPREVIEGIAALLSQRARLVKAKKQLTTANKEQKMFLDKDIMHSLNKYTNRTTAVIDKQVEAIENEIIGLISADEKLNQMYQIITSINGIGLVTASYILITTNEFINISDPKKFACYSGVVPFEHTSGSSVRGRNRVSHIANKSMKALLHLSAISTLNTPGEIQDYYNRKIAEGKNKMSIINAIRNKLILRIFACIKQNRVYEKNYCYKLA

SEQ ID NO: 195660 - protein, 342 aa, unidentified
MQITTIGLDIAKNVFQVHGIDAAEKVIVRKRLRRSQVLTFFKALLPCLIGMEACATAHYWARELTKLGHKVRLMPAKDVKAYVKRNKNDAADAEAICEAVRRPTMRFVQVKSAEQQGQLMQHRTRDLVMRQRTQVINALRAHLAELGIVAAKGDKGVKELLTILADEKDTRLPIDARASVIVLAAQLQALQTLIGSIEKRIKAQHRSNQASKRLETIPGIGVIGATAIAATVADPTVFRSGRDFAAWIGLVPRQNSTGGKQKLGPISKQGDRYMRRILVVGAHSVLRRAKENPDKYPWLTQLLARRPFKVVAVALANKMARMAWALLAHGGTYRAPKPAVAA

SEQ ID NO: 195661 - protein, 347 aa, unidentified
MNITQVGIDLAKVVFQVHGIDARGKVGLRKQLRRSQVIAFFAQLPSCLIGMEACAGAHFWARKLTELGHTVKLIAPQFVKPYVKSNKNDAADAEAICEAVGRPNMRFVPIKNTTQQALLGLHRARQGFVIARTAQANQIRGLLAELGLVMPVGIRSIGRKLPEILEDAENGLSGMSRALFARLFEHFRALDRQVDELEREINAWHREDTASQRLQTIPGIGPLTASALVASVGDAKVFKNGRQFAAWLGLVPRQNSSGGKTNLLSISKRGDTYLRTLLIHGARSVLLHLKRRPDLVEGWLARVAARRNSNIAAVALANKNARTVWALLAHGREYQTGYRSANAIAAA

SEQ ID NO: 195662 - protein, 357 aa, unidentified
MTHSTVTKATPRFFGLDVGDRVTHLCCVDGRRAVVERLRFSTTPDGVRRVFADRRPARIVLEVGSQSPWMSDQLRSLGHEVTVADARRVAELTRAGRKTDRRDAETLARLLQGMPELLGALHHRGREAQVDLAAIRARDLLVRTRTSLVQHVRGTLKAFGLRARSCSAQAFHKKARESVPEDLKPALTPLLDQLAELERRIRHFDREIERIAKERYPAAARLRQVCGVGPLTSLAFVLSVDDPNRFKKSRKVGSWVGLCPKVQASGDRDPQLSISKAGCTYLRRLLVQSAHYILGPFGKDGDLRRFGLRLCERGGRAAKRRAAVAVARKLAVLLHRLWISGQPYEPLRNSLRTAVAN

SEQ ID NO: 195663 - protein, 417 aa, unidentified
MNPQLSQFTAIIGIDWADTKHDICVQANGADTREFSRILHKVDKIHEWAQSMYQRYGGPMAVAIELDKGPIVSALQKYNFFVIYPINPTTLAKYREAFNPSGAKDDPTDAALALDILLSHPDHFAPLNPQSVEMRTLMTLVEQRRRLMNDRIRITNRLRNALKQYYPQALDWFDRIDTPLFCDFIKQWPTLAQVKRARRTTLETFFRDHKMYRKSVLERRVEAIKSATHLTQDKAVIVPYRLQSLTLINQLEVALNSLRTYDKEITQLASQHPDFQLFNSLPGAGPLLAPRLLVAFGEQRDRFTSAAQVQKYSGIAPVTERSGNKSWVHWRWQCPTFLRQTFVEWAAQTINKSYWAGLFYHQQRAKGCTHQATLRALAFKWIRILYRCWITQTPYDEAKYLKVLRDRGSPLLNAANT

SEQ ID NO: 195664 - protein, 449 aa, unidentified
MARQHARRQRSAQPFHPNAAGIDCGATEHFVAVPEDRDPQPVRSFHTFTADLHALADWLQQCGIDTVAMESTGVYWIPLFEILEARGLQVYLVDPGKITNAPGRKTDVVDCQWIQQLHSIGLLSASFRPDDDICILRSYMRQRDMLVRYAAQHVQHMQKALMEMNVQLHHVIADITGLTGTRIIEAILGGERVPNTLAKLRDGHCKQDEATIARALQGNWRDDHLFALQQAYDLYIFYRQQMAQLDTRLEAYLHTFEDHTDGQPLAPWPRKRPPKPNEPPFDTTNLLYRMTGVDLTTIDGIGGHLALGIIAEIGTDMSSWASEKHFASWLCLSPGNHKSGGKQKRSKTGTRPSANRANQLFRLAAMSLSRSDSALGAFYRRLRGRLGAPKAITATAHKLAKIVYNMLKHGQAYVDRGAQYYDQQYRQRAVKNLRRRAEALGFTLRPQAL

SEQ ID NO: 195665 - protein, 344 aa, unidentified
MTYYVGLDVSLRSVNICVIGDDGEIVQEAKVDSEPEDIVAKLRSLKPEIQALGLEAGTLTQYLTYGLQHAGYEVVCMEARQVAASLAAMRNKTDKNDARGIAQILRSGWYNRVHVKIIESHHIRALLSARKAVLRKCIDLENEVRGLFKVFGIKLPSPLKHGAFDGAVRERIEADPALAHALLPLLDARLVLYRTFLEMDGRARKMAAKIVVCRRLMTAPGIGAISALTYKAAVDDPKRFKRSRTVGAHFGLTPRRFQSGEMDNVGRISKAGDPDVRAVLYAAANAMLTRTTGWSAVKAWGMDLMKTKGRRKAVVAVSRKLAVILHRMWIDGNDFQWATEGATS

SEQ ID NO: 195666 - protein, 321 aa, unidentified
MQKDLLYCAIDVSKDKLDIDAAALALPAQLGNDHAGFRQLIKAAKKYPGPVQFVFEATGPYHLGLALALWEAKIALSVLNPARVRFYAKAQGKAKTDPLDKHVIGDFARSFRPQPTPAPDPVRRELTELLQRRDGLISSRAAEQNRLGQCRHKIIKGQIRRMMAQSIEQIDQIDGLMKKLVHSSQELKDKVKALCQVKGVGHLTAVTLLITLPELGTLGRNRISRLVGLAPLNDDSGLQKNKRFIQGGRKRPRCALYMPALSASRHNPVLKDFYERLRKAGKLKKVALTAVMRKLLICLNALLRKLANQHASAEGLCLAKP

SEQ ID NO: 195667 - protein, 389 aa, unidentified
MIYVGIDVAAEKHACCILAESGKVHKQFTFSNDISGFEKLHKALLTPSETKIGLESTGVYGNNLAEFLRRNGYETHIFNPLLVKKSIQATTLRKTKTDKSDAKHIAQYTKEHSQPNLEPSYHISELKSLSRGRFSLVRERSKVKTQAKGLLVQLFPEFSQAFSDVFGAAANAVLRQLPSARMIAQCPVDVLTDLLRTASHGRLGKVKAELLIDLAEHSVGIQSMALELQMQMLLQQIDLFTIQINRYEAAIKSEMETIQSPITTIPGIGCVLGAAILSEIGDIRRFATPAKLQAYAGVDPSVGESGSSVSTPGRMVKHGSHYLRWALCQAARCVSLYDPIFAAYMKAKRDEGKHYCVACTHVAKKLTRVIYSILKNNTAYSLTYSQIGA

SEQ ID NO: 195668 - protein, 354 aa, unidentified
MITIGVDAHKHMHMAVALDERGRVAGHWQGENSVAGWDEATQWARALGDERRWGIEGGGGYGRGLAQHLVDGGEVVYDINPRLTATERRRSRRTDKSDACDAQAIAQVVQREDAKLPRVAAEDETVALDLLTAEREDAQAEATRLRNRLHHLLLQLDPQYHLHLPALTSVAGVQAAAGYTTTSSSLVQQERAAVVRRLAGRLRLAMEQVAELGQQRIEALAQARYAPLTRLCGVSLLTAGSLAGILGPGRRFASEAQLAAYAGVAPLETSSAGRVRHRLNRGGNRRLNAIVYRIALVQARWSPEAKAYLARRVAEGKTKREAFRALKRYLIRAIWRLWGACLSPAATETAHRAA

SEQ ID NO: 195669 - protein, 354 aa, unidentified
MLAELVGHVVGVDTHKDTHTAAVVASATGGVAGTETAHANTAGYEALVEFADLHSDATDRAWAIEGTGSYGAGLAHFLAARGEWVLEVDRPTRPAQRDGAKSDALDAVRAAREVLGRTKLAQPRARGEREALRCLLVTREGAVRDRTRATNQLKAMIVSAPEELRAKLRGLNGTALIGACRRLRRPTGRPTDHVATVAALRRLAARIEHLDNEIAEHDTDIKALTKAVCPQLLDELGVGPLSAAQAYISWSHPGRCRSEAAYANLAGVAPIEASSGQVVRHRLNRGGDRHLNRALHMVIITRYRCDPITKAYIAGRLADGKSHREARRCLKRYVARHLYRLLEAGPTTTQERTP

SEQ ID NO: 195670 - protein, 326 aa, unidentified
MTSLPNPTSDARLTVGIDVAKATLEVALSGRAATRAFANDEAGYAALLAELSGLEVGLVLFEATGGFELACATALQLAGLAVAVVNPRQARDFARAMGLLAKTDRIDAAVLADMARTLLARGDLAKWVKPLPDAQQLELQGLVTRRRQLMAMRLAEDHRMKMPGVRQRRSLNTILKALDREIARIDNDLQAFVSANHAALAALLDSVKGVGRATISTLLAEVPELGKLSGREVSALVGVAPINRDSGTLRGKRAIFGGRPAVRRVLFMAALVASRHNLVIKAFYQRLLAAGKPKKVALVACMRKLLTILNAMVRSGKPWNQALHLG

SEQ ID NO: 195671 - protein, 348 aa, unidentified
MIVLGADMHKGSHSLAAVAGETGELLDDKLVRVGERGFAAALDWARALADERVWALEDCRHVSGAFERFLLVRGERVVRVATRLMAGERRGGRERGKSDLIDALAVARAALREGLERLPLAELAGVELDIRLLVDHRERLVRMRSALNNDLLWHLHDLWPEQTLPGSALLSNKWATRMGRRLARHEQGARVRIARDELRQLRELSRTIDALEAEISELVAKVAPQLLAEPGFGPLTAGKLIGEIAGVERFSSDAKLARAGGIAPIPVSSGKTNRHRLDRGGNRQINTAIHRVAVTRARCHPETRAYIERKRSEGKTNRDAIRCLKRHLARRVWLLLQPQDLATRPSTI

SEQ ID NO: 195672 - protein, 410 aa, unidentified
MDTLYPRCAGIDVHKANVVVCVRCADRPGKAFEEIRTFSTMTADLLALAGWLASHGVTHVAMESTGVYWKPVFHILEGGVQVILVNAEHIKQVPGRKTDVKDCQWIAQLLQHGLLKASFVPPQPTRELRDLTRQRTQLIQERSAAANRIQKVLEDANIKLASVATDVLGVSGRDMLEALIAGETDPEQLAQRARRRLRAKLPELRQALHGRVTEHHRFLLRMHLDHVTHLEALISRLGSRIEEALAPFAEARQRLETIPGVSQRVAETVLAEIGTNMDQFPSAGHLASWAGMCSGNNESAGKRRSGRTTKGNRWLKRILVQAAWAASHTKGTYLAAQYRRFAKRRGRKRALVAVGHTLLVIMYHVLKRRTTYAELGPDFLDRLEPERLTRQLVKRLEALGHKVTLEKDAA

SEQ ID NO: 195673 - protein, 415 aa, unidentified
MSLKIVYKICCGIDVHKTFVVACIASTNDKGITSYESHRFSTYTSGLKTLLQWLLKRNCKDVCMESTGKYWIPVYNILENDCSIVLAHPKYVKAIRGKKTDKKDAKWIADLFKHDLVAGSFMPPADIRQLRDLMRYRFKLTCFQSSEKNRLQNCLTVSNIQLGNVVSDTFGKSAQAILDKLLENPADTSFDLEPLVYKSLKKKLPQLRDAIDGYITPEQAGKLKVIKSHYENLESRKAELEELILALAAPYQQELAILQTAPGIRSDFTAIGIISEIGTNMEAFPSAKHLCSWAGLTPTNNESAGKKKSVRVSKAGCYIKPLLVQCANAVVTSKKHPEIRNRYLRLKKRRGHKKAIIAIARMLLTALYHMLKNGENYNAELYRKSYLPPVDREITVEQAVIIARNQGYKIKSATA

SEQ ID NO: 195674 - protein, 381 aa, unidentified
MTNATHGNQTSQVTVYAAIELSKKSWVISIARPDRDQPSIHRITGGNFSELVGRLRTAAKNFGRILVCYEAGYDGFWLGRLLTKVDIECRVLDLASLQVNRRARRVKTDRIDALALLRALIAIDRGDRHVCAVVRVPTLEEEDARRSHRERQRLVRERTAHINRIKGLLFGQGIRGVEPKLRLSRIDFAALTTSEGHPIPDRLRRELEREYVRLNLVEQQLRTVEKERDTADRQDPAVDRKRQMLCALRGIGQASAAILAREVFVRSFANRRQLGSYLGLTPSAYDSGSTSRCQGISKAGNSWGRRVLIEIAWLWQKYQSGSSLSRWYEARAAGQSPRIRRIMLVALARKLAVALWRYVETGLIPDGAVMSDAIVPRATAA

SEQ ID NO: 195675 - protein, 420 aa, unidentified
MKAYNVDNFAALIGIDWADKKHDICEHPTHTEKHHYSIIQSKPEALHDWAMSLKKRYPNQQIAVACELKKGPLIYALAKYNHLTLFTINPSTVAKYRKAFTPSGAKDDPSDAFIQVEILTLHMKKLIVIEPESAAMRSLTQLVEYRRNLVQDSVDLSNKITATLKNYYPQALEWFKEKDTFIFCDFISKWPSLTKVKRAKRKTLLDFFNNHNSHYTHVNDARLLSIKTAMPLTEDAGVIEPNQMLVVVLIAQHRVLLKGIETLDKAIKLGYKSQDDKVIFDSFPGAGPQLAPRLLVAFGSNRDRYEDASELQKYAGIAPVIERSGKKMWTHWRYSCPTFLRQTFVEWAGFSIRYSFWAKAYYDQQKSKGKPHNSIIRSLAFKWIRIIFRCWKTSTPYDESKYLEALKRRGSPLLKFAINS

SEQ ID NO: 195676 - protein, 367 aa, unidentified
MKKNSTTTQRGKRARAGTEATVIGMDLGDKTSRYCELDQDGKEREEGSVATTKQALTQRFAGKKRCRIALEVGTHSPWVSRLLKNLGHEVIVANARQVRLIAHSSRKNDRLDARTLARLARADPRLLSPIQHRGEQAQQHLAMIRVRAALVEARTKLVNAARGFSKAQGERLPACDAAAIGVKEMAELPAGLKAVLRPLLEQVESLTGQIKKADVELEQIARTQYPETALLRQVKGVGVLIALTFVLTLDDAERFQKSRDAGCYVGLRPRQRESGASQPQLRITKEGDRYLRTLLVQGAHHILGWRGPDTDLRRWGLKLASRGGKNGKKRAIVAVARKLAVLLHHLWVTGEVYEPLRNSGAATTQAA

SEQ ID NO: 195677 - protein, 386 aa, unidentified
MNADKSEPLTAIHTELGAIFVSLELSRSSWLITSLSPGGGEKMSKHSVPGGDFAGLMERFAQLQEKARLRTGQSFRIIVVQEAGLDGFWIHRALQNEGIESHVVEAASIATSRRRRRAKTDKIDGETLVRALLAYKRGEPRVCAMVKAPTPGEEDRRQLCRERKALTAERVRHVNRIKGLLFSQGISGYQPLRRDRRQRLEELQTGDGRAFPQHLKALVNRELDRLELLLKQIKTVEAARDALLAVEQTAKPGPAAMLLDIKGIGPEFAAILWSEGLFRHFENRRQIAAYAGLAPTPWQSGAVDREQGVSKAGNPRLRTTLIQLAWLWLRNQPRSALSVWFHERVSRNGGRLRKTTIVALARKLLVALWKYVTAGVVIEGVTMKVA

SEQ ID NO: 195678 - protein, 346 aa, unidentified
MEHYIGLDVSLKLTSICIVDGKGKIVREGTVASNPEAIAAFVKLHAPHVARIGLETGATSTWLWTELNKMGLPVICIDARHAKAALKMQINKSDRNDAVGIARIMQCGWYKEVRVKDLDSHAIKALLVSRALLVKIKRDLENQIRGLLKNLGLVIGRAKMNVFAVRAAELIEDRPELAAAVVPLLKAREAIERQIEDFDRKVMRLARNDPQVRRFMTTPGVGVITALCFLATVDDPTRFKRSRSVGAYVGLTTRRYASGEIDWTGRISKCGDKMMRSYLYEAANVLLTRVAKWSALKAWGVRLAKRSGLRKAKVAVARKLAVILHRMWIDGTEFNWSSKEVAAQPV

SEQ ID NO: 195679 - protein, 386 aa, unidentified
MIIIGVDPHKRMHVASAIDPATNLQVTALQVEASLAGYRRLLRWAGGFGERSWAVENAHGLGRHLAQWLLARGEAVEDVASTATARVRELSRGGRRKNDVIDAAAAASVAALRGDANPVLAEDITTVLGLLDERRSNVTTQRTRLVNQLHAVFRDLVPGGAPKGLTAAAASRLLAGIRPAGPVEAARKQLARDLVAEIRDADRRLKLLKAQIAETVAETGSHLIEVDGVGPIVSGRLLARTHKMSRFPTAAAFASYAGVAPVEVSSADRVRHRLSRGGDRQLNLALHVVAVNQIRMPGSTGRAYYDTKIAAGKTEKEARRCLKRRLADHIWRLMIRDEGGEAAGPGGHQGTTLQSSAAGSTPTTSSSDKSLPEPADSDSTTRQPAA

SEQ ID NO: 195680 - protein, 357 aa, unidentified
MGTYYIGADVHSNSTELAIEKKGKIVARYNVPTSIPAIVNVLDSLQGKKYMAVEEGPMSGWLYRNLSSKIEQFISSDPRRNKLIASDGDKDDKIDAAKLASLLRGGFLRAVYHSDDDSRAELKHWVSLYHDRVRDAVRSINKIRARCRMHGVKISRAVLRDPASRINWLLKTRHYALANQLKMLWIGYDATSQQVKFAKRQLSILSKKYDIIQQWSLLPGIGLVRATTIFAYLDTPWRFKKKNKLWKYCGVGLQRTASGTDKKGRPKPARLKLPWAVNRTLKNAVLGAALSAINQKDNVFKDYYERMLKDGIITSNARHSVARKMLTVMWAMWKTNSPFDENSVFLSKLNRTIISLS

SEQ ID NO: 195681 - protein, 372 aa, unidentified
MKEHIDYLSTLFVGIDIASRIHVISALDFNQDFFIKMKPFENTKEGAGIVEKMIADVLADNHQFKYVVIGMESTGFYGVHLANYLSTSELLAPFSVRVYCLNPKEVKNYKKSFNDIGKNDGIDSFVIADFARVGRIAIKPWRGSQYLALQRLTRHRMHITECITREKTYMLNNIYLKFSEYALLRNGEHPFSNKYGATAEAILTEFTTNEDIVNSSIEELVEFINSKSKGRIAYPEETAKIVQAAARNSYRLDKCLYEPLTISIASSFNCISSFEKELKAIDKAILQTVQGLNPEEYTVLNSIPGIGKVYSAGILAEIGSIKAFQNANQLAKYCGIVWNDNDSGDFESEDSRMSKAGNRYLRYYIIEATGSE

SEQ ID NO: 195682 - protein, 323 aa, unidentified
MSKNTKYFGIDISKDVFDVMDQNSNYYQFSNNFKGFKQFFKLLDVNSHCVMESTGYYHLQLAYFLLENNVAVSIENPLSVKRFIQMKLSKIKTDKSDAKMICLYAQKVDLKLWLGATKSQRECLQITRTLSIYIKQSTALKNKIHGEKVLGNPSKIVVRSLKRSLKNTKKEVTLLEGKLLELVQKDNQDLLTRLESIPGIGRKTALMLIVLADGFNRFEKASQLCSYAGLTPIIRQSGSSVNARPRISKIGNQKLRNLLFMCSFTASVRNKSCREIYQRITNKGKSKKLALMAVCNKLLKQSFAIAKSGLIYDESYRSVLVKK

SEQ ID NO: 195683 - protein, 431 aa, unidentified
MKGGDLVKNNILSTLYVGIDVSAKTNVLCALDFQGNKLLKLKALNNQPGAETILNSIIECLDSNDLKYVVIALESTSFYSTHIANFLASNEILLAYKPLIYCLNPKTIANYRKTFVDMDKTDPLDAYVIADFARCGKITSKPWRGSQFLALQRLTRHRLHLVEGITREKTYMVSNIYLKFSELAVLDKQERPFSNTYGATSLAILTEYLSLDDITYSSIEDLVAFIREKGKNRFNNPEMTARVLQKAARDSYRLDKVLYEPLNVAIASSFNVVRALEDEIKTVDKAIERAIKGINHAEYQSLTSIPGVGPVLASGILSEIGTITSFDSHNALAKYAGLTWRVNQSGNYSSDDTRMTKTGNKYLRYYLIEAANSVKNHVPEYKEYYYKKYNEVTTYQHKRALALTSRKFVRLVFGLLTKNQIYSNDKVGEIN

SEQ ID NO: 195684 - protein, 348 aa, unidentified
MNTPDFFVGIDIASLTFTAAVGQLQDGSWQIVVKPKEFPNNFDSFAQFLHWLQQHHLTPHNCVLCMEASGVYNEVLAHFLVANHYRLAIQPPLQVKKAFKPVGHKTDPVDSGQISEYAYRYFDQLTFWQPRDETLEQIKVLLATREQFSGQVTAHKNALQALKRKQVRTPLAEKAHLEAIRQLQAHIQALEQEIRRLIDQDPDFKQRVKLLLSIPGVGLLLAAHLLVLFESASQPPSAKQLAAYIGICPYENKSGTSVYSPPTSRHYGPPMLRKLLRLAALSLRQHNPEFRHYYERKVAEGKPKAVALNNISNKLLKIICAISRSATPFIPSYRSVHPGQLKSALTKS

SEQ ID NO: 195685 - protein, 365 aa, unidentified
MTKSTWVGLDVHQDSITAAILRDDSNQPEVVRLSGDLMKIRRLFRRLSAEGPVHSCYEASGAGFVLHRVLADDGFHCEVIAPSLIPKKPGDRRKTDRLDAVNLAQLYRGGHLTPVHVPSSEQVELRQLLRLRGRYQQQAKSTKLRITSVLRTHGHRFTDGRSLWTKKHHVWLKQMRRSLTGPLQMVIAAELEHHEYLEMQRTSFDAEIERVAQSPTYRRSVEALCCFRGIQTLTAMTILCEVGDIRRFDSPRRLAAYLGLVPSERSSGDVQRRGPITKAGNSHARRLLVEAAWNNRHRAESTLILNRRRQGQPSEIVAIAVKAQHRLSKRFHHLHQKKHVNVAVTAVAREMCGFIWAALRTLPQN

SEQ ID NO: 195686 - protein, 452 aa, unidentified
MKKRKRKPSKSLPKVYPNSAGIDIGAQFHVVAIPPELDAEPIRTFKSFTGDLYRLVDWLKEKEITTVAMESTGIYWIPLYEMLQACEIEVFLVNARDTKQVPGRKSDVNDAEWLQQLHQYGLLRSSFLPNQEIARLRAYMRQRERLVEYAAAHIQHMQKALHQMNLQLNHVVSDITGITGMRIIRGILGGIHDPRILATYRDVRCKASMETIEKALEGHYHPEHLFALGQAVGLYDTYQKCVVDCDQEIANVLESLRLPEQPTDPLPKPRHRTRQPNELNFDVREALYAMIGVDLTQIHGFGPYLALKMVSECGTDMSKWPTAKHFTSWLCLSPGNKISGGKLLSSATRRTTNRASALLRLSAVNVGKTDTAMGAFYRRLAMRIGKNKAVTATARKIAVMFYNVLRFGMDYQDPGADIYEERYRERVISNLTRRAHKFGFELMAVTEPEGVS

SEQ ID NO: 195687 - protein, 343 aa, unidentified
MKHIGMDVHSTTTDITVLNSNGKKIFHQKIPTRREELVASIKKIPGKKQVVVEESSLSDWITRLLEPYATKIIRCQPQYNRLISESEKKCDEEDSYSLAELSYLDKLKGVHHPTQVYRDLREGVRAYWYSSRQITRAKNRLKAFLLFNGIEKQGKQAYSQRQRSCMLDKIKNSSANMKLATIRYWELDAARQSQLEHLRLLRELAKPVQDKVKILKTIPGVGEIGAHTLVAYLEDGRRIPNKRKLWQYCGIGIRRHESSNKGIEGASRQGNRCLKNALMIAVAHILTGCNGDNALWRIWCSQQAARIDPRRTRRNLARKIAVIAQHLLRSKEPYDDERIIMAH

SEQ ID NO: 195688 - protein, 339 aa, unidentified
MMMCYAGIDLHATNSVLVVIDDADRVLYQKRLRNDLPLILAALEPYRTTAQGVVVESTYNWYWLVDGLMNAGYPVHLAHAPALPQYSGLKHADDQHDAQWLAHLLRLGLLPTGYIYPKAERAVRDLLRKRSQLVRHKTMVVLSLQSLLTRVTGTRLSLPRLRQLTPEGVQALVPFPEQVQAVMSSLAVLACLEQEVHTIEDRVREAGRTLSGYALLQTVPGIGPILAGTILLEAGDMRRFATVGHFASYCRCVGSEHLSNGTRKGAGNTKNGNKYLSWAFIEAAHFAIRYETVIRTYYQRKQARTHPLVALKAVAHKLARACYHMLREQVPFNLHRAFG

SEQ ID NO: 195689 - protein, 274 aa, unidentified
MFQAHGADAAGQVLFRKRITRGKLLGFLAAQAPCVVAMEACAGAHYWAREISKLGHSVRLMAPAYVKPFVKRQKNDAADAEAVCEAVQRPSMRFVPVKTEEQQANAIVFRARDLLVRQRTQCVNALRGHLMEYGYVFPKGITHVATLVALIEDQSSLPDSARVILKLLVDTFTALEAQITVLDAEINRRSKTDPAACRLMTIPGVGPIVSTAITALAPAAHSFAASRDFAAWLGLTPRQRSTGGKQKLGAVTKRGETNNPATPDYWSKCRGSAG

SEQ ID NO: 195690 - protein, 344 aa, unidentified
MNVTTVGLDLAKNVFQVHGIDSTGGVIVRRSLRRRQMMPFFGKLEPCLIGVEACATSHFWARELRALGHEVKLMAPAYVKPYVKRGKTDAGDAEAICEAVTRPTMRFVAIKTAEQQSVVALHRTRGLLVGQRTQLVNMIRAQLAELGIVLAKGIHHALRLVDQLVEGVVPDIPALACKIIIALAEQIRELQARIAMLEGEIKAWFRGNELAKRLETIPGIGFITASALAASVTDPHRFTSARQFAASLGLTPKADCSGGREGQGRISKMGDRYLRRLLVSGMTSQLQSARRKPDAYPWVAGLLASKPNKLVAVAMANKAARIAWVVMTRGEVYRAHRPATEGTA

SEQ ID NO: 195691 - protein, 349 aa, unidentified
MNAVSTLGIDLAKNTFSVHGVDADGVVTVRRTVSRAKLAELIARLPACLIGMEACSGAHEWARRFAAAGHTVKLMAPKFVAPYRKSGKNDGNDAEAICEAVCRPNMRFVPIKSVQQQADLSLHRVRQGFVEERTATFNRVRGLIAEFGYVLPNGVEQLRRQVLDLIDRLPARVAHCVRDLLEHAERLRSKALEYEREIRLTVRDNELARRAHTRPGIGPITASALVATVGNGHDFKNGRQFSAWLGLVPCQYSTGGKTRLGHITKRGDPYLRTLLVMGARSVLQRAYRESDPLSRWALALQQRRGYHRACVAIAAKNARVAWEWPVRVTQSVLRCSHDSPQEPEIRKSC

SEQ ID NO: 195692 - protein, 353 aa, unidentified
MNQELRRVIGGVDSHADNHQAAALDERGRLLGSKSFAVSAAGYRELQAWLASFGLIDRVGVESTGSYAAGLTRHLLAEGVRVLEVNQPHAHSRRRRGKTDAIDAELAARHALSLASAVTPKQSSGIVESIRQLRVARDSAVKSRSAAIVQLGDLVRTAPSELREQLAIRSTVKGKAALCRRLRPDTDRLGEPANGAKLALRSLAGRIAGLAEEIAELDRQLAPLVATAAPRTTALLGISTGHAGQLLITAGQNIDRLHSEAAFAALCGASPIPIASGKRGRYRLNPGGDRQANRALHMIAVCRLRHCPKTRAYAHRRSSEGKTKKEIIRCLKRYIARQTYATLREDLRSLAIA

SEQ ID NO: 195693 - protein, 358 aa, unidentified
MTNLAEKLDFSGHTISCGIDVHLKSWTVSLYLGKQYLKSFVQSPPSVEGLWNFLSTNYPQAHYECAYESGFCGFWIQRAFTARSVSCIAVNAADVPRTDKGTKNKNDRNDSRRIAEALQAGQLEGVYVPDPELEADRQLVRLNERYSNDLTRSKNRIKGLLRLMGIEIPQRFAKANWSRAFVAWLKEASCGEPSIRIVLDRQLSIMEAIRTQKLDTLREMRKLMGKARYRTISGLLCSIPGIGPVTAAVLIVEIGDISRFEKFDRLNSFVGLCPMQHSTGGNDRKGSITTRQHRRLRYMLVEAAWVAVRTDPALTICYSRWTARVGSRRAIIKIARKLLSRVRHVWNDRAPYVTGIVK

SEQ ID NO: 195694 - protein, 338 aa, unidentified
MAILTVGIDTAKSVFAVHGVDEAGKVQLRQPKVARGRLNGVIAALPPCTIGIEACTGAHYWARQFQAHGHTVKLMAPKLVAPYRMSGKRGKNDAADAAAICEAVGRAQMRFVPVKTEEQQSRLMVHRARQGYVTTRTATINRIRGLLAEFGVVLPLKAEVVRREAAAKLEDLPGYANLVIGDLLSEVHHLDERIKQYDAHIHGMARECTAAQRLMQLMGIGEVTATAIVAMVGNAAEFDSGRQFAAWLGLVPGQYSSGGKARLGRITKAGDAYLRGLLVIGARAVLNAAASKTDSLSRWAVGLAARRGYWKAVVAIAAKNARMAWAVLTKGETFKLPA

SEQ ID NO: 195695 - protein, 302 aa, unidentified
MASGWLHPIPEPPRCHRRLCARLSAEKQIIRIAVEPTGGYEKRLVKALRGAGLPVEMVHTSRFAAYRTLIGAKAKSDTSDARLLAAYAAAPEEVRGRKAGHVVLPQDDVREQLAELAARRDQLKHMIHAETCRLSTVRSRSIRDDITAHLQALRQADCKTYDAMMQLVRQRDELRNAKRLLQTIKGIGDKTALTSIAAVPELGLISNKAAAALVGVAPFVRRSGTMIAPARIKGGRALVRSAFYMAAVTASRHNRVLAPFYVRLIAAGKPPKVALVAVMRRLVVYANAVLRSGQPWKGAEII

SEQ ID NO: 195696 - protein, 485 aa, unidentified
MENTEFNVAMLCQLLGMNRKLLYRKIKQLTGVTPVSLIRRVRMIRAATLLLQGRFTVSEVMYMVGYSNPSYFSRCFMAEYNISPSQYARAFDWRNYEYSKKPLEFSNNEAGFVTFKVWMEELAEKYGKDVVIPGMEPTGHYWFNLGAYLQDNGMKPVHVNPHHVKKSKELDDNNPNKNDRKDPKTIAALVNEGRFSYPYIPTGVYAEIRSLSNLRLQAQEEITRIKNRIARWFSIYFPEIKDVYKNPGAVSGLMILKVAPLPKDIVKLGVDGVNQIWRDAKLRAAGLKRAKTLVTAAEHSIGSQEACDSARIELKILLNDYEIYHQREEELMELIEEKLSEVPYIDKLLEIKGIGMKTVSGFVAEVGDIKRFDNPKQLQKLAGYAIVECSSGKHKGESHISYRGRKRLRYVLYEAAISLIARNTEFKEIHRYYQTRGKNSLKKMQSVIAVACKALRIFYAILTKGVTYDGAKMLQDIKRPQLKVA

SEQ ID NO: 195697 - protein, 345 aa, unidentified
MAVYIGVDLHVRTQTVCWMNTADGEIHQHTLDHSRDDVRAFYAQFTAPAVVGIESSGYALWFHQLIEQAGHRLLVGDAYAIRQFARRRQKNDRRDAELLLDLLRREEFPVVHRPAPPSQDTLALLRYRHRLVRMRTMVKNGLQAVALNHQLRLGFRLFTVRGQQRFAALPLSGAYATQRQQSQVLLTTLEAQIAAVNQELATRAAADARVVRLRTHPGVGLQTALAVVHTLEPVTRFDRARRIAAYCGLDPSEHSSGDTTRYGHISKQGNRLLRFLLVEAAWSAVQHEEDLGRFFRRLRARKKPHAVAVVAVARKLVLRLYRMLQEGIDYEEFRRRGRDARRARK

SEQ ID NO: 195698 - protein, 411 aa, unidentified
MIKENYIYVGIDLHKETHTAVMIDCYNQKLGEITFPNRPADFPKLVAKVKKCNTDGKTIVFGLENAYGYGRPLAVWLIDKGYFVKDVNTAISHRQAKHRGAMYRKSDSDDAEAIALATLNMLDKLPDACPNDAYWSLGQLVHRRDNIMKQRTRLVNQLHEQLCIAYPSYKSFFNDISRPTALYFWEHYPSKKYLKGKSVEDLRAELVPVSHNKCSTKTCEKILDAVASDKVKNNAYQDARDMVTLSIVSDLQHYDSQLAEVDKMLEQMYKMLGCTLTTIPGVNVITAVKILAEIGDIKRFSNANKLAQFAGIAPLHLSSSGKGKDVATKQGNRRLQATIYFLAIQMVQLSSKGTPRNPVVRAYYEKRKAEGKTSQQALICISRRLISIIYGMLKNGTEYRMPVVENAGENR

SEQ ID NO: 195699 - protein, 328 aa, unidentified
MFYLGMDVAKAKLDCCLLLDEASGRRKTKVVSNAKSGIVDLLAWVAKQNVSPGALHVVMEATGVYHEQAAMALADAGITVSIVNPAQVKDFGRGLAVRTKTDGVDSFVLARYGALLKPVAWTPPAPEARMLQALLSRREAITQDLQRERNRQEKADATDTPDRIRQSLADSIEFLVKQLAELQRDIDQHIDRHPTLKDDMALLQSIPAVGPQVGGNLLSVMRSHEFSSAEQLAAYLGLVPVERQSGSSVMGRARLSKAGPARIRAVLYMAAVVATRHNPHVKAVYDRLLARGKSKMSALGAAMRKLVHLCFGVLKTRKPYQHNYAKIA

SEQ ID NO: 195700 - protein, 344 aa, unidentified
MSEQYVGHQIVGMDLHRRRSVLVRMTDCGEQLETVRISNDPEYLQAVMARAGEHPDVVLEATYGWYWAADTLAELGATVHLAHPLGVKMFSLRRVKNDQLDAADLADLLRMGRLPEAWIAPPPTRELRGWVRHRAKLVGLRSNLKCQVHAVLAAAGVQVPMADLFGPSGQQLLATVRLAVESRSRIDSLQRLITGLDFEIDTFARLVAGRLREDPGYRAIQQIPGVGPTLGAVFVAEIGDIGRFRRPAQLACWAGLTPTHHESDTTVHRGRISKQGSRLVRWAAVEAVQRVSAHTRLGQIRDRVGDRRGRNIGVVAAARELTELVFYGLRDHRIRCLATPASAA

SEQ ID NO: 195701 - protein, 409 aa, unidentified
MRIIGLDIHRAFAEAVAWDDGKLKRLGRVDMRRHLLEAFAKKLSKEDVVVVEATGNASSVAAVIAPHVKRVVIANPKQVRIIAHAKIKTDTIDASVLAQLYASGFLPEVWIPDEPTQALRRQVTRRNQIVRQRSRLKNIIQSILHSHLIPSCPHADLCGASGRAWLFHQVLPEDERLAVERHLREFDRLGDDLKVIERDLARSALADVGVKRLMTIPGVDMIVALAIVAAIGDVGRFEQSQKLVSYLGLNPSVRQSGPGPAYHGRITKQGRGHARGMLVEAAWASARAPGPLRAFFLRVRARRGQHVAAVATARKLAVIIWHLLRKGESYAWTRPALHAKKLRDLELKAGYKPGRGQKGAAHAYNIKSHRDQERRWVEQAETAYARFVAGWNPRGPKRARTGAANEVRQ

SEQ ID NO: 195702 - protein, 338 aa, unidentified
MKKFIGIDLHSNNSVVVVSDEADRVMFRKRMANDLKLIEAALAPHRDETVGVVVESTYNWYWLVDGLMDAGYRVHLAHASAIKKYEGLKYSGDVADAAYLAHLLRLGLLAEGYIYPREERGARDLARKRLQLVRYRTAQILSIEGILMRQMGARMKSESVKGLTPEQVEKFGFAPDVALAVEANRAVSQTLGQQIEALEKRLRERVSLRGEFKLLKTAPGIGETLATTIMLETGTIARFAQVGNFSSYCRCVDSLRESNGKKKGEGNAKNGNKYLAWAFVEAANFAVRYCPQAKSFYERKKRRTNRIVATKALAHKLARACYHMLRDHKPFDVNRCFA

SEQ ID NO: 195703 - protein, 312 aa, unidentified
MTEHCYCGIDVAKDRLDVQVLPHRQRFSVDNNGTGWAELVERLHALPIAAVGIDPSGGYERGIIRALLAAGLSVRRINPSKLRQFARARGILAKNDRLDAQLIAEYVSIMPTRVVQRAATAERLAEVVTMRRQLCDQHVTIENQAAHVEDAILRRLNKRRLARLKADIHLLDKRMAEIVAADTILAQRYELLTSMRGVGPTLAFTLIALLPELGQMSRKQIAALVGLAPYDFDSGKLKGHRCIYGGRRPVRNILYMAALSAARYNPALKVFHNRLAAANKKPKVIIVAVMRKMITTLNAMVRDKAAWQPRAA

SEQ ID NO: 195704 - protein, 401 aa, unidentified
MEGPIISIDVSNGCSHFRCFIDRNKAFGKVHKIKHDVDGFQYLLDCMERLNEKTNEEVCVVYEATGVYTKPLTRFLNKHKVRHYMVNPLQAAKMRKTDLHSKKTDKNDPNSIAKVYYDKDLYEYADEEPIYHTLRVMNRNYEDQLDHLRKYKVTFQNILCIVFPGYGSLFKNPYCDIALAILKKYPHPDMIRNKKPETVANYIEKHTCHHKDSCLKWAVKVIEYANKTYPGCDKDEIEVIELLRIIKELEVCIASCDTQLNEMVQLAEQLPNYFLVLSIDGIGPNLACRILAEIGDIKRFSSTKQLISYAGIDPHISQSGDVDGLHLSISKKGNKRLRCLLYLAVTCNLRLKKENDPIQQFYKKKKQQSAPLKPKAARVACTNKLLRIIYGMCNNGCSYQK

SEQ ID NO: 195705 - protein, 420 aa, unidentified
MTNANIIPADAVLVAIDIAKVRNEVLIEDPSHKRRRRLQVLNNRAEHDRLIEVLQTYGRSVVCGFEATGNYHRPIAWRLAEAGFEVRLVSSLALARTREALHNSWDKNDPKDAQVMLHMLKIQATQFYHDPLRAGINDAQELSKTHEAIARAKTEIQHRILTHYLPLYFPEIERFRGNSRSDWFFAFLDAFPTPASIVVLSKEEFVKAAWGVVGRKVSKTQILMDIYETASTSIGLPLPLEAPAVRMFRMVVAEARSLIRQRNEIEAQADELLRHSQDYQLLRQIPGVGPIIALTIIAEAGDLRRFHHHRQFLKFCGLDLSTQQSGQYRGQTRLSKFGNARLRRALWIAGQVAIRQRENGFRHKFERYIAKDRDNPDLRRKALTAITAKMARVVHAVIKSGSDYRPFVEGRVPGGRTSLS

SEQ ID NO: 195706 - protein, 340 aa, unidentified
MQANVVGVDIAKRVFQLHWVETDTGEMKSVQLKRERFLEHFANRERCLIGMEACGGSQHWARELRKLGHEVRLLSTRWVRPFVGGNKNDAADARAIWTAVQQPGIKTVAVKSEAQQAVLALHRMRQQLVKSRTAQINALRGLLTEYGEVMPVGRTGVVRQLPGALARLAERLPGMLIETLREQFARILVLDEQIKQIEERLRQWHREDSATQRIAAIPGVGLLTATAAVATIGDARAFSSGREFAAWLGLVPRQSGTGGRVRLLGISKRGDTYLRTLLIHGARAVLTRSKAPSEWLTNLTRRRARNVAIVALANKMARTIWALLAHERAYQPGYVSQPAG

SEQ ID NO: 195707 - protein, 317 aa, unidentified
MQQHNTIFVGIDIAKFKFDVAFSHLSKGVTYDYTPAAIKEFIQTLQEIQPQLICLESTGKLHQKLLACLHKHHLPVSVVNPRQIRDFARAKNQLAKTDQIDARTIMQFAQIMQPRITPPLTQAQQKMREFSSRRQQVSKMIIQETNRLGTTEDTEIDKLIQQSIRAYKKQLKVIEKKLKQLIAADEQAQERAAILQSVPGVGAITAALLIAELPELGSLNRKQFARLVGVAPTNRDSGTMRGRRTIGGGRVGIRNGLYMPTIVAQKHNPKICAFYKRLVESGKPKMVALLAAMRKLLIILNVMIKEGKKWNENVMKA

SEQ ID NO: 195708 - protein, 335 aa, unidentified
MTKVMDAVSVGIDVSACTLVVALERDHQSGRQRREFPNTAAGHQVLVQWLSKSATAVQVCLEATGLYSLDLALALDRAEGIEVMVANPRAIADFAKALLQRSKTDQLDAEVMLEFVRRMPFVPWQPPKPHRLDLRALMRRITGLKLASQQEKNRLHSVSQAAEITPLVRKDIQSHLVQLERHIEKLEQQAEAIVQADPELAQQFRHLVSVRGIARVSALHILAELVVLAPDMTARQWVAHAGLDPRHHDSGTSIHKPARISRAGNRYLRAALFMPALVATQHDPNIRAFYQKLVDRGKTKMQAIVAVMRKLLHALHGMLRTDSDFVGEKFYVIPA

SEQ ID NO: 195709 - protein, 376 aa, unidentified
MLGKSGPRALIPRQYDIFVGLDVDKTSISLTCVDHEQMVQSVRIPHRATHVLGYVRRHFAEKRIAFAYEAGPTGYGLYDQLTCAGYPCLVVAPSMIPTAPGQRVKTNRLDSQKLAVNLRGGQLHPIQVPQPVFRQLRHLVQLRDTFVQQSRATQCRIKALLLFEGLPFPGTQWSQTTVAQLETLPCAPAVRFKLSQLVQTLRFAQAQVRETTREIRRFCTEEPELHRCLGYVLSIPGIGWATGTQLLARIGDWRQLRHVRQLAAFLGLVASEDSTGASIRRGSITRSGDHRLRNKLIQAAWAAIRQDPELRAFYQRIAQRHPTPQASHKAIVAVARKLTTRVYAVLTQQRPYVIRQTQEECHPPLGETRMAAEPGP

SEQ ID NO: 195710 - protein, 459 aa, unidentified
MAKAKTLVGLDVHATKIVAAVLDAETGELQVFSMGGDAGEAAAFCAGLPRPVRVAYEAGPTGYGLARELAARRVECVVAAPSKIPRAAGDRVKTDRRDAEHLVRLLLAGKLHAVRVPGPEEEALRDLVRARDAVRQDLMRNRHRLSKLLLRHGVRFEDGPAWTQRHRDWLAGVTLPYAAAQATLADLWGAIDALVHRRDQLEREIVAMLPDSPWQVQVGRLRCLRGIDTLSAVGLCAEIGDFERFARAEQLMSYVGLVPSESTTGAQRRLGSITKTGSGHARRLLVEAAWHCRKAPRIGKALTERHDGQPPEAVAIAWSAQRRLHRTWTRLEARAKRRTIIAVAAARELSGFCWAITQIGDPPQARSQPSHPVGWAGGGPARAGNPRQSYEQPAPTTSRLATPDPRQRLPTTNHGPAATRSANISLTRVAHSRPDRHPPSRPHSHPQHERQRATSACSP

SEQ ID NO: 195711 - protein, 460 aa, unidentified
MENDRDVQASKEIAGLPVIRSEVAGIDIGSEQHWVCAPTADRSAREVATFGATTPELDRLAQWLKDREIKSIAMESTSVYWIAPHEVLEAAGFEILLVDTRQLARVPGRDKKTDAKDCEWIQRLHSCGLLRGSFRPPEMICMLRTLVRDKATLVAESADWLRRMQKSLDQMNVRVHRAVSDIDGVTGMKILRAIAGGERDPVKLAQLRDWRCHKSEEEIAKELTGHWREDHLFSLRQSLQMYDAIHQRVADYDREILRKLSELQRDDRRQQTPPKVDNPQKARAIKKRGEEPMRGALYRMTGVDLTSIDAIGVETVLVVASEYGPDLSDFPTEKQFVSHVTLAPHRPMSGGKPVKKKRRHTASTRVAAALRMAALSLRNSQTALGAYYRKIARSRGGDVAVFATARKLAIFIYRLLRWGQPYVDEGAAAFEKRYLEARIKSMKARARELGYELVESAVTA

SEQ ID NO: 195712 - protein, 419 aa, unidentified
MSKSNIARQLAQVQPGTLHAGVDLALENNVVVVINEKAERLDHFSFPQDRGGYDYFLRRLEGLRQKDQASEVVVAMEPSNYFWKLLARELEEKKITYHLVNSYTVKKHREGDQLDRSKDDRRDAGQIAELSRNGKYTGTHLQKGAYEDLRLYATLYDQSVQAIRREKQVLWGLVGQVFPELSQVFKNLVGETGQALLITGASAATIRQLSVEDFIAQVRAAYSGKRLFVSKLHRVHQLAVTSIGLTEGLGAFQLAIQVHLAELQTFQKQLKRVTTAMTACLATLPETPYLLSVKSMQAVSTAIFLAEVGDPKRYQSAAQWVKLAGIQPAPNTSGKKQRSQTPMSRQGRARLRTMLYFTCLRMVRFDEHFAQIYAHLQRRQNNPLTKMQALGVLMNKLLHILWALIHNQTFYNPSFGQSI

SEQ ID NO: 195713 - protein, 353 aa, unidentified
MKILAIDLGKFKSVACLFDTATNQATYETIPMFQSVIENLLHQSQAEQVVIETCTNSGWVDDICQTQGYGVLVANPNQEAWQWRNVKRKTDKDDALKLAKLAVLDQIHPVHVPSASTRQYRRLVKYRKTLVWRMNQIHNSIRALLMAQGMTMPSRAKAWTIEGIKALRQHCNPIAECSIDELWKGELDLELTLLDHLEDQHDQVEKQLNQLAKHEEQVQRLMTIPGVGRRTAEVIFTALDKPERFANARQVSAYAGLVPDQRQSGQTNKLGSITRRGSRLLRGALVEVSWMLLRFNPWAQKTYERICGGQKTRKKTAIVALARKLLVRCWAMLRDKQAWNPDGSPIPVSTTNG

SEQ ID NO: 195714 - protein, 360 aa, unidentified
MIVIGADTHKTAHMLVGVDANTGQVSEGRQIAASDEGHRDAVRWACELGSERVWAIEDCRHVSRRLEQALIAAGERVVRVPPKMMGQSRRGERQAGKSDEIDALAVARAVVKDGSERFPSAYLDERAMEIRLLSDHRDQLVGERTRIQNRLRWHLLALCPELEARLPNGGLTRQVVQERTARRLRDFRGDQRARVAREQLRHIRTLSAQINELERELCPLVAAHRPALLAEQGCGVLTAATLIGRTAGAERFPTDAHFARQAGVAPIPASSGRVDRHRLHRGGDRQLNSALYMIAITRARIDPQTKAYLERKRAEGKSKREALRCLKRHLARKIHRLLSMPTVVTDPVGLESANSGRCLT

SEQ ID NO: 195715 - protein, 401 aa, unidentified
MAKLWAGIDAGKAHHHCVVIDTDGNRLLSQKIPNDEPALLDLIATVLKLADGDPVIWATDLNHGGPALLIAILVGHGQNILYIPGRIVHHASRLYRGEGKTDAKDAAVIADQARMRRDLQPLRAGDEISTGLRILTARRADKSADRVRAINRLQAQLLEYFPALERAFDYSRSKAALLLLTKHRTPDGIRRTGQARLHAWLKKRGTRSSAAVAQAAVDAAKSQHTTVPAQHMGEGIVAALAREILALNEELADLDALISEKVTEHRDTRVLLSMPGFGPVLAAEFLGATGGDLTVFQTADRFAGVAGLAPAPRDSGRITGNHHRPRRYDRRLLRVFYLSGLSALKSCAASRAYYDRKRAEGKTHIQAMLSLARRRLNVLWAMLRDGTTYTPVPARAARMAA

SEQ ID NO: 195716 - protein, 323 aa, unidentified
MNKYNEIFGVDISKDVFDVYGSKSGHNQFKNAASGFMFFLKNLPKKSLVVMEATGYYHYSLAQFLFKQGVLVSVVNPLSVKRFIQMKLAKVKTDKSDAKAICEYGQINQVPLYSALSDVQSECLQLFRLLDSYLKKRTMTKNKLHGEDVLGIPSKHVYRSLKRNRKHLDTEIASIETKLLSLVKQDQQTQLTLLKSIPGLGVKTALFLIVITDGFTKFETAAQLCSYVGITPTIRQSGSSVRGRSSISKVGNKKLRNLLFLCSFSACKHNKSCREIYERIVNKGKSKKLALIAVSNKLLKQAFAIAKSGNPYDETFVSVLMAK

SEQ ID NO: 195717 - protein, 351 aa, unidentified
MPRASTVHAVIAIGIDMGKSTLHMIGLDSCGAIVLREKVSRGRIASRLANLPPCLIGIEAGMATHYVARELTALGHDVKQVPATYAKPFRQGHKNDFRDAHAVAEAVQRPTTRFVPAKTDEQLDLQALHRVRSRLVSERTAVINQIRGFLLERGIIVRQGLRFLRQLLPDILAKRADVLSPRMIRIVAELAGDWRRLDERIETVTDEIEALAKSDDSCRRVMTVPGIGPIISSAMVAAIGNGVAFERGRDFSAWLGLVPKQMSTGDRTILGRISKRGNGYLRMLFMQAARVILLRPANWPKHGFGAWLARAAQRLHPNVLAAALANKLARIAWTVLAQERTYESRATKAAA

SEQ ID NO: 195718 - protein, 338 aa, unidentified
MKVYVGMDLHATNTYVGMVDEENEVLHKQRFRNELPLILAGLDPFRKDIEGVVVESTFNWYWLVDGLMAEGYRVHLANVSAIKQYEGLKQIDDKKSAFWLANLLRLGILPTGYIYPKEERPTRDLLRKRLHLVRHRTSHILSVKNILARNLGLRMKSEDVKKLEDPEVKRFFPDKEMQTAVLASVGLIRHLEVEISGIERMITKKLKIRKEFAKLMTIPGIGKILTLTIMLEVGDIRRFPTVGDYSSYCRCVKSIRTSAGKIIGYGNRKNGNKYLSWAYIEAAQAARRFHETVRSYYEKKMAKTNRIVAIKALSHKLTRASYYVMRDQVDYDPARLFR

SEQ ID NO: 195719 - protein, 416 aa, unidentified
MNSPPKATLDRFLALDIHKHYLVIGGVGLRQEIVLKPRRISFHQWPEWAMANLRATDAVVLESTTNAWHVHDQVALLVGRTVVAHPALVKVIATARVKTDPRAVLDLARLLAANLVPEVWVPPLEVRELRALVNHRRRLVKLRTMTCNRLHSLLHQHNVPPPSGDIFSSRHRAWWNDLHLSSTQSLRARQDLATLDHLEPQIAEVEAELNRLSTVHPWAAQAAYLIQLPGIGALSAMTILAAIGDITRFPTPKKLVGYAGLGACVHDSGQTHRGGRITKQGRKDLRWIMVQAAWTAVGHHPLWKDRYLNLAHRIGWRRAIVAMARKLLVVVWHVLTQKVADRHADDERVASKLMAWARMLDPQERDGLTTPQFVRYHLLQLGLGHTLPHIRQGSRTCRLASPQEVLAIKPDLGSAA

SEQ ID NO: 195720 - protein, 418 aa, unidentified
MEPNRFRHYIGIDWATEAHRICLLDHDGQPCGKTSIPHSGEGLAKLQDWLAHHGVVPAHAAVGIETPRGAVVETLVERGYAVFAINPKQLERFRDRYTAAGAKDDDRDAWCAASALRTDQAAFRRIQLDSPEQIRLRELCRTQSELGVDAQRHANRLSEQLRRYYPQMLALCPAGDEPLLWDLLELAPLPEVAQHITVAQVAAVLHRRRIRRLTAEQVLAQLRATPLTVARGVADAASEHALVLIQALRVLHAARIQTLKRLLRLERQIRATRPDPQLPSDAEIIDSLPGAGALTVAAILTEASQAVAARSATALRGHAGVAPVTRQSGKHCAVSMRYACNPYLRNAFHHFVLASLRDPIARRHYDRLRQQGHSHARALRGVGDRWVTVLMAMLRSGQLYDPTRRKAWRATAAQEHTA

SEQ ID NO: 195721 - protein, 360 aa, unidentified
MQEITRVGVDLAKRVIQVLAVNAAGSRVTGRALAREKFLHWCAQLPAGCLVAMEASSSAHHWARKLIGMGLDARIIAAHLVTPYRMQGRSGKNDANDAAAICEAASRPQMHFVPIKSVEQQSMLCIHRLREGFKTERIACINRIRGLLAEFGLVFPQKPEVLRQALPDVTEDATNELGGLARLALQRAWAQWQELDEHMHWCDQRIAAHLKTNEQVRQAQQLMGVGPVTASAVVATVGDFRQFKNGAQFGAWLGLTPRQNSSGGKNNLGRITKRGDMYLRTLLIQGAKSIVLTAQKRDDPISRWALQIREKSGWQKAVVALANKNARILWAVFVRGKAFDANHVSVKPPAAMPQIGAVPA

SEQ ID NO: 195722 - protein, 365 aa, unidentified
MQKAELSCESDSENYLGGSSETMYYIGLDVHKRTISYCVKDAAGCVHIEGKIGSTRRELDAWIKTLPQPRTIAMEATIFTGWIYDHLLPHAEQVKVAHPLMLRAIAAAKRKNDRIDASKIADCLRCDFLPECHMASTEIRDRRRTLRYRGLLVKQMVQMKNRVSGLLMEKGVTHTKRRLHKVGYFAELMSESKEIDASIWPLLKLSREHIVRAQKLDYALVSSLERDPLLAERLKRLRTVPGVGPITALTWALEIGDVSRFRSIKQAISYCGLCGAERSSADKVMRTPISKQRNKHIQHVLVEAAKLAPRLNHDLALIYEKEMQRGNRNRATLAVARKIVAYLLAVERRKQDFVSADQLGGTAAA

SEQ ID NO: 195723 - protein, 415 aa, unidentified
MNRLIERCAMLDIHKSQITACVRVPDGDGGRQQEIGEFASTTSGLLTLADWLRSYAVTVVGMESTGVYWRPVYYLLEDEFECQLFNARHLRHVPGRKSDVQDAEWGCQLVEHGLVRPSFVPPRPLRELRDLVRYRKAKIQERTREVQRVEKTLQDAGIKLSSVASEVLGVSARKMLEALISGTNDPELLADLAKGVLRKKIPALREALQGRFTGHHALLVSQMLAQIDFLDEAIQTLSERIEELTAPFSRELELLDTIPGIDRRAAELILAEIGPDMSIFPTDRHLASWAGMCPGQRESAGKQHSGKTRKGSKWLRGTLTESAKGVVRTKGTYLSARYHRIKSRRGHAKATIATGHKILTAAYHVLQQGVPYHELGEEFFYRRDTENTERYRRRLVKQLERLGHKVTLEPLPQAA

SEQ ID NO: 195724 - protein, 413 aa, unidentified
MALKIVYPICCGIDVHKTFVVACIASTVKGVTTYKRHRFSTYTKGILELSQWLCENECKDVCMESTGKYWIPVFNVLEDSCNITLAHPKYVKAIRGKKTDKKDAKWIADLFKHDLVAGSFMPPLEIRQLRDLMRYRFKLTNFMSSEKNRLQNSLTVSNIQLGNIVSDTFGKSSMNIIEKLLNNPSDTSFEIEPLIHGSMKHKLPELELAIDGYITPEQAEKLKVIKQHCEDLESRKTDLEKIILSLAASYTEEINLILTVPSFKNIFSAIAVVSEIGVNMDVFPTAKHLCSWAGLTPTNNESAGKKKSVRISRAGCYIKPLLVQCATSVVKSEKHPEIRNRYLKLKKRRGHKRAIIAIARMLLTAIYNILKKKEAYNPELYKKSDVLPVTREITVEQAILLARKHGYHVLEAS

SEQ ID NO: 195725 - protein, 405 aa, unidentified
MRRPVSPEAVSFGVTHSEVQETSMEKNSKKPTKRAEQAKVAAAQLSALQQRADNSLVIGIDLGDRTSFYCVRTLDQEQVATGTIAATVPAMTAFFQGIKRQRVVIETGTHSRWVAQLLDLLGQEVIVGNARKLKLITPNDQKGDRVDAGLLSKLGCVGVEWLYPVYRRSEGVQRTLTLVRAREALVETRTGLINQVRGQVKSFGCRISACTAERFVEVAQKELPEALRDALGGVLEILEELEDRLYRYDCQVKHACEQTYPQTKWLLQIAGVGPLTALTYVLTIEDPGRFENSRDVGSYLGLVAKRRQSGKRDPQLGITKTGDEMLRKLLVNCAHHILGHVGADSDLRRWGLNVVARGQKAGQQGARKRAAAAVARKLAVVMHRLWVDERKYEPLRNSQTMAPAA

SEQ ID NO: 195726 - protein, 375 aa, unidentified
MASQTTTIPRDPDGNVIGIDPHKRTLSATVLDRRGGRVAQAHFHVSGEGHRALEAWAAGFGPVARWGIEGASGLGRHTATYLCHTGHDVRDVCPNRTAERGRGRHQGKSDALDADRIAAETLTHPELPAAFKRAAGDTGPDHTREQLALWHKTRRSLVKLRQQLLGEAESLLGDLPEELRAELPDTTAVLPRLTALARRDHGRAWDATTTLRLRLLDAHAELLTELAAQEREATRALGKLVAQAGSTLGELVGLATRSVAELLVEVGDPRRFTEGGFARFNGTAPLPASSGEGPGEPVRHRLNRGGNRNVNAVLHRMAVTQLRCEPRAQEIFANARKGGHTKKEAMRVLKRHLSDVVHRRMLRDLNARQLPTASA

SEQ ID NO: 195727 - protein, 465 aa, unidentified
MIVAGRKLWRNRKERKEWAQRLQSDNPGLEVVHPDAAGIDVGNSSHYVAVRPDRDAQPVRRFECFTTDLYRLADWLQSCGVKTVAMQSTGVYWIPLYDILEERGFEVYLVNARHTKNLPGRKSDVRESQWLLKLHTYGLLSNSFQPPSEIRVLRTYWRQRGEHVAGAATCVLRMQKALTQMNIQLANVISDISGLTGQTIIRAVVTGERDPRKLAALSDPRVHASEEEIAKSLQGNWRPELLFVLQQEVDMYDTYQRRIAECDQQLQNQLANLSGTLPSPRTPTKKTKIKKPAKNAPRFDLGSELQRVTGVDLTRIDGIDVMTAQTLLSEVGLDMSRWKTESHFASWLGLCPDNRVSGDKLLGRGTRRVVNRAATALRQAANTLMRSRSYLGAQYRRLRTKLGAPKAITAMAHRLARLVYRMLKYGQTYADKGMDYYEERFRQQQIQSIRKRAARLGLQVAEAQA

SEQ ID NO: 195728 - protein, 341 aa, unidentified
MAEYHVGLDVSLDETSVCVVDQDGKVLKECKAATEPADIALSISIYADDVARVGLEAQSLSPWLYTELQALGLPVIVVETQHMKAALRAQRNKTDKNDARGIAQMMRMGWFRRVHVKSHDSMQLRVLLSNRRLLKRKFLDVENELRGTLKAFGIKIGKVSRGRFEARTIELLDGADPTLRGMVISMLRVRRMLWDECLKLHALLVRTVRDDPVCRRFMTVPGVGPVVALTFRTAVDDPHRFSRSRTVGAHFGLTPRKFQSGTIDYDGRISKCGDGEVRTALYEAASSLLVRCKTSSELRSWGLSLVKRRGHKKALVAVARKLATLLHRMWLDGSDFRPAAV

SEQ ID NO: 195729 - protein, 412 aa, unidentified
MVETIFERVGALDVHKAQVTACVRVPDAAGGREPHLAEFQTTVRGLIALRDWLAAHRVTHVAMEATGVYWQPVWHVLEDDFELMLCNARHVKNVPGRKTDVSDAQWLCQLMEAGLLRGSFVPPKPQRRLRTLTRYRKTQVQERQREANRLHKALEDTGIKLDCVATDILGASGRAMLDALVAGTTDPEVLADLARGRLRAKLPALREALEGRFETHHALVIGAILAHLDFLDEHIDRLTDAIEAELGPTGLAGVALAATMTGVAARTAEVMVAEIGTDMRVFPSARHLASWAGRCPGNDQSAGKRRSGHTRKGSKWLGIALEEAALAAIRTHDSYLAAQYQRLKPRLGHGRALGAVKHSMLIAYWHMFTTGETYHDLGGDYFQRRDPERATKRLVTKLEALGHIVTLQPAAP

SEQ ID NO: 195730 - protein, 353 aa, unidentified
MELDKYIGIDVHSSTLVVNARNALGKVILESVVPTNAEAIVECIGGLRGRLHITFEEGTHAQWLYDVLRRRVADVLVCDPRESRLLQDGSKADGIDAGKMSHLLRIGALTAVYHDRQGTAVLRELVRSYDELVEDSVRTMNRIKAVYRSRAIPTGGQSVYGIAQRHAWLEKLKDSGAVKRVQSQYAQLDTLSELRRQAERSMVTEARRHPAYALLRSIPQVGPIRVARLISIVDTPHRFANKAAFWNYCGFAVVTHSSAERKFVDGQLVRTSKVVSTRGLNKDHNPKMKEIFKGAAMKARVQGPFATYYAGLVARGMKPEIATITLARKISATTLAVWKKGVAFDPKKLMLAT

SEQ ID NO: 195731 - protein, 340 aa, unidentified
MNITRLSIDLAKDVFQLYGVDGKQKCVLTKRITSRAKLIEFISRLKTCEIYMEACGSSNYWARTFQGYGHTVKLISPQYVKPYIQRNKNDYRDAQGIMEASFWAGTPYVTPKTVEQQDIQSLLRIRSNYIEIRTTVSNQLRGLMKEYGVFLAAGYQKLKQELPGIFDRNTENGLTPQMKELIEGQYDMLLIFDEKIDKLDIQIEQISKQNEVCQRLQKIEGIGPITALAIIALVGNGQGFKNGRHFSAYLGLVPRQHSSGQKEKLLGISKRGDVYLRELLIHGGRSVVMHCSKKSDARSVWVNKIKDTGGMNKAAVAVANKNARIVMAMLLSGENYQKAA

SEQ ID NO: 195732 - protein, 360 aa, unidentified
MTNGSTKARTAAGLTVGIDVSDIFSHLCILDAEGNVIEESRVRTTTTALERQFRTLPGCRTVLEVGTHSPWLSRLLADLGHEVIVANPRQVRLIAESDRKRDRADAELLARLGRLDPDLLRPIRHRGPQAQQDLALLRARDTLVRTRTNLVNHVRGAVKALGGRLPACSTASFHKKVAAHVPEALRGALLPLITTVADLAARIQEYDRRVEQITEERYPEGRRLRQVPGVGPLTSLAFLLVIEDSTRFRKSRGVGPYLGLVPRQSQSGEREPQLSITKAGDPLLRRLLVQSAHYILGPFGPDSELRRWGLRLAGAGSGRSKKRAVVAVARKLAVLLHRLWVTGEVYQPIAAEQPAPVRDG

SEQ ID NO: 195733 - protein, 339 aa, unidentified
MASRSVSVIGIDTHIVNCNYFCVNKKTAEILGAGEFSTNATNFIKTVTQFPEPRVVIVEQGPLSGWIERILEKHVEEVVVADTKRNSWIAKDPGKNDLIDSEKLAHLYMGGYIKRIVSRSKEKQELISLVIHYHSLVRQTTRLKNQVGERRRGARAYREESIKEDLKYLWHNKGLQMGIRNYHDQLRAVEKQIEEVTKRIQKISCKYPEISYLENFPGIGFVGSSTLSAMIDIPERFSTLKQLWIYCGYGLDQQSSGGSSKRPRITKRGNRYLNNVIKTAAHNIITLCKNDNVYKTWYNENIRKGKDPEKLRANLARKLIKDIWLGWKALNRSVSKQAA

SEQ ID NO: 195734 - protein, 409 aa, unidentified
MLYLAIDEHRKQLTVNLRNEEGEVVLRRQVSTQWERVRAFFEDLRERSEPEGGFAAILEVCGFNDWLLKMLKEYGCCETVLVQPEKRSKRKTDRRDANALGELLWVNRHRLLAGQKVANLRRVLPPSQEDAEARQLTALRKRLGELRTRTINKIQHILLRHNLQQECPTKGLDTKKARKWLAEIELAEIDRLEMDLLLAQWELWERQLATVEEGITARQKRHPTAPVLATMFGGGAYSSLALASRIGSIERFPRPGSLANYWGLAPGCRNSGDATDRLGSITKEGSPMARFILGQMVLHTLRRDGQMKVWYAKIKKRRGAKIARVAVMRRLATIIWHMVKHHEPYVPGGPPRRPAQGECVFRTKGEDEKRKGRDSQRKTRPSPSFDRVAREQSPTNQDHACFPAIVKSV

SEQ ID NO: 195735 - protein, 351 aa, unidentified
MNITTVGIDLAKEIITVYAQDIQGRCVMSRNFKFKELAEWLVQLPEGCLVGMEACSSAHYWGRRMQVMGLQPRLMAAEFVQAFRKSKSAKNDHNDAEAIAIAVRQPTMRFVAIKNEAQQSRLAWHRVREGWKEERTALINRCRGLLLEFGYPIARTAAAFQRGLKTSLQEEGLPPNLRRLLIQIDAQLQQLELLLAECDREIAQSARDDEAARRLRAVAGVGVITADAVSASVGNAHDFKNGRQFAAWMGLTPRQYSSGGKTQLGRISRRGDSYLRSLLVQGARSTLQATLKKAPDKQNRMQQWIIRLYGRVGYHKTLVAIANKNARQLWALLAKGETYNLDAWQQYAIGE

SEQ ID NO: 195736 - protein, 339 aa, unidentified
MTIQSKNIVQELKSLFAGIDVGADELILVIRKNGTPYKAQKFANTPADRARLVKKLASLPGIIVCLEATGVYHFDLSIALHDAGVALMVVNPKSSHNFAKVLMKNSKTDAVDADTLAQYAERMDFVAWARPSDEKIALRSFARRIDALTRQKAAAKNQLHALGASKENPKAVLRDVNLSITQLEKRIDSLGKEALVLIKKYADLERVFKLLTSVKGIAQTSAIALMGELLLLPQGLSHREWVKFAGLDPRAFDSGKSVHKKSRISKAGNRHIRSALYMPALSAKQHDPHVKAYFQHLVDNGKLPLQALCAVMRKLLHAIHGMLKYDKPFDNTRFYAIPA

SEQ ID NO: 195737 - protein, 360 aa, unidentified
MERNRTFVGLDVHAWSVTGHGLDAVTGEVWQRRLTPDPADILGWVAGLPGPVKVTYEAGPTGFGLARHLIDHGVPCVVAAPSKLHRPSGDRVKTDARDAQLLARLLRLDEIVEVTVPSVEQEAARDLVRAREDVRGDLMRARHRVSKLLLRQGIVWTGGQAWTGRHDVWLRSQRFAQPGRQLAFESAYETMLLTGQRRDRLDQAITAMAETSSYTAVVHRLGCLRGISTLTGFGLAVEIGDWTRFTGSTIGAFLGLVPTEYSSGQSRSQGSITKTGNSHARRLLVEAAWHHRKTYRNPGQVMRTRWEHASAAARARGHEGNRRLHHRWEIFTARRKRPVIANVAVARELAGWAWSLAVLE

SEQ ID NO: 195738 - protein, 344 aa, unidentified
MRHYAGLDASVKETAICIVDENGRICRETKVISHAEDLSKALAETGLRIKRIGLEAGPLSQWLFEGMARAGLPVICVETRHTKAFLRAQVNKSDRNDAGGIAQMMRVNLYRPVHVKTLASQKRRALLRARKLLQEKAIAIENDIRGLLRNFGLKVGIVGAAKFEARIKDLTEEMPDLEEFIDVLLAARRKLRDRFSRLHGKVLEIAGNDAACGRLMTIPGVGPVTALAFISTIDIPARFRSSRSVGPALGLTPVLKQSGESERVGRVSLCGDGMMRGLLYEAAQSKLTRVKKWSWLKAWAMTVARRGGLKKAVVALDRRIAVIMHRMWIDGSEFRWSREGAAET

SEQ ID NO: 195739 - protein, 311 aa, unidentified
MTLPQNIIGVDVSKDWIDVFHLSSCRHDRIASTKRALSQFARTAQGALVVFEASGGYERPLGEALAGAGVAYARVNPRQAREFARSTGRLAKTDRVDAEILARMGRALELAPTPPIARDRARLADLAARRDDLVATIRAEKNRAGQVRDGWIAGQIAQLVRVLEVHLHRVEAQIAAQVETHDDLKEQGRRLCTMPGVGPTLSAVLLARLPELGGLGHRQIASLTGLAPHASDSGLHRGKRRIWGGRADVRRALYLAAFIASRHDPTIKAFRARLEAAGKPVKLAVTACARKLLTILNAMLRDGKDYVKPAM

SEQ ID NO: 195740 - protein, 339 aa, unidentified
MQLYAGLDLHSRNTYIGIMDKEFKRVFGKRVLNKLPLILKTLEPFQDQLKGIVVESTYNWYWLIDGLMDAGYQCVHLANPSAMKQYEGIKHTDDQHDAFFLAQMLILGILPQGYIYPKEDRPVRDLARKRLFLVRHKTSYILSLQSLIARCCGQRVSANDIRKFTVDDLQRLLKEEYIVLSAQANLDTIVFLKQQIKRLEKTIQKKVKLNKAFQQLMTVPGIGLILAMTIMLEVGDIGRFAQVGNFASYCRCVSSQRLSDGKSKGHGNRKNGNRYLSWAFTEAAHLSRRYNEHFRSYYNRKVAKANTSLATKALSNKLARICYYIMRDQVPFRQELLSQ

SEQ ID NO: 195741 - protein, 470 aa, unidentified
MWGRSATSAHTGAGEPVEVYGAGFSGVGGLLLRARGSVSWQRALRAALAAMAAALDGRSLMEVMFERVAGIDVGKASLTVCVRTPGARRGRHSETRTFKTTTGSLRVMRDWLVELRVEIAAMESTSAYWKAPFYCLEDVMEVWLLNAAHMKAVPGRKTDVRDAEWIAQLLEFGLLQPSMVPPPPIRQLRMLTRYRVQLMGDRTREAIRLEMMLEDASIKLSSVASSLTTLSARVMLQAMIGGERDPLVLSEMAKGKMRRKIPDLAQALDGHFDEHHARMAKTILGRLDMVEESLTELDQVIAAKCVPWAHQIELLQTIPGVGEKVAQVIVAETGADMSRFPSAAHLAAWAGVAPAIYESAGKRTPSGKRHGNKWLTAMLVEAAGSVGRMHGSNYLSAQHARLAKRRGTGRAQVAVAHSILVSAWHMLTKDEPYQDLGADWLARRNDEAHTRRLVAQLERLGHTVQLDSVA

SEQ ID NO: 195742 - protein, 404 aa, unidentified
MLYVGIDWGRKNHQVALVNSSGRLLESFAAPHSGQGFQLIRERIEHYQQDPNSVRVAIELHDGPLCSWLPDQGYQVLGVNPKSAAQARTLLRPSGCKDDVFDAYTLATVAALPAFPLQPLPPSDDTLLALQTLLDLREDLVEQKTTLLKQIRTLLDEWAPALSALCKDLNSRWQRQLLHRWPLERDLADAHPNAVASFDKKHRLRVATRELIRGARSQMPLPIGADHADALRRKMAHLLTRLDSLCGELQDLEAEIDQRSAEDENAALVDSLPAVGIVSRAAWTVALRCARVHGLDWEALAARCGVAPLTRQSGGSRSVHRRRGHDRTLRRLLTYYAFITTNCEGCWAHDDYQRRRARGASHYTALRAIARRWLKIACALVRHHDPYSEQLRRQAQSNDLKQAA

SEQ ID NO: 195743 - protein, 342 aa, unidentified
MLYVGIDVAKNKHDVTALNVPGKTVLKPLTFSNNKAGFELLDLSFRQLNQDCLIDLEDTGHYAFNLLNFLHEQGYKVYTYTPLLIKEFAKSLSLRKTKTDKKDAHGIALKLLSDPNREQFQHDNRQVELKILARHIHRLKKKQSDWKVQYTRCLDIIFPELDKIVGKHSEYTYQLLTCYPNPQKRLEAGFDKLIEIKRLTASKIQDILSVAPRSIGTTSPAREFEIIEIIKHYKRLIDKAETCVNDLMAEFNSVITTVTGIGGRLGAVILAEIRNIHAFDNPAQLQAFAGLDSSIYQSGQIDLAGRMIKRGSPHLRWALIQAAKACARFSPAFKAYLKTKLE

SEQ ID NO: 195744 - protein, 403 aa, unidentified
MNMNAVGSDVSKGKSMVAILRPFCEIVSSPFVIKHTTGDILSLIEQIKSTEGESRIVMEHTGRYYEPLARELSQAGFFVSAINPKLIKDFGDNSLRKVKSDKADAVKIARYTLDNWIELKQYSLMDEIRNQLKTMNRQFGFYMKHKTAMKNNLIGILDQTYPGVNTYFDSPAREDGSQKWVDFSTTYWHVDCVRKMSLNAFVDHYQKWCKRRKYNFSKDKAEEIYGAARELVPVLPKDDLTKLIVKQAVEQLNTASKTVEELRTLMNETAAKLPEYPVVMGMKGVGPSLGPQLTAEIGDVTRFTHKGAITAFAGVDPGVNESGTYEQKSVPTSKRGSSSLRKTLFQVMDCLIKTKPQDDPVYAFIDKKHAQGKPYYVYMTAGANKFLRIYSGRVKEYLMSLPE

SEQ ID NO: 195745 - protein, 315 aa, unidentified
MAMSVSVSKPIVGVDVAKNELVIYQTELDLLETLPNNKPAIKKWLKALPAPVDVAIESTNIYHLDFADLAHDAGCTIYMVGGYELSHYRKGVKVRAKTDALDAKLLARYLKNEYEELHPWTPPSPLYRQLLSLFRRRAALVQARVGLVQSWANEPLLKAAFAEQIASMQRLEVLVEKMINALLKEAGLLAHLRRCMKVEGIGFLTGARLIAAFQRGEFKNADAFIAFLGMDLRVSQSGQKDGRRSLTKRGDPEARRLLHNAAMSASRTAAWKGFYEEQRAKGFSTTQALVILARKLARVVFALLKGQSEYQPKAS

SEQ ID NO: 195746 - protein, 338 aa, unidentified
MTLYAGIDLHSNNSMIVVQDEEDKVVGRKRLPNDLLAVLEWLEPYREDLTGVVVESTYNWYWLVDGLMDHSYPVHLANTAAIQQFDGLKFRDDTSDARWLAKLLRLGELPEGYICPQGERGIRDLLRKRSQLVRQATMNLLSIQSLFARSRGENVSANQVKKLTADDLDAAFADANVALAVTSNLNVLNCLRRQVALLEQAVHGQVRLRKSYKRLTSVPGIGKILALTIMLETGDIRRFPHVGNYVSYCRLVSSAHLTNGKRKGAGNTKNGNAFLCWAFVEAANFAIRFNPMVRAYYQRKQARTKRIVALKAVAHKLARASYHVIADDVPFQLNRVFL

SEQ ID NO: 195747 - protein, 420 aa, unidentified
MERMVERCAGLDVHQATVVACVLINERGRRPRKELRTFGTMTHELEALRDWLVAERVTHVAMESTGVYWRPIHAVLEEHFTVIVGNARHIRNVPGRKTDVKDAEWIAELVCCGLIRPSFVPAKPLRELRELLRYRRKLTEAQAAERNRLQKQLEIANIKLGSVATDVFGVSGRAILRALIEGASSPVEMAGLARGRLRRKRDELAHALKGRLDDTQRFLLSMQLRRVEDIEILIKELDQHITGKLGPYQTELALLMQIPGVDWVVAAALIAEIGVDMSVFVSVHHLAAWAGLCPGSHQSAGKRKNTTARKGNVHLRTMLVGAARPAARTKGSYFKDKYYRLKARRGSMRAALAIAHKILVAAYHMLARRVDYRELGEAYLDRIDQTRTAINLKRRLERLGYVVSILPQTTHSDAQATHPA

SEQ ID NO: 195748 - protein, 324 aa, unidentified
MFYLGIDVAKAKIDCCLILENSANKKKTKTFSNTPKGFEQLQIWLNQHAATSTQTIILMEATSIYHELLAKYLFDEGYQVSVTNPARARYFAQSMSKLNKTDKVDSEVLARFAMTANLHFWQPLPKHIQLLNALLDRRAVLCEDLQREKNRLEKAESTFTMEPVLQSLHKSIEQLNQHIQGIDQQIDDHIDQNPDLKNDKELLSSIPAIADRTSLLMLSFLRSHTFERASQAAAFVGLVPTQKQSGSSIHGRSHLSKAGSSKIRAGLYMAAIVATRHNPHIKGMNERLLANGKTKMMAIGAAMRKLVHLCYGVLKHQQPYQADY

SEQ ID NO: 195749 - protein, 368 aa, unidentified
MIVQRTSVGLDVHARSVRAAVIDSVTDEVIERMVSPVVERVVSFVDEIAAGHGSVLVTYEAGPTGYGLARALLAAGHGCQVAAPSKLLRPAGDRVKTDRRDALLLARLARNGDIVAVTIPTVAQESARDLVRAREDARATLMSARHRLSKLLLRHGHVYDDGDAWTGRHDVWLRRIRKEQLLPAGGGTLAAFDDAYDAVTHTVGRRDRLDRDIAVLAADCEFTAVTRRLGCLRGISTTTGFALAVEIGDWQRLTGASIGAYLGLVPSESSSGASRVQGGITKTGNSHARRLLIEAAWHHKPVYRPGKTMTDRWALASTAAAARGDAGNRRLHRRWQVMSAHRKRHTVANTAIARELAGWCWSLAVMDD

SEQ ID NO: 195750 - protein, 358 aa, unidentified
MKIIGCDLHARQQTIAMLDTDTGELEEKTLEHEGDTVREFYSALPGPILVGIEATGSMQWFLEMMEELGIECRVGHPAKIRRAETRKQKHDRRDARLLLTLLAENRFPTIWMPSSEQRDLRTLLRHRHQWVRLRSRVQHTLQSMALNHGLRRGRSLWSQAGQDELRALPLAPHASERRAALLSLYPRLQESIDQLDQQVGQQVDQHPPARRLMTHPGVGPITALATEVFLGDPLRFIDGKALASYIGMIPSEHTSGRRQRLGAMSKQGNALLRYLWCEAAMHAVERDPELKRFYRRKLVQKGLGKARVAAARKLGIRLWIMMRDQIDYQEFCRRGKARQESGSVRAGMPDRNSGPAAQ

SEQ ID NO: 195751 - protein, 384 aa, unidentified
MQKPNDLNQSRIVLKQDSTLIAVIEMSLSSWLVAGIVPGVERQPLKKLAVDESALLKLLNRWREEAEKAGRRIERITVAFEAGRDGFWLARWLRARGIEAHVIHASSVAVSREHRRAKTDRLDTELLKRAFLGWLRGERDHCKMVAIPTTKDEDAKRPNRERQSLVGEQTRIVNRMKAALIRLGIRGFNPKLKKAAGRLEDLRTPEGEPIPPNTLAELHRDMERRRLVSDQIRQIEKARLERMEQAPGDGPHAMVRLIARVIGVGIETADMLVHEVLSRKLRDRRAVARYAGLTGAPDESGSKRREKGLAKAGNARVRGGMIQLARRFLLFQKDSALAQWYRTRTEGGRNRKTIIVALARKLLIALWRLVTTGEVPAGVVLRAA

SEQ ID NO: 195752 - protein, 360 aa, unidentified
MRYSTIVGIDTHSKKNAVCAIVPATGEMREAVLSEDPGQLLSWISGQGFPEPVGCIYESGPAGFGLARALEAGGVACTVAATSKLSYRVDRQKNDRADAKWLARQMLAGGVRAVRVPTPEEESLCHLSRLRGEVAADLRKAKQRVSSFLLLTGTEYTLTKKKWSKTFRKWAESHEFDQPADTFTFRCKMSAVLRLEERLAEVEAEILRTIASSPKLSERMSRFTCIHGIGKVSAFSLVCEVHDFDRFNNGASFASHLGLVPSESPSGKKVSRGAIAKQGNSHLRRILVEAASCYSKQFKAVRSEDSAVPEAVRAKAEKCAARLRKRRAALKMRGVSANKAKVAVARELAEWIYHIAVMPA

SEQ ID NO: 195753 - protein, 325 aa, unidentified
MRQPKSQVKPQTQVGLDISSQTLDAHIRADGKAFSVPNTDAGFDQLCNLLSAYDVTLVLMEATGGYEDNVACYLQLQGYDVVVINPRHARRFAQSMGRLAKTDRIDAAILSHMAFMIDSGPDRERYIKPVTDEQRKQLSRMSSRRRQIVDLITIEKQRLTHADDYARESINDIISLLNARLKRIESDILRYVKKNFSELADRLLSIPGVGSQAVTVLIADLAELGHVNRRRISALLGVAPFNHDSGKFKGQRRIRDGRQSVRNVLYMGVISATRFNPVIRAFYDSLLLRGKPRKVAIIACMHKLIRIINAMMRTGKPFDVSLHGV

SEQ ID NO: 195754 - protein, 392 aa, unidentified
MGPHIRVGIDVGRKNHHVGISSPEGVLIEEFSIPHCQKGFDDFFCRVERHRRGLPVAVAMEGYGGHARPLDREIMRRGYELMNVNNLKLARFREVFPAPAKSDALDTRLILNLFTMDEHLPLSRGTLARVCEVPEENEKLRRLSRRRRELVQEKVATLNRMQADLAAVCPELLGITGSADNLWFLRFLTCRDDLAKLARLRPESILKIPGVGKKYAEKIRSWQAGACFSPEVGYVGPMIVADARRVLELLAQISSLEAAMAELAASSEIARRLATIHGFGEICVAELAGEIGTQARFAGEASLALYLGMCPLDNQSGDYHGSKVPKQVNKRARMAMTNALAHHIKYVPQSRAFYDRKRAEGKSHNQALRSLGRHMVRVIWCMLRDGRDYELR

SEQ ID NO: 195755 - protein, 362 aa, unidentified
MECYIGLDVSQRQTAICVVDAKGKIVVEGKSLTRPGDIHGWLVARDVQISSIVRIGIEAGAMSAWLHIELTKLGLPLICLEAFQAHRFLKTYRNKTDKNDARGLAQLVRIGGEFIRPVTVRARSSQEDRTLLTLRQQLVQQRIGLENNITGSLKPFGLLVPRGNVNSKTFRERVMAALVKADELGLTLSDGIMPSLDLYEDLCKHLAILTRRVEAVSRDSPVCRRLMTAPGVGPIIALSFVTAVDNPLRFSNNEDIGAYFGLTPKQYQSGETDYQGSISRLGNSMTRVHLVQAATVLLSSSRKWSTLRAWGMKVAKRRGFNKARIAVARKLAVVLHRMWINEQDFRWSNKTEGSELASSAAA

SEQ ID NO: 195756 - protein, 308 aa, unidentified
MTIHHTFIGCDIGKDMIDIFDPRTARFCRIPNDEAALSTFAHRLDPATDLVVFEATGHCDRLLRLCLSQAGIAFARVNPKTARRFAEARGRLAKTDRIDARSLCEMGSMFGLTAEAPPCPVRERLAALARRRDQLVDARATERRHLCDAFDPAIRADIETMIAILGEKIASIQAEIDDHMKSQALTEHAHRLTSAPGVGKVTALTLLAHMPELGALSPKAAASLAGLAPFNDDSGKRSGRRRIKGGRPRVRKALYMAALGAIKASARLRAFHQAVSARTGSAKAGIIAVARKLLTILNAMQRDKTHFA

SEQ ID NO: 195757 - protein, 370 aa, unidentified
MEKIVYVGLDVHADTIAIAVADDGRNGEIRFHGVIENTADSVQRLTKRLVAANTRPTFCYEAGPCGYGLHRLISKLGFDCAVVSPAMIPRRTGDRIKTDRRDAEMLARLWRAGELTPVWTPDEEQEAMRDLIRTRKQFLDALKIAKQQLQSFLLRHGLRYNRPTYWTKIHWRWINDLRKFRFPHQQLAFEELKRAIRQIEERISTLDQAIEDAVKDWRFGDLVDALRSLRGVNTTIAATLAAEIGDISRFESPRQLMAWLGLVPSEHSSGNTVRRGRITKTGNALARTMMVEASWSYRHPAREGHPYLKRCQHQPQEIKDIGWKAQTRLCKRYRDLSKTGKPQPRVLTAIARELAGFIWDIARRIPIQVR

SEQ ID NO: 195758 - protein, 418 aa, unidentified
MDARFKRTDLKKKGVVMHYLGIDVSKASHQCVILDAEGEALGKSFTIQSSKDDFANLVKKLSDLNIPQTDITAGLEATGNLWENLYVYLKERGFNIVLLNPFQTSKFHQAMLKKAKTDSIDALVIAGLLRSGCAAGSYIPDEEIQSLRDLIRLKDGYLKDTKNYKRKAYSLLNLVFPEFLNLIKDPFNISCTEILSKYQTASDFKSIRPKDLLKIARGHQGNNYDEAWAGKVIQAAKDSIYSGKASKARGIVVKSLVLNIKNLKEQMIELDNEIQNILKTDDDSSNNDTDNLLTIPGVGPKTIAVFIAEVGDITRFASCKDFIGFVGLYPKIEQSGSSLNRAKLTTKGSRLLKHALYMASVASLIHNPYLKSVYNDKLSQGKCAKQALIVVSRKIACIMYSMLKNNTAYNPGRVAIAV

SEQ ID NO: 195759 - protein, 403 aa, unidentified
MQYLGIDLHRKQMTVSLRNHNGDVLLRRQVSTRWPKLEEFRNQLHQTLADGEKYVAVVEVCGFHDWLVQWLNRDERCLQVLVVQPLGRSASKTDRRDAHGLSELLWVNRERLLRGERVQGVRTVQVPSEEEQADRCLTQARERLVRRRTQTLNQIHKILRRQNLEWERPTETFQTVKVRRWLKTLQLAPIDRLAMDHLLVQWALWDEQLVAADGWIRERFLANRNAQLLATMPGVSRFIGLAIACRIAPMERFPQGRSLANFLGLTPGCRSSGDTERVGSITKIGSRMVRYLLAQAIQHVLRRDGSIRAWYQRLKRRRGSKVARVAVMRRTATIMWRMLSTGEPWRCGRARSEMPEADEPRQTRVPQDGPAEQLAPSADPELAGFNTGSSSLLAGEEVAPCPA

SEQ ID NO: 195760 - protein, 356 aa, unidentified
MDSTKYIGMDVHKESISIAVRNAAGKIVMECVIETKANMILEFVDGLRGDVHVTFEEGTWAAWLYDLLKPHVTKLVVCDPRRNALLQDGNQNDRIDARKLAELLQNNQLRPVYHGDHGLRTLKELVRSYLTITKDLSRVMTRVKAIYRSWAIACTGKQVYSPRHRSEWLGKIHEVGVRRRAECYYQQLDALRSLRQEARRDLLAESKKHKAWKRLCQIPSIGPIRAAVLLGILQTPHRFRTKRQLWTYSGFGVEVHSSADHQAVKGQLQRKMKRHMEVRGLNENCNHDLKNLFKGAAIVASTKPGPFEEFYAALLAKGMRPEMARLTLARKIATIVLIVWKRGVCYDAQHLKPQTV

SEQ ID NO: 195761 - protein, 343 aa, unidentified
MDHFAGLDVSVKDTSVCIVDDAGKIIREVKVASEPDALLQVLRTAAYHFKRIGLEAGPLSQWLFGALAEADLPVICVETRHMRAVLKAQINKTDRNDARGIAQMMRVGLYRPVHVKTLRSQKLRMLLTHRKLLQSKAIAIENDLRATLRNFGLKVGVVGTVKFEARIKELIENFPDLVALVEPLLVVRRVLREQLELLHRHLLAVVRDDAICRRLMTVPGVGPVVALTYRATVDVPARFRKSKSVGAVFGLTCSRDQSGERDRPGAISRCGDEMMRAMLYEAAQAMLLRSAKWSWLKAWAMQIARRRGMKRAIVALARRLAVILHRIWVDGTEFRWTREVAAA

SEQ ID NO: 195762 - protein, 342 aa, unidentified
MEVDVLGIDLAKRVFQLHGASKTGIVLHRSKVSRPSFLEAVRRLNPKLVVMEACSSAHHWARVLQRQGIEVRLISPQYVAPFVKTNKNDRNDAEAIVEAASRPAMRFVSIKTVEQQDLQALHRLRQLLVHQRTAIINQVRGVLAERGIVVAQSPAAFHRAMPTVLAGQDDELSQFCRGLLVELLEHLKSVEEKIDSCDARVKAFMASSQACKRIGEIDGVGPLTATAIVAAVGDASEFRNGRHLAAWLGLVPRQYSSGGKSKLYGISKRGDTYLRTLLIHGARAVLRYVVGKTDAQSRWLQQLIERRGYNRAAVAVANKNARIIQALLSSERTYVRKAAVGS

SEQ ID NO: 195763 - protein, 348 aa, unidentified
MKHIGMDLHRRNSTYCVVDEEGNVVSRGKVESNEEGWLSLLKRWPAKEVGLAVETGTLTWWAVDCARSIGIEPVVVDARQFKMVASSKKKSDRRDAFHLADALRAGLAQRCAVAVPSLRARSGRGVLEARATVVKQCTMSRNAALGLLRSIGLKVSVRCFASDAHWERFLAENVNQVPASMRASLEIHRRTWKALRSSRKEFDALVEAELQRWPEADRLKDIPGYGDIVTLAVASGIDDPKRFRTEKQVGSYAGMVPTVRASGDSAWHGGITHQGRGLLRVTMVQAAHSALNSKRLNPALKRWVWRLLLTKGRQVAAVALGRRLLTLGYKLLRSGDTYDPNFGATATT

SEQ ID NO: 195764 - protein, 420 aa, unidentified
MRNAGIHANSLLEVRRMYNAVGIDVSKGKSTVAVLQPGGTVIRKPFDVSHTSQNLNELADYLSSLDGTTKIVMECTGRYHEPMVKALSEAGLFVSIVNPHLIKNFGNNSLRKVKSDPADARKIARYTLDNWTELRQYSGMDNTRTQLKTLNSQFSFFMKQKVAAKANLIALLDNTYPGVNKLFDSPTREDGSEKWVDYAYSFWHADCVRKIGLKAFTERYKSFCKKHHYIFQQDKPEKLFNASKELVAVFPKEKTYKLLIQQSIQQLNLASEHVERLRREMNELASTLPEYSTVMGIYGVGKTYGPQLIAEIGDVSRFTHREALTAFAGVDPGVDESGQHKSKSNRASKVGSARLRKTLFQIMTTLLQNASEADPVYRFLDKKRSQGKPYYVYMTAGANKFLRIYYGKVKECLRNLEQTE

SEQ ID NO: 195765 - protein, 413 aa, unidentified
MTVFCGIDWAEDHHDIALVDQHGTLPAKRRIGDDAAGFATLLQLLAEVGDSADAPIPVAIETSHGLLVASLRATGRPVFPINPMSVSRYRDRHSVARRKSDAGDALVLANILRTDLAAHRALPADSELVQAIAVLARAQQDAVWARTDAHNKLRSLLREFYPAILQAFASKRGGLLRPEARALLAAAPTPRAAARLTMAQLRALLRRAGLQRGIDAEAARLQQVLRGDYLHHPSLVEEAFGQQTLALLRQLDTAYANAEQLAAATAERFAQHPDAAIITSMPGLAELTGARILAEIGDDRARFADARGLKAYAGSAPVTRASGKSTAVLHRRVKNQRLASVGYVWAFAALTASPGARAHYDRRKAAGDRHVAAQRNLFNRLLGCLHHCLHTGQTYNEATAFPAPSNTTQARAA

SEQ ID NO: 195766 - protein, 415 aa, unidentified
MKGTEDTSQIERYIALDIHKEYVLAGGQNAKQEWVMPPRRISMAKFRGWAAANLHAGDALVLETTTNVWDIYDIVAPLTTRTVVAHAGAVRQIAEARVKTDKEDVKRLIRLLIADIVPEVWVPPVEVRELRGMISYRQRLVKMGTMVRNRLQSLLHRHNMLLPKGKLLDATWWQEQKMSTLEKMQIQQELAMLEELDRHKREVDAELGRQCLREPRGKQAVRLLQLPGFGVVMTMIVLSAIGDIQRFESAKKLVGYSGLGAGVHDSGKEHIEKRITKSGRKELRWALVEAAWQAIRISPYWKEQYEKYLRRMRKPNQAIVVIARKLLVAVWQVLTKEETDLHASEEDLAYKMLVLSWDLDESVRMGLTYKQFAKYALMKLGIETDITRFVRRNVPRRVASREETLARMEELGLTC

SEQ ID NO: 195767 - protein, 339 aa, unidentified
MAILFVGIDLAKNVFAIHGVDEHGKVVLVRPSVPRARLHQLVAALPPCTIGMEACSGAHHWARLFVQHGHTVRLMAPKFVAPYRMSGKRGKTDAADAQAICEAVQRPNMRFVPVKSQDEQARLCIHRVRQGFVEQRTATINRLRGLLSEFGIVLAQKAATVRREAAAHLEDLPGWANTAVGDCLSEVHRLDERLAEYDRHVNQMAGEDERSARLMQLQGVGCTTASAIVSTIGDARDFKNGRQLAAWLGLVPGQYSSGGKTRLGRITKAGDGYLRTLLVLGAKSVLAAARNRHDRLSRWATALEMRCGYWKAVVAIAAKNARMAWAVLAKGDAFKLIEA

SEQ ID NO: 195768 - protein, 375 aa, unidentified
MCERAVLTNRPSLDLIPFVLKGLEPVGERGTDPVSSLNPNSCTGFEPEPSKEGSWMMAQNELVVVGIDVAKDKVDACIRSLSQRQTFPSTAEGRRDLIAWLRKHKVGKAVMEASGGYERDWAKALRGADLEVRIVDPKRVRSFARSAGRLAKNDAIDAEMIAWFAETFGEAPAQAYDADREKLVQIVNARQALLDVRTELQNRNEHSVPDVVQKMQARLLKKIALEVAKLEAAIAAMIKATAHFTELAEIIESVPGLGEGTSAGLIAAMPELGQVSNKAAAALLGVAPYDDDSGKRRGERQIKGGRRKVRNLFYMACLGAATQHNPVLKAFYRRLIAKGKEKKVALVACMRKLIVILNIMIARGEKWDASRHAVG

SEQ ID NO: 195769 - protein, 342 aa, unidentified
MNRVYVGLDLGSSNFHQVAISERGVSTLNRELATSEANLVKAFSGMRGEIHVHLEAGELAPWASEIIRPLVTRVVCSHPQKNAWIARDRDKSDRVDAYKLASLLRLNEFKEVRYPQSQLRRDFKAVVQHYDELTQQQARLKTKIKARLRMQGVITRGQLGFSARGRKAVLQAVKSVVVRTAIQQLYGMLDQSLESQAEARRLMLRAAQALPEISIMRTAPGMGPIGACRFSAYVHAPQRFSSTRKLWKYCRLSVSHRSSNGKPLRRPRIDRSGCGRLKDVSRKAFEAAMRRKDNNGFQRAYYRALEQTHDATHARLTVQRKIVSTLRAMWINQTPYGDQLMP

SEQ ID NO: 195770 - protein, 451 aa, unidentified
MAQVKPQVIDDEQHDRVHERVAAVDVAKDTGMVCTRTPHPSRPGARQSTVWTVKARMTVIRALGRQLKADGIEMVTLEATSDYWRIWFYVLETAGLAVQLVNAAQARNLPGRPKTDKLDAMWLARLTEMGLLRPSFVPPAAIRALRDYTRARTRLVQERTRCFQRLEKLLEGALIKLSSVASKLTTESAKDMIKAMIAGERDPHTLAALARTRMKAKHDDLVEALTGMFDDHHGELARILLDQAAFCDARIAQLTARITAAVAAMPAAWGVDADGTTGPDAGTGPDAAALPAAQRLAEIPGISPDLARSIIAEIGLDMGRFPTAAHLVSWAGLCPRARQSGPRTRSGKKNQGDSWLRGTLGQAATGAARTATFLGERYGRIARRRGKAKAQVAVARSILIIIWHLLSNPQARFADLGSGYYQTRTDTDRKLRNHIRQIQALGFDVTITKTA

SEQ ID NO: 195771 - protein, 409 aa, unidentified
MQVVHERCAGLDVHKKSVSGCAIWPGEKGRKQQEIRSFGTVTADLLKLADWLREHGITHVAMEATGVFWRPVWAVLEGQFELMLVNPHHIKAIPGRKTDAKDSEWIADLLQHGLLRGSFVPPAEIQDLRDLTRYRTELVQAQNRVDNRIQKLLEQCNIKLSSVASDTLGLSGRLMIEAMSKGEEDPERLADLAQRALRKKIPELRLALAGRVRDHHRFLLKEFLDEWKALEERIRRIEEEIDKRIAPFEAAVQLWESIPGVDHVSACNLVAEIGVNMAQFPSAQHLASWAAVCPGNHQSAGKRLSGTTRDGNKWLRRTLCQVAWAVTRKKDCYLSAQFKRLAARRGVKRAVMAVAHSILIIGYAMLKTGRSYRELGGGYLEQINKQQLQHYFVKRLQRLGLTVSVTPAA

SEQ ID NO: 195772 - protein, 420 aa, unidentified
MAKKGTKVRIEDLQDIYEYCAGIDVHKGGVTVCAICGIGRQIDAEVVEYGTTTGELRQLGEWLREKGVTHVVMESTGVYWRPVWQILEGAGFQLLLANAKQVRNVPGRKTDQSDSIWLATLLRKGLIRGSFIPPAAIRVLRDLCRSRASLVRDRTRVIQRIEKVLEEGNVKLDVVASDLVGKSGRRILGRLAEGETDTVAMAELALGRLRSKIPRLIQALEGSFRPHQLFLLRELLEQYDYLCKKVERFEIQLEEYARPFEEQIQRLDAIPGVNRLSATAILSEIGVDMSRFPTPQQLCKWATICPGNRESAGRKKPGKTGRGNRWLRGTLTQCAWAATHDKNSYLAVQYRRLLHRGKQRALVGVAHSVLNIIWHLLRHQIEYQDLGVDYFERQNLEGQKRAYVKKLEKLGFTVQLEPAA

SEQ ID NO: 195773 - protein, 330 aa, unidentified
MPVNYYVGIDVSKADFYASFDEVSSSIRYENTKKGINTFLREMNKRFYTNQNTIIGLESTASYHLLLCVICTDLGYTVNVINPLTVKTQNQTSLRRVKHDAKDASLIRYCLTQGTGYPFHETTETLTVRSLVRQRNSLATILLKLKRQIKDIEHKQYCLGTTLPNTYQDIRPLLEKKSKELEKILKTHRTQEQRLLQSIPGIGPLTAAAFLSEVQDIKRFATPKQLTAYIGLDSRVHQSGTSIHGKGYISKRGNKILRTRLYNAVSVAVLRPNTFQVFFQKKMAEGKPYKVALIATMNKMARVVHSVWTNNQPFRDYYYNPPKSSKSTEA

SEQ ID NO: 195774 - protein, 366 aa, unidentified
MEKTIYIGMDVHTTNYTLCAMGVEGRKYFAETQIEPDVKILVKYFKRIQEQHPDTKLMCGYEAGCLGYSLYEQVTAKGYECVILAPTKIPHTQNEIKTDKRDARKIAECLANGTYSKVYVVSDEDNAVKEYIRMRDASKENLKRIKQQIISLCTRHGKHYPGRSYWTQAHLEWLKKVVFDNSLMNETLNEYMITFNYLKDKIERFDERIEELAKQKEYAKKTSMLGCFVGIKTHTALSAVSEIGDFSRFPTATQFASFLGLVPGEQSSGGNQNRKGITKTGNTHLRKLLIEAANCYGRCTTKKSAALKARQKGNDPDVIAYADKANDRMRRKYMRIAMRSKSNIAKCAVARELACYIWGMMNEKIY

SEQ ID NO: 195775 - protein, 348 aa, unidentified
MDIIGLDLHKRESQLAIKAEDGTIAERRIVTSRERFTAVLGGRPRARILLEASTESEWVARHLESFGHEVIVADPNYAPMYANRSRRTKTDKRDARTLLDACETNAYRPAHRLSEARRHVRAELAVRDALVRTRTRYIALAKALVRRDGLRVPTSASSWVPTRIAALDLSPALATELTPLFAVYAPLNEQIAAADRRLAVGAAADPIVARLATAPEIGPVTASAFVATIDDITRFGSAHQLEAYLGVVPSERSSGEKRQLGRITKAGNGRMRWLLVEAAWRILRSKSPATAALRAWALAIARRRGKRIAAVALARRLAGVLYAMWRDGVPYDAQRIRPLGVTVHERAG

SEQ ID NO: 195776 - protein, 419 aa, unidentified
MKNSNTKKLKSISEGTLLVTIDMGKVKHTGYYRFPNGTEGKPFEFFNNRKGFEGFWWQVCQAKKSLDLAEVVVGFESTGPYAEPLLHFLRKRDVRLVQVNPLHTKRLKELQGNSPNKTDQKDPKVIADIIELGHALTVIIPEGTVAELRRLTQARERSIQRMRMLMSQLQDLIFLIFPEFMPVMKDITIKSTQYLLKNYPRPQDIVEQGIDRLAQTLKKVSRGRLGKERAEALYEAAAESIGIGEGRESIVLEIKETISVIENIEKFAKELEKHMSKHLKDVPYSRCILSMKGIGEITAAGLIGEMGDFKNYRTISEVIKHAGLDLFEISSGKHRGTRRISKRGRPLLRKLLFFASINVVRKGGILHKQYQHHLEKGMPKMKALVAISRKLLSIIFALVRDHSVYIAEYSKTQQLKEAA

SEQ ID NO: 195777 - protein, 438 aa, unidentified
MSNKVIFNLDELFISVGIDVGADFSWMSIALPNQQFVGKPYKILHNKMSSLTTAVSKIKEAEELYSLESRIFLESTGIYHYPLFCYLRDKGFNCSVINPIITKNSTNINIRKVHNDRFDSKKAALVGLKPDLKVSLMPSDLALNCRNLCREYYDLMDNRSAYVNKLQGELRMAFPQYLGIFSKVTTNTSLTLLETYTSPSAFIAADRQEIIDTIKSTARFGLTYAQNKYDAIVQAANEANDFGYIIDSNIKRIRLYISFIRKYDEEIASILDAMHELVDTNESTDFVKQIHLIETLKGAGFLSAVSLMGEIGDFSAFSKPKQLFAYFGLDPAVKQSGKFKGTRIQMSKRGSAIARRVIHTLTLQSISTSRTGEAKNPVLRDYYLKKCESKPKLVAMGAVSHKVCNMIFAILRDSKPFEIITPQEHNKQYNTTKYGIAA

SEQ ID NO: 195778 - protein, 388 aa, unidentified
MQTVADRPEAPTAIRTDLGAIFVSLELSRSTWLITSLSPGGGEKMSKQVVRGGDVAGLLERFARLREKARARTGKVFPFVVIQEAGLDGFWIDRALQNEGIESHVVDPASIATSRRRRRAKTDGIDGEGLVRALLAYKRGEPRVCAMIKAPTPEEEDRRRLCRERKVLIVERVRHVNRVKGLLFSQGISGYEPLRRDRRRRLDTLQTGDGRLLPVHLKAQVCRELDRLELLLEQIKAVEAERDVLLAAQQVAAPAPAAMLLDIKGIGPEFAAILWSEGLFRHFDNRRQVASYAGLAPTPWQSGSVDREQGVSKAGNPRLRTTLIQLAWLWLRHQPHSALALWFEERVRRNGGRLKKTTIVALARKLLVALWKYVTAGVVIEGAVMKRT

SEQ ID NO: 195779 - protein, 328 aa, unidentified
MAKGITICAGIDTGKYKLDIALEGASEQLQVDNTLADHNVLADWLRRHRVKRVGIEASGGYEQAVVAALRRRRFVVVVFQPAQVRAYAKFRLQRAKNDKIDAALIAACTAAVKTIHAPPDPRLAPFAEQLTMIDQIGEDIARLKNRLETCRDPRICQAWSEEIARLTKRRNGELKALVAAIRQHRDLAERLALIESVDGIGLPTAVAIVVRLPEIGRITREHAAALAGLAPYDDDSGEYVGIRHIAGGRERLRRALYCAALPASMRWNPQLIALYRRLIAAGKEHKRALIACARKLLIFANTVVARGTPWGRTAPVLPTTSHAQLAVA

SEQ ID NO: 195780 - protein, 384 aa, unidentified
MGEAQGRGPPWSPNGIDVPEWRCSVTTRGTGGSTMNVTTYGLDLAKRVFQVHWVEPETGELKRKALSRSDVSVFFARRQPGVVAMEACGSAHHWGRRLRDLGHEVRLIAPQFTRPFLKTNKTDVADAEAIWEASQRPGMRYVALKSEEQQAVLSLHRIRAQLIKVRTMQANQVRGLLYEFGMVVAKGWRVLLAEVAPVLAEGGRGLVPELVRRELLTQVEGLRMLTSRIHELERQIGAWQRRETECRRIAQVPGVGQLTATAVVAMVGDARTFRSGREFAAYLGLVPRQWGTGGRVRLLGISKRGDPYLRTLLIHGARAVVLQQSRADREQDPWLKELLSRRPKNVAIVALANKMARTIWALLAYGREFDRSWSRAQMPAAAYS

SEQ ID NO: 195781 - protein, 372 aa, unidentified
MKDAMKYVGLDVSKEKIAVAIAEEGRDAPRYWGLIDHTPEAVKKVMKKLGKTEYVRVCYEAGPTGYALYRLLSDMGIHCEVIAPSLIPQKPGERIKTDRRDAIRLAQLYRAAELTSIYIPTPDDEALRDLVRCREDAKEDELRAKHRLSKFLLRNDLKPPAAVNKWTVKYLHWLDTLKFENAHLRVVFQEYYHQLKELKQRILRLEEEINIHAKEGIHAEKVQALQSLRGVALITATSIVAEIGSFKRFTTARQFMAYVGLIPSEYSSGEKRKQGNITKTGNRHVRRLLVESAWSYRYQPAVKGELKKRINGQSPTIQSISWKAQNRLHKKYYRLLSKGKNGGKAVTAVARELAGFIWAVMQEVEDLPNPNS

SEQ ID NO: 195782 - protein, 326 aa, unidentified
MELVTPHSIIGIDVSKDTLDVATSTDNRVRPYANTASGFARLIVSLRECTDPLIVLEATGEYHIPLVEALEAAGYLTAICNPAWVRNFAKSQGASVKTDKVDARMLVAYGRARNPERRPLLPPLLREIKALLARRDDLVGMRTMERNRIKGTHDDSVRASAMRMEAVMTAEITMLGSEIARLIASDPAMAAQYRQLCSTPGIAMVCAAQILVSLPELGTLSPKQLAALVGVAPYARDSGKKRGKRFVQGGRAALRKALYQAVFVAIYTVKHDHALKGHYRRLRAAGKAHDLAMVATMRHLVIYLNVMVRDGLSWNELDVNQVQKAA

SEQ ID NO: 195783 - protein, 370 aa, unidentified
MGNRSMFVGLDVHKETIDVSIADGGRHGEVRHYGVIASDLEPLDKVVRALRAPARTLHFVYEAGPCGFGIYRHLRKRGEDCVVVSPSMTPKRSGDRVKTDRRDSVALARLHRAGELRPIYVPDDTDEAMRDLVRAREDAVAVGIQAKYRLKAFLLRQGRRYPGREGWTLAYRRWLTDLSFPQAAQHIALQEYRDTIDETERRQDRLTEQLRQLAPTWRWAPVVAAQQALRGVSFITAVALVAELGDLTRFGHPCELMAYLGLVPSEYSSGPTVRRGAITKAGNPHVRRLLAEAAWAYQGIPRIGRQHAYRQEALPKVVCDIAWKAQLRLTTRFRRLIARGKAKPKVATAIARELTGFIWAIAQEVSPTSQ

SEQ ID NO: 195784 - protein, 343 aa, unidentified
MQAVTTIGLDIAKSIFQVHGVDAEGNVVVRRKLKRRYIVAFFQKLPPCLVGIEACASSHYWSRELQALGHTVRLMPPAYVRPYVKRHKNDAADAEAICEAVTRTNMRFVATKTSEQQSCLMLHRTRHLFIRQQTAVINATRAHLAEFGIVAPVGRNGVEELLNVVADSTDKRVPEIARACLAALGAQLRMLKTQVLEFDRLIMAWHRSNETSKRLDEIPGVGPALATALVASVGDPRAFRSGRDFSAWIGLVPKQNSSGGKEKLGNISKRGDRYLRSLFTIGALAVIRYAKLHGAKHRPWLTALLARRPTKVAAIALANKIARMAWAMMAKGERYKEPVALAM

SEQ ID NO: 195785 - protein, 427 aa, unidentified
MPYKIAGIDVHKRMLHVVISDVQVDGEYDFARRIFGSLPEALRSLAAWLVEQQVQEVVMESTAQYWKPVWGTLERYWKPICQTREGTLATSGTLHLAQALSNRGRRGRKKDFRDAERLVKRLVAHELVLSFVPDAEQRLWRTVVRTKYQLTRNRVQLQNRLEALLEEAHIKLSSLVSDLLGASARRMLEAVSDGETNREILAALADRGLRATQEQLQDALSVCQELNPVYRRLIRMVLDEVASIDKRIEQLNQEMANLLRPHEDQVKRLAEVPGLGVDSAQQVIAEVGATAATFPSEKHLSSWVGACPGDEESAEVNYSRRSPQGNRHMRRILNQAANAAVKYKGSIFEILYRRYVPRLGHNQTIGIIAHKLCRLVWKILHRGIRYQERGPEVSKASKQKRTRKMIQALRKLGYRIEPSPSQSAISA

SEQ ID NO: 195786 - protein, 346 aa, unidentified
MSMTTIGLDTAKSVFQVHAVDAAGKTGIRRKLSRAELIPFFEKQAACTVIMEACGAAHHWARLLIGLGHTVKLIAPEAVRPFVKKGKKNDAADAAALCVAASRPDMKFVPVKPPEQQGILALHSARSLLVKQQTMLVNAMRGLATEFGLTVPQGVGRLAELKTRVDEDEAFPETARRVFTALLDQYGALAKSIETFEAAIVAHARNDETARRLATIPGVGPLTASLIAATVTDISLFKSARHFAAWLGLVPRQYATGGKTRLGRITKAGNQEIRQLLVLGATSMLHRAPQWNSAVGAWARGVLARRPVRLASVALANKMARIAWALMTRKEVYQAKGHGVAATQAA

SEQ ID NO: 195787 - protein, 353 aa, unidentified
MLIIGCDFHPSFQQVAIFDNRTGEIQKKRLQHREEAEQFYRGLVGQPVRVGMEACGHYPWFERLLAELGCELWLGDAAEIRATVVRKQKTDRRDAEHLLDLLRQDRFPRIWVPSLEERDVRQLLVHRHKQVQARTRVKNQLQAMALSQGVQKKRKLWTEAGRPELEKLELLPYAAERRKQLLAALDGLEAEIEQLNRRVEAEVAKRPAAVKLQTHPGVGAVTALALVLTLGPSERFPSGKQVGSYFGLIPSEYSSGGQQKLGHISKQGSSFLRFLLVEAGQTAARYDGELGRFYRRLAVRKHRALAKVAVARKLAVRLYLMLREDWTYAQLCRAVVQASPSHPVVGRQNRALE

SEQ ID NO: 195788 - protein, 322 aa, unidentified
MIKEAVYVGVDVAKSALDVAVTDSGETWQFVNDDEGISQAVHYIASVEPAGIILEATGNLEMPLAAALQASRLPVAVINPRQVRDFARATSALAKTDTFDAQILALFGARVKPEIRPLPNQKAREMCNLLTRRRQLIEMLTAEHNRVSQADDGIRSCIETHIKWLETALSNINDDLDNQIRSSPSCLEKVNLLKSVPGVGKAVSSSLLIELPELGKLNRRKIAALVGVAPFNRDSGTMRGRRTVWGGRAKLRAVLYMAALVASRRNPIITAFYQRLLNAGKAKKVALVACMRKLLTILNAMMRTMTVWQPEIILRHASVEAS

SEQ ID NO: 195789 - protein, 407 aa, unidentified
MEVVYRCCCGIDVHKKLIVACLNKGGKRELREFGTTTGEIKQLGNWLTEEGCQMIAMESTGVYWKPLYNLFEMMDLEAIIVNASHMKALPGRKTDIKDAEWIADLLRHGLLKASYIPDREQRELRELARYRKSLIEERAREINRLQKVLEGANIKLDSIVKNINGKSSRKLLEKIANNEAMTADDVSGIIHGRMRPKLDEIMKSIEGITTTLQRMLIAKIVDHIDDMTRRIDELDGMMKEYTEKYEQAIEAIDELPGIARRSAEVIIAEIGMDMNLFPSAAHLCSWAGLSPGNNKSAGKRKSGQTTKGNKALKTILTQCAKAARNCKDSYFSAQYQRIAARRGKNRATIAVAHSMLIAIYHVLNEGVAFRDLGADYYDNFNREHKIKSYLKRLQSLGWSPELAPTAT

SEQ ID NO: 195790 - protein, 362 aa, unidentified
MKKIKVSGTIMEVNPGSDVWIGIDIHKVTMAVTVVGRHTVLDKFAGPVGESHFAALSRRFAGCQIHAVYEAGPTGYKVLNWLVALGWDAMICVPSLIPHAPGAEVKTDPRDSEKLAKLLRAELLTSIVKRDDQEYAARELLRTREQIQQARTNFMRQIRSKLLMHGIEVPEEYEGGWSKEFVTWLEEGPTGNAHIDICVRLLVGQYKGLTADLDAIGKEIVKCSQSEPYKEPAARLRTLPGVGPLTAMTLLLEAGAHTQFSSGEALANYVGLVPSEHSSGGTRQQGRILRACNGHIRSIWIEAAWQAVRKEPRFTELYERLHPRRGKARAIVAVAHQMILTAYAMLRDKTSWNPTHGLKKVA

SEQ ID NO: 195791 - protein, 412 aa, unidentified
MEVLYPRCCGLDVHKSSITACVLIAQSGKPLKHIRRFGCTTRELRELVLWLQEFGVEHVAMESTGVYWKPVWNVLESHFQIVLANAQHIKAVPGRKTDTKDCQWIAELLQHGLLRGSFIPPLVIRDLRDLTRARTSLSQEHSRIASRIQKVLEDANLKLASVASNTLGKSGRAILAAIIGGEQSPERLADLALGHLRAKIPQLQAALEGQVRDHHRFLLQSLLRQLYFIETEIELLDARLEQLGQQHEDLAEALNRWVTVPGVDRVAGWSFIAEMGADVSQFPTAAHLASWAGVCPGNKESAGKRISGKTRKGSPWLRRMACQSAWAAARTKNTYLSAQFKKLAARRGRKCAIIAVAHSILVIGYHLQRKRCAYTDLGGNYFDRLHADGLRRYLVKRLESLGHSVTLQPRIA

SEQ ID NO: 195792 - protein, 348 aa, unidentified
MNYIGTDIHISTLDFKVVGNLGKVKMAREVTTSAPNFLDFIKSVPAPRQVIIEEGPLAAWLLEICDKNGEHLIISDPKRNKWIGASGEKEDPIDAEKLAQLARGGYIKEIHHPLGQRRRFRELITAYHDTNKSIVRIKNKIKAKFLQNGIQCPGKTVYSSKQRAEWRQKLPQEPALLVIIDSLWQQLDQIQDNLESILAEAKLEANRYPEIELIDEIPGIGFIIAATIVAILENPHRFANKRKVWAYAGLGIVRKSSANKTYAEKLGKEFNRMLKCVVEEAAQAAINTETDNAFRRSYARMTIQKGIDPHHAMLTVSRDIIATVWAMWKKGEHYNPAIDRQVKTEVEV

SEQ ID NO: 195793 - protein, 358 aa, unidentified
MSQHHNTKLDFTGQEIYAGLDTGKKSWKVSIYTGEREHKTFTQPPKPDMLVGYLRKHFPGARYLCVYEAGYFGFWIHDALRQQGVECMVTHPGDVPTKDKERRNRNDTVDARKLGRNLRNGELAPLYVPARKALEDRSLVRTRVQMVKKQTRCKNQIKGLLSFYGYVIPDEMVSSHWSRRFIAWLEELDFEGESGRQSLQALLEELKHLRQNIARLTRQTRSLARQEPYRIQVELLSSIPGISTLSAMTLVTEIVDINRFRDLDHLASYVGLVPGEDSSGEQERTTGISRRRNAHLRAILVECSWVAVGKDPALLMCFNKLSKRMQKNRAIIRIARKLLNRIRYVLKHQEPYETCVVV

SEQ ID NO: 195794 - protein, 358 aa, unidentified
MAGKVTETAVVGGVDTHKDLHVAAVVDQNNKVLGTQFFSTIRQGYRQMLAWMTSFGALKRIGVECTGTYGSGLLRYLQNAGLDVLEVTAPDRMERRKRGKSDTIDAECAAHAAFSRIRTVTPKTRNGMIESLRVLKTCRKTAISARRVALQIIHSNIISAPDELREQLRNMTRMQLIRTLGSWRPDASEYRNVTNVYRISLKSLARRYLELHDEIADLDVMIAAIVDELAPELIKRNAIGYESASQLLITAGDNPQRLRSESGFAALCGVSPVPVSSGKTNRYRLNRGGDRAANSALHIIAIGRLRTDDKTKEYVARRVAEGHTKMEAIRCLKRYISREVYTLLRNQNRQLNSIPITA

SEQ ID NO: 195795 - protein, 371 aa, unidentified
MKSIIYIGMDVHKKTYSLCALLKETGEIIGETKIPADVSLIIKFIENAKKSVDSDDVQIKTGYEAGCLGYSLYWQLAAKDIECDILAPSTMHRSAKNKVVKNDRRDAKNIAANLANGTYKSVYVPTDEDVEIKEYIRMMHDFKIELKKVKQHINAFLLRFGHHYPGKSKWIPAHIKWLKELELSDMYREILDEYLSQLEILSEKIERFKYRLEELSQKETYNEKIGQLRCIKGIDTTAAMTMHAETSDFDRFPTANAFASYCGLTPGEDSSGESYHRLGITKQGNSMIRTTMVEAAQVLVRGTIGKKGKKVKSKQKDQDVKVIDYADKAVVRLQKKYHRMIFRGVKRNIAITAVARELACFVWGIETGHIS

SEQ ID NO: 195796 - protein, 450 aa, unidentified
MNKGVKKTGKGKKEISFQLVNPMAAGIDVSVSEMVVAIPEGLAEESIRAFGTMTCDLRELCNWLKDCEIETVAMESTGVYWQPLFYMLLSAGFDVCLVNAAHVKNVSGRKTDESDAQWIQKLHSCGLLSGSYLPEDVQRSIRCLTRTRRSYTEEQNKHLNRIQKELESMNIKFHTIINSIAGVSGMAVLQAILDGERNPENFLVYIDRRVKASREEIVKSLEGNWDPTHLFLLAIHVASYKECQKTIEELDKELEKKLVLLEAKVNHGEIKSLPELQKRRHKNSPKAQIEQQLKNIHGVNVLSIYGMGMISALEILAETGIDLSKWRTENHFVSWLNLCPNNKKSGGKELSSKIPRRRANPASQAFKSAANALQRSQHWLGDYFRRMKSRGGNKYAIVATANKLAKIYYRMIQEKEEFKPINLQDYRTKFNQDKITYLERKLQLLKNQAA

SEQ ID NO: 195797 - protein, 412 aa, unidentified
MKDLLEISCELDVHKEKIVACILTGPLGKPTHSEIREFSTLIPDMIALRDWIVSRNCHHVAMESTGIYWMPIYEILEDAFSGDITLLVVNARHMKNVPGKKTDMRDSEWISTLLRAGLLNGSFIPEKRIREFRDLNRYRKSIIRDITSQKNRIEKFLQSSGFRLSSFISDIFGASGKNIILHLIEHGQIDRTALDSCLKTKTRNHIDEILMSVNGTLSEHQKKFLKILMNHYDSLKEHLNEIEKDLEQDIEPFILQVQQLNSIYGISTTASCAIIAEIGVDMKPFKTAEHICSWAGLCPGNNESAGKRKSTSVTKGNPYIKSMLCEIAWVIAGKRNTYLSAWYWRIKQKKGAKKAIVALARKLLVIIYTMLKQGTLFDESCFEARRKNCEQKQLSRYIRELEKHGYHVEAQG

SEQ ID NO: 195798 - protein, 367 aa, unidentified
MFNERTAIGLDVHARSVRAAAIDTLTGEVIEARLPAGAADVLAWVMQVSARLGPVHAGYEAGPTGFGLARKLEAAGIAVTVAAPSKIIRPAGDRIKTDARDAVLLARLLKMDELVAVRVPTQAEEAARDLVRARDDARTDLLAARHRVGKLLLRRGLVYAKDRAWTGAHDAWLRQMRREGLDGAGPGTLAAFDAGYDAVNSILARRDRLDRDIAAMATDSPFTAVTNRLCCLRGISTLTGFALAAEIGDWDRFTGRTIASYLGLVPSEHSSGGSRSQGAITKTGNTHARRLLIESAWHHKPVYRPGKIMKDRWAAAPAAAAARGDAGNRRLHHRWIVLDAHKKKHTVATTAIARELAGWCWSLAVMT

SEQ ID NO: 195799 - protein, 323 aa, unidentified
MAVVVGVDIAKRSFDLAVLQSNGKYRTKGKLSNDPSGFAVFADWLQQHAESGAWIVMEATGIYHEALAEHFHALGYRIAVLNPAQIARYAQSQLQRSKTDKLDAKLIATYGQRHEDSLRDWHPEPVSIRTLRALTRRLEDLQSLRQMEFNRLEVSPEKVQDSIRAVLQRLDEQIAWTLEQIKRHIDDDPDLRGKRDLLVSIDGIADKTAALILAELGDIDRFANARAVTAFAGLNPRLQESGLARGHACLSRMGSVRLRSALYLPAVVALTYNPAIKAQAERLKARGKRGKQTVCAAMRKLLTIAYGVLKSGKPFDPALAIAH

SEQ ID NO: 195800 - protein, 354 aa, unidentified
MSTVAISDPPASRSDTRTVVGALARMQSGVPTKLWPMLAEEGMEDKIIVGVDVAKDWLDIAIAGEATTERIDNTTEAIGAWLDRAPPAWVAFEPTGGYERALRQGLRERGILFTRVHPNEIIAFRKSRGIKAKTDRIDARLIAAFAGEELSRRGIRPCILGDDVLRELAARRRQLVDSLQAERCRLALALAPSVRHSLMLVINVLEKSLTTLEAELAEHIAANPPTANLAGILQSIKGIGPITATTLIADLPELGHLSGKEIAALVGLCPHTRQSGKTRSREHTGFGRPAVRRVLFNAARAAIRYPSPFKIFYDRLISQNQRPGKVALTAVMRKLLVTANAVARDRQPWNLNQA

SEQ ID NO: 195801 - protein, 309 aa, unidentified
MATSSFVGIDVSKDRLDVAVLGERQEKQVDNTSQGIAQLVAWMQGLQPELIVVEATGGYQRAAVESLFHAGLCVAVVNPARVRQFARACGLLAKTDKLDAQVLAVFGQRVQPKPYTGKSEAEKHLAALLVRRKQVEEMLKAEQNRLRTTSRSLKSSVEEVIVCLKEQKKRLDEQIQQFLAEQEAWQEQTEILSSAPGVGMVTTATLLAELPELGKMDRKKIAALVGVAPMNYDSGKKRGYRRTKGGRTDVRSVLYMSTLVATRYNPVIRTHYQHLLKRGKEKKVALTACMRKFLTILNAMMRDQQPFRV

SEQ ID NO: 195802 - protein, 474 aa, unidentified
MEAQKQGARRPDERSWHEMNRKQRREIARRIQSEDLRLEVVHPDAAGVDIGNESHYVAVPATRDRQPVRRFGCTTAELKDMATWLKQCGILTVALQSTGVFWIPVYDILEEAGLEVYLVNARDTKNLPGRKSDVQESQWLMKLHTYGLLRNSFRPPQEVRRMRTYWRQRNDLVRSAGRQIQRIQKALTQMNLRLANVLSDVSGVTGQAIIKAILTGERDPRKLAAFRDKRVKASEEEIARGLEGNWQEDLLFMLKQEQEGYEFCQKQIAECDARLEQYLQQTPDRSQGASLPEEKRKGRLQKKAKNPQFNLRTALFRITGTDLTQIDGIDVRTAATVISEAGWDMSKWENENHFVSWLRLCPDNRISGEKVIGKGRLRTNNRLATALRMAASTLRESDTYLGAQFRRLRTRLEAPVAIKAMAAKLARLVYRMLRYGMQFVDQGAIFYDARHRQINFLRRKAAKLGFQIVLAPAT

SEQ ID NO: 195803 - protein, 406 aa, unidentified
MLDIHKSQITACVRVPDTAGGRRQELREFHATTSGLLTLADWLRSWAVTVVGMESTGVYWRPVFYLLEDEFECRLFNARHLRHVPGRKSDMQDAEWGCQLIEHGLVRPSFVPPRPLRELRDLVRYRKAKIQERTREVQRVEKTLQDAGIKLSSVASEVLGVSARKMLDALISGTNDPEVLAQLAKGTLRKKIPALREALQGRFTGHHALLIGQMLAQIDFLDETIATLSAQIEELTRPFSRELELLDTIPGVDRRAAEMLLAEIGPDMSRFPTDAHLASWGGLCPGQHESGGKKHSAATRKGSKWLRGTLTECAKGVVRTKGTYLSARYHRIKSRRGHAKATIATAHKILTAAYHVLNQGVPYHELGEEFFYRRDTENTERYRRRLVKQLERLGHKVSLEPLPEAA

SEQ ID NO: 195804 - protein, 372 aa, unidentified
MNYNTVYVGMDVHKESFTFCAYTIDAEKGSHFQRTEADYKNVLKYLEFLRTVYGNDANFICGYEAGCLGYTLYHQLIEHHVNCVILAPTTMLEQCSRRRIKTDRRDAEIIAKCLAQHNYSPVHIPTATDEETKEFLRMRDDHKLALKKVKQQILAFCLRHNYRYDGNSHWTAAHIKWLKSLKPEALYKEILDEYLLTYTTLSDKLERLDKRIEELASKDEYKESVKKLCCFIGVKTHTALSVLIEVGDFQRFASAQKFASYLGLVPGEDSSGDEQTRLGITKAGNRHVRMLLTEASQCYARGQIGFKSKELKSRQAGNSPQVIAYADKANERLRRRYYKMVLGKSKKHNVAKTAIARELACFMWGMMTDHIT

SEQ ID NO: 195805 - protein, 343 aa, unidentified
MELYVGMDVSLKETSICMVDNRGEIVSEGTVISEPAAIAGFIKTKAESAARIGLETGPTTTWLWHELRALGFPVICIDARHAKAALSMQINKSDRNDAVGLARIMQCGWYKEVQVKSVACHEIRALLNSRAQLVKVKRDLENQIRGLLKNLGLRIGKAGGTRFHHRVEELLAGYRLLQVAVRPLLGVRETVRLEIASLTRRLLTMARDNDACRRLMTVPGIGAINALAFCAAIDDPARFERSRSVGAYFGLTPRRYASGEIGWSGRISKCGDGLVRSYLFEAAGVLLTRVPHWCKLKAWGHRLWKRIGFKKAKIAVARKLAVILHRMWRDGTDFIWSDKEVAA

SEQ ID NO: 195806 - protein, 373 aa, unidentified
MSTTPVQFCPMLAIAVEMSGATWLVGSCAGTKLRRKAVSDEAPLVRMRSLLAEVETALKRFGAGEHTRVVVAYEAGQEGFWLVRELRARGIEAEVIDPVSLKVDRRGKRAKTDRLDVEALARALYAWMAGDTTALRMVRVPSKEDEDNREWQRERDRLTSERRSCLDRIGKKLRTHGIWHWDRVALTQGTLRCADGTPLGRMLQETLRMELDRVEKAEARLDVLNAQVGELTDAAHSRIERLALLRGIGEIGGRGLALKLYWRDFNNRRQVGACTGLVSLAYDSGTMRQDQGISKQGDPSLRALLVEVSWLWLKHQPTSAISAWFKRRTEGQGKRHKRSMIVAVARRLAIALWRYLKDGVVPEGATFKAGRAI

SEQ ID NO: 195807 - protein, 413 aa, unidentified
MSVTLQGVPARVCAGVDWAKDDHAIAIIDPDGQVLDRFAVPHDAAGLKSLVRRLLTAGVDEVGIERGDGPVVEALIQAELTVLVIPPGQLKNLRSRYGSAGNKDDRYDAYILADVVRTDRRRLRPLVRDSAATTALRTTVRARRDLVEHRVAAANQLRAHLQIVFPGATSLFAAIDSAISLTFLERFSTQAKADWLSPKRLGTWLSSVSYSGHTDPEILHTRLLAAPQGTTGAEAQTHTVTTLAFVAILRSLNTQIEALAASIGEQLAIHPDAHIVTSLPRSGTVRAARLLAEIGDARGRFPTADSLACLAGVAPSTRQSGKVKAVTFRWGANKELRDAVCDFAGDSRHANPWAADLYAKARARGHDHPHAVRILGRAWVHIIWRCWQDNIGYDATKHHALQVVLNADQPKAA

SEQ ID NO: 195808 - protein, 330 aa, unidentified
MNYNTVYVGMDVHKESFTLCSCKYEDEKASHYQRTPASYKNVLRYLAFLRTIYGEDTRFVCGYEAGCLGYSLYHQLENFNVECVILAPTTMLEQRSKRRIKTDKRDAEIIARSLAQHNYSPVHIPTETDNQTKEFIRMRDDHKAELKKIKQQILSFCLRQGYQYDGSGNWTAKHVKWLRSLKPAGLYKEILDEYLLTYTILTDKLNRLDQRIEELASKEEYTESVSKLTCFLGIKTHTALSVIVEVGDFQRFVSARKFAGYLGLVPGQHSSGDDRNGLGITKAGNTHVRRLLVESAQSYTRGKIGYKSRVLRSRQAGNSPQVMQTGQMSV

SEQ ID NO: 195809 - protein, 399 aa, unidentified
MISVGIDVSKGKSTVCILKEYGEVISEPHEINHTEADLKALVESISELNEETRVVMEATGAYHLPLLTYLKNHGIFVAVINPLIMKKYSAIGLRKGKTDKLDSIKIANYGIDNWFKLTDYEATDEVYSELKLLGRQYSHYIAMRIESKLVLSNLLDRTMPGIKNLLKNRSDKPEKDKLNDFVKEYWHYDNITKKNEKQFINSYFKWAKNKGYHQSETKAKQIYALAQEGIPTLSSSTPSTKMLVLEAVRVLSEIDRTLSMILSQMQELASSLKEYNVVRNMPGVGDTLAPRLIAEIGDLKRFYNKKALIAYTGIDSPPFESGQFVANKRRISKRGSALLRKTGYEIMKCIKSAKPKDDPIFLYMLKKEAEGKPKKVAKIAALNKLLRIYYARVKEVYNT

SEQ ID NO: 195810 - protein, 411 aa, unidentified
MDTSYCVGIDVALHDHRVAILGPDGEARGKSFSILASQEGFAELVRTLHARAAAPGHTLVGLEATGHFWENLEAFLSGAGYRVVVLNPLQTRRYRDVLRRKAKTDDIDAYVIAGLLRSEVAAACYVPDEQIQSLRELARLRARLMRERQDYLRQLVAQLDVVFPEHRVGIGDATTARARGLLAAFPTARHLAHATPATLRRTAAAAGARGFSLQDATALRDRARQSTYSGKAADARGHVVRTLLAQFERLTASIDDLDQALHELLPPANSDGGPSDAMLLQTLPGVGPYTAGTLLGELGSLTRFTDARALVAYVGFYPVIRESGEHAATPSLSPAGSRIARHALYLAAVNAVRRSTEWRLLYQRKLAQGKKPKQALIAIAVKWLHTAYAMLKHRAPYDPSRLGATPATIST

SEQ ID NO: 195811 - protein, 422 aa, unidentified
MLEQTQDEQEIIERVAALDIGKAELVCCVRVPDPKGGPRRVQEVTTYSTMTRSLQVMVDRLTDLGVTRVVMEATSSYWKPPFYLLEAHGFEVWLVNAKDVKHLPGRPKTDRLDAVWLCKVAERQMLRPSFVPPIPIRRLRDLTRYRMSLVSDQSAEKNRVEKLLEDAQLKLSVVASDIFGVSGRDMMAALIAGQRSPRVLAQMARARMRAKIPQLEEAFVGQFTDHHGFLLAKMLARIDALSVDIADLDTKIEARLAPFADAVARLDEIPGVGATTAAVIIAEVGDDMTRFPTPAHLSSWARFAPGVKESAGRKKGTGATGHGDRYLARVLGEAAVSAARTDTFLGERYRRIARRRGKKKAIVAVGRSILLIVWSLLSDPETRYHDLGPGFYDSRINPERKKRNHIRQLEALGYKVTLQPAA

SEQ ID NO: 195812 - protein, 321 aa, unidentified
MTYIGIDVSKDTFVVAYSPDKNSKTKTFKNTTKGIHEFIMTISKEEHHCVMEATGNYSALLVYLLSEAGITTSLENPLKVKNFARAMLSTVKTDEIDARLIALYGEKMQPAPYKLRSDAILTLKQKRTVIRQLKKQLIATRNLKGSMEVLPFFDAKCKKSIEKTIAFLEKQVKGLEEDLSSLARSEYKKQMDLLTSIKGVGVTLAASLIMATGGFTYFDNAKQLTRYLGLSPTYQQSGTSVNFKGHINRNGDSSLRGLLYVAAFASLRCNTECKACYDRLRSKGKPGKVAVIAVANKLIRQAFAVVTQEKPYVDGYVSSKK

SEQ ID NO: 195813 - protein, 346 aa, unidentified
MDQIIRIGMDTSKHIFQLHGVNAAEEPVLRKKLRRQDMVAFFGKLPPTVIGIEACGGSHHWARLLQSLGHQVRILPPQFVKPYLKRGKNDAADAEAICEAMSRPTMRFVPVKTADQQAALMLIGLRDRLIRQRTQLTNAIRGYAAEFGLVAAKGICRIEPLLERIKADDTLPALARELFVVHGMEYAQLQAQLEEVEDKLMAWHRADECSRRLAKIPGVGPIGASMLVMKAPAPAVFRSARHFAAWLGLTPKDHSTAGKVRLGVITRAGDEALRSVLVVGATAVIRHARRRQGRASPWLIELLKRKPPKLVAVALANKIARIAWKLMVSGEGYRAQAASTEVACAG

SEQ ID NO: 195814 - protein, 436 aa, unidentified
MSEVTTIGLDLAKNVFQVHGIDASGQVVVRRQLRRSQVLSFFERQHPCLVGIEACATSHHWAREIAKLGHEVRLMPARYVKPYVKRNKNDAADAEAICEAVTRPTMRFVAVKTEEQQSVLMLHRTRQLFVRQRTTLINAIRAHMAEFGIVAGVGRNGVERLLRLIDEGSDERVPPVARECLQALRTQLVLVKRQILEADRRILAWHRSNELSRRLETIPGVGPLIATALVASIPDPHAFGSARDVPAWIGLVPKQNSTGGKERLGSISKAGNRYLRSLLVVGALSVIRRAKQVGYTRRAWLAELMARRPVKVAAIALANKIARVAWAPGSLYRVPLTISSAGSLRDARLTRANEVGKGNARIMHPSRSIRRSGHPTCARAAFDCGLLTGTRSRGEHYGQRPWVSAASKGRTHGSTDQPCITSKSSCQLGAVHTWRT

SEQ ID NO: 195815 - protein, 391 aa, unidentified
MNKIIYIGIDVHSSNFTLCSFEPGYGLTEDKIFGQVQFKEDFIKNTEKYISTLKKQRKDIDVVCGYEAGCLGYAPQRELSKRGIKCVILAPTTMAVQKGGKKVKNDFRDAVDIAKCLASGAYKPVYIPDTEDEDVRDYIRMRDDHNTALKHIKQQLNAFLLRHGFKFDGKTKWTLKHIEWIKKLSCTDKQREIFNEYLATYETLSDKIDALDLRIEELSQTERYADTVKKLTCIKGIKTHTALSFVTEVGDFNRFKSAEKFAGYIGLTPGEQSSGESEHKTNITKAGNRHLRRLAVECAWAFMRGFVGQKSAGLKKRQKNMPQEVVTYADKASTRCQRKYNRLTTKGKNSNKAVTAVARELCCFIWGMATSHYEGTTQPKDNSVLKESALD

SEQ ID NO: 195816 - protein, 381 aa, unidentified
MTTPATCNVPESTTAGTLFVAFELSEKTWKLGFTTGHGQKPRERTVTARHQERVLEEIAHAKRRLGLPDTAPVVSCYEAGREGFWLHRFLQGHGITNHVVDSSSIEVNRRRRRAKSDGLDVRKLLSMLMRYAQGERQVWQVVKVPSVEAEDQRHLHRDLETLKQERASTTTRIQGLLSSQGIRVTSLSNLPEQLEALRLWDGSPIPPGLRRRVLRVYAHHTFLSAQIAAVEAERRAQLQASTDANIEKVRQLMQLKGIGINGAWLLVMEFFGWRAFKNRREVGGLAGFTPTPYQSGESAREQGITKSGNRHVRWMTTELAWSWLRFQPDSALSVWFRERFGGGGKRLRRIGIVAVARKLLIALWRFLETGVLPEGAVLKEG

SEQ ID NO: 195817 - protein, 324 aa, unidentified
MDLPYLGIDIAKVKFNVCLLQSNGKLKHKVFPNNAAGFAQLQEWLVKHQTVQVQACLEATGTYGEALAHFLHDRGHTVSVMNPAAIKAFAASRLSRTKTDRVDAALIARFCLAHQPPPWTPPAAEVRELQALVRRLESLIEMRVAEENRLSAGVTVAAVRSSVEEMIAHLKEQITRTEKLIRKHIDKHPGLKQQSELLNSIPGIADTTAAVLLAEVPNLKLYRSARQVAAFAGLVPRERQSGSSVRGRVRLSKIGNARLRKALYFPAITALRCSPFFQQWADGLRARGKSKMSVIGAVMRKLIHIAYGVLKSGRSFDPDLAKSA

SEQ ID NO: 195818 - protein, 430 aa, unidentified
MNESVSEQPLSPKVAAFVGIDWADLKHDVVLRSVGDPAKSEHQVIKSEINALNDWIAQMHNRFGAKGKVLVCLEQSRGALIHQLMAYELFELYPINPSQLANYRRTFFSSGAKDDRPDADLLSELVMCHRDRLKAWKPDNQLTRELASLNEGRRNAVDRRTELANEIKSQLKLYFPVALQILENEITTALAADLLVQWPTLAELQKVSPGKLRKFFYGHNSRQEKKILERLALIKEAKPLTTDLAIIRPNALRVKLLARQLKSLLPFIADYERRIAELFGSHPDRFLFDNLPGAGPALAPRLLTAFGTDRDRFEVAGDLLNLSGIGPVRIASGKKTGKNASVHCRRACPKFLRQSFHEFGECSIRYCPWAKACYQAQRARGKGHPAAVRAVTFKWIRILFACWKQRTPYDPQRYFQALQTRGSDYAQTTA

SEQ ID NO: 195819 - protein, 473 aa, unidentified
MARKKGKDPAGIGGPGLTGEPAGVSDEPAEVIARAAAIDVAKGSGMVCTRVPHESGPRRRVQRIWQVSARYSEIAALMAELAKLGIQRLVLESTSDYWRIWYYLAEAAGLEVWLVNARDAKHLPGRPKTDKLDCVWLCKLNERGMLRRSFVPPEAVRDLRALTRLRSRLAQDQARHQSRIEKILEDALLKISSVISDLMGASGRRFLAALVAGERAPDKLAALGDRRLKASPAQLEQALAGRFRDIHALEIGMLLELIDDITAKMARLDAEITARLARIPGLAPACAGCGEIGGGHAPSCPRPGAPVLSVIERLDELTGIGTGAAQVIVAELGTDKTTFPTPGHAAAWAKLASRTIQSGSTSKDGRTGKGNPYLRAVLGRAAMTAAKTDTYLGERYRRIARRRGKQKAIVAVSRTICEIAWMIITDPSVRFSELGPDYYARLDAGRQTRNKIRELERLNPGMKVTLTPAATAA

SEQ ID NO: 195820 - protein, 371 aa, unidentified
MKEFIKYVGLDVHKETIAVSVAEANGGEVRYFGEIANTAEALSKLVRQLKKGDVRLAFCYEAGPCGYGIYRQLREMGLDCVVVAPSLIPKKAGDRVKTDRRDSLSLTRLHRAGELTAVWVPDGAQEALRDLTRAREDMKHLQKQAKQRLLAFLLRHGKRYDGKGKWTQAHHRWMEGVKFDQATQQIVFQEYIDTVGALSKRLEALDGHLQDAASESVFWPVIEALMALRGVRLLTAATIVAEIGDLKRFASAPQLMAYLGVVPSEHSSGPKQTRGGITKTGNGHVRRVLVEAAWTYRHPARKTAVLQRRAERTSEVVQEIAWKAQKRLCSRYRLLEARGKLKVQACTAIARELAGFIWAIGQVSSQPAASA

SEQ ID NO: 195821 - protein, 394 aa, unidentified
MIYVGIDVASTKHDIVISSESGELFKKAFSIKNDLDGYKKLLSEISSAKEFFNDLNVRIGLESTGHYSRNILHFLILARFEVMFINPLLTNMDRKAVSVRKTKTDAIDAKAICMFLIRNQNDFKPYTLSSYHIDELKTLVRQRKSLKTQINKEMNLLHAYVIQAFPEYYKIFKKINSKASMEVLSRYASLSEFKRVRLETLKELIRKSSKGHHGIREAQMLKDLNSSSIGIDSSALSFSIKQTIKRILMIKEQICDIEHEIKHHVDESHTTLLSVPGIGYTTGAIILAEIGDIHRFKTNDQLLAYAGLDPSVYQSGNFEGSYKISKRGSSILRFAIYHVAQAAVKFDPVFKAYYLKKKAEGKRHRVIIGHVTKKILRVIRSILKNNSTYSINTH

SEQ ID NO: 195822 - protein, 375 aa, unidentified
MQNKVRFLGLDVHADTIAVAIAEPNGEVRSLGTIANRAESIRKMVKKLGTVDQLRACYEAGPTGYVLYWQLAELGVNCEVIAPTLVPVKAGDRVKTDRRDAERLARSHRSGDLTAVWVPDAGSEALRDLVRAREAAKQDQLRARHRLSKFLLRSGLRPAQGMKAWTQPYMIWVKQVRFTQVAQESTRLDYLTEVEHMGERVLRLEKAITEAVKLASPELQEVVKDLQALRGIAQISAVTIAAELGNISRFEGARQLMGYSGAVPSEDSSGKRLKRGSITKTGNAHLRRIAVEAAWSYRLRPGVGPALRKRQEGVPEEIKEIAWKAQHRLHKRYIKLSAAGKDQRKIITAVGRELLGFIWAIGTKAEAAVKQQKAA

SEQ ID NO: 195823 - protein, 466 aa, unidentified
MQPFYMGVDVSKGYADFMIIDSQKKPVTKTFQLDDTFEGHQRLYNVISRFLAKQPDATLFAGMESTGGYENNWFNSLIAFQGSLAVQTSRLNPLGVNHNSKADLKKNTTDKISSQNIAEYMVAHPEKVNYQQEDHLAGLRKQWGFIQTLTKQRTQFLNQFKGLLYTSNPELLHYCQGDTPTWILTLAIKYPSAARLKRASAKTVAKIPFITKEKANQLISDAKRSIASATDPATEQIIASTARQIIHLSKAIDAQTQRMIKSCDVPEVALLKTFKGIADKSAIGLLIEIQTVKRFARAKNLASFFGMHPVLKESGDTARVSKMSKQGRVEPRHILYMVTLAALKCNPLIQQLYEKHQKSGKHNMAIMGICMHKILRIIYGMLKHNKPFDPRIDMANRRRSARASKESPEKDMSRRFQSYDEKAPVSRRQKKKRLEQDRSQSVNDTQSVITEPVPVGNIIADILPDL

SEQ ID NO: 195824 - protein, 309 aa, unidentified
MKQSVVYIGIDVAKAHLDVAWAGTFRRLPNERSGHAVLVRWIKQSATPVQLICEASGGYEQGLLESLEKSEVKVTLVQAVRVRQYARAAGILAKTDQMDAKVLAAFGSAMQPPPTPPLCAEQKRLRQYEAQRRHLSRVLVAEQNRLAQLSCAELRNLSRGLISKIKKQIETIDTRIGDLIAQDQTLREKAQKLTAIRGVGVRTAALLLAQMPELGQLNRRQAAALAGVAPFNHDSGSIRGKRAIFGGRRALRSGLYMAALSAARFNPILSRFYRRLRTKGKPHKLALTAVMRKLLLALNQTLKPIPSLA

SEQ ID NO: 195825 - protein, 389 aa, unidentified
MKIYVGIDIAKLNHFAAAISSDGEIIIEPFKFTNDADGFQLLVSKLESFDKNSLIIGLESTAHYGDNLVRYLVAEFYQVCVLNPIKTCQMRKNNVRKTKTDKVDTYVIAKTLMMQDNLRFVSFFDLDMMDLKALGRFRQKTIKQRTRLKIQLTTYVDQVFPEIQYFFKSGLHQNAVYALLKEAPSPKEIASMHMTHLANLLKVNSHGHFTKEQAKELRVLAQKSVGANDSAISIQITQTIQQIELLDSQLEKIEAEMTDIMKFNDSVIMTIPGIGYINGGMILGEIGDIHRFSNPNKLLAFAGLDPSVYQSGNFQAKTTRMSKRGSRVLRYALVNAAWNVVRNNATFKAYYDAKRAEGRSHYNALGHCSGKLVRVIWKMLTDNVEFNLK

SEQ ID NO: 195826 - protein, 345 aa, unidentified
MTTMNYIGLDVHKKTISYCVKDVSGRIQQEGKIGSTRRELDCWMKTLPQPWTVAMEATIFSGWIYDHLLPHATQIKVAHPLMLRAIAAAKKKNDQIDASKLADCLRCDFLPECHMMPRAIRDRRRTLRYRHLLVRQMVQMKNRVSGLLMETGVEYNKQRLHKVSYFRELLSANGEVPPSIRPLLKLSRETIERCQKTEYALVSSLQRDPVLADRIKRLRTVPGVGPITALTWALEIGDVSRFGSIKKAISYCGLCGDERNSADKAMRMPLSKQRNKHIQRALVEAAKLAPRQNHEMAVIYDQERKKGNSNRATLAVARKMVAYLLAVDRQQRDFVPAEERRTSAA

SEQ ID NO: 195827 - protein, 387 aa, unidentified
MLASGSASAQAAIHVDLAAIFVSLELSRSTWLITSLSPGGGEKMSKHAVRGSDIAGLLSHLAKLGTKAQARTGRTFPIVVIQEAGLDGFWVHRVLEQEGIESHVVDAASVLTSRRRRRAKTDRIDGEALLRTLLAYKRGEPRVCAMVRAPSPQEEDRRRLCRERKTLVAERIEHVNRIKGLLFAQGISDYEPLRRDRRERLEELTTGDGRPLPAHLKAQIGRGLDRLELLLRQLKAVEAERDAQLEPVGDAALTPVAALAGLRGIGPEFAATLWLECFFRSFGNRRQVAAYAGLAPTPWQSGSVRHEQGVSQSGNPRLRSTMIQLAWLWLRHQPTSALSLWFKDRVKRDGGRGRKTTIVALARKLLVALWRFSSSGVVIEGAAVKAA

SEQ ID NO: 195828 - protein, 342 aa, unidentified
MNHFAGLDVSVKETSICIVDDTGRIVREVMVASEPEALLKVLGNPTYHFKRIGLEAGPLSQWLFSALAEAGLPVICVETRHMQAVLKAQINKTDRNDARGIAQMIRAGLYRPVHVKTLRSQKLRMLLTHRKLLQSKAIAIENDLRGTLRNFGLKVGMVGKVKFESRIKKLVDNLPDLALLVEPLLIVRRALREQIVILHRRLLAVVRSDEVCRRLMTTPGVGPVVALTYRATVDVPARFRKSKSVGAVFGLTCSRYQSGEIDWSGRISRCGDEMMRVMLYEAAQSMLRSKKWSWLKAWAMQIARRRGMKKAIVALARRLAVIMHRIWIDGTEFRWTRETAAA

SEQ ID NO: 195829 - protein, 340 aa, unidentified
MNKNTVIGIDLAKTSFAVIELGRGGDVKRRKTFRRDGLKRFLAKHEPATVALEACGSAHYWGRWLEEHDHKPVLLPPQHVKGYLRGQKNDYNDAQAIAEACHHGAIRPVTVKSIEQQDDQAFHAIRRSLKVESTRLVNQMRGLLAEYGLTVPKSVSAFCRRVPELLEDDENGLSARFRMLLNRQWSRLKALLDEQVWYDQQLQQQAKEDDTCRRLTDIPGVGPVVASAVKSWMGDGQQFQRGRDASAALGLVPKQYSTGGKQSLYGITKRGDAYLRSLVVHGARAVVRTAKNKQDALSRWALAVEARRGHNRAVVAVANKIIRMAWVVVARQEHYRPAES

SEQ ID NO: 195830 - protein, 341 aa, unidentified
MNILFLGIDLAKNVFQLCGLNQAGKPVYTKRTGRKELLQTLANIPACLIGIEASTGAFYYWQREFEKLGHKVKVISPQYVKPFVRGQKNDGNDAQAIAVALMQPTMQFVPPKSPEQQDIQALHRARQRIVNHRTATVCQIRGLLLDRGIPIGSAVSRARRAIPLILEDAENGLSSRMRRTIAELYDLFNDLGRRIHFFDKEIETVFRQSEACPRIAKVKGIGPETATAVVAAIGKGTEFKNGRHFAAWLGLVPRQHSSGDRQVLMNMTKKGDKHLRTLFIHGARAVVRVATNNNDGHMNQWVNQLKERRGFNKTTVAVANKNARIIWSMLRNDTGYQVVCN

SEQ ID NO: 195831 - protein, 383 aa, unidentified
MMQTMTRGNESSAAMGCVLVAFELSQRWWKVGFTTGLGQRMRTRRIAAGALEALAEAVADAKKMFGLVADARVISCYEAGRDGFWLHRYLTARGATNYVVDSASIEVNRRARRTKTDAVDLQGLLALLTRYVAGDRRCWRVVRVPSVADEDARQLHRTWETLQGDRTRLINRVKAVLASHGVRLAITADFLAAVAATRLWDGSAIPPGARERLAHDWAQLSSIEERLAAVADARANLPVDPTTATGHAVQTLQQVRAIGPGGAWVLATEIFGWRGIRNGRELGALVGLAPALYQSGATQRDRGITRAGNAHVRRMMVQLAWGWLRWQPDSALAQWYQRRFATGGPRQRRIGIVALARKLLIALWHYVDHGIVPEGARLKVTAA

SEQ ID NO: 195832 - protein, 413 aa, unidentified
MEAYYVAGIDVHKAMLAVVVSEVKPGECEFHRRRFGTTRSQLRELARWLEELGVREVVMESTARYWRPVWVALEGTGVRKHLAHARSNGARRGRKSDFRDAERLVHRLVAGELVLSYVPEDEQQGWRWLTRTRYQLVCERGRVQNQIEGLLEDAQIKLSSVITDLLGASGRRILEALAQEQGPHNPGRLAELGHAKLRASREELIDALDGRWLDRHRFLLGLHLERIRQLDSQIERIQQQTASAMQSCQEAVARLIQVPGIRTEGALQMLAEIGPTAAAFPSPEQLASWVGVCPGQQESAGQSSSQRSAKGNWQMRRLLSQAAHAASHAKGSFFESLYRRLVAKIGPPKAIWAVAHRLCRLIWRILHQGVSYQEHGSPTASPKSIRRRQYKLTAEFRKLGFQVQFTPINTIHP

SEQ ID NO: 195833 - protein, 365 aa, unidentified
MSKDIKKPAGETRRYVGIDLGDKKSRVCILDERGEIVLQEWVVTTPEAFFKRFHGEAKMDIAMEVGAHSRWASDLLGRCGHKVVVADPRQLALITKNDAKSDKRDARTLAQLLRADPRLLSPIEHRAENLQTDLTVIRMRDNLIETGTRLVTSVRGVVKATGGRLPSGETSSFPQQVSDLIPQPLRPALAPVLEVIDRLNEAIYEYDCLLEHWARTRYQESSRLTQVKGAGTLTALTFMLTVGDKARFSRTRDIGPYLGLRPRLGQSGDNEPQLRITKAGDGLLRKTLVECAQYMVGPFGQDSDLRRWGLKMIEAGNGSKRARQRAVVGVARRLAVLLMSLGKSGQTYDPLRHSRAQESSAEVAA

SEQ ID NO: 195834 - protein, 342 aa, unidentified
MQISTIGIDIAKSVFQVHGVDAAGKPVLKKQLRRGQMLEFFGKLPPCLIGMEACATAHYWARELTKLGHQVRLMPAKDVKAYVKRNKNDAADAEAICEAVRRPTMRFVQIKSTEQQGRLMLHRARDLLMRQRTQVINAMRAHLAELGIVAAQGRDGIRELLKIIASEADARLPVDAHTSLVVLAAELQAMQTLIGSIEKRIMVQHRLSEASKRLKSIPGIGLIGATAIAATVPDPKVFGSGRDFAAWIGLVPREDSTGGKQKLGPISKRGDRYLRRILVVGACAVLRYARHKPEKYPWLTKLLERKPFKVVAVALANKMARIAWALLAKGDTYRVPALAAAA

SEQ ID NO: 195835 - protein, 385 aa, unidentified
MMRMTTDQPQSQAWTAARSDDATVFVALELSASQWLVAANLPGSDKVSKHAMAAWRPEALLRLLRRWRSQAEKRAGGGVKVTVIQEAGRDGFSVHRLLEEAGFESWVVDPASIAVNRRKRRVKTDGIDVEKLLQTVMAWARGERMVCSMVRPPTLAQEDERRLSRERERLKKERDQHIVRIKSLLALHGITGYEPRRRDRRQGLEALRTPSARLLPPRAKAEIVRELDRLEMVAGQLVLVEKERDATVAAAGDGAMPLDRLRGIGPETAAVLTQEAFFRNFSNRRQVAAYSGLTPSPWQSGAIARDQGISKAGNPRLRRVMVEAAWMWQRHQPNSALSRWFRARVGDAKGRLRRMMITALARKLLVALWRYATQGVIPEGAVFKM

SEQ ID NO: 195836 - protein, 338 aa, unidentified
MRLYCGIDLHSNNSVVVLLDETDKVIFQKKLNNSLDLILEQLSVYKSRITAIAIESTFNWYWLVDGLMDAGYTVKLVNTAAVQTYSGLKHTDDKDDARWLAHLLRLNILPTGFIYPKEERAVRDLLRKRSQMVQQSTTNILSLQNILARNTAQSLSSYKIKKLDDEQAEKLINDPNITLSLKCNLNVIRCLQNTITEIETAVLQQARVRPEFRKLLSVSGIGEILGLTIMLESGDMSRFEKVGNFSSYARCVKSERFSNGKKKGEGNRKNGNKYLAWAFIEAANFAIRYNDKIKAFYQKKKAKTNGIIATKAVANKLARACYHILKDQVSFDVDKAFS

SEQ ID NO: 195837 - protein, 447 aa, unidentified
MVPDGRQVEVDEHEQIVERVAAIDVAKASGMVCTRVPHPTTAGKRLTRVWEVAATTNAIIELADQLAGQGIERVVVESTSDYWRGFVYLLEARGLSVWLVNARDVKQVPGRPKTDKLDAVWLAKLNERGMLRPSFIPPAEIRQLRDYTRLRSDLTQERARHVQRLEKLLEDALIKLSTVATDIMGASGRDMVEALIAGQRDPKVLAELARGRMRGKRAALVQALTGRFNDHHAELARMLLDQIDALGVQIDRLTSRIEELIGAIPAAQPPSEKASHTGEDTYQPALPAVSRLDEVPGIGVKAAQVIIAEVGLDIGQFPTAAHLVSWARLSPRTIQSGAKQRTGATGKGNPYLKGVLGEAAAAAAKTDTFLGERYRRLVKRRGKLKALVAVARSILVIVWHLLADPTARYHDLGSDFYTSRIDTDRKTRTHIRQLQALGFTVTLTPAA

SEQ ID NO: 195838 - protein, 419 aa, unidentified
MSKQPVELAAFIGLDWADEQHAVCLQEAGATRREALKLDQTPEALQAWIQQLRARFGGRPVAIAVEQARGALIYALMHVDFLQLYPVNPQTLAKLRQAFYPSGAKDDPGDAELLLEVLLKHRDHLRVWVPDNVLTRSIQLLTEGRRKLVDERTALTNQLTAALKMYFPQALDWFGDLHTARACAFLQRWPSLPQLQGATTSSVRKFYRKQGYRGDDKLKQLIQNIQHAQPLTEDPAVVLSSSMMVHALVKQIPSLTESIEDYDRQIASLFKQHDDSTLFGSFPGAGPTLAPRLLAAFGSDRNRFEYATEVQQLSGVAPVTEKSGKACWVHWRWACSKFLRQSFHEFAGQSILKSVWARAYYQQQRQRGQSHHAALRALAYKWIRIIFRCWKDRTPYDETTYLQSLQLRGSNLASALKTT

SEQ ID NO: 195839 - protein, 317 aa, unidentified
MEGVNFTQVVRRGCGIDIHRDIAVATIGGEGITTETRSYKTFSSSLTELKEWLIASGVTHVAMESTGVYWKPVYKVLEGPELKVWIVNARHIKYVPGHKTDKKDSAWICKLLLAGLLKPSYIPPKEQRELRDLTRYRNKLIQHIASEKNRTIRVLEDCNVKLDSVLSSTSGVTANKLIDKLIENGAVTMEDIDEVYHCRIQASKEELYLACEGFIDEHQKYLLQMIRRDIDQTQKLIDELSERIKDLLAPYDNAVERLREIPGLSTKVVEDLIAEIGLDMEVFPTEKNLASWAGMSPGNNESAGKKKALAPITGTGR

SEQ ID NO: 195840 - protein, 412 aa, unidentified
MRVIVERCCGLDVHQETVVACLLIGASGDRPTKEVRTFRTVTRDLEALRDWLAAAGVTHVGMESTGVYWRPVYAVLEGHFDLTVGNARHIRNVPGRKTDVKDAEWIADLVRHGLIAKSFVPPRPLREMRELLRYRRKLTESQAAERNRLLKLLETANIKLASILSDVFGVSGRAMLRALIEGRASVEAIADLARGQLRRKRSDLILALEGRMEEHHRFLLATQLRRLEAIEQDIAALDLRINERLEPYRMPHALLMQIPGVDWLVAAVIIAEIGVDMSVFLSVYHLSAWAGVCPGSHESAGRRNSGRARKGNVHLRTMLVGAAISAARTKGSYLKDKFHRLKARRGAMRAALAIAHKILVSAYHMLAKGLPYRDLGEAYLDQIGQSRTVANLKRRLERLGYHVTLNRTTQAA

SEQ ID NO: 195841 - protein, 323 aa, unidentified
MDPVMTMFLGLDVAKAKVDCALLLNGKVKSKVVPNNQEGFETLKQWLTKQGATHVHACCEATGTYSDAIALYLHDQGHTVSVVNPAQIAAYAQSQLVRAKTDALDAKLIARYCERERPMTWSPPPAAERLLLALLRDLQDLQSMHQAESNRLDTAHPDVRERIERHLEFLGREIEQLRKKIERHIDDNDQLRGRRDLLDSVPGLGEHTIPWLIAYLGDGQRFPGSKCAVAFCGLSPKPHQSGSSVRGKAHISKTGHADLRHALYMPAVVAYSRCKAFASFVQRLKAAGKPPKVIIVALMRKLVAIAQAILKSGKPFDPSLHCT

SEQ ID NO: 195842 - protein, 316 aa, unidentified
MQTALEGLCIGIDVSKNTLDVDGFPTSHREQVKHDTDGISKLVAKLQGLQPQCVVLEATGGLEMELVSALAVVGLPVAVINPRQARDFAKAIGYLAKTDQVDAFVLAKFGSMVKPEPRPIKDEQLRELESILTRRRQLVDMLTAEKNRRGQAAAVVKKDIAEHISWLEQRIKGTDGELSKAVKNSPAWQAKTDLLLSVPGVGAITATTMLAELPELGTLDRRQIAALVGVAPYSRDSGRMRGKRRIFGGRGCVRAILYMATLAAIRFNPVLKAMYKRLLEAGKMKKVAIVACMRKLLTVLNAMLHNGTMWSATDKC

SEQ ID NO: 195843 - protein, 335 aa, unidentified
MQISTIGVDLAKHVFQLHGVGPDGSVVLRRKLRRAQMLIFFGSLPPCLIGMEACATAHHWARELRAFGHVVRLMPAHYVRAYVKRGKNDAADAEAICEAVTRPTMRFVAIKSKEQQGVLVMHRARDLLVRQRTQLVNALRGLMAEFGISEPQGIRHVGRLRAHLDEDVVPQTGRDVLELLVDQLDPLEKQITAIEGKIREWHRANPISQRLAKIPGVGPLIATAVVATVGDASLFRSGREFAAWLGLTPRQRSTGGKQRLGRITHQGDAYIRRLLIIGAQSALQCSREMKENAWVRGLLGRCARLKVAVALANKTARIVWALMAKGDSYRRASAV

SEQ ID NO: 195844 - protein, 376 aa, unidentified
MQVKTLSKSLFTLDSAETVQYINGYLPVGCDLAKFSIQIYCYNFKSKKFSSKALTRDGFTKFLQESDKPLLVAFESGSSCHYWARQCIKYNHKVRLITTRFVASVKDMNKDDPHDAKLIYRACFADGCKEIGVKTEQEQLLNMILRLRDQILKDRVKMTNLWKAAIHEIGEPVRCGIKEFRQHAHDLADDPDHVRDDSKEFLGMINEFASSHMDDCDAKVAKIDEYITKVAREDEACKLLMTIPAVKEFSAFCLMVSLCNLDNFKNGSYYASLMGYAPRHRGTGGSNYTIKAAPVGHKTIKKCYYFLAMHMYSKVKRLDKFENCWLHRMVKEKSGKVAICAIANKLCCTAYSMLKNKQPFDMDEFKGIYKEQKVEP

SEQ ID NO: 195845 - protein, 456 aa, unidentified
MSKQSKSTMPAVHAKPTQRKHAAGIDIGATSIYVAVPVDRDPQPVRSFQTFTEDLHRLADWLQRCRIKTVAMESTGVFWVPLFQILEQRGFEVCLVNARHVKNVPGRKTDVSDCQWLQYLHSVGLLQASFRPAQQVCALRSLLRHRDSLVQTASTYAQRIQKALDQMNLQLHHVISDITGVSGITILDAILDGERDPFKLASLRDYRIKATEETVAKSLVGDYRPEHLFTLRQSLDAWRYHRKLVAECDDEVQRHLVQFASKVDPKQKPLPRPKKVSSSKVYSSHPDYDLRTEHYRILGVDLTEVPGINTLLVHTLLAEVGPDLSKFRSAAAFASWLGLCPDNRISGGKILSVRTRHVQNRAALALRIAAHTLHHNQSVLGYYYRRMRAKLGAPKAITATAHKLARILYHLLTTGQPYQESIFEERETQHQQRTLFSLHARARALGYQLIPLAPTT

SEQ ID NO: 195846 - protein, 415 aa, unidentified
MSYKIAGIDVHKKVLMVVVMDAHAPADEPERRRFATMPSDLRRLLSWLQEKEVKEAVMESTAQYWRSVWLELEPYMRLQLAQAFSNRAPRGRKHDFKDAERLVRRLIADELILSFVPKGEQRIWRNMTRMKTQLTRDRVRLQSQMECLLEEMRIKLSSVVSDLLGVSGLRILWALARGESDPKKLAALGEERLRCNEEQLIDALTGSPQPTHRELLSLQLERLQLIDEQIAKLNGMIAQALKPHQETVVRLAEVPGFGVDSAQQVIAEVGVKASTFPSAAEFTSWVGTCPGKDESAEQNHSSRSAKGNKYLRRLLSQVAHAAVKKNGSHFQAVFRRLLPRLGYQSAIWAIAHRLCRVLWKILHEGVRFIEQGKEPDPQAKKQRARILARALRKLGYDVAISPINPSTAESATPTQ

SEQ ID NO: 195847 - protein, 399 aa, unidentified
MNSTQGCIAIDVSKGKSHVCAYASKDTMVQKPIEIHHDREGFEVLDDLYNRLNTREGSPPVFIYEATGIYHRPLKRYLKEKHYPYTEVSPLLAAKHRKNSGIRVVKSDKADPKSLVRLFYDVDLPLDQNLNDMYYELLQLDRNYQALTKLMVTCKVHLKEKLDILFPRFEDYFGNVFLTYFLNLLETNPHPTLILHKRSDAIRRRLIEGGLQYGRSPSVVMALKNYCLNCTPGSSAESVDTQILKLFIQQIRFYTNERNRIIEQMTGLVEDFPLFKQLKSIPGIGPLLAVRLIAELGDLSRFRNIRQLTAYAGLDPIVYQSGQNDGKHLSISKKGNRYLRSLLYQVICISTNLTIDHSIKVYIQKKKQTQPMKSARIAGCAKLLRIIYSLYRSGELYTI

SEQ ID NO: 195848 - protein, 337 aa, unidentified
MEYFAGLDISMAETHVCVMTGSSTVIHYAKVPSTPADIAAELARLPTCRRVVFETGRMAPMLYHGLSQLGLPVVCIESRQAYQALKLLTTHKTDRNDARGLAHLARTGFFKPVHVKSLPAHAVRSLIIARKKLVGQRVTLENQIRGLAVVFGVRLPRALSPAFIDQALRASDGIPGLSAAMRGLIAARAAVLGAIVAIDADIRRMVGASDACRRLMSIPGVGQLTALAFTAAVDDPGRFRRSRDIGAYLGLVPRRHQSGEVDYTGSISKCGDPRVRTLLYEAANVMLTRYKGPLKLKDWAFAIAKRSTMRKARIALARRLAIIMHAMLRHGTEFQPA

SEQ ID NO: 195849 - protein, 341 aa, unidentified
MQVTTVGLDLAKNIFHVHGVTETGEVAFNRPLRRAQVLAFFERLSPCLIGIEACASSHHWARELSKLGHTVRLMPPMYVKPYVKRGKSDAVDAEAICEAVTRPTMRFVEIKSEEQQALLSLHRARDFVVRQRTQLINMIRSLAAEFGITIARGVARAIDFAKGIIDGKQSGVPELAQDVLRVLSRQLVELHNRLRWYEIRMRIQARLSRQAQLLQTIPGIGPVTASAVAATIGSGHQFKSGREFAAWLGLTPRNHSSGGKERLGKITKMGDRYLRQLIVVGMTSRVRQVTNHPERADPWLTKLLQRKPARLATVAMANNLLGTCLRHTLPGNGRRGSCGRC

SEQ ID NO: 195850 - protein, 409 aa, unidentified
MHVIHECCAGLDVHKKSVYACAIWLGHNKAKEQEIRSFGTMTADLLKLADWLRERQVTHVAMEATGVFWRPVWAVLEGQFELMLVNPHHIKAIPGRKTDAKDSEWIADLLQHGLLRGSFVPPREIQDLRDLTRYRAELVQDQNRVDNRIQKLLEQCNIKLSSVASDTLGASGRLMIEAIIAGEENPEQLADLAQRRLRAKIPELRLALAGKVRDHHRFLLKEFLQEWKALEERIRRIEKEIDLHIAPLKQAVQLWESIPGVDHVSACNLVAEIGVNMAQFPSAQQLASWAAVCPGNNQSAGKRISGTMREGNKWLRRTLCQVAWAVTRKKDCYLSAQFKRLAARRGVKRAVMAVAHTILIIGYAMLKSGRSYHELGGGYLEQINKDQLQRYFVKRLQRLGLTVAVSPAA

SEQ ID NO: 195851 - protein, 317 aa, unidentified
MKQTKSNMKIAGIDVGKTRLDAAVHGLPMPMAAPRTAEGLAALIERFKAHGVGRVGLEATGGYERMVVTALQAAGLEVVVHQPMEVRLFARLKRQRAKSDRIDAQIIAAATASTDTVTAAREPLLHELAERLTAYEQITDLAATLKTACEHIALPDLMQDFSTQIRALTLLKRKLAAEIVAKIKAHPQLGARHALLMSLKGVGPLIAAALIVRMPELGAMKRGQAASLLGVAPFDRDSGNYKGQRFIAGGRSRPRRMLYLAAIVAKRYDPALKAFAKRLTDKGKPTKVAVVAVMRKLIEAANLILARGQPWLDRAPA

SEQ ID NO: 195852 - protein, 346 aa, unidentified
MQNDTLAAVDIAKEIFEVGVSEQPGRVALRKRLPRDRFLDFFAQLPPATVVMEACGSAHYWARRIEELGHVVVLLPPQYVRPYVMRNKTDRTDVDALLEAFRNEQIRPVPIKTVPQQVIATLHRLRSGWLADRVRCINALRGLLRELGFFIPEGRRHVLPEAWEIIQDHRRGLPDALKPSLAAMCEEIAALSTRIEDVEAQLEALARQIPLIARLRSVPGIGLLSATALYAFIGDPSRFPSGRHMASFVGLTPREYSSGLRRFLGRISKRGDAYLRMLLIHGARSVLWHAKRMKHRDRLRSWALNLERKVGHNKAAAALANKLARITWAVWKNDRDFDSAPEPQAA

SEQ ID NO: 195853 - protein, 351 aa, unidentified
MMIIGVDYHPSFQTIAFFVEETGEYGERELSHSEGQAEKFYRDLKQRGISVRVGMEATGYSRWFERLLAELGFEVWMGDPAEIKAKRVKKQKFDREDARLLLRLMRENNFPQIWVPGAENRDLRQLLWHRHRLVQMRTRIMNQLWALAMNENKCGKKKLWSERGRAELEKLPLDFWANRRRQDLLELLDRLNPKIEELTATAEQQAKKRPDALRLMTHPGVGPLTALAYVLIIGTPTRFARGKQIGTYVGMIPSEESSGGKQRLGHISKQGNSLLRFLLVEAAQAAARVHPDWRRRYMHLAMRRHKSIAKVAMGRRLATKLYWMWRNGCEYSQSGKCGSYAGQLGTGHGGK

SEQ ID NO: 195854 - protein, 339 aa, unidentified
MNIIKEAVGIDVSKDSLTVRFGTMDDNQNTSITKSVTFPNTIKGHKQLLDWTQKQSSSKPWFLMEATGVYYENLAYFLNEQKQQVAVILPNKAKNYTKTLEQKSKTDGIDSQSLTQFALERQLTAWTISSEGMRSLKMLSREYLTIKHLATQVKNQLHAKESSYQPLKQTIQRLKEQLRLFDKQIKVIEKQIHKLIDQDPELKKKIDNIDTVEGLGFMTIVTIIAETNGFAIIENHKQLASYAGLDVVHNQSGLKKGKTSISKKGNKFIRASLFLPAMVAARFNPKLKELYLRLVIKKNIKKVALVAVARKLLVLIFTLWKNNSTYISNYNPIPSVDIR

SEQ ID NO: 195855 - protein, 349 aa, unidentified
MKKIVRQVLGIDVAQKELVVCLGRVHDVDWALELYAHRTFPNTGKGFAAMILWVKKLTMENIPVRYVMEATGVYHEALAYFLEGKGHDVSVVLPNKISNYFRTLDVKTITDKTASEAIARFGLERKLDNWQRPKEIFREMKQLTRERGQVVEDRTVSKNQLHAEETQAFPNKKSVARVKARIKLLNKQEAEIKVEIALLVKGEKEVAKSVALICTIPGVGLLTAATVLAETNGFELIRSKRQLTSYAGLDVQEKQSGTSVKGKPKISKKGNRHLRKALHMPALSAIRNEERFTTIFVRLVSKHGVKMKAAVAVQRKLLELIYTLHKTNKPYDKDFPKNAEAKGEQRMAA

SEQ ID NO: 195856 - protein, 391 aa, unidentified
MIYVGIDVAKDKHDCFITNFDGEVLFKAFTIANNLDGFNDLYQKIVSVTEDITKVKVGLEATGHYSYNLLGYLIDKSLPTYVINPLHTNLYRKSLSLRQTKTDKVDARTIASMLMSDVNLKSYSDTSYHNEELKSLTRYRFDKVKERAKLKTSVSRLVCILFPELEKLVPTLHIASVYAMLSEFPGAKQVANAHLTRFTNLLSEASKGRYGKETAIAFRDAARTSIGSNMPAKSLELKHTIKLIQELTSEIDEIEHEIKLIMDELNSPILSIPGINYRMGAMIIAEIGDFTRFDSPDKILAYAGFSPSTYQSGQLDGAYSHIEKRGSRYLRYALYNAAKYVCIWDPTFAEYLAKKRSEGKHYTVAISHAVKKLVRVIYHLEKTNQQYIKAA

SEQ ID NO: 195857 - protein, 337 aa, unidentified
MFNSEEGYLHKVVQLGIDVSKAKLDCTLLLDRDTLRSRSKIVPNTAAGFVQLVEWVQRQAQVAAAEVVAAMEPTGVYHQALALALYEAGMTVVVVNPGQLRQFAEGLAVRTKTDAKDSVVLARYAGQAERIVWQPAPVEVRQLQALMGRLATVETELRRELNRREAAQLGHDPQLVQASIADAIAFWSAEQSKLQQAIDEHIDRHPGLKIERERLLTIPAVGPKTANRMLCVLSAHDFGRASQAAAFIGLTPVEHQSGSSVRGRPRLSKCGDARLRAALYMAAVVAIRHNPDVRALYQRLLKRGKAKLSALCAAMRKLVHICFGVLKNQQDYRPQCA

SEQ ID NO: 195858 - protein, 346 aa, unidentified
MNHYAGIDVSLECSSVCVVDASGKILREAKVASEPEALIAWFRGLGLGLERIGLEAGPLSQWLFAAMKAAGLAVELLETRHVRKAFEAMPVKSDRNDARGIAQLMRLGWFRPVHCKSMGAQETRTVLTARKLVQSKLRDVENSLRGILRGFGLKVGPTTERSFCGRIRELVAGHPSLAAVAEALLAVHAVLLREFNGFEKQVRRMARSDAKARLLMSTPCVGPVVSLTYASAIDDPARFKSSKRVGAHFGITPKKHQSGETDYTGRISKIGDASVRTALYEAAHIMLTKPVKGCSELKSWAMRIARRAGMSKAKVALARRLAVIMHRMLADGTPFNPAHKQFAAAA

SEQ ID NO: 195859 - protein, 337 aa, unidentified
MRSIGVDLHSNSLTACYLSEDGSEEFRTIALRELAAFQESLQAEDQVSVEATGNTRWLVKQVKALVSRVVVVNPNQFAVIRQSVKKTDKNDARALALFLSKGMVPEARLKSDDCAALSSLCQTRQKLVELRTTLVNKLHAIHRSHGIESKKSEFGSEKGLEQALARDWSLVERVEIEVIASQIRSLNENLKKVDSQLSASGAEMEGHQNLVSIKGIGAKSAAILLSVIGDVKDFEDEDKLASYFGIVPRVSDSNQTQHHGRITKRGSKLGRTTLVQCTLVAIRYSDYLKSYYTKKKSEKGAGKAIIATARKFLGVIYRTLKHKWVFADFPNFVLAEG

SEQ ID NO: 195860 - protein, 343 aa, unidentified
MYYIGLDVHKKTISYCVKDAAGHVHREGKIGSTRCELDAWIRTLPQPRTIAMEATIFTGWIYDHLLPHAEAVKVAHPLMLRAIAAAKRKNDRIDAGKIADCLRCDFLPECYMTSTEIRDRRRTLRYRGLLVRQMAQMKNRVSGLLMETGVSYNKQRLHKVGYFAELMSGNAEIDASIRPLLKLSREHIVRAQKLDYALVSSLERDPMLSERLKRLRTVPGVGPITALTWALEIGDVSRFRSIKQAISYCGLCGAERSSADKAMRMPISKQRNKHIQHVLVEAAKLGPRQNHELALVYEKEMQRGNRNRATLAVARKMVSWMLAVERRKQDFVPAEKLGGETAA

SEQ ID NO: 195861 - protein, 316 aa, unidentified
MYLGIDVSKLTIDCCLIADGQSHQKKFQNNKGGFEQLTKWLQSHKVSDKLHCVCEATGTYYEALAEYLYSRYTITVENPRKIKGYAIAELQRSKTDTQDAKLIAQYCQDRKHKLKAWQPPAKEQKQLQEIARYLDYLKQQRATEKAKQHEAPDYIKSHIQTTISNLTAQIQTVKKQLLQFYKDNPSYNNLRKRLKTITGIGEQATAVLLSTYKRHEFKNAKQFTAYLGLDPRKYQSGTSVNGKSRISKIGSSEIRKSLYMPAVVAYRCNAFPEFVGRLKNKGKHIKLILIAIMRKLAVIAFTLLQNGQDFQVERYK

SEQ ID NO: 195862 - protein, 372 aa, unidentified
MGHHTEAFVGIDTSKLRNAVAIADSGRGGEVRYLGEFPATEAAIQKLVAKLAAKYRHLTFCYEAGPTGYGLYRLLKSLGHESLVVAPSLVPKKAGDRVKTNRRDAVSLAKLLRAGELTAVWVPDERHEAMRDLSRARLAAKKDLQGKRQQISSLMLRLGRVYPGKTTWGPAHMKWLMTQKIEHREQRIALEELLEGIRQESERVERMEHAIREVVPEWSLAKVVAALQAVRGIDLIAAVGVLAEIGDLSRFQNPRELMGYLGLVPSESSTGDKVKRGGITKAGNGRARRILVEAAWSYRYPPRVSRDKQPKVEAAPRRVREIAWKAQTRLCGRFRSLERKGKRRTVIATAIARELSAFIWAINRELMAHRQA

SEQ ID NO: 195863 - protein, 362 aa, unidentified
MKAALRGAAPGWRTLEERSPKMRKTLHCGVDLHSNNAMYVITDERDRQVLRRRLPNELPVVLKVLAPFRPRLKVVAVESTYNWYWLVDGLQEKDYPVVLAHPSEMDQYDGIKEADDLTDAAFLARLARLNILPTGYIYPKEDRPVRDLLRRRMLVVQHRTGIILSLENMAQRQTGQNVGWRALRKLADEERRELLGDHDCLAFVTAEQVDLIEQLNEKIKRFEKKILEHVQLRPAYQCLQTLPGVGPILALTIMLETGDIGRFPTVGDYTSYCRCVRATHTSNGKKKAHNNGKNGNPYLAWAFVEAVHHALRVCPQAKSFYDRKKAKRNGALATKALAAKWSKAAYYMMKRQENFDRTRVFG

SEQ ID NO: 195864 - protein, 334 aa, unidentified
MHYLYYVGLDVSKETFDASLVAFEDANEMAHRKFANSRKGICSCLHWVEKRHGIRLDDVIFCAEDMSYISEMAVCASDRTLTFNFSLISPLVIKYSMGIARGKTDRVDARRIAEYAITHYRKIALYLPAEKELCQLRTWLILRAHLAKQRVAKLVLLEKLDYKEKFADVSIQRSMLQEEIAYAETHMKTIEREMKELIAADSNICRNYKLLTSIKGVGPITAIVMLCSTLNFTKITDHRKFACYCGLAPFEHSSGTSVRGGCHTSSMANRDIKVQLNRSALIAIRCDPQLKAYYERKVAEGKHKFSVLNAVRAKIAARCFAVVRRGTPYVALQI

SEQ ID NO: 195865 - protein, 311 aa, unidentified
MKIICGVDVSKARLDACIEPGVIFASFDNDPAGIAALAAFCRQHQTALVAMEATGGYERRAFLLLWEAGIPCAMTNPRSVRRYAEAMGLLEKTDRLDASTIARFAHAKNLQPTPAPTPAQQRLKALVTRLRQVTDDLTVQKQRRSSLDNAEMLASIDEVIALLKRQSRSIEGEIASMIDDDPLWAQLAEAWRSVKGVAGRTVARLMADLPEIGTYSNKAIAKLAGLAPLADDSGKRQGKRSIRGGRASVRSILFLVAAIAAKYDKSLAAFRERLLAAGKPKMVVRIALAHKLLVRLNAKARDARAQYANAT

SEQ ID NO: 195866 - protein, 306 aa, unidentified
MEVVYRRCCGIDVHKNSITACVLVNEPGKQREAREKEFRTYWSDLQKLKLWLYASKVKQVAIESTGVYWKPVWNVLDGHFPLLLTNPYHMRNIPGQKTDQKDSEWISDLLAHGLRASFVPPWPVQELRDLTRYRTKLTGEHNRVHNRIVKILEDANLKLGSVASDILGVTGRRIIAAIIAGQEHPDWLADKACGTLRNKRDQLRLVLKGRITSHHRYMLGELMEDLRRIEEKISRLEQEIAERMKPHAGAIGRLMTIPGLKLITAWTIIAQMGTDMSAFPDAAHAASWAGLVPGNNLSRNFLPLPG

SEQ ID NO: 195867 - protein, 400 aa, unidentified
MEPVIGLDVAKGESQVQAFLQRKQTYKQSFKFAHDLQGLHAFHRFYQEVEQVSGQPPSIIFESTGHYHEPVLQFLENHGITYYLINPVVSFGARKTSLRKVKTAKIDAFHLGELYYKEDLEVYQRKTEQALNLRLLTRQHSALTDSYVEIKLQFQAALDQIFPEYHGVFSDLCGNLSLNTLLHYPTSTDIHKVSQETLANEMRQFGARRSQAWFLDKASQLKDAAERNPFQFPVCHGHLVSLRMYIQMLFQYQEHLSKLKKEIDALAQTFEDYGLIQSIPGIGDKIAATIISEIGDINQFHYAKQLTAYAGLDPSVFESGKFRASINRITKRGSSRLRQSLYTAVQCGLAKERNKKLITFYDRKRNEGKPHKVAVIACANKLVHWIHAMLKRQEVFVDQS

SEQ ID NO: 195868 - protein, 411 aa, unidentified
MEVLHSRCAGLDVHRDTVVACARIAANGAVAQDVRTFGATTKELMALSEWLTEHGVTHVAMEATGVYWKPVWHVLEGSFELVLANAMHIKNVPGRKTDVNDATWIADLLAHGLIRGSFVPPAPVQDLRALTRTRKQLVRERASHVQRVDKILQDANLKLGSVITDIMGQSGRAILDAIVAGETDPAKLVMLVDRRVKAPRQTIADALHGTVTANHRFLLGLHLGQADGLQAAIDELDREVGERLDPFRVTAQRVTQIPGIADVAAAAIVSEIGVDMSRFQTSAHIISWAGFCPKNDESAGKRRSTRLRKGAPWLKTLLVQCAWCAARTKNTYLQAQFLRLKARRGPKKAIMAVAASILTAIYHMLKNGVDYRDLGADHFSRNDKTKSVNRLLRKIESLGFEVTGIREKQAA

SEQ ID NO: 195869 - protein, 342 aa, unidentified
MQKVSIIGLDLAKRVFQAHGAHADGSVSFRKKLSRERLLAFLKEQPRCVVAMEACGSAHHWGRAIRDLGHEARLIPPIYVKPFVKRQKNDAADAEAIAEAAIRPTMRFVAIKTEEQQARAMLFRTRDLLVRQRTQLINALRGHLAEHGIVAPQGPTNVKVLEQAIEDEATSLPLLITELARVYLEQIYQLSERIGALEKTVAHEAKCGATTRRLRTMPGVGPITAMAIETFAPPMGVFRRGRDFAAWLGLVPVQHSTGGKQVLGRTSKMGQRDIRRLLISGAMVIVRWACRKGTPEGSWLHRMLARKPRMLVAIAIANKMARSIWAMLTKGEDYRVPVAVAA

SEQ ID NO: 195870 - protein, 283 aa, unidentified
METVTLLGIDLGKHSFHVHAQSRTGHQVWRKKLNRSQLIETVANTPICRIVMESCSGAHFLARKFAQFGHDVRLIAPQYVKPFVKGNKNDFVDAEAICEAASRPAMRFAAARNEHQQTMSALHRTRDLLIRNRGSAHNQIHAYLVEFGIAISKGPAAIRKLPAVLEANELPPRLVALLEQLRNHIIYLNEQIQTIECELKALLSEDEAAQRLLTIPGIGPITASVLATQAGNVRQCRTSRDFAASLGLVPRQYSTGGKSTLLGISNAGTSTCGRCLSNVPEQS

SEQ ID NO: 195871 - protein, 347 aa, unidentified
MVTIGIDPHKASHTAVALDPNGEMLGELRVVADASMLRRLRKWASSWPQRVWAIEGAAGLGRLLAHQLVAAGERVVDVPSALAARARVLASGHGRKTDGIDARSVAVVAQHRGDLLAVAADDHTAVLRLLSDRRDELTGERRRTINRLHRVLRDMHPGGAPRQLSADRAARLLTSIRPASAVDLERKAIARQLIADVRRIDRALLENRRRCEQAIAASGSTLTEIFGISDVLAAKILGHTGDITRFASADHYASYTGTAPVEASSGEQTRHRLSRAGNRSLNHALHIAARVQTMHPGPGRTYYQRKRAEHKTSTEALRSLKRQLAKIVYRQLRHDHLGRPFIDSGLT

SEQ ID NO: 195872 - protein, 354 aa, unidentified
MYGLKHQKEKRSMDHFAGLDLSVKETSVCIVDDTGRIVREVKVASEPEALVAVLGNAAYHFKRIGLEAGPLSQWLFSALAEAGLPAICVETRHMRTILKAQINKTDRNDARGMAQMMRAGLYRPVHVKTLRSQKQRMLLTHRKLLQSKAIAIENDLRGSLRNFGLKVGMVGTVKFEARIKELVEDLPDLAVLVEPLLIVRRVLREQLGILHRRLLAIVRNDDVCRRLMTTPGVGPVVALTYRATVDVPARFRNSKAVGAVFGLTPSKYQSGEINRTGGISRCGDEMMRVMLYEAAQSMLRSAKWSWLKAWAMKIARHRGMKKAIVALARRLAVIMHRIWVDGTEFRWTREVAAA

SEQ ID NO: 195873 - protein, 400 aa, unidentified
MKYYTSTTEFNCGIDLHARQMYVCVMDRQGQKRVHTNVRDNDFNFFLKLVEPYRHSLTVCCECMFGWYWLADACQNAGLTFVLAHALYVKAIHGGKNKNDRVDSEKLTHLLRSNLIPPAYVYPADKRPLRALLRQRLFYVWRRSELLARIYSHQLAHNRIPAKQTRRTRDLWEEALLNAEDHPLRQIALKNDLTMIKHFDTQIFQLEEELQRQTKKVACREYSLLQTLPGIGENLGLTILYEIGDISRFPTVKDFLSYCRLVKGTVASAGKIKGLRGAKLGNPYLRWAFGEAAVIAKRDHYLVGPLSQRLEAQMGGNKFKANTVLAIKLARAVYFMLKNKTVFDPERLVASMQKCFSPGRRPPGSLTGRAKKAMPPPVPEAASCAPSTALCVGQASSPAH

SEQ ID NO: 195874 - protein, 433 aa, unidentified
MSQFLHDFVVGIDVSSEFSIVAMLAPSGELIRKPFRIDHNPAGFQKLLEILKKEEERLKRKPIYFVESTGIFHLPLFFFLRSNDLKGFVLNPLSVYSTKNFDLRKVKNDQKDAEAIAKLAKYQDVKFSLVPEPQILALRMMTREYYALSDTLTEMKNRLSTDLYLLFPGFLDVFSGAFGKTALAVLKGYPSPRAIQAVDTDALTFLISKTSRKNSTWAAKKVNQLKDCAQLASSMPHEFSLLDAKIKVHIDGIENMQASLNGIVAQIHAMIESKLFPADARRNIELLDEMPGIGFLTAATLMAEIGDFNLFKSAKAFTAFFGIDPSVNQSGKFQGDRNKISKRGTRIGRRILFTIAMASIRTTRKGDEINPVLREFYVAKCVNKKKKVALVAVMHKLLHYIFAVLRDQKPFEIRQPEDHQAWRNTKLRQAPAA

SEQ ID NO: 195875 - protein, 342 aa, unidentified
MLYVGIDVAKNKHDVTALNVPGKTVLKPLTFSNNKAGFELLDLSLRQLNQDCLIALENTGHYAFNLLNFLHEQGYKVYTYNPLLIKKFAKSLSLRKTKTDKKDAHGIALKLLSDPNREQFQHDNRQVELKILARHIHRLKKKQSDWKVQYTRCLDIIFPELDKIVGKHSEYTYQLLTCYPNPQKRLEAGFDKLIEIKRLTASKIQDILSVAPRSIGTTSPAREFEIIENIKHYKRLIDKAEKCVNDLMAEFNSVITTVTGIGNRLGAVILAEIQNIHAFDNPAQLQAFAGLDSSIYQSGQIDLAGRMVKRGSPHLRWALIQAAKACARFSPAFKAYLKTKLE

SEQ ID NO: 195876 - protein, 388 aa, unidentified
MNVGADKSEPLTAVHTDLGAIFVSLELSRSSWLITSLSPGGGEKMSKHSVRGGDFAGLMERFAQLQEKARLRTGQSFRIIVVQEAGLDGFWIHRALQNEGIESHVVDAASIATSRRRRRAKTDKIDGETLVRALLAYKRGEPRVCAMVKVPTPGEEDRRHLCRERKALTAERVRHVNRIKGFLFSQGVSGYQPLRRDRRQRLEELQTGDGRAFPQHLKALVNRELDRLELLLKQIKTVEAARDALLAMEQTAKPAPAAMLLDIRGIGPEFAAILWSEGLFRHFENRRQIAAYAGLAPTPWQSGAVDREQGVSKAGNPRLRTTLIQLAWLWLRNQPRSALSIWFHERVSRNGGRLRKTTIVALARKLLVALWKYVTAGVVIEGVTMKVA

SEQ ID NO: 195877 - protein, 365 aa, unidentified
MTDGGRRVIAGVDAHTDEHHAAVLDESGRLLGRAAFATTREGYEQLIAWVAGHGLIDRVGVESTGSFAAGLVRVLQERAIVTVEVNQPHAHTRHRRGKSDPIDAELAARAVLSAVASAIPKHTAGIVEAIRQLSVTRASAVKARSAALNQLENLIITAPDELRVELARRKTLSGKATLCRKLRPDLARLGEPAQAAKLALRSLARRVRDLDLEITELERQLDRLTRIAAPRTTRLLGVGAVHTSQLLITAGHNIDRLRSEAAFARICAAAPIPASSGRTTRHRLDRGGDRRANKTLHMIAVCRLHHCSRTRAYAARRTAEGLSKRDIIRCLKRYIARELYHSLRADLTDLAPPTPPPRAITIGSV

SEQ ID NO: 195878 - protein, 338 aa, unidentified
MKLYGGIDLHSNNNVVALLDEEDRVVLRARLANEAAGVLAALAPYREAIVGLVVESTYNWYWLVDALMEAGYRVHLANTAAIVQYSGLKYSDDDSDARWLAKLLRLGLLPEGYIYPKEDRAVRDLLRRRMRLVQQHTANLLAVQNLFARNRGKSLSANEVRRLTPEAVSGLLPDPNQALAVQSNLLVMRAQDVAIDLLEREALAQVKLRPAYRHLLTVNGIGTVLGLTIMLETGPVARFSQVGHYASYCRCVGSEHLSNGKRKGHGNTKSGNKYLAWAYLEAANFAVRYNATVKRYYQRKRAKTNGVVAIKTVAHKLARACYYILRDGTDFAVSRAFG

SEQ ID NO: 195879 - protein, 367 aa, unidentified
MKSILSVGMDVHKNSFSLCAYDGYTGEIVSESTFASDVKLVIKFIETLKSRYENDVEIKCGYEAGCLGYSLYKSLTARGVDCIILAPTTMQVSAKNKMVKNDRMDALNIAKNLASGSYKSVYVPDEEDVEIKEYIRMIHDFKKELKRVKQEICAFVLRHGYQYDGKSKWTIRYMNWIRELEMSEIQRETLNEYIAEMENLNDKINRFMNRIDEMYQSERYHEKVSKLRCFKGIETFAAMTIQVETADFERFPSAKAYASYTGLTTGEHSSGDKNNRIGITKQGNTVIRKTLVECAQSLVKGNVYAKKSQGLKSRQKGMDVNIIAYADKATERLKKKYQKLIERNVPRNKAIVAVARELACFIWGMEM

SEQ ID NO: 195880 - protein, 438 aa, unidentified
MSNKVFFNLDELFISVGIDVGADFSWMSIALPNQQFVGKPYKILHNSIDSLTTAVSKIQEAEELYSLESRIFLESTGIYHYPLFCYLRDKGFNCSVINPIITKNSTNINIRKVHNDRFDSKKAALVGLKPDLKVSLMPSDLALNCRNLCREYYDLMDNRSAYVNKLQGELRMAFPQYLGIFSKVTINTSLTLLETYTSPSAFLKADKQEIIDIIKSTARFGLTYAQNKYNAIIQAATDANQFGYIIDSNIKRIRLYISFIRKYDEEINSILESLHELVDANEDSDFVKQIHLIETFKGAGFLSAVSIMGEIGDFSAFSKPKQLFAYFGLDPAVKQSGKFEGTKVQMSKRGSAIARRVIHTLTLQSISISRNREAKNPVLREYYLKKCDSKPKLVAMGAVSHKVCNMIFAILRDNKPFKIIAPQEHIKQYNSAKCDIAA

SEQ ID NO: 195881 - protein, 408 aa, unidentified
MRVIGMDIHRTFAEAVMIDGDKLIRLGRINMSREHLAAFAAKLTHDDHIVVEATGNAQAVVEAVAPFVGRVVIANPRQVHLIAKARVKTDVIDATVLARLYASGFLPEVWVPDQQTMRLRRQVTRRNQVVRQRVRLKTMIQAILHAHLVPQCPHADITGPKGRAWLLAQLLPEDEATAIERHLREYDRLTDDLRSLERELARDALASAETKRLMTIPGIDMVVAVGLLAAIGPISRFSNPTRLVAFLGLNPSVHQSGNSPARHGRITKQGPCHARTMLVEAAWAAVRGAGPLRAFYERVRARRGTHVAAVAVARKIAVIVWHLLTRCEDYAWFRPALHAKKLRDLELLSGQPARRGQRGAGYEYNLTKCRQEERQRGERAEAAYRRFTEGWTKRGNRVPAGASEEARQ

SEQ ID NO: 195882 - protein, 523 aa, unidentified
MEAAKIIVPYSKNKTNRTLVRWRQESHKSPKANVVPVLKWFQPWWRGKLDPDEESIFETENGLEYGPMQGEVVVSKRKKTIDQMTVVNSNAAGLDIGAREIWACVGVSPDGECIKQFGTFTPDLQRLADWLVACDVKTVALESTGLYWLAIFEILEARGLKVWLVNARHIKNVPGRKSDYLDCQWIHKLHSLGLLNASFRPDGEMCALRAYLRHRAQLVQHRAPHILHMQKALQQMNIQLHHVLSNITGATGMAILRAIVAGERDAVTLAQLRNPACQSSEETIAKALTGEWKNEHVFALQQSLELYDFYTQQIAACDVQIQHQFAAMKPRWTNDSQVLAALPAKANSKMRNRSAVHSRAELLRIAGVDLVAVDGLNISLAQTILSEIGTDMSKWSTEKHFASWLGLAPHNDISGGKVLRSRTLPSQNRAGQAFRQAAAAVSRTPSAFGAFYRRKRVQLGPQQAQAATAHKIARTVYYLLKHHVPYQDVGAEIYEQTQRERDIAHLRKKAAKLGFTLTAPQVT

SEQ ID NO: 195883 - protein, 391 aa, unidentified
MIFIGIDAAKDKHDCFIANSDGEVLCDVFTISNTLTGFNDLLSKLKSFSKDLSKTKVGLEATGHYSYNLLGFLLDNGLPTYVLNPLHTNLYRKSLSLRKTKTDKVDARTIASMLMSCKDLKPYTRALYHNEELKSLTRYRFDKVSERAKLKTSVSRLITILFPELEKLVPVVHCVSVYALLSEFPSAKHIANANLTRLTNLLYSASKGHYNRDTAIRLREAARNSIGSVMPAKSLELKHTIKLIGELDNEISEIETAIKQIVDSLGTTILTIPGIGYATAASILAEVGDFSNFETPDKILAFAGMSPSTYQSGQLTNCYAHMEKRGSKYLRFALYNATKYVCKWDSNFAAYLAKKRSEGKHYNVAISHAAKKLVRLIFALEKSRLPYMPVA

SEQ ID NO: 195884 - protein, 415 aa, unidentified
MYYVGIDIAKSFHVVSVIDDNETKVINKPFKINNDAKGFEKLLAVLNSVTLDKSEFTIGLEATGIYGENLQEFLKFQAYLVKLLNPFQTTRYREQITLKKVKNDEIDSLVIALLLKSGKFSSGYITDDEYQSLRTLYRNRATIQADMKDVKKRILTQITVTFPEFEGFIKPFTVTGLVLLDKYPTAHHYRHSSVDRIMKLFRHIQGNNFTQSKALGLLELSRESIYSGKAKDARAIAIRSSIRLLQMYLSELDIIEAEILSLLNATSTQSTVDEAGQEIQKADSLLANLKTIPGVAEKTIAALISECGDLTRFPSIPKFIGYLGLFPTENSSGSSKYIGHLSKRGSPLAKHALYMSAVSCLIHNTQLKQLYDTKRSQGKSKKEALIAVSSKIAVIIYSIVKYNVPYNPNRVFAKS

SEQ ID NO: 195885 - protein, 402 aa, unidentified
MPMLSIGIDVSKGKSTVCGMKPGGEIVYTPFEVQHTRKGMSELVSLLRSSGEEVRAVLESTGSYHCPVVAALLENGIFVSVVNSLRMKRFCSQSIRKVKTDRIDAMQIALYGLAYWQELQPTRLPEDTYRELQLLARQYYQMTSILIKAKVDFNAICDQVLPGMQELMNDHAGRHKLSDFVLRYRHTTHILEMGETRFRKDYCKWAEKKGYRNCERMAALIFATAQNGIPVLPNAPSTQIVITEAIRVLHTVEASRDAILTQMQALAKTLPEYSLVREMPCIGDTLAPRLIAEIGDVRRFHSKRALIAYAGIDAPPYQSGKFCANNRHISKRGNRYLRKTGYEVMQSYVMHKPANDPIFTFIEKKRSEGKSGKLAMVAGLNKFLRVYYGKVTELYRSLPAIE

SEQ ID NO: 195886 - protein, 371 aa, unidentified
MGSETHFARAFDWRNYEYSKKPLEFSNTEAGFMTLKAWMADFAEKYGKNVVIPGMEPTGHYWFNLGAYLQDNGMKPVHVNPHHVKKSKELDDNNPNKNDRKDPKTIAALVNEGRFSYPYIPTGIYAEIRSLSNLRLQTQEEITRIKNRIARWFSIYFPEIKDVYRNPDSVSGLMILKEAPLPQDIVKLGVDGINKIWRDAKLRAAGLKRAKTLVTAAEHSIGSQEAPDSARIELKNLLNDYEIYKNREEDLMSLTEEKLSEIPHIDKLLEIKGVGLKTVSGFVAEVGDITRFDNPKQLQKLAGYAIVECSSGKHKGESHISYRGRKRLRYVLYEAAISLIARNENLRKYTGIIELERKSAKEDAVSHSSCV

SEQ ID NO: 195887 - protein, 337 aa, unidentified
MSNCTVIGMDTSKNVFEICGGDRTRITLRKRLFRSEILSFFRSLQSTLVAMEAGPASHYWWRELQKLGHEVRLIAPQFVKPYVKSNKSDRIDAEAIYEAVQRPGMRFVSVKGIEEQELQHVHRRRSLAYKQWVAVNNELRGMLAEYGVVISKGKKALRLVPEKIEELGGTLSSLGVRILRDLYEEVVRLESDIGKLDVLVEGLCKAHPVCRRLDTIPGVGPVIATAIVSAVPDAGVFKNGREFAAFLGLVPRHTGTGGRNRAGRISKRGDSYIRKQLVHGARSVLYRAGQKTDRLSTWAESIKKRRGWNKAAVAVANKNARIIWALLRYETEYKAAA

SEQ ID NO: 195888 - protein, 453 aa, unidentified
MVQPNARVSLKPGKSRAALTITHPNAAGIDIGSASHYVAVPADRDDTPVREFPSFTVDLNALADWLKLCRVDTVAMESTGVYWIPLFELLESRGFTVLLVNARHVKNVSGRKSDVLDCQWLQQLMSYGLLSGAFRPVDQVCVLRSLWRQRVMLLRSQGRHVQHMQKALTQMNVQLANVISDVAGETGQKILRAIVAGERDGQVLGSMKNARIRASIDEIAKSLQGNWRGEHLFALKQALNAFDFIGTQLAECDREIDQQLQRLQAHEGEPAKGKQRGRARNAPKFDLRTQLFKMCGVDLTRIDGIDVSTALAVISETGADMSRFPTVAHFASWLGLCPGTKITGGKLMSGKTKRCANRAAQALRLAAAALRPSQSALGAYFRRMCSRMDKPKAITATAHKLARLVYTMLTKGEEYTDQGQDYYEERYRQRVMHHLAKRAEKLGFQLTPIPNAA

SEQ ID NO: 195889 - protein, 410 aa, unidentified
MERIHDRVAGLDVHRDVVAACTRTPGPRRGTVSTKDRFGTTTSELTRLGDWLAGAEVTLVAMEATGVYWKPVVYALEERLEVWLCNAHHVKNVPGRKTDMSDAEWLADVAAHGMVRPSFVPPRPIRELRELTRYRTSQTEARATEIRRLEKVLQDAGVKLSSVASKVLTQSGRAVVEALIGGERDSVVLANLAKGKMRPKIPALIEALDGHFGAHHAVAARSVLDHIDFLDGRITALSGEIAARTSGFGQVFDLLLPVPGLGQLTIEIVIAETGADMSRFPTAAHLASWVGLCPANHESAGKRRRAGTGHGNMWLRKALIEASRAAVRSKDSYFAAQYLQIMRRRGPNKAAVAVAHSLLDVIWHLLSTGETYADLGADYFERRRDPDRQRRRLINQLEQLGYTVTLEPVA

SEQ ID NO: 195890 - protein, 326 aa, unidentified
MSPTHVAFNHIVAFEVAKETLVIHILPGDGQHTIANKPKAIRKLLMRELRRNALADLGSLLVVCEATGGYESHVLEICVELGLAAHKAHGARVRHFAKYLGLLAKTDPIDARVLALYGLKTQGLRLYVPLTPVVMALKDLKTRRDQVQQMLIAETNRLEHAHHASVTRSLKVHIASLRKALATLEADIAAHLKANDELARKARLMRSLKGVGPMTAATLLAYMPELGTFRKGEVTCLAGLAPIANDSGKSHAPRHIAAGRSNIRTALYMAALVALRHNAVMRRFAASLRQNGKPFKVVITAVMRKLIVTLNAILRSGEPWSHAKQA

SEQ ID NO: 195891 - protein, 411 aa, unidentified
MRMAGIDVHKKVLMVVVIETTKPEEKPERQRFTTLRGDLSRLSSWLRAQDVQEAVMESTAQYWRSVWLELEPHMLLHLAHAFSNRAPRGRKHDFRDAERLVRRLFADELILSFVPDGEQRIWRNLTRMKMQLTRDRVRLQSQMECLLEEMRIKLSSVVSDLLGASGLRILRALAAGETEAKRLAALGDGRLKCTEEQLLDALTGSSQPMHREMLALQLERLQLIDTQIDKLNHLIAQAMKPHQEAVMRLAEVPGLGVDSAQQIIAEVGAQAGTFSSAAELTSWVGTCPGKDESAEQNHSSRSAKGNKYLRRVLSQAAHAAVKKRGGYFQALFRRLLPRLGYQSAIWAIAHRLCRVVWKILHEGVRFIEKGREPDAQAKKKRVRILVQALRRLGYDVAITATHLGTQNATQA

SEQ ID NO: 195892 - protein, 346 aa, unidentified
MMLIGCDFHPSWQQVAWFDESTGEIGEQKLVHGTGDAEKFYRQLPGPALIGMESTGNCQWFVELVTALGHTVWIGDAAKIRASDVRQQKHDKRDAELLLKLLMEKRFPRIWTPSSQQRDLRQLLIHRYKLVRLRAQAKNGLQHLAMNQGVQKKRRLWSTAGQQVLRELPLQPWASRRRADLLRVMAMLDQQIQSLDLAVTEAAEKDPNARLLMTQPGVGPVTSLAFVLTMGEVSRFRRGKQVASYLGLIPREYSSGGHQRLGSISKQGNRFMRMLLVEAAQGAVRCDPQFRSEYLHRCHQKPKGVAKVAAARKLAIRLYWMLRTQKAYPAIVSIESSSRVPLVGAS

SEQ ID NO: 195893 - protein, 281 aa, unidentified
MNITQIGIDLAKLVFQVHGVDARGKVALRKQLKRSQVNAFFNQLAPCLIGMEACGSAHFWARKLTEFGHTVKLIAPQFVKPYVKSNKNDAADAEAICEAVGRPNMRFVPIKNTEQQALLGLHRARQGFVSERTAQANQIRGLLSEFGLVMPVGIRSIKGKVPGILEDAENGLSGVSRALIARLFEHLGLLDRQVRELEREINAWHREDTASQRLQAIPGIGPLTASALVASVGDAKVFHNGRQFAAWLGLVPRQSSSGGKTNLLGISKRGYTEFELTQEAQ

SEQ ID NO: 195894 - protein, 321 aa, unidentified
MAMLSFCGVDVSKERLDVMVLPEQQRFSVRNDAAGWAELIARLRSFAIAAIGLEASGGYERGAMRALLAAGVPACRINPFKLRQFARPSGVLAKNDPLDTRMIASFVAIMPTRPARPRPPAIERLTEMLAIRRQLNAEKVAAENASRLLEDTMLQRLSRRRIARLAADIDMLDRRLVEITASDAALAHRYRLLTSMPGVGLVLACTLIALLPELGTINRKQVAALVGVAPYAFESGKFKGRRCIWGGRAPVREVLYMAAMSASNWNPVFKAFHTRLKAAGKLPKVAIVAVMRKIITTLNAMVRDDVVWADHLHGRHIVPAA

SEQ ID NO: 195895 - protein, 342 aa, unidentified
MDHFGGLDVSVKETSICIVDDTGRIVKEVKVASEPAALLKVLGNPTYRFKRIGLEAGPLSQWLFSVLAEAELPVICVETRHMQAVLKAQINKTDRNDARGIAQMIRAGLYRPVHVKTLRSQKLRMLLTHRKLLQSKAIAIENDLRGTLRNFGLKVGMVGKVKFEARIQELVENFPDLAVLVEPLLIVRRVLREQIVILHRRLLAIVREDEVCRRLMTTPGVGPVVALTYRATVDVPARFRKSKSVGAVFGLTCSRYQSGEVDWSGEISRCGDEMMRTMLYEAAQSMMHSKKWSWLKAWAIRVARRRGMKKAIVALARRLAVIMHRIWVDGTEFRWTRETAAA

SEQ ID NO: 195896 - protein, 309 aa, unidentified
MTAEIFIGIDVARDNLEVAVRPAVEQWRVANTTAGIAELLVRMQALRPTLIVLEATGGLELPLLGVLGSAGLPVVAVNPRQVRDFAKATGKLAKTDALDAHVLAHFADAVRPAVRPLPDAATQALSALVARRRQLVEMLTAEENRRTSASAPIRADIQEHIAWLRKRLRGIEQELSQALRNSPLWREQEDLLRSVPGIGPVVTVTLLADLPELGVVGRKQIAALVGLAPLNRDSGTLRGKRTVWGGRSAVRAALYMAALVGTRSNPVLKALYTRLLAAGKTACMHKLLTILNVLLKHRTRWAPPTTVGA

SEQ ID NO: 195897 - protein, 445 aa, unidentified
MSVGHEEIPDADHESVIGRVCAVDVAKATGKVCVRVPHPTLEGRRVSRVWDVPATLAAVTELATELVAEGVQRVTVESTSDYWRIWFYVLEAAGLRLQLVNARDVKNVPGRPKTDKLDAVWLAKLTEKGMLRPSFVPPAPVRQLRDYTRLRIDLTRERTRHWQRLEKLLEDALIKVSSVASTMTAMSVRDMLEALIAGERDPHRLADLARGKMRSKHAALVQALTGRFDAHHGVIARTLLNQIDALNTEVAGLDERINEQLTAITVTQTECGSDDTVPVVSTGVQAVQRLSEVTGVGVMTAQVIIAEIGIDMSRFPTAAHLVSWAKLSPRTVQSGPVLQGGRTGKGNPYLKGALGEAAAVAARTDGFLGERYRRLVKRRGKLKALVAVARSLLVIVWNLLADPTARYHDLGAEHYLGRIDTQRRVRNHLSQLAALGYRVTVEPAA

SEQ ID NO: 195898 - protein, 356 aa, unidentified
MSQKLDTSPAVIGIDIGKNSFHIIGQNQRGAIVLRQKWSRGQVEARLANLPPCRIGMEACVGAHHLSRTLEALGHDPRLMPAKYVRPYSKGQKNDYRDAEAIAEAVQRPTMKFVPTKTTDQLDLQALHRVRERFVGQRTGIINQIRAFLLERGIAVRQGLRFLRAELPGILATRTDALSPRMLRIIEDLTSDWHRLDARIEHLSSEIEALARQDKGCERLMSVPGIGPIISSAMVAAIGAGDAFSKGRDFGAWLGLVPKQLSTGDRTILGSISKRGNRYLRSLFVQAAWVVLVKIGPKHWDRYGLKSWIEAARRRLHHNVLAIALANKLARIAWAVLHKGRAFECVKTNEAASQLA

SEQ ID NO: 195899 - protein, 342 aa, unidentified
MTRIARIGIDTSKSTFQLHGVDAEEKVVMQRKLRRREFMTFLGKLEPTSIGLEACSASHYWAGQLQALGHTVMLIPPQYVRPYVARGKNDAADAAAICEAMSRPRVRERLVAAKTADQVAAQMLLGVRENLIRRRTQLGNSIRGHAAEFGLVAAKGLSKVEPLLARIAADDTVPALAKDMFAALGQELAELAPRIAAVEARLRAWHRSNELSRRLAEVPSIGPIGACLLPIKIANPQIFRSGRMCAAWIGLTAKDHSTAGKQKLGGITRAGDETLRATLVAGATAYIQQVRRGRTKPSPWLAVLLQRKPPKLAAVALANKTARIAWKLMTSGQHYNRAAAGV

SEQ ID NO: 195900 - protein, 351 aa, unidentified
MFDSGKTALRVVGIDIGKTSFHVVGLDRRGAIVLRQRWSRGQVEARFANLPCCLIGMEACVGAHHLSRKLQALGHDARLMPARYVRPYSKGQKNDFRDAEAIAEAVQRPTMRFVATKSVDQLDLQALHRVRERLVSQRTGTVNQIRAFLLERGVAVRQGPRFLRIELPRLLAAPSEVVSPRMGRLIEGLADDWRRLDERIEGLSREIEAMARQDAGCARLMSVPGIGPIIASAMVAAIGTGDTFAKGRDFAAWLGLVPKQISTGDRTILGSISKRGNRYLRVLFVQAAWVVLVRPKNWERHGLKSWLEAARRRLHHNVLAIALANKLARIAWSILARGRGFEASRLDHAIA

SEQ ID NO: 195901 - protein, 352 aa, unidentified
MEYYIGCDAHKKYSVMAGLSETVEILPAERVEHDKETYRLFLRTLPTGSRIAVESVGNWYWMIDEIEKAGHQPFLVHAARAKLMMGQVNKTDKLDAMGLAVLARNGTLPVVWVPPGELRDKRELPRMRMVLVSMRTRLKNRIHAIFAKYGITFPDVSDLFGGKGRRLMEASLWELPPETRLSVVQQLQLIDQVEQSIKEAEKRIGEVIKQDPAMQLLKTMPGVGALLAITIALEMGEVTRFPSAEKFASYAGKTPRVSSSGGKTRYGRVRADVNRYLKWAFTEAANAIVLQQHSLGDCHVLRLYWRVRRRGGHAKAITAVGRHLAEAAYWMLQKQEAYREPERHTMALAVKG

SEQ ID NO: 195902 - protein, 373 aa, unidentified
MNKSTRIVGLDESKEMLQVAVADAAPGGEVREYGAIPNTAEALGKLVRRLGRPKDLFFVYEAGPCGYTTYRTLRALGANCVVVAPSKTPRRPGDRIKNDRRDAVNLARLYRAGELTIVWVPDEESEAMRDLTRAREDAKYAETRARQRLQSFLLRHGRRYPGRTSWGKAHARWLAEQRFAHPGQQVAFEEYGEAVREATRRVERLDQQIRDLVPTWSMAPVVQALTAHRGVSQVVGSTFAAELGDVTRFDRASDLMGFVGLVPSLHATGLSRHTGPITKTGNAHVRRCLVEAAWAFRHPARRTQHLNRRLRGQPREVQAIAWKAQVRLCGRYRKLRARGKPHNTIITAIARELVGFLWATARLVSAPATATTH

SEQ ID NO: 195903 - protein, 349 aa, unidentified
MTIVEDACVITGGVDTHADLHVAAALDPLGGLLGVREFPATATGYAQLLDWLGGFGAVALVGIEGTGSYGAGLARHMADAGVRVVEVDRADRQDRHRQGKSDPLDAVSAARAAQSGRASGAPRGRDGAVEAIRALMVAKRSARAERTQAINQARALIVTGPDELRARFAGHRPAALVEAIAALRPRPGEVSGYATRVALRELGRRAQFLDAQLERLDELIGPLVTARAPGLLALHGVGPDTAALLLIAAGDHPGRLRSESSWAHLCGAAPIPASSGKVSRHRLNRGGDRQANHALWRIVITRLGSRPGHPATRAYVERRTKEGLSKKEIIRCLKRYVAREVYHQLRAGA

SEQ ID NO: 195904 - protein, 370 aa, unidentified
MSVRRILAKTINTDLEYEAIGIDLAKNCVSVALLTTDGEVVCIDRLDYSELEKSAQVLCPTTFAMEPCTEMNYLVQKLEAWGHRCLVIGGKNVQNYVENHYSGQKTDLNDAQALAFLAQDTQLRTIKAKDMEQQKYASLTTLREQYIKQYRQTIVSLKGICQAWGLNISKGISGKARLKDLIENHAAFPEELKESLVDMVTHAQTAQKALNKITKTLEELAKNDKLCQLIQTIPGLGPICSCRLRATIGDIKRFKNPKDFPAYYGLVPRSIATGHNEKKGRITHRGDKTMRSLMVQGAGSVINMATRGKLKSKQLTKWILKKQKEKMPWGKLVCAVAAKLLRIVRAVLISSKPYNSKIAGVAKCSLPKGA

SEQ ID NO: 195905 - protein, 351 aa, unidentified
MTVTHYIGFDVHKKSVSYCVKDATGTIAEEGKLRATREALRQWAGKRTEPWHGAMEATLFSGWIYDTLKPFAAELQMGHPAMMKAIGASKKKNDRIDARKTADLVRCNLLPACYVAPVEMRELRRMLRYRNVVVAQAVRMKNKMSGLLMEVGAEYNKQQLHGKKYFAELLGSLEEVPESVKELLRLSRGALEMFETTQQQILDKLQKDLRLVERLEVLKSIRGVGDVTALSWALEICDPHRFSSIADAVSYCGLTSALVSSADKQQRGPISKQRNAHLQTVLIEAAKLAPRWNAQLAAVHEQEIARGHRNRATLAVARKLVAYLLAVDKSRKPFQVRTPSAAENQAPATAP

SEQ ID NO: 195906 - protein, 421 aa, unidentified
MTPLSHDTFAAFIGIDWADATHDGCLQAAGTAKRECFQLAHTPEAIDAWVTTLRTRFHGQPLAICLELDKGPLVSALRKYDFLVLFPINPLMLARYREAFTPSRAKDDPTDAELQLDLLLTHRDKLHPLTPQSPTMRALAQLVEHRRRVVGDKVRMTNRLTSTLKNYFPQVLHWFQDKDTLIFCDFLSRWPTLKAVQLARRATLETFFRDHHVRSPEVITQRIQAIKAAPPLTTDDGVIAPNALLVQALVAQLRVTLQAIAEFDTASAQRAHSHPDFPLFQALPGAGPVFASRLLVAFGEQRERYRSATALQKYAGVAPVTERSGKKAWVHWRLQCPKFLRQTFVEWAAESIRHSFWAQVYYQQQRDKGKAHQAAVRALAFKWIRILYRCWQERKPYDESVYLQALHRRGSSLLQNLAKAS

SEQ ID NO: 195907 - protein, 418 aa, unidentified
MKSMEITAVGIDVSKRKSTVAIRRPGGVIVACPFDISHSSHDLEKLVSILKTTGGDIRVVMEHTSNYWKPIALTLKNAGFYVSVVNAMLIHDFSDNSIRKLKTDRADSLKIANYALTFWNQLPPFNDEDETRLVLKEQSRMYERLASTATSLRNGLIALADQTFPSIDQAFGHAIKNADGHEKWVDFFSIYWHRDCVLRLSIEKFTESYRKWCLRRNYKFRTNTAHKLYALAQDAVPTLPKNNGTKALVLQACKSLNAVCEAKQSTQEEMNRLASLLPEYEVVMQMEGTGPITGPALMAEIGDVRRFKNKKALVAFAGIDAPPFQSGNFESKSRHVSKRGSPHLRRTVFLVANIILTLSHKDNSVFCFMDKKCAEGKHYYVYTIAGSAKFLRIYYARVSEYLRTQEPPAAAICLDCKD

SEQ ID NO: 195908 - protein, 414 aa, unidentified
MEVVHSRCSGIDVHKAEVVVGTRIALSNGRASKEIRRFGTTTRDLLELADWLSQNGITHVAMESTGSYWRPVYNILEGLFDLTLVNAQHMRNVPGRKTDVKDAEWIADLHAHGLLKASFVPDAEQRGIRDLTRTRSSLVGERARLANRIQKTLEDANIKLGNVATDVLGVSGRQMLHAMVAGEQDIEKIAQMSHGALRKKLPELRLALEGRVREVHRILLKVLLDQVGALDKSIEELNAEIDRALIGSPRPFESAKQLLVTAPGVGRITAEAVLAEIGVDMTRFLSDAHISSWAGICPGNHESAGKRLSGRTRRGNTALRPVLITIAHVASRQKGTYCHALFKRKAAGRGKKRAIVAVAHSLLVAFYHMLKDGVPYQELGADYFDRLSKPKTVHNLTKRLQSLGYDVKLTEVAV

SEQ ID NO: 195909 - protein, 342 aa, unidentified
MDYYAGIDVSLECSSVCVVDSNGKIIREGKAASEPEALIGWLRSLGYELSRIGLEAGPLSQWLYAATGEAGLAVELLETRHVRKAFEAMPVKSDRNDARGIAQLMRLGWFRPVHCKSLSAQEARAVLTARKLVQSKLLDVENSLRGILRGFGLKVGKTTARSFAGRIQELVKGHRHLETIGEALLSVRTVLLREFNVFEKRVRAMARSDARTRLLMTTPAVGPIVALTYASAIDDPARFKSSKQTGAHFGLTPKKYQSGETDYSGRISKIGDASVREALYQAAHVMLTKPVKGCSQLKSWAMRIARRAGSSKAKVALARKLAVILHRMLANATPFNAAAAAA

SEQ ID NO: 195910 - protein, 318 aa, unidentified
MPHYIGIDISKVYFDADIVGKVMRFKNTDTGYDAFVKALPIDAYCVMESTGNYGYRLATALVHSGVSVAMVNPLSVKRFGQMHLRRTKTDRSDARLITDFAKIAPLSPFVVQSNALNELQQLTTALKQLIKQRAALRNQLEALAQLPHRSTGAIEAITSTIKHLDKTIKGLEKKTHEHAMMECPEIYPSLLTIPGIGKRTAIALLTITNGFKRFERAKELVAYLGVCPRIAQSGSSLAAQGHICKLGLAYERSLLYMCAMSAVRWNNPCKVFFSRLISRGKPKMVALLAVVNKLIRQAFAIATQHTVFQHNYNFALAS

SEQ ID NO: 195911 - protein, 341 aa, unidentified
MHDVTLVGIDLGKHSFHLHGQDRHGKAVFRKKVNRKQLIEFFAKFHPCIVVMEACAGAHYMARQLAGWGHQVKLISPQFVRPFVKSNKNDFVDAEAICEAASRPSMRFVTPKTESQQILSALHRVRDSLVRDRVKTANQLHGFLLEFGISLPVGQAVIKRLPAMLAEHALPPRLVAILERLHVHFKYLSEQISEIDAEMARQLADDELGQCLLGIPCVGPITASVLAAEMGDGKQYGCSRDFAASVGLVPRQYSTGGKSNLLGISKRGDKNIRRLLVQCARVYMQHLERQSGRLADWVRTMLARRHSNVVACALANKLARTAWALVTSRTTFDARSAGMPA

SEQ ID NO: 195912 - protein, 511 aa, unidentified
MNLVERLSFSPPRSVTAQCYDAPARAARWRDWFRPATCVLIGEPWASRWRDLFFSDPSRASNADPSQLRPEVMTKPSLEVLDPTAAAVDVGSEQLHVSVAGGRPKVFGTTTGQLHELRDYLLAHGVRSVAMEATGVYWLCLFEVLEQAGLRVVMVNGKYVKNLPGRKTDMSDWQWQATLQAHGLLQPGYVPPEHIRRLQDYLRLRTDHITMAGSHEQHLQKALDRMNVKIHQVLSDLTGVSGRKLIEAILAGERNPVALLALCDRQIQNKKAQPMREALEGNWKAEHLFALRQAYELWQFYQEKIAECDRAIEQILQELTGPEDPQAPAPRGAKRGGVNAPQIAGLHGMLWRLCGGKDPTQLPGVADYVLLQLLAEVGTDLGKNWRTEKHFTSWLGLAPGNHHSGKRRGTQQRSRNRAGRLFCVIARSVGRSVDKALGGFYRRLKGRRGGLVANLALARKLAVLFWRLMVHGTTYVEQGLKKYEEQVAATEQRLLQKLARKYNLVLQKKTA

SEQ ID NO: 195913 - protein, 333 aa, unidentified
MKKYLFYVGIDVSKAKLDINVLDSLTLKSEHFIIENSIKSISIFIKKLNKKIDSESALFCCENTGVYTNYLSTVLVNLYQDLWIVPAIEIKRSKGISRGKNDKTDAKDISYYSYRNIDKLKLFTLSSIDIQKLKILYTEREKMLKALLLIQTTKESKAFTNKIIFKEVSQVNQSLVKSIKNSISKIELKIKEVIKSNEQLSKQAQLIKSIPGLGEQTSVYLIIATKGFTAFKNWRQFACYSGVAPFEYSSGSSVKGRTRVNHMADKKMKSLLQMCAMTTLKYDPQLKEYYSKKKAEGKNSMLVLNNIRCKLISRVFAVIARETPYINTYKFAS

SEQ ID NO: 195914 - protein, 407 aa, unidentified
MSFFVGLDWAATTHAVCMVDEAGTVRWRGSVAHSAAGLAELVQRLRRCGPPATLPVALERPSGLVVDTLLEAGFPVVPIHPNVVKASRPRYTAAGGKSDPGDAYLLADLLRTDGHRFRTLQPLADETRALRALVRGRDDLVAQRVALANQLRALLERFWPGAAAIFADVDSPIALAFLTRYPTPQSAERLGERRLAQFLRRHAYCGRRSAAELLTRLRTAPLSRTGDAESEASGELVQTLVVVLMPLVAQIQQLSAAIVAAVAQHADGPLVQSLPRSGAVNAAQILAELGDDRARFPTADQLAAEAGVAPVTHASGKHHGVAFRWACNKRLRQALTTFADNSRHASTWAAAVYARARGRGCDHPHAIRILARAWVRVLWRCWQDRRPYDVTQHRAAQLPSGLQPVGG

SEQ ID NO: 195915 - protein, 345 aa, unidentified
MKITTVGIDLAKNVFQVHGIDERGKAVLRKQLRRAQVAVFFGNLPPCVIGMEACASAHHWARTLQRFGHTVRLIAPQFVKPYVKTNKNDVADAEAICEAVGRPNMRFVPIKNIEQQAILSVHRVRQGFVKARTAQANQIRGLLGEFGLVIPQGIYNVAKRVPEILEDASNELAVPFRHLIDRLTKHLKELDRQVKEFEQEIIAWHRSSELSRKLEKIPGIGPLAASALVASIADARSFKNGRQVSAWLGLVPRQSSSGGKPTLLGMSKRGDAYLRTLLIHGARSAILAAKNKVDNTQGWLTNLLKRRHPNIAAVALANKNVRTVWAILAHGREFRPDYVPTRMAA

SEQ ID NO: 195916 - protein, 340 aa, unidentified
MKLYGAIDLHSTNNVTVVIDEQDRVVYQKRLPNDLALILMELSVYQTELQGIVVESTYNWYWLVDGLMEQGYKVHLANTAAIQQYEGLKYTDDHSDARWLAHVLRLGVLPEGYIYPRADRPVRDLLRKRSQLVRQRTTNLLSIQNLVTRNTGESLSANQIKGLDVQQVDELLPNGDLALAVKANLSVMCCADEQTEILERTVRDRIKLRPEFSFLKTVPGIGQILALTIMLETGDIRRFCSVGNFASYCRCVGSQKVSNGKKKGKGNTKNGNKYLAWAFVEAANFAIRFNCKIKSFYQRKKAKTKGVVAIKAVAHKLCRACYYIMRNRVAFDLIKAFGQK

SEQ ID NO: 195917 - protein, 347 aa, unidentified
MNYIGIDLHKKFSQVTVLGENGEIKEKVKIENKEKVLNRHFNNFDEPSKAVIEATFSWGWLADYLKSRKIEVVLAHPQKVKAIASSQIKTDKVDSLILAKLLRSDMIPTAYLCPKPLREIKEVLRSRASLVGLKTQIKNKIHALLHKYNIQEDEEFSDLFGKKGRQFLNSLNLGEYSTAVLKRYLDTLEFLENQIEKTNVDLKAVFEKDETAKFLERLPGIGLYTALTLSKEIGDINRFFSAKHLCSYAGLVPSTYQSGEHTRHGRIKEGNKYIRWLLIEAVPKAIKKDKVLFAFYERIKKKKGANKAKVATARKMLAQIFYLLKTKKVFIDPKTGSPVFFSGGVFS

SEQ ID NO: 195918 - protein, 408 aa, unidentified
MERYYLGVDWSDEFHQVWVSDPEGKKVMEKKVLENVEGLAEFGRWLDESRAKGIELWASIEKPAGRIVDFLLDHGVVVYPVNPKALDRVRDRFRMSQSKSDSFDAYVLAEFLRTDHAHLRALEPSSEQAQELKLLTRDHHRLGRHKTRILNLLGRTLKEYYPRPLEVFGDLESKIALDFLTQYPTPQALSNLKRREWNRFAKREHHLAEARCKELWDNLNTPQLKVPDHVVRAKAQLLTVLVVQLKTLIQAVETYSERVKSFFASMPAAELVHSLPGGKSGTTLPMLWAELGDVKSRWESFKHLQAEAGAVPVTRSSGKSSYVQFRFSCNKHMRYAAYWFAFVSLNRSEWANKYYRDQRARGKSHHQALRALGAKWLKIIFVMWRDHKPYDENYHLANITRQKIRQAA

SEQ ID NO: 195919 - protein, 457 aa, unidentified
MTGTNKPVQSRAMSPIHPRAAAIDVGAKMHVAAVGPDRASEPVRTFGTFTDDLNRLADWFQECGIETIAMESTGVYWIPVFEILEQRGFEVVLVNARDAKHVPGRKTDVSDAQWLQRLHEFGLLRASFFPKGEIAALRAYLRQRERLVELSATHIQHMQKALMQMNVQVHHVVSDIMGVTGMRILRAIVAGERDPGVLAANRDRRCHADVETIQRALTGNWRAEHLFALEQALALYDVCQEKVTDCDRKIEATLKRIEAQSAKPVGKLPPARSTKRQPNAVDFDVRTALHAVLGVDLTQIHGLGPYLALKLVGECGTDLSAWPSAKHFTSWLGLAPSNKISGGKVLSSRTRRSGNRAASLLRLAAVTVGRTETALGAFFRRLSGRVGKAKAVTATARKIAVLFYNTLRHGMDYADPGASYYEERYRQRVLTNLQRRAKSLGYVLQQADAAPAANGVS

SEQ ID NO: 195920 - protein, 438 aa, unidentified
MSNKVIFNLDDLFISVGIDVGADFSWMSIALPNQQFVGKPYKILHNSIDSLTTAVSKIKEAEELYSLESRIFLESTGIYHYPLFCYLRDKGFNCSVINPIITKNSTNINIRKVHNDRFDSKKAALVGLKPDLKVSLIPSDLALNCRNLCREYYDLMDNRSAYVNKLQGELRMAFPQYLGIFSKVTINTSLTLLETYTSPSAFLEADKQEIIDIIKSTARFGLTYAQNKYNAIIQAATDANQFGYIIDSNIKRIRLYISFIRKYDEEINNILESLHELVDANEDADFVKQIHLIETFKGAGFLSAVSIMGEIGDFSAFSKPKQLFVYFGLDPAVKQSGKFEGTKVQMSKRGSAIARRVIHTLTLQSISISRNGEAKNPVLREYYLKKCDSKPKLVAMGAVSHKVCNMIFAILRDNKSFEIITPQEHIKQYNASKCDMAA

SEQ ID NO: 195921 - protein, 380 aa, unidentified
MDHAIAGTPTTKAVLYGALELSKNTWLLALQLPDRAQPSLYPIRGGDTEGLMAKLMAARDRWAKMSGKAPSIVLCHEAGYDAFWLTRFLKSRDIECLVIDAASMQVNRRARRAKTDRIDVGMLLRALIKWGQGDHHVWSVVRVPSVDEEDLRRSHRERDRLVCERTAHINRIKGLLFGQGIRDIKVKSKYKTLQIDKLVTGDGRPLPPRLASENTREIARLALIQEQLATLDRERDQAPTPCKATEKKRVQLMSLTGIGPAIAAVMTREVFYRQFDNRRQVASFLGLATSPHDSGDVERSQGISRAGRGQVRGTIVQAAWLWLKHQPKSAITRWFVQRTTGQSGRIRRVMIVAVARKLAIALWRFLEQGLVPQGATLASR

SEQ ID NO: 195922 - protein, 345 aa, unidentified
MEQISRIGMDTSKHFFQLHGVNAAEKVVLRKKLRRKEMVAFFKALAPTVIGIEACGAAHYLARLLGSFGHEVKLIAPQLVKPYVKRGKNDGADAEALCEAMSRPSMRFVPLKTAEQQAALMMVGLRDRLIRNCTQLSNAIRGYAAEFGFSAAKGKAHLVPLLERIQADESVPVLARELFTAQAEEYARLQAQIDAVDAKLLAWHKADESSRRLVKIPGVGPIGAVLLLLKTPAPELFRSGRQFVAWIGLTPKDHSTAGKVRLGGITRAGDEALRSVLVVGATSVIQHVRRGGRGSPWIVNLLKRKPPKLAAVALANKMARVAWKLMVTGERYAARSVSAALANAT

SEQ ID NO: 195923 - protein, 413 aa, unidentified
MSSTLIVGIDISSELNAASFIDEAGNRLVKKALFFPNDLDGAQQLIDFTISLAQQFNISSIKFGMEATSHYAWHLHTFLASSPELAPFNPLFYVINPSIIKSFKGAYIHLPKTDSVDATVIAECVRFGQVKPTPLPDLRYAALQRLTRMRYHIVRSLVREKNRALSLISFKFSTYPSECPFSNIFGKASLAIIENFTPDDIASMPLDDLIDFIVKNGNNRLSDPTQIAKTLKAAANRAYRLHPDLAEANDLALSMTLENIRFLESQLKKLDGEISRQLKAFNQTLTTIPGIGDVLAAGIIAEIGDIKRFNNEAALAKYAGLIWNKYQSGNFNAQDTSLVKCGDQYLRYYLVEAANCVRVHTVRFKEYYNKKYREVPKHQHKRALVLTARRLIPLIFAMLSKGQIYQERGVVSI

SEQ ID NO: 195924 - protein, 341 aa, unidentified
MKNKSFIGIDISKNVIDVSIFCEETPIKDFSHDVFNNSRKGFGEMCTWLKKNHVVLSNCLFGMEFTGSYSMELEKFLNARKYQFCMLSTHVIKHYPMGPKDKSDKIDSAKIADFLYRYNGTECVKPYNMPDKTMQRLKALMNERKFLVEQRTCFMNRRQLCITKEDAQLYDGYIKKFSRDIENIELEEQKLLATDDSLLSTYKNLLTIPGIGFVNAINVIVITRNFTAFETARQYASYVGVAPHFRTSGTSVKWRPRPSARCDGQAKADLSMAATVVVQYDAELQSFYNRKLGGKQDSDTKRKALNAVKFKLVLRMFAIGKQNRKWEPLDSKSSNEKLAIS

SEQ ID NO: 195925 - protein, 411 aa, unidentified
MKEQLKYLFIGVDLHKQHHTAVILNFWNEKLGEIRFDNKPSAFPELLQEIKKHLKRGMTPVYGLEDTGGYGRALAVFLKEEKKIVKEVNPALANNRRKSHAIIEKSDSWDAECVARVLKDEFNNLPDANPIDIYWAVSQLVTTRRGLVKDLSSYVRKLHQQLGYHYPSYKKFFSEVDGKTALEFWKKYPAPHHLQDVTVEGMAEFLRSHSNNGLSTKKAEEILTLVAKDGDTEREFQERRDFIVQSIVRTIKFNQVEIESVDKQLHEVMGRLDLKLETMTGIDRVTAAYFVAEIGNVHRFASSDKLARFAGIAPIVVGSGNTHRNRKNKLGDRDLHYLFEQLAVRQIAVTRTKKEPRNPYFYEYYQQKLAAGKTKKQAIVCIMRKLVNIVYKMMKEGSEYQIPALPEKAAG

SEQ ID NO: 195926 - protein, 425 aa, unidentified
MLAVGIDWAEEFHLVALGRPGEGVFDVRRVEHSPKAVDALVERIAALEPDPAEVRVVLETRHGLLVERLLDAGYVVVPVNPDLVARRRGPAKKKDDAEDARIACLLALDRFERLRPLIPHGELAGELRAIARDDARASRDERRLLNRLRQDLVSTFPAALQIAGDDLGAPAFLRLLERWPSTEALRQTTREQLVEHARACHHGWPERFADKIEAALADDHFQPRAYLARAKADTIRLSAQQLLAIGNQRRAWERRMGELLLGAPRRGRAKQPREDERGQSFPGGEVYLSFPGLGDRLAARVAGEIGDHPQQFQSPNALQCYAGKAPVTRRSGKSEFVISCRLAYNRHLGDAVQQWAFCSLRSSPWAREFYDGKRAAGKGHHAALRALGNRWLEVLWHCLQKNVVYDETIHANNRNRTLRPLPKAA

SEQ ID NO: 195927 - protein, 329 aa, unidentified
MKVQHIIGADLSKKTIDLFCYQLSTHIQIENASLGFTTLVKWMREQNINGSNTMIVMEHTGLYSFCFENFLHQHHIPFCKVGALAIKKSMGIVRGKTDKLDAARIATYGYEKRDKLTADVPVDNALKRLQMLYSTRERLVRQRAALINAVKEYKHIGINKTDIIMQAQLKLIKTFETQIQKVMKEMQAVIEKQESLKQNYFLLKTVKGVGEVIALIMIIKTNNFTRFSNARKFACFCGTAPFEHSSGTSIKRNSRVSPLADKKMKSLLDLAAKSAIQNDKELKGYYLKRTKGGKSKMSTINIVRNKLLYRMFAVIKRQTPFVENYLQAA

SEQ ID NO: 195928 - protein, 391 aa, unidentified
MVYVGIDVAKDKHDCFIANSDGEVLYDVFTIQNDMDGFEDLLFKIKTASRDLSKVKVGLEATGHYSCNILGFLHNKGLTTIVINPLYTSLSRKSVSLRKTKTDKVDARTIASMIMSDVSLKPYSNTVYHNEDLKSLSRYRFDKVRQRAKLKQSVSRLVTILFPELEKLVPSLHIASVYALLAELPGAKQVASCQLTHLTNLLSAASKGHYDRSKAVELRNAARRSIGSAMPAKSLELQHTIRLIRELDAEISEIEAAIKQFMDQIASPILTIPGISYRMGAMILAEIGDFSRFDSPDKILAYAGLSPSTYQSGKLDNAYAHMEKRGSRYLRYALYNAAKYVCHWDASFCAYLAKKRAEGKHYNVALSHAAKKLVRLIFALQRSGQPYCPTA

SEQ ID NO: 195929 - protein, 378 aa, unidentified
MNHGRITESSQKRFIGVDLHLDSFRTCESRSNTNEKIEQKVSLTKTDLDYFIGTLDKNTWVMVESCANAFNFADMIRPNVAEVIIADSHKLKIISQTNKKTDKVDAEKISRTLKMQIISGEDVVNKVYCPEKEIQALRSLFTTYEQNKKMIISVKNHIQSLLAKNMILLPPGKLARRMIAYIESLELDQTMSFQVKIYIEQLQVLENIQTKISNQIKIAGARYYREIEILTSIKGISIMTALALIADIADIKRFPNAKHLCSYLRSAPSVESSNNTTKVKSTNKFSRKLSMCFLTQEVAHFKNSIPPLKSWYEHKTKAVKKGKIRMAACRRIIVHIYNMLIKNEYHKFRDVKNHTAKMRQYDIFLKSAGLFYENSKIA

SEQ ID NO: 195930 - protein, 345 aa, unidentified
MSESYSGRQFVGIDLHRRRSVIVRMTTDGDPLECIRISNDVERLTTVMARAGEAPEVVLEATYGWYWAVDALQELGARVHLAHPLGVKAFEYRRVKNDERDARDLADLLRMGRLPEAWIAPPATRELRELVRHRAKLVGIRSNCKAQIHAVLAKCGIQVSMTDLFGLAGTELLDRLQLPKPYAARIASLRRIIGALDFEIDAFAGQVRGRLARDPGFVAVQAIPGIGPILGAVFVAEIGDVHRFTRAEELTCWAGLTPKHHESDNHVHRGRITKQGSRLVRWAAIESVQILPKHTLVGGIRDRVADRRGRNIGVVAAARRQLEFVFYALRDHRVRALQGTRPVAA

SEQ ID NO: 195931 - protein, 326 aa, unidentified
MSNILGIDVSKDKLDLVLLSEEGKYHKVIRNDLSGFKELDQWLISRHIDRVHVCLEATGQYGDEVSEYLYERGHDVSVVNPTRIKRYGESKLHRNKTDKADADLIAEFCLKEKPALWEPLNPDLKHLRALVRRLTDLQANYRQEGNRLTSGEKDDWVIRDISVHLEYLKASIQATEAEIQNFTNQTPGLKAKQELLVSIPGVGKKTSARLLAEIGEINRFENAPQLAAYAGLNPKGFSSGSSVHKKTRISKQGRSELRACLYMPAIVAMTHNPVVRALKERLQKKQLPTMAIVAACMRKLLHIVYGVLKSQMPFDPDYDRQFNFSS

SEQ ID NO: 195932 - protein, 361 aa, unidentified
MSESYSGQQFVGIDLHRRRSVIVRMTTDGDPLECIRISNDAERLTTVMARAGESPEVVLEATYGWYWAVDALQELGAQVHLAHPLGVKAFEYRRVKNDERDARDLADLLRMGRLPEAWIAPPVTRELRELVRHRAKLVGMRSNCKAQIHAVLAKCGIQVSMTDLFGLAGTELLGRLELPKPYAARIASLQRIITALDFEIDAFAGQVRGRLARDPGFVAVQSIPGIGPILGAVFVAEVGDVHRFTRAEELTCWAGLTPKHHESDKHVHRGRITKQGSRLVRWAAIESVQILPKTSVVGRIRDRVGDRRGRNIGVVAAARRQLGFVFYALRDHRVRALQGTRPVAAGGAVTRTAGRCGSCRS

SEQ ID NO: 195933 - protein, 523 aa, unidentified
MATKSRTKRRRSARSHLIHKPHGTLHPRVQEVGPEHFGIVSVDCAKARSKWMLADFYGKVLVPPTPVEHTRNGLTAMVQAIRHVIAQFDLRDVIVAIERTGQYHKPVQRTCVQAGFDTRLVHPLTTKQFRQPANPANKTDDTDLSAIHLATVNGFGLVEHPADPVSARLQLLARYRRDWVEKKTALRCQIHEHLQVIMPGYAKCFDDIYECHIPLLIARSLGSATSILRAGLSGLTQQVRQASIRPHRPTLEKILAWAQTAVAAPDEASIHHQIMIELDDDRVIKLRAVRKVEGELAEVLVQTPYVLLLGIPGINVVSAAEFAGEMGPIQFYTKARSITGRAGLFPSRYQSDEVDRADGKLVRCANRRLRQAIMMIADNLIECNDHFRVMAAQWKLEGRDAREIRVRVAGRFCRIAYQMVAGRTSFRHPCCQQRDYILRKMITFYMEHNIDISRIMKDLDAAVAQIPGAAHREEGAALAEALDELQKKRGSGPRSLAEILPAVLAKLGVKLIESSKSGEANLS

SEQ ID NO: 195934 - protein, 312 aa, unidentified
MGFRSFAVKTIGVASGISLYASLELSRATWLVTSLAPGSDRMSKHSTAGGDGGALLGLLERTRTRMQQVAGHPVKIVVIQEAGLDGFWMHRLFEANGVESHVVDPASVAVPRRRRRAKTDAIDGETLLRTLLAWKRGEPRVCAMVVPPTPEEEDRRRVCRERAILLQERIRHTNRIRGLLAGQRIADYNPLHKDRRHLLDATRTGDGRPLPRQLKAEILREIELIELLLRQIADVEAAREALARPRTAKAPSPVVLLEQLKGIGPEIASVLYLEGLFRTFGYRRQVAAYAGLAPTPWRSGTGHLQGGQPAAA

SEQ ID NO: 195935 - protein, 427 aa, unidentified
MDKKQNDRIASITESTLVIGCDIGSSIHYGRAFNFRGIELSGKPFSFTNDTEGFESLKTWIEGIKTRNGLTGIVVGFEPTGHYWFNLGSYLKSLGIRMVMVNPAHVKRTKEFDDNTQDKNDRKDPKVIAKLVIEGRFTEIYIPEGDYAECRNASFLRSQIIKDIISDKNSLRRWISIHFPEYMSVYRVFTAKSGLLILKIVPFPDEIAALGVEGINQIWRAGKIRAVGMKKATALFEAAKGSVGTTQGRSAERLYIRILIEDLERKQEHLEQVTEQLEELCERMPEAKHMLSIPGIGIGTVTGFLGETGELSRFSNPRQIQKLAGLSLVECSSGKHQGQTRISHRGRKRLRHLLFDASLMLVANNPEFKALHLHYTTRKENPLKKKQSIIVISCKLIRVLYSLATQKADYSPGKLVADIRRPEAAVS

SEQ ID NO: 195936 - protein, 341 aa, unidentified
MTVYIGVDIHARQQTLSYLDTTDGTFGGAELDHEQDDVRQFYSQFKGEVIVAIEASGYTNWFEEMIEQLGHKLLVGDPAEIRRLARRRQKNDRRDADLILDLLWHNEFPALFRYPRASREVLRQLRYRHKLVKLRTMVANSLHALALNAGLSLRAQLLTKAGKKQLCSLQLSAISQQQRDELISLADELSTRILKLEQWLKVQADNDQRVLRLQTHPGVGLLTSLCLVHTLGELSRFPSTRKVAAYVGFDPMEDSSADRKVYGGISKAGSKLLRYLLIEAGQSAAREDEHLKQFYRRLLPRRGKARAKVAVGRKLLIRCFIMARAEIDYAEFLRRGNQETE

SEQ ID NO: 195937 - protein, 498 aa, unidentified
MKILYRRCAGLDIHKKTVAVCVRMRVDKGQVVTEHAVFGTFTQDLERLREWLKERKVKQIAMESTGVYWIPVWNVLEPVRWRFDLLLVNPQLVRALPGRKTDQQDCERIAELLQYGLLRGSFIPPKPIRELRDLTRRRVHLQGDRNRVINRIARLLETANVKLGSVASNIVGKSGHAILKGLAEGRTHPEWLAERAVGHLRNKIPELVLALDGRYSDHFRWLLRELLAELEWLDAWLAELDWHISQSMEPHAELVRRLCTIPGVDRTTAWTLIAELGTDMHQFADDAHIASWAGLCPGNAESAGKRFSGRTRKGDRYLRRMLVQNAWAVAHKKDCFLTAVFYRTANRRGLKKAAVAVAHKILVIAYHIIRDGGEYREYGGDYFDRKNPEHTARRLTERLRRIGYHVVLDPSIALSVEPRPARPARLGRPCKCAERGLCCPHPLPPKPRSQPPSRQPPLSPPEPASSCPRCARWGISCIHVRNQKLHTPVSPSPLDPIT

SEQ ID NO: 195938 - protein, 349 aa, unidentified
MEQNEVILGVDTHLDTHVGAVISDTGKLLGTLSVTTDTAGYLHLLTWANSFGQLRRAGVEGTGTYGAGLARVLRDHEIEVLEVNRPDRAMRRSQGKSDPTDAENAARAVLAGKATAIPKGQSGAAEAMRAVSVARRSAVKAKTQAINQLRALLVSAPQEIRERLLKAKTAECVEGCARLRSLGKTPMLQTLTTTLRLLAKRWLTLAEELKALDTMLDSLTSQHARRLRERFGVGPQTAAVLVAVAGDNPERLKSEAALAALCGTSPLQASSGKTVRHRLNRGGDRSANNALWTIAMVRMRSDPRTRTYVDRRTKEGMSNKEIHRCLKRYIVRELYPLILADLADSTPVA

SEQ ID NO: 195939 - protein, 339 aa, unidentified
MKLYAAFDLHSSNSYLGIVDENGKRTFKKRLRNEFETIIDVLKPFKSEIVGITVESTYNWYWLVDLLMEKDYRVHLANPCKIQQYSGLKHGDDEDDAFWLAEMLRLGILPEGYIYPKEQRPLRDLLRKRGHLVRLRTSLILSLQNILARNIGTKMNTNALKALKEDRVTPLLAGNDDISLAGRVSKDAIDSLSRQIRAIEVAVEKRINLRRPYDLLLSMPGVGRVLALTIMMETGPIGRFIKVGNYVSYCRKVPAGRFSNDKKKGSGNRKNGNKYLSWAYAEAAELARRFDSEARVYYDRKQRRTNAPIAHSALAHKLSRAAYHIMRDKVPFMPEKAFA

SEQ ID NO: 195940 - protein, 403 aa, unidentified
MNAVGIDVSKGKSTVVIIRPFGEVVASPFEVAHTNSELSKLAGMLKNLKGETRIVMESTGSYHLPIAYALHEAGLYVSVVNAQLTHNYDNNSIRKSSNDSIDSLKIANYTLTNWLKLSKYIPPEDIRHMLKTYSRQYNKYGKIKIMLKNNLISLLDQTFPGVNELFTSPPRKSDGHEKWLDFAEDFWHCECVCSLSPKVFAERYRKWCKREGYNFGQDKADDIYASACGHFSVMPKNEITKLLIIQAISQITAVCETIAVIAAEMKRLAMLLPEYNIAIGFHGVGEIFAPQLMAEIGDIYRYHKKSALVRFAGLEPVENKSGKFQGKETISKQGSPHLRKTLFQVMDCLLKHKPTADPIFLFLDRKRAEGKHYYSYMSAGSAKFLRIYYARVKEFLNSYYDEA

SEQ ID NO: 195941 - protein, 426 aa, unidentified
MRVLHERVAGIDVHKDMIKVAVRSPGDKPWTRKTEIVEYRTFYGVLQHMASELVLRGVTHVVMEASGIYTEPVYYALCERDFTEVVVINPAHAKALKGHKTDARDCARLAELFECGLLRGSYIPPAELKEVRDLTRYRMKTVQARTSEIQRLAKALESAGIKLGSVASDITGKSATAMIEALIDGERRGTVLADLAKGPMRTAGKLADLSMALTGRFTEHHALLCRLHLDRIAVFDTAVADLGERIAGKAARWQREAGLLTTVPGFGDIVAWAWLGEIGPSPHRHFASHDKLASWVTLCPGNNISARKRKHGRTGDAGTYIKPMLVQAAWSAIRVRGRLQARYNRLVRRFGGEKNPAAKKKAITAIAHTLLKIAYQVLKSGQPYRDLGTDFYTRRESPEQRQAYLLRQLQKLNPGATITITPLEAA

SEQ ID NO: 195942 - protein, 371 aa, unidentified
MKKCTRFVGLDDSKTSIDVAVASEGRDGEVRSYGTIENTPEAVRKLVRRLGRPKDLYFVYEAGPCGYGLYRDLLTLGTNCMVAAPSKTPRRLGDRIKTDRRDSLELARLHRAGELHPVWVPDEETEAMRDLTRAREDAKYVQTKARQRLQSFLLRHGRRFPGRSHWTKTHLRWLADQKFGQPSQQICMDEYVEAVKQAGARVQRLEAQVRELVSAWSLGPVVSAMTAHRGVSLVVAATVCAELGDLTRFDRVRQLMGFVGLVPSLHATGLRHRAGAITKTGNGHVRRVLVEAAWAYRHPARRTALLRKRLEGQPEEVQAISWKGQVRLCGRRRRMIARGKHPNKVTIAIARELLAFLWATARIVKPMSPAA

SEQ ID NO: 195943 - protein, 408 aa, unidentified
MNAVGIDVSKGKSMVAALRPMGEVALLPQEFLHTEVGLEQMAYAIIALGEDTRVIMEATGRYHEPVAAALHEYGIYVCVLNPLFIKQSGGGSIRKVKTDKADAMKIAKYGLDNWVDLREYTPMDTVRQQLKLCSRQYNLYMKTVVSLQNNLISLTDKTFPGVNELFSSPERADGHQKWVDFVMTFWHCDCICRVSEKAFTERYQKWCKRKGYHYSAEKALDIYAGSCGHFTTLPKNDNTKLLITTAAQQLLAGKMTLAALRAEMARLARQLPEYDTVHAMYGVGEITAAQLMAEIGDVRRFPRRSSIVGFAGVDPAVNQSGKHAAQSTPTTKRGSPHLRKTLYQIVCTYLKKSPVDEPVYQFLDKKRSEGKPYFVYMTAAQNKFLRIYYARVKECLEDFDAQQNSAQS

SEQ ID NO: 195944 - protein, 342 aa, unidentified
MQITTIGLDIAKNVFQVHGIDATEKVVVRKQLRRSQVLAFFKALPPCLVGMEACATAHYWARELTKLGHQVRLMPAKDVKAYVKRNKNDAADAEAICEAVRRPTMRFVQVKSAEQQGQLMLHRTRDLLMRQRTQVINALRAHMAELGITAAQGKAGLKELLKIVASEEDARLPVDAHTSFVVLAAELQAMQTLIGSIEKRIMAQHRSSEASQRLETIPGIGVTGATAIAATVADPKVFRSGRDFAAWIGIVPRQDSTGGKHKLGPISKQGDRYLRRILVVGAHAVLKRARQQPEKYPWLTQLLARKPFRVVAVALANKMARIAWALLAKGGTYRAPALAATA

SEQ ID NO: 195945 - protein, 426 aa, unidentified
MKLEEKKLEKPIDAWIGIDWADEKHDVSLYDVATGKQEAVIIRQSPEALQEWLGQLRSRYEGGYVAVVLEQGRGGLLNALMGCEFLVLYIINPKSLSNFREAFYGSGATSDPVDAELMRDMVRQNPSRFRAWRPDDVMTRSLHLLTEGRRNLVNQSTAFTNQLTALLKEYYPQALSWVGTLDTAWACDFLEQWPTLQSLQASSRRQILRFYEKHPRASLDLSEQLKQIHDARALTQDAAVLESSALMVHALVSQLRPLLASIAEFDRKIAMIFRKHPDRPIFESFPGAGAALAPRLTAAFGTDRDRFQAATEMQELVGIAPVTEKSGKNTFVHWRYACPKFMRQTFQEFAEHSRRWCKWAKAHYELLRKRGKSHNAAIRALAYKWIRILFRCWKDRKPYQDEVYMKSLLKHGSPLSSILAKPVENQ

SEQ ID NO: 195946 - protein, 459 aa, unidentified
MKKSQKRVGKEKANSFDRPVLEPNAAGIDVGARQMFVSVPPDRDNQPVRAFDVFTEDLNRLADWLEACGVTTVAMESTGVYWIPLFEILEQRKLKPCLVDARHMKNVPGRRTDWQECQWIQYLHSVGLLRAAFRPNEEVCAVRALMRHRKNLVEMASQHVQHMQKSLTQMNLQIHHVINDLTGVTGMAIVDAILQGERDAAELAKLRDPRIKASLETIRKSLIGNWRREHLFTLKQSRECYSTYQQQIADCDTEIEKLLQTASSRIDRSDKPLPPNKKRKRKQRIDPESAFSVRTEAYKLFGVDLTQVPGLAENVLDLYAEIGCDMSRWASPAQFVSWLALCPDNDVSGGRTLWRGMRKCKNRAAGILRMAAYSLHRSFTPLGDYLRRMKGRLGPAGAITATARKIAVMVYTMVKNQVEYDETRWAEYETQRQKRIEAKLHRQAKRLGYQLVPIQQPAC

SEQ ID NO: 195947 - protein, 424 aa, unidentified
MNLTQNDRLNQVTADTLVVGVDIGSETHFARCFDWRGYEFSKRAVRFSNTQVGFLTFIRWVEEMMKKTEKTKVIVGCEPTGCYWLTFQKFLTDRDILLVMVNPYSVKKCKELDDNSPEKSDLKDPKTIAGLVREGRFSTSYLPEGVYAEIREAQVCRDQIMKQHVRLSNQIQGWLQKYFPEYLECYKDFDTASGMMVLEHAPLPEDVIKLGAGGINELWRNAKLRAAGIKRAKTLVEAAQGSVGLSGGEAARLEIWFLINDYQTKTKQLERLDEFLAKEIMKVPHVEKLLAIKGVGLSTVIGFVADVGDIGRFTDPKQVQKLAGLEITKVSSGKKKGQPCISKRGRRRLRRTMYESARSLISWNEAFSEVFMYYRYRARNPLGGMQAKIAVACKAIRVFYTILKTGCEFDAEKLRRDIIRPEAA

SEQ ID NO: 195948 - protein, 400 aa, unidentified
MKTVLSVDVAKNKSMIMLMNNDGEILIDTKEIKHNLGEFEKVKEEIEEINPENLTVFMESTGTYHLPVERYFKENGFNTLVINSLTTKNNFDTIRKTKTDKKDCYRLAKLFFVNEVEYHEISKKDFYANLKAMTRQYFYLTQVNIRCKNRYKRLINICFPEFEGFFARNRIYEDTALNFIKAFPHAYIVREKRIDALYNNLRKVDARHDYYYKRLARQLKDTAVDSFPGVDKDHADVKNLSDMASILQENNRLIDEIRKNMIELAKQSPYFEIVNSFYGIGEVLAAELLGELGDITRFDNHKQLIAFCGLDPAIVQSGKSINVHGAISKRGDKYARWILFNISQMVVKLGHQYPSHPVYNYYLIKKAEGKHYYESLTACSTKILRMLYSMCKNNKQFLEE

SEQ ID NO: 195949 - protein, 323 aa, unidentified
MSTKATKKRRSFIGIDVSKKLLEVGVHQSDYHFRCPNDPKNFPALITELISLRPARILLEATGGLERALLQALHAAGLPVVVVNPRQVRDFAKALGLLAKTDRLDARVLAHFAAATQPAIRPVKAQQETELDALMGRRTQLSDMLVQEKNRRGSAATKDTRDDIEEHIEWLEERIQELDEKLKEQLKCSAVWQQKDKILQSVKGIGFVTSLSLLADCPELGQLNRHQIAKLVGVAPLNRDSGQQRGARHIWGGRAQVRGKLYMATLAAIRFNPVLKSFYQRLLAKNKLKKVAIVACMRKLLTIINVMIRENKLWNVKAQPVSA

SEQ ID NO: 195950 - protein, 396 aa, unidentified
MLVTVLSDRRADTQTPYRLRRKAVVITMPKQIGSSKPGQALDAVPGQLLVFGGVDTHADTHTVAAIDERGGLLGHAKFPATPAGFDQLHRWLIGHGPVVQVGVEGTGSYGGGLATHLTARGVSLVEVNRPNRATRRARGKSDPIDAEAAARAALAGVATAVPKAHTGVVEAIRVLFVARRGAVQARTAAINTLHQMIITAPMQLRDQLQPLTRRQQIAACARFHAKDLTDPGRATRLALRRLARRIAHLNTEIDDAERDLTGLVADLTPQLLAEVGVGPLSAAQLLITVGDNPNRMTGPAGFAALCGTTPIPVSSGKTNRHRLNRGGDRQANCALHTIVLSRLRYHPETRAYAAKRNAEGKTELDIRRSLKRYLARRLFALILNPTETADNTPVAA

SEQ ID NO: 195951 - protein, 437 aa, unidentified
MTKSKNQAKKTLCLQSLPMIHPSAAGIDVGAKEHVVAVPADRDPEPVRSFKAFTPDLYELADWLKGCGVETVALESTGIYWITLYEILEERGFQVRVVNARHVKNVPGRTKTDVLDCQWIQKLHSFGLLSGSFRPDQQIRTLRSLMRLRDNLVVNSTQSVHHMQKALFEMNVQLSNVISDIVGESGMRILEAILAGERDPEALARLCSTRIKASRQTVAKSLHGNWREELLFALRVAMDSYRFAQSKIAECDERIGQHLAQFEDRAALETPPASLKSELHRICGVDLTKIPGIKEQAAQIIISEVGLDMTRWNTEKQFASFLGLCPNNAISGGKVLRRSTRKVYNRAADALRLCSQSLTHSKTALGAKYRRLKARLGAPKAIVAMAHHLARLVYRMLRYGRHYVEKGMAEYEIRFRLQRLKWLKREAKSLDMQLLPA

SEQ ID NO: 195952 - protein, 314 aa, unidentified
MERAVVYVGVDVGKEQLEVALRPSGEQFSLANDERAVRTLVKRLLPLGCARIVVEATGGYETLVLAALHAAGLPVALLNPRWVRSFAKAIGQLAKTDRIDARLLALYAERAELKVRTLPDEQTRELRALCARRDDLLEMIVAEENRLEHAPKRLQREIRGHIDYLRKRLKHLDRDIDGAVRGSELWRQKDDLLDSVPGVGPVLRAALLAWLPELGTLNRREAAALIGVAPFNHDSGAMRGRRAIGGGRAPLRRVLYCATSAAIMWNPLLRAYYEHLIANGKLHKVAMVATMRRLLLILNAIIKTKTPWRPPCPA

SEQ ID NO: 195953 - protein, 364 aa, unidentified
MKKSSKKQQGATVAESKPAQVVGLDLGDRYSRYCLLSSTGEMMEEGRMQTTAAAIEKHFGSEPRMRIALEAGTHSPWVSRLLKGYGHQVIVANPRKIPTLTKSESKNDRNDAKQLARMAAFDPKLLHPIEHRSLERQQDLNLIHTRSVLVRARTMLINSARGLVKSAGQRLPACSSEVFPEKVPAAVPPALKAACTPLLEQVTQMNRTIATMDKQIDKLDKKYPEITVLRTVPGVGPVVAACYVLTLGSPQAMETNRQAGAYLGLRPRQQQSGDCDPQCRITRTGNTYLRSLLVQSAQYILGRFCPDSELRRWGLKLAASGGKRGKKRALVAVARKLAVVLLSMWRNRKNFVPFPQPAAQLATA

SEQ ID NO: 195954 - protein, 310 aa, unidentified
MLENKNKRFIGIDVSKYKLDIFNSTTGEIKTIENSKAGIRQYIRALEFSEELYIVVDLTGGYEALCVNMFYDKGFKVIRAEGRKVKNFARAMGITAKTDTIDAKILADYGEKCFERLRIYKPYNSSIKKLVMRLSDLKDMAQKEKNRLKAPDNALIVVKSIQTLLKTYEKEITKLEDHIEQLILKDEELNAKYTMLLEQKGVGKKVAFILLGLLPELGYLNRREIAALCGVAPFAKDSGTINGYRRTQNGRIEVKKALFMAALAAVKYDSKYKPVYESLLERAKPKMVAITAIMRKLIIYLNVKSKTLCA

SEQ ID NO: 195955 - protein, 397 aa, unidentified
MKGFCISLDVSKGSSFYQGFKGLDEPITKPKKIEHNLEGFKELLKLKEIIRKEYDSDCIVIFESTGVYHKAVQTYLDEHDFKYTIISPLLSAKVRKSDIRGTKTDAKDCASIAKVFYLKELRIYSKTDEIYDDLKEKSRYYDFLVDEMKRWKVEFRRLLDIIYPGFDKIFENLYIDYTQALLLEYPHPEIIRKKRLDTIAKFIEKHTCHKESFSLKQAQALKEYAENCASGCSYKSYLVSQFDTVIHTLNSQIKHLETTLDEIVEMAKKLPNYEIIRSIPGIADNLASRILSEIGDIDRFDNASQLVAYAGIDPQIYQSGQISGLHLKISKKGNKKLRCLLYLAVTCMIKTNRDTKIVEFYKKKKADGLAARSALVASMNKLLRIIHSLCKNGCLFK

SEQ ID NO: 195956 - protein, 386 aa, unidentified
MGGSRQVRRGPGPSSTLVTPDRAGNVVGVDPHKRTLTATVVDPRGGIVCSEHFRVSGDGHRALEAWALGFGPVVRWGVEGASGWGRHTAIFLAGRGYDARDVCPNRTAGHDRARQRGKSDTLDAERVARETLAHPLLPRAFKRAGQDAGPDEQAELLAVWWQARCSLLNRRQHLLNEAEALLGDLPLELIERLPGTQRVRPRLAALARLTRRRRFDLPTKLRLGLLGEYRAEIAKLDQQEKQVTSELRTLVQANGSTLDQLCGLQTVSVAELLVEIGDPRRFTEGGFARFNGTAPLVASTGEGPGEPHRHRYNPGGNRRVNAVLYRMALTQLRCEPRAQALYANARAHGHTKKEARRILKRHLSDVIHRRMTRDLAADPAQPLLAA

SEQ ID NO: 195957 - protein, 366 aa, unidentified
MPSVTSGAEWIHLGMDVSKDAIVVGVLHPGEEVPVVDRIFNDEASLRRLVGRFRDRSRLAACYEAGPGGYELHRLLTSMGVACDVVAPSLIPKGAGERVKTDRRDAIRLARLHRAGELTAIRVPTIAEEAVRDLVRTRADLLDDRRRAQQRINAFLLRHGRVWRGGVRWTKIHRQWVASQVFDEPALTATLATYRAALMAREAELAALEAQLHELAQCEPLHAAVSRLGCYRGIAELTALTLAAEVVDWHRFASARAFMSYSGLIPTEYSSGDRIRRGGITKAGSEPVRTALTESAWSYQHRPTIGAPLRRRRQDATAETLARSWKAQQRLCGKFRRMAKAGKSPAVTVVAVARELAGFVWAEMTS

SEQ ID NO: 195958 - protein, 338 aa, unidentified
MRLYCGIDLHARSSYVAIVDEQRKRIFKRNLQNDPKLILSFLAPYTQELAGIVVESTFNWYWLVDALMDDGHTVHLANPCAIKQYAGLKYVDDKHDAFWLADLLSLGILKEGYIYPKEQRPVRDLLRKRGLLVRLRTSLLLSLQNTVVNTFGIKIPAHRIKGKEDYVTTYDFGNESLALMGQVSKTSIDTLSRQIEAIESHVYQHCKLTAAYNPLVSLPGVGKILGTTIVLETGAVGRFPAVGNYVSYCRKAETVWTSSDRVKGKGNRKNGNRYLSWAFSEAAEHARRFDTASRNFYNRKLHERNSPVAHNALANKLARAAYYIMRDQVPYEEKKLFG

SEQ ID NO: 195959 - protein, 343 aa, unidentified
MTVYVGMDVHRKRSQVAIVDTAGVPQHNRNLANDPAKLIPVLGALPPGTPVAFEAAYGWGWLVDLLEELQLEPHLVHPSRCKAIAAARLKNDKVDAATLAQLLRADLLPEAWIAPQATRDLRAVLRHRASLVRMDTACKNRIHAVLADRGIPDHSSLWTGPGRAWLADLELPATPRGIIQDCCGLLDALATPIARLEQEIAGLAKPDPRVQALMVLPGVGRLTAMTLVAEIGDITRFPTAGKLCAWAGLTPQVRNSDRKVRHGHTTKQGSPWVRGILQEAAQTAKRHPMFAPADAQLARRRGTHIATTAIARRLLARSFHILTQLETPPAPEKASTGRARVSA

SEQ ID NO: 195960 - protein, 366 aa, unidentified
MLIIGCDYHPSVQQIAWADTETGEYGEKRLMHSDGEAERFYRELKQKGVQVRVGIEATGHSRWFERLLAELGFELWVGDAAEIRATRVRKQRNDRFDAKHILKLLMEDRFPKIWTASSENRDARQLLLHRHRLVGMRTRVMNQLQAIAMNEGLRRKGGLWSKKGRARLESLSLAPWSSRRRQELLELLDRLHPMIEELSKAIEQEAARRAEVQLLMTHPGVGPITALAFVLIIGTPERFHCGRQIASYLGLIPCEESSADHWRLGHITKQGNALLRFLLVEATQTVARCEPEWRQHYFHLVLRRGRAIAKVALARKLAVRLFWMWRKGQNYQQVKKFGSDTGQLEVPNGVKSITENLIERPAPSMA

SEQ ID NO: 195961 - protein, 410 aa, unidentified
MTESAYQIFVGIDWGSQTHQVVVLDAARRVVGDRVVAHDGLALHTLAQWVAGLAPPGAVAVAIEVPHGAVVDTLLEHGLHVYALNPRQMDRFRDRYTVAGAKDDRRDAQVLAAALLTDQPAFRRLQPDDPLIVQLREHTRMAAEVQEDIRRLANRLREQLLRFYPQALALCPAADEPWFWALLRLLPTPAAAARRRRDPVVTLLREHRIRRVTADEVLTALRRPPLTVAPGTIEAAGAHIALLLPRLELAAAQRRACAAQLDTLLATLAAAGEQRGHRDVTILRSFPGVGRTVAATMLAEASQLLASRDYHRLRAYGGAAPVTHQSGTRRSVHMRYACNQQLRTGLYYWAFMAARHDPATRQHYEALRASGQSQGRALRGVVDRLLAVLIAMLRTQTLYDAGRRQTRAAA

SEQ ID NO: 195962 - protein, 368 aa, unidentified
MKPDPQMTLDRYFRQCVGIDISKDKFTACLYMYDRGSDVGCHTESIDFNNTKSGFNQMVKWSRKEAQKGFPLTYLMEPTGVYYESLAYHLHKIGQTVYIVLPNKARKFCESEGIKTKTDAMDARCLALMGCASRKLKPWSPPAPIYRELRQMTRFHADLSQIMTSVMNRMESLNHMEEADKTVRKNCQKLIEEIDRLMENNDEAIIQKVSEDKGLEARVKRIARAKGLGLTTVVCIVAETEGFHLIENRKQLTSYAGLDVKAKQSGKEDPMHAISKKGNAHIRAALYMPALVAVRYNPQIKAAYGRICQKHPKEKKIGVTAAMRRLLLLIYTLWENGEEYDSTRDKTHTPRKMEKRLEYGPENGGLPF

SEQ ID NO: 195963 - protein, 483 aa, unidentified
MKSKPEEQNKRATNHPTQHHWHEMNRKQRREMTRQIQSEDLSLEVIHPDAAGIDIGNESHYAAVPPSRDSQPVREFGCTTAELKAMAAWLKKCGIRTIAMQSTGVYWVAVYDILEQAGLEVYLVNARDTKNLPGRKSDVQESQWLMKLHTYGLLRNSFRPSQEIRVMRTYWRQRNDLVQSAGRHILRIQKALTQMNLQLANVLTDISGATGQAIIKAILAGEHDAHKLAEFRDPRVKASEEQIAQSLEGNWQQDLLFVLKQEHEGYEFCQKQMAECDRQLAQYLQQREDRSHGAPLPEEKRKGRLKKKKGNAPQFDLREGLFRMTGTDLTRIDGIDVMTATTVISEAGYDMSKWQTENHFVSWLRLCPDNRISGNKVIGKGRLPTNNPISIALKMAATTLRESKTYLGAQFRRLRTRLGAPIAIKAMAAKLARLVYRMLRYGMKYVDQGAAFYELRHRELQIKRLKAKAEKLGYRVTPIPVAA

SEQ ID NO: 195964 - protein, 311 aa, unidentified
MTVICGVDVSSTHLDARIGRTGKAARFANTAEGIEALAAFCKDHDVTLAAMEATGGYEKLPFTLLWGQGVPSAILNPRHVRRFAESLGVLEKTDRIDAGLIARFAEIKPAVAQEPAPPVQGRLEALVTRLSQITELRTAQTNQRRLVDDIDVLAFLDEIVALLNRQIRSLEAKIAGLIDDDPLWRHLDQAFRSIKGVADRTVARLMAEMPEIGTLSGKAAAKLAGLAPIANDSGKRSGKRPVRGGRAGVRSILFVVAEIVRRHEPDFAAFHATLTKAGKPKKLIRIALARKLLVRLNAKARDARAELAFAT

SEQ ID NO: 195965 - protein, 347 aa, unidentified
MRFYTKAHRYYCGIDLHAKTMYACILNQEGETVFHRNLPSTPDAFLKAIAPYRDDLVVAVECIFTWYWLADLCAREGIPFVLGHALYMKAIHGGKAKNDKIDAHKIAVLLRGGMLPMAYVYPAEMRATRDLLRRRCHLMRKRAELLAHIQNTNSQYCLPPFSKKIAYKANRTGVAARFVDPSVRKSIEIDLALIARYDALLTDVELSITRTAKVHDVNAFYRLRSVPGIGKILALVILYEIHDIARFPTVQDFASYARLVKCSKASAGKRLGTSGAKIGNAHLKWAFSEASVLFLRQNPPAQRFVEQLASKYGKAKALSILAHKLGRAVYYLLKRQEAFDMNKFFRA

SEQ ID NO: 195966 - protein, 354 aa, unidentified
MPQKLNTAIVVIGIDIGKNWFHVVGHDVRGAIVLRQKWSRGQVAARFANMPPCLIGMEACVGAHHLSRRLKALGHDARLMPAKYVRPYSKGQKNDFRDAETITEAVQRPTMKFVATKTADQLDLQALHRVRERLVSQRTGIINQIRAFLLERGIAVRQGQRFLRAELPRILAAPPDVLSPRMVRLIENLAGDWRRLDERIEGLSSEIETIARQDAGCERLMSVPGIGPIISSAMVAAIGTGEAFSKGRDFGAWLGLVPRQMSTGGRTILGRISKRGNRYLRVLFVQAAWVVLIRPKSWQRHGLKSWIEAAKKRLHPNVLAIALANKLARIAWGVLAHGRDFEVRKISEAAAQSA

SEQ ID NO: 195967 - protein, 381 aa, unidentified
MFMIWAGVDVGKEHHHCVALDAQGERRLSRRVGNDEPALLELIRDVLALADPGEVLWAVDTYHGGAALLIGLLLDQGQSMVYLTGLTVHRAAAGYRGQSKTDAKDAHVIADQARMRQDLGLLRPGDEVAVDLRIFTSRRLDLVNDRTRQINRLREQLLGIFPALERALPRKGRGLVVLLTGYQTPGAIRRLGVRRLESWLKMRGVKSTASLARTAVEAAESQATTLPGEKTAADMAARIAKSVLALDAEIAELDALIVARFHDHPHAKVIETLPGMGPRLGAEFIAATGGDLTAFGTPDRLAGFAGLAPVPRDSGRVRGNLHRPRRYHRGLLRACYLAAMASLRCCPVSQRYYQRKRNEGKSHIQDVLALARRRLNVLIPV

SEQ ID NO: 195968 - protein, 317 aa, unidentified
MARFDHFVGLDVGKYTVAVYADGIEASFEISNDASGHSKLIAILEQAGLKRSGTLMVLEPTGGYETPLWACLFESQYLVKRVDAKQVRHFAKAGGLLAKTDPIDARLLRNYACAFPDRGQELSAENQRCIKDFVARRSALVETRKGVRCRLKQSAQAKLINMDQELETMLNQQIEGIERKICELVDDDKQMANKNEMLQSIPGIGPVMGWMLLAHMPELGRARDKQIAALAGVAPFAHDSGRSNGKRFVQMGRRALRNVLYQAALVASRYNPDLKNFAERLKKAGKPHKLIITAVARKLIVLANTIVRQNRMWEPKI

SEQ ID NO: 195969 - protein, 391 aa, unidentified
MRFVGIDIGAERHMVASVDEGSTVLQRPTAFREDAEGYQQLLTQLGSPADTLVVMEATGHYWQNLFATLASEGFVIALINPLRTRRFAQEDLARTKTDALDALGLARFGQQKRPTATRLPDIATRDLRELVRLRTRFLQDFGDRTRQLHRAVDLAFPEFTRYVAQLDSARATALLHAFPTAATMRAASERRIAGVRGGERTVGRDLARALKAAARQSVGRHDSEVYAREIRFFCEDLDLLRRRLGELERDIERLLGQHEVGRLLTTIEGVGPQTAAKLVAELGDPAAFRSAGALAAYVGAIPALRQSGKQTWDRAGLSRIGHARLRAALWMPTLVAVRCNPWLRAYYQRLRDRGKLPKVALMAAMRKLLVAIYTVAKHRRPFVPIVPLPAP

SEQ ID NO: 195970 - protein, 372 aa, unidentified
MNYNTVYVGMDVHKESFTLCSMTIEDEKASHYQKTEADYKKVLKYLEFLRTIYGDNAKFICGYEAGCLGYTLYHQLMSQHVECVILAPTTMLEQRSRKRIKTDKRDAEIIAKCLAQHNYSPVHIPTATDEQTKEFLRMRDDHKLALKKIKQQILAFCLRHNYRYDGNSHWTAAHLRWLKSLQPEALYKEILDEYLLTYTTLSDKLERLDKRIEELASKDEYKEAVKKLCCFIGVKTHTALSVLVEVGDFNRFASAKNFASYLGLVPGENTSSDDRNLLGITKAGNRHVRLLLTEAAQSYARGQIGYKSKDLKSRQSGNSAQVIGYADKANERLRRRYYKMVLGQSKKHNVAKVAIARELACFMWGIMTDHIA

SEQ ID NO: 195971 - protein, 385 aa, unidentified
MLSRADHTEISIRTDLRAIFVSLELSRTIWLVTSLSPGAREKMSKHSVPAGDIGGLLVRLRSLQERVRARRKQLPPLVVIQEAGLEGFWIHRLLTENDIESHVVDPASVATSRRRRRAKTDKLDGDTLIRTLLAYKRGEPRVCAMVRPPTHEEEDRRRLSRERRVLLKERIQHSNRIKGLLFGQGVTGYEPLGRDRRQRLVGLQTGDGRPLPPHLKAQIDRELDRLEMAIEQIRAIEGELRHAIVAADTVTPVPRMLIELKGIGNEFATVLWTECLYRRFDNRRQVAAYAGLAPTPWQSGSIDREQGVSKAGNPRLRAMLLQLAWLWLRHQPDSVLSQWFLDRVKANGGRLKKPTIVALARKLLVALWKYVTSGVVIEGAIVRAA

SEQ ID NO: 195972 - protein, 375 aa, unidentified
MSEHSEAFVGFDTSKLRNAVAIAEGGRDGEVRFFGEIENTAEATAKLVRKLAGKYDRLTFCYEAGPTGYGLYRQIRSLDQACSVVAPSLIPKKPGDRVKTNRRDAVSLAKLLRAGELTAVWVPDQGHEAMRDLTRARESAMIDLRAKRQKVSAFLLRLGRHYPQKRKTWTKTHMNWLASQKFEYPQQRFVFEEMMLAVRQAQERLARVEEAIRGAVPEWSLAAVVTALMAMRGIDVIAAATLLAEIGDLSRFRTPHELMAYLGLVPSEESTGDTVRRGSITKAGNGRARRMLVECSWSYQHPPRVGAHKQHKVDAAPPAVREIAWKAQCRLHKRYRALIRRGKLKTVAITAVARELAGFIWAINREITTARGVAR

SEQ ID NO: 195973 - protein, 327 aa, unidentified
MAKDTTICAGIDTGKRKLDVALDGSSEQLQVGNTPEGYKVLSDWLRRHRVKRIGIEASGGYEQAVVAELRRKGFVVVVFQPAQVRAYARFRLQRAKNDKIDAALIAACTAAVKTIHAPPDARLLTFAEHLTMIDQIGEDIARLKNRLETCRNPRFRQTWKEDIARLEKRQKIELKALVAAIREHRDLAERLDLIESVDGIGLPTAVAILVRMPEIGRITREQAAALAGVAPYDDDSGEQVGIRHIEGGRERLRRALYTAALPASFRWNPQLTALYRRLIAAGKEHKRALIACARKLLIFANTVVARGTPWDHQRPPIASVTAVAQAG

SEQ ID NO: 195974 - protein, 402 aa, unidentified
MNAVGIDVSKGKSMVAIMRPFGEIVSAPFEIKHTASDINSLVELINSVEGESRIVMEHTGRYYEVLAHQLSEANLFVSAINPKLIKDFDNDSLRKVKSDKADAVKIARYALDKWQNLKQYSVMDELRNQLKTMNRQFSFYMKYKTAMKNNLIGILDQTYPGVNTYFDSPARSDGSQKWVDFASTYWHVDCVRKMSLNAFIDHYQNWCKRKKYNFSQSKAEEIYGKAKELVPVLPKDNITKLIIKQAVNQLNIASATVESLRTLMNETASQLPEYPVVMAMKGVGTSLGPQLMAEIGDVSRFTHKGAITAFAGVDPGVNESGSYEQKNVPTSKRGSSNLRKTLFQVMDALIKTHPQDDPVYQFIDKKRAQGKPYYVYMTAGANKFLRIYYGRVKEYLSSLPES

SEQ ID NO: 195975 - protein, 349 aa, unidentified
MTEQRRSYAGECVYVGVDVHKETYTVTCVCHKQIVKTVTVQAEPAGLAASLPRWFPEATLYSVYEAGFSAFVLHRVLTKASIRNIVVNPASIAVAANDKVKTDRRDSKKLAIDLADGRLRGIYVPTEAEELARLLPRTRAQIVEHRATIARQIKAKLPQFGLIAPSSRRMISNRYLREIATWSLPPELSVSLTLLAEQWRFATRQLIEMRRLLREQAQAQQEIEKVYRSVPGIGAVAARPLATELGAMTRFANERALFSYTGLTPSEYSSGASVRRGPISRQGSSRVRHVLVAIAWRAMPRDAVLKEIFDRIAATRGKKRAMVAIARRLTGRLRACFRQGTTYAVGTYA

SEQ ID NO: 195976 - protein, 310 aa, unidentified
MDSITVGIDVSKDRLDIAVRPSGEVFAIERNPAGLEQLTLRLGTLSPNLVALEASGGFETVVAAALAAARLPVVVVNPAQIRAFAKAIGQRAKTDPIDAVVIAHFAEATRPEPRPMPDEATRLLADLVARRRQILEMMVAERQREKRVTVPHLRKSIMRLLKVLERELTSVDTDINDAVRGSPAWREKEDLLASVPGVGPTIARTLIAELPELGQLSRRQVAALAGLAPFTRQSGQWRGKSFIGGGRTSVRTALFMGAMVAKKYNPVLRTFFNRLVAAGKPKMIALIAVARKLLTMLNAILRDRRPWQTA

SEQ ID NO: 195977 - protein, 318 aa, unidentified
MLIRYIDIAKRNFVIAVSSLSKTKTETNNPKGIAHTIEYLKKHKVALVVTESTGGLEIPAAKAIRRAGIAVIIANPRQTHQFAQSQPLTKTDAKDAKMPAFFAQMTAQKEDSQTMPYQPPTEAEEVLEALVNRRNQPADMRTAEKNRLHQVHETQVGSVKQLIAHFDRLIDELDKQIDDHTHTHFDGKAQVAEQIKGIGSITTATLMVMLPELGRLSHKRIAGLAGIAPHPRESGETKFKSRCFGGKSAVRKALYMATVAATRFEPLIRDFYQRLLSEGKPYKVAVTACMRKLLETFAKFLSLPTAETQTQVFVYFRS

SEQ ID NO: 195978 - protein, 368 aa, unidentified
MELSRATWLITSLSPGNGEKMSKHTVSGGDVPALLAHFAQLQAKVKSRTGNQFPIVTIQEAGLDGFWIDRVLKANGIESYGVDPASIATSRRRRRAKTDRLDGEALVRALSAFKRGEPRVCAMVKAPSPEEEDCRRVCRERKILIAERVKHVNRIKCLFFSQGISGYEPLRKNRRTRLTELQTGDGRLLPAHMKAQIGRELDRLELLLAQITAVEEERDKLLAMETHGTITLADTEAAMLCNITGIGSEFAAVIWTERLFRHFDNRRQVAAYAGLAPTPWQSGTIDREQGVSKAGNPRLRTTMVQLSWLWLRHQPKSALSLWFTAKVQSNGGLMKKCAIVVLARKLLIALWKYVNLGVVIEGAVLKAV

SEQ ID NO: 195979 - protein, 464 aa, unidentified
MKRQRRCEPKPRVSPSVLERINPHAAGIDCGSAEHFVAVPPDRDETPVRSFATFTGDLHRLADWLTACRVTSVAMEATGVYWIPIYEILDARGFTVLLVNARHVKHVPGRKSDVSDCEWLRDLHIVGLLRGSFRPTDGIVALRAYLRHRETLIQSAGSQVQRMQKALVQMNVQLPLVVSDITGVTGLRILRDIVAGRTDPHALARHRDHRCHASEAEIVAALTGNYRAEHLFGLRQNLEAFDHTQQLLAACDTAIEAHLQRLATHAQQATTPLPPPRARQKPRGNEPRFELRTPLHHLTGVDLSQLDGIGPYNALRLISEIGTDMTRWPTDKHFTSWLTLAPKNKVSGGRLLSSRTQPSANRAAAILRLAAMNLGRTQTALGAFYRRLAYRVGKAKAITATARKLAILVYHTLKGELVYQDPGAAEYDARDRARVLRRLRQRAEHLGFTLVNLTTGELAEGTVS

SEQ ID NO: 195980 - protein, 317 aa, unidentified
MSRSETVMGIDVSKVLLQVAVVPEETTWSANNDETGIGVLVERAKALEPRLIVLEATGGLEAPVVAALATGGLPVVVVNPRQVRDFAKASGKLAKTDTIDAFMLARFGGAVNPPVRPLKDHHAQQLSALVVRRRQLVAILTAEKNRLSSAPPAIHENIKSHIAWLENCLDGINRHLQQAIKDSPVWCEKDALLRTARGVGPVLSVSLLAGLPELGSLNRKQIAALVGVAPFNRDSGAFRGRKSVWGGRSHIRAVLYMGTLSAIRYNPAIRTFYQRLCMAGKEHKVALTACMRKLLTILNAMVKNHTTWELRVEQKTA

SEQ ID NO: 195981 - protein, 330 aa, unidentified
MASIPVFVGLDYHDSGVQVCVLGVEGNVLGNRPCLNDLAEITGYVEGLGSVVRAGIEACTGSADLAEKLVQHGWSVDLAHPGYVARMKQNPDKTDYGDARMLADLERVGYLPRVWLAPEEIRELRRLVRYRQTLVNERRNVRLRIRAILREHRLRLNQRAWSQAWLTWVSRVTLGEQSRWIMDQHLLSLQRLNQEVRSVEHRLTEATQDDPLIQRLLEQSGIGPVTAWTIRAEIGRFDRFRTGKQLARFCGLTPRNASSGNRQADAGLIPAGNRGLRAILIEAAQRLRRCDPRWREFSACLIARGKPGSVVAAAVANRWVRWLYHQMQAA

SEQ ID NO: 195982 - protein, 435 aa, unidentified
MEEPTRFIGMDVHKDTIVVAVTATGDVAKATAYGTFPNTAAALEKLVRRLRQAGDGPLKFCYEAGPCGYGVHRTLTRLGEDCMVVAPSMIPRKSGDRQKNDTRDAASLAVLHRGGLLTAVWVPDAAHEAMRDLIRARLAAVRTVRTARQQLSAFLLRHERLYPGNRKPWTKAHRGWLADQSFAQPAQQIVLEESIDAVRLGEQRRDRVDDYLRAQIPSWSLFPLVRNLCALRGLDMIAGAGLAAAIGDPSRFTSASNFMAYIGLVPSEHSSGSQRHMGAITRTGDVHARTLLIEAAHCYRFPARIARHKLAAVDAVPEAVRVIAWKAQIRLCQRYRRMMAKGKPRQVVVTAIARELAGFVWAIACITSDPPAKTSAVAPASEEVGPTSRRTSIVSSRDGLQRHNEVARPGIRRDHARHGRPEKPEEMIAHHHSTG

SEQ ID NO: 195983 - protein, 346 aa, unidentified
MMIIGCDFHPSWQQVSWLDTETGETGEQKLVHASGDAKTFYAQLARPALIGMEATGNSQWFIEVVEDLGHEIWIGDAAQIRASYVRKQKTDKRDAAHILKLVVEGRFPRLWTADREQRDLRQLVLHRHKLVEIRSRVKNELQHLSLNRGMQRKAKLWSQAGQKLLRELPLKPWAACRREDLLGLLEMLNQQIGKLDEAVQQAAEEHPQAKLLMTQPGVGPNTALAFVLTLGDVSRFPRGKQVASYLGLIPREESSGGRQKLGAITKQGNQLVRSLLVEAAQIAVRFDPGLGKQYRHRCHQKPKGVAKVATARKLAVRLYWMLRTEKPYPEIVRIESSPRVPLVGAS

SEQ ID NO: 195984 - protein, 440 aa, unidentified
MRLMYERCAGLDVHKKTVVANRRRINKQGEVESETQTFGTTTGELLQLLDWLMMWDVQMVAMESTGVYWKPIYNLFEGNIPVMLVNAHHIKHVPGRKTDVHDAEWIGELLSLGLLKASFVPPKPQRELRELTRHRVGLVQDRARVVNQVQKVLESANLKLASVASDPLGVSGRTILEALIQGERDTAVLAELAKGRLRLKKKELEQALQGIVGQHHCFLLSQQLSHIDLLDEQIESVNEEVGRRLVSLEPVAVPPAPPPNTPSQEGATGGPDSEPLSWNEAVAILDTAPGINKTAAQAILAETGINMGQFPNDKHLTAWAGLAPGNNESGGKRYSGKTKAGNAALRRIMTQVAHAAVKTKDTYISAVYRRLMARRGKKRAITAVARKLLADIYYMLTRRQPYHELGADHLSQRSRQSKVDTLCKQLVKLGYRVKIEPSPV

SEQ ID NO: 195985 - protein, 331 aa, unidentified
MADAKRFVGIDVAKAQLDVAIGPNGESFSVANDETGISELLRRLEPADLVIIEATGGLEVPVASALATAGIAVAVVNPRQVRDFARATGQLAKTDALDAQVLARFGEAVKPQVRALRDAQAQALEALVNRRRQLVEMLTAEKNRRANSPKVIHKSIDEHIHWLEKRLAGFDDELTALVRATPIWRERDELLRSVPGVGPVLATTLLAYLPELGALNRKQIAALAGLAPFNRDSGSLRGSRCIWGGRAQVRRVLYMAVVSAVRSNPVIKNFYAQLRARGKYPKSALTACMRKLLVILNAMLHNNTYWHATALTSSTSALYPLGGAVSEHGCC

SEQ ID NO: 195986 - protein, 346 aa, unidentified
MDLAMTAPDRSGSSTASANEAAPAVGVDVSKASLEVVILGKDADCSVSRSIPNTEDGFDKLREWIECEVEVDFEEIHVCLEASGGYERPVARYLHEQNLTVSVVNPRRTSAYAESRLNRSKTDPVDARLLARFCQREEPSSWQPASSEQKNLKDMTRGLQSLKKERDRLKNQIGRSENPTVTSSLESVLESVNEQIDQLEEAIDEHVQSCRALARKQELLETIPGIGSATAALVLAELGDHQRFESARQAAAYAGLTPSHHESGSSVHRKPRLSKVGSSRLRKALYFPAISALRCNAAIKAFGERLAERGKAKMVIIGAAMRKLLHICYGVLKNQAPFDASLHPGT

SEQ ID NO: 195987 - protein, 414 aa, unidentified
MGRFIGLDIHRDFAQVAVVEDGFVTDWGRVGCRPQAMREFAASLRRDDQVALEATGNATAVAVLLEPHVAKVVISNPVKTRAIAEAKVKTDKVDARILAQLLAADFLPGTWLPDERTRMLRRLSSHRAQLVRGRIQVKNQVQAVLHRNMLPHPPVTDLFGTRGRAWLEHQPLPVDERETVDALLRQLDFYGQELAAVERRLATEALDDPVVKRLMTIPGVDAMTAVTLLAAVGDFHRFTTADKLVSYLGLNPRVRQSGGAPAHHGRITKAGCGKARGMLVQAAFAALRSPGPLRALHQRIKARRGMQIAIVAVARKIAVIAWHLVTKDQDYAFARPSLVAFKRRKLELTAGAERRIARRGPGYDYNNKDLRRQEREIAEQAERAYAVLAAHWQTQRPAGKPRLPAIPGAANPSL

SEQ ID NO: 195988 - protein, 322 aa, unidentified
MTEEKVYVGVDVAKSALDVAVTDSEEARQFANKDKGISQAVSYIAGLKPAVIILEATGNLEMPLATALQADHLPVVVINPRQVRDFARATGALAKTDTIDARILALFGARIKPQIRPLPDKKARDMRSLLTRRRQLIEMLTAEHNRLFQTHEDIRLGVETHIKWLEEALSDINDDLERRIKCSPSWREKDSLLKSVPGVGKVVSTSLLIELPEMGELNRRKIAALVGVAPLNRDSGTMRGKRTVWGGRAKLRSTLYMAALVASRRNPIITAFYQRLLDAGKAKKVALVACMRKLLTILNSMLRTMTAWQPQTILNSVSMEVK

SEQ ID NO: 195989 - protein, 338 aa, unidentified
MYYTGIDLHKKTSFITTIDDSGKVVFRRNFTNQEEHILDYFQNLDGPTKIVIESMCSWYWLHDLLRAHNFNVVLSNPLKTKAIASAKIKNDKIDSHMLAQLLRADLIATVYVCSLKTRELKEMLRHRRRLVADATRMKNRIHMLLMKNNIAIPVSDLFGVKGMKHLKQIDLPIYHRPQLKSYLTLYEQLTKQIEPLTKRIGDLAKKDPMAQLLMTIPGIGPLTAMFIVAEIEDISRFPSHRNLSSYAGLVPCLDASADKSRTGRITKQGSPYLRTALVEAAQVIPRMKKTRLNVFYRKRIVRAGYQKAIVATAHKILQIVFYVLKNQTPYQEEYPARA

SEQ ID NO: 195990 - protein, 450 aa, unidentified
MSDTWPQGPDEMPQSTSAPEFAAFASIDWAARKHVWKMARRDAPSEQGEFENTPEAVQAWATGLFHRFGGRPIAVCLEQSRGALVYMLTRYPHLVLFPVHPTTAARYRETFCPSGAKGDPGDTASLLDLLLRHRERLRPLQLDTAPTRLLQLLTQQRRELVDEKTRQKLRLIASLKQYFPQLLQWFDDVDSPLVGALLQRWPSLQQLQRTNPSQLRDFFHEHNCRGEERIQQRIQAIYAATPATEDAVVLEGEGSKACDWVAVVATLRERIAKLDQRIAELVATHPDSVLFASLPGAGPVLLPRLLVAFGTRRDRYDSAYQMQCLSGIAPVTESSGNRQCVQFRFHCPKFLRQTFHEFAFCSLQKSVWAQAYYKLQRDKKKSHQAAVRALAYKWIRIIYRCWKDGKLYDEQTHLENLQKRNSPLRGGIASATGKRWNPVGGLRKISENFS

SEQ ID NO: 195991 - protein, 336 aa, unidentified
MGSYVGIDLHRRRSVVVVLNEDGDRVSWCRIDNTPANLAAEIVAAGGGAEVAMEACWGWYWAADVIAECGARLHLAHPLGIAGYGNRRVKNDVRDATLLADLLRLGRLPEAWVAPREVRELREMVRYRAKLGRLRSGLKQQVHQTLGKEGVIPEHDSIWRGGGQRWLDDLALADAYVDRIESLRDLIELYDREIRQCDARIHRRLKGHPGYEAIQALRGVGPVLAAVFVAEIGDVTRFDNPRRLCSWAGLTPRLRESDTHTHRGHITKQGSRLLRWAAVEAVSGAVRDPQIASVKHRVGDRRGRNIGRVAAARHLLTLVYYGLRDGEIRCLTADVA

SEQ ID NO: 195992 - protein, 364 aa, unidentified
MLIIGCDYHPGFQQIACVDTDTGELSERRLAHRDQAEQFYRELKQQNLSARVGMESSGHSRWFERLLHELGFELWIGDPAQIQTKRARKQKTDRQDAQLLLRLLIEDRFPRIWVPDAANRDLRQLLWHRHRLVQMRTRVMNQLHVVPLNEGLRRKKALWRPEGRKELESIALPPWASRRRQDLLDLLDQLTPKIQELTCALEAEVEKRPVTRLLRTHPGVGPLTALAFELVIGTPERFHCGKQIASYIGLVPEEKSSGDRRRMGHISKQGNVLLRFLLVEAAQVTVRSQQEWRSKFFHLALRRGRKIAKVAMARKLAVHLYWMWRQGRDLGQMQKLGSHAGEPGNPDGVQSITDVMIGHPAPSK

SEQ ID NO: 195993 - protein, 427 aa, unidentified
MKEQSGMIVGIDWSADSHTCYDLKADKSFKIPDSVKGYERLLNDYPEAVFVIEEANNRIGDYLLINNREVYVLPPCRSKEARKYHFSSGAKSDSLDAKAIALTFKEHPSYCLKARYSGVGAKITKLVTMYNIVSKTHSQQCNRLYSVLLRYFPEYLHIMDKQYRSDTSLKVLSICPTLTELRKVSNEELRKILNKENYRMTSGLRKKLDRIRSEGISWGDTSCEGNLIMFLANQILTLREEQERLREEMGETLENSPYRIILSIPGVKAVIGSYIVKAYLTHDFRSYQEMQKYAGTIPFLFQSGRKSIMLMRKKCDKDLRNMIHIAAFASLKTCGWARNYYKRKRKEGKTYGHALRALGNIILKIAFSMLSKMKKYDETLFLNAKGIKTTQQNNTIIPEAFTNPEYSQDAHPSLAATKDVVENLNVT

SEQ ID NO: 195994 - protein, 343 aa, unidentified
MDKITTIGLDIAKSVFQVHGIDASGEVVVRRQLRRRQLLAFFERLEPCLVGMEACATAHHWAREIETLGHAVRLMPPRYVKPYVKRGKNDAADAEAICEAVQRPTMRFVPIKSPDQQSLLMVHQTRQLFVRQRTSLINAIRAHMAEFGIVAGVGRNGVKSLLAIIADGEEDRLPSAACDCLMALAAQLELVDRQIQAADRQVLAWHRQSEVSRRLEAIPGVGPLVATALVASVPDPGIFRSGRDLSAWIGLVPKQNSSGGKEKLGSISKAGNRYLRKLLVVGALAVIKRARVLGYSRHPWLVRLMERRSAKIAAVALANKIARMAWAMMVRGEHYKAPLPAAA

SEQ ID NO: 195995 - protein, 400 aa, unidentified
MQQQHLLVGVDVGCRKHHVAIGGPGGITEQFEITHDAGGFSYFFRRVSEQERRQRLPVIVGMEGTNGYARPLDQLVKDKGYTLLNVNNLKLARFKEIFSSPAKTDSIDAQQIVTLMMMAPFMEQVKESLQPVLAVSMIERQLKRLSRRRRQLVQEKVNVQNRMQADLQSVCPGFLDIIHKVDSLYVLRFLSFRSDLRQLARLKTATIRSIPGIGAAKATTLARWQSSAIFGAEIAWVGPMIVEDAKRLLQLKESIDVLEAQLEYLVKQSSVATLLDSIPGFGTISAAEVSGEIGTIARFASEASLAIYLGMAPLDNSSGKHKGTKSPQQVNKRAKAAMMVGMGHHIRKVAESKAYYEKKRAEGKKHNQALRSLGRHITRVFWNMVKNNRLYEEKKQSPAT

SEQ ID NO: 195996 - protein, 369 aa, unidentified
MADRITYVGLDVHKESIVVAVASGGLRGEVREYGRIANTATALDRLLRKLGDAGMVLRFCYEAGPCGYGIQRHVSARGHECVVVAPSLIPKRAGDRVKTDRRDAASLAKLHRAGELTAVWVPDPQHEAMRDLVRARLDAVHSLRRARQQLSGFLLRQGCHYGRPAWTKLHRRWLSGLVFEQAIHHIVLEDYIAAVEAAEARRDRLTAQIETMLPDWTLAPVVAALQTMRGMAMVNAATLIAELGDLSRFADPRQLMAYLGLTPSEYSSGSSVRRGGITKAGNGAARRLLIEAAWSYRFPARLSRELLLRQESQPKPIRDIAWKGQVRLCARYRRLARTGKPANVVTTAIARELTGFVWAIARQVTVTPG

SEQ ID NO: 195997 - protein, 433 aa, unidentified
MRSIGLDVHKRFAEVAIIEESGPPTSRRIGTTSAALSAFASTLRADDQLVLEATMNTWAIADLLRQSGARVVISNPRRTRAIAEAKVKTDKVDALTLAQLLAADFVPEVWVPDDETRRLRHEVAARATLVRQRTQVRNRIHAVLHRCLKDAPASDLFGAAGRAWLATVALPEEERAQVDAALRVHEAIEAEVDLLDRRLAKLALAEERVERLMTIPGIGPVNALAVIAVVGDIARFRRPGRLVSYLGLDPKVRQSGERPAWTGHISRAGQAHARGLLVEAAHAAVGAPGPLRAFFRRIERRRGTQVALVAVARKLATLAWHLLSRGERYRLERTTVMRQKRRELERRLGIAGIRRPRGEGGSTLAQLRERELVLLAEAESGYTAEIAARRKRDAAAANGEATMRPSKGRDARRSSHPHRSALLTGSTAPENGG

SEQ ID NO: 195998 - protein, 342 aa, unidentified
MQATTIGLDIAKNVFQVHGIDADERVVVRKQLRRGQVLAFFKALPPCLVGMEACATAHYWAREVTKLGHRVRLMPARDVKAYVKRNKNDAADAEAICEAVRRPTVRSVQVKTAAQQSQLMLHRARDLLMRQRTQVINALRAHLAELGITAEQGAGGLKELLRIIANDDDERLPVDAYASLVVLAAELQAMQTLIGSLEKRIMAQHRASEASKRVATIPGIAVIGATAITATVTDPKAFRSGRDFAAWIGLVPRQDSTGGKQKLGPISKQGDRYLRRILVVGAHAVLKQAKQKPEKYPWLTELLARKPFKVVAVALANKMARTAWALLAHGGTYRAPRLAAAA

SEQ ID NO: 195999 - protein, 327 aa, unidentified
MARMQGKTTSDISQLFAGIDVSKAHLDLRLSCEGKSRRFPNDPAGFAAIDAHLRAHADAPCLVVLEPTGRYHFAVWRALHEAGHGVAPLNPLHVRRFAESDGELAKTDAVDAAVLARMAAERRPAAKLPPSEEQLRLKALTTSIADRIDRRATLKGQRAEVRDPLIARFDEAEIAQLSEAIDALKAERARLIDANPQTDRVAAILCSMPGIGEASAHRIIAEMPEIGTLDKKQAAALLGTAPRANQSGKRDKRRRTKGGRRRLRAALYMPAIVASNANPDLKAFKLRLKAKGKENAVILTAILRKLIILANALVAQNRTWTLKMPLT

SEQ ID NO: 196000 - protein, 334 aa, unidentified
MKITRVGVDLAKNVFQVHGVNRAGRCVWKRQLKRLNWLQVLTETLEPGCEIGMEACGGSHHWARELVSPQFVKPFVKSQKNDANDAEAVCEAISRPSMRYVPIKTAEQQDLQARHRIRDTLMRHRKAKANQIRGLVAEYGIVAPKTVVPLRRAIPDWLEDAKNGLSDNFRALLFGLWEDFQQLEQRVKDVDRQINIVSDTNPDAKRLKQLRGVGPLVSTALVAQFGDGRQFTRGRQASASIAVTPRHAGTGGKNLVYGITKRGDPYLRSILIHGARAVVSQAKRRDDALSRWLTDLADRTHTNVAAVALANKTARMAWAMLRYGTDYDPALARA

SEQ ID NO: 196001 - protein, 312 aa, unidentified
MEKLSYGGIDVSKDRLDVVVLPEGWFFSVSNDTAGWAELVARLRPLAVSAIGLEPSGGYERGIIRALLAAGLSVRRINPNKLRQFARARGVLAKNDRLDARLIAEYVAIMPTRVVQRDDAVERLAEIVTMRRQLCDEHVAVENQAAHLEDAMLRRLSKRRLVRLEADIRLLDKRLAEMVATNAAFAQPYELLTSMPGVGPVLAFTLIALLPELGKMSRKQIAALVGLAPYDFDSGKLRGHRSIYGGRMPIRNVLYMAALSASRYNPALKTFSNRLAHANKKSKVIIVAVMRKMITTLNAMLRDNAAWQPQSN

SEQ ID NO: 196002 - protein, 315 aa, unidentified
MDNSIVSFIGIDVAKDKLDIHVRPENRDFSTANTPEGFQEIVKQLPAPTTCLIALESTGSYHKSLAEAMIRAGHFVAVANPRHVRSFAIALGLLAKTDKIDARIIAHYAETARPRTMSLSPENQVKIVELVTRRRQLLDMRTAEKNRLETIHIQAVRRSLEQMLKTIDKQIKTIEKQIAGLLKSDDDWNDKADLLLSVPGVGPITVASLLADLPELGRLNRKEIAALAGLAPYNNDSGRKHGKRSIHGGRKPIRSVLYMAALTAMRCNDVIRKFADRLKAQGKSFKVVVTACMRKLLVILNTMVKNNTQWEPQNA

SEQ ID NO: 196003 - protein, 314 aa, unidentified
MDKITVGIDVSKDRLDVAVRPSGERFAVPRTGAGLDDLVARLKVLKPNLIVLEATGGFETVVVAALAGAGLPVAVANPAQVRAFAKAIGQRAKTDPIDAAVIAHFGEATGIVPRPLPDQATQQLADLVARRRQIIDMIGAERQREKRANPRIKKSIGRLVKSLERELSSVDTDIDDAVRGSPAWREKEDLLSSVPSVGPAISRTLIAELPELGTLSHKEIAALVGLAPFARQSGQWRGKSFIGGGRASVRKALFMGAMVAARYNPVLKAFYERLVAVGKPKKVALIAVARKLLIILNAIVRDGTPWKGTVRAVS

SEQ ID NO: 196004 - protein, 438 aa, unidentified
MLGGSVTAFFSHFCCEEVVDLKVVFPTCCGVDVHKSFLVATIIKTSQNSLQPSYQKKRFSTFNSDLNRFADWLRENDCLDVCMESTGKYWVPVFNILEKQAIRVVIANPKWVKAVKGNKDDTKDSKWIGDLFRIGLVKSSFIPNKDIRILRELTRYRYKLISMKSSEKNRFQNAFTVCNVALDSVVSDMFGKSATAITDYLTSDVEFDAQHCISLLQRSLKKKAPAILEAVEGHEIAPEQKTRIGIVRDHLHYIEKLVERVDDCVEGMVQKHEGSITLLRTIPGVDRSSAITILSEIGIDMAQFGSSKRLCCWAGLTPGNNESAGKKKSVRISRAGVYLKPALVQVAHAAVKDKSSTYYAVKYERISKRRGKKRAIIAIARMILTAVFCMLSTGEVWSPVDLYKVDMPEHLKEKQLAKAVKQAVHFLETQGLTVLDFA

SEQ ID NO: 196005 - protein, 343 aa, unidentified
MDHFAGLDVSVKETSVCVVDETGKIVREVKVASEPQGLLVVLANPAYHFKRIGLEAGPLSQWLYSALAEAGLPVICVETRHMRAVLKAQINKTDRNDARGMAQMMRVGLYRPVHVKTLRSQKLRMLLTHRKLLQSKAIAIDNDLRGTLRNFGLKVGMVGAARFEARIKELIENIPDLAVLVEPLLVVRRVLREQLGILHRRLLALVRNDDVCRRLMTVPGVGPVVALTYRATVDVPARFRKSKSVGAVFGLTCAKYQSGEIDRKGAISRCGDEMMRTMLYEAAQSMLFHSTRWSWLKAWAMKIARHRGMKKAVVALARRLAVIMHRIWVDGTEFYWTRETVPA

SEQ ID NO: 196006 - protein, 440 aa, unidentified
MAFIRDEAGGSLGQSFSFPRTSAGFNQLLEKALAGMPETARLTVVMEPTSLAWVPLATYLSLKGHIIYLVNPRRVSDLRKFYSRRKNSDRLDAKVLSNLPNLEEDILTELYLPTGELNALKRHSQQRDKLKQSIGDQKNRIQAVFTEANPTALEAFGEDKFSRVGRAFLRKYINPLKVKGLGLKRFTQVLERKAYGELKQSTVNRLFEACCDTINIYREALEKDKLPFSYEQIQEEINLELDLMEFKEAQVKKLDKKIANLYQQVDPRGDLKSLRGVGDVHAPIILGYAGYIGRFGNARSYCGFTGLVPGKKQTGGIDRKGLKITKEGPNLLKKTYYMVGETARHWDLEMAERYHRLIGRGLHHKQAITAIGRISAARAYAVMKRMELARKGLIKPEEVPYKLRDLEGREISAQEAREQILIRYPSKNSLKKRGRAATAD

SEQ ID NO: 196007 - protein, 413 aa, unidentified
MSVTDVPEPPRPTAGVDWAKDDHAVSVVGPDGEQTHRFSITHDAAGLRSMIKRLLGAGVAEVGIERPDGPVVDALRAAGLVVYVIPPGQLRNLRSRYGSAGNKDDRFDAYVLADVVRTDRRRLRPLLVDTPATTALRQSVRARRDLVVHRVAVANQLRAHLQICFPGAVGLFRDIDSEITLRFLERFPTPERAAWLSVKRLTAWLASIGYCGRTPPETLYQRLTTAPAAATGADADTAAAVTAAFVAVLRTLTTQIEALAARISEQLDLHPDAPIFTSLPRSGTVRAARLLAEIGDARGRFPTADSLACLAGVAPSTRQSGKVEVVSFRWGADRQLRDAICDFAGDSRHANPWAADLYQRARNRGHDHPHAVRVLARAWVDIIWACWTSHSPYDPDRHGALQRILNQDQPAAA

SEQ ID NO: 196008 - protein, 402 aa, unidentified
MNAVGIDVSKGKSMVAIIRPFGEIVSPPFEIKHTASDINSLVELINSVEGESRIVMEHTGHYYEVLAHQLSEANLFVSAINPKLIKDFDNDSLRKVKSDKADAVKIARYALDKWHNLKQYSVMDELRNQLKTMNRQFSFYMKHKTAMKNNLIGILDQTYPGVNAYFDSPARSDGSQKWVDFASTYWHVDCVRKMSLNAFTCHYQNWCKRKKYNFSQSKAEEIYGKAKELVPVLPKDDLTKLIIKQAVDQLNSASTTVESLRTLMNETASKLPEYPIVMDMKGVGPSLGPQLMAEIGDVSRFTHKGAITAFAGVDPGVNESGTYEQKSVPTSKRGSSDLRKTLFQVMDALIKTKPQDDPVYRFLDKKRAQGKPYYVYMTAGANKFLRIYYGRVKEYLTTLPES

SEQ ID NO: 196009 - protein, 339 aa, unidentified
MTNITRIGLDLAKNVFEVHAVNAQEQVVLRRSLRRNQMLPFFSKLPPCLIGLEACGSANNWARELAALGHDVRLIPPSYAKPYVRRNKNDAADAAAICEAVSRPSMRFVPVKTVEQQADAVTHKARQLLIKQRTMLQNSLRGLMAEFGVIAAQGPQHIGKLLAVLADPEDKSIPAVARIALNAMAEALSTLEQQIDVLDKDIKARVRTNPTARRLDTIPGFGPVLASAMAAIVTDPKHYASGRDFAAALGLVPRQDGTGGKVKLGPISKRGNGYLRRLLVNGATAVLCGKNARLDPWRAKLLESKPRKLAAVAVANKMARIAWAVMTRQEDFRPRAVTA

SEQ ID NO: 196010 - protein, 412 aa, unidentified
MDRVHERCCGLDVHKDTVVACLRVPGERGRPKIEVRTFGTTTPELLAFGDWLIEHRCSHAAMESTGVYWKPVFNLLESVCEVVLVNARHIKMVPGRKTDVKDCEWIAELLELGLLKSSFIPPEPIRDLRDVTRYRKTLIQQRAAEANRVQKLLELANIKLGSVATDVLGVSGRAMLDALVAGERDAATLMRLAKGRLKRKRAALVPALTGRFTQHHAFLLGQLLAHIDELAEHIAQCDRKVDEYLRPFVQKADLLQTIPGVGRRTAEVIIAEIGVEMDRFPSAAHLASWAALCPGNNESAGKRKSGKTRKGNQWLRRALVEAAWSASHTRDTYLSSLYSRVARRRGAKKAAVAVAHSTLVAVWHILKHHIPYQDLGPSHFDKLHTERLRHHYLRRLEDLGLRVTVQPIGEAA

SEQ ID NO: 196011 - protein, 387 aa, unidentified
MKYNQNTKIMQITEKTLIVGVDIAKEIHHARAFDFRGIEYGKRIEFSNDIDGMKRFLKWAADIMNKSNKEHLMVGMEPTGHYWLCFAQFLRDKNHKVVLVNPFHVKRSKEFDDNSPTKNDRKDPKTIAMLVKDGRYVEPNIPEGIYSELRIAVDIREMLTKDLNKIKNRVARWLDIYFPEFNKVFADWEGKAALITLKEFPTPAKILGIGAEEILAAWKKEVNRAVGIKRALKLIEAASESVGKRDGIEMAEIEIKIILEQYEMLVKQLKKIESKIEELFMQVPGANEMLSIKGVGVITAAIFIAEVGDITRYEHPKQIQKLAGYNLVENSSGQHKGQTTISKRGRRRLRSALYKMIMPILANNKEFQELHKYYTTRKENPLKRNSQ

SEQ ID NO: 196012 - protein, 389 aa, unidentified
MPSVSERPEAPTAIQTYLAASFVSLELSRSIWLITSLSPGSGEKMSKHSVRAGDVAALLARFSELKRKASERTGKSFPIVVIQEAGLDGFWLHRVLQSEGVESYVVDPSSIATSRRRRRAKTDRIDGEALLRALLAYKRGEPRVCAMVKAPTPEEEDRRRLCRERKVLIAERVKHVNRVKGLLFSQGISGYEPLRRDRRQRLDELTTGDGRPLPVHLKTQIRRELDRLELLLDQIKEAEAERDALLAAPQPAAPAPTGRMLLEFKGIGAELAAVLWLEALFRHFDNRRQLASYAGLAPTPWQSGSVDHEQGVSKAGNPRLRTSLIQLAWLWLRHQPQSALTLWFKERVSGNGGHFKKSTIVALARKLLVALWKYVTAGVVIDGAVMKDA

SEQ ID NO: 196013 - protein, 408 aa, unidentified
MLFLGDDWAEAHHDVELQDADGRVLVRRRLPEGVAGIAQLHSLIGGHLGDDEPDQVLVGIETNRGPWVQALLAAGYQVWAINPVQAARYRSRHGSAGVKSDPGDAHVLAEIVRLDRAHHRPVAGDSAVADHVKVAARAHQTMIWTRQRNTAMTRSMLREYYPAALTAFDDLAGRDALAVLAAAPSPQQGRKLTVGRVETLLRRAGRQRYLTKRATEIVAALRSEQLPARPGVVDAYAAAVAALVAVTAEMVRQIGVLEEQVRAGFGRHPDVEIYLSQPGLGMVLGARVLAEFGDDPGRYADTRARKNYSGMAPVTRASGTNWVVLARHARNQRLADALYQQAFAALTSSPGARAYYDRQRDRGATHHQALRALANRLVGIIHGCLAHHINYSENVARVAPSVTTIAAA

SEQ ID NO: 196014 - protein, 345 aa, unidentified
MEFFAGIDLGKRKSQIKILNSDRKVVEELKIENDPKEFFRIFKKYKGKIDVACEASSNAFWVWDTLSPIVRRFSVGHTSKIRWIAEARIKTDKIDAGILAELLRADLFPAIAIPPRRIRELRELIRGIIRMRRQALRYRNQVHGLLGRHGIPYKRSEVQDSKLGELVRSVELAKPARLAADALLRLEAATREEIRQLQIELQKELKGEDEINRQIALLESIPGVGFFSAALLVLELWDVTRFSDAKHLASYIGFVPSTHQTGETLWHGGMTRQGNVLVRWILVQDTWAAIHNHWFFGRLHERYKKRKGNTRAVVPVARALLKTIHRVWTEKKTYEEIYKEKALVG

SEQ ID NO: 196015 - protein, 344 aa, unidentified
MERSPDTYRLFVGVDVAAQTVTAAWQPSRGGPGPPHTVDQTPTGHAALQRQLRTAGIPPAETLVVLEATGSYWVALAVTLHEAGYRVAVINPLQAHHFAKAHLRRAKTDDLDAQALAQLAAALRPAPWTPPPAVYHEVRQRLVARDGLLAMRTQARNQRHALLQWPVVVAAVRQHLDAVIDDLDTRIADLTTEIAAVLKEGAWAESLACLTSAPGIGLVTAAWLLVATLDFSLGGGPAAVTAYAGLAPIPRESGRSVRGRPRIGHGGNARLRTALYMATLSAALHNPIIKPFYDRLRAAGKPVKVARCAAARKLLHLAWALATKRQRFDPVKQQQHTALPNLAA

SEQ ID NO: 196016 - protein, 372 aa, unidentified
MKEETAGHPGVVGGVDTHKDLHMAAVVDEHDRVLGSECFATTRHGYKQMLIWMRSFGELLRVGVECTGTYGAGLLRYLQHAEVTVLEVTAPDRSDRRKRGKDDTLDAENAAHAAFAGVRTVTPRTRDGMIESLRVLKVCRKTAVAARRVALQLIHNTVVCAPDELRESLRTMTRMQLIRTLAAWRPDLSDYRNLTSAYRITLKSLGRRYLELHDEIADLDVMIAALVNELAPDLVSRNSIGYESAAQLLLTAGDNSERLQSEAGFAALCGVSPVPASSGKVTRHRLNRGGDRAANSALHIIAIGRLRTDPRTKAYVDRRVSEGHSKLEAIRCLKRYIAREVYYVIRKRNRQIGQVQVAWKRPVPDNRQAFVI

SEQ ID NO: 196017 - protein, 411 aa, unidentified
MQVIYDRCCGLDVHKRTITACVLKWLGSDWEKEIRQFGTMTKDLLGLSDWLVGEGCTHVAMESTGVYWKPVYNILEGQFELLVVNAQHLKAVPGGKTDVRDAEWIAELLAHGLLRASFVPPASVRELRELTRYRTSLVRDRARTINRLQKVLEVANIKLANVVSDIDGISARLMLEALVAGERDTQQLASWAKGRLKEKREQLVEALSGRLKPHQSFLIAEHLAQIDYLEGAIERLSHQIEERLRPFEQEIAWLDTIPGVNRRTAEVLWAETGGDMSRFPSARHLASWAGMCPGNNESAGKRRSGRTRKGSPWLRHCLVEAAHGAAHTKNKYLSSQYHRLGARRGKKKAQVAVGHSILVIAYHLLTRKQPYSDLGANYFDERDRQAVTKRCVNRLQKLGFKVTLEKLQMAA

SEQ ID NO: 196018 - protein, 337 aa, unidentified
MSYLGVDLHTNSFTVCYQTSVGKQRLATFELKKIDSFRKTLRKQDQIAVEATGNTRWFVEQMGARVKKVVVVNPHQFEVIRKSVKKTDKHDARTLAYFLSKDMLPEARMKSKENSQLHSLAGTRDKLVKQRTALINKIHNVLNGHGIKFAKETLSTEKALKSVWSYDWDPIVRVELEVLIEQIRSLTGSIKKLDEQMSEHGKDIDGHKSLTSIKGIGERSATILLSVIGDVRDFADENKLAAYFGIVPRVSDSNQTVHHGRITKNGSKIGRTTLVQCTLAAKRYSPYLNRYYERIKRHRGSGKAIIATARKFLGIIYQTLKNGWIFEDFPNFVIANT

SEQ ID NO: 196019 - protein, 415 aa, unidentified
MKFAGIDWATDRHFVALEAADGQALDEWSVEHTPAAIAGLLVRLQQEGGPGEVVVGVESGAPLVTDQLLLAGYTVYALNPKQADRFRDRYAPAGSKDDRRDALVIADAVRTDAGRLKPLESDSPLTEELRMRDRARTRLVEQRTRHSNQLRQVLSRYYPALLELERAMHDPFLAALLRAYPDPDGGRGARLPRLRRLLEEHRIRTIDAEALQRLLHRPGFAVPRHVLAACRDEALDLVAQIELLVEQTRLADRRLRELFEGHPDRELLESLPGLGTCLAIRVCAELGDYRARTADATTLQAFAGTAPVTRRSGKRGVSSITMRRGCNRVLQAALFHMARCSVHRSPWARAYLRHLRGRGVPHAKAVRALSNKWAKIIAAVLRTRRRYDEVTHVERLLRNQVPWALGLDHPHQEAA

SEQ ID NO: 196020 - protein, 501 aa, unidentified
MAAKKNAKTKADSAGEGVQAHGGVAAEVTDEVTQVVEYAAGIDVAKGFGMVCTRVPGSRRGSKRQKVWRVNATFKEITALMDHLVCEGIQRLVLESTSDYWRIWYYLAEAAGLDVWLVNARDVRHLPGRTKSDRQDAVWLCKLNERGMLRRSFVPPRAVRDLRMLTRTRSRLAQDQARHQSRVEKILEDALLKVSAVISDLFGVSGRRFLDALVAGERSPAALAALGDYRLKASKAKLEETLTGQFRDIHATEIAVHLRLIDAINAEITGLDAEIEKALPQVPRTAPVCTACGVAGGGHAPDCQNLGVLLLGLAGRLDEITGIGPVNARVLIAELGTDPSQFPTPGHAAAWAKLTSRLMQSGESSWNGRAGKGNPHLRGALGQAVMSAAKTDTRLGAMYRRIARKRGKQKAIVAVARVICEIAWRLICDPGARYIELGPDYYQPRSARQRTRSSIRQIEKDNPGKKVVLIDDPAIAGTPGSAGPAEPAALPAVLSRLPVTY

SEQ ID NO: 196021 - protein, 440 aa, unidentified
MAVRKREDEVFPNAAGIDVGASSHWVAVPKHLAEESVREFGAMTDDLNTMADWLIACGVDTVALESTGVYWIPMYEVLEQRGLKVWLVDARQMKYVPGRKSDVQDCQWQQKLMSLGFLRAAWRPDGEVCVVRAVARQREVLLTEQASWVQRMQKALVQMNIQLTEVLTDVMGGTGQAIIRAIVAGERDAKVLARHRHSRVKASAEEITKALTGNWREEHLFVLRQALAMYDDIAQHLAECDTKLHALLGELGQRKVDLGKAPRAGSKLRVEFDARQTMANWAGVDLTRINGLGAAAVMKILSEIGPDLGRFANVKHFCSWLGLCPGTKISGGKVLSAKTKRSANRVRQALKMAAMSLSHSGSALGAFYRRLCARMDKPRANTATAHKLARMVYFMLTRGEAFVDQGQQRYEEQQRERSIVALKRRAAALGFQITQTPAVA

SEQ ID NO: 196022 - protein, 317 aa, unidentified
MDVETKTDCFVGIDVSKARVDVHVRPDGIAFGCATDPEGLGALGARLKPLLPCLVVLEASGGYEGAVAAALVEAGLPVAIVNPRQVRKFAGAIGRLAKTDAIDAAVIAHFAQAVRPPARPLPDDLSVRLAELMARRRQLVVMINAEKQRLAKARDPIAQSSFKAVLKRLQAERARIDKAIDRLIEVSPLWCAKQDLLKSVPGIGDVVARTLIAELPELGRVDRHQIAALAGVAPINRDSGRYRGKRKIQGGRVEVRAPLYMACLVAIQHNPVLKSFYRRLREAGKPARLALVAAMRKLLILLNAILRDQRPWAHAQT

SEQ ID NO: 196023 - protein, 392 aa, unidentified
MDNKVWVGIDAGKALHWAHVLDASGQQILSRRVENDEVDLLKLIDEVLALSEEPVWAVDQPGGSAALLLALLWERNQQVLYFPGLAVDRARDAYPGESKTDARDAYIIAEQARMRSNLAQIVPGEGALADLQLLLARRRDLVADRTRSINRLRDVLLSLFPALERALDLNAKGALILVRHYQSPSAIRRVGHRRLATFLKNRSVKGAEDIAHKAITAAKAQSVSLPAENVAATICSELAEETLAVKESIDNLDRELRRRFFARPEARILASLPGIGPILGAEFLVSVGDLSAFESADRLAAYAGLVPAAFDSGKRVGNHRRMRGGNKVLKRVFYQSAFASLRSSPHSRAFYDRKRAEGKKHTQALIALARRRVNVLWAMLRDGTTFEARPAA

SEQ ID NO: 196024 - protein, 326 aa, unidentified
MAKRITICAGIDTGKSKLDVALEGSSEQLQVENTAQGHKVLLAWLRRHKVKRVGIEASGGYEQPVVAELRRQRFVVVVFQPAQVRAYAKFHLQRAKNDKIDAALIAACTAAVKVEKIHPAPDPRLSPFAERLTMIDQIGEDVARLKNRLETCRNPRLRTLWKEDISRLSKRKRTELKAVVAAIRRHPDLAARLDLIESVSGAGLPTAVAILVRMPEIGQLPREQAAALAGLAPYDDDSGDQVGVRHIEGGRERLRRALYAAALAASFRWNPQLIALYKRLIAAGKGHKRALIACARKLLIFINTVVARGTPWQDKPPVVAASPSAV

SEQ ID NO: 196025 - protein, 418 aa, unidentified
MEVMYARCAGLDVHKETVVACVRIVEGGEVSRSVRTFATTTASLIELGEWLEVNGCTHVAMEATGVYWKPVWQVLADSSFELVLANAAQVKNVPGRKTDVNDAAWLSELLAHGLVRASFVPEPAIQELRGLLRTRKQLVREKASHVQRLQKTLEEANIKLETVLSDVMGRSGRAMIQALIDGETDPAKLAALAHWKVRASAATLREALHGRIKRHHRFLLRLHLQQVDALDAAIAEIDREADAGLACFRDAVKQLSTIPGVSELSAQVILSEIGTDMGRFASAAHLRSWAGLCRATTKVPASAGRLACAGESPGSRPCSFNALGLPRAPKLPTYTRNLCDCAVDAGRRKRSALLLPPSSRPPITCSKTARSMKISEPFTSIVGGPRRKRAASSNASPNSAFPSNSSPWPPSHEQSVSL

SEQ ID NO: 196026 - protein, 487 aa, unidentified
MRPRTTNSSTQTFDVCRFSFESAGALAFVNEYSGFAVQPAHYIAFAERKLARPGSPIYHCRRCSVKPLSERPFTAHVGIDWADAKHDVCLQAADSEQREFDRFAHQVGSIDQWAKSLHQRFGGPIAVALELAKGPIVYALQKYDFFVLFPINPATLAKYREAFKPSGAKDDPTDAELALDLLLRHPERFAPLKPQSVAMRTLLSLIEQRRELVDDKTRVTNRLGNALKQYYPQALDWFEQRDTILFCDFLSRWPTLSAVKRARKAGLQAFFYAHNGRRPKLIDDRIDSIRAATPLTDDMGVIAPYRLQVQVLVEQLRVTLQAIDRFDRQIAVVAATLPDYALFSPLPGAGPHLAPRLLAAFGEQRERFMSADELQKYSGIAPVTERSGKKRWVHWRWQCPTFVRQTFVEWAGQTINKSFWAGVYYRQQRDKGSSHQAAVRALAFKWIRILYRCWQAGTPYNESTYLNALRQRGSPLLKRFHPTAQNA

SEQ ID NO: 196027 - protein, 374 aa, unidentified
MSNHSEAFVAFDTSKLHHAVAIAEAGRSGEIRFLGEIDTTAAATAKLVRKLAVRYEQLTFCYEAGPTGYGLYRLIKGLGHECIVIAPSLIPKKPGDRVKTNRRDALSLVKLLRAGELTAVWVSDERHEAMRDLSRARGAAVEDLRSKRQQVSSFLLRQGLHYPGKRTWTKTHMRWLASQKLEYPERRIAFEEMLLAVRQAQERIERLEQAIRSAVPDWSLAEVVTALMAMRGFDLIAATTFLAEIGDLSRFQTPRELMAYLGLVPSEDSTGDAVRRGPITKTGNRRARRMLVECSWSYQHSPRVGKEKLEKVAAAPLAVREIAWKAQCRLSARYRALVRKGKPKTVAVTAVARELAGFIWAVSREVTAVRAAAA

SEQ ID NO: 196028 - protein, 357 aa, unidentified
MMEGITGTTAITIGLDVSDRFTEAYAIDANGEFVASWRMPTKAAALREQLSRYPGARVVLEVGCHSPWISRQLKEDGFEVIVANPRRVRLIAESDAKSDRMDAEQLARLGRIDPGLLSPIVHRGEQAQRDRVLLLARDGLVRSRTLLINQARGFAKSLGARLPSSTSDAFAKRVRESVGEDLFPGLEAILRMVEQLTQEIHSIDRQVERLCEDRYPVTEQLQQPSGVGALTALAFVLTIEDPNRFAKSRHVGPYIGLRPRRRDSGDRRPQLPITKAGDRMMRRLLVSAAHYILGPFGPDTDLRRFGLRIAERGGKAAKKRAAVAVARKLAVLLHRLWVTGEAYQALGYGRSEDGKAA

SEQ ID NO: 196029 - protein, 355 aa, unidentified
MSLEKYIGMDVHAATISAAVKNAEGKLLMECVLETKAATILEFIQGLRGTLALTFEEGTLATWLHDLLKPHVSRLVVCDPRKNTLMRDGNQNDRVDARNLAELLRTNQVHPVYHGKHGTRALKELGRSYLTLTKDSTRVMNRIKSVYRSWAIPCAGTSVYSRRHRAEWLAKLEEPGVRIRAEHLYEQLDCLQPVRQAARHELLRDSRKHEAVKLLRQIPAIGPIRSALLVALLQTPHRFRTKRQLWAYSGFAVQTYDSGEYRFVRGKLQRNRERITVRGLNHNHNHDLKNLLKGVAISAIERRGPLQDFYAALVDKGMRPSMARLTLARKIAAITLTMWKKGVSFDPKQLQRQAA

SEQ ID NO: 196030 - protein, 339 aa, unidentified
MYNFISIDVAKSTLQVYIPIKDENISIQNDKKTIASLYSNLKKYYKKEYKNLVFIFEPTGPYSNILKHFCANKNIFCFIVNPRQSSNFAKALNNRSKTDIIDAKMLYEFRIMAKKEDIRVPVIDNLQENLGEMLSFYKLLQKQRLAFSGHLESLESKDGNQFIIKQIKKDIKSLKNQENQLIEQMKELIHSKEELAQKFNYIKTIKGLGDLSGIVLIHLFISYPNANRQQITALSGLDSIEHSSGTSIQRKSRISKKGSSIYRSILFMPVLCAIRSNPYMKAFYDRLKENGKHSTLAQIAVMKKLVLIAHSLYKNNLEFDSSLYEKRVSWNEEKTENIA

SEQ ID NO: 196031 - protein, 343 aa, unidentified
MQTISTIGLDIAKSVFQVHGVDAAGQVAVRRQLKRRHVLAFFQKLPPCLVGIEACASSHYWSRELQALGHTVRLMPPAYVKPYVKRQKNDSADAEAICEAVTRPNMRFVPTKTVEQQSCLVLHRTRHLFIRQQTSVINSIRAHLAEFGIVAPVGRRGVEQLLEIVADANDVRVPEVARACIAALGVQLRALKAQILELDRRILAWHRSNEVSRRLDHIPGIGPALATALVASIADPKVFRSGRDFSAWIGLVPKQNSSGGKDKLGNISKQGDRYLRSLFTTGALAVIRYAKIHGTKHRPWLAALLARRPTKVAAIALANKIARIAWVLMTRGERYKQPAALKV

SEQ ID NO: 196032 - protein, 398 aa, unidentified
MTESSDCESVLVFIGVDVGKDTHHAVAINRSGKRLFDKALPNDENKLRSLISDLKQHGQILLVVDQPATIGALPVAVARSEGVLVGYLPGLAMRRIADLHAGEAKTDARNAAIIAEAARTLPHALRTLKLADEQIAELSMLCGFDDDLAAQTTQASNRIRGLLTQIHPAPERVLGPRLEHPAVLDLLQRYPSPEKLASLGEKKLAAQLCKLAPRLGKRLAADIAQALAEQTVVVPGTNAAAVVLPRLALQLITLRKQRDEVALEVEQRVLAHPLYPVLTSMPGVGVRTAARLLTEVACRAFASAAHLAAYAGLAPVTRRSGSSIRGEHPSRRGNKALKRALFLSAFTALRDPLSRAYYTRKMSQGKRHNQALIALARRRCDVLFAMMRDGTFYTPQGS

SEQ ID NO: 196033 - protein, 446 aa, unidentified
MTKSKLEVMNPDAAGIDVGSAVHYVCIPERRDEQRVQKFGCFTEDLHNLARWLKKCKVTTVAMESTGVYWIPLFQILKSYGFEVKLVNARHVKNVPGRKSDVQDCQWLQQLHSYGLLQGSFRPDSQICVLRSYVRQRKNLTESASTHVLRMQKALIQMNIQLHRVIRDITGVTGMKIIKAIIKGERDSGKLAQFRDARIKNDQSTIAKALAGDYREEHVFTLKQEFELYNIYQEKIAECDRNIEVYYKTFETKSNESKQLSKEKNKHRKSKPDFALHEELHRITGMDFTKVPGLDILSIQTIISETGINHNKWSTEKHFSSWLGLSPANKITGEKVFSTRTRKVINRAANAFRMAANSVGNSKSSLGAYYRRLKKRLGAPKAITATARKIACIFYSMLKYGQEYVEKGMEYYETRYKERAVKNLIKKAREFGYTLVQQEELVKEVS

SEQ ID NO: 196034 - protein, 314 aa, unidentified
MKALKTNVAGVDVHKDMLAITIMIGAGDEDAVVEHLECSTMTDDLRACGIILKEKGVVDVAMESTGVYWKPVYNVWEPLGLKVIIGNATHMKNVPGRKTDMNDSHWIAQLHRFGLIRPSFVPDGVYQRLRLLSRHRTNLVEDLSRVKNRVEKVLQDGNVKWSSVVSDTFGVAGVQVLDLISEGVTNAQTLAASVRTKIKKKGEVEKALTNCLTNEHIFVIQKLMLQYRHIQSQLLDVENELTEKTLPYAHLIEELDKIPGIDKILAMAIITEATADMSSFPDERRFAAWAGVASGNNESAGKKKDQNADTVIRT

SEQ ID NO: 196035 - protein, 397 aa, unidentified
MPTTNEVRVSVDIGYRQHSVAVGLSSGQLIDEFDIQHDLDGFNQFFHHIESIRSRHGGPVSVAMEGFNGFARPLDRLVQERGYRLLNINNLKLARFKEIFPAAAKTDRIDARKGLELMQLGDVLPVARKVLQPVFTIPRVNDQLKRLTRRRRTLVEERGRVLSRLQTDLQAVCPGLLDITGRAENLWFLNFISCVDDLRKLARLRQSTLLKIPAVGSCYAAKIQAWQRETIFSHEADWVGPMILEDAQRILELGQAVKALDLQCATLMTQSNIAQRIDSIPGFALVCSSELAGEIGVVDRFSREASLALYLGMATLDNSSGTKKGSKSPRHVNRRAKMAMMTGVDKHRKQVAESQRYYEKKRLEGKSHNQAIRALGRHLCRVIFNMLRNNRDYDRRD

SEQ ID NO: 196036 - protein, 484 aa, unidentified
MKAAVTVPTPRHAANKPLSEAGPIRPAKELPVINPHAAGIDVGATQHYVCVPADAVAAGESVVRNFGAFTGELDQVVEWLQACQVSTVAMESTGVYWIPLFQKLEAAGLSVVLVNARHLKQVPGRKTDVKDCQWIQRLHSYGLLSGSFRPSQVICRLRTLLRHRGNLVEACSQQVLHMQRSLDQMNVHLHHVVSDLDGDTGLRIVEAILGGQRDPKELVKLRDPRVRKSTVAQMEAALVGDWREEHLWVLQQALEAYRFFHGQMAALDQQVEALLPQIVTAPPAPPESERPQNPQAAPGAQRPRKKKKKAGNAPNIDFTEELTRICGVDLTQVVGFNLLSVLILISEIGVDMSKWRNAKAFSSWLGLCPGNKISGGKVLSSRTARVSNRAAALLRTLATSVGRSETWLGSYHRRMKSRMGPGAATTATARKLACLLYHLLKYREAYVEVDRGVYEARIQRCRIAKLKKLALELGYELTENKQPA

SEQ ID NO: 196037 - protein, 349 aa, unidentified
MPVMIGVDPHKASHTAAALDEHGQLLDQQRIPATLDGYRQLRQWAGRWPQRCWAVEGAHGIGRALAQRLVGDGEQVLEVPAKLAARVRVLSVGHGRKSDPDDAVSVAVAARHAPSLRQISVEDQATVLHLLTKRREDLVAARTQTINRLHRLLMDLIPGGARRNLTAKRAAALLAAVRPTGAPAVTRWELASELVADVRGLEQRIAVVEARIKAAVAQVNTSLLGLFGVGPVLAATFMGEVGDIGRFPTKHHFAAHTGTAPLEASSGQVIRHRLSRAGDRKLNHALYMMAMVQVRRPSPGQAYYQRKRAEGKSAKEALRCLKRRLSDAVYRCLLADQHLQPRPVGRRPV

SEQ ID NO: 196038 - protein, 400 aa, unidentified
MMTPDDIDVWVGLDVGKSAHHAHALDHDGNTLYDKPLKQDEKAIRTMLGKLSKHGRVLLVVDQPNTIGSLPLTVARNMGIAVAYLPGGAMRRTAQLLPGDAKTDRRDAHVIAWAALKLPETLRDAGPDDETLAALKLLAGHDEDLAHESARHVNRLRSLLLQTHPAFERALKGERITRDATLALLERYGGPMGVKRAGIEDVKDWAKSNGLRAGRIIDDMFKAIGEQTVTVPGTLMAETIIPSIAHDIKTIRDRRREVGRQVEKLLEDHPLLTVLTSMPGIGVRTASNILLGIGGDIANFKSSAHLAAYAGISPVTGQSGTSIKGERPSRRGNKRLKNALWQTAFVASTKHPPSVAYYKRKREQGKHHNAAIICLARRRCDVIYSMLKNGTLYQEPALVA

SEQ ID NO: 196039 - protein, 408 aa, unidentified
MNTLYVGIDVSSKSNVVYLMLPNGDKHSNFSVANSHEGSTQLVKRILSALTSHSLDTVLIGLEATSVYGDNLVYFLREDATLAPFNRKIHVLNPKQVKKFHDAYNDLPKNDYVDSFVIADCLRFGRINKEVYLGDYRYKALQNLTRARFFAVQNLIKEKQRFMNVLFKKYSTMTQEKVFSDTFSTTALAVYDEFDSAEALANMDLHELTDFIIEKGKNRFPDPDAVAKAIQKAARSSYRLPKTVNDSVNQVLSISITSMKALESQIKEFDKAIKAQMELLPNVLISIPGIGPVYSAGIMAEIGDINRFDNQAALAKYAGLAWKQHQSGSFEAEVTRLIPSGNRFLKYYLYEAAFSLVRCDKEYSDFYHLKYKEVNRCQHKRALALTARKFVRLVFRLLKDNRLYCPAK

SEQ ID NO: 196040 - protein, 412 aa, unidentified
MEVLHSRCCGLDVHKKSISACVMIREHGRLEKLERRFGTFTGELEDMAAWLAEHKVTHVVMEATGVYWRPVWNVLEGRFDLMLVNPQHIKALTGKKCDRRDASHLTELLQHGLLQGSFIPSAAIRHLRDLTRNRARTVQEAARIKSRVQKVLEEANVKLGSVATDVLGVSGRLMLNGLVAGKQDPEELADLAVGVLRKKRDQLVQALSGKVGDHHRLMLGKLLRALKTREVEIAEDETDIRTRIEPFRKAVLAWMQLPGIDEVTAWSLVAEMGADMAPFDTAEQAASWACVCPGNHESASKQGDGRTRKGNPWLRSTICEAAWGASRTKKSYFHAQYIRTCARRGPKRALMAVAHSMIVVGFYLIKHDLKFNDLGADFFDRRNREQATRRAVKRLNALGYSVHLEQAASAPA

SEQ ID NO: 196041 - protein, 413 aa, unidentified
MEQGLITAVGVDVSKGKSMVAVRRPGGQIVMLPIQVNHTAEELAGLAERLQGLGGDIRIIMEHTGMYWRPIAHSLKEAGFFVSVVNAILIHNFSDNSLRKVKTDKADALKIANYGLTFWTELRNFSDEDETRQMLKMQCRLYERTQKTSVELRNGLISLLDQTFPGINEILPAHYCTKRGHYKWVDVSKRFWHKDCVKKLSESAFTNTYQKWCKKEGYRFSRIEAEKIYSAAQNTVATFPQNESTKTLIVQAVDCLNAVYESMAVLRTEMKRLASLLPEYEVVMAMQGAGDVTGPKLMAEIGDVRRFTNKNALVAFAGVDAPPFQSGSFEAKSRHVSKRGSPHLRRTLFQVMSVVLQRSSTDNPIYSFMDKKRAEGKHFYVYTVAGAAKFLRVYYVRVKEYLLALETKQETAA

SEQ ID NO: 196042 - protein, 368 aa, unidentified
MEHDITGYVGLDVHKDSIAVAVAAPGRAAPRFVGTTGPRLSELTKALSHLGTPAELHLAYEAGPCGYTLARELIERGYRCEVIAVAKTPKKPGERIKTDRRDALMLARYLRAGELTAVTIPDARDEALRDLSRAREDAVRARLKARQQLKALQLRHGHRYTGKTSWNAAHERYLGQISFAHPAQNIAYAEYREAVHEANARVERLVQALREQAEGWRFAPVVRALMTLKGIDFVAAVTLVAELGELARFAHPKELMSYLGLVPSEYSTGESRVQGKITKAGNGHARRVLIESAWSYRYSPRMSRERVVRCEGQPKAVRELAWKAQLRLCSRYRKLSARGLHKNKVCVAIARELAAFVWDVARQVHIER

SEQ ID NO: 196043 - protein, 345 aa, unidentified
MKHFAGLDVSLDETTVCVVDEEGRIAKEARVPSEPEALVTFFQGLGLAVERIGLEACSLAAWLHEGLAAAGLPVVCIETRRAKAAMGAMPNKTDRNDARGLAQIVRTGWYRAVHVKSPACRSWRALLAARRLVLNKLRDVENGLRALLREAGLKLGTPARKEFAARVRELVGADPVLSASAEPLLAIVAAMVGELARLTRRVLEIARAEPVCRRLMGVPGVGPLTALAFRATIDRPDRFRRSRDVGAHLGLTPKRYQSGETDIQGGISRCGDELARTALHEAAHSLLVRSRKWSALRAWGVQVAKRRGMARARVAVARKLACVLHRMWADGSEFRWGKQDAASAA

SEQ ID NO: 196044 - protein, 375 aa, unidentified
MTTIARLGIDTSKSLFQLHGVNAREQAVLRKQVRRGQFLSFIAKLGPTEIGLEACGASHHWARQLQALGHVVVLLPPQHVKPYVGLNKNDKIDAAAICEAMSRPKIRQRFVAVKSAEQSAAQMLLGTRDGLLRRRTQLSNTIRGHAAEFGLVTPKGLAHIEPLLERIAADQTVPALARELFATLGQEFTDLAPRIAQLDKKLKAFQRSNEMCRRLVEVPTIGPVIASSMVVKISDPAAFQSGRRLAAWLGLTPKDHSTAGKMRHGGITRAGDEGLRAALVSGATAYIQQVKRGRTRPSPWLAQLLKRKPEKLAAVALANKTARIAWKLMISGQRYDRAPTEAREGLGAAQHGGCAPSPSLQPHSAHHGASAMTAA

SEQ ID NO: 196045 - protein, 366 aa, unidentified
MIVIGADTHKATHALVAVDAGTGRIRGDREIKAEEPGHLAAVRWARELDDDRAWAIEDCRHVSRRFEQALLAAGERVVRVPPHRMGASRKGEREPGKSDEIDALAVARAVVKDGVECFPVAYLNDQAMEIRLLFDHRADLVAERTRIVNRLRWHLLELSPELERSCKRGSLSKSRVLDRVERGLRKLPAGARVRVAREQVRELRRLSREIDALHCELGALVRAHRPQLLAELGCGALTAAILIGRTAGNERFRSEASFALQSGTAPIPCSSGQRIQHRLNRGGDRHLNHALHIIAITRAQRDPATKEYLDRKEAEGKTPKGALRALKRHLARHFHRLLAEPAADQQRAAVDPNSNGVAPSPKVCIT

SEQ ID NO: 196046 - protein, 323 aa, unidentified
MSDPVFLGIDIAKQKFDAALLMGGKLKHKSCKNSTEGFELLSQWLRKQRLDRLHACLEATGNYGDELAFYLHEAGHTVSIVNPARIKGFAQSELLRSKNDKMDAGLIVRFCLAMHPEPWAPPAPEIRALQALVRRADALVTMRTQELNRLGTAPVTVEPSIREHIAYLDEQIEKIKQQIDGHIDDNPELKSKKDLLHSIPGIGPATIAAILSEISIFERFDQVRKVVAFIGLAPKEALSGSSIKGKPRLCKIGHARLRKALYMPALVSIRYNPMMIGFYKRLRSKGKNGKVIVCAVMRKLVHIIFGILKSGKPFDPYYKPHFA

SEQ ID NO: 196047 - protein, 306 aa, unidentified
MLDVHKSQITACVRVPDGAGGRRQEIREFAATTLGLLTLADWLRSYAVTVVGMESTGVYWRAVFYLLEDEFECRLFNARHLRHVPGRKSDVQDAEWGCQLIEHGLVRASFVPPRPLRELRDLVRYRKAKIQERTREVQRVEKTLQDAGIKLSSVASKVLGVSARRMLDALISGTHDPDVLAELAKGALRKKIPALREALQGRFTGHHALLVGQMLAQIDFLDETIATLSQHVEELTRPFSRELELLDTIPGIDKRAAEMLLAEVGPDMSRFPTEHHLASWGGLCPGQRESGGKHHSAKTRTGSKET

SEQ ID NO: 196048 - protein, 421 aa, unidentified
MRGFGLDVHRDFCEVAIAEEGGVRSAGRIATRMPALELFAQSLGVGDVVAVEATTGTDKIVSVLQAHGIRVVVANTRKLKSISEAKAKTDRLDARTLARLLVSGLLDEVWTPDDRTRTLRRLTYRRERVVRARTRAKNEAHGVLARNLCERPPVTDAFGKGGRRWLAELELPIDEQLTLDGCLRQIDFLEREVEVLDREIAKQALAWPQLLRLTTVPGVNLQTAAAFMASVGDVARFSSPGKLVSYLGLDPRVRQSGSAPAHHGRISKAGASEARHMLGEAAWKVTLTPGPLRAFFERVRARRGTQVAATATARKLVVLFWHLLTREEDYAFARPAMTRNKIRRLELLTGAPPQKGRKGIAGGKSKAVFEAERELSRQAEAAYRRLVTDWRSSGRPKAGAGRDIGARISKPSRGKAARQTP

SEQ ID NO: 196049 - protein, 387 aa, unidentified
MSQASDLTRCFAPYDQATTLIAVIELSLSSWLIAGMVPGLARQPLKKMAPDEAGLLRLLERWREEAVTAGSAINRVSVAFEAGRDGFWLARWLRTRGIDAHVIHSSSVAVSREHRRAKTDRLDTALLMRVFIGWLRGERGHCSMVAVPSIEEEDAKRPNRERENLVGERTRIINRMKSALARLGIRGFKPELRKAPQRLDTLSTPEGMPIPINTLDEFRRDLVRLALVREQIDAIERTRIAQLEAAPKTGPHAMVRLLAKILGLGIETADMLVNEVLSRNLRDRRAVARYAGLTGSPDESGKKRRERGLAKAGNARVRRGLVQLAWRFLLFQKESALVLWFRARTESAAGVRKTKLIVALARKLLIALWRMVTTGEVPAGVVLRPST

SEQ ID NO: 196050 - protein, 362 aa, unidentified
MTKAMSLVGLDVHARQTHAAVLTPDTGELAVSKLRMEPAGVVGFLEGLGSDVRAVYEAGPTGFGLARTAREHGVDVRVIAPGSIPKGSGDRVKTDRRDAIRLARLLAAGELSFVFVPTVEDEYFRDLVRAIEDVRGDLMRARHRLGKLLLRHGERYPGPGANWTVKHMKWLGSVSFPDVCSQATFLDYLASVQLLMGRRATLIGTLEGQIAESSHAPVIARLRCFRGVDTLTAAGLCAEIGSFSRFPKPTLLSGFLGVVPSERTSDTRRRQGSITKAGPPHARRLLVEAAHHYRHQPIIGETLARRQAGQDPRIIEITWRAQQRLHQRWQHLHHQRHKPASVVAIACARELAAFLWEAATLD

SEQ ID NO: 196051 - protein, 343 aa, unidentified
MKKNLFFIGLDIAEADFAASIYQTPDKPIVTKEAIPNDRKGFEMLLLWLNDYHLDKKNCRICMEATGVYSQAIAYYLLFQGFPVSVEPPLKVKRAFDPVGHKTDPVDSKQIAEYAYRFQDELTSWKPKDEILEKIRQLLSIREQFSKQKVALDNSLQAYSRQRVQVALIKKAQKETLNQLKKQIARIDKELANLIKQDPQISQRANNLDSIPGCRMLLAAHLLVITENFTKIQNSKQLAAFIGIVPYQHQSGTSVYKRAKIRHFGPGPSRKLLRLAAQSVATYNVIFRRYYLRKLAQGKAKALVLNNIANKLLKIACTIIRNNTRYIKDYRSIHPMYLENAVS

SEQ ID NO: 196052 - protein, 348 aa, unidentified
MDHIIRIGMDTSKHVFQLHGVNAAEEPVLRRKLRRNDMVVFFERLAPTIIAIEAAGASHHWARLLRSFGHEVKLIAPQLVKPYVKRGKNDAADAEALCEAMSRPTMRFVPVKSAERQAALMLLGLRDRLVRNRTQLANAIRGYAAEFGLAAAKGIAHLAPLLARIQSDESLPGLARELFAAHAQEYAQLQAQIDEVEGKLMAWHKTNPGSRRLAQIPGIGPIGAAMLIMKTPAPEMFRSGRQFAAWIGLTPKDHSTAGKVRLGVITRAGDEGLRSALVVGATAVIRHLRNGKGRSMLSAWVEQLLKRKPPKLAAVALANKLARIAWKLMVTGETYTAKPRPVASAGIA

SEQ ID NO: 196053 - protein, 372 aa, unidentified
MQQDSAAFVGLDTSKMTISVALAEDGRHGEVRFLGDIDHTPEAVRRLVTKLASKYARLLFCYEAGPTGYGLQRQISALGHDCAVIAPSLIPKRPGERVKTNRRDALTLARLHRAGELTAIWVPDPGHEAVRELVRAREAAMADLRTKRQHLQSFLLRHGRIYSGSRPWTQVHARWLSNLSFEHPAQYLVLREYRQAIDDAETRLERLTQHVAEVVSSWSMAPVVEAYQALRGVAFLTAVTFVAEIGDVRRFETPRQLMAYLGLVPSERSTGAQVWRGSITKAGNPRARRVLIEGAWTYRYPARLSRTLQVRQESLPTVVRAIAWKAQLRLCARYRRLMAAGKRQTVVTTAIAREMAAFLWAIGHAVEPRPAA

SEQ ID NO: 196054 - protein, 318 aa, unidentified
MTNTSSPFVGIDVGQARLDAAVGKAGEEWAANNDATGIQKTVERLTQLQPALIVIESTGGLEIPLMLELSKAGLPFALVHPGRVRDFARSLGRLAKTDRLDARLLAHFAEAIQPPLTQLPSEEVQRLNALMQRRRQLLDILVAEKNHLLSTPLFQRAGVEEHLTWLEEKLAQLDQDIQDQIGRTPEFKEKEAVLRSAKGVGPVLCAKLLSGLPELGQLSRKEIAALVGVAPFNDDSGRHRGRRRIKGGRADIRHVLYMATVAAVRFNPLIRPFYQRLVSQGKLKKVALVACMRKFLTILNAMVRDMRPFAYTSGLFNS

SEQ ID NO: 196055 - protein, 363 aa, unidentified
MGNTIICGIDAHEKTLVTRIGVNQEPAETKRFSNTRSGREALFSYLKKLSGEYAGGKMVMAYEASTLGYGIYDESVARGIECHILAPTKMPAARKDRKKKTDERDAQRVFEIVRAYALAGNELPGIWIPDHQTRDDREVVRGRLDAAQKLTGLKCQVQTLLKRTGVVKPAEAGDSWTQRYRLWLKGLCIKPGAQIALQSLLRQIEGIEAEIKILDQAVEQLAEGERYKAVAGALVRAVKGVGLLTAMVYVTEMGDLSRFNNRKQVGSYLGLVPSSNESGEVADHKGHITREGSARVRKVLCQATWARVAHDKEEAVVYQRLVKKNPKHKKIAVVASMRRLGVLLWHIGLAAQKEAVAVKEQAA

SEQ ID NO: 196056 - protein, 455 aa, unidentified
MKQAQRIRAHLKQVNLFAAGIDIGSRSHFVAVPEELDEQPVREFAGFTGDLHRLADWLVEMGIQTVAMESTGVYWIPVYEILEARGLEVLLVDARHVKNVPGRKTDVLDCQWIQQLHTYGLLRGAFRPPEEMVALRSYLRQREGLIASASDCIRHMQKALRQMNLLLENVVSDITGVTGLAIIRAILAGERDSKQLARLRDKRCRSDERTIAGSLEGHYREEHLFALQQAVACYDFYQQQIKVCEGAIERHMREIEDDNDNDQDVPPASKPKGHNKNGFDFDVRSQLYRLTGVDLTEINGMSESNVLTIVSETGLDMNAWPSEKHFASWLGLSPGNKITGGKQLSGKTRPSPNRAAAAFRLAAYSLANSKTALGAFYRRLRNRLGAPKAITATAHKLARLFYRLLKNRTPFIDPGQDYYDQQYQERATRNLKKRAAALGYKLIPESTGGLHESMC

SEQ ID NO: 196057 - protein, 364 aa, unidentified
MTSVPATVAQHYPIVVGVDTHAKNHVYAAVASTTGEVLDVRTYPTTRGGLSKAITWIQTLAPHHQVLTSIEGALSWGTTLTHALTRAGLTVTEAPTPRRGRADAKDDHHDAIRAARNVLAQDITRLASPKMGTIHEDTRVLLSARRTLTQDKNRTILALTALIRDYDLIAKVRSKITTTQITTIASWRPTPTQTHYRARKEAHRLAQRLTQIHTELEDNKAELDALTTHMVPELTDLCGLGPVIAAKCLEAYSHHGRVRNDAAFARLAGTCPIPASSGNTTRHRLNRSGDRELNQHIHHAIVTRLRWDPNTITYMNRRLQEGKTKREIMRCLKRHLTRTIYKTLKHIDLDTRATTWTPTPHTAA

SEQ ID NO: 196058 - protein, 422 aa, unidentified
MLAKTQDEEQIIARVAALDIGKAELVCCVRVPDEDRPGRRLQEVEAYSTMTRSSLQLADRLRCLGVTRVVMEATSDYWKPVFYLLEARRFETWLVNARDVKHLPGRPKTDKLDAVWLAKVAERQMIRPSFVPPPQIRQLRDLTRYRADLVAARTAEKQRVEKLLEDAQIKLSVVVSDIFGVSGRQMLAALIDGQRDPKALAQLARGVMRRKITVLQEAFTGYFTAHHAFLLATMLARVDAIDADIAALDERIEQMAAPFTAEVRRLQQIPGISFTAACAILAEIGISMGRFPTAAHLVSWAKFAPGIKESAGKKKGKGTTGHGNRYLARVLGNAAASIARTDTFLGERYRRIARRRGSQKAVVAVGRSLLIIIWHLLNGPDACYADLGSDFYDTRIDPERRKRNHIRQLEALGYKVSLEPAA

SEQ ID NO: 196059 - protein, 427 aa, unidentified
MKKIKIDYLSTLFVGIDIGSRTNVISALNFDQDFLIRMVPVANAQGGAEQIEEMVAQVLSQHHEFKAVIIGLESTGFYGVHIANYLSTSEKLAPFSTKVYCLNPNEVRQYKKSFNSLDKNDGIDSFVIADFARVGRIHTEPWRGTQYLALQRLIRHRLHITECIAWEKVYMLNNIFLKFSEFAMLDKNEHPFSNKYDATAEAVLTDYLSTEDIVDSSVDELVTFISSKSRGRISDPKQTTYLLQKAAQDSYRLDKCLYEPLTVSIACSFNCISAFEKELRAINDAILRAVKGLNPTEYQILTSVPGIGHVYASGILAELGTIKCFESNDALAKYCGIVWKGNQSGEFEAEDTPMNKAGNRYLRYYMIEAAGSVIQHCPEYKAFYDKKFAEVRTHQHKRALALTSRKLIHMLFGLLANGKLYSVEKSR

SEQ ID NO: 196060 - protein, 384 aa, unidentified
MKADRTDTPTMQDYATVHVVFELSKSKWKLGVMITGSAKMSVFTIAGGDLAALSRRLAAAREKAARSGEKVRIVSCYEAGFDGHWLHRWLTDQGVTNYVIDASSIAVDRRARRVKTDRVDLELIMRTLLAYLRGEPRVCSMIRVPTVEEEDRKRRNRERERLLAERTAHTNRIKGLLHAHGIRDAMPLKRDFVATLNRARTGDGRKLSPRLKDEIVREHERLCLLSGQLATIEAESRAEQRAAAPGTAEAKIVQLAQLKGIGPVGGQGLVNEVFYRAFDNRRQVGSYIGLAGTPFNSGDRQRDQGISKAGNHRARRLAIELAWLWIRHQPDSQLSRWFRERVGDIRGRGRRIAIVAVARKLMVALWRYLQTGLVPNGAVLHPSL

SEQ ID NO: 196061 - protein, 415 aa, unidentified
MRVIGLDIHRSFAEVMFLEDGELIHGGRVELSHGSFSAFVRTLRSDDEAVLEATGNTIAVVRLLEPHVGRVVIANPFQVRAIAHAKIKTDKIDAAVLAQLHASGFLPEVWRADEDTLALRRQVARRNQIVRQRTRLKNQVQSVLHAYLIPRFPGADLFGKKGRGWLSTQPLPADERLAIERRLRELDRLGDDLAVIEKDLARYALQDADCRRLLTVAGINMAVAVGIKSAIGDISRFSTPQKLVSYFGLNPSVRQSGLGPAHHGRITKQGRAHARAMLVEAAWAASKAPGPLRAFFLRIRARRGHQIAAVATARKMAVLCWHLMSKQEDYAWTRPALHARKMRELELKAGFPSQKGGNKKGKAYDYNFRHVREQERRFTEQAEMAYECFVKGWQPKGPELRPMSKRTGATKERAS

SEQ ID NO: 196062 - protein, 360 aa, unidentified
MSDSSSDVPEITIGLDVGDKYCQICVLDGGGEILEEGRVRTTPLALERRFGSAPPVRIALEAGQHSPWISRLLSESGHEVFVANARKLRLIYENDRKSDRVDAQYLARLARLDPRLLSPLKHRGIQTQKDLELLKARDMLVATRTRLINHVRGAVKVYGIRVPKCSTSGFATKAGGHLPPEHRVALRPLLDVIGSLTVRIRRYDKLIEQMCKQAYPQTDLLRQVPGVGPVTALSYVLTIENPHRFRSSRSVGCYVGLTRRESRSGGHDPELRITKAGDPRLRRLLVQSAQYILGPFGPDTDLRRWGLSLASRGRKNAKKRAVVAVARKLAVLMHRLWVTAEEYEPLRQAAKAARVGVPAA

SEQ ID NO: 196063 - protein, 340 aa, unidentified
MGKVTTIGVDIAKRVFSVYWVVVQTGEIGAKTLTRAKFEQFMRTREPSRVVLEAGGSAHYWGRWLGRQGHEVRLIPAQHVRAFVRTNKTDGADARAIWEAAHRPEVKWVAVKSEASQAVLGLHRLRQQLIDMRRMQSNQLEALLYEFGVVSSSKITSAMLKDWVAAGRIPELLLASLSEQLERIARLKPEERELTGTLERHNATDALAMRLLKVPGIGTLGASALSAELAAGAKSFANARQYAACKGITPRLSGTGGKVCAGAISKRGDPYVRTLLIHGARSVIAHRRRSGTLSPWLKALLERRPLNVVAVALANKMVRTAWALAAHERTYQQNYGAQAA

SEQ ID NO: 196064 - protein, 418 aa, unidentified
MIPSRRITTGSRICFMGVDLNNDNTPNRRMVNYTAVQPNRQITFKEAAMQFIGIDLHTNRFTCCYRNGNTSEGGKDEKQTESFDISEYGLAQFYQTLTKETYVLIEATITTFWFARFMQPMVKEVIVANTYELKQISLARKNTDKIDADILCKVLKMQILSGVQVISPVTIPPVEIQDLRSLFSTYRLLKKQTTQVKNRIHSLLKEKLYGFTQEEIFSKRDRKMISSLEGDTAMSFQVIGLLDLLEYMETNIKSLEDKIMECAAPFMREIDILTSMKGIGVFTAIAIIADIIKVDRFKNSKAFTSYLRSAPAVSSSNTSVKNKGTNKKGRKLAATLLTQSLTHVLSSSQKLSNWYDRLTEGKKRGLVRTGLRRRVFAEIFQMLKKGEYHYGRVARLHEAKMLHYQRFLKKRNISFEIA

SEQ ID NO: 196065 - protein, 347 aa, unidentified
MIIIGCDLHTRFQQIAMLDTETGEVVERRLEHEDGEGKRFYQELEPPVLVGIESTGYTLWFAKMMSELGHELVVGDAAKIRASETRKQKHDRRDAWHIMELLAEGKFPRLWLPSMEEREVRVLLEHRHQLVQLRTRAKNGLQAVALNHGLRRRRQLWTAAGLRWLQSLPVGEGTKWRREDLLQLLHQLDGWVDNLDDRLLAEVERRPEAQRLMTHPGVGPLTALATVLVLGPVDRFSEVRQVTSYVGLIPAEESSGGGQRFGHLTKQGNRLLRFLLVEAGQTASRIDPGLRRTYKRLTFRKGRSIAKVAIARKLVIRLYIMLRDQIDYAEFCRRGSHAGMLGEVALA

SEQ ID NO: 196066 - protein, 363 aa, unidentified
MNFIGVDLHKNSITICVMNEKLKVLARKTLPCAQPEQIVEFFQQFRPFQVVVEATASYHWLFELLEPFAEKLVLANPKKLRIIAESTKKTDRLDAQILAEFLARDMIPQSYRPTPRQRQHRIYVRQRQHLRNRMTSVRCMIRHVLADHNADRKDLFSAGCGKAYLKQVNLGEAERLRLKQLWAEWETHQAHLEEVTKKIKAFAAKAPQREKEAREIIKTAPGVGFVTAEVVLSELGDISRFRNAKAVCAYAGLVPAVRQSGGKRSKDLSITKEGSPLLRWALVESAWRLVGSSARWAAFFSRLRERGGSKRAIVAVARKLLCVLYAMLKTSTPYKIVPTETKAPKTRRLRLVRKPSPQQTVTT

SEQ ID NO: 196067 - protein, 345 aa, unidentified
MKNTTIAIDLAKSVFEVGVSDRPGHVVANHRLSREQIVGFMANQPTTIVVMEACSSAHYWGRTFQSFGHSVKLLPPLYVRPYVQRSKTDRADVKGMLEAWRNADIRPVPVKSESQQQLTALHRIRAGWIATRTMRINSARGLLREFGIVFPLGAAALAGRVQELIEDADSSALSMPLRQLLHELVLEIGELESRVKLIHKQLEAIAVQTPVVERLLTIPGVGLLTATALVGFIGDVSRFPSGRHFAAYLGLTPSEHSSGLRRRLGRISKHGDVYLRTLLIHGARAVLVAAQRRPNPKGLHLWGLQLQRRIGNNKAAVAIANKMARIVWAVWKSGKPFQPHLQDVS

SEQ ID NO: 196068 - protein, 313 aa, unidentified
MKSRMDQLYVGIDVSKEVLEIAIFGEAGSWHIKNTAKQLTELVDQFKELEPERIVLEASGGYERLAISILGQAGLPVALVNPQRARRFGQSTGKLAKTDRIDAQMLAHFGQALRPAVHPGSSEQEEYLAALIKRRTQLMTTQTAEKNRLGTARFQVRERIVRHLEWLEAELDDIQEEIEPLLTTNQEWCQKRELMESVPGIGAVTSFTLLAYLPELGTVDRKKIAALVGVAPFSHDSGKWHGKRFVHGGRAIVRSALYMAAMSAYCYNPVIRKFYNSLILRGKPFKVAITACMRKLLVMLNAMIRDQKAWKFA

SEQ ID NO: 196069 - protein, 362 aa, unidentified
MGQSSWLVAGIVPGVERQPLKKLTTDQDALLQLLHRWRKEANEAGHVIKRITVAYEAGRDGFWLARWLRAHEIEAYVIHPSSIPVSREHRRAKTDRLDTELLKRAFLGWLRGEPKHCSMAAVPTIADEDARRPSRERENLVREVTRLVNRMKANLARLGIRGFRPHLAQAAGQLQTLQTPEGTAVPANTLAELRRDMDRLRFVKQQIKQIEAARVQRLESEPGERRHAMVYLLARVVGIGVESADMLVQEVFSRKLRDRRAVARYAGLTGAPDESGNKRRERGLAKAGNARVRRGMIQLAWTHLLHQKDSALAQWYRARTADARGRTRKIMIIALARKLLIALWRLVTTGEAPAGLLIRPAA

SEQ ID NO: 196070 - protein, 373 aa, unidentified
MSEDQDVTVGVDTHKDVHVAAVLDQTGRVLATRNFPTTMRGYAQLATWAESFGTVAKVGLEGSGSYGAGLLRFLTDYGLTVVEVDRPDRSTRRRIGKTDTIDAESAARAVLSGRATGTPKTRDAHVEMIRALRVARRGAMKARIQAGGQVESLIVSAPEPVRQLVRGLAGKKRIRVCAALRPGTVSDPATATKLALRSLARRWLALQAEIDDLDSHLAALVTAAAPYLVALPGVGIDTAGQLLVTAGDNPHRLHSERAFARLCGVAPIPASSGRTDRHRLHRGGDREANRALWRITLVRMRCHQPTKDYVTRRTAEGKTKTEIMRCLKRYIAREAFTHLAPRPTEQAPWPGATTDGRRVHRHDRDTANTSRRR

SEQ ID NO: 196071 - protein, 376 aa, unidentified
MQATPRQGYEVGTVLYMAMELSNRSWKLGFSNGQKMRHKTIDARDRERLVAEVALAKRQLGLAPAARVVVCFEAGRDGHWIYRWLGAQGYEVLEIDSSSIEQARGRKHVKTDRVDVEKLLDLLLRYCLGFRKAFAVVRVPSAAAEADQRLHREDEYLLRQRTRVRNRIKSLLVTQGIVEVPLKRGFETWLEQVQSWDGSGLSGALKVELRRLYAQYELMDGQLAEVAQAYAQELLSDTAVADQRRRLEQLRSIGPKTSRILSAEVFSWRQFRNGKQLGGMSGLTPTPSQSGDVQREQGISKAGNRRVRWVMIELAWMWLRWQPDSVLSQWYQRRFAHGGKRLRRIGIVAVARKLLIALWRYLEYGVIPEGAVFKAE

SEQ ID NO: 196072 - protein, 315 aa, unidentified
MDEITSTLRFVGIDVGKAFIDIFVHPSGEAFRLERDPAGLDDLVARLKPLAPTLIVLEATGGFERLVTAALYGAGLPVAVVNPRQIRDFARAMGRLAKTDRVDPRVIAHFAAAIRPEQRPPPDAEASRFAELVARRRQLVDMISAEKMRSHQARQASVRRRLAAHLTWLNKELRESDAELDTAVRASPAWRERAELLLSVPGVGDVTARTLIAELPELGQLDRRRIAALAGLAPVAHDSGQHRGARHIRGGRGTVRTALFMAANSARQWNPVLKQTYQRLMAAGKLHKVALVACMRKLLTMLNAMVRSNTPWRPA

SEQ ID NO: 196073 - protein, 427 aa, unidentified
MSYRIAAVDVHKKMLAVVVTDVEGKGEFQFERRKFGATPGELHVLAQWLDQQEVEEVVMESTAQYWRPVWGTLEQYWRPARQQREGAGQMSGTLHLCQAKSNHGPRGRKNDFLDGERMVKRLVAQELVLSFVPDPEQRLLRTVTRRKHQLTRAKVGFKNQLESLLEQGHIKLSSFVSDLLGVSARRMLKALAEGESDPAVLAAMADRGLHATPEQLRDALGASSHLSGAFRRLLKLSLEELQLIEAHIEQLGREAMELLKGHEDVVQRVAEVPGFGPDCAVQMIAEVGLEAAKFLTAKNLSSWVGVCPGNEESAGESQSTRSPKGNRQMRRLLNQAAQSAVKVKGSIFEVTFHRLLPRLGYQQAIWAIAHRLCRLLWLILHKGVRYQERGPAVSAKSKRTRAARMIRELKKLGYRVEGGPLPAVARA

SEQ ID NO: 196074 - protein, 365 aa, unidentified
MEECSTYVGIDVHGKELVVCRLSVDTGELEEARFPHDGRGIRRLVKWSLKGVSGRVKACYEAGQWGFELQRKLVEEGLETVVVAPSRVPRQPGPGVKTDRVDARKLARLLSLGELVEVTPPTVEEEAAREVVRSREDARKALHAAQQQLVKMLVRWGYQWQERGKRWTQKYWAWVKGIRLPEEWAQRVLEECCLRVEQRQEELARADRLVEELGESEPFRGAVQRLRCYRGIDTLTAVGLVTELYQVVRFGSARQAMSFVGVVPRESSSGERQRRGGITKTGNQLVRRLLVEAARHASERPTVSQALARRRAGQSGEVIARADRAQTRLHRKYWRLVRRGKLAHVAVVAVARELMGFVWAELGAA

SEQ ID NO: 196075 - protein, 409 aa, unidentified
METMYHRCAGLDVHKKSVEVAVRILDNQGRLQTQTRHFGTYTRNLLEMADWLAEQGVTHVAMESTGVFWKPIYNILEGRFSVLLVNARHVKNVPGRKTDSKDCQWLAQLLQCGLLTGSFVPGRDLRQLRDLTRHRAQLVAEKNRVINRIHKVLEDANIKLGSVATDIVGVSGRAMICAIIQGENNPERLAGNARRRLKNKTEELKLALEGHVNDHHRFMLKLLWEQLLSVESLIQQLEDKIASQMGPFQQAVELIDEVPGIDRRVAHTIIAEMGIDMGQFPTDRHLASWAGMCPGNNESAGKRKSGKTTKGSRWLRQALVQAAWAASHVQDSYLAAQYSRVVKKRGKKRALVAVGHSILVIIYQMLKKKVHYQDLGSNYFDMRNHIHLTKYLVKRLEGLGHKVTLECAA

SEQ ID NO: 196076 - protein, 335 aa, unidentified
MEFEFFIGIDVSKNELDFSIQQGRCFLFHREIINEPEAIKCLIKEISKLDGFYLGNAVFCMEHTGIYSNHLLSCLYEQKANICLESATQIKKSLGNLRGKNDKVDSMRIAAYGYKNRDELRLWAPRREKVQQLAHLSSTRSRLIKAKKMLKTPLKEYGSFVKRKASKQNTDACSQAIRGIDSSLENVEKAIMVIITADPELKRLFTLVTSVVGIGKVTAVQLLITTNEFKDINNARSYACYAGLVPYLQESGVFKGKGRLSHMANKKVKTLFHMAALVAIQHNDELKRYYQRKVNIEKKNKMSVINAVRNKLVQRIFSCVNQNRKYQKNYLQLLA

SEQ ID NO: 196077 - protein, 392 aa, unidentified
MYIVGIDIGKNHHEASIVSPEGKQIGRSLRFATTHKGADSLMSFIFKNIGNSPCVFGMEATGHYWYPIYSFLKAKGYTIYVINPIQSDSLRKMYIRQTKNDSIDSFLIAEVIRFGQFGTTSMADENILAMRQLCRYHDSVISSRTEIKLRIGTIMEQIFPEYEKQFSSLWVSTSMGILEKYLTPENIENAPIDELFEIIKDKSHNRLTKAKAISIKEAAADTFGIKIAQDAFSFQLKQLIDRMNFLDKQIEALDIEIMKYYEQFDCYLHTIPGIGIIGAATILAEIGDISRFKNSSALVAFAGIDPTVRQSGEFNSTHNHMSKRGSPYLRHAIFLAATTCSFHNSPLNAYYKKKRDQGKHHLTATGAVARKLTTIIYAVLRDSKPYEPKKFC

SEQ ID NO: 196078 - protein, 341 aa, unidentified
MQITTIGLDIAKNVFQVHGIDAAEKVVVRKQLRRGQVLKFFAALPPCLVGMEACATAHHWARELTKLGHEVRLMPAKDVKAYVKRKKNDAADAEAICEAVRRPTMRFVRAKSAEQQGRLMQHRARDLLLRQQTQVINALRAHLAELGIVAAKGREGLKELLTIIADESDERLPIDARASLIVLAAQLQALHTMISSIERRLTVQHRASEESKRVATVPGIGTLGASAITATVTDASAFRSGRDFAAWIGLVPRQDSTGGKPKLGPISKQGDRYLRRILVIGAHSVLRRAKQNPEKYPWLTQLLARRPFKVVAIALANKMARVAWALLASGGRYRAPRLAAA

SEQ ID NO: 196079 - protein, 392 aa, unidentified
MVVSVGIDVSKDKHDCFIVSSEGEVLADAFIIPNTMDGFHYLLQRIRHCTAPQDKIKVGLEATGHYSYNLLGFLLDNGLTTYVLNPLRTNLYRKSLSLRKTKTDRVDARTVASMLLSDAGLKPYTDTAYHNEELKSLTRYRFDKVKERAKLKSSIARLVCILFPELEKLVPSLHIASVYALLEEFPGAKQVANTHLTRLKALLETASNGHYKRDMALEIRNAAKNSIGSQMPAKSLELQHTIRLIRELDREIDEIEEQIQSIMDELHSPITTIPGLGFRMAAMILAEVGDFTRFDSPDKLLAYAGMSPSTYQSGQLKNCYPHMEKRGSRYLRYALYNATKYVCHWDPTFADYLAKKRAEGKHYNIAISHAAKKLVRLIFAMEKSRQPYCSAA

SEQ ID NO: 196080 - protein, 359 aa, unidentified
MHSQRNKLDFTGQNVYIGFDVHKKSWKVSILLEKLFHKTFSQDPKPELLYHYLKKNFPGANYYSAYEAGFCGFWIHYALTSLGVNSIVVNPADIPTTFKEIIQKEDSRDSLKIAKALRNGQLRAIFVPKNTTCDDRALIRARTTLTRDLAKNKNRVKGFLNFQGIEIPQEHKYRSQIWSKTFIKWLESLKLGSSSGNEALSIFIEECKSLRSAKLKVTRKIRALSITESYKQNTELLQTVPGIGLITAMEILTELETINRFKNIDHFASYIGLIPSTHSSGENDVVGNITSRGQQTLRSAIVESSWVAVRTDAALSQKYIELLARMLPQKAIIRIAKKLLSRIYFVLKNKQPYQCLIVQ

SEQ ID NO: 196081 - protein, 341 aa, unidentified
MGQASTIGLDIAKWVFQAHGADATGRVVFRKRLVRAKVLEFFAGQPPCLVALEACGGAHYWARELGKLGHTVRLIPPAYVKPFVKRQKNDVADAEAICEAAQRPGMRFVPVKDEAQQANTVVFRARDLLVRQRTQCINALRGHLAEYGHVVPQGPAHVDSLVALVEDPKSSVPESARGILQVLIRTLNALEEQLKELDGEIARRAKADPVARRLMTIPGIGPIAATAITALVPAPEGFRAGRDFAAWLGLTPLQRSTGGKHKLGAISKMGERTIRRLLILGASAVVRWASRRGAAAGSWLARMLARKPRMLVTTALANKMARIAWALLVKGGTYKAPAVAA

SEQ ID NO: 196082 - protein, 322 aa, unidentified
MSELLIERFVGIDVSKGSLDLFADPPTASLPRQSAYEDSALKALCDGLAAVAPTLVVVEASGGLEQRLASELAARGVPLAVVNPRQVRNFARASGELAKTDAIDAQVLCAFARAIRPHARPPKDADTQDLADILARRRRLVDMRVQELQRQHTAKSRPLRKSLSEHIAWLDKRIERLDEDMGQRLMKSDVWRARDDLLQSIPGVGPVMSRTMLGLCPELGALNRREIAKLIGVAPLANDSGKHRGRRRIWGGRADVRRVLYMATQAAMRHNPAIRAFATELKAKGKLPKVVIAACMRKLLTIMNTIVKTGQPWRQPAAPGTP

SEQ ID NO: 196083 - protein, 342 aa, unidentified
MNEVITMGVDLAKNVFQVHGIDAEGAVVFRRQLRRGRVLAFFKKQLPGLVGMEACATAHHWAREIGALGHEVRLMPPHYVKPYVKRNKNDAADAEAICEAVSRPTMRFVAIKTEEQQSVLMVHRTRELLVRQRTMLVNAIRAHMAEFGVVARVGLPQVKALFAVIADPDDDRIPPLARTCLEGLARQLLSLEREISAAEQRIHAWHRASEVSRRLETTPGIGPITASALTASITDPSIFRSGRGMAAWIGLVPRQTSTGGKERMGRISKQGDQYLRWLLVAGAMTVIRHARRRGTTDPWLAGLIAHKPTKVAAVALANKNARIAWALLRHGGTYRRPATDTA

SEQ ID NO: 196084 - protein, 346 aa, unidentified
MRFYTKQHKYYCGIDLHAKNMYVCIVDQQAKVLLHKNISAHPDYLIHLIKPYLDDMALAVECMFTWYWVSDFCLKHNISFVLGHALYMRAIHGSKTKNDRIDSKKIAMLLRGSLIPMAYVYPQKMRSTRDLLRRRMYFMHKRSELLAHIQNTRSQYLVEAFDGPVARKRHRHNIVEKFHEQAVSKTIEADLKLLNHYDSVINDVENYLQRSVKEHDYNTFYLLRSIYGVGKILALVMLYEIQDIRRFERVQHFTSYTRLVKPRKESDGKVKGGSNKKMGNAYLKWAFNEAVLLLIRESEEVKQLHMKLKNKHGKKVALAILAHKLGRAVYYMLTQKKVFDVDKYVN

SEQ ID NO: 196085 - protein, 369 aa, unidentified
MDEGTTHVALDDSKRKIVAGILRSGATEPELRELPNDPHHIRRVVERLKREGPVVMCYEAGVSGYDLYRQITALGVPCQVMAPALTPRRPGQRIKTDRRDAAKLVRLFRAGELTPIHVPDEAEEGVRDLLRCRDDVRRDVLRWRHRVLKLLARHGRSYQTGKNWSQRHWRWIREQQFAVPALQRAFEASLFALEQALARVAALDHEILALAESEPYRTPVGWLRCFRGIATLSAMILVGEIVDFQRFRGPRELMAYLGLVPSEYSSGDRERRGALTKAGNSHARRVLIEAAWHYRHRPTAGGALGRRSAGQPAAIIGQAWRAQQRLHRRYRHLVGHGKRSPVAVAAVARELVGFIWAAMTGQESREHAA

SEQ ID NO: 196086 - protein, 347 aa, unidentified
MNFYTQQHKHYCGIDLHAKAMYVCILDQAGTILVHKNLPTTPEAFLRIIAPYREDLVVGVECMFTWYWLADLCSKEGIAFVLGHALYMKAIHGGKAKNDKIDAHKIAVLLRGGMLPQAYVYPAEMRATRDLLRRRCHLVHKRAELLAHIHNTNSQYNLPEIGKKLAYKANREGVEEHFPDPSVRKTIEVDVSLIDHYDQLLGEVELYITRSAKAHDGQTFSRLQSVPGIGQILALVILYEIQDIARFPRVQDFVSYCRLVKCAKESNGKRLGTSGKKIGNVHLRWAFAEAAVLFLRHNQPGKEYFAKLERKHGKAKALTVLAHKLGRAVYYMLTREQAFDLNRFVTA

SEQ ID NO: 196087 - protein, 254 aa, unidentified
MSSELFIGIDVSKDHLDIAVRPTAQCLTFENTDTGVDELIRTLLEFSPTLIVMEATGRYHQLALGRLVAANLPAIAINPRQSRDFARALGRLAKTDRIDAALLAEFADKVRPVLRSIPNSDTQELEALSTRRRQLMTMLIAEQNRHHSAPRSLRPGIKKHIHWLEKELEQSDKELKNRIRSSPAWREKEDLLSSCKGIGPVTTHSMLAYLPELGTFNRRQIAAIVGIAPFNNDSGKYRGRRSISGGRRQLRSVL

SEQ ID NO: 196088 - protein, 391 aa, unidentified
MKYIGLDVHKRVVQAAVLHDTGEVEEDIRFACTPELLRAFCRKHVGAKDKVALEATTNCWAVAAIIREFTDGVMVSNPMRTKLIAQSRRKTDKVDALILAQLLSAGFLPGVWEPDVKTREKREITSRRAALVHDRTAIKNRLHAVLAQRMIAPDGKLFSKEGHHLLRTLELDGVGRQLVDSDLRQLTQVEKEIAALDDVIAGLAQEDDLAKLLMTLPGFDFGGAVGVVAGAGDMRRFPDGNHFASYFGLVPSTKQSAETTYHGPITKAGRAHVRWIFCQAAMHLGGNKGPLGHFFRRLAQKKGHNKAVVATARKLAVIAWHLLVKKEPYRYAEPRIVEKKLSHLRVRTTKTKRKTSMRGTSRPATYGSGVGIRTWIAPHTGHTTTAARFSA

SEQ ID NO: 196089 - protein, 369 aa, unidentified
MADRITYVGLDVHKESIVVAVASGGLRGEVREYGRIANTPAAVERLLRKLSGDGVSLRCCYEAGPCGYGIQRHVSAQGHECAVVAPSLIPRRAGDRIKTDRRDAASLAKLHRAGELTAVWVPDARHEAMRDLVRARLDAVHSLRRVRQQLSGFLLRQGRHYGRPAWTKLHRRWLAGLKFEHAVHHIVLEDYIAAVEAAETRRDRLTAQIEAMLPDWTLAPVVAALQTMRGMALVNAATLIAELGDLSRFTNPRQLMAYLGLVPSEHSSGASIKRGGITKAGSGAARRCLIEAAWSYRFPARISRELLLRQENQPKPIRDIAWKGQVRLCARYRRLARSGKPANVVTTAIARELTGFIWAIARQVTVTKG

SEQ ID NO: 196090 - protein, 346 aa, unidentified
MTAFAALDVSKRSTSIHIVDEKGTCLWRGKTLTDPDALAVALSPFSNNLTLVGLETGCWTTWLWHELTDRGFPMVCMDARQAHAALSISINKTDANDAQGLAHLLRTGLYREVRVKSWDDMRKRTLLRARATMLRCVLDLANAIRGALRTFGISLPAGSGNGGAKIFERRVIDHLATRADLEVIIGPLLEAWRAGRAQVARHESTIRRIVRNDPRCQLLMTVPGVGFLTAVGYVGAIGDPATFTSGRTAAAWIGLTPRRYQSGAINQQGRISRQGDKLLRSYLYEAAAHLLTRAKTDSALRRWGLKLRERIGFKRANVAVARKLAVILHAMWRSGRPFETEGAVPA

SEQ ID NO: 196091 - protein, 346 aa, unidentified
MEKFVGLDVSQEATHVCVVDGKGETAWQGKCPSTPDAIAAAIKDKASGVARIGLESGSLSTWHWHALKAMGLPVICMDARHAKAALSMQVNKTDKNDALGLAQIMRTGWYREVTVKSFSSHQVRAMLGARAQLVGMRTDLINQIRGILKTFGVVLKGTSGLTFEKRIEEIIRDGAPVSDTLRALLEILRSIRKQVEKLDVQVREHARDSKVCRNLMSIPGVGPVTAVAFVTAVDDPAKFRKSKSVGAYFGLTPRRYQSGEVDQNGGISKCGDNLVRCYLFEAAGVLLTRVDKWSSLRAWGLRLAKRGGMKKAKVAVARKLAVIMHQMLLTGEEFRWSNPAAVTAAA

SEQ ID NO: 196092 - protein, 358 aa, unidentified
MKYVGIDVHKKMCQAAILDEDGKLLDEIRFANTPEDIEEFAAKLTTFHDEVRAVVESTGNLWIQIHDRLEEHGFDVALSNPAKTRLIAEAKVKTDKVDARTLAMLLRADMLPTCYVPGEELRSRRELLRHRLNMVKIRTGVKNRVHGLLDKHGLRMPGITPFSKENIVWLREQSFGFMDDAIVRSDLAVLEAVDGQVSLIEEKIAVIAAEDKRVRLLMTMTGVGYFTAMLVMAEVGDVSRFRGDKEFASWMGLVPSVHQSGEKTRIGGVSGPGNKRLRWALVESAQAAVRFDPRLGGLYERVSKRRGKGCAVVAVAHEMARIMYFMLSRGEPYRGENRGLTERKLKSMSKKAFNGLRN

SEQ ID NO: 196093 - protein, 320 aa, unidentified
MTYIGIDVSKDSFVAAYPAKSGYTTKTFKNTSSGVHQFIQSLPAECHCVMEATGNYSMLLLYLLQQANIIVSMENPQKIKHFARAMLSTTKTDDIDAKLIAMYGEKMEPAPYKIPSESIMLLKQKRTVLRQLKKQLTMLLNLQHSLAVLPKQDPTAKVATEKTIKFLRKQISKLEEEITHLSNKEFKHQMDLLTSIKGIGKTLASALIVATGGFAYFSNSKQISRFLGLCPTYQQSGTSINVKGHINRNGDTYLRSQLYIAAVSSIKFNAACKETFERLKAKGKSGKVAVIAVANKLIRQAFAVVTNNRPYVDGYVSSLP

SEQ ID NO: 196094 - protein, 426 aa, unidentified
MRVLYDRVAAVDVHKDMVKVAIRVPGAKRGTRKTDVLEFRTFYGVLQAMARELRGRGVTHVVMEASGVYTDPVYYALRELDFTEVMVINPAHAKALKGHKTDAKDAIRLLDLYECGLLSGSYIPDPDLREVRDLARYRMKTVQARTSEIQRLQKTLETAGIKLSSVVSDVTGGSATAMIEALISGERRGSVMAGLAQTRLRTAGKMADLSMALTGRFTDHHALMCRLHLDRIKLFDDAVTDLDAKIAPLVARYAREAELLKTLPGFGDVIVAGWLGAIGPAPHQHFATASRLASWATLCPGNYMSARKSKGGRTGDGGAYIKPLLIQAAWAAVRVPGRLQARFRRLVRKFGGPRNMGAQKRAITAIAHTLLKIAYGVLKTGKPYADLGADFYTRRESPDARQDYLMRQLRKLNPGCVITITPAEAA

SEQ ID NO: 196095 - protein, 357 aa, unidentified
MKTTAGLGRRSVVGKDVYVGIDVHKESWQVTVRTDGEEIFNGRIPGQYQSLKKLFERYQGCRMKVAYEAGPFGFWLSDKLVEDGIEALVVPPSLIPTESGNRVKTDKRDSRKLARLLESNMLKRVYVLTPEEREHRDLLRTRRQLVDHRNDVARQIKSKLLFYGITSPFTASTRWSLKYIEWLKVLRCDTEYLRESFNLLIDLYEYLTRQIVRINKKVALLCRDKKYRDRITLLCTAPGIGRLTAIEILVELQDITRFESAEELAAYIGLTPSEYSTGERTRQGRITRCGNKRVRTYLVESTWMLITKDPAIRLKYLKLKSLRGGKRATIAIARKLLIRIRRMLLDNVPYRMTATAA

SEQ ID NO: 196096 - protein, 418 aa, unidentified
MKDIKTEKGKKINKKSLIVALDVAQEKHVVYIRSSDGREEKPFVVFNRREEYEQMWRRISQTKEAYGLEEVVVGFESTGPYAEPLVHYLMKKEVKLVQVNPMHTKRVKEIRGNSPNKTDEKDPQVIADIMELGNYLRVVIPEGVSAELRRLTHARERAVERRTMLVNQVHGLMSVIFPEFAMIMKDIKTKTAYYLLKHYPRPQDIVELGYERLEETLKKISRGRMGKDRAEALYEGAVNTVGVREGQGSIVFEIKQLVVEIEQTERLIEEMEEKMREYLKEIPYSRYMLSIQGVGEVTVAGLIGEVGDFRKYRTIAEITKLAGLDLFEVSSGKHKEERHISKRGRPLMRKLLFCAAINVVREGRIMHERYKRYLQRGVPRMKALIAIARKLLGVLFALVRDQREYVKNYEEIRLKQVA

SEQ ID NO: 196097 - protein, 337 aa, unidentified
MKLYCGIDLHSSNSVIAVLDEQDRPVYEKRLDNDLDEILEALKPFKDEIVGCVVESTYNWYWLVDGLMEAGYRVHLAHAGALPQYAGLKYSNDITDAGYLAQLLRLGILPTGYIYPKQERALRDLLRRRLLLVRQKTLHHLSLQSLIARHSGQRLNANAIKKLEQEHLSYYLDSPILLGGEITHQARCWLDGAIARIERELQKHIQPRQDYRLLQSMPGVGPALGTTIALETGTIARFPSAGNYASYARCVKSEKISNGKYKGQGNKKNGIKYLAWAFMEAAHYSAIWSPQIKQYYQRKQAKAHVLVAKKAVANKLARACYHMLKRGEPFDVKRAFG

SEQ ID NO: 196098 - protein, 391 aa, unidentified
MTYFVGIDIAKFKHDCFIQDHNGVVIRHSFSFRNNQDGFNILLDALNGLDHSQEIKIGLEATGHYGSNIKQFLNSNDYSFMEFNSLLIKRFSQATTLRKTKTDKIDAALISSFLMTVDYKPITHTSYHTSALKSLTRLRESLVKERSLTLVRITNVLDIIFPEFKPLFDNSLKSSTCMYILENYSSPDRISRMNVESYNKMKSKLRKTISYDKFLKIRDAAKSTVGTTDEIYVYELQILLGIYKELDSRISDLENKIIQYYRQFNSHIHTIKGVSELSAAAIYAELNGVTGFRNPDQILAFAGLDCSRIQSGESDKNGRMVKHGSSALRCVLMRCADSFALHNPVVYEYKLKKMNEGKFFRVALSHVAKKLIRTIYTLEKNDLDFDQSKLR

SEQ ID NO: 196099 - protein, 375 aa, unidentified
MNAVGIDVSKGKSMVAALRPMGEVALLPQEFLHTEVGLEQMAYAIIALGEDTRVVMEATGRYHEPIAAALHEYGIYVCVLNPLFIKQSGGGSIRKVKTDKADAMKIAKYGLDNWVELREYTPMDTIRQQLKLCSRQYNLYMKTVVSLQNNLISLADKTFPGVNELFSSPERADGHQKWVDFVMTFWHCDCICRVSEKAFTERYQKWCKRKGYHFSAEKALDLYASSCGHFTTLPKNDNTKLLITTAAQQLLSGKMTLAALRAEMTRLAKQLPEYDTVRAMYGVGETTAVQLMAEIGDVRRFPRRSSIVGFAGVDPAVAAVGVLHDNAGDAVALADKLHGRSGEAQLEIVVLLGHFLHFQAHVDARVAGAHAGIRR

SEQ ID NO: 196100 - protein, 431 aa, unidentified
MNYNQNEKIAQITSQTLIIGVDIAKFKHVARAQDYRGMEFGSPCFFENTKQGFELFLDWINQLKLEQQMDKVIVGMEPTGHYWLNLAHILKENNIKFVAVNPLHVKKSKELDDNSPTKNDVKDAKVIAQLVKDGRYAELTIPQGVYAELRVAKKIRDLLTDDLQTVQGQIHNWLDRYFPEFLTVFKSWEGKAALQFLRLGALPHELIHFTDQYLLDHLRKAVSRSVGLNKILELKQAARESVGLCQGSNMAKLELATLLDKYDLIQEKFVELDNKIDNLIEHIPGVQQMLAIKGVGRDTVAGFFAEVGNLQDYNHPRQIIKLAGLSLKENTSGKHKGQTKITKRGRKKLRALLFRVCMIMVAKNSAFKALHSYYTQRPDNPLKKMQSLIALCNKLIRIFFAIGKKQFEFSEERMLQDIPHMRANIEVEIAA

SEQ ID NO: 196101 - protein, 341 aa, unidentified
MKYKSFIGIDISKNVIDASIFCEGTPIKDFPHDVFNNSRKGFGEMCTWLKKNHVVLSNCLFGMEFTGSYSMELEKFLNARNYQFCMLSTHVVKHYPMGPKDKSDKIDSAKIADFLYRYNDTECVKPYKMPDKTMQRLKTLMNERKFLVEQRTCFMNRRQLCTTKEDTQLYDGYIKKLSRDIENIELEEQKLLATDDSLLATYKNLLTIPGIGFVNAINAIVITRNFTAFETARQYASYVGVAPHFRTSGTSVKWRPRPSARCDGQAKADLSMAATVVVQYDAELQSFYNRKLGGKQDSDTKRKALNAVKFKLVLRMFAIGKQNRKWEPLDSKSSNEKLAIS

SEQ ID NO: 196102 - protein, 341 aa, unidentified
MMKKQTCFFLGIDVSKLWFDISLMPVVNYQKEPMITERFDNTMKGLALLKRWLKEQKVSFDNDTLLVIENTGIYHRLLWKFFSENNIPIHIGNAAHIKKSFGIARGKNDKIDSQRLCSYAYKNDDELKASSALNPAFLNLKDLITSRSRLKTQLGANKAYLKELKNINDKATQKMMENVYKMAINGLQKSITEIEKQITIVIKSDSSINANYTFLLSVPAIGPVTATYILCCTNNFANKISGKQLSCYAGVVPFADRSGKSLKGRNKVHKMANKELKSLLHLCALSSIKYYQEFRDYYERKVKEGKHPNSVLNAICNKILLRAVAVVNNQKSYVENYKKAA

SEQ ID NO: 196103 - protein, 409 aa, unidentified
MRVMNCACSGLDVHQKTVVACTLIGPAGADPQMEKRTFGTSTSQLLGLADWLREHGVTHVAMESTGAYWKPVWAVLDGQFDLTLCNAAHIKQVPGRKTDQKDAEWIADLLRHGLLKKSFVPPQPQQDLRELTRYRAQVSGDRSAVSNRIRKLLEGANIKLGSVASDVMGASGRRMLEAIVKGTTDPYELADMALGKLKEKRPQLIEALSGRIRDHHRTMLRLELAQWKFLDALVNELEQAIEKALAPFMQAVELVKTIPGFSDVSAAAVVAEVGPQMEQFVEPGRLSSWAGLCPGNNESAGKQYSGKTRSGNIWLKRILCQVAWAASHSKDTYFAALFRRISAKRGKKRAVLAVAHAVLVTIFFMLKNQQTYRELGADYFDKLHADGLKRYCVRKLEAMGHRVILESAA

SEQ ID NO: 196104 - protein, 414 aa, unidentified
MEILYRSVAGIDVHKKMLAVVVRGQRGEQVQYYQRKFGANRADIQHLGAWLQAHGVSEVVMESTAQYWRPVWYGLEPHFRLHLTHPLKTRAPRGRKSDFRDARRLADRWDSGDLEESFVPGCEQRSWRFLTRTRVQLKKKLSVIHSHVEGLLEQGGIKLSAVVSDLFGVSGWAMLERIAQGVTDVEVLAGEARGALRKKDAELKEALAGGLEPVYRLLLKQHMDQVRLLRRQVEEINQALAEAMKEHVGALHRLSKIPGVDLYAAQELVSEIGPKAAAFASAEQFASWVGVCPGSQESAGVNYSHRSAKGNRYLRRLLCQIAWAAIHTKGTFFAGLFARLKPKVQGKGAAWAVAHRIAKIVWLVLHQEVEYQEKGSAPPNERTLVRKFKRMLKEFGALGLDVRALLDQQLPATP

SEQ ID NO: 196105 - protein, 349 aa, unidentified
MTILTDIVDVVIGVDTHVDTHTAAAVAAGTGAVLGQITVTTTVDGYQDLVDFADEHSALRVWAIEGTGGHGAGLARLLERREELVVELDRPERAQRRHGAESDPLDAVRAAREALSRKDVGTPRSGGDRQALSVLLAARRSAVDASTVAQRQLFSLVIAAPEVLRDTLRGHKLPEMIRRAATVRLRKDWDTETTTTATVFKTLARRARTLQAEADDLEKQILVIVRRWRPDLLAQLGVGPIVAATVLCAWSHPGRIRSEAAFAMLAGVAPIPANSGQVTTRYRLNRHGDRQLNRALHTVVLSRQRYDDATKAYTARRTAEGKTSRETKRCLERYIARDFYRLLEHHQTA

SEQ ID NO: 196106 - protein, 412 aa, unidentified
MLGIDVGSETHYARAFDYRGVEYSKKPFKFSNTEAGFVTFKAWVLDIKEKHGKDKVIPGMEPTGHYWFNLGKFLQDNEMKPVLVNPHHVKKSKELDDNHPTKNDRKDPKVIAGLVREGRYMIPYLPDGVYADLRTASNIRFQLQAELTRIQNRINRWFNIYFPEYKTVYGKPDAKSGILILKEAPLPEDILTLGIDGVNQIWRDAKLRAVGKARAKTLIEAAEHSIGSKEGTMSARMEIRMLLEDYESKNMRLQEVMVLIEGLVNQIPMAEKLLEIKGVGIKTVSGFLAEVGDIRRFNDPKELQKLAGLALVENSSGKHKGKTTISRRGRKRLRYLLFEVAMSLVAKNPEFRELHNYYTTRRLNPLKKMQSLMAIAAKLLRVFYAILTKGVGYDPKKMVNDIRRPAAYAQAA

SEQ ID NO: 196107 - protein, 453 aa, unidentified
MAAKKKNGSENNSQEQKKRKANLKKINYNVSGVDLSSEEMFTAIVDKDVRKFSTFTRGLEEAACYLKQEGIEKIVMEATGIYWIPVYEHFEKEGFDVCLVNGAHAKNVPGRKTDVLDSEWLRELHTYGLLRASFIPEARIREIRYYVRLRDDHIAMGATHINIIQKNLDMMNIKLHKVIDSVMSKSGLLIIRAILDGVRDSEKLWKLCQKHIRDEKHQDIIDSLKGNYRKEYLFGIRQALQMWEQYQHKQKQCDKEIEKLLEKMTQKKESPQEISTAKPIKRNKPEIEDFHRLMVKLTGGKDTTAIAGINDYSALKIIAETGLDFSKFKNEKFFTSWLGLAPSAHQSGKKRRRKGRRHCNRAGFIFRQLAVNVGNGKHTALSSFYKRIRARSGKMIAIKATARKIAVYFFHLMTKGIAFVEEGIKKYEKRYAEQQEKFIQRKAKEMGYILVKA

SEQ ID NO: 196108 - protein, 411 aa, unidentified
MTATTSAATVGLETRAIVAGVDTHASTHHVGVCSLTGTRLGDIEIPASPAGYRALVDFVATFGVVQMIGVEGTSSYGAGLARFLTTEAIEFREVIRPRRTQRRQGKSDPLDAYAAAEQVLADPDGLPIAKSGDGIVEQIRVLLTVRRSAIKARVAAIRQIKSLLITAPEPLKQRWAHLPDRELLASLAATRPRVATDSVAAATARTLRRLARRHHYLGMEIAELDDDLRALVNTAAPAMIATKGYGVITTATLLVTAGANPHRLRSEASFAALCGTSPIPASSGKTRRYRLNRGGDRQANWALHQIALVRLSNDPRTRDYADRLRATGKSKKDVLRCLKRAIAREAFHLIAHPQQVPDTTDLRALRHQRGATLVHAAMSIGAEPARLSELERGKRPDALLTARYRRWLTAG

SEQ ID NO: 196109 - protein, 420 aa, unidentified
MKLWQEITHYAGFDWARDHHAVVIVNSAGEIVADFEFDHTLSGWQRFVEKTASWPHLAVAIETNVGAAVDQLLQRGYHVYPVNPVASESYRKRKAPSGTKTDHVDGWSLADALRVDGQGWKPLEPMDPLSQKLRLLCQDEVKLIEQRTVLVNQLQQALVEYYPAALQAFEDWTKSSSWDFVIEIPTPQVLVKSGRRRWEKFLHAHKLWRPETTERRLGIFAQADQFKASDPILVAKSQLAVSLSKLLRTLEQQLAQYRQQIEALFKDHPDHDLFGSLPGAKKVLAPRLLAAIGSDPVRYGSHQVLQCFAGTAPVNYQSGQMNKTHVRRACDKFMRHTVHLWANCFRRASAWGQTYYNQKRKQGMSHACALRCLSQRLLKILYRMLTDKKPYDAELHALNQKKHGSWVLSLVDKSAASACE

SEQ ID NO: 196110 - protein, 350 aa, unidentified
MEEVSVIGIDLAKNVFELCALGASGEIAWRKRLKRRGFVRFMEEKAPRCLVAFEACGGAHHWGRFLLARGFRVKMMAPRVVKSYRQGPHKNDGRDAQAAAEAGSRAGVRSVTMKSEASQAVQILVRLRTLQIKQMVQTSNQLRGILNEFGIVLPKGHKRLRETIARLEVADPAYGRLPGPVRQAVEKLCCQLGQQVGWVKQATDDLAAATEVDDSCWQLSTVPGLGPINVASLSVALEAPDAFANARAFATFLRLVPRQHQSAEKQKLLGVGRQSTNETRRHLVLAGQSLITMVKRRQHPPTDKFLLWVWRLSQRKKRNVAAVAVAAKLARIAWALMARGQTYHPQFVNA

SEQ ID NO: 196111 - protein, 340 aa, unidentified
MTIVTLGLDLGKNWVHMVGLDADGRIVLRRRVRRDRLLVETVDLPPCLIGMEACCGAHHLGRALAAQGHTARLMPPQYVKPFVKSNKNDHRDAEAAAEAVQRPTMRFVPLKSEAQLDLRTIHRVRQRLVGRRTALINQLRAILLERGITVARRRRVLELRLRAILADESARLSARVRHLIEDMRAEWRDLDARIDAFDAELTAKARQDDACRRLCEIPGIGALNATALVAAVGNGAVFDRGRDMAAWLGLVPREYSTGGKQRLLGISKRGNKYLRTLLIHGARAALPYLAARNDRLGSWLRSLLARAHRNVAVVALANKLARIVWAVLANDGCYAMPTTA

SEQ ID NO: 196112 - protein, 310 aa, unidentified
MSTEIFVGIDVSKDSLEVGVYPSHPGCRMANSEQGVEELIYALRALNPQLIVCEATGGYETLAVGCLAAAGLPVVVVNARQVRDFAKSIGRLAKTDAIDAGVIARFAEAVRPELRGIKDAASQQLSALVTRRRQIVEMITAETNRLSVACRRSRRDIETHVRWLHKRLDQLDDQIKRDIHSGPMWRTKDQILRSTPGVGPTTSAMLISCVPELGQLNRKQIASLIGVAPLNRDSGRLRGRRMIWGGRGQVRAVLYMSALSAIRHNPLIGQFYQRLRASGKCFKVAIVACMRKLLVILNAMVRDQARWNHC

SEQ ID NO: 196113 - protein, 418 aa, unidentified
MGRCAKIGQEAETHPPVGNESPFQRFVPPPIRNRATANAGHYLGQALVSRQARICKRGMVTQTHKGDCIMSQHETHWVGIDVSKQHFDAAVIKLGESSDPAVLRKLPAAKFPRTPDGVRGFLAWLDLPLGLSGQVRVVMEATGSYSTELSAWLSQQRPELAPAIINPRQSAHYIKSLGLRSKTDKLEAKALASYGAIRNPSAYVPLTPARAELRELSRRRADLISQRTALKNQIGEHPAYASETVRQLDQDRLSQLNRDIAMLEEEIRALTKRQDELAKDYNLLVSIPGVAFVTATTVLAELGDLRQFKRARRLSAFVGLDPMHKESGQSVRAKPRLCKAGNGRIRPLFYLAALASTRCKGPLQNAYHALRKAGKPPMAAIGAIMRKLLVLMRAVIISGKPYDPHHRSNANSCGVTCG

SEQ ID NO: 196114 - protein, 342 aa, unidentified
MTIIRIGLDTSKHVFQIHGVDENEKPVLRRQLRRSEIAKFFATLAPTRIGIEACGASHHWARVLRGLGHEVLLMPPQYVKPYVQRGKNDAIDAEAICEAMSRPKMRFVPVKTAESQAALTMLGVRDLLVKQRTMLINAIRGHAAEFGVTAPKGPQQVPELLRRVAAEEGVPALAREMLGLLASQLEALNAQLALNAQLKAIEARLMAWHRQDQASQCLATIPGIGPIGGVSFTLKVPDPKAFRSGRHFAAWIGITPRENSTAGKHRPGKISREGDESLRRLLVLGATAVIRQAKRGRASAWLLGLLARKPKKLAAVALANKMARIIWAMMVSGETYRRPKEA

SEQ ID NO: 196115 - protein, 432 aa, unidentified
MSLAAILSLAEVHVTASLSQQFTAYVGIDWADTKHDICLQAGDDNHRQFDCIPHQVDRIDEWAKALHLRFGGPIAVALELAKGPIVSALLKYDFFVLFPINPSTLAKYRVAFKPSRAKDDPTDAELALDLLLRHPERFTALRPQSVAMRSLLSLIEQRRDLVNDKTRFTNRLCNTLKQYYPQALEWFEQRDTLLFCDFLTRWPTLLSAKRARKTTLEAFFYAHNGRRATLIEARLASIRAASALTEDAGIIEPCRLHALALVEQLRTVLSVIDRFDKEIERVASALPDYALFRGLPGAGPHLAPRLLAAFGEQRERFHGADELQKYSGIAPVTERSGKKSWVHWRWQCPTFLRQTFVEWAGQTINKSFWAGAFYRQQRAKGSTYQAAVRALAFKWIRILYRCWQTRTLYDETTYLNALRKRGSPLLKNLDLG

SEQ ID NO: 196116 - protein, 423 aa, unidentified
MKVVYQICCGIDVHAKSLVACLIFSDGRKEIRNFSTMTDDLLRLRDWLVAAGCTHVAIESTGVYWKPVFNILEDRLKVILVNPEHVRALRGRKTDVKDAERLADLLRHDLLQPSFIPPPEIRELRELTRFRDSLVNEQTAIANRIQKVIESGNIKLGQVASDALGASGRAMLRAMAKGETDPFKLADMARGKLKEKRSELVRALTGRLTSAQRFVLGELLTQLEQLEATQERVNKEIDQHIASPDHPKLARSRDILDSIPGIGPRVAEIVIAEIGIEMSEVFPTDAHLASWAGLCPGNKASGGKRLSGKTRKGNTYLRSALTQAAWAAARKKDCYLSAQYYRLAGRLGRKKALVAVAHSLLIIIYHVLDSGRSYTELGGDYFDRRHTERERAYFIRRLQMLGLKVNVEELSEEAVEEGIPKAA

SEQ ID NO: 196117 - protein, 412 aa, unidentified
MEGETVIAGVDTHKDVHVLCLIDGLGRKIWSGSFGADPEGYDRLAEAIGDPGSCMVVGVEGTASYGAGLTRRLVELGYNVVEVLRPKRDKVRPGEGKSDPLDAARAARKAASGKGCSVPKSQDGWVEAVRQLYVARRLAVATSTSCVACAKSMLTTAPSALRERFRGRERPKDLMPLLARGRKAGDALEESVLASLRSVAAVWKEARSQVESLDERIRALLEANAPALLGVEGCGTTTAAALVVAAGDNPGRLKGEAAFSMMCGASPIPASSGKTDRHRLNRGGNRQANWALYEIAIKRMAYDERTRRYVARRTSEGKSRREAVRCLKRYIAREVYHVLMDPNPDGAAPEGPELAKMRKAMRVTQKKAAAELGLSAATLGHLERGKRRSTKLERRYYELLCELERTLPQTAS

SEQ ID NO: 196118 - protein, 411 aa, unidentified
MKALYERCCGIDVHKRIVVACLKCGKKQEIREFGTTTEELRSLTEWLSDSKCQMIAMESTGSYWKPLYNIFELSSLAAIVVNARDMRNVPGRKTDIKDAEWIADLLQHGLLRASYIPNREQRELRELSRYRKSLIEERARELNRLQKMLEGGNIKLASVVSDINGRSARNLLTHMLKRDTSLTKEEVSFLVRGRLRHKVEAIMKALDGFLTPLQKQLMLKVVDHIDDMTKRIGEMDDLMNQYLTEYHEAIQKLDEIPGIGRQSAETILAETGLDMSRFPTAKHFSSWAGLAPGNNESAGKRRYGRTTKGNITLKTTLIQCAKAAVKKTDSFLSAQYQRLVVRRGANRATVAVAHTMLISIYHMLKNNVPFTDLGADYYNRFNTQSKIQHYLKKLKQLGWELNSATIPTAAI

SEQ ID NO: 196119 - protein, 412 aa, unidentified
MKRIRERVAGLDVHRDTVVACCQVKQPDRSIEVTKQTFATTANGLGELAAWLSDSGVETVAMEATGVYWKPVYYCLEGLFDELWLCDAQHVKNVPGRKTDLSDAEWLADVAAHGMVRPSFVPPAEIRELRDVTRYRKTQVEARVKEIQRLEKTLQDAGIKLSSVASKVWSQSSRAMIEAMIDGERDPSVLAQMAKSRLRAKIPQLEEAFSGRFDSHHALVCRQVIEHIDFLDRSIATLTADVTERLCPFESAVTILCSIPGVSRTTAEVMIAEMGVDMTRFPTSGHLCAWAGVAPASHESAGKRHPVGTRKGSTWLQRALVEAARGASRTKGTYLSAQYSRLARRRGSNKATIAVAHSILDVSWHLLTNGALYDDPGAQFFELRHDPAVEAKRLQRRIEDLGFDVSIAPAAA

SEQ ID NO: 196120 - protein, 346 aa, unidentified
MKITTIGIDLAKEVFQIHEVDIHGKAMLRKQLRRSEMARFFANLNPCLIGMEACGSSHHWARKLGEFGHIVKLISPQFVKPYVKTNKHDMADAEAVCEAVSRPNMRFVPIKNVEQQAILSIHRARQGFVKARTAQANQMRGLLSEFGIVIPQGIRSINKRMLDILEDAENGLPGTLRRLLERLNDHLKELDCQVAELELQIKLWHKENEASQRLEAIPGIGPITASAIVATVGDAAEFKNGRQLSAWFGLVPKQRSSGGKQTLLGISKRGDTYLRTLLIHGARAVIRFAENKAEPESWLRKLMARRNKNVAAVALANKNARIIWALLARDTKFHPNHTSAASAAKA

SEQ ID NO: 196121 - protein, 354 aa, unidentified
MSQTLNAAIAVIGIDIGKNSFHIVGHDESGAIVLRQKWSRGQVEARFANLPPCLIGMEACVGAHHLSRKLNSLGHDARLMPAKYVRPYSKGQKNDFRDAEAIAEAVQRPTMKFVATKTADQLDLQALHRVRERLISQRTGIINQIRAFLLERGIAVRQGQRFLRAELPRILATPPDVLSPRMARVIEGLAGDWRRLDERIDDLSGEIEAIARQNAGCERLMSVPGIGPIISSAMVAAIGAGEAFTKGRDFAAWLGLVPRQMSTGDRTILGRISKRGNRYLRVLFVQAAWVVLIKPKTWERHGLKPWIEAAKKRLHHNVLAIALANKLARIAWSVLARGRAFEVRKIDEAAAQSA

SEQ ID NO: 196122 - protein, 342 aa, unidentified
MNKVTIIGIDLAKRVFHAHGAAADGSVVFRKRLTRAQVLPFLAGRPRCVVAMEACASAHEWGRAIQELGHDVRLIPPTYVKPYVKRQKNDMADAEAITEAGSRPTMRFVAVKTEEQQARSMVFRTRDLLVRQRTQLINALRGHLAEHGVVAPQGPAHLKTLAAAMDGAGRSLPQLVRDVGGIYLEQIEQLNRRIADLEKVLRREAQFGTETRRLQTMPGIGPITAMAVEAFAPPMATFKRGRDFAAWLGLVPVQHSTGGKQRLGRTSKMGQRDIRRLLIIGAMAVIQWASRRGAEAGSWLHRMMERKPLMLVAVALANKMARSIWAMLTKKEDYRNPGNAAA

SEQ ID NO: 196123 - protein, 342 aa, unidentified
MAIVAGFDVHRAQITFDALDTDSGEVMRGRIDATPAAVARWAERFGGAEVDVAVEACTGWLFVCDALVAAGAVPHLAEPVETRALRGRKRRAKTDREDARWLRELLAEGRLPEAWIPPEHVRQWRSRARLRHTLIDERTQWMQRIQATLYHHGVSGTPEKLRTLAGRAFLDELELPGDARERIGIALAMVEAIEAQIAPLERELRQLARRQTGCKALMRLYGMGELTSLMTLCELGDVARLSASRKAVRMAGIDIGVHRSDRRARVGKLTRQGSPQLRWALYEAALSACRPSSPDHADYLALKARGLSHTRASLTIARKLARRSYHVLRELGPAALEPVPTR

SEQ ID NO: 196124 - protein, 416 aa, unidentified
MNAAGIDVSSRKSTVSVLRPFGEVVRLPFDIVHSAEGFASLIRQLKSIEGEPRIVMEHTGRYYEPVAQILHEAGFYVSTVNPLLIREYGGNSLRRVKTDKADAMKIARYALDNWSELRDYTPMDTIRYDLKTLNRQFQLASKQKTAASNNLIALLEQSFPGVRKCFDSPVRKDGTQKWVDFVYTFWHADCVRKNSLNAFTERYRKWCKRHGYFFKQSNAAEVYELARSVITLVPKGPVAKVLVQQAASQLTSISRSVETYRAEMNRLASMLPEYPVVMGLYGVGESFGPQLMAEIGDVRRFDRKQALVAFAGIDPMPNQSGEKNVRSNKSSKRGSPYLRKTLFSIMMCLLQSAPADEPVFQFLDRKRSEGKPYYVYMTAGANKFLRRYYAKVRDYLATLDNFPPVDMDSTGLNHLN

SEQ ID NO: 196125 - protein, 331 aa, unidentified
MTEYIGIDVSKQSLELWDGTHEEEVPNEKGLKTLKKLLKKRYGTNWNKGGFIYEPTGPYSNYLRAFAAEHEVQVYEVNPKKSANFAKVLGNRSKTDVVDAKMLSTFHALLAEEDFCIPAMDERAEQLGAFIGSYEIIQKTRTMLSNHLQSLEYKSGVTKKLKESLEKELGRLGTMEDELEKEMEAVAEDHEETREDLHNLLSIKGIGVISAINLLYLFRKYPGANRNEITALAGLDPVRRQSGSSLNGGRKISRAGDPMLRKVLYLACMNSIQHNECIQAFYKHLVSDNHKKPKVALVACMRKLLLIAHHLTITKSKYRTLEHDANPCLTS

SEQ ID NO: 196126 - protein, 344 aa, unidentified
MDHFAGLDVSVKETSVCIVDDTGKIIREVKVASEPEALLVVLKSPSYHFKRIGLEAGPLSQWLYSALTEAELPVVCVETRHMRAVLKAQINKTDRNDARGIAQMMRVGLYRPVHVKTMRSQKLRMLLTHRKLLLSKAIDIENDLRGTLRNFGLKVGMVGTVKFEARIKELVENLPDLAVLVEPLLIVRRVLREQIEILHRRLLTIVRDDEVCRRLMTVPGVGPVVALTYRATVDVPARFRKSKSVGAVFGLTCSKYQSGEIDRSGRISRCGDEMMRVMLYEAAQVMLTRTNKWSWLKAWAMKIARHRGIKKAIVALARRLAVIMHRIWVDGTEFRWTREQAVAA

SEQ ID NO: 196127 - protein, 347 aa, unidentified
MDHYAGIDVSLEDSSVCVVDADGNIVREAKVLSEPAALVGWLKGLGLSLKLAGLEAGPLSQWLYAAMKKEGLAVELLETRRVRDAFKSMPVKTDRKDARGIAQLVRLSWFRSVHCKSAAAQEVRALLTARKLVQSKLFDIEMSLRGILRGFGLKVGKTNPNRFALRVEELVAGHPTLEIVGKALLAAHEVLLREFKGFERRMRQQARADERVRLLMSAPGVGVIIGLTFVAAIDDPARFKSSKQVGPHFGLTPKKYQSGQTDYTGRISKIGDASVRTALYEAANAILTKPLKGASHLKSWGMKLAKRAGMAKAKVALARKLGAILHRMWVDGTPFADKASAPKLAAA

SEQ ID NO: 196128 - protein, 304 aa, unidentified
MKETVAVAFPNTAEGIVALASFCHAHLVELVAMEATGGYEQQPFALLSEQGLPVTILNPRAVRRFAEGMGLLEKTDSLDAGVIAWFAAVKRSQPQSLSSASRQQLRALVTRLCQLTAIRTAQRNQSRLVTAPAVLASFTELLALVARQIRELEIAIAALISEDPLWHQLDQVFRSIKGVADRTVARLMAEMPEIGTLSNKAISKLAGVAPLARDSGKQQGKRAVRGGRPQVREILFVVAGVAGRYEPDFIAFQQRLRAAGKPGKVIRIALAHKLLVRLNAKAREVRQQMATEMPDLRAPIAVTN

SEQ ID NO: 196129 - protein, 378 aa, unidentified
MGGDSTVVGLDTHKAAIHVAMLLPDAIQPVQWQIANEPAAVRHLARKLRRAAEGEVRCCYEAGPCGYALQRQLEAAGVSCTVVAPSLIPVKPGERIKTDRRDARKLAELFRAGLLTAVAPPTAAEEAVRDLCRAREDAVEDRLRARHRLGKFLLRRGLIWRGGKKAWTQRYRDWVRGLRFEDAADQAVVATYLLAIEQVEERVRTLEGQLEAVAQAEPYRERVGWLRCFRGIDTVTAVTLLAELHGFQRFTTPRALMAYLGLVPSEHSSGEAQHRGGITKAGNLHARRLLIEAAWHYRHPPAIGKALRQRRQGQPARLLAVADRAQQRLHRRFSRLSARGKMANKVVVAVARELVGFIWAALTPAAAVRTPRRAARTA

SEQ ID NO: 196130 - protein, 351 aa, unidentified
MPRTSMVHAVTTIGMDMGKNTLHMIGLDSRGAIVMREKVSRGRITSRLANVPSCLIGIEAGMATHYVARELAALGHDVKQVPPTYAKPFRQGHKNDFRDAHAVAEAVQRPTTRFVPVKTDEQLDLQALHRVRSRLVSERTAVINQIRGFLLERGIIVRQGLRFLRQLLPDILAKRTDVLSPRMVRIVADLASDWRQLDERIENVTDEIETLAKSDDTCRRVMTVPGIGPIISSAMVAAIGSGGAFARGRDFSAWIGLVPKQMSTGDRTILGRITKRGNGYLRMLFMQAARVILLRPANWSKHGFGVWLARAAQRLHPNVLAAALANKLARIAWTVLAQERSYEARVTKAAA

SEQ ID NO: 196131 - protein, 338 aa, unidentified
MNYVGIDHHRQYSHITWLDEKGEVVKSGRVANLRRELEGFLHGIGDIKAVIEAGRSSYTIVDVLEGLGIETAVAHPKEVRAIAKAKVKTDERDCYKLAHLLRAGYIPEVHKRSRENRSSQRVLGQRAFYVGKQTAVKNRLRALLAQQGEEIRQEVERVENLFTDKGMKILRGLALPEREAKLVGALVRTYDHLEERINETNALVKELYEAMPSAQLIQTVPGFGIFLAVLVAVEVEDIGRFEEVSQFHAYAGVIPSTHSSGGRSWHGKIIKEGNRWLRWAAVEAVWPGLQADFDLRCYYDRMKRRKGANPAKVATARRLLTILYLMLKENRPYIRYER

SEQ ID NO: 196132 - protein, 323 aa, unidentified
MNKSTKFYGIDVSKDVFDVTDQQDVHYQFKNDYKGFKRFIKLLDESSHCVMEATGYYHYKLAYFLQENQVLVSVENPLSVKRFIQMKLSKIKTDKSDSKMICKYAQSVELRLWEGQSEEQQECLQMVRSLSVYTKQSTVLKNKIHGEEVLGVPSKIVFSSLKRSLRNLKKEMKMLEEKLLEIIKNEQQELLSLLETIPGIGRKTSVMLLVLTDGFERFSSASELCSYAGLTPIIRKSGSSVNGRPRISKIGNQKLRNLLFLCSFNACKYNQACKALYDRIVAKGKSKKLALIAVCNKLLKQAFAIAKSRIPYDQSYKSALLVN

SEQ ID NO: 196133 - protein, 299 aa, unidentified
MNGFLQLVRWLQKQGYNSLESVLICFEHTGLYSLPLALFLEKEGIPFAMVSALEIKKSMGITRGKNDVIDSKRIAEFAYRFKDKISLTILPIVDIRKVHSLLTLRDRLVTNMQGYVVSMNETLRTMNMEDFPELFSAYQMQIATLKEEIKKLEKSIKSIIKNNPQLWASYQLITTIKGIGFIVASYLIVYTYNFTRFDNWRKFACYSGIAPFDYQSGTSVRGKTQVSPIANQQVKKMLHLAAMCAVHFDPELKEYYLRRQADGKTKMSIINIIRNKLVSRVFAVVKRGTPFVDIKKYIT

SEQ ID NO: 196134 - protein, 322 aa, unidentified
MRYIGIDVSKATFVVAYSSDKGGEIRTFNNTTTGIKQFIGALPKDSRIHCVMEATGNYSAMLLYLLNVAGIAVSMENPLKIKNFARAMLSTVKTDKIDARLIALYGEKMNPQPFKIQGEAILRLRQKRTVIRQLTKQITAMSNLRGSLACLPVPDKGATHTVDETIEFLEKRRDRLQSELTDLVEVEFSRQLALLTTIKGIGITLATALIITTGGFTYFQNAKQVSRYLGICPTYEQSGTSVNIRGHINRNGDAYTRGLLYVAAWTASRFNTKCGETYTRLRQNGKPGKLAMIAVANKLVRQAFAVVTHDKEYVDGFVSNRP

SEQ ID NO: 196135 - protein, 341 aa, unidentified
MTLYIGVDIHARQQTLSYLDTEDGTTGQVELQHERDDVKGFYSKFQGEVIVGIEACGYTNWFEELMEQLGHQLLVGDAAEIRRLARRRQKNDRRDADLLLELLVHNEFPALFRYDRESREVLRQLRYRHKLVKLRTMVINTLHALAINCGLSLRAKLLTQGGRKQLRALQLSAISQQQRDELLSLADELTGRIQTVEQWLQMQASSDARVQRLQTHPGVGLLTSLCLVHTLGDLSRFSSTRKVAAYVGFDPMEDSSAERKAYGGISKAGSRLLRYLLVEAGQTAAKHDEHLKQFYRRLLPRRGKARAKVAVARKLLIRCFIMGRAEIDYAEFLRRGQQEAE

SEQ ID NO: 196136 - protein, 429 aa, unidentified
MNNVDSIRLERFRQIRKEIRGSREFMVVGIDVAKTKNYAFYGTAIGKTLLKRMIFENSTEGFEKLLIQEDNLKAMNGLEKVVYGLEPTANYHKPLGEHLIKCNRNVVLVSGSAVKNNRTMIDGRWDKHDTKDAAVIADLISQGKILFYEYASMPLRDLRNLLSLKRRLKKQEHSQKVRIRNHLLAQYFPELDRYYRNWGQEGLAIVRWCLDPSIITGLEYEEFARLVAPGGRGGISQQERLKAVWQKAMKSIGCSVGLSLDIEAKLMVEGLKYTRESIRNVEKKIEEICLGLPEYKYLLSIPGFGPDISSKVLGAIGYPFRFDNGSQVLKMSGMDLSAQRSGKNSDNATPKLSKSGKADLRYALYQAALIASCKSLPFVKYYTEKLRGRAKEKGIKTKMRVKLAAKLLIIAWTLMKKQEYFDPGYIVLE

SEQ ID NO: 196137 - protein, 459 aa, unidentified
MARARRKGNGLPAQLAAVNLHAAGIDIGSQEHWVAVPADCGPQPVRRFGACTADLEALATWLRECRVTTVAMEATGVYWIPLFELLEARGFGVVLADAREVQRAPGRPKTDVQDCQWLQRLHTYGLLAAAFRPPEQICVLRSYLRQRSMLVAYASHHVQHMQKALTQMNLKLQHVVSDITGATGMAIIQAILAGERNPSVLARLRNRHCQHDEAEIARALQGTWRTEHLFALQQAVELYEFYHRQIAACDQQIADQLQTLAEQSSSKPLSPTPRAPKRRRPTLHCDVREPLVRATGVDLTAIEGINEHTALVLLSEIGTDMSRWPTEKQFAAWLGLCPLHKISGGKLLARKVRPGVNRAAGALRLAASSLQRSQSALGAFFRRLKARVGTPKAIVATAHKLARLVYRLLKHGEAYVMQGMAEYEQIYRDRVVKQLTRKAQELGYQLLPTNTQIPQEAAG

SEQ ID NO: 196138 - protein, 354 aa, unidentified
MKYFAGMDVSLEETAICVVDETGQMIKEARATSEPDALHALLASFNLPFERVGLEACSLTAWLHGELTSAGWPAICIESRHAKAAMGAMPNKTDRNDARAIAQIMRTGWFKAVHVKTPTCRSWRSLLVARRAVLNQMRTIENVVRAILRETGLKLGTPARKDFIVRAREFVAGEKGLAMMIDPLLEILATMLREFTRLTKQVLVIVRDEPVCRRLMSTPGVGPLTALAFRATIDRPERFKKSRDVGAHLGLTPRRYQSGETDIQGRISRCGDELARTALYEAAHSLLIRSKKWSALRAWGMKIAKRRGMARARVAVARKLATILHRMWVDNTEFRFGREQAANPTIKAITVVAA

SEQ ID NO: 196139 - protein, 370 aa, unidentified
MNTTHAVAGIDPHKRTATVAVVDVVGVLVTSLSFAVTESGIAELLALLRSTSLSIDRVGVEGSGGLGRPVMLALAAAGYEVREVQANRTADRRKRRRRAKTDVEDAEAIARETLADPDLPPAGKDATPSPASNELDVLRDWRESLVLQRVRLLTEAEPVLVSLPLQLREQLPATSRVLASLKRLAELEGVDAALSAGDRLKLDRLAASRADIVAISARIKKLDAQIPALLKAMGCSLTAIHGIGVVTAMTLLTEVGDPHRFSTEARFARWCGVAPVAMSSGEGDGPPRHHRLDLGGNRKVNSVLHIIHVTQARCHPDAQAYLIRRAEENKTKRAARRAHKRQLANVIIRRMWNDADDLARANSTPSTAAA

SEQ ID NO: 196140 - protein, 411 aa, unidentified
MEKITTVGIDLAKNVFSIHGVDVAGRTVLRRAVRRDQLEEVVATLPACLIGMEACSGAHEWARRFILYGHTVKLMAPKFVSPYRKSGKNDGNDAEAICEAVSRPNMRFVPVKSVEQQALLTLHRVRQGFVSERTATINRLRGLMSEFGVVLPLRSKTIRQQAAGASENLPTLVRRVIAELLEHLQLLDTRIEAHDREIEVQARHCEPARRLMKVRGIGPITALAIVASVGNAREFKNGRQFSAWIGLVPSQYSTGGKARLGHISKQGDPYLRCLLFQGARAVLHSALGHHDRMSRWGCSSCRADAATTARSWRSPTRTHALPGRCSARTRSSSQPEVLHENCQRGDDESVRPAPVEPDQHVGGIRCRLTIEEWACGFHQGVSWVSWRGNLEILAYLLSKKIVDFAVPRDRR

SEQ ID NO: 196141 - protein, 355 aa, unidentified
MRTYYVGMDVHSATVVMVVLNGAGKQVMESIIETSAESVRSFFKQPRLRGEVYATFEEGNQAGWLYDVVRPLVSNVVVCDPRHNKLLQAGNKSDRVDARKLAQLLRNGSLHAVYHGNKGVRTLKELVRNYDSLVSDASRVMNRLKAIYRGRAIACRGSEVYRGDRRQKWLNKLNEPGARQRASSLYAQLEELNRLRQEAKKEMLREARRHPAYKLLLSMPWLGPISVAQIIAVVGTPFRFRSKRQFWTYVGLAVVTKTSAEYVMVDGLVRRSLRPVTTRGLNRNHNHLLKRVFKQAATSACADGPFKAAFEARLAQGMDPSLARLTIARKLVATTLAIWKRGEQFSPERMKQQVA

SEQ ID NO: 196142 - protein, 342 aa, unidentified
MNGDYGGRQYVGIDLHRRRSVIVRMTPEGEQLGWVRIDNDPVALGLELAKAGPDPEVVLEATYGWYWAVDALQTAGAKVHLAHPLGVKGFADRRVKNDVRDAADLADLLRMGRLPEAYIATPHERELRELVRHRAKFVALRSGLKAQVHGVLAKQGLLPEVSDVFGPTGQAWLRTASLDLVYRQRIDSLLELIDAYDGEIELFRVMIANRLRGHRGYRAIQQISGIGPTFAAVLVAEIGDVTRFSRPEKLCCWAGLTPRHRESDTSVHRGPITKQGSKLVRWAAIEACQRTRPGTKLAVDRTRIITARGRNIGVVAAARRLLTLVFYGLRDGQIRALAAGAG

SEQ ID NO: 196143 - protein, 359 aa, unidentified
MLISSRGSADRRDGLLARSRKPERLGGSDSRIDDKEGMRAMSEEQQQGWIGIDVSKQWLECACAGAPAQAQRYRNEAAGIDALLAWLRAAPVGLVVLEATGGYETAAATALAGAAVPVAVVNPKQVRDFARAKGILAKTDRIDAQVLAEFARLIRPAVRALPDEQQREFTELVDRRAQLVAMRAQERTRLASVLPVARKSVAEHIRWLDARIADLDIELTHRLRTSAAWQVKVDLLRAVPGVGPVTLFTLLARLPELGQLDRRGIAALVGLAPMAADSGPHRGQRFVQGGRAEVRAVLYMATLAAIRHNPPIQAVFTRLTAAGKPFKVALTACMRKLLTILNAIVKSNQPWNPSLHTPA

SEQ ID NO: 196144 - protein, 430 aa, unidentified
MKSSTQNTKIEAITETTLVLGIDVGSETHYARAFDYRGIEYSKKPFKFSNDEAGFVTFKAWILDIKEKHGKDKVVPGMEPTGHYWFNLGKFLQDNEMKPVLVNPHHVKKSKELDDNNPTKNDRKDPKVIAGLVREGCYMIPYLPEGVYADLRTASNMRFQLQAELTRIQNRISRWFNIYFPEYKTVYGQPDAKSGMLILKVAPLPEDILTLGIDGVNQIWRDAKVRAVGKARAKTLIEAAEHSVGSKEGEISARMENRMLLEDYESRNTRLQEVVALIEELVKKIPMAEKLLEIKGVGIKTVSGFLAEVGDISRFNNPKELQKLAGLALVENSSGKHKGETTISRRGRKRLRYLLFEVAMSLVSKNPEFRELHSYYTTRKLNPLKKMQSLMAVAAKLLRVFFAMLTKGVDYDPKKLVGDIKRPAVYLQVA

SEQ ID NO: 196145 - protein, 315 aa, unidentified
MDNSLPQTVGIDISKATLDAYAHPAGCERQFANTAKGHKELIGWLAQWRVDRIAYEATGAYHRQLEQALAHLPCVKLNPARARRFAQAAGTLAKTDKIDAVILARMAMTLQPPVRPATTPQQARLAELISARDSLVRDKIALQNQAKNLTLTLLERQHKTRLDQIDRHIEQLDAELATSIAADPALARRHQIIASIAGVGIRTADQLVATMPELGTLDPKQAASLAGLAPVARQSGQWKGRSFIQGGRANVRRALYMPALVAARYNPDLKAKYQSLIEAGKPAKVAVVTLMRKLIVMANALIKANRLWVADRACA

SEQ ID NO: 196146 - protein, 394 aa, unidentified
MKLVGIDVGKNSHHFCVIDKETGELDVTPSSFSNNKDGFDSLLDLLKPYSKKSILIGMEDTGHYHLALLKFLLNNGFSVALINPKTTDLTRRLEGNITKNDKLDTITICDVLDTPERKKQYRITKVNSFDLYEQRQLTRHHHNLKEELNVYCNRLQKSIDLVFPEFNTLFKSKYGTVYMNLLKTFGSAEAVASTDIRTIRKCFEIKGKGNRISLTPDQLKECAKNSIGISSVAEVIQIKHLVAQIELIKEQITEIDKKIEEFSIQNNSPILTIPGISHFSGTSILAELGDIRNYSKPSQIIKFAGVAPSHYESSQFNAPHTAITKKGSKYLRKTLYQIILSVINNNPVFKKYYQLKISQGKGHRCAQGHCIRKLLRIIYHLLDTGQSFDPALLR

SEQ ID NO: 196147 - protein, 421 aa, unidentified
MNQLTDAGYTAYVGIDWAAAKHDICVQAAAGGAREFARISSQPEGIEAWAQDLYRRFGGPIAVALELNKGPIVSALQKYDFFVLYPINPSTLAKYRETFTPSGAKDDPSDAELAVDLITRHPERFSPLKPQSVTMRKLIALVEQRDKFLGDRGRLVNRLGHALKQYYPQVLEWFNEHHTVVFCDFLSRWPTLRQVKRARKASLERFFKSHHVHSAQLIEKRITAIKTAMPLTADAAVIEPHRLQVEILIEQLRITIKALKRFDEEIAATANKLPDYDLLFSPLPGAAQVLAPRLLAAFGEDRQRYPHADALQMYSGIAPVTKRSGKKTWVHWRWQCPTFVRQTFVDWASQTINKSAWAGAYYRQQRAKGCSYQVAVRALAFKWIRILHRCWQDRLPYDESKYLEALRRKGSPLLKYLAEAA

SEQ ID NO: 196148 - protein, 335 aa, unidentified
MKHTVIGMDIAKRVFQLHAVDPETGEIERIKLARGEVLAFFAQRCPALVAIEACGSAHWWGRQLTALGHEVRLIAPKSVRPFVIGNKTDAADARAIWTAVQQPGAHFVAIKTEQQQAILSLHRMRAQLMKFRIMQTNALRGLLYEFGVVLPEGVCALAKAWPAAMATVADQLPGMLSLREQWTRVQTTEAEIAAIERRLASALRESQSCKQIAAIPGVGLLTATAAVAVMGNANNFKSGREFAAWLGLVPRQTGTGGRIRQLGLSKRGDSYLRTLLMHGARSIIVRTHRSPWIEALIKRRPYSVVVAALANKLARTIWAVLAKGRPYDPAAFSAV

SEQ ID NO: 196149 - protein, 343 aa, unidentified
MTCFVGLDVSQKMTAVCVVDNAGHRLWRGQCPTVPEQISILVRRHAGVDARIGIETGAMTPWLVHELRNLGLEVICLDARHARAALEMQINKTDQNDAEGLAQIVRTGWYRSVHVKSFDSHRARALLGARTQLIGMTTRLSNHIRGVLKTFGLLPGTMRGLPFDRKVEALLIGRSDVALIVRPMLVAWRQLRKQITAFDKVIRGLVRSNSACRLLMSVPGIGVLSSLAYVSTVEDPGRFSRSRSVGAHLGLTPRQYQSGEVDRSGRISRCGDTLARTLLYEAAVVILARVKKASSLKEWARAIAKRSGNGKARVALARKLSVILHSVWRSGKPFRWSHAANVA

SEQ ID NO: 196150 - protein, 340 aa, unidentified
MKEDSTAKKKTGFNKHENRIREMAAKQRLTIGLDLGDRTSRYCILNEAGEVVNEDQLPTSKTGFSSLLEKMPSSRVALEVGTHSPWVSLHIASLGHEVIVANPHKVKLITQSVRKNDRIDAQQLARLARVDPKLLSPIRHRGPEAQADLAVIRARAELMEARTGLINSARGLAKPMGERLKQCDADQVKEGLADGLSAAVRRVIGPLLESVEALSEQIAVYDEKIEEIGKRYPEMELLTQVYGVGTLIALTYMLTIEDAQRFEHSRDVGPYLGLTRKQRDSGDSEPELGISKNGDRLLRSLLVQGAHCIMRQGAPDSDLKAWGVGKLENSGVNPKTETTS

SEQ ID NO: 196151 - protein, 330 aa, unidentified
MKNYEEVVGIDVSKKTLDAYCHQAQVHKVFVNDVIGYKSLLKWVLKVTKDSKVFYCFENTGYYSLKLALYLDSQSVVYVEESPLKIKRCSGIVKEKTDRIDAILIARYAWLYREELKPSTVKSMSHLELGRLLALRDQLVRNNAGLKGTLKEMKVLLSSSSTDVGCLSLKRSIDYLEKQVKSIETRIKDILASDASMNKNYELLTSLKGVGLVVACQLIYHTGNFTRFASWRAFSSYCGTAPFKHESGTSIHRRKQCHYLGDRKMKSLLSMASVSAIQHDSELRLYYKRKLAEGKDKMLAINNVRNKLIARAFAVVKRGTPYVVLQQHAA

SEQ ID NO: 196152 - protein, 451 aa, unidentified
MPARRKTTAKTNTQLPTLHPHAAGIDLGARAIYVAVPPGTCTSTVRTFTTFTDDLLKLRDWLVKCGVRTVAMESTSVYWIPLFQILEAAGLEVCRVNARHCKNLPGRKTDVSDCQWLQYLHSVGLLRASFRPPEQICAVRSLLRHRSALVRYASDHVRHLHKALTQMNLQLHNVLSDLTGVTGLCILEAILEGERDPQKLAALKDHRIKASRDTLARSLQGDWRAEHLFVLQQALDTWRHYQQLIARCDAQIQKDLARFETQTPAHPLPPPASSHRRAQRNEPRFDARAELHRLCGVDLTQVPGVQVNTALVLFSELGPDFTDRFPTAKCFASWLGLCPDNRITGGKIISVKTRDVKSRSAEALRLAAQSLWRAKNYLGDCFRRWKARLGTAKAITAMAHKLARILWHLTKHRTPYDPTVWQHAEEKLRQKKIQRLHQSAAALGFKLLTTS

SEQ ID NO: 196153 - protein, 348 aa, unidentified
MNQRYEKSRQYVGIDLHRRRSVIVRMDGEGEVLECVRIENSVPALVEQVAKAGPGAPVAVEATYGWYWAVDALTETGFAVTLAHPRGVKSMQDRRAKTDKLDATELADLLRLDRLATAWIAPREIRELRELVRYRHKLVGERSAIKASIHAVLGKCGVIPEIADIFGPVGAKMLDSLVLPEPYASRVASQRRIIAVLSAEIAGVESETARRLKDNREYRALLTINGVGPVMAAIFVAEIGDVHRFATADQLACWTGLTTRVDSSDRRTRYGHVSKQGSRLLRWAAVEGCQRAREPYLAGKRRQIIDRRGRNAQHIATVATARQMMKVVYYTMRDGHARCLDAPTPVAS

SEQ ID NO: 196154 - protein, 387 aa, unidentified
MPQPNDLSRSLVALDQDSTIIAVVEMSQSSWLIGGVLPGIERQPCKKLEPSAERLLGLLHRWRDEAVRAGKKITRIALAFEAGRDGFWLARWLNARGVEAHVIHPSSVAVSRQHRRAKTDRLDTELLKRGFLGWLRGERGHCSMARVPTIAEEDAKRPNRERECLVGERTRIVNRMKATLARLGIRNFKPTLRKAAERLATLQTPEGMPLPPNVSAELQRDMARLGFVVSQIKEIEEVREKRLEQAPEIGSHAMVRLLARVVGVGIETADMLVHEVLSRPMRDRKAVARYAGLTGSPDESGAKRREQGLARAGNARVRRGMIQLAWRFLLFQKQSALAQWYRARTADSRLGTRKTMIVALARKLLIALWRFVTAGETLEGVILRPAG

SEQ ID NO: 196155 - protein, 348 aa, unidentified
MRSIGCDLHARQQTLAMLDTTTGEVANLTLAHEGNQVREFYSRLPRPVLVGIEAGGSMPWFLNLMDELGIECRVGHPAQIRATEPRKQKHDRRDAELILKLLAENRFPAIWLPRKELLDLRALRLHRHQWVRIRTRIQNALQAIALAHGLRRGPRLWSSDGQEKIAFLPLMPHTADRRSALQTMYQTIEAEIEKLTQVVAEQAEKRSAARRLMTHPGVGPVTALATDVFLGDPKRFADGKALASYVGIIPREYSRGGQQRLGGITKQGNPLLRFLWGEAGAHAVRRDPELKRFYRRKLMQKGLGKARVAVARKLGIRLWIMLRDEIDYPEFCRRGQMQARGAACGGDA

SEQ ID NO: 196156 - protein, 484 aa, unidentified
MFYMKTTGGNGQGLVSAQWAALCFKGKNAERGMSARHALIAPRLGLNRTAAKGCAMRSDGRVLNPRRSAAKPQYAALDVSNEETAVHIINGAGATVWRGKRVSDPDVLTAALQRYAPDLVRVGLETGPLTPWLYHTCKALGLPIVYLDARHARAATALQRNKTDARDAETLAQLVRMGWYREARVKSYATHTVRHLVGARAQLMGVAVDLSNQIRSTLKTFGLMAGKGAGRAFENRVHDLIAERPTVAGIVEPLLAAWRAVRGQISVPDRRLIALAKGDATCRLLMTCPGVGVIVATSFAAAIEAPEHFRHSRSVGAYLRLTPARHQSGEIDRSGGISRRGDRLMRTYLFEAAASLLVRVRQDSALKAWGRALVERMEFKHAAVAVARKLAVVLHAMWRAGTPSSLGPRPYEALVAEARRRRSPRSAGVKRTEASPPGREQSHPGLGLVAGLEPDRAFDMVSSASRRMVRRSIGPTAETTTIRR

SEQ ID NO: 196157 - protein, 412 aa, unidentified
MSKMAYPICCGLDVHKSFVYACIATTNEKGITTYKSHRFSTFTKGLKELLEWLLKNNCRDVCMESTGKYWIPIYNILEADCKVVLVHPKYVKSVRGKKTDKKDAERIADIFRHDLVNGSFIPPPDIRQLRDLMRYRFKLTNCSTGEKNRAQNCLTVSNFKLDDVFSNVFGKSSQAIINQILEHPNEHFDVADFVDGRCKTPIEDIQAAVDGEMCSEQIEKLKIIRSHMDDLDKAKANLDSVILTLAQKFLPQINIVSTAPGIKSFSAIAVIAEIGVDMSVFSTAKHICSWAGLSPCNDQSAGKKKTTRISRAGIYIKPLLVQCANAAIKSDKYPEIRNRYLKLKKRRGHKKAIIAIARILLVAIYNMLKKNEPYNPELHRISDEQPNSNTFSVDHAIRILLSQGYSLTPPSR

SEQ ID NO: 196158 - protein, 426 aa, unidentified
MKLEEKELAKPIRAWIGIDWADEKHDVSLYDLETGKQEVLTIAQNPEALQEWLGQLRARYEGGYVAVVLEQGRGGLLNALMSCEFLVLYIINPKSLSSFREAFYGSGATSDPVDAELMRDMVRQNPSRFRAWRPDDVPTRSLRLLTEGRRHLVNQSTALTNQLTALLKGYYPQALAWVGSLDTASACDFLEQWPTLQSLQISRRRQILRFYETHPRAALDLNEQLKQIQDARALTQDEAVLESSALMVQALVSQLRPLLASIAEFDRKIATIFRKHPDRPIFESFPGAGAALAPRLTAAFGTDRDRFQAATEMQELAGIAPVTEKSGKKTFVHWRYACPKFMRQTFQEFADHSRRWCTWAKAHYELLRSRGKSHNAAVRALAYKWIRILFRCWKDRQPYQDEVYTNSLFKHGSPLSQLLAKPVENP

SEQ ID NO: 196159 - protein, 504 aa, unidentified
MVLGHARCGAVTAAVRAIQSGEHLPGHLDAIVERLRPAYLKANSVPGDLIDQVVRAQILGTVSALAHDGPLAALVNRGELGIKADVCVRLPPAREGGRRTSRIEALPATWRDITDLGQRLLDDGVQIVVMEATSEYRRSWYYLLEACGLNVWLASPSHARQLAGRPKTDRLDCQWLARLAEMGLLRPSFVPLPEVRALRDLTRTRLHLVRDRTRLWQRLEKLLEGALIRLSSAVGDMAGNKSARRILEAIADGERDPGRLAALAHAGVKGGRDGIRAALEGMMPGEHHIRLIRTLLGLIDGLDREISALEDEISAHLAAMAGAWGVTADGVPSPGPGPDPAVLPAGERLAEVPGISADLATAIIAETGLDMSRFPTAAHLVSWAGLSPVAQQSGKRGKKAKKGKGDAYLKGYCGQSALGAARTSTFLGERYRRLARRIGGARAQVAVARSILTIVWHLLADPSARYADLGPDWHARKVNRDRATRNHVEHLKALGYHVTLTPAA

SEQ ID NO: 196160 - protein, 377 aa, unidentified
MRKVALDLGARKTVLCEVREGRVVGRATVAAVDSLASLLGPEQPRAVVAIEACREAWHVHDLLTSWGNEVVLVDTTRSRRLGIGQHGRKTDRIDAEVLALALERGGIPVAHVLSPHRRELRRWLNVRRSLVESRAQMVTTARGIVREHGDGLPRCATAHFARNARKHALDAELRAVLEPLLKLLDTITTELEVVESKLTKLCATEPVVTQLATIPGVGPIVSASFVSVIDEAKRFRSAHHVESYLGLVPNEDTSGGRRRLGAITKKGNKYLRALLVQSAWSILKSADRHDPLRIWADSVAARRGKQVAVVALARRLVGVLWAMWRDGTVYDAASLAHASSKGTRKAAQSVEFRAAALASAAKKLSNGLATKEVTPET

SEQ ID NO: 196161 - protein, 414 aa, unidentified
MNTLVSNTSLSGTLIALDIAKKHHDAKIRHPDGRTSYLRIENTLEGFNRLLALTASPHDDIIAAFEPTADYHRNIAWWLHKQGVKCHLVSSVRCARAREMLFKTWDKNDRKDASVIMYLLEQGLSSPFYDPLANGIIDIQEISNTYHQVTLARTRCLNSLVNHYLTLYFPEAEQFLHMSRAEWFCQFLLQFPTPSCITSLNRDLFVKQSWDVVGRKQYKKQFLEHLYDVAADSIALPLSEDSLAVTTFRLQLHRYVGLSAQRLQLEKQAENYLQERSDYRHLRTIPGIGAIIALMIIAESGDLTRFAHYRQYLNFCGFNLSASQSGQKHSGYRLSKRGNARLRYAFWLAATVAVRTRENSFRYKYECYIRENGDKPDQKRKAMTAVATKVARVAHAIVKQDIDYKGYYEISHRT

SEQ ID NO: 196162 - protein, 332 aa, unidentified
MDLIHIGIDISKKTLDLSIYGRERRDSGFLHVTNDKKGFSKILSWVKGLKIRLSQVWFCMEHTGEYGYALALFFDEHGITYSMVSGADIKGANPSKKGKNDKQDAAMIARYAHEKRDSLAPSHLNIRPLYELRCLLNERRMYVRQRAQWKAQRSERRLFSTKHRDSRVNRAIKTLSATIREIEEEIRSVIAVNEDIRRNFELIMSIPGIGLINAVNFIVATANFSTFNNARRYASHICVAPFAVVSGTSINNGTHTSKIGRHDLKTELRTTVLAVLKADSEMRKYFDRRKADGKKYNVIANNIMFKLICRVFAVVRRGTGFVETHKYLQKKE

SEQ ID NO: 196163 - protein, 362 aa, unidentified
MTESTPIVAFDQHAATTVAAVLLPGQRTPALHALASDSPTILRFVARLRRQGPVECCYEAGPCGFELQRALTSHGVPCDVIAPALIPRRPGDRIKTDRRDAGQLAVLYRAGALTAIHVPTEHEEAARDLLRCREDIRADLLRAKHRLSKFLLRHGRRFTGTKKAWTRRHTAWLQAQTWTEPALGQTHRAYVRAVDDAIARLHAIDTELRDLLPLQPLRARVERLRCFRGIDDLTALTIAAELGDPRRFPSAPSLMAYIGLVPSEHSSGTKQARGAITKTGNAHVRRVLIESAWHYRHHPFLGRSLRLRQHGAPAAAVDVAWRAQSRLHRRYRRLAARGKPKQLIVTAIARELTGFLWAALTQ

SEQ ID NO: 196164 - protein, 340 aa, unidentified
MITLGVDVHKKYSQVAVLNEQGEVRVNVKMANEKRLFSELLSEFNEPCQAVIEAGYSWGTMFDLLTELGVDVTVAHALKVKAIASAKIKTDKIDAKILAQLLKANLIPEVHVPSKDVRQQKDLLRQRSWLVKIRTMLKNRIHQVIARNHIELPEYKDLFGVGGRKFLNSLCLSQPDQGILQQDLILFDFINEHIKQTTKWVEESVKDNRYRQILQSLPGFGTVFSALAAIEIDTIDRFSHPAKLSSYAGLIPSTYASGGKVYHGDLIPHCNHWLRYAFIEASWVAITSSPYCRSLYWRLKKNKKATTAIVAVARRLSEIAYHCLKENRNYEERPYKIYSA

SEQ ID NO: 196165 - protein, 468 aa, unidentified
MMEDTRKKAQKPEDCAGRKTLTAALQVVNANAAGIDLGSREHYVAVPPDRDERPVRHFGCLTPDLHEMARWLNGCGVQTVAMEATGVYWVPVAQVLESEGLEVVLVDASDLKNVKGRKTDVQDCQWAQQLHTFGLLKGAFRPTKEIQVLRGYWRHRETLVAECAQQIHRMQKALEQMNLQLHKVLSDISGVTGMQILRAILAGERDGAVLARMRNGRLKCSEETLAKALTGDYRQEHLFALRQAVELYDVYQQKIAECDAEIQKVMAQFQRPPARGTRNPKASKKKATSRRKNQCHFNLAEELFQIAGVDVTRIDGIDALTAQTVFAEVGFDLSAFPTEHHFASWTRLCPNNRITGGKIISSRRRRGKNRVALAFRRGAQSLHHSQSALGGFYRRMVAKMGPGKATTAVAHKLARLFYRMVRYGQDYVDQGEKQYQQRYQEHQMRLLKKRARHMGYALVCAQTGVVVS

SEQ ID NO: 196166 - protein, 450 aa, unidentified
MGRPQVIDDEERERVYEKVAAVDVAKDSGMVCTRLPHPSRPGTRQSTVWTVQARMGAIRELGRQLARGGIQTVTLESTSDYWRIWFFVLEGCGLAVQLVNSSQAKNLPGRPKTDKLDAMWLARLTEMGLLRASFVPPAPIRALRDYTRARTRLTQERTRCWQRLEKLLESALIKLSSVASKLTTLSAQDMVRALIAGERDPQVLAALARGKMKAKHDDLVEALDGMFGDHHGELAQLLLDQIAFLDSKIAELTARIQEQAAAQPGAWGVNADGTTGPGAGTSPGDPVLPVVQRLAQVPGISEDLARSIIAETGLDMSRFPDAAHLVSWAGLCPRAHQSGPRARNGKKGRGNGYLRGYLGQAAIGAAATATFLGERYHRIARRRGKAKAQVAVARSILVIIWHLLASPEARFTDLGYGYYQARTDKDKKIKNHIRQIEALLGHPVTIAKAA

SEQ ID NO: 196167 - protein, 321 aa, unidentified
MIHLAVDVAKAELDTFDGERSLTVQNTEDGIRKRLKALPPQSVVALEPTSTYGDLLARLAYEEGHTVYIVQPSWIKAHRRSCGIRAKTDRVDAKQIHDYILKNKGDLHPWRPLCELLQELKGLVRQRQSLADDIARARQRYRALQMNPQHIDMLLDGMKKAKKELDKSLKTALAKIPTVKVLLGVPGIGIRIAATVIVFLEHIAFVSSDSFIAFSGLDPVPNDSGTVKGQRRISKRGDVFVRRALYMAAMAACSRAPWKERYQSLKARGLKPKQALIALAKKIATIVFHLHRKQIAFDPEMVKYKGPQDNAGKRQVTLQEG

SEQ ID NO: 196168 - protein, 414 aa, unidentified
MELLHERCAALDIGKKDLKACVRTPSVRRKHSRSQQIRTFATTTNALLELRDWLVAERVSLVVLEATGDYWRGAFYLLEDDLNVILVNAAHAKGLPGRKTDVCDASWLCQMGECGLLRASFVPPEPIRQLRDLTRYRTTLATERTREAQRLEKELEDAGIKLSSVATDILGVSGRAMLAALIDGERDAQVLAEMAKARMRPKIPQLVAALTGNFGEHHAFLCRLHLERIDQLSAAIGELSARIEEQMRPFARQLEHLMTIPGVGQTVAEVIVAETGADMSRFRTAENLASWAGVCPGHHESAGKRKSGRTRHGDRWLCGALGTAAMAAARTRDSTYLGARYRRLAPRLGKKKAIVAVEHSILTAAWHMLTDDVDYHDLGGDYFARLDPERAMRRIVRQANALGFTVRFDPIQAA

SEQ ID NO: 196169 - protein, 339 aa, unidentified
MDKSDFAGIEVSKDELLVALRRDEQTLPLKTFPNTGEGHRTLARYLARKGRRVRVCLESTGVYGLDLALLLHKRPGVEVMVANPRAVRHFAQALMQRSKTDPLDARMLLEFAARMPFQPFQPPSATALHLRALARRIEAVTDLCAAEKNRLHAASAAQALPAAVRQDIRSSIAFQERALERLARQARKLIAGDPLWQERFEQLDSIPGIAPTSAIAILAELALLSPDREVRQWVAAAGLDPREHSSGTSVHKKTCISKAGNRHLRRALYRPALVAVQHDPHLRAFYPHLLDNGKEKLQALVAVMRKLLHAIFGMWKHQQAYDGSKIYQLAPEVCTTEAA

SEQ ID NO: 196170 - protein, 430 aa, unidentified
MPLPHKRKRGDNLSSVIEIVYPTCCGIDVHKNFLVACIAKTNERGQTEHLIHRFSTNTGDLRRLADWLASHDCKDVCMESTGKYWIPVFNILEKTCTVCLTHPKYVKAIKGKKTDKKDAKRIAELFKCDLVRSSFIPPFDIRQIRDLCRYHAKLTYMTTSEKNRSQNCLTTCNFKLDAVFSDVFGKSASRILDNVIALGHSNFDVAPLLDRRCKASIEDVKAALDGEFSFAQSEKLKIIRKHMEHLETLKERLESLIFALSKNYQPEIDLLLTVPGISSPLTAIRILAEIGADMSVFETAKMLCSWAGVTPQNNESADKKKSTRISRAGAYLKPLLVQIALAVSNSKKHPEIRDKYQALKKRRGHKKAVIAIARRLLTAVWHILSKKELYNADLYRRADKPPVNRVLTPEQAFALLRRNGYQIVEPVIVA

SEQ ID NO: 196171 - protein, 413 aa, unidentified
MEVIHERVAGIDISKVDVKVCIRVPSGAGKRRRSEVRTFSAVTSGLLAMRDWLLAEGITVVGMEATGVYWKPVFYLLEHDMECWLLNARHMKSVPGRKTDVKDSEWIAKLVEHGLVRPSFVPPEPVRQLRDVTRYRTEVVRERTRETQRLEKLLEDTGIKLSATVSNILGVSGRAMLEALIAGEHDPHVLADLAKAGMRRKTDALAEALTGNFTTHHAFLARAMLDRIDACTATEAKLGEHIEVMLQPFRRRIELLVTIPGVQVRAAQVILAEIGADITRFPSAADLASWAGVCPGNYQSGGRSGGGKTRHGDPWLKAALGQAAVGAARTKDTYLAARYRRLVARRGKKRALVAVEHSILTAVWHMFTPDTDYADLGGHYFIERTGRARQTRRLISQLNQLGYQVTLQTEGTV

SEQ ID NO: 196172 - protein, 355 aa, unidentified
MNDAKYIGLDVHQATISVAVLDSAGKLVMEAILETEAETILQFIHGLRGSLHVTFEEGTCAAWLHDLLKPHVAKVLVCDPRKNALLKAGNKNDRIDARKLADLLRSGLLSAVYHGENGVRTLKELARSYLTLTRDTTRVMNRLKALYRSWAIPCAGQKVYAPHHRNQWLAKITEGGVRRRAEFYYQQLDALQTLRQQVRRDLLAESRKHGAMKLLRQIPSIGPIRAALLIALMQTPHRFRTKRQLWAYSGLALKTSTSGEYRILEGQLKRSKKFLAIRGLNTNHNHDLKNIFKGAATRAAAVPGPFQEFHAALVAKGMKPTMARLTLARKIAAITLIVWKKGVGFDAEYLKQQAA

SEQ ID NO: 196173 - protein, 340 aa, unidentified
MNITTLGIDIAKSVFHLHGTNKQGKLELKKRLRREQLLTFMKNFPPCLVAMEACGGAHYWARKFQSYGHTVKLIAPQYVKPYVKTNKNDYNDAEAINEAVGRPTMRFVGIKALWQQDIQSLHRARSRLMQLRNTLSSHTRGLLMEYGIVVPRQIGQLRQKLPLILADADNELSTDMRALFAGLYEQLQNADRLISEKNKQILAIHRESELSQRLGEIEGIGPLTATAFISAVGDAKMFKRGRDCSAWLGLVPRQYSTGGKTILGSISKRGDRYLRTNLIHGARSVIAKASNKTDPRSRWIQQLKSRVGMNKACVALANKNARILWAVMASGERYRASKQL

SEQ ID NO: 196174 - protein, 311 aa, unidentified
MAQGKMFVGIDVSKARLDVCPWPAGEGFAVANDRAGRSELIRRLKRLRPAAIGLEASGGYEREALAALLGAGLAARRLNPLRVRRFAQSCGFLAKNDRLDAEAIARFLAAVPQREAEHDPAAAALAELVTARRQLCDELTRCINQAEHATQTVVRRLAARRAVRLKADIVLLDKTIAQAVADDSRLARKEMLLRSVPGVGPVLAHTLLALMPELGRLTGRQAASLVGVAPFDCESGAFRGQRRIAGGRRPIRDVAYMAALVGSTHNPTLAAFKQRLAQAGKKPKVVLVALIRKLITILNAIVRDNQPWRVA

SEQ ID NO: 196175 - protein, 346 aa, unidentified
MEHYVGLDVSLKLTAICIVNERGKIVREGAVASNPEAIAGFVKSHAPHVARIGLETGATSTWLWTELSMLGLPVICIDARHAKAALKMQINKSDRNDAMGIARIMQCGWYKEVRVKDLDSHAIKGLLVSRALLVKIKRDLENQIRGLLKNLGLIIGRAKMNVFAVRAAAFVEDRPELVTAVEPLLKTREAVERQIADLDRKAMRLARNDAQVRRFMTAPGVGAITALCFLATIDDPTRFKRSRSVGAYLGLTTRRYASGEIDWTGRISKCGDKLLQSYLYEAANVLLTRVAKWSVLKAWGIRVAKRSGLRKAKVAVARKLAVILHRMWVDGTEFNWSAKEVAAQST

SEQ ID NO: 196176 - protein, 357 aa, unidentified
MSKRIRRQAKVQQYQYVGLDVSLAETAIAVVDESSNLLWHGKVDSTPEAIAEALQVHAPHAERVGLEAGQLSSWLYQSLKALEQPMICVDARHAKAALSLRLNKTDPNDALGLAEIMRVGWYREVVVKGQAAQSLRALLVARAQLVSQVTTLKNCVRGLLKVYGIVLAKKLRASFVANVREAVAGHATLEPVLDPIVRTLSATIEQLHVYDRAVSRHARDDETIRHLMTAPGVGPIVAMAYVTAVDTPARFARSSSVGVYFGMTPRRYQSGEVDKAGRISRCGDSMMRGLLFEAAKVLLARSAKPSDLQAWGRKLARRIGKKKATVAVARKLSVVLHRMWMTGETFRWTAASAPATA

SEQ ID NO: 196177 - protein, 348 aa, unidentified
MTVYCGVDFHARKQTISYLTIEDGEVQQTELQHEQGDIRGFYAKLRNLGPVIVGFETSGYAAWFEELLEELGCEIWIGMPAAIRRQARRRQKNDRRDADLILELMLRGDFPRLHRYTPESREVLQQLRYRHRLVKLRTIVVNSLQYMALSRGVSLRSKLLTGRGQERMKQLPLPVHLAKQRDELCELLKELTQKIETAESWLELKAKQDARVERLRTHPGIGLLTGLCLVYTLEQVQRFANPRKVTAYVGFDPVEDSSGERQRIGAISKQGSRLLRFLLVEAGQVAVRSDPDLKAAYWRVQLRRNHQKAKVAVARRLLVRAFIMLRDEIDYAEFQRRGVAARSTRRTA

SEQ ID NO: 196178 - protein, 401 aa, unidentified
MEGPIVSIDVSNGNSHYMCFIKNNKRFGKVKKIDHDIEGFKRLLEDIQKLEAETNEKVCAVFEETGVYTKPLERFLSKNSIKTYIINPLESARKRKEEIHNKKTDKLDPISISKVYYDKEEMMELKKKDETYNWLRKKNRLYEDQLNHLRKYKVTFQNQLSICFPGYLDLFKDGYSDIPMTILKKYPHPDLLKNKKAETVARYLEKNTCHTHKVSLEYALKIIEFAKKTYPGCEKDDVEVEIFKILLDKVIETQRECEKTLNEMITVASTLEEYRYILSIDGIGPNLAARIIAEIGDIEEFKSREALVAYAGLDPHIYQSGDQDGKHLKISKKGNKYLRCLLFLAVGCSIRGAKDNPVNRFYQKKKQQSNPLNSKAAKTACTAKLLKIIYGICKNKTTYER

SEQ ID NO: 196179 - protein, 484 aa, unidentified
MSGRNRKTPPPPPDDLCRLARGAAQQRRHADDCARIAALPVQHPHAAGIDAGEQSHWVCVEATPDGSDTVREFAAHTAGLRQLVDWLRQCGVTTVALEATGAYGHVLLLTLLEAGLTAILTPPQFARQIKGRPKTDRRDCQWIQRLHKLGMLPSVFRPDAATHTLRDYVRQRGNLVRLSGQHIQRMQKALELMNLKLTGVLGDITGVTGLKVLRAILAGQRDPQQLAKLRDRRCKHTAAEIATALDGRYRPEHLLELRCSLALWDKYQEMITVVDDAIAEQLRSMRRQTELPPLAPRIRVRGRKPHDPRFDVRTALYYATGVDLTAIEGIDEVHALTLVSELGSDLSKWPTLKQFTCWLGLCPNWKKTGGKVQSSHTRRGKNRAARALRLAAWCLLRSKSYLGPYLRRQRSRLGAPKAITAAAHKLARIVYHLMRYGVAYMKQTEQAYAEQVRARLEKQLRRRAAELGFELRKMETAPASTVEE

SEQ ID NO: 196180 - protein, 368 aa, unidentified
MTTEAITVIGGVDTHKHTHYAAAVDEHGRLLGHQEFPATEHGYQALLSWLRRHGHVLALGVESTGSFGATLTRALTKAGERVIEVNRPNRLARRMDGKSDCLDAEQIARAVLGKTSTATPKAKSGAVEVIRTLRVTRASAVKARTQAFNTLWGIMIGAPSPLRDELVVLTKRTLVNKCAGLRPETDDLLSVANDHDRLLLAAVKTSLRDLARRWKTLDAEIKALNRQIEAIVRATAPELVELHGVGVEVAGQFLVTAGDNAERIRNEAAFAKLCGVAPQPASSGRTTGRHRLSRSGDRAANSALYIVTIVRMRHHQPTRDYVERRTAEGLSKREIICCLKRYIAREIYTNLPKPKTAEPPLRVVQDAA

SEQ ID NO: 196181 - protein, 343 aa, unidentified
MQSITTIGLDIAKSVFQVHGVDASGQVVVRRQLRRRHVLAFFQKLQPCLVGIEACASSHHWSRELQALGHTVRLMPAAYVKPYVKRQKNDATDAEAICEAVMRPTMRFVPTKTTEQQACLMLHRARHLFIRQQTAVINSIRAYLAEFGIIAPVGRRGVERLLEVVADTADQRLPEIARACVAALGEQLRALKAQILKFDRCIIAWHRSNATSRQLDDIPGVGPVLATALVGSVADPKAFRSGRDFSAWVGLVPRQNSSGGKDKLGSISKQGDRYLRSLFTAGALAVIRYAKIHGTRHRPWLTALLARRPTKVAAIALANKLARMAWAMMARNEQYKEPAALAA

SEQ ID NO: 196182 - protein, 346 aa, unidentified
MYDRKDIILAVDYHAENTEVRWLNCWTGQERCLRIPTTRGGLLRLVEKAGGEAGQVGGKVIWIMESTTGWARVKELIGSRVQFILANVLLMPLPPKAYRRKSDKIDTGRMLREFLNGSLPRSHQPMVWWREVRRLVDSRQDLVERQTAVKNWIVHFLHHETWYDREGLWTQEGMKRLGALKLSAGDRMILNLKLQELEQLAQRRGQMEAAMQAVYDQWPQAQRVDEVRGIGMVTAVSILAHIGPIERFPTAEDLILYAGLAPGHRRSDQTTHNGRIGGGGTDGHLRYLLIESMQWVCQIPRYRPAFERAQAKRGTNVARIIVARMLLRSIFKMLRDEVRFNQVPAA

SEQ ID NO: 196183 - protein, 416 aa, unidentified
MLFIGDDWAEDHHDIEIEDADGRRLARARLPEGLEGITRLHALVAEHAPAAWAELLPEQVAGRVVVGIETDRGPWVTALRAAGYQVFAINPMSAARYRERHATSGAKSDAGDAHVLAEIVRLDRDHHRPVAGDSDLADAVKLLARAHQNAIWERTRHVLRLRSTLREFFPAALEAFGDLTASDTLVLLERAPSPELAAKLTRGQLAAALRTARRHHVEAKAVALQEILRAPALRQPPVLGSAYATIVVGQVRIIAALNAQITQLTEVVDEHFGRHPEAEIYLSQPGLGVVLASRVMGEFGDDKTRFADARARKNYSGQSPITRASGRKTVVLARYASNRRLGAALHLQAYAALTGSPGARAYYDALRARKIGHHAALRQLANRLVGILHGCLKTGTLYDENTAWQHHLPGAENLAA

SEQ ID NO: 196184 - protein, 346 aa, unidentified
MSVSRPAPQYHLYGGVDIAAKTLTAAWMAPGATPGRPLTVDQTPQGFATLQDRLLATGHPAAAILVVMEATGSYWVGLATTLAQAGFVVSVVNAAQAHHFAKALLKRAKTDASDAQTLTQLAARLEPTPWTPPPAIYTELQQRLAQRDTLMTLRQQVRNQRHALQHLPVVIASVLERMEALIATFDAQIAVVEQEIEQVLSQDAAWATTATLLLSSTGIGLFTAAWLLVTTLTCTICATAEEATAYAGLAPHPYESGTRVRGRAAIGHGGNGRLRTALYLATLSAAQHNPHIKPFSARLRAAGKPKKVARCAVARKLLHLAWAVATKGVAFDPLYQTQHACSGSSA

SEQ ID NO: 196185 - protein, 476 aa, unidentified
MKEHKKAKAKTKSEALKPIGEQERDSAGIDIGAKEIWVAVPPERAENAVRQFGAFTRDLNAIVQWLVQCGVRSVAMESTGLYWIPLYQLLEDAGLKVCLVNARHVKNVPGRKSDVRDCQWLQYLLSVGLLLGSFRPAQAICASRSIYRYRQNLLSMAGQHVQHMQAALDQMNIKLHHVIDDLTGATGQAIIAAILSGQRDPLQLAKLRHQRIQAAESTIVKALEGDWRKEHLFVLQKAWDQYQQLQQQLQDCDKELWQYTRELEACIRVVKAAKVVRLRPELVGVEPVNNQSGSKARKMRKKTSKNQPEGPWQQELERFFGVDLTAIPGISVLTGLTLMTELGNDLSTFKTEHHFASWLCLCPDNETSAGKVLRRRTRRSQNRVRYALRMAAYALHRDKSYLGDKYRRLRTRLGAPKAITAMAHQLARILWTLITRQVPFDLSVFAHQQKLNEHRRLKHLVANARQMGYQLTPIAA

SEQ ID NO: 196186 - protein, 376 aa, unidentified
MTKIIRIGVDTSKSVFVLHGVDAAERVVLRKRLRRRQVLELFAQLEPTKVGLEACGAAHYWARELQGLGHEVVLLPPQYVKPYVKRNKNDAADAEAICEAMSRPTMRFVPVKTAEQQAALMLVGTRDALVRRRTQLTNAIRGYAAEFGLIAAKGLDKIEPLLARIAAHAPLPGLAQELFAAHAKEYARLQAQIREIEAKLRAWHKHNELSRRLAEVPGIGPIGATLAVMKVPNPKAFRCGRDFSAWIGLTPKDHSTAGKTRLGVITRAGDEALRSALVAGATAVIQHVKQGKGHPSPWLIELVRRKPAKLAAVALANKNARIAWKLMVSTERYNPAHGRAVAASGGRGPALRGGSAPRPPLAPHDKSREATATTRA

SEQ ID NO: 196187 - protein, 400 aa, unidentified
MAKLWAGIDAGKRTHHCVLMDGAGVVVLSTKVSNEEGDLLDLIASVLRVADGGEVSWATDLVDGGSALLIALLRAHGQQLLYIPGRIVHHAAATYRGDGKTDAKDARIIADQARMRTDLLPVCAPDEVAVGLRLLTSHRLDVIHDRVRAINRLRATLMEYFPALERSFDFSKNKAALTLLSGYSTPQGLRGMGVARLTAWLKARGCRNSAGVALKAIQAAKAQDTVLPCQSVASILVAKLAETIRAIDDDVASIDARIHEQLGLHHDAENLISMPGFGPYPAATFLAQIGGSLSAFDSADKLASFAGLAPVPRDSGRISGNLHRPRRFNRRLLRTCYLAALSSLKSSPSSRTFYDRKRAQGKSHKQALIALARRRMNVIWAMLRDHTPYVEPATALPNTA

SEQ ID NO: 196188 - protein, 340 aa, unidentified
MPPINKFYLGIDVSKAWFDVSLLPVVDYQKLPMLTERFDNSVEGIKLFKVWLKINAVTCDEKTLLVIENTGVYHRLIWSFCSKHNLPLHIGNAAQIKWSLGITRGKSDVIDSKRLCTYCYKQAEELKATPALNPVFMKLKDLMSSRSRLVTQLHSTKNYIREIKCTGDKEIVAVLDKAHKAAIDGIKKSIKQIEILIEKIIKEDAAIYANYGLIKSVPGIGHLTAVYIICCTGNFTSKISGKQLASYAGVVPFEHSSGISIKGKSRVHKMANKELKKMLHLCALTAIKYYPEFKQYFDRKKAEGKNGMLVLNAIRNKLVLRVAAVVNNQQPYVENTKIAA

SEQ ID NO: 196189 - protein, 406 aa, unidentified
MLNAVGIDVSKGKSTVAVLRPAGEIVRKPFPVTHSAKCLHDLVSYVRGLDGETRVVMETTGHYHEPILKAFLDAGIFVSAVNPSLIKRHDSDENPLRKVKSDPADAKKIARYTLDRWENLRQHSVMDTTRTQLKTLNTQFHFFMQQKVSLKNNLISLLDLTYPGANALFDSPVRSNGSEKWIDYVHSFWHADCVRKIGLKAFTERYQNFCKHHGYNFQPDKPQKLFEASKDLVPVVPKDPVYKQLILSSIEQLNTVSKQIEIFRCTMNELASTLPEYQTIMSMYGVGPTYGPQRMAEIGDISCFDHRSAITAFAGVDPGVNQSGTMNYESSRASKHGAPRLRKTLFQIMTTLLQLAPADDPVYRFMMKKKSEGKPYQVYMTAGANKFLRIYYGRAKECFASPSATE

SEQ ID NO: 196190 - protein, 391 aa, unidentified
MIYVGIDVAKNKHDCFITNSDGEVLFKAFTITNNLDGFNDLYQKIETVMKDITKVKVGLEATGHYSYNLLGYLIDKGLPTYVINPLHTNLYRKSLSLRQTKTDKVDARTIASILMSDVNLKSYSDISYHNEELKSLTRYRFDKVKERAKLKSSVSRLICILFPELEKLVPTLHMASVYALLSEFPDAKQVANAHLTRLTNLLSEASKGRYSKDTAITFRDAARTSIGSNMPAKSLELKHTIKLIKELDSEIDEIENEIKIIMDEINSPILSIPGINYRMGAMIIAEIGDFSRFDSPDKILAYAGFSPSTYQSGHLYGAYAHMEKRGSRYLRYALYNAAKYVCHWDPTFTAYLAKKRAEGKHYNVAISHAVKKLIRIIYHLEKTNQQYIKAS

SEQ ID NO: 196191 - protein, 335 aa, unidentified
MSQKTDAVVASTIGIDTGKNTLHLIGLDDQGTIVLREKLSRSRIVSRLANVPRCLIGIEAGMGTHYVARELIALGHDVRQVPPVYARPFRQTHKNDFRDAYAIAEAVRRPSTRCVPVKTDDQLDLQALHRVRSRLISERTAVINQIRGFLLERGIPVRQGLRFLRQQLPEILAKRIDVLSPRMIRIIEDLSGDWRHLDQRIEHVTEEIEVLAHGTESCRQLMTVPGIGPIIASAMVAAIGNGVAFAKGRDFAAWLGLVPKQMSTGDRTILGRISKRGNRYLRMLFMQGARVILLRPANWAKHSFGSWLTAAAKRLHHNVWQLRSPISWRASLGRF

SEQ ID NO: 196192 - protein, 345 aa, unidentified
MYHCGIDLHSRITVYHLLDGAGTTLARGEIDTSEASLGELARGIKKHTRFYIEASTGSAWCARLIEACGHQAVVVDPNRLRAISSSPKKTDAHDAEMLAMLGKTGLLTPVHVRSEFTDRFRRLLAARHAIVGSRANLIRTTRSLLRSEGHNLPSCDGDDFARRLEGTWGIPEGYELAVPPLVQAIDDMTTQVLEIEKAVHEVAEADPTTVRRLRAIPGVGELIATSFLALIEDPTRFRSSEEIAAYTGLAPWVNSSAGKRKPGGITKRGNSATRALLVQGAWAHVRSKKDTALKRWYYKLSERVGKKKAIVGLARKLGELMWTLWKNEADYQAFPTSSRRVPAPT

SEQ ID NO: 196193 - protein, 366 aa, unidentified
MASVSHPAPIHLGLDVHRDTISVGVLEPDQQVPEVDRIPHDEPSVRRLVGRLGDTRRLRACYEAGPTGFELARLLEGMGVRCQVIAPSLIPKAPGDKVKTDKRDCRRLARLHRAGELVAIRIPTVGEEAVRDLCRTRADMVADRTRARHRLGKFLLRHGRVWRGGATAWTQAHERWLLAQQFDEPALRATYAHYRVVLQSRDAHLDAVEADLAGWYDRPPFAEQVARLGAYRGVTRLGALTLAAEVCDWRRFAKASQFMGFCGLVPSEYSSGQRTVRGHLTKAGNAHLRAQLVESAWSYQHRPGVGTQIAGRQQGLDPQVIARAWAAQLRLCGRFRRLAARKTSKNVVVAAIARELAGFLWAEMTA

SEQ ID NO: 196194 - protein, 360 aa, unidentified
MAKTKSVRPPFVVGGVDTHKDLHVAAVVDENNRVLGSDFFATTRQGYRQMLTWMASFGTVARIGVECTGSYGAGLLRHLQNAGITVLEVTAPDKMERRRRGKSDTIDAESAAHAAFSLIRTVTPKTRSGMIEALRVLKVCRKTVVAARRIALQMIQMNIVSSPDELRDQLRNLTRMQLIRTLAAWRPDVTAYRNVQDAYRIALKSLARRYLELHDEIADLDIMIASIVDELAPELIKRNAIGYESASQLLITAGDNPQRLQSEPGFAALCGVSPVPVSSGKTNRHRLNRGGDRAANSALHIIAIGRLRTDTKTQEYVAKRVAEGHSKMEALRCLKRYIAREVFTLLRNQNRQINSTQITT

SEQ ID NO: 196195 - protein, 347 aa, unidentified
MAPQLTLGVDTHLDVHVAALLDERGALLGVESFDTTPDGYRNLLTWAASHGEVVLAGVEGTGSYGAGLTRHLHAEGVKVLEVDRPNRQRRRRRGKSDPQDAITAARAAQSGDAQGEAKTRDGNVEAMRVLRVARSSARKSRTQALNQMRSIISTAPDQIRSELRDLNVYRLLERASAYRPGARRDVASLTKLSLRTLARRALALEAEIADIDVILKELVHDTAPELVARVGIGVDSATALLVAAGDNPGRLRNEATFAHLCGVAPIDASSGKHERHRLNRGGDRQANSALWHIVITRMVYDPRTRDYIDRRTKEGLTKKEAFRCLKRYIAREVYNHLPHDQLAIDSP

SEQ ID NO: 196196 - protein, 341 aa, unidentified
MKEYTYVGLDVHKKVVAYCVKTADGSIVHEGKIPSTRQALCQWAENLEKPWEGGMEATLFTGWIYDTLLPYAAELKVAHPYMLRAIFAAKKKSDKLDARKIADALRADLFPRCHMAPPEIRDLRRVMRHRDFLVGASVKMKNKTSGLLMEAGVEYNKKQLHGKRYFQDLLARMEDVPESVVDMLRTTNDSMLVFEHNQRKLLDALKKHSLLRERIERLMSIPGVGEVTALTWALEIDDPQRFSSVKKAVSYCGLCSGQNQTGGKTFRGPISKQRNKHLQKIIIETAKLAPTWNPQLAHEHKKALDRGANRNEATIAVARKLVAYLLCVDKNNARFELKICT

SEQ ID NO: 196197 - protein, 342 aa, unidentified
MYYIGLDVHKKTISYCVKDASGQVHQEGKVGATRWELDDWIKTLPQPWTVAMEATIFTGWIYDHLLPHAQQVKVAHPLMLRAIAAAKKKNDRIDAGKIADCLRCDFLPECHMASTAIRDRRRTLRYRHLLVRQMVQMKNRISGLLMETGVSHNKQRLHKVGYFRELLASNEEVNESIRPLLRVSRDSIVRLQKTEYALVSSLQRDPLLAERIKRLRTVPGVGPITALTWALEIGEVSRFPSIRQAISYCGLCGDEKSSADKVTRTPLSKQRNKHIQRVLVEAAKLAPRQDHNLALVYEREKQKGNANRATLAVARKMVAYLLAVDRGQRDFVPFADSQSAAA

SEQ ID NO: 196198 - protein, 398 aa, unidentified
MKPVIGIDVAKGKSVVQCFLKRNRPVGRAETILHTPKGFERLKSLLIELEQQSGFKPQIILEPTGHYHRVLVQYLQREAFEVILVNPLQAQRARRTGLRKVKTDESDAWHLGDLYYQEEDWLAHPLKDRALTDLQFLTRQHEFVTSLYVQAKLNTRSLIDQMIPGYENVFKDLFSKTSLNLLKAYLSPEGIQERCDNLHEVIKEAARASRSDVWMNKKVELMRAVCEANPVTAIGFGLRQSLQLMLKILGEFQEQLAELERMIYEVSQTIPQVQLLESIPGVGTKLATVMVAEIGDASQFSHPKQVVAMAGLDPSVFSSGKFTASENKITKRGSKRLRRAAYLAVICGLRKGLNPRLRAYYDKKKSEGKPHKVAVIACANKVLHHVYAMLKKGQPYAL

SEQ ID NO: 196199 - protein, 334 aa, unidentified
MLIIGCDYHPSVQQIAFVDSETGETGERRLQHKDGEAERFYRDLKLRGISVRVGIEATGHARWFERLLAELGFELWIGDPAQIKAARVRKQKTDRQDAQLLLKLLVEERFPRIWIPSPENRDVRQLLWHRHRLVQMRTRVMNQLQAVAMNEGVRRKKALWSKSGRAQLESFVLSPWASRRRQDLLEVLDRLNPTIDELSTAVEEEAKKRPEVLRLMTHPGVGALTGLAFVLIIGSAERFACGKQIGSYLGLIPCEDSSANRQRLGHISKQGNTLLRFLLVEAAQAAVRGDAEWRRKFVHLAMRRDPRIAKVAMARKLAVSLFWMWRKEWNYEQV

SEQ ID NO: 196200 - protein, 345 aa, unidentified
MASIQPLSRVGVDPHADTLAASGIDAVGVEVFHLEVPNTSEGIEKLVSHVNGASVLWAIEGTGTFGRALCDRLLAENRDVVEVPTRLTGRYRTRAGRNKTDRGDAVAIAQASLSDECCQVTHHRVVETLRVLVTQRESFVKTQTETANRVRARLRELDPQMAATTKPLRGPKAFRALTGLTYEPDGDPHRETLVAVIALDATNWLTRHQQIRDLEKRIAEILPDAGHALTQHDGIGLIGAATIIANTTDIDRFETEGHYASYCGTAPLDASSGRQTRHRLNRYGNRAINRVLHTAIVTQLAHHGEAHDYVTRRIQENKTKKEAIRAAARYLNRRVYRTLKQHPLT

SEQ ID NO: 196201 - protein, 360 aa, unidentified
MSETITSFVGLDVHKDSTAIGEAEAGRENPDLGQLLKALKSLGKPETMLVVYEAGPCGYGLARQLRSRGYSCEVVAAGKIARRPGERIKTDRRDALTLARLARSGDLVKVIVPDEGDEAMRDLSRAREDGVRARLKARQQLKALLLRHGHRYGGKSSWTLAHERYLAAVSFAHPAQDIAFAEYRQAVREGHERVERLTEALRTQAEHWRLKPLVAGLATLRGIDFVAAVTLTAEIGDFGRFAHPTELMGFLGLVPSEYSTGDTRRQGDITKTGNSHARRVLVEAAWNYRFPARLSRVLQIRQEGQPKAVREIAWRAQLRLAHRYRRLSSRKLHPNKICVAIARELAGFLWDIARQVKLAT

SEQ ID NO: 196202 - protein, 346 aa, unidentified
MQHIGIDLGKTSSQMCALSEEGELIEKRIKTGRETFTQLLGRCAPSRILIEASTESEWVARTLEALGHEVVVADPNFSLMYAMRSKRVKTDRRDARALAEACRLGAYRQAHRPSDKQRRTKNLLAVREVLVRTRARYICVSKSLLRAEGLRLESRDAQRFAIHLAQLALPEGLRATLAPLLTVLESLNAEIARSDAALQELTRSDAVVRRLCNVPGVGPVTAVSFVATLDEASRFASAKQVRAYLGLVPSEYSSGERQRRGRLTKAGNARMRYLLVEAAWALLRDQSEGTARLRAWAGGIARRRGRLVAAVALARKLAGILYAIWRDETEFAGEGRRGGAGQPLAA

SEQ ID NO: 196203 - protein, 388 aa, unidentified
MNVGTDKSEPLTAIHTDLGAIFVSLELSRSSWLITSLSPGGGEKMSKHSVRGGDFAGLMERFAQLQEKARLRTGQSFRIIVVQEAGLDGFWIHRALQNEGIESHVVDAASIATSRRRRRAKTDKIDGETLVRALLAYKRGEPRVCAMVKAPTPGEEDRRHLCRERKALTAERVRHVNRIKGLLFSQGISGYQPLRRDRRQRLEELQTGDGRAFPQHLKALVNRELDRLELLLKQIKTVEAARDALLAVGQTAKPAPAAMLLDIRGIGPEFAAILWSEGLFRHFENRRQIAAYAGLAPTPWQSGAVDREQGVSKAGNPRLRTTLIQLAWLWLRNQPRSALSIWFHERVSRNGGRLRKTTIVALARKLLVALWKYVTAGVVIEGVTMKVA

SEQ ID NO: 196204 - protein, 256 aa, unidentified
MTETPTYFAGIDVAKDRLDVVLRPSGEYVEATNDERGIRSVVRRLRKEDVALAVLEATGGLEQPAAAALALAGVPVAIVNPRQLRDFAKATGKLAKTDRIDAAVLAHFGEAVRPEPRPLADEHARELSAVVLRRRQILAMTTAEANRARTAPKAVRKRIEAHLRWLRKELARVDGELERVVEESLVWKERAVLLMSVPGVGPTLWATLLAELPELEHLDRRQLAALVGVAPLNRDSATLRGIRTVWGGRSGVRTTL

SEQ ID NO: 196205 - protein, 421 aa, unidentified
MKGLRSKRMRTVKEGTLIATVDIGATTNTGYCTTVDGKDIKVFKFGNTREGFEKFWHLVVAARNRFRCDEMVMGYESTGPYAEPLVHYLLSKPVKIVQVNPLHTKRLKEVNDNSPGKTDDKDPRVIADVIKLGHALSVVVPEGDAAYLRRLNNARERHIGERTALLNQMQQLVFIIFPEFKTVLKNMKTRTARFILKKYITPGRIGALDKNVLGEEMRKRSMGKLRIKDAELLISLAQSTVGIKEGVSGIALDLQHILAQLETAESFTAEIEAGMAATLVRIPCSARILSIKGLGVISVAGLIGEVGDFSKFDTQSEIMKLAGLDLYEISSGKRKGQKRISKRGRSLIRKILFYASIQMIRKNGILCHYYERLIGRGMLRMKAVVAVMRKLLGIIHAIVRDNRDYVGEYTVPKRRVIKKAA

SEQ ID NO: 196206 - protein, 421 aa, unidentified
MWQFSQWLLIIHERSLTMKVTYQTCCGVDVHTSFLVATIVKTTGDIEPSYQKKRFSTFNNSILEFKQWLLDNDCHDVCMESTGKYWVPVFNLLEDDINVVIANPKWVKAVKGNKDDTKDSKWIGDLFRLGLVKGSYIPCKKVRILREYTRYRYKLVSCRSSEKNRYQNALTVCNVALDSVVSDIFGKSSTSIIDYLLEQSGSSINHEEIASKLLRSLKSKEDAVIESVEGYQMTDAQKYRMRLVRAHMDYITAEINDVDKMIENMISSNTDFENAVQFLCTIPGVKRDSAITIISEIGTDMSQFSSSRRLCCWAGLTPGSNESAGKKKSVRFTRAGVYLKPALVQCAHAAVKSDKSPYYKKKYESLVKRRGKKRAIIAIARMILTAIYQMLSTGEQWNPSDLYKIDMPVALVEKQKAKAIK

SEQ ID NO: 196207 - protein, 327 aa, unidentified
MDRNILGIDVGKSTIHVCLLFANGKSKPKALENSPQGYQDLLQWLSHNGVSAVHACLEATGSYGNGIARFLYEQGQIVSMVNPSRIKGFAISEMTRTKTDSVDARVIARFCQALKPAPWHPPAPEIEQLQALMRRLEALNQMLQQENNRQEVAPTQAVQSSIEEHIQFLETAITKTKELIQEHMNQHPGLKSQRDLLTSIPGIGEQTAASILAEIGSIAGFESARQLAAYSGLTPKERISGTSVRGKTRLSRVGNSRLRKALFMPALTATRCNPFVRDLWERLISRGKAKMVVVGAAMRKLLHLVFGVLKSGKPFDPHYGAQHLVEG

SEQ ID NO: 196208 - protein, 521 aa, unidentified
MAQLVRRRKKSARPKLALSPPSGELAGMIREVGVDRFAFVCVDPAKLRSRWMMTDFLGSILIAPATVEHTSAHLKAAVDRVRMTVQEAGLKTVWVIVERTGQYHLPVQRAFAAAGFTTRIVHPFATKQYRVIDNPGVKTDDTDLVAQHRAAVAGFGLIERPIEGVYRTLQLLSRHRRDLVEKSSILCCQLQEHLHLVMPGYAKCFDDLWKSPVALPIARRTGTPQALLDLGVTGLTRWLRETNLRCRASTIDRLLAWAREAAPPAPHEILHQRIWTALDEDRLAKRREIQALERELVTALVQTPFVLLMAIPGINVVSAAELAAEMGPIAHYANPNAITGRAGLFPSRYQSDEVDLANGPLIRCANRRLRAALLRIGDNLVVNNRWFRAAADVQRIRQVDERKIRVRAAKQFTRLAYVVLADRQVLRHPCCQPGDAILAKLSEFHRQREAPATQLLADLKVAVDQLPKEAYTHEADALSAKLQTHVTRRHGPAPLGELLPPILARLTKTTSAEPTEAQASS

SEQ ID NO: 196209 - protein, 343 aa, unidentified
MQTITTIGLDIAKTVFQVHGVDAGGQVIVRRQLKRRYVVPFFQKLSPCLVGIEACASAHHWSRELQALGHTVRLMPPAYVKPYVKRQKNDATDAEAICEAVTRASMRFVPTKTPEQQSGLVLHRTRHLFTRQRTSVINAIRAHLAEFGIVAPVGRHGVEELLTVVADPSDKRVPDIARACLLALGDQLQSIKKQILEFDRLIRAWHRSNEMSMRLEAAPGVGPVLATALVAAVADPKSFRSGRNFSAWIGMVPKQHSSGGKNRLGNISKQGDRYLRGLFVAGALSVIRYAKIHGTKHRPWLTSLLARRPTKVAAIALANKIARMVWAMMARGERYKEPVALAR

SEQ ID NO: 196210 - protein, 385 aa, unidentified
MPVARRQVQPLDITKKETSQFRMLTIAKPSTHNHQEVPMFYSGIDLHKDNCFITTINDAGALLQQQRVANVPEALLAYFARLGTDHQAVVESTSGWYWLNDLLEDHGIELVLAHAKYLKAISYAKVKTDKVDSHTLATLLRMKLIPQAHKISRELRDIRDVMRARLRFVQRRTRCIVSVHTIGRKFNCDDLIAIERQTIPDVLPEPYKLQMQLLYQQIALLHEQILALEKSLHPVLIPNDDIQRLLWVPGIGKTTAFTIYLEIDGIERFTSDKHFVSYCRLVPGAHNSNRTLRQKSGNKDGNKYLKMAFSDCAVRAIQYYPEIRAFYKRMLRRTNERVARAIVAKELARIVYSILKTKNNYRGFKGQPISRVKALQWPRLASPYA

SEQ ID NO: 196211 - protein, 389 aa, unidentified
MSSVRGGGAKRSGAPAPRTGDARSIVSRPSKAVTKQDRRRLRGTSPNSRLSDDRPLAAAAAVSSHLQDRDVSMNDSPSYVGIDVAKDKLDVFIDSTNECFTVENTSAGIASIRQRLCGLNVKLIVIEHSGRYERRCALDLMDADLPVALVNPRQVRDFARSRNWLAKNDRIDAHLNCEFGKANNPRISEKIPQNRAELDELVGRRRQLVAMRASEKPRLQQVSSKSVRQSIEKVVRQLDVQIQDLERAIAKLIENDDDWRGKAQLLQSVPGVGPVVASTLVAELPELGKVNREQIAALAGLAPYDHQSGKFKGKRRCFGGRGQVRCTLYMAALAARRFNPIVRALSQRLLARGKSFKVMMVACMRKLLTILNTIAASGVTWRKDLVPNS

SEQ ID NO: 196212 - protein, 383 aa, unidentified
MSVYVGIDVHRKRSQVAVVAEDGAVQVNRNVPNGVEPILGVIGDLPTGTPVAFEAAYGWGWLVELLEDYGFAPHLVHPLRCKAIASARLKNDKVDAATLAQLLRAALLPEAWIAPLQVRQLRALLRHRVALVRLCTGLRNQIHAVTADHGYDRPDASWTGAYWTGPGRRWLDELPLPAVSRQVITDNLAVIDAIAPTIDHLDREVHVRAKADPRVKVLTALPGVGEFTAMVLLAEIGDISRFSNARRLASWAGLTPTVRGSDLAVHHGHISKQGSPYVRWVLVQAAQIAKRHPEFAATYQRIANRRGRKIATVAMARKLLTRAYHLLAATDTHTEAAGTTTMDNSTCVTRAQRAYSQNGRVAKPRARSPQRHEPATSRARSFD

SEQ ID NO: 196213 - protein, 405 aa, unidentified
MPYILALDVSMGHSYSVLYKDDTCLFEDEIEHTQRGFHALLEEIQHLPERPLIVFEATGIYSRPVEKFFQDHHFSYCLLNPLEAKKQMEESTLRSWKTDKSDAHRLAQTHLKNQRQPKEVQSNFYLEMRDLARFYQEIEKKITRLRMDLHNCLQLTFPELEQFFSNRLTPYALTLIRLFPHLDFVLASTRTKIKNKLINETRKKISANRAEQKADQIIHYAQCAYPAVEKDSIHCQKTIYYAELLQDLLEQKEALATQMIKKAEGSPCFLLYQTFPGIGALTAALLLGELGDITRFKTHKQLNAFVGIDIRRYQSGKYTGQDRINKRGNPKARKIIFFTIRNMIRQQRAAPNHIVDYYYKLKKQPIPKKDKVATVACMNKLLKCMHAMVRAHTEYDYAYAVSVDH

SEQ ID NO: 196214 - protein, 378 aa, unidentified
MHSMEHQDTLVIGGVDSHADAHHAAAIDQRGALLATKGFPTTTLGYRELLDWLCAFGEVDVVAIESTGSYAAALVRYLREHGVRVLEVNQPHAHTRRRRGKSDPIDAEMAARLALSGKATTVPKQTDGIVESIRLLRAARHSAVKSRSAAIVQLGALIISAPQELRDQLAARKTIRGKAALCRRLRPSTEELSRPAHAAKFALRSIAQRIDALDEEIAVLDRQLEQLVRMAAPRTVQLLGISTGHAGRLLVTAGENIERLRGEGAFAALCGASPVPASSGKTTRHRLNYGGDRQANRTLHLIAVCRLRYCERTRAYAKRRTAEGKTKPEIMRCLKRYIARETYHTLIADLHSLDPPTPLKATTINCGAGPIGITRRRT

SEQ ID NO: 196215 - protein, 408 aa, unidentified
MKTLHKRCAGLDVHKKEVVACLRVVARSKATYEVRRFPTTTRGLIELAEWLEASQCTHVAMEATGVYWKPVWHILEGLFTLILANAAHIKGVPGRKSDINDATWIADLLAHGLIRASFVPPQPIQELRDLTRTRKQLTREIVQHTQRIQAALEEANVKLSSAITDILGASGRRILKAIVGGETDPDKLSTLGSPRLAASRSALSDALHGRIREHHRFLIDQHLKTIEQLEATIVAFDARIEAALEPFRDCIERLKEIPGLSETSAQILIAEIGTDMSQFPTAGHLLSWAGLVPRLDESAGRRRSTRVKKGAPWLKPVLVQCAWGAARKKKSYFQAQFLRLKARRGAKKAAIAVAASLLTTAYHMLADGTCYLDLGPEHFARRDPARTARKLADRIRSLGYQVDIRAAA

SEQ ID NO: 196216 - protein, 424 aa, unidentified
MGKFTKTLCISERKEYHIMEGPIITVDVSKGSCHYQPFIENGHPMRKPKQLSATIDGFQKLGQTIKDLEAKTEREDIPVIFEATGVYHRPLQKYLEDHKIRYYIISPLLSATYRKTDLHSNKTDALDCAHIAKAYYCEKELRQYQAQPQEYKRLYQLSRIYESELVHLRKRKVSLRSMLDIIYPRIDKTFKGNQNLYDPIPMEILKRYPHPSLLLSHREDTIVKTVGHCTGHLKGYTERIVHKIYEKAKECYSGCDINDIEVVKLPSLIENVQEQKKKCDSLLKEMIEIARICPYFASVVSIVGIGENLAARIIAELGDVNRFDNRAAIVAYAGLNPKIQQSGDIDGLHLKISKKGNKHLRCLLYLGAQCNYRLRKEDPLYEFTKKKRQQTQCPLSSKAAYTASAHKLLVIIYSLCKNGTLYHS

SEQ ID NO: 196217 - protein, 455 aa, unidentified
MYLPDWKWIPIRKGLLLMSNKVIFNLDELFISVGIDVGADFSWMSIALPNQQFVGKPYKILHNSIDSLTTAVSKIKEAEELYSLESRIFLESTGIYHYPLFCYLRDKGFNCSVINPIITKNSTNINIRKVHNDRFDSKKAALVGLKPDLKVSLMPSDLALNCRNLCREYYDLMDNRSAYVNKLQGELRMAFPQYLGIFSKVTINTSLTLLETYTSPSAFLEADKQEIIDIIKSTARFGLTYAQNKYNAIIQAATDANQFGYIIDSNIKRIRLYISFIRKYDEEINSVLESLHELVDANEDADFVKQIHLIETFKGAGFLSAVSIMGEIGDFSAFSKPKQLFAYFGLDPAVKQSGKFEGTKVQMSKRGSAIARRVIHTLTLQSISISRNGEAKNPVLREYYLKKCDSKPKLVAMGAVSHKVCNMIFAILRDNKPFKIIAPQEHIKQYNAAKCDIAA

SEQ ID NO: 196218 - protein, 310 aa, unidentified
MSTEYFIGIDVSKDTLDVCVYPTQERFRVPNSAQGLDELIKRLKPIEPRLIVCEATGGYETLAVSSLAAAGLPVVVVNPRQIRDFAKSIGQLAKTDSIDAGVIARFASAVRPELRPVKDSPSQALSGLVTRRRQIVEMIVAETNRLQAATRRNRRDIQTHIGWLQKRLKQIDDEIKRDIKNGPLWRTTDQILQSTPGVGPATSAMLISCVPELGQLDRKKIACLIGLAPLNRDSGRYKGRRTIWGGRAQVRSVLYMSALAAIQYNPVIRECYKRLRDAGKCFKVAIVACMRKLLIILNAMVHNQTKWRSC

SEQ ID NO: 196219 - protein, 332 aa, unidentified
MVPKIFVGVDISKLTLDVALLYKDQPVRSFKINNSEDDIKQLLALLKEEYGYKPREIVFCAEHMGIYAQFLTTVLARKKMALYLETPLQIKRSLGIQRGKNDKLDAIRIARYVKKHYLNMKEWEAPRDCVKQLKALYAIRKRLLKIKKMLVTPGKVSNYYIPKTDSLYFDHFYLSSTQSVIGDIESIEKKMKGIIEGDDKLDHYFKLITSVPRIGPVIAIQMLVYTNEFRDISCPKKIASFCGIAPFEYRSGTSLTGKARVSYLANQEIKPNLHLAALGVTRMRGTFLNDYYMRKVAEGKNKMAILNAIRNKLIHRIFSCIHRDTIYVDIDV

SEQ ID NO: 196220 - protein, 436 aa, unidentified
MDEVTDEPLYRDRVCGIDIGKAGMVATIRVPSDKNPARRAAETRSFGTTEREVLALADWLRSWQVPAVVMEATGDYWKGPFYRLEAEGFDCVLADAKQVKHLPGRPKHDPGDSRWLAACFERGAVTSCFVATAEFRVIRLHTRYRRDLTGERTREKQRAEKLLESAAIKLSSVVTDLHGVTGRDIMGHLIAGERSPRALAQLARARARRKIAQLEEALEGAEFFTAGHAGLLATMLERIDQLNAKIDGLTEVIERLLAPHEEQLQQAESMPGWGRRSAQDAVAETGADMSRFPTGGHLASWAGRTPLDNSSGKRTGRTRSKKGNRYLAGITGETAAAAGKTQTREGARYRRLARRRGKAKAQVALGNTQLKVYHKLLSSPGMRYQDPGPDYYDRQASTRRQIAHHVGKLGALGFEVTLCRLPSPDPDPAGTGTQAA

SEQ ID NO: 196221 - protein, 371 aa, unidentified
MKKIIRVKRGEVDREAGRKVATVGLDLGDRFSQFCAIGVDGEIVQEGRLPTTVVGLQGYFGPMGSVTVAIETGTHSPWVSRVLSSLGHEVLVANSRKLRLIYENRRKRDRVDARYLAKLARLDPELLSPVHHRSELAQRDLAVLRSREALVSARTQMVNHVRGSVKSMGSRLAKCSTRSFHKQAGEQMPEALKEALSPILETIAVVTEQIKGFDRRIEVLAREVYPEAQRLMQVKGVGALTALAFILSLGDPGRFGRSRTVGAYLGLVPATDSSGESDPQLRITKQGDVFLRRLLVGSAQYILGVFGEDCDLRRHGLRIAERGGKNARKRAAVAVARKLSVLLHRLWRTGEAYQPLYNTQARQMRGQEKVA

SEQ ID NO: 196222 - protein, 355 aa, unidentified
MTFVGLDLHKRYITACALDAGGAVLAEAKRLPATLDALGAFLAALRGPATVAMEATLYWAWLTERLEAAGFTVQVAHAYQAKLIWQARSKTDPIDARKLAELLRTNLLPTIWVADAATRARRQLLRGRAFLVRQRTQLKNRIHGHLTAENQVCSTTDLYGKAGRTWLTSVALSPALREQVDVLLRLVDSLSQEIHALDQLVKRAARGNVVATQLQSLPGVGPFGALMLEAEIGPIARFRSSHELAAYAGLVPSTHSSGGRTTHGGVGPAGNRWLKWILIEIVQTLKLAPGPVGAYYQRLLRAKGKAKATVAAARKLCCYLYWMLKEGWSYAEWLRQHDGSPSSEVRPVQRMGAVA

SEQ ID NO: 196223 - protein, 407 aa, unidentified
MSNSRKVCCGLDVHKETIFAAINANGKAGEVKEYSTLTCQIRALSDWLKANKVSDVAMESTGIYWIPVWNILEASGFRLTLVNPYFIKQMPGRKSDVKDSQWIAQLLAKDMLKKSLIPCHQIRTLRWYSREYVKRQQSITRIVVSMERTLETANIRITSMVSKIESKTVLNIIELIIKGETDINKLLEKVHGRTKNRKGDLVAQSLEGFVLPEHRFILSQQLDEYRMYYNQADELQKQMLAICKEHYAKEMELLKTMPGTDDQSAMQLIAETGADMSAFESSNKLSNWAGLCPRNDESAGKIKSKATTKGNKYLRRIIVQIAWASSRTKSSSYYNKYNQLAIRKGRKKALVALARKQLTVVWNILKYEQPYDSNKQPAITPEQILAKKKYYEKELGKLNILAIAVNQ

SEQ ID NO: 196224 - protein, 377 aa, unidentified
MGEKTLYCGIDIHYKKSSFCILKKNGETKDYIEINTSKREIESLINRYQKYKMQYAVEAGNMTRYFHKIASNLDNTEKVHVVHPLKFKIITESKHKNDKNDSKNLALGLLKNYLPYPVHIKSEESRQLQILLNLRRRMVSTRTKLIQQTKSIIRSLGIKTEAKSLKSTRGFLEIINLLEKEEFDKETIEFLFEEFKIEDEKIKMIEEKIMEKIKQNFIKEYKLLISIPGIAFVTAATIIAHVDGIKRFQKASQLSAYFGLVPSEYSSGEKIKHGRITKEGIKEVRALLIQAAWTLIRIRSKNDERLTALKKKYYKLAFKGKNSQKAIVAIARHLSRIIFGVLNNGMPYSGIIINRQESIKPALYSGEGVNFASELYD

SEQ ID NO: 196225 - protein, 345 aa, unidentified
MMVIGIDAHKRSHTAVSVDEMGRQGFVKTVGTATQDHLRLLKWAVGLAEERLWAIEDCRHLTRRLERDLIAAGESVVRVSPKLMAHVRDSARSYGKSDPIDALAVARAALREPDLPTARLDGVERELRLLVDHREDLVAERTRIISRLRWHLHELDPGWTAPTKLQRGSAFDKVQAHLSGRNDGTIVRRLALRLVEHLRLLTDEIDELTAEITARVTTIAPSLLTIVGCGALTAAKIVGETAHAGRFRSKDAFARHNGTAPLPVWSSNKQRHRLSRTGNRQLNAALHRIALTQARCYPPARELLERRTNSGKGGMEALRILKRRLSDVAYRAMLADQTDPPTVAA

SEQ ID NO: 196226 - protein, 366 aa, unidentified
MKKSIRKTKGQNLEVNWSEATAIGIDLGDRISYYVALDAGGECVGAGRLPTSAEAFEATFGSIGAKSIAIETGTHSPWVSRLLKKLGHRVTVANSRKLRLIYENRNKNDKVDADYLARLVRVDPKLLSPVEHRDERAQQHLTLLHGRDVLIKTRSRLIAFVRGAVKSMGSRVPRCSAEAFVKRARPVVPPMLHAAIEPILSTLEQLVGQIAVFDRRIENLAKDEYRDSQVLMQIRGVGALTAVAFQATLGDRDRFLHSRTVAAWLGLVPGQRASGQSDPQQRITKQGDSYMRSLLINCAHYILGPFGEDCDLRRHGEMIAARGGKNAKKRAVVAVARKLAVLLHRLWCTHAIYEPLRKAASCPKAA

SEQ ID NO: 196227 - protein, 335 aa, unidentified
MKEITTVGVDLAKSVFTVHGVDAMGRVVLRKTVRRAQLVELIAGLPPCLIGMEACGGAHEWGRKFQIYGHRVGIMMARFVAPYRKSSKNDGNDAEAICEAVARPNMRFVPVKSAEQQAILSLHRVRQGFIEQRTATINRIRGLLAEFGVVLPQRAEQVRRAAVVMAEGLPVLAREAIADLRAHLTYLDERITRYERQLVSLARQREAAVRIQRLPGVGPLTASAITASISDGHEFANGRQFAAWLGLVPRQYSTGGKARLGRITKRGDPYLRTLLMLGARAVLQNAAPKTDRLSRWAMALRARRGYHRAIIAVAAKNARIIWALLAKNREFVLPA

SEQ ID NO: 196228 - protein, 381 aa, unidentified
MLYVGIDVAKNKHDVTVIDDTGKTVLKPITITNRKQGFELLHNTLKQLNQNCLIAMEDTGHYALNLLTFLHQKNYQIYTYNPLLIKEFTKSLSLRKTKTDKKDARTIALKLLSDPNRALFMHDNRQEELKIMTRHMNRLKKHQSDWKVQYTKCLDIIFPELHQVVTKHSDYVYELLKCFPSPEKMVTAGFNKLIEIKRLTAKHALDILKLAPDSIGTTSFARELELIEIIENIQHYEKLIKQAEKKIDELMAELNSVITTVPGISNRLGSVILSEIRNINTFNNPAQLQAFAGLEPAIYQSGQLDTRGKMVKRGSSHLRWALIQAAIKVARYSPAFKVYFRTKLAQGKHYNVAISHVAKKLIRVLFHLLQNNEASEEDKLR

SEQ ID NO: 196229 - protein, 393 aa, unidentified
MFFVGIDIAKRNHEACITHQDGAFAVKPFKFANSSEGFNKLLDSLKTVSASLADFEFGMEATGHYWLNLYCKLTDAGATVHVVNPVQSDALRGLYIRKTKTDAKDSLIIADLIRIGRYSETTLSDPDLISLRELTRQRFYLVDCVSDAKRKVISLVDKVFPEYEQLFSDMFGSTSLALLEQFPTPDMLCEVSAVKLTNFLKSVSHGRHGRPKAEEIKSLAKNSFGSAVFAAGSAFALKQFIEQIELLERQVEEIEDYIAELLPKFNNTLTTIKGVGPTLAAIFVSEIGDVNRFESSEKLAAFAGIDPSINQSGEFSGSKAKMSKRGSPYLRRAFFLAAVACNLHNPAIKALYDKKRIQGKHHLVALSAVMRKLVNIVYAVLKSGQPYTMIMPE

SEQ ID NO: 196230 - protein, 411 aa, unidentified
MQYFIRKEGMPMLSIGIDVSKGKSTVCGMKPGGEIVYAPFEVQHTREGMLELVSLLRSSGEEVRAVLESTGSYHCPVVAALLENGIFVSVVNSLRMKRFCSQSIRKVKTDRIDAMQIALYGLAYWQELQPTRLPEDTYRELQLLARQYYQMTSLLIKAKVDFNAICDQVLPGMQELMSDHAGRHKLSDFVLRYCHTTHILEMGETRFRKDYCKWAEKKGYRNCERMAALIFATAQNGIPVLPNAPSTQIVITEAIRVLHTVEASRDAILTQMQALAKTLPEYSLVREMPCIGDTLAPRLIAEIGDVRRFHSKRALIAYAGIDAPPYQSGKFCANNRHISKRGNRYLRKTGYEVMQSYVMHKPANDPIFTFIEKKRGEGKSGKLAMVAGLNKFLRVYYGKVTELYRSLPAIE

SEQ ID NO: 196231 - protein, 444 aa, unidentified
MAVRKQVFELMHPNAAGIDIGSASHFVAVLADRDDEQVREFKSFTEDLIGMADWLEHCGIETIAMESTGVFWIPAFKLLESRGFTVYLVNARHVKNVSGRKSDVLDCQWLQQLMSFGLLSGAFRPGEDICVLRALSRQRDMLIECQARHVQHMQKALTQMNLQLGNVITDIVGKTGQQIIRAIVAGERDPVKLAAFRDHRIHASEAEIAKSLRGTWRDEHLFALSQALRLFDTYQERIGECDERLAQALAKLARHDKVPEPNKRKGRAKNAPSFDVRTALFQACGVDLTRIDAIDVSTALKVIAEVGTDLSKFKTVKHFCSWLGLCPGTKISGGKRLSGASKRCANRLTQALKLAATGLLRSRSALGAYFRRLAGRMDKPKAIKAAAHKLARLIYTMLTKGTEYVDQGQDYYEQRYRTRVLANLSKKAASLGFQLQPVVTPEAA

SEQ ID NO: 196232 - protein, 316 aa, unidentified
MYVGIDVSKEHLDVASEDGTLEARFANDEQGHGQIVARLRELSPELVVMEATGNFQLELSILLASAKLPMAVVNPRQVRDFAKALGILAKTDAIDARTIARFGATVKPQAQPLPDEQTLELEALMTRRRQLIGMIASEKNRLQALFGPARTSWAEKSIRDTLSHLIKQLSQLDKGLRKRIERSPAWKAKDDLLKSVPGIGKVTSLTLAIDLPELGTLDRKQIASLAGLAPINRDSGKSIGKRRIWGGRASVRTVLYMACVAFLRCNPVIQALYARLTKVARKPAKVALVACMRKLLTILNAMIRAQRPWDPALAGG

SEQ ID NO: 196233 - protein, 421 aa, unidentified
MPNIEIGVDSMDKENFIYVGIDLHKETHTAVMIDCYNQKLGEITFPNRPAAFPKLVTKVKKCNTDGKEVVYGLENAYGYGRALAVWLIDKGYLVKDVNTAISHQRAKHRGAMYRKSDSDDAKAIALATLNMLDKLPDACPNDAYWSLGQLVHRRDNIMKQRTRLVNQLHEQLCIAYPSYKQFFNDISRPTALYFWEHYPSRKYLKGKSVEDLRAELVPVSHNKCSTKTCEKILDAVASDKVKNNAYQDARDMVTLSIVSGLQHYDSQLAEVDKMLEQMYKMLGCTLTTISGVNVITAVKILAEIGDIKRFSNANKLAQFAGIAPLHLSSSGKGKDVATKQGNRRLQATIYFLAIQMVQVSSKGTPRNSVVRAYYEKRKAEGKTSQQALICISRRLISVIYGMLKNGTEYRMPVVENAGEKL

SEQ ID NO: 196234 - protein, 435 aa, unidentified
MLVKSKGQAEYMTRIRGLGRERCLVVPVDVGKRSAMALVADHCHEVVVDPFMFELNESGFEQLLAKADAYAEFVGAGHVRFGVEAAGHYHRGLVTRLDSAGRDVVEVNPAVVKDARGRIGQRHIKTDVQDCLAIAEVLIDGLGHTPTQRSVAMATQAAWAGQRRRKVEARGVLVSQIHAQVDLAFPHLTACYSHGLNMPSLRVILTHICDPARIVRLGPKRLREYVVNRGVRMWAPKAAQVVEAAHEALAVPEGQRHAAQQFVARDMTLLEAIEAEIAECDRQLAEILPATPAGILTTIPGVAVTTASYYGAALGDPHRFRNVDAAYRYSGLSPTSYESSGKRSGRPTISREGSVELRYAIITLGRGVRKHEPDFADYYKRLRSTGKPPLVALIAVGHRAHRLAFAMMRTQTAYDPDQWVKAVEKGRAAKAANAT

SEQ ID NO: 196235 - protein, 367 aa, unidentified
MIKTIVHHEGAAALTAAGTKHNLPPATIKLGLDIHAKTYVVVAQHDHAALRPPRRFAPPEFVPWVEKLLTQGHTVHIVYEACGFGFGLCRALRKAGAQCHVIAPRKLDEQRTGVKTDARDAATLCQRLSRYVDGNLKELAVIRVPSEEEEKLRHIHRQRESLVRHRTKLQAQGRGLMVNHSQAAPPHWWRTQTWNRLTKLLPDWLVARLEVLRPVLAILDTQIAALSLELEAAAPKDLPHGLGKLTSVVLTREVCDWQRFKNRRQVASYTGLCPGEHSSGNKRVQGSVTKHGNPRLRASLVELAWRLVRFQPTYPPVRERLALLAKGARATGAQRKKAIVAVARHLAIDLWRLHTGQCSAQQLGFIN

SEQ ID NO: 196236 - protein, 368 aa, unidentified
MNTVYCTTIGADVSDRTTKICVMSKEFGKPKIVRETTIPTTPDGFRAFLEGQDKSAPLVFETGTHCRWIDKVGTGMGFKTIVANPARLRMITESNTKNDKNDARTLARMALADVELLHPVRLRDDEHQKMVNLHEIRDQLVKERTAEVLQIRAIAKSMGFRIPDCSAECFHNIAKNSIPKELSDIVWPLMKELKSKAVTIKTVEKQMRKLAKSDVFKAQVERLMEIPNVGFITATCFVAVTGGDMDKFDRPRDIGPWLGVTPKQDQSGDIDRQCHITKAGSKMLRWKLTECAQRVLQKNSADMDLKVKGLRIRARGGKIAKGKSITAVARGLAVLMVAMLKKPDVPYVPLSEDKAKELAQIRAAMAAA

SEQ ID NO: 196237 - protein, 401 aa, unidentified
MSKKNTRNALDTSLSYAVIGLDLAKADCAVAAVPCSDDELGLIDRMDYESLFEQAEKLEPTLFAMEPCCGYSQISLRLQNMGHEVKVISGHAVKNWIATHKSNQKTDLNDATALAKLALYNHDLQPIRVKNVEECRIASVQAIRIQLRTQATKSLVCFKSLCQCWGIVIRRGSSNTKKMAEAVAAVEKLLGAEVASSLMILRDAYKFTMKQINALDKLLDALVEANEQARTMKTVLGIGTQTAARLAVTTGDIKRFPMPRSYVAYFGLAPRNIITGHSGTPSPSKRGALKPVSSRGQGKVSRRGDRVARSFIIQGAATIYMLYCKDMLPECQLRRWLHEQIKRGKPYGKIIVSLAAKLLRIVWALLTYGEKFDSHKAGVPRSVLAAMEKPLKHDVAAESAA

SEQ ID NO: 196238 - protein, 359 aa, unidentified
MRGQRNEISFRGQKIYIGIDVHLKSWSVTVLSETFVLKKFSQHPSPEALHGFLARSYPGAEYHSVYEAGFCGFWIHERLTALGIDNIVVNPGDVPTKSSEKLRKSDAVDSSKLARSLRANELKGIYTPDSASLEMRSLIRLKNSITKDTTRQKNRIKSQLRYLGIGIPQEFLEPFSNWSKRFIAWLKEVETLTPSGRQAFDIQIRHLEELRRQKLEMTRALRTLAKTDRFREPLRLIMTVPGFGQATGMAFLSEICDIARFRNAEQLAAYIGMIPMCHSSGEKDGTGDITVRRNAVMRCNLIEAAWVAVRQDPAMNLFFTEQCKRMPKSKAIVKVARKLVNRLYFVLKHQTDYVNSVMS

SEQ ID NO: 196239 - protein, 345 aa, unidentified
MHSENIAAYVGLDVHKETLAVAIAAPERLGEVRYYGTINNEAQAVRRLFQKLQGLYGNILSCYEAGPCGFGLYHQLTAMNIKCQVIAPSRIPKSPTDRIKNDHRDAISLARLLRAGELTPVWIPDLTHEAMRDLIRARAAAKRDSRVARQRILSMLLRTDKHYAGKHWTGKHRTWLANQSFSQPSQQIAFQHYCQSLEQIEDRILQLDQEISRLLPEWSLCNLVCQLQALKGVGQLIAITLVAELGDFSRFSNPKQLMAFLGLVPGEYSSGNSIRPRGITKVGNSELKRLLYEAAWSYRTPAKVGAWLIYYRPDSVTQYSKDIAWKAQQRLCSRYRSLTAKGKKS

SEQ ID NO: 196240 - protein, 411 aa, unidentified
MDVLHERCAGLDVHQETVVCCVLVSEPGGRCRKEFRTFGTMTADLEALRDWLRERGVSHVAMESTGVFWKPVYAVLEGHVEIVVGNAQHIRNVPGRKTDIKDAEWLGQLLRHGLIRASFVPPPEFRELRELLRFRRGMVQDGVRLRNRMIRRLEGAGIKLAAVASDVFGVSGRAMLRALIDGTQSPAAMADLARRRMRGKLPALAQALDGRLSDSDRFLLDLDLKQLERLEADLSVLDERIEGKMAPYREQQRRLMAIPGVDAVAAATILAEVGIDMAVFGTAKRLAAWAGVCPGNRESAGKTKAAATRKGNPHLKAALFTAAASAVRKKGSYYKAKYDRLKARQGAKRALMAIAHKILVAVFQMLSRNESFQDLGEAYLDRLAEKRVTLRLVERLNALGYQVELNPKAAA

SEQ ID NO: 196241 - protein, 314 aa, unidentified
MILPLRCVGIDVSKHMLDIFDDTIGTAERIANASQPITEQVARWRCGNVFVVFEATGIYDRVLAEVLQQAGVRFARINPARARDFARASGRLAKTDAIDARMLAAFARAMVPAADQAPKPERNALALAAKRRDQLVQMRAQEKNRRSEARDRDMIEDITRHLDFLNEAIKVIEAKIKALIEAEPQISEQARLMRSVPGIGPVACMQLIAQMPELGQLGPKQVAALAGLAPLNVDSGTYRGKRTIGGGRKRVRDALYMAALNAVRRDASFKSFYQRLRNAGKPAKLALVAVARKLLTTLNAMLRDRKTYRQPQPT

SEQ ID NO: 196242 - protein, 500 aa, unidentified
MRSRKAKHSEVVNNSAGGHDGVGRHSASARTRSCKPNASSVTVRSPVVPGASGKTYERTVSPEDPCIRFTRRRSDRTNRGNDMNATQWNEQPYFAALDWARAHHDVVVIDRLGQIKETIRFEHTAEGWESFRRLAQRYPDLPVALETSHGTVVEQLFTAGVHVYPVNPKAAERYRERQAPSGVKDDQLDAWSLADALRLDGQAWRALAKSDPIVAELQLLCRDEIALIEQRTAFVNQLKQALYEYYPAALEAFDDWLAPASWAFLVQFPTPAKLQQAGRTRWAKFLHTHRLWRAQTVEQRMAVFARATALSGSAPTTAAKSLLAISLVRLLQTVEAQLSVYRERITALFAKHPDHDVFGSLPGAGPKLAPRLLAELGADRARFTDVEGLQCVAGTAPITYKSGKVCYQKIRWACNDTLRATVHLWADLSRKKCAWAEAYYQAHRRKGQSHACALRCLGQRWLKILWKMWQTHTAYDEALHTRSQTQHGSWVLVLTSAKTS

SEQ ID NO: 196243 - protein, 299 aa, unidentified
MHEKTVVATIDGLGLKRETRTFDTFTESLIELRNWLKTHQVSHIAMESTGVYWKPIFNILEENFRILLVNARHLKNVPGRKTDKADSEWICKLLLSGLLKGSFVPEEKLRNLRDLSRYATKLTQQASAEKNRIHKILEDANIKLSSVVSDIDGAVSNRLIAGLIAGRRDLGQLVEETYHKKLKANKADLLKAITGKLTDHHRFMLGQIQSHLEYLEKQVMAIEDQMDRLLEDHEQQIELLKEIPGVDDKAAKKVLSEIGTDMEVFPSEKHLAKWAGICPGNNETAGKKKVDEPRRETNT

SEQ ID NO: 196244 - protein, 347 aa, unidentified
MRFYKQQHQFYCGIDLHARKMYVCIIDQKGKTRLHKNIPTDAEMFFELIFPFLEDIVIGVECVFCWYWIADLCAQHSVAFVLGHALYMKAIHGGKTKNDKIDSFKIAALLRGGNFPLAYTYPAHMRATRDLLRRRMYLSRRCGELVAHIQNTNTQYNLPEFAKKISRKYNREGVAERFENPVVRKSVEVDLSMIDALNQTLRQLEWYIEKTAREHDYQTLYLLRSIPGVGQILALVILYEICDIKRFATVQDFSSYARLIRPVKESDGKWAGKGNKKIGNHHLKWAINEAVILMLRESEQAKHFVDRLTKKHNKGKALGILTHKLGRAIFFMLKNNEAFNMNRFFSS

SEQ ID NO: 196245 - protein, 345 aa, unidentified
MQNMYYIGLDVHKRTISYCVKDVSGRVYAEGSLPATRFHLDRWMKTLPQPWTAAMEATVFTGWIYDHLQPHAAGLKVAHPLMLRAIAAAKKKNDRIDASKICDCLRCDFLPECYMVSTALRERRRTLRYRNLLVRQMVQMKNKIAVLLMEAGVSYNKQRLHKAGYFRELLATNPDINEGLCSLLRVCRETVVRLQRTESALVRSLERDSLLRDRVERLMTIPAVGPITALTWAVEVGNVERFSSIKKAISYCGLCGAEKSSANIVQRTPLSKQRNKHLQTTLIEAAKMAPRYSPTLALLYDREKQKGNANRATLAVARKLVAYLMAVDRGQRNFQIVEASYSTAA

SEQ ID NO: 196246 - protein, 370 aa, unidentified
MSNATTFVGLDVHARPVKACAFVPETGETIRKSFGYEPGEIASWVSSLPQPARCVYESGVTGFHLCRELNAMGAACVIGAVSKMHKPAADRGRKTDRRDAQFLAVQLALGVVTEVHVPDAECEGARDLARALADARDDAVRAKQRLSKFLLRHGLVYDERNAAGQRRNRWTGDFWAWVGRIDLGDAAAMATLDHYCERVREADAAKAALEAKVKSLAQQPRWKPTCDALKCLKGIDAVTAASIACEADGFARFATASGFAAWVGLVPSEHSSGESRFRGGITKAGNKHLRKLLVEAAWHYKGASRSPKDLAKGQVVDAATRRHANAGVRRLVDRRRSMDDAGKQSSVANVAVAREPACWCWAVGRMAEGA

SEQ ID NO: 196247 - protein, 344 aa, unidentified
MKFTRCGLDIAKQVFQVHGVNEHGVVKGRKALQRAKVREFFAQLPPCLIGIEACGSAHYWARELSKLGHTVKLMAAQYVAAYRKRDKNDANDAEAICEAVGRPNMRFVAVKSEEQQAVLMVHRARALAVVHRTAQANQIRGLLGEFGLVVPKGVARLRRELPGILEDAENGLPVLARGVLCGLLEQLREVDARVSGYDRQIRTLAEASEPARRLMRVEAIGPQTATALVATMGDPHVFKSGRGFAAWVGITPRQHSSGGKERLGQITRQGDGYLRTLLVHGARSYLRVVDKKTDAKSDWARRLKERRHANVAAVALAAKHARIAWAMLAHGTEYRPAGPQTTVA

SEQ ID NO: 196248 - protein, 473 aa, unidentified
MKSAKMRKKFPGEVSPPAVLKGNSLCARLVPSSGAQGSNGIQRRKRRPRMDKQEREFRLRGSGNQVVEGGRLMRFAGIDVGSERHMVAMVDEEGKVLCRSSPFGEDASGYAHLFELLGPPEGCLLALEATGHYWRNLFVALLAKGYAVAVLNPLRTRRFAEEELQRTKTDAIDALGIARFAAQKRPPAAQLPDAATEELRELSRLRDRLQEDFASRLRQLHRAVDLGFPEFTRHVRTLESQLAATILSRYPTAASFRGASVKKLARIVYDGSHKIGEELARALIEGAAKSVGSYHSEPYRLRIKYLCEDLDVLRRRLKDLARDIERKLDEHEVGKLLTTIDGVGPLTAACLIAELGDPARFRSAGAIASYVGVAPRLRQSGKKRFSGSPTIPFGNARLRKALWMVVLNAVRCNPWLRQYYGRLRAAGKPGKVAVIAAMRKLLAAVWSVATHRRPFIPHLSPIPVTADAVTNNA

SEQ ID NO: 196249 - protein, 339 aa, unidentified
MQKYPIVGLDVSKQTLDVFLLEASDTHRSITVRNSEAGFRKLQQWLAPYPVEGMTVCLEATNVYSVAVSTFFYEQQATVYLANPSQVAAYMRTELRRVKTDTADAESIAHFAVAVGHRLRPWQPMPEQYQELRDLVRYLHELTRSRARVKNRREKSRYLTSAAASVIKGWLVKEIQFYDRSIKAIRSAIQQCLDRYPDLSGRYNLLRSAPGIGPISAVTIMAEIPNMQQFASAKQLAAYAGLTPRIRHSGQHQPASQSISKIGNAQLRSICYMAALTAKKHNAPLNAFAHRLQIEHHKKPKVVVIAIARKLLHLLYAMEKHQKPFIANYQNSQLIAGTI

SEQ ID NO: 196250 - protein, 340 aa, unidentified
MRLIGCDLHASQQSIAMLDRETGAVIEKTLRHEGETVRTFYASIPRPVVVGIEATGSMGWFLRLMEELAIECRVGHPTAIRKAETRRQKHDRRDAALLLQLLAEDRFPAIWMPSMEYRDLRSLLLHRHQWVRMRTRVQNALHAIVLAHGVRRGHALWSRDGQALLASLPLPPYTADRRSELQALYQHFEEHIDRLDEQVKHVAGERPRATLLMTHPGVGPVTALATEVFVGDPTRFLDGKALASYVGMIPREYSSGRRQRLGALSKQGNPFLRFLWCEAAAHAVRRDPDLQRFYRRKVVQKGFAKARVAAARKLGIRLWIMLRDQIDYQEFCRRGLARQS

SEQ ID NO: 196251 - protein, 347 aa, unidentified
MIIIGCDFHSRFEQIAMLNTETGELVERKLDHESGEARTFYEGLKAPALVGIEATGYTRWFAEMLAELGHELVVGEAGKIRAMNPRKQKHDRRDAEHLLNLLLRGDFPKIWLPAADERDVRGLIEHRHQLVEFRTRAQNGLQAIALSYGLRRRQRLWSKAGQEELEKIPLREGMGRRRQDLVQLVRQLGVWIKELDQRIAQEVERREDAQRLMTHPGVGAQTALATVLVLGPVERFPDDRHLTSYLGLIPQEDSSAGRQRFGHLTKQGNRLMRFLLVEAAGIASRYDPRLQRAYRRLAFRKGAAVAKVAVARKLAIRLYIMLRDGIDYQEFCRRGSHAGMLVSKPLV

SEQ ID NO: 196252 - protein, 407 aa, unidentified
MEVLVDRGAGIDVHKQSVTVCVMTTEGRKVIKMLHRFSTFHRDLLAMREWLKEMGVTHVAMEATGEYWKPVYEVLEGSVELLLANAQHVKNVPGRKTDPEDAAWLARLLRHGLLRASFIPSRAIRDLRDLTRLRRKTVEMLSRVENRAQKVLEACGVKLGSVVSNVFGATGRAILKELAANHTDPIVLAELARGSLKKKKREISSALEGSFSAHDASLLDHQLILHEQLDERRVKIELQLADLAAPYDDLISRLDQMPGINRDAAMEILGEIGDDMSRWPDHRHFAAWAGLCPGNHESAGKRKNIAVRKGNPFLKSILVQVATAAVRTKGSYYQAKFIRLSKRRGYKRAIVAIAHSMLIGIYHIVRDDRPFEELGSDWFSKRSAESKTKSLVSQLERLGYTVELRTA

SEQ ID NO: 196253 - protein, 343 aa, unidentified
MERYYYIGLDIHKKIIAYCVKAIDGSLIDQGKIVADRQSLEIWVKGLPGPWIGAMEATIFTGWVYDFLKPHAVALKVAHPAMLKAITAAKKKNDRADAEKIADLLRVDLLPECHMLSKEIRELRRILRYRNHIVRTAVKMQNKMSGLLMEVGVTYSKKRLHGKKYFRELLERVDEIPPSVKELLQLSRSSYEMFRSFQKRLIETLRTNQLIRDRVHRLMTIPGVGEITALTWTLEMGDPGRFSSIRKAVSYCGLCSAQKESAGKEQRGPISKKRNKHLQTMLIEAAKLAPHWNEQLAIVHERELKKGNRNRATLAVARKLVAYMLAVDKKQADFKLPAETQAA

SEQ ID NO: 196254 - protein, 316 aa, unidentified
MSDALYVGIDVAKESFDVASDPAGLRLSLPNDPPGRQQLLDALRNRSVALVVLEATGGYERTLVADLLGAGHNVVVANPRQVRDFARGIGQLAKTDRIDARVLARFASLVKPQPRLATSPEAETLAELVTRRRQLSDLMTQESNRLPQARHPEVRRSLKKSLRMLEKQIDDLDKLIRKNIDSDDGLRRKDEIVRSFKGVGPGTSAMLLSQLPELGRINRQQIAALAGLAPWDFKSGQWAGESHIWGGRRAVRNMLYMAALSAIRFNPVIRKFYQHLESQGKKFKVAITACMRKILVILNTLVRNDCLWLSPLLKNT

SEQ ID NO: 196255 - protein, 427 aa, unidentified
MSRMLRRLPSPYFAVGFDPHRSEDAVRNITNEVTAMLFVGIDIAKRNHEAAVIDQQGHVVRKPMRFANSQLGYNKFMDMVRNQGEPVVFGMEATGHYWLTLYTHLRNDGCTVHVINPIQSDALRGMYIRKTKNDAVDAVIIADVIRFGRYCETSVEPGDLQAMRELCRQRFYIIDMASDLKRKVIALLDQVFPEYEKLFSDTFGASSMELLARYTTPEEMLSVDSGKLAELLEQASRGRLGEAKAQEIQAAARNSFGLVMASNSFALIIRQYIEQIRSLEASVDAFDAEIARLLAGFDTQLTTITGIGPTLAAVILSEIGGDISRFPSAVKLAAFAGVDPTVKQSGDFNGTRMKMSKRGSPYLRRAIWLASTVAAFKDPAIHALYERKRAEGKDHMTTIGHVCRKMVSIIFAVLRDNSPYVPAQLPD

SEQ ID NO: 196256 - protein, 347 aa, unidentified
MQFYTKNHPYYCGIDLHARSLYVCIINHDGEICVHREIKASPEHLMRILEPYIGNIIVGVECMHCWYWVADWCEDNAVDFILGHALYMKAIHGGKAKTDKIDSFKIAKLLRGGTFPVTYHYPKSMRATRDLLRRRMKIIRHGAMLKAHVSNTLSQYNLPAHGTNLRYSQARDALRGTFEDKYVQANINLDLNLVEHYDRELRQIEKQVENHAIKHFYREYHLLKSIKGVGKILALTILYEIGDIQRFESVQKFASYSRLVKCKAESAGKIYGTSGAKIGNAHLKWAFSEASVLYLRGNDDAQRYLAKLQRRMPKSKALSVLAHKLGRCVYFMLRNKTLFNEDQFMKR

SEQ ID NO: 196257 - protein, 318 aa, unidentified
MKANTAAVYVGVDVAKATLQVHQQGRQIELHNVPAGLTQFCKKLKALEGAHVICEATGGYERALVQALHKVKIPVSVVNPAQVRGAAQAQGQRAKTDRIDALMLTDYGQRYQPQPTPPASQSQRQLAALAQWLKQLVDAQAVAKTQAEHHEDPFVRKQHNALLDHYQSQIEAVETKLKALMRKDPVLAQRVECLDAIEGVGLRTAFMILAHMPELGQINRQQAAALTGLAPWTRDSGTMKGMRCIGGGRSEVRLALYMSALSAARCNPVLSAFYQRLIARGKLPKVALTAVMRKLLIYMNHHLKALDAQPAPDAQKQN

SEQ ID NO: 196258 - protein, 340 aa, unidentified
MQIVGCDFHPSFQQVSILDISTGEVVELKLVHATGEAERFYRGLEAPVLIGMESTGNTLWFERLMEELGHELWIGDASQIRASYVRRQKTDRRDAGHILTLLLEKRFPRIWVPSHLERDQRQLLLHRHRLVQMRTRVKTELQHLAMNQGLQQKRSLWSVRGRADLEKLPLEGWTARRRADLLQVLGMLEAQVADLDEAVGKVAFANSQARLLMRQPGVGPVTALAFVVTIGDVGRFKRGKQVASYLGLIPSERSSGQKRRLGAISKQGNVFLRTMLVEAAQSTVRHDDEFKKEYAHRCHSKPKGVAKLAVRLYWMLRTQTPHAHAVHNEGSPSHSLVGES

SEQ ID NO: 196259 - protein, 349 aa, unidentified
MAAASVITLGVDTHKDLHVAVTLDALGRRLGIASFPTDDAHHADLWQWVAGFGQLTQAGVEGTGSYGYRLAQFLTGRGITVFEVNRPDRAARRRRGKSDPVDAENAARAVLSGDATATPKTRTGPAGQLRALLVARRSATKSRTQAELQLRSLILELDDDQRAQLDRRRTDHLAAACATLTGADGISLALASLARRWQFLDTEVRANTAQVEAIVRQTAPRLLNQPGIGPITAAQLLATAGDNPDRLSSEAAFAALCGVSPVEHSSGKTQRHRLNLGGDRAANSTLWTIANNRLMHDPRTREYAARRTALGSSRKEILRLLKRYIARQVFTEIRRALTPPKINQAQNLT

SEQ ID NO: 196260 - protein, 370 aa, unidentified
MKEPTTSYIGLDIHKESIAMAIADADRAAPRFIGTINPAPAELCKAMRRVCTKETTLVVYEAGPCGYGWVRYLRKQGWACDVIAPSRITRKPSEKRIKTDRRDALLLARESRSGNLTSIVVPDERDEAIRDLVRAREDARAARHRVRLQIQAMMLRHGRHYQGKKSWSQAHDRHLSTIRFEHPAQEITFNEYRQAAKEACERVERITQELRVQCKDWRMNPVVKALMCLKGFDFVAAVIFVAEMGDLTRFAHPRALMAYLGLVPSEFSSGKSRRLGEITKSGNKHARRILVEAAWNNRFKAQVTRGLEVRQEGQAKIIRDISWKAQLRLSKRWRSLSMGRKLAQNKICVAIARELAGFIWDVARHVKVNP

SEQ ID NO: 196261 - protein, 319 aa, unidentified
MSKIICGVDVASRSLQARIGPEGPAGRFANTAKGIAELAVFCRQHQVELVAMEATGGYEKQPFALLWAQGVAVAILNPRAVRHFAEGMGWLEKTDHIDAGMIAWFAQVKRVAAMAPLSTEQQRLKALVTRLRQLTAMRTAQRNQQRLVEDPLVLKSFKRVLAVLAAQMRQLELAIAELIAADPLWHKLDQTFRSIKGVADRTVANLVAEMPEIGTVSNKAISKLAGLAPMARDSGQHQGKRVVRGGRREIRNLLFVVSMIVRQFNPDFAAFHQRLTAAGKPKKVIRIAVAHKLLVRLNAKARQVRGELAGAKVLPCEVG

SEQ ID NO: 196262 - protein, 391 aa, unidentified
MIYIGIDVAKDKHDCFITNYDSEVLFKAFTILNNLDGFNDLYQKIESVMDDVTKVKVGLEATGHYSYNLLGYLIDKGLPTYVINPLHTNLYRKSLSLRQTKTDKVDARTIASMLMSDVNLKSYSDTSYHNEELKSLTRYRFDKVKERAKLKTSVSRLVCILFPELEKLVPTLHMASVYALLSEFPSAKHVATAHLTRLTNLLSESSKGRYGKDTAITFRDSARASIGSNMPAKSLELKHTIKLIQELDSEIDEIENEIKIIMDEINSPILSIPGINYRMGAMIIAEIGDFNRFDSPDKILAYAGFSPSTYQSGQLDGAYAHMEKRGSRYLRYALYNATKYVCHWDPTFAAYLAKKRAEGKHYNVAISHAVKKLVRVIYHLEKTKQQYIKAA

SEQ ID NO: 196263 - protein, 346 aa, unidentified
MSHKTAATVAHTIGIDTGKNILHLIGLDDQGAIVLREKIARGRISARLANVPRCLIGIEAGMATHYVARELSALGHDVKQVPPAYSKPFRQGHKNDFRDAHAIAEAVQRPSTRFVPVKTDDQLDLQALHRVRSRLVGQRTAVINQIRGFLLEHGITVRQGLRFLRQQLPDILAKRSDVLSPRMIRIMGDLSGDWRRLDERIQHITEEIEVLAHGSESCRQLMTVPGIGPLIASAMVAAIGNGAAFAKGRDFAAWLGLVPKQMSTGDRTILGRISKRGNRYLRTLLMQGARVILLRPANWAKHSFGPWLTAAANRLHHNVLATALANKLARIAWTVLMQARSYEARV

SEQ ID NO: 196264 - protein, 385 aa, unidentified
MQVMIEGQSHFQPFGLPYWGSENLNKGVGSMTASYDYHIGVDYHKSYSHLVVQDSGGKTLRSGRVKNDRQSLGGFLERYRENSHAVVEATRNWMVMYDWLDDICDDVVLAHPLKVKAIADAKIKTDKIDATVLAHLLRADLVPEAWAPSDTARDLRIALRERMFYVRLRTMTKNRIVTVFDRYPEQTAQLKTLGDLFGKAGRVQLAQVNVSEIDRIQIDRGLAFIGDIDGRIKQSEATIRAMTKANANVRLLKTIPGIGEFFARLIDAEIDDISRFRNAKKLAAYAGLVPSTYSNGGKTFHGKLIKQGNKWLRRAFVEAVSPAIASDAQLRAQYEHLKFSGVNKARVAIARKLLTIAFQILRDQRAYEPRGESPTEGASAISRLS

SEQ ID NO: 196265 - protein, 356 aa, unidentified
MSNYITIGMDLGNRKHTVCALDQTGNVLWRKDVANTPEALKPFFEENAGATVAMETGLCCRWVSALAKSCGCDALVGNARKLAAIWQSKQKNDENDALLIAELARASRRLFHPVELRDDEHHEMVQLIELREVAVSQRTQAVNSVRGLCKAHGVFIPKCDASCFHKVAADAIPDGMAWKFKPMLRHLKEVAATIKRYDAMLEEYAQKHFKEEVELLRTVPGVGPITSCAFVALIADPGRFGSARDAGAYFGLTPGQDKSGDKDAPKHITKTGSALMRHLLVTAANHILRASSPDTALKRHGERICARGGKVARRKAKTAVARKLAVVMLAMLKSGKAYDDGIAAVKAGAGESTVAA

SEQ ID NO: 196266 - protein, 453 aa, unidentified
MEKQVDSSKGLSLECIERNAAGIDVGATEIYVAVPPDRDPQPVRCFPTFTADLRRMAAWLVQCGITTVAMESTGVYWIPPHEVLEEAGIRVCLVNSKHVKHVPGRKSDVQDCQWLQYLHSVGLLKASFRPESDICAIRALSRHRSGLIESAAAHVQHMHKALTQMNLQIHHVLSDITGRSGMAIIEAIVSGERSPVRLAGLCHQRVRSDQGTVIKSLVGNYRSEHLFTLKQSLSAYKNYQELMVECDREIERLTRLLNGRIDPPQQTLLPPPRPRKAKRSKNQFHFDMGAELNRIFGVDLTAVPGISALTAHALLAEIGSDLSRFPNVAAFASWLALCPANNKSGGKVLSSRTRQTNSRASSALRIAAQTLARSKSHLGDYYRRMRARLGAPQAITATAHKLARIVYHLLTTGQAYDETVFVQENKKQAQRHEKRLRKQANALGFQLIPIAAG

SEQ ID NO: 196267 - protein, 341 aa, unidentified
MKNKSFIGIDISKNVIDVSIFCEETPIKDFSHDVFNNSRKGFGEMCTWLKKNHVVLSNCLFGMEFTGSYSMELEKFLNARKFQFCMLSTHVVKHYPMGPKDKSDKIDSAKIADFLYRYNGTECVKPYNMPDKTMQRLKALMNERKFLVEQRTCFMNRRQLCITKEDAQLYDGYIKKFSRDIENIELEEQKLLATDESLLTTYRNLLTIPGIGSVNAINVIVITRNFTAFETARQYASYVGVAPHFRTSGTSVRWRPRPSARCDGQAKADLSMAALITVQYDAELQSFYNRKLGGKQDSDTKRKALNAVKFKLVLRMFAIGKQNRKWEPLDSKSSNEKLAIS

SEQ ID NO: 196268 - protein, 356 aa, unidentified
MSQAILPDIIVGVDTHKQTHAAVAITRLGARVGELTIEVSLGGYRKLETWARSLGAVRAFGIEGTGSYGAGLARFLRAAGHTVHEAGRPDRGLRHRHGKTDHLDAEGAARTVLGGQATALPKAGTGEVEMIRHLKVARDTAVKARTQAMLALKAIIVSAPAALREQLDAVAGKMALVRHLAALRPGPLSTTTASAKASLRAIARRWLDLDAEIGSHDAHLGRLTERCAPEMVTAHGMGAVTAAEMLILVGDEPERIRSEAAFAKLCGACPVPASSGKTSRHRLNRGGHRQANAALHRVVVVRMRTHQPTLDYVRRRTAEGKSKREIIRCLKRFVAREIFGYLCRRPKAVCPAQIAA

SEQ ID NO: 196269 - protein, 425 aa, unidentified
MGMEVRWDGVPRDAVWAGVDTHADTNWLSVVDRLGAELFSGEFPTGAEGYARLIASARALGTLVAAGVECTGTFGAGLAREMASEGVRCYEVVVPTRSRRRRSAGKDDAADALRAARQVLSGDDLAVPKSQDGWVEEVRALYVAREGLVRSCTSLANIALATVRKAPDDLRARLEPLGTTGIMRACACWEDDGSAALVERAAMVSLRALGKAWVAQRSSARDLEGAIADAVRKGNPALAAMYGCGALSAAALAMAAGDNPGRMASEASFAALCGASPIEASSGKVRRHRLNRGGDRRANRALHVIAMHRMRTDPRTIAYVERRRAEGLSDREIRRCLKRYIAREAYRLLTNPEDVPAEGTGPGLREARIGAGVSQKDAAKALGVTASTLCDLELGHHQFRDLALRYRKWVDDGFPMDAEDPADGA

SEQ ID NO: 196270 - protein, 456 aa, unidentified
MAKRKIKGNPNATISMPVVNPNAAGIDAGSRSHFVCVAQDNVKEFPTHTAGLHEICQHLGSYGIKTVALESTGFYWQQLFAMLQSYNIEAIVVNARHLKNVKGHKTDVVDSKWIQLLHSIGLLNNSFQPDSFCKELRQYTRHRRSLIENSSRYIAKMNKSMVLMNIQLKTVLSDLTGESGLRVIEAIVKGERSPEMLEKFVGKNVKASREAIKKALVGDWRSEHLFELSQNFEFYKFTWEKIRETDQQIETILRKWQDKNGDESKIQEYRKNSKYKKPRQKNDPKFDIKAFAYQMTGGVDLSQIEGVNINTILTMMSETGFDIKSKFKTAKHFTSWLGFAPNRKITGGKVMSSNTPKVKNPMVYAFRQAANAAGNSQGRLGDFFRRISYRKGRSIAITAAARKIAVIIYKMLESGQEYCYDYGQDELDKLRKAKIKKIKKTIGLFQIEGSELALSI

SEQ ID NO: 196271 - protein, 417 aa, unidentified
MIDDVQWFVGIDWATQSHRVCLLDVEGRHVNERDFAHGGAGLTELRDWLLEKTKAAPGQIAVAIETPHGPVVEMLLDHAFLVFAINPKQLDRFRDRFTVAGAKDDSRDARVLGSGLRTDRQAFRRLVVDDPVVIELREWSRMADELQQERTRLANRVRQQLWRYYPQASELTDDVADDWFLALWQQVPTPATAAKVSEQAITRILKDHRIRRLDAATALQTLRKTPLFVAPGTTEAACAHIRNLAARLHLVNQQIKEAHRALDGLCAKLEARESPSGQNREQRDVTILRSWPGIGRIVLATLLTEAAEPLRARNYHALRALAGTAPVTRRSGKQCFVIRRHACNGRLQTAIYHWSRVAIQRDAVARRRYDALRRRGHGHARALRSVGDRLLYALCTTLKRQTTYDPNCQTAQITASL

SEQ ID NO: 196272 - protein, 377 aa, unidentified
MHDEELVLIGGVDAHADTHEAAALDQRGALLGTERFATTFTGYGNLLDWLRAFGAIELVAIESTGSYAAGLTRYLREHGVAVVEVNQPHAHTRRRRGKSDPIDAEMAARLALAGKATTVPKQTDGIVESIRLLRVARSSAVKARSATMVQLSELIVTAPQELREQLSQRRTIRGKAALCRRLRPNPIELDRPTQAAKLALRSLARRIDALDAEIADFDVQLEQLVRAAAPRTTQLLGISTGHAGQLLVTAGQNIERLRGDAAFAALCGASPIPASSGRTTRHRLNYGGDRDANRALHMIAVCRLRHCDRTRAYAQRRTAEGKTKREIIRCLKRYIAREAYHALRADLADLQAATPPPRHAIAISCGAGFIGRNRRKL

SEQ ID NO: 196273 - protein, 389 aa, unidentified
MKIYVGIDIAKLNHFAAAISSDGEIIIEPFKFTNDADGFQLLVSKLESFDKNSLIIGLESTAHYGDNLVRYLVTELYQVCVLNPIKTCQMRKNNVRKTKTDKVDTYVIAKTLMMQDNLRFVSFFDLDMMDLKALGRFRQKTIKQRTRLKIQLTTYVDQVFPEIQYFFKSGLHQHAVYALLKEAPSPKEIASMHMTHLANLLKVNSHGHFTKEQAKELRVLAQKSVGANDSAISIQITQTIQQIELLDSQLEKIEAEMTDIMKFNDSVIMTIPGIGYINGGMILGEIGDIHRFSNPNKLLAFAGLDPTVYQSGNFQAKTTRMSKRGSRVLRYALVNAAWNVVRNNATFKAYYDAKRAEGRSHYNALGHCSGKLVRVIWKMLTDNVEFNLK

SEQ ID NO: 196274 - protein, 349 aa, unidentified
MLHVGLDLSRKRVDVCVISREGELVEHFRAPCDRDGLYGLTRRVAVYEEPIRGVVESMNGARYVHDELVRYGWEVLVADAVRVKGLAPLACKTDKVDARVLAELSFRDLVPAIWLPTPELRAERERSRWRLHLVKHRAILKNRVHSSLIAYGHQVPMADLFGVAGRRLLASLDFPEPWLGHVQASLELIDDLDRRIGEIENWLRRSGADHRYLPLLLTCPGIGWITGYTIAAEIGDINRFASPVKLTGYTGLCPRVSQSGEIDCRGPISKHGPRYLRWGLMEAAIAASSHPLYRERYQRTRRRLGRQRGPKIAQIELARKLSEAIWYMLTRNQPFKPFVPAGAVLPLTA

SEQ ID NO: 196275 - protein, 366 aa, unidentified
MKKTSTVRVNGNMIFKGHKLTIGLDLGDRWSYYCVLDEAGEVLLEQKLATTPEAMKQTFERIPRSLIALETGTHSPWLSRLLKELGHAVLVAHAQKVELISKSNRKDDRHDARTLARLARIDPELLGPVRHRSAKAQIHLTVIRARAELVSARTALVNGARGLVKSYSQRLPKCGTEQVSRELAAELSAELREVLEPLLKEIESLNERIKEYDERMEKIARESYPQVALLKQVKGVGTQIALTYVLTLDDPHRFAKSREVGCFLGLKPGRRDSGESQPQMRISKEGDRYLRTMLVQGAHYILGPFGEDSDLRRWGLRLAERGGKNAKKRAVVAVARKLAVLLHRLWVSAEVYEPLRNSHKAMRAAA

SEQ ID NO: 196276 - protein, 483 aa, unidentified
MREPQEIQDEEHEQTWERVAAIDVAKASGTVCTRVAHPSRPGRRLTKVWEVPATMGAISELGEHLAGLGVEKVTVESTSDYWRPFLYLLQAGGLDVQLVNAREVKNVPGRPKTDRLDAVWLAKLTERGMLRPSFVPPAAIRQLRDDTRLRADLTQERARHYQRLEKLLEDALIKVSSVASTLDGLSVRDMLEALIAGERDPRVLAGLARGKLKAKHGALAEALAGRFDDHHAELARMLLDQIDTLGGQIGTLTTRIQELIAAIPAAQGVDADGTTGPGAGSSPDAVVLPAVARLDAVTGIGPGTAQVLLAELGLDMGVFPTPGQLVSWARLSPRTLQSGAKTRGGKTGKGNPYLKGVLGEAAGALPASGQAPRQAQGPGRHRPLHPGDRLAPARRPHRPLPRPGRRLPRQPHRQGQEDPQPHPPAASPGVHRHPHPGSLTPPLQPHPTAQEPASPAAAACLTEVCDFPVSPGVPAGTPRGREN

SEQ ID NO: 196277 - protein, 482 aa, unidentified
MVVPNEEPKKPTKPNKPTKPNKLTKPNKSRERSLPVPVPVSAAALHVINPDAAGIDVHSDMHMVCVPADRDANPVRQFGANTADLQEIVAWLKKCRVRTIALESTGVYWIPLFELLESEGFEVNLVEPGQLSRCGARPKTDVLDAQWIQRLHSYGLLRASFRPPDSVLALRAYWRQRQMQVRYAASHVEHMQKAMEQMNVKLTEVVSDITGLTGMLIIGAILEGERDPIKLAQLRDRRCQHSEEQIALALEGTWRPEHLFELRQAHELYQFHHRQITECDQQVQAELANFPNRAGEKTRTVKRRKRGRKSNDVRFEATGPLFQALGVDLTSIEGIDVGTALVILAEIGVDVSRFPTEKHFASWLRLCPPQDESNKTKKRRGHRKGTNRVTIALRMCARSLGKTMTPLGLFYRRIRSRIGGLGAVKATAHKLACLVYRMLKYGQQYVTQSMEEYEAKVKANMLKALKRKAAALGFQLSPLPTQ

SEQ ID NO: 196278 - protein, 371 aa, unidentified
MEESSKSLYVGLDVHKESITVAYAPEERGTEVVSLGAIGTRQCDIDKLIRKLQSKGAPLVFVYEAGPCGYWLYRYLTRKGLSCHVVAPSLIPRKPGDRVKTDRRDAVMLARLMRSGDLTSIYVPTVEDEAIRDVSRGREDAMRDLKAAKYRLKAFLLRQDIRYEGRANWNAAHLRWLSEVVCPTPAQQIVFQEYVRAVTEQHERVQRLETELHEHVKTWRLYPVVEAIQALRGVELTGAVILVAELGDLTRFDTPRKLMSYLGLTPSEYSSGERRRQGGITKAGNTHARRALVEGAWAYRYPAKVSRHLQLRQEKLPAEVRAIGWKAQVRLCKRYRQLIARGKHANQVVVAIAREMAAFAWAIARIVPLAP

SEQ ID NO: 196279 - protein, 372 aa, unidentified
MQTYYVGLDVHSRESVFVVENDTGAIVARGSVPTTVNGLKHLRDSCGLPAATGVALETGTSAFFVARELARLELKPVVIDAHEVRRKAQRPEQKSDTRDALELCEGLRRGFYRSLVHVPSPAISDLRTTLSRRRHFIRIQTAEVNAVKRLLRGVGRNSGRRGSLRTDTHWQSLLAGDLVPEQLQEHVRHPYAVWRQAAERVRALGLSLGDNARERRDAVKRLETVPGVGPIVALTAIAVFAEVSRFESAKHAASYAGLVPSTFQSGERDAHGHITKRGSAELRAMLCEAAHHARRPVHPLHPHFAKVCARRGYKTAVIAVAHRLCRILFAMLRDGTDFSVTRVGVEQGDFERTTTYRYRLRPKPASRLPATG

SEQ ID NO: 196280 - protein, 338 aa, unidentified
MELKRVGLDTSKAVFTVHGVDHAERVVVRRDLKRPALEAFFAKLPPTVVALEACGASHHWGRRLTALGHEVRLIPPQYVKPFVKRGKNDRNDAEAISEAASRPGMATVPVKSAERQAEAMVLSMRETLVKQRTQWVNTMRGHAAEFGVIAGKGVGRVSELLDKVASDATIPPIAKEMLSFAAAEVSHLDDRIGELERQMQRQHKANPVSQMLAKVPGIGPIGALSLALTVDAGRFQSARHFSAWLGLVPKQHSTGGRQQLGSISKAGNERLRQLLVVGAMSVIRFAKPGSKSASAWLLQLLERKPRKLAAVALANKMARIVWAMMTRGEAYRPQAVAG

SEQ ID NO: 196281 - protein, 369 aa, unidentified
MGDRITYVGLDVHKEGIVVAVAEGGQRGEVRDYGRIANTPAALDRLIRKLGGEGVGLRFCYEAGPCGYGIQRHLSAHGHDCVVVAPSLIPKRAGDRVKTDRRDAASLARLHRAGELTAVWVPDAGHEAVRDLVRARLDAVHALRRARQQLSGFLLRQGCHYGRLGWTKLHRRWLANLRFEQAVHHIVLEDYIEAVEAAQARRDRLTAQIEAMLPDWTLAPVVAALQTMRGMALVNAATLIAELGDLSRFANPRQLMAYLGLVPSEHSSGTSVKRGGLTKAGNSAARRLLIEASWTYRFPARVSRELLLRQEEQPKPIREIAWKAQLRLCARYRKLARSGKPANVVTAAIARELAGFIWAIARRVPPAAN

SEQ ID NO: 196282 - protein, 312 aa, unidentified
MNRIICGVDVSKDWLDAFIRPSGTFERFSNDATGIGALADLCRAENVELLVMEASGGYERTAFLLLWELGIACALANPRHVRRFAESMGFLEKTDRIDAAMIAHYAETRRLAALPPPKAAQMRLSALMARLSQVTSDLTIQMQRRSAARDQQCEASLNEVIALLVRQSRTLEGEIASMIDDDPLWACLNQAFRSIKGVANRTVARLMAQLPEIGQISNKAIAKLAGLAPIANDSGKRSGHRPVRGGRSGPRAILFLVGAIAARHDPHLAAFQQRLQSAGKPKMVIRIALARKLLVILNAKARDARREFEYAT

SEQ ID NO: 196283 - protein, 338 aa, unidentified
MNEITTVGLDLAKNVFHVVCRDHRGKEIKKRMLRRGQVAAYFAQLPACLVGMEACAGAHHWARTLQALGHEVKLIAPQHVKPYVLGNKNDYNDARAIAEAVTRPGMRFVSVKTVAQQDVQALHRLRQARVADRTALVNQVRGLLAENGLVIPQGLKSFRQQVPQILEDAENGLSDRFRRHINSCYEHLQQLDARIDEYTREIKRESREHEAVRRLQSAPGFGPILASVFYSVVGEGAAFKRGRDVSASLGLVPRQNSSGGKQRLQGISKRGDGYLRSLLVHGARSVVRRAVGKEDRLSRWIQRLVAERGVNKATVALANKLARIGWAILRHQTIYRTA

SEQ ID NO: 196284 - protein, 400 aa, unidentified
MRAVFGIDVSKTSSEVAILVNGEKVHGYTILNDAIGFNRLLGDLKTVHNPEIIFEATGVYSRRLQAFLEEYSYAYTRLNPLEAKKQLDSLRVRKTDKIDAEKLAKSQLVHNRKPTYVQEEVYQHLRDLSCFYQNMTEDLVRTKNRLHKVLQVTFPELENLLSTPTGEQYWNLVMAFPCKEFVLSLSQSNLCEIIRQSTSKRISENRVTYLVDKLTKLANQSYCAVKNTSPMLEEVRYYAQELLRLSERRQVVLNDMVALAQPLPEYDILRSIPGIAETTATSIIGELGDIRRFQSSNQINAFIGIDLRHYESGNFLAKEHITKRGNPYARKILFKCIHNIASASHTNPCHIADFYEKRKRQSTIASTKPHTIASIHRLIRTMYYLITHNKLYDYSLTQNR

SEQ ID NO: 196285 - protein, 353 aa, unidentified
MLAEMVDHVIGVDPDRDWITAAVVDAATTGVVATARFVAKGSGYREAMAWADEYSIDTERAWAVEGTSSYGRGIAVALANSGEWVIEFDRAKEKAAKDGAKTDILDAVRAARETLGRDKWASPRTHDGIREALRVHVVARDSAVHARTAAINELKAFVVTAPDHLRDQLRGLKRRSLVKRCAGFRHSDNQPIDEQCTRAVMRAVARRIVHLTDEIKAHEKTLRLLVEEAAPQLLGEFGIGPITAAALYVAWSHSGRCRNEAAYARLAGVAPIPANSGQTQDRHRLNRGGDRQLNTALHTVAVTRIRAHPPTQDYKQSRLAEGKTDREIRRCIKRYIARRVFRLLENPPLDEAA

SEQ ID NO: 196286 - protein, 332 aa, unidentified
MENVLKIVGADLSKKSIDLAIHATQEHLRIENNIEGFKKMVRWLKYHKLEASQVTIVMEHTGLYSYCFEAFLHKKGYRFNKVNPLDIKFSIGLTRGKSDKMDAARIAKFGFEKQGRLKAETPLSQVLQDLKLLNTSRENLVRTRAGLKTSIEEFRNIGLKDSNPALHCQVQIVSQLDKQIERLDKEIRAVIQQEEKIEKTYTLLNSIKGVGPVVATNTIIKTHNFERFANARKFACYCGIAPFENTSGTSVRGRTRVNHMADKGMKTILDLAAKSAIGCDKELKEFYQKRVDQGKSKMSTINIIRNKIVGRMFAVIKRQTPFEQNYFKPTWN

SEQ ID NO: 196287 - protein, 346 aa, unidentified
MLDSETGEVVSMTLKHEGNNVREFYSSLPRPVRVGIEATGSMQWFVNLMEELGIECLVGHPAEIRAAEPRKQKHDRRDADLILKVLVENRFPAIWLPSKELQDLRSLLRHRHQWVRMRTRIQNALQSIALANGLRRGTSLWSHDGQNTIASLPLAPHTAYRRSELQALYQKFEAEIEKLNQRVEEQACGRAGARLLMTHPGVGPVTALATEVFLGDPARFADSKALASYVGIIPREYSSGGRQRLGGLTKQGNPLLRFLWGEAGAHAVRRDPELQRFYRRKLIQKGFGKASVAVARKLGIRLWIMLRDQIEYNEFCRRGQKQQKSSEACAGMPETRNGAKSHRPVD

SEQ ID NO: 196288 - protein, 387 aa, unidentified
MEVRMVNTPSADSNNEPVACYVAIELSKSGWLVGFLTPLSDGTGRYQVKAGDAQALLDLIERVHTRVARQLNRPVEVMSCYEAGYDGFWLHRVLEAHGIHNHVLDPASLQVNRRARRAKTDRIDVDRMLRALIRYLRGEPEACSVAQVPRVEEEDAKRLHRERKRLVVERVQHVNRIKGLCAAQGIYNYAPLRPDRWSQLDKLRTGDGRSLPARLKSEIVRELKRLELVLEMIETVEAERDAIIKDPRSRHLNADKIKMLARLRAIGPEFATSLTGEVFYRKFANRRKLGRYVGLDGSPFRSGSVERDQGISKAGNPVARSMMVELAWTWLRYQPDSALSIWFRERVGNLKGRPRRIAIVAMARKLLVALWRYLETGVIPTGAVLKA

SEQ ID NO: 196289 - protein, 375 aa, unidentified
MEHHSEAFVALDTAKLRNAVAIADAGRNGEIRYLGEIDNTEAETRKLVAKLASKHARLTFCYEAGPTGYGLYRLIKSIGHDCLVVAPSLIPSKPGDRVKTNRRDAVNLVKLLRAGELTAVWVPDERHEAMRDLVRARDAAVKDYRIKRQNVSSLLLRLGRHYPGKKTWGRTHINWLTGLKLEHREQRIAFEEMLLAVRQVRERIERLEQAMREAVADWTLAPVIEAVQAMRGIDMIGAIAFLAELGDLSRFQNPRQLMAYLGLTPSERSTGESVKRGGITKAGNTRARRLLIEAAWSYRFPPRVSKDMQTRIGAAPRTAREIAWKAQMRLCGRFRTLTRKGKRPTIVVTAIARELSAFIWAINREVAGSHATANQ

SEQ ID NO: 196290 - protein, 309 aa, unidentified
MEHFVGIDVAKDRLDVHLRPSGETFTVARDGEGLAALVERLRALAPRLVVMEATGGYETVVASAVGAAHLPLAVVNPRQIRDFARATGKLAKTDRIDAAAIAHFAEAVRPPARPIADAQAQALGELVARRRQVIEMIVAETNRRRMAAQRRVIKAIGRHLALLQAELSELDGDIDGAIRSSPAWQADADLLVSVPGIGKATLRTLIAELPELGRLTRRKIAALVGVAPINRDSGTLRGRRTIAGGRRAVRAGLYMAALVASRANPVIAAYYAKLRAAGKTGKQALVACMRKLLVILNAILRDRKPWQPA

SEQ ID NO: 196291 - protein, 385 aa, unidentified
MSLNVVGAVFFVGIDWASAIHAVCVQDAAGRRVAAFTVEHSAAGLAGLMRRLARLGDPDTMPVGIERPDGRLVDALLEAGHPVVPVKPNAIKTWRDGEVLSGAKSDAGDAEVIAEYLRLRHHRLQLATPYTPETKALRTVTRARGDLVDMRVATTNQLTALLDLHWPGAKAVFADVESPIALEFLTRYPTARHAQHLGAKRLTAFCVKHGYSGRRTGEQLLTRLRAAPAGTLDDTLCEAVRDAVTALVAVLRAVGAALKDLSRSVVAHLGEHPDGEIFTSLPRSGQINAAQILAEWGDCRQAYDGPDSIAALAGVTPVTKESGKHRAVHFRWACNKRFRVAITTFADNSRHDSAWAAKVYTDACARGLDHPHAIRVLARAWIRVI

SEQ ID NO: 196292 - protein, 339 aa, unidentified
MNEVTVIGIDLGKHSFHLHAQDAAGRMVFRKKLSRQQLLRTLANVPSCRVVMEACAGSHWLARQLAGMGHEPRLISPQFVRPFVVGNKNDFGDAQAICEAACRPSMRFVSPRNEAQQTVSAMHRLRERLVRERTATVNQIHGFLLEFGISLPRGAALMSRLPTVLDHETLPPRLVGLVVRLRAQVHYLEEQLRQVEQDLKASLREDDKSRRLLEIPGIGPITASALAVELGDARQFANARQFAASIGLVPRQYSTGGKPTLLGISKRGDRNLRRLLVQCARAVMQHTASRTDALSLWVKTLSTRRHSNVVACALANKLARIAWAVLARGTHYQARALTT

SEQ ID NO: 196293 - protein, 389 aa, unidentified
MLLDHPSDEPTAIRTYIAAIFVSLELSRSTWLVTSLSPGKGEKMSKHSVTAGNVAELLTLFAELRRKAEVRTGQSYPIITIQEAGLDGFWLHRVLQQEGIESHVVDPASIATPRRRRRAKTDRLDGEALLRALLAYKRGEPRVCAMVVAPSPEEEDRRRLCRERRTLIAERVRNVNRIKGLLFAQGISDYAPVRRDRRARLEALRTGDGRELPSHLKAQIGRELDRIELLLGQIKEVEAAQDALLAAARKPASEEAAPDPVTMLLALKGMGANFAAVLWSEAFYRQFANRRQVAAYAGLAATPWQSGGIRHEQGVSKAGNPRLRTTMIQIAWLWIRHQPQSALTRWFKARSQQGRKRAIVALARKLLVALWKYVTQGVVIEGAVTKPAA

SEQ ID NO: 196294 - protein, 343 aa, unidentified
MQTVMTIGLDIAKSVFQVHGIDAAGRVVIRRQLKRRFVLSFFEKLPPCLVGIEACASSHHWSRELQALGHRVRLMPPAYVKPYVKRQKNDSTDAEAICEAVTRPNMRFVPTKTVEQQSCLMLHRARHLFIRQQTAVINSIRAYLVEFGIVAPVGRRGVEHLLEVVADADDHQLPEVARMCLVALGSQLRALKAQILEFDRRIMAWHRSNATSKRLDAIPGVGPALATALVASIADPKAFRSGRDFSAWVGLVPKQNSSGGKDKLGSISKQGDRYLRSLFTAGALAVIRYAKIHGTRHRPWLTALLARRPTKVAAIALANKLARMAWAMMARNEHYREPAALAA

SEQ ID NO: 196295 - protein, 441 aa, unidentified
MAVRKVFELMYPNAAGIDIGSASHYVAVAADRDEQPVREFKSFTEDLLAMADWLSGCGIDTVVMESTGVYWIPVFELLESRGFAVYLVNARHVKNVSGRKSDVLDCQWLQQLMSFGLLSGAFRPTEEICVLRALSRQRDMLLGAQGRHVQHMQKALTQMNVQLANVITDIVGKTGQAIIRAIVAGERDPVKLAQFRDRRIHASEEQIAKSLRGNWREEHLFSLAQALKLFDAYQQLIGECDERLQQLLLQLARHAGEPEPNRNKGRQKNAPKFAMRTALFRVCGVDLTRIDAIDVSTAFKVIAEVGPDLSKFKTVKHFCSWLALCPGTKISGGKRLSGASKPCANRLAQALKLAATGLLRSHSALGAYFRRMAARMDKPKAIKAAAHKLARLIYTMLTKGTEYVDQGQDYYEQQYRQRVVANLQRRATALGYKLMPSAQPA

SEQ ID NO: 196296 - protein, 344 aa, unidentified
MELYMINNFLGIDISKDRFDVSLSFISNKGKRETRKRSFKNNDHGFQGLLSFLQKHNVEQVKACMEATGCYSEALAEFLHNTGHFVSVVNPACIRFYAKSKLIRQKNDQTDAEIIADYCQRQEPIRWAPPSPELKKLKHLYRCSAALKDELTLVNNHLEKKERLPKEVANAWEDLAMNIKQKIERIKNSLRELLNKHKELLENFQLLLTIPGIGEESAVAILAEVPNIKAFKDARQLAAYAGAIPRNITSGTSVHAKPRLSKSGSRTLCKAMYFLAIVAKNHNPTIMTFCKRLKEKGKHNMAIVGAAMRKLLHIVFGVLRSKKAFDPDHIKNYRARSLAESLVL

SEQ ID NO: 196297 - protein, 320 aa, unidentified
MSGSSVVVGIDVASQHIDAVVLGAQLGAERFSNDVDGHTALADALAPLKPQLVVMEATGGYEVALACALQAAGLAVAVINPRQARDFAKATGKLAKTDRIDARVLAEFAALLAHRPDADRFSRALPKPAQQDLAALVTRRRQLTAMLLSERQRMRLARPVARASIEATIEFLRRQLDDVETQMATHVQAHHAALDQLLRSAGGIGPIASATLIAELPELGRLDRRAICALVGVAPYAKDSGSSRGRRRVVGGRFEVRRTLYMATLTATRYNPAIHAFYTRLVAAGKLPKVALIACMRKLVTILNAMVRSGRSFDLDRVHT

SEQ ID NO: 196298 - protein, 403 aa, unidentified
MHYLGIDVSLKSHRCALLDSEGEKVGASFSVDSSPEGFSSLLETLKKRNIPFDQVTAGLEATGHLWENLFSFLERQKIKVLLLNPFQTNRYRELLSKKAKTDDIDAFCIAGLLRSGEGRACYVPDDMVQGLRDLVRARNSFISNLQDYQRQAQALLQVVFPEITGLLKDPFAKVACEILRQFPTARDLACVHPRTLEKIARACQGNNFNREKAEEIVEAAKKSIYSGKAQKARGQVLSSLVKQIVDLKTAIANLDQIIDDTLNTPSQGPSEVDLITSIPGVGPKTAAVLIAEIGDVSRFASANHLVGYFGFFPQIRESGGRMLGTPKISPRGPKHFRKALYMAAVACLKHNPEMKAVYDRKKSQGKAAKQALIVVARKLLATVYSLLRYQTTYNPLRLNIVAT

SEQ ID NO: 196299 - protein, 399 aa, unidentified
MFVGIDWAKESHDICVVDPAGKVRGRATVAHSQEGFDELAGHLARWADGGKLLVGIERPEGRLVDRILEAGYPIVLIPTFAMKDLRRRYAVGGAKSDPGDAYVIADAARTDGHRLRRLEPLSEHTRALRSVVRARGDLVDQRVALSNQLRACLDAYWPGAAVIFADVCSEICLAFLERYPTPESAARLGELRLGSFLKKAGYSGRRSAAELLQRLRSAPAGIAGVEAEARADAVRAMVRVMRALNSSIKDLDRAVVVHLGEHPDAEVFTSLPRSGRINAAQMLAEWGDCREAYLDPDAVSMLGGLCPVTHASGKHRDVSFRWACNKRLREAVTTFADNSRHASPWAADIYRRAVARGCDHPHAVRILARAWVRVIWRCWQDGKPYDPALHGAAVLLEAA

SEQ ID NO: 196300 - protein, 393 aa, unidentified
MEGRMENTPSAGVNYDPVHCFVAIELSKSSWIVGFQTPLSKQTSQYQLKPCDAKPLLELIERVRIRISRELGRPVEVMSCYEAGYDGFWLHRVLEAHGIHNHVLDPASLQVNRRARRPKTDRIDADRLVRALIRHLRGEPEACSVVRVPSPEQEDARRLHRERGRLIAERVAHVNRIKGLCASQGIYDYEPVRKDRLQRLEKLRTGDGRPLAPQLKAEIVREIKRLQCLLEMIATVEAERDAILESEKSRHLNADKIKMLAKLKAIGPEFSTTIVGEVFYREFANRRQLGSYVGLASSPFRSGSLGRDQGISKAGNPKARAMMIELAWSWLRYQPDSALSRWFRERVGNLKGRPRRIAIVAMARKLLVALWRYLQTGVIPTGANLKTNRLKQA

SEQ ID NO: 196301 - protein, 346 aa, unidentified
MKEYISFDSHKRYTLAEREEVATGRVRQSRLEHGRGVIRRFLGRCQGGTAVAVEATGNWYWIVQEIEEAHMKPLLVHPRKAKLMMGMVNKTDKLDVHGLNRLQRNGTLPTVWIPDGELRDQRELTRTRLVVTRQRTRLKNRITATLSKYGLTEGEASDPYAKGARTELEQRIQQLPEQARWVTGLLLDQVDFVEQQIGELEKRLRQLLAVTPTMQLLTSLPGIAVILAATIAWEVGDVKRFPSAPHLASYAGTTPRVYASGGKVRYGHLRQDVNQYLKWSFVEAANSIAVHRRTHPERHVSQLYERLRARKGHSKAIGAVARHLAEATFYVLSRQEPYQDPAAKRV

SEQ ID NO: 196302 - protein, 314 aa, unidentified
MRNCIGIDVAKQYFDLHGLKTGQDQRMENSTDGILKCVAICNKIRPELIAMEATGGYELTLAATLQAEGFAVAVVNPRRIRDFAKAAGQIAKTDRLDARIIAQFAATMEPVPNEQFSEHTQKLKALVARRSQLVGLHTAESNRLEHADGKEIRRSIAAVLKVIEAQLKTIDRQIAEYIENTPRLRQRSEILDSVPGIGPTTANMLVTELPELGQLNRRQIAALVGVAPMARDSGTFRGKRMTGGGRKKIRSRLFMPTLVAVRHNPILRAYYNKLLSRGKCKMVALVAVMRKLICILNAMAKNDQEWNPNLIKIA

SEQ ID NO: 196303 - protein, 398 aa, unidentified
MGDAVEAAWVGIDAGKVSHHATLVDAEGTIVWSRKVGNDQAAIEQLIAKAAASAKTVRWAVDLTSAGAALLLALLTTAGQRVVYVPGTVVNRMSDAFAGEAKTDARDSFVIAETARLRRDLTELTTPNELVAELALLTGHRADLMADWVRGINRLRELLTRVFPALEQAFDYTTRSALILVSHYCTPDAVRDADADELAAYLRREGAHRPSIPGMVAKAQTAAAAQTVALPGEVTTAALITRQARKLLDLDREIKDLDKQLTGRFRDHPQAHIIESMPGMGPILGAGDLAAFGTAARLATYAGLAPVPDDSGKRTGVLRRPRRYHRRLRHVFYMAAFSSLKNDGPSREFYERKRSERQRHTRAMIALSRRLVDVLWALLRDNRTWQPRPPTPLPASAA

SEQ ID NO: 196304 - protein, 334 aa, unidentified
MSLDLLAIDLGKQSFHVYGIDSDGVIVSRKLSRAKLMRAIAELAPAVIAMEACASAHYWGRQFLAAGHRIRLINPRFVKPFVKGSKNDAVDAEAIYEAALRPTMRFVPVKSIAQQDLQSLHRARERVVCARTALINHMRGLLGEYGVILPQGAWRFVGQAPGAISDAELSDLAREIFSDMLDQLSDLNRRLEKFDAHLMALCRTNEACRRLSKLPGVGPVIATALVAAVDDGRHFRSGRELAAWIGLVPRQYTTGGKPRLGGIGRRANHYLRRQMIHGARSVVMRLAKHDDRRSEWLKGLAARRGFNRTIVALANKTARIAWALLTRNEDYVAA

SEQ ID NO: 196305 - protein, 420 aa, unidentified
MPNIEIGVDSMVKENFIYVGIDLHKETHTAVMIDCYNQKLGEITFPNRPADFPKLVTKVKKCNTDGKEVVYGLENAYGYGRALAVWLIDKGYLVKDVNTAISHRQAKHRGAMYRKSDSDDAKAIALATLNMLDKLPDACPNDAYWSLGQLVHRRDNIMKQRTRLVNQLHEQLCIAYPSYKQFFNDISRPTALYFWEHYPSRKYLKGKSVEDLRAELVPVSHNKCSTKTCEKILDAVASDKVKNNAYQDARDMVTLSIVSDLQHYDSQLTEVDKMLEQMYKMLGCTLTTIPGVNVITAVKILAEIGDIKRFSNANKLAQFAGIAPLHLSSSGKGKDVATKQGNRRLQATIYFLAIQMVQVSSKGTPRNSVVRAYYEKRKAEGKTSQQALICISRRLISIIYGMLKHGTEYRMPVVESAGEK

SEQ ID NO: 196306 - protein, 333 aa, unidentified
MVEGTEGSHHKEGSTKMSKYTTVCAGIDTGKHKLDVAIDGGAERAQVDNNSEGHRSLSAWLRRREVERIGIEASGGYEQAVVSSLRADGFVVIVFQPVQVRAYAKFVLQHAKNDNIDAVLIARCTAAATDIHEPPDARLAPLAQHLTMIEQLTEDVGQLKTRREACREERIREFWKQEINRLKVLLNSELKQLVTAIREYRDLANRLDLIASVDGVGLRTAVAILVRMPEIGRVTREQAAAIAGLAPYDDDSGLRRGSRHIKGGRQRLRQSLYAAALPAVFYWNPQLKAFYRRLLVAGKPHTLALVACARKLLIFVNTVVARGTSWRSSAVTT

SEQ ID NO: 196307 - protein, 324 aa, unidentified
MRQNRKRIWRGKCLSHPQAVADAIRRHAPDAVLVVFETGSLSTWFYHDLTAAGLPAVCIDARHAKAALDTAPNKTDADDADGLSLLAEAGFFREVRVKSWAAMQVRTLTGARAQLIGISTDLSNQIRGILRTFGLVVSKGGGRLFEANVRTLLEGQEGPADSVLPLLEAWRAVRAQATALDRQLVAVTRRSPACRLLMTIPGIGAVTALSYTTLIEDPANFTHSRAVGAYVGLTTRGFQSGEVDDDGHISRRGDKHVRTLLYEAATVMLTRVNADTALRRWGLKLKEKVGFKRAAVALARKLAVVMHAMWRDGCVFDPAHGAPT

SEQ ID NO: 196308 - protein, 425 aa, unidentified
MATKVREVAYVGLEAVLAYCCGLDVHKKRITACLLVGPVDQPPKELLSTFTTTTKGLTALRDWLASYDCTHVAMESTGIFWRPVFNILEGSVTILLANARHMKQLPGRKTDINDSQWIARLLRWGLLKPSLIPPKPIRELREMCRYRKKLTQEVGAEKNRVHKTLEDANIKIASVATEIFGVSGLAMMDALIAGNLSPQETAELARGRMRSKIPELAEALVGKVEEHHRLLLRKHLDHLSYLQQAIAEMNRLIEEQIKPYQPQVELLRTIPGIDTVSAQQAFVEMGGDINVFPSEDHFASWIGICPGNNESAGKQRRAKALKGNRWLCSLLVQSAHAVGRSKGTYACAFYHRIAGRRGNERAAVATGHYLSKCIYHVLMDGKPYQDLGADYLNHRGNDSLKKQLLRRLERLGYQVELTPQTTTMN

SEQ ID NO: 196309 - protein, 402 aa, unidentified
MDVALNRTAKSEDKHMKNQKYVGLDVHKDTTVIAVAEGDRLGEVRLYGKISSDLNKTVDALRKIRGEHGELHVAYEAGPTGFVLYRRLRQLEIDCLVVAPSKTPTARGGRQKTDRRDALQLARMHRAGELTGIHVPDAVDESLRDLTRARSDASRDLKRAKQRLKSFLLRQGFHYTGKANWSEAHLRYLRELELPLPALRSVLEEYLLAITEATTRLTRLEELLAVQVPQWRMYPAVRALMCLRGFELVAASLLVAELSDVRRFAHPRGLMAYLGLVPREESTGNSRRLGAITKAGNAQARWILVEAVQSAANPPRMSAPLTLRQEGQPQAYRALAWKVQVRLHKRYWHLTRRGVMAGKVKIALARELAGFVWDLLRQVPPPVSRSATRRPRLGASAHALVG

SEQ ID NO: 196310 - protein, 375 aa, unidentified
MKIIGCDYHPSFQQIAMVDTETGEVTERRLYHGNGEAQRFYESLSGAVRVGVESSGNMLWFERLLTRLKQELWIGDAAAIHWQNPRKQQLTDKRDAQHLLDLLLENRFPRIWVPSMEERDLRQLLKHRHTLVQMRTRVKNQLQHIALNQGLQKKSQLWSQEGQEWLKKLELDPWTQRRRDDLLQMLEDLDRQVKQMNREAEKAAAARKDAQLLMSHPGVGPILALATVLTLGDVSRFQCGRQVASYIGLVPTEMSSGQHRWLGSITKQGNSFMRFLLVQAGLSAARGDAELGRVYKRLAQKKHHGIAKVAVARKLLVRLYWMLRTQKQYPEVVRMQGSPSHPVAEAKADRLSGRPASRPEPKDQKQKQKNRKKQK

SEQ ID NO: 196311 - protein, 386 aa, unidentified
MPQPKDDLSRSLVALDQHSSLIAVVELSLSTWLVGGMVPGIERDPLKKLVPDEDGLLKLLHRWRDEAVKAGHQINRMVVAFEAGRDGFWLARWLRSRGIEAYVIHPTSVAVSREHRRAKTDRLDIALLKRSLLGWLRGEKKHCSMAAIPTLEEEDAKRPNREREQLVGKRTGIVNRMKAALVRLGIRGFNPKLRKAPQQLATLRTPEGGTIPPNTLAELQREMAHLSFINEHIKQIEAARLIQLKQAPQHGSNAKVVQLGRINGIGIETADMLANEVFSRDLRDQRAVARYAGLTGSPDESGRRRREKGLAKAGNARVRRGMIQLAWRFLFHQRNSALTQWYRQSVAAGKKRTTVIVALARKLLIALWRFVTIGDVPQGVILRTAS

SEQ ID NO: 196312 - protein, 391 aa, unidentified
MNKAWVGVDAGKEFHWAHVLDAFGTELLSRKVENDEADIARLIDQALSLAEGLVWAVDQPGGSAALLLALLWERNQRVFYVPGLSVDRARETYRGESKTDARDAHVIADQARMRPDLGELEAGELEIAELQLLLARRRDLITDQSRTITRLRETLLFLFPALERALDLNSKGPLTLLTHYQTPAQLRRAGHKRVATYLRNRGVKGSNKVADKALAAAKAQSVTLPAQEVASRIVAELAKDILGFKERIEGIDEEIGQRFFARPEALILTSLPGMGPILGAEFLVAVGDIRTFESADRLAAYAGLVPAARDSGKRVGNNKRMRGGNKVLKRVFYQSAFASLRSAPESRAFYDRKRAEGKRHTQALIALARRRVNVLWAMLRDGTAFESGSAA

SEQ ID NO: 196313 - protein, 341 aa, unidentified
MKKFIRVGVDLAKNYFQIHALESENGPALMRKLKRSKMREFFSKIEPCLVGMEACGSAHYWARELKAMGHEVLLMPPAYTKPYVKRGKNDAVDADAICEAMSRPGMRFVPIKSAEQQAILMLHKTRELLIKQRTMTINALRGHLSEFGVIAAKGIGRVDELLDLAESDATFPAAAKAAMKVLASVLDEFDKAINDLEGELTSAHAQSEMVQLLDKVPGIGKLIASVVVASVPDPSVFKSGRDFAAWLGLTPRQNSSGGKQTLGGITKQGNRYIRKMLVLGATSLLNVVGKRKGALRDWVAGLLAKKPARLVTVALANKLARILWAIMKTGENFRTEMFAKA

SEQ ID NO: 196314 - protein, 431 aa, unidentified
MNYNQNKKIAQITSQTLIIGVDIAKFKHVARAQDYRGLEFGSPCYFENAHEGFEHFLKWISAIKNEQSMDKVIVGMEPTGHYWFNLAHILKENGIKFVAVNPLHVKKSKELDDNSPTKNDVKDAKVIAQLVKDGRYAEPTIPQGVYAELRVAKKIRDLLTEDLQTVQGQVHNWIDRYFPEFLKVFKKWEGKAALQFLKLYAFPHEIAEFTEEKLLVHLRLSVTRSVGLNKIRELKQAASKSIGLLQGAEMARLELKTILAKYELIQLQFEELDAKIEGLLDEIPGVQQMLAIKGVGRDTIAGFFAEVGDLGEYNHPRQIIKLAGLSLKENTSGKHKGKTTITKRGRKKLRALLFRVCMILVAKNSAFKALHAYYTQRRDNPLKKMQSLIALCNKLIRIFFSIGKKQFEFSEEKMLKDIPHMAVTEKTEMAA

SEQ ID NO: 196315 - protein, 347 aa, unidentified
MSITMIGLDTAKSVFQVHAVDEAGKVAIKRKLRRSELIVFFEKQEACTIVMEACGAAHHWARVLTGLGHDVKLIAPEAVRPFVKKGKKNDVADAAAICEAAVRPDMKFVPAKSLEQQGILALHSVRSLLVKQQTMLANAMRGLTAEFGLTVPKGMGRLDELMGLVDATEAFPPRARQAIRELLDQCDGLAESIMTFEAEIIAHARKDDTARRLMTIPGIGPITASLIAATVGDISLFKSARDFAAWLGLVPRQHSTGGKTRLGRITKTGNREIRRLLVLGATSMVRRAAQWNSATGAWVRAVLERRPARLATVALANKTARIAWAVMTRNEVYHPKGRVVVVAEAVA

SEQ ID NO: 196316 - protein, 362 aa, unidentified
MQTHPRSQTLFVGVDVHKDTHTAVGLTPFGEKVFEMTIGNEAEDFISLVQKTKVEAEKSGLSPSFGLEDVHSWGERLSSFLVEEGLPVRAVAPILVDHRRSQTTHPEKSDSLDAEGVAEVMIQRIDTLPVYTLSEEAKKAKQIRELSLEREWLVKERARLKNQLHILLHRIHNTGYRIKFKDPFSKKALRYWMRSASKDTDAILEQRMKRAVRRLLDLKEEIQEIEEELETMMKENKQTLSTASGCGTVIAAEIIGEVGDISRFHSPGALAKYSGCAPREHSSGKTIRWRKTRSGNRRLNRSFHRMALSQISRSGNDAARTYFKRKISEGKTKAQALVCLRRQLVNVVWMMMKHKTEYRWPC

SEQ ID NO: 196317 - protein, 358 aa, unidentified
MYRIATIIQPKLRRPIMKFYCGIDLHATNSFLCVIDDKDNISLKEKVKNDLGAILYALESFSPRPSVVVEATINWYWLVDGLQEAGFDVKLAHTMALYMITGAKIKTDRRDAFSLAKLLRLDAIPEAYIYPKDKRPIRDLLRKRKKVVNLRANAYGALRRVLLQHGIYGYSQAAIKSLTEEQLDQHLEHCATQAGCHLEVQRIRFYSYQIKTLENRILSSVDDDRGFELLQTIPGVGKILALTILYESGDIERFQSAKQFCSYARVVPGIAQSGGISKRGRGSKQGNAHLKWAFCQAAALSVRYNTRIREFRQHHLARRRSKAKKLVTLCIVAHKLATAAYNVLKDRVPFKQELMFGS

SEQ ID NO: 196318 - protein, 432 aa, unidentified
MEKIRNNVSGIDIGAKKVFTAVEGQPVVSHFTFTEDFLKLRDYLIQHKVESVAMEATGVYWVILYEILEQAGIDVWLVDGRQTKQVPGRKTDVKDCQWIQELHSYGLLNRCLVVEADIKELRSYLRLREDHIRSSSMHINHMQKALTQMNIRLKEVLSQLHGKSGMAIIEAILNGERDREVLVGLCHISILKGKRDLVYKSLEGRYTESGLFALKQAYDAYTFYQHQIQQCDARINTVLNRMGKSGQGQNPDQKRKPIRHHKPQVDHLGPNLLNIFEGKDATLISGITDYSWVQLLSEIGNDLGKWPSEKHFTSWLGLSPGQNDSGKKKKKVKQKGRPVAGQIFRTIAQGLINSKNIAIGAFGRRLRGRKGAAIAIKAMARKLAILYWRIMQKGLDFAEKGIKKYEEQLAAQKLKTVMKLANELKLNISNYQ

SEQ ID NO: 196319 - protein, 385 aa, unidentified
MKIVCGLDVHKDSVFCCILCANGEKIQHKFGVLTEELVTLRDLMVSEGVEECAMESTSIYWIPIWRVLEGSVKLHLVNPYFIKQLPGKKSDVKDAEWIATCLSKELIASSFVPDEKIQRLRQYDRRIFDLNASISRNLVKLDQCIQRCNIRISNYISTTDSKGYRSIVELISQGVTDAEVLVKKLHGRTINRHGRETLVKALTGVVNETDIDTINQLVEEIELQQRHKDEAQEKMTELCMEWFPEELENLQTIPGVKERSATSIIAEIGTDMKHFQTPKKLVSWVGLRPRNEESAGKIKARGITHGNRFVRKTMIECSWGAARVKNSFFAEFSYRLCIERRKNKMKVQVAIARKMLVAIWYVLSQKTQYIKPTDHSTAANITAVS

SEQ ID NO: 196320 - protein, 313 aa, unidentified
MAQMVTNAGIDVSKQWLDVALWPKRDEVSRFKRDAAGLEELAFWLRERHVVRVGLEASGGYEREVIDALEAQGLEVALLNPLQVRRFAQAKGRLAKNDRVDARTIAQFTAVMIEAPQPGRRRELDSLSEHLTFRRQLRAWIDDCTNQLEHLRDKALRRTAKALRVKFQRALAAHDKALAKLTAEHADWNVLARRLRTVPGVGPVLSQTLIALLPELGHLSRRAIASLVGVAPFDNDSGQRSGKRHIKGGRGAVREVLYMAALSARTHNPIIAEFAKRLAGKEPKVMLVACMRKLLVILNAMVRDGMDWQVKTA

SEQ ID NO: 196321 - protein, 367 aa, unidentified
MSSVASAAGLIHLGMDTSKNTIVVATLLPGEDGPVTDRIANEEAAIRRLIGRFADRSVLRAWYEAGPGGYELWRLLASMGVACQVVAPSLIPKGGSDKVKTDKRDSRRLARLGRAGELTPVRVPSPAEEAVRDLVRARDAMLADRKRAQQRLTAVLMRHGRIWRGATYWTAAHRAWIAAQRFGEPALAAAIGYYRATLAVREAELAALEAELIPWAAREPLAGPVRRLGCYRGIAELGGLTLAAGVAAWHRFPAARAFMSYTGLVPAGYSSGERTRRGHITKAGSEPVRTALTEAAWSYRHAPAIGAGLRRRQQGAAPDTLARSWKAQRRLHDRYMHLTHDGGKAAPEAAVAVARELAGFVWAEMTA

SEQ ID NO: 196322 - protein, 431 aa, unidentified
MYPFDFISVGIDVGADFSWISILTPDHKTVVKPFKISHNDIKSLEKAVSTIKKVEELYSLEAHTFLESTGIYHLPLFYYLKESGFEVFILNPLITDSNKNSGIRKVKNDKSDAIRIAKTAYTENLKVSLVPSDLVLNLRTLVREYYYLVDHKTSYVNKLHKELRVCFPGYSKVFYDIAGKTSLAILKIYKTPQNIMNAPKDEIISLIANTSRRGTQYANEKYELLLKSACLSKSFGKYLSSAFEIIELNIDIIEIYKQKIECVLSSIKQYTVKHQNDTFIKQIHIVESINGVGFISAVTLMCEIGDFSAFKRPKQLYAYFGLDPSVKQSGKFIGTRVSMSKRGSRLARRVLFTVAKSSISSSSKGKAVNPILKEYYEKKKLSKPKMVALGAIMHKITNIIFAVLRDNKPFVIKTLDDHHNDYKNSKLSLVA

SEQ ID NO: 196323 - protein, 350 aa, unidentified
MIIIGCDYHPGFQQIAFVDTDTGELRERRLQHPEEAEQFYRDLAAPGMKVRVGVEASGHARWFERLLAELNFELWIGDAAEIRAKRVRKQKTDRQDAQHILRLLLEDRFPQIWVPNGENRDLRQLLWHRHRMVQARTRIMNQLQAVALNEGLRCKKRLWRERGREQLESFKLAPWASRRRRDLLELLDRLNPTIAELTEAIEQEAEKCPEAQRLRTHPGVGPLTALAFVLIIGRAERFQCGKQIACYLGLVPLEDSSGDRRRLGHITKQGNSLLRFLLVEAAQVTVRSDQQWRSKYFHLAMRRGRKIAKVAMARRLAIQMYWMMRKEWDYEQVKKFGSHAGQPGNPHGVQ

SEQ ID NO: 196324 - protein, 404 aa, unidentified
MKTYILRDSQPVEPQKSIRTPRSKPAAPVTTHGPILFIGLDVHNDSIAVSLAPSDSTEVRRYGIIGGEHDDVLKLVKKLEAAHPGAVLKFCYEAGPRGFALCRCLRAHRLDCILVCPSKVPRKPGERVKTDRRDADGLARLYRAGELTGIYVPQPEDEAMRDLIRARFQVGKQQHRARQQLKMYLLRHNRRYGGQSSWTPAHLRYLAKIKMPFPVQQIVFQEMLEVISNATAQLERYDQEIERAVPGWRWEPAVRALMSLRGMALLHASTLVAELGDFNRFEHPGQLMGYLGLVPSEHTTGNDRQQGGITKMGNAPARRALVEAAWQYRAPARLSPHLKKRQEGLPKAITDIAWEAQRRLHHRYTHLTRVGRKKSQVAVTAVARELAGFVWAIARQVKPHAARP

SEQ ID NO: 196325 - protein, 347 aa, unidentified
MNYVGVDLHKERSWFYIMNEQGKKISSKSISNELGVLKEYFQSITKPFTLAVEATYNWYFFVDLAEEYADKVYLANSYELKAFAKRNKKTDKIDARLIADILRKGYLPSVHIADKETRELKESLRYRMNLIKDRSKAIFRLKALLDKLGMQATGDFTTNKALDNIDFTSIPTGYHSLVNKYIEQLKWYWEKLWGYRKNLEKRLITDQDILNLISIPGIGFFSAALIKTEIADISRFKNFNRLCSYAGLAPSVHQSANTCRRGPLSKNRCKNLQWILLENSIHFIHAMPSIAKKHERIKQRKSYNTAKVACARDMLKAVYHVLKDKRKFFIKKNDVIRTHAISALSGV

SEQ ID NO: 196326 - protein, 318 aa, unidentified
MLIHYIDIAKRNFVIAVSSLSKTKTETNNPKGIAHTIEYLKKHKVALVVTESTGGLEIPAAKAIRRAGIAVIIANPRQTHQFAQSQPLTKTDAKDAKMPAFFAQMTAQKEDSQTMPYQPPTEAEEVLEALVNRRNQPADMRTAEKNRLHQVHETQVGSVKQLIAHFDRLIDELDKQIDNHTHTHFDGKAQVAEQIKGIGSITTATLMAMLPELGRLSHKQIASLAGIAPHPRESGETKFKSRCFGGRSAVRKALHMATVAATRFEPLIRDFYQRLLSEGKPYKAAVTACMRKLLTISNARMRDYFAENDTAENGIRTA

SEQ ID NO: 196327 - protein, 337 aa, unidentified
MNSTTIGIDLAKTSFNLVGSNRHGKIVLRKQLSRGKLLSFMAQHPPCLIGLEACSGAHYWAREFEKFGHQVRIIAVKFIEPYRKGSKNDNNDAEAICEAVRRPNIWFVPVKSADQQASLCVHRVRQGVVRDRTAWVNRLRGLLAEFGIVLPRGRYAVQSTIPAILGDPDNGLPELARQMIHDLWLSIQQANEQVLGYDRALSRLAREDETAKRLLTIPGVGEQIATGVVASVPDPRLFKNSRQFSAWLGLVPRQYTTGGKIRLGRITKRGDKYLRMCLVHGARAVIAKLGDKQDHVSCWIRGVIERRGYLRAVVALAARNARLIWTLMMKREDYRAI

SEQ ID NO: 196328 - protein, 338 aa, unidentified
MSIVMGLDQHRAQITAEWLDTDSGELHRRRVSPADRAGVRAFATRFAGQELDVALEATTGWRFAAEELAAAGARVHLAEPAEAAALRGTKRRAKTDRADAKHLRELLGTGRLPESWIPPEHLLEFRARVRLRHTLVDQRREWQQRMQAVLYHHGVPARAWLLGVESRKWLAGLDLAPDAREQLTTALALIDAIETQLVPLDARLRDYAKRQPGCRALMHHFGIGPLTSVTIVAELGDARRFSNSGQAVRFAGLDITVHQSDARRSPGRLSRQGPAALRWALFEAAQCARRPASPDHDYYLQTAARLGGNRACLAVARKLLKRSFHTLRELGDEAISPV

SEQ ID NO: 196329 - protein, 414 aa, unidentified
MDVIVERACGLDVHKRTVVACLITPGPAGKPHKELRTFSTVTADLLRLADWLAAAGCTHVAMESTGIYWRPVYNVLEATDHFELLVVNAQHVKAVSGHKTDAHDAAWIADLLRHGLLRGSFIPPRPLRELRDLTRYRSELVHDRVRLVNRLHKVLEDANLKLAMVATDVMGASGRAIFAALIAGESDPERLADLARGTLQKKRQELEQALKGQFRPHHAFLLAELLSQIDALEEAEARVTAELEARLQEEADALAYLDTIPGVNQRIAQIIIAEIGTDMARFPSAKHLASWAGICPGNHESAGKRRSGKTRKGSRWLRQALTEAAHGAAHTKQTYLAALYQRIAARRGRKKAIIAVAHAILVICYYLLMRQEPYQDLGANYFDEREREGVERRLIRRLERLGYTVVLQPVSAAA

SEQ ID NO: 196330 - protein, 291 aa, unidentified
MQISTLGIYLAKNVFVLHGVDHSGKTVLRKKLSRGQLVPFVIQLPPCLIGMEACSSSHHFARIFIRQGHEVRMMPPQYVKPYVKTNKTDAADAEAICEAVTRPNMRFVQVKTIEQQAVIALHTERDLYMRQRTATSNSLRAMLSELGFCIPTGMRALYKSVPTILEDAENELSSFVRRSISRRLEELQAKEEQIAQVEHDLQSWFQTQPDCQRVAKVPGIGLLTATYLIASVGNGKQFNTAKQFAAWLGLTPREHSSGGKQRLGGISKRGDGYFRYLLVHGARSVLKLSKR

SEQ ID NO: 196331 - protein, 404 aa, unidentified
MNNVAGIDVSKGKSMVSVLRPFGEVVAKPFSIGHTGSELKELADYLKSLDGETRVVMEHTGRYYEPVARFLHDEGVFVSAVNPKLIKDYGNNTLRKVKTDKADSRKIARYGIDNWAELRQHTPMDTIRMQLKTLNRQQSLYTKTKTMMKNNLIALLDQTYPGVNALFDSPVREDGSQKWVDFATTFWHVDCVRNMSLTAFTERYRKWCKRHGYNFSQSKAVEVHAGAQDLIAMLPRDALTKTMVRQAIDALNAISASMERLKAEMQALAAQLPEYPVVMGMFGVGPTLGPQLIAEIGDVRRFYSKKALVAYAGLDAPPNDSGDVTGKHKSMSKIGASSLRRTLFLVMSVYLQNAPLDEPIFRFMDKKRAEGKPYRVYMMASANKFLRIYYATVKAYLESLEHTA

SEQ ID NO: 196332 - protein, 348 aa, unidentified
MRLIGCDLHASQQSIAMLDRDTGAVIEKTLKHDGEAVRTFYASIPPPVVVGIEATGSMGWFLRLMEELAIECRVGHPVAIRKAEARRQKHDRRDAALLLQLLAEDRFPTIWMPSTELRDLRALLLHRHQWVRMRTRVNGFGCERACRTRCTRSRWRTVCGAVTRCGIARGERCWRRYRWRPTPRIAAVSSRRCISTWMRVDRLGERVKQVADERPRATLLMTHPGVGAVTALATEVFVGDPARFPDAKAVASYVGMIPSEYSSGTRQRLGALSKQGNPFLRFLWCEAAAHAVRRDPDLQRFYRRKVAQKGFAKANVAAARKLGIRLWIMLRDQIDYAEFCRRGLARQS

SEQ ID NO: 196333 - protein, 408 aa, unidentified
MKDSGKRYIGLDVHKHYLIAVGVDEELNVILPARRVELSHLETWMKKILTKQDDVVLEMTTNTWQLYDELCEYAGRVTVVHPPHVALITRSLVMNDKIAASILARLLAKGLLVGIWIPPQDIRELRGLVAQRKKMTGLAIQAKNRLHAVLQRHHRMPPKGNLFHASQQSWWQALGLGPLEKVNVESDLATLQFAQAQQLHLTSIMEEIASQQEQVTRLLQLPGFGVVTAVTVWAAIGTIQRFADPQHLVGYAGLGTKVHDSGMTSRSGRITKAGRRDLRVVLIEAAQVAANSHPHWKAELARLQPRLGRNKAIVAIARKLLITVWYVLSQHKTDRFAEPEKIAQKFLKFAYQLGKENRPQGQSAAQFVRRRLDALQLGQDLTSIAWGSKKPIPLPPSANKVSDVPNTK

SEQ ID NO: 196334 - protein, 315 aa, unidentified
MTQTNITTAGIDTSKAKLDIAVHGRTERWQVANALSGWRVLAANLTKADVTRVGIEATGGYERGVVEHLRAAGFTVLVLQPMQVKAFGRVHLRRAKNDALDAALIAACAATLDQPRIAADPRLAELAGYLTFLEQTEEDIARFKTRLEHIDEPRLRRIVTTDIKRLKARKAAQIQDIAKRLRAHNDLAKRLDLMLSIPGIGERTALALIIRMPELGRISREEAAALAGLAPFDDDSGKYKGQRHIAGGRGRLRRSFFAAALPAAFRWNKALIALYARLMAKGKAHNAALIACARKLLIYANTVVQRGTPWTEKAA

SEQ ID NO: 196335 - protein, 360 aa, unidentified
MSFNGTSVGLDVHALSVVAHAVDEETGHVERARLCPDHGEILGWLRQLRGPVRVAYEAGPTGFGLARALAEAQIDCTVAAPSKLIRPAGDRVKTDARDAAHLTRLLRLGEVTAVTVPEREVEAARDLVRAREDARSDLMRMRHRLSKLLLRQGRVYSGGQAWTALHETWLRRQRFDHPHTAAAFDHHFDAVLNATAARDRLDEQIVEVAASPRFADTVNRLGCLRGISALTGLALTVEIGDWSRFTGASIGAYIGLVPSEYSSGTSRVQGSITKAGNAHVRRLLIEAAWHHRASYRNPGPTMRARWTKVDPALKARGHAGNRRLHQQWCRFLERKKHPVIANVAIARELAGWCWSLATLD

SEQ ID NO: 196336 - protein, 311 aa, unidentified
MATYVGIDIAKHSFDMALDSESNVQHFDNDARGIHKGLKQLQSLQPDLIVMEPTGGYERPLRKQLQALDLPVAVVNARKIREFARASGQLAKTDKLDARIIARFAAVLRPAAQEPCDEQTEQIKALVSRRHQLVQMHTAETNRYEHAHDKAVDRSIRAIRKTIEKQIENVDRQIRDRIDSNPELKRKAEQLESVPGIGETTAALLVTELPELGRLNRRQIAALVGVAPINRDSGTYRGKRFTGGGRRHLRARLFMPTLVAARHNPSIRAFYQRLIENGKTKMTALIAAMRKLLTLLNIMIKKNETWKPKTT

SEQ ID NO: 196337 - protein, 431 aa, unidentified
MRNRTNQRLEEITITTLIVGVDIAKTTHYARFTDYRGMEIGKAISFKSDAEGFEAIVARIEQICNSKVTRKPFTQVIIGMEPTGHYWKTLAHYLMEAGYRVVGVNPYHTKKAKELDDNSPTKNDRKDALTVARLVKDGRFFNPYLPTDIYAELRTLANGRASVMKHNNAVKNTITAILDEYFPEIWQVFKNPLTGKASRQILKSCPFPMMILALREAEILAEMKKAVKKTVGVKKVRALIATAERSVGVGYGAEASKMRLGHLLDELEMAERQLAEIEAAMEKMLCATGYAESMLSIKGIGIVTAARFLGEVGDPLRFNDARQISNYAGYNLTEDSSGKSKSGTVISKRGRSQLRGLLYQMAFTMVNCNPEMKALHKHLTSRVKNPLKKKQSLVVISKKIITVIYSLLKKRTTYNPALALGAVRRELMDAA

SEQ ID NO: 196338 - protein, 443 aa, unidentified
MPMVHPNAAAIDVGATMHTAAVRADWTPEPVRSFGTFTTDLHRLVNWFKECGVETVVMESTSVYWIPIFELLDARGFSVFLVNARDAKHVPGRKTDVSDAQWLQRLHSYGLLRASFRPKGQIAELRAYVRQRERLLEYAASHIQHMQKALTEMNLQLHHVVADITGTTGMSIIRAILAGERDPKVLARLRHYSCRSSIETIEKALTGNYRAEHLFALEQALTLYDAYHEKVSACDVRIEAVLKELSVRRGRKSGSLPSSHRRTDQANGLAFDARAALFTLLGKDITQIDGLGPYLSLKLIAECGDDLSAWPSAKHFTSWLCLAPSNKISGGKILSSRTRRGSRAPALLRLAAVTVGRTDTALGAFYRRLSARIGKAKAVTATARKIAVLFYNAVRYGMEYVDPGASFYETRYRKRVVDNLRRRAKSFGFVLQPFEPTPSVPVS

SEQ ID NO: 196339 - protein, 370 aa, unidentified
MSVRRILAKTINTDLEYEAIGIDLAKNCVSAALLTTDGEVVCIDRLDYSELEKSAQALSSTTFAMEPCTEMNYLVQKLEAWGHRCLVIGGKNVQNYVENHYSGQKTDLNDAQALAFLAQDTQLRTIKAKDVEQQKYASLTTLREQYIKQYRQTIVSLKGICQAWGLNISKGISGKARLKDLIENHAAFPEELKESLVDMVTHAQTAQKALNKITKTLEELAKNDKLCQLIRTIPGLGLICSCRLRATVGDIKRFKSPKDFPAYYGLVPRSIATGHNERKGKITHRGDRTMRSLMVQAAGSLVNMATKGKLKSKQLTKWILKKQKEKMPWGKLVCAVAAKLLRIVRAVLISNKPYNSKIAGVAKCSLPKGS

SEQ ID NO: 196340 - protein, 394 aa, unidentified
MRFIGIDVGSETHVVAVVDESGKVVFKATSFSEDADGYAKFRQILGAPGDAMCALEATGHYWQNLFAFLAAEGFPVALLNPLRTHHFAAEDLRRAKTDAIDALSIARFAQQKRPAVTVLPDEATLELREMVRLRDRMMEDLGDRIRQLHRTLDLTFPEFPRLVRDLSSYKATALLLRFPTATAFREASSGNIAELRYDGRHRIGPELAAALCDTAGRSVGRHEGPSYRLQTQYACEDISTLRERLKTLDDDIHRSLGQHRVGQLLTTIDGIGPNTAARVIAEVNLLAFRDAGALAAYVGVAPSVNQSGKRVPQRGGLHSVGHARLRAKLWMPTLRAVRNNAWLRHFYEGLVARGKPKKLALVAALRKLLSAMLSVARSGKPFEPRLPEAAISLA

SEQ ID NO: 196341 - protein, 418 aa, unidentified
MSRAIARRLARIEPGTLFVGVDLALDNNVAVVIDAQAHRLDRFRFPNDSDGYDYFHRRLVAIQEREGAPAVLVGMEPTNYFWKLLASDLEQRQVPYRMVNPFTVKKHREGDQLSRSKDDSRDAFMIADLLRTGKFTETQLLQGQYAVLREYVVLRDRLKGDIRRQKTLIRNIAGQLFPELAHEFKDFFGLTALALLRHHAVPGVIRDMSQQALITAVRQDFTGERLPVSKLRRAHALAKRSVGVRHGTVALQEALRVHLDALDLLQEQGRNVEELLLAVFFDLPEAPYLISVPPLGSVTAAIILAEIGDPSRYSNGNQLIKLAATQPVPNLSGRKTRSKTPMSKKGRPRLRTALYFATMRMIQEDDTFARVYRRFLTRERNPLTKMQALGALMNKLLRILWALMKHQTFYDPTYEMNK

SEQ ID NO: 196342 - protein, 423 aa, unidentified
MKYALVRVLPEVPPGGVCAGIDWASADHAVCVVDLAGRVRDRFTAVHDRAGIAGLIARLRENQAGEVAIERGDGVLVDALLAAGLTVVVIGSRQVKNLRSRYGSSGAKDDRFDAFVLADTLRTDRARLRPLVPDSPATLALRAAVRARRDLVAHRVSACNQLRAHLAVAFPGAIGLFSELDSPVSLAFLAAFPGQQAAARLDEQALAAWLATIPRRGNTAPAGVLAARLAAAPRGAAGADAAQAAVTAELAAATAGLAGRVRALEAEIAAQLAAHPDQHIFTSLPRAGTLRAARLLAETGDCRARYPDPWSLAGLAGVAPVTRRSGTYISHEFRWNVNRQLRDAICDFADGSRHASPWAATVYAAARDRGKDHPHAVRITARAWVLIIWRCWQDGTSYDPAKHRALQDILTRQAAAGTPQPHR

SEQ ID NO: 196343 - protein, 363 aa, unidentified
MRRTKRPKRVNPAMPTVGIDLGETTSHATILANDQAETFEFPMSEDGYALLKTKVALDARIAFESSGTAYPFWRQLRSMGYTDLTVAHPAELAWIVKSKKKNDRVDSVKLARLHSVGMLPEAHLLEREEQITRDLLLQRLKLGQEIGRLKSTIIGYLKREGVYQGLPDSTNHFSALRRNSIRGLSFGDERDLVLSSLMDRIEFAEKLADQFEERIRQRVKENDDVKLLMSIPGVNFYLASMVSSFIGDVRRFPDADHLASFFGIVPSERNSSSIKRVGHMSKSGPSEGRWALSLMVDTIAKYETNVRAYYAKAKARTKSGKMSHVLTMKKLVRMIYTMLSRREPWRWERESLTERKLADLKAN

SEQ ID NO: 196344 - protein, 339 aa, unidentified
MRYFIGLDVHSNNTVIAVLDEKGKRIYSRRVNNFIKLVLEELEPFKDKVQAIALESTFNWYWLADGLKEAGYEVHLANPSANKQYEGIKHTNDFSDAFFLAELLRLDILEEGYIYPRRERAIRDLLRKRLMLVRQRTAHILSFQSLYNRVKGCSFGGGNYVKRLKEDEMDDYFEEEDFALAAKTNIASIRFLTTQIEQLEKAVLKKMKILPEFEKLKTVTGIGDILALTIMLETGDISRFPKVGNYASYCRCVPSERSSNKKKKGENNRKNGNKYLAWAYVEAANFATRYCPKAKRFYQRKSAQTNNIVATKALAHKLARASYFVMRDRVGYEPERLFG

SEQ ID NO: 196345 - protein, 524 aa, unidentified
MAVKSSSKNRRKAQPHALHKPRGVIHPRVQAVGPEHFALVCVDCAKARSKMMVADFYGRVLLEPTTVEHNQSHFDTALKSVRDAMARHHIQDTIVVIERTGRYHGPVQRAFGAAGFEVRIVHPFTTKQYRLPADPGNKTDDTDLSAIHRAAVNGFGLLEHEPDPVSVQLQLLARHRRDLVRQRVALQQKMLEHLQSFMPGYSRCVEDVFGSPVVLWVARKLGSAAAIVQADLAGLSQQVRQAGIKVHRSTLEKIVAWARSAPPAEEPASLHHRIFLGLDADQLRKAQSIQAIESELAGLLAQTPYLLLLSIVGINVVSAAEFAGEMGPIARYPKARAITGRAGLFPARYQSDQVDRRDGALVRHANHDLRYAILMIADNLIKCNDHFKVLAAGWRLKGKDARGVRVQVAGRFSRIAYQMVAGRMTFQHPCARQRDSILEKLIRFSLEHSTAPDQLVRALDAAVTQLPRTAYGEEAVPLAEELARVQKPRGAGPHPLATILPAVLAKLEVKLVRSPESGEADPTG

SEQ ID NO: 196346 - protein, 351 aa, unidentified
MKTTITALPKLFIGIDIHKRSWKIHCSTDLFAGKSFSMPPDPYKLQEYVQKHFPDHEVSTAYEAGCCGYSAHRSFESFGWKSLVVNPADIHRKGKERYTKTDRIDAQLISRELKDGRLESIVVPDKEREELRSLFRRRNELVKDLRRVKSMIKMQLLYFGIKVPAEFDNDHWSHAFRHWIDSQEFNYPTARETMASKMRNFRFIDKELRDVSTQLRAYCRKHFKKDYYLLRSVPGIGGIVAVGILSELGDLRRFNSLKHLAGYVGLAPGIYESGANSKSTGMNPRCHRLIRSYFVEASWQAIRTDPVLQAYYRKHLGKDVKKIIVKVAHKLLSRTLAVIKTETPYEIGVVA

SEQ ID NO: 196347 - protein, 350 aa, unidentified
MQIVGCDFHPQWQQVSFLDQETGEYREAKLVNGDGEAERFYRSLSPGALVGIESCGNAQWFIDLLSSLGHTVWVGDAAKIRASYVRKQKTDRRDADHILKLLVEDRFPRLWTPSAKQRDLRQLLIHRHKLVEIRTRVKNGLQHLAMNRGVQKQSRLWSVRGRAELEKLPLEGWSARRREDLLELMKGLDRQVKELDEAVVQAAREDAKAELLMSQPGVGPITAMAFVLTIGDVSRFEYSGKVASYLGLIPSEYTSGGKRKLGAISKQGNRFMRQLLVEAAQTACRLDEGFRKQYQARCHHKPKAVAKVAAARRLAVRLYWMLRLNKRYPEIAHIESGSGVPLAIHGRDVE

SEQ ID NO: 196348 - protein, 331 aa, unidentified
MTSLPNRTNETPLTVGVDVAKATLEVGFSDRNATLAPANDEAGHAALLAHLAALRAKGAVIGLIVLEATGGLELNVATTLQLAGYAVVIVNPRQSRDFARSMGVLAKTDRIDARVLAQMGQTLLQRDDLRKLIKPLPDERQRMLQALVTRRRQLLAMRIAEQQRASGPDRRMRRSLNIILKALDRELARLDKDMQAFIGEHHAELAALLNEVKGVGKATISTLLAEVPELGELNGREVSALVGVAPINRDSGAMRGKRTIFGGRPAVRKVLFMAALVASRHNPVIKAFYQRLLAAGKPKKLALTACARKLLTILNAMARTRKPFNVALHLG

SEQ ID NO: 196349 - protein, 442 aa, unidentified
MSATAAQNAIAVVGIDIGKNSFHVVALDDRGAIVLRQKWSRGQVEARFANMPPCLIGMEACVGAHHLSRKLKAFGHDARLMPAKYVRPYSKGQKNDFRDAEAIAEAVQRPTMKFVTTKTADQLDLQALHRVRERLVSQRTGIINQIRAFLLERGIAVRQGQRFLRTELPRILAAPPDVLSPRMVRLIEGLTEDWRRLDQRIEDLSSEIEELANSDPACVRLMSIPGIGPIISSAMVAAIGTGDGFSKGRDFAAWLGLVPKQISTGDRTILGSISKRGNRYLRVLFVQAAWVTLVKVSPSRWQGHGLKPWIEAAKKRDCTIRACDRACQQARAYRLERASPWSRLRGEQASGGLIIRKIESLLPAKVCEKMRRDGGSVFPAHANTGDPNGPTRGLSANEIAGALISMMARSTASNKRPDTLMQDRLPNSCCSPQATKSWTSRE

SEQ ID NO: 196350 - protein, 314 aa, unidentified
MSAAIFVGMDISQACVDVAVHPGTAFQISHDERGIAEAVERLHAVQPTLIVLEATGGLEVPLAGALAAAALQVVVVNPRQVRDFARATGQLAKTDRLDAQILARFAEAIRPPVRPVPDEQTQALAALVARRRQLIEMLTAEKNRLRLAARPIQQRVQAHITWLEKELAATNTDLTATMCESPVWREKDEVLRSVPGVGPVLTTTLFANLPELSTLTRKEVAALAGVAPFPRDSGTLKGRHAIGGGRAHVRAALYMAALVATRRNPVIRTFYQRLCQAGKAKKLALTACMRKLLTILNAMIKNRTPWRESVSQPA

SEQ ID NO: 196351 - protein, 309 aa, unidentified
MNTEETVYCGVDVSKKYLDADVNKKTIRIENSLAGASQLMKKAGTVHFIFESTGGYERVAAWFLLGKGRKVSIVNPGRVRDFAKSMGQLAKTDAIDARMITEYAQVRKPTSNKLPSEEQRKLTVLVDRRQQLIDMRVMESNRLSTAGERIQQKHIKRHLRFLEKEIEAIDTMVREILATDPTMKEKAACIREIIGYGPVCTTSLLAHLPELGSLSRKEVAALVGVAPVNRDSGSYRGIRHIHGGRKRLRACLYMAAVCASKTNPILREFYTRLVEENHRPKKVALVAVMRKMLIAANSAVRNNDILVVS

SEQ ID NO: 196352 - protein, 339 aa, unidentified
MGLYTAFDLHSNNAYLGIIDESGKRLFKKKLPNEAAIIKTILLPFKVAIEGIVVESTYNWYWLVDMLMEEGYQVHLANPAKIQQYSGLKYSDDKHDAFWLADMLRLGILPKGYIYPKESRPIRDLLRKRSHLVKLRTSLIISLQNIIARNVGSNLKASDIKVLTTNRVKPLLEYNEDLALAGKVSKDAIDFLSRQIKSIEKNIGGRIHLRSPYDHLLSIPGVGPIIGSTIMLETGSISRFPKVGNYCSYCRKVPTGRFSNDKRKGSGNPKNGNHYLACAYSEAAEHAKRYDEASRKFFNRKLKSTNAPIAHNALAHKFSRAAYYIMRDGVDFMPEKAFA

SEQ ID NO: 196353 - protein, 354 aa, unidentified
MLAELVDHVIGVDPDRDWITVAALDSRTSGVIATDRFPATRDGYRDAIVWADGHTVETERAWVIEGTASYGRGLTMALQHHDEFIVEFDRPTRKATKDGAKSDALDAIRAAREALGRDKLNQPRAHDGIREAIRVHTVARAAAVRARTAAVNELKAFIVTAEEQLRAELRGLRTNKIVSRCSRFRDSASRPLDARCTRNAMRALARRVQHLEAEIAEHDAALKELIDRAAPQLIAERGIGYVTAAAFYLAWSHPGRCHSEAAYARLGGTAPIEVTSGQNQDRHRLCRGGDRQLNRALYLVAVTRQRCCPITQDYMARRTSEGKTQREATRCLKRFIARRVWRLLEHPELALDRT

SEQ ID NO: 196354 - protein, 344 aa, unidentified
MAIVGALDIHRRQITFDWVDHGSGESGRGRISPADRVGLRRWLEQFAGQPVELVVEGCTGWRFVAEECQAAGVIVHVADPAEAAGPRNRKMRAKTDKIDARKLRVQLEKGDVHDSWIPPRQVLEVREKVRLYLDLVEDKQRWQKRIHATFFHQGVPKAEGRLLGGDNVKVGLDDPDLSPAGAQAVDVAMRIITTIDTDLVRLRSELTGFGRRHPGPRELAHEYGLGALLATAVWEELGDTRRFSASKQAVRHAGLDISIYDSDGKQRGAPKLTRQGPPALRWALYEGALHAHKKTSPDNAYYLHLAHRIGSGRARLAVARKLARRCHHRLRALGDQAWIELPAP

SEQ ID NO: 196355 - protein, 341 aa, unidentified
MKVSTLGIDLAKNVFQLHGVDHEGHTILRKKLTRAKFVQFVIQLEPCLIGMEACSSSHYFARLFTRYGHEVKLIPPQYVKPYVKTNKTDAADAEAICEAVTRPNMRFVQKKTEEQQAVLALHTERGILIRERIACANSLRATLAEFGITIAAGQNHLTRELPAILEDGENGLSPFVRTSIYRQSKHIRELEEQVKQVEEALASWYRTQEACQRMAKIPGVGMLTATYVVAAVGNARQFSTAKQFASWLGLTPKEHSSGGKQQLGGISKRGDGYFRYLLVHGARALTAWVNRNGAVEKNSWLQGLLERKHYNVAVVAMAAKTARIMWSMLSHNTEYQPRQLA

SEQ ID NO: 196356 - protein, 400 aa, unidentified
MHLTANISVPQKNFIAIDLHSDNAVICVRRNALNKAGELVGKNIWCGRVSIRDGLDNFIKALLPYCQDFDHVAVVESTYNWYCLADVFEERGWLLRIADPSTVSQANLKASDDRTDAQYLAERLRVGSLKHYLPLSYSSRALRDLCRYRMAMVQDCASLKIKLINLYRNQLSINLRVADLLDRWRNHMQSNYRFDPDILEEFKDPNIRLRVAFEVSRIAMLEEMIEECNAEIQKQCKDQELVKLCKTIPGCGPVLSAVICTEIGTMQRFKSAGDFVSYCRLCSTSKLSNGKSKGLGNAKNGNAYLSWAFTEVAQYASRNPVIREILQRLLRKYGGLRVKAIRTLAAKIARVTFNMLKNKQPFNAAKCFGIELTKSIKKKLPHKPLREDAAIVLPAVAGQA

SEQ ID NO: 196357 - protein, 354 aa, unidentified
MPATAQTAIAVIGIDIGKNSFHVVGQDTRGQIVLRQKWSRHQVEARFANMPPCLIGMEACVGAHHLSRRLKALGHDARLMPAKYVRPYSKGQKNDFRDGEAIAEAVQRPTMKFVATKTADQLDLQALHRVRERLVSQRTGIINQIRAFLLERGIAVRQGQRFLRAELPRILTTPPDVLSPRMLRIIEDLAGDWRRLDERVEGLSNEIEAIARQDTGCERLMSVPGIGPMISSAMVAAIGAGDVFTKGRDFAAWLGLVPKQLSTGDRTILGKISRRGNRYLRVLFVQAAWVVLIKPKIWERHGLKPWIEAARKRLHHNVLAIALANKLARIAWSVLARGRAFEARKMDQAANQSA

SEQ ID NO: 196358 - protein, 356 aa, unidentified
MSEGSCVGLDVHARSVVAGVIDMGSGEVRSLRVPSGAEATVAWLKTLPPPVRVVYEAGPTGYRLARSCAEAAISCVVAAPSKIRPAADRVKTDRRDAERLARLLRLGEITPVRVPGPAEEAARDLVRAREDARGDLMRARHRLSKLLLRHGAVYDATAWTRAHDAWLRKQRFQDGPLAIVFDECYSRMIDAKTRRDTLDKAIAELAASEPYVAVVERLVCLRGVSTLTAFALTVELGDWNRFRPESLAPFLGLTPSEHSSGERRRQGGITKTGNTHARRLLIEAAWHQRSAPRLSVTLERRRTGKSLAVRAQADSSARRLHGRWNALEARGKPRLIVVVAVARELAGHCWALATME

SEQ ID NO: 196359 - protein, 415 aa, unidentified
MEQVYERCAALDVHKAQVTVCVHVPDQAGERAELRAEFATMTGDLLGLRDWLKGLGVTHVAMEATGVYWKPVYYLLEDDFELLLVNAQHVKNVPGRKTDVQDAQWLCQLLEHGLLKSSFVPPQPQRELRDLTRYRKSLVWERGREANRLQKVLEDANIKLASVASRPLGASGKAMLRELCEGNNDPVALADLAKGKLRAKLPLLRQALEGRFRGHHALLVSHLLAHIEYLDQTIGELSEEIEERMRPFARERELLCTIPGVAERTAEVILAELGPDMSRFATHRHAASWAAVCPGHDESAGKRRSGKTRKGDSWLRVALIEAANSAAARTKDTYLRAQYLRIRRRRGHKKAIVAVAHSILVSAYHVLQEGVSYQELGGDYFLTREDRQRMTRRLVRQLERLGQNVTLEPMAAEAG

SEQ ID NO: 196360 - protein, 417 aa, unidentified
MGTKDPNDVVYRRVAGMDVSKSDVKVCVRVPSTQRNRYHSEVTTWGATVPEIMKLKAFLEEAQLELVVMESTSDYWKPYFYLLEDTVPVQLVNARQARNLPGRKTDVSDAQWLAKTASWGMLAPSFVPPPPIRVLRDLTRARSTITFGRASELQRLEKYLESTGSKLSSVVSDLDGVTSTLILRALAGGERDPKALAALAKGRLKNKTDELEQALTGIRFTAHDAFMVAFHLDELNAQQARLAALDAQITEAFAPFRTDIELLSTIPGVKTTIAQVIIAETGGNMAAFPTSAQLASWAGVAPGNNESAGRHKPAATSKGEKYLKAALGQAALNIAKQKGGFLPTRYKRIANRRGKPRAIVATGHTLITDIWNMLANGVAYEEPHPRRYDQANNDRTRQHALRALKQLGYEVTLTQAA

SEQ ID NO: 196361 - protein, 354 aa, unidentified
MSDNKYVGLDVHQSSTVAAVHNSQGKRLMGSIIETKGEAIRDFIGGLRGTVHVTFEEGTHAAWLYDVIKPLVAEVIVCNPRANKLLASGSKSDRVDANKLAQLLRLGELKPVYHGGASIRPLKELVHNYDSILGDTTRVMNRLKALFRGRAIRCGGRDVYYQRNREQWIERVTEPGARRRVEFLYEELDHLTTLRREAKKEMLKEARRHAAYRQLRQVPVLGPIRVAAILAAVVSPHRFRTKRQLWAYCGLAVTTRSSGEYRFEAGGPRRQEKKVATRGLNQNYNHRLKYVFKSAALAGIHTEPFASVYQRRVEDGMRPEMARLTLARKIAAITLRIWKKKEGFNDLKVRTPAA

SEQ ID NO: 196362 - protein, 427 aa, unidentified
MAYRVAAIDVHKKMLAIVVADVAGEGEYQFERRKFGATPDQLHLLAQWLVQQEVEEVVMESTAQYWKPVWGALERFWKPERQKREGATKMSGTLHLCQAKSNRGPRGRKNDFADGERMIKRLVAQELVLSFVPDPEQRLWRTVTRRKYQLTRDKVRFQNQLESLLEQAHIKLSSWVSDLLGLSARRMLKALAEGETDPAALAALADSRLRATPEQLRDALGACTQLHGVYRRLLKMALEELKMMEEQIEQLDREALGLLQQHQDTVKRVAEVPGFGVDSAVQMIAEVGAEAAKFDSEKALSSWVGVCPGDEESAGESQSTRSPKGNRNMRRLLNQAAHAAIKVKGSIFDVTFRRLLPRLGYKQAIWAIAHRLCRLLWMILHKGVRYEERGPAVSAKSKRTRTARMIRELQKLGYHVEGAPLPAGNPA

SEQ ID NO: 196363 - protein, 344 aa, unidentified
MLYVGLDLSRKRLDFDARLGDGELVERGAVPPDADGLAGLVRRLGDAQVLAVIESMNGARYVHDRLELEGWDVRIADAVKAKGLAPLACKTDKIDAWVLAELARLDLVPEIWLPDPAVRGERERARFRLHLVKHRSALKNRVHSTLIAPGVASPSSDLFGMSGRRMLERGGLPEPWRSTSAASLALIDTLDEEIERCELELRLIGADHRYVPLLMTCPGIAWILAFTIASEIGDIARFGTPVKLVGYSGLTPRVEQSGESDRRGPLRKNGPDHLRWALVEAAHSASRHPLYRPILERNRDRHGRKRGTKIAALTIARKLAEASWYMLTRNQPFAPAGATRPLAA

SEQ ID NO: 196364 - protein, 361 aa, unidentified
MSHTSAWNNATEMPAVTIGLDLGDRTSRIFEVSAAGERLAEAVVPTTPSALAKYFGKGASCRVVLEVGTHSPWVARTLTELGHEVVVANPSAVYGKGRRRKRNDRMDAEFLARQGRADVKLLHPIRHRSAAAQADLALLRARDQLVQTRTGLINHVRGAVKAIGARLTRCAAEAFPRRVRAEVPEALRPALTPLLEVIGELSQRIAGYDRQLVAAIRDRYPVAMRLQQPAGVGPLTALAYVLLVEDPRRFGRSRDVGAYFGLVPRLDESSDSRPQLRISKAGDVLGRRLLVSAAHYILGPFGPPCDLRRYGEALAARGGKNAKKRAVVAVARKLAVLLHRVWVSETAYDPDYLATRQTRAA

SEQ ID NO: 196365 - protein, 343 aa, unidentified
MTLYIGVDFHPHQQTLAWCDTQTGETRTLDLGHDPEKVRQFYSSLPEPAMIGIEASARATWFENMLFETGHKLFVGNPVLIRKRATSRHKNDRRDAELILELMMRGEFPTIWRRPPKSNQIIDILGLRQKLVRQRTQVYNRLQGIAHDVGLPKGKMSTLCFQALIKAADTDEATSIRRSHLFSLLEKLNEQINELSKWLEQKAEADIAVRLLLSQTGVGYLTALVTVHTLGDMSRFTRVSKQVASFAGLDPVERSSAGKTRFGGISKAGSSLLRYQLGLAAHIAARSDPKLKSFRKRLAKKKAKGVVRTAAARKLLVKLAIMLRDGITAEEFDRRGRTVGNAR

SEQ ID NO: 196366 - protein, 351 aa, unidentified
MTIETLGIDIAKNVFQLHGVNRNGRVVFKRRVMRDDLLRVIAQIERCTVVLEACTGAFFWARKFESLGHHVKLISPQYVKPFARWQKNDGNDAEAICTAARQPHIPFVPKKNVEQQDIQAMHRARQRMVNHRTAVVSQIRGLLLDRGFAFAKRITRARREIPGILADLDNEPTGMARETIDELYDLFRDLDRRIASFDKKIDAVFRSNEACQRIARIKGVGPKTATAVIAAIGDGSEFMNGRHLAAWVGLVPRQSSSGDRKVLMGVSKRGSQHLRSLLVHGARSVVRTASNKTDPGSQWSMSFDSDAASTARRWRSPIRMHELYLGRASNRRTLLRRLLKARLGVCETTEK

SEQ ID NO: 196367 - protein, 406 aa, unidentified
MLFSICAIYYTLSKKVIVACLVNGGEQELREFGTTTSEIKTLANWLTESGCEMIAMESTGVFWKPLYNLFELMDLDAMIVNAAHMKALPGRKTDVKDAEWIADLLRHGLLKASYIPNREQRELREITRYRKSLTEERCREVNRLQKILEGANIKLDSVVKDITGKSARKLLQRIIDDDIPDSDEVSKLVHGRMRPKLDQIVASIEGITTPLQRKLLAQIIDHIDDLNRRIGELDKLVQEYMAEYEAAIEAIDEIPGIARRSAEVILAEIGLDMGRFPSAAHLCSWAGVCPGNYQSAGRRKHGKTTKGNKALKTILTQCAKSAKTVKSSYFFAQYQRISARRGKNRATLAVAHSMLIAIYHILKNKTAFHDLGSDYYDSFNRDRKINSYLKRLKALGWEPDAIPSSA

SEQ ID NO: 196368 - protein, 341 aa, unidentified
MSEVSTVGIDLAKSVFQVHGADAGGGVVFRKKLRRDQVLPFFSQLPPCVVAMEACASAHYWAREIAEFGHNTRLIPPAYVKPFVKRQKNDMADAEAICEAAQRPTMRFVAGKSAEAQASAVVFRTRDLLVRQRTQLINALRGHLMEFGYIVRQGVGHVGKLVDIVGDPTSDIPTEARPVLAVIAESLQALQAQIALLDREIAHRAKADPVAKRLMTIPGVGPVTATALVALAPAASSFRRGRDFAAWLGLVPKQRSSGGKERLGHTTKKGERSLRRLLIIGASSATKVAARDPDKASAWLAGMLARKPRMLVTVALANKTARIVWALMAHGGSYRAPATAV

SEQ ID NO: 196369 - protein, 408 aa, unidentified
MGKNEKRYIGLDVHKHYLVALGVDAELNIVLPMRRVEFSYLESWMKKTLTGQDEVVLEMTTNTWQLYDELIQYAGKVTVVHPPHVALITRAQVMNDKIAASILARLLAKGLLVGIWVPPQEIRELRGLVAQRQKMTRLATQAKNRLHAVIQRHHLKPPAGNPFAKTNNGWWNALRLGKLEKMNLQSDLETLQFAEQQEVRVEKEMTSIAAEDEEIGRLLHISGFGVITAVTVYAAIGDIGRFVEPKKLVGYAGLGARVHDSGMTTRTGKITKAGRRDLRVALVEAAHVVANSNPHWKAELARLQPRLGYNRAIVAIARKLLVTVWHVLARKVADRFAESEKVSEKMLRFAYAVGKENRPGRQTAAQFARERLDALGIGQELTSIPWGTKKPIPLPPSRLKGESAVPNK

SEQ ID NO: 196370 - protein, 417 aa, unidentified
MKAWTELTHFAALDWADDHHDLVVVDAQGKVALELTFAHNAEGWQQAQQALAAWPGLPVAIETSAGPAVDQLLQRGFGVYPVMPKAAARYRERKRPSGSKDDRHDAWSLADALRTDGQGWSALSPLDPLTGELRALCRDEITLIEQRTALINQLQAALKEYYPAALEAFDDWTAPYTWAFVLAFPTPKALAAAGKRKWEKFLHSHKLWRPQTSSQRMEIFARATAFSGAEPITAAKSLLVQSLARLLQTLEQQLANYRARIQALFDQHPDHDLFGSLPGAGAKLAPRLLAELAGADWSQLSQVQARAGTAPVTYESGNTRRVKIRRACTHPLRATLHLWADLSRHYSAWAAAFYRAHRDKGQSHSCALRCLAHRWLEIIGAMSRTHTTYNAEQHLREIQKHGSYVLQLISSPDPKLP

SEQ ID NO: 196371 - protein, 429 aa, unidentified
MQNESAPGARGPVFCGVDTHADSHWLYVLDWRGRKVLSRQFPADAAGYEALAGAIAAAGEPACVAMEGTSSYGAGLTRHLASLGMPVREALSPAGMQRRRPGQGKCDEADAERAARAAMSGSRLGTPKSQDGWVDGVRCMLAARSGAVKARTSAINTARSLLTTAPEGLRSRFRGMGGPRLMEELPSVRAEGALGAALGALADLWAAARDAALDMERAIEASLEENCPALLAMYGCGPVSAAKLAVAAGDNPGRLRSEASFAAICGACPIPASSGKTVRDRLNRGGDRQANSALHEIARQRVMRDPETAEYAERARGRGKSDREVMRCLKRYVAREAYRALMRPHEIRRPEDASGLVAARRAARVSQVRAASILGTSEKYISMLERGQRELKPIRRAYEAWVEAGLPLDWDRRAFEAERKMDSKKHLAK

SEQ ID NO: 196372 - protein, 343 aa, unidentified
MSEYDGKQFVGIDLHRQRSVIVRQTDSGEQLAVARIVNDPASLALQLEKAGEHPEVVLEATYGWYWAVDTLQGAGATVHLAHPLGVKGFRYRRVKNDVRDARDLADLLRMNRLPEAWIAPPPTRELRELVRYRAKLVAMRSSLKAQVHSVLAKAGVLIPVSDLFGVEGRERLTQVPLGVAYAQRVISLLELIDVLDAHERRFFDQIAAELRDHPGYRAIQELPGVGPTFGAVFVAEIGDVHRFADPSHLCSWAGLTPKHRESDTVVHRGHITKQGSKLVRWAAVEAIQRQPAGTKISVDRKRIEARRGRNIAKVAAARKLLTLVYYGLRDGEIRALARHKAAA

SEQ ID NO: 196373 - protein, 355 aa, unidentified
MDSKKYIGMDVHKEAISIAVLNASGKLVMESIIATKAITIVEFMQGLRGELHVTFEEGTWSAWLYDLLKPHVQKTVVCDPRRNALLKDGSKSDRIDARKLAQLLYTNMLRPVYHGESGVRTLKELARSYLTISKDQVRVMTRLKALYRSWAIPCSGKQVYAVRHRSEWLDKIREVGVRRRAEFYYQQWDALRCLRREVRRDLLTESAKHRASKRLRQIPSIGPIRAALLIAILQTPHRFRTKRQLWTYSGFGIETHDSGEHRYVDGELRRSKKKVSVRGLNRNYNHDLKNRFKSAATNVAAKPGPLQEFYTALLVKGIRPDMARLTLARKIAAITLTIWKKGKSFDAQHLKHQTA

SEQ ID NO: 196374 - protein, 492 aa, unidentified
MDSLVEVQRLLPRLGESLTFAPGPKHKPTKRRFDAMRSPKRKQVKFSVAEDLPRIRQNAAGIDVGATEHWVSVSGDRSSEPVRRFGAFTGDLYALADWLKACRIDSVAMESTGVYWIPLFEILEERGFEVALVNAKHLKNVAGRKTDWSDCQWIRIVHAYGLLSASFRPPAAIAALRAYLRHRKMLVEYAACHVQHMQKALMQMNLHLHHVLSDITGVTGMKILRAIFDGERDPQRLAELRDARVKNSEEIIAKALQGNYRPEHLFALKQAFDLYEFYRTQIDGCDREIQQHFQTIDSKVDLEKNPLPSSKRGKPKKKRRNEIRFDCRNELYRVAGVDLTTVDSIDESTALLIHGEIGQDMTPWPTEKHFTSWLNLSPNHRISGGKVLDRKTRKHKNRLRDALRICAQSLLHSQSALGAYCRRITARIGHPKGIIATARKLACLVYRLLKFGDSYVDKGQEHYQKRYKERALKNMARRAKELGYQLTPMVQS

SEQ ID NO: 196375 - protein, 344 aa, unidentified
MNEAYDDKQFVGIDVHRRRSVLVRMSESGELLGWERILNDRDRLAEVMAQAGEHPEVVLEATYGWYWVADAVAGMGANVHLAHPLGVKAFSYRRVKNDVRDAGDLADLLRMGRLPEAWIAPPATRELRELVRHRAKLVHARTSLRCQVHAVLAGQGVPVSVSDLFGVEGSKLLDELVLPQVYRYRIDSLRRLIAAFDVEIDATARLSRERLGQDQGFAAVKTIPGVGPILGAVFVAEIGEVSRFPGPAQLASWAGLTPKHYESDTTVHRGRITKQGSRLVRWAAVEAVQRTEKGTRLWVLRERVAARRGRNIATVAAARELVEMVFYALRDHTVRRLSQPPLAA

SEQ ID NO: 196376 - protein, 354 aa, unidentified
MKQASQKISYEGKKVFVGIDVHKRNYSVVAVVEGMVVKKWRTLASPEKLAEQLKRYFPGASIQTAYESGFSGFVLHRVLEEAGIHNIVVNPGSIEVAIHNRVKTDKRDAVKIATLLGAGRLTGIRVPTPQQEQQRLLTRTRQQLVEERSAIKNKIRMKGHQMGLIDPEDRREMTHKLVEETLAKTPSTEFTLTIEAHWEVWKSIDSQIQRIEQKLKEQAKTDPNETIYRSAPGIGSLSARILSNELGDLSQFKNERQLFSYTGLTPSEFSSGETVRKGHITRQGNTRVRHILNQAAWRAIKKDQDLKLFFERLAPRTGKKRAIVAVARKLIGRIRAAFKTHQPYQMNPISLSAA

SEQ ID NO: 196377 - protein, 403 aa, unidentified
MNNVAGIDVSKGKSMVSVLRPFGEVVAKPFSIGHTGSELKELADYLKSLDGETRVVMEHTGRYYEPVARFLHEEGVFVSAVNPKLIKDYGNNTLRKVKTDKADSRKIARYGIDNWAELRQHTPMDTIRMQLKTLNRQQSLYTKTKTMMKNNLIALLDQTYPGVNALFDSPVREDGSQKWVDFATTFWHVDCVRNMSLTAFAERYRKWCKRHGYNFSQSKAVEVHAGAQDLIAMLPRDALTKTMVRQAIDALNAVSASLERLKAEMQALAAQLPEYPVVMAMHGVGDSLGPQLMAELGDVTRFTHRNAITAFAGVDPGADQSGTHEAKSTRVSKSGPPELRRALFLVMDCLLKTQPQDDPVYRFMDKKRAEGKPYLVYMTAGANKFLRIYYGRVKEYLASLEGN

SEQ ID NO: 196378 - protein, 343 aa, unidentified
MEHSAGLDVSVKETSVCIVDDTGKIVREAKVASEPDALLAVLTNPAYRFKRIGLEAGPLSQWLFSALAEAGLPVICVETRHMRAALKAQINKTDRNDARGIAQMMRAGLYRPVHVKTLRSQKLRMLLTHRKLLQSKAIAIENDLRATLRNFGLKVGMVGTMKFEARIKELIESVPDLVVLVEPLLIVRRALREQIAVLHRRLLAIVRDDDVCRRLMTVPGVGPVVALTYRATVDVPARFRNSKAVGAVFGLTPSKHQSGENDRTGGISRCGDDMMRAMLYEAAHIMLVRSTKWSWLKAWAMQIARRRGMKKAIVALARRLAVIMHRIWLDGTEFRWTRQTAAA

SEQ ID NO: 196379 - protein, 339 aa, unidentified
MNEVSIIGIDLAKRVFQLHGAAADGSVVFRKKLTRAQLLPFLASQPASIVAMEACATAHHWGREAAKLGHEVRLIAPIFVKPYVKRQKNDTADAEAITEAASRPTMRFVAVKTEAQQARAMLFRGRDLLVRQRTQTINALRGHLAEFGLVAPTGPAHLKTLQVAVEAPEALPEAAREVAQLCLEQIAALSTKIAELEKKVRAAAGEDATARRLQTMPGVGPVTAMAVAVFAPPMDQFRSGRDFAAWLGLVPRQHSTGGKPRLGKVSKAGQRDIRRLLITGAMAVVRWAARKGAPEGSWLARMLARKDRMLVAIALANRMARGLWAMLSKGEDYRDPAAA

SEQ ID NO: 196380 - protein, 386 aa, unidentified
MQKLNDLSRSLTALEPDGTLIAVIEMSLSSWLVAGIVPGVERQPLKKLAVDESALLKLLHRWREEAEKAGRRIERLAVAFEAGRDGFWLARWLKARGIEAYVIHASSVAVSREHRRAKTDRLDTELLKRSFLGWLRGERDHCKMVEIPTMKDEDAKRPNREHDSLIGERSRIVNRMKAALVRLGIRGFNPKLKRASTRLDGLRTPEGEPIPPNALAELRRDMERRRLVNNQIRQIEEERLKRIEQAPCDGPHVMVRLLARVMGVGIETADMLVHEVLSRNMRDRRAVARYAGLTGSPDESGRKRREKGLARSGNVRVRRGMIQLAWRFLLHQKNSALTKWFRSRTENARGTRKPMIVALARKLLIALWRLVREGIVPDGVVFRAAQ

SEQ ID NO: 196381 - protein, 343 aa, unidentified
MEHFAGLDVSVKETSICIVDDTGRIVREVKVASEPEDLLQILNNPAYHFKRIGLEAGPLSQWLFSALAEAGLPVICVETRHMRAVLKAQINKTDRNDARGIAQMMRAGLYRPVHVKTLRSQKLRMLLTHRKLLQSKAIAIDNDLRGTLRNFGLKVGMVGKLQFEARIRELVENLPDLAELVGPLLVVRRVLREQLGILHRRLLVIVRDDDVCRRLMTVPGVGPVVALTYRATVDVPARFKNSKAVGAVFGLTPSKYQSGEIDRTGGISRCGDEMMRVMLYEAAQILLVRSTRWSWLKAWAMQIARRRGMKKAIVALARRLAVIMHRIWVDGTEFRWTREVVAT

SEQ ID NO: 196382 - protein, 389 aa, unidentified
MKIYVGIDIAKLNHFAAAISSDGEIIIEPFKFSNDADGFQLLVSKLESFDKNSLIIGLESTAHYGDNLVRFLVTELYQVCVLNPIKTCQMRKNNVRKTKTDKVDTYVIAKTLMMQDNLRFVSFFDLDMMDLKALGRFRQKTIKQRTRLKIQLTTYVDQVFPEIQYFFKSGLHQHAVYALLKEAPSPKEIASMHMTHLANLLKVNSHGHFTKEQAKELRVLAQKSVGANDSAISIQITQTIQQIELLDSQLEKIEAEMTDIMKFNDSVIMTIPGIGYINGGMILGEIGDIHRFSNPNKLLAFAGLDPSVYQSGNFQAKTTRMSKRGSRVLRYALVNAAWNVVRNNATFKAYYDAKRAEGRSHYNALGHCSGKLVRVIWKMLTDNVEFNLK

SEQ ID NO: 196383 - protein, 321 aa, unidentified
MSHFYLGIDVAKAKLDCALRLPNGKFRAKVISNSPEGFAQLVTWLSAHDAAKPHVCMEATGIYWEEVAQFLATAGLTVSVVNPAQIKAYATSRLTRSKTDAVDAKLIADFCAERQPLPWQARSEAEVALRALVLRLDALQAMRTQESNRLEVARDAVRQDIQQHLEWLDTDIRQLVKTLNDHINNHPDLKQKRELLDSIPGIGERTSAIILAFYADTDRFANSRQAAAFAGLDPRQHESGSTVRGKPRLSKIGHTFVRKALYMPAMVTLYKTVWGKRFKERLALSGKPPKLIIGAMMRKLIHVAFGVLKSGKVFDPVLHGV

SEQ ID NO: 196384 - protein, 357 aa, unidentified
MTQHTIDRFPLTIGLDFGSRTTQCAIYGPDHVRIEERKLPTDRARFTALFERFPGARIVMEASTPTRWIHRLATELGHEVIIANPRSIPVITASVRKCDRNDARLLAELGQVQPSLLSPVQLRADRYQNVRTLLFARDQLVKQRAALVTFLRAEARALEFDLPTCGTKVFVERCRPLVPAYLKTALFPVFDAIQCLSDGIQSHDSRIEELSQREFPETNTLRQVHGVGPLIALAFVATIGDPSRFRKSRTVGAYLGLVPRLNQSGKSDPSLSITKCGDRYMRTLLVSAATRILGPHGTDSDLRRFGERIAVNGGKSAKSRARIAVARKLGVLLHCLLRTSEVYEPLRNSEAPSAATL

SEQ ID NO: 196385 - protein, 312 aa, unidentified
MTEHCYCGIDVAKDRLDVQVLPHRQRFSVDNSATGWAELVERLHALPIAAVGIEPSGGYERGIIRTLLAAGLSVRRINPSKLRQFARARGILAKNDRLDAQLIAEYVSIMPTRVVQRAAIAERLAEVVTMRRQLCDEHVAIENQAAHVEDAILRRLNKRRLARLNADIHLLDKRMAEIVAADAILAQRYELLTSMRGVGPTLAFTLIALLPELGQMSRKQIAALVGLAPYDFDSGKLKGHRCIYGGRMPVRNILYMAALSAARYNPVLKIFHNRLAATNKKPKVIIVAVMRKMITTLNAMVRDNAAWQPRAA

SEQ ID NO: 196386 - protein, 312 aa, unidentified
MTATFGGLDVSKDHLDLHVRPAGAAARFANDDAGIAALVARLAAAAPDRVVVEATGGYEAPAVAALAAAGLPVVVVNPRQARDFARATGRLAKTDALDAAALAAFAEAIRPPVRPLPDADARALAALVARRRQLVEMRTAEQNRLGLAAPGVARSIRDHIRWLDRQLDRAGRELAAAVEASPVWRAKDDLLQSAPGVGPVVSRTLLAEVPELGTVSGRRIAALVGVAPVADDSGRHRGARAIAGGRAGARSGLYMACLSAVRYNPALRAVYARLRAAGKPAKVALVAAMRKLLVILNAMLRDNRPWDPAIVA

SEQ ID NO: 196387 - protein, 485 aa, unidentified
MKGTPQDKKRKQAQGALGSGPANLQRMNRKQRRDWARKIQADDISLEIVHPDAAGIDIGNECHYVAVPSKRDPEQSVRRFGCVTAELKQMAEWLKQCGIRTVAMQSTGVYWIPVYDVLEEAKLEVYLVNARDTKNLPGKKSDVQESQWLMKLHTYGLLRSSFRPVQEIRRMRNYWRQRNDLIRSASRHIQRMQKVLTEMNVQLANVISDISGLTGQAIVKAILDGQRDPQKLAALRDPRVKASKEEMARSLEGNWQEDLLFLLKQEREGFEFCQKQIAACDQQLEQYLKQQADRSGGASLPEEKRKRRRRKDGNTPQFGLREALFRMTGTDLTRIDGIEVLTATTVISEAGWDMSKWQDENHFVSWLRLCPDNKISGEKIIGKRRLPTHNRLTTALRIAASTLKESDTYLGAQFRRLRTKLGAPVAIKAMAAKLARLVYRMLRWGMPYVDRGAELYEEQHRQRQILYLKRKAADLGFKIIETATA

SEQ ID NO: 196388 - protein, 421 aa, unidentified
MNQLSGESYTAYIGIDWASSKHDICRQLTGGEERVFERIKHTPEAIEEWAQALYQRLGGPIAVALELSEGPIVSALQKYDFLVLFPIDPKRLAKYREAFVPSGAKDDPTDAEFAMDYLMRHPEKLTPLKPESAAMRKLRYLVEARDRIRGDQSRYVNRLIQALKHYYPQAVDWFNDHNTLVFCDFLKQWPTLATVQRARKARLERFFKEHNVRFARLIEERIQAIKAATPLTHDEAVIEAHRLQVEILVEQLRLTIKAMKCFDEKIAAIAAQFSDYECLYTALPGAGKVIAPRLLAAFGEDRDRYSCAAQLQKRSGIAPITKRSGNSTWVHWRFQCPKFLRQTFIDFAAQTINKSAWAGAYYRQQRDKGASHHMAVRALAYKWIRVLYRCWQERTPYDESKYLETLRRRGSPLLKQLAEAA

SEQ ID NO: 196389 - protein, 344 aa, unidentified
MPTHFIGIDLGARRTQVCITTEDGTVLTNTSVASRLDVILALAQRHGATACPVAIEATFAWYWLADGLQDHGYEVHLVHAARCAAITTAKVKTDRRDAATLAQLLRAGLLPEAYLYPRAQRGTRDLVRQRHAVVERRSGVLRKIRCLLYREGHVDHDLDDAKHLDADDLMTRFADPMVRFHAQTLIDEQAHLLEIQTRIEKILLDQAEETPQHALLRSIPGIGKILSLVIGYEIGDIRRFRSIQGFCSYCRVAPGIAQSGNSVRHGRANKAGNPHLKRSFHQAAVLACSHEEGWKHWRDRLLVRHAGQGGKMKATNAVAHRLARIVFRILLSGKPYEETLARLA

SEQ ID NO: 196390 - protein, 418 aa, unidentified
MKIVFPTCCGVDVHKSFLVATIIKTPKESLQPSYQKKRFSTFNSDLNRFADWLHENDCLDVCMESTGKYWVPVFNILEKRGIRVTIANPKWVKAVKGNKDDTKDSKWIGDLFRIGLVKSSFIPAKDIRILRELTRYRYKLTSMKSSEKNRFQNAFTVCNVALDSVVSDMFGKSATAITDYLTSDEDFDPQHCVSLLHRSLKKKAEDVLSSIEGYEITLEQKCRIGIVRDHLHYIEKLIERVDICINTMVEKYDGAISLLRTIPGIDRSSAITVISEIGVDMAQFGSSKRLCCWAGLTPGNNESAGKKKSVRISRAGVYLKPVLVQAAHAAVKDKLNPYYALKYERIAKRRGKKRAIVAIARMILTAIYSMLSTGEIWNPVDLFKVDMPEHLKEQQLQKAMKQAVRFLEAQGLTVLDSA

SEQ ID NO: 196391 - protein, 317 aa, unidentified
MYIGMDTHDRYSQVAVMRQDGSLVDEFRLSHGTERVELEEFAREYAGSAVAIEATGHYRPIYETLDEHMDVTLVNPSKTRVIADAKVKTDRVDAKMLAHLLRANLVAESYVPPKDVRERRDLVRARKALVEDRTREKNRVRAVLKRTGNQYSRELFGPTGREFLAELTLSKVDRAVLEAHLAVIDTLNEQITKLDKRIEDTAAARHDAQLLMTIPGVSYFTSLLITSELGEINRFSSAKKVISYAGLDPSIRQSGDKEVRGGISKEGSAPLRWALVQCANVAVRFDDYLGQFYNRLKQRKNHNIGCVESLDGGGMVR

SEQ ID NO: 196392 - protein, 382 aa, unidentified
MNSTQNKKIEQVKETTMIVGIDVGSEKHYFRAFNWRGIELTRKPVAFSNSMEGFNSFYNTIVELMQKSELEEALVGIEPTGHYWFDLGQFMGEKSIKFVMVNPHHVHKTKELDDNSPSKNDRKDPRVIAGLVRDGRYFYSYMPTGVYAELRNASNRRFVLVEEQTRAKNRLQKWIAVYFPEYKGIYTHIDAKGGLLVLKQAPTPEEIVKLGEEGIIKIWKDAKLRRNGNKKALKILNAAMRSIGLRTGLTEARMEIQDLIEDYELQTKRLERVNDLIKELCQQIRYADKLLEIKGIGITTVAGFIAEVGDITRFDSTKELQKLAGLELVADSSGKHNGKTKISKRGRKRLRYLLFEAAISVVGKNEEFKESTGITPPGKRIH

SEQ ID NO: 196393 - protein, 367 aa, unidentified
MRIIGDIHRVAAEVVSLLDGEIVKLGRVQMLRDKLEEFARKELTHDDHVVVEATGNAAAVAEVLSPYVDRIVIANPKQVHMIAHAKVKTDMIDATVLAKLYASGFLPEVWVPDPETLALRRQVTRRTQLVRQRSRLKNLIQSILHAHLIPPCPHGNLVGISGRKWLARQILPADERAAIERHLGLINQVNEALTVVEADTAVHALQDPTIRRLMTLPGLDVTVAASVAAAIGDIRRFSDPQKLVAYLGLHRGRRHRAQACNDHLAHAEQGYRLHLGPAGLACPQVQIGRAACRPSDQPRQTRHRLRLQHPGQAPKNDPASRRRKLPMQPRLPDGERGRKGRRLWKSRRMRRTGYSTTSVSIGLPGTM

SEQ ID NO: 196394 - protein, 283 aa, unidentified
MPMLAGLVDAVIGVDTHRDTHTAAVLDPNGGLLATTVTRTDQAGYQELLGWAAQRAPGRRCWAVEGTGSYGAGLTRFLAEHGEWVVEVDRPTRSPRRRGKSDALDAERAGREALARAHLAVPRQRGQREALRVLHLARSAAVQAYADARRVLKALLVTAPAPLREELRGLPWRRLAEACVGLVVPTGAPVEHQATVGALRATAERLLAADQQANDLEREVSKLVGQLAPALLEQPGVGPVVAAQVLLAWSHPGRVRSEAAFAMLGGAAPIPASSGRTVRYRLM

SEQ ID NO: 196395 - protein, 402 aa, unidentified
MRFVGIDVGAERHTVAIVDESGVVILKATAFTEDSAGYGRLLELLGTATDCLVAMEATGHYWRNLYAALVTAGFAVALINPLRTSRFAEEELQRTKTDAIDALGIARFAAQKRPTITQLPEAALQELRELVRLKGQVLQQLGDRVRQLHRAVDLVFPEFTRHVRTLDSELATAILARYPTAAALRTVSARKLARLCYDGSHHVGEARARALIVAARQSVGAHHGEPYQLQVRYACEDIDLLRRRLRALEKDIEQRLEQIEVGKLLTTIDGIGPQTAACIIAEVGDPARFHSSRALASYVGVVPRLHHSGKRRFSTSAKVPLGNARLRRALWMPALTAVQHNPWLRAYYYRLREAGKRPKVALIAVIRKLMSAVYSIAKHRRPFVLAPIFSPVAGGAVVPTAR

SEQ ID NO: 196396 - protein, 319 aa, unidentified
MYCIGVDVGKQELVTYDGVEHRTFPNDQLFDGFSSYARRRTKLLVVYEPTSTYSRRLEAFCRAEKIVCCALNPRVIPHLRQVSRKRSKTDQTDAELLYRYGIERGEAEAGLLFHDGLVHSVSAHLACYRVIQKARVTYQGLVEALKEDPATSDGLVVELEGEIAVMKEKEAYHLTEAQSLIAEDEAASCQLKALLTIPGIGPITAITLLVMFRKYVNANQRQVVALSGLDPIMSQSGTSVHGKSRISKRGKSEVRKRLYEATLSAARFNPRISTFYHRLKERGKPEKVARTAAARKLLLIAYAVYRSGEGFRSLNENHT

SEQ ID NO: 196397 - protein, 388 aa, unidentified
MRYLGVDFHKDTSYITTLNEEGKKILEVEISNRPEAIQAWARTLRPGDRVAVEAVGHWMYLYEQLEDSPAEFVLSDPGGTKAIASARLKSDKVDSAMLAHLLRSELLPTAYVPPREVRDLREVLRLRAALVHMRTMVKNRIRATLLKTGHPSELKDILGVSGREWCRSVEVRPSYRLALDQGVALGEQLNRQIAEVERELAMRAETTPEAELLLSMPGIGLYSALLLLAEIGEISRFRKSDHLVSWAGMAPRNRRSSNKLWRGPISKRGSKYVRWILIEDAPHAIRGAKRFAQKYESVLPRRGKNKAKTAVAALMLRCIHAMLSQGEKFRDLEESRKDDSLGSMGPSEKPGRPRHGGAPRAHRTARGVVRLPGQKEISAPAHKNQPGS

SEQ ID NO: 196398 - protein, 339 aa, unidentified
MNKVSTVGLDIAKKVFQVHGVDAAGVVKVRRSLRRSQVVTWFAKLAPCLIGLEACATSHYWGRELRKLGHEVRLIPPAYAKAYVRRNKNDAADAAAICEAVSRPGMRFVAIKTEAQQAIGGVHKVRALLLKQRIMLINHLRGLMAEFGLVVATGPQHVGELLAILADPEEGGVVEPLRGALLGMTEVLRGLERRIEAIDRQVVAWGRSNTTYRHLITIPGYGPILASAVAALVIDPTTFCSGRDFSASLGLVPRQEGTGGKVKLGPISKRGNGYLRRLLVNGAMSVLGSKRARQDPWIAKLLASKPRKLAAVAVANKLARIGWAVMMRQEDFRTQPAAA

SEQ ID NO: 196399 - protein, 368 aa, unidentified
MTNIIYVGMDVHTTNYTLCCYTTEDDRIFAKVQVEPDYLNILKYLNRVKANYGRECKILCGYEAGCLGYVLYHQLTDHGIDCVILAPTTMASAPKEKKTDYRDAEKISKCLAYHNYKAVYVPTAEDDAVKEYIRMRDAEKLAQRTLKQQVLAFCTRHGKFFDGQSHWTQKHVNWLNSLTFGDVILDETFQEYLVSLRQSSDRVERFDKRIEELASRDEYRQNVEKLSCFIGIKTHTALSLIVEVGDFNRFPNAQQFSSYIGLVPGEYSSGDSRQLGGITKAGNSHLRRLLVESAQCYTRGKVGYKSMALKGRQAGQEPRVIAYADRANERLKRKFYKINSHSKRNIATTAVARELACFIWGMMTNDVA

SEQ ID NO: 196400 - protein, 337 aa, unidentified
MDYFAGLDISMDETHVCVLDREGVVVHESKTESTAQAVANELAKAPSCRRIVFETGRMAPILFHGLSQLGLPVVCVESRQAYQALKSLATHKTDRNDARGLAHLARTGFFKPVHVKSLSAHALRSLIIARKKLVGQRVTLENQIRGLAVVFGIRLPRALTAAFIDQALKASEGIAGLSTAMRGLIAARTAVMTAVAAIDADIRRMTRASEACRRLMTIPGVGQLTALAFVAAIDDPSRIRRSRDVGAYLGLVPKRYQSGEVDYVGGISKCGDRRVRTLLYEAANVMLTRYKGQLRLKDWAFAIARRSTMRKARVALARRLAIIMHAMLRDGTEFAPA

SEQ ID NO: 196401 - protein, 385 aa, unidentified
MKEQNFVPYEFDIFGGLDVDKKSIAVTFMNHEGVLQSFSVPYRAEHLLSYVSKHFAGQKVAFAYEAGPTGWGLYDRLTAQGHPCVVAAPSMIPKVPGQRVKTNRLDSQMLSEHLRGGQLKSIHVPTEPYRQLRHLTQLRDTFVKDVVAMKLRIKGLLLFEGLEFPPAPAGSQWSYLVRGKLKQLPCSGSVRFKLDRLMESLESSEKQALETIREIRRFCQQDAELSQAIKHLKSIPGIGEIVASHLLARTGDPDQITNVRQLGGFIGLAPREHSTGDRIARGGIMRTGDGRLRSKLIQAAWSAIRHDPELREFYRSVYQRHPRDRAARKAIVAVARKLTTRIYAVLKQKRPYVVREKVNSAPLTQEETSPQGTTRRLKEPGEIIS

SEQ ID NO: 196402 - protein, 434 aa, unidentified
MQNEVDRLALFRTLRSEIRGASEYLVVGIDVAKDTHHAFYGTASGRTLRKRLVVDNRRGGFEALRALARDLAAQHELSQIVYGVEPTGVYHKPLLAYLQQQGEQVVLVSNVAVARNRELLDGRWDKNDVHDAANVADLVGQGRCLFADFPEDDLRQLRTLVRVRTRLKKQEHALRMRVRNNLVAQYFPELAAAYAQGSGASDAVVLAVVRHCFDPQAIAALSFDAFWARIAQPRWGKRQEGRVRTVWEAARESVGCPLDEAVRWEASWLAQRLESHRQDLREVERHMLDTARRITGHASVISIPGVGPVLASLIQAAIGNPHRFEHVRQVLRLAGLDLCASRSGKQSDRAVPRISKQGKGSLRFALVHAAIIATRYHPAIRAHFKRLLKGREQERGIRRKMYVKLAARLLGVAWHLMKHEETFDPQHFLPHRVE

SEQ ID NO: 196403 - protein, 415 aa, unidentified
MQHAPIRVLPASRPGHRTAGVDWARDDHAVAIVDDRGQVAERFTVAHTEAGIRDLVRRLARAGVTELAIERPDGPLVEALLEAGLTVIVISPNQLKNLRSRYGSAGNKDDRFDAFVLADTLRTDRARLRPLVPDSPATVTLRAACRARKDLVGHRVALANQLRAHLQRAFPGAVGLFADIDSPISLRFLDRFDCQDRADWLSPKRLAAWLTSVGYCGRVEPAVLQGRLVAAPRGATGTDGIAQAHVTRAILATLATLVEQIKILSEQIAEQLSLHADAHVFTSLPRSGTVRAARLLAEIGDCRARFPTPDSLVCLAGVAPSTRQSGKLRVVTFRWAANKQLRDAVCDFAADSRRANLWAADLYRRAITRGHDHPHAVRILARAWLHVIWRCWQDGVAYDPARHRALQSSLQPQAA

SEQ ID NO: 196404 - protein, 428 aa, unidentified
MTEHPLRPDAEPAWFVGFDWGSETHRVSLFDASGTSIGRRDVAHSATGYAELGDWLLRTTGAEPGAVAVGIETTHGPAVDALIDRGFRVYALNPKQLDRFRDRYSVAGAKDDTRDADTLGRSLRTDRPAFRLLSPDNPLIVQLREATRSANDLTRDLGRLTNQMRDLLWRYYPQMLALDDNLAAGWLLELWQLAPTPAKGARLHKATIARILKAHRIRRLDADQVRAILKEPPLPAAPGVSEAAVGHIRLLLARIRLLNGQIKATHAWIDTLNRDLAGPPVVEPGESVPGQTTEQRDVTILHSLPGIGRTVLGTLLAEASGPLRRRDYHAIRALGGQAPVTVRSGKSCFVKRRMACNKRLATAMYHWGRVAAMHDAKSKQRYAALRARGCSHGRAIRAVVDRLLKLTCVLLERQVRFDPNYGAKEAAA

SEQ ID NO: 196405 - protein, 438 aa, unidentified
MSNKVIFNLDDLFISVGIDVGADFSWMSIALPNQQFVGKPYKILHNSIDSLTTAVSKIKEAEELYSLESRIFLESTGIYHYPLFCYLRDKGFNCSVINPIITKNSTNINIRKVHNDRFDSKKAALVGLKPDLKVSLMPSDLALNCRNLCREYYDLMDNRGAYVNKLQGELRMAFPQYLGIFSKVTINTSLTLLETYTSPSAFLKADKQEIIDIIKSTARFGLTYAQNKYNAIIQAATDANQFGYIIDSNIKRIRLYISFIRKYDEEINSILESLHELVDANEDTDFVKQIHLIKTFKGAGFLSAVSIMGEIGDFSAFSKPKQLFAYFGLDPAVKQSGKFEGTKVQMSKRGSAIARRVIHTLTLQSISISRNGEAKNPVLREYYLKKCDSKPKLVAMGAVSHKVCNMIFAILRDNKPFKIIAPQEHIKQYNAAKCDMTA

SEQ ID NO: 196406 - protein, 388 aa, unidentified
MNVGADKSEPLTAIQTNLGAIFVSLELSRSSWLITSLSPGGGEKMSKHSVSGGDFAGLMERFAQLQEKARRRTGQSFRIIVVQEAGLDGFWIHRALQNEGIESHVVDAASIATSRRRRRAKTDKIDGETLVRALLAYKRGEPRVCAMVKVPTPGEEDRRHLCRERKALTAERVRHVNRIKGFLFSQGVSGYQPLRRDRRQRLEELQTGDGRAFPQHLKALVNRELDRLELLLKQIKTVEAARDALLAVEQTAKPGPAAMLLDIKGIGPEFAAILWSEGLFRHFENRRQIAAYAGLAPTPWQSGAVDREQGVSKAGNPRLRTTLIQLAWLWLRNQPRSALTVWFHERVSRNGGRLRKTTIVALARKLLVALWKYVTAGVVIEGVTMKVA

SEQ ID NO: 196407 - protein, 429 aa, unidentified
MRTESTPGARGPVFCGVDTHADSHWLCVLDWRGRKVLSRQFPADAAGYEALAGAIAAAGEPACVAMEGTSSYGAGLTRHLASLGMPVREALSPARTQRRRPGQGKCDESDAERAARAAMSGSRLGTPKSQDGWVDGVRCMLAARSGAVKARTSAINTARSLLTTAPEGLRSRFRGMGGPRLMEELPSVRAEGALGAALGALADLWAAARDAALDMERAIEASLEENCPALLAMYGCGPVSAAKLAVAAGDNPGRLRSEASFAAICGACPVPASSGKTVRHRLNRGGDRQANSALHEIARQRVMRDPETAEYAERARGRGKSDREVMRCLKRYVAREAYRALMRPHEIRRPEDASELVAARRAARVSQVRAASILGTSEKYISMLERGQRELKPIRRAYEAWVEAGLPLNWDRQAFEAERKMDSKKHLAK

SEQ ID NO: 196408 - protein, 351 aa, unidentified
MSEYIAFDSHKRYTWVDREDHSTRKNSGHRLEHAPGAVREYLNGCEPGTAVAVEATGNWYWIIDEIEQAGLQPRLVHPRKAKLMMGLTNKTDKLDAQGLNRLQRNGTLPTVWIPPGPLRDLRELTRTRLVLVAQRTRLKNRLSATLAKYGTPASECSDPYGKRGRAELEKHLEGLPEQTRWVSGQLLAQLDFVSAQVKQLEQRLQELVEVTPEMQWLLTLPGVGVILAATIALEIGEVERFPSAMHLASYSGTTPRVHASGGKVRYGPLRADVNRYLKWAFAEAANSVAVNHLRCPERHVSQLYRRLRQKKGHPKAIGAVARHLAEAAFHVLRGKQMYQDPSFGRGRTSQV

SEQ ID NO: 196409 - protein, 341 aa, unidentified
MNGGKNVVGIDIAKRVFQLHWIDRETGEIVSLQIKRERFFEHAANRQSCLIGKEACGGAQPWARKLTAMGHPVKLLPGKAVKPFVTGNKNDRQDARAIWTAVQEPDVKAVAIKTEEQQAILAPHRMRSQLVKFRTAQINGLRRLLTECGEVMPQGKAGVRKDLAEALARLADRLPAMVIDTLREQWARIKKLDGEIAAIKQRIQLWLKQDDACKRIAEIPGVGPLTATAAEAILGDARAFKSGREFAAFAVLAPRQIGTGGRIKLLGISKRGGTCLRTPLIHSARSVLTHAKDPGPWVTELRQRRLLNVAVVALANKMARTIWAMLAHERTHQKEFVSQPV

SEQ ID NO: 196410 - protein, 346 aa, unidentified
MVIIGCDFHPSWEQVAWLETETGETGEQKLTHADGEWERFYRGLAEPALVGLEATGNCHWLLDRLSELGHEVWVGDAAQIRASYVRRQKTDKRDAAHILKLLVEGRFPRLWVPDREVRDLRQLLIHRHKLVEIRARVKNGLQHLALNQGMQRKARLWSAAGQQALRALPLQPWSARRREDLLGLLAALDQQIAPLDRAVEQAAEQNAEARLLMRQPGVGPNTALAFVLTIGDVGRFARGKQVASYLGLIPREHSSAGRQKLGAISKQGNRMLRMLLVEAAHTATRYDAAFRREYQHRCHTRPKQVAKVAAARKLAVKLYWMLKEAKAHPESVAIESSPRVALVGES

SEQ ID NO: 196411 - protein, 422 aa, unidentified
MKAFDISNFAALIGIDWADRKHDICEVNCQTNKSYFSVISSQPKAINAWANELKRKYNGQLVAVACELKKGPLIYALSKFSHIVLFTINPSTVAKYRKAFTHSGAKDDPTDAAIQVEILQLHMSKLNVITPDTESVRCLAQLVEYRRKLVQDRVNLTNKITTTLKNYYPHVLDWFKEKDTMIFCDFLLRWPSLEQVKRARKQTLIDFFNQHNSRYPAVNEKRINNIKQAETLTNDEAIIAPNLLLIECLTVQIKQLMLSIERFDIEIKAIYKMHKDRFIFDSLPGAGPQIAPRLLAAMGSNRDRYHSCEEIQKYAGIAPVTERSGKKAWIHWRYSCTKFLRQTFVEWAGLSVRYSFWARAYYRQQESKGKPHNTIIRALAFKWIRILYRCWKSNTAYDETTYLEALKRKGSPLLKYAVESKF

SEQ ID NO: 196412 - protein, 338 aa, unidentified
MKLLKQVLGIDVAQKELVVTLGRLYEDLKIELYAYNVFKNTENGFLKLSEWVSKLTDKEIKVLYVMEATGVYHQKFAYYLDEKQEDLSIVLPNKISNYMRTLDIKTITDKTCSEAIARFGLERKLENWKKPKDIHRVLKQLTRERRQITDERTIVKNQLHAEETEAIPHFSTIERLKKRIYFLNTLEKEIKNEIKSIVKEHKELTIDITNICTIPGVSILTAATVIGETNGFELIRSKKQLTSYAGLDVVEKQSGTSVKGKPKISKKGNRYLRSALHLPALSTIKWNDNFRDQYARIVAKHGIKMKACVSVQRKLLELIYVIYKNKTVYDKGYELKKK

SEQ ID NO: 196413 - protein, 354 aa, unidentified
MTEILKSKIAAIGIDIGKNWFHVVGLDGRGAIALRQKWSRGQVEARLANMPACLIGMEACVGAHHLSRRLRLLGHDARLMPAKYVRAYSKGQKNDFRDAEAIAEAVQRPTMKFVATKTADQLDLQALHRVRERLVSQRTGIINQIRAFLLERGVAVRQGLRLLRAELPGVLATRCDVLAPRMVRIIEDLAGDWRRLDQRIEALSGEIEALARRDGGCERLMSVPGIGPIISSATVAAIGTGDAFAKGRDFAAWLGLVPKQFSTGGRTVLGKISKRGNRYLRVLFVQAAWVVLIRSKNWERYGLKPWIEAAKRRLHRNVLAIALANKLARIAWSVLAHGRIFAAGKVAEAATQPA

SEQ ID NO: 196414 - protein, 373 aa, unidentified
MYYTTLFVGMDVHKENFTVCCYDMIQDKIFYAQKLEPDYNQILKYLTFVRKAFRKDVDFVCGYEAGCLGFTLYHQLTQHGVSCVILAPTTMMKPAGKKKIKTDKRDAALIARCLASNNFSPVHVPTTQDEEVKEFLRMRDDHRLALKKVKQQILAFCLRHGYSYTATKNHWTVAHIAWLRSLKPEGLYSEILSEYLLTFQALSDKLERLDWRIEELAAMKAYSEGVKKLSCFLGIKTHTALATMVEVGDFHRLASANQFASYIGLVPGEDSSSESVNRLGITKAGNAHIRTLLVEAAQSYTKGQVGYKSAALKKRQAGNTSEVIAYADRANERLRRKYYKMILSKSKRTNVAKTAVARELACFIWGMMTDRIA

SEQ ID NO: 196415 - protein, 347 aa, unidentified
MRFYTHQHKFYCGIDLHARTMYLCILDQEGKIVLHRDIKTNPDIFLKTIAPYRQDIVVAVECIFTWYWLADLCSQENISFVLGHALYMKAIHGGKAKNDKVDAYKIAALLRGSMMPMAYVYPSETRSTRDLLRRRNHLARKRAELLAHVQNTNHQYNLPAIEKNLGKKGNREGVAKRFADLCVQNSIELDLGLIDHYDQLLHRIEHEISLIAKKYDADSYFRLRSIPGIGRILGLTILYEIHDISRFESVQDFVSYCRLVKCGKESAGKIIGSSGKKIGNAHLKWAFSEAAVLFLRRNPEAVAYRNKLARKHGAAKSLTILAHKLARAVYNILKKKEVFHPEVFFAK

SEQ ID NO: 196416 - protein, 412 aa, unidentified
MQAIIERCCGLDVHQETVVACVLIGAPGTQPRKEVRTFRTMTRDLEALRDWLLEAGVTHVGMESTGVYWRPVYSVLEGCFELIVGNARHIRNVPGRKTDVKDSEWIADLVRHGLIAKSYVPPRPLRELRELLRYRRKLVESQAAERNRLLKLLETANIKLASVASDVFGVSGRAMLRELIAGEASPEAMADLARGRLRHKRGDLILALDGRLEEHHRFLLAMQLRRLEAIEADIAALDLRIGKRLEPYCAQHALLMQIPGVDWVVAAVLIAEIGVDMSVFVSVYHLAAWAGVCPGNHESAGKQKSGRARKGNIHLRAILVGAAISASKTKGSYLKDKYHRLKARRGALRAALAIAHKILVSTYYMLAKNSPYRDLGEAYLDQIGQSRTVTNLKRRLERLGYRVTLEPNAQAT

SEQ ID NO: 196417 - protein, 319 aa, unidentified
MNEPSFIGIDVSKDKLDVCWSDGRVEQVVNAPEELQAFSERIGTAGVSLVVMEASGGYEQLALLTIYRSGVPAVAVNPRQVRDFAKALGRLAKTDRIDAQVLCDFAQRIRPEVRIVPEDELLELDALLQRRRQLVEMLSAEKNRLQQAHAKPIRSNIQENIHFLSKQLKKLDIDLDDRMNHTPIWKAQVDLLTSVPGVGRVTAMKLFAGLPELGKLDRKEIAALVGVAPLNHDSGQHHGKRSCWGGRADIRAVLYMAALVGSKHNPVLRNLYQRLLAAGKAKKSALVACMRKLIVILNAIARTQVPWLPPAAETTKLAG

SEQ ID NO: 196418 - protein, 374 aa, unidentified
MSTVRFIGLDVHADTIAVAVAELGGEVRSVGVIPNRPESLRKLMKKLGPAERLRVCYEAGPTGYVIYWQLTGLGVRCEVVAPTLVPTKAGDRVKTDRRDAEKLARSYRAGDLTAVWVPDAAHEALRDLVRAREAAQKDQLRARHRLGKFLLRHGRRPPTAMTSWTQRYLTWVKQVQFEQPAQEATLLDYLHEVEHVAGRIERLERAIDAAVQTAPPRMRAVIDALQALRGIARVSAVTIVAEVGPLARFARAPQLMGYSGLGAREDSSGPRRRRGAITKTGNAHLRRIVVEAAWAYRHRPAVGGALRKRQALLSDEVKAIAWKAQHRLHGRYRKLLGRGKCQQQVVTAIGRELLGFIWAIGIAVETDRPLTDAA

SEQ ID NO: 196419 - protein, 361 aa, unidentified
MMQDVHYVGLDVHKKTIAFCEKKQDGRVVEEGVLEATRSALQSWANRRVPWVGGMEATLFTGWIYDFLKPFAVELKVGHPLMLRSICAGKKKSDKIDARKLADLLRCDLFPESYMAPAALRDLRRVLRFRNLLVRQAVRMKNKTAGLLMECGVAYEKRRLHGRAYFRELLEKIEDVPESLPTLLNMSRSAMETFDLAQKRLITALRESENLAGRVELLMTIPGVGEVTALTWALEAGPVERFAGIRNAISYCGLCSAQRESAGKIQRGPLSKQRNKFLQSSLIEAAKLAPQWNPQLAEVRDRELESGHHNQATIAVARKLVAYLVAVDRSKKPFQFTNSKPEQKEEVDALESPSLSSAHCP

SEQ ID NO: 196420 - protein, 404 aa, unidentified
MPDSRRVVGGIDTHKEMHVAGVVDEVGGVLATESFPATPKGYGQLISWMRSFGQVLRVGIEGTGSYGAGISERFAAAEIEVVEINRPNRQMRRLRGKSDEVDAVAAARAALVDENLATPKGRSGIVESIRALRVAFTSMRNTRTRVANQIHGLVVTAPELLRIQLQDLELDDCVSRCARLRPGNLADPINGTRSALKALSRQYLELTDQLEELQSDLTTLVAQANLALVSAYGVGADVASILLIVAGENSERLKSEAAFAALCGVSPVDASSGKTIRRRLNQGGNRQGNHALWRIVMVRLSKHAETRAYAERRKAEGKTIKETIRCLKRYVAREIFQLLTNPQDVPAGPELRAKRTRAQVSLAVVADRFKTYPIFVSKIERGLSFDSGFAIRYEKWLDDQLSNV

SEQ ID NO: 196421 - protein, 423 aa, unidentified
MKVVYPICCGVDIHKTFFVATLITTDGIQPKYQKKRFSTFNNQILAFKAWLLENNCRDVCMESTGKYYIPVYNLLEDSINVTVANPKWVRAVKGCKDDEKDSKWIGDLFRLGLVPGSFIPKKDIRILREYTRYRFKLMSCKSSEKNRYQNVFTVCNVALDAVVSDMFGKSATSITDYIVNSDTFDPEHCVSLLKSSLKKKANEVVESIEGFQMTASQKYRANMVRGHYDYLVGQIEDLDNTLDVLAKPFEPSVNLLCTNPGIRKLSAIMVLSEIGDDMSQFGSSKRLCSWAGLTPGNNQSAGKKKSVRINRAGVYLKPTLVQVAHAAVKDKENTYYKVKYEKLSKRRGKKRSIIAIARMILTAIYHMLSTGEVWNPCDLNQVDMPEDLREKELQKSLRRAVKLLVDHGVVDSESIVIPELSSA

SEQ ID NO: 196422 - protein, 400 aa, unidentified
MPRIWAGIDAGKAHHHCVVVDVEGNRLYSKKVPNTETDILNLLAHVAGLADGHELTWATDLNQGGAALLIAVLTAHGQNVLYLPGRTVYTAARTYRGDAKTDAKDAWIIADQARMRRDLYPISISDEIATDLRLLCAHRTDLMTDRTRILNRLRATLLEYFPGLDAALDFAKSPAGLTLLTGYQDAASLRRMGVTRLSAWLRRRGYHRPERVAQAAVDAAHAQHTVLPGQSAAAVIVAKLATDVLRLTADAAEIEKRIEARLREHADAELLLSVPGFGPMLAAEFTAATGGSMTRFATADRLAGVAGLAPAPRDSGRISGNNHRPKRYDRRLLRACYLSAQVAAIWCPTSRAFYERKRGEGKSHTQAVLALARRRINVIWAMLRDRTTFQHPAAIAASTT

SEQ ID NO: 196423 - protein, 422 aa, unidentified
MLEQTHDEQEIIQRVAALDIGKAEVVCCVRVPDPKGGSRRLEEVKTYSTMTRSLQLMADRLLDLGVTRVVMEATSDYWRSPFYLLEAHGFQTWLVNAKDVKHLPGRPKTDRLDAVWLCKVAERQMLRPSFVPPVPIRRLRDVTRYRIALVSDRNREKNRVEKLLEDAQIKLSVVASDIFGMSGRDMMAALIAGERNPQALAQLARSRMRGKIPQLEEAFVGYFTDHHRFLLAKMLTRIDALNADIDELETEIEAQLAPFAPAVARLDEIPGVGVTAAAVIIAEVGLDMTRFPTPAHLSSWARFAPGVKESAGRKKGNGSTGHGDPYLARVLGEAAVGASRTNTFLGERYRRIARRRGKKKAVVAVGRSILVIVWYLLSDPEVGYHDLGPGFYDSRINPERKKRNHIRELEALGYKVTLQPAA

SEQ ID NO: 196424 - protein, 343 aa, unidentified
MKVMTIGLDLAKNVFQVHGVNERGVAVLRKQLKSDQLVPFFARLEPCLIGIEACGDAHFWAAKLAALGHQVKMMAAQFVKPYVKTKKNDSLDAEAICEAVTRPNMRFVPIKSAEQPSVLSLHTAREAFVHARTAQANQIRGLLLEFGLVVPIGIRHVFERVPSLIEDGEIELPGLFRQLIDRLLLHLKELDRQVQELEHEIEQWHRSSEPSKRLESIPGIGPITASALVASAGDPRNFKNARQFAAWIGLVPRQNSSGGKTQLLGISKRGDVYLRTLLIHGGRALVQLARTRPERADTWLGKLVARRHHNVAAVAMANKNARLAWALLSSGKAYEPGYTPQAA

SEQ ID NO: 196425 - protein, 407 aa, unidentified
MAGVMIGVDPHKGSHTAVVLDAREVVLGQVRVTARTDQLLRLQQWAQPWPDRVWAVEGARGLGRLLTQQLLAAGERVVDVQPKLAARVRLLNTGHVNKNDPNDARSVAVAALRSCQVSDASLDDHTVVLRVWGRRYRDLGRLRTQVMCRLHTVLCEMVPGGFSKEISAGQAIQVLAGIVADSPMTAARFELAHDLVGDLQRIDEQRREVRRRAARAVTSSATSITQIYGVGPIVAATVLGYVRDIHRFPTRDHFAAYNGTAPIEASSGNRKIYRLSRRGNRQLNYVIHMAAVTQIRNHGTVGRAYYDRKIAEGMTGKAALRSLKRKVSDAIYSRMINDAARPVPNGLGKDPGGQSGNDSASSVTSSHPESPALRKSHSRATSKPRVQARQAPNSSSLRSSPQPHRNP

SEQ ID NO: 196426 - protein, 342 aa, unidentified
MEHFAGLDVSVKDTSVCIVDDTGKIIREVKVASEPEALSAVLKSPAYHFKRIGLEAGPLSQWLLSALAEAGLPAICVETRHMQAVLKAQINKTDRNDARGIAQMMRAGLYRPVHVKTLRSQKLRMLLTHRQLLQSKAIAVENDLRGTLRNFGLKVGMVGKVKFEARIRELVENQPDLAVLVEPMLIVRRVLREQIVILHRRLLAIVRDDEVCRRLMTTPGVGPVVSLTYRATVDVPARFHKSKSVGAVFGLTCAKYQSGEIDRSGRISRCGDEMMRVMLYEAAQSMLRSKKWSWLKAWAMQIARRRGMKKAIVALARRLAVIMHRIWVDGTEFRWTRQAATA

SEQ ID NO: 196427 - protein, 354 aa, unidentified
MSQKLDTSPAVIGIDIGKNSFHIVGQNQRGAIVLRQKWSRGQVEARLANLPPCRIGMEACVGAHHLSRTLKALGHDARLMPAKYVRPYSKGQKNDYRDAEAIAEAVQRPTMKFVATKTADQLDLQALHRVRERFVGQRTGIINQIRAFLLERGIAVRQGLRFLRAELPGILATRSDALSPRMLRILEDLSADWRRLDARIEGLSSEIEALARQDKGCERLMTVPGIGPIISSAMVAAIGTGDAFSKGRDFGAWLGLVPKQLSTGDRTILGSISRRGNRYLRALFVQAAWVVLVRVKCWERYGLKSWIEAAKKRLHHNVLAIALANKLARIAWAVLHKGRAFECVKTEETASRPA

SEQ ID NO: 196428 - protein, 361 aa, unidentified
MPGTMTYVGFDVHARSTHAAVIDVMTGELSRVRFGPGVDAPVDWLRTLPGPVRACYEAGPTGYGLYRAALAAGIAMDVIAPGKTPRGRGDRVKTDRKDAELLARCLIAGSLTAVVVPAPAVEAARELVRAHDACRRDLMNARHRVSKMLLRHGRVYLESSTWTQKHRRWLAAQQFEQPMSELTWADLIACVDGLSARKQALAQRIGELATDPAWWPTVSRLRAFRGVDTLTALAIHLELGADWTRFEKPTRVGSWLGLTPSRQQSGESDRQGSITKTGSMLARRLLVESAWQYAREPRIGVTLRNRQDGQPDHVLAISNRAQQRLHHLYKSMRARGKPHNVTIVAVARELSCFLWAAATAP

SEQ ID NO: 196429 - protein, 473 aa, unidentified
MANIKKRNEKALTEGEGLRKQGPIMGLDVHKDIIQYCIVTEMRLLEEAELENTKGGLKKLVQIIKKRRVRSVAMESTSQYHVKVMYYLLENEVRMLVANPLQTKQTQGKKTDILDARRIAVAHRDGRLKASVIPHYDYWMLRKAMRKLVQLINDATRSKQRLSQLFHQKDFNGTRLLKTKTGIEILSLVNNGAITHEIIKQIINRSTTRKLSFSEKDFLDLKVFQKSLKSMERITFGTELTQLRTNMLLQEQQQLIYVEMAKKDEQFKKNMELLLSIPGIGPDTAAIILSEIADISYFDNPASLAKWVGLAPKVYQSGHKKNITGKIHKGGNKYLRRALALATQNIYAKAKQNPLHQWMRDKKEVRESKTHRSAYWLVICAGARKLLVYIYHILKNQCLWKFMEVPEEVVEKVVKYIKKKTKDFQKKVFQLEHARSLILRETTTILSGLAVPELSPKYLLYQILKHPAVYTYT

SEQ ID NO: 196430 - protein, 410 aa, unidentified
MKQSKSKIKANTVRVDERNIVGIDIGKRKHAATAVSPQGVTIASLKLFENNRLGVDQLERHVLVPATAPHKPMIAMEATGQYWNALHDELQRRGYSCVVLNPIQTSSRGKKQIRKTKTDLVDSGLIARTILSGDARWTIVPGEAMFELRLLVRHRWRLIRTHGIILRYAISLLDRVFPEFEGIFCKPFLSSIRKLIREIGITPCSLIGNREKVPTVLERASRKMFSKEKIDLLLNRAAESIGTQQGDQTVNHQFRMIVDYLDFVEKQVKEINLELRKRMLETPNPITSLGIGPEIAATILAESGDVTMFAGPEKYSAFCGLDPSEYKSGDSIKGRTPISKRGSPLLRWAMYMSAVTVCKKHHDFNRIFERHAHKGYRYAMVAVAHKLARVIWRLMKDNRKFTKRPPKRTV

SEQ ID NO: 196431 - protein, 391 aa, unidentified
MVCVGIDVAKDKHDCCILDSEGTTLVDCFTIPNNMDGFKSLLQTIQDCSQKSDKIKVGLEATGHYSYNILGFLLDNDLPIYVMNPLHTNLYRKSLSLRKTKTDRVDAKTIATMLLSDVDLKSYTDTAYHNEELKSLTRYRFDKVQERAKLKQSVSRLVTILFPELEQLVSSIHGTSIYALLSEYPGAKQISEAHLTRLANILVKTSRGHYRKDKATHIRDAARTSIGSVMPAKSLELKHTIKLIQELTSEINEIEDAIRKIMDELKPPILSIPGMGFYSAAMILAEVGDFSNFNSPDKVLAYAGCSPSTYQSGKLTNCYAHMEKRGSRYLRYALYTATKYVCYWNPVFTEYLTKKQAEGKHYNVALSHATKKLVRLIYALQKSGKAYLAVT

SEQ ID NO: 196432 - protein, 375 aa, unidentified
MDVLYHRSAGLDVHAETIVVCALLGEEEHVQKEVETFPTFTKDLFRLLKWLEDRGVTHIAMESTGVYWKPVFNILEDYFDITLANAQRIKNVPGRKTDVSDAEWIAKLLRYGLIEKSFVPPENIRELRDLTRLRKKRIGQLTAEKNRIQKVLECSNIKLSSVISDVFGVSGRKLLERLMKQGYIEETEVDACIHRSMKRKKQQIQDSLFGTLTNHQLFMIRQSWKHIESLESLLRDIEERIDQLLQVYKQEMELLVTIPGIKKETAAVIIAEIGVDMGQFPTSQHLASWAGVAPGNHESAGKRKSTRTTKGNPHIKSALCEAAWALSRCRNQRLAAKYWSLAARRGKKKALVAIAHRMLTIIYCIISRKEPFREQ

SEQ ID NO: 196433 - protein, 341 aa, unidentified
MKNTTIAIDLAKSVFEVGISDRPGHVVANHRLSREHIRAFMAKEQAATVVMEACGSAHYWGRTFQSFGHDVKLLSPLCVRPYVQRSKTDRADVKGMLEAWRNADIRPVPVKSESQQQLTALHRIRAGWMATRTMRINSARGLLREFGMVFPLGAAALAGRVQQVIEDADSVLSMPLRQVLHELVVEIGELEKRVKLVEKQLEAIAAQTSLVERLLTIPGIGLLTATALIGFVGDVSRFPSGRHFAAYLGLTPSEHSSGLRRRLGRISKHGDVYLRTLLIHGGRAVLVAAKRQSDPRGFYLWGLKLQSRIGNNRAAVAIANKIARFVWAVWKSGKPFRANAS

SEQ ID NO: 196434 - protein, 367 aa, unidentified
MEKSSKNFVGMDVHKESIEITLAEQDGEVRRFGQVGGDRTSLLKAVRRLESSGKPLVFVYEAGPCGFWIHREITSRGHACWVVSPSRVPKRSGDHVKTDRRDSEHLARLARAGELEAIYVPDVHDEAIRDLVRAREDTVIGQRRSRQQLKALLLRNDIRYVGKSSWSAAHQRWLARLKLPQPAQQIAFQEYLDATVVATERIARLTQAIAAEMPFWRFATVVSALQGMRGIQFIHAVTLVSELGDLRRFESARQLMGYLGLTAREDSTGEKRRQGSITKAGNTYARRALVEAAWAYQHPARVSPVIARRQSTLEKPLRDIAWKAQLRLCSRYRRLMARRMHKNKVIVAVARELAGFVWALGQEVKLG

SEQ ID NO: 196435 - protein, 368 aa, unidentified
MPSMQLRRDDVIVGVDTHKDQHVAVVLDGLGGRVDELFIPATLTGFAQLLAFCERHVGTDGQLVAFGVEGTGSYGIGLARFLRRHGHTVHEVHRPPRKGERRMSGKSDTIDAEHAARQVLSGARMAQPKTADGQIEALRLIKIARDTAVKARTTAMITLKATLVTAGDELRAELEPLTDFKLVAACAELESATSLGDPDAAMRHVLGSLARRWLDLHEEIKIHSRHLKKQTKAVAPQLVQAVGVGLDIAAELLVTAGDNRDRIRSEAAFAKMCGACPIPAGSGKTNGRHRLNRGGNRQANAALYRAVIVRMRWHEPTIAYVARRTAEGLSKREIIRCLKRYLAREIYHLLPPLDAIAITEATPPKLVT

SEQ ID NO: 196436 - protein, 342 aa, unidentified
MQITTIGLDIAKNVFQVHGIDAAEKVVVRKQLRRAQVMKFFAALPPCLVGMEACGSAHYWGRELSKLGHQVRLMPAKDVKAYVKRNKNDAADAEAICEAVRRPTMRFVQVKSAEQQGQLMQHRTRDLLIRQRTQAINALRAHFAELGIVAARGREGLKKLLEIIADKEDERLPLDARASLIVLAAQLQALQTMIGTIERRIIAQHRANEASKRVASIPGIGFLGASAITATVTDASAFRSGRDFAAWIGLVPRQDSTGGKQKLGPISKQGDRYLRRILIVGAHAILRLAKKSPQNYPWLAQLLARRPFKVVAVALANKMARIAWAILCRGGTYHEAALPAAA

SEQ ID NO: 196437 - protein, 325 aa, unidentified
MSSSTDEVLYAGIDVSKARLDVALRPTAEGCLGFANDQAGIDSLLARLQQASPTLVVLEATGGLEHPIAAALAAAGIPVAVVNPRQVRDFARATGRLAKTDKIDAQVLARFGEEDLRPEPRPIPDQQAREFAAILARRRQIVEMITAEKNRSGAMRSKPVRKRIEAHIKWLEKELKRTDEDLDETIRASVIWRENEALLKKSVPGVGPVLARTLLAELPELGGGELSPKQLAALVGVAPLNRDSGTLRGRRTTWGGRERVREVLYMGALVATRYNSTIKEFYERLCGGGKPKMVALVACMRKLLTILNAILKNRTPWRSSHALTP

SEQ ID NO: 196438 - protein, 325 aa, unidentified
MRQPKSQVKPQTQVGLDVSSQTLDAHIRADGKAFSVPNTDAGFDQLCNLLSAYDVTLVLMEATGGYEDSAACYLQLQGYDVVVINPRHARRFAQSMGRLAKTDRIDAAILAHMAFMIDSGPDRERYIKPVTDEQRKQLSRMSSRRRQVVDLITIEKQRLTHADDYARESINDIISLLNAQLKRIESDILRYVKKNFSELASRLLSIPGVGSQAVTVLIADLAELGRVNRRRISALLGVAPFNHDSGKFKGQRRIRDGRSSVRNVLYMGVISATRFNPVIKAFYDNLLLRGKPRKVAIIACMHKLIRIINAMMRTGKPFDMSLHGV

SEQ ID NO: 196439 - protein, 398 aa, unidentified
MLSIGIDVSKGKSTVCGMKPGGEIVYTPFEVQHTREGMSELVSLLRGSGEEVRVVLESTGSYHCPVVAALLENGIFVSVVNSLRMKRFCSQSIRRVKTDQIDAMQIALYGLAYWQELQPTRLPENTYRELQLLARQYYQMTSILIKAKVDFNALCNQVLPGMQELMNDHAGRHKLSDFVLRYHHTAHILKMGETRFRKDYCKWAEKKGYRNHERMAALIFATAQNGIPVLPDAPSTQIVITEAIRVLHTVEASRDAILTQMQALAKTLPEYSLVREMPCIGDTLAPRLIAEIGDVRRFHSKRALIAYAGIDAPPYQSGKFSANNRHISKRGNRYLRKTGYEVMQSYVMHKPANDPIFTFIEKKRSEGKSGKLAMVAGLNKFLRVYYGKVTELYRSLPQ

SEQ ID NO: 196440 - protein, 433 aa, unidentified
MNTPHPYDLVIGLDRSDTKADLCLIDTHTGQRRSVVIDTAPEALWQWLLELRQQYPQARVGLCLEQPAVHLIGFLEAYAWITLHPINPITLQKYREAFVTSRAKDDTRDADFLADLLLSHQAKLPAWAPEDSATRAVQQLVVHRRAVVDERTALSNRLIALLKQYFPQALKLCGEDLWRPLATGFLLKWPSLQAAQKAKPASLKQFYYLHGSRSARLLEERLALVQRAVAVTDETVVIASFALRVQLICRQLQLVQRSVREFDQKIAQAYAAHPDREIFASLPGAGPVLGPRLLASVGTQRERFESAASLQQYTGVAPVTKKSGGSCYIHRRYLCPKFHRQSFHEYAKESVLWSRWAASYYLQQRQRGAPHHTAVRALAFKWQRIIWRCWQDRRPYDERIYEATLRQRGSSVVALFDRVELGKSPWKNPVKKN

SEQ ID NO: 196441 - protein, 399 aa, unidentified
METTQSSIAIDVSKGCSYVCGYAAKDKMIQEPIKILHDREGFAVLDDLYLRLTTQTGTNPIFVYETTGVYHRPLERYLTQHDYPQIKVSPLLAAKHRKNSGIRVPKSDKSDPKSLARLFYDLELCLNPPSDERYYELLQLDRFYVSLTRLMVTCKIHFHEKLAILFPRMGEHFLKMYAPYHLDLLATYPHPEIILKKRVDTLEHRLIESGIQNRRAHDYAKKLKEFSQGCVPGTSSNSNDAYILRTYIKQIQFYENERAKTIERMIELGKELQFFKQLQSIPGVGSVLAIRLIAELGDLSRFTNERQLVAYAGLDPIVYQSGQFDGKHLAISKKGNHHLRSILFQILSISAQVETDHSLKQYVQKKRQTHANKSALIAGCVKLLRIIFSLYRSGQMYSF

SEQ ID NO: 196442 - protein, 375 aa, unidentified
MKEKVRFLGLDVHAETIAVAVAEHDGEVRSLGTIANREESIRKLMKKLGPVEQLRACYEAGPTGYVLYWQLTRLGVECAVVAPTLVPVKAGDRVKTDRRDAEKLARSHRSDDLTAVWVPDEGSEALRDLVRAREAAKQDQLRARHRLSKFLLRTGRRPAMGLKAWTERYLAWVQQIQFSQPAQEFTLLDYLHEVQHMDERVQRLEQAITEAVKLASSQVQEVIRGLQALRGVAHLSAVTIAAELGNISRFESARKLMGYSGAVPSEDSSGQRQRRGNITKTGNAHLRRIVVESAWSYRFRPAIGPRLRQRQEGVSEEIKEIAWKAQIRLHKRYLKLMAAGKDKKKIITAVGRELLGFVWAIGIKAEIASKLQMAA

SEQ ID NO: 196443 - protein, 343 aa, unidentified
MDHFAGLDVSVKETSICIVDDTGRIVWEVKVASEPEALLAVLANPTYHFKRIGLEAGPLSQWLFSALAEAGLPVICVETRHMRAVLQAQINKTDRNDARGMAQMMRAGLYRPVHVKTLRSQKLRMLLTHRKLLQSKAVAIENDLRGTLRNFGLKVGVVGKVRFEARIRELVENLPDLAVLVEPMLIVRRVLREQIGILHRRLLAIVRDDDVCRRLMTIPGVGPVVALTYRATVDVPARFKNSKAVGAVLGLTPSKYQSGEINRSGAISKCGDEMMRVMLYEAAQVMLTRTNKWSWLKAWAMKIARHRGMKKAIVALARRLAVIMHRIWVDGTEFQWTREAAVA

SEQ ID NO: 196444 - protein, 433 aa, unidentified
MLKINYMSTLFVGIDVSSKTNAVYAMDFEENKYISSSFGNNQPGADQLVTMIAECMHKHKNLDTVLIVLESTSVYSVHISSFLSTSEVLMPYKPYVFCVNPKATSNYRKSYIGMEKTDPTDAYLIADFGRVGRTKKLEPWRGGQFIALKRLTRHRMHLSECITREKTYMVSNLYLKFSELQLLEGDDKPFGSLYGAASSAVLTEFLSPQEIIDMPEEDLLTFLAQKSRNRISDLSKTSELLRKAARDSYRLGKCMYEPLNISLASSFNCIHAYQKEIKLIEQAIEKCINGMNPNALIILQSIPGIGPVWASGILSEIGDITAFHSSDALAKYAGLYWPKGDSGDFTSEDNKMSKAGSPYLRYYLGEAANSVRKHIPEYADFYARKYAEVTKHQHKRALALTSRKFVRLVFGLLVKNQLYTGEKLDAEYNIESN

SEQ ID NO: 196445 - protein, 332 aa, unidentified
MAEEWIPVGIDVSKATLHVAILFPERTKPLYQSFDNYDAGYAALQAWLVERGVSCAHVCLEATSSYGHGVATALHQQGHRVSIVNPVRIHGYAKSQLKRTKADRPDATLIAQFCRDLAPSAWQPSAADIDTLQAYTRRLDALTGMLTQEKNRLSISPEALKADIEAHITFLEAQVKALKKQLHAHIKRHERLQAQADLLVSIVGIGADTAARLLAEIGDINAFGSARQLAAYAGLTPQEHTSGTSVNGKTRLCKIGNARIRKALFFPALTLLRRAPELQPWRQRLVAAGKSKMAIVGATMHKLIRIVYGILVSGQKYDPTKLLTPESAVATA

SEQ ID NO: 196446 - protein, 444 aa, unidentified
MSKIRSAHLRGDRGQAFADLVRGIPSEQLLCVSIDISKYFHVVMIHNGLGEIVTPPFEVDIYQSGFDQLCQKIEAARLGVQAKLVLVGMEPTSHYFENLAHHLLDHSQPVKLINSYSVKQNREQQLMRREKTDQIDVAAIGDLLRRGEGAPYRPPSRVYLQLQQIDRVRLGKLKIETMLKNQIIGHLDRIFPGLVLIGEAAQERYIPFMNINLWQCRTLQDLIRICPNPHLLAKMSPAELIEMFHAQKCRMGPAVAAKIIAQARKTLLPDPELAAIRSELLQHDLVLLESVQAHIAVLEQRLAALLAQTPYAIWTQFKGISAVQAASLAAAIGNPAHYFEAAQVFRRSGLVSGRNDSGTHQRKGRGSHVLKAGDVYLRYSLMNAVSTLLVHQPALYSYYKRLSLSKPAGVARVATARKAIGLLWAAQRDQSSNTLILCKGANMP

SEQ ID NO: 196447 - protein, 349 aa, unidentified
MGMLAERVDHVIGVDTHRDSHSAAVCNPSGAVAAEVTLAADAFGYKRLLRFAREQAPGRRVWAIEGTGSFGAGLTSFLLEQGEWVVEIDRPARPARRNGAKSDALDAARAAREALSRKHLAQPRRRGEREAIRVLLATREGAIVARTKAIAQLKALIVNAPEQLRHHFRPLTTDEQLARCARLRTSATQSVEHRSTIIALRSAARRALALEAEAADLESQLELLVRELAPALLAEPGVGVVSAAQLLSAWSHPGRFRSEAAFASLAGAAPIPASSGQTVRHRLNRGGDRQLNRALHTIVLSRLAHHPETKRYAARRTAEGKTPREIKRCLKRHLARHLFRLLESSPTPA

SEQ ID NO: 196448 - protein, 370 aa, unidentified
MGNASTLHVGLDVHKESIAVAYATEDGATAPVPLGAIGTRQCDIDALVRKLQSKSARLVFVYEAGPCGYWLYRYLTRKGLTCFVVAPSLIPRKAGDRVKTDTRDAVTLARLARSGDLTPVYVPAVPDEALRDLARAREDALHDLNAARFRLKALLLRNDVRYVGRANWGAEHRRWLARFVFPTPAQQIVFQEYVRTVTERTELLQRLEAELLEQAKTWRLSPVVEALQALRGVQFTVAITTIAELGDLTRFDTPRQLMSYLGLTPSEYSSGERRRLGGITKAGNRHARRVLIEAAKAYRHRAKVSEQIQVRQEHLPAVIRDIAWRAQVRLCGRYRKLLARGKHPNTVAAAIARELAAFMWAIAKARPVPA

SEQ ID NO: 196449 - protein, 428 aa, unidentified
MNCNTQNAKIASITEKTLIVGIDVGSETHFARAFDWRNYKYTKKPLEFSNTEAGFMMFKAWVEDIAEKQGKTAVISGMEPTGHYWFALGKFLQDSGMKPVHVNPHHVKKSKELDDNNPNKNDRKDPKTIAALVNEGRFSYPYIPTGIYAEIRSLSNLRFQTQEELTRIKNRIARWFAIYFPEYKDVYGDLMAVSGRMILKEAPLPEDIRILGVNGVNQIWRNAKLRGAGMKRAKILVSAAEHSVGSKEAPEAARIELKNLLNDMDVYVSRMEELLQTIEEKLKTIPYVDKLMEIKGIGLITVSGFIAEVGDIGRFDNPKQLQKLAGYAIVANDSGKHNGESRISYRGRKRLRYVLYEAAISLVGKNAEFKEIHEYYRTRKENPLKKMQSVVAVACKIIRVFYTILTKGVDYDPMKLMSDIRRPQLQAA

SEQ ID NO: 196450 - protein, 345 aa, unidentified
MTIKHYIGFDVHKKTISYCVKAADGNIHEEGILRAIPMVLREWAGKRQEPWHGAMEATLFSDWVYDQLTPYAAALKMGHPARMRAIATSKKKTDQIDARTICDLLRCDLLPPAYVMPPDLRQLRRVLRYRNLLVRAGVQMQNKIAGLLLEMGVEYDTPRLHRKKYFGQLLQEKEAEIPASARCLLAFSREQYETLHRMELQLLRGLEQHPDIAERVARLMTIPGVGPVLGLSWTLEVGPVERLGNLSRAISFCGLCSALRESAGKQTRGPISKQRNVHLQTVLIEAAHLAPRWNPLLAEVREREIQRGHRNRATLAVARKLVAFLMAADRGHQPHPRPASVTAAA

SEQ ID NO: 196451 - protein, 343 aa, unidentified
MDHIAIDLGGRESQICVMSAGGEVLLEERRPTRGLGAYLAKRPAGRVVMETCAEAFSVANEAQRAGHEVVVVPATLVRSLGVGMRGIKTDIRDARNLAEASCRMKRLPSVHVPAMASRERKTVCGLREVLVGTRTKLTNSVKGWLRTMGLGPMQRNTPEVFPSRVRKHVSDRECVIPPAVERVLVMVEAVNVQIASADEELEKLSEEDPVCVRLMTVPGVGPVTAVRYAAALDDASRFDSASSVASYLGLVPGENSSSDRRRITSITKAGAPQVRWTLVQAAWSARRHRKLDPMVQWALEVEKRRGRHVAVVALARKIAGIMYAIWRDGSVYDAKRGAMPPSA

SEQ ID NO: 196452 - protein, 342 aa, unidentified
MSITMIGLDTAKSVFQIHAVNETGKVDIRRKLSRKDLVAFFEKQEQCTVVLEACGAAHHWARILTGLGHHVKLIAPEAVKPFVKKGKKNDAADAAALCAAASRPDMKFVPVKSLEQQGILALHSARSLLVKQQTMLANAMRGLATEFGLTVPKGISKLEELAVLVDADEALPVKVRQAFTGLFDQCKSLTESIMTFEAEIVAHARHDETARRLATVPGIGPITASLIAATVGDIGLFKSARHFAAWLGLVPRQHSTGGKTRLGRITKTGNREIRKLLVLGATSMVSRAPQWNSAAGLWIRGVLQRRPVRLATVALANKMARIVWALMTRKGVYQAKGRGAAA

SEQ ID NO: 196453 - protein, 465 aa, unidentified
MVEQQKPNKKKRTAVTPTALPVARPQVAGIDIGSAEHWVAGPVHADAASNVRVFGTTTDALHALADWLVAQHVESVAMESTSVYWIPLYELLESRGVEVVLVNARQLHHVPGRKTDVSDCQWLQLLHSCGLLRGSFRPAEAIVRLRALQRQVANLVAERTRCVQWMQKALDQMNVQVHRAVADLTGTTGMAIVRAIVAGERNPATLAAHRDPRCRKSAAEIARYLTGTWRDEHVFTLASALRLYDAFGVEIAAFDTQLLAELAALEPPTRRAAPVPAHPNRAKEQGLRRRGEQAIRTALWRVAGVDLTRIDGISTKVAQVVVTEVGPNLAAFPSEEAFVSWLRLCPRTPISGGKPLKKRRNGLGANRIATVLRMAATTVQRSQTALGASFRRLARRKGAAVAVFATARHLAKLIYRMLRFGQDYVDVGAQAYERRFQLRRLAGITQAAKSLGFTLVPQTAEAAPG

SEQ ID NO: 196454 - protein, 339 aa, unidentified
MEHYIGMDAHSKTCMFVVVNGRGQETRAQRINTGETEILKFIRSLKGKKHLTFEESTFARWLHVLIKDEVDELVVCNPLFLNRRTGPKNDYLDGLHLAQQLRGGFLTPVFHDDSFLSDLRKVVTSYENLVTDGIRAKNRYKALFAARGLSTHGRKIYYGVGKPIELLDPTSQFVARRLLDQVQYCEDMKNEYMTVFKKNVEENKQIKLLTTLPSISAVRANIIAAAVVDPKRFPNKYKFWSYCMLVKHDKLSDGKSYGKVTVFGKKILKWVYMSAAMNAIQDEGPSKDFYDDQIAKGVSPKAAKRNLARKYAAATIAIMKTGKPYQEKRLLENIDKDKN

SEQ ID NO: 196455 - protein, 338 aa, unidentified
MKITTIGLDIAKSVFHFYAVNEMGRFVKKKQLRRKQVLAMIANMTPCLIVMEACGGANYWAREFIAMGHQVKLIAPQYVKPFVKGNKNDYNDAEAIAEAAQRPNMRFVPIKSVEQQDIQNFHRQRERLKKERTALVNQIRGLLAEYGVVINKGIAAVRKDLPEILGDAENGLTAIARELFAELLEELRGLEQRFKQCERRINSLNQDNDVCQRLDEILGIGPLIASATYAAAGDGKDFVNGRHFSAWLGLVPGQHSSGGKTVLLGISKRGNAYLRTLFIHGARAVLRHSATKTDRFSCWAQAVLARRGHNKACVAVANKMARMAWVIMAKGETYRVAA

SEQ ID NO: 196456 - protein, 365 aa, unidentified
MKEQKSLTRFVGIDLGKRTYEMAVVGKGGKVTKSNGMTFPEGRQCLYKKLRASDKVALEACSLAFIMAKEMQASVGCQVYVLNAGRLSIIYKSMKKTDKEDALKLAHILEDFAEERLPVVPIPSDKEMERRKIVANYRRTDRDRTRNINLLHALFVAQGITTIKRKDLSTGEVRKETIKMLTGIERDEAEYLVACLDLIERRNEKLEKIITKEAVTDEQMRRLQEVPGVGPKVAYVFVAHVGAERFENASQLSNYLGLVPRVYMSGDTVRYGQITKRGNSYVRAMLVQGAWALVRTKEGGKFKEMYEYMTKEKSKSKKKAIVAVARRIAELLYLLMRDEVRYVSRSYISLEKKRANEKAQLKISA

SEQ ID NO: 196457 - protein, 412 aa, unidentified
MDIVVERCAGLDVHKDTVVACVRTPGKGGSRDQTTRTFKTMTIDLVALRDWLVAMGVTLVGMESTGVYWKPVFYVLEDDMECWLLNARHLRNVPGRKTDVQDAEWICQLVEHGLVRPSFVPPKPIRELRDLTRYRKAQIDERGREAQRLDKVLQDAGIKLSSVATDILGKSGRDMLVALVSGTQDPQVLAELARGRLRAKIPLLRRALQGHFVSHHRLIVEKILAKLDFLDETIEDLSAEIDRLIAPFAAEVELLDTITGIDRRAAECIVAEIGVDTARFGSSARLASWAGRCPGHHESAGKHKSGRSRPGSKWLAATLAQCAEAAGRSKGTYLGAQFQRLRGRRGHAKARKAVEHSILVAAYHVLDRHVPYQDLGADWFVRRRPEAHARRLAHQIEALGFRVTIEPTEQAA

SEQ ID NO: 196458 - protein, 394 aa, unidentified
MYYIGIDIAKKSHEVCFMDQNGQILDGNSFKIPNTLSGVNKLQQMLDRYALTPENAQVGMEATGHYWLVLYSWLFEKGFDIKVINPIVTDALRHMRIRKVKNDRVDAEIVAKVLMLGEYQETAIADGDILALRQLCRFRLWQVQTMGDLKRKVIALLDQVFPEYADLFSDVFGMTSKELLLQYTTPEEIAAVSARKLTTLLGKSSKGHFGKEKALEIQAAAKGSLGITVATDAFAFQIRQMVEQLEFVEEQITLLDQQIESYMAKLESPITTIPGVGPVYGAVILSELGDIHRFPSAKQIVSYAGIDAQVNESGDFKGTEAHMSKRGSPYLRRAIWGAAFVASWADPQLKEYYQSLRARGKPHRVAVGAVARKLCYLIFAILSENRAYEVRARL

SEQ ID NO: 196459 - protein, 342 aa, unidentified
MYYIGLDVHKKTISYCVKDASGQVHQEGKVGATRWELDGWMETLPQPWTVAMEATIFTGWIYDHLRPHAQQVKVAHPLMLRAIAAAKKKNDQIDASKIADCLRCDFLPECHMASTQIRDRRRTLRYRHLLVRQMVQMKNRISGLLMETGVSYNKQRLHKVGYFRELLSTNEDVHESIRPLLKLSRDTIVRLQKTEYALVSSLQRDPLLADRIKRLRTVPGVGPITALTWALEIGEVARFRSIRQAISYCGLCGEEKSSADKVMRTPLSKQRNKHIQLVLVEAAKLAPRQDHDLALVYETEKQKGNANRATLAVARKMVAYLLAVDRGQRDFVPAEDYQRAAA

SEQ ID NO: 196460 - protein, 341 aa, unidentified
MKNKSFIGIDISKNVIDASIFCEGTPIKDFPHAVFNNSRKGFGEMCTWLKKNHVVLSNCLFGMEFTGSYSMELEKFLYARNYQFCMLSTHVVKHYPMGSKDKSDKIDSAKIADFLYRYNGTECVKPYKMPDKTMQRLKTLMNERKFLVEQRTCFMNRRQLCSTKEDAQLYDGYIRKLGHDIENIELEEQKLLATDDSLLSTYKNLLTIPGIGFVNAINAIVITRNFTAFETARQYASYVGVAPHSHTSGTSVRWRPRPSARCDGQAKADLSMAATVAVQYDAELQSFYNRKLGGKQDSDTKRKALNAVKFKLVLRMFAIGKQNRKWEPLDSKSSNEKLAIS

SEQ ID NO: 196461 - protein, 423 aa, unidentified
MPKRMYRATEVKKVSLAPLKEQVYGQRVVLGVDVAKTTMYGTLLNEAREVLGRWKWRQPGETRELVGLLRSLPAIVEVVLEPTGSYGDALRYHLERAGIAVYRASPKRCKDYSEVFDGVPSQHDPKSAIVLARLHLEGFTEKWIASSEEQRALETAVREVDIFDDQYHRNLNRVEGQLARHWPELTQVLSLDSATLLALLVEYGDRSEVAADPEGASRLMRRVGRNFLKRTKIKLVIEQASQSVGVPMAEAERHLMRTLAREAQRNRQERQSAAKRLQALARRIPSVVALQPAWGDTTAAVLVSEVGDPRFFETSSSYVKAFGLNLKIRSSGRYIGQLRITKRGSSVARRWLYMLALRKVQRDPVIRAWYQKKIARDGGIKMKAVIAIMRKLAAAMWHVARGAEFDSTKLFDVRRLAVSEATA

SEQ ID NO: 196462 - protein, 457 aa, unidentified
MAKKKRESQNQAVLPILKPNAAGIDIGATEIWVAVPADRDPQPIRCFPTFTEDLHRLADWLKACRITTAAMESTGVYWIPLYQILETRGFEVCLVNARYYQNVPGRRTDVSDCQWLQYLHTVGLLRASFRPEPQVCVLRSFLRHRDNLIQIASTHVLHMQKALNQMNLQIHHVLSDITGLTGLAILDAILAGERDPKVLAKLRNPRVQASPQTIMKSLVGDYRVEHLFTLRQSLAAYRYYQQLIADCDREIEKQLLQFQDKVDVATKPLPPLKVQRTTRYSNAPSFDLRGHLYRTLGVDLMAVPGINVLTGHTILTEVGPDLSGFRSASAFASWLGLCPDNDKSGGKILSVRTRKVNSRAALAFRLAANTLHRNKSWLGDYYRRMRAKLGAPKAITAAAHKLARIVYHLLTTHQPYDESIYAKYQQQSRARATAKLKKQAIFLGFQLVPMHATPAAH

SEQ ID NO: 196463 - protein, 422 aa, unidentified
MLEQTRDEQEIIERVAALDIGKAELVCCVRVPDPGGGRRRVQEVTTYSTMTRSLQVMVDRLTDLGVTRVVMEATSSYWKPPFYLLEAHGFETWLVNAKDVKHLPGRPKTDRLDAVWLCKVAERQMLRPSFVPPIPIRRLRDLTRYRMSLVSDQGAEKNRVEKLLEDAQLKLSVVASDIFGMSGRDMMAALIAGERSPQALAQLARSRMRGKIPQLEEAFVGQFTDHHGYLLTKMLARIDALSVDIADLDTKIEARLAPFADTVARLDEIPGVGAVTAAVIIAEVGLDMTRFPTPAHLSSWARFAPGVKESAGRKKGTGSTGHGDRYLARVLGEAAVAASRTNTFLGERYRRIARRRGKKKAIVAVGRSILLIVWSLLSDPETRYYDLGSGFYDSRINPERKKRNHIRQLEALGYKVTVEPPA

SEQ ID NO: 196464 - protein, 484 aa, unidentified
MHLQITNKLTLALDAFRFNFESAGALELPNEYSGLASERLLYCLRRVQACTSLTGKLAQWSGLMNQLTDTEYSAYVGIDWAAAKHDICVQAADGGTREFVCISSQPEGIEAWAQALYRRFGGPIAVALELSKGPIVSALQKYDFFVLYPINPLQLARYRETFTPSGAKDDPTDAELAVDLMTRHPERFSPLKPQSVGMRKLIGLVEQRDKFVSDQGRLVNRLGHALKQYYPQVLEWFNEHNTLVFCDFVSQWPTLNQAKRARKASLERFFKSHHVNSAQLIEKRITAIKTAMPLTLDAAVIEPHRLQVEILVEQLRITIKALKRFDDQIAVTAQKLPDYDLLFSPLPGAAKVLAPRLLAAFGEDRQRYPQADALQKYSGIAPVTKRSGKTTWVHWRWQCPTFVRQTFVDWAAQTINKSAWAGAYYRQQRAKGCSYQVAVRALAFKWIRILHRCWQNRTPYDESKYLEALRRKGSPLLKYLAEAA

SEQ ID NO: 196465 - protein, 338 aa, unidentified
MAIVFVGVDIAKNVFAVHGIDEHGKPVLVRPSVARAKLHALIASLPPCTIGMEACSGAHHWARLFTASGHTVRLIAPKFVAAYRLSGKRGKTDAADAAAICEALQRPSMRFVPVKTLDQQALLSLHRVRQGFIEQRTALINRIRGLLSEFGIVMPLKANTVRLLAGAALEDLPGWANLAIGDCLSELHHLDQRIVQYDRHLAQQARTDARAQRLMRLNGIAETTATALVASVGNAHEFKCGRQFAAWLGLTPGQYSSGGKTRLGRITKAGDAYLRSLLVLGARSVLNAAKGRSDALSSWALALQQRRGYWRAVVAIAAKNARMAWAVLAKADAFVMPA

SEQ ID NO: 196466 - protein, 345 aa, unidentified
MTIVESRAVTGGVDTHRDTHVAAALDGIGGLLGVESFPTTPAGYRMLLDWLNSFGTVERVGIEGTGSYGAGLARHLQALGLSVIEVNRADRSARRREGKSDPLDAISAARAALSGRATGASKGRDGSVEAIRTLMVTKRSARRDRTSTINQMRALVATAPDDVRARIACHTTLSLVAEAAAMRPRPGEVVDYATRIALRELGRRAEYLAAQIGRIDGMLGPLLLARAPSLLALPGVGPDSAAILLIAAGDHPDRMRSEAAWAHLCGVAPIPASSGKITRRRLNPAGDRQANHALWRIVLTRMSFEPRTRAYVARRTDGGKSKLEIIRCLKRYVAREVYPHLRSSL

SEQ ID NO: 196467 - protein, 412 aa, unidentified
MKPILESCCGMDVHRDQVTACIASGPLDRAKEKLIVKEFSTMTYGLRELSSWLKEHNVKTVAMESTGVYWKPIFNILEDDFEVILANAARIKNVPGLKTDKKDARWIARLLRYGLVPASFIPPRNIRYLRDLTRTRKKLTEERTRHKNRIHKILQDANIKLSSVATDVFGVSGKAMIMALLEEDEPSPDEIKSMTKGKLRKKIGLLIKAMDGRVTDHHRFLLKMHFEHIESLSSQINELDEEISRKLEPYEKEFGLIRTHPAISEVTGASVIAEIGVEMSQFPDEHHLSSWAAISPGNNESAGKRKSGRTRRGNNYLKTTLVEAAWVASRTKDTFLSARYYNIARRRGSKRAAVAIGHQILKDIYHILSTGEPYKEIGAEASRNRKSDARECSMIRELERLGYSVRKIEAST

SEQ ID NO: 196468 - protein, 417 aa, unidentified
MNTVFARVAGLDVHLKTIQCAVRCRQESGKLLAPVRSFGTMTRDLRALADYLQALGVTHVALEATGVLWKPVWNVLEGRFTLLLVNPRHLKKVPGRKTDVSDAEWLAQLLQCGLLRGSFVPPRAVRQLRDLTRHRAQLTGEQTRVANRIHKVLEDANIKLGAVASDVLGQSGRAMLRAMLGGEQDPKKLAELARGRLRGKMPQLRLALEGNCTEHHRYVLGRLLSHLSYLEHQADQFSGRIAHRLSELLPAAAAERLDRIPGVNRITIENVIAEIGVDMAVFPDEHHLSSWCGVCPGNEESAGKRLRSRTRKGNRWLRRALTEAAWAASHTKDSYFAAQYRRLAARRGKKRALVAVGHSLLVIIYHVLKEQVEYQDLGPDYFDRLEPERLRRYLVKRLQGLGFEVTLSAKKLNDSAA

SEQ ID NO: 196469 - protein, 313 aa, unidentified
MSQEKYIGMDVHQATVSAAVRDRNGNLLMECILETKADTLLEFVQGLHGTLSLAFEEGTLAAWLHDLLKPHVNRVVVCDWRKAALLRDGNKSDRIDARNLSELLRTNQLKPVYHGEHGLRTLKELGRSYLTVSKEMTRTMNRIKSLYRSGAIPRPGTTVYAPRYRRQWLAKITEPGARMRAEHLYEQLDHLQPMRVRARREFLQESNKHDAVKRLRQIPSIGQIRAALLVALLQTPHRFRSKRQIWAYSGFAIETHDSGEYRYVRGKLQRNRERITVRGLNRNQPSRLAADLALCRIFMKHELPWGCGQPWPD

SEQ ID NO: 196470 - protein, 412 aa, unidentified
MEVLYACCCGIDVHAKMLVACLLKAGRKEVRTFSTMTEDLLHLLDWLSQEGCTQVAIESTGVYWRPVFNILEGVMEVILTNARDAKGYKARKTDVIDAEWLADLLRHGLLKPSFIPPLPIRELRDLTRYRESLVRERTALANRLQKLIESANIKLGQVASDALGVSGKLMLRALAAGETDAEQMSHLAQRTLKRKQPQLQQALEGRFTPAQRWILGQLLDQYDHVEAALQGAEERIRQEVANSADPFVPEAVPLLDTIPGVGETVAQIIVAEIGVDMDRFPTDHQLASWAGMCPGNNESAGKRKSGKTTKGSRYLRAALVQAAWAASHQKGTYLAAQYKRLVKRMGKKKALVAVGHSILVIAYHVLQNRTPYQDLGGDYFEHRNVDKQRKRLIRQLESLGVKVTIEEVKEAA

SEQ ID NO: 196471 - protein, 343 aa, unidentified
MKITINWRFIVGIDISKLILDIYLFDRQSGDGNSFQVPNTREGFRQLAEWMEDHKVTKSQTILISEHTGRYGEQLLRWTTNNNWPHAVVKTTALEKVSFEHHRKTDALDASQLAEYGVRFSDRLRLAEAPKPTAGQLKRLQAERRKMVDRRAALKSKLGEADFHDADMSQLTKMWNQQVHLLTQHIEQLEYTMDELIRQAPTLCKRHQTMRTAPGIGPVIGRFWLCLFAGKDQLNPRKISSRFGFAPHGRSSGSSVKSPDRSTGYGNSEMRRLMHQAARSVANHKPHYHDYYEQKIDEGKHELVAINNIINKLIRLYCAMWNNQAEYDPRHIQKMNKKYKKSA

SEQ ID NO: 196472 - protein, 361 aa, unidentified
MHATTVAVDLAKSVFQLAIADEHWCVVETQRLTRTQFERWFANREVGLVVMEACGSAHHWARWLNGLGIEVRLLPAQYIRAYVKRNKTDATDAAALLEAARCADIRPVRVKSVEQQALQGMHRIRSLWMGTRTSRINALRGFCREFGIAIPVGARTGVEAISRVLADPNTAVPDLMRGTAKLLMEEIRLLEARIAQLERELAALARLSPACTTLLSIPGIGLLTATALVAATSGDVSHFKDARHFSSWFGLTPKEYSSGNSRYLGHISKRGDRYLRMLLTHGARSVLRSSKVAQDAGREVCGVRRWALDVQARGNHNKAACALANKLARICYATLRDKKPFGEQTVRLSKKVSRESFVMPV

SEQ ID NO: 196473 - protein, 431 aa, unidentified
MKKIRKNAAGIDIGAKNFFVAIEGEEVKVFFSYTEDIEALRDYLLEKNIETVAMESTGVYWVVLYEILESAGLDVWLVDGRETKQVPGRKTDIKDCQWIQQLHSYGLLNRCYVAKSDTKELRSYLRLREDHIRSASMHVNHMQKALTEMNIRLKEVLSQVHGKSGISIIKAILEGERDQDKLVSLCHSSILKKKRELVHKALKGKYTKAGLFALRQAYDAYKFYQQQMKECDSIINLIINKMGNKGEGQKPVSKRKPIRHNKPNVDNLGPKLIDIFDGKDATLISGLTDYTWLQLYSETGRDLSRWPSEKHFTSWLGLAPGQNHSGKKRKSAKKKGRPAAGQIFRVIAQSLINSKKIALGAFGRRLRARKGPGVAIKAVARKLAELYWRVMVKGLEYSENGIKKYEEQLQAQKLKTFTRLASELNCQVVEY

SEQ ID NO: 196474 - protein, 415 aa, unidentified
MLFIGDDWAEGHHDVVAQDDAGKTLARRRLPEGADGIARFHELVASCLGEDAEPDPARVIVVIETDRGPWVKALAAAGYRVYPANPKQAARHKETIANSGKKDDFFDAGCLADMGRTRLHQMRELAADSDVAEAVKIAARAHQKLVWERTRHLLRMRSALREYFPAALEAYADLTLAGKDALELLAKAPAPESAARLTVTQITAALRRAGRRGDLAQRARDIQAALRAPHLAQPDVIAGAYAASVQAAAAVITALNEQVKIMEAKVSGLFRRHPDAGLYLSQPGIGDITGARILGEFGDAPGRYASAKARKNYAGTSPLTIQSGKKKTVHARYIRNRHLIDALHAQALSALTGSPGARAYYDELRAHDAGHDDAMRRVASRLVGILHGCLKTGREYDEATAWSHRAETPEAEAAA

SEQ ID NO: 196475 - protein, 410 aa, unidentified
MRYYLGVDWADQTHAVWVVDEQGAKVASRAVPHTAAGLSEWGRELDEWRAQGIELWAAIERPEGRVVDFLLDHGVVVYPVNPKALDRARDRFRPSAAKSDPFDARVLAEFLRTDHGHLQALQPSSEAAQELKYLTEDYRRHVRQQTRLVNQLTATLKAYYPRALEVSELTTALARQFLQAYPTPVAVAALTKKRWQRWARAHRLSDARAQELWGFLQRPQLPVPDHVVRAKARLMLTLVEELTAVVAAVGQYREAIDAFFAGLPEAQWIRTLPIGDHGVTAPTLWALLGDAPRRWESWQHLQGHAGAVPVTIRSGQQRVVRFRFACDKALRYVVDQVAFLSLGKSEWARAYYDQQRARGHDHRPALRALGAKWLKIIFVMWDRQIPYDEQHHLATMTRQQLRQRGQKKVA

SEQ ID NO: 196476 - protein, 426 aa, unidentified
MKYTQNERIMQITEKTLIVGIDVGSEKHYARAFNFRGVEYGKLLIFHNDAEGFAIFEGWIRKLAVQNGFKDVTVGMEPTGHYWFTLGEHIKRTGMRIVLVNPHHVKKSKELDDNNPSKTDRKDPKTIAMLVKDGRYMEPYIPEGIYKELRNLMDSRWRITKELFAIKNRIRRWISIYYPEFTKVFVDWEGKAAMLILKECPTPAKIIEKGIDGIIAIWKEHKIRAVGMKRAVMLLEMARLSIGTKEGMTSAENELQMLLEDYESKMRQYERTMDLVERLAREIPGFEEMLAIKGVGLVTAAGFIAEIGDVRRFSHPKQIQKLAGLSLKENSSGKHKGKTTICKRGRRRLRYYLTFGMMPLLSKNEEFKALHEYYTSRKTNPLKKMQSLVALSNKLVRIFYVILTKKVAYDPQKMMNDIRRTEVKAA

SEQ ID NO: 196477 - protein, 358 aa, unidentified
MEYGAIDLHKKESQIRIVRESGEIVDRRIATTRDRLTTMFWGRPPMRILLEASTESEWVAQHLETLGHEVIVADPNFAPMYGHRSRRIKTDRRDVAALADACQRGCYRAAHRRSAAQRTVQSRLNIRRELTDSRTRAISVARAITRGAGFHLRSGSTESFLNRITALELPSSLTETLSPLRNMIEALNEELARADDTFAQLVAEDPVVTRLTTLPGIGPITASAYVAALDDASRFGRAAQVASYLGLVPGEHSSGEQQRRGHVLRSAHPQVQSLLVQAAWRLGRSNAPRTAGLRAWAQGIARRRGKKIAMVALARRIARILFAMWRDGVPYDAARIRPTRTKVAAPIVDGATRSVVNG

SEQ ID NO: 196478 - protein, 355 aa, unidentified
MSQEKYIGMDVHQATISVAVRDVHGKLIMECVLETKAATILEFIQGLRGTLALTFEEGTSAAWLHDLLKPHVSRLVVCDPRKNALLKDGNKNDRVDARKLAELLRTNQVKPVYHGKHGTRALKELGRSYLTLTKDVTRVMNRIKAVYRSWAIPCAGTSVYTPCHRAEWLAKLVEPGVRVRAEHLYQQLDSLEPVRLEARRQLLLESRKHAAVKLLRQIPSIGPIRAALLVALLQTPHRFRTKRQLWAYSGFAVEVHDSGEYRWVRGKLQRNRERITVRGLNDNHNQDVKNLFKSAAISASTRPGPLHDFYVARIESGMRPTMARLTLARKIAAITLTMWKKGVSFDPKQLQPQAA

SEQ ID NO: 196479 - protein, 432 aa, unidentified
MKKLRRNVSGIDIGAKDIFVALEDGPVKSFKTFTEDFKLCAIYLKDNNVKSVAMEATGSYWMILYMILENAGFEVWLVDGRETKQVPGRKTDVKDCQWIQQLHSYGLLNRCFTLEEEMKNLRSYNRIREDHIRSSSMHIQHMQKALIEMNIRLKEVISQIHGASGMKIIKAILAGERDKEKLTSLCSKTILKNKRKEVEKSLEGYYTEAGLFALKQAYDSYQFYQHQISLCDGEIEKQLIKLGGDKKDEDLDTKRKPIRHNRPKVKNLGANLIGLHKGYDPTVIEGMTDYSWLKLTAELGYDLSKWKTEKHFTSWAGLAPGQNNSGKKNKSKKKRNVNQVGQIFKDIALGLINNKNSAIGEFGRRIRSRKGGIVAIKAMARKLAILYWKLFMEGIDYVKESAENYRKKLRERKQKNLRKLAKELNVQIIESQ

SEQ ID NO: 196480 - protein, 367 aa, unidentified
MTIVAHAHPFVVGVDTHAKNHALSILATPAGVQVDDGEFPTTAAGMARAIDWVARRTGGDLAVLWVIECAASFGSQLAHAVTAAGYQVVEAARMSAKANRGVGKSDPLDARRIAAAVLPLELDRLRHLRKDDGVRVGLRVLIAARDHMTGERTATVNALIALLRVLDLGIDARKPLTAAQIIEVSKWRTRTEDIGAAIARAEAVRLAKRVIVLEAELAENTKTTTDLLRRSPARVLLDKPGIGPVTAAVAMAAWSHDGRLRSEAAFASLAGVNPIPASSGNTVRHRLNRGGDRRLNQALHMAVVVRTRMDPATKAYVERRLTEGHTKKEIRRCLKRYLARQIYRTLTAVTRADEALAAVTSATPIPA

SEQ ID NO: 196481 - protein, 313 aa, unidentified
MPQDTFVGIDVSKDTLDVHVLPTRRRLQCSNSAGDIQTLAAQLASLEPALVVLEATGGYQTQLAATLHDHGLVVAVVNPRQVRDFARATGRLAKTDRIDAAILAQFAQRIQPPPRDLGNENDRQIKALVTRRRQLLDMHAAESNRLGQARHQAVTASIQAVLKLIEAQLKDTDATIDEFIRHSPIWLQKATLLDSTPGVGPATIRSLLAHLPELGRLNRRQIAALVGLAPMNDDSGKRGGYRAIRGGRTAVRNALYMATLVATRHNPRIRAHYQHLLTQGKKKMVALIACMRKLLIILNSMLKNNQPWRCQMT

SEQ ID NO: 196482 - protein, 411 aa, unidentified
MSDSIFVGIDVSTKSNKVCILDQQGNRLSKLSVENNSHGSAKIVERVIEATEKSNSSDVSFGLEATSVYGDGLIFFLKQEPSLKLYNTKVFLLNPKQVHNFKKAYSDLPKTDDVDAWVIADCLRFGRINLREVYFDEQHKALQRLTRARYFVAQNIVREKNRYLTNLFLKFSGMCQEKLFSNNLGATATELAGSEFSLDEIVHIPLDELAIFINTTGKGKFADPEALAAGIQKAARSSYRLPKTVEDSVNQVLAVSVISIKSYLQQLKTLDQSISTLMEAIPNTLTSIKGVGPVYSAGILSEIGSINRFKDQASLAKYAGLSWSRYQSGNFDADNTHLINSGNRYLRYYLIEATNLVRRHDPEFKRFYELKYHEAPKSPHKRALALTARKFVRLVYALLRDQRLYSPPRVR

SEQ ID NO: 196483 - protein, 322 aa, unidentified
MTQRGVMNQDHVVVGIDVSKDEFVMNTLPSDDRWTSGTDPVAIDLLVTRLCTLQPHVIVMEATGGYEAPLAAACAMAGLPLAIVNPRQVRAFAQAVGRTAKTDAIDAGLLALFGARVQPTPRPLPSAATTQLAQLVARRRQLLEMLTAERQRLAQLGTTTGPVARDLRHHIRWLEKRVTDADGAITTAIQQSAVWRVNDDLLRSVPGIGPTVARTLLAELPELGTLDRRAIAALVGVAPFNCDSGHFRGRRMIWGGRPSVRAALYMAALVAARHNPILARFYHRLRAAGKPGKVALVAVMRRLLTIVNAMIKHQTPWRPETA

SEQ ID NO: 196484 - protein, 352 aa, unidentified
MKILAIDLGKFKSAACVYESATGEHAFTIVRTKPAEIHDLVATHQPHRVVIEIGSAAGWVYDMGLTMNVEVQVANPNHEAWRWKNVKRKTDKDDALKLAQLSAMNQLPMVQLPSKKVRQWRSLICYRNTLVARRTAIKNHIRSILDRQGIGWPVGPSGWTDKAFVSLKRIAGFIENANPDDLWRFELRMELEAMVQAQMLINRVEVKLDALAKEDSRVHQLRTIPGVGPRLAEVVVAVIDDAKRFKNAKQVGAYAGLTPMQFESGTMNRQGGISGRGNKLLRALLVQVSWLGRRCNGKISKIFEDVCRGNKTRRKIAVIATARRLLVICWAMLRDGTTWREPGNPLGALPTS

SEQ ID NO: 196485 - protein, 351 aa, unidentified
MPIVIGVDAHKRTHTAVAVDRATGQQVDVITVPARVKGFERLLAWARRLDTDRVFAIEDCRHVSGSLERYLIPAGERSVRVPTKLMAESRRVGRERGKSDPIDALAAARAAVREPDLPTARLDGPERDLRLLVDHRETLVWQRSEAQSKLRWLLHELDPELEIPLRTLDRFVTLDRVAARLDEMLLDGRVEICRELLATIRALTTRVNALETRIKTMTEKLAPGLLELPGCGPLTAAKIIGETAGVGRFASEAKFAMHAGIAPLPVWSGAKTRFRLNRSGNRQLNAALHRIAVTQIRMHQPAKDFMARKISEGKTKTEALRSLKRHIAPKVYDTMTRHQLTTPAGLQSAAA

SEQ ID NO: 196486 - protein, 376 aa, unidentified
MQAVQKQAYEAGTVLYMAMELSNSKWKLGFSNGQRIRRKSIEARDRLRLVQEVDLAKQKLGLEREARVAVCFEAGRDGHWIYRWLSAEGFEVLEIDSSSIETPRGRKHVKTDRVDVEKLLDLLLRYCLGFRRAFRVVRVPSEEAEAGQRLHREDEYLLRQRLRVSNRIKSLLVTQGVVEVSLKRGFEAWLEAVQSWDGSDLSSALQDELRRLYAHYELISTQMAEVAQAYQQELLSDTAVADKRRRLEQLKSIGPKTSRVLSAEGFAWRVFRNGKQVGGMSGLTPTPSQSGDMNREQGISKAGNRRVRRVMIELAWLWLQWQPDSALSQWFNRRFARGGKRMRRIGIVALARKLLVALWRYVEWGVVPEGAVLKSA

SEQ ID NO: 196487 - protein, 341 aa, unidentified
MTTVSTIGLDIAKHVFQAHGADASGQAVFRKKITRTKLIDFLASQPRCLVALEACGGAHYWGREISKLGHTVRLIPPSYVKPFVKRQKNDAADAEAICEASQRPSMRFVAIKDEEQQANGVVFRARDVLVRQRTQCINALRGHLTEYGWVVPKGTSHMATLIDQIEDPNCSLPKSACAVLSVLVTTLNSLEENIAILDAEISRRSREDAIARRLMTIPGVGPISATAIAALAPPVETFRTSRDFAAWLGLTPLQRSTGGKQRLGATSKMGERTIRRLLIIGASAVVSQARRRGAPAGSWLARMLVRKPRMLVMVALANKTARIIWALLAKGEVYRAPAAVA

SEQ ID NO: 196488 - protein, 323 aa, unidentified
MNKDKEIIGIDISKDFFDVYTSSGKSLQYKNTPVGFRCFRKLLSENVHCVMEATGYYHYQLAGFLSKEEIRVSVVNPLSVKRFIQMKLSRIKTDKSDAKMICLYGEHQAELKIWHPSDDNQRESLQIVRLLDQYTKQTTALKNKIHGEEVLGKPSKIVLRSLKRSLRNLQKEQAMLEEELITLVEQDHRDMLARLGTIPGMGRKTAILMLVLTDGFTKFETASQLCSFCGITPIIRQSGSSVRGRPRISKMGNQKLRNLLFLCSFTASRHNKACADIYQRIVNKGKSKKLALIAVSNKLVKQAFAIATSGLCYDENYRSRLPV

SEQ ID NO: 196489 - protein, 366 aa, unidentified
MIVIGADTHKATHALVAVDAGTGRIRGGREIKAEEPGHLAAVRWARELDDDRAWAIEDCRHVSRRFEQALLAAGERVVRVPPHRMGASRKGEREPGKSDEIDALAVARAVVKDGVECFPVAYLNDQAMEIRLLFDHRADLVAERTRIVNRLRWHLLELSPELERSCKRGSLSKSRVLDRVERGLRKLPAGARVRVAREQVRELRRLSREIDALHCELGALVRAHRPQLLAELGCGALTAAILIGRTAGNERFRSEASFALQSGTAPIPCSSGKSIQHRLNRGGDRHLNHALHIIAITRAQRDPATKEYLDRKEAEGKTPKGALRALKRHLARHFHRLLAEPAADQQRAAVDQNSTGVAPSPMVCIS

SEQ ID NO: 196490 - protein, 312 aa, unidentified
MIASPDYVGIDVSKQHLDLAMTETPMLRVPNSQAGVRRLIVRLGTLRRPHVVCEATGSHTRLMARELARHGIALSKVNPRRVRDLARAGGQMAKTDAIDAQAILRFARLMQPQPDPHDPYALELTDLVRRRRQMVDMLAMEKQRSEHPEGETIKASIKAHIDFLSTQIATIDKQITEHIAQHTGLHRRAELLASIPGIGRVTAAVLIAEMPELGSIGNKQAAALAGVAPFVHDSGQMRGQAHIAGGRLSVRCALYMATISAIRANPPIKAFYQRLRSQGKPAKLAIVAAMRKLLTTANAILANDAPWIPSPA

SEQ ID NO: 196491 - protein, 350 aa, unidentified
MRVIGCDHHPGFQQIAFVDTETGECGERRLQHREEAEKFYRDLAAQGMKVRVGMEASGHARWFERLLAELNFELWIGDAAVICTKRVRKQKTDRQDAQLILQLMMEDRFPQLWVANWENRDLRQLLWHRHRMVQARTRIMNQLQAVALNEGLRCKKRLWREAGREQLESFPLAPWASRRRRDLLEVLDRLTPTIAELSQAIEQEAEKCPAAQRLRTHPGVGSLTALAFVLIIGSAERFQCGKQIASYLGLVPSEDSSGDRRRLGHISKQGNALLRFLLVEAAQVTVRSLPEWRNKYFHLAMRRGRKIAKVAMARKLAIQLFWMMRKEWDYEQVRKFGPHAGQPENRRGVQ

SEQ ID NO: 196492 - protein, 401 aa, unidentified
MESPIVSIDVSNGNSHYMCFIKNNKRFGKVKKIDHDIEGFKRLLEDIQKLEAETNEKVCAVFEATGVYTKPLERFLSKNSIKTYIINPLESARKRKEEIHNKKTDKLDPISISKVYYDKEEMMELKKKDETHNWLRKKNRLYEDQLNHLRKYKVTFQNQLSICFPGYLDLFKDGYSDIPMTILKKYPHPDLLKNKKAETVARYLEKNTCHNHKVSLEYALKIIEFAKKTYPGCEKDDVEVEIFKILLDKVIETQRECEKTLNEMITVASTLEEYRYISSIDGIGPNLAARIIAEIGDIEEFKSREALVAYAGLDPHIYQSGDQDGKHLKISKKGNKYLRCLLFLAVGCSIRGAKDNPVNRFYQKKKQQSNPLNSKAAKTACTAKLLKIIYGICKNKTTYER

SEQ ID NO: 196493 - protein, 413 aa, unidentified
MRRVVGIDIHRTFGEVVFWEAGKLRHGGRVDMTRTGLEGFGKSLQATDEVVVEATGNSMAVSRVLSPFVARVIIANPLQVKAIAHAHVKTDKVDAGTLASLHAAGYLPEIWTPDVATERKRRLVARRYQVVRHRTRLKNEIHAILHAHLIPKCPHADLFNARGRAWLARQPLPDDERSAIDRHVCELDRLADDLDILDREIAQGALDDQAIKRLMTITGVNLTVAAGVMAAIGDIGRFKSPGKLVSYFGLNPRVRQSGLGAAHHGRISKIGRSHARAMLVEAAWAAAKAAGPLHAFFVRIRARRGHQIAAVAVARKLAVLCWHLLTKDEDYLWARPALVANKTRAMELQAGKPQSKGNQRGPAYAYSVKTLRDQEMQIAEQAERNYARFVDRWKVRPRKNRREGARVPQTGKA

SEQ ID NO: 196494 - protein, 337 aa, unidentified
MEPTTIAIDLAKRVFQIHFVDPDGRIHSKVLKRDQMLPFFANRPAARIVMEACGSAHHWARQLTALGHEVRLVAAQFVRPFVKSNKNDAADAAAIWEASLRPGMRFVAVKSADQQAMLALHRMRQQLVRIRVMQVNQLRGLLYEFGVVLPQGRRPSIQAAQAAIATLTDQLPGMLIDSLRDQLSRLHLLDDQIQRIEQRIIEWRRGDEACRRISEIPGVGPLTATAAVSVIGQAQTFRSGREFAAYLGLVPRQNGSGGKVRLGGISKRGDVYLRTLLIHGARAVISSSKHLPAHMRDLLARRPTNVVAVALANKMARTIWALLAYGRTYQPAAALPS

SEQ ID NO: 196495 - protein, 420 aa, unidentified
MKSQSDMEFTVFVGLDWADKKHDICLQAAGCEDREFDRFAHRVSAIEQWALSLHQRFGGRIAVALELAKGPIVYALQKYDFLVLFPINPSMLAKYREAFKPSRAKDDPTDAELALDLLVRHRERFQPLQPQSEPMRTLQYLVEQRRRFVDDKVRYTNRLGIALKQYYPQALDWFADRDTVLFCDFILRWPTLMQVKRARKASLVSFFRAHNMRFPKLIEKRICAVKASAPLTQDGAVITAYKLQAQVLVEQLHVTLQAIRRFDQEIATITPKLPDYALFHALPGAGSALAPRLLVAFGEQRDRFAGADECQKYFAVAPVTERSGNKTWVHWRWQGSTFLRQTLVEWAGQTINKSFWAGAYYRQQKEKGSSHQAAVRALAFKWVRILYRCWQTRTPYDESKYLEALRRRGSPLLKHLGETM

SEQ ID NO: 196496 - protein, 345 aa, unidentified
MFYVGVDLHKNFTQVYGFNDATGEVVERRVSNDKSSIREVMSQFGENAKVVLEATRNWYWFVDLLQEMGIDVVLSNPLQTKAIAYAKVKTDKVDARMLSHLLRADLIPFAWIPSMEEREIREMLRTRLTLVRIRARFKNLVRSILAKLNIVLSHGDIWRGKGRKELEQLNLPSPYTEILPHYLSIIDNLDKYIEEWNRKIERIAKETPEVFLLKSVPGIGTISALTILYETGPIDRFPSAKRYSSYAGLVPRVKGSGGKFKTGHLSRQANMYLKWIYVEIATGIVRIGKGYLYEYYKKQMYKKGKNVAKIALARKISRMVYHLLKQHITYDTFVERNVNKMRRTG

SEQ ID NO: 196497 - protein, 379 aa, unidentified
MYRILKIGMDVHTTNYTLCAMEDKFGEDGQIIAQVTVAPDHKLILNFIRRIKEKMDPQGKDEIDVECGYEAGCLGYSLYHLLTACKVKCKILAPTTMLAEKGPRIKTDKRDAKLIADCLANGGYHAVHIPTKEDNAIKEYIRMRDDHLLMLKQTKQRMNALCIRHGYIYEGTKWTVPHMKWLQQLQLDPIVREGMDEYITTYGELMAKIERYDRRIQELANQAEYRERVKKLECFLGIRTHTALSLIVETGDFSRFRKGNIYAAYLGLAPGEHSSAESGGHLGITKAGNTHLRKLLIEASGGICKGNIGYKSKDLKARQAGNPADVIAYADKANTRLRSKYYRLTRHGKKRNVVIAAIARELACFVWGMMTDNIHGNAA

SEQ ID NO: 196498 - protein, 382 aa, unidentified
MQASTVDTPTAGHCGTIFVTIELGQKTWLVTLHSPDRDRISRHKLEGGDHSGLLALLESIRARAALKLGAAPKVVSCYEAGYDGFWLHRLLTAAGITNLVFDPASIAVEQRSRRVKTDRIDGELMLRTLMAHLRGEPRVVRIVRVPSVEQEDARRASRERDRLVKEQTAHTNRIKALLRLAGMAVGYPRRGNWLHWLAQQRDWQGQPLSPHVLAEVTREHARLMLVREQLAALEQAQAAQAPAVPAAMAERRDLLQRLKALGPAFSTTLTNEVFYKDFRNRRQVGAYCGLTSSPWRSGGIDREQGISKAGNPRARLKAIELAWLWLRHQPESDLSRWFRTRTANAGKRARRIAIVALARKLIVALWRYLTTGLVPAGATMKA

SEQ ID NO: 196499 - protein, 395 aa, unidentified
MSAEGEAIRSNDYRKDTTVKAPSTRPAAVLGLDVGKSSHWACLIDRDGEVLDSAPVRNREAELDALFASAPADTLVVVDQFRNIGSLAVRRARAAGLGVAYLPGLAASRAAGLFAGEAKTDERDAAVIARTALGVPDSLSGVPGRGEALEAARALSSQRDHVVACATRDKNRLRAVLLESCPALEAAVDLSDRRWLELLAGFGGAWGIARSGAEGPRAEAAGEAAAASTAPPPALVEAENRQGRFLAARISEALDEAGALEAETAALLEGDETYACLLTVPGIGPRTAAQLAVSVDIGRFPDHDHLASYCGIAPRVRSSGTSVRSVRASRRGDARLKSLLIFSCNSLVRSSGRYGEYYRACRARGMGHGRALKAVARKRLRAIYAVMRDRVPYRE

SEQ ID NO: 196500 - protein, 370 aa, unidentified
MEKSTPLFVGLDVHKDSIAVAYAQGQSADPPVFLGAIGTREADLTKLIRRLQSKTATLRFAYEAGPCGYGLFRDLASQGFDCQVVAPSLIPKKPGDKIKTDRRDALELARLLRNGDLTRVYVPTIDDEAIRDLCRARDAARLTLKNAKLRLKSFLLRLGLHYVGRADWNAAHLRYLAKVVCPTSAQQIVFQESVRAVDEQVDRLKRLEAELLERAPAWRLYPVVQALQALRGVQWLVAITVVAELGDLTRFDNPRQLAAFVGLIPSEYSSGPARRQGGITKAGNGRARRALIEGAWAYRHPAKVSAHIQTRIDGLPKPIQDIGWRAQVRLCKRFRRLVARGKHPNVAVTAIARELIAFMWAIAKAVPRTA

SEQ ID NO: 196501 - protein, 424 aa, unidentified
MKVTYQTCCGVDVHKSFLVATIVKTTGGIEPSYQKKRFSTFNNSILEFKQWLLDNDCHDVCMESTGKYWVPVFNLLEDEINVVIANPKWVKAVKGNKDDTKDSKWIGDLFRLGLVKGSYIPCKIVRILREYTRYRYKLVSCRSSEKNRYQNTLTVCNVALDSVVSDIFGKSSMSIIDYLLEQSGTSINHEEIASKLLRSLKSKEDAVIESVEGYQMTDAQKYRVRLVRAHMDYITAEINDVDKMIENMISSNPDFENAVQFLCTIPGVKRDSAITIISEIGTDMSQFSSSKRLCCWAGLTPGSNESAGKKKSVRITRAGVYLKPALVQCAHAAVKSDKSPYYKKKYDSLVKRRGKKRAIIAIARMILTAIYQMLSTGEQWNPSDLYKIDMPVALVEKQKAKAIKQAKKLLQREGILPPDEPLAS

SEQ ID NO: 196502 - protein, 448 aa, unidentified
MNDRRLVGIDLGIASAHTVRVLTGDGTTVAKRKAWPTTESLSEIERVCLAGTSAGTRLEVVIEPTGAAWLPIAVFFSARGHVVHRVSSAKAADLRRFLSRHAKSNSIDADTLARLPLVDPGGLRPLELPGAERAALDRRVRATDRLTQQGALHKRRIRDLVRQLMPMTPLTGDLGVADLAVLERHADPNELVRLGKTRLTRVIARASKSQLGAERAEQWLVAARLSIELYGSHPAVAFTDLAAEVATEVRLLRATQAELAAHAEEREACYRWVDPSSLARSLPGLAEVGGPALVACMGDPRRFRRGRQFRSFTGLAPKASETGETDRKGQPMSKAGSSLLRTTLVRAADSARKQDPQLARIYFVQMVERGKDHVGALCVVAANLAERAWAVMDRGMPYVVCDTDGNAVTPEEARAIIASRFTVTEHVRLRRRSKKKVGKAPQKVLEGH

SEQ ID NO: 196503 - protein, 398 aa, unidentified
MTESSDYESVQVFIGVDVGKDTHHAVAINRSGKRLFDKALPNDENKLRSLISDLKQHSQILLVVDQPATIGALPVAVARSEGVLVGYLPGLAMRRIADLHAGEAKTDARDAAIIAEAARTLPHALRTLKLADEQIAELSMLCGFDDDLAAQTTQASNRIRGLLTQIHPALERVPGPRLDHPAVLDLLQRYPSPEKLASLGEKKLAAQLCKLAPRLGKRLAADIAQALAEQTVVVPGTNAAAVVLPRLALQLITLRKQRDEVALEVEQRVLAHPLYPVLTSMPGVGVRTAARLLTEVACRAFASAAHLAAYAGLAPVTRRSGSSIRGEHPSRRGNKALKRALFLSAFAALRDPISRAYYTRKMSQGKRHNQALIALARRRCDVLFAMMRDGTFYTPQAS

SEQ ID NO: 196504 - protein, 383 aa, unidentified
MKQSFSEPLNRTIFMMGWTPRTASMCQSGVFEQHLREASVSGVITVGLDIAKHVFHAHGVDDQGRALFSKRISRGKLLDFFAAQPSCTVALEACGGAHHWARQLTQLGHEVRLIPPAYVKPFVKRQKNDAIDAEAICEAAQRPNMRFVAMKSEQQQAAGLVFRTRDLLVRQRTQLINAVRGHLTEYGWIAPKGPSHVAELAHLIEEKRMAGSLPEAARAMFRLMLDQLASLNGRIAVLDKEIARRAREDEVSRRLMTIPGIGPISATAIAALAPPVETFAKGRDFAAWLGLTPVQRSTGGKQKLGATSKMGERTLRRLLIIGSSAVVQQASKRGGAKGSWLEQMLARKPRMLVTVALANKMARIVWALLVKREVYRAPVAANA

SEQ ID NO: 196505 - protein, 312 aa, unidentified
MQNDTIGVDVSKDHLDAHRLADGASRRFANDKRGHRALIKWLAEKPANRVVFEPTGPYHRAFERALGAAGVPFVKVNPRQARRFAEAIGSLAKTDRLDAAMLARMGAMLELKARPPRSEALLELKELHLAREALVKDRTAAKNRGKVLAAPLLKRHNAQRLEQIKRQITAIEAAILEQIRADLDLAQRFAILTTIPGVSAITAFALLIEMPELGALEPGQAASLAGLAPVARQSGRWTGRAFIRGGRASVRQAVYMPALVATRFNPDMKAKYKQLINAGKPAKVALTAVMRKLILLANALLKANRRWAPKIA

SEQ ID NO: 196506 - protein, 409 aa, unidentified
MEVLFARCAGLDVHQKTVVACVRLHGPDGRAHTETRTFGTHTPALLELAAWLEENGCTHAVMEATGVYWKPVWHILEEGLALVLANAHYGRNVPGRKTDVSDAAWLADLLAHGLVRSSFVPDRPTQELRDLTRTRKQLVRQRAQHVNRLHKVLEDANLKIGSYVTDITGVTGRAILGSLIAGETDPTKLADLRNPRLKTPRGELILALTGKITQHHRFLLQMHLDQIDGADSSIARLDVQIEELTRPLAEAVGRLAAMPGMSETSARVVLAEIGSDMSRFPSARHLVSFAGLCPSLNQSAGKSRSSKLKKGSVWLKTVMVNCAWAAARAKNTYARAQFHRLKGRRGAKKAVVAVAASMLTAVYHVLRDAVPYRDLGAGYFDRRDQTKLANRLRRRLESLGFSVQMQPAA

SEQ ID NO: 196507 - protein, 331 aa, unidentified
MSGEKYIGLDVHQATISVAVRDSQGNVIMESILETKASTLLEFLAGLRGSLFVTFEEGTWAAWLYDLLKPHVTEVLVCNPRKIPLHKQGNKNDKIDARKLAERLRLHDLKPVYHGENGVRMLRELARSYLTIVKDLARVMSRVKALYRSWAIPCAGRDVYYTRHRSQWLDKIPEAGVRCRAEQLYAQLDMLQQLRQQARRELLAESRKHTITAKLRQIPSLGPIRSALAVALIQTPNRFRTKRQLWTYSGLGLETRDSGEYQFVQGQVRRRKKQVFVRGLNKDYNHDLKGLFKAAAVRASVQPGPFQDFYQRSLAKGRSLITSVGTYAKLQ

SEQ ID NO: 196508 - protein, 407 aa, unidentified
MVSVMIGVDPHKASHTAAAIDPAENDLGQIRVRAAAGQVQRLLAWAGAWPERTWAVENAGGLGYLLSQQLLAAGERVLDVPPKLAARVRLLATGDINKNDPNDARSVAVAALRSPAVKPVAAEDHQAVMKVWAKRHRDLGRARTQVVCRLHAVLCDLVPGGGISKELSVGKAEKVLAEIEPEGAVASARYQLAEAFIDDLRRLDEQIRDTKKRITAAVTASNTTVTEIFGAGPVIAAMVKGDVGDVRRFATRDRFASYNGTAPIEVSSGPKKIYRLSRRGNRRLNHAIHMIAVTQLRFPYTEGRAYFERKLAEGKTGKEALRSLKRRISDQLYARLLEDARREDAARQCGPGGHTGNVSASSAAGSHPATPTLRKSHSRTATKPTTSRRTRRPADAPASQKVSRRAS

SEQ ID NO: 196509 - protein, 346 aa, unidentified
MDIYIGLDVSLASTAICVLGEKGKIATEARVASTPEAVIAFVRALPPGNAVIGLEAGPLSQWLHKGMSEAGFESVLMETRQVKAALSAMPIKTDRRDAEGIARLLQMGWFRPVHCKSVSSQEMRALLSSRRSVLDALMNMELSLRGVLRNFGLKLGTVSKNRYEARVRELIAGNEMLEAAAEPILRARAALRGELAGLEKLVRSLARQDPVCRLLMTMPGVGHVIALTFVSAIDDPERFHRSKDVGPWVGLTPGRNQSGEKDIVGRITKAGDARLRTALYQAATVMLHRAGPNWLKAWALRLAKQRGNKRATVALARRIGVVLHRMWRDGAEFRYTREEAMAVRAA

SEQ ID NO: 196510 - protein, 339 aa, unidentified
MLYVGIDVAKNKHDVTALNVPGKTVLKPLTFSNNKAGFELLDLSLRQLNQDCLIALENTGHYAFNLLNFLHEQGYKVYTYTPLLIKEFAKSLSLRKTKTNKKDAHGIALKLLSDPNREQFQHDNRQVELKILARHIHRLKKKQSDWKVQYTRCLDIIFPELDKIVEKHSEYTYQLLTCYPNPQKRLEAGFDKLIEIKRLTASKIQDILSVAPRSIGTTSPAREFEIIKHYKRLIDKAETCVNDLMAEFNSVITTVTGIGNRLEAVILAEIRNIHAFDNPAQLQAFAGLDSSIYQSGQIDLAGRMIKRGSPHLRWALIQAAKACPRFSPAFKAYLKTKLE

SEQ ID NO: 196511 - protein, 347 aa, unidentified
MVTIGIDTHKATLAVSAIDGTGRETGARTFPNDRQGHVGLLRWAQAHGSERRFGIEGSGSFGAALARLLVAAGEAVVEVPAILTERERRHLRRAGKSDPGDALAIARVALREAGLGPIPMPGITEDLKLLVDARDQRVGERTRIANRLHAHLVVLAPGYKREIRNLTAARHLAAVADLLDRLGGVRAELARAELARLRELEAESVVLEGRIRSLVRLTGSSLPTITGVAAITAAKLMGETGDPRRIHSTPAFALMSGTAPIPASSGQTSRHRLNRGGNRQLNRALHTIALVQARTDPRAQAYMARRMAEGKSWLEALRCLKRHLADVVLRTMLADLERSAKPAAMGA

SEQ ID NO: 196512 - protein, 468 aa, unidentified
MGHKRSRRRQPGGKKFKHPSLLKRINRNAAGIDCGSEAHYVAVPPERDLEPVRSFKTFTGDLHRLADWLEACKIKTVAMESTGVYWIPIFEILEERGFEVMLVNARHIKNVPGRKTDVLDCQWIQELHSVGLLRGSFRPAAEIASLRAYLRHREKLVQSAASHIQRMQKALVQMNLQLHNVISDITGVTGMRILRDIVAGVTDPMALAAHRDPRCRASQEEIAASLTGNYRAEHLFVLRQHLELFDTFQRQIQLCDAEIESLLHQLAARQRKPETPVPSPRCKLRFYDNEPRFKIRDPLYRLAGADLTQIDSIGPFTALKLIAEIGTDMSRWPTYKHFTSWLTLAPKNKITGGRLISSKTQPSANRAATVLRMCAMVVGRTSTALGAYYRRIAYRIGKPKAITATARKLAILVYRTLKGDLDYSDPGVQAYEERYKERTIRNLRKRATQLGFGLISVETGEVLEGSVS

SEQ ID NO: 196513 - protein, 340 aa, unidentified
MTPIRIGLDIAKNVFQAHGVDDKGTVVIRKRLRRPDMLRFFASLPPCLIGIEACSASHHWARELIRLGHDVRLMPARYVKPYVQRGKSDALDAEAICEAVSRPTMRFATIKTTEQQSVLTLHRSREILVKQETMLANLIRGCLGEFGIVAPLGIRRVAELIAVIKDDADPRILPEARIAMRAVADQLCDLQKRIKEIEQAIRAWHRSNETSRRLATIPGVGSITASAIVATVANATEFKSARHFAAFLGLTPKECSTGGRQRLGRISKQGDVYIRRLLVLGGTSLVRYARAAGGSVWAKQLLARRPTRIVTVALANKAARVIWALLTRGGVYRAPQPQAA

SEQ ID NO: 196514 - protein, 425 aa, unidentified
MNDVVMIAVDPHKASSTAAVLDPVTKTLIESARFANTMDGYAQLTAFAARWAQRRWAVEGCQGAGRSLAQRLVADGEMVLDVPAKLAARVRVYSRGHGRKTDKDDAVSVGLAALDGTGITLVTCDGALVSLRLLCDRREELTAQRTQAVCRLHRLLTELTPGGMRRELTANKAQALLALIRPADDVGRVRVHIARDHLADIRALDARIKYIGTQIAALVTASGTGLTGLFGIGPVIAGRILAEVGDVARFATKDAFASYNGTAPIDVSSGDQVRHRLSRAGNRRINHALHMMAVTQIRYPATPGRLYYERKRTEGKTPKEALRCLKRQLSDLVYYQLLADRRGTIGACGSPTTPPPTRSTSTSPATRSHRAAPPSRPPRRPAPAGSSRWTGKTAASSASRSSTLAPASTKASSKRPKSTAKTAAS

SEQ ID NO: 196515 - protein, 356 aa, unidentified
MKILAILLRRHCVNDLGKFNCVSCLLDTESNATEFDTFKTYRREFKEILHRTHPHLVVMETCSITGWVHDLCVEQDYPVLVADPSQEAWRWKNVKRKTDKDDALKLAKLAALEQINPVYVPAPETRQYRHLVKYRKVVVGRINRVQNAIRALFDQQGVKMPSGHRAWTVQGIDELSQHRRVLAECDEHNLWRGELDLELTMLDQLWEHLATIERKLEILAKQEARIQLLQTIPGVGRKTAEVIVTCLDDPKRFENSRQVSAYAGLIPQQHQSGQTNRLGKITKRGPRLLRTALVEVAWIMLRYNEWAAATYARISGGQKTRKKTAIVAVARKLLVRCWAMLLHNQPWNPELGQPTT

SEQ ID NO: 196516 - protein, 341 aa, unidentified
MTIGIDLGDVWSHYCTINEEGEVIDRGRFRTNPSGVDKRFRDLEPIRIAMEAGTHSIWISEQLRDLGHEVIVANVRELRAISHSDRKSDSVDAEKLARYARLDPEILRPIAHRTVAQQETLTLIRGRDVLVRLRTSAVNSVRGLAKPCGYRLPASSTLCFAKRCLAMMPSGLAVALSPLLHQIGDMTVKIKEYDRAIKKLTETKFPETQALIKVYGVGHLTALTYVLTLGKKERFRRSRDVGCYLGLRPKRSQSGDSDPQLGITKAGNGYLRQLLVECANHVIGPHGKDSTLRRWGLSLCARGGSQARRRAVVAVARKLAVLLHRIWITQEAYVPFYAAAA

SEQ ID NO: 196517 - protein, 428 aa, unidentified
MDELDRNRLEEFRQLRQEVRHSEEYLIVGIDIAKDQHHAFFGTATGKTLLRRLVFSNDHEGFRKLLDHAEALRVRHGLKKVVYGMEPTANYHKPLGEYLIILGRTVVLVSGVTVKQNRESLDGRWDKHDVKDSANVADLISQGKCLYYDHPAARLRGLRNLLSLKRRLKKQEHGYKVRIRNNLIAQYFPEMDRDYDRLGAEGLSIMRWCFPPSQMTVLDVDPFIERVTSRRIRIEKRRRLEGIWEKAGESIGCDGVPGVEHEARVMVEGLKQIREMIKETEDKIEELCKEFPEYKYLLTIPGYGPDVSAKVLGAIGDPDRFQNGKQVLKLAGLDLSADRSGKNSAKAIPQISKRGKADLRYALYQAALIASTRNQDFMRYYTRKLQGREREKGIHTKMWVKLSAKMLLIAWTLMKRKEVFDPAYLNVK

SEQ ID NO: 196518 - protein, 456 aa, unidentified
MDILFKYCAGLDIHKKIIVACVLLSGPEGVQRQIKKFATTMVGLEALDAWLTGLGVTHVAMESTGVYWKPVFNVLAAHFDVWIVNARDMKSVPGRKTDVCDAEWICKLMSLGLLKRSFIPEVEQRDLRDLTRYRRRLVEERTSASNRLEKILEDSNIKLSAVVSEIQGVSARAMLEALIHGETDTAALADLAKGRLRSKIPELEVALVGRIRDHHRFLWRELLYHLDELNVRIAAINERIAEYTAPYEALIQRLCTIPGIKRWTAEVILAEVGPNVEAFPSAHHLASWACLCPGNHISANKRRSGTTRRGQNWLRPALVEAAWATAHTQTYFGSQFHRLRARRGDQRAAVAVAHSILIVVYHLLAEPEAVYTELGADYFTKRNPEQEQRRAIRKLETLGFAVTLTPAQTAAPTPAPVAAAVPSEVPGQATAPAPGASGRPRPKRAPQRKAQAAAPS

SEQ ID NO: 196519 - protein, 404 aa, unidentified
MGQVYVGIDWADDHHDIYVTDDAAIELDSFSISHSSEGMEKLMKRVDRCCTGREAVLVAIESHQGLLIYALLEAGYLVYPINPKSMDRYRDRYRMSSSKSDTKDAMVLANILSTDLHLYKPLPRETVADARLRQLTRPHKSLGQQKTKLLNQLTTQLKSYYPVALRLFSRLDHKITMAFLERFPTPEKATDASLEDLRRFFREQNYSHQWKVNSIYESLQQPSLRAPIELEEIHQTIVLSLIPVLRSLVVEIEKLASKISEEFEHNQVHKVFSSLPTGELTAARINGELGSDGARYPSREYLQTAAGTAPVTRRSGKTVVVFFRWQCNKHLRAALQDLARDSVKRCPWAREYFAGQMRLGHKPSRAYRALANRWAGIIWKMLQTGQYFDQSRLDKHLTKAVATN

SEQ ID NO: 196520 - protein, 462 aa, unidentified
MAERNDHETGESNRRQLQGLPVIRRNVAGVDLGSERHWVCAPTQDGSGREIASFGATTLELLRLAEWLKARQVESVAMESTGVYWIAPHEVLEAQGLQVLLVDTRQLARVPGWDKKTDPSDCEWIQRLHSCGLLRGSFRPEEAVCMLRTLVRDKANLVAESADWLRRMQKSLDQMNVRVHRAVSDIDGVTGMAILRAIAAGERDAQKLAQLRDRRCSKTEQQIAEQLTGHWREDHLFSLQQALKMYDAVQERIAAYEQEILRQLGEMEGPGQRGQSAPPLNNANKANAIKKRGQEAKRQGLYRMSGVDITQIDALGVETVEVVLSEYGPDLSRFPTEKEFVAHVTLAPRVPSSGGKPLKKKKRNSASTRVAAALRMAALSLRHSQTALGAYYRKLAQRLGGDVAVFATARKLATLIYRLLRWGQPYMDEGVEAYEKRYRQQRVKSLTAKAKDLGYELTALNT

SEQ ID NO: 196521 - protein, 340 aa, unidentified
MTITTVGIDLAKNVFAVHCVDQHGKTVLVKPKVPRAALPELIASLPPCVIGMEACSGAHYWARLFRQYGHEPRLMAAKFVSPYRMAGKSGKNDAADAQAICEAVRRPHMRFVPVKDESQQAMQCLHRTRQGFIEEKTATYNRLRGLISEFGVIAPQSTDALRHMVSEQKKSLPLQVQQCVDDLLKHIDRIENNVTEYDRILSRMAKADHRSQRLMELKGIGPTTACALVASIGNAHDFKNGRQLAAWLGLTPSQYSSGGKSKLGRITKAGDSYLRTLLVQGARSVLIGAEKKTDSFSRWVCSLVERRGYWRAVVAIAAKNARLCWASLHYGDDFRLYSVS

SEQ ID NO: 196522 - protein, 287 aa, unidentified
MKYKFFVGIDVSKDKLDLCVIDQLLPEQSHHHVVANNEKAFQKLIKQLTSEFGKPDEHWLFCLEHTGVYAMPVCRFLSSLELNYALVPALQIQKSIGIRRGKSDKADSRDIAMYAMLFSSQIKLYKLQEKVLQKLSIWLAQRERLIKCKVLLKKASDESTEYLERDVTVGIKSQSQRLIKKMDAEIKKVEDKMLQLVASDKDVKRAYDLISSVPGVGDQTTFHLLVATRCFTSFKNARQLASYCGVAPFEYSSGKSIRGKAKVSHLANKKIKSLLSMCALNAKVSDP

SEQ ID NO: 196523 - protein, 345 aa, unidentified
MKKNLFFIGLDISEANFVASIYKTPGQPIVTKEAIPNNPEGFEMLLLWLSDYHIDKKNCRICMEATGVYSQAIAYYLLFQGFPVSVEPPLKVKRAFDPVGHKTDPVDSKQIAEYAYRFQDELTSWKPRDEILEKIRQLLSVREQFTKQKVALDNSIQAYSKQRVQVALIRKAQKETLDQLKKQIARIDKELEKLIKQDPEIFQRTNNLDSIPGCGMLLAAHLLVITENFTKIQNSKRLAAFIGIVPYQHQSGSSVSKRAKIRYFGPGPSRKLLRLAAQSVATHNVTFRSYYLRKLDQGKAKPLVLNNIANKLLKIACTIIRNNTRYIKDYRSIHPMYLKNAVKSA

SEQ ID NO: 196524 - protein, 367 aa, unidentified
MKKHSSKHDPLSSTDVELCTTLCVDLAKQVFQLAGEDATGRVIYEDRIKSRQNFHDFLIKLPVTVTVLMECGPGAQAWARLLQAKGNPVRILPAQRVAEHRSGAKNDRNDTHAILRAGRDTSIASIPIKSITALAIQALHRVRRGNIKRHTALGNQMRGLLLEHGVSMPQGDAAINTHVPRALEDASLPLPDLLRELLDELLTDWLSLGERIATLSRRLEATAQEDEVAQRLITIRGVGPIIATAIVAKQTEPSRFASGRMYSAFFGIVPDQHSSGNKIRLGRMSKRGDGYIRSLMIQGAHAVLSQLRPDSDQPDDHRLLRWLSRLGRKEAAIRLANRNLRIIWALLQSDQVYQRKPNSNSEAAMSL

SEQ ID NO: 196525 - protein, 338 aa, unidentified
MKTHIGVDLHQRFCYLTAVNASGKLCKQGQVVNEGAALRAWLRPLPGPRQVVVEASGFWPAFARAVAPESERLVMVHPQRVKAIAAAKLKNDRVDSETLAHLSRCDLLPTAWMADEATQQLRLLVRLRITLGRQRARAKNQLQAVLHQEGFKKPVTDVFGKRGRAWLGGLELSAAGRVAVDTWLREVDHLDVELAAQTRQLEGLARGDARARFLQSVPGIGPYAAMVILAEVGDAGRFQNKRALASYAGLTPMVRESAGKRKRGGITHQGSNTLRWIMLQVAQVAARCSPGARGFYAGLRQRKPAQVARIALARKLLTVVWALLHHGVCYDEELFIRG

SEQ ID NO: 196526 - protein, 351 aa, unidentified
MIVIGIDPHKRTHTAAAVEQVTGELVDELTRPAREQGHGELVAWACSLADERLWALEDCRHVSGQLERFLLARGERVVRVPPKLMAGMRRSARSRGKSDAIDALAVARAALREPSLPAAQLEGRSREIRLLFDHRDDLVGERTRIQQRLRWHLHELCPELELPAGALDRQVWLQRVARRLARLEQTTQVRIGRELVRRISELSRRANELERELEALVRSEAPSLLELIGCGTLTAAKLVGETAGASRFASDARLAMHAGVAPLDASSGDQRRHRLNRSGNRQLNCALHRLAVNQGRWHPGAAAYLERKQAEGKSRREALRCLKRHLARVVYKLLVDVNQPTAAPPAAFALT

SEQ ID NO: 196527 - protein, 342 aa, unidentified
MSTFIVGIDVSRLTLDVAIARDKQEAVLLGQYTNDASGFERLVPAVQRAAGGTTIQLVMEPTGGYEQPLAHLALDLGWRVSLPNPRHVRDWGKSQGRRAKTDRQDALLLARYGAHHDLPLWQPLPAPVAELEALLARRTDLEGMLRQDRNRQHALTSQDAFTGPVAASVAATIAWLEQAIAAIDAAINEHLKCHPDLREQAQRLRQVPGIGPRNVLPILVLLYRWGSLTTFLGTARGLTAFVGLDPQPYRSGTTVYRPSAISRQGAPAVRSLLYMSALGGARGHNVLREFYQRLVAAGKPKKLALIAAARKILVWAWAVFRDHADFDPTRANGAEPARLLVA

SEQ ID NO: 196528 - protein, 347 aa, unidentified
MIIIGCDFHTRFQQIAMLDTGTGEVVEKRLDHESGEAKRFYEGLKEAALVGIESTGYTRWFAEVLSELGHELVVGEAGKIRAQDPRQQKHDRRDAELILKLLVRGDFPKIWLPPSEERDVRVLLEHRHQLVQMRTRAQNGLQAIALSHGVRRRQRLWSKAGQEELKKIPLREGMGRRRENLTQLVQQLNRWIKELDQRIGEEVARRPEAQRLMTHPGVGPLTALGTVLVLGPVERFPDDRHLTSYLGLIPREDSSGGRQRFGHLTKQGNRLLRWLLVEAAGIASRYDPGLRRMYRRLAFRKGAAVAKVAVARKLAIRLYIMLRDGIDYAEFCRRGSHAGMLGEVALV

SEQ ID NO: 196529 - protein, 351 aa, unidentified
MKTQIKTTSKLWIGIDFHKKTWRVHFRSDTFSDNPFSMEPDPDALFKKVVRDYKGYEVEVVYECGCFGYWAHRKFESYGWNSVVVNPCDIPRVSKQKFTKTDSIDARNLSKLLKAGLLNSVTIPDIKREQLRSLFRRRVHFVMYTRSIKSRLKAQLLYYGIKIPDDLDNAAWTKAFKGWVKEVKWEHETGKLMMLSNLKQVEYQHYETNEISTHLRKYCRGNYKKEYDLLQSVPGVGPLTAICFISEVGNINRFKNFKQLSCLVGMMPTTYQSSDTNRTQGLTPRALRIMRSYLVEAAWQAVRIDPVLREYYKKHTGKKPNDIIVKVARKLLSRMYGVLRTETEYEIGLVK

SEQ ID NO: 196530 - protein, 347 aa, unidentified
MNFYNNIHPYYCGIDLHARLLYVCIVDQEGNTLVHKEISADPDKLHALLKPYIGDIVVGVECMHCWYWVSDYCDKIGVDFILGHALYMKAIHGGKAKNDRIDSFKIANLIRGGNFPLAYVYPKKMRATRDLLRRRMKIVQHGADLKAHVVNTTSQYNLPPNKVNLKNVCAREQLKSSFPETSVQRNINLDMVILDCYAEQLSKVEWYIQAQAKQHKPVHFYLLKSISGIGPILALTIIYEIGNIDRFDTVQNFASYARLVKCKAESAGKSYGTQGNKIGNAHLKWAFSEAAVLYLRGNDNAKKYLAKLQKRMSKAKALSALAHKLGRCVYFMLKHETVFDESKFLKG

SEQ ID NO: 196531 - protein, 502 aa, unidentified
MNNSAAGENIAGGRPASARSRSLEGNRKTVNCRLPGEPEALAATSNRTTPLEGCNISSVDSRAKGRKKQKTKRAAMNSPEQGPGSWLEKRGFGGLDWASQKHSVVVVDPRGKVIEDFEIEHSALGWKKFREIMQPYGAIPFAIETSQGAAVEQLLEAGMEVYPLNPKSAQSYRERKAPSGVKNDRLDAWSFADACRIDGHGWKALRPEDALVKELRLLCRDEVVLIEQRTSFINQLRHALAEYYPTALEAFKDWNSVGAWMFVQRFPTPQLLKQAGKRQWEKFLHSRHLWRTESGPHRMELFAHATELSGSVAMANAKSHLALSLVSMLFALEKQLGIYRQRIEELFQRHPDHDLFGSLPGAGPKIAPRLLSEIGDDRDRFGEEPQALQCLAGTAPVTRQTGKPRCKPPRWPVHQRWACDKHLRHAMHLFAEQTLTRCFWAEIYYRHHRQKGRSHADSLRRLAQRWLKIIFRMWMDRKPYDAMLHNQNQLKHGSWVLQINPT

SEQ ID NO: 196532 - protein, 411 aa, unidentified
MAQVIFAGIDVSASKLDIVCIDEHGNQLSPARSFPNNAEGANELINTLVSLATKFNVSQVNIGLEATSIFSVPLRDFLMDAPQLKPFSVQVYEINPSLVAGFKKAFGSRLPKTDAIDAYIIAERLRFGHLTPYSHEASVTAPLRQLTRLRLHLVDLLVEEKNRALNLLFLRFSNYKQDNPFSNAFGKASVEVLKEFTPDEIAQISVEELAEFIQSHGKNRFANSEEIASALKQAARRAYRLNSKMQQACEIALSLTLQNIEHLKRQIKSLDKVISRELKAIPQTLTTVKGLGEVSAAGIIAEIGDIKRFKNEASLAQYAGLTWTRYQSGDFDAEERRLTKSGNKYLRYYLVMAANSLRVHNEEYKAYYQTKYQEVQKHQHKRALVLTARKLVRLVFALLSKGQIYKGTVRS

SEQ ID NO: 196533 - protein, 338 aa, unidentified
MELYAACDLHSNNTVLAVIDATGAQRYRHRLPNDMSVIDAALAPFREELTGIAVESTYNAYWLIDGLQAKGYPAKMVNTLAVPQYNGLKHGDDDSDALHLAELMRLGLLPLAYIYPREQRPLRDLLRRRMLLVQQSVRLLQSVQGYWARTTGQRLSADAFRKLNIEQLKTTFVDPTELFAVLNLVQAWRTLQDRSEEMEAWLTDDMRRDARLIGLRTIPGIGIVLGLTIVLESGDIHRFDEVGQYASYCRMVPALRFSNGKKKGTGNRKCGNRYLAWAWMEAANYAIRFDPDIKRWYQRHKAKKLRLVALKAVAHKLARAGYHLLRDGGTFDVHRAFA

SEQ ID NO: 196534 - protein, 339 aa, unidentified
MWYSGIDQHKRDCVITTYGPDGPRVKQARVANTPLALAQYFADFPAPHKAVVESTGGWYWLADVLAPLGVELVLAHATRLKAISAAKVKTDQVDSDVLALLLRADLIPIAHMIRPEQRGPRDLMRARLRLVEKCVNAQNSIDRLREKFNVAAVTQLAPLYQLQAACHQAQIHLLEAQITTLERALHPHLIPNPDVQRLLWIPGVGKVNAFTLYTEIDGITRFPSVRQFFSYSRLVPGADNSGGRTRHRSGSKAGNRYLKLAFSHAGIRAVQYYPEIRAFFKAKARRKPMRIARTLVALELARIVYQVLAKQEAFNGQFKHRPLSREKHAQWPRRASPPV

SEQ ID NO: 196535 - protein, 341 aa, unidentified
MKPAMSVLGIDIAKRVFHAVGMDERGKIVLRKRLSRHDLMPFMTKLPPVLIGMEACGGAHYWARRFREHGHDVKLLAPQFVKPFVKSNKNDLRDAEAIAEAVTRPTMRFVPIKEIDQQDIQALHRVRERLISERTALINEVHGLMHEYGIVLPKGVAKFRQAVVEKLERDKDKLTALGQELFWKLLQEFVDLEKRIASYQEKLEGLATTHPECQRLMTIPGIGAITATALVAAVGDVGVFKNGRQFAAWLGLVPKQHSTGGQTRLLGISKRGDSYVRKLLIHGARATLRWVKRKTDGRSQWIQGLLERRGWNRTAVAVANKNARIVWALLSRGGVYGTNVS

SEQ ID NO: 196536 - protein, 395 aa, unidentified
MYNLLVGADVSKDFFSASGLSTEGKECFSGTYEMNSHGFSEFLKTLSSHGERLDQMIVAMESTGCYHINLFSFLSSQGIRTVVVNPLLISNFAKLSLRKTKTDKKDALTIARFLLDHHEEISQFSLSQDLQDLRDLSRERESLSHLISATKVEIKRVLRTTFPELESIGNLYTGAMLRFLQQYPSARLVRGAKRVAIAKALRGPYVGDKLTFTAEDIIKAAQSSVAVVSPAKEIIVQGKIATLLHLKERLEELTKLLTDLCKATRVEDLKILQSIKGVGPNTAVPFLAEVGEVKNFTSSKKLIAFSGLDPSIHQSGKFLGASKLSKRGNRHLRRAIYLMTTSVVSQNVFFKAYFLRRKKEGLPPQKALFAVAHKLIRVIFAMLSQRTYFNVKETI

SEQ ID NO: 196537 - protein, 473 aa, unidentified
MSKSKGPASAGRAGLTIAESKRGSQKKVVEQAVFEPNACGIDVGAREIYVAVPPDRDEHPVRKCGTFTSDLDQMAEWLVSCGITTVAMESTGVYWIPVYEAVERHGLEACLVDPRNMKNVPGKRTDFHECQWIQHLHALGLLHAAFRPDSDVRAVRALMRHRNDLVQMASQHVQHMQKALTQMNVQFQHVISDLTGLTGLAILDAILAGERDPAVLAKLRDPRIKADQETIRKSLEGNWRAEHLLVLKQRLSLYRNYRDQINACDTEIEKLVSAFAPRVDPAEKPLPKDRKKRQRQRKKKTGSPDFDMRTETYKLFGVDLTQIPGLMALVLLLFSEVGRDMSRWPTAAHFVSWLGLCPDNDISGGKVLWRGARRTNNRAGTLFRMAASSLYREQAPIGDYLRRMKAKLGPAAGTTATAHKIAVIFYTMVKNQVEYDASLWAKRDVLREKRLEARLHKQAAQRGYKLVPLEAAA

SEQ ID NO: 196538 - protein, 322 aa, unidentified
MQYIGIDVSKATFVVAYSSDKGGEIRTFNNTTAGIKQFIGTLPKDGSIHCVMEATGNYSALLLYMLNVAGITVSMENPLKVKNFARAMLSTVKTDKIDARLIALYGEKMNPQPFKVQGEAILRLRQKRTVIRQLTKQITAMSNLRGSLACLPVPDKGATHTVDETIKFLEKRRDRLQSELTDLVEVEFSRQLALLTTIKGIGITLATALILTTGGFTYFQNAKQVSRYLGICPTYEQSGTSVNIRGHINRNGDAYTRGLLYIAAWPASRFNAQCKATYTRLRQNGKPGKLAMIAVANKLVRQAFAVVAHDKEYIDGFVSNRP

SEQ ID NO: 196539 - protein, 352 aa, unidentified
MQHFIGCDVHTRNQMVAWIDEQTGEIKKRQLEHEGKEVREFYAQFPRGTVVGIEATFPAHWFERLMGELGHELWVGDAARIRASEVRYQKTDSRDAEHILDLLRTDRFPRIWVPSLGERDLRQLLVHRMKQVRARTQVKNQLHALAISQGVCRKGKLWSVKGRKELESLALLPWAARRRKELLESLDRLDEQVRELDRAVEEAGRAREEVALLRTHPGVGMVVSLAFVLTVGPVERFRNSRKLVSYWGLNPRENSSGGRQRLGSISKQGNTMMRWLLVEAAQTAARLDPQLRRTYQRLKKQKTSGVAKVAVARRLAVRLFWMLRTRNNYAQLVHMSGSPSSAVVPPKAEPTV

SEQ ID NO: 196540 - protein, 312 aa, unidentified
MAKDTIGIDVSKDRLDAFWHSHDVARSLPNTAEGFAQLCAWLGEDDEVLVVFEATGAYHRGLERYLSLAGRPFIKVNPKQARRFAQAIGRLAKTDSVDAKMLARMGVVLDLTPQGAEGEDVHDLRELLTARRALVKDQITAKTRLATATNPLVREQLCRRIDDIDTDIKALDEVIAQIAKQRGTLDERIRRLMTIPGIGRLTATTMLIDMPELGLLDSKKIAALAGLAPMTQQSGKWQGKERIIGGRASLRRAIYMPALVAIRFNHDLRAKYQQLVNAGKAKKVAITAIMRRIVVLANTLLREGRDWQPKRP

SEQ ID NO: 196541 - protein, 412 aa, unidentified
MKDLLEISCGLDVHKEKIVACILTGPLGKPTRSEIREFTTLISDMIALRDWIVSQNCHHVAMESTGIYWMPIYEILEDAFSGDITLLVVNARHMKNVPGKKTDMRDSEWISTLLRAGLLNGSFIPEKRIREFRDLNRYRKSVIHDITSQKNRIEKFLQSSGFRLSSFISDIFGASGRNIILHLMEHGQIDKAALDSCLKTKTRNRIDEILMSVNGTLSEHQKTFLKILMTHYDSLKEHLTEVETSLEEDMAPFTLQVEQLNSIYGISTTASCAIIAEIGIDMEPFKTAEHICSWAGLCPGNNESAGKRKSASVTKGNPYIKSMLCEIAWVIAGKRNTYLSAWYWRIKQKKGAKKAIVALARKLLVIIYTMLKQGTLFDESCFETRRKNCEQKQLSRYIRELEKHGYHVEAQS

SEQ ID NO: 196542 - protein, 325 aa, unidentified
MTREILYCGIDMSAETFDICLQNTDGNFTHHQLSNDSTGFKQLLQVCKLNYHFIMETTGNFQLPLCFFLHENNCSYSVVNALQIKRYIQMNLERSKSDKKDAKHICMYGIERNPEQYQMPSQQYFECKQLNNSIESLTHEIVSFNNKIYAAEKLKIDSNTVIKSYKNIIKTLKAELKKLEIELDKKLKLWQPDLTKKVQSVKGIGKRATAILIVFTQAFEHTQTYQQLISYAGLSPKEYSSGKSIRGKVRISKIGGKQLRHTLYMCALNAKKTNAACRELFDRLVAKGKNKKLAIIAVCNKLLKQVFAVVKSGKLYQDNYSKNIA

SEQ ID NO: 196543 - protein, 410 aa, unidentified
MQTLVERGCGLDVHQATVVACLLVVLRNGQVQKQVRTFGTTTRELLSLREWLVSEGCTHVAMESTGVYWKPIYAILEGALEIVVANAQHVKKVPGRKTDVKDAEWIADLLCHGLLRSSFVPPKPIRELRDLTRYRRKLVESQAAERNRLLKLLESANIKLASVATNILGVSGRLMLRALIEGKTTTREMAELAKGKLRNKISELEPALEGKLEEHHRFLLKLQLERLKAAEKDLAVLEQRIQKKLEPYVAQLALLQEIPGVDWTPAAVIIAELGVDMKVFGNVSQLASWAGVCPGNNESAGKRKGSRVPKGNVYLKTALVEAANAAARAKGTYLRDKFFRLKARRGYKRAAVAVAHKILVAIYHMFSRQVCYNELGDLYLDELNKHHLTRNLVRRLERLGYTVTLEQKAA

SEQ ID NO: 196544 - protein, 346 aa, unidentified
MILIGCDFHPSWQQVCWLDQTTGETEEKKLIHAPGEAERFYRQFPAPALVGMESTGNCQWFVEMVEALGHEVWIGDAAKIRACDSRQQKHDRRDAQLLLRLLDEGRFPRIWTPSSEQKDLRQLLIHRYKMVRLRAQAKNGLQHLAMNQGLQKKRRLWSKKGQKLLSELPLRPWASRRREDLIRVMKMLDQQIQLLDLAVIEAAEKDPHARLLMTQPGVGPITSLAFVLTMGDVSRFQRGKQVASYLGLIPREYSSGGHQRLGSISKQGNRFMRMLLVEAAQVAVRCDPQMKREYLHRCHEKPKGVAKVAAARKLAIRLYWMLRTQKQYPEIVSIESSSRVPLVSAS

SEQ ID NO: 196545 - protein, 366 aa, unidentified
MDRIYIGVDFHARQQTICYLKTETGELVTCELKHQDKQKVQAFYAQFHGPVIVGLEASGYSPWFERLLEELGCEVWLGHATEIRRRARWRQKNDRRDAELILDLMLHDEFPRLHRPAVQSREVLRMLRYRQKLIKIRTMSKNSLQAIALQAGLAKGSHLFTKEGQQQLGAAEMSPVLHWQREHWLQLMEPINHQLLETMVWFKAQSQGDACITRLRTHPGIGLLTSLCLVHTLQPVSRFRNTRKVAAYAGFDPIERSSAERKCFLGISKAGSRLLRYLLVEATQTAVRKDEDLKRFYQRLADRRGRPKAKVAAARKLLIRAYIMLRDEIDYAEFRHRAVAARLARRGQGPSNVPEVLIGQPASPEL

SEQ ID NO: 196546 - protein, 462 aa, unidentified
MTLRIIGIDLAVHAAHKAVILDQASQRFLSGLISFRANPAEMDCLLQQARAGATDEVQLIAVLEATGMSWFTVGTYLVRHGVRVYRVSGQLTADQRRVIQRHAKSDRIDARVLVSLYLACPERLRPLFLPSGPQLELQRACRELQRLTRQIASIKNRLLATDALAWLGLADVLPPYGPQARWVRTHWYDPWRVREAGYATLAQAWQDAAPQQPADTAWIEGLLRKAKEVVALYGQPQRLDYQCLQLGLQREQARLESAEEQAQTLRLGTIRPLYRQLHPQRHLETLRGVGQDSAAVYVAFIGDIHRFPSLADFRGWSGLIPYSRQSGTAQAQGLRITQAGPDLVKSTAFLDANVARLYDPQIAAIYQAQMLRGKHHLQALCACATHLLDRVYTVLRENRPYQLRDPRGQALDKDQARRLCTQVYRVPPEVRRRNNYRLRKARAEQRVEQRYQSRTLKERSKG

SEQ ID NO: 196547 - protein, 318 aa, unidentified
MNTNTLQNINIGVDTGKSQLDIYIRPLDLFFTVPNNDKGIKQALTTIKKHNPQRIVIEATGRLEMPFVLACVEAKLPIVRANPVHIKRFAGAIGRRAKNDRLDAELIAHYGEAIKPELTIIKAKNIRLMSDLVIRRNQLLSMQTMEKNRMQILPKTLHSTIKPMLTAMKNQITKLEEKLVKLIEDSPEYQSKNTILQSVPGIGNIAAASIISNVPELGYITNKQAASLIGVAPITRESGRYKGKRVIQGGRAQVRTVLYMAMMSAMQCNPVFKATYSRLVEAGKPKKVAIIACVRKMVVILNSMLRDGVMWDENIAKN

SEQ ID NO: 196548 - protein, 420 aa, unidentified
MKAFSVDNFSALIGLDWADQKHDICEQAVGSTDNSYSVISSQPEALHEWALSLHSRYPDKPVALACELKKGPLIYALSKYSHIVIFPVNPITVAKYRHAFTHSGAKDDPNDARIQKELLAKHMDKLQAIQPDCADIRALAQMVENRRKLVQERVKMTNRIMAQLKNYYPQPLDWFKEKDTFIFCDFLLKWSNLNRAKKAHKKTLMTFFQAHNARYADINEKRVTEIKEAIALTDDPGVIEPCQLMIEALVPQLKIQLQSIETMDRAIKEKYHQLDDRFIFDSLPGAGPQLAPRLLTAFGSNRERYSSAEDLQKYSGVAPVIEQSGKKKWTHWRYSCSTFLRQTFVEWAGLSIRYSFWAKAYYEQQIGKGKSHNVAVRSLAFKWIRIVFRCWKDRKPYDESTYLNALKKRGSPLLASMVST

SEQ ID NO: 196549 - protein, 352 aa, unidentified
MSTVPVFVGLDYSLTGVQVCVLDREGKMLGNQKVPDQVDAIVHSASRFGPVHSAAIEACCGASDLAEEIVQRHGWLIHLGHPGYVSRIKQNPDKTDFSDAHLLADLERVGYLPRVWLAPKSLRELRTLVRDRQALVRQCQSIRLRITALLRDHRQVSPCHRWTQKWYAWLKHGVELGEHSRWVLDRQLDRLAWMTREIRQGEKHLHEVMQDDRLVQFLLKIKGVGYVTAWTLRTEIGRFDRFRTGRQLARFCGLSPCNRSSGSKMADAGLIRCANPELRRVLIEAAWSLIRHQPRWRKLAASLRERGKKGSVTCAAVANRFVRWLWHQVMNNIENVPPVDRPAVAGVPVHVG

SEQ ID NO: 196550 - protein, 348 aa, unidentified
MNDYLQSVGIDIAKEKFDVCFKERKNGRSVIKGTRTFKNDSKGFTDFNLWCSKRRKETSHLVFVMEATGVYYEELAYFLHSKNEAVYVELPQKVKYFAKSLNIKTKTDKVDAKLIADIGLERSSSLKSWNPPSEQFKAIRDLCREISQLKKNKSAASSRLHAWNTAHNTIPEVIKAAEEHLEILDELIEKMEELLLERVKQDKQLYDKIERIAQIKGLGIISVTKVIAETNGFLLFNSIRQLVSYAGLDVIQDESGQYKGKSRLSKKGNAHLRAALYMPAVTAATHNENLNKFYSRLNEKFNYKKQSLVAVMRKLLVLIYTLWKSGEDYNQNYQWTGIKTGGLPPATR

SEQ ID NO: 196551 - protein, 371 aa, unidentified
MERRIKFIGLDVHKETIAVAVAEDGADREVRFHGTIASTAEAVRRLVARLAGPGIELRFCYEAGPFGLGLYRQLRKLGAECLVIAPSTMPRRPGDRVKTDRRDAVTMARLLRAGELAGIWIPDEEHEAIRDLVRARRTAKDDLKRAKLGLLSFMLRHERRFGGRSYWTKAHWRWLGEQSFESPHQQLVVEELKQRVREGEARCKRLETALAEAVGSWRLAPLVQALQALRGLGLVASTVLVAEIGDLRRFANPKQLMAWLGLVPGEHSSGGRTRRGGITRTGNAQARTILIEAGWCYRHKAREEHRYQGRCEGLPQAVRAVGWKAQVRLCQRFRRMSAAGKPLPKVTTAIARELAGFIWDIARRVEPAPAG

SEQ ID NO: 196552 - protein, 366 aa, unidentified
MEKGITVVGLDAHKVAINVCALLPGGAAPVVWECANEKAAVRRMVRKVQGQARGEVRMCYEAGPCGYAVQRWIRDAGAGCVVVAPSLIPRKPGDRIKTDRRDARKLAELYRAGLLTEVHPPTEQDEAVRDLCRAREDAHEDVVRARHRVSKFVLRRGWSWQGGKRAWSQGHRLWLKSLRFEQREDQVVLDDYLLALEQVEARLRALDDQIEQISQDERFAPVVRRLRAFRGIDTLTAMTLIAELHDFMRFDSARGLMAFLGLVPSEHSSGGKEQRGQITKAGNGHVRRLLIEAAWHYRHRPSVASLKKRREGVPAEVVALADKAMTRLHRRFNRFLERGKARPKVVVAIARELTGFVWAAMRSRTA

SEQ ID NO: 196553 - protein, 340 aa, unidentified
MKNKKYFIGLDVHKKKTTYVVLDKIGNIILEGETATIYQDLFERLQSYLKSSMIGLEACTSYYILYQNFLKNNYNIKVANTIQIRQLIAKNDKLDAKRLAEMLRLGTFPTSYIPGEKIQRMRSLVQVRHSLMEEKVRCNTRIQAFLDRNGIVMPPHKAFSKKWRNALMQYMGSGEVSMELRHEYDHFVFLEKKTEQLDQELQGYARKNWTKEYHNLQSITGIGPVIACYAIAHILPIERFSSNRKLRRYAGVVPTCKQSGNKVSRGRIPKTSSRKLLRWALIQAANTIGKTDTKLGRYYRMKKRQKKNAGIAKVAVASSLIDIIYKVMTTNQPYNPNTKQ

SEQ ID NO: 196554 - protein, 353 aa, unidentified
MSDDKYIAFDVHQVTTVISVLNSAGREVKTAILPTQAQALLGFLEGLRGTLHLTLEEGTYAAWLYDLLQGRVAKLIVCDPRHNALLKEGNKTDAGDARKLAELLRAGMLRGVYHGSRGLRALQELAHAYESLRDDTTRVMNRIKAFYRGRGIDCAGRGVYRPGQRARWLERLPAGASRLRAELLHEELDKVGSLRRKARRALLAESRKHTVAARLRQIPGMGPLRVALLMAHVQTPHRFRSRRNFWTYVGLGVVYRGSSEYRLVGGRAVRRAQALQPRGLNPNHRPELKEIFKSAALTAIRRPGPFKNYYEPRAQQGVDPAILRVTVARKLAALTWSLWKKGGHYRGEGPQQA

SEQ ID NO: 196555 - protein, 314 aa, unidentified
MSPNNNPIILHVGVDVAKLSLQLDLAGRGHTLANDAKGHAKLLNLLRSQPAVQVVCEATGGYERPMVRVLQAAQIPVSIVEAGRVRHFAKAKGLRAKTDPIDAAVLSQYGRAFQPAPTRAPTAAQSRLSQLVQRRRQLLDTLLAETNRATHYTDKWLLRQSRQLLRLLEKQMAACELDITQLIAADENLKARAQRLDAIPGVGALTAATVLAEIPELGRMSDHATAALAGLAPYNRDSGNQTSPRHIAGGRKTIRCALYMATLSAVRFDTILKAFYLRLRQKGKKPKVALVACMRKLVILMNRLLKNPNFQLAT

SEQ ID NO: 196556 - protein, 342 aa, unidentified
MAILFVGIDLAKNVFAVHGVDEHGKAVLVRPSVARAKLNELMASLPACTIGMEACSGAHHWARMFKQHGHTVRLMAPKFVAPYRMGGARGKNDAADAAAICEAVQRPNMHFVPIKSEDEQARLCVHRVRQGFVEQRTATINRLRGLLSEFGIVLAQKAAIVRREAAAHLEDLPGWANAAVGDLLSEVHRLDERLAEYDRHVTQMAADDERSRKLMQLQGVGCTTASAIVATIGNAHDFKNGRQLAAWLGLVPGQYSSGGKTRLGSITKAGDGYLRTLLVLGAKSVLAAAKNKQDRLSRWAVSLQERRGYWRAVVAIAAKNARMAWAVLAKGEGFKPLEPQAL

SEQ ID NO: 196557 - protein, 347 aa, unidentified
MKFYNNNHPYYCGIDLHARSLYVCIIDHAGETCVHKEISADPDKLSKLLEPYLGQVVVGVECMHCWYWVADICEELGVDFILGHALYMKAIHGGKAKNDRIDSFKIAKLIKGGNFPVAYVYPKEMRATRDLLRRRMKIVRHGADLKAHVANTTSQYNLPPNKVNLKNVSAREHIRSAFPDPVVQRNMDLNMAILECYAKELSKLEWFLEQQARQHNPAHLHLLRSVSGIGRILALTIIYEIGNIDRFESVQTFASYSRLVKCKAESAGKSYGTQGNKIGNAHLKWAFSEAAVLYLRGNEKAQKYLQRLQRRMSKAKALSALAHKLGRCVYFMLKNETVFDESKFLTG

SEQ ID NO: 196558 - protein, 410 aa, unidentified
MIFVGDDWAEAHHDVYVCDDAGTRLVHCRLPEGIDGVSSLHELVAELVDEPGEVVVGIETDRGLWVQSLVEAGYQVYAINPKAASRYRDRHTLSGAKSDPGDAKMLAELVRTDRHNHRQVAGDSALAEGIKVLARAHQNLIWDRTRATNRLRCSLREYFPAALDTFAELADRDTLAVLSKAPTPAEATALSLGKIRSALRAGGRQRNIDTRAQQIAEGLRVEGLQAPKAVVAAFAATTRSQVAIIAAINTQIGVLETELADHFEQHPDADIYLSLPGIGVILGARALSEFGDDPNRYATTKSRKNYAGTSPITRASGNRSVALARHVRPRRLADTIDRWAFCSLRNSPGARAFYDQRRNAGDSHHKALRALGNRLVGILHGCLHHHTPYDEDTAWAHRHETRLSHIQDAA

SEQ ID NO: 196559 - protein, 459 aa, unidentified
MRKKAQNQTKRKQKVSINQVWPLINAQAAGVDLGSREHWVAVPPDRDPQPVRRFGTCTADLAALADWLKACQVTSVAMEATGVYWIPLFQLLERRGFAVLLVNARQIKNVAGRKSDVLDCQWIQRLHTYGLLGGSFRPADAYCVVRSYLRYRDELVGARSTQIQHMQKALQQMNVQLTQVLSNINGLSGQAIIAAILQGERNPLTLAGLVDKRVRASRSEVAKALVGDYRAEHLFQLKVAADLYQIYEAKIAACDAALTAELARLPDRVPATAQPLPAQTGHKHVAEDLRWELYRKLGVDLTAVEGFGVLVALTVLSEVGPDLSRFKTEKHFTSWLGLCPDNRISGGKVLSCHTRRVVNRLTDVLRLAATTLERSPTALGAYYRRMKAKLGGAAGVTATAHKLARILYALLTKGEAYVRQGLEDYERKHRERKLKHLQSTADALGFQLVEIQKVANPVS

SEQ ID NO: 196560 - protein, 429 aa, unidentified
MRTESTPGARGPVFCGVDTHADSHWLCVLDWRGRRVLSRRFPADAAGYEALAGAIAAAGEPACVAMEGTSSYGAGLTRHLASLGMPVREALSPAGTQRRRPGQGKCDEADAERAARAAMSGSRLGTPKSQDGWVDGVRCMLAARSGAVKARTSAINTARSLLTTAPEGLRSRFRGMGGPRLMEELPSVRAEGALGAALGALADLWAAARDAALDMERAIEASLEENCPALLAMYGCGPVSAAKLAVAAGDNPGRLRSEASFAAICGACPIPASSGKTVRHRLNRGGDRQANSALHEIARQRVMSDPETAEYAERARARGKSDREVMRCLKRYVAREAYRALMRPHEIRRPEDASELVAARRAAKVSQVRAASILGTSEKYISMLERGQRELKPIRRAYEAWVEAGLPLDWDRQAFEAERKMDSKRHLAK

SEQ ID NO: 196561 - protein, 451 aa, unidentified
MKKQKMEMDIINQHCAGIDIGSKSHFVAIGQELTDVKEFGVYADDLTAICMHLKQHGITSVAMESTGNYWQNLFVELIKHGMDVTLCNGKFTKNIKGKKTDVKDARWIQKLHSIGLLTGSFLPDDVTQTLRTYCRQRANWIELSAQASHKMQKYLKLLNFRLDVVVRDICGLTGLAIIADICKGNLDPEKLSELRHGNCKKSKEEIAKALKGNNRTDYLFGLKQEYESYLFFQKKTDACDVEITKFLKVQINTHPEMKKLKTDNKPHKRINKNSIKGIDLNQASYQYFGGVDLMKIEGINHSTIMSIMSEVGPGGFEMFPTAKHFTSWLRLAPNNKISGGKLLSSKTPKGSNRLKIAFRNAANAIGNLKDTHLSDFFKRVAYKKGRTVAVSATARKLAVIIWTIITKKVSYKPPTEYLFLDQKRKLKLVERIKKQITKFDLKPDDVGFVID

SEQ ID NO: 196562 - protein, 467 aa, unidentified
MSKSQNPTKEVIPIMKKRIYRRMPVNDFQPETISHADLGGKLVFAIDVAKVDMVAAVAAADGRVLQTICWKAPDQNFTVLSILRGFRAAGITVEAVMEPSGTYGDVLRHQLEKEAFPVFMVSGKRTHDAKEIFDGVPSLHDAKAAAIIARLHADGLSTLLSEEVQERRQLRASLAIMDLYQERYLPLVNRLESWLARHWPELPTLLELTSSSLMALLARIGGPSDVAANPNQATRLLRGISHRLLADDDIAAIIASANASVGVPLVGLERDALMAIADEAYRAHRAFATAKTKVAKLADATPAAALVPVVGHTTAAAVFAEVGDARSFHCTRAFLKAMGLNLKEKSSGTVRGQIKITKRGPSRVRQLLWLASFRWIQKDPIADAWYQRKKQRDGGRASRAAVALMRKLAKGIYHVGRGGTFDSSKLFDTRRLQVASADFPKGDLPLNRLSAPCKSAVSLEAPCGTIF

SEQ ID NO: 196563 - protein, 364 aa, unidentified
MLTSTTTKEAPVSEEYSDRQIVGIDLHRRRSVIVRMTAAGEKLETVRIDNDPIALGLEIAKAGPDPEVVLEATYGWYWAVDVLQDAGARVHLAHPLGVKGFAYRRVKNDERDAADLADLLRMGRLPESWIAPPAVRELREQVRHRAKLVALRSGCKAQVHAVLAKQGVAVPMSDLFGVGGNKLLDRLGLDAPYAARVGSLRRIIDLLDFEIDVVSKRVAVQLSGHDGYRAIQALPGVGPVLAAVFVAEIGDVTRFPSARQLTCWAGLTPRHRESDTTVHRGPITKQGSRLVRWAAIEAVQRTPNSAGWLVATRAELTGRRGRNIAAVAVARRLLTLVFYGLRDGHIRALDLDHGQRRPSTTAAA

SEQ ID NO: 196564 - protein, 364 aa, unidentified
MKNSITWVGMDDSANKINVAIFQGQEREPREEIVVVNDSTGLGRLAKKLKTIPGQVRCVYEAGVNGYHLHRYFKNHGISCDIAAPSLTPRRAGKRVKTDRLDAKKLATLYRAGELTSIAIPEKEQESLRDLVRAREDALEDLQRARHRLARFLMRRGLRYGIGKNWSCGHMKWIKNLRFEDDRDQMVLDEYRFTLDERTERLKRLQQRIEELATQEPYQKRVRYLMALKGIQALTAMTIIAEALDLRRFMDAPAFMAAIGVVPSEESSGDIEHRGSITKTGNRHIRRVMIESSWHYRHSASIGKTLKKRREGLPIEILEIARGCDHRLHQKFRRLINRGKDRRTAAVAVSRELAGFIWAIGQVA

SEQ ID NO: 196565 - protein, 314 aa, unidentified
MTTLSATYVGVDVAKDSLAVCSSPTAKTITVPNTAQALDGWLAGLPATAHLICEATGRHHRMLQQLCAKHARALSCLNPARVRDFAKSLGKLEKTDPLDAAVLWRYGHERQPTPTPVPSPALQRLGDLLMARQAVTEQICAFHSRNDLLSAPTRRQLQCVIRTLTTHRLALERELAAWLDSAEGSPWQDRVYTLCLAPGVGVLSALALIAYLPELGALNRRQIAKLAGLAPLPWESGKMKGLRRIQGGRAPVRRVLYLCAMVAARWHEPTRDHYRQLRARGKTATAAYVAVARKLLTYLNSLLRPAHAAERPAA

SEQ ID NO: 196566 - protein, 389 aa, unidentified
MEKISTAKMRRQVAARTKKWTIGMDLGDRSSRYCVLDENGDVIAEGSVATTKPAMEKLFGAMVGCRIAIETGCHSPWVSRQLQGFGHEVIVANPRNVRLIGESTRKDDRLDARTLARLARIDPNLLGPVRHRGAEAQAHLAVLRARHALVKARTLLVNAARGLTKAFGERLRKCDPEQLGVHAVSGLSAETQAAVGPLLAEVETLNKGIAAYQRQIERVAKEHYPEIALLKQVKGVGTLSALTFVLTVDDPHRFRRSRDVGCYIGLRPGRRNSGKSQPQMRISKEGDTHLRSLMVQGAHYILGPFGSDCDLRRWGLKLAERGGKNAKKRAIIAVARKLAVLLHKLWVSGEVYDPLRNNSERLPSHGRNYRAWEGPFQETGFRLLFRNAR

SEQ ID NO: 196567 - protein, 457 aa, unidentified
MGHARARKVPAQLVEDEDYQLRYERVAGIDVAKAKGDVCTRLPPAREGGRRASAVEEVPATAGEVLALAGRLLAGGVELAVMEATSDYWRIWYYLLESAGLKVQLVNPAHARQLAGRPKTDRLDCQWLARLAEMGLLRPSFVPPPEIRALRDLTRTRLQLVRDRTREWQRLEKLLEGALVKLSSAVHSLARTKTARDILEAIAGGQRDPQALAALAHGNVTGGRAAVREALDGMLIGAHHPLLIRPRLEHITFLDRAVSAVEDEIAAAVDAIPAGWGITAGGVPSPDPGPGAAALAAADRLAEIPGVSRDLAVAVIAETGLDMTRFPTPGHLASWAGLAPAARQSGPRTRKPKKGQGDSYLKGYCTQAAGGAARTPTFLGERCRRLDKRIGGVRARCAVGRSILEIIWHLLSDPGARFTDLGPGWHARKGDRDRKIRAHLRQLRALGLDVTVTPAAP

SEQ ID NO: 196568 - protein, 358 aa, unidentified
MTTMTTTTPGVTGGVDTHGQTHHAAVLDHLGRQLGDREFPTTPSGYRSLLAWMAGHGRLERIGVEGTGTYGAALTRQLRATADVQVVEVDRPDRKARRAHGKSDPLDAYSAARAALAGTATGAPKGRDGRVEAIRALRVARGSAVKARSQTTNQLKALLVTAPAELREQLRSLTTTVLIATCARLRPAGDIADPETATKTALRRLARRHQYLSEEIGEADVELRALVTAAAPRLIALPGVGPEVAGQLLTTLGDNPERLHSEAAFAHLCGVAPIPASSGRTHRHRLNRGGDRAANNALYVVVLGRLRYHPRTRTYAARRTTEGLSKPEIIRCLKRYVARELYNALQPVKQSEDLAPTP

SEQ ID NO: 196569 - protein, 342 aa, unidentified
MDPQPYRCFLGIDVSKRTLDVCLFQGMNTEKHHLQVANDEAGFTHLIEWLTRNQATAEETIVCMENTGLYDDALLEALTLAGYSCAVEKTTVLQKVRPEHHRKDDRFDAGLLAEYAWRFQDKLCLWRAPEPVIEEIRLLYRERRRLITQRGAVLQLQSEAARRSADTRFAEALWREQIAFFDEHITRLDDKLDALVRSDEDVFRRYEIVKSLPGFGSVASLLFVMLFYGEDRLKAREMASRFGFAPHRARSGTSQWVPARSSGHGQSEVRKVLTLCARSAGTHDAKMQAYKAKKLAEGKASQLVTNNLINRLLRIVCALWNQNQYYDPDHVSRFAQKAALRT

SEQ ID NO: 196570 - protein, 344 aa, unidentified
MAEVSTIGLDIAKSVFQIHGVDVEGAVVIRKRVNRAKVLEFFAALPSCLVGIEACPTAHHWSRRLQALGHTVRLMPPSYVKAYLKRSKNDANDAAAICEAVMRPSMRFVATKSEQQQSILMLHRSRQLLVRQRTMLSNAIRGHMAEFGIVSAKGRNGTAELLAILANEQDDRFPIAARFSLDALARQYAVLTTEISIIEKRIHAWHRTCEESRRLQEIPGVGPIVATALIAEVSDWKAFSSGRGLAAWIGLVPRQHSTGGKERLGGISKQGNRHLRWLLVAGAMAVIRYARKHGTKRLWLIRLMGRRPIKVAAVALANKIARMAWAMMVRGERFKEQNLLPAAA

SEQ ID NO: 196571 - protein, 472 aa, unidentified
MREPQEIEDEEHEQTWERVAAIDVAKASGMVCTRVAHPSRPGRRLTKVWEVPATTGAISELAGQLAGLGIQKVTVESTSDYWRPFVYLLQAGGLSVQLVNAREVKNVPGRPKTDRLDAVWLAKLTERGMLRPSFVPPAEIRRLRDYTRLRADLTQERARHYQRLEKLLEDALIKVSSVASKLDGLSVRDMLEALIAGERDPAVLAGLARGKLKAKHGALVEALAGRFDDHHAELARMLLDQIDALGGQIGTLTARIEELLAAIPAAHGVDADGTSGPGAGSGPDAVVLPAVARLDEVSGIGPGTAQVIIAEIGLDMGVFPTPGHLVSWAKLSPRTLQSGATRRAGKTGKGNPYLKGVLGEAAAAAAKTDTFLGERYRRLVKRRGKLKALVAIARSILVIVWHLLADPTARYHDLGAGSCKPWGSPSPSPQQPDPALQPHPAAKEPASPAAAAYPVRAVIFRSARRYAVLRGG

SEQ ID NO: 196572 - protein, 353 aa, unidentified
MRTHQKSSDAVTTIGIDIGKNTFHLVGLDKRGAIVLRIKVSRSQLERRLANVPRCLVGLEAGCGSHHIARQIRALGHDVRLIPAQYVKPFLKGHKNDYRDAEAIAEAVQRPTMNFVAIKTPEQSDLLSLHRVRSRLVGRRTAVINQIRGFLIERGITVRQGPGPLRKALPEILSSPTEALSPRMVRLIADLSEDWRRLDERIDAVSAEIETLAENDGGCQRLMTVPGVGPIISSAVVAAIGNGGGFRQGRDFGAWLGLVPKQESTGDRTKLGKISKRGNRYLRTLFVQAAHVVLIRRPAAAMRGLWPWIERAAKRLAHRNLLAIALANKLARIAWAVLARGRDYEPRITINAA

SEQ ID NO: 196573 - protein, 349 aa, unidentified
MTDQRISYCGRIVYVGIDVHKETYTVTCVCNKQIVKTATVQADPAALAASLPRWFPGATLYSVYEAGFSAFVLHRVLTKAGITNLIVNPASVAVAANDKVKTDRRDSKKLAIDLADGRLRGIYVPTEAEELARLLPRTRAQIVKHRATIARQIKAKLHQFGLIAPSSRRLISRRYLREMAAWSLPPELSVRLTLLAEQWRFATRQLIEMRRLLRDQAQAQEAIEKVYRSVPGIGEVVARTLATELGDMTRFANERALFSSTGLTPSEYSSGASVRRGHMSRQGSSRVRHWLVETAWRALPRDGVLKEMFDRIAATRGKKRAIVAIARRLTGRIRACFRQGTTYAVGTYA

SEQ ID NO: 196574 - protein, 329 aa, unidentified
MKKDWYVGIDVSKRWLDVAIFVENSDLMGYFHTQVSNDKTGYKELLRWLKEHDVDASTCMYGMEHTGFYSDGLQHFLDKKGYKYTMLEPAVIKHYPIQPREKNDHLDAAKIADYLFRFKETINLSRVPDKTMEELRNLHRERKFYVEDRVVYLNRKQVVGKEEAKRLDKMIALLDKQVESIEEKIREIIWNDKSLMESYLYLTSITGIAFVNAVNAIVITQNFTVFKTARDYASYIGVAPHTKKSGTTVRWKPKPYKHCDLTAKADISQAAKIAVVHDVELKRFFERKLGGKEDADTIRKAMNAVKFKLVLRMFAVVKQKHEYRQFATI

SEQ ID NO: 196575 - protein, 385 aa, unidentified
MLSEGGQPTQNGQGRGRSYNLEASEPEGELDRRVTANSAENPNSRRGRKREPELRKAGSGPNRKWVKVMSQYAELYVGIDVAKRSLEVALSSGESWTVSNEAAAIRKLVAELVRRKPALVVMEASGGYEREVWLALLTAAILTARVNPRDTHHFAQANRQLAKTDRLDARGLTLFAAQVRPRPDVAPSAAAERLQELVGRRQQLVGMLTAERNREQQAITAANRRGIRGVIRFLERQCEAIERAIAEHLSKHAEYREVDQILQSAKGVGLVVSATVIARMPEVGTVSGGQFAALVGLAPYDRKSGDWDGRSHIFGGRADVRCALYMATLSAVRCDPALRAFYRRLLDRGKEKKVALTACMRKLAVMLNAMVKNRTPWRPLCPTAV

SEQ ID NO: 196576 - protein, 380 aa, unidentified
MPEAVIGLDVGKSSHWACVATRDGEVLLSAPVANREDDLDSLFGRFPDALVVVDQSRNIGALALARARAAGMSAAYLPGLAAHGAARLFAGDAKTDERDAMVIAKTALGIPDALLPVGDPGPTIAAARALAAQRNFLTRENTRNKNRLRSILLESCPAFEALVDLSDGPQLRLMASLGGAWSVADAGPRRAAALTRGAARGKIEALVRSTTSSTRPDASVVAAEDRAVKLLARRISENSAEIEAITAEISALLEGDDTYRCLLTVPGIGPKTASELAISIDIEDFPSHDRLASYCGLAPRNRQSGTSISSVTASRQGNKRLKNLLIFSCNCLTRTEGRWGDYYTRCRERGMSHGKALKALARKRLKVIYAVMRDRVPYAA

SEQ ID NO: 196577 - protein, 459 aa, unidentified
MKQKQFFLGGDISKGYSDFVIVDKYKQPVKENFQLDDTIAGHIQLYEQLLQFFDERPGVEICAAVESTGGYENNWYNTLLKFQGSLNIKTARLNPEGVYNSSKADLKRTITDKVSAQSIAEYLVAHPEKVVYQQQDYWSPLRKQWSFIKLLTKQKSQLLNQLESLVYSANPEILKYCQDGVPQWVLKLLKQYPTADKLARAKAKTVARIPYVNRDRADRLILNAKKSVGSALDIFTGQLITSTVEHILQLEKSIKSQVKIIADNCPMPEVELLKTFTGIGDYSAIGLMLEIQTISRFSTAKKLSSYFGIHPMYKASGDGTTVVRMSKKGRKEPRRILFMVAMSAITSNSLIQDIYQKHVTQGMEKMAAIGLCMHKILRIIYGMLKNKTSFDQAIDIRNRERSLEKSPKEIKNKNRRYQEFDPNAPVSGRQKKKRVERKVSQNATSGVECGINTSAPESS

SEQ ID NO: 196578 - protein, 342 aa, unidentified
MNLPIRIGMDTSKSVFQLHGVDENEGVVVRRQFRRAEMIRYFERLPPVLVAIESCGSSHHWARLLQSFGHEVKLIPPQYVKAYVKRGKNDAADAEALCEAVTRPSMRFVPVKSKERQAACMLMTVRERLVSVKSQLSNAFRSYAAEFGIVGPAGRQNVTALIKRVLEDDSLPEMARDLFRLQAEEYAAVQARLAKIEAKLMKWHREDDVSRRIATIPGVGPIGSSMLSMKAPPPETFRSGRDFAAWLGLTPKDHSTGGRQRHGGITKAGDSVLRSTLIVGATALLRHIRKGRHKPTLWLASLLERKPPKLVAVALANKFARIAWRLMISGGVYNRPVAATPI

SEQ ID NO: 196579 - protein, 473 aa, unidentified
MSKGSGSGTTRGDRRRNARRERLRGLLPRDGAVIGIDLAEDKQALAVVDHDVRVLARKTVKVKAFRLGEALDWAVAQAKVKGFKQVAVACEPTGPRWMQVQRLCAERGLPLVCIQPLVSHIAREQQDYTPHKTDESDCVLIGRLAAELHCYIPEELDETWAQLRHLGRRRAQLITAATASVQRIGDFLSVTWPVVTEVCAQPFKSVTWLAALQVVTSRCGGDPARLAAMGPEEFTAVVRAAVPAWGGKKGWGTICGRVFAATADTEGVVAWSRRGLLRRVAGELGDLARTRAQLRAVAADMVMVLSELGLSRLGDIPGLTAVGAAAILAETGDPRRYDSSSSLVKHAGLSPSENASGAFEGQARISRRGRPGLRLTAWRAVWPMLRLNPVMAAKYAAMTQAADAAVASDAGSQPARAAASAARARRAKARVACAASLLRWIYSMVVHGTSWDAAVASAAAACQHAPRCQPEAA

SEQ ID NO: 196580 - protein, 420 aa, unidentified
MTRRKSTPPEVALVAIDVAKHRNEVLIEAVRGGRRRRMTILNTRADHDKLITSLQAMHKPIVVGLEPTGNYHRALAHRLIGAGFGVRLISSMALARTREALHNGWDKNDPKDAQVILHMLQIGATMVYQDPLAAGINDLQELSKTHEVVSKAKTEIWHRLLTHYLPLYFPEIERFVGNSRSDWFLAFLERFPTPASVTAMAKEDFVEAAWDVVGRKVSKARLLGDIYETACSSAALPVLLDSPAIAMFRLVLAEARSLIQQRNVIEAHAHELLRERPDYLRLRQVPGIGPIHALTILAEAGDLRRFRHHRQFLKFCGLDLATHQSGQFRGQTRLSKYGNARLRRTFWLAAQVAIRQRDNSLRDCFGRHVARDRENKDLRRKATVAVATKMARVVHALIKTGTDYRPFPEGPVPSGRTLSL

SEQ ID NO: 196581 - protein, 349 aa, unidentified
MDHIGIDVHKRESQISILAEGGTMLEQRIRTEPERFAAVLGARPRARVLIEASTDSECVARCLEALGHEVIVADPNFAPMYATRTRKVKTDRRDARALAEACLLGAYRPAHRLSDPQRHVRGRLLVRDAVVRTRTRYISLIRALLRQHGFRVPSGSAESFVHRVQGLPLPGRVRSVIAPLLALMRPLNRQLAYSDATIEHLAVQDPRVPRLRSVPSVGPVTAAAFLAAIDDAQRFRHAHQLEAYLGLVPREYSSGETQRRGPITKAGHSRTRWLLIQAAVSILRRRPPQAEALRTWALRIAARRGQQVAVVALARRLAGILYALLRDGSVFEPQHARRPRPPAAALVTM

SEQ ID NO: 196582 - protein, 349 aa, unidentified
MIVIGIDPHKQTHTAVAVEQATGRVLAELTVRARRPGFERLVAWARALDEQRLFAVEDGRHVSGHLERYLIGRGECSVRVSPRLMGEARRADRVRGKSDPIDATAVARAALAHPDLPRATLAGPEREIGLLAAHREQMVGERTAIQSKLRWLLHDIDPDLAPGPRTLDRFATLDLLQARLGELEPVAEVRICLDLIDRCREITVRANELEREIASLVRAAAPHLLEIPGCAALTAAKIVAETAQVERFPTEGHFARYAGTAPVPASSGAQHRHRFNRRGNRQLNAALHRIAITQLRIHQPAKDYVAKKRAEGMSKTEAIRALKRRLCRVVFKTMTSKNRPTDGLIPVAA

SEQ ID NO: 196583 - protein, 401 aa, unidentified
MKEFNPTETHFESASALNIFSNGKLKVTYPAYIGLDVHKETIAVAVARAGRDAPESWGEIANRPKAIAKLAARLHQEFDGEVLLFCYEAGPCGYTLYRQLLSLGHDCQVVAPSLIPKKPGERIKTDRLDALKLSRHLRAGDLTAVWVPDEEQEAIRDLTRARDDMKGQERKARQQLNAFVLRHGHAWPAKKTRWNQTHYNWLEAIKFEQHFLQIVLQEYIDAVKAATQRVADMTDQMMQLLPNWSLGPVVDSLVALRGIDKLSAMVLLAELGDISRFASPKQLMSYLGLVPSEHSSGGRRRQGAITKTGNGHARRTLVESAWSYRFQARQTMHLKRKARGASDDARAIAWRAQKRLCGRYRTLTQAGKNTKLVCVAIARELVGFIWDIVRHEMPKLQQAAR

SEQ ID NO: 196584 - protein, 337 aa, unidentified
MAGSDWINLRAEIEQAREKLGCSADCAIASCYEAGRDGFWIHRALIEEGIENYVLDSASIEVSRRRKKVKTDRVDVVALLRLLMRYRGGEREALHAIRVPTVEEEDQRRLNRERDRLLKERGAHSARIKSLLKLHGISLGKINDLPGLLPSARALVVEYALPADLKRELEREYERYELVDQQIKGLEKLQIQRAEDLDKPAMQQITQLMSLKGVGWQSSWILTMEFFLWREFRNPKQLGSCAGLTPTPYDSGDSTREQGISKAGNKRIRRLMVELSWLWLRYQPDSALSQWFERRFGQGGKRMRRIGIVALARKLLIALWRYLEHGVLPEGAVLKAA

SEQ ID NO: 196585 - protein, 366 aa, unidentified
MKKSSTRKPSMKSQGIKSKPERTVGLDLGDRTCYYCLLDSAAELMEEGRIQTSEASLRKQFDNEAQMRIALEVGTHSPWIAPLLESMGHEVIVANVRKVRAISSNENKNDREDALLLGRLAAADPKLLHPLQHRSIQSQQDLGLIRARAAVVRARTLLVNCLRGLVKSAGYRLPSCSTEALPEQARQHLPADLKPACLPLAEQIGKLNQTIAEMDRKVVQLGNTYPEIGVLRTVPGVGPLVAACYVLTLDHPSRIRDSRQAGAYLGLRPRQEQSGDSNPERGIAKNGNTYLRSLLVQAAHYTLGRFGPDSALRRWGLKLAGTSKRNKKRAVVAVARKLAVLLHRLWRSGQTFVPFPHPLTAAVAAA

SEQ ID NO: 196586 - protein, 342 aa, unidentified
MKHYVGLDVSQKEAAVCVVNEAGNFVFEGKAKSEPGALAAVIRKRVPFADRIGFETGAMASWLWHELKRVGLPVVCMDARHANAALSVRINKSDQNYARGLAELVRIGWYREVRIKSQQSQTIRSTLVARARLVGIRRDLENQVRSLLKENGLLFSRAIGSRFRQQVCELLVEDHVLRPIIDPLLAIHEPVCRQQRKLDDEIRRLARADATTRRLMTVPGVGVVTALTFRHTIDDPSRFQSAVAVGAYLGLTPRRRQSGDMDTNGRISRWGDRLLRSYLFEAARVLLHRTHKGSTLKAWGVRLMKRIGAKKAKVAIARKMAIILHCIWVDGTVFEWGQPKMA

SEQ ID NO: 196587 - protein, 408 aa, unidentified
MFIVGIDIAKKTHVAAITDDTGKLIGKTFKVDNSVEGFNGLLQKLADISTDISQFVFGMEASGHYWLNLYTWLSDKGFTIHVINPLQSDALRRLQIRRTKTDPIDAQLIGECIRLGKYCETNLANDDMLALRDLTRQRFYLVDMAGDIKRKVISMMDRIFPEYESLFSDMFGRTSCELLKECTSPEEILALDTERLCEILRKSSKGRFKQQKADQVRERARNSFAVLLSSQSLSLLVKQMIEQLELLESQIRQIETLIEQLYAKFDCKLTKIQGMGTTLAAVILSEIGDISRFQNPKQLTAFAGLDPVIKQSGSFSATRVHMSKRGSPYLRRALWLAANTVKQWDPSFAFAYQKKMNAGKNKSQALAFITHKLLNVVFTILKNNIDYLPLFPPDFELSKLPLNFHLAT

SEQ ID NO: 196588 - protein, 463 aa, unidentified
MRTLGIDLAITSTHKAVVVDERGNAIGSVIRFRTNPADLEALLRRAREGADEDEELRVVMEPTGLAWLPVASYFIQRGVTVYLVNTQQTSDLRKFYSKHAGSDRISARVLARLPWVNPEALHPLRLADADHLSGQRWCKQQEELAQRMTAIENRVQAWERAFWPGLEEVVGDLFTPWVRRWREEWYDPWSLQSLETSQLAAFLAEAGADPEKAEGLAAGLQTVARQAVALFGTPRGGPSPYVDYAALQDQVLRELYLLACYEAEHRAVRRQVRQLYRQVHPDRQLETLYGVGENGAAVYVFFIGQIERFSSQKKFRGWSGLVPKSSQSGSGEKKGLRITHAGPDLIKKYAYINAEVARQWDPQMAAIYYDQMVHKGKHHVQAVCCCATHLLDRVRAVLRDGRPYELRDVDGTPITWQEARAIIAERYQVPEEMRKRNSKRARKTRRDEQAERKRKKRRSRPDR

SEQ ID NO: 196589 - protein, 337 aa, unidentified
MKKNEFTNFVGTDVSKNTLDTVCIFNKEIDNSQHQQYSNDEKGIKKILSYVKKQKGVTLDNTLFCFEHTGIYGRKLAMILIENKCHVWIEMPVAILRSMGLQRGKSDKVDAKRIAVYAMKNHDEAKLWEAPRKEVETLRQLITTRERLINSLKSLKMPINECKQTGNKELASIIEKSIKNAVKGLEKDLERIEQKIDEVIKTDEALAKLFQLITSVPGIGKITAVELICFTNEFKMYTEAKQLACYCGVAPFEHTSGTSVRGKTRVSKMANKSLKTKLHLCAMAALQYDAEIRGYYNRKVEEGKNKMLVINAVRNKLIHRITAVVKRQTPFMHNIAA

SEQ ID NO: 196590 - protein, 340 aa, unidentified
MKVLAQSLGIDVASKSLQVCFMIKNDQGQFKIKGQRKFDNAKSDFKMLIEWISKRHQAGLGLEVVMEATGVYYERIAYALAQQGFHVHVLLPNRIKGYLKFLNVKSKTDKIEANGLAQLGLDHQLPKWEPACAQMYSLKRLCRERNMLIDEKTAISNRLHAEKSCQDPEALTIKRLKKRIKLLVDQIKEVEQQIIKLSEEDTQLAQKIDNICKVKGLGPITVISIIAETNGFQLVENKSQLVSYAGYDVVERQSGSSIKGKTRISKKGNAHIRKALHFPALGVVKYHKEFTDFFNRIFERTKIKMKGYTAVQRKLLVLIYTLFKKNQPYDPQFAQNLNQI

SEQ ID NO: 196591 - protein, 371 aa, unidentified
MQETSRVFVGLDTSKLKISVALAEEGRQGEVRFLGDIDNTPDAMKRLVRKLSGKYLQLLFCYEAGPTGYGLHRQITALGHDCSVIAPSLIPKRSGEHVKTNRRDALTLARLHRAGELTTIWVPDLGHEAIRDLVRAREAAMEDLREKRQQLQSFLLRHGRLYPGLRSWTLVHARWLSSLIFEHPAQYLVLREYRQAIEDAEARLKRLTQQVADVVSTWSMAPVVEAYQAMRGVAFLTAVTFVAEIGDVRRFETPRQLMAYLGLVPSERSTGEQVRRGSITKAGNPRARRVLIEGAWTYRYPARLSRPLQVRQESLPEVVRAIAWKAQVRLCARYRRLMAAGKRQTLITTAIAREMAAFLWAIGHEVQPCSA

SEQ ID NO: 196592 - protein, 427 aa, unidentified
MNVAQTTRVNEFRQFKSQIRGCREYLIVGLDIAKRKHHGFFGDANGQTILKGLIVENSAEGFGHLLSQVRFYMQRDGFRRVVFGLEPTSVYHKPLAEHLISQGHLVVYATNEAIKKNRSLIDGRWDKNDTKDSANVADLVAQGKCHYYDLPDQRLRDLRSLLLLRKRLKKQVHSCRVRIRNNLVAQYFPELDLFWNNAEAENLTIVRGYLDPARIRQLTCEQFIAQVSTHNGGLRQQRRLRHIWEAAGNSIGCRPGAAMALEAELLVASLSSIQEQLDQVEKATQRLAEGFEEYDYLKSIPGFGPYVSAVTLAAIGNPHRFENRAQLIRLAGFDLCASRSGEKSNTAVAVISKKGKADLRYALYQAALVASSLTSHFRSHYTRLLEGRQREKGIRTKMLVKIAAKMLVIAWTLMKRKEPFNPAHIQA

SEQ ID NO: 196593 - protein, 411 aa, unidentified
MKNNIKATTMQLAKNHSVKAQITGTQTKKASRESEQLSERLKYPIRDGGSRARAAKEVNCYVGIDLGDKKSNYCFLDAKGNIFAEGTLATTQAGLSELFSQIPRCRIAIEVGTHSPWVCALLKGHGHEVIVANPRKMESIHKNRRKNDKVDARTLARLVRADPELLYPIQHRGDQARQDLVLLRAREGLVAARTKLINCVRGQVKSVGGRLPSCSAESFHYTVAEKLPDSVREALLPLVLQIGEMSKRIRAFDAEVIRISRQKYPETECLQQVRGVGPITSLTYILTLEKPERFTKSRDVGSYWGLVPRQDESGAISKQLRITKTGDKMLRQLLVISGQYILGPFGEDCDLQRFGLKLAERGGKNAKKRAVVAVARKLAVLLHRLWLTGEKYEPLHNVHLHEKTLGIAANG

SEQ ID NO: 196594 - protein, 358 aa, unidentified
MRIVVARAQDDAQCRIAGERRGHGKTVRHDHEVLAFRREAPGEVRACYEAGPCGYALQRQITDAGEMSCMVVAPSLIPRKPGERIKTDRRDARKLAELFRGGLLTEVQPPTESDEAARDLCRSREDVREDLQSCRHRLSKMLLRRGRVYSGTRNWSRAHRRWLKELRFENAIDQAVFDDYLLAIEQAEARLDELVKRIDQLSLEAPYAEPVAALRCFRGIDTITAMTIVTELHGFARFTAPRGLMAYLGLVPSEYSSSDNTRRGSITKTGNGHVRRVLVEAAWNYRHRPSVAALKKRRTGQSPVVIAIADRAMQRLYRRYHRMTAKGKPAPKAVVAVARELTGFIWAALYPLAQKAAA

SEQ ID NO: 196595 - protein, 355 aa, unidentified
MSMLTGRIEAAIGVDTHKQQHTAALLDALGGQRGLMTIVSDGGGYRQLLEWARRLEPGRRVWAVEGTGSFGAGLTSYLLEAGEWVCEVDRPDKPARKRGAKSDQIDALRAARQALQEEHLAQPRRRGQREAIRVLKLGRQQAVDVHSRAVVQLKSLVVSAPEELRAQLRGLNAEQLVKTCARLRQNSRQSLEWTATVAAMRALARRAESAAKGVEELSQSLAELVAAAAPQLLAEKGVGTVVAAQLLCAWSHPGRLRSEAAFAMLAGAAPIPTSSGQKERYRLNRSGDRDVNCALRTVVITRMACDARTQAYFERRRAQGKSDREIQRCLKRYVARRLFHVMNGHRSASQTNVRS

SEQ ID NO: 196596 - protein, 317 aa, unidentified
MEVIHERCCGLDIHKKSIVACLSLPGPKGAATTTVRTFGAMTGDILALSDWLVEAGCTQVAMESTGVYWKPIWNLLEGVFTLLLVNPRHMKAVPGRKTDVSDAEWIASLLRHGLLTGSYVPERAQRELRALTRYRTTLVRERTAEANRLQKTLEGANIKLAAVATDILGALGREILAALIGGTTDAQTMAQSARGRMRAKLPALEQALVGQFGAHQRFMVAQQLAHVDFLDATIAAVSAKIGARLRPVDDLVARLDTIPGIGRYVAEALITEIGTDMTRFPSAGHLVSWAGMCPGSHESAGKQHGGKTRKGNAWLRA

SEQ ID NO: 196597 - protein, 325 aa, unidentified
MLIIGCDFHPGFQQVAIFDNQTGEYRERRLGHRAEAEQFYRSLAGQSVRVGMEACGHYPWFERLLAELGYELWLGDAAAIRASVVRKQKTDRRDAEHVLDLLRQDRFPRIWVPSLEERDVRQLLVHRHKQVQGRTRVKNQLQAMALSQGVQKRRKLWTAAGRAELEKLELLPYAAQRRQQLLEALDGLEAEIEQLNRRVEEEVAQRPAAVRLQTHPGVGPVTALAMVLTLGPAERFASGKQVASYFGLIPSEHSSGGRQQLGHISKQGSSFLRFLLVEAGQTAARHDVELGRFYRRLAGRKHRALAKVAVARKLAVRLYLMLRED

SEQ ID NO: 196598 - protein, 338 aa, unidentified
MKVYCGIDLHSTNNYLAVLDDDRQPVLSRRLPNRLDTILDCLQSYRENLAGIAVESTFNWYWLVDGLMEHGYRVQLVNTSAVRQYEGLKYRDDRHDARWLAHLLQLGVLPCGYIYPKEERPLRDLLRRRSFLVRQRTADLLSLKNLFSRQTGQQVSSHELKRLTAEDIEQRFADPYLALSFTSTLKVISDLNVQITTIEKAVLKEARLRPDFKRLLEIPGIGQILALTIMYETGSMARFPDVGHFCSYCRCVPSKHLSNGKVKGSGNVKNGNPYLSWAFTEAAHFLIRFEPRAKRYYERKSAKTNPILALRAVANKTARAVFYVLHDQTPFRVERAFG

SEQ ID NO: 196599 - protein, 316 aa, unidentified
MSELVYVGIDIAKNSFEVAVTGELKTLNLANDEAGHAQLCQWLAPLAPRLILMEATGGYEQDLALALAGAGLHVSVVNPRQARDFARCVGKLAKTDRIDAQALRSFASMLDAQGHQPRALADDERRELTALVVRRRQLVAMLVSERQRLGVAHRKAKPSILAIMDAIAAQLHDVDDELKAHVQTRHADLAKLLTSVKGVGPTTACTLLAQLPELGQLNRKQITALVGLAPMNRDSGTLRGQRHIFGGRADVRRVLYVAALVGTRFNPVLKVFYAKLLAAGKAKKVALVACMHKLLVILNAIARTRSPWRDDFAERL

SEQ ID NO: 196600 - protein, 347 aa, unidentified
MALASISVLGVDLGKNVCSVVGLDAFGKVAMRRKVRRETLIRLAEKLPPCVVGMEACCGAHHLARIFAAHGHEVRLMSPEYVRPYVKAQKNDDRDAEGIAEAATRPTMRFVDLKSQDQLDIQTLHRSRDRLVGERTALINQLRAILLERGIVAPKGRRKLEEFLADLMDERGGAELSPRMILLIADARIQWAELDRRIAAFDAEFVQWAKENEEARRLTTIPGFGAIVASALVAAVGHAESFDRGRDMAAWLGLVPRQFTTGGKPKLLGISKRGNRYLRKQLIHGARAALPYVAERDTPLGRWAKALMMRAHHNVAVVAFANKLARIAWAVLRRGERFAAKGVPSAV

SEQ ID NO: 196601 - protein, 465 aa, unidentified
MTIHSVGIDFHQGQHRVRCLDDRAQPCDSFGFETTPEGLTTLEEHIFKDDSNPIIVFEPAGIPWLTVAAYLRSRYPDCRLVKAKMQKVAALRRYLRGPVKSDRIDALTLAKMPFIDPEQLEEVYLPSAEIHALQRLTRQRKRLESDIAGRKVRIEMIIDGYLPGVRKAFASPWSTQVRAFLRARLNPFAVVLDGEKALSTFLSKAASRDKGSRAESHQIFQACQAVADICKVAEPATTINEEFFVELQDEIARELRLMETEEAESESLEGRISEIYHKLHPSNNLCTIPGVGEHTAPIFLAAIGDPARFRNQSAFANWTGVVPRSRQSSNMEAKGLRMTKAGPSIMRMALFQSGNIGRRWDPQMAAIYYRQMVSHGKNHKQALGAVMSHLGARVLKVLLEDRPYELRDIDGKSVTRDYAKRLILTKYHVSEDIRRERRRRNSKIGKIGETATNRINEAAKAPQPV

SEQ ID NO: 196602 - protein, 344 aa, unidentified
MEKHNVVAVDIAKAVFQVAVSEEPGRVARERRLSRAEFLTFFAQTPRSTVVMEACGSAHHWRREIERLGHAVVLLPPHQVRPYVTRNKTDRVDAKGILEAYRNADIRPVPVRSLPQQVLGAIHRFRSGWISARTAQVNTLRGLLRELGIVIPEGIEKVIPKVRCFVADADSGIPDSLRATVAAACDEIEALGARIRQAERDLEALAEQTPVVARLRSIPGIGLMTGTALVAFVTDIQRFPSGRHFASYLGLTPREYSSGLRQRLGRISKRGDSYLRMLLIHGARSVLCHARKAERHDRLRTWALALQKRTRHNKAAVALANKLARIAWAVWKHGKEFESMPHAA

SEQ ID NO: 196603 - protein, 351 aa, unidentified
MLIIGVDYHPSFQQIAFFNQGTGECGERRLDHSDGEVEKFYRGIQSQGVPTRVGIEATGYARWFERLLAELGIELWIGDAAEIRTLRVRKQKTDRQDAQLLLKLLMEDRFPRVWIPNPENRDLRQLLWHRHRLVQMRTRILNQLQAVAMNEGQRWKKRLWNKQGRALLENLPLAPWASRRRQDLSELLDRCNPVIAELTTAIEREANQRPEVVRLMTHPGVGSLTALAFVLIIGDPFRFARGKQIGSYVGLVPCENSSAGRQRLGHISKQGNKLLRFLLVEAAQVAVRFDPDWRRRYLHLAMRRDRRIAKVAMGRKLAVRLFWMWRKGWDYSQFVEFGSHAGQLEGTPGGQ

SEQ ID NO: 196604 - protein, 332 aa, unidentified
MVFNHYLGIDISKKTLDAALLLREGVVEGQTKVSNDKKGFKDLLSWLKKLKISPTEVLVCAEHTGIYGYDLQVWLDEKAIKYAMVPALEIKKSLGIRRGKNDVVDALRIAEYAYIRRESIVLTHRPSETIFQLKALITERKLYVRSRAGLLSRKDAMEKYESREGRKRREDAIKKFSSYIESLEGQIEDVISNDPDVLRNYQLVRSVKGIGLINAVNTIVYTNNFTSFQTARQYACYIGIAPFEHSSGTSIKGKTMVSSLGNHQLKCELTMAARNAVCTDPWLKGYYKRKMAEKGNMRGAYGIVLNAVKFKLVVRMFAVIKSGTPYKTLTYC

SEQ ID NO: 196605 - protein, 332 aa, unidentified
MRGAVHMQISTIGLDIAKNVFQVHGIDSSEEVVVRKQLRRSQVLAFFKALPPCLVGIEACATAHYWARELTKLGHRVRLMPAKDVKAYVKRNKNDAADAEAICEAVRRPTMRFVQVKSVEQQGQLMLHRTRDLLMRQRTQVINALRAHMAELGIVAAQGREGIKELLKIIASEADARLPVDAHTSLVVLAAGLQALQTMIRSIEKRIVVQHRSNEASKRLETIPGIGVIGATAIAATVPDPKVFRSGRDLAAWIGLVPREGSTGGKQKLGPISKQGDQYLRRILVVGAHAVLKRARQQPEKYPWLTGLLARKPSGSWRWPLPTRWRASPGHC

SEQ ID NO: 196606 - protein, 311 aa, unidentified
MTKDTIGIDISKDTLDAHRLSTREAASFPSSPAGLRALRRWIGTEMPDLVVFEATGSYHAILERRFAGVLPLVKVNPLQARRFAQACGTRVKTDAVDARILAMMGASLDLVPDVPAGRNHHELKELQIARMALIKERTRLLNRSKTQTLPMLKSQSKARLGQIKRQLTELEEALLDLMRQCPKRARAFDILCSIPGLGRVTAVAILIECPEIGTMDRKQIASLAGLAPMTRQSGQWRGKAFIQGGRKFLRDALYMPALVAARYNPDLRQKYQTMIQAGKPSKVALTALMRKLIEMANALVRQDREWTPKTA

SEQ ID NO: 196607 - protein, 368 aa, unidentified
MKQALFAGIDLHSNNVMIGIVDQSGRRLKHQKLGCDLNEITSFLEPWKPQLKSVAVESTYNWYWLVDGLRALSYPTKLADPAQIEQYSGIKHADDKNDAFFLADLQRLNILPTGYIYDPALRPVRDLLRRRLGLVHQRTALLLSFKSLYARTTGQAMSLSRLKAMEPNDTKTLYRHPANCLIALLQKEHIDKLCQSIELIEKSVLAQARELPCYQKLLSLPGVGRVLGLTITMEVGEISRFKTPGQFASYCRTVNSQRLSNNKKKGDNNRKCGNKYLAWAFVEAANFAKQHHQHCRRWFDRKAARTSKVIATKALACKLAKAAWYLMSQGSDYDPERMCPEGAMKEEKLKFVRAAASQKIGVGKNPFD

SEQ ID NO: 196608 - protein, 309 aa, unidentified
MDSIIGIDVSKNRFDVAVRPSGEVFAVERNAAGLELLTARIKALSPHLVALEATGGFETVAAAALAGAGLPVVIVNPAQIRSFARAIGQRAKTDPIDAAVIAHFADATKPDPRPLPDEATRMLADLVARRRQIVEMMTAERQREKRLAIPRLKKSIVRLLKALEKELAALDADISDAVRGSPVWREKEDLLASVPGIGPTIARTLIAELPELGQLDRREIAALAGLAPFTRQSGQWRGRSFIGGGRTAVRAALFMGALVAKQHNPVLKAFFNRLVAAGKPKMVAIIAVARKLLTILNAIIRDNRPWQTA

SEQ ID NO: 196609 - protein, 460 aa, unidentified
MSLTGLVSQNSQEDVVVQGSGLSRGDKRRNAKLARLRELVPTDNAILGIDLADEKQAIVLTDHDSQVLARTRVKAKAWRLGPVLRWGREQARKHGFADVTVGCEPTGHRWRVLDQLAAQQNMVLVCVRPLLTGRARESEDYTRDKRDDKDAVLIARLVAQLDCYAPERTDETWARLRHLGARRDRLISESTACVQQLRDLLECAWPAVLSAAAQPFDSVNWCAALAVVLERCNGDPRRLARLGPRGFEAAVRRELPRWGGQRAWRRIITAVFTALTDAAGVFAQRRGALERARWVLADWRTCQARLAEVETRMVEVLDELGLTEYLTSIPGISAVGAAAILAETGDPTRFDSPRALVKHAGLCPRENTSGTYTGQSRISRRGRPRLRLAAWRAVWGALPNNPVMAARYQHLTTRERNQLNDGQARAAIAAALLRWIHVIVTRRVTWDAALAGANELPAAA

SEQ ID NO: 196610 - protein, 353 aa, unidentified
MLIVGCDFHSRYQQIAVVDEQTGEYFERRLEHHNGEARAFYARLPAARVGIEATGYTQWFERLLQELGHELWVGDAAAIRASVVRLQKTDERDARHLQVLLSQGRFPRIWLPTLAERDLRQLLVHRVRLVQWRTRLQNQLHALAMGQGLCRKKKLWAQSGRRELEALPLDPWARRRRSELLELLDGLNPKIEELNLAVEQQAREHPRALRLMTHPGVGALTALAFALSLGPASRFARGKQVASYVGLNPREHSSGDRRRTGAISKQGSSLLRWLLVEAGQVAARYDPALGRVYQRVKFRRGSQIAKVAVARKLAVRLYWMLRRQITYRELLGAQVPVPGSSGSAVMSDNTSGR

SEQ ID NO: 196611 - protein, 426 aa, unidentified
MAETVIDMYSRAAGIDIHQSLAVVSAIVPSEDGSQCEFVRGEFNTFTEQGLRELVEFLRPLSVEVVLMESTGVYWMSPYDALLEAGFSVVIVNAREIKGMKGRKTDRNDADWLARIAKQGSFHPSFVPGREARGLRSLARYATSLRFVLAGEKNRLGKLFVAAGYRLNTVFTDMYGAGGMICVRGILDGGKPEEIIGSLPRTGRYKHTKEEMLLALGGKFEEGDLFAARRILKHIDFLDSELGDCVGELMRIVREKDAKKFDLLQTIPGVDALAACLILAELGGGGLEAFDSADALCSWAGLAPGQNESAGRRKPGGTRKGNKALRRVACECAGAAAKTRDTTLRSKFQSLLQRGKGYKKAVMAIARKVMVYAYYVLKNALPYVDPKIDYQKEHATKNFRRFIGQLRHCMSEYDIKIIHKATGEVI

SEQ ID NO: 196612 - protein, 436 aa, unidentified
MKNPLELPIINPHAAGIDVGSEKFFASIAGQEPKVYLTVTSQMHQLCEDFKAAGVRTVVMEATGVYWINLYGALEEAGMEAVVVNGAHCRNIPGRKTDMKDCQWLAVLHAHGLLKGGFVPVPEIRRLRDYMRIRADLVSMASQHVQHMQKALDRLNVKIHVVINDITGVSGMRMLKAILAGERDTERLVALCDQQILKTKHVAVLEALRGIWRKEHLFALELALQSYEQYQRQIADCDRHIAEVVQAISADKSTPDLGKPKELRHNAVDIEGLQKQMAQIFGKDLTKLPCLNESTVTMLLAEIGQDMSRWKDWRHFGSWLSLAPCYAQSGRGRKRQKKRLTRAAQILCRAVQSMATGKHTWLASFYRRIRAKRGAKVAIKATAYKLAKLVYLVLTKGWEYVEQGMAKYEQRLHDVQVKVFHKLAKKLNYVVLPKAQ

SEQ ID NO: 196613 - protein, 328 aa, unidentified
MAGRKELAVREEDNSKVPTIYMALDLGRRRWTVGIVLPGDRHARLFQIVAGDREALSVLIQRQRQAISHPGVRVVSCYEAGRDGFWLHRWLRDQGIENRVLDPASLEAPRRRRRVKTDRVDTLGLLRVLLRLERGETEMTRVVWVPAPAIEDARRLTRERERLVTERTAHRNRIQGLLAAQGVTTIKIGTRDWLDRLVVARTGDGRTLGVALLAEIRREAERLMLVEHQIKELEAAQRAALKADNALVAKACKLKRLKGVGEIFASGLIHEAFWRDFENRRQVGGGFGLTPWPWDSGDMHGDQPISKIGNLASGPPLSRRSAAERSVP

SEQ ID NO: 196614 - protein, 345 aa, unidentified
MELFTLGIDLGKTTFHLVGMNQRGDVVVRKRFSRTQLLHFTANLKVELIGMEACGGSHFLGRALREQGHEVRLIPAQYVKPYVKTNKSDYIDAEAIAEAVGRPRMRFVPIKSDDQLDLQSLHRVRERWVMRRTAVVNQIRGLLLERGITLRKGRRYVDAALPGIVADTDSKLSGSVRVLLMELKLELEQLADKIERSDQSIEHIARENEACQRLVAMPGIGPVTATALIATIGNGSAFRKGRDFAAWLGVVPEEHSTGGKQTLWQIPLRGNQYLRRLFVQCARAVMQHKTKQSSGLSAWLVQLTARTHNNIAIVALANKLARMAWAVLAKNEAYRPPILVDAIAG

SEQ ID NO: 196615 - protein, 315 aa, unidentified
MTNLIKSKSVVNIGVDVGKFVLDICIYEKNVHWQDDNSAEGIKRILKRLSHYKVIRLVMESTGRYEFEFAQAAYKKGLPVCIVKPLRVRRFAGAIDQIAKTDKLDAELIAEFAVKVQPEATPQKSKNLMAIKELIARRRQLMTMRTQEMNRTKIMGKSLETSCRRIVKYLDQEIERIEKRLAKYIEEQAEWSEKQVILKSAPGVGDALVYTILADLPELGNLSRNQVGSLVGLAPMNRDSGKLKGKRRIQGGRYTVRTMLYMATLSTTQCNPIIKAFYQQLVAQGKHKKVALTACMRKFITMLNAMLRDRCEWAY

SEQ ID NO: 196616 - protein, 413 aa, unidentified
MVGEGEGERVIYVGDDWAEAHHDFCIIDEAGKVLGKRRVPEGLAGVSQLHALVAAHAEEPAQVVIGIETDRGLFVQALIAAGYQVFAINPLAASRYRERHSTSGAKSDPGDAKVLAELVRTDRHNHRPVAGDSELAEAVKVLARAHQSLIWVRQRQLNTLRSTLREYYPAALVAFEDLAHGDALGVLDRAPTPAQGAHLDLPAIQSALKRGGRKRNIAARAREIRAALRSEQLAAPAPVAAAFGATTRAAVGIIAELNRQIGELETSLAEHFETHPDADIYRSLPGLGVVLGARVLGEFGDDPNRYTDAKSRRNYAGTSPLTVASGKKRAVLARHVRNRRLYDAIDQWALGAINNSPGARAFYDQHRAAGDLHHQALRALGNRLVGILHGCLRHHTLYSEHTAWAHRQTTQAA

SEQ ID NO: 196617 - protein, 347 aa, unidentified
MSYFAGIDLHKRYLTLCVLDPEGNAVVQHRQLTTDGLFAVLAELDGPITVAVEATLHWAWLHDRLVQHGYGVQVADPGQVKLISKARCKTDPIDAKKLADLLRSNLLPAIWVPDPATRANRKLLRGYAFLVRMRTRIKNRIHAYLTEIHLASPATDLFGKQGRIWMDSLTLPDEVRFQVHGLLTLLDSLEACIQRVAKRIEQRVALTPDAQLLLTVPGIGTKTAMLIMAEIGDLSRFPSSHHLTSFAGLVPTTRSSGGKTTHGSLPHAGSPWLRWALVETTQALKMKPGPVRAHFTRLSRAKGNSKATVAAARKLCCYLFWMLKEQRTYPDWLQNRHSQPLLEVRPT

SEQ ID NO: 196618 - protein, 370 aa, unidentified
MSQSSTLFIGMDVHKESIAVAYVAQDHGAEVTYLGTIGTRQCDIDQLIRKMQSKAKHLIFIYEAGPCGYWLYRYLTKKGYDCWVVAPSLIPKKAGDRVKTDRRDAVQLARLARSGDLTAVYVPKVEDEAIRDLTRAREDTLSDLKDAKFRLKAFLLRHDIRYTGRANWNPAHLRWLSEVVCQTPAQQIVFQEYVRAVSEHTERLQRLEQALQDQVKSWRLNPVVEALQALRGVQFTVAVTMVAEIGDLSRFDTPRELMKFLGLTPSEYSSGERRQQGSITKAGNTHARRALVEGAWAYRYPAKVSRHLQLRLENQPKRIQDISWKAQVRLCTRYRRLMARGKHANVVTVAIARELVGFMWAIAKEVPVTP

SEQ ID NO: 196619 - protein, 345 aa, unidentified
MTVTSASYQLYVGVDIAADTFAAAWLSASGVLAVPFTGEQTPAGFATLQRRLQATAVSPTATLVVLEATGNYWVALAVTLHEAGYRVAVVNPRQAHHFAKAQLRRAKTDALDARDLARLAAALQPTPWTPPPAVYHEARQRLVARDALLAMRTQARNQRHALLQWPVVVAGVRRHLDELIADLDRRVASLEAELAALLSTSEWAESLACLTSAPGIGLVTAAWLLVSTLNFALCSNPASLAAYAGLVPVPRESGRSIRGRPAIGHDGNGRLRTALYMATLSAARHNPAITVFYERLRAAGKPHKVARCAAARKLLHQVWALGTKRQRFDPHHGQPRPAGAPELAA

SEQ ID NO: 196620 - protein, 352 aa, unidentified
MDYYAGLDVSLEMTSICIVDADGVVMKEAKVASEPDDLVAFFAQCGMAMKRIGLEAGAPSQWLYGGMADTGLPVVCIETRHAKAALSAMPNKTDRNDARGIANIMRTGWFRAVHVKTQTAQELRFLLVARQTLVRKLMDIELAIRGMLRSFGLKMGVVSKRNFEARVLELAGDRAMLMRALNPMLTARRALAVEYANLQKVAMDFARDDDVCRRLMTVPGVGPIVALTYRATIDVPSRFRRSKSVGAHLGLTPRAYQSGEVERTGRVSKSGDAMARAALYEAAHILLIRVKRWSSLKAWGMRLVKNRGHKRAVTALARRMAVLMHRIWVEGTTFIWKTGDGLAIAPKPAPGV

SEQ ID NO: 196621 - protein, 428 aa, unidentified
MKNRNDQKLKAITPGTLIVGIDIAKETQWARFVDYRGLELRKTLKFKNHKNGFDSILASIKAICKNRRLDNIIIGMEPTGHYWKPLANYLLKHKVTVVMVNPYHTKRAKELDDNSQTKSDKKDALTIARLVRDGRYYEVYMPQDMFAELRVLSNSRISLMKRSNALKNTITAVMDEYFPEIVTVFKYPLKGKAAMHILKSCPFPSLILELGIDGVLAEIKKAVKKTVGRKKASQLVETAKSSIGVGYGLVSAKLKLELMIEELELLSKQLEQLEKAMEKALADTGYIKLILSIPGIGVVTAASFLGEIGDPMRFDHPRQICKMAGYNLIEDSSGKNKSKTKISKRGRKNLRSILYQMARTMVAVNTEMKELYQYLKTRPNNLLKKKQALVVISKKIVTVIYNLIKKQTEYQAELVLGEFRKNQIRQAA

SEQ ID NO: 196622 - protein, 400 aa, unidentified
MDERQRFRWFLGIDVSKETFDACCINSKGERLFSLSSSMNRKGFEELIKQVSSLSIPQESLLVGMESTACYHINLYSFLVSSGYTVIVINPLLISNFVKLQLRKTKTDKKDAYVIAQFLLLNRDSLSQTIVSSDISDLRDLSRQRESLVDQMSSTKSEIKRLLNITFPELEHIAGVFTKSMLRLLCQYPSAASMRQVKRSKIAKILIPGSYGKQTDASVDRIVKAAQVSVGTSSVTKEIILKQKASLLIQLEGHLQELTEVLMELCQAKIQEDMDILTSMKGVGEKTAMNFLIEMGGDIKQFESHKKLIAMAGLDPALYQSGKMDRKGRISKRGNRHLRRVIWLMTTKVIQFNEQFKQYYLKRIKDGLPYKKAVLATAHKLIRVMFAMLTNKTLFIPKMN

SEQ ID NO: 196623 - protein, 359 aa, unidentified
MREQRNKISFRGQKIYVGIDVHLKSWSVTVLSETSVLKKFSQHPSPEALHGFLARSYPGAEYHSVYEAGFCGFWIHERLTALGIDNIVVNPGDVPTKSSEKLRKSDAVDSSKLARSLRANELKGIYTPDSASLEMRSLIRLKNSITKDTTRQKNRIKSQLRYLGIGIPQEFLEPFSNWSKRFIAWLKEVETLTPSGRQALDIQIRHLEELRRQKLEMTRALRTLAKTDRFREPLRLIMTVPGFGQATGMAFLSEICDIARFRNAEQLAAYIGMIPMCHSSGEKDGTGDITVRRNAVMRCNLIEAAWVAVRQDPAMNLFFTEQCKRMPKSKAIVKVARKLVNRLYFVLKHQTDYVNSVMS

SEQ ID NO: 196624 - protein, 408 aa, unidentified
MDKLFVGIDVDLHKNTVYIMKPDGEKHSSFVVPNSPSGSRTMSQHIAAALREQALISVKIGMESTSVYGDNLVYQLREDGELGAFDRSVYVLNARQVKKHKDTFNDPPKNDNFDAFVIADVLRAGRVGRPDNSDHRYDSLQILTRGRYRMVQALVREKANFTNHLFLKFSGLAQDNPFSDTFGAAALAFIEEFDSIDTVVNMSLDELAKFLAEKSKNHFEDPNELAKSVQRAVANSYQLPKIVSNSVNQLLAISVAAIRALDKSIKAYDKEIARIVEVIPNTLTSIPGVGPVYTAGLLAEIGDINQFQSQASLAKYAGLAWRQHQSGNFTAEDTPMNKSGNRYLRYYLCEAANKLRNYDSDYREFYKLKYREVNKHQHKRALVLTARKFVRLVYKLLKDQQLYKPPGG

SEQ ID NO: 196625 - protein, 378 aa, unidentified
MHKDSVYLCILRENGEKIERVYGVLTPQLDSMRDFMAENEVSEVAMESTSVYWIPIWRVLVDSFELKLVNPYFIKQLPGRKSDVKDAQWIAECVMKELIRGSFIPPPLIQQLRLYDRRIFELNAELVRKYSKIDAILQRCNIRLSNYVSNTDCKSYKNVVKRISEGVTSPQELLMLVHKRIINKHGEDTILAALTGVVSEAEIDMLAQYVAESALLEDNKNKCIEKMREICNREFEEQMKDLQTIPGVSERSALTVLAEIGPDVNAFPSAKHLVSWCGFNPRNDESNKKIKSNKITHGNRFIRIASVQCAWAASRTKDCYFSKFYAFHTQVRKKFKLKVVVAVARKILVCIWHILKFNVSYKDFEPQKSVAKDCTQLA

SEQ ID NO: 196626 - protein, 331 aa, unidentified
MKNKEFVGIDVSKNVLDVFILSCKFHFTVPNSPEGFALLLEIVSSKLKDSFARVFFCFENTGRYSRLLSVFLQDGSFGFAALDALDLKRSMGLTRGKSDKKDARIIAIYAWRRRDELTTTKLAGPVLDQIRQLLTLRDKLIRHRTAFKNTSRDLHDGYFEGEFDFIKERQESMLSHLQQEVDLVDKEIIRIINLQNDILINYNLLRSIPGIGKVLAVYLIALTHNFTRFDTPRKFSCYAGIAPFEYSSGTSVKGKTKVHPCANKHIKSLLNMAAMASIQINGEYKMYYQRRLAEGRNKMSTLNIVRNKLVFRAFAIVKRGSPYIDLHKFAA

SEQ ID NO: 196627 - protein, 348 aa, unidentified
MDTIGLDLHKRESQLCIGQDDGQISELRIVTSRERFTAVLGTRPRAKILLEASTESEWVARHLESLGHEAIVADPNFAPMYATRSRRTKTDRRDARTLMEACRLGAYRVAHRVSSGRRHVRAELAVREALVRTRTRYIAVAKTLVRRDGLRVAASDSHLVARRIAALELSDTLSAELLPLFEILAPINEQIAAADRRIAALVAADPAMTLFATAPSIGPITASAIVATVDDVTRFASAHQFEAFLGLVPGERSSGEKRRIGRITKAGNSRVRYLLVEAGWRILRTKSAETAALRAWGLTIAARRGKRIAVVALARRLAGILYAMWRDGTPYQPTRLRTSAPASEQLMA

SEQ ID NO: 196628 - protein, 433 aa, unidentified
MGLIVPTTIHPEREDQPLPYEWFVGIDWGSQQHQVCILDRDRRLVGERTVDHDGASLAQRAAWLWTVSAGHPQRVAVALEVPRGAIVEGLVERGFHVFAINPKQLDRFRDRHSVAGAKDDRRDAFVLADSVRTDRPSFRRLQLDAPHLLLLRELSRVEETLLEEFRRSANRLREQLHRFYPQMLQLCSAADEPWLWDLLHLAPTPAHAMLLSEEQVQRVLKAHRLRRLKAPAVLACLQAPALPVAPGTAEAAQAHCGFLLPCLRVLAEQLQTCSQQVSALLSTLAEEPGEGESPSDVAMVLSLPGVGRKITAWLFAEAAQPLAERDYQVLRTHGGVAPVTKQSGKRRQVVMRHGCNPRLRHALYHMARVAMQRDAHFSSVYAALRAKGQRHGQALRNIGDRLLRILMAMLRHRTCYDASRIRCAPVAQMGQKM

SEQ ID NO: 196629 - protein, 401 aa, unidentified
MESPIVSIDVSNGNSHYMCFIKNNKRFGKVKKIDHDIEGFKRLLEDIQKLEAETNEKVCAVFEATGVYTKPLERFLNKNSIKTYMINPLESARKRKEEIHNKKTDKLDPISISKVYYDKEEMMELKKKDETYNWLRKKNRLYEDQLNHLRKYKVTFQNQLSICFPGYLDLFKDGYSDIPMTILKKYPHPDLLKNKKAETVARYLEKNTCHTHKVSLEYALKIIEFAKKTYPGCEKDDVEVEIFKILLDKVIETQRECEKTLNEMITVASTLEEYRYISSIDGIGPNLAARIIAEIGDIEEFKSREALVAYAGLDPHIYQSGDQDGKHLKISKKGNKYLRCLLFLAVGCSIRGAKDNPVNRFYQKKKQQSNPLNSKAAKTACTANLLKIIYGICKNKTTYER

SEQ ID NO: 196630 - protein, 335 aa, unidentified
MLHIGLDAHYRTSSICILDKSGRKVKQETIRGSWRKVVARLGRLTEPFGICFEASCGYGPLHDALSKIASRVVMAHPGQLRLIFRASRKNDRIDAEKLAKLLYLDEVPASHVPSLDVRQWRELIEFRRRLVDKQTMCKNQIRSLLRSNGFSSPRGLWSRKGLSWLAAQAWPTLSSRVRCQMLVEDYRSGLHKIRSVTRVLDAMAARHPGVELLRTIPGVGARTAETIVAYVDDPKRFSRPSQAAAYFGLVPRQDASGGVNRLGHITKQGPGTARKYLVQAAWQAVRRSPLVRQRFERLLAGNRQRRKIALVAVAAWLVRCMQAMLTSGEVWREAA

SEQ ID NO: 196631 - protein, 315 aa, unidentified
MTTAGIDVSKAHLDLALLGPSYQRNLRFPNTPEGREALLAALRLHHPQAIAMEPTGPYHLPLLKLLQAAHLPVGLVHPAQAKALRVGMGHRNKGDRTDALALARIALSWPEALRAPEALPLWLVELKALMGYRENLLKQKQMVEGQLETLGEGKGAVEAWLKEDLERLKGKLKEVEARVEALLSLVEEARVLLQEPGAGLWVVAAVLAYLPPGVWGKAKAAAAYAGLHPANRESGTSVRGSRLSRRGPGVLRRYLYMGAMVGRRWNGELGAYYEALIGRGKRPKQALVAVAHKLLRRMMGRLKAFYREKGVGGRS

SEQ ID NO: 196632 - protein, 360 aa, unidentified
MDELIKIHVGLDVHKDSITVAQALPGRDDARLVGKVAHDIPKLLKVLAKLGSPEQLHLVYEAGPTGFGLQRAGYVCEVIAPSKTPRKAGNRIKTDTRDAVDLARYSRSGELSAIWIPDPADEAIRDLVRAREDAVQARTQARHQLSAFLLRHSKVYAGKTKWCAVHDRWLAAVSFESSPSQTAFTEYWQAAKSVDARVERLSKALLGAIVGWRFEPVVGALATMRGIAAVTSIALVAEIGDFERFGSARQLMGYLRLVPSEQSSGDKTSRGSITKTGNGHARKLLTDAARISKDIQARQEGASEAVQAIAWKAQLRLTRRFAALRARGVHKNKVCVAVARELAGFVWAVGRQAQRESNLN

SEQ ID NO: 196633 - protein, 359 aa, unidentified
MQLQSKQLNFEGQNIYVGIDFHKKDWTVCIFSQQLEHKKFSQPPTSESLKTYLHRNFPGATYYSAYEAGFCGFRVHTELQSAGIKNIVVNAADVPTTHKEKVNKTDKRDSRKLGISLRAGELKGIHIPSRKTQEDRSMVRMRYTVRKDLTRMKSRVKSLLNFYGIEYPEQFSSPGKHWSCRYMSWLKTVKMEEESGRFTLQTLINEVEEVRKVQLAVTRQIRALSKTRSYQKDYELLSDIPGIGLITGMCFLTEIEDINRFSNTDQFAGYAGLIPSCRSSGEKENNGEITSRANKLMRDLIVESAWIAARKDPALHLAFCKLCKRMEPNKAIIRIVRKLLNRIYHVLKTKTKYVCGTVE

SEQ ID NO: 196634 - protein, 360 aa, unidentified
MFTERTSVGLDVHARSVAAAAIDGVTGELVQAKLTPSHDHIRSWLAAVPGPVAVAYEAGPTGFGLYRALSQAGIRCVVAAPSKLQRPSGDRVKTDAKDAVHLARLLRLDEITPVTVPTPDQEAARDLVRAREDCRGDLMRARHRLSKLLLRHGIVYFGGQAWTGAHDAWLRRQSFTSPVVRMAFESDYDAVLTVKARRDRLDKAIAVMAAGSEFTGCVRRLGCLRGVSTLTGFALAVEIGDWHRFTGRTIGAFVGLVPSESSSGPSRVQGSITKTGNTHARRLLVEAAWHHRPRYRPGTTLRDRWELAPPAARARGDAGNRRLHDRWVGFSLRRKRPVVANVAIARELAGWCWSLAVMDD

SEQ ID NO: 196635 - protein, 337 aa, unidentified
MRFCGIDLHSNNSVVVVTDEADRVLVSRRCPNELTKILGVLAPHRAELAGIVVESTYNWYWLVDGLIAEGYAVKLANTVAMKRYDGLKHSDDETDAAHLAHLFRLGILPTCYIHPPAERALRDLARKRIQLVRDRTRHVLAVENLLARQTGGHATSNAIKRWGQQDVAALGLPPDVALAVASNVAIIAVLNAEVTRLEHRLLEGVKLRPEYMQLKSVPGIGEVLATVIMLETGDIERFAQVGNYASYARCVDSIRLSNGKKKGEGNTKNGNAYLVWAFVEAANFARRFNEQARRFFERKKARTNSVVATKALAHKLARASYHVLKEGQPFDVNRCFG

SEQ ID NO: 196636 - protein, 368 aa, unidentified
MVVDIGGVAGIDAHKHVFSVAVLDARGGRCAIESFPTSPDGLADALALLDSVEFAIGRVGVEGSAGLGRHAAAFLAAAGFDVRAVPAKPTAERRRRRRRHKTDPEDAEAIARETLADPDLPAAGKQRRPDPDWDALAAVRNRRKRLINQRLRLRNEAEAVLVSLALTVRAVLPQTSRVRPRLRALQRGAASSIQVAAADRVNLAWLVEAAGDVTRLDAREGTRQEDPGPARPARLHVHRRVWHRAMDLLVEVGDPTRFATEAQFARWCGVAPMAVSSGEGDQAPTHHRLDLAGNRQVSSTLHVMHVTQVRSYPPARDYIASKRAGHKTKREARRAHTRHLANIVIRRMWADHAQRFETAANPATPTAA

SEQ ID NO: 196637 - protein, 371 aa, unidentified
MIIIGCDYHPGFQQIAYVDTETGELQERALQHREEAEKFYRELAAQGMKVRVGMEASGHARWFERLLAELNFELWIGDAAEIRTKRVRKQKTDRQDAQLILKLMLKDDFPRIWVPSWENRDLRQLLWHRHRMVQARTRIMNQLQAVALNEGLRYKKRLWREAGRKQLEAFRLAPWASRRRQDLLELLDHRLNPTIAELTQAIEREVEKCPQARRLQTHPGVGSLTALAFVLIIGQADRFRCGKQIASYLGLVPLEDSSGSRRRLGHITKQGNSRLRFLLVEAAQVTVRSDPEWRSKYHHLMMRRGRKIAKIAMARRPGGSDVLDDAQGMELRAVEKVRFARGTTRNRRWCEGEHRVIDWVSRSPSAWGSSK

SEQ ID NO: 196638 - protein, 344 aa, unidentified
MKKNLFFIGLDISKADFAASIYKTPGESIVTKEAIPNDRKGFEMLLLWLNDYHINKKNCRICMEATGVYSQAISYYLLFQGFPVSVEPPLKVKRAFDPVGHKTDPVDSKQIAEYAYRFQDELTSWKPRDEILEKIRQLLSIREQFTKQKVALDNSLQAYSKQRVQVALIKKAHQETLNQLKKQIARIDKELANLIKQDPQIFQRASNLDSIPGCGMLLAAHLLVITENFTKIQNSKRLAAFVGIVPYQHQSGTSVYKRAKIRHFGPGPSRKLLRLAAQSVATHNATFRRYYLRKLDQGKPKPLVLNNIANKLLKIACTIIRNNTRYIKDYRSINPMYLKSLKSA

SEQ ID NO: 196639 - protein, 313 aa, unidentified
MLNEVIVGIDAAKNKSDVHVSGSGTSFSCSTTKSGLRSLSRRISRIKPSLVVLEATGGYEFPVASALYKAGLPVSVVNPRRIRDHAKSIGRLAKTDCIDAGVIADYGRANRQHCRAFKVRQEQAVKEVVARRSQLIAERSAEKNRLKQASNPVVLKSIRKNIGNLNQDIKELDREIARLIKDNESWRRRQEVLTSFCGVGTVTSAVLIGMLPEMGEVNRREVAALAGVAPFNNDSGKQKGHKSISCGRGPVRAALYMATLTAIRRNPVIKEFYERLVKKGKPRKVALTACMRKLLTILNAMIATDTTWRPKNT

SEQ ID NO: 196640 - protein, 428 aa, unidentified
MIPRLRSRRRPAPRFEELGPESSSGTRVRAHEPSLLPWPPRKMSFQRAGVRQGHGGHQRKTRAADGARAPSAQGLDGIWGAPVSAGASRFDEVRLGPGAPDFDLDPKDMLHQACTGVDVSKDTLDFALTLDGERFSMRTFSNDKKGHKAAWEWLSEEAGGPWRLALEATSAYHKAFVAFFSGLGARPLVLNPKQARDLARGLGVLRKDDATDARVLAMCAVMAWREPEALPDAASETLQELSRRLDVLARLAADERKRLQKPGAGKGLLESVRRHLKWLVKEIERLEGEWLEAVVGCPRLFRAYSLALGVPGVGHKTARVVVSELYAAQRQRTVRQCAAYAGLAPHERTSGTSLRRPGRTVSTGNKRLRSALYMAAVSTLRHDAECRDLYLRVTGQGEHAKVGIVAVMNKLLRRIAAVVERGTPYVRI

SEQ ID NO: 196641 - protein, 409 aa, unidentified
MRYYLGVDWADQEHAVWTLDEGGRKISARTVAHTATELSEWGRELDEWRAQGIELWAAIERPEGRVVDFLLDHGVVVYPLNPKALDRARDRFRQSGAKSDPFDARVAAEFLRTDHGHLTALQPSSAAAQELKYLTEDCQRLIRQQTRLLNQLTATLKAYYPRALEVAELSTALARAFLTAYPTPDALSRLTERQWQRWARAQHLSASRTAELWSTLLAPQLPVPAHVVRAKARLMQTLLAALDPVLAGVAGYRQTIDDFFAGMPAAPTARTLPVGERGLLVPTLWARLGDAPDRWRSFRHLQAQAGTVPVTERSGKQRSIHFRYACDKTLRYVVDHLAFRSLQRSDWARAYYDQQRARGHGHRQALRALGAKWLKIIFVMWRDGVAYREEHHLANIARQQLRCSARKTA

SEQ ID NO: 196642 - protein, 418 aa, unidentified
MSGSKSSAILSVVHHICCGLDVHKDKISAALFITNEDGGIVEEIREFGAFTDDLQRLEQWLSDHACQVVAMESTGVYWKPVHNVLEDKTHVILVNAKHIKHLPGRKTDVSDSRWLASLLRHGLIKGSFIPERHVREWRDLSRLRRVYVDSLSDYKRRVHKLLECANIKIDSIASDLFSVTGRNLINLLVSGKDIELEDVYACTRGKLKGKEDELFKSIMGFFSDHHRFQLVSMLDLIGAVGKQISSVHDRLKRLLSDRKDKIDLLMQVPGISELSAHSILSEIGDTLEQFESSAALASWCGLCPGNNESAGKRHSGRSPVSSNHLKTIMTEVAWGAVKKKGSYYREKYYSLRARKGSKKAIIAIAHRIIKAVFHILKYVMPYRELGENYLINLNNEARLKSLHKHAAKLGYALVPLTA

SEQ ID NO: 196643 - protein, 380 aa, unidentified
MSTAATRSTQPAPTLHLAFDLGNRLWKLAFATSIAHAPRLRTMPARDLAQLDAEIAAAKARFGLAFDAPVVSCYEAGRDGFWLHRALTARGLTSHVVDSASINENRRARRAKSDRLDATALVRLLLRHHGGEGGVWSVLHVPSVDEEDRRHLHRELFTLTRERTRQVNRIKGLLALHGIVLPRLRGLPAKPPALRDWNDAPLPPALAARVAREWTRLRATQRELVALRTARRHLLASPEAATDPLLQKVQQLLALRGIGEVSAWLYTTEFFGWRAFRNRRQVAGLAGLTPTTRASGDLEREQGISKAGNVLIRSLAIELAWSWVRRQPTSTLSRWYRSRFATGGSRQRRIGIVAVARKLLIALWRYLETGVVPEGAILKT

SEQ ID NO: 196644 - protein, 345 aa, unidentified
MKIVGCDLHTRYQQIAMLDEETGELTERRLEHASGEAKEFYTKLTGAVRVGIEATGHTRWFERMLAELGHELWVGDAARIRAAEVRKQKTDARDAALLLELLRNGRFPRLWRPTNEERDLRHLLWHRQKLVWMRNAVGNQLHALAMGEGLCRKKQLFTKKGRGELQALKLDRWASRRRQELLQMIDPIDASLKQFDEAVNQQAAGTPEAVRLMTHPGVGPVTSLAFALLVGPVSRFSRSKQLVSYLGLNPREHSSGGRQRLGAISKQGNPMLRGLLVEAGHTAARLDPELRQDYQRLRLRRGGSVAKVAIARKLAVRMYWMLRRQVNYTQLVRMQGSSRATLVQQ

SEQ ID NO: 196645 - protein, 360 aa, unidentified
MAKAKLVHLSPVVGGVDTHKDLHVAAVVDQNNRVLGSEFFATTRQGYRQMLVWMASCGTVKRIGIECTGSYGAGLLRYLQSTGVEVLEVTAPDKMERRKRGKSDTIDAECAAHAAFSRIRTVTPKTRSGMIEALRVLKVCRKTAVAARRIALQMIQMNIVSAPDELRDQIRHLTRMQLIRTLASWRPDVTAYRNVQDAYRIALKSLARRYLELHDEIADLDIMITSIVDELAPELIKCKAVGYECASQLLITAGDNPQRLNSESGFAALCGVSPVPVSSGKTNRHRLNRGGDRAANSALHIIAIGRLRTDTRTQEYVAKRVAEGHSKMEALRCLKRYISREVYTLLRNQNRLINSTQITT

SEQ ID NO: 196646 - protein, 387 aa, unidentified
MQKPHDDSKACDATFVQDSTLVVVIEMGLSSWLVAGMIPGVSREPLKKIDPKAEELLQLLYRWRDEAIAAGKEITRIAVAYETGRDSFWLARWLRKRGIDAHVIHATSVAISREHRRAKTDRIDTAMLRRGFLGWLRGEPGHCSMAIVPTVAEEDAKRPHRERDSLVHERTSTINRMKSILIQFGVRNFNPVLRKAREKLDAVRTPEGIPLPPNTVAALRRHMERFCVINEQIKAIEQTRLQQLERDPADRFNAMVFLLVRIIGLGVETAEQLVREILSRQLRDRKAVARYSGLTGSPDESGSKRREKGLSRSGNGRVRKALIQLSWRMLQFQPESALVLWFKKRTENVQGSRKPMIVALARKLIIALWRYVNTGVVPEGFELRPAA

SEQ ID NO: 196647 - protein, 394 aa, unidentified
MRYVGIDIGSEQHVVAIVDATEVVLRGATKFAEDSAGHARLRELLGASADTLVAMEATGHYWKNLFAMLAGEGFAIALLNPRRTSRFAQEELERTKTDAVDALNIARFAAQKHPAVTRLPDRATDDLRELVRHRDRLVQDFGDRTRQLHRLVDLGFPEFKRHVHDLGSELATTILNEYPTAEAFHGLAPGRLSRLRYDGRHTVGPELAKTLIDLARVSVGHFHSPAYRLQVHHCCEDLGLLRRRLREIDADIERTLAEHEVGTLLTTIDGIGPITAARIIAEVGDPAAFLSPATLAAYVGVVPALKQSGKRQPKRAGCSSIGNARLRAALWMPTLTAVQKNPWLKAYYERLRARGKLPKVALVACMHKLLGAVHSVARRRQPFVPFITQPETPA

SEQ ID NO: 196648 - protein, 340 aa, unidentified
MKLYGAIDLHSTNNVTVVIDEQDRVVYQKRLPNDLALILNELSVYQSELQGIVVESTYNWYWLVDGLMAEGYKVHLANTAAIQQYNGLKYTDDNSDARWLAHLLRLGVLPEGYIYPRADRPVRDLLRKRSQLVRQRTTNLLSIQNLMTRNTGSSLSANQIKGLDVQQVDELLPNGDLALAVKANLSVLCSADEQTKILERTVIERVQLRPQFSFLKTVPGIGKILALTIMLETGDIRRFPSVGNFASYCRCVGSQKISNGKKKGKGNTKNGNKYLAWAFVEAAHFAIQFNSKIKSFYQRKKTKTKGVVAIKAVAHKLCRASYYIMRDRVPFNITKAFGQK

SEQ ID NO: 196649 - protein, 489 aa, unidentified
MSRKKRKNKQGVSGNKKPLEVRNASAKPRTTRRGGLPVDNAPPPIESLKQVNANAAGIDIAANVHFVAVPKDRDAEHPVRSFGAFTADLDAIADWLSECRIETVAMESTGVYWIPLFEVLERRGFTVILVEPSQIKKFRRKTDVLDCQWIQTLHTFGLLTGSFRPEDQIIVLRAYMRQREMLVKSAAQHIQHMQKAMEQMNLKLTEVISDILGATGMAIIDAILAGERDPHQLAKLRNEKCKNDEATIALALQGNWRDEHLFSLRQAMDLYRYYHQKIVEVDNQIEAYLRQFDDQSGGKPLAKPPRAKQRSKTTNEPKFDTRTMLYEMLGVDLTSIDGIGAHSALQIVSEIGITVDAFPTEKHFVSWLSLCPEANKSGGKKQKKGKSPTHRSSNRVAQTLRVCAQTLIQSKCALGAFGRRLRGRDGAASAITAIARKLAIIVYTMLKTGRPYKDIGADAYNGRFQEKLVASLRRRATELGYDLQPNLAV

SEQ ID NO: 196650 - protein, 389 aa, unidentified
MQASNVCTPTADHNGTIFVTIELSQRSWLVTMHSPDRDRISRHKLEGGDHAGLLALIEQVRARAADKLGSQASVVSCYEAGYDGFWLHRLLTAAGITNLVFDPASIAVEQRARRAKTDRIDGELLLRTLMAHLRGEPRVVRIVRVPSVEQEDARRASRERDRLVKEQTAHTNRIKALLRLVGMAVGNPRRSDWLNWLGRQRDWQGCPMPPHLLAEVTREHARLMLVRQQLAALAPAPATQEAPAVQQAPAVPAQMIERRNLLLRLKGVGPAFAGTLASEVFYKDFRNRREVAGYCGLAPSPWRSGGIEREQGISKAGNPRARHKAVELAWLWLLHQPDSALARWFRERTVNTSKRGRRIAIIALARKLIVALWRYLMTGLVPNQAVMKA

SEQ ID NO: 196651 - protein, 396 aa, unidentified
MQDTQQRDAVDVFVGVDVGKGHHHAVALDRNGKRLYNKALPNDEAKLRALIAELKTHGRLLFVVDQPSTIGALPVAVARAEGVLVAYLPGLAMRRIADLHAGEAKTDARDAAIIAEAARSMPHTLRSLRLADEQLAELTMLCGFDDDLAAQVTQTSNRIRGLLTQIHPALERVLGPRLDHPAVLDLLERYPSPAALAGTSEKTLANRLTKLAPRMGKGLAAEIVQALSEQAVTVPGTQAATIVMPRLAQQLAALRKQRDEIAAEVERLVLAHPLWPVLTSMPGVGVRTAARLLTEVAHKAFASAAHLAAYAGLAPVTRRSGSSIRGEHPSRRGNKVLKRALFLSAFAALRDPVSRAYYSRKIQQGKRHNQALIALARRRSVRHAARRHHLPTQVSP

SEQ ID NO: 196652 - protein, 365 aa, unidentified
MGYKRAPHNFNPTPCPRTSTAHSAVAVIGIDIGKNAFHVVGLNDRGAIVLRQKWSRGQIEARLANLPPCLIGMEACVGAHHLSRKLKALGHDARLMPAKYVRPYSKGQKNDFRDAEAIAEAVQRPTMKFVATKTVEQLDLQALHRVRERLVSQRTGIINQIRAFLLERGVAIRQGLRFLRAELPRILATSPDVLSARMVRVIRDLAEDWRRLDERIDQLSSEIAVLARQDAGCERLMSVPGIGPIISSAMVAAIGTGEAFSKGRDFAAWLGLIPKQISTGDRTILGKISKRGNRYLRVLFVQAAWVVLIKPMSWERHGLRSWIEAAKKRLHRNVLAIALANKLARIAWGVLAGGRIFEASKLQAA

SEQ ID NO: 196653 - protein, 352 aa, unidentified
MDYFAGLDVSLEMTSICIVDADGAGMKEAKVASEPDDLVAFFGQCGMAMKRIGLEAGAPSQWLYGGMAEAGLPVVCIETRHAKAALSAMPNKTDRNDARGIANIMRTGWFRAVHVKTQTAQELRFLLVARQTLVRKLMDIELAIRGMLRSFGLKMGVVSKRNFEARVLELAGDRAMLMRALTPMLKARRALALEYTNLQKAATDFARDDDVCRRLMTVPGVGPIVALTYRATIDVPSRFRRSKSVGAHLGLTPRAHQSGEVDWTGRVSKSGDAMARAALYEAAHILLIRVKRWSSLKAWGMRLVKNRGHKRAVTALARRMAVLMHRIWVEGTTFIWKTGDGQAIAQRPIPAV

SEQ ID NO: 196654 - protein, 403 aa, unidentified
MQHVIAFDVSMGKSYMVIYNAQKQCIFESEINHSKPDFEELRKRIDQLMNENKKSPHIVFEATGVYSRQLERFMQDNKFEYFLLNPLEAKLQCDSLRIHKTDRSDAHQLALTHFTASRREKTGTDNLFYQLKSLSRFYSELDDELSLIRSRMHKVIQLTFPELEQIFTTKSDLFLNFVQLFPHPDFVQNLSKTVMKNQIRKNTNKNISISIAEKTAMEVLEAARYSYPAVRQDDVLCEQLKSYAKRYQELLYQKEQCITKMVRLAESRTEYPIILSFPGIGPNTAIRLLAEIGDITRFENNKQLNAFAGIDIRRFQSGKTFFKDKINKRGNKHLRKLLFLIIQNMIKLRRYGQNHIVEYYDKLKTQPYNKCHKVASIACVNKLLKLLFYLITHNIHYDYRLTA

SEQ ID NO: 196655 - protein, 349 aa, unidentified
MRRPKEKLIAGIDLHSNNLVIGVINQDGKRITHRKLDCKLAEVEEFLRPLKPQLQSMAVESTFNWYWLVDGLQAAGYPIDLANPARIEQYSGIKHADDKHDAFHLAELQRLKILPKGHIYDAQLRPVRDLLRRRVMLVQHRTALMLSFKSLYNRTTGEQMDLARLKGMSPQEGPKLYQHPANQLIAQIQLEQIEALDENTRRLEKAVLSCAREIPLYQKLLTLPGVGRILGMTITLEVGDIRRFKTDGNFASYCRAVDSRRLSNGKQKGENNQKCGNRYLSWAFVEAAHCARRSYDDCRRWYDRKKAKTNTVIATKALACKLAKAAWHVMAEGTDYDASRMFPEGTAKK

SEQ ID NO: 196656 - protein, 324 aa, unidentified
MIDGILGIDVSKNTLDVSISSCGKVRTKSFANTSDGWHHLLDWLLAQKIQRVHACLESTGRYSLGIACALYEAGHVVSIINPAQVRDFVRTKLGRNKTDGVDASRIREYCELFKPLPWAPPSEAHRRLGELQTIRSGIIAGLTEWKNRKNSGIIDAEAQALADATILHFTSQIGAVDKAIALAIENDADLRSKRDLLLSISGVGDTLAGVVLAELPGPDVLHSSGEVVAYAGLNPRQHRSGTSVDRATRISKIGNAVLRAALYMPALSAMRYNPAIVALVTRLKSRGRLKPKQIVVAAMRKLLVLCFGVLKTGKPFDPAIAMGR

SEQ ID NO: 196657 - protein, 426 aa, unidentified
MRVMYDRVAAIDVHKDMVKVAIRVPGAKRGTRKTDVLEFRTFYGVLQAMARELRRRDVTHVVMEASGVYTDPVYYALRELDFTEVMVINPAHAKALKGHKTDAKDAIRLLDLYECGLLSGSYIPDPDLREVRDLARYRMKTVQARTSEIQRLQKTLETAGIKLSSVVSDVTGGSATAMIEALISGERRGSVMAGLAQTRLRTAGKMADLSMALAGRFTDHHALMCRLHRDRITIFDDAVKDLDAKIAPLVARYAREAELLKTLPGFGDVIVAGWLGAIGPAPHQHFATASRLASWATLCPGNYMSAKKSKGGRTGDGGAYIKPLLIQAAWGAVRVPGRLQARFGRLVRKFGGPRNKGARKRAITAIAHTLLKIAYTVLKTGKPYADLGADFYTRRESPDARQGYLMRQLQKLNPGCVITIIPAEAA

SEQ ID NO: 196658 - protein, 375 aa, unidentified
MLYLGIDQHAMQLTIDLGDEEGNLVDHRQVKTEPEKLTKFLQDMQQRAAPDGGYVAIVEVCGFNTYLLALLKQHGCTKTILVQPEHRDKRKTDRRDARRLRELLWLNRQHIMQGNRVAGLRIIRPATKSDNDSRQLTILRTRLIRLRTMAINKVKGLLRKHNLQHACPTKGIQTKGALAWLQQLKLDEIDRLEMDILLARWKLYNEKLSIVDSNINERQQQDDKATIISSIPGLSAYGSLAVASRVGDHRDFPRAASLANFWGLTPSSNSSGKTIRLGQITKEGSSVVRYVLGQAVLHVLRQDPWMRGWYQKIKRRRGSKTARVAVMRRLATIIWSMLTYDVPYVKGGPDELRKVIELKQAFSQESQEATAASST

SEQ ID NO: 196659 - protein, 336 aa, unidentified
MKSWTATVRVENTFNKTFSQDPESKVLFNYLKKNFPGANYFSAYEASFSGFSAHRELNELGIKNIVVNPADIPTTDKERKQKDDPRDSRKIAEQLAASKLVGIYIPGIEAEGDRAMLRFRRTLTKEIARNKNRVKSFLYYHGKIIPEQFADKKYWSKRFTKWLQEFELLSESSRVTLTELVEVVEFLRKKQYKILKKIKEQSQTKNYKKNNELLISIPGIGLITAMSFLTEVEDIARFSNLDKFCSFVGLIPTTNSSGEHEAVGNITKRQNKILRSLIVESSWMAIRNDPVLILAYGKHVKRMKPTKAIIRVAKKMLSRIRYVLREQKLYEYAVVK

SEQ ID NO: 196660 - protein, 350 aa, unidentified
MKLHAIGIDLGKTVFHLVGLNQAGEVQVRKKFSRTQLLRFTANVRVDLIGMEACAGSHFLGKALREQGHEARLMPAQYVKPFVKTNKSDFIDAEAIAEAVIRPRMRFVPIKTDEQLDMQSLHRVRERWIMRRTSVVNQIRGLLLERGITVRTGRCHLDAALPNILEDGLTSLSGTVRFLLVELKRELEQLAEHIEQAEILIQRAAQQSEACRRLDAIPGIGPLTATALIAAIGNGGAFRKGREFAAWVGLVPREHSTGGKQKLLGISKRGNSYLRKLFVQGARAVLKYRDKQCSGLKHWLAELSSRSHYNIVGVALANKLARMAWAVLASGDSYRPPAQAGTTGLQMAAV

SEQ ID NO: 196661 - protein, 398 aa, unidentified
MTESSDYESVQVFIGVDVGKDTHHAVAINRSGKRLFDKALPNDENKLRSLISDLKQHGQILLVVDQPVTIGALPVAVARSEGVLVGYLPGLAMRRIADLHAGEAKTDARDAAIIAEAARTLPHALRTLKLADEQIAELSMLCGFDDDLAAQTTQASNRIRGLLTQIHPALERVLGPRLDHPAVLDLLQRYPSPEKLASLGEKKLAAQLCKLAPRLGKRLAADIAQALAEQTVVVPGTNAAAVVLPRLALQLITLRKQRDEVALAVEQRVLAHPLYPVLTSMPGVGVRTAARLLTEVACRAFASVAHLAAYAGLAPVTRRSGSSIRGEHPSRRGNKALKRALFLSAFAALRDPLSRAYYTRKMSQGKRHNQALIALARRRCDVLFAMMRDGTFYTPQAS

SEQ ID NO: 196662 - protein, 309 aa, unidentified
MDPQVSLSVVGIDVSKASLAVCYQAERQVRYLEGSNTKTGFEQLLQASGTNCLFVMEATGTYYLLLAYYLHAQGAQVAVLNPLVVKRFIQMHLGKGKSDRKDAQWLLRYGQQQATKPWQPEEQVVVECRQLEQVSEQLIKQKTMIINSLEDLTQQPVQSAGALKQLQQTLQLLGQQQQVVEQELLNLLEQRYAQELALLCSIPGIGRKTAALLLLFAGGFTTFDNYRQLIAKAGLSPREHTSGTSIRGKVCITKMGGGLIRSKLYMCSLSAKKGNAACRALYDRLVAKGKNGKVALIAVCNIEEGRVRG

SEQ ID NO: 196663 - protein, 375 aa, unidentified
MNSIIYLGIDVHSTNFTFCALSVTLGEAPKVIAENQTEADGICALEMVEYLKKQYGENTNVICGYEAGCLGYTLYHTLESHGIECKILAPTTMPSTRGKKRIKTDKRDAKVIAENLAYNTCSFVTVPEDGDMEIRDFIRMRDDHKLALKKVKQQILSFCMSHGYRCASKHWTIAHIKWLRTFECTKMHREILNEYLLTFDSLMEKINRFDSRIEELSFGEKYHQDVKNLSCLLGIKTIGALSVLVETGDFTRFPTAQKYASFLGLVPGEHSSAEDINRLGITKAGNTHLRKILIEASQGICKGTPGYKSKDLKARQQGCDAKVIAYADKANERMRRRYYKLISKGKKRNVAVTAIARELACFIWGIKTGNIGIAS

SEQ ID NO: 196664 - protein, 423 aa, unidentified
MKNSAAKKRKEVPAEYLVIGIDPHKKKHASVFMTQDFTIQSKFKFDNSREGFNMVLEKARTVMLKTACRGVIFAIETGAHHWRNLAYFLDEKGIPFRLINQYTLKRRREGKDLNHRKNDYRDSEVAAELLCTGEFTATRLPHGVYAELRAAYSSYRRLVKERTRIMNLIKSLLDGLFPEFTQVFKNPCGQTAATVLRICAGPRAIAGMSESKFEDVIKAACQGRIMRRKLQDLHRVAGTSIGIEEGAESVSSEISFLIENICLIDQRLFLIKETLARLVNQTFEGKYLLSIIGLSYVSVAGMLAELGSFSSYQNAKQLIKMAGSNPTESESGGKRRSHTPISKQGRPALRHCGWTAVIPMLRFNPDFRDWAKKLRERPVHDNPINGREIVVAAVNKLLRLSFAMVKKQTYYRTPVSQPAGIGI

SEQ ID NO: 196665 - protein, 327 aa, unidentified
MTHAILGIDIAKAKYDVALIHHERVMDKQFENTLSGYQQLNAWLKKQGIEDLHICLEATGQYGDGVAQYLFEQSYSVSVVNPARIKHYANSKLRRNKTDKADAQLIAEYCLREKPALWTPPPAIFKDLQAMTRHLEDLLQSRQQQTNRLSSGVHTPAVIKSLELVIACFNDQIKQIKADIQAHIDQHPELRRQQDLLVSIPGIGKLSASKLLGEIRNVTDFEDARQLSAYAGLTPRNVSSGTSVHKKARLSKTGNANLRKILYMPAISAKHHNPIVSQFCDRLLHSGLRPMEVIAAAMHKLLHLIFGILKTGRPFDPNYLPKLQVLS

SEQ ID NO: 196666 - protein, 342 aa, unidentified
MEYYAGIDVSLEASSLCVVDASGKIIKEAKVSSEPEALIAWFKALPFVLARIGLEAGPLSQWLYAGLKEAGCAVELLETRHVRDAFKAMPVKTDRNDARGIAQLMRLGWFRPVHCKSAPAQETRAVLTARKLVQGKLYDIEMSLRGILRGFGLKVGRTTKAGFASRIMELTEHHPALKAIAKGLLAVHEVLLKELNGFEKEVRKLAKSDARTRLLMTAPGVGPIVGLTYVAAIDDPARFSSSKTAGAHFGMTPKKYQSGEIDVTGRISKIGDKSVRTALYEAAHVILTMPVKGGALKSWAAKLAKRSGMQKAKVALARKLAVILHRMLADGSAFDAAKAAAA

SEQ ID NO: 196667 - protein, 444 aa, unidentified
MDVHQRSISVCARTRMARDRFRTETAVFRTFTQDLERMARWLSERRIRHVAMESTGVYWKPVWNVLEAGKAKFELVLVNPQHIKALPGRKTDQQDAERIATYLQEGLLRGSFVPPQPVRELRELTRRRTHLQGERNRVINRIIRLLETANIKLSSVLSDVVGQSGRAILNAIASGQTAAGDLATYTSSRVRHSRAEFELALEGRYSDHLRWLLGQLLEELDHVGRRVALVDLRIGQLTQSHTELIARLCTLPGVDIITAHTIIAEIGTDMSRFPDARHLASWAGLCPGNSESAGKRFSGRTRKGDRYLRRMLIQNAWAVAHMKDCALTALFRRIAANAGMKKAAVAVAHRILMLAYYIIRDGGVYREAGGDVYDRRNPERTAKRLARRLQRIGFEVTLKPALRPSPPPPGPPLPGQTCLRCNRWGIACIHLRPRSPNPRTESTR

SEQ ID NO: 196668 - protein, 410 aa, unidentified
MEVLHTHCAGLDIHKETVVACVRHMAGGKIKAEVRTFAAHTAALLDLSVWLATEQITHIAMEATGVYWKPVWHILADGDFQLVLANAAHVKNVPGRKTDVKDAEWLADLMAHGLIRASFVPDEPTQQMRDLLRTRKQLVRERSSHTQRIQKALEDANIKLDCVVTDILGLSGRRILAALIAGETVPQALATLAHRRIHASTDELEAALRGRVTRHHRFLLKLHLDQISAIDAALASIDKEVEGNLDTFRPAAQLLTEIPGISQLSARIILSEIGLEMNRFETSGHLISWAGLCPRNDESAGKRRSTHMKKGAPWLKTTLVQCAWAAARTKNSYFQAQYHRLRARRGAKKAICAVAASLLTTVYHMLKNGSCYQDLGPNHFDQQAKTKHIMRLVNRLENLGFDVQIVPRAA

SEQ ID NO: 196669 - protein, 364 aa, unidentified
MDVHLRSTTVCALDAETGEAVTRRFRGNPWGEVAEWMSGFPGPSLAAYESGYLGFAPQRELSGLGVDCVVAAVSKVPRSAADFSSKNDRNDAARMAKAILSHDISPVWVPSPEIEGLRDLAGAHDAATARLAAAKQRLLAFLARRGYAYGGTTPAGNPRRYWTYDFLRRLDKVRPADDGGIRALAALRNEVEAAAETRDDLLAEYRAAVAAGPLSAEVEALQSIKGCGFALAAAFASEVGDFSRFRSGRQVTSYFGLAPKQRSSADSVRLGGISGAGNALVRRLAVEGSWSYVQASHQPKLMPKGSGVPLEVRMHGRKGSERLLRRREEMLARGMPQAKANAATAAELVRWLWALGAMCREATE

SEQ ID NO: 196670 - protein, 369 aa, unidentified
MVDSIRSIDCQVIVGLDIGDKFSTIIVLNPDGEILDEGRVRTTAEALTARFQGLPRARVAIEVGTHSPWVWKLLEECGHEVLVANSRKLRLIYQNDKKSDKVDAEYLARLARFDPKLLSPIQHRGLETQQDIAVVRARDTLVKTRTVLINTIRGSVKSIGERIPSSSAHNFHKKIADSIPQELRPALTPLLETIEEVTTRIHALDNRIEELCETKYPQTKALMSVTGVGPLTALAYALVIGNPARFKKGRDVGPYLGLVPRRQESGDLQPQLRITKSGDKLMRRLLVGSAHYILGPLNQADSDLRRHGEAIAGRGGKNAKKRAAVAVARKLAVLLHRLWVSGEEYEPLRNSKRRARTKRQTPAQAPAPR

SEQ ID NO: 196671 - protein, 261 aa, unidentified
MTESSDYESIQVFIGVDVGKDTHHAVAVNRSGKRLFDEVLPNDENKLRALISDLKQHGQILLVVEQPATIGALPVAVARSEGVLVGYLPGLAMRRIAELHSGEAKTDARGAATNAAVVVLPRLALQLITLRKQRDEVALEVEQRGLAPPLYPVLTSMPGVGVRTAARLLTEVACRAFASAAHLAAYAGLAPVTRRSGSSICGVHPSRRGNKRFKRPLFLSAFAALRDPIFRAYYTRKMSQGNDTTRRLSPWQDGAATFYSP

SEQ ID NO: 196672 - protein, 331 aa, unidentified
MKKVTETIGIDVSKLTLDVYVRTTKVHKQFSNDVKGFRQIISWTIKQKINLEETLFCFEHTGWYCLLLSYFLFENKHRYCCINAIEIKRSMGLKRGKSDKADAWEIANYAWLRREELIPSVPPAKKLIELQRMMSLREQLVKQLTASKNLFKGMQEIVIDELNDVSLGILKENMNQLEKQILTTEKSINELIKQDETMITNYKLSKTVKGVGMVLAVQMLLHTHNYTRFESPRQFSAYCGLVPYPYQSGTSINGRNKTHPISDRKMKSLLSMSAISAIQHDKELKLYYQKRVEEGKPKMVVLNIIRNKIVSRVFATVNRGTPYVEMSKFCA

SEQ ID NO: 196673 - protein, 346 aa, unidentified
MQHYVGLDVSLKQTAVCVVDQAGKIRREGMVASEPKAIADFIAANAPHVVRIGLESGATSTWLWTELKKFGLPAICIDARHAKAALKMQINKSDRNDAVGIARIMQCGWYKEVRVKDLDSHAIRALLSSRALLVELKRDLENQIRGLLKNLGLVIGRCKLNTFTARANELINGKPALAAAVEPLLKAREAIGRQIADLDRKVLRLARSVPQVRRFMTVPGVGPITALCYLATIDDPTRFRKSRSVGAYIGLTTRRYASGETDRTGRISKCGDGMLRSYLYEAANVLLTRVAKWSALKAWGMRIARRRSLSKARVAVARKLAVILHRMWIDGTEFSWSSEGTTMQPA

SEQ ID NO: 196674 - protein, 318 aa, unidentified
MPQITWLVGIDVSKNKLDWCIRGAAGATAGNTAAGCAALAKELERRGVRLAVMEASGGYERPMAAALRQLAIEVLIVSPKRVRDFAKAAGRRAKNDPIDADTIAWFGEIFIRQGSARPDPAREQLAALVAERQDVVGMRVQCLNRDEHQSPALCRKLRKDMIKFLDQAIVKLDAAIAALIAQTPPLAERAALLASVPCLGRQTVAALLAWLPELGQIPNTQVAALVGVAPFDDDSGKHRGARHIAGGRRELRNILYMAVLGGATQHNPTLKAFYQRLLAKGKLAKVALVACMRKLLTILNIMVTRNQPWQPQPTPALA

SEQ ID NO: 196675 - protein, 468 aa, unidentified
MNSKSITMKTAYLGVDVSKGYADFVLIDEDMQQLADPTQLDDTTKGYKKCEQWLRKCINKHDLTQIRAAVESTGGLENNWIASFKTMLSGFDLSMIRLNPATVKFASKATLSTVTTDEKSALNIAQYLVRYGKSLDFNAPESPYLAYKKVLMQLRYLTKINTGSKNIFRQLLYETFPELQAFCPKDVPNWLIELLKKYPTPSRLARAKPAVIAKIKGITVEKAEQLIMAAKNSAASAKDDSIGLVMDTQIRQIQYEKEQIKKLKLYLERNVKGPEIDLLTSITGIGTYSAAVLMILIGDCNRFPSPRKLASFFGVTPEIRQSGDKKGHSKMSKKGSSLARATLFMCARSAAIHDEHMKRIYTNHITRGKNYYQAIGVIMHKLLRMCWGVLTSKTPYNPAIDQKNQQNPVSNELQKDQEWINKRKEQAFDPLAPVSNRARKQRKEHLLSQAVRDGHVRDLESAPLLVET

SEQ ID NO: 196676 - protein, 389 aa, unidentified
MLLDHPSDEPTAIRTHIAAIFVSLELSRSTWLVTSLSPGKGERMSKHGVTAGNVAELLTLFAELRRKAEVRTGQSYPIITIQEAGLDGFWLHRVLQQNVIESHVVDPASIAMPRRRRRAKTDRLDGETLLRACLAYKRGEPRVCAMVVAPSPEEEDRRRLCRERRTLIDERITHVNRIKGLLFAQGICDYGPLRRDRRARLEALRTGDGRELPSHLKAQIGRELDRIELLLDQIKAVEAAQDALLATARKPASEEAVPDPVTMLLALRGIGSNFAAVLWSEAFYRQFANRRQVAAYAGLAATPWQSGGIRHEQGVSKAGNPRLRTTMIQLAWLWIRHQPQSALTHWFKLRSQQGRKRAIVALARKLLVALWKYVTQGVVIEGAAMKPAA

SEQ ID NO: 196677 - protein, 450 aa, unidentified
MSKKKVIKSKKVKINEFTVLHPNAAGIDVSSKDHVVAVPPGRDKATVRTFGCFTCDLKAIALWLLSCNIDTVAMESTGIYWKQLFVVLQEHGIEVYLVNSKHVKNVTGKKTDEEDAQWIQRLHTCGLLSNSFQPKEDVRTLRSLVRQRKTHCNNKSRYVNRMVKSLEEMNIKLNLVLSDITSVSGQKIVAAIIQGERSAEKLMTLMHHKVKAPREDILKAFEGCWREECIFELEQTYDLYNFIQQKIGECDKKIEVQLEIIAAKANSGDVTGLQESAKKKTCRKNELGFNVNAYLKAIIGTDVSKIYGISDDTSLILYAETGGDLCSFKTANHFASWAGLAPNNRISGGKIISSHLPKKKHPIKKALLRAANSVYRSDNTLGDYYRKMKARLGPKGAKCAVARKILVIYYHMVTKKQPFNIELLKQQQHDNKQKRVLYLKKQLADLEMVA

SEQ ID NO: 196678 - protein, 341 aa, unidentified
MKFSKKLGKINLKDALSIWLDVSMKKIDVCIWGKEEEVFLQVKNEEKALRRFSEELRKGWLEDSIPIVIESTWDLHLLASLVLSKYGFTVKEINPILTKHYVSHTIRWTKTDKTDAKTLAKIWMIEGEQLATFNRTEELIGIGKKVSLIASLETQIQWLKASIKGYKKTANNLGLEMWENIKDLEKIVEDLEDKVKDLQEEIASHKFSSPEAEEVIERIDSITWITKYTATVCYISFAHKSFRSKESMFAFIGYDPKLKQSWDKNIGIRISKRWNPYVRKRLFQSAFCSVQHCELFKNIYQSMIERWKHHFMAVISIIKKMVHIIRSMIKHKTYFKPSLTL

SEQ ID NO: 196679 - protein, 315 aa, unidentified
MSHDRYVGVDVSQAQLDVAVLPQGSRCRVANDDAGFDTLVSWLGEPGGALVVMEATGGYQTAAAGALAAAGFDVVVANPRQVREHARSRGRLAKTDKLDAEAIADFAQRNQPPVRPLPDAQAQLLQALMARRRQLQDMLTMEKNRRKQAPQALAARIADHIQWLQEQLASLDDDLGQQVRQSDIWREKDNLLRSTPGVGHVTSRTLLAALPELGELTSRQIAALVGVAPLNRDSGKFKGHRTCWGGRAHVRSALYMAIVSAICYNPVIAAFYQRLKAAGKPTKVAMVACMRKLLTILNTMLKERKPWQPKMPANA

SEQ ID NO: 196680 - protein, 326 aa, unidentified
MVSSCPLPVVGLDVSKATLAVCYHLDQQVRHLEVSNDKAGFAELLHVCGAQSLFVLEATGTYYLALAYYLHEQGGQVAVLNPLIIRRFIQMHLGKSKTDRKDAHWLLRYGQQQAVKLWQPAESVLVECRQLEQVTEQLLKQKTMVSNSLEALQRQPVISPLAQQRLQQTWQLLDDQVQALEAELLTLLETRFNQEMKLLRSIPGIGRKTAGLLLLFAGGFTRFDNYRQLIAKAGLSPREYTSGTSVRGKVRITKMGGGLIRGKLFMCSFAAIKFNATCKALYDRLVAKGKNGKLALIAVCNKLLKQAFAIVKSGIPYQADFTKISA

SEQ ID NO: 196681 - protein, 343 aa, unidentified
MQSIATIGLGIAKSVFQVHGVDAAGQVVPRRQLKRRYVLTFFEKLTPCLVGIEACASSHHWSRELQALGHSVRLMPPAYVKPYVKRQKNDMADAEAICEAVTRANMRFVPTKTPEQQSGLMLHRTRHLFMRQQISVINAIRGQLAEFGIVAPVGRRGVEELLRVVADPNDKRVSEVVRACLAALGSQLLSLKKQILDFDRIIMAWHRSNQTSKRLNCIPGVGPLLATALVASVADPKNFRSGRNFSAWIGLVPKQHSSGGRERLGSISKQGDRYLRSLFVAGALAVIRYAKIHGTKHRPWLTALLARRPTKVAAIALANKLARMAWAMMATGERYNYPASLKI

SEQ ID NO: 196682 - protein, 377 aa, unidentified
MDCIFEVKKQNNQLKRTSMQRNKLSYNGQKIFIGIDVHKNLWGVAVVCEGGFEDYHTQEPSAEKLFEFLQKHYPDGEYHAVYESGFSGFSTYYSLVELGIDCMVINAADVPTTQYEHTMKTDQIDARKLARSLKSGLLRGIYIHSKENIDARSVVRIRRTIQKQLGGCKSRTKHLLHSNGVTIPERFNKSGSYWSRVFIKWLQEDVQLLSPTRDSLDLLLEQVSVIRSTLLRANRKVRELSRSQLYRTRYELLTSVPGIGLNTAMALLTEVGDFGRFHNEREFASFLGLIPTCHSSGEKTSHGEKTFRGNKTIGPMIVEAAWVSITRDRGLNCAYSNYRQKMKPQEAIIRIARKLANIIFAVMKTETQYVPYQWSNT

SEQ ID NO: 196683 - protein, 343 aa, unidentified
MQIHSVGIDLGKTTFHLVALGAHGKVLLKKKFTQRQLITFPANLQTSLIGMEACSGAHFLGRALRAQGHEVKLVPAQFVKPFVKSNKNDFIDAEAIAEAVTRENMRFVPIKTDDQLDLQALHRVRERLMARRTSVINQIRAFLLERGIVFAKSPIRLREAIPDVLENANENFTPRMRNLVAMRWSEWKDLELQIVEMNDEVERIASSDDACRRLRQIPGIGPLVATAIVASIGNGAAFHMGREFAAWMGLLPKQHSTGGKARLSGIGKRGNRYLRKILVHGARAVVLRSKRDRIAMGAWITSLERRAPRNVLIVAMANKLARIAWAVLSTGQDYRAVPDTVAA

SEQ ID NO: 196684 - protein, 370 aa, unidentified
MKKHSTRPQSPRGAAARSKGPITIGLDLGDKTSRYCVVGDNGEVMSEGSVATTRKAMAQKFSGMGRCRIALEVGTHSPWLSRLLSKLGFEVIVANARQVQLISASSRKNDRMDAHMLARLARVDPELLRPIRHRSEQAQADLMTIRIRAALVEARTSLVNAARGFTQAMGERLPACDTDSLGVEKLEALPAALQPRLQPLLEQIEALTAQIKKLEGHIEQIARIEYPETRLLTQVSGVGTLIALTFVLTVEDRERFQKSRDVGCYVGLRPKQSESGQSQPQLRITKEGDRYLRTLLVQGAHLILNRRGPDTDLKRWGLKLAQRGGKNAKKRAIVAVARKLAVLLHRLWVCGEVYEPLRNSRPTPASKHAA

SEQ ID NO: 196685 - protein, 357 aa, unidentified
MPAHSETAKPSTQVAVIGIDIGKNVFHLIGLDKRGAIVLKAKLSRSQLENRLANLPPCLIGMEACAGSHHVSRKLIALGHDARLMPAKYVKPFLKGHKNDYRDAEATAEAVQRPTMRFVATKTEEQLDLQALHRVRARLVAERTATVNEIRAFLLERGIAVAQGIQRLRRALPDVLAKSTDALSPRMIRIIEALAADWRRLDERVEEVSTEIETLARKEAPCQRLMTVPGIGPIISSATVATIGTGDMFAKGRDFGAWLGMVPKQLSTGGRTILGKISKRGNKYLRTLFVQAARVVLLKRVSWERYGLKAWIEAAARRLHTNKLAIALANKLARIAWAVLHYGRNFEVSHDYAPQPA

SEQ ID NO: 196686 - protein, 344 aa, unidentified
MYYIGIDVSTKESALCILDAKGKIVRETRLPTDPEIIARFIAATGLAIERVGLESGCTAAWLFAGLQRYGWPVICIDARHAAAALQASFRNKNDRNDARGIADLMRVNKYRPVWVKSPEAQRQGRLLTARATLQSQLVALENTIRGLLRQEGIGLTDRRTAFEAAVREAIGDDRLLEAAVHPLLETRNAVLQNRATLDRRIVRADPVCRLLMTAPGVGALVSLAFKVAVDDPRRFSRSRDVGAHFGLTPREYSSGEVSYHGRISKMGDREVRRLLYVAASRMLRRDAALWCPLKVWAVRLAQRVGIRRARVALARKLAVVLHAMWSDGQVFQWRRAEASASASA

SEQ ID NO: 196687 - protein, 323 aa, unidentified
MSNEYDHYVALDWAESNMAVARMTKRSDEIKVVDVPSDIEDLKAFLTSLKGTKIMTIEETTTTHWLYTELVGLVDKLIICDPFRNKLLGEGAKTDKIDARKLVQLLRSGLVKEVYHSFDDNIKLRTFVSSYEDVIKAGVRLKNQRKAVIRSRVDNTLSEFVLNNLDEQIKSYEAGKQKYKKEFERLGKASKAIGLQESLPGIGWISAVKIVARVVDPRRFAKKGDYLGYCGLIMLDRVSGGRSYGKKRPRYSRVLKSVYKSAALSAIKGKSSMGQYYRDLMKEKHYPKYQARHAVARRIAVLSYGIFKGGEKYRDHKIISSGL

SEQ ID NO: 196688 - protein, 322 aa, unidentified
MLIIGCDFHTRYQQIAMARRETAELLVQRRLDHESGEAQAFYRSLQNLQEPVRVGIEATGPIHWFERLLAELGHELWIGDSAKIRASEVRKQKTDERDARLILDLLLAERFPKIWVPTPAERDLRQLLWHRHKLVCLRTMLTNQLHFLAMSQGLCRKQKLFTKKGRAELGSLTLGPWASRRREELLKLLGQLDPPIAELDRAVLEEAQRREDAVLLMTHPGIGPVTSLAFVLAIGPITRFHRSKKIASYLGLNPSEASSGGKRRLGAISKQGNTMVRWLLVEAAQQTLYPQFFLLTTHSPLLTLVTPLESALPQNSPVTPLQ

SEQ ID NO: 196689 - protein, 319 aa, unidentified
MFNLGIDVAKAKLDCALRLPNGKHRNKVVENNRQGFTALHAWLLKHAAGSPRVCMEATGTYWEGVAEYLAGLGMVVSVINPAQINAFSASRLVRTKTDKVDAQLIADFAHERQPEPWQAPSPAEQSLRALVLRLDALQAMRQQESNRLEVARAAVRQGIEDHIARLDAEIKALILAIRRHIDDDPDLRGKRELLDSIPGLGERTIPVLLSYYANPERFDSAKQAVAFAGLDPRQHESGSSVRGKPRMSKVGHSFLRKALYMPAMVAVHKTPWGKRFGQRLRDAGKAPKLIIGAMMRKLVHVAFGVLRSGKIFDPALHAA

SEQ ID NO: 196690 - protein, 344 aa, unidentified
MQHYVGLDLSVKQTSVCIVDKAGKVIREVKVATEPMAILAVLTEEALAIERIGLEAGPLSQWLYSALAEAGFPVICVETRHMKAALSAQLNKSDRNDARGIAQMMRVGLYRAVHVKTLASQKRRMLLTSRQLLQAKALDIENDLRGTLRNFGLKVGMVGTVKFEARIRELVADHPDLAAIVEPLLIARRVLREQLGVLYRQLLEIVRQDEVCRRLMTTPGVGPVVALTFRATVDVPSRFTSSKAVGAAFGLTPRRQQSGEIDRMGRISKCGDAMMREMLFEAALVLMTHSRKWSWLKAWGMKIARHRGMKRAIVAVARRLAVIMHRMWMDGTEFRWTREEAAAA

SEQ ID NO: 196691 - protein, 346 aa, unidentified
MNNHNKECTIKVLGIDLAKQSFQLHGVDEQGKVVLRKNLSRNKLTSFVANLPPCLIGLEACGGAHHWVRVFKSLGHTVRMMAPQFVKPYVKSNKNDAVDAEAICEAVQRPNMRFVPEKSISQQDIQCIHRIRSQLIARRTAQANQIRGLLMEYGIIIPKGISYIRKVIPHILEDADNKLTSLLRELLNELYDEMVYLDERISSLENKLKIISHQNEDCQRLLTIPGIGLLTATALIAAIGNISVFRSGRELAAWLGLVPRQHSTGGMPTLMGISKRGDCYLRTLLIHGGRTVVRVAHLYTDKRNLWICELDKRRGKNISAVAVANKNARIAWALLSKKESYQVTAI

SEQ ID NO: 196692 - protein, 313 aa, unidentified
MFVGVDVGSRWLDVALGPEGEVLRVANPAGIPDLLQRLPSGAVVGLEGTGTYYRPLAYALYRAGFHVVVLNPFAVKSYSRSLLRRAKTDRADARLIARFVAERWQQLPPYYPSEDSLVLLGVLVRLWDSLTSDYVGMLNRLHAWEYVVPGLADLLRDIPAGVEGLRRRVLREALQVVGSDDLLSSWVESLMSLPGIGQVLAIRILAYSGDLRRFRSARAYAAFTGLTPRIVQSGVMPQSSRISRFGPPGLRGAYYMAAVAAYRSSSLHRSFVEALMARGKPKKVALVALANRLARAAWVVCVKGGLDKGEVNV

SEQ ID NO: 196693 - protein, 348 aa, unidentified
MENTITIGIDLGDKFHIAVVFDGEGNELQIAKVNNTKTGVGKFFQPYKHARVAMEASTHSPWISRLLGEMGLTVYVGNPRKLRCIWDSTDKSDARDARILGMVCRIDPRLLHPLKHRSSKAQADLASIKTRDMLVKTRTQLINHVRGLVKANGERLPKCSSESFAKKCEPLIPPELRFAMDTVFKTIFDLNEQIKTLDRQIEQLSMERYPETQYLRQVAGVGPITALCFVLTIEDPARFGKSRQVGPFLGLTPRRDQSGDIDKQLPITKAGNTYLRQLLVGSAQYILGPFGPESNLRLHGLSIAARGGKNAKKRAVVAVARKLAVLLHRLWVTKDNYQPFYGMNKKAA

SEQ ID NO: 196694 - protein, 360 aa, unidentified
MQTQATKLNFEGQNFFVGIDVHLKSWTVSIVTDHLTHKTFTQPASAEVLSNYLKRNFPGGIYHSVYEAGFCGFWTHYMLTEMGINSIVTNPADVPTTQKEHLQKDDPTDSRKLARSLRSGELSAIYIPDPSTLEDRSLVRMRATLIKDMTRFKQRIKSFLYFYGISYPKEFERSGSHWSKRFMKWLNEEVSLQHDSGTHTLKILVQEAEQQRKLLLEVLHKIHSLASGEKYAKNIALLRTIPGIGFITAMTFLTEIEKIDRFEDTDHFAGFVGMIPNRHSSGEKDKNGEMTFRGQDTLRRSLIESSWIAVRFDPALMMSYHSYIKRMEPNKAIIRIARKVLNRMYYVLKNKKEYVSGIVK

SEQ ID NO: 196695 - protein, 348 aa, unidentified
MDYYAGIDVSLEESSVCVVDSDGRIVREAKVLSEPEALIAWFCALGLGLSRIGLEAGPLSQWLYAAMKQAGLAVELLETRHVRDAFKAMPVKTDRKDARGIAQLMRLGWFRPVHCKSMSAQEVRALLTARKLVQSKLLDVEMSLRGILRGFGLKVGVTKPNRFGNRIEELVAGHATLEVVAKALLAAHEVLLRELNGFEKRVRAMARDDKRVRLLMSAPGVGSIVGLTYVAAIDDPGRFKSSKQVGPHFGLTPKKYQSGEKDISGRISKIGDAAVRTALYEAAHIILTRPIKGASNLKSWAMKLAGRAGMKKAKVALARKLGVILHRMWVDGTPFAGEPAGALKPASA

SEQ ID NO: 196696 - protein, 410 aa, unidentified
MKKHTYRTKKVNEINWSALGQQLGGEAVIFAVDVAKAEQFALLTNSGQSLSILIKWALPETTGLIHELKQLACPITVVMESTGTYGDAMRYQFRQAGFDLYQASAKRVHDAKEIFDGVPSLHDAKAACLIAKLHKEGLTKPWHELDEAGRELNAARREYDLHQSHYERNQNRLEAYLSRHWPEVLALFDLDSVTLEKLLIVYGSPQAIAADAEQAARHMQAWGGHFLSRDKIARVIASAGVTFGLPCIDAERRYLQALATEMQHSRCQRQTAKQLLEASVVADAGLTEMAAAIGKLTTAILIGLHLDPRHFSSARSYQKALGLNLTEKSSGQYHGQLKLSKRGSATARKYLYLAALRLIQKDPVIGQWYQNKADPRVKMKTVIACLRKLAKALWYVARGERFDARKLVTL

SEQ ID NO: 196697 - protein, 420 aa, unidentified
MKTPSNKPFTAFVGIDWADAKHDVCIQAAGNEHREFARISHKVDEIEAWAQSLYQRFGGPIAVALELSKGPIVYALQKYDFFVIFPVNPSTLAKYREAFTPSRAKDDPTDAELALDLILRHPHRFQPLNPQSDEMRTLVSLVEQRRRLVNDRVRITNRLRNTLKQYYPQALQWFDRIDTLSFCDFIERWPTLVQIKRARRNTLETFFHQHNMRFAHVLQARLESIKTASPLTLDQAVITPHRLQALVLVDLLRATLAAIKRFDQEIAELAPKHPDYALFDSLPGAGPSLAPRLLVAFGEQRERFNNADELQRYSGIAPVTERSGKKSWVHWRWQCPTFLRQTFVEWAAQTINKSFWAGAYYRQQREKGCTYNAAVRALAFKWIRILYRCWDTHTPYNESVYLKALQRRGSPLLSQLSSTK

SEQ ID NO: 196698 - protein, 375 aa, unidentified
MAKNTRFVGLDVHAETIAVAVAEGRGKVRALGTIPNRPEAVRRLLGKLGKPGELRVCYEAGPTGYALYWQLTAMGIACEVIAPSLAPSKPGDRVKTDRRDAERLASSYQAGTLTVVWVPDPKHEALRDLVRAREAAKQDLKRAKHRLGKYLLRYGQRPGNGAKAWTAVWWQWVRKLELPHAEQNTTLLELILEVDHQSQRVVRHDGAIDRAVASAPEHLRAIVAALQALRGIAQETAVTVALEFGSFSRFERAAQAMGYTGLVPSEYTSGSKKRQGAITKTGNSHLRRALVEAAWHYRHPPRLNQRQKQLQGKLPPKVAEIAWAAQERLHRRYRALSNKSKPSPKVIAALARELVGFVWAIGKETEQSLAVKRAA

SEQ ID NO: 196699 - protein, 389 aa, unidentified
MCNIGTTGLPAAEHEDMAVLAAIELSLKRWRVAAMSAASNKLMRVDIAGGGAAELSQRLEHWRSEAARRLGRPVAVTVCYEAGRDGFWLARYLEARGITVLVIDPASLQVNRRARRVKTDRLDAEGMLRALRRHCWGEPRVFSVVRPPSPADEDSRCLTREREALLKERTRHVNAAKALLIAQGIRTVGSTRHGWLERMAELQTGDGRPLGENLRHRLARLARRLDEVARQIKEVEAELLALDRKRAADLPAGSATIAARLCRLVGIGMASAMVLEEEAFHRTFPNRRHVAAYAGLAPTPFQSGESAREQGISKAGNPRLRRLLIELSWLWLRYQPDSPLSKWFQARVGDARGRVRRVAITAVARKLLITLWHYVTLGVLPDGTRLSST

SEQ ID NO: 196700 - protein, 363 aa, unidentified
MTSMTTNSTIVTGGVDTHGQTHHGAALDSVGRQLGDREFPTTPAGYRALLSWLQAFGHLERVGVEGTGAYGAGLTRQLRAAGVTVVEVNRPDREARRAQGKSDPLDAYSAARAALARKATGVPKTQDGRVEAIRILRVARSSAVKARSQATNQLKALLVTAPAELREQLRTLSNTKLIATCARLRPTGDIADPAHATKTALRRLARRHQYLSEEISAADTELRTLVTAAAPRLIALPGVGTAVAGQILITAGDNPDRLHSEAAFAHLCGVAPIPASSGRTHRHRLNRGGDRRANNALYIVVLGRLRYDSRTRAYAARRTTEGLSKPEIIRCLKRYVAREIFTILTARTAGDQPHTAHAMSTAA

SEQ ID NO: 196701 - protein, 349 aa, unidentified
MLEPEIRCVVGIDVAKRSHVVCALDVPSGTVRQKAFKIDSSAAGYAGLRTDLARWGAPEQVLIGVEATGSLWEPLYDALTRTGHRVVVLNPRQTAAWAAGLGLRAKTDGLDAQTLARGLLAGYARASVLPSETVQALRELTRARRDLVQSQTAARQRLQDELVVVFPELPGHTPDRCDLAIPAVLHLLSTYGSAQALVAAPLADVAALLAQHSRGRWSERPAWALQTLAADSAASTRAVAARAVVVRTFARHLLDLQPRIAELEAAIATVLRDDDDGQRLRRVPGIGPIHAATIRAELGDVSRFAGVDQIVAYAGLEPRVRQSGAFMGQAKVSVKRQLDLPTTKIRIAD

SEQ ID NO: 196702 - protein, 387 aa, unidentified
MQNPHDDSKACDAAFVQDSTLVVVIEMGLSSWLVAGMIPGVSREPLKKIDPKAEELLQLLYRWRDEAIAAGKEITRIAVAYETGRDSFWLARWLRKRGIDAHVIHATSVAISREHRRAKTDRIDTAMLRRGFLGWLRGEPGHCSMAIVPTVAEEDAKRPHRERDSLVHERTSTINRMKSILIQFGVRNFNPVLRKAREKLDAVRTPEGIPLPPNTVAALRRHMERFCVINEQIKAIEQTRLQHLERDPADKYNAMVFLLVRIIGLGVETAEQLVREILSRQLRDRKAVARYSGLTGSPDESGSKRREKGLSRSGNGRVRKALIQLSWRMLQFQPESALVLWFKKRTENVQGSRKPMIVALARKLIIALWRYVNTGVVPEGFELRPAA

SEQ ID NO: 196703 - protein, 412 aa, unidentified
MKVVHEICCGIDVHARMLVACLILANGEKEIRTFSTMTDDLLRLRDWLVAAQCTHVAIESTGVYWKPVFNILEDALTVILINPEHAHALRGRKTDVKDAEWLADLLRHGLLKPSFIPPPEIRELRELTRYRESLVREQTAVANRIQKVIESANLKLAQVATDALGASGRAILWALARGETDPVKLASLAHGKLKAKRPQLERALHGRLTPNQRFVLRELLQRWEELEAADRRFTKEIDRYLQDHPKLARARDHLDTIPGLGPRAAEIIVAEIGVEMKVNFGSDAHLASWAGICPGNKSTGGKRLSGRTRKGNTYLRSGLVQAAWGATMKKNCYLSSQYFRLVKRLGRKKALVAVAHSLLVIIYHVLQCDQSYTELGGDYFDRHHVGQQREYFIRRLQMLGLKVSVEELPKAA

SEQ ID NO: 196704 - protein, 349 aa, unidentified
MQEHTTIAVDLAKSVFELAVSNQPGTVSLRRRLTRGQFSSYLSEHGPATVVMEACGSAHFWGREAQRLGHRVVLLPPHTVRPYVLRNKTDGADARALLEALRNDALCAVPIKTIDQHVLTSLHRLRSSWVATRTARLNTLRGLLRELGLNIPVGATRVVPAVHALCAQGDAGLPAALRLVVREAAVEIGELEARTRAVEHSLEALASQSSLVARLRTVPGVGLLTATALVAFVGDVARFPSGRHFASYLGLTPRESSSGLKRKLGRISKRGDPYLRMLLIHGARSVLAHAKRPQAPRDGLRTWALGREHARGHNKAAVALANKLARTVWAVWRHDQPFQARKEESASKN

SEQ ID NO: 196705 - protein, 348 aa, unidentified
MGVFVGLDVSLAKTAVCVVDRDGVVLWQGKVPSEPGPLVTRLADWSGTIDLAGIEACPLSEWLHRGLCEAGIPVVCIEVRHAQRFLSSRPVKTDKNDARGIAEMMRLGHYRPVYVKSPAAQAMRTTLTVRMQLVASQLRIEGTIRGLLKVYGLKIGAIHRNRFAARVTELLEMAALPELSAAIEPLLRVREGMRTERKAFDRTLAGLSRRDDITRRLMTIPGVGPVTSLAFKATIDESGRFATSKALGAHLGLTPRVYQSGEIDRSGHISKCGDRMMRHLLYEAASVLMTRTRKWSRLRAWGVSVAKRRGMKRATVAVARKLAVIMHRIWVTGGEFEFGSPAAAANAA

SEQ ID NO: 196706 - protein, 473 aa, unidentified
MSKEKAKKAKKKKVKDIISMQVVNPYSAGIDVGDKEMVVAVPEGLSDPRVRTFGTMTCDLEEIVLYLKTCEIDSVGMESTGVYWKPLFRKLINAGIEVYLVNAAHVKNVSGRKDDENDAMWIQKLHSCGLLKSSYLPDEMQEAVRTLVRHRTTLVQDASRFVNRMQKSLELMNVKFHTVISDIVGQTGKAVVEAIIGGERNAANFLPLISKRIKMDLPTIEKSLQGNWLEEHLFTLKQNYEMYKIYWEKIAVCDQEIEKHLQQYEAKCNEGVIEEPMPVKEESAPESEGKKKKAVKKHGDKNRPRFDVQKYLERIYHVDIMAIYGINSTSALNIFAEIGTDLSKWKNEKHFVSWLNLSPNNKISGGKLISSKLMHKHPNPASLAFRAAANGIQNSDNWLGDYFRRKKAKGGQRYAIIATANKIATIFYKMVRYQVEFKPVELEQYQQKYKQVKIAYLERKLMQLKQETGNVAA

SEQ ID NO: 196707 - protein, 340 aa, unidentified
MPNPAVIGLDIAKNVFQVHGADAEGRCVLRRRLRRAEVITFFARLPKALVGIEACPGGHHWARELRSLGHEVRLIPPQYVRPFVKTNKNDAADAEGICEAVVRPNMRFVPIKSVAQQAAMMLHRTRALLLRQRTQLINAVRGHLAEFGLIARRGARNIRELTDLVRDTGSDKLPDTARAMLVLLLEQIREAELRVRKTEQALEAWAKQSDACRRLLAIPGVGIMSATALVLAMDDPKRFRSGRHFAAWLGLVPRQSSSGERQVLGGISKRGDGYVRTLLIHGARSLTRWHRESWGWLAGLLRRRPTNVAAVAIANKTARTAWAILARGRQFQPTRRAEAA

SEQ ID NO: 196708 - protein, 339 aa, unidentified
MWYTGIDQHKQFSVLTTYGAEGPRVKQGRVPSAPLALQVYFAAFPGPHRVVVESTGAWDWLADVLAALGVELVLAHATRVKAIAAAKVKTDAVDSNTLALLLRADLIPRAHMIAAAQRGPRDLMRTRLRLVERCVGAQNSIDRLLEKFNLTDVSQLEELYQLQASCHAAQIALLTQQITTLERALYPYLIPDADVQRLLWIPGLGKVNAFTIYTEIDGIARFPSPRQFFSYCRLVPGADNSGGRSRHRSGSKAGSRYLKLAFSHAGIRAVPYYPEIRAFFKAKARQKPIRIARTLVGLELARLVYHVLSTQEAFNGQFKGRPLSRTKRGKWPHQASPPA

SEQ ID NO: 196709 - protein, 321 aa, unidentified
MESKTAVVYAGVDVAKATLQLHLQGQQSEFRNTPKGLLQLVAQLQTVPSVQVVCEATGGYERAMVKVLHQGQILVSVTNPARVRAAAQAQGQRAKTDRIDARGLTDYGQRYQPKTTPPVSATQEQLVNLTQWLKQLIHGRALAKTQAEHHQNPFVRRQHAKLMTHLDSQIEAVEKQIEALIEKDATLQQRVACLDKIQGVGPRTAWMVLAHMPELGQLNRQEVAALAGLAPWTRESGTMKGMRCIGGGRPEVRLALYMAALSAARCNPVLRILYKRLRAKGKLPKVALTAVMRRLLTYMNHCIKALPSETAGARTEELKAA

SEQ ID NO: 196710 - protein, 371 aa, unidentified
MKQQSKGSHITVGLDLGDRRHRFCALDERGEVVEQDSICNDRVSLRKLAGRYHGALGVMEAGAHSPWISRFLEALGWRVVVSNPRKVRAIYQHERKSDQRDALMLARIGRMDLALLYPVRHGTAEAQQDLLRIKLRDSLVRARVAVINSVRFTLKSLGYTVRNPSSARFHKVVMEEVPESVREMITPSVQALTELTARIKMLELEINTLAQMKYPQSAQLQQIPGVGPITALYFVLKIEDPNRFAHVRDVGAYAGLCPRRDQSGESDPQLRISKRGDAYLRRLLVSAAHYILGPFGPQSALRAYGLMLAADGTARAKKRATVAVARKLAVLLLSLWKSQQPYQPFPGACLNGEQEDRRSGTIALHRMEATD

SEQ ID NO: 196711 - protein, 341 aa, unidentified
MSIITVGIDLAKNVFAVHGVDDNGKPALVKPKVSREHLLPLIAQLPPCVIGMEACSGAHHWARQFRQHGHTVKLMAPKFVSPYRMSGKRGKNDAADAAAICEAVTRPAMRFVPVKEEHQQVILALHRTRTGFVEERTATYNRLRGVISEFGIVCPQKIANLRRALMDHLEDLPGYVNQCVGDLLAHADSLDARIAEYDRIIAKAARDDTRSKRLMSLPGIGPNTASAMLASIGGGHDFKNGRQVAAWIGLTPGQYSSGGTARLGRITKAGDKYLRSLLVMGAKAVLSGLGDKQDRFSRWARSLVERRGYWKAVVAIAAKNARLAWAVLRFGEDFRLKAAAD

SEQ ID NO: 196712 - protein, 324 aa, unidentified
MLPTLGIDISKDSFHLELSINDKLRHRKFANRKEGFGELCVWLAKHKATHVHACLEATGPYSEALALYLHQQGHTVSIVNPVQIKAFGQSELLRNKDDRPDAGLIRRFCEKQRPAPWTPPPVHLRELQALTRHLENLIETRQQQVNRLETTNTKQVAKSLRKLVTHLDAEIERTEQQIDDLVDRHPDLKQQSELLESIPGVGKRTAAKLLAEIPNITQYKSARQVAAYAGLTPRNNRSGTIRGKTRLSKTGNARVRKALFFPAIVAKRHNPIVRAFCERLSRNGKNKMQVVGAAMRKLIHIAFGVLKSGRMFDPNHELLINQAC

SEQ ID NO: 196713 - protein, 380 aa, unidentified
MDVHSKNYTLCAMEPTIGSEDRIFGEVQVAPDYKEIICFIESLKMKLGFYDDYSVECGYEAGCLGYTLYHQLTNAGVKCVILAPTTMLTQQGKRIKTDKRDARLIAQCLCYGGYHPVYIPTGEDDAVKEYLRMRDDHKLALKRLKQQINAFVLRHGHSYTGTKWTIKHVAWLKKVELDPIYRETLNEYMASYEEQETKIERYDKRIEEIASEARYQEKVKKLVCFLGVRTHTALSLIVETGDFNRFAKGNTYAAFLGLAPGEHSSSENVNRLGISKAGNTHLRRLLIEASKGVCKGAIGHKSKELRSRQSGQPAEVIAYADKANTRLRSKYYKMIRHEKKKNVAVAAVARELACFIWGMMTENISISSRKGTSMPAVSQG

SEQ ID NO: 196714 - protein, 367 aa, unidentified
MKKVSSRAAAQSRNISQQKLTIGLDLGDRNSWYCVVDEAGQIQREQRVRTSGKALQETFGALPRSRIALEIGTHSPWISRLLSELGHEVIVANARKVRLIGESRKKDDRLDAQALARLARIDPELLYPVKHRSVQAQADLTLIRARAGLVRARTGLVNTARGLAKSYGERLRSCNVRNLNPEKAEGLSPELQAALEPLLNAIGSLSERIVEYNEGIENLAQQSYPKVALLKQVKGVGTLIALTFLLTLEDPHRFHKSRDVGCYLGLQPARRNSGQSEPQLHISKEGDPYLRTLLVQGAQHILGPFGPDCDLRRWGLKLAERGGRNGKKRAIVATARKLAVLLHHLWVSGEVYEPLHNSSPTTVAAAA

SEQ ID NO: 196715 - protein, 320 aa, unidentified
MSATSVVVGIDVAKAHVDVAVLGGKLEAQRFENEAEGHSALAAALQPLGVALVVMEATGGYEAALACALQAAALPVAVVNPKQARDFAKAMGRLAKTDRIDARLLAEFATVLVRRDDLARFIRPLTDAQQQALAALVTRRRQLLTMLLSERQRLQLAIPLVRPSIEAMIQAIRAQLNDVETQMTGHVRTHFAELDTLLRSARGIGPIASATLIAELPELGRLNRREIAALAGVAPLANDSGTTRGRRRVQGGRFEIRRVLYMAALVASRRNPVIQDFYQHLIDAGKLPKVALVACMRKLLTTLNAMVRTNKPWDSSLHRA

SEQ ID NO: 196716 - protein, 309 aa, unidentified
METYVGIDVSKDRLDVHILPQDEAFSVERNGKGLAELVDRLKSFVPSLVAVEATGGFESTTAAALAGAGLPLAVVNPAQIRHYAQALGKRAKTDAIDARVIARFAADVKPDARPLPDETTQLLADLVARRRQIVEMLQAERQREKRTTVRRLKKSLARLIAALEKELNALDSDIDDTVRGSPVWREKENLLASVPGVGSQTARTLLGELPELGTLGRKQITSLVGLAPYTRQSGQWRGKSMIGGGRKTVRSALFIAALVASRHNPQLKAFRDRLVAAGKPKMVAIIAVARKLITILNAILRDKKPWQPA

SEQ ID NO: 196717 - protein, 338 aa, unidentified
MKLYAGIDLHSNNSMLSIIDEEDRVHYQKRLPNELERILLVLASFKECLVGVVVESTYNWYWLVDGLMQAGYEVHLAHPAALVQYQGLKHSADEHDARWLAHLLRLGILHEGYIYPRESRAVRDLMRRRMQLVQTRSAQITCVQTQFARSTASSPSSDAIKRMEPEEVEQLLQDANVGSGVRANLAVIGTLNVQIKRLEHEILGQVKLAAQFAPLLSIDGIGRILALAIMLESGAMERFAKVGHFSSYARCVQSQRLSNDKKKGEGNRKSGNKYLAWAFVEAAHFAVRYNPRIKRFYERKAAKTNKVVAIKAVAHKLARAAYHVMRERVAFDEQRAFA

SEQ ID NO: 196718 - protein, 353 aa, unidentified
MKPNTETTAAPLAVIGVDIGKEIFHLVGFGTDGKIAFRKKIRRLDLKGAFEQLPRCIVGMEACLSAHFVSRTLRALGHEPRIIPAIYVKPFLKGQKNDYNDAEAIAEAALRPNLRLVKEKSQDQLDLQACHRVRSRLVSRRTATINQIRAFLIEQGIAVRAGARALRNSLFAILENRKDEISPRTAKLILGLYEDWCHLDERIESVSEEIESLGKAEAKCQRLISVPGVGPLISTGIVAAIGSGEAFERGRDFAAWLGLVPRQHSTGGRSIVGRISKRGSKYLRTLLIQAARVLLMRPHNWPRFSFGAWLKTASERLHRNKLALALANKLARIAWSVLRHDKAFDTHLEVAAI

SEQ ID NO: 196719 - protein, 297 aa, unidentified
MFVSCQRERVFGFPTTRGGLKDLIARLLRIRPTLIVVEATGGYERRLAAELLAAGLTLAVVNPARVRHLAKGHGTLAKNDRIDAFNLAQFAQVVRPTPRRKTSEKQSELNDLVARRRQLVEMIVMEGNRLEKQPVAEVKQSIARIMALLQQQRQEIDDCIAEQLRSDDEWNGKIQKLQSVPGVGAITAATLVAELPELGELNRRQIAALAGLAPFDADSGNWHGRRFIRGGRKSVRVALHMATLTATRCNRLIKAYYQRLIGKGKSFRCAMVACARKLLILLNSLLKENRSWSPLPS

SEQ ID NO: 196720 - protein, 343 aa, unidentified
MHSISTIGLDIAKSVFQVHGVDGAGQVVLRRQLRRRQVLAFFQKLPPCLVGIEACASSHHWSRELQALGHTVRLMPPAYVKPYVKRQKNDTTDAEAICEAVARPNMRYVPTKTVEQQSCLMLHRARHLFIRQQTAVINSIRAYLAEFGIVAPVGRRGVEHLLEVIADTSDRRLPDVARACLAALGSQLRALKAQILEFDRRIIAWHRSSATSKRLDAIPGVGPALATALVASIADPKAFRSGRDFSAWVGLVPKQNSSGGKDKLGSISKQGDRYLRSLFTAGALAVIRYAKIHGTGRRPWLTALLARRPTKVVAIALANKLARMAWAMMARNERYKEPAALRA

SEQ ID NO: 196721 - protein, 407 aa, unidentified
MEEKRTRYIGLDVHKHYLVALGMDADLNIVLSMRRVELSHLESWMKKNLTKQDEVVLEMTTNTWQLYDELVEHAGSVMVVHPPHVALITRSQVMTDKIAASILARLLAKGLLVGIWVPPLEIRELRGLVAQRQKMTRLATQAKNRLHAVIQRHHLKPPEGNPFAKTNNGWWQALALGRLEKLNLQSDLETLQFAQQQEARIEKEMTGIAVENEEIGRLLHIAGFGVITAITVYAAIGDIHRFEDAKHLVGYAGMGTRVHDSGMTTRTGKITKAGRRDLRVAMVEAAHVVANSHPHWKAELARLQPRIGYNRAIVAIARKLLITVWYVLQGEADKHAEPEAVAQKMLRFAYAVGKANRPKGQTAAQFARIRMDALGLGGELTSISWGSKKPIPLPPSRLKGRSDVPKS

SEQ ID NO: 196722 - protein, 355 aa, unidentified
MTASYEYHIGVDYHKSYSHLVVQDSAGKTLRSGRVKNDRQSLGGFLECYRENSHAVVEATRNWMVMYDWLDDICDDVVLAHPLKVKAIADAKIKTDKIDATVLAHLLRADLVPEAWAPSERSRDLRVALRERMFYVRLRTMTKNRVVTVFDRYPEQTALLRKLGDLFGKTGRVQLAQVKVSEIDRIQIDRGLDFIGDINERIKQSETTIRAMTKANANVKLLKTIPGIGEFFARLIDAEIDDISRFRNAKKLAAYAGLVPSTYSSGGKTFHGKIIKQGNKWLRWAFVEAVAPAIATDPRLRVQYEHLKTRGTNKARVAIARKLLTITFQILRDQRAYEQRDVNGQEGVSTISRLS

SEQ ID NO: 196723 - protein, 408 aa, unidentified
MEVVYGICCGLDVHAKSVVAGLIRQGRRQIRTFGAMTGDLLELRDWLASEGCTHVAMEATGVYLKPVFNILEGAVDVTLVNARHVKAVKGRKTDVRDCEWLADLLRHGLLKASFIPPKEIRELRELTRHRAGLVCELTALSNRIQKVAESGNIKLGQVASRAMGVSGREMLTRLSQGVTDPQVLSDLARGRLREKKEDLQKALEGRLTQTQRWLLAELLRRFDEAEAALERVEGRIDQELKQAEEPSIREAIVLLDGIPGIGKTTAEAIISEIGVDMTRFPTAGHLASWAGMCPGNDESAGKRRNTRTNPANRYLKGAMVEAAWAASHTKDTFLSALFRRFVRRMGKKKALVAVAHRILVIVYHVLAKRLPYKEVPVNPVRNDSERQQRRLIKKLETFGLKVTVQKAA

SEQ ID NO: 196724 - protein, 414 aa, unidentified
MKKHTYRSKNVNKINWEKVREKPADELLLFAIDVAKEKQYALLSNASGTVSELVWWNHPEQTHKMLDILESFSCPLDVVMESTGTYGDALRHQFRVSGFGIYQISAKRVSDAQEIFDGVPSQHDAKAATLITQLHRTGISKPWVELTETARSLNALRREYDLHQSQYQRNQNRLEAYLSRHWPEVHYCLELNSVTLESLLIEYGSPERIAADKETAVIKMRSWGKSQLKDEKIHRVIEGACYTLGQPCTEVEIQYLQALATEMRHSRLQQQRAKKAIELMIKSDDGLQEMGQLIGLVTTAVLLSCHLDPRNYDCASSYLKAFGLNLKEKSSGKHIGQLKLTKRGSSTARRYLYFAALRLIKLNPIAKAWYLNKVDSRARNKTVIAVMRKLVKSLWYVGRGEAFEATKLFTVAEA

SEQ ID NO: 196725 - protein, 427 aa, unidentified
MSERKSLELRVSVDVGSRRHSVAIGLPDGQVLEEFEIAHRPEGFQEFFSRIEKHQKAQGCGVAVAMEGYNGYARPLDTLVRQRGYRLYNINNLKLARFKEIFPGAAKKDRIDARKGLELFQLRDHLPLAKGVLQEVTGTPKENEILKRLTRRRRRLVNERVRVVNNLQSDLQAVCPGLLEITTEASNQWFLNFLLSADSLPQLARLRKSTLLKIPAVGRKYASLIEQWQKRAHFSDEIEWVNEMVREDALRCLELDEKIRTLEAKIEEIAKSSKIAKILLSIPGFGPVCTSELAGEIGTVERFSKEGSLALYLGMSTLDNSSGDYHGSKQPKHVNTRAKAAMMIALDRHRKYVPESQRYYEKKRTEGKKHNQTIRSLGRHLCRIIFRMLRDQRNYEIRPQQRNTKTKVRSRSCVKTKIRRPKISANT

SEQ ID NO: 196726 - protein, 353 aa, unidentified
MDRYIGLDVHSQSCTMAVVGPSGRRLTSHVLETNGRALVEAIKSVPGQKHLCLEEGTQSAWLYEILTPHVEDLVVTMPAKRVGTKDDLRDAWARAEEMRLGSFKMKIYKAPQKFTELRNAVRAHRMMTRDAVRVKNRLKSVYLSRGIATNASLYNAERRSRWEKKLPVKHRRLAVMLGGQLDAVMQLQGEAEDWVKKTSKAHEIVRKLSTAPGMGVIRTAQVVAIVVTPFRFRTVRQFWSYCGLGIVTHSSSDWVRQDGKWIRAQTFQTRGLNRNRQPDLKAVFKGAATTVIFQLTKHPLHAAYQRSLENGTKPNLAKLTLARRIAAAVWSMWKHGEEYDPGKPLRNMKTLAI

SEQ ID NO: 196727 - protein, 316 aa, unidentified
MISYYVGLDVSKATVDVGFLPATFPQFKISNDPDGFAQLIACLDELEVERVLLEATGGYERALFKTLQLRGLNVIRVNPKRARDYMRSMGTYAKTDRIDAQKLAKFARDIEDLPPVEPNQARDELGELIKLRGNLVKDRDSNKRRMQQTTYRKAISDYANHITYLNKKIKALEALIEKASNALDQEKASRLRSVKGIGAITCGTLMASLPELGRVTGRKIAALAGLAPYNNDSGKKSGPRSIEGGRHAVRCALYMSTWSVVRHDPEVKAEYEALRARGKLAKVAVVACMRKLLVRLNAMLRDGSKWKEPKSQVPAT

SEQ ID NO: 196728 - protein, 387 aa, unidentified
MYFVGIDISKFKHDCAIIDELGDVITPSWSFQNDREGFSLLRELLDALEGEKKIGLESTGHYGQNLKLFLENNGFSFMEFNPLLVNRFVRSKSLRKTKTDSIDALMIAQYLMTVEYKPYPPSFYTLEKLKSLTRFRDSLIRQRSKQLVELTNVLDKVFPEFKPFFKGKFSVTALYILSHYTSPEKISNMNSKSYESLRRLSRGKFSMVDFVELKTLARNTVGSTRDYLLQEMEIIIDIYNQLQSKVEEVEQLINDCVLVLDPPMLTIPGIGVSSAAVILSEFGDLSKFDSPSKLLSFAGLEPGYFQSGISESVGKMVKHGSSHLRYAIMNCAQTVINNEPTFAAYYAKKRAEGKEHRIALTHVAKKLLRVVYALQTKELPYNPDFIR

SEQ ID NO: 196729 - protein, 391 aa, unidentified
MIYVGIDVSKDKHDCYIVNSDGVVLADVFSVENNLDGFDLLLQRLKSVAPDLLNVKVGLEATGHYSYNILGFLLDKGLATFVLNPLHTNLFRKSTSLRRTKTDRVDARTIAAMMSSGIVLKSYTAISYHNEELKSLSRYRFDKVRQRAKLKQAVSRLVTILFPELEKLVPSLHIASVYALLAELPGAKQVASCQLTHLTNLLSAASKGHYDRSKAVELRNAARRSIGSTMPAKSLELQHTIRLIRELDAEINEIEAAIKQFMDQIASPILTIPGISYRMGAMILAEIGDFARFDSPDKILAYAGLSPSTYQSGKLDNAYAHMEKRGSRYLRYALYNAAKYVCHWDASFCAYLAKKRAEGKHYNVALSHAAKKLVRLIFALQRSGQPYCPTA

SEQ ID NO: 196730 - protein, 405 aa, unidentified
MEMVYPRAAGLDVHKKTVVACVITPEVRETRTFGTMTGDLHALKDWLQKCKVSHVAMESTGVFWKPVWNLLEAEFTLFLVNSRHIKNVPGRKTDVKDAEWIVDLLRHGLVRGSFVPDRQLRELRELVRYRRSLIEERSREVNRIQKVLEGANIKLSSVATDIVGVSGRAILEAMISGVEDTKVLADMAKGVLRRKKASLEEALQGVMGDSQRTVLSIQLDHLDSLDQHIARLDDEIDRGMKHMEEALRRVDTLPGIDRRGAQEVLVETGTNMGIFPGAGHFSSWIGLCPGNNESAGKRKSGRTRKGNRWLTSTLVRAARSAVRSPHNYFYALYHRIVGRRGDGRAIVAVANSMAVTIYHMLSEGTEYHDLGPHYFDERDQQRVVQRAVRRIESLGYKVTLGPATA

SEQ ID NO: 196731 - protein, 474 aa, unidentified
MGKRQRFNPPTAPNIEYRYRKPNRKFKDHRGKTVLPPQLSTVNLHAAGIDIGAESHFVAVPADRDEQSVREFGAFTDDLYQLADWLKECGIKTVAMESTGSYWLVLFEILEARGFEVHLVNTHRLKYVPGRKSDVLDCQWLQTLHTFGLLAGCFRPDDEICPLRSYLRQHATLVRCSAEHIQRMQKALTQMNLKLQHVLSDITGATGIRIIEAILAGQRDPVTLAQLRDPRCKHSCETIAKALKGNWREEHLFALKQEYDLYLKYQKSITECGQKIEAELARFQDKSDGQQLPKNCPRPNLPTFNIRQALYRMTGVDLTVVEGIDAYTALVVVGELGMNLQKHFPTENQFVSWLALCPGTNKTGGRQKSSRTRRSSNRVAAALRMAASSLHHCKSALGAYYRRKQGLIGKPQAVTAVAHKLARLIYKMMTKGLKYVQRGQDEYEEQYRQRKLYNLKRNAKQLGFALVPATDAPA

SEQ ID NO: 196732 - protein, 338 aa, unidentified
MNYVGIDHHRQYSHITWLDEKGEVVKSGRVANLRRELEGFLQGARDVRAVIEAGRSSYTMVDVLTDLGIETTVAHPKDVKAIAKAKIKTDERDSYKLAHLLRTGYIPEVHKRSRENRSSQRVLRQRAFYVGKQTSVKNRLRALLAQQGEEIRSEVERVENLFTDKGMKVLKGLALPEREAKLVGALLRTYHHLEERINETNALVKELYEAMPSAQLIQTVPGFGIFLAVLVAVEIEDIGRFEDVSKFHAYAGVIPSTHSSGDRSWHGKIIKEGNRWLRWAAVEAVWPALRADFDIRCFYDRLKSRKGANSAKVATARRLLTIIYRMLKENRPYIPYKR

SEQ ID NO: 196733 - protein, 371 aa, unidentified
MKSIIYIGMDVHKKTYSLCALLKETGEIIGETKIPADVSLIIKFIENAKKSVDSDDVQIKTGYEAGCLGYSLYWQLAEKGIECDILAPSTMHRSAKNKVVKNDRRDAKNIATNLANGTYKSVYVPTDEDVEIKEYIRMMHDFKIELKKVKQHINAFLLRFGHHYPGKSKWIPAHIKWLKELELSDMYREIPDEYLSQLEILTEKIERFKYRLEELSQKETYNEKIGQLRCIKGIDTTAAMTMHAETSDFDRFPTANAFASYCGLTPGEDSSGESYHRLSITKQGNSMIRTTLIEAAQVLVRGTIGKKGKKVKSKQKDQDVKVIDYADKAVIRLQKKYHRMIFRGVKRNIAITAVARELACFVWGIETGHIS

SEQ ID NO: 196734 - protein, 345 aa, unidentified
MTIVETRPVTGGVDTHLDTHVAAVLDGNGGVLGVESFTATRPGYRQLHAWMAGFGSVARVGVEGTGAYGAGLARFLRAIGLEVIEVDRPNRQARRRAGKSDPLDAIEAARAALSGRARAIAKTADGHMEAMRALLVAKRSARDMRIAALNQIRHLSFTAPDDLRERLRPVAVDRLAGTAAALRPRPGGDPVAYATKLAVRALAQRVLALDDEAAGLDVALAELVTATAPSLLGLYGVGVDTAAILLVAAGDNPERIRSEAAWAHLCGVAPVPASSGKTIRWRLNRAGNWQANHALWRIVFTRLGSDKRTRLYMQRRLEEGRTKPEIIRILKRYVAREVYRHLPRT

SEQ ID NO: 196735 - protein, 411 aa, unidentified
MGYRIAGIDVHKKVLMAVVLDVEAGQPEVGQRRRFGATTSELIRLRLWLEEQGVKEAVMESTAQYWRPVWMELEPHMDLQLAQAYSNRAPRGRKHDFKDAERLVRRRLADELILSFVPQPEQRAWRTMTRMKTQLARDRVRLHNQLEGLLEEMRIKLSSVVSDLLGASGQRILRALANGQTDAQQLAALGSSQLQCGQQQLIDALNGTPSAMHRQLLGLYLERLEVLDTQMDKLNHMIATAMKEHEEAVMRLAEVPGFGADSAQQVIAEVGPQARAFDSAAQFTSWAGTCPGKEESAEQNRSSRSAKGNKYLRRVLTEVAQAAVKTKGSHYQIVFRRLLPRLGYKQALWAVVHRLCRLVWKILHDRVNYIEQGLQRDPKANQQRARTLARQLRRLGYNVNIQPLQPNTAPA

SEQ ID NO: 196736 - protein, 427 aa, unidentified
MKNSTARKLEQIPSDYLIVGIDAHKKKHAAVVKTQDAFIRAKFKVSNSRDGFVELLERTKAQMVKTDSRGTIFAIEAGGRHWRTLAYFLEEREIPFRLISPFTLKRRREGEDIDRRKNDYRDADMAAELLRTGKFTETKLPQGIYADLRAAYHTYHSLGKERSRATNLLSALLDSLFPEFHNVFKDVSSKTALAVLAAYPVPHVIAEMSMEKFMDTMMTKYKGQHIIRKKVSAIYQAAHGSVGIHAGAGVVCFEISLLVERIRLLTEHRQKVEDLIVTLVEWIPESKYLLSIPGLGHITIAGILGELGPLNHYRSGKQLVKMAGINPVQSESANKQASKTPMSKKGRPLLRYCLWQASLNILNHNQEFKAWAKRLQKRPLHQNPLKKREARGAICKRLLYLVFALFNKHSFYEKHYRVETERELVTV

SEQ ID NO: 196737 - protein, 392 aa, unidentified
MIYVGIDVASRKHDCYMMSDNKNDTLRITFQNNGFGFKKIIDSINDFSKKTGDDKIRIGLESTGIYSHNILQHLVKNGYNTMLINPLLTNMERKSSSVRKTKTDKIDAKSICMFLVRNQDFRPYTIESYHNLSLKSLSRRRISLVKLLTKEKLQLNALITVMFPEYLGVFCSLYGNASLEVLLKYSTPDKIARARIDTLSRLIHKASKGHHGHDTAMKIKTLAKATIGDSRNLFDFEVIFLIQRIRLLQSQIKEYTLAIKKMMIEHCPQILTVPGIGYVTGAIIIGEIGDISRFNSPDQLLAFAGLDPCVYQSGNYNADNVSISKRGSRYLRWAMHIVSSIIIYNDFNFNAYYTKKREEGKHHFVALGHVSKKLIRVIFSLLKYDKSYISQT

SEQ ID NO: 196738 - protein, 343 aa, unidentified
MWYVGLDVHARRSSFCVLDGRGRKLFSRTVRGSYSKVVKEMESVKRPFSICFEATTGYGWLHERLSKLARRVVVAHPGQLRLIFRSKRKSDRIDAERLAKLLFLDEVPAAYVPDGRVRAWRSMIELRSKLVARRVAVKNRIRALLRSQAIEAPCPLWSKAGRRWLAQLSWPSDFEALARDLLLEELRSVSEAIARAERALKAEAARRPAVGLLMSIPGVGIRTAEAVVAYMDDPYRFRRNSAVGAYFGLVPCLDSSAGKDRFGHITRQGPATVRRLLTEAAWQAVRRSATMRAFFDQVTHGDPSRKKIAIVACAHKLVRSMHAMLRDNRSWQEALQQVALCAA

SEQ ID NO: 196739 - protein, 362 aa, unidentified
MDKYIGLDVHAASCTAAIIDPRGKRLGHHVVETNGQVLVEFFRMQAGTLHVCIEEGGQAGWLVEILSPHVERVVTLRVPESRGAKSDERDAFGLAERLRTGATDTGVYKQVGPFATLRQLVKAHQMIVRDSARVQGRIKAVFRSRGVSAVGKTVYSAAGRDEYLRQLPESSRAAALLLFEQYDALRPVRDHAEKQLVAESHKHAVTRSLESCPGVGEIRAAQLAATVVTPDRFRTRAQFWSYCGLGIVMRSSSDWTQTPGGQWVRAPVQQTRGLNRNHNRLLKCVFKGAATTVIQQHPDSPLRAGYDRMLAAGTKPNLAKLTLARKIAAITLALWKNKEEYDPRKTSKPTELVSSSAPTTVV

SEQ ID NO: 196740 - protein, 334 aa, unidentified
MKSDVVHIGVDVSKEKLDVFVPAQKEGMRPTAKELDNSVAGFRELRDLARKAGATVCVEPTGGYELELIAFMHKFSVPVAYADALRVRQFARAEGCLSKNDSIDAALISRFADKIGVRLLEEKDVEAVELKRRAKFRQTMSDSRTAMVNRLETEVDPDMKALLKEQIKRINRLIAKAERLCLETVRKNDSTNKLCERFTQVGGVGAITAISILAGLPEIGTLSDEKLNRLVGISPEEDQSGSRDRLRRIWGGRQDVRNALYMAATASLMWNSILGAYYRKKRAEGHPHKWAMVPTMRKLLSLLNRIARDPDFTPRPEPESTKRNAIATRKRKAA

SEQ ID NO: 196741 - protein, 349 aa, unidentified
MNFYTNTHPYYCGIDLHTRLLYVCIIDNENNILVHEKIDDSPDKLLALLKPYLGNIVVGVECMHCWYWVSDFCEEHNIDFILGHALYMKAIHAGKTKNDKIDALKIAKLMRGGNFPLAHAYSKEHRSIRDALRRRTHIMRMSAQLKAHVSSTISQYNLPALESRLNLQNSPDREKMHHFFPDEAVQKSMDLNLNIIETMVSELYKIEHYVKTQAQTHRATDLHILKSFPGIGKILALTILYEVGDIKRFPSVQKFASYSRLVKCKAESAGKTHGTQGNKIGNAHLKWAFSEAAVLYLKGNDNAKRYLAKLQKRMSKAKALSALAHKIGRCAYFMLKNQQVFDEERFLNE

SEQ ID NO: 196742 - protein, 353 aa, unidentified
MHTHQKSSDPIATIGLDIGKNTFHLVGLDKRGAIAMRIKVSRHQLVGRLVNLPRCLIGLEAGSGSHHIARQIKPLGHDVRLIPAQYVKPFLKGHKNDYRDAEAIAEAVQRPTMNFVAIKTPQQSDLLSLHRVRSRLVRHRTAIINQIRSFLIERGITVRQGPGPLRKVLPEVLSSPPQALSPRILRLIAELDQDWRHLDERLEALSAEILSLSENDPACQRLMTVPGIGPIISSAVVASIGTGSGFKQGRDFAAWLGLVPKQESTGGRTKLGRISKRGNKYLRTLFVQAAHVVLQRRPATAMRALWPWIEQASRRLAHRNLLAIALANKLARIAWAVLARGRHYDPRITPNAA

SEQ ID NO: 196743 - protein, 348 aa, unidentified
MTAYYGGIDLSARDSQVCVIDAEHTRHVEQKVPNVLDDIDRLLAPYKAHLKIVVESTFNWYWLIDGLQERGYEVCLAHTLGLYMITGAKVKTDRRDAFALAKLLSAKMIPEAYIYPKAKRSVRDLVRRRARVVQMRASEYASMRRMLYRHGILEHSRYGMTRMSEEDVERWFDDPRVQLTGKYSIERIHLYTRHIKGIESEVALALKGAASYRRLMSLPGVDRILATTIYFETGDIGRFRKAKHYSSFCRLVPGISQSGRVVRRGRNPNQGNHYLKWAFNQAASYAVRYYEPIRAYFQHLLQTHHGRARKLIAYNAVAHKLGVAAYHILRDGEVYCQKKMFGAAIPSA

SEQ ID NO: 196744 - protein, 405 aa, unidentified
MTQPATLHYAGVDWATRTHAVCVVDQTGAIRARFEVPNTGKSFTGLCRRLAKLKVAGVAIERPDGPLVEAMLEGGLKVVVVAPRQVKALRSRYRASGAKSDPADAYLLADVLRTDGHRLTPLTPDSDPTKILRALTRTRKDLQEARVALVNQLTSQLERCFPGAIGLFAELHSPIAVAFLRRYPTSHAAAALTQAKLAAFLRRLHYPGRTPVATLLGRIQTAPLSGISPAEAAGRAVCVAALLDAIQITARQERELEAEIIERLEVHADAKVFTSLPKAGHGVRAAALLAELGDVRARFPDNDCLAALAGAAPVTITSGKRRVVKFRWACDKKLRNALIDFADDSRHASPWAAKIYADALARTGRHPHAVRILARAWIRVIWRLWQDGVAYDPAKHRGAVRLLAA

SEQ ID NO: 196745 - protein, 430 aa, unidentified
MSSKTLVLKINTASTLPVAFDVGKSRLDYYFEIPSLESGERTAVSGFVANRTSTILPLFEQLTAKAKEHGFEYIGVICESTGPYSEKLLRLARTNGHFTAYVSGESVHKLKVLENNDAGKTDIKDPRVILMLAKMDKILCHRNLNGHYQALREYNREYDNERTQLTSIKGSIHAILIRLFPDLDFTSGFLYKDTGRAMSVLYRWNPYRILEEGWEQFTNNMRCLAPGVHQETLDKLWQNAETSCLQALEPIYVEAMEFKVGGLWNRMDAHERRIAEINDRMIALYRELLETGERIPKPDPGFLTELRIARIIGETGPLTDYHSLEGLMKYAGLNLRERKSGQYVGKVQLSKKGRAPLRRVLGEAAFRLVKKTELYGPYYHGKKEKGMPGTKILAAVERKLLSVFYTLGIKSLAFDPVRFSMCESHFKKAA

SEQ ID NO: 196746 - protein, 372 aa, unidentified
MESILYVGMDVHTSNYTLCTYSIEDDREFGLVKFEPDYLNIVRYVKRLKEHHGQETRIICGYEAGGLGYSLYRSLTANSIECVILAPSTMPKAPNERKTDYRDAAKIARCLAYNSYRSVYIPDAEDEAVKEYIRMRDNTKDHIKQLKQRILAMCTRWRKEFDGTKKRWTVAHMKWLQHLEFENPIAQEAFDEYVIQLNEANARLKRYDERIEKWAKLPRYAEKVSKLTCFCGVKTHIALATIAEISDFDRFPNANRFASYLGLVPGEFSSGNNVNRLGITKQGNSHIRKLLTEASQCYARALPGKPSADLLKRQQGNDPKVIAYANKGNERLKRKYRSIASRKARPLAVTATARELACFIWGMMTNHLEQVY

SEQ ID NO: 196747 - protein, 425 aa, unidentified
MPYRIAGIDVHKKMLAVVVADVEVEGDFRFDRQKIGTSPADLRALAAWLVEREVEEVAMESTAQYWRPVWEALELHWRPKRQAREGASPICGTLHLAQAQSNRGAGGRKKDFPDAERLVKRLVAQELTLSFVPNAEQRLWRTVMRRKYQITRNRVQLHSRLESLLEEAHIKLSSFVSDLLGTSARRMLQALADGETDPAAVASLADQRLRATAAQLSDALSACTTLHPVYRRLLKLTLEELRLIEVHLGQLDQQMADLLAAHHDAVQRLAEVPGLGVDSAQQVIAEVGATAATFPSPKHLASWMGACPGTEESAGKNYSHRCPKGNRQMRRVLNQAANAAVKAKGTIFAVVYRRIVPRLGHAQAIGAITHRLCRLIWKILHERMRYEERGPSVSAEAKKVRARKMIRELRNLGYRIELITPAPSA

SEQ ID NO: 196748 - protein, 423 aa, unidentified
MDVLYERVAGLDVHKETVVACVRIMADGKARRECRTFAATTEQLTELRAWLEECRCTHVAMEATGVYWIPVFRIVDEGGFELILANAAHIKNVPGRKTDMNDAMWLADLLACGLIKASFIPNEEIQELRALTRTRKQLVREQTRHVQRIDKTMAEANIKLSSVLSDIMGASGRRIIEAMIAGVRQPKQLAELAGKQIKATPKELYDALHGRLTDHHRFLLELHLKQRDSLDETIRKIDLEIDQRIARTHAEVGGSQVPFRALIDLVSTVPGVSLVAAPAILSEIGPDMSRFPTAGHLVAWAGLCPGQNESAGKRKSSRLRKGAPWLKTMLVQCAWAAKRKKDSYYRAQFFRLQSRRGPQKAICAVAASILTAIYNILKDGVEHHDLGGTYFDRRPVELKANHLVARLKKLGFNVQLQPIAETA

SEQ ID NO: 196749 - protein, 346 aa, unidentified
MENVPVFVGLDYHSKSVQVCVMDAAGMVLVNRRCENSVLEISRAVGAVGQGREVKRVAIESCCGAADLAEALMDPVHGPGWTVSLAHAGYVSRMKTNPDKTDYGDARMLAELARAGLIPPVWLAPKHIRELRVLVRLRADLVEQVKAFKTRILALLRQQRLAEPSSFGRWCRAWLAWLASEGCALSEQGRFAVEIWLDEIAALRSRIKKVEGRLRDAVRDDAVVAKLRENKGVGEVTAWTMRALIGRFDRFASGKQLSRYCAVTPRNASSGERSADSGMIRAGDGQLKSVVIEAAQRLRRYVPRWQKLSESMHQRGKATSVIIGAVANRWLRCLYHEMKGVSMGSA

SEQ ID NO: 196750 - protein, 347 aa, unidentified
MRFYNGQHRHYCGVDLHTKRMYLCILDHEGNKLLHRNVRAKPREFLAAINGFREDLVVGAECMFTWYWLADLCLEQEIKFILGHALYMKAIHGGKKKDDKLDSEKIARLMRGGTFPLSYVYPREMRATRDLVRRRMFLVRRRSELLAHVQLMNQQYNHDPFEKMLKYAGNRRDVLDRFAESSAQLNVAADLEMVGHYDRLIKQLEMNLVREAKLHDPKACSLLRTIPGIGKILSVVLLYEIHTIDRFPSVGDFLSYARLVTPKQTSDGKVTGHGGAKIGNVHLKWAFSEAVLWMLRYSEDAKAFLKRKEKKYGKVRAMSLLARKIARAVYQMLKRKESFDAVKFFAS

SEQ ID NO: 196751 - protein, 371 aa, unidentified
MKSILSVGMDVHKNSFSLCTYDGYTGEIVSESTFASDVKLVIKFIETLKSRYENDVEIKCGYEAGCLGYSLYKSLTARGVDCVILAPTTMQVSAKNKMVKNDRMDALNIAKNLASGSYKSVYVPDEEDVEIKEYIRMIHDFKKELKRVKQEICAFVLRHGYQYDGKSKWTIRYMNWIRELEMSEIQRETLNEYIAEMENLNDKINRFMNRIDEMYQSERYHEKVSKLRCFKGIETFAAMTIQVETADFERFPSAKAYASYTGLTTGEHSSGDKNNRIGITKQGNTVIRKTLVECAQSLVKGNVYAKKSQGLKSRQKGMDVNIIAYADKATERLKKKYQKLIERNVPRNKAIVAVARELACFIWGMETGNIH

SEQ ID NO: 196752 - protein, 416 aa, unidentified
MKIYPITRPIQRYIALDIHKEYVLAGGMSAKQEWLLPPRRVEISKFGEWAQKNLCESDAVVIETTTNVWDIYDIVQPLVGHAVVAHAGAVRQIAEARVKTDKEDVKRLIRLLIADILPEVWVPPQPVRELRGLISYRQRLVKTGAVFRNRLQSLLHSHNLVLPEEGLLSQAWWAGQEKISPLEKLQIGQEIALLEQIEKHKAEVDQELGKQSLGETWGRDAVRLLQLPGIGVVIAMTILSAIGEIQRFESADKLVGYSGLGAGVHDSGKEHIEKRITKSGRKELRWAMIEAAWRAVKMSPYWKEQYEKFFQRMRRESQAIVVVARKLLVAVWHVLSKEETDIHASEEELAYKMLLLSWSLNEDARLGLTYKQFAKYALMKLGVETDITRFVRKDVPRRLAPREEVLARLTELGLTA

SEQ ID NO: 196753 - protein, 352 aa, unidentified
MTTMTPDPGSVTGGVDTHLDVHVAAAISHLGAVLGTESFPTTTAGYRQLLRWLASFGPIHAVGVEGTGSYGAALARHLADNDVTVVEVARPNRQVRRRHGKTDVVDAIAAARAVLSGDATGAPKAHNGPVEALRLLKIVQRSANKARTQAINQLRNIVATAPDELRSRLRGLKTTELVETCAAFRIREDDDSLPAVTRLALRELAQRVQHLDAQLERTAVRLRRITTAVAPELVAIQGIGPDVASTILVSAGDNPHRLRNERAFAALAGTNPIPASSGKTNRHRLNRGGDRQLNAALWRVAVVRLRCHDATKTYLERRTEDGKTKPEILRCIKRYIAREVFAALPREALGLT

SEQ ID NO: 196754 - protein, 352 aa, unidentified
MSSMPCLQSKVFGGIIDTHKDLHMAALVDETGAVIATHAFSTTRAGYRALLRWMTGFGQLQRVGVEQTGSYGAGVVRHLALASVPVLEVTGTDKAERRTRGKDDTLDAITAARAALEGKRISLAKHRDGEIEALRVLRVARQTAVKSRRSALQLLHNMIIAAPDEVRDQTRNLTRMQLIRTCAAWRPDVEAASDPAVATRIALKSVARRIIDLNDEIANLDEPIERLVRELNPKLLDQIGIGVEIAGQLLVTAGDNPERLRSEAGFAMLCGVAPLPASSGITQRHRLNRGGDRQANRALHMAAVSRLRLCPRTRAYATRRKAEGLSKREIIRCLKRYIAREAYHLITAETGP

SEQ ID NO: 196755 - protein, 400 aa, unidentified
MLSIGIDVSKGKSTVCGMKPGGEIVYAPFEVQHTREGMSELVSLLHNSGEEVRAVLESTGSYHCPVVAALLENGIFVSVVNSLRMKRFCSQSIRKVKTDRIDAMQIALYGLAYWQELQPTRLPEDTYRELQLLARQYYQMTSMLIKAKVDFNALCDQVLPGMQELMNDHAGRHKLSDFVLRYRHTTHILEMGETRFRKDYCKWAEKKGYRNCERMAAHIFATAQNGIPVLPNAPSTQIVITEAIRVLHTVEASRDAILTQMQALAKTLPEYSLVREMPCIGDTLAPRLIAEIGDVRRFHSKRALIAYAGIDAPPYQSGKFRANNRHISKRGNRYLRKTGYEVMQSYVMHKPANDPIFTFIEKKRGEGKSGKLAMVAGLNKFLRVYYGKVTELYRSLPAIE

SEQ ID NO: 196756 - protein, 341 aa, unidentified
MQVSVLGIDLGKNSCSVVGLDGTGKVVVRRRMRRETVIAYSAKLPACIIAMEACCGAHHMGRELAAQGHVVRLMSPEYVRPYVKAQKNDDRDAEAIAETATQPTMRFVELKSQAQLDMQTLHRVRDRLIGERTSLMNQIRSVLLERGHIVPQGKAKLAARLAELLADPALALSHRIRELICDMRERWQVLDERIDVFDKEFVQHARQDEHARRLITIPGIGPLNATALVAAVGDARTFARGRDLAAWLGLVPRQETTGGKPRLLGITKRGSKYLRKMLIQGARSAMPTLRKSDTRLGAWLRGLLSRAHANTAVVALAAKMARIVWALLRHGRTYKAVAVTA

SEQ ID NO: 196757 - protein, 341 aa, unidentified
MKKFIRIAVDLGKRYFQVHCLESEGGRSISRKLTRSKMLEFFSQIERCRIGMEACGSAHYWARELVAMGYEVVLIPPAYIKPYVKRGKNDAVDAAAICEAMSRPGMRFVPIKSVDQQAVLMLHKTREMFVKQRTMSVNALRGHLAEFGLVVAKGIERIDELLALAQSAAALPPVAKSAVAGLAQHLEGLDQSIEAVEDEIARAHRQNPTSRLLDEVPGVGTLIASVIAASVPDPAVFRSGRDFAAWLGLTPRQNSSGGTEKLGAITKQGNRYIRKMLVTGSTSVLRVAGKRKGALADWINALRTRKPERVVAVALANKLARICWAVMTTGESFRVDTYVKA

SEQ ID NO: 196758 - protein, 421 aa, unidentified
MQVTHPVCCGIDVHKDTLTACLRRVDANGQVSKERREFATTYTSLLTLSDWLVEQHCPIVAMESTGVYWKPVYHVLVGTVEVYIGNAHELRSRPGKKTDKRDAAWIAELLAHGLIQPSFVPPPEICALRDVTRTRVAFVQTRSQSKNRVHKLLEDTNLKLGSVVSDLFGVTGRRMLAALVAGERDPQVLASLALGALKHKRPQLELALTGQFTAHHGTLLGLLLELIEMLDRQIATLDQQIGELVAPLQAQIAQLDSIPGVDIIAAHDILAEIGTDMSRFGDAARLASWAGVCPGNHESAGKRYRGKTRKGNRYLRRVLVQCAWGTRKTPTFLGRTFRRLAVRIGKKKAALAIAHTILVIVYHLLAAGTCYEEARYDHYYPKQEARERRRAIKALERLGYTVIVERAASLRAGVSSLLRLS

SEQ ID NO: 196759 - protein, 370 aa, unidentified
MAKRNMFVGMDVHKESIDVSIAEEGRDGEVRHYGVIPGDLEAVAKVVRALRAPTRRLRFVYEAGPCGFGLHRYLTAQGEDCVVVNPSSMPKRSGDRIKTDRRDGNALARLHRAGELTAIYIPTPDDEALRDLVRAREDAVGLSTQAKHRLKAFLLRQGRRYPGRAGWTRPYRRWLADLSFPRAPQHIALQEYRDTIDETERRVERLTDQLRQLTPAWRWAPVVDALQALRGVSFVTAVGLVVEVGDIRRFDHPRQLMAFLGLVPSEYSSGPSVRRGGITKAGNPHARRLLAEAAWAYQGVPRIGRQMLYRQEALPNTVCDIAWKAQLRLTSRFRKLVARGKAKPKVAMAIARELTGFIWAIAREVAPPPA

SEQ ID NO: 196760 - protein, 428 aa, unidentified
MNEVNRNRLEGFRQLRQEIRHSEEHLVVGIDIAKDRHHAFFGTATGKTLLRRLVFGNDHEGFRRLLDQVETLRVRHGLRKVVYGMEPTANYHKPLGEYLITQGRTVVLVSGVTVKRNRESLDGRWDKHDVKDSANVADLISQGKCLYYEYPSAELRGLRGLLSLKRRLKKQEHGYKVRIRNHLIAQYFPEMDRDYERLGAAGLSIVRWCFPVSQMTELDVEPFIQRVTSRRIRMETRRRLEGIWEKAGASIGCEGVPGVDHEAKVMVEGLRQIREVIKETEDKIEELCNAFPEYRFLLTIPGFGPDVSAKVLGAIGEPDRFQNGKQVLKMGGLDLSADRSGKDSDKAIPEISKRGKADLRYALYQAALIASTKNRDFMLYYTSKLQGREKEKGIHTKMLVKLSAKMLLIAWTLMKKKEAFDPAYLKAE

SEQ ID NO: 196761 - protein, 409 aa, unidentified
MELLNARCAGLDVHQATVVATVRIPDDQGGRRSVTETFGTMTADLLALREWLHAYGVTHVALESTGVYWKPVYYVLEDAFTLLLINMQALKRVPGRKTDVQDSAWLAQLLECGLLKASFVPPPPIRELRDLTRYRVQQVRDRAQEVNRLCKVLEDAGLKLTSVVTDVMGASGRAMLRALVEGTTDPVVLAELARGALRKKLPALRRALQGRFRPHHAFLIEQIFAKIDFLDETLDRLREEIDRRLGPFEPMLAGLDTIPGVDRIGAISIVAETGGDMTRFPSAGHVCSWGAMCPGQNESAGKRRSGKTRKGNRYLRATLIQAALGATHKKGSALQARYHRVKRHRGHKKAVVAVGHQILEIAYYIMRDGITYDELGADYFERRHADRAVRRHVRQLEALGFHVTIEKAA

SEQ ID NO: 196762 - protein, 387 aa, unidentified
MSPTIAACRPAAVDYERTLILSIEVSNQNWVLAAQVPGLPHTKAKRTVDPEAEALMAAIAGYRSRAAAMGRSIERVIAVYEAGWSGFWLARWLTRHKVEVYVIQPSSVPVDRRMRRAKSDGIDAELLPRTLLAWLRGEPRVCSMVPVPDEADEDARRCIRERTELISERVGLTNRIGAVLATLGVTDYNPLLRNRHHRLAELRTGLGEPLPPNAHAKIVRLLARLELVLAQIAELERERDAVVETETPDHASKMIQQLISLRGIGVQSATVLVREAFVRRFANGKALGSYAGLTSSPYSSGGIDREQGIGKGGNRRLRTVMVELAWLWTRYQPATAQVCWFRERVGSTGRRVRKIMVVALARKLLIALWRFVIDGVVPEGAVLKPAA

SEQ ID NO: 196763 - protein, 341 aa, unidentified
MAIGVDVHLKSYEAARKLDNDSVGVVQRWRSKEEFLLYAEKQLQQAQEVVVVYESGPLGFTLYWDLKARGIECLVCAPQSQEQKRKRRKNNAIDARTLSGNLFNYLNGNKHALQLVRVPTKAQEQARIESRQHDALVQERKRIAAMGNSLLLSQDYGSWKNWWRPKAFERLSQLVAPWVLKQLQRWITILGELDRQIQQAKVELTQHYQGPRPKGMGAPSLAQLNAEVLDWNLYSTERKIGCLAGMVPSEWSTGEGQRLGAITKVGLPAIRRIITEMVWRMILFQPQYKAVQKWREVLEGSNRGLKKKAVVAIGRRLIVDIWRLQTGRISAQELGLIMIEA

SEQ ID NO: 196764 - protein, 317 aa, unidentified
MENSLQSTWIGVDVAKRHWDVVVAGQTQVHHFPADQEGCQQLQQLLAQHQVTHACLEATGGYERMLADFLREQGIVVSIANPRQIRDFARVQGQLAKTDRLDALVIARYAVLMQPKKTKKPSENERKLGSLRTRRQQVSDALTREKNRLGTQHDDLVRQSIEEAIDFYQRQLEQLDQQIQQLLQADDQFRERSALLTSVPGVGATTAAALIAHLPELGSLNRGEASRLAGLAPINRDSGTLRGKRMIGGGRAVVRKMLYMPTLVATKHNRVIREHYQQLLQRGKAKMIALTACMRKLLLILNAMIKTNSTWNDPRET

SEQ ID NO: 196765 - protein, 315 aa, unidentified
MTITLEEYVGIDVAKDKLDMAVLGQKATSEVFNTKRGITAVVKKMCQLNPKLIVVEATGGYEEALVLALYEAGMPVALVSPQRVRQYAKARGLLAKTDKLDAQNLAEYGKHIQPRLFVAKSEEGRRLSAIIGRRRQLADMQKAEKNRLRTAYLEMKSSIQTVIDCLEAEIERLDEEIRNFMNEHENFKEQEELLRSAKSIGPVTAATLLADLPELGKLDRKQIAALVGVAPINQDSGKKRGYRKTKGGRPEVRSVLYMSALSGIRYNPIIQAQYDQLVKRGKEKKVAITACMRKMLTILNAMMRDQQPFRKVSMV

SEQ ID NO: 196766 - protein, 334 aa, unidentified
MKKRYFMGIDVAKATFDFCLLSSTESCLWRGQFSNDAHGIARFLAQWPAPRRKPAQIHFALEATGVYGKALVAALHQAGLAVSVLNPAQVKYFAFSVLRRTKNDTVDAEIIARFCRERKPLATRPLRPIEEQLKVLVHERESRVGEQTRERNRAKKDPFQIALPTLISRQRRQRLQQLDKEIAQLDAAIDSLIASDESLSNQSQLLCSIPGIAAVTAAKLLSELAGKEFQSARQLAAYAGLTPAEFRSGYFLYGKTHLSKIGNAFLRKALYLPAAVARRWCKPLKPWIAILESRKLHHLAIRGAIMRKLLHIAFGVLKHQKPFNPLLVFIPKTL

SEQ ID NO: 196767 - protein, 351 aa, unidentified
MERIALDSHKRYSLLSAEDEQGLILREGRVPHKRGAIRGALEGFTPGSPVAVETIGNWYWIVDEIEQAGLVPRLVHARKAKLMSGQINKTDKLDVRGLNKLQRAGTLPEVWIPPAELRDKRDLSRARMSLSNHRTRYKNWIHPTLAKYALQDFEELSDIFGVKGRKLVKERMGKLPTHTRYTMERFLESLDQVQTEIDRIETRMKEVFEQTQEVKLLQTIFGVGFILAVVISLEVGDVKRFPSSACLASYAGTTPRIHASGGRVRYGQTRPDVNRYLKWAFCEAATTVASHRKRRPHMHASRLYDRIRARKGHPKAIGAVARHLAEATYWMLTNNEPYREPKSKATSSRRV

SEQ ID NO: 196768 - protein, 404 aa, unidentified
MYNAVGIDVSKSKSTVAVLQPGGTVIRKPFDVSHTSQNLNELADYLSSLDGTTKIVMECTGRYHEPMVKALSEAGLFVSIVNPHLIKNFGNNSLRKVKSDPADARKIARYTLDNWTELRQYSGMDNTRTQLKTLNSQFSFFMKQKVAAKANLIALLDNTYPGVNKLFDSPTREDGSEKWVDYAYSFWHADCVRKIGLKAFTERYMSFCKKHHYIFQQDKPEKLFNASKELVAVFPKEKTYKLLIQQSIQQLNLASEHVEQLRREMNELASTLPEYSTVMGIYGVGKTYGPQLIAEIGDVSRFTHREALTAFAGVDPGVDESGQHKSKSNRASKVGSARLRKTLFQIMTTLLQNAPEADPVYCFLNKKRSQGKPYYVYMTAGANKFLRIYYGKVKECLRNLEQTE

SEQ ID NO: 196769 - protein, 413 aa, unidentified
MQVAYERCCGLDVHKETIVACVLVSGPQGRPAREVRTFGSMTGELQELGRWLEERGVTHVVMESTGVYWKPVYNLLDGRFFLLVVNAQHLKALAGRKTDVQDAEWLADLLRHGLLRGSFIPSQLLRELRDLTRYRAKLGDERTSEVNRVHKVLEDANIKLASVASDIMGVSGRAILEELVQGRTDPALLAELAKGRLRDKRDLLEKALSGRVRTHHRFMLAQHLSHVDFLEEAMRQLDVQIEEQMRPFVASLERWDSLPGINRRIAEIVVAEVGPDLAPFEDAEHLASWAAICPGNDESGGRRRSGKTRRGSPWLRRALVEAAHGAARTKNQYYQSLYRRLAARRGKQRAIVAVAHSLLVTGYYLITRERTYQDLGADYFDRRDHDAVKRRSVSRLEKLGYQVQLAPRQVAAA

SEQ ID NO: 196770 - protein, 291 aa, unidentified
MDVHRETISLAYLTSKSKDVVKEEQIKHNEVQIKKFINKLKSEWNKIHCCYEAGVTGYPLYRYLKSLGVNCILVAPGKIPRQSSDKIKTDKRDAIKLARLLRSGDLESIHVPTEEDEAVRDYLRSRDSLRLDLGRNRQRLMKFLLRKGNVYSATKYWTVSHYKWLNNLHFENEILQETFNDYYSRVKVQEENLKAMDQRIQEIAESEPFRERVGILRCFRGVDYLTAMFLLCEVCDFKRFKTAGSFMSFLGLVPGEYSSGSKRKQTRITKTGSPRHFDGSCLAASLSWNGK

SEQ ID NO: 196771 - protein, 348 aa, unidentified
MTDYFIALDVHCAFSEMAVVTGSGKLVRRDRFPTSIPAIREALGQVPRRRRLTFEEGPLADWLAREVRTSVDELVVCEPRRNHWIARDGDKDDPLDAYKLAELHRGGYLKAVHQAGSLERSLLKQHVSLYHDRVRERVRQGNQLAAMLRRHGVFVRAAHQLDETEWSLTLQRLPAAELLRRGLERVRQAYQLLVTQEESWREELTGLAKREEPVRRFQELPGVGWIRGITFYAYIDTPERFRGKAALWRYAGIGLERRHSGQGPMRTRLSHRGSPRLKDVLLGAAKSAIVQGENPFADKYRSWIEEGGLSAPNARRNVARGIAATLWSLWKTGQAYDPQRVTAASPPA

SEQ ID NO: 196772 - protein, 412 aa, unidentified
MEVIHTRCAGIDISKKDAKVCVRVQDPGRTKSTSKVTTWGAVTNQILVLRDHLVAEGVTLVVMEATSDYWKPFYFVLEDGPFEMMLVNAGHVKNLPGRKTDVSDASWLAQLGAHGLVRGSFVPPQPIRQLRNLTRTRSSVTYERSREIQRLEKLLEDSGIKLSSVASDLTGVSGRAMLEALVAGERDPHILAEMAKKRMRVKIPELIEALTGRFDDHHAFLVRLHLDLIDQHTHAIEAITARIEVVIEPFRAARDLIITIPGISTKVADVIIAETGADMSRFPTAGHLASWAGTCPGSNESAGRVKSTHTRPGNPYLKAALGISAMVLARTGDTYLSAKYRRLASRRGPIKALVAIEHAMLIAIWNMLQTGATFTDPGGDFYTKRSPDKTKNRAIQQLRSLGYMVTLQPTAA

SEQ ID NO: 196773 - protein, 373 aa, unidentified
MMVWTAPYGIECARMRLLRSQTREPSVNQIIRIGMDTSKHFFQLHGVDAAEHPVLRRKLRRKEMLAFFAKLPPTVIGMEACGASHYWARELGQLGHTVKLIAPQHVKPYIKRNKNDGRDAEGLCEAMSRPTMQFVPAKTAEQQAALMLAGMRERLVGQRTQLSNAIRGYAAEFGLIAAKGLDKIEPLLADIAADEALPVLARELFAMHGREYAQLQAELKTIEARLMAWHRANADSRRLAQIPGIGPISATALVMKAPDPRAFPSGRHFAAWIGLTPKDHSTAGKTRLGKITRAGDERLRSVLVAGATAVIQQARRGRGRSSPPWLLALLARKPPKLAAVALANKNARIAWKLMTTGESYDGARMPDVSALAA

SEQ ID NO: 196774 - protein, 366 aa, unidentified
MLHKLNSAATLIQRTTTEAPRDHMYYIGLDVHKRTISYCVKDAAGHVHREGKIGSTRCELDAWIKTLPQPRMMAMEATIFTGWIYDHLLPHAEKVKVAHPLMLRAIAAAKKKNDRIDAAKISDCLRCDFLPECHMASTEIRDRRRMLRYRNLLVKQMVQMKNRVSGLLLETGVSYNKSRLHKVGYFADLMSTNEEVSESIRPLLKLSREHIVRAQRLDYGLVSSLERDPLLAERLRRLRTVPGVGPITALTWALEIGDFTRFRSVKQAISYCGLCGDEKSSADKVMRMPLSKQRNKHIQRVLIEAAKLAPRECHELAMVRERELEKGNPNRATLAVARKMVSYMLAVERRKRDFVPAEEFKCTAAA

SEQ ID NO: 196775 - protein, 457 aa, unidentified
MPARRKQPRSGTASPAHTIDPNSAGIDIGATEIYIAVPADRDPHPVRKFATFTEDLLAAADWLKQCGIKTVAMESTGVYWIPLFQILEAGGMKVCLVNARHVKNVPGRKSDVCDCQWLQHLHSAGLLRASFRPEQQICAVRSLVRYRDSLVQLSAMHLQHMQKALDQMNLQLHHVISDLGGKTGMAIVEAILAGERDPHQLATLRDPRTKASKETIAKSLVGDYRREHLFTLRQSLTGFRQNGQLIADCDVEIESLLKEFSSGDGPGAEAVPEPQAELKRKPRCNEMNFDLRTQLHRIFAVDLTEIPGIDTLTAHTLFTEVGRDLSKFANVAAFTSWMGVCPDNRVSGGKILHAQTRRVNNRVAKALRMAAQALSRSHGWMGQYYRRMRAKLGGPKAITATAHKLARIIYHLLTTGQAYDESVFAQQEAQNNQRNECRLRHQARKLGFELTLIPTEL

SEQ ID NO: 196776 - protein, 403 aa, unidentified
MEGPLISLDVSKGKSNYRFFENGTDRKGKKGVIRHDIQGFDSIRDEAEKMEKRLRIKPSVIFESTGVYSDVVEKYFTDKGFDVYVISPLLSASMRKEGVRPAKNDSLDTLSIAKVFYSKDDLRKCSENDKKAERLREMSYELDMMNRRIRPMKCQFLRLLDKVWPCLDEVSDYSSRFMLDFIIAFGHPENIKTVKGVLSVIRKSEMGTAGRKDKIAQDLFDYCHTHLSAVSKDSSYVELLKRMAIELKAMAKKKSELIDRMAEEARSKDEFARLLTIPAVAKTTALKIMARVGDISRFRNAEALVAYCGLDPRVYQSGKMTGEHRTITKKGDCILRSTLFLAVKLMVMLYPDTKVARFVAAKAKNGLSYKQAVVAGSAKLARIIYSMLTHHENYVEFNADIVA

SEQ ID NO: 196777 - protein, 408 aa, unidentified
MLEVKLERCAGIDVGKKYIDVCLLIGPVDHKPAEEVRRFGTTTRELEQCRAWLLEKGCTDVVMESTGSYWKPIFNILEGHVKVTLANPEHVKALRGKKTDRKDCRWLAGLMRHGLVQPSFIPPRDIRELRDLTRRRRVLLQNGGEERNRIQKILEDANIKIGSVLSDVFCMSGQAILESLMDNKLKPEEMAQFARGRARAKIPQLVEALEAHRKTDHHRLLIGQALRHMQFIEKMIEELDEQIRERLKPHQKQFELACTVPGIGPDSAAAILAEIGMDMSDDGPFASCHHLASWAGMCPGNNSSGGKQKNSRIRKGNRWLKATLCQTGWAAAATNGSSFQSRHRRIRARRGAQRANIAVGHAQLIALYWVLRLGVPYEKHHQNIPAEDRQSRIQHHLRRLAELGYQAH

SEQ ID NO: 196778 - protein, 405 aa, unidentified
MNAVGIDVSKGKSTVTIRRPGDVVLMPPCDIPHTQSAINCLIKHIQSLDGETKACMEHTGRYYEPVATWLSDAGIFVSAVNPILIKDFGDDSLRTPKTDKADSKKIARYTLDRWAKLKQYGSMDKTRNQLKTTNRQFGFYMAQKTAMKNNLISLLDQTYPGANDFFDSPARSDGSQKWVDFVHTYWHVDCVRSKSLNAFTEHYRSWCKRRGYNFSADKAEKIYHLSSDLIAVFPKDDITKMLIRQAVALLNTASETVESLRLKMNELASTLPEYPVVMDMNGVGSTLGPQLMAEIGDVTRFTHREALTAFAGVDPGKNDSGQHVQKSVRTSKKGSPYLRKALFQVMDSLIKRSPADDPVYAFMDKKRAQSKPYYVYMTAGANKFLRIYYGRVKEYLSTLPEKEGI

SEQ ID NO: 196779 - protein, 313 aa, unidentified
MNQEKHIGMDVHQATISVAVIDGKGKLIMECILETKAATILGFIQGLHGTLWVTFEEGTSAAWLHDLLKPHVSHLVVCDPRKNALLKDGSQSDRIDARKLAELLRGHQLKPVYHGEHGVRTLKELGRSYLTITQDVTRVMSRIKALYRSWAIPCSGTTVYAPRHRAEWLAKIQEPGVRLRAERYYQQLDLLQPVRQEARRDLLGESHKHNAVKLLRQIPSIGPIRAALLVAMLQTPHRFRSKRQLWAYSGFAVETHDSGEYRYVRGKLQRNRERITVRGLSDHHNHDLKNLFKGAAISASARPGPLDSALGEY

SEQ ID NO: 196780 - protein, 343 aa, unidentified
MKLTRVGVDLAKQVFQVHGVDRAERPAWCQRLKRSRWITELERNVEPGCEIGMEACGGAHHWARLLQSKGYVVKLIAPQFVKPYVKSNKNDANDAQAICEAMSRPSMRFVAVKTVEQQDIQAVHRVRASLISERGAKANQLRGLVYEYGLVAPREIASLRRAVPDWLEDASNGLSVRFRTLLAALYRDLQWLDERLRELDREIAAIVRENEAVRRIEQLRGIGPLTASALVAMVGDGRQFKNGRHLAVALGLTPRQNSSGGKEKLLGISKRGDKYLRTLLIHGARSALRTAPGKTDRLSRWALALAQRAHPNVAVTALANKTARVAWAMLRHGTNYEPERVAA

SEQ ID NO: 196781 - protein, 337 aa, unidentified
MSEITTVGLDIAKRIFVAHGADAAGNTVLTKKLRREEVHTFFASLPPCLVGMEACATSHYWAREIAAFGHDTRLIPPIYVKAYVVRQKNDFVDAAAICEAVTRPSVRQSPVKTIEQQTARVTQRTHELLSRQRVTLINALRGHMAEFGILAPAGPQHVGRLVEKLADPAAPIPGAVRDALNVIVDQLVALGREIDRMEAQMRRFCRNEENAARLLTIPGVGPITASAILAGVPNIRGFRSGRDFAAWLGLVPRQNSSGGKERLGRITKMGDRTIRRLLVTGALSAIRWGRREPGFAESWIGRLIARKPMKLAAVALANKMARIAWALLTRGEVYRTA

SEQ ID NO: 196782 - protein, 335 aa, unidentified
MGAYVGIDLHRRRSVAVCLDEGGERLWWRRFENSPLAMAEVITEAGPDPEVVLEATWGWYWAADVIAEAGGRVHLAHPLGIKGFENRRVKNDLKDATLLADLLRMGSLPESWIAPQSTRELRELVRYRHKLSQLRAGLKNQVHAVLGKEGVIPHLVTLWGPAGDQFLDETLLGDAFGYRVESLRDLVGVYDREIKLVDDRIHRRLKGDRGYRAIQQLTGVGRVHGAALVAEIGDVTRFRSSKHLCSWAGLTPRLRESDTTTHSGSITKQGSRLVRWTAVEAISSRHGGAPIRDHYRRIAERRGTNIGRVAAARKLLTLVFYGLRDGEIRCLGETG

SEQ ID NO: 196783 - protein, 330 aa, unidentified
MKKYDDVVGIDVSKLTIDAHIHKGSIHRVFSNTSKGYAALVKWLDKNLGEQCYFLCFENTGHYSTNLSVYLSQNDMDYVEESPLAIKRSAGIVRGKTDRLDSGMIARYGWLHQEELVLSTPKEKDIQEIGRLLSLRDQLVRDRTGKMSTLKEAQSLLSSPSTDSCCKIVTKTIAYLTKQIEALEDRIKTLMRSEEELNDNFNLLNTIKGVGLILSSQLIYHTNNFQRFDSWRQFSSYCGVAPFAHSSGTSIRRRNKIHHIGDRKMKTLLTMASVSAIQCDSELKHYYQRRLAEGKPKLVALNNVRNKILARAFSVIKRGTPYVELQRFAA

SEQ ID NO: 196784 - protein, 429 aa, unidentified
MKKAPSFEVCQTIKLGAMQKKDYVEFEQVVERGCGMDVHKETVVVTIQGKGIKTVTKSYSTFTGSLKKLKEWLQKHGITHIAMESTGIYWKPIFNVLGDDFEILLVNARHVKNVPGHKTDKRDSRWLAKLLLSGLLKGSFIPERPFRELRDLTRYKKKLTNQVAADKNRFLKILEDANIKLSMVLSDVFGVSGTKMINHILSCDDYRPEELMQYVHGKVKASREDIKEALTGYITVHHKFMMKTILGNMAKIESTIAEIEAHLDTVLEPYKLEKELLETIPGVGPDVAIGIIAEISTNMEHFPDHKHLASWAGMSPGSNESAGKNKSGRTTHGNKNLRSHLTEGGWAASKTKNTYFSSKYKSLVGRRGKKRAIIALGHKILIASYFIIRDKVEFKELGEEYLNNFRRDKLIAYYKKQIERLDPDREVAA

SEQ ID NO: 196785 - protein, 465 aa, unidentified
MEDGFKAINLPSCGLDIHKDIIEATVIDAEGKQHYKTFDTMRNSLYALRDWILSKKCFAVLMESTGVYWIPIYEILEEVNGMDVGLGNSSHMKNVPGRPKTDKEDSRWIARLCMMGLILKNFVVGREFRGLREITRYHKKLVQERARILNRIEKLLQLNGFKLSSVISKIDGVSGLRFLKKLQTQGFVTVQDVNQLRAHNLCAKSEDIERAINGNLKLISRLLLGKMLSRLETLDKEIAEIYDLMVEHSKNHASAISIIDSIPGLAELSAIYMIAEIGTDLSSFKSANHLTAWAGLAPKIKESAGKQKSSKTKKANVYVKSILVECAWGAVRTRNTRLSNWYWRNKNRLGEKTAITAVARKLLVYIYAMLNSGELYNDSLDVADTEIYKAQKLPSARKTVEHHTNNSNAKKQCANKTKSDLVNALPAAQAYQNSPNIAASEATPRKRGRPRKKKDTDDLAANLTA

SEQ ID NO: 196786 - protein, 495 aa, unidentified
MPLKEASDELTGDLQKRIPYRKVLNIKKYIPWSFSKTNNMKNKKTANLQIVNLNAAGIDVGSKSYMVAIDQERENVTEFGVYTKDHQKMIDHLRSHDIKTVAMESTGSYWQTLFSSLQAAGFEVLLVNGSQTKNVKGRKTDVIDCMWIQKLHSLGLLSGSFLLSNVFQELRTYYFHRQHLIEQTVMYANKMEKSLRLMNIRLDIVLRDVTGKSGLNIIEAILAGDRDSKNLAGLADIRAKKSQEEIANALQGSWRSELLFELKASLQFYKQYEQALNECDVIIEEKLLEYVPKENLSAQQSTQIKITNKKSRKHSPAFNVAKISYEYFETDLFAIPGISHTTVLCLMTNVGHDIHKFATGKSFASWLRLVPNNKISGGKIISSRSPSGKNHLAIAFRQAANSIGNQKDHPLTPFFKRIAFRKGRISAITATARKLAVIIWNMITKIQPYNKENEEVHNARHKHVMLRNIEKRIGSLQLNQEELKKLFVRTSLLTT

SEQ ID NO: 196787 - protein, 378 aa, unidentified
MTVTLVPSLPPTSDVPGNIGGVDTHKATHYAALIDARGHLLDHRQFPATERGYRDMLDWFREHGPLKAVGVESSGSFGASLARFLTDQQVRVVEANSLNVMVRRRDGKSDRLDAEQVARAVLSQTSTAIPKSKSGIVEVIRTLRVTRTSAVKAKTQTFNTLWSVIIGAPSALRDELTPLSKRTLIKRCLTLRPETTDLLSLATIPERLLLAGTKIALRDLARRWKSLDEEIQLLNRQIDALVRHAAPELVELHGVGTEIAGQFLVTAGDNNSRIHSEAAFAKICGVAPQPASSGRTTGRHRLSRGGDRAANSALYIVTLVRMRRHQPTIDYVQRRTAEGLSKREIIRCLKRYIAREIYANLPHQQPEFLPEHRPAANA

SEQ ID NO: 196788 - protein, 490 aa, unidentified
MSRNRQLRQPPLSDATPTSGSPVPFRDVGIDLASVGEHHATVLDERAEVLFGRYFPTRAEALAQLEARALQATPSGTQLRDLLDCASLAWLPVAVWFQRRGHLVYQVPNGKTKDLREYYSKHSKSDPDDSYALAKHPTVDAESLVPLYLPTPEVFSLDRLNREHDRYSKEVAAMKNRLRDFLNSFAPGLAGALPVGLFHAGARELLREYLAPERVLRLGQRRFGTVLQNRLGDQVTPAVSAAVYQVYQQTATLFDLAERPAVCFDDLQAQLNRYWDELAHWEAQAAELKRQIGERYEQVSPGKHLSSLPGVGDLIGASFFGTVRGRDRFPNLASQRKFFGFTPKRNQSANSDKKSQRMTHAGPNLTKKHLFLATDMLRQHDPEVAAYYYDQMVRKGKCHTVAVCNAVNNKTIPRLHALLREDRPYELRDPETGESITPQQARQLIRERYTVPEEIRRARRSHQPRRKAQPPKEGTRSRKKGRAQSPGLRP

SEQ ID NO: 196789 - protein, 441 aa, unidentified
MKNEPTQNNNSIPAADPIAAWVGLDWADKKHSLFVRLTDGAATTACELEQKPQALDQFFLQLHQKHPQGRIAVCLEQSRGPVLYALMKYDFVVIYPVNPRCLADFRRAFKVSGAKADPTDADLLSELGCKHHQRLRALVPEDLATRQLRFLVEARRDFVNKRTALANELTATLKSYYPLALEVVGENLEGPMGLEFLRRWPNLAKLQGAKPSVVRAFFYAHNSRSEEKIAARLEAIKTAVPLTEDPAIVGSLQLQAAGLARQLAAVQKTVAEYDQQIRAVFEGHSEKWLFEKLPGAGPVLAPRVAAAFGTIRTNLGAALDLLCLSGVAPVKRQSGQQETVHFRFARPKFLHQSLVEFAKCSIGQCDWARLLYEKQITQGKSTYAAIRVVAFKWVRILWRCWKDGQAYDEVKYLRSLKKRGIKLYESLYNALPAETGPVNNS

SEQ ID NO: 196790 - protein, 350 aa, unidentified
MLIIGCDYHPGFQQIAFVDTESGEVGERRLSHREEAEQFYQELKQRNLAVRVGMESSGHSRWFERLLHELGFELWIGDAAEIRTKRVRKQKTDRQDAQLLLRLLLEDRFPRIWVPDAANRDMRQLLWHRHRLVQMRTRVMNQLHVVALNEGLRRKKALWRPAGRKELESIALAPWASRRRQDLLNLLDQLTPKIQELTRALEEEVEKRPVTRRLMTHPGVGPLTALAYELVIGSPERFHCGKQIASYLGLVPEEKSSGDRRRLGHISKQGNVLLRFLLVEAAQVTVRSHPEWRHTFFHLAQRRGRKIAKVAMARKLAVHLYWMWRQGCDYGPWQKLGSHAGEPGNPHGVQ

SEQ ID NO: 196791 - protein, 318 aa, unidentified
MSTAPCFIGIDVAKAAFQVASRPERLSGNFPNTAVGHRQFLKQLIDVDVALIVLEATGGYEKTLAAELVQAGYPVVVANPRQVRDFARGLGRLAKTDAIDADTLAHFAHMVHPTPKPPQRPEVEQLAELVTRRRQLTDLLTQEANRAQMIHHVKVRKSIRKMIKTLEYQIHELDRLIQEHIQADDDFQGKDRILRSSSGVGPQTSAMLLSHLPELGRLNRHQIAALAGLAPYDRQSGNLVRGAHIAGGRHEVRCLLYMAAVTARRCNPTIRQFAQNLENKGKSFKVVITACMRKLLIILNAMIRDQQVWNNEKNLKNT

SEQ ID NO: 196792 - protein, 367 aa, unidentified
MKKVSTVVAKQSRNVSRQKLTIGLDLGDRNSWYCVLDEAGRIQREQRVRTTAKALQEVFGAMPRSRVALEIGTHSPWISRLLSELGHEVIVANARKVRLIGESRKKDDRLDAQTLARLARIDPALLYPVQHRSAEAQADLAVIRARAGLVRARTGLVNTARGLAKSYGERLRGCNVRNLDPEKAEGLSPELQRALEPLLATIEELSERIVEYNDRIEALAQASYPQVELLKQIKGVGTLIALTFLLTLEDPRRFRRSRDVGSYLGLQPGRRNSGQSEPQLHISKEGDPYLRTLLVQGAQHILGPFGVDCDLRRWGLKLAERGGRNGKKRAIVATARKLAVLLHHLWVSGEAYEPLHNSSRMTVATAA

SEQ ID NO: 196793 - protein, 428 aa, unidentified
MQYALTEVLPDVPPGGVCAGIDWASTDHVACVVDMAGRVVDRFTAAHDKAGIAAIIVRLRRAGAGEVAIERSDGPLVAALLAAGLTVVVITSRQMKNLRSRFSAAGGKDDRFDSYVLADTLRTDRARLRPLVPDTPATVALRAAVRARKDLVAHRVAAANQLRAHLAVAFPAAVGLFSELDSPLSLAFLARFGNQDAAAQLDEDAIAGWLSGLPARGNPAPPAVLCARLRAAPPGATGSDSAAQAGVTTALAAAVAGLAAQIKTLETQIAGQLAAHPDVHIFTSLPRGGTLRAARLLAEAGDCRSRFPDPWSLTALAGVAPVTRRSGSHIARHFRWAVNHQLRDAVCDFAADSRHASPWAAAIYDAARDRGKDHPHAVRILGRAWIYVIWHCWQDRTAYDPAKHTALQRLLDQQHAAQAAGPAPQEDR

SEQ ID NO: 196794 - protein, 428 aa, unidentified
MNCNTQNAKIASITEKTLIVGIDVGSETHYARAFDWRNYEYTRKPLEFSNTEAGFQTFKAWMEDMAAKHGKTAVIPGMEPTGHYWFALGKFLQDSGMRPVHVNPHHVKRSKELDDNNPNKNDRKDPKTIAALVNEGRFSYPYIPTGIYAEIRSLSNLRFQTQEELTRIKNRLARWFAIYFPEYKDVYGDLKAVSGRMVLKEAPLPEDIRKLGVEGVNRIWRDAKLRGAGMKRARTLVSAAGHSVGSKEAPGAARMELKHLLNDMDVYTSRLEELLLKTEEKLKEIPYVDKLIGIKGIGLATVSGFIAEVGDIGRFDNPKQLQKLAGYAIVANDSGKHNGESRISYRGRKRLRYVLYEAAISLIGKNAEFRAIHEYYRTRKENPLKKMQSVVAVACKVLRIFYTILTKGVDYDAGKLMGDIRRPRIQAA

SEQ ID NO: 196795 - protein, 356 aa, unidentified
MSRDIKYIGMDVHKEATVIAVLNGSGKLVMESIVETKASSILQFIHGLRGELHVTWEEGTWAAWLYDLLQPQATQVLVCDPRRNALLKEGNKSDKIDAHKLADLLRTGMLRPVYHGEHGLRTLRELGRSYQTISQDLNRVMNRIKALYRGWSIPCAGTQVYAPRYREEWLQKIEHAGVRRRAELLYQQLDGLQALRRTLRPELLAESRKHKAAKLLRQIPCIGPIRAARLIALMQTPHRFRSKRQLWTYSGLGIETRDSAQYRFVRGQLQRTKKPQQIRGLNRNHNHEMKEIFKGAATRASCGVGPLRDFYVALLDKGMKAEMARLTLARKIAAIALTLWKKEERFDAEQLKLQAA

SEQ ID NO: 196796 - protein, 317 aa, unidentified
MDVETTADRFVGIDVSKARVDVHVRPDGTAFGCATDPEGLGGLVARLLPLSPCLVVLEASGGYEGVVAAALAEAGLPVAIVNPRQVRKFAGAIGRLAKTDAIDAAVIAHFAQAVRPMARPLPDDLSVRLAELMARRRQLVVMINAEKQRLAKAQDRIAQRSFKALLKSLEAARARIDKAIDKLIEASPVWCAQQDLLKSVPGIGDVVARTLIAELPELGRVDRHQIAALAGVAPMNRDSGRYRGKRKIQGGRVEVRAPLYMACLVAIQHNPALKSFYRHLREAGKPARLALVAAMRKLLTILNAMLRDRKPWASAQS

SEQ ID NO: 196797 - protein, 308 aa, unidentified
MGPVCVGIDVCKARLDVHVLPQGQAVARDGAGLSDLVARLQALAPDLVAIEATGGFEQVAAAALAGAGLPLVVVNPAQVRHFAKALGQRAKSDPIDAAVIARFAAATQPAVRLLPDAATRLLADLVARRRQIVEMLAAEKNRAQRTDVVRIAKSITRLIKALEKELAEIDAEIDTGVRGSPAWRATEDLLASVPGVGPVTAHTLLAEMPELGRLTARQIAALAGLAPFVRESGKWKGRAMVAGGRKSVRTALFLAALTACRHNPVLKLFRDRLVAAGKPKIVAVVAVARKLLTILNAMIRDQKPWQTA

SEQ ID NO: 196798 - protein, 331 aa, unidentified
MSNIIGIDVSKASLDCAYLRDPDQDKAKRKSCPNKVHSFAALVTWATARSGLPIQALAFIIEPTHVYHEQLVHFLFNAGATVYLVNPGRVRKFAEGIGILSKNDMVDADLLVRYGLMARNLIAYQPAAPEVNDLRSLLNRLDALEHNLRSELNRQEKVGKTIVFHRLEQQSIARSVKRLRSEIKTFKRAIRACVKSSPSLLRDFNLLHTIPGVGAKTAWIMMVILGSRAFRSAPEVASFLGLNPIEKRSGKSQYRRPRLSKSGSGHYRQKLYFPAMVATRKNPDIQVLYERLLAADKSKMCALGAAMRKLVHICYGVVKNQTPYQAHTISS

SEQ ID NO: 196799 - protein, 362 aa, unidentified
MTAMSIVAHTHPFVVGVDTHARNHVYAILAANTGALLESRDFPATGAGINRAIDWVARRTDGSADTLWVIEGASSYGAILAGTVATHGFPVAEAPRMDARKRRGVGKTDALDAHQIAISTLPLPVDKLRRPRLHDGIRQGVRILVTARGSMSKDRTRSINALNALVRGHDLGIDARKKLTSNQITEVSKWRSREEELSLSIARTEAVRLARHILLLDEQLTANENQLDELVKVSEAAPLLEETGFAAISAAKCLAAWSHEGRVRNEAAFASLAGVNPIPASSGNTVRHRLNRGGDRSLNSALHMVAVTKMTHDTKTREYAEKRRAQGRTNKEIRRCIKRYLARHIYRTLNASATQTPLAMAA

SEQ ID NO: 196800 - protein, 386 aa, unidentified
MKKNTTAKKSPKTLAKGQKKQIHQLAAKQRLTIGLDLGDQTTRYCILDEAGEVVSEDQLPTTREGLASLFAQMPASRVALEVGTHSPWISRLLASLGHEVIVANSHNVKLITQSVRKNDRIDARQLARLARVDPKLLSPIRHRGEAAQLDLAVIRARAELMEARTQLINSARGLVKPMGERLKKCDADQVGEDLGASVREGARGVIGPLLKTVETISEQIAKYDEQIEGIAKRYPEVKLLQQVYGVGPLISLTYVLTLEDAERFEHSRDVGPYLGLTPKQHDSGESQPELGISKAGDGLLRSLLVQGAHCILRKGAPESDLRTWGMGKMGKGGKRAKKRAVVGVARKLAVLLHHLWATGEVYDPQYNRKAAEAAAAKAKGKGKIAA

SEQ ID NO: 196801 - protein, 347 aa, unidentified
MRFYKQTHRFYCGVDLHARSMFVHVLDHEGQTLFEKDLPAGPDAFRAAVAPYRTGLVVGCECMFAWYWLADLCEDESIPFTLGHALYMKAIHGGKAKNDQIDAAKIAGLLRGGMFPMAYVYPRDMRETRDLLRRRTYFVRQRAQLIAHIQNTNSQYNLPPFDRKLSRHPDYSELAERFPHASTKLSIGADATLINHYHQTLAELETHLVRHAKVHDPATYHLLQSLPGIGKVLGLILLYEIHDIGRFPEDGNFLSYARLVRCDHESAGKKKGAGCRKIGNAHLKWAFSEAACLMLRALPAAKAWLGRQERKRGKKKALAILEAKIGRAVYQVWKKQQPFDAQKFLTH

SEQ ID NO: 196802 - protein, 361 aa, unidentified
MNATTAAIDLAKNVFQVALADASSRVLEQHRLSRSQFERFFDNRVLSRVVMEACGSAHHWARVFAARGIEVILLPAHYVRAYVRRSKTDAADALALLEAARCAEIVAVRVKSVEQQSLQGLHRTRSLWMATRTSRINALRGFCRELGLHVPVGARTGLEAITRLVADNDSPIPPMLRPAMQLLLDEIRVLETRVAQLERQLALIARESGACRLLMSIPGVGLLTATAILAVTAGSVAHFKSARHFASWFGLTPKESSSGGTRRLGRISKMGDRYLRMLLTHGARSVLHAAKVARLRGQQLIGLRHWALELQARSNHNKTACALANKMARICYAVLRDQTPFGQPATRLGKKIQRQSFELVH

SEQ ID NO: 196803 - protein, 312 aa, unidentified
MSEKQWVGIDVCQEYLDIYVRPLGNLFQITNDEVGINKLVKILKNIQPELIVLEATGGMEINATIKLTQAGLAVAVINPRQARDFAKATGQLAKTDAIDARLLAHFADAIRPEVRQISDKSSRQLEDLVARRRQLSDMITAEKNRRRGKTNSVQVDIDEHIEWLKKRLQEIESQIKSAIAKSKNWRQKMDLLTSVPGVGEVVAVTLITSLPELGTISHKSISYLVGVAPLNKDSGKSRGKRKIWGGRAKIRCVLYMATLVAVRFNPVIKAFYERLVSKGKLKKVALTACMHKLLIVLNAMMKNNQAWKSQIA

SEQ ID NO: 196804 - protein, 341 aa, unidentified
MKPDLSVVGIDIAKRVFHVVGMDERGKIVLRKRLSRPDLMPFIAQLPPMMIGMEACGGAHYWARRFREHGHEVKLMAPQFVKPYVKSNKNDMRDAEGIAEAVTRPTMRFVPTKAIEQQDIQALHRVRERLIGARTALVNEVHGLLNEYGIVIPKGVSKFRKVVVAKLEAEKDKLGPLSQEMFWKLLDEFAALEKQLSYYQDKLETLAATHPECQRLMTIPGIGPIAATALVAAVSDASAFKNGRQLAAWLGLVPRQHSTGGKEQLLGISKRGDQYLRKLLVHGARAVVRVVGKKPDRRSAWIRELVARRGFNRATVAVANKNARIVWALLTSQQEYQLVTG

SEQ ID NO: 196805 - protein, 402 aa, unidentified
MNCVGIDVSKGKSMIAVMRPFGEVVVSPFEVCHTVNELSELARQLKSLDGETRVVMESTGNYHAPVAWLLHDAGLYVSVVNAMLVHDYGNNSLRRAKTDKKDAVKLANYGLDHWLTLPRYIPEEDTRLMLKICYRQYQQYSKVQTMLKNNLISLLDTAFPDANRLFTSPPRADGSEKWVDFVATFWHCECVCGLSKKAFTAKYQKWCRKHGYNFSQDKALDIYASACGRFGVMPKTNTAKLLVEQAISQLQTTSAALAALKQEMQSLAASLPEYPVVMGMFGVGPTLGPQLIAEIGDVRRFHSKKALVAFAGIDAPPYQSGQIDVRSRSISKRGSASLRRTLFLVMGVLLQCAPMDEPVYQFMDKKRSEGKPYRVYMMASANKFLRIYYASVKAYLDSLEHD

SEQ ID NO: 196806 - protein, 361 aa, unidentified
MPGTMTWVGFDVHARSAHAAAIDVMTGELSRARFGAGFQTPVAWLCSLPGPVRACYEAGPTGFGFYRAAVKAGIDMRVIAPGLTPRGRSDRVKTDRKDAELLARCLLAGSLTAVRVPSVEVESARELVRAHDACRRDLMNARHRVSKMLLRHGRVYPKPSTWSQEHRRWLAAQQFEQAISELTYADLIACVDGLTARKTALAERISVLATDEQWWPTVARLRAFRGVDTLTAFAIHLELGADWTRFEKAHRVGSWLGLTPSRQQSGESDRQGSITKTGSTLARRLLVESAWHYAREPRIGATLRNRQDGQPEHVLQISHRAQQRLHRVYTGMRARGKPHNVTVVACARELSCFLWAAATAP

SEQ ID NO: 196807 - protein, 406 aa, unidentified
MKLYIGLDWSENKHDLAFMNESGAVLFQLTIPHTPEGFLKLDEKRQQVGVACGDCVVGLETAHNLVIDFLWNRGYTQVYVIPPNVVRSSRGRFGQSGARTDRSDARLLADLLRTDRARLQPWQPDGLLTRQMRAKVSLVDYLTRSSIRLSNRLRAILLRYYPAALQVFSALTTQIALHFIQTYNTPRAAEELSYAEFEAFARQHHYPKPNKLPECFARLQREQPLACPEVVRAYVDEATLLARLLLSTVQAKMDALRELTELFEQHPDHHIFDSLPGVGQLLAPSLLVKFGDDRQRFRSPASVQSLAGTCPVTDASGKRKVIKFRRSCDKQFRHITQQWARCSLRQSAWANAYWRRIRPHCDSDSHAYRCLANRWLAIAWKLWQTRQEYDEGYHLQQCALRRKPRR

SEQ ID NO: 196808 - protein, 314 aa, unidentified
MITSYQNFIGIDIGKFKNVVAVHKQKNAVEFDNDTAGWQQLFQDFSNILPNSLVTLENTGKYELGLAHFLVDKDIAVHRANTRKVKSFVLSHGTLAKSDQSDARALAQYGFERYSTLSLFAPMSKEQTTLVALCQRRDDITKMRAQEKSRLAAPENDHIKESCQKTIEFFNSQIDELNNTIQKIIDENPELQKRQKILKTVPGIGAKLSQDFLCLMPELGYVSRGEIASLAGVAPHPKESGKTIGYRRISGGRSNVREKLFTAAMSASRSKSALGAFYSRLVGKGKKKMVAMTALMRKIIVIANARLKEAVNVN

SEQ ID NO: 196809 - protein, 409 aa, unidentified
MSLDVLHERCCGLDLHKRSVTACRLLPSAGGQVRKEIRTFGTMTAELLALGDWLEQGGVTQVAMESTGVYWKPIWNLFEERFHLLLVNAAHVKVVPGRKRDVGDAEWLADLLRHGLLRPSFVPDRPARELRELTRYRSSLVHERTAEVNRLHKTLEGANLKLGSVVSDLTGVSARAMLAELVAGHEDAAALADLALGQLRRKRGELERALTGRVSAHQRFMLAQHLAHIDAVDEQIARVGEEIGERLRPFAAEVVILDSIPGIGRWSAEVILAEIGPNMGRFPTAGHLASWAGMCPGHDQSAGKQRSGKTRKGSPWLRVTLTEAAYAAGRSNDPYLSGRYHRLIARRGKKKAAIAVGRSILELCHQLLRTGQVYDPQQVRPTPVPLAQEARLVRQLEQLGHRVTLEPAA

SEQ ID NO: 196810 - protein, 338 aa, unidentified
MIHVGVDLHQRFCYMTALEARGKIVQAGPVTNEKRALRRWFRQFRGQAVEVAVEACGFWPAFREVVEPEVKRLVLVHPQRVKAIASAKLKNDRVDAETLAHLLRCDLLPESWKADRETQARRQQVRLRTTLVRQRTRLKNQVHAVLHQQGLRSPVTDLFGRRGRGWLSQVKLPEMARTSVEACLRMIDHYGEEIQKQNLQLREKAQGDERVAWLETIPGVGEVSAMMLLAEIGDLGRFATKEALCSYAGLVPRVRESAGKTARGSITRQGSSALRWIMVEAAQAATRSSPAAKRYYERLLRKKHKHVARVALARKLLIAVYALLHEGEAFDEERFAAR

SEQ ID NO: 196811 - protein, 370 aa, unidentified
MIKLGVDVHWREHVVVRQIDGTSPQPAQRFAPEAFVAWVAKQAQQADVVHCCYEAGPFGFVLHRRLVGLGVKSLVVRPRNWDEYGKKVKTDRRDALALVSCLDRYVAGNTEALTSIRVPTENEERARSVSRQREQLLEHRKRLAAQGLSCARYYGHDLPDEWWRAKKFELLQAELPEFLVGLLASVQRIALLVHAELEAHSAEVESAQTQELPTGLGALTAQILDREIGDWGRFKNRRQVASYTGLVPSEHSSGERRQRGAITKHGNPRVRHILIEASWRLQQFQPDYRPLKSRQGALDTAKRKGDKPARKKLCVALARQFIVDWWRIRTGRTTPAKLGLQMSWPAAYVLRGKAPQPVVAPLAVPQPAAA

SEQ ID NO: 196812 - protein, 413 aa, unidentified
MDVLHPRCCGLDVHKSSISACILLWEAGRVQKHQRRLGAMTQDLRELAEWLRQFGGTQVAMESSGVYWKPVWNILERQFTVVLANAQHIKNVPGRKTDQKDAEWIAQLLQYGLLRASYVPCEIIRDLRDLTRMRASLSQEASRISSRIQKVLEDANLKLASVATNVLGKSGRAMLEDIITGEDHPEHLASLALGHLRVKIPQLRLALEGKIRSHHRFLLRRLLDQIQFVEHEIAVLDERLEDLGQQRPDRAQAVARWDTIPGIDRVAAWALLAEIGDNMAQFPTAEHLASWAALCPGNHESAGKRLRGTTRQGSPWLCRMACQCAWAAARTKNTYLSSQFRRLAARRGKKRAILAVAHTLIVIGYHLQKNQSNYDDLGGNYFDRIHSDGLKRYLVKRLEQLGHKVTLEPLATA

SEQ ID NO: 196813 - protein, 401 aa, unidentified
MQDTQQRDAVDVFVGVDVGKGHHHAVALDRNGKRLYNKALPNDEAKLRALIAELKTHGRLLFVVDQPSTIGALPVAVARAEGVLVAYLPGLAMRRIADLHAGEAKTDARDAAIIAEAARSMPHTLRSLRLADEQLAELTMLCGFDDDLAAQVTQTSNRIRGLLTQIHPALERVLGPRLDHPAVLDLLEHYPSPAALAGTSEKTLANRLTKLAPRMGKGLAAEIVQALSKKAVTVPGTQAATIVMPRLAQQLAALRKQRDEIAAEVERLVLAHPLWPVLTSMPGVGVRTAARLLTEVAHKAFASAAHLAAYAGLAPVTRRSGSSIRGEHPSRRGNKVLKRALFLSAFAALRDPVSRAYYSRKIQQGKRHNQALIALARRRCDVLFAMLRDGTIYQPKSAPNA

SEQ ID NO: 196814 - protein, 405 aa, unidentified
MNEHLLVGIDVGCHSHQVAIAKSNGTYLKEFGISHNASGFNSLFSEITYYESTLKCPVVIGMEGFNGYARPLDQLIQQKGYTLYNINNLKLARFKELFSGPAKTDAIDARKIVEFMRIAPSFQEQRRAITEIKPGNGVNQTLKRLTRRRRQLVNEKICIQNRMQADLQSVAPGLVDLVKNVDSRWYLHFLTCRPSLRNLATMRKESLLKIKGVGKKYAAVIASWQKEAHFSTDVDLVSSMIIEDAKRILELMEAIATIENELEPLGEQSDLAVTIGSIPGFGLISSAELAGEIDNLSRFPSEKSLALYLGMAPLDNSSGKKEGCKIAKSVNTRAKAAMMVAVAHHSWQVEESKRYYEKKRAEGKKHNQAIRSLGRHLVRVIWSLIKEKRFYEIREENERNILKMA

SEQ ID NO: 196815 - protein, 342 aa, unidentified
MIKVSTIGLDLAKNVFQVHGISDDGTVVIRRRLRRAEVVPFFSRLPPCLVGMEACATSHYWARELGRLGHEIRMIPPRYVKPYVKRGKNDALDAEAICEAVQRPSMRFVPLKTAEQQGALVIHKTRDLLVRQRAILVNALRSHLAEFGIIVAKDIGDAPQLAAVVRDKTDRRVPATARSALVTVVDSIDALSRRIKVLETRIRHWHRANLASQRLATIPGIGPITATAIAATVPDPKAFCSGRHFAAWLGLTPRQNSTGGKERLGGISKQGNCYVRRLLFIGAVGVVRYARRRSPLEEWIRHLLERRPTRLVTIALANKLARIAWAVLAHDQNYRAGQPVAA

SEQ ID NO: 196816 - protein, 411 aa, unidentified
MKQQTATSMDILPQLDKACGLDIHKDKIVGFIACKDGSGQELKEFGTFTCELQKVKEWLQVNQVEHCLMESTGIYWMSLYTILTDSGISVIVANPTHIKQIPKRKTDRKDARWLCMLLMHGLVRPSFMPTAEQRVLRDYCRSRLFYSRQQNKIQNRLWKILESNNIKLRSVISSINTKTAMSIIRLLSQGVTDKEQLAECSLGRARKNKENMLLALEGTLAAHHLTQLQMLLQDFDHIQQQVKTLNSLIDESITKHYSIAFGCLDTITGIAQRSAEIILSEAGNDMSRFPTADHFTAWCGLAPGNNESAGRQGNTSIKKGNTYLKTAIVSAAWAAVRVKNSYWHALFDRMRKRMKAQKAIVAIARRMMKVVYNTIETLSPYKEKGIAYYQEMQEKAAAFRQAGKLWPSPNA

SEQ ID NO: 196817 - protein, 421 aa, unidentified
MQYALPLVLPDVPVGGVCAGIDWATADHVVCVVDMAGRVTDRFSAAHDKAGISAMITRLRRGKVTEVAIERGDGPLVDALLAAGLTVVVITSRQVKNLRSRFGAAGAKDDRFDAFVLADTLRTDRARLRPLVPDTPATISLRMAVRARRDLVRHRVAVCNQLRAHLAVAFPAGSTLFHDLDSPISLAFLARFGSQDAAAGLDEQAIGAWLATIAVRGRPAPAGVLCARLQAAPPGATGADGAAQAGVTAALTATLTALSAQIKALETQIAGQLAAHPDGPIFTSLPRPGTVRAARLLAEIGDCRSRFPDAESLAGLAGVAPVTRRSGTRIAHGFRWSVNRQLRDALCDFAADSRHGSSWAAAIYDSARARGKDHPLAVRITARAWAYVIWRCWHDSAAYDPAKHNALQAILARRAAQQEDQ

SEQ ID NO: 196818 - protein, 323 aa, unidentified
MSQGLCVGIDVSKDRLDVATYPITEQRQFANDAQGISELLEFVAEKQPRLVLLEASGGYEREPSCALHTNQVPTCVVNPRQVRDYAKSKNILAKTDAIDAAVIAEFGSVTNVQPRPITHGDALKLKALVTRRAQLVDMITAEKNRLGTAHDAVSQGIKNHIEWMQTELKNLEKQIEQTIKDDPGLSQKHQLIQTMPGVGKVTSAVLLAELPELGTVGHKQIAALAGVAPFNCDSGKHKGERHIWGGRQAVRDAMYMGTMAAIRHNPDIRDFFERLSTPKKDKTNNSNDKAYRVKLIACMHKMLKHLNAMLRDNAAWRPKAKAA

SEQ ID NO: 196819 - protein, 370 aa, unidentified
MRQSSTLYIGMDVHKDSIAVAYITQEHDAEVIYLGTIGTRQCDIDHLIRKMQSKATHLLFVYEAGPCGYWLYRYLTKQGYDCWVVAPSLIPKKPGDRVKTDRRDAVQLARLMRSGDLTPVYVPQVEDEAIRDLSRAREDAIRDLKAAKFRLKAFLLRHDIRYTGRATWGPAHLRWLSEVVCATPAQQIVFQEYVRAVHEHTERLHRLEQELQEQVKSWRLHPVVEALEALRGVQFTVAVTIVAELGDLTRFENPRQLMKYLGLIPSEYSSGERRRQGSITKAGNTHARRALVEGAWSYRYPAKVSRHIQLRLEQQPKPIQDISWKAQVRLCKRYRRLIARGKHANQVVVAIARELAGFIWAIAKQVPVKP

SEQ ID NO: 196820 - protein, 439 aa, unidentified
MKKKIQYRAESVERILPERLVGAFEASTRVVVGVDVAKRNFVTALCNATGETVLRVRFEHPRQTAQFVGLLAGLQAAERQVEVAMEPTGTYGDALRYRLGSSKIPVFRVSNKHVHDASELFDSSPSKHDGKDSSVIGWLHAQGRSKRWEELDPARRSVRALVAQRDLYDEPMVRLITQMEPLLARHFPEFETFFDLSQRMTPWVLLEAFGSPAAMGKLSVEEVLAAMKDQIRRRPSAEDLQSLLEAARSTSGAPMVSEETQLVRRMATEVLHLMRKRREVDERIAKATEDVEAVKAIRPCLGPVTAAVIFAYLGDPKSYASAAALEKAAGLNLVESSSGTDPNAEDNVPRHISKRGASIVRKYLFLAAMRLVRSDPIAKAWYQARRSFKAQQRTKAIVAVERKLCRSLFHVAKGQSFDTEKLFDNRRLGVVRPPNEEAA

SEQ ID NO: 196821 - protein, 319 aa, unidentified
MASFLGIDVSSLSLDALVRPQDIRISVRNDPAGFEELVKSLRGLSIKRILLEATGGYELDVMRFLQNASYKVIRVNPKRARSFADSLGIKAKTDAIDAAVLAHFAEVIPDQPALKTSPERALLRELLQQRDRLVQQRDDDRRRLKQAQSAMVANFLKTNLQHFASQIKLVEQAIKRQATVLNDERIAKLNEVKGIGMVTATKLVALLPELGHVESREIASLVGVAPFNHDSGKSVGKRFISGGRFEVRRALYMACLVAVKHNPTLKARYEALRGRGKLAKVALVACIRIFIVRLNAMLRTGTPWRDDLPQPENMAQITA

SEQ ID NO: 196822 - protein, 342 aa, unidentified
MDAPGVTTSDSLDQNAQNAPRRASHSRYCATANCFHTVCKALAPTVIGIEACGASHHWARILRSFGHEVKLIAPQLVKPYVKRGKNDTADAEALCEAMSRPTMRFVPVKTAEQQAALMMVALRDRLIRNRTQLSNAIRGYAAEFGFTAARGMAHIDPLLDRIQADENVPVLARELFAAQAEEYAQLQAQIAEVDAKLMAWHKADECSRRLAKIPGVGPIGAALLMMKTPAPEMFRSGRQFAAWIGLTPKDHSTAGKVRLGVITRAGDEALRSVLVVGATAVVQHVRRGGRGSPRIVDLLKRKPPKLAAVALANKMARIAWKLMVTGNSYAAKSAPATLMGAA

SEQ ID NO: 196823 - protein, 344 aa, unidentified
MDHFAGLDVSVKDTSVCVVDDTGRIVREVKVASEPEALLAALRNPAYHFKRIGLEAGPLSQWLFSAMAEAELPVICVETRHMRAVLKAQINKTDRNDARGIAQMIRVGLYRPVHVKTLRSQKLRMLLTHRQLLQSKAIAVDNDLRGTLRNFGLKVGMVGATRFEARIRELVEGLPDLAVLVEPLLVVRRVLREQIAVLHRRLVAVVRDDEVCRRLMTAPGVGPVVALTYRTTVDVPARFRKSKSVGAAFGLTCARDQSGERDRAGAISRCGDKMMRAMLYEAAQSMLVRSTRWSWLKAWAMQIARRRGKKKAVVALARRLAVILHRIWVDGTEFKWTREAVPAA

SEQ ID NO: 196824 - protein, 322 aa, unidentified
MMAEPTEIQSILGLDVSRDTVTLCDGRRHTVTVANEADALRAALQPYRGTTTLAVCEATGGYEDILLGVLLELAIPAHRADPAKVKAYIASFGKRAKNDPIDARWLSRYGRDRATTLPRWQPADPTQQKLELLVARRLDLVAMRVQEQNRLKAPRSRLIADNIRDHLAELERHIEALNAEIDTLVGESRDLALRAQQLRSVPGVGPVLAPLLLAVIPELGTLNRRQVASLAGVAPHPKDSGKANWHRSTTGGRRQIRPALFIAALAACRGDNPLAVAYKALLKAAKPKRVALTAIMRKIITIANARVRDAVRHQNEIGKINA

SEQ ID NO: 196825 - protein, 422 aa, unidentified
MSYCPVAGIDVSKRFSDMCILSPDNKIFAQEKIYHDETSINRANALLQKAERLFFSKPVIVMESTSHYHLILFQFFSEHGYDVIVVNPLQSNSMKDFSIRKRKTDRVDAFKLAMMYRTKTLRPSQIPQTATRALRQLCRHRAELLNDVSSYKNRLTALLDQTFPGYDKVFSDVGGVTSCAVLVRFPTPTILLVEEESELVEVIAAASKSGYSFAKKKAGLLISAAQKAQTLGIHSCADETLIVCTIQMLRTLSESVLQIETAIDNLLAQIKEMRNNVSLLQSIPGIGSHSAALLLGEIGDISLFKKPKQLAAYFGLDPTERQSGSFRGTKNKLSKRGSSYARAALHMGVVNSICKRGKDSAANPVLLSYYEKKCKNKPAKVAQAASMHKLVFIVFAVLRDQKPFELKTPEQHAVEQGFVKAA

SEQ ID NO: 196826 - protein, 359 aa, unidentified
MKIQKIHKVQEFVVKNKEVFVGLEDSKTTWKIAVRCQKMVIHRTSMEARYEVLIQYLRNKFPECTIHLIYEAGFKGFNLYDRLTEDGIHCVVIPPHMVTEPKVNKVKTDKRDANRLAFILENDDFKDPCHVPDKERREDRQVTRTLIAIQKDIIRTRNRIRKLLDFHGIEVPFPDRWGRDEFRALKKLSLSEPLRISLDVLLSQLEQLWVHQTSLRTALRALCKKERYRKAFDIARSLPGIGWYTAIRFVLELGEDLSRFTSGKKIASFVGLACSEYSSGETEHKGGITGMGSGFIRTTLIENSWAAIRKDPVLLAKFTRVWRASGNRKKAIVAVARVLIVRLRACLLSGTPYACGVVK

SEQ ID NO: 196827 - protein, 570 aa, unidentified
MIKNKNPYRGVWGDAGRHLRVFFIRAILYLATTLVAWEKSIMGNRRTRRKRKQHINKVQGQRLAAEFKGQDLSRVLVVVIDGAKKSHKALLADGFGEIITDTFGFPNDLAGAKMFAGSVRKAAVDINAFKIIVGLEPTGHYAENLVAYLLEQGFDVRQVNSFAVSREREAGLTWSKTDEIDLCAIGQLIINGKSSPLGHTEAIYDNMKYAARARRSTIQRTVLLESQIHAYMDRLFPGFLDRDLFSDPFGLTSMAFMARYSSANAACRAGATRIERWLSSRRGVSNPHEITQAVVELAQGALRRPADHEEALIEALRFRLREHDLLEEQIGNLNIRLAEYLVETPGIWLLAIDRVSVVSAAEYLGELGQISRYDGANQIIARAGMVPRETQSGMIAYSGGITKLGHPKLRYILGVIGHNLLTSNRYFQAFYNRLVDRGGKNERLAKTAVAGKFVRVSWAMMNLKGAFEAPTWCEDDLKKDIRTKMERFLKQFGASQIYRNSIGPRLDKVLVSGGQPSTSNSITGSHQLPSASGTHEEHDRASTKPIHIGSLIPVVLGQMAAEQDVEAHMA

SEQ ID NO: 196828 - protein, 387 aa, unidentified
MIYVGIDIAKRTHYASVMNSDGEILAEPFPFTNDLAGFQKLLSCIGSFPKEQLLIGMESTAHYAENLTCFLFSRDFQVCIINPIQTASLRKSNIRKTKTDSVDTFLIIKALSLHDYRRFSKRDYDSLQLKNLCRFRQKLMKARTKVKIQLVSYVDLIFPELQYLFKSGIHTKSCYALLKTESNPDRIAKMHLTRLSNLLKKTSKGHYTKNHAIALKELASQSVGIKDDTLSLQILQSIEQIEMYTQQISKVEASICEIMDHMDSVIKTIPGIGNLNGAMIIGEIGDISRFEKPCQLLAYAGLDPSVYQSGKFTAARTRMSKRGSKLLRYALINAAWQLTLNNETFKAYYDLKISQGRRHYNALGHVAHKLVRVIHKMMTDNLVFDLD

SEQ ID NO: 196829 - protein, 346 aa, unidentified
MLIIGCDLHTRKQQVAMLDSETGELVERGLEHANGEARAFYTSLPSPARVGIEATAPAQWFERRLAELGHELWVGEAAQIRAPVVRQQKTDRNDAGHLLELLLTDHFPRIWIPSAAERDRRPLLRHRHKLVGMRTAVQNQLQALAMSEGVCRRRKLWSARGRAELESLAWGPWGSRRRDELVKLLDQLEASLEPQDRAVEKEAKGSAEAVRLMSPWGVGPVTALAFVLTLGPVERFRRSKQVVSYLGLNPREHSSGGRQRLGSISKQGNTMLRWLLVEAGQTAARFDPELRRKYQRLKFRRGSSVAKVAIARTLAVRLYWTLRRPAEEAPPVRTSGSPSSGVVPVR

SEQ ID NO: 196830 - protein, 355 aa, unidentified
MKRNTKYVALDVHQATTVASVRESSGRVLARAVFPTEEPAIMEFFGGMRGGPVHVAFEEGTQAQWLHELLTPQVDRVVVCDRRGQSRHGNKADQGDADQLSELLRRGGLRPVYHGHADLATLKELTRTYQSVVADSTRVMQRIKALFRTRGIKTAGMTVYHPRHRAQWLAQLPEGGARFRAETLYTQLDVLRELRPKARTAMLAEARRDPAWTVLRTVPFLGPVRVALILATMQTPWRFRTKRNLWAYAGLAVVTRSSADYVMVGDRAVRRQRAPMTRGLNRNHKHVLKDVFKGTATAATGKPGPLQDFYLGMVARGMREELARVTLARKIAAITLRLWKRGERYDPTKLTTQAS

SEQ ID NO: 196831 - protein, 412 aa, unidentified
MEVLYACCCGIDVHAKMLVACLMKQGKKDVRTFSTMTQDLLHLLDWLTQTGCTHVAIESTGVYWRPVFNILEGAMEVILTNARDAKGYKARKTDVIDAEWLADLLRHGLLKPSFIPPLPIRELRDLTRYRESLVREQTALANRIQKLIESANIKLGQVASDALGVSGKLMLRALAAGETDAEQMSHLARRTLKRKQPQLQQALEGRFTQAQRWILGQLLDQYDHVEAALQRVEERIGQEVASSADPFVPEAVKLLDTIPGVGETVAQILVAEIGVDMERFPTANHLASWAGMCPGNNESAGKRKSGKTTKGSRYLRAALVQAAWAASHQKGSYLAAQYKRLVKRMGKKKALIAVGHSILVMVYHVLQNRTQYQELGGDYFDRRNVDKQRKRLIRQLESLGLKVTVEEVKEAA

SEQ ID NO: 196832 - protein, 445 aa, unidentified
MEVTFTHCAGLDVHKKTVVACCITPGAKGEKQIEVRTFGTMTVDLLALSDWLTSKQITHVAMESTGEFWKPIYNLLEGNFEILVVNAKHIKNVPGRKTDVKDAEWIAELLRHGLVRGSFIPPQAQRDLRDLTRQRTNLVQDRATVVNRLQKVLEWANIKLSSVATDVTGVSARAMLEAIVQDQVDPAALSELARGRLRKKRDALEQALTGAVRDHHRFMIGQHLTQIDFLDQQIAAFDEQITAAMQDMSQPPDEPGPAQPDASQVVVTPPEDTTAPLTWEAAVALLDTIPGVGPRAAEMILAEIGLDMSRFPSEAHLSSWAKVSSGNNESAGKRYSGAIGHGNRWLRTVLVQVAWAAVKVKKSYLSSFYHRLAARRGAKRAIIAVAHRLLIAIYHMLKKHEPYKDLGATYLDERNKPKVVSRMKHRIEQLGYRVTIEPVTVSVPG

SEQ ID NO: 196833 - protein, 366 aa, unidentified
MQKISTRRVMGSKILKGHQLTIGLDLGDRWSFYCVLNERGEVLREEKLATTPEAIRRTFEKVPASRIALETGTHSPWISRLLTELGQEVIVAHAQKVQFITKSSRKDDRHDARTLARLARIDPQLLGPVRHRSAQAQIHLTVIRVRAELVSARTALINAARGLAKSYGERLPKRGSQQVGRELAAQLSTALREVLEPLLRGVESLNERIREYDQRIEQIAQEVYPEVALLKQVKGVGTQIALTYILTIDDPYRFPKSREVGCFLGLRPGRRNSGQSEPQKGISKEGDRYLRTMMVQGAHYILGPFGEDSDLRRWGLKIAERGGKNAKKRAVVAVARKLAVLLHRLWVGGEVYEPLRNTHRAMTAAA

SEQ ID NO: 196834 - protein, 370 aa, unidentified
MKKSITIVGLDVHKNSIDIATAETGGNQEVRYYGTIGGDMVSLDKAIRKLKSRKAELCFVYEAGPCGYEIYRHLTKQNLQCAVIAPSMTPRKSGNRIKNDRRDAVTLARLGRAGELTQVHVPLPDDEAMRDLTRGREDSVKALRTARQRLGAFLLRHGYRYPGKKTWGASHMRWLSDIAMPHPAQQITLQEYIHAVIECTERVDRFTEQIQKLLPEWRMAPVVAALQALRGVAQIVAVTFVAEIGDISRFTKPPQLMAYLGLIPSEKSTGDNIKRGGITKTGNGHVRSALVEAAHAYSFPARVSRVLLKRQDGLPKEIKDIAWKAQIRLCGRYRRLMAKGKLKNKVITAIARELAGFIWAIAREVQIQGA

SEQ ID NO: 196835 - protein, 338 aa, unidentified
MIVIGVDVHKHSLTAVAVDEAGRMHEEKTVAAGDGELLAWASMLSDQRLWALEDCRQLTRWLERHLVEAGEELVRVPPKLMAPQRRAGRARGKSDPIDALAVARAALREPGLSQPRPDEQPFRELKLLVDHRDDLVDERRRAQQRLRWHLHQLDPSFAVPARRLDRLAQLDRVGRWLARREQDVQVRIARDLISRCRSLTRAIMELDRELEQRTEQLAPALLELPGCGALTAAKLLGEVGPIDRFRSDAQLARHSGVAPLEASSGRVQRHRLDRGGNRQLNAAFYRMAITQARYYPAARAYLERKQAEGKSRREAIRCLKRQLARVVFNTLKASPALT

SEQ ID NO: 196836 - protein, 317 aa, unidentified
MTPVICGVDVSSTSLEAFVGPAGPARSFANTVEGIAALAAFCQEHQVDLVAMEATGGYEKQALVLLWSQGLAVTLLNARAVRDFAKGMGLLEKTDRIDAQIIARFAEIKGSLPSVPRTAAEEHLKALVTHLRQLTQMQVSQRNQGLLVTDQAVRRSMAKVLKVLERQKREVAAKIAAVLASNPLWKQLDQVFRSIKGVADRTVAAVMADLPEIGTLSNKAAAKLAGLAPLARDSGKKQGKRPVRGGRRQLRAVLFVVAGVVARHNPDFAAFQQRLSAAGKPKRVIRVALAHKLLVRLNAKARDVRMQFTTVDVAQVA

SEQ ID NO: 196837 - protein, 348 aa, unidentified
MKILALDLGKSKMAACIYDTLSHEHRFDSAALERGVLSIALEAERPDRVVIEVGPSAGWVGEQVRALGVELQVANPNHEGWRWRNVKRKTDRLDALKLAQLSACDQLPQVHLPERNVRQWRSLIHYRQRLVTRRTAVKNRMRSILEAEGMGVPRGVKAWTRAGLADLRSKACPWEEAGAQELWRGELWEELEQFERLTAALKRVEARLDQLAQSDARVPLLQSIPGVGPRLAEAVVALVDDPRRFRRGKQVASYLGLVPRQYQSGQMDRQGRISGQGDRRVRALLVEVSWIGQRYNPWMQETFARVCGGSRTRRKIAIVAVARRLVIRCWAMLRDHTTWSPPTKARAA

SEQ ID NO: 196838 - protein, 347 aa, unidentified
MVIIGCDFHPGFQQIAMMNMDTGEVRQLRLAHREEAQAFYAGLRGRELLVGMEACGYTQWFEQMLEEMGHRYQIGDAAAIRASYVRKQKTDRRDAGHILRLLLEGRFPALWVPRAAERDARQLIVHRHKRVQMCTRVKNPLHALALNQGLRLRWKLWSREGLEQLRALPLLPHAAARRADLLKQLEEMNAEIDRLDRAVRQEAAARPAAVRLMSHPGLGPVTALAFVLTIGDARRFEKSRQVASYLGLIPSEHSSGGKQRLGHISKQGNSLMRFLLVEAGQSAVRKDVELRRFYMRVQHRHSTGVAKVAVARKLALRLYWMLRRTMEEAQFQAGPYAGKPESFCGRS

SEQ ID NO: 196839 - protein, 341 aa, unidentified
MEHCGIDLHGKSSEVAVVDEAGELVETARIPTTEAGLRRWFGGRARMRICLEAGGMSAWAERILVGLGHEVVVCNPARVRLIAESTLKNDRVDAETLARLVRMDVRLLRPIQHRGETTQRLRGMLRVRGILVANRTACMNGARGLLRSFGYRVPGTTIQRLARALATREIPEELLALVAPLVATALELAEKIEGLDHEVRAVGQGFAEVERLQTIPGVGPLVALAYVLCIEDPGRFRRSRDVAGFVGLRPRMRESGQRSRFGSITRTGDSEMRRLLVQAAHGCLRSRQDSDLKRWAEQLAARVGKKKAVVALGRKLAVIMHRVWVSGAVFEPHQKVAAQAA

SEQ ID NO: 196840 - protein, 350 aa, unidentified
MSEISIIGLDLAKLVFQVHGADKAGRCVLRKQLKRREVLGFFAGLPPCIVAMEACGSAHYWARAIAKLGHEVRLVPPAYAKAYVKRGKSDSIDAEAICEAASRPTMRFVPVKSIEQQGLATLHRCRDLLVKNRTMLINALRGHLAEFGFVADKGVGNLPDLIKIVSEAPAEALPELARASLSGFIDGIAQINRHLADIAKRLQAWHRKNAQSQRLEGIPGVGLIGATALCALVADPKLFRNGRHFAAWIGITPRLDGTGGKTRLGRISKAGDGTLRRLFVMGATSLLRSLENKTTPLALWVQGLLSRRSRRAVTVALANKLARIAWAVMASGAAFRPADAARHANAAASA

SEQ ID NO: 196841 - protein, 322 aa, unidentified
MKMAKPNIISAGIDTSKDKLDVAIHGIVGGFIVSNDAAGWAVLAERLQAAGVGRIGIEATGGYERGALRALQQAGFEVVLLQPLQVKAFARLRLRRAKTDKLDAALIAHCTHVMDAHNKMSPDARFDALADLLTYIEQIGEDIVRFKTRLEQTRDERVRQLVQDQIRAFQKQKIAELKRLRDQVQAYDDLAERYRLVMSIPAIGIVAALSLVVRMPELGQVSREEAAALAGVAPFVHQSGTHKGETHIGGGRARLRRALYMPAFVGALHWNPALMALYQRLIARGKSHKCAVVACMRKLVIFANTVVARSTPWETNGQITIA

SEQ ID NO: 196842 - protein, 332 aa, unidentified
MYLGIDVHKRYAQVAVMDEAGEIVEEVRVKNANLDDLAQRYAGAEAALEATSNYYHIHDTLSEHLDVTVAHPKELNQIANSDKKTDRVDAKELARMVRLNSVPESYVPTDEIREARALVRGRQTLVENRTKYANKIHGLLSDHGITEDVKPLNKEGREFLRELSLPTPWDALLESYLELIETLTEEIQELEETIEERAGSLKETQLLMTIPGVSYYTALTIYAELGKISRFDGDKSVVSYVGLNPVIRESGDSRIEGSISKRGSGRVRWLLVQAANTAVHTCNDEYLSRFYERLASRKNSQKAIVACARKMLVSIYHMLDRGEVYDPPDVSS

SEQ ID NO: 196843 - protein, 427 aa, unidentified
MLKINYMSTLFVGIDVASKSNVVCAMDFYKNQLIKTSVSNNQPGAYDLICQIVSVMQKHSDLNTVVVALESTSIYSIHISNYLSSCEELMPYHPYVFCLNPKMTANYRKSFIGMNKTDLLDAFIIADFARAGRIETDPWRGSQFLALQRLTRHRLHLVEAQTREKTYMVSNIFLKFSELSVLPKEEQPFCDNYGSTASSVLTEFLSMEDIINASPEDLVAFLGEKSRNRISDPAKTADLLQKAARDSYRLDKCLYDPINISLASSFNCIDAFKQEIKVIDKAILKTIAGLNPNAYTILTSIDGIGPVFASGILAEIGDITAFHSQDALAKYAGLTWTKSQSGDFEADESRMTKAGNRYLRYYLGEAANSMKNHVPEYRDFYDKKCNEVPKHKHKRALALTSRKLVRLIFGLLTKEKLYSTDRADALS

SEQ ID NO: 196844 - protein, 343 aa, unidentified
MDYFAGLDVSVKDTSVCIVDDTGKITREVRVASEPEALLAVLRNPTYRFKRIGLEAGPLSQWLFSALAEADLPVICVETRHMRAVLKAQINKTERNDARGIAQMMRVGLYRPVHVKTLRSQKLRMLLTHRKLLQSKAIAVDNDLRATLRNFGLKVGMVGTAKFETRIKELIENLPDLILLVEPLLVVRRVLREQLDLLHRRLLAVVRDDAICRRLMTVPGVGPVVALTYRATVDVPARFRKSKSVGAVFGLTCSRDQSGERDRPGAISRCGDEMMRAMLYEAAQAMLLRSAKWSWLKAWAMQIARRRGMKRAIVALARRLAVILHRIWIDGTEFRWTREAAAA

SEQ ID NO: 196845 - protein, 422 aa, unidentified
MDTIVERPAALDVHKEQVTACVRVPAADSKRREQHVAEFKTTVRGLLALRDWLAAHRVEQVVMEATGVYWKPIWHVLEDDFPLMLVNARHVKQVPGRKTDVKDAEWLCQLLEAGLLRASFVPPKPIRNLRNLTRYRKTQIQERAREANRLHKALEDTGIKLDCVATDILGVSGRSMLDALVHGTTDPEVLAELAKGRLRAKLPALKEALEGRFDQLHSLWIGAILAHIDFLDEQIDRLSDAIEEQIAPFGAAVELLCTIPGVKQRAAEVIISEIGTDMSVFPTAKHLASWAGQCPGNDQSAGKRRSGNTRKGSKWLDWTLEESALAAVRSKDAYLAAQYARLRPRRGHKKALGAVKHSIICACWHMLTTGELYNDLGGDYFQRRDPERQAQRLVKQLEALGHVVTLQQTPTATSTTEEAVAA

SEQ ID NO: 196846 - protein, 431 aa, unidentified
MDDVSRFEQFCQFRSFIRGSKEHLIVGIDVAKDKHHAFFGTAYGKTLWRRLIFTNDFVGYLRLVEQTELLLKQHRLKEAVFGLEPTGNYHKPLAHWLIQHDYRVVLVAGKAVKDNRGLLDGRWDKNDTKDSANAADLVSQGKCQFYEQPDSVLIAVRNLIVVRKQLKKEEHKLRMRIRNGLIAKYFPELDRFWGSCLEENLAIVRWYLDPQKIASTDFNLFVRHVTTTDRGLRQVQRLKAIHQAAGQSVGLPVDASACYEARLLVERLKGVKNQITQTMQQIEGLCQTLPGYKLLLSIPGFGPYIAALVLAALADPFRFASRKQVIRLAGLDLNASRSGKKSLDSVPVISKKGDADLRYALYQAALIASYHNDDFRRFYHRMLDGRQGERGIKTKARVKLAAKMLIIAWTLLKNNESFDERRLLAESGHGR

SEQ ID NO: 196847 - protein, 361 aa, unidentified
MPTVADVIDDVIGVDTHTDTHTLVCCSPAGAVRGELTVDNSTDGFAEALTWATMLASGPSLIFGIEGTRSYGQALSEFLSRAGLVVVEVERPARRSARTRGGKSDPIDAKAAAHQVLAMDPDALPTPRADGDREALRILLVTRRALADECKKANARLRALLLTGTDTDRALLRGPRLSKTTLTGLTRRRGSKGEDRATTTRRREITRLANQQLRLLEELRANNRDLATITDEIAPGLTSEHGVGPVSAAQLIVSYSHRGRVRSEAAFAALAGVSPVQASSGRRTRHRLNRGGDRQLNRALHDIARTRMRDCPNTRAYVTRRTSETPNFTTRDARRCLKRYLARHLYRRLETIMTPGPGPTT

SEQ ID NO: 196848 - protein, 406 aa, unidentified
MSDSTSHPIRFVGLDVHKHYLIAIGVDADRQQVFGPQRVELPRLEEWASKRLTNQDAVVLEMTTNAYVVYDALQPLVHSVTIVHPPHVALVTRVPVKTDQKAAITLAKLHAAGLLEGIWVPPAAVRDLRALIAERRKLTRTTTQLKNRLHSVLHRCRTIPPPGDPFSSKNREWWAHVPLSALERTRIQSYFETLAFIQRQIRNLDACLAEACAKDERLPLLVQLPGIAFLTAVTLIAAIGTIERFPSAGALVGYAGLGARVHDSGQTHRTGRITKAGRRELRAAMVEAAQTAVRVNSHWKEELARLEPRLGRNKAIVAIARKLLVVVWHVLTKGSVDYNAEVQQVARSFFNLAYRLGARNVPDGQRPGAFARQQLDRLAIGQDLTSIAWGIRRLKLPTSTLAIDGS

SEQ ID NO: 196849 - protein, 343 aa, unidentified
MGYYVGLDVGLRSSSVCIIDDQGAVRLERNFPSEIEEIAACVRHVGGEIEGIALETGNLTPWLAAGLRAEGFRVVVMEARQVKTTLSSMRNKTDRNDARGIAQILRTGWYREVHVKSLESQRLKTLLAARKALLRRRIDLENEVRGLLKVYGVKLPPQIYHVRFDEMARQAIASDPSLSEALDPLLDARGHLYRAFLDIDRRVKLLARADPIAQLLMSAPGVGYIAALTFKAAIDDPARFRRSKTVAAHFGLTPRRYQSGERDNPGRISKAGDVEVRSALFLAANTIMNGRGKPSPLRSFGARLSRAKGRKRAIVAVARKLAVVLHTMWTHGTLYCNAEEALA

SEQ ID NO: 196850 - protein, 376 aa, unidentified
MDSMTNSRGVVVGVDAHTDTHDVAVLDDCGRLLARQTFAADAAGYRALREWIEPFAPIAAIGVESTGSYAAGLVRHMRAEGLEVVLEINQPHPHTRRRRGKSDPIDAELAARHVLAANRPVVAKDTSGIVEAIRQLRVARDGAVKARTAALNALNGLIITAPEDLRRQLTARKTKRARAKLCERLRPDPQRLREPEQAAKAALRSLARRITELDGEIELLDQQLAQLVAEAAPITINRVAVGTGHAATLLVTAGQNIERLRHEAAFAALCAASPIPVSSGRTDRHRLNYGGDRDANRALHMIAVCRLRHCERTRAYAARRTSEGKTKTEIIRCLKRYIARELYHALLADLLAQPGPPAPITSVTCGAGPIGHTIRS

SEQ ID NO: 196851 - protein, 365 aa, unidentified
MTTRERSTSSSTDPPSRGEVVLGVDTHGEVHVAAVISPLGKVLGTESFPATAAGYRQLLVWAGKRGTVRRAGVEGTGTFGAGLSRYLVTQRIQVFEVNRPDRSARRLLGKSDPLDAQAAARAVLSGRARARAKSGDGPVHSARIYKLAKDSAVKARTQAINQLKAVLVIANSALRERMSNLGNAELFRTCARLGPPDGGGDQDAVSQATHMTLRMLAERIQQLTGQIDELNQRLTRLVEHHAPQLLEPVGIGPDSAVTLLITMGDNPERLNTEASLAALCGVSPIEYSSGRRSTRRLNHGGDRQANAVLHRIVFTRLRHDLRTQACYERRTQEGKTQRQIIRCLKRYAAHEVFNLVRPVSRTPAL

SEQ ID NO: 196852 - protein, 406 aa, unidentified
MKKKVIEFEQVVECGCGMDVHKDLIVATIQGKVIKTQTKSFKTFTSSLIKLKEWLFENGVTHVAMESTGVYWKPIFNVLGDDFKILLVNARHVKNVPGHKTDKKDSCWLAKLLLSGLLKGSFIPERPIRELRDLTRYKTKLTNQISAERNRFQKILEDANIKLSSVLNDVFGATGTKIVSHILSHESYRPEELLQYVHGKVKANRQDIKEALTGYITHHHRFMLKTIMGNIAKIESTVAEVDAQIENCIEPYKIERELLESIPGVGRDGSICIIAEVGVNMEQFPDQNHLASWAGVCPGSNETAGKNKSGRITHGNKYLRSLLVECGWAASRTKNTYLSAKYKSLVGRRGKKRAIIALGHKILIATYFIIKDKVAFKELGEDHLNNFRKDRLIAYYQQQLEKLTAA

SEQ ID NO: 196853 - protein, 361 aa, unidentified
MSNSTTWIGMDVHKESIVVAAVNGAGTVAARWETPNTSKGKDRLATRLSEFGTVRCAYEAGPCGYDLRRFLETKGIPCDVIAPSLIPKKPGDRVKTDKKDAEKIARMHRMGDLTAIHVPTPAQEALRDLLRAREDANEDLVRRRHRLQKFLLRQGRRHEGKNWTRDHWRWIRAQKFDDQNSETVLSEYIAAIDQEIERIGRLDAQIEQESKHPDIAPAVARLKALRGVGTLTAMTIFAELIDLNRFASPRELMAFVGLVPGEYSSGGRQWRGSITKAGNAHVRRVLVEAAWHYRHSPRGTGEAIRKRREGQPAAVIETARKAELRLYKKFTRLVMRGKRSTVAATAVARELVGFVWAIGRI

SEQ ID NO: 196854 - protein, 428 aa, unidentified
MIPAVIERCAGIDVHKKFVMVCVLIGPADSNPTPQIRRFSTFNAELERLRTWLLELQCNRVAMESTGPYWKPVFNVLEEAGIEMVLANPQQVKNLRGHKTDPKDAHWLAHLFRHGMIRPSYIPPKPIRELRDLTRRRKQLVRNGAMERNRVQKLLEEANVKLGSVLSDVFGASGQDMVEALMKGEATAEQIAQLAQRRARKKIPEIQKSIEGHRLNQTHRDLMQQCMTHLAFLEEQIEEIDQQIQNKIRSYGLSEAYELLQTVPGMQAEAAATVLAEVGADVQAFPSAAKLSSWAGVCPGNNESAGKRKSSHTTKGNPYLREVLLECAWASSRKKNSQMQHRYRRLLGRRGKKRAAVAVAHALVQAIYYVLSTRKPFVDTAEPRRSPGQVRRLVRHHTRRLRKLDCWTRRTKSENKGNSMAQNQQTSG

SEQ ID NO: 196855 - protein, 335 aa, unidentified
MTVSNQAERVIGVDVAKNRLDIADSQGKIRKTISNTAPAIKKAIVQKVKDDDSVFVVCEATGGYERGLVKTLQDAGISVAIANPRQVRQFASAMGRLEKSDPIDAEAICQFAQTAELPAAPVKTAEQEARDAVVRRREQVLEMIGQENNRLQQESDPKMKKTIERVLKTLKSLLKKLDAEVARFLAEEAKTNASVEVLMSVPGVGAVTTATLLCELPELGQLNRSEIAKLAGVAPIVHESGQSRGHRSVSGGRGKVRRVLYMAALVGIRSNPALVEFHRRLVSRGKPQKVAIVACMRKLLTILNSMVRTKTMWRTKGEEKVMADQGSATTRAHGD

SEQ ID NO: 196856 - protein, 415 aa, unidentified
MDVVHERCAGLDVHKRTVVACVLRSTAGSDVESTVRTFGTMTDDLEELGGWLAECGCTHVAMEATGAYWKPIYNVLEERGDLHLLVINAHHLRTVPGRKTDVKDAEWIATLLRHGLVRASFIPDRAQREVRELTRYRTALIRQRANEVNRLQKTLEGANIKLASVLTDLTGVSGQRILEALLEGQTDPAQLADLAHWRVQIKRHALEQAVVGRLSRVLRFVVQQQLRHLHNLDEQIAECDAAVEEQLHPFVSELQRLRSVPGIGPRTADVILAEVGVVLERFPTANHLAAWAGMCPGNRQSGGKRQHAPTRKGSPWLRAALAEAAWAASRCKTGYLPTLFRRISARRGRKRAIVAVGHSILVTAYYLLTRGGVYQDLGETHFDQRDRAAVVRRSLHRLQALGYAVHLEPAPRPAA

SEQ ID NO: 196857 - protein, 478 aa, unidentified
MEQEGAGQLPRRLVGIDLGIASRHSVRVLEPDGQVVCRSSCVPTVESLAAVEGAALAGAPAGTRLVVVFEPTGPAWLPIAVFFARRGHAVYRVSSAKAADLRRFLRRHAKSNGIDAETLARIPLADPGGLQPLELPGPGLAALDRRVRACARLTQAAAEHKTRIKDLVRQLMPVTPLTGDIGTADLVVLERHADPRSLLAVSLAELTTLITVASNKQQGQQRARHWHACAAAAVELYDGHPAVPFAELAAEVVTEIRLLRAIQAELAAHAAAREQHYLQADPAQLARSLPGFAEISAPVLAAAMGRPGRFRDGTKFKSYVGLAPKASETGETDRKGQSMSKAGPSLLRATFYRAADTARRQDPQLAKIYYVQMTERGANHLKACCIVAGHLAERAWAVLNRGTPYVVCDNNGNPVTPAEAKKIIADSWTVPEDVRRRRRNRKTAGKAPQPALTRPDTRGDLPRPRSSRPRPKAVNPAT

SEQ ID NO: 196858 - protein, 428 aa, unidentified
MDQVNRNRLEEFRQLRQEIRHSEKYLIVGIDIAKDRHHAFFGTATGKTLLRRLVFSNDGEGFRKLLDQAETLRVRHGLKKVVYGMEPTGNYHKPLGEYLIHMGRRVVLVSGVTVKRNRESLDGRWDKHDDKDSANVADLISQGKCLYYEYPSAQLRGLRGLLSLKRRLKRQEQSYRIRIRNHLIAQYFPEMDSDYGRSEAQGLAIVRWCFPVSKITEIDVDPFLERVTSRRVGMEKRRRLEAIWEKAGESIGCDGVPGLDHEAKVMVEGLRQIREVIKETEDKIQELCEQFPEYPCILTIPGFGPDVSAKVLGAIGDPDRFQNGKQVLKLAGYDLSADRSGKGSDKAIPEISKRGKADLRYALYQAAFIASTKNPDFMRYYTSKIRGREKEKGIHRKMLIKLSAKMLLIAWTLMKKKETFNPTYLKAE

SEQ ID NO: 196859 - protein, 360 aa, unidentified
MNLQRTSVGLDVHARSVVACGLDRQTGEVFERRLCPDHREILEWIGGLPHPVAVTYEAGPTGFGLARALEAAEICCVVAAPSKLVRPAGDRVKTDARDARHLARLLHLDQIVAVTVPSMQQEAARDLVRAREDCRADLMRTRHRLSKLLLRQGIVYYGGEAWNAVHERWLRRQHFDAAGLQMAYQEAFDAMLVTRDRRDRLDAAITAMAVDSEFTTVVTRLGCLRGVSTLTAFALAVEIGDWHRFTGRSIGAYLGLVPTEFSSGATRVQGGLTKTGNGHARRLLVEAAWHHRKPYRLAIALRRRQDAASPAARARGNAANRRLHTRWQRFDARKKRPVVANAAIARELAGWCWSLATLDE

SEQ ID NO: 196860 - protein, 411 aa, unidentified
MEVVNARCAGLDVHKATVVAGVRVPGPQPSARRGETKTFATTTRGLRDLTNWLLTHGVTAVAMESTGVYWRPVYEALEGSVQLVVVNARHVKMVPGRKTDVKDSEWLAQLLECGLLRGSFVPPRAVRDLRDLTRLRKALIRERGHHVNRIAKTLELAHLKLSCVVTDLMGKTGRAILHALSAGIDDPERLAACAQGLLRKKQAALREALVGRLTPHYAFLLQQHLSLIDGLDAHIATLDTRIEAAMAPFAEAAALVQTMPGVAARAAQAILAETGVDMDLFPTPAHFASWARLCPGNHESAGKRQSTTTGKGATWLRATLQETAWAAVRSKKSYYRALYHRLKGRRGAKKAIVAVQHAMIVALWHMLKHRVAHHDLGADYFDRRHTARIRRHHVRRLEQLGYDVVLVEKAA

SEQ ID NO: 196861 - protein, 399 aa, unidentified
MFVGIDWAKESHDICVVDPAGKIRGRATIAHSQEGFDELAKHLGRWAEQGEVLVGIERPEGRLVDRILEAGHPIVLIPTFAMKDLRRRYAVGGAKSDPGDAYVIADVARTDGHRLRRLEPLSEETRALRSVVRARGDLVDQRVALGNQLRACLDAYWPGAAVIFAGVCSEIALAFVERYPTPDAAAHLGEVRLASFLKKAGYSGRRSAAELLERLRAAPEGVVGVEAEARADAVRSMVRVTRSLNRSIKDLDRAIAAHLGEHPDAEVFTSLPRSGRINAAQMLAEWGDCREAYPEPDAVSMLGGLCPVTHASGKHRDVAFRWACNKRLREAITTFADNSRHASPWAADIYRQAIARGCDHPHAVRILARAWVRVIWRCWQDRRPYDPALHGAAVLLEAA

SEQ ID NO: 196862 - protein, 394 aa, unidentified
MIYAGVDIAKTDHVIGAVDERGAEMCPPMPFKNTEAGLERAVAWLEGLAGSPSDVVVGMEATGHYWMACYSFLVARGYSVAVINPMQVKAVRKLKGLDKVKNDRVDAGLIAEALRIGQYDETRLATDEVASLRSLSRYLQSLRGMVAELKTQCICLMDAHFPEYAGIFSDMFGAGSRAVLSKSPLPFELARRRADSLARDIAEASRSGGKSSGYAAKIKAAAKSSIGVRLGQEAASFQVKSLIRQIEFADSECAGVEARLRSLLDEVEPLVLTIPGVSYVTGAQIVSEIGDVSRFRNAPALVSYAGLNSSVSQSGRFDSGGGPITKHGSPYLRRALWLAANRARQYDPGLRAFYDRKRAEGKPHRVAVTAVARKLCHIVFAVMRDQVPYDPGRE

SEQ ID NO: 196863 - protein, 430 aa, unidentified
MEIVYPRACGVDVHKSFIVAVICISESIKPRYIKKRFSTFNNQLIQFRDWLIENNCHNVCMESTGKYYIPVYNTLEGHIPNVVVANPKWVKAIKGEKDDNKDAKWIADLFKFGIVRSSYIPKKDIRILREFTRYQYKLVNIRSSEKNRFQNALTVGNCKLDLVFTDVFGKSASSIVDTILSDEPYTSEDILSKVHERCKASSDDILSAVEGTNLNQYQKARIKIVQKHMEYVDSLLDEVQHHIDMMVESYENYIQLLMTIPGVNRKSAIIIISELGIDVSQWSSARKLAAWAGLAPGHNESAGKKKSVKISKAGIYLKPCLVQVAHAAVKDKTCSYYAEKFGRISKRRGKKRAIIAIARKILVAIYHILKTDEVFNPSDMADVETTKEQRIAYIANNFRNAFNQLSRTGLSEEEILSIIIKKSGNSPQTE

SEQ ID NO: 196864 - protein, 365 aa, unidentified
MVAQPTTRVQAQSTVLVPAGGHVCVGIDLHKDTMTVCVLVRGSGEIAYRKIACKNRDQVEAFFRALPRPHTVAIEAVGFYRWLWELLEPIVEKLVLCDATQARALAGRRLKTDREDAANVAELLLADRLPLAYAPPLEVQILRDWTRQRNRLSRDHARALHGVKSIMNMNNRPGSARLDSAGLHRYLLAFQALLPERHVKMLWQRQRQLSLLEEELGLCEREIARLLQSERFAAITRLLFTAPGVGPVVAATTIAEIGDFARFPDGKAIGRYAGLAPRLYNSGDKERHGHISKTGPSDLRWVLQQAAWTAIRCDERIKAQWLKISRTAGKKAAAVAIARKLLVLLWHMATTNQSYQRPPQPQEAA

SEQ ID NO: 196865 - protein, 410 aa, unidentified
MEVMFDRVAGLDVGKETVTVCLRRPGPRGGRRSETRTFRTMTGSLQVMRDWLVEAGVTIAAMESTSAYWKPPFYCLEEQMTVWLLNAAHMKAVPGRKSDVRDAEWIAQLLEHGLLRPSFVPPPDIRRLRMLTRYRVQLMGDRLRDTVRLELMLEDASIKLSTVASSLTTVSARAMLTAMIEGETDPLRLADMAKGKMRRKIPDLAQALTGHFDANHARLARSMLRRLDLVEQAMAELDQVIVDACRPWQHQIELLQTIPGVGPKVAEVIIAETGGDMSRFPTAAHLAAWAGLAPAMNESAGKQSPAGKRHGNKWLAAMLVEAAGSVGRMHNKNYLAAQHARLLKRRGMGRAQVAVARTILVSAYWMLKRDEPYHDLGADWHTRRNDQAHTRRLVAQLERLGHTVIIDPAA

SEQ ID NO: 196866 - protein, 344 aa, unidentified
MTYYAGLDVSLRSTHICVIDDDGELFAEGKADSEVEDILAFFDELDVDITMIGLEAGTLTQYLTYGLQFAGFEVVCMEARQVKAALSAMRNKTDKNDARGIAQLLRSGWYSRVHIKSIQSHQVRALLTSRKAVLSKCIDLEQEVRGLFKVFGIKLPQRLGHGAFDPTVRPLIETDEALSQSLLPMLDARLVLYRTFLTLEYRVRKLAKQDPVCQRLMTAPGVGPITALTFKAGVDDPTRFKHSRTVAAHFGLTPRRFQSGEVDFDGHISRAGDANVRSTLYVAANAMMTRSSQWSPLKAWGMKLAKSRGHKRAVIAVARKLAVILHRMWLDDTQFRWSTEAARS

SEQ ID NO: 196867 - protein, 422 aa, unidentified
MQQNPNSVERVVGLDVHPDSFTAALVQGPTPRAATVEKVFNKVPIEQLERWTQKNTSASDIIVLEASGNSFHVARVLRSIGRRAEVLESCQMGKLKEAHANNDKISATRIAKAFLSGTAKTVWVPDPKSQERRDWLHAYNKAAASVTRLSNSLLSFLSDNGVRLEQRLIDCPASQQVELIRATRAWLPSQWQVIEIKLAELQHALSTEARWSSLLAQEVIADAQLLSLVRLCGIRDVVAFALGAVVGDIHRFSEPKKLVKYVGLNPAFDDSGEGKWSGGIGGHGHRLLRSLLIESAHSILRSRNHPMAKWGHRLLARKGDLRLVVAALARKLLVNVWYLLMGKSQPLEAISAPLSAKISKIISKVGEQGLNHLKTNRRELRKRIEQSLISGRTYTLDPTRIFEPKRAMAPISPAESPQASAS

SEQ ID NO: 196868 - protein, 304 aa, unidentified
MFGIGIDVSGENLDVAVHEQAFRQFKNNKRGWASLIRWLQRWPAKQVVLEASGGYEQKALDALHEAGLPMVRINPGRGRSFASATGKQAKTDRIDAMVLAHMADVLKLTRYVPPAAWQRRLGELCQRRRHLVQMRVSEHQRMRAFSEPGLISMLNQHLREIQKTIKQLDTTIAALLAEQEGWRDFAKLKGAGPVLMATLACELPELGRLSGKAIAALVGVAPMNRESGNWKGRQSITGGRAVVREALYMAALTAKRYEPRLKEFFESLVNQGKPGKVALVAVMRKMLVILNARKRDAEAQMASA

SEQ ID NO: 196869 - protein, 326 aa, unidentified
MMNYLGIDVSKEKIDCCLFINGISGKGKSKIFSNSESGFIKLTDWLSNLNINTNDLLVTLEATGIYHENLCYFLHDLKINIAISNPMRTRRFAQGMSILTKTDKVDSEVLAKYGALAPIKYWKPDSKNFRELRDLMIRRDALSTDLVRESNRLEKSTFTKTSLHVIAMIKESIDSLQTRINHIDVIINELIKNDSELTNEMNLLISIPAIGQRTALQMLTLFHGKDFDNAGAAAAYVGLVPIQKQSGTSVRGATRISKSGSSRIRAALYMAAIVAIRFNPHSKVLYNRLLKNGKSKMSALCAVMRKLVYLCYGVLKNKTPYQPDYA

SEQ ID NO: 196870 - protein, 391 aa, unidentified
MSMYFVGIDISKYKHDCCILSAADQNVVSKFTIKNDMSGFEQLITTLHSLSNPEDIKIGFESTAHYALNLELFLENAHHSFMEINPVLIKEYKKSTSLRRTKTDSVDCESIARWLMTVEYKPHPKGFYHAYSLKSLTRLRDRLIRQRSFYLVKITNVLDHTFPEFKPFFHERLSKTALYLLENYGSAEKMARMNSASYEKLRSLSRGKFSPQQFLRLKELASNTVGINNSIFDVELNCLLTLYKSLVKEIGALETEINNLIEEIHPHYMSVPGIGPISAAVIYSEYGDLSNFSTPAQMLAFAGIEPGINESGTESHGGRMVKHGSSQLRYVLINCCLPLIRFDMTFAAYYAKKRAEGKPHRVAITHVAKKLVRVIYALERQGTDFNAQKLR

SEQ ID NO: 196871 - protein, 457 aa, unidentified
MSRKGKRTKGIEKAHSFKDMSRVNPQAAGMDIGAVEIVACVSGDSQTQIVRAFGNYTVDLQSIGEWLKEYDVKTIAMESTGVYWIPLFEELERQGFECLLISSRSLRRVAGRKSDIEDAQWIQTLHSYGLLESSFRPQADLIALRTLLRHRGQLIEHRSPHIQHMQKALLQMNVQLSQAVSDITGVTGLKIIASILGGERSPERLAALREPGCKKSAEEIGKALTGTWREEHLFILKQAMQLYLFYTEHIETCDEEIERVYGLTRPDWEAGEVQPLSRRKRNSHSKNKPENSENIRGHLKRISGVDLSVVDGFGVSLAQTVIMECGTDMSKFPNEKHFCSWLGLAPKHEISGGKILKNKTLKTKNRAGQAFRMAAHSVKRADCVFGVTYRRMRARLGPAQATVATAHALARVVYRMLKYQVEYETISVEEYEKKYKEQQFKYMKKKAAKLGFQLVPA

SEQ ID NO: 196872 - protein, 331 aa, unidentified
MKIKETVGIDISKLTFDVRIHSNQTFKVFENSIKGFRIMIQWVYKNSPFLKDDILFIFEHTGLYSHNLSVFLTEQNIGYALVPGLEIKRSLGISRGKDDKIDATKIALYGYRLRDEIVLYNLPSQDVISLKSLLSLRDRLVKQRAGYKSSMKEQKRVFLKKDHKILFETQERMIISFSKQIQKIEKEMENIVKNNEQLKHLYELIISIKGVGSQTTLFLIVYTNAFTKFKDVRKFASFCGIAPFPNSSGTSIRGRTKVSHLANKKIKSLLDLCAKSAIQSNPEMKSYYHKRIEQGKNKMSTINIIRNKILARVFAVVKRQTPYVDTMKFAA

SEQ ID NO: 196873 - protein, 400 aa, unidentified
MTFDRRCTETAAIRSQLGAIFVSLELSRSTWLVTSLSPGTGETMSKREIRSGDVSGLLARLAELRRKALTRTGINHPIIVIQEAGLDGFWLHRVLQQEGCESHVVDPASIAAPRRRRRAKTDRIDGEALLRALLASKRGEPRVCSMVRPPTPEAEDERRICRERAELIEERVRHVNRIRGLLFSQGVTTYEPLRRDRRKRLVELRTGDGRPLGEHLKAQIARALDRLDLLLAQIKAVEDARDALLAQLAESRDEDRTEAAGAPPSPVALLMSLKGVGPEFAAVLWTEGLARSFANRRQAAAYAGLTPTPWRSGSVDHEQGVSKAGNRRLRTKMLQAAWLWLRHQPQSALARWFHARLPGMVGKAARKRLIVALARKLFVALWKFTSAGVVIEGAAMTSSA

SEQ ID NO: 196874 - protein, 401 aa, unidentified
MNAVGIDVSKGKSMVCVMRPFGEVVLEPFEVSHTAQNLRDLATKLKALDGETRVVLEATGNYHKPVAFVLHDAGLFVSVVNPLLIHDYDNNSLRRVKTDKKDAVKIANYTLDKWTRLRQYLPEDDTRLALKNCYRQYQQAVAVRTMLKNNLISSLDLTFPDINRLFTSPAKSNGCEKWVDFIGEFWHSECVSSLSENGFAKKYLKWCQKNGYIFARSKSDEIYACAVNAASLPKSATSKLLIQQQVVQLKAVSKSVAAFQQEMLRLSRQLPEFDTVMEMYGVGPSLGPQLMAEIGDIRRFQSKKSLIAFAGIEPQPNDSGKVVGNDSGISKVGSAVLRRTLFLIMTVILQTQPQDEPVFQFMDKKRSEGKPYKVYMMASANKFLRIYYARVKTVMDSADSN

SEQ ID NO: 196875 - protein, 334 aa, unidentified
MQEACDLTIDATVGIDVSKDRLDVVLRREERDQTRGCANSAAGFLELHRWLSAQGIQPQQTPVALEATGSYSDAIALFLYEHDYRVSVLNPAVLVDYRKSVNVRSKTDALDARLLARYAQERRPRLWKPLPPEMQTLRFLLARREDVQHMLQQERNRLHAGRMDDWIRTRVQQHVTQLDKELAALWKRTMDHLKAHPSLKSQWRRLQTIKGIGPIGAACILAEVGQIERFDDPRALVSLAGLAVTRHDSGTSVHGKPKIDRHGRMGLRRILYLCAVSAIRWDAHMQGFAARLQARGKPLKVVRVAAMRKLLHIVYGVWKHEADYDPTLAFPQVA

SEQ ID NO: 196876 - protein, 402 aa, unidentified
MIFINCLGIDISKSESVVAHYKDEVLVKEMVIQNNQNGYRYLKNYIKHLDSLFILFESTGIYSRGMKRFCEIHKIDYLEMNPLEAKFKTSSLRSWKTDKSDAHKLALLAFRMKDSKVQRQSEEIYFELRERARFHLEMEINQNRLKVELVETLHQTFPGLEKLFTNRYSKIALNIAKAFPHPDFVSTLTHDELVEKVLHSTDKGISVNKAHKYVQKLIEIKNNSFPNVDKSSFLLQKVQYLCDKLLIGIEEMKEFDQEMIDLAKNTTEFENIISIPGIGELTGALLIGELGNIREFKTNKQLNAFVGIDIKRYQSGTSKSRDTINKRGNKKARRLLYLIIMNIIRGRNHYQSHIVDYYYKLREQPHGKTHKTAVIASINRLLKTIHYLIVNNKLYDYQKAPH

SEQ ID NO: 196877 - protein, 344 aa, unidentified
MYHYAGIDVSLECSSVCLVDGTGKILREARVASEPEALITWLRSLGLVLERIGLGAGPLSQWLYAAMRDAGLAVELLETRHVRDAFKAMPVKSDRNDARGIAQLMRLGWFRPVHCKSIEAQETRAVLTARKLLQSKLRDIENSLRGVLRGFGLKVGTTTERTFAERIRELVAGHPGLEIVAQALLEAHAVLRREFNGLDKHTQKLARSHPQARLLMTTPSVGPIVALTYASAVDDPKRFRSSKATGAHFGLTPKKYQSGETDYTGRISKIGDASVREALYQAAHVMLTKPVRNCSALKGWAMRIARRAGLRKAKVALARKLAVVLHRMLADAKPFNPMAKASAT

SEQ ID NO: 196878 - protein, 321 aa, unidentified
MNKDRKIYGIDISKSVFDLYCQATGHLQLKNDEKGFKDLLKLLPKDALVVMEATGYYHYRLAQFLHKNDVAVSVVNPLSVKRFIQMKLAKVKTDKSDAKAICAYGTMNELPMYSALTDVQAECLQLFRLLDNYLKKRTQTKNKLHGEDVLGVPSKYVYKSLQRDLKHLGKEIKGIELRLLELVKQDQQHQLTLLKSIPGLGIKTALFLIVVTDGFKKFESASQLCSYVGITPTIRESGSSVRGRSRISKVGNKKLRNLLFLCAFSACKHNRACREIYDRIVAKGKSKKLALIAVSNKLLKQAFAIAKSGLPYDENFVSRLA

SEQ ID NO: 196879 - protein, 343 aa, unidentified
MYYIGLDVHKKTISYCVKEANGHIYAEGKVGATRWELDDWMKTLPRPWTVAMEATIFTGWIYDHLLPHAEKVKVAHPLMLRAIAAAKKKNDRIDASKIADCLRCDFLPECHMASTEIRDRRRTLRYRSLVIKQMVQMKNRVSGLLMETGVSYNKQRLHKLGYFEALMTSNEDVHDSIRPLLKLSREMISRSQKLDYALISSLERDPLLTERLRRLRTVPGVGPITALTWALEIGDFTRFTSNKQAISYCGLCGEEKSSADKVLRMPISKQRNKHIQRVLIEAAKLATRESPELAMIRARELERGNPNRATLAVARKMVIYLLAVERRQQDWVAAEQFRRTAAA

SEQ ID NO: 196880 - protein, 319 aa, unidentified
MKEAFLGIDISKLTFDVALLEEDKVKSKKFTNNKQGFKKLTGWLDSKNVCIIHACMEATGVYGEHLAEYLFLNKIPVSIVNPARIKGFSQSELSRAKNDELDAKLIARFCKLIRPKLWEPTPDKIKFLQQWVRRLDDLIKLQRQEENRLEAASDYMKPYIEKTVKHISNQIKEAKKIINEHIDNNPELKEKSELLKSIPGIGEATTAQVLAFIGDTGKFRNAKEVAAFVGLNPKQNQSGTSVRGRTRLSKTGDATLRKALYMPAIVSMRHNPVIRQFASRLESSGKHKMAIIGAIMRKLIHIIYGVLKNKNAFNAELNC

SEQ ID NO: 196881 - protein, 410 aa, unidentified
MPKIVYPICCGMDVHKSFVVACIASTNDKLVTTYKSKRFSTFTGDLRRLADWLMENNCRDVCMESSGKYWIPVYNILELSCNIVLAHPKYVKAIKGKKTDKRDAKWIADIFKHDLINGSFIPPSDIRQLRDLVRYRVKLTSYSTGEKNRAQNCLTVSNIKLDDVFSDVFGKAASAITDRLLENNEPFDVRPYLTKHIKTSPEDIQAAVDGAMCANQAEKLRIIRSHMKNLELCKMNLDSEILAVAEKYLPQVNLISTVPGIQTLSAIAIIGEIGVDMSVFATSRHLCSWAGLAPQNDQSAGKKKTTRVSRAGVYIKPLLEQCALCAIRSKSNPEVANRYSAIKKRRGHKKAVIAISRMLLTAIYNIIKKDEPYNAELYRLSDKPPVQREVSVEQAIFILQRQGYLVTDDT

SEQ ID NO: 196882 - protein, 309 aa, unidentified
MNDKYVALDVHKASIVIGVRDAAGKYTMESIIETKAATVLDFVKGLSGTIHLTLEEGTQSAWLYDLLKAHVAELVVCNPRRNKLLDEGNKGDVIDVKKLSHLFHGGLLRPVYHGDHGTRALKELAQNYESLVADRTRVKNRLKAVYRGRGISCEGDEVYHKLKRAKWLAQLTESGVRQRAESLYRELESLDSFVKEARKQLLAESRKQKATRILRQMPTLGSIWAALIIATVDTPYRFRTKRQFWSYCGLAVVTRSSADYWFDKKGEMRKRRRPASTRGLNQNYNRRLKKIFKGAALVGDLPGTVQALL

SEQ ID NO: 196883 - protein, 316 aa, unidentified
MSKHSIICAGIDTGKSKLDVAIAGSVKRWCFDNTAQGHAMLSARLRQHHVERVGIEASGGYERAVVATLRRDGFVVIVFQPIQVRAYAQFHLQRAKNDKIDAGLIAACTAAREKIHAPPDPRLAALADHQTLIDQIIDDIAMFKNRRESAREACFRRFWTAQIADLKKREKSEFNKLVAAIRQHDDLSRRLDLIASVDGVGLPTAVAILVRMPEIGRVSREQAAALVGLAPYDDDSGERNGAKHIAGGRERLRKTLYNASLAAAYHWNAQLIPFKDRLLAAGKLHKVMRIACARKLLIYVNTVVARGTPWVSRVLP

SEQ ID NO: 196884 - protein, 410 aa, unidentified
MEVLHPRCCGLDVHKETVVACVRRVIDGKTVKEVRTFSTTTANLIALSEWLAEAKCTHVAMEATGVYWKPVWHILSDENFELVLANAAHIKNVPGRKTDVKDADWISDLLAHGLIRPSFVPDPQTQEMRTFLRTRKQFVREKSSHILRIQKTLEDANIKLDSVITDIMGASGRKMIETLIAGEKDPAKLARLADPRVKASQESLREALRGRVTNSHRFLLRLHLGHIDAIDAAIAEVDREVEAGIAPFRTAVQQVTTTPGIKSLAARTILSEIGTDMSRFPTSGHLISWACICPRNDESAGKRRSTRIRKGSPWLKTTLVQCAWAATRTKGTYLHAQFHRIRARRGPKKAILAIAASILTAIYHMLKDGTLYQDPGPNCLNARNKERQKNRLIKRLADLGYVVELVPQAS

SEQ ID NO: 196885 - protein, 318 aa, unidentified
MSSAAPAFVGIDVAKAELVITIRPSGEHWTIANDVAGIHTLGQRVRGHAPTLIVLEATGGYERAAVAARAAAQLPVVVATPRQVRDFARATGQLAKTDRIDADILALFAERVRPAPRALPDDAAQALDALLTRRRQVLEMLIAERNRLEHAVPTVRRGITQHIRWLERQLADVDRDLDDTIQASPVWRAKENLLRSTPGVGPVLSRTLIGELPELGTLPRKQIAALVGVAPLARDRGTLKHKRLVWGGRAPVRAALFMAALVGPRCNPVLRAFYRRLLEAGKPKNVALTACMRKLLTILNAMMRTNTAWRHIDLSPTT

SEQ ID NO: 196886 - protein, 325 aa, unidentified
MQGQEVSEQETRKCTAGVDVGKDWLDAHVLPKGESLRVANTSEGIGQLKRWFLRRKVELVTIEATGKWHRAVFRSLSASNVAVAVIDPFRARMFAKAQGIAAKTDRLDARVLAMYAAMMSPQCRPPAPERLEALQEFVTARASAVDEKTALKNQLAAATQSFLKSQLRKRIKQLEAHVDDLKTECLARIKAEEGLKRRFEILTSIPGVGDVVAITLIACLSELGSLSDKQVAALAGLAPIADDSGKHHGIRVIWGGRSAVRRALFLAALSAKSCNKEMKAFFQRLADKGKAKKAAIVAVARKLAVLANLLIAQDRLWQKIAPKCA

SEQ ID NO: 196887 - protein, 331 aa, unidentified
MKFKSFIGIDVSKSKLDAYLKINHLHAIFNNNEEGFKELVEWVMENSGLVLARELLFGFESTGIYSSELALFLDKHPLPFYIMSGLELKRSLGIRRGKSDKADSKDTAEYLYEKQEKIEPTFLPSQTIQDLKKLFNYRERLVKERAAFKTRLKEYETIVSRNKLKVYLKSHTTVIACLDKQIETIEKEIQKLTHSEELLMNQYKLLNSIKGIGPQTALALIILTGGFTKFSSWRRFASYAGTAPFPNQSGTFNGRTKTSKLANKRIKTLLTLCAGTAIQYSTEMKNYYQKRVGEGKSKMSTLNIIRNKLLSRAFAVVNRNSNYVDTLKYAT

SEQ ID NO: 196888 - protein, 422 aa, unidentified
MKENVRIVGFDCGEDEHAAVLLDASGEFEKRFSIVNERGQVQEALAKLLLEVGPEQQLLVVVESKRSHGRVVADVGTELGCELWQVNTVALNHFRDLEGQPRKDDEWDAYLAARMVYLRMGGCREAIETTDEERSLSRLTRIHSRVTEDRKRYVARLRAVLLELAPEMLHSKWNGPRPDSKAMLYLLERWPGFDGLERAQLRSIEKILRQCRYKSEDRIPVAKLIRKAARGISIAADERSSLTMELDLLVRHIRLCDESIAKVYIEIAGRVGRHPVGRKLLEMHGIGPVIAGVLVSELFPVARTAPEPKSATYSGVTPLARKSGKSLDKDRLTQGVNKRILHALYTSSVVAIKHSSVDRAYYQKKLRDYAGHPKPHVAAFIALSRQRHKLIYKLMTTEARYDKEILVASHLERIERDRIAAA

SEQ ID NO: 196889 - protein, 338 aa, unidentified
MKEYKLISIDLAKNVFQICAFSDFNKIAFNQRIHRGKILAKLRNIPSTTIVMEACYSSNYWGREIQKLGHTVKLIPPFKVKPFLIGNKNDANDAVAIAEASLRPRTRFVSVKTLAQQDTQTLLRVREQLQKIRIMTSNQIHGFLSEYGVFCAKGHKSLMTTLAEALAPESNLLSPIAIEAIRMQSDYYSELKAKEDEITKRLIMLCEGNPIYRYLKTIPGIGPIVAATLISSVGDPRYFRNAREFSAWIGLTPLQHASGETSRMGKISKRGDQHLRKMLIHGARSIVNWVKHKEDKLSLWIKSLEKRMCPNKVTIAVANKLARIAWAVMTYQVEYHAK

SEQ ID NO: 196890 - protein, 414 aa, unidentified
MDVIHACVAGLDVHKSTVVVCIRRIGEGGRVWKEIRTFETTTRHLEALRAWLQAEGVTHVAMESTGVFWKPVYNCLEEHCEQVLLVNARDIKQVPGRKTDVKDSEWIAQLLQFGLLRGSFVPPRQQRELRDLTRHRTTLVQEHNRVVNRLHKVLQDANIKLSSVMSDILGVSGRQMIEALGSGEDDPNVLAELARRRLRGKIPQLRMALEGQVRAHHRFLLRMLLEQLDFVSKAIDELSQRIAEVSGPPVQAAVALLTTINGVGQRVAETIAAELGTTMTPFPSHKHCASWAGVCPGNNESAGKRKTGKTSKGNRWLRRALAEAAWAASHTKGTYLAAHFRRIARRRGSKRAIVAVSHTLLVAVYHMLSKQLPYSELGADHFDRLQPERLTRYYLTKLRALGFKVTLAPLEEAA

SEQ ID NO: 196891 - protein, 354 aa, unidentified
MIIIGCDYHPGFQQIAFVDTETGDYGEPRLEHSEGAEKFYRDLAAQGKKVRVGMEASGHARWFERLLAELNFELWIGDASEIARKRERKQKTDLEDARHILQLLMENRFPKIWVPSGENRDLRQLLWHRHRMVQARTRIMNQLQAVALNEGLRCKKKLWREKGRQQLEAFRLAPWASRRREDLLQLLDRLNPTIAELTQAIEQEVEKCPEARRLRTHPGVGALTALAFVLIIGRAERFQCGKQIAAYLGLVPLEDSSGNRRRLGHITKQGSSIVRFLLVEAAQVTARSIPEWRNKYVHLTMRRGRKIAKVAMARRLAIALYWMWRKGWDYEQLRKFGSHAGQPGYGDGVKQNIE

SEQ ID NO: 196892 - protein, 357 aa, unidentified
MVTGLKHQKEKRSMDHFAGLDVSVKETSVCIVDNTGKVVREVKVASEPEALLAVLKNPAYHFKRIGLEAGPLSQWLFSALAEAELPLVCVETRHMQALLKAQINKTDRNDARGIAQMMRVGLYRPVHVKTLRSQKLRMLLTHRKLLQSKAIAIENDLRGTLRNFGLKVGMVGKVKFEARIKELVENHPDLAELVEPLLIVRRALREQIVILHRRLLAIVRDDEVCRRLMTTPGVGPVVALTYRATVDVPARFRKSKAVGAVFGLTCSKYQSGEIDRSGRISRCGDEMMRVMLYEAAQSMLRSKRWSWLKAWAMQIARRRGMKKAIVALARRLAVIMHRIWVDGTEFRWTREQAPAAA

SEQ ID NO: 196893 - protein, 400 aa, unidentified
MISVGIDVSKGKSTVCILKPYGELLQRPFEIMHTLEDLTALVKTIKHFNEETRVVLEATGYYHLPILEFMKENDIFVSVVNPLVMKKYINVSLRKAKTDKIDAAKIAKFGLDHWFDLTDYRPDEKIYEELKILGRQYLQFMGMYIKGKITLTCILDRTMPGIKDLLKSYSDDFSHNKIGDFAFRFWHYDIITNKGEKYFVDAYVKWANKKGYHANEKKAHQIYALAQTGIPTLPSSTPSTKMLVQEAVKVLLQTEKSLHIILARMNELAKSLKEYKVVRAMPGVGDKLAPRLIAEIGDIRRFHNGSSLIAYAGLDAPPYESGNFTATKRKISKRGSSILRKTGYEIMKCLKTVKPAYDNAVYRYILKKESEGKPKKVAKIAGLNKFLRIYYTRVKETIAG

SEQ ID NO: 196894 - protein, 355 aa, unidentified
MERYIGMDVHAASSTLAVISEKGRKLRDFPVETNGQALVEAVRMIPGHKHLVFEEGLQSAWLYETLSPHVDEIVVAGITESRGPKSDKRDAYGLAEKLRVGNLDKSVFKAPREFTRLRELSRIHMTLVGDVVRVQSRIKSLYRARGIFVTGVNVYRVRHREEWQRQLCSSAQTRATRLYDHLDFLLEQKKQAEADLLREAKKHPIVRILETAPGFGPVRAARLVPIVVTPHRFRTKRQFWSYCGLGIVTRSSSDWVRTADGGWIKTRVPQTRGLSRQHNRFLKHIFKGAATTIVTQRNKDPIYERYQRLLDGGTKPTLAKLSLSRMIAATVLRMWKNEEEYDPARGGPSTTTREG

SEQ ID NO: 196895 - protein, 386 aa, unidentified
MQKLNDLSRSLTALEPDGTLIAVIEMSLSSWLVAGMVPGVERQPLKKLAVDESALLKLLHRWREEAEKAGRRIERIAVAFEAGRDGFWLARWLKARGIEAYVIHASSVAVSREHRRAKTDRLDTELLKRSFLGWLRGERDHCKMVEIPTMQDEDAKRPNREHDSLIGERSRIVNRMKAALVRLGIRGFNPKLKRATTRLDGLRTPEGEPIPPNALAELRRDMERRRLVNNQIAQIEEERLERIEQAPSDGPHVMVRLLARVMGVGIETADMLVHEVLSRNMRDRRAVARYAGLTGSPDESGRKRREKGLARSGNARVRRGMIQLAWRFLLHQKNSALTKWFRSRTENARGTRKPMIVALARKLLIALWRLVREGIVPDGVVLRPAQ

SEQ ID NO: 196896 - protein, 404 aa, unidentified
MYNAVGIDVSKSKSTVAVLQPGGTVIRKPFDVSHTSQNLNELADYLSSLDGTTKIVMECTGRYHEPMIKALSEAGLFISIVNPHLIKNFGNNSLRKVKSDPADARKIARYTLDNWTELRQYSGMDNTRTQLKTLNSQFSFFMKQKVAAKANLIALLDNTYPGVNKLFDSPTREDGSEKWVDYAYSFWHADCVRKIGLKAFTERYMSFCKKHHYIFQQDKPEKLFNASKELVAVFPKEKTYKLLIQQSIQQLNLASEHVERLRREMNELASTLPEYSTVMGIYGVGKTYGPQLIAEIGDVSRFTHREALTAFAGVDPGVDESGQHKSKSNRASKVGSARLRKTLFQIMTTLLQNAPEDDPVYRFINKKRSQGKPYYVYMTAGANKFLRIYYGKVKECLRNLEQTE

SEQ ID NO: 196897 - protein, 416 aa, unidentified
MEVLHQRCAGLDVHKETVVAGVRLSIEGKVVADVKTFATTTQGLLALSDWLCEHECTHIAMEATGVYWKPVWHVLSDGEFELVLANAAHVKNVPGRKTDVNDAMWLAELLAHGLIRASFVPDGQTQELRALLRTRKQLVRERTRHTQRIHKTLEDANIKLDAVLSTVLGKSGRAILGAIVAGVSDPSQLAKLANANVKCSQDELREALRGRVTRHHRFLLQLHLGQIDGIDAAIATIDREVDEGLAPFRVAVELVSTAPGVNTLSAQAIVSEIGTDMSRFPTAGHLLSWAGLCPRNDASAGKRRSTRLRKGAPWLKTTLIQCAWAASRTKASYLQAQFLRLRARRGPQKAICAVAASILTAIYHMLKNGTPYQDLGPDHFQRRSKTTHAQRLVKRLQHLGFAVEIKRVATASASVS

SEQ ID NO: 196898 - protein, 348 aa, unidentified
MMVVLGVDAHKRTHTVVAADEAGVSLGEVTVAATTAGHLRALRWAARWDERRWALEDCRHLSRRLEAELLGAGEVVVRVPPKMMAGVRRSARTRGKSDPIDALAVARAAMREPGLPVARLEGPAREIRLLVDYREGLVRERTGLQNRLRWRLHELDPELDPAPGSLDRYVVLDGLIEALDAYGGVVAELACREITRIRDLTAEINQLERHIAARVGEVAPSLLEVPGCGALTAAKLVGEAADITRFHSRDAYAMWAGVAPIPVWSSNTERFRLNRGGNRQTNAALHRIAITQMRIHPGARKLITKHLSAGKTKTEALRILKRRLADVVYRTMIKDTKQLSQAAPARAA

SEQ ID NO: 196899 - protein, 410 aa, unidentified
MEVLYPHCAGLDVHKDTVVACVRHIVNGTVRREVRTFKTTTTELLALSDWLAAEKCTHIAMEATGVYWKPVWHILSDGNFSLVLANAAHVKNVPGRKTDVNDAIWLADLLAHGLIRGSFVPDPQTQEMRNLLRTRKQLTRERSRHVQRLQKTLEDANIKLDSEISDIMGLSGRKMMEALIAGESDPEQLARLAHRRIKAPPEALREALRGRITPHHRFLLRLHLQQIDAIDKVIADIDREVDAVVEPFRTTVLLLTTIPGVDELSACVILAEIGRDMSRFPTAGHLISWAGLCPRNDESAGKRRSTRMRKGAAWLKTTLVQCAAAATRKKASYLQAQFHRLRSRRGAKKAIGALAASILTIVYHMLLGGELYRDLGPDHFDRRAKATQTKRLVTRLQNLGYAVHITPLPA

SEQ ID NO: 196900 - protein, 373 aa, unidentified
MKYSTVYVGMDVHKETFSVCCFTNEKEEAEYCQTMDAHYSKVLNYIEAMRFHYGEEAMFICGYEAGCLGYTLYHQLTDHGIKCVILAPTTMPKPTNEKKMKTDKRDARLIARCLAHHDYKSVYIPTEHDEQVKEFIRMRDDHNLALKKIKQQILSFCLRHNYRYEGGRNYWTQKHLDWLRALEPEEIYKEILNEYLLTYQTLADKIERLDRRIEELASDEVYNDKVNKLVCFLGVKTHTALSVIVETGDFKRFKDARSYSAYLGLVPGENSSGPKKNGLSITKAGNRHIRRLLVETAQSYTRGQVGYKSKALKARQKGNASEVIAYADSSNERLRRKYYNMTLRNNKRTNVAKTAIARELSCFIWGMMTANYI

SEQ ID NO: 196901 - protein, 355 aa, unidentified
MQKYKVSFKGQNIYVGIDVHLKTWHVTTLTESGCKYSFSQHADAKELFDRLNKKFPEAHFKSAYEAGFCGFSAHYALTEQGIENIVVHAADIPTTGKEKALKTDAVDSEKIAWALKRGELTGIYIKDKRYMDDTNLMRLRQRFIMDLSRQKNRTKHLLYTQGVTYPERFRKNSTHWSRNFMKWLREEVELLSEQKMSLILLCEQVENTRKAILKVTREIRRLSTTDRYKKNYNLLITVPGLGLITSMSVLTELDNNIMRFPNERSFVAILGLIPTCHDSGDRKVSGEKINRGNKHLGPLIVESCWIAIQRDIELSAYYSKCCQSMKPHKAIIKVARKLACRAYAVLKTKARYALP

SEQ ID NO: 196902 - protein, 408 aa, unidentified
MDQQIERCAGLDVHRDTVAAGVRVPGSNGRRRQEVRTFGTTAAELLALRDWLEAHGVTHVAMESTGVYWKPVYYVLEEAFTCLLVNAAHIKQVPGRKTDVKDCAWIAQCLECGLLRGSFVPPAPIRELRDLTRHRKVLIQEKTRAANRLHKLLQDADIKLASVATDILGVSGRAMLEALARGTTDPVVLADLARGQLRKKLPALRQALAGRFRPHHAFLLSQLLAHVDYLDEAISLMSAEVEQRLAPFAEVLMRLDAIPGINQRTAEVVIAEVGVDMSPFPSDRHLASWAGMCPGNNESAGKHKTGKTRKGNRWLRMALIEAASAAIRTKDSALGARYRRVMRHRGHHKAVVAVAHAMLRAIYHILAEGTTYRDLGAHYYDRRHTQRVTRRAIQLLERQGYSVLAPAA

SEQ ID NO: 196903 - protein, 340 aa, unidentified
MKLYGAIDLHSNNNVTVLINEKDEVVYRKRLPNDLKLILGQLAPHQSKIEGIVVESTYNWYWLVDGLMERGHRVHLANTAAIEQYSGLKYTDDDSDARWLAQLLRLGVLPQGYIYPKEQRPVRDLLRKRSQLVRYRTANLLSIQNLFTRNTGQSMSANQIKGLQVEEIDGIVPANDLALAIKANLSVMRSAEEQVEVLEQTVTGRVKLRPEFRFLKSVPGIGPILSLTIMLETGDIRRFSTVGNFASYCRCVGSQKLSNGKRKGSGNTKNGNKYLSWAFVEAANFAIRFSPKVRSFYQRKKAKSHPVVAIKAVAHKLCRACYYIMRDRVPFDLKKAFSAK

SEQ ID NO: 196904 - protein, 340 aa, unidentified
MNIKRLAIDLAKDVFQLYGVDEQRKQVLEKRIKSRQKFVEFVTKLGPCEIVMEACGGANYWARKFTDMGYKVMLISPQYVKPYIHRNKNDYRDTHGIMEASYWSGISFVAPKTVEQQDIQSLLRIRSNYLDMRTAISNQIRGLMYEYGVTVKVGYEALRSTLPILFDRDNENGLTIAMKELIEGQYDMLLIIGIQIDALDIQIKQSFSNSEVCQRLQKIEGIGPISALAIIALVGEGKGFKNGRHFSAYLGLTPKQHSSGNRECLLGISKRGDKYLRELLIHGGRAVVRTSEKKTDPRSTWVNRIKTQSGFNRAAVAMANKNARIAMAMILSGETYKRAA

SEQ ID NO: 196905 - protein, 356 aa, unidentified
MDKNITAKGLLTIALDLGDKHTEACVMDGSGEVIETFRVRTTQVALDRALGRFEAARVVLEVGTRSPWVSRRVTALGHEAIVANPRRVRLIAENDSKNDRFDAELLARLGRIDPSLLSPVVHRGEQAQRDLVLLRARDGLVRARSQLINQVRGFAKSLGSRCPASSAEAFPRRVQAALPGDLFPGLSTMLAMIEQLTAEIRSMDREVERLCKERYPETAVLRQVKGVGAITALGFILTLEDPHRFAKSRSVGAYVGLRSRQRDSGEQRPQLRITKAGDALLRRLLVTAAHYVLGPFGPDAELRRFGLRLAERGGKSAKKRAVVAVARKLAVLLHRLWLTGEVYQPLGYGRDIAQAA

SEQ ID NO: 196906 - protein, 319 aa, unidentified
MTQLICGVDVCSTSLEASLGPDGAAASFPNTPEGIALLADFCREQGATLVAMEATGGYERQAWALLSEQGIDVAILNPRAVRQFASGMGRLEKTDRIDAAMIAWFAEVKQVQPTVLATASHRQLRALSTRLRQVTQLRTAQLNQQRLVDDASVQNTFDDLLALVNRQISELAGQIAALIQADPLWRELDQAFRSIRGVADRTVARVMAEMPEIGTLPHKTVSKLAGLAPLANDSGKHHGRRPVRGGRSSIREILFFVASVAGRYEPDFIAFKQRLADQGKPPKVIRIALAHKLLIRLNAKARDVRQTMNLQTLTHLPTA

SEQ ID NO: 196907 - protein, 362 aa, unidentified
MGSSKIIALDLGKFKSVCCVMDAATRESAFETVQTSPALLHELLVKHLTASASDTLVVFETCDLAGWVHDLCLTLGVRVIVTHAHGEAWQWRRVKRKTDRDDALKLAKLALLDQLGPVHMPTPDQRQRRRLVLHRRSVVSRRTQSRNAIRAIFNQQGLSLAKGGKQWTIAGIAQLREHARPLADCDLADLWRGRLDVELSMMQAADAQLKALDARLDELARDDPRIKLLQTVKGVGPRVAEAVVLHLDDPHRFKSADHVAGYAGLVPKQIESGQMSRFGHITRRGPALLRSMLVESAWVVWRHNTWAQAWVAKISRGSRARRKIAMVALARKLLTMLWSMLKHNRPFRTPAIGPPLAAACPT

SEQ ID NO: 196908 - protein, 338 aa, unidentified
MAQDELVVCLGRMYDDWIPELYAYKTFANRPGGYKALVQWVKKPAGQGPAQRYVMEATGVYHEKLAYFLEDHGEQISIVLPNKISNYARTLDVKTVTDKTASEAIARFGLERELETWKRPKEIFKRLRQLTRERDQIVEERTRGKNQLHAEKTEAEPNKNSLKRVNKRIQLLDKQEAEIQKEIAQIVKQDKDISQLVDRICTIPGVGLLTAATILAETNGFDLIRNRRQLASYAGFDVRQKQSGTSVKGKPRISKKGNKYLRKAMHLPALAAIRHQENLKGLFARLVSRHGIKMKAAVAAQRKLLELTYTIYKTNTIYDKNHLAKENQRAAEGSMVAA

SEQ ID NO: 196909 - protein, 399 aa, unidentified
MECPYAPAERPRPAPGQALSRSLVALDQDSTIIAVVELSQSSWLVAGVLPGIERQPQKKLEPSAERLLGLLHRWRDEAVRAGKKITRIALAFEAGRDGFWLARWLNARGVEAHVIHPSSVAVSREHRRAKTDRLDTELLKRGFLGWLRGERGHCSMARVPTIAEEDAKRPNRERECLVGERTRIVNRMKATLARLGVRNFKPTLRKAAERLATVHTPEGMPLPPNTLAELQRDMARLGFVVSQIREIEQARQKRLEQETETEPHAMVRQVARVIGIGIETADMLVNEVLSRPMRDRKAVARYAGLTGSPDESGARRREQGLARAGNARVRRGMIQLAWRFLRFQKESALAQWYRARTADSRLGTRKTMIVALARKLLIALWRFVTTGETLEGVILRPAG

SEQ ID NO: 196910 - protein, 342 aa, unidentified
MLYVGIDVAKNKHDVTALNVPGKTVLKPLTFSNNKAGFELLDLSFRQLNQDCLIALEDTGHYAFNLLNFLHEQGYKVYTYTPLLIKEFAKSLSLRKTKTDKKDAHGIALKLLSDPNREQFQHDNRQVELKILARHIHRLKKKQSDWKVQYTRCLDIIFPELDKIVGKHSEYTYQLLTCYPNPQKRLEAGFDKLIEIKRLTASKIKDILSVAPRSIGTTSPAREFEIIEIIKHYKRLIDKAETCVNDLMAEFNSVITTVTGIGGRLGAVILAEIRNIHAFDNPAQLQAFAGLDSSIYQSGQIDLAGRMIKRGSPHLRWALIQAAKACARFSPAFKAYLKTKLE

SEQ ID NO: 196911 - protein, 403 aa, unidentified
MNAVGIDVSKGKSIVSVLRPFGEVVISPFEVRHTSSEINGLISSLSKLEGETKIVLEYTGRYHEPVAHWLSNAGFYVSAVNPKLIKDFGNNSLRKVKSDKKDALKIARYGLDNWNDLRQYDLMEKLREQLKTMNRQFDFYMKHKTALKNNLVALLDQTYPGANTFFNSPVRKDGKQKWVDFVTTFWHVDCVRSLSLSVFTDRYKRWCLRNSYNYQPEKPAQILEASKELIAILPKDKMTKTLIKQAINQLVTISKTVEQLRYQMDQIAAQLPEYPIVMAMKGIGPSLGPQLMAEIGDIRRFSHRGALTAFAGVDPGVNQSGTYNQKNVRTSKRGSAPLRKTLFQVMDGLLKSSPENDAVYKFISKKRAEGKPYYVYMTAGANKFLRIYYGRVKEYLLSLPNEE

SEQ ID NO: 196912 - protein, 313 aa, unidentified
MIIPPRYVGIDVSKKHLDIFDEADGVSRRIANAAQAITQQVARWRCDALVVFEATGAYDLALREALSQAGVRFARINPARARDFARASGQLAKTDPIDARMLAAFGRVMQPATERAANPARNALAGLAKRRDQLVLMRAQEKNRRSEADDRTMAERISRLIEVLDGEIAEIEADIKALTKAEPEIADDARLMRSLPGVGPVACMQLIAKMPELGHVGAKQIAALAGLAPFNVDSGAFRGKRKIAGGRKRVRDALYMAALNAVRRADPFKAFYARLRQVGKPAKLALIAVARKLLTVLNAMMRDRKPYLQTEPT

SEQ ID NO: 196913 - protein, 334 aa, unidentified
MNYIGLDIHKKNTQACMKNEAGKVLLTGRFPSRPKDLNAFIEKVEEAGGPASFVIESTGFCIPVYDIIAGRGHQIKVAHPLKVKALTAGRAKTDKNDAEMLAELLRLNAIPESYIPPAELRELRELTRFRRSLVRNSTEIKNQIHAFLASRGIETPPEHRSPFSKKHQDWLRSLHLVQIDDLLDIYLLLLTKIEKVEGEIERSNQRKDDVELLKTIPGVGDVIANTLVAEICDIRRFSSPENLFSYAGMVSSIHQSGEKGWAGPITKQGNARIRHIVVEAAYSHVRCSKDSDLTRFFERKKSEKGTKKAIVAMARKLLGVIYQMLKKREVYHAH

SEQ ID NO: 196914 - protein, 328 aa, unidentified
MTMNPALSAFNHVVAFEVAKDSLVIHVLPAGKQSFSANKPKAIREALIAEMRRNAEASLGPLLVVCEATGGYERHVLEVCQKLGIAAHKAHGSRVRYFARYLGLLAKTDPIDARVLALYGLKTTDLRLYVPSAPEALALRDLRTRRDQLQQMLFAESNRLEHARHLSVSRSLKAHIASLRKALAALEAEIAACLKASETLARKARLMQTLKGVGPATVAAILAYMPEIGAFTKAGAACMAGLAPIDDDSGKLKGPRHIEAGRAAVRKALYMPALVAIQHNPVMRLFADKLKRNGKPAKVVIAAVMRKIIVTLNAIVRSGEPWSHAKIA

SEQ ID NO: 196915 - protein, 415 aa, unidentified
MALKIVYKICCGIDVHKNFVVACIASTDGKGVTTYESHRFSTYTRGLKNLLQWLLKHNCKDVCMESTGKYWIPVYNVLENDCMIVLAHPKYVKAIRGKKTDKKDAKWIADLFKHDLVTGSFMPPADIRQLRDLMRYRFKLTCFKSSEKNRLQNCLTVSNIQLGNVVSDTFGKSAQAILDKLLENPADTSFDLEPLVYKSLKKKLPELRDAIDGYITPEQAGKLKVIKAHYENLESRKAELEELILALAAPYQQELAILQTAPGIRSDFTAIGIISEIGTNMEAFPSAKHLCSWTGLAPTNNESAGKKKSVRVSKAGCYIKPLLVQCANAVIKSNKHPEFRNRYLRIKKRRGHKKAIIAVARMLLTALYHMLKNGENYNAELYRKSEVPPVDREITVEQAIIIARNQGYKIKSATA

SEQ ID NO: 196916 - protein, 366 aa, unidentified
MLRPARKAPAQKAHSENPMNALHYIGFDVHKKSISFCVKTAAGEIVEEGMIPAQREVLRQWARARRQPWRGAMEATLFSGWIYDTLKPYSEQLEMAHPAKMKAICAGKKKSDTIDARTIADLVRCHLLPACYVATPRIRELRRLLRYRSLVVSEAVRMKNKMAGLLMETGALYVKEKLHRKKYFASLLEELEEVPESVIDLLRLSRGALEMFESTQKRLVRELLADPELAQRVERLMTIPAVGEITALTWALEVGDPQRFPSCSDAMSYCGLTAALKSSAGKQQRGPISKQRNHWLQTTLIEAAKLAPRWNPQLAALHARELERGHRNRATLAVARKLVTYLLAVDKSRQPFQLRVPLEEPTQKAA

SEQ ID NO: 196917 - protein, 344 aa, unidentified
MTYFTALDVSLRFVSICIVDDTGEVRYEAKVPAEVHRIVGCLRKFSDQIETVGFEAGALTQYLTYGLQAAGFEVVCLEARQVNAALAAMRNKTDRNDARGIAQILRTGWYSRVHVKSLESHQIRALLASRKAILKKCVDLENELRGLLRVFGIRLAPKVPHGAYDAVVRKQVEPEPLLARTLLPLLEARQVLYRTYLKLDNEVKAIVRHDRICQQFMSVPGVGAITPLTFKAAVDDPHRFRRSRTVAAHFGLTPRRYQSGEIDNPGRISKAGDPEARCALYVAAHSLLSRSATWSSLKAWGVRLAKTRGHRRAVIAVARKLAVILHKMWIDGTEFRWSAEPVQA

SEQ ID NO: 196918 - protein, 389 aa, unidentified
MIFVGSDVHVRNSYFYATDLEGRRLGHGRVANDAAELRSFCERLLVESGGEVQPIRFVLESTTNSRAVQRQLQQAAGAAGFEQVQADVLDARKLRIIAESVAKCDALDARVLNQLARANLKLPTCYMPDDEEFALREHLRARSDLVRMRTMMKNRIHAVLHRRGILTPKEGLFTKDGRKFLDQLALDDAGRTIVQRYLSALDLFESLIDESDKDLKSVKRRPRWTKPAALLETMPGIGLITALTILAELGDLKRFKSRAAVANYAGLVPVIRDSNSKHYSGGITHRGSAHLRHVLSEAAWTAVKRVPVYEALFTRIAGRRGKQVAIVAVARRMLEDAVRMLWKDEAFRFVPVKSDAASNPSQPSGTPGSDRSATATKHAGAELASSVAG

SEQ ID NO: 196919 - protein, 411 aa, unidentified
MTCGIDWAEDHHDIAVVDTDARLLGKLRIGDDATGFQDLLRLLAEHGDSPEDPIPIAIETSRGLLVACLRASGRRVYAINPMAVARYRDRHAVSRKKSDHQDAVVLANILRTDADLHRPLPDDSDLVRAIAVLARAQQDTVWDRTRAHNRLRSHLREYYPAILEAFADKRERLLAREARAILAVAPTPGEAARLTRSRLKVAVTRAGRQRRIDAETDRLLEVLRRTRLRQPGLVEAAMGRQTLALLAQLDAACHACDDLARATEELFLQHPDAEIITSFPGLAVLTGARILAEIGDDRTRFDTARDLKAYAGSAPVTRESGRSRRVSHRRIKNSRLAATGRHWAFAALTASPGAHAHYNRRRETGDRYYAALRHLFNRMIGQLHHCLTTHQKFDETTAFTPPTKPQLATAA

SEQ ID NO: 196920 - protein, 348 aa, unidentified
MSKSSQYVGLDVSLKETSICIIDDAGKIVWRGRVDSTPEAIATAVKQHAPNAVRIGLESGQLSSWLFHELKEAGFPVICVDARHAKAALSLKVNKTDANDAFGLAQIMRVGWYREVTVKGLDCQAVRALLVARAQIVSQITTLKNCVRGILKTFGRVLPKGLRSQFPGRVRTAIDGHPVLGAIIEPTLRVLEAMRAQPLVYDRAVIQRARSDDTARQLMSAPGVGTVVALAYMTGVEDPARFKRSSSVAAYFGMTPRRYQSGEVDHAGRISKCGDGMVRGLLFEAAKVWLSRSARPSALKTWGEALGKRIGAKKATMAVARKLAVILHRMWTTGTTFQWNAEAASPAA

SEQ ID NO: 196921 - protein, 404 aa, unidentified
MGESTGGTNDSGASVVIGMDPHKRTVTIEVMSASEQVVGHGRFTTDEAGFAAMLDYASRWAQRMWAIEGCEGIGRHVAQRLLPLQETVVDVPAKLSARMRVYATGQGRKTDDTDAHSIALVGVRMAGLRTVKHDERLEILRLLVDRRRRIGADHTRVVCQLHGLLLELIPGGAKRDLSAAQARRLLASVRPRDAVAKTRKRIALELVVDLEKTYQRKKAANKELVELVRDTGSALLGLHGIGPSGAARLLVEVGDITRFPDRGHFASWSGTAPVDASSGDNTRQRLSRGGNRNINQVLHIMATVQLRTRTTQGRAYYDRKVAAGKTPNEAMRCLKRRLSDIVYRTMLGDVIASGAARPGTGPGGHGGASLTSSAAGSQPHTDTSDQSLPGPATTKATADLPRAS

SEQ ID NO: 196922 - protein, 343 aa, unidentified
MKLTRVGVDLAKNIFQLHGVDRGDRPVWCKRLKRNRWIKEIEQNVEPGVEIGMEACGGAHHWARLLQSKGYRVRLIAPQFVKPYVKSNKTDANDAQAVCEAMSRPSMRYVAVKTIEQQDIQAVHRVRASLISERGAKANQLRGLAYEYGLVAPREIAALRLAVPAWLGDACNGLTVRLRALLSGLYTDLRALDERVRELDKEIRAIGRENEAVGRVQQLRGIGPLIASALVAMIGDARQFKNGRHVAVALGLTPRQHSSGSKERILGISKRGDSYVRTLLIHGARSALRTAPGKDDRLSRWALALAKRSHANVAATALANKMARVAWAMLKHGTAYEPNALAA

SEQ ID NO: 196923 - protein, 373 aa, unidentified
MSIVMGVDQHRAQITAEWIDVVSGEISRARVSPADRTGVRRFLERFAGQQLEVALEATTGWRFFVEELRAVGAVVHLAEPAETAARRGNKQRAKTDRADARHHRELLLAGRLPESWIPPDHILDLRALVRLRHTLIEQHSEWQQRIQAVLYHHGCPQRRQLMKSEGRDWLQALALPETARQQITVSLAMTDAFDVQLDPLSRQLRSYARRQTGCKALIDQYYGIGEMCAVTILAELGDCRRFDNSRDAVRYAGMDITVYQSDRHRAPGRLSRQGPPALRWALYEAAHAARRPGSPDRKYYEQAAERLGGNRACLALARKLLKRCYHTLRELGEDALAPPTDERDSATARRASSGTPRRTERPATSESADALAA

SEQ ID NO: 196924 - protein, 337 aa, unidentified
MKVTLIGIDLAKSIFQVCGVNQAGKRIFNRQVRRAMLLELLVQHPDAALAMEACSGSNYWGRELQQRGFQVKLIPPQHVKPFVKGNKNDRNDAFAITEAARRPNLRCVEPRTLAQTDMIQVHRVLDRMIRQRTALINQIRGFLNEYGVVVSRGKEKLLAALPDLLEDAQNGLTPASRALYQAMYDEWRQMNAAIERVEKVLKGQAKADEVAQRLMQMKGVAEKIATATIACAGNGTSYRSGRHFAANLGLVPKEHSSGGKQSLGGITKRGNRYLRRLLVQGAWSVIRNVDHSDDRMSRWAKQLIERRGKHRAVVAVANKMARIMWSMLYHQTEFRAN

SEQ ID NO: 196925 - protein, 339 aa, unidentified
MKAYAGIDLHSRNNYLAVIDEQDKRLFGKRLPNDLNITLTALEPFRKNLTGVVIESTYNWYWLVDGLVDNGYTVHLANPSAIKQYEGLKHTDDPWDAYWLAHMLRLGILPKGYIYPKDQRPARDLARRRLLFMRQRTAQVLSLQSMITRHLGVNMSGSAIKALTGDQAAELFDTKYQVMMAQNSIATIRFLSGIISDIEKELLGSIKLCQEFQRLKSIPGIGDILALTIMLEVGDIERFPKVGNYSSYCRCVDSKKLSNKKKKGENNRRNGNKYLGWAYVEAANFAIRFCEEAQRFYQKKKAKRNGVVAIKALSNKLAKASYYIMRDNKSFEVERLFDN

SEQ ID NO: 196926 - protein, 360 aa, unidentified
MTTTMTCVGLDVHARSIHAAAVELVSGELQRARFGGGSEEVVAWLAGLPRPLRVCYEAGPTGFALYRAARAAGIDVCVVAPSKTPRASGDRIKSDRKDAELLARLLLAGQLKPIAVPSPALEAARHLCRAREQVRADLMRCRHRVSKLLLLHGRVYPEPTTWNERHRRWLGGQRFDEAVAELAYLDTLAAVDGLVARKRALDERLSRIALEGEWAETVARLRCFRGIDTLSALVLALEIGDFVRFGRPAQLASWLGLVPSLDQSGESRHQGAITKTGSSHARRLLVEAAWQYLREPRIGVSLRNRQQDQPAQVLQIAWRAQHRLYRLQQRLRGRGKPGNVTTVAVARELACFLWAAAVAD

SEQ ID NO: 196927 - protein, 344 aa, unidentified
MDYYVGLDVSLRSVAVCVIDVDGKHIFERSLACEVEDILTCLRDVPAGQYRIGFESGAMSQHLYYGLRNAGLDVVCMEARQVNAALSAMRNKTDKTDARGIAQVLRSGWYGKVFIKSREAHALRALLSSRKAVQKKCIDLANEVRGLFRVFGLRLPSRVDQGSFDERVRPLIEADPDLSRALLPLLDARVMLYKTYRELDRRVKQAASHDEICLRFMAIPGVGPIAALTFRAAVDDPARFTSSRTVAAHFGLTPRRYQSGEMDNPGRISKAGDSDVRATLYAAANAMMMRAVASSEIKSWGLRLMRRKGRRRAVVAVARKLAVIMHRMWADNTEFRHGKVEGAV

SEQ ID NO: 196928 - protein, 322 aa, unidentified
MNTAAMPLGIDVSKAKLDCALWLGSKYRSKAFANTPEGFARLSEWLHHHGADQVHVCMEATGTYWEAAALYLADAGQRVSVINPALAKAHGQSLGLRSKTDALDAKLLADFCREKQPPMWTPPSEAERRLRALVLRHQSLVEMQTQEKNRCESLREDVRTSVETHLAWLASELARIEQAIARLLDDDDHLRGQRALLDSIPGLGERTIAVLLAYGVSSERFQSARQFVAFAGLSPRLHQSGSNVRGKPRLSKIGHAFLRRALYMPAMVTLYKTAWGKRFQQRLAAHGKPPKLIIGAMMRKLAQVAFGVIKSGKPFNPALHGA

SEQ ID NO: 196929 - protein, 400 aa, unidentified
MLSIGIDVSKGKSTVCGMKPGGEIVYAPFEVQHTREGMSELVSLLRSSGEEVRAVLESTGSYHCPVVAALLENGIFVSVVNSLRMKRFCSQSIRKVKTDRIDAMQIALYGLAYWQELQPARLPEDTYRELQLLARQYYQMTSMLIKAKVDFNALCDQVLPGMQELMNDHAGRHKLSDFVLRYRHTTHILEMGETRFRKDYCKWAEKKGYRNCERMAAHIFATAQNGIPVLPNAPSTQIVITEAIRVLHTVEASRDAILTQMQALAKTLPEYSLVREMPCIGDTLAPRLIAEIGDVRRFHSKRALIAYAGIDAPPYQSGKFRANNRHISKRGNRYLRKTGYEVMQSYVMHKPANDPIFTFIEKKRSEGKCGKLAMVAGLNKFLRVYYGKVTELYRSSSAIE

SEQ ID NO: 196930 - protein, 408 aa, unidentified
MNTLYVGIDVSSKSNVVYLMLPNGDKHSNFSIANSHEGSTQLVKRILSALTSHSLDTVLIGLEATSVYGDNLVYFLREDATLASFNRKIHVLNPKQVKKFHDAYNDLPKNDYVDSFVIADCLRFGRINKEVYLGDYRYKALQNLTRARFFAVQNLVKEKQRFMNVLFKKYSTMTQEKVFSDTFSTTALAVYDEFESAEALANMDLQELTDFIMEKGKNRFPDPDAVAKAIQKAARSSYRLPKTVNDSVNQVLSISITSMKALESQIKELDKAIAAQMELLPNVLISIPGIGPVYSAGIMAEIGDINRFDSQAALAKYAGLAWKQHQSGGFEAEVTRLIPSGNRFLKYYLCEAAFSLVRCDKEYSDFYRLKYKGVNRCQHKRALALTARKFVRLVFRLLKDNRLYCPAK

SEQ ID NO: 196931 - protein, 318 aa, unidentified
MTSQHLVLAAGIDVGQRFLDVGLAPSGKTFRVPNAADGIAAILERLAHEGVGRVVLEAIGPYAQRLVSALAIAGFEVGLINPRRIKAFREFEGRRAKTDRLDARLIARFALAMTDAIRPLPSAEQLALKALSTRRRQLTEMIAMEKTRLKQAAEPLLLDSHRAAIAALSAQCRDIEAELARRIADDPQLVSTFEILTSVPGIGPRVATALITELPEIGRADRRAIASLAGLAPYISQSGKAPPRAAISGGRPCVRTALYMAALVASRHNPEMKRAYLNLRSQGKPAKLALIAIARKLLVTANALVKSNTRYTPQPLDS

SEQ ID NO: 196932 - protein, 376 aa, unidentified
MIKDTLYVGLDTDKKSIAVALAEALPGGEVRAWGKLANDARSVLRLVKRLQAGGRDLEMCYEAGPCGYGLDRLLNGQAGVRCTVVAPSLTPRRPGDHVKTNRRDAIMLARLLRAGELTAVWVPEPAHEAMRDLVRARGAAAGDLVRCRQRISGFLLRQDIRYAGKPWTRKHRAWLGQRAAALPLAAHRLMLGEALQALDEAIARRDRLTDHIAELVPGWSLAWLVDALQALRGFALINAATLAVEIGDPRRFATPRQLMAYLGLVPSESSTGDKVRRGGLTKAGNGRTRKALIEAAWTYSRPARAPSDTARHAPAVVAIATKARHRLSQRYRRLIARGKRPVIAVAAIARELSGFAWAIAQVAGPTATTPQPPAKR

SEQ ID NO: 196933 - protein, 311 aa, unidentified
MMDAQFVGIDVSKDRLDVHVLPKGEAFAVARNGEGLAALNDRLVGLGVVSVAVEATGGFETVVAASLAGAGLPVVVVNPAQVRAFAQALGKRAKSDPIDAAVVARFVEATRPEIRPLPDEQTQALADLVARRRQIVQMIAAEHQREKRAMIKRVKRSIQRLVLALEKELAELDKTIDDMVRGSPAWRRNEDLLRTVPGVGPIIARTLLAEMPELGTLDRREIAALAGLAPWTRQSGKWKGKSFIGGGRSSVRTVLFTGAMAAARFNPALKAFHQKLVDAGKPKIVATIAVARKLLTILNAIIRDQKPWKPA

SEQ ID NO: 196934 - protein, 343 aa, unidentified
MSEISMIGLDLAKNVFQIHGVDRSGETVLRRQLRRGALEKFFAQLPPCTVGIEACGSAHHWARVIGRYGHQVRLMPPAYVKPYVKRNKNDGRDAEAICEAVGRPTMRFVPVKSVEQQATLAVHGTRSLLVRQRTMAANALRAALSELGIVAAQGLKGLHDLMARLEAPNEEIPEMMRGALLVLARHWQALDADERALEQQIAKAARADCEARRLMEAPGVGPIIATTVLAKVPDAKVFRSGRDFAAWVGLTGKDHGTGGKHRPGRISKQGDRMLRALLISGASAHLRQQIARGVEDPWLRELLARRPYKVVMVAFAAKTARILWAMLVKGEHYRDRVSASAAA

SEQ ID NO: 196935 - protein, 331 aa, unidentified
MYVGIDYHKRYSVATKMDEHGEVMERMTLRNDPETLQGYAATLPAGSQIALEATGSWYYFYEVLEDSGHDIHLAHPLKTRAIAEARIKTDTIDATMLAHLLRTNLLPRSYIAPRHIRDLREILRYRASLVSMRVSVKNRIHALLSKNGSIVPYSDVLGTKARRYLANLPLRDSYRQCLEGYLQAAQALTGLIKEVDTTITSIAEDNDQAMRLTTIPGIGYFSALLILSEIGEVQRFSSAKKLCSYAGLVPRVHSSGGKTRYGSITKQGSKWLRWILVETSTHYVNSCPRLKRLYETVAHRHGKHTARVAVARQMLTIIYCMLRDHRDFVRG

SEQ ID NO: 196936 - protein, 411 aa, unidentified
MVKENFIYVGIDLHKETHTAVMIDCYNQKLGEITFPNRPADFPKLVTKVKKCNTDAKEVVYGLENAYGYGRPLAVWLIDKGYFVKDVNTAISHRQAKHRGAMYRKSDSDDAEAIALATLNMLDKLPDACPNDAYWSLGQLVHRRDNIMKQRTRLVNQLHEQLCIAYPSYKQFFNDISRPTALYFWEHYPSRKYLKGKSVEDLRTELVPVSHNRCSTKNCEKILDAVASDKVKNNAYQDARDMVTLSIVSDLQHYDSQLAEVDKMLEQMYKMLGCTLTTIPGVNVITAVKILAEIGDIKRFSNANKLAQFAGIAPLHLSSSGKGKDVATKQGNRRLQATIYFLAIQMVQLSSKGTPRNPVVRAYYEKRKAEGKTSQQALICISRRLISIIYGMLKNGTEYRMPVMENAGENR

SEQ ID NO: 196937 - protein, 408 aa, unidentified
MNQDSGFDIWCGLDVGKTGHHACPLDAAGRKVFDKPLPQDQKRLEELFDKLQTHGRVLVIVDQPNTIGALPIAVARSMGIQVAYLPGLAMRRAADLYPGNAKTDARDAFVIADTARTMPHTLRRVDAGEETLSELKVLVGFDEDLAAEATRLSNRIRGLLTQIHPALERVVGPRLTTKQGLAVIEQLGGPQTMAAASKSKLLRVISKAYPRGAQEFADAITTALAEQTVIVAGTAAAEQVLPQLAASLRQTLDQRHALAAQIEQVVDAHPLAAVLTSMPGVGVRTAARILLDVGDASQFPTAGHLAAYAGLAPVTRRSGTSIRGEFPARAGNKHLKRALFLSAFAALRSDPTSKAYYDRKRAQGKKHNAALICLSRRRCDVLFAMLKNREPYRAPTPTREPSPLPLAA

SEQ ID NO: 196938 - protein, 338 aa, unidentified
MSIVMGLDQHRGQITGEWIDTDTGEVQRTRVTPADRAHVRKWLTRFRGSELEVALEATTGWRFVVEELRRVGASVHLAEPAETAGLKGPKKRAKNDRADARHLRELLMVKRLPESWIPPDHILDLRARVRLRHTLSEQRGEWQQRIQATLYHHGCPQRRQLMTGDGREWLAAQSLPAAAREQVTVALAMIDSLDRQLAPLDRELRAYARRQAGCKALMAHYGIGPLVAVTILAELGDCTRFSSSRLAVRYAGMDITVYQSDQHRAPGHLSRQGPPALRWALFEAAQSACRRGSPDLEYYRQAAARVGHNRACLSVARKLLKRSYHTLRELGEEALQPA

SEQ ID NO: 196939 - protein, 410 aa, unidentified
MEVVHARCAGLDISKKDAKVCVRIAGSGRRKTTETVTTWGSMTNQVLALREHLVAARVTCAVMEATGDYWKPFYYLLEDAGFELMLVNARHVKNLPGRKSDVSDATWLAQLGAHGLVRGSFVPPEPVRQLRELTRARTAITRERGREVQRLEKLLEDAGIKLSSVASDITGVSGRAMLRAMVEGQRDPVVLADLARRRLRSKIPALTEALTGRFTEHHAFLAGVHLDLIDRHTAAIEEITARIEVVIEPFQAFRELIRTIPGIDTLTADVVIAETGADMSRFPTAGHLASWAGTCPGSNESAGRIKSTTTRPGNPYLQGALGAAAMTCARTDTYLGARYRRIAGRRGPQKANVAIQHKMLITIWHMGTTGTLYADPGADYYTRAHPERAKNRAIHQLEAMGYRVTLDQAS

SEQ ID NO: 196940 - protein, 433 aa, unidentified
MNSPHPYDLVLGLDRSDQKADLCLIDTHTGQRRSVVIDTAPEALWGWLLQLRQQHPGARVGLCLEQPAVHLISFLEAYAWITLHPINPITLQKYREAFVTSRAKDDTKDAEFLADLLLTHHAKLPVWQPEDSATRAVQQLVFHRRAVVDERTALSNRLIALLKAYFPQALTLCGEDLWRPLATAFLLKWPSLHAVQKARPATLKQFYYLHGSRSQTLLEQRLALVARAVPVTEERAVIESFGLRVQLICRQLQLVQKTIRQFDHQIAAAYAVHPDREIFASLPGAGPVFQPRLLASLGSQRERFDSAASLQCYTGVAPVTKRSGGSCHIHRRYLCPKFHRQSFHEYAKESILWSRWAAAFYLQQRTKGCAHHTAVRALAFKWQRVIWRCWQDRRPYDERIYEAALRKHGSPIVALLDRVELGKSPWKNPMKKN

SEQ ID NO: 196941 - protein, 366 aa, unidentified
MDYGVYCGVDFHARQQTICCLTTEDGVIATYELKHDCKNAVRDFYAQLPGPVLVGLEAGGYSLWFEQLLEELGHEIWLGDATEIRRCARRRQKNDRRDAALILDLLVRGEFPRIHRQAPLSREILRMLRYRHRLVKLRTISKNCLQALAIQSGLSLKSQLFTQAGMQQLTSVTMSPVMQCQREQWLQLLPALEQRITACEKWLSEQAAADPRVRRLRTHPGLGLLTSLAVVHTLDPVSRFPNQRKVAAYGGFDPCEDSSAERKRYLGISKAGSKLLRFLLIEAGQTAVKEDPDLKRFYRRLQQRRNKPKAKVAVARKLLIRSYILLRDEIDYAEFQRRAVAARLARENARLNACPLIEQSASLAGD

SEQ ID NO: 196942 - protein, 431 aa, unidentified
MGDGTRGWRRQQAKAAARVALVDGEPLVVGLDLAESGHQARLETAAGMPLMQAMLRTTAQTERWWSEVEQRRRDGQPVLVGMEPTGVTWKLIWAEVSARGYRPLLVQPLAVRRAGEQLDYQRAKSDPRDAELICHLVRQGDVTRTRLLDEPWASLRSLATKRWQLCRQQGAAQQEIRSLLQLAFPAYLSAVRTLDGLTSQAMLRAGVDPLRLQEISLEAWTTEVRDHLVGTNRMWRRLVATVHRAAEEPGGLASERHAALWRIGDAVERWQLLQRQIAGLDAELIRLLEQTPYVHIARGIRGLSTAMLAALVGLIGDPRDYDSGRCVVRLAGLNPRPWSSGGFVGRTMLSYAGRVELRTVAHQAALSLLVHDPAFRARYRYLTTRTQRPLAARQAICALAAKLLRTVWCLAVSGTSYDRTRAWPGGMPLAA

SEQ ID NO: 196943 - protein, 328 aa, unidentified
MTMNPALSAFNHVVAFEVAKDSLVIHILPAGKQSFSANKPKAIREALIAEMRRNAEASLGPLLVVCEATGGYERHVLEVCQKLGIAAHKAHGSRVRYFARYLGLLAKTDPIDARVLALYGLKTTDLRLYVPPAPEALALRDLRTRRDQLQQMLFAESNRLEHARHLSVSRSLKAHIASLRKALAALEAEIAACLKASETLARKARLMQTLKGVGPATVAAILAYMPEIGAFTKAGAACMAGLAPIDDDSGKLKGPRHIEAGRAAVRKALSMPALVAIQHNPVMRLFADKLKRNGKPAKVVIAAVMRKIIVTLNAIVRSGEPWSHAKIA

SEQ ID NO: 196944 - protein, 315 aa, unidentified
MSIVSTVGIDLAKNVFSVHGVDAGGVVLIRRTVSRAKLAQLIAQLPPCLIGMEACSGAHEWARRFAAFGHIAKLMAPKFVAPYRKGGKNDGNDAEAICEAVARPTMRFVPIKSIEQQSELTLHRVRQGFVEERTAMLNRIRGLLAEFGHVLPLRAAEVRRRVPELLETLPTRVASCVRDLLEHALRLEAKALEYEREIRAHVRTNALAQRAQTRLGIGPITASALVATVGNAHDFKNGRQFAAWLGLVPRQYSTGGKTRLGHITKRGDPYLRTLLVMGARAVLHGALRLNDPLSRWAPSGDRRPASAHCELSTHN

SEQ ID NO: 196945 - protein, 373 aa, unidentified
MENSITYVAMDTHKKQHRVSLVYPNDEQIIEFSVKNTPADIRKMVRKIKRNAPGKVKFCYEAGVCGFTLQRRIETLECKCSVIAPSLIPRKPGERKKTDRRDAKKLLGLFMSDMLTEVYPPDEQQEAARELTRCREAAQENLKRIRHQLQKLLVRHGYVFIDGQHWTQKHLRWLGAVDFDLPLLQEVFDCYFTEMRHCLQRVKTLDRELEKLAQSEAYREVAGALRCFYGIKTLTAMTIITEIFDFGRFASARDFMSYLGMTPSESSSGEKQHKGSITKTGNKRARRLLTEAGWHYRHSYTVSKALNERREGQPQWVIDIADRAGVRLRKRYRRLVNHGKLPCKAVVAVARELAGFIWSVLIEYEARKKRKAA

SEQ ID NO: 196946 - protein, 428 aa, unidentified
MANKKRVVIGGVDTHRDVHVAAVIDDRGKVLDTAEFATTKAGYGRLLVWMQSLGELTKVGVEGTGAYGAGLSRHLRTQGVEVLEVNRPNRQMRRRRGKSDTVDAEAAARSALNGEATVVPKSHDNLVESIRVLRVAFTSARNSRTRVALQIRDLILTAPDQLRGILSPLSTARRVDRCARLRPGSPLDPAEATKLALCTLARRYEALSEEMAELAAVLDELTAKANPALRAAKGVGADVAAILLVAAGDNPERLRNEAAFAAMCGVSPVQASSGLTVRHRLNRSGNRQANHALWRIAIVRLTCDEETKAYSARRQAEGKTKRDVVRCLKRHIAREIFLHLTKPAAIPIGGDLRAARTAARISLDTVSTELGTQPIRISRLERGLDHNSDLAERYEAWLTAKKPRRRLDSHRSIKPGFLWAIIGTCVCT

SEQ ID NO: 196947 - protein, 394 aa, unidentified
MKRESQEEFAAFVGLDWADAKHDVCLQATGTERREFLILEHRPEAIDAWVHTLRTRFNGQPVAVCLELNKGPIVSALRQYDFLVLFPVNPLTVAKYREAFTPSRAKDDPTDAELQVELLLKHRDKRTPLAPQSAMMRTLAQLVEHRRRLVGDKVRLTHRLTSALKNYFPHVLQWFPDTDTVLFCDFLSRWPTLKAAQLARRTTLEAFFRAHHVRAAEVIASRIQAIKSALALTTDDGVITPNALLVQALIAQLRVTLQAIADCDTAIAQRAQEHPDFPLFDALPGAGAVFAPRLLVAFGEQRERFTSAEDLQKYAGIAPVTERSGKKSWGHWRLQCPTFLRQTFVEWAAASTRHSFWAQVYYQQQREKGKAHQAAVRALAFKWIRILSRCSPDR

SEQ ID NO: 196948 - protein, 415 aa, unidentified
MKAWKEITYYGGFDWARDHHEVVIVDRRGQIVADFAIEQTAEGWQRWREQVASLGAENLAVVVETSQGMVVEQLLDSGVSLYPIAPVSSKAYRERKAPSGTKTDRLDAWSLADALRLDGHAWKALAKEDPLIAELRLLCRDEVLLIEERTALVNQLQSALQEYYPAALAAFEDWTLPAAWAFIEVFPTPGALAAGGQRKWEKFLHVHKLARPQTYAKRLEIFARGSELAAGEALTRSKSRLALARIRMLRTLQTQIEAYRAEIEKLFAQHPDHHLFGSLPGAGPKIAPRLLGEIGSDRARFDDPSALQALAGTAPVSYQSGQIHKVYLRRHCNKSLRATIHLWANLSRRASPWAELYYRALRARGKSHASALRCLGQRWLKILWKIWHTRCAYDPDLHTRNQLKHGSWILALQSA

SEQ ID NO: 196949 - protein, 348 aa, unidentified
MTLVGCDLHARTQQVAVLDTSTGELVEQELVHEGDAVERFYRALPPPVTIGIETTGYTQWFHTLMHQLGHTVLVGEAAKIRAMVVRKTKTDRRDARHLLDLLQHDRFPTVWIPDPGTRDRRALIAHRIRLVRIRTMVKNGLQAIALNQRLALRSALWTQRGLTQLKALTLLPHTTRRRDDSLALLAWLTTRIDQLDDHIAAVASADPRVRLLLTHPGVGPLTALTTVLVLGPLARFPDSKHVVSYVGLAPAVNASADKQRLGKITKQGNALLRWVLGQAAPLAARADDDLRRRYFSVMHRRGRPKARVALARKLLVRLYIMLRDQIDYEEFQRRGRAPRPRQLPVAVM

SEQ ID NO: 196950 - protein, 280 aa, unidentified
MRIVVLGIDLGKNLCSLAGLDETGAVILRRRMKRASVLPFTAQLETCTVAMEACCGAHHLGRQLVAQGHLVRLMSPAYVQPYVKAQKNDERDAEAIAEAATRPTMRYVEIKSEAQLEVQSLHRVRGRLVAERTALINQLRALMLERGIAVPQGRCKLAGYLPAILADERNGLGPRLRRLIEDMREEWRSIDCRIKGFNDELAERVRNEDTAKRLIRIPGIGVLTATALVAAVGNAQTFTCGRDLAAWLGLVPRQATTLARIAWTVLARDRQYVTVQAIGK

SEQ ID NO: 196951 - protein, 379 aa, unidentified
MRVYIGIDWSTQKHDIVYLNEEGGIILYQTIPHSPAGFEAFDEQRMKLGVSVQDCLVGIETEHNLLIDFLTSQQYQQIYVIPPSMIRDSRGRFGASKANNDRSDAHLIADMLRTDRARLHAWHADMLLTQQIASLVSLESFLTRTIIQTTNRLRNVLWRYYPNAARVFSSLDQQIALEFISAYPTPEAAAGLTIEEFKGFAKRHHYPRPSKLPACFARLQKPQPDARQQTVLTYQSEAVRLAHLALQAVQDKAATLKEIQELFVDHPDYPVFSSLPGAGAILAPALLAKFGDDRQRYPTPQVLQCVAGTCPVTKASGKHKYVSFRYACDHEFRRIVQQWAKSSTDSSVWANTYFQTIRPHCDSLSHAYRRLANRWLEIA

SEQ ID NO: 196952 - protein, 319 aa, unidentified
MSNIILGVDISKATFDVALLNDNKVKTKKFSNTSKGFSELKQWLKNKGIDTAHACMEATGGYETKLAQYLYDNNFKVSVINPARIKGFSVSKLSRVKTDKADSELIAQFCQAMQPDLWQPTPKHIQELQQWVRRLDSLIANKNQENNRLDEASDLVAVHINTHIEFLDKQIKEIEELISNHIKTHKDLNDKSKLLESIPGIGEKTIGIILAFFSVENFSSAKQVVAFVGLNPKPRQSGSSVHGVGRISKTGNADLRKAFYMPAIVAIKHNLIIKDFSQRLSSAGKSKMVIVIAAMRKLLHIIYGVLKNETPFNENIKTI

SEQ ID NO: 196953 - protein, 408 aa, unidentified
MKTLHRRCAGLDVHKKEVVVCLRLVIRGKATYEVRRFATTTRGLVELADWLEQAGCTHVAMEATGVYWKPVWHILDGRFQQILANAAHIKGVPGRKSDMNDATWIADLLAHGLIRASFVPPQPIQELRDLTRTRKQLTREIVQHTQRIQAVLEEANVKLSSVITDILGASGRRILKAIVAGETDPQKLSELGGPRLAATRAELADTLHGRVRSHHRFLIGQHLKTIEQLEETIAAFDARIEAALAPFRDIVERLKEVPGLSETSAQILLAEIGTDMRQFPTVGHLLSWAGLTPRLDESAGKRRSTRVRKGAPWLKPVLVQCAWAASRKKKSYFQAQFLRLKARSGPKKALIAVAASILTTAYHMLADGTCYQDLGADHFARRNPTRAAAKLVNRIRNLGFHVEIRPAA

SEQ ID NO: 196954 - protein, 428 aa, unidentified
MNENETTRYAQFCQFRKEIRGSQDYLIVGIDVAKDKHHAFFGTATGKSILRRLIFDNNASGFSTLVERADQFMRQFKLKRVVYGLEPTGNYHKPLGSWLLDQKQMLVLVSSKLIADNRQTLDGRWDKNDTKDSANVADLLSQGKCQFYERADDNLEQLRTLLLLRRRLKKDEIRLRLQIRNGLVCKHFPELDRFWGQNSQENLAIVRWCLDPRQIAQMPFGEFVRRVTTCDRGLRQARRLRAIHEVAAESIGIAMSSTDRYHARLLVGQLRLKQEQLSKVMERIEKACQGSVYYQLLLTIPGFGPYITSVVLARIGDPLRFSRRKQVLRLAGMDLSAKRSGKRSKDVVPVLSKKGNSELRYAIYQAAHTASCRNDTIRELFTRYLSGREKEPGIRKKMRVKLAAKLLIVAWAMMRNQTQFNASLLLTQ

SEQ ID NO: 196955 - protein, 411 aa, unidentified
METMIARCCGLDVHKARVSACVRVLIDGTVSELIETFGTTTSDLLALRDWLAAHAVTHVAMESTGVYWKCVYYVLEDDFEVLLVNARHIKHVPGRKTDTIDAAWIAQLLACGLLKGSLVPPRPIRELRDLTRYRKALIYERSRAINRLHKVLEDAGVKLSCVATDVMGVSGRQMMRALIEGQADADALAELAKGKLRKKLPALRKALDGRFRAHHSFLLERMLARIEDLEDDIEAISARVQEQISPFEQAVTLLRTIPGVERRTAEVIIAETGGDMTAFPTAKHLASWAGVCPGQNESAGKRKSAKTRKGSPWLRATLIESARAASRSKGTYLGERYRRLARRRGDKKAIIAIAHEILTATWHMLSTGELYREQGPQVISERDADNARRRAIRQLERLGHKVTLQPLAEAA

SEQ ID NO: 196956 - protein, 330 aa, unidentified
MKVAGIDVAHKTLGVVLSAEEKAGKAQEFANTASGHQALVKALQAARVERVCLEATGSYHLDLALALDTGGLALMVVNPKAAKRFTEALLTRSKTDAVDAAVLAQFALRMPFEPWQRPDNQALALRACARRLEALNRAKTEAKNQLHALTQTQTTPEVVLADVRLSIRQCEDQIKDLRTWAEGLIQTDAGLKEVFDLLISVKGIAAASAIQLMGEILVLPPDMRAKQWVALAGLDPRQSISGTSVHKKPRLSKAGNRYLRLALFMPALSAARHDRHVNGYYRHLIEDRGLKKIQAVCAVMRKLLHAIHGMLKSRRPFEGRRFYALAETPA

SEQ ID NO: 196957 - protein, 430 aa, unidentified
MKSNTQNAKIETITEKTLVLGIDVGSETHYARAFDYRGIEYSKKPFKFSNTEVGFATFKEWILDLKERHEKDKVVPGMEPTGHYWFNLGKFLQDNEMKPVLVNPHHVKKTKELDDNNPTKNDRKDPKVIAGLVREGRYMIPYLPEGVYADLRTATNIRFQLQAELTRIQNRISRWFNIYFPEYKTVYGKPDAKSGMLILKAAPLPEGILTLGIDGVNQIWRDAKLRAVGKARAKTLIEAAEHSVGSKEGAVSARMEIRMLLEDYESRNTRLQEFMVLIEELVRKIPMAEKLLEIKGVGIRTVSGFLAEVGDISRFNNPKELQKLAGLALVENSSGKHKGETTISRRGRKRLRYLLFEVAMSLVSKNQEFRELHNYYTTRRLNPLKKMQSLMAIAAKLIRVFYAMLTKGVDYDPKKMVSDIKRPAVYLQAA

SEQ ID NO: 196958 - protein, 403 aa, unidentified
MSDDRCRLGSDDVVIGLDLASAEHQAVVVTAAGKRLTRFRMPHTRAGLEELLRRTTPAALGRPGGARVFAFEATGHLWEAVAYVLRARGEPYVVVNPLATFRVREARQLSREKTDLTDAEQIAELCRTGLVTRTQLEARPYLALRRAWGEYARLREERARLKVLVAHQLYGLFPEFLRVWADLLQPGALAVLRTGLTHAAMAALPLTEFVAQARAAAQTMACPDGLDVLAREVQRAVARIDMLTAHMTAVAAEIDSMLAELEEVPSLRPIPGLGWTSVAGLLAHIGAITKYHHGRQLIKLAGTNPSRRDSGQTVGHGQRMSHRGRAGLREVLYLATISCLQHNPRIRAHDDRLIQRPDRPLPKMQALGACMNKLLLYAFAVMHRREAFQLDHDWPRTTMARVA

SEQ ID NO: 196959 - protein, 411 aa, unidentified
MEILHSHCCGLDVHKKTIAACVLRLEGKTKNRQQRTFGTMTRDLLALSDWLKECGVTHVAMESSGVYWKPVWNILEGSFEVLLVNAQHIKAVPGRKTDQKDSEWIADLLQHGLLKGSFVPPTPTRELRDLTRYRVNLRQECNRIANRIQKVLEDANIKLAAVVSDSLGASGRAMLKAIIEGEHDAQKLSELSKGTLRKKRNELQLALEGRTTAHHRFLLKELIDHLEFVEGKIERLEAEISERMHPYEEQVRHLRTIPGIERITAWGLLAEIGMDMNQFPDAAHLASWAGLCPGNHESAGKRLSGKTRKGSVWLSRHLCQAAWAVSTKKNSYLSAMFRRVAARRGVKRAVVAVAHALLVIVFHMLKKGIDYRDLGPNYFDRINADHIKRKLVKRLENLGVKVTLEALPQEG

SEQ ID NO: 196960 - protein, 335 aa, unidentified
MQIYGIDLSKDKFDVNFVEESGKEKNKEVKQKFSPMVRFLKSIPQDGVICAEYTGTYGDKLVFLCNQMNVRIALIPGYTIKHSFGIVKGKSDPVDAKRIREYGERFRDKLKYKEYDSEDIMELRTLYALRAEFVKTKKQLQTAIHSRSLLPFQSIKLNKFQREAFNDIKERIKEINNEMEAIIIANKELKESYEYARSVTGVGPVIATELIIKTGNFQNINTARKAASYAGVCPFPNSSGKMVKKSKTSPFADKKLKTILHMGAKAAVEHDASFKLYFQRKQLEGKPYYLIMNNVSNKLLRTVYSVVKSKSYYLRNYNCPDPREKNINSSNEKVA

SEQ ID NO: 196961 - protein, 342 aa, unidentified
MKQYVGLDVSQKETSVCVVNETGQVLFEGKAKSDPGALTALLRKRAPHAERIGFETGAMASWLWHELRRVDLPVVCIDARHAHAALSVRMNKSDQNDARGLAELVRVGWYREVKVKSEESQRIRAILVARSRLVSMRRDIENQVRSLIKECGLLFPRAIGQRFRNQVSELLGEDHQLLSVIAPLLSIHEHICQQQSKFDDEVRRLAKSDETTRRLMTVPGVGVVTALTFRHTIDDPSRFRSASSVGAYLGLTPRRNQSGETDINGKISRWGDRLLRTYLFEAATVLLYRTKKWSSLKAWGMKLAKRIGMNKAKVAIARKIAVILHCIWVDGTSFDWGQAKPA

SEQ ID NO: 196962 - protein, 523 aa, unidentified
MTVPTTKGRRTKATPLPTSLPAIRPLVAGLDVGSSEHWVCGPARADGTPNVRGFGTTTDQLQALADWLADHGVESVAMESTSVYWIPIYELLESRGIEVVLVNARQLHNVPGRKTDVSDCQWLQLLHSCGLLRGSFRPGEAITRLRALQRQLANLVAERTRCVQWMQKALDQMNVQVHRAVTDLTGATGLAIVRAIVGGERDPARLARHRDRRCGKSATEIARYLTGTWRDEHLFNLASALRLFDALETEIAAYDAQLLQEIQALPPPERQTEPVPPHPNPAKEKAIKARGEQAARTTLWRFAGVDLTRVDGISAGAAQVVLTEVGPQLAAFPSEDHFVSWLRLCPRTPISGGKPLKKRRNGLGAHRIAGVLRMAATSLQRSKTALGAAFRRIARHKGGAPSRSSPPPGTSRGSSTGCSGTDTTTSTSGNRPTTTGSRFGASPHSPKRPGPSATRWCQRWPPSERVKFQVRLARQGGARRRDPHVRDVGERFWRAALLEDSFVAVIRRAPRPRPPRTHRRRGG

SEQ ID NO: 196963 - protein, 346 aa, unidentified
MEHYVGIDVSLELLSVCVVDGRGKIVKEAKVASEPEALVYFLKELGFPVNRIGFEAGPLSQWLHAGLTQAGFEAVLLETRHVKAALSAMPVKTDRKDACGLAQLLRMGWFQQVHAKSIGSQEIRALLVARKQLLGRLLDVELSIRGILRGFGLKVGQVTRKTFEARIRELVTGHTTLERIAEAMLSARATLKAQYEKLHKAVLAIVREDAVCRRLITVPGVGPVVAVTFKSAVDDPSRIAKSKAVGALFGLTPKKYQSGEKDVTGGITRTGDEMVRTALYEAANVLLSRITRFSKLKRWGMDVAKRRGSKRAKVALARKIGVILHRMWIDGTTYRWAEAKLIAAQA

SEQ ID NO: 196964 - protein, 364 aa, unidentified
MVYVGVDLHRKSSYVAVLADDGELLASRRIASQPDEFLRVFGELEAEPTGVAFEATYGWGWFADLLSDVGIPAHMAHPLATKAISSARVKNDRVDAKTLAHLLRTNLLPEAWAAPPEVRDARKLARTRVSLARISSRLKCQTHALLADQAIEVPVTDLFGLAGRAFLEEVLLRPVPQARLQANLRLIDLLAPEVAQADRELRELFHGDPRIERLTPIPGIGFTTAALIVAEVWDVSRFPSPEHLCSWAGLTPTERSSADHTRRGHISKQGSRWLRWAMVESASRPYLKDPTLRGFRDGIARRRGAKIAKVALARRLLTLCYYALRDEGGCRAFPVPPTSTKRPNRGRARSPQVMASSGTAAPSD

SEQ ID NO: 196965 - protein, 338 aa, unidentified
MYYTGIDLHKKTSFITTVDEQGQVRARRNLPNQLPVILEYFSALAQPTQVVIESMGSWYWLYDALSAAGHAVMISNPCKTKAIASAKIKNDKIDSHMLAQLLRAELIAPVHVSRLETRQLKELLRHRSKLVDDARRMKNRIHMLLMKNNIQQPFSDLFGLGGIEYLRQLPLPQAYQTQLNVYLSLYLQIEQQIAPLSRKIHHLAREHPMAKLLMSIPSIGPIVAMTFIAEIEDITRFASYRKLAAYAGLVPALDSSARKDRRGRITKQGSKYLRTALIEAAQCVARLRNCRLNAYFRKRIVRSGYSKAVTATAHKILQIAYYVLKNQQPYQEQYAARA

SEQ ID NO: 196966 - protein, 389 aa, unidentified
MLHDHPCVGPTAIRTQFGAIFVSLELSRSKWVLTSLSPGNGEKMSQYSLTAGDIGGLLARFAELKRKAKERTGSDYPIITIHEAGLDGFWVHRVLQNEGIESYVVDAASIATSRRRRRAKTDKIDGEALLRALLAFKRGEPRVCAMVVAPSPEEEDRRRLCRERQTLIAERIIHVNRIKGLLFAQGISDYAPLRRDRRKRLEGLRTGDRRPLPVHLKTQISRELDRLELLLDQIRKVEAEQEALLAAESKAAPEGEPHNAVAMLLAVKGIGEHSAAILWSEGLCRQFSNRRQVAAYAGLAATPWRSGAVMHEQGLSKAGNPQLRTTMVQLAWLWLRHQPQSALACWFRARGERGRKGSIVALARKLLVALWKYVTHGVIIEGAVMKPAT

SEQ ID NO: 196967 - protein, 339 aa, unidentified
MDLYAGLDLHSRNTYIGIMDDALNRVFKKRVPNDLEQILHTLKPFKKRLNGFVVESTYNWYWLVDGLMAAGYSTAHLANPAAIKQYEGLKYSDDQHDAFFLAKLLILGILPEGYIYPKEHRPVRDLARKRMFLVRHKTANILSLQSLIQRCCAVKISTSDIRKMNVEALESWLKEEYLIFSAQTSLDTINFLKQKIKSIEKAIIKRVKLKKGFRQLLTIPGIGNILAMTIMLEVGDIRRFPKVGNFASYCRFVPAKRLSDGKSKGSGNRKNGNRYLSWALTEAAQIGRRHNEQFRGYYNRKVAQANTSLATKALGNKLARICYYIMRDQVSFRGELMAH

SEQ ID NO: 196968 - protein, 453 aa, unidentified
MPRKKVSKKTRVTLPVLKPDAAGIDIGATEIYVAVPAGRDPEPVRMFATFTQDLIQLAEWLQQCGVRTVAMESTGVYWVPLMQILEARGLEVYLVNAKHVKNVPGRRTDVSDCQWLQYLHAVGLLRASFRPAPEICAIRTLLRHRDSLVEMATAHVQHMQKALDQMNLQIHHVISDITGTTGLAIMDAILAGNRDTQALAALRDPRVRASADTIAKSLVGDYRPEHLFTLRQSIDLYREYQRQLGTCEQEMQRLMKDLETNADPTVSLPVAKDSVRKCKVMLPAKALALREEAFRILGVDLTAIPGISVLHVQTILAELGGDVSKFRSASAFSSWMGLCPDNDISGGKVLWTGTRKVKNRVALTLRMAAQSLQKSESALREFYRRMRTRLGAPKAITAAAHKLARIIYHMLKTREPYDEGVFAKAEIRHRQRAENRLRALAHTLGYALTPVQT

SEQ ID NO: 196969 - protein, 361 aa, unidentified
MAGTVTWAGLDVHARSTHAAAINVMSGELVRARFGAGLEEPLAWLAGLPGPVKACYEAGPTGYGLYRAAQAAGVEMVVIAPGKTPRGPSDRVKTDQKDAELLARLLLAGSLTAVKVPPPELEAARDLMRAHDACRRDLMDARHRVSKLLLRYGRVYPEKATWTVRHRGWLGRQQFTELGTELAFADALACVDAISARKAALALKLSELALDERWWPTVARLRSFHGIDTLTAFALHLELGGDWRRFERAPQLACWLGLTPTLSQSGESSRQGHITKTGSTLARRLLVEAAWHYARTPGPGVALAARQAGQPAHVLQISHRARQRLHRTHRKMRARGKPGNVCVVAAARELSCFLWAAAVAD

SEQ ID NO: 196970 - protein, 320 aa, unidentified
MYVGIDVSKEQLDVATDDGAFSGQFPNDERGFGELVIRLREVKPTLVILESTAQYQLEVSLVLATAQIPLAVVNPRQVRDYAKAMGILAKTDKLDAVTIARFGATVKPAAQTLPDAETLELEALLTRRRQLVGMISSEKNRLQGIFGPAKQGAAAQSVRDTLSYLTKQLKQLEKDLQKRLERSPAWKAKEDLLKSVPGIGKVTAMTLAIDLPELGKMNRKQIASLAGVAPFNCDSGKNQGKRRIRGGRTTVRTALYMACLASLKHLSEPTASRYGRLKTQGRKPHGVAIVACMRKLLTILNAVVRDGKPWNPQLASACHV

SEQ ID NO: 196971 - protein, 366 aa, unidentified
MDQGITFIGLDVHKRSIVVAVREPGSGGVQEERIPHEIPVVKRWAQRWKRRSGGQLLCAYEAGACGYALQRQLESLGVRCQVVAPSLVPRKPGERIKTDRRDARKLAEYLEGGLLTEVRPPTPSEEAARDLCRAREDAKQDRMRCRHRLSKFLLRRGRSYPAGRRSWTLAHRAWLKQQSFAEPCEQAVFDDYRLAVEQVDARIAALDRQIEGLAQAPPYRAAVGALRCYRGIATHTALGLVTELHGIERFDRASGLMAFVGLVPSEASSGDRQRRGAITKAGNGHARKLLIEAAWHARHKPAIPVALRQRREGQPPEIIAMADVAQNRLHRRYWRLVQRGKPTTVAATAVARELAGFVWAALRAVA

SEQ ID NO: 196972 - protein, 387 aa, unidentified
MYFVGIDISKFKHDCAIIDELCDTVMPSWSFSNDREGFSHFKALLDSLEGEKKIGLESTGHYGQNLKQFLESNGFAFMEFNPLLVSRFVRSKSLRNTKTDSIDALSIAQYVMTVEYKPYPSSFYHLDKLKSLTRFRNSLVRQRSRQLVELTNVLDKLFPEFKPFFKDKFSVTALYILAHYQTPERIANMNARSYEALRKLSRGRFTLSNFTQLKALAKNTVGTQSDYLLDQMNILLELYSQLDSKVDEFDAQIKECVRGIDPPCLSIPGVGELSAAMILSEFGDFSKFQTPSKMLAFAGLEPGYFQSGQSEYTGHMVKHGSSRLRYALMNCCLPLISNEPVFAAYYTKKRSEGKPHRVALTHVAKKLLRVIYTLQTKNIRYDPTMIH

SEQ ID NO: 196973 - protein, 373 aa, unidentified
MEKGISYAGLDVHKSEIVVALYKPGEETAKEWRLGTDARSVKRLAQRLLEESAGRVECVYEAGPTGFVLQRQMTGHGVKCEVAAPSLVPVKPGQHIRTDRRDARKLGRYLRSGDLTFVRAPSETEEAARELCRHRTTVSQQLTSAKQRVSQMLLRCGRVYRKKHGTKMYRDWLRAQRFEQSHLEEVFTDLLSEVDWLETRLREVERKVEALAETEPYQERVGWVRCLRGFDTLSAVTLLTELHGIERFTSPRGLMAFLGLVPKEDSTGPRQRRGSITHAGNSHVRWLLVQSAWNQRFQVRVGEALRRRRKDQPAEVIALADRAMKRLHERYVHLLWTRGLPSQKVAVAVARETVGFLWALLVEYPQQRRQPQV

SEQ ID NO: 196974 - protein, 375 aa, unidentified
MGWTAPNGIISAKLVVLIRSSKGGPSMTKVSMIGLDLAKNVFQVHGIDATGKVVVRRQLRRRQLEKFLAALPPGVVVGMEACSGAHHWGRVIEKLGHEARMMPAAYVKPYVKRNKNDGRDAEGICEAMTRPTMRFVAVKSLDSQAVAVLHRTRRLLVRQRTMSGNALRSALAEFGIVAAQGLKGLRSLMALLADKASAIPDKARMPLRVLARQWGRLNADICKLEAQIVSAAKSDAVARRLMAIPGLGPIGASAILAAVADARVFKTARDFAAWLGLTPRQFGTGGKQRSGGISKQGDRTLRTLLTIGATSYLRYERARGAEHPWVRDLLARRPFKVAAVAYAAKMARMIWAMLVTGEGYRAPNRSRSVAAQAAA

SEQ ID NO: 196975 - protein, 420 aa, unidentified
MKSFVPVAGVDVSKRFSDLCVLSPDNNVLLRQKIYHDMVSMKLAEKKLHEIELECGARPVVVMESTSHYHLILFQFFTDAGFEVVVVNPIQSGALKNINVRKVKNDRVDAYRIAMLYRLKVLRPSQIPTSSLRGLRLLTRQRSELKGDVARFKNRLTAYLDQIFPGYGEVFSDVGGSASRAVLHMCPTPEKLLNADGSLLAKAICEAGNKGPKFGAEKAAKLREAAGSAQVIGVRSASNASLIKNVLDIIEGLLAAIQRIEREIKELVTLDTRLDEDVKLLCSIPGFGFSSAVVIAAEMGDISLFRKPKQLAAYFGLDPGERQSGTFKGRKNKLSKRGSPQVRAALHMAAVSSVSRNRDGTYRNPVLAEYYERKCAEKPCKVARVAVMRKLSNIIYAVLRDRRPFELRTPQEHMALLAAA

SEQ ID NO: 196976 - protein, 531 aa, unidentified
MVTTRTTGTKRKRSRSQRFKKAVLGRPQGVIQSRVQAVGPEKFGIVAIDCAKARSKWMLVDFYGNVICPPADVEHNRSAFQRAILMLKQAVGKHDLKDVIVAVEMTGTYHKPPMRAFRQAGFETRLVHPFASSFYRQPEHGDLKTDAHDLDAIFRAAVNGFGLIEKPVDAIHQQLQILARHRRDLVKKRAKLQCQIRHHLELALPGFGALFDGDDLWRQITPAPLLEAIAQRGGTVDVVKQAGQKGITQWLNAAKVRFHKKTVERVTVWAVNAAESDPMAAFHARVWTSQLADWKQKTQQIQEIERDSASVLVKTPYVLLLSYPGINVVSAAELAGEMGPVENYATAKSICGRAGLFPSRYQSDEVDRGGKLTRFRNARLRAAWMMVADNMLKCNAYWIKKAERWRGEGHKPQDIRARIANRMTRGVFQMVSGRQLYQHASRLDRGYIMDKLLTFHREHETSPAVIVRDLKHAADQLPKSSQLEEGAKLQEAALKARRSRQKGPQELGTLLVAVLARLGIAAKDDDALEST

SEQ ID NO: 196977 - protein, 338 aa, unidentified
MGIVYVGIDLAKNVFAVHGVDEAGKPALVRPSVARARLRELIAGLPPCAVAMEACSGAHHWARLFTAHGHTVRLIAPKFVTPYRMSGARGKTDAADAAAICEAVQRPNMRFVPLKSEQQQSQLMVHRARQGFVQARTACINRIRGLLAEFGHVLPLKAETVRRQAAGLLEELPGWANTVIGDLLSELHRLDERVAQYDRHVAQIAREDERAQHLMQLPGIGATTATAIVAMIGNGHEFKCGRQFAAWLGLTPGQYSSGGKRRLGRITKAGDGYLRSLLILGGRSVLALAKGRSDAISSWALAVQQRRGYWKAVVAIASKNARLAWAALSRGENFKMPA

SEQ ID NO: 196978 - protein, 489 aa, unidentified
MSQGKRSVPRAASSKVKAEARPKAASCPGGAPAGALTVLKPNAAGIDVHSDMHMVCVPAERALPEGEGASGDLPANVRKFGANSCDLAAIAAWLAACGVTTVAMESTGVYWIPLFELLEARGFEVYLVEPGQLAHCGARPKTDVLDVQWIQRLHTYGLLRPSFRPANSIVALRGYHRQRQMQIRYAASHVQHMQKALEQMNVKLTEVLADITGLTGRRIIEAILAGERDSRKLAALRNVQCHNDETTIAKALEGTWRPEHLFALRQAYDLYRFHHQQIAECEQMIKTELAQLPNRAGNKPFSPKPRKGGRKQNDLTFEACGPLFKALGVDLTEIEGIDVRTALVILAELGVDVSRFPTEKHFASWLGVCPRQYESNQNKKKRGPRKGKNRIAIALRMAAQGLGKTKSPLAMYYRRIKSRIGGKGAITATAHKLACLVYRMLKYGKEYVTQSIEEYESRIKQQLERSLRRKAAALGYELVAKPAPEPAPA

SEQ ID NO: 196979 - protein, 412 aa, unidentified
MRIVYKRCCGLDVHKKVIVACLLLLEPDGELRQEFRKFGTMTQDLLELLDWLQQAGCTHVAMESTGVYWKPIYNILEGHLEVVVVNAQHLKGVPGRKTDVLDAEWLAECFQLGLLKASFIPPAPVRELRDLTRYRTSLIRERARTANRLQKVLEDANIKLAGVVTDIQGVSAWAMLQAIVSGTTDPEALADLAKGLLRKKREQLVTALSGRVKPHHRFLIAEHLSQIEYLEEAIQRIGAEVAERLHPFEVEVKRLDSIPGISRQIAEVMLAEIGWDMSRFPTDKNLASWAGMCPGNNESAGKRRNGKTRKGSRWLRHALIEAAHGAARTKNKYLKTQYHRIAAHRGKKKALVAVGHSILIISYHLLTRGQEYTDLGANYFDERDRNAVQRRCVKRLEKLGFKVALQPTAIAA

SEQ ID NO: 196980 - protein, 378 aa, unidentified
MSKVRFIGLDVHADTIAVAAAEPGGEVRSLGVIPNRPESIRKLVKKLGPAEQLRVCYEAGPTGYVIYWQLTALAVRCEVVAPTLVPTKAGDRVKTDRRDAEKLARSYRAGDLTAVWVPDAAHEALRDLVRAREAAKKDQLRARHRLGKFLLRHGRRPPTAMTAWTQRHLTWVKSAVHFEQAAQEATLLDYIHEVDHVAGRIERLECAIDEAVKRAPARMRAVIDALQALRGIALVSAVTIVAEVGELSRFAKAPQVMGYSGMGAREDSSGERRRRGGITKTGNAHLRRIVIEAAWAYRHRPSVGGALRKRQAMLSDEVKAIAWKAQHRLHGRYRKLLGRGKCQQQVVTAVGRELLGFIWAIGVTVERQQGKMSSSIAA

SEQ ID NO: 196981 - protein, 416 aa, unidentified
MFAVGVDVANGRSMVAVLDGMRNMVAKPFEVVHTAQGFAALVEKLRQLDGEVRIVMEHTGRYYESFAMSMHRAGFFVSAVNPLLIKNYQGSINVRKVKTDKADAQKIAQFALDKWTILPHYTPMDTIRYNLKTLHRQFQLASKTKTALSNNLIALLEQSYPGANRYFDSPVRTDGRQKWVDFVDTFWHVDCVAMSSEHAFVERYRKWCKRHGYVFSEQKAIQLHADARQKIPLVPKSDTCKLLVREAVSQLNAVSRTVETYRAEMDRLASQLPEYETVMGMTGVGKSMGPQLMAEIGDLRCFAHQKSLVGFAGTDPIKEESGDKVSQSAPSSKRGSPYLRKTLFVIMTILLQLQPQEDPVYQFLDKKRSEGKPYYVYMTAGGTKFLRVYYGKVRDCLKAKGLWEVPASASQEVNPG

SEQ ID NO: 196982 - protein, 347 aa, unidentified
MTIVENHTQITGGVDTHLDFHVAAAVDANGGVLGVETFSTRGARYAQLVAWLQRFGPIDRVDVEGTGSYGTGLTRYLRSDGIAVVEVDRPNRQARRRHGKSDTVDAIAAARAALSRAATGQAKHRDGNVEAIRLLMVARRSAVDERIKVLNQIRHLVLCAPEPIRARFHGLTSTSLLNQTSSLRPRDHGDVVDYTTLITLRELGRRAKNLHDENLRLNKLLRPLIRRTSPGLLEVYGVGYDTAAKLLVAAGDNPERLRSEAAWAHMCGVAPIEASSGKTKRHRLNRGGNRQANSAIYHIMLTRLRYDQRTRDYFARRSAEGKTNGEICRILRRYIAREIYKQLPHQT

SEQ ID NO: 196983 - protein, 345 aa, unidentified
MMVTLGTDAHKKSHTIVAVDAAGAEIASLTVAATGDGHLRAVQWAAQYTKRQWAIEDCRALSRRLEADLLRIGERVVRVPPKMMARARATARQVGKSDPIDALAVARAALREPDLPVAHLDGPSREVRLLVDYRESLVRDRTAAQNRLRWRLHELEPGYDPPAGSLNRYRTLDEIDELITTHDSIVADLARRETARIRQLTREANQLERDITQRVTDLAPTLLAIPGCGALTAAKLIGEAADITRFTNRDAYAMFAGVAPIPVWSANPNRFRLNRGGNRQTNAALHRIAITQMRIHPDAQAFIKRRIETGSTKREAIRLLKRKLANVVYRTLHTDTQTTPLAQAA

SEQ ID NO: 196984 - protein, 326 aa, unidentified
MQHILGIDVSKDKLDVILLSEGKKYHKTITNDQKSFEYLERWLETRHVPKVHACMEATGQYGEEIAEYFYERDHLVSVVNPARIKRYGESKLHRNKTDKADADLIAEFCLKEKPGPWEPLSPEMKHLRALIRRLRALKANLHQENNRLKSGEKDEWVIDDLKTHIEFLNKRIKAIKAEIDDFVKRTPNIKSQHDLLTSIPGIGDLTASTLLAEIGDFTAFENAPQLAAYAGLNPKGHRSGSSVNKKARISKEGRAELRCCLYMPAVVALSCNPVIQSLSERLRERHLQKMEIVVASMRKLLHLAYGVIKTQLPFDPNYGAQFDFSS

SEQ ID NO: 196985 - protein, 342 aa, unidentified
MQISTIGLDIAKNVFQVHGVDARGSIVISRQLRGGRLIAFFDNLPACLIGMEACATSNYWARALARLGHTVRLMPPGYVKAYVKRGKNDAADAAAICEAVTRPSMRFVPVKSAQQQSALMLHRTRDLLIRQRTQLINAMRAHLAELGLVAAQGREGVHRLMALVAEESEACLPRLARFACQALAVQLEAVQGQIDALERRLCVEHRACEVSRRLETIPGIGVIGATAIAATVTDPKAFHSGREFAAWIGLVPRQNSTGGKARLAGISKQGDRYLRRLLVIGAMAVLKQARAHPDKHPWLIQLLARRPAKVVAVALANKMARTAWAVLARGESYRAPALKPAA

SEQ ID NO: 196986 - protein, 343 aa, unidentified
MDYFAGLDVSVKETSICIVDDAGKIVREVRVASEPEALLQVLTNNNYRFKRIGLEAGPLSQWLFSALAEADLPVICVETRHMRAVLKAQINKTDRNDARGIAQMMRVGLYRPVHVKTLRSQKLRMLLIHRKLLQSKAIAIENDLRASLRNFGLKVGLVGTVKFEARIKELVENLPDLAALLEPLLVVRRVLREQISILHRRVLAVVRDDEVCRRLMTIPGVGPVVALTYRVTVDVPARFRNSKSVGAVFGLTPAKDQSGERDRSGAISRCGDEMMRVMLYEAAQIMLVRSAKWSWLKAWAMKIARHRGMKKAIVALARRLAVIMHRIWVDGTEFRWTRELAAA

SEQ ID NO: 196987 - protein, 495 aa, unidentified
MGVDSCLENVWAVAARVSHLVTRIATDRSSEMALTLGIDVAIRAAHQATLARDGATVWRGRKFWTRPADLDRLWADLDLADPAELTVVVEPTRNAWIVLAEWFRRRGARVVMVPTTQSADLRKYYSKHTKNDRIDSELLARLPLLHPEGLREYSGQGPADPLRRLVKQRATMVKRRVAVYARLDALVELLGPAWYAVLGSNYGIAALEFLARYADPNTVLRLGQARLTRFLIARSRGAWRDDHAAGLLAAARETLALWGRDGMDFAELADDIAHEAEQALFLTRQIKQIDERVANLYADADPDGIVASAPGVGPVISAVIAGRIGDPHRFTSLAAIRAYTGLVPKISQSGVSKVESSITKAGDPLLREMLCTAADAARKVDPQIAAKYQRLMAGDRHHDSAICHLATLLVTRIATCMRAGQPYQLRDVDGTPITEAEGRAIVKERYQIEPRRRDNIRHQRMRERRKQTADRESQKSLSAPTSRPANTNPTSRQVA

SEQ ID NO: 196988 - protein, 424 aa, unidentified
MKVTYQTCCGVDVHKSFLVATIVKTTGGIEPSYQKKRFSTFNNSILEFKQWLLDNDCHDVCMESTGKYWVPVFNLLEDKINVVIANPKWVKAVKGNKDDTKDSKWIGDLFRLGLVRGSYIPCKKVRILREYTRYRYKLVSCRSSEKNRYQNALTVCNVALDSVVSDIFGKSSTSIIDYLLEQSGTSISHEEIASKLLRSLKSKEDAVIESIEGYQMTDAQKYRMRLVRAHIDYITAEINDVDKMIENMISSNPDFENAVQFLCTIPGVKRDSAITIISEIGTDMFQFSSSKRLCCWAGLTPGSNESAGKKKSVRITRAGVYLKPALVQCAHAAVKSDKSPYYKKKYESLVKRRGKKRAIIAIARMILTAIYQMLSTGEQWNPSDLYKIDMPVALVEKQKAKAIKQAKKLLQREGILPPDEPLAS

SEQ ID NO: 196989 - protein, 346 aa, unidentified
MEMVRFFLGLDVGKSEIVATLMDDEEKELFRGSFKNQLSGFREMMKAVTGVTLNLSKEYQIYAGMEATGTYYLKLVKFLYEKEDRVTPYVINPNKVKKYMEYRGSRTKTDLQDSRIIAMCIRDGVENGLFRPWFPSRKEHEELKQLVRLRESLLTMKTMEKNRIEGLKQNPDHSPHAMKILEDHVAYLSQQIKELEAILKDNIKHGNFPDIEEDIERLKSIPGISDLTATSFVSEIGEIERFDGIKQIVAYAGLSPMEKQSGTSIRGKAQICKKGSSKLRQILYMPTLAAIRCNPVIKSFYEKLLEKGKKKMVAITACMRKMLHIMYGIMKNKAYFDPALCMPKVR

SEQ ID NO: 196990 - protein, 347 aa, unidentified
MDTIGLDLHKRESQLCVLAPDGTAREQRILTSHDRFTAVLGPLAPATVLLEASTESEWVARHLESLGLTVIVADPNFAPMYATRARRVKTDRRDARTLAEACRLGAFRRAHRLSDARRHVRAELAVREALVRTRTRYIALAKALVRRDGLRVASGESERVVARLAELELSPTLAGELAPLVALFGPLNAEIAAADNRIAQLTAADPAVTLLTTAPGVGPITASALVATIDDITRFRSAHEFEAYLGVVPGERSSGEKRRVGRITKAGNARARWLLIEAAWRIVRSRSEETAALRAWASGIATRRGKRVAVVALARRLAGILYAMWRDGARYDGGKVRAPRPRAVAVA

SEQ ID NO: 196991 - protein, 341 aa, unidentified
MKAPEYFIGIDVASLSFTAAVGKTPWQLVIRPAEFANDFDSFPKFLHWLQQHNLQPDNAVLCMEATGVYGEALAYFVHANGYQIAVEPPLKVKRAFDTSGHKSDAVDSRQIAEYACRYFDELAFWQPKADILEQIKVLLTTREQFSAQLTAHRNALKTLQRKVVVTPLAEQLHQDSITQLKKHIKSIEEEIQRLIDQDPIYRQMVSLLMSVPGVGLLLAAQMLVIMENSPEPVSAKTLAAYIGICPYEHLSGTSVFKRSSSRHYGPAAVRKLLYLAAMSVRTHQAPFREYFLRKVAEGKSKRLVLNNIANKLLKIMCAVLRTQTPYIPNYRSVNPMLLKTT

SEQ ID NO: 196992 - protein, 442 aa, unidentified
MSETSSEPKFAALVGIDWGDKKHAWALQVEGSSQIERGEMLHTPEAIQEWVAELRRRFPTGCVAIALEQSRGPLVFALSKYEHLVLYPIHPTSAADYRKVFRPSGAKSDGPDAVLHLDMLVRHRDKLRSLHPDTPQTRTLQLLVEDRRQLVNERTRYSNRLRADLKSYYPQVLQWFEDLYTPVALDFLERWPTLEDLQKAKPAMLHKFFQQHRCRDDAHHQARLQAMRTALEATTDLAVITAGRAATCTAVRLLSTLHQSIQEYDRQIDQLAKAHPDFVIFDSLPGAGEVLVPRLIAAFGTQRDRYQHAAEIQQYSGIAPVTQASGQQHWVHWRWSCPKFLRQTFHEWAEKSIPYSDWAQAYYRAQRDDKNKSHNAAVRSLAYKWLRIVFRCWKDRKPYDESIYETALRRHKTAPDPQPSPFELNVKWTSCGSFQKIALKTP

SEQ ID NO: 196993 - protein, 363 aa, unidentified
MSQTIAAPIPAAVDYERTLVLAIEVSNKSWVLAAQVPGLPHTKAKRTINPEAEALLAAIAGYRARAAATGRSIERVIAVYEAGWSGFWLARWLLRHGVEVHVVQPSSVPVDRRIRRAKSDGIDSELLLRTLLAWLRGEPRVCSMVPVPDEADEDARRCVRERTELISERVGLTNRIGAVLATLGVSDHNPLLRNRARRLAELRTALGEPLPANAHAKTKRLLARLELVLTQIAELERERDAVVETEAPDKASKMIQQLTGMRGIGVQSATVLVREAFVRRFANGKALGSYAGLASSPYSSGGIDREQGIGKAGNRLVRTVMVELAWLWTRYQPGAAQVCWFRERVGSTGRRVRKIMVPWPENC

SEQ ID NO: 196994 - protein, 337 aa, unidentified
MHFIGMDVHSKVTMICVLDENGKKVEERVVKGPLGHLVGTLRLLGKEFGRARLCFEASTGCGWLRDELCNLEYQVQVAHPGKVRMIFRAKRKNDRIDAYKLALLAFLDQVPLAHIPSAACRQWRSLIEYRQKLIGQRAAAKCRLRAILRSNALVAPRSLWSKAGRAWVAQQKLGLCQGLQRDQLLMELEELRTKVRQVERMLGQVAREAPAVGLLMTIPGVGIRTAEAVVAYIDDPGRFSRIKSVGCYFGMVPCEDTSVKSRLGHITKEGPGTVRKLLTEATWQGIRRDPAIREYFQRVCRNDPKRRRIALVATAHHLLRVMLAMLRTGECWRATAA

SEQ ID NO: 196995 - protein, 337 aa, unidentified
MNYSGIDLHSNNSVVTVIDETDRIVAEKRLPNELPKILAFLAPWQETLAGVVVESTFNWYWLVDGLQASGFTVHLAHTTAIRQYDGLKHSGDETDARYLARLLRLGILPTGTILPLEARSVRDLARKRMQLVRSRTSHMLAIENLTARHHGMRISSSQVLRLTAESIEQMGLPAEVALAIQANLAVVSTLSTQIEVLEKRLADKVRPRAEYALLTSVPGIGQILATVIPLETGSIERFANVGNFASYARCVGSCHTSNGKKKSEGNIRNGNRYLCWAFVEAANFAQRYCAEARRFYERKKARTNPIVARKALAHKLARACFHILKENKPFDVTRCFT

SEQ ID NO: 196996 - protein, 345 aa, unidentified
MTMLADDVEFVIGVDTHKQAHTAAVVDRLGGVAETFEFAANPTGYGRVLGRVAAHGGIRVWGVEGTGAYGAGLTEFLHDAGELVVEVERPSRPPRRNGAKSDAIDAVRAAREVLAHKHQIEPRRRGEREAVRVLLATRNGAVVARTKALNHLQALVVTAPERLRSRVDGLTTTQLARHAARLRLSPDRPVEDQATIRAMRACARRALACEQEAAQLEAELERILTDQVPHLLTEPGIGPISAAAIYLAWSHHGRIRNDAAFAALAGVCPIPASSGQTTRHRLNRGGDRQLNRALHTITLSRLSCHPETQAYATRRLAEGKTSREIRRCLKRHIARRIYKLLEHTP

SEQ ID NO: 196997 - protein, 336 aa, unidentified
MTEITRIAIDTSKSVFTLHGTDADGRAVLRRNLRRQDMVPFFARRPPMEVVLEACGGSHHWGRVLAGLGHTVRLIPPQYVKPFVKRGKNDRNDAEAISEAAARPEMREVAVKSARQQANAMLLSVRELLVRQRTQLVNALRGHAAEFGHVGRLGRQGVAKLLADVAEDADLPTPAKDALALLGAEIGRLDARLAEVDARLVAQHKQTPTSKMLAEVPGIGPIGALSLVLRVDFSQFKSGRHFASWLGLTPREHSTGGKTRLGGISRAGDERLRQLLVLGATAVIRQAKPGKASAWLIALLARRPRKLAAVALANKMARIVWAMMTSGEAYRQPATA

SEQ ID NO: 196998 - protein, 352 aa, unidentified
MKAKLVGIDLAKSVFQVCVIALSGSVLFNKKFTRAKFLEWLKDLEPTTVAMEACATGHFWGRKLQAAGHMVRLIPAQHVKAFCRVHKNDSGDALAITEAVHRPKMHFVPVKTLGQQDLQLLGRVRSKLVSQRTELISQVRGLASEYGVTFPTSRAALMAGLPLALEDADNGLTQLARFALLNVLEDIRALDSRLAALALQTAALAKQEPAYARLLTVPGFGPVVAPTFIAAVGDGKQFEHGRDVSAWLGMVPKQHGTGGKVQLMRISKNGDRDLRTLLIHGARAVLRWVDRRDDAMSRWLVSLRARRGEARTIVALANKLARIGWAVLRGDQDFDVNKAFRPKAVKQQTATA

SEQ ID NO: 196999 - protein, 337 aa, unidentified
MYYVGLDGHKDLAVFCIQTNSGTVKEIFSTSADPKGMDELIMKMKGKRYKVLAEASTYTTDLHDYFVMRGVDSYLANPRKLKLITESNSKTDRNDALELANYLRLWDKGELKLSISYIVMGEDRSLRELCRYRMAVSKSKGETMQKIKAHMRRNAEYMDTENLDSRGAMNEIRFRFGDDFILLQLIDDYMLFDTKGNNLDREIEKMCQHREDVKLLTTIPGIGTTTAAEIMSMIVDIGRFGSADRLRAFFGMAPKVRDSSKTVSHGHITRMGDSMMRFVLGLAVNNHCRFCPEGHIARYKRSHKGAMKAGILMVACENKLLDLIYVILKRKTPYEQR

SEQ ID NO: 197000 - protein, 409 aa, unidentified
MNPLYVGIDVSSRNNVVFLMKPDGSKIKNFSVPNSKDGSHKLVKEILSALTSFALTDVIIGLEATSVYGDNLVCFLREDGSLSPYNRKIHVLNPKQVNKFKESYNDLPKNDFVDSFVIADCLRFGRINKEVYLDDYRFKALQNLTRARFVAVQNLTREKQRFMNVLFKKYSSLAQEKVFADTFSTTALAVYEEFDSADTLAYMDLHELTAFLQEKGKNHFSNPEEVAKAIQKAARSSYRLPKTVNDSVNQVLSISITSIKAMEAQIKEFDKAIAAQMELIPNTLSSIKGIGPVYSAGIIAEIGDINRFPSQAQLAKYAGLAWRQHQSGDFEAQNTRLIRTGNRFLKYYLGEAAMSLVRCDAEYRRFYHLKYKEVNKYQHKRALALTARKLVRLVYRLLKDNRLYIAPKA

SEQ ID NO: 197001 - protein, 520 aa, unidentified
MVSTRSRRSSSRRRPPTSLGKPRGVLHPRVQQVGPEHFGIVCFDCAKVRSKFLLADFYGRLLLPPTVVAHTRPALDAAVTQIRQAFEQHQLRDGLVAIERTGRYHRLAQRTFAAAGFETRILHPFVTKQYRQPVDPGNKTDDADLAAIHRATVTGCALLEASRDEAWTTLQLLIRHRRDLVCKGAALNCQIRDHLEAALPGYAACFDKLWESPIPWHLLRHYPTAGQLRDAGLASLCQSLRQAGIRFQQRTVQAVVDWAEQAAPGDVAASQHLRIALALYDDRQRKTQEIQALEGDIAGRLVHTPYVLLLSFPGINVVSAADFAGEMGPIEHYANARSITGRAGLRPSRYQSDQVDKANGPLVRNCNRSLRAAILGIADNLIVCNHHFQALATQWAAQGKDPRHTRVKIGLRFSRIAFQMVAGRQVFRHPSIQGRHYILDKLTAFHRVHDTVMVEVLGDLQAALGHLPPREYAAEAKPLGEELQRIQDGHRRGPQVLGDILPIVLARLGVGVVQSNESGE

SEQ ID NO: 197002 - protein, 368 aa, unidentified
MNTFILEAAPTACAIELKIDKRPKAKRILLGIDVHLRGYQAARKIDEGAIGVVDNLRSEAELLLYIEKLRRHAEQVVVVYEAGPLGYTLYRKLSATGVLCYVCAPDSTQQRKKRRKNNKIDARNLASKLFNYLNGDPHALPLARVPSEAQEQQRMASRQHDQLVEERKRLGAKGNAMLLSQGIGSWSNWWRPKAWSQLSRVAPQWLLERLQIWVDVLKILDEKISLAKAALARACSGPRPKGVGALSQMQLQSEVLDWSLYRNRRKIACLVGMVPSEWSTGDKESRGSITKVGVPALRRIIVEMVWRMVLFQPQYKPVQKWQEVLKGPNPALKKKAVVAIGRQLMVDLWRLQTGRVTAQDLNLIMVEN

SEQ ID NO: 197003 - protein, 319 aa, unidentified
MEQFYLGIDIAKAKFDCALLLPNGKCRNKSGFANNPKGFTELDNWLNSHQARNVHVCMEATGIYWEAIAEHMANTGHTVSVMNPYQIKSFANSCLVRSKTDKIDARLIARFCAERRPGPWQAPTVSEQSLEAFVLRYDALQAMRARELNRAEVARDTVRDGILAHIEWLDAQIKELLQRIRRHIANDPDLKDRRDLLDSIPGVGERTIALLLAFCVHPGRFENSRQAAAFAGLDPRQHQSGSSVSAKPRLSKIGHSILRKTLYMPAMVTLYKTRWGQRFRQRLAAVGKAPMLIIGAMTRKLIHVAFGVLKSGKPFNPAL

SEQ ID NO: 197004 - protein, 334 aa, unidentified
MGTVAVFVGLDYHDEAVQVCILDDQGQQLANRSCANDAAAIVAFVQRHGQRVQAAVESCSGAANLADELVNRFGWSVDLAHPGFVARMKQNPDKTDFQDAHLLADLERVGYLPRVWLAPEPVRELRQLVRYRQQLTERRRATKLRIRAVLREQRCRAPAGINAWTQAWQRWLTRTAPLSEQGRWVVERHLRELTRLADDIGEVEKRLQQVTADDPEVARLLAQRGIGPVTAWTLRAEIGRFDRFRSGKQLARLCGLSPKNASSGQRQADAGLIRAANPQLRSVLIEAAHRLIRLEPRWRALAQDLRSAGKPGSLVVAAVANRWVRWLFHQMRAA

SEQ ID NO: 197005 - protein, 388 aa, unidentified
MPAAETPVAYLGIDVGKSSHSACALDAGGGVAFRAELANRPDDIDRLLERAGSGALVVVDQKRNIGALVLARAHAHGNPCAYLPGYAEKQARGMFPGIAKTDAIDAEVIARAARGVPGALRPAAEEPEGAASLRILSSQREFASSARTRAKNRLRATLLEADPALEGAVDPSSRWQVSLLAEFGGAAGCSAAGWRRFSSAAARAGAPAAGARRLWEALLASARSERRLPAGEDVAVRMLAREIASLDADIEALDSLVADSLAGNETYECLLTVPGIGPKTAAALVTSIDISAFRGHDELASYCGVAPSDRRSGTSIRSTSPHRGGNRQLKNLLIFSCNSLIGTDNRFGRYYGECRARGMRHNKALKAVARKRIKVIYAVMRDVAPYAA

SEQ ID NO: 197006 - protein, 418 aa, unidentified
MSRTLAKKLAQVKPGTLFVGVDLGLDRNVAVMVNEGGQRLVKFAFPHTQDGYAYFRRQMEKLRAQHQAPATLVGMEPSNYLWKLLAAELEKHELPYRLVNPFTVKKHREGDQLDRSKDDVRDAFTIADLLRTGKYTETQLLHGGYAELRQYATLCGRLDCEMTRHKNRLHSVVGQLFPELKRVFKDLTGRTAVAMLQNHAAAAVVRDLSVEDFIAAVRHDYVGPRLCVSKLRQAHRLAAISVGLQDGVQSLQLMVQQQLQALALLERQSTEAQKAVIDCFLALPESRYLLSIHGLGLVSAAVILAEIGDPSQYHNGRQWIKLAGSQPAPNVSGRRTRSRTPMSRKGRSRLRTTLFFAVMRLVQIDDSFAREYLRFRQRQENPLTKMQALGALMNKLLRILWALVRQQTLYNPAFMHTG

SEQ ID NO: 197007 - protein, 396 aa, unidentified
MFYLGIDQHRKQLTVNLRNEAGDVVLRRQVSTNWQKVREFFAQLAERTSADGGYVAILEVCGFNDWLLKLLAGEPNCRQTLLVQAVERSRHKTDRRDANRLCELLWTNRERLLNGKKVQQLRVIQPPTAADAEVRQLTALWCRATRRRTRTINAVQHLLLKHNLQRACPTKGLKTKRARAWLLTLELPGIDRLEMDQLLDQWALWDRQSERLAQQVQWEHPRHAPAQLLATLPGCGAFSSLALACRVGDVSRFAGPQSLANYWGLTPSCRNSGEAHERRGSITKQGSAIARFVLGQIVLHVLRRDGKLRRWYKQLKNRRGSKIARVAVMRRLTNIIWHMLRHNEPYRLAEPCPRRQADDSREACLTRAPTRATSVRARQKGAAPTAFTAASDLGTG

SEQ ID NO: 197008 - protein, 427 aa, unidentified
MLKHNIQPDPAEEFAAFLALDWADEEHAFHLQVVGQSKIETGTLEQKPHVLGPWVAQLRERFGGRPIAVGLEQSRGALIHALMAYDFLVLYPIHPTTVAKYREAFKFSGAKSDPLDAGQILEILTKHQDRLHRFNPDTVETRLLGRLVEDRRKAVDLRTTHLQALGANLKEYYPQALELTSGNLSSRLAGDLLIKWPTFEDFQQAKPSTLKRFYYGHNVRSPELIERVLTLAEKSQALTTDPAIVESGRRLSRMYVGLIQALNPVIEDYAQRIQRVFDAHPEVKIFTGLPGAGPALAPRLLAFFGTDRSRYAAALNVQSFTGVAPVTQSSGKSRVVYARAACPKFDRQTFHEFSRLSVTHCQWARNYVQYYTDKGKKYHTIIRALAYKWIRILHKCWKERTPYNEDQYMQTLKKRGSIFATLHLQKT

SEQ ID NO: 197009 - protein, 371 aa, unidentified
MQDTIKYVGLDVSKEKIAVAIADEGRDEPRYWGMIPNTPESIRKLVKKLGEKENLRVCYEAGPTGYGLHRLFLTLGIECEVIAPSLIPKKPGERIKTDRRDSIKLAKLFRAGELTPVYVPTEDDEALRDLVRAREDAKEDELRAKHRLSKFLLRNDIHPPFKGKKWTRRYREWLNTLKFERSASKVVFQEYLYHLQEIEQRVKRFEEEIKLQSTEGYHAPMIQALQSLRGIATITATSLVAEIGSFKRFATPKKLMAYVGLIPSESSSGETRRQGKITKTGNRHVRRLLVEAAWSYRFPPAIKGDLKKRLEGQLPNVQMISWKAQNRLHKKYFRLLSRGKAFGKALTAIARELAGFIWAVTQEIENSSMAK

SEQ ID NO: 197010 - protein, 442 aa, unidentified
MRGVPEEIPDAQSEQILARVCAVDVAKGSGMVCVRLPGEGGRRISRVWPVPATTNAVGDLAADLVTAEVEKVTVESTSDYWRIWFYLLEAAGLDVQLVNARDVKNVPGRPKTDKLDAVWLAKLTEKGLLRPSFVPPVPIRMLRDYTRMRVDLVRDRTRYWSRLEKLLEDALIKVTSVASTVRTVSTRDMVEALIAGERDPQVLADLARGPLRSKRAALVEALTGRFDAHHGELARILLNQIDHLDAEIATLTERIAVLLDQIDPAGPPLPPGGAGTVAVLDARRRLAEIPGINTESAQLIIAELGLDMTRFPTAAHLVSWAKLCPRTLQSGTSITAGKTGKGNPYLKGALGMAAAAAARGHGTFLSERYRRVVKRRGKGKALVAVARSILVIIWYLLADPSARFQDLGADFYDRRVNTTRKINNLVRQLEALGHTVTLHPAT

SEQ ID NO: 197011 - protein, 394 aa, unidentified
MKLVGIDVGKNSHHFCVMDKETGEFNVTPSSFSNNKEGFDFLINSLKPYSKKSILLGMEDTGHYHVALLKFLLSNGYTVALINPKTTDLTRKMEGGITKNDKLDTITICDVLDTPERKKQYRITKVDRFDLYEQRQLTRHHHNLKEELNIYCNRLQKSIDLVFPEFNTLFGSKYGVVYMNLLKTFGSAEAIASTDIRTIRKCFEIKGRGGRISLTAEKLKECAKNSIGISSEVETIQIKHLVSQIMLIKEQIAEIDKKIEEFSIKNNSPILSIPGISHFSGTSILAELGDIGNYSKPSRIIKFAGVAPYHYESSQYNAQHTAITKKGSKYLRKTLYQVILPVINNNPVFKKYYLLKISQGKGHRCAQGHCIRKLLRVIYHLLETGQSFDPALLR

SEQ ID NO: 197012 - protein, 437 aa, unidentified
MKQHDGSRLVEYCQFRKEIRGSTEYLIVGLDIGKERHNAFFGTATGKTLHKGMFFDNTYEGFQKLLMRTDALKVQYGLRKVVFGLEPTANYHKPLGEYLIKGGYLVVLISSAATPKNRELLDGRWDKHDTKDSANVADLISQAKCLYYDCPGEDLLSLRGLLSLKRRLKKEEHGLRVRIRNQLLAQYFPEMDQHFGSAASLNVVQRCLDPSTISIMEYDEFCRTVAPGKTNMAQQRRLTQIWRVAKQSIGCSVGEAVAVEAQIMVAGLNRVRETIKTLEAKIEAICMKFPEYSFLLTIPGFGPDVSSKVLCAIGDPDRFTNGKQVLKMAGFDLCASRSGKTSNSATPVISKHGKAELRYALYQAAIISSLHYKEFIIYHMNKIKGREREKGIGTKMRVKLAAKLLIIAWTLMKKKETFDPKYLITGDSKAQPEKELK

SEQ ID NO: 197013 - protein, 422 aa, unidentified
MLQETADREEIIQRVAALDIGKAELMCCVRVPDENRPGRRLQEVQAYSTMTGSLLRLADRLACLGVTRVVMEATSDYWRPAFYVLEAHGFETWLVNAKDVRHLPGRPKTDKLDCIWLCKVAERQMIRPSFVPPPQIRRLRDVTRYRADLVGARGAEKNRVEKLLEDACIKLSVVASDIFGVSGRAMMDALIAGERSPRALAQLARTRMRGKISALEEAFTGHFTDHHAFLLAKMLARVDAINADIAELDQRIETMIAPFAAAAARLDEIPGIGPVAAAIIIAEVGTDMSRFPTPGHLASWAKFAPGVSESAGKKKGKNATGHGNPYLARVLGEAAIGAARTDSFLGERYRRIARRRGKSKAIVAVGRSILVIVWHLLSDPEARYADLGPGFYDSRVSASRKLRSHVRQLEALGYKVTLETAA

SEQ ID NO: 197014 - protein, 438 aa, unidentified
MSALPVIDPRAAAIDVGSEQMPVSIAGGEPKVFGATTAQLHALRDDLMSQGVTSVAMEATGVYGLCPYEVLEKAGLRLVMVNGKYVKNLPGRKTDRKDCQWQATLPAHGLLKGGFVPQEHIRRLQDYQRLRADHISAAARCEQHRQKALERMNLRFHDGISDLTGVSGLKVVRAILAGERNPVALLALCDCQIQKKKASRGCESLVGTWKPEHLFALRQALAAWEFYRAQIAECDQALEPGLQEFTQDKAAPPRPLPSWGRRRGTNAPQVPQLREMLWKLCGGKDPTAIPGISDYALLQLVAETGTDLAAHWKNENQFTGWLGVAPGARQSGKRRGTQRRSRNRAGRIFCVIARAVGRSADKALGGFYRRLRARRGGSVANLALARKLAELFWRVMVHGLAYVEEGLKKYQDRVQKTEQAWLRKLAKKHGMTLQPKAP

SEQ ID NO: 197015 - protein, 482 aa, unidentified
MKKRNIYQNQSQELLSLFEQAANNAKVMCVPIDYAKKDHVVMFCNGYGDILRKPFSVKNSPEGVDYLTDQVIRSCRQRQISEKYVFFGGEQVGPFADNFINTLRSQGWLVAGVNAHEAKTQRENLQASTDRLDLMGIAKSLLNRRANCSPAQSGIYLNMRTLVRHRRKLVDITTEVRNRIHTVVDRLFPGFLDESKSGVTPFSKSSLWLMKERFSAPQIRRRRRSTLIESLRRLGTKKPEDTADMLQQYATQVLKPPQDYVDILQLSLAQHVKHFYCLQDSIGQLETEIALNLAQTQGAFLTSVRGIGIVLAAGVSAEIGNPFEQKPLNNLVSYCGIIPRVKQTGGPQGETKTGKVAKRCNRILKDYVVQSASHLGLHGPTDLMSDYKRRDAAGQHADFGMARRYLRMAMCLMRTSQIYLPSRLRKAQGQIKQRADYYLMTWPYLRDKWQKLGTLETAFKADHPLGQWRTIVQQFYGIKLTL

SEQ ID NO: 197016 - protein, 428 aa, unidentified
MKNCNSRKLEAIIPGTLIVGVDIAKAIQWARFIDYRGLELRNPLKFPNDKTGFDNILASIQTICKDKKLDNVIVGLEPTGHYWKPFANYLIRHGITVVMVNPYHTKRAKELDDNSPTKNDKKDALIIAKLIRDGRYYEVYMPQDIYAELRVLSNSRISLMKRHNALKSTITAVMDEYFPEITTVFKNPLNGKAAIQILKSYPFPSLILEMGVEGVLREIKKAVKKTVGRKKAQQLVETAKNSIGLNYGTLSAKLRLRLMIAELELLNQQLEQIESAMKQALMGTGYSDIILGIPGIGVITAASFLGEIGDPMRFDNPRQISKMAGYNLVEDSSGKSKSRTIISKRGRKNLRSVLYQMALTAVAVNNEMKELYGYLKTRKDNPLKKKQALVVISKKLITVIYNLVKKKTEYRAELVFGEFRKNQIKSAA

SEQ ID NO: 197017 - protein, 331 aa, unidentified
MFPVGIDVSKNTLDLCMLYDGIKGRIKTRNIQNNRHSVENILRWLRLQHCSPEDVHVVMEATGVYHERLATELHDAGFRVSLANPHRSREFTRGMGIMIKTDKVDAYMLACYAFLKKPHRWEPPAPEIRYLGALLRRRDVLLGDALREENRLEKYLSTDTPADIISSCRRMAQLLREEVSNIERQIKAHIKASPALRRDYTLLTSIKSVGPQLGMHMLVVLRSHNFVSAEQAAAFLGVVPIEKRSGTSVRRRPRMSKIGPPQLRAKLYMSALCGKIYNKRMRNIYDEMCLRGKPKMVAIGALMRKLVHWCYSVLKTGTVINDESLKQVLST

SEQ ID NO: 197018 - protein, 313 aa, unidentified
MTLPVFVGIDVAKATLDIAARPSGERWQLANEEAAFPLLLARLRPLAPALVVLEATGGFEHAVVAALAAAGVPVVVANPRQVRDFARATGQLAKTDILDAQILALFAERVRPVPRPLPDAAAQALDAVLTRRRQLLEMLTAERNRLGVARAPVARRIRTHVRWLERELADVDRDLGRLIEQSPVWRAQDDLLQSVPGVGPVVSRTLLGELPELGRLTHKQIAALVGVAPLARDSGTLRGKRLVWGGRAPVRAVLYMGALVATRWNPIIRAFYQRLRMSGKPPKVALVACMRKLLIILNAMARTGTRWRHTALA

SEQ ID NO: 197019 - protein, 377 aa, unidentified
MEIAIGIDVHKEKCAAFAKFAGKGEPRPRHEMFLERFNERFRRFDSDYRGMTELADFVKDHGVHVLIENSTKSQDVYWMLRGLGLEVTVAHATDLKHISESMNKNDDNDAAQLAGYMRRRLWGEIEFAQCYIPMQETLLQRELCRYDLRLRSELTALKCQIHAHMLIRGWKLTREYPNIVCTAALRELNAADIDIFRFDVAKAKYLKQLVAETDRALRARMETNRMFEIIWSIPGFGILSASYMACMIDDLSRFRDGKSLSAWMGLTPKLDESADKPKNCGITRRGDPEMRKLICQATFVHIFHSESFISEKYRRLKSRGKSHNEALVACANSMAQMIFAMLRDDTKYSSDPKTLSKTRALADSEEIEDEMEASARA

SEQ ID NO: 197020 - protein, 317 aa, unidentified
MKKHSILCAGIDIGKRKLDVALDGKEERLQVANTDDGHRELTTWLRRHRIKRVGIEASGGYEQAVVSRLRRDGFVVVVFQPMQVRAYARFHLQRAKNDKIDAALIAACTVEAKKIHAPPDPRLVALAGQQTLIDQIADQIARFKNYREACRDPRSAQFWNDEIKRFRGLFKKELQQLVAAIRRHPDLAERLGLIASVDGIALRTATTILVRLPEIGRLSREQVAALAGLAPFDDESSERIGERHIGGGRERLRNNLYSAALAASFHWNAELIALYKRLTAAGKEHKVALVACARKLLIFANAVVARGTPWMSRAAAR

SEQ ID NO: 197021 - protein, 466 aa, unidentified
MRQLETNTRRQRRAAMRAAAKGEAFPLVRPNAAGIDVGSRVHYVAVPPELNLPVRSFDCMTEDLNALRDWLKTCGVKTVALEATGVYWIPLVEKLEDSGFEVYLVDARQTRNISGHKTDVKDCRWIQKLHSYGLLAPAFRPEKSITVLRSYWRQRQGLIASCAQQIHLVHKALDQMNVQVHKVLSDITGQSGMRIVRAIVAGERDREKLASLCHSGIKCTQAQVARALEGNYRAEHVFALGQALEAHDFFQRQLEAADRALEAQIATVPSRHTEPREGGPQAQTRAKRRKNQPHFDLREQLRRIAGVDLTRLEGIDAMTAFSVFSETGMDMTRFPSEKAFSSWMHLCPNNRITGGRVHSRRVRPGVNRAGQALKVAAQSLHHSKSALGAYFRRMKARLGPQKAIVATAHKLARLIYRLLKYGEAYVAQSEAQYQQLTRERALQQLTRRAQHLGFALVCTATGEVVS

SEQ ID NO: 197022 - protein, 339 aa, unidentified
MEHVAIDLGAKKSQICVRSADGRILEEKRWPTRDLEAYLTDRPTSRVVLETCAEAFCVADAARKLGHETRVVPATLVKTLGVGARRLKTDQRDARALSEVSCRIDLPSVHIPRVESRDRKTMCGMREALVGARTKVINTVRGWLRSRGRRIERGGRASFRRRVEAAWQDQVPSYVERQLQVLEVLNAQIAAADVEVKSWAEADETCARLTTVPGVGPLTALRFVAALDDVTRFENAHQVESYLGLVPGESSSSERQQRLSITKAGPRALRWVLVQAAWALHLRCRRPEAIPLQLWAQRIEQRRGRRTAIVALARKLAGILFAIWRDGSVYDGGRGAKMI

SEQ ID NO: 197023 - protein, 374 aa, unidentified
MSHHSEAYVAFDTSKLRNAVAIADAGREGEIRFLGEIDTTPAATAKLVKKLAAKYERLTFCYEAGPTGYGLFRQIQGLGHACIVVAPSLTPQKPGDRVKTNRRDALGLARQLRAGELTAVWVPDARHEAIRDLTRAREAAVEDLRAKRQQVSSFLLRLGRHYLGKKTWTKAHMNWLTSQKLEHTEQRIAFEEMLLAVRQAQERIGRLEDAIRAAVPDWSLAEVVTALMAMRGIDLVAATAFLAEIGDLSRFRTPRELMAYLGLVPSEHSTGDSVQRVPITKAGNRRARRILTECSWSYRHPPRVGKKKQEKVAAAPRPVREIAWKAQHRLAGRYRALIRKGKKPVVAITAIARELAGFIWAVNREVAINRAPVM

SEQ ID NO: 197024 - protein, 463 aa, unidentified
MAAVMIGVDPHKATHTAVAISAAEEPLGELQVRACAAQAERLLAWAAAWSQRTWAVEGAGGLGHLLAQQLLAAGERVLDVPPRLGARVRLLAAGDVNKNDPSDARSVAVAALRSPGVAEVRPDDHAAVLKIWSKRYRDLGRTRTQVVCRLHAVLCDLVPGGVSRPIYASRAARILQQITPADAVAAARCELAAAFAEDLRRIDAQTRGTRKKLAAAVAATGTSLTRLSGVGPVIAAAVIGDVRDVSRFPGRDHFAACDGTAPIEVSSGPRKICRLSRRGNRRHGHAIHMAAVTQIHHRHSDGRACYDKKLAEGKTPKEALRALKRQVSNAIFACLQAGARRAAARAKGPGGQQGNDSVAARPDCTPGTGSSDKPLPGPATTLRPRPAPRRQGQPGRSDPPRSVTSPAGPGAKPAIPRSLPSCRRRRCRSRWSARSEARTNDPERRQDDGHTRPRGRPRVKVRS

SEQ ID NO: 197025 - protein, 369 aa, unidentified
MGHVTSIGLDVHARSVTAAAFNLYTGEIITRTFGYSPVEIAEWILSFDSPKAVYESGVTGFHLARTLRSFGIDCVVGAISKMQKPPADKRRKTDKADAEFLARLLATHNIVEVFIPDEECEAMRDITRALEDVRDDIIRAKQRLTKFLLRHGHVFDEKNDKGQRKGNWTKAHWRWIHGVKFAEVADQETLAHYISCVSRAEADKDNLEKLILAHAKKPRFKERIDAIRCIKGIEIITAFSLIVEAQVFSRFPDAKSFAAWLGLVPSENSSGETIRKGGITKAGNAHGRKLLIEASWHFVRSSPEPKKLESDQYVTSRVRNHANKAVERLLKRRTHLHKRGKKPVVANCATARELAEWIWAIGRMVEGTL

SEQ ID NO: 197026 - protein, 411 aa, unidentified
MLDVKVENCAGIDVGKKFLAVCVLTGPADRKPAQEVRRFGTSVKELERLRAWLMEKKCTEAVMESTGSYWKPVFNILEGSLKIILANPEQVKALRGKKTDPNDSRWMASLLRHGLVQGSFIPPRDIRELRDLTRRRRTLVGDGAAEKNRVQKILEDANVKLGNVLSDVFGTSGQAMLEALLENKRSAPEIAELGHWSLAPKIPQIVEALEGHRMTDHHRFMIRQCLGHMRHIEEMIEELDKEIGVRLKPYQQQVKLACTVSGIKPTAAASILAETGMDMSPEGPFPSCHHLASWATVCPGNNESAGKRKSGRTRPGNRWLRATLTQTGWAGAADKKSLFQFRYQRVKLRRGGQRAVMAVAHAQLIAVYWALRNGTPYPEQVQRLEQDRREAQIRYHLQKLTKLGYEPDMHG

SEQ ID NO: 197027 - protein, 350 aa, unidentified
MLIIGCDYHPGFEQIAYVDSETGEFQERRLKHPEEAEMFYRTLWEQGVKVRVGMEASGHSRWFERMLEELSFELWTGDAAKIRAKRVRKKKTDREDARHILQLMLKDDFPKIWVPTWQNRDVRQLLWHRHRMVQTRTRIMNQLQAVAINEGVRYKKRLWREAGRKQLESLSLAPWASRRRKDLLEVLDRINPTIAELTQAIEEEAEKCPQARRLMTHPGVGALTAVAFVLIIGEANRFDCGKQIAAYLGLVPEEDSSGERRRLGHISKQGNSLLRFLLVEAGQATARCDQRWRNQFSHLAQRRGRKIAKVAMARRLAVRLYWMWRREWNYEQLQSFGSHVGQPGNPHGVQ

SEQ ID NO: 197028 - protein, 465 aa, unidentified
MAARKKKRMSAQVVEDEDYQLHYEKVAGIDVAKESAAVCIRLPPAEGKTHRTSHLREVIATVPAITELAWELKTLGVQMVSMESTSDYWRIWFIVLEEAGLAVQLVNSSQARSLPGRPKTDKEDARWIARLTEMGLLRPSFVPPPEIRALRLLTRHISDLTADRTRYWQRLEKLLEDGLCKLTSVVSKLAGHQTARAVIEAMIGGERDPRALAALGKGNMRDEKLPALAAALTGMRFGPEHAGVAASLLAAIDLLEEELRVAEDAVAAKLAAIPASWGVDADGATGPDAGREEGAPVLPAVDRLDEIPGLGRESAAALIAEIGLDMSRFPTPEALVSWAGLTPTARQSGPRKGRGKKGRGNTYAKHIAVLAAYAAANTDTFLGERFRRLASRPGGGGRKKAGCAVGRSILVIVWHLLSDRASRYRDLGPDWHARHTDRNRKARSARRQLEALGYDVIITLREDAA

SEQ ID NO: 197029 - protein, 465 aa, unidentified
MKRNRWTKGHKPRQHISLLERINPDVAGIDCGSAEHFVAVPVGRDPDPVQSFKTFTADLHRLADWLAACGVRSVAMEATGVYWIALFEILEARGFEVIVTNAHHVKNVAGRKSDVVDCEWLRELHSVGLLRGSFRPAEAITALRGYVRHRDTLVADMSSTIQRMQKALVQMNVQLPQVITDITGTTGLAILHDIVDGRTDPQQLVLHRDPRCHASPEQFVAALTGNYRPEHVFALRQNLALFEYYQGMLAECDTAIERHLQALADQTEVPAAPLPPRRTKAQPRSKEPRFDIRGHLYRLTGTDLSQIDGIGPYQALRLISEIGTDMGRWPTEQHFTAWLTLAPQNKISGGRLLSSRTPPSANRAATMLRMVAMSLARTQTALGAFYRRLAARIGKAKAITATARKVAILVYRMLKGEIQYQDPGPDAYDARQRQRLVRKLHKRAEALGFALVAIDTGELLPTGVS

SEQ ID NO: 197030 - protein, 325 aa, unidentified
MQSGANYTGIDISKSFFDVAFTVESKYRYYKFSNDVSGFKALLEVLPGNSHIVMEASGPYYLQLACYLTGHGIAVSVVNPLVIRRFSQMRMSRAKTDKKDAMMIAEYGKTEQPDLWHMPEQHVITLQQMEAVLSNLSKERMALNNQLESFTHTGMLDKALKSMIIKELEHKDELIKKVNKAMQGIAEQHYAEMLSNLESIPGMGRKTAMALIVLSGGFDRFDDYRKLSSYVGLCPRLFESGTSVKGKSRICKMGMSRIRAMLYICSWSAMRYNKACKELYHRLLAKGKAKKLALIAVANKLLKQAFSIATQKTKYNENYSNYICF

SEQ ID NO: 197031 - protein, 334 aa, unidentified
MNQKYFIGIDISKGKLDVAVILSDHTLVVESVIPNNVKKIKSFLNGFVKKQKAEFSQITICCESTGIYNGPLRQASAELKVGLWEEHALRIKRASTDMRGKSDRKDAKRIAEYLLRYLDKSVLYKQPSKVLVTLEHLHKVRETLLGQKLAMQNQMGESKTFDPDGYKVLSNHYKQIIAQIESQLKKIDLDIQSQLNQNEEIQNNLNLMKSVPGVGKQTALQLIIYTQNFTIFKSVKHLACYAGVVPFQNESGTVIKRARVSKMASIKLKTVLHMAALAAVRTKSELKSYYIRKVADGKNKMSILNAVRNKILQRIWAVIERQTPFLSQENFRPI

SEQ ID NO: 197032 - protein, 323 aa, unidentified
MEKVIVGIDVSKDRLDVAVRPSGEAFVVARNAAGLEELVTRLAGLGAHLIALEATGGFETVVAASLGAAALPVVVVNPAQIRAFAKALGKRAKTDPIDAAVIAHFAEATTPEPRPLPDEATQLLADLVARRRQIIAMIGAERQREKRATARSLKKSIARLIGANVYRERQALTQKALEKELTSVDTDIDEAMRASPAWREKEDLLASVPGVGPVIARSLIAELPELGQLTRKQIAALAGLAPWTRQSGQWRGKSFIGGGRTAVRTALFQGAMVACRHNPVLKSFFHHLTTAGKPKMVALIAVARKLLIILNAILRDQKPWQTA

SEQ ID NO: 197033 - protein, 441 aa, unidentified
MAMRKRELTVMHPNAAGIDIGSASHYVAVAPDQSEEPVKEFGCFTEDIEAMADWLIECGVDVVAMESTGVYWIAPYEILESRGLTVYLVNARHVRHVSGRKSDVLDCQWLQQLMSFGLLSGAFRPAGEICALRAISRQRDTLLNEQARQVQRMQKALTQMNVQLTNVIADIVGKTGQDIIRAVVAGERDPHKLAKLRNYRVHASAETIAKSLEGNWREEHIFCLSQALSLFDTYQALIVAVDAKLEEMIKPMRQHQEALAANKNKGRGKNAPAFDARNALYQWAGVDLTRIGGIDVSTALKVLVEIGPDLSKFENAKRFASWLGLCPGTKISGGKKLSSASKRIPNRVTQALKLAAQGLHRSHCALGAYYRRMAARMGVGKAITATAHKLARLIFAMLTKGGEYVERSQEQYEDQMRKRTVAYLKRKAASLGFSMQPIEAV

SEQ ID NO: 197034 - protein, 436 aa, unidentified
MEEVEDEPLFAERVAGIDIGKREVMVTIRVPSDTRRGRRQQETREFRAVRKDLLALADWLRAWGVTKIGMEATGDYWKPVYFLLEREGFDCVLYHAAQVKALPGRPKTDKLDSVWLAKITERGSLASSFVPPEEIRRLRTHTRYRRHLVQARTAEKARCEKLLEDAHLKLSSVITDIHGVSGREMLAAIIAGQRNPKVLAQMARTRMRGKITQLEEALDCSFFTEEHAFVLAMMLANIDHLTAQIKELTGKIEALCQPYLHQIAQLDAIPGFGVITAQDIIAEIGVNMAVFPTAGHLCSWARQAPQVSQSGGKRKGKNATGRGNPYLGGALGESAVNAGRTQTFLGTKYRRLVRHMPKKKAQGAISRTQLVICYELLSDPEAVYQDLGTDHYERRANIRREVRSHARAIERRGYKVILEPIEPGLDPDILPVTKAS

SEQ ID NO: 197035 - protein, 309 aa, unidentified
METSPAQVPSFTVGLDVGNRLIELCLIDANAAVVERDRIPTTSAAVQERFEAMPSARICLEVGVDSAWISRLLTKIGHEVLVANARTIALIHKSNRKTDRSDAEALARLGRLDPQLLRPIQHRSEAVQRDRMLLSARDQLVSVRTALINHVRGAVKTVGERLPMCSAEAFASKVQRLIPKALATALRPLIRQIATITKDIKEYDRGVEALSQSNYPATKLLRQVHGVGPITALCYALTIEDPARFQSSRQVGAYLGLTPRKHASGDSDPQLRITKAGDPMLRRLLVSSAQYMLSRNGTDCDLRRYGQRR

SEQ ID NO: 197036 - protein, 404 aa, unidentified
MSVHVAPVTSSTIVVAVDVGKTSAMLSVTDGARKRVLGPVEFSMTRSGLVATVHRVEAVVVASAQVKVGVEAAGHYHRPVLDYGWPTGWEVLELNPAHVAEQRRVVGRRRIKTDAIDLEAITDLLLAGRGQLITEREVLIGELSAWAGQRSRRVATRSATKNQLLAQLDRAFPGLTLALPDVLGTKIGRLITAEFADPARLCAVGVSRLIRFAAARDIQLRRAVAERLVTAAREALPTRDGVVARRVLAADLGLLADLDTQIETAERELAALLPASPYATLTSVPGWGVVRVSNYAAALGDPDRWPGPRQIYRASGLSPMQYESAGKRRDGTISREGSVALRRALIDLGLGLWLTEPAAKAYAAELKSRGKPGGIIGCALAHRATRIAFAMVRDHTSYDPSRWA

SEQ ID NO: 197037 - protein, 360 aa, unidentified
MAQVRTWVGLDVHAAKIVAAIADSDSGELAVQRMGGQTEQVAKFCTALPAPVRVAYEAGPTGFGLARALAARSIECTVAAPGKIERPAQDRVKTDRRDAERLVRLLMIGGLHPVRVPTPAEEAMRDLVRAREDVRGDLMRARHRVGKLLLRHDLRFEGNNWTQRHLDWLGRVELPEPVAQSVLLDGIGAIDALLVRREGLEAQMGALIEGSPWEQQVARLRCLRGIDTLSALGLCAEVGDFERFQRPAQLMSYLGLVPSENTSGEKRRQGSITKSGSRHARRLLVEAAWHYRRAPRKGRELRRRQEGQPQAVCAISWRAQQRLHRSWVRLDAERGKRRTLCAVAVARELAGFCWAVTTAD

SEQ ID NO: 197038 - protein, 396 aa, unidentified
MFFLGIDIGKNKHVASMVDEEGKPVFKAFSFANTTEGGESLLAKLSSCGVNSGSLEIGLEATGHYWLAVYSYLHDNSYKIHVINPIQTDGWRKGIEIRRRKTDVIDSLLIAELIRYGDFIEARLPDEAVFSLKQLTRFRSCLVDSIADLKRKVICVLDQVFPEYESVFSDVFGKTSKEILLKFSTPADLESVSSETLADLLASLSRKKLGREAADKLSSAASKSFGVTFCRDSFSFQLRMLIKQIGYIELQVEYTETEIADIMSELNSPILSIPGIGKTNGAVILGEIGDINRFDNPAKLVAFAGIDATVRQSGEFEGSSNHMSKRGSPYLRRALFQAALVAASGRNPDPVLRAFYLKKIAEGKHHSTCIGAVSRKLCYIIFAVLKENRPFVKRIP

SEQ ID NO: 197039 - protein, 425 aa, unidentified
MNYKQNEKINQVKESTLVVGIDIGSTTHYARAFDWRGIELGKVFPFSNSREGFENFKDWMQRLQDKYKKSDVIVGIEPTGHYWFDLGAYLEDEGILLVMVNPYAVKQTKELDDNSQSKNDRKDPKVIAKLVTEGRYSAPYTPDGVYADLRIMVANRKRLIRELTQIKNRFARWFAIYFPEYKEVFGDYEAQSSMMLLKKACTPEAMVELGAEKINQIWRDAKLRAVGMKRATTLCETAKRSIGLKKGSSAAEYEMKLLLADYEYKMAQLDSVMEEIESLCKKIPESEQMLAIKGIGVITVAGFLAEVGDVRRFESPRQIQKLAGLSLRENSSGKHKGQTTISKRGRSKLRAVLFNAAIPLIAKNPEFRSLHEYYTTRANNPLKKKQSVIAISCKLIRVFYAILANGVTYDPEKMISDIHRSPQAA

SEQ ID NO: 197040 - protein, 416 aa, unidentified
MNDQRDKACGADIHKNKIVATILSLSGTKNQSEFGTTLPELLKLKSWLIDNGCNVVAMESTGTYWIPVHSVLEDSMEVIVANPYMIKHIPGKKTDLIDADWLAELCLKDLIIPSRIFPKEARILRNLTRAREGLVKIRTRFKNKIHRDLSSSHIKLSSVVTDIFGKSGLHILRGMLDGRSIDEIIKSIPSNRVKKNADKIKEAIENNLDPSQIFLIECSLDLIGSVQDKINAIDADLKRKMNTKQKNLKIAMSILGIEFTSAATILAEIGNYRNFSSPEQLASYFGIVPFVNQSADKLHNGCITKHGSPHLRWIMVQVAHAASKKIGSKLRKFYLRIRARRGANVAIVALARKILCILYHLLMNQEMYEEPGAAKRTRPIRIDQSPSQREFTAQEMIDILRKSGYQIRKMDSGACG

SEQ ID NO: 197041 - protein, 341 aa, unidentified
MQIHSIGIDLGKTTFHLVALGTSGKILVKKKFTRKQLLIYTANLQASLIGLEACSGAHFLGRALRQQGHDVRLIAAQFVKPFVKSNKNDFVDAEAIAEAVERKNMRFVPIKTDDQLDLQAIHRVRDRLVSRRTAVINQTRAFLLERGLVFAQSPAKLKIAMPDVLENAEADLTPMMRNLIDLLWNEWKLIEEQLSELNDELERICAADAGCTRIRQIPGIGPVVATAIVAAIGNGAAFRKGREFSAWLGIVPRQYSTGGKTNLLSISKRGNVYLRKILIHGARAAVLRIKRDRAPIGAWLDALEARAHKNVVVVAMANKLARTAWAVLSSGNEYRPTVKPA

SEQ ID NO: 197042 - protein, 410 aa, unidentified
MVERFVGIDVALREHRIAVLDRDGEAVGPSFTIAASKDGVATLLRTLDARGATAAQTLIGLEASGHLWENLEAALIGAGYRVIVLNPRQTRRYRDVVRRQAKTDDIDAHVIAGLLRSGAAQASYVPDEQIQSLRELARLRARLMADRQDYLRQLVAQLDVVLPEHHAVLGDLLTARARGILAPFPTAQHLAHANPRAIRRAAAEAGARGFSLDDATGVRDSARRSLYSGKAAAARAHVVRTLVSQLERLTRAIDEVDCAATTLLPPSEPGTGPSDAELLQTIPGIGPQTAATLLGELGALTRFTDARALGAYVGFYPVINESGGRAATPHLSPVGSRIARHSLYLAAVNAVRRSGEWRTIYLRKKAQGKTAKQALIVVAVKLLHAVYAMLKHRQPYNPSRLLVAPATIGS

SEQ ID NO: 197043 - protein, 340 aa, unidentified
MGEITTVGIDLAKNVFSVHGVDAHGKTVLRKTVSRGALLELMAQLPRCLVGMEACSGAHQLARDLQPLGHQPRIMMPKFIIPYRRNQKNDGNDAEAICEAVARPNMRFVPIKSVEQQAVLVVHRVRKELVELRNGQINQARSLLAEFGVVIAVGRYRFRQQIGAALDDPRVPQLARQVLHEVNARIRALDEDILAYDRRISAQVRDSAAMQRIVAVCGVGPITASAVVASVGDAKLFRNGRQFAAWLGLVPRQFSTGGKPVLGRITKQGDVYLRTLLIHGARSALLTLTRRDDKLSRWASALIARRGFKKACVALAAKNARVIWALLAKGEAFQLDRAAA

SEQ ID NO: 197044 - protein, 520 aa, unidentified
MSDRSGLSRGDRNRNARLARLRELLPAENAIVGIDLADDRQAAVVTDHDSRVIARRRVSARAWELGGLLDWAVSRAAAAGFAAVTVACEPTGHRWRVLDQLAAERGLALVCVQPLLVYRAREGEDLTRDKSDPKDAVIIARLAAGLHCYEPERADAVWARLRHLGARRHQLNTAATAQVNQIRDLLECAWPAVLSASGSPFRSASWRAAVTVVVDRCAGDLAWVRRLGEARFTAAVRRELPRWGAARPCLRIVRAVFAALADPAGVTMHRPGALERVHLAMGDWRDTRARLADVEARMVTVLDELGLRELVTTIAGLTPAGAAAILAETGDPGRFASPRSLVKHAGLCPRDNASGAFQGKTPISGRGRPRLRVAAWRAVWAALPNNPVMAARFAHLTTREDNRLAASRPAPPAPPPCCAGSTSSSPAGWPGTPPSPPGLHRRGRLHEPSTSGTLTTARGNLPAAASRRGRGEPERPSRNHLAHEHGQPRPSPHRARFTLSGTTRLKARQSTRRRRSTRPT

SEQ ID NO: 197045 - protein, 344 aa, unidentified
MLHAGLDLSRRRLDVCLVDDAGELVEHTAAPPDGDGLRHLVGRLRGQRVRAVIESMTGARFIHDTLEELGWEVLVADAQKVKGLAPLACKTDKIDARVLAELSWRDLVPAIWLPDPSIRRERELARYRLHLVRHRTTLKNRIHATLMTFGHPCPVSDLFGHAGRELLDHLAIPDPWRRNVDASLELIDDLELQISRLTVELKRQGADHRYIPLLVTAPGFGWINAFTVASEIGDIERFASPAKLCGYTGLCPRVYQSGTTDRRGPISKQGSRYLRWALFEAALHACNHPIYRDRYQRTKKRLGRQRGPKVAQIDLSRKLTEAIWHMLTRNQPFAPAGAPFRLAA

SEQ ID NO: 197046 - protein, 319 aa, unidentified
MQRIFIGVDVSQDHLDVHVRPTSVRKRFANTAAGIAELLAWVRPLGAERIVFESTGPYQKAAVGALLAEGLPAVVVNARQVRDFAKAMNYLAKTDTIDAAVIAHFGEVANTTVRPLESQEIRDLRELYDRRGQLVRMLAMEKNQRHSAIVAQASTKVLKSIDKHIHYLEGQIKDLEQRMDRLIESSTTFQARDEILQTITGIGPQVSRTLIAHLPELGRYNRQTIAALVGLAPYNDDSGDHTGQRHIRGGRAKVRVGLYQAAIAAIRHCAHMKAFYAALKARGKASRVAIIAVARKLLVLANAMIRDMVPYKAPANSVC

SEQ ID NO: 197047 - protein, 360 aa, unidentified
MPVPARSDAEVPVTVGVDTHLDLHVAVALDHMGRRLDDLTVPTTEAGYAKLLRWAEALGNLERVGIEGAGSFGAGLARFLRERGVEVLEVGRPKRRDQHRSGKSDPIDAELAARAVLAGTAIGEAKDSEGTVEMIRVLRAARRSAVKARAQAAKQLKALLVTAPENLRTELRGLSTAKLVRGAAGFRPGDLPEDVAAATKFALRSIARRYRTLSEEICELDGHLARLVTDTAPALVAVHGVGVDTAATLLVAVGQDPKRLKSEAAFAHMCGVAPIPASSGKVVRHRLNRRGNRDANRALHVVAAERMSRDERTRAYAERRTSEGKSKRETMRCLKRYIARELYKVLVSTVVPTTTSLSAP

SEQ ID NO: 197048 - protein, 448 aa, unidentified
MVQGRKLTRGDRRRNERLSRLRSIVRRDYAVLGVDLASAKQAAALCDHDSQVLARRMFTGDAWVIEEILDWAVPIAAEAGFAGLVLGCEPTGHRWKPLLDRARARGIELVCVNPMLVHRGREEEDFTRDRSDFKDATIIAKRVAELRCYVPYQLEGHWCRLRHLGARRDDQVVLAGSARQCLRDLLECAWPAVLRAAGDPLDAVSWRAAMSVSTDPGVIAAMSYDAFAVAVAAELGRWGGTRRNHRVLRAVHAAAVAPGGIPAERAAACERAEFALADWHRALDQLAEVETRMLACLQALELGELAATIPGVSPVGVAAILAQTGDPERYDCARTWVKHAGLCPRDNESGTFAGTTTISRRGRPALRTAAWRAVWGALRHNPVYRARYTHLTTRPANPLRDGQARAAIAAALLRQLFIVITRRVAWDPATAAGHLPGLTKTTVAPMAA

SEQ ID NO: 197049 - protein, 343 aa, unidentified
MSTKTILKQCLGIDVSMKKIDCCLSVYTQALQIKVVSTSKFENNSKGLPKLQQWIEKKMDKTLCLHVNMEATGVYHEDAAYYLSDLGYKLSIIQPAKGRQYAKSLDEKNKTDRIDAIMLARMGLERELPLWNRPEENLRVLKRLSRERISIIRDKNGLTNQLHALNHSHQAFKDSIKRIKDRIKLADKQLAEIDQQMHDLIRETPVLDEKIKRVITIPGINFVTAATVIAETDGFSNISNRRHLVSYAGLDIVIRESGTLSWRPHISKRGNAYIRAALYMAAVSSILHNQVLRIYFNRLKDKGKPGKTGVIALERKLLILIFTLYKNNTDYIVGYSCNNAGAD

SEQ ID NO: 197050 - protein, 508 aa, unidentified
MGKLKQSSSMPIIHRNAAGIDIGSKFHVVAVSPEITDEPVKTFKSFTGELHAMAKWLKECHVETIAMESTGVYWIPAFEILENYGFEVYLVNAREVTTVPGRKTDVNDSQWVQQLHQFGLLHASFQPSKENAELRAYLRQREKLLDYKAAHIQHMQKALMQMNIQLHHVVADVNGKTGMEIIRAIVQGQHAPDELVKLRDNRCKNSVEVMKAALTGNYKAEHLFSLTQALELIDIYMEKIEACDRVIESTLERLHQLADSMHTTPPKPKGRDKSKNAPSFDVRQSLFNMIGTDLTQIDGIGSSIALKLVAECGTDMTKWPTSKHFTSWLCLAPCNKISGGKVLSSKTRRSSSRAATYLRLAAVVVGKTNTALGAFYRRLAWRTGKAKAVTATARKLATLFYNALRYGMEYVDKGANYYKEQYRKKIIGGLRRQAESLGYTLQEKVPALAENRSFLEKAERERSLYGSEFEIQLRNKLTQRAIPFDQKWEKYFVARRVNKRQNSSKGQN

SEQ ID NO: 197051 - protein, 334 aa, unidentified
MDKVTTVGIDLAKRVFALHGVDASGRVVLRKTIRREQFVETVAKLPPCLIGMEACSGSHEWARRFQGLGHSVRLMAPVFVAPYRKSGKNDGNDAEAICEAVSRPNMRFVPVKSAEQQALLALHRVRQGFVEERTALINRLRAVLTEFGVVLPNRTQWVRRDAVAVAEPLPVLARQAVEDLRAHLVQLDERIGAYDRQLEQQAGQSEAAKRLMQIRGIGPLTAVAIVATVGSARDFASGRQFAAWLGLVPRQNSSGGKSRLGHISRRGDAYLRMLLVQGARSVLNTAARHTDHLSLWALSLQARRGMHKALVGIAAKNARIAWALLSKDQTLRAV

SEQ ID NO: 197052 - protein, 367 aa, unidentified
MKKVSTVAAKSSKKISPQKLTVGLDLGDRNSWYCVLDESGQIQLEQRVRTNEKGLREIFGAMPHSRIALEIGTHSPWISRLLTQLGNEVIVANARKVRLIGESRKKDDRLDAQTLARLARIDPRLLYPVKHRSEQAQADLMMIRARAGLVRARTGLVNTARGLAKSYGERLRGCNVRNMNPEKAEGLSPELQTALEPLLACIESVSEQIREYNQRIEKLAQDNYPQVALLKQVKGVGTLIALTFLLTLEDPHRFRKSRDVGCYLGLQPGRRNSGRSEPQMHISKEGDPYLRTLLVQGAQHILGPFGVDCDLRRWGLKLAERGGRNGKKRAIVATARKLAVLLHHLWVSGEVYEPLHNSSSTTMAAAA

SEQ ID NO: 197053 - protein, 433 aa, unidentified
MLGQLKRDRRLWVMEIDQSEQHLIARVAAIDIGKAEMVCCVRVPGTGRARAQEVRTYSTMTPSVLEMADWLTGLGVTRVVMEATSDYWKPVFYLLEEQVPETWLVNARDVKHLPGRPKTDRLDAVWLCKVAERQMLRASFVPPPAIRRLRDLMRYRTDLVAVRTAEKQRVEKLLEDAGVKLSVVASDIFGVSGRAMMAALIAGERDPARLADMALGRMRVKTALLEKAFVARFSEHHAFLLATMLRRVDTANDDIAAIDTQVAAVLDEELHDAAARLMTIPGIGAVTAVAIIAEIGLDMTRFPTAAHLCSWAKFTPLTSESAGRTKGRQSTGHGNRYLARTLGEVAVMAGRSHTFLGARYHRIARRRGKPRAIVAVGRSLLVVIWHLLSQPGATFTDLGADYYETRVNHQRTARTHIKALEGLGYQVTLAPAS

SEQ ID NO: 197054 - protein, 320 aa, unidentified
MMTQNDLVVVGIDVAKDKVDACIRRFKLRQTFPNNPQGRRKLIAWLGKYQVGKAVMEASGGYEREWRNVLHNAGIEVRIVDPRRVRNFALSAGRLAKNDPIDAEMIAWFAETFSQAPGQIPDAAREELAGLAKARKALMDVKIRLQAQNEHAAPKPARKAHARILKSLAAEIDKLEVAISAKIKATPEFAERAEIIQSVPGLAQTTSAILIAGMPELGQVSDEVAAALVGLAPYDDDSGNRRGERHIKGGRRWVRNAIYMPCLGAATQNNPVLGVFYQRLIAKGKEPKVALVACMRKLIIILNTMIARRQKWDPSRYSLS

SEQ ID NO: 197055 - protein, 360 aa, unidentified
MGNERTFVGLDVHAWSVTGHALDAVTGEIWQRKLTPDPSDVLGWVSKLPGPVKVGYEAGPTGYGLYRFLNDHGVCCVVGAPSKLHRPHGDRVKTDARDAELLARLLKLEEFAEVSVPSLEQEAARDLVRAREDVRGDLMRARHRLSKMLLRQGIVYTGGQPWTRVHDRWLGAQRFDQPARQTAYEAAYEAVVLTTDRRDRLDAAITAMAADSSYTAVTRRLGCLRGISTLTGFALAVEIGDWHRFTGSTIGSFVGLVPSENSSGQSRSQGSITKTGNTHARRLLVEAAWHHARPYRTPGKTMRDHWEQAPAQARLRGHHGNQRLHQRWQAFTARKKKPVIANVAVARKLAGWAWSLAVLD

SEQ ID NO: 197056 - protein, 337 aa, unidentified
MKYSGIDLHSNNSVVTVTDEEDRVVAEKRLPNDLTKIIGLLMPWQEEMAGVVVESTFNWYWLVDGLQAAGFKVHLANTTAIKKYEGLKHSGDETDARYLAHLLRLGILPTGTILPPEQRAVRDLARKRMQLVRSRTTHILAVENITARQQGARISSNQVKQLTADAVDRMPLPEDVALAIKTNVAVIATLSAQIDLLEKRLQEKLGKRTEHGLLSSVPGIGQVLATTILLETGPIDRFAAAGNFASYARCVDSVRTSNGKKKGEGNTKNGNKYLAWAFVEAANFALRYCAEAKRFYERKKAKTNNVVAIKALAHKLARACFHILKERKPFDVTRCFS

SEQ ID NO: 197057 - protein, 325 aa, unidentified
MQNQTIVGIDVSAATLDICVTGKTQKSVVIKNESAAIRKFFNTYQSDQLLIGMENTGRYNWALYEVLKDLHHQVYVISPLHLKKSMGLVRGKTDKVDAIRIAAFIAKNHTDISQWKPSSPAVQKLKIFLTERNSRIKTKRQLLKQQHDYVKMKHLGLDKTLMKLNSKQLTLIDSQITEIERQIELVIKADQNMDQQAKLIRSVPGAGKVLCWMMIAKTEGFTTITEPRKMACYSGVVPFANQSGTSIKGKQRVSHYADKAIKAVLHLAAMSAIRLKNELRDYYLRKVAEGKSKMSALNAVRNKIVHRIFAVVKNQIPYQSNLLLS

SEQ ID NO: 197058 - protein, 409 aa, unidentified
MGLYCGIDWAENHHDFAILNDLGDVVRRGRVSNDAVGFARLLEAFAEAGDTAENLIPVGIETDHGLWVAALRASGRVIYPINPLAASRYRSRHSVSGSKSDSADAVMLANIVRTDATAHRPLPADTDSALAIRVLARAQQDAVWSRQRFGNEVRSLLKEYFPAALTAFQSLEDGLTRPDARSVLAAAPTPTAAAALTRPQLRAALKRAGRSRFLDRDVERLRGILRTPALRQPPQIEAAMGISLMALLRQFDAACAAAETLAAHVSVLFSEHPDAKIITSFPGLGPLAGARVLAEIGDDRNRFATARGLKAYAGAAPITRASGKKTFALHRHVKNRRLAAAGTIWAFSALQASPGARRHFDARRAGGDWNHQAQRHLFNRFLGQLHHCLITREFFDELHAFPPPLPIAA

SEQ ID NO: 197059 - protein, 368 aa, unidentified
MKKNSIRPKSPKPNKRVCRVTIGMDLGDKASRYCQLDEDGQVLQEGSIGTTRRAMTQTFAKMGRCRVAIEVGTHSPWVSRLLQSLGHEVIVANARQVKLISTSSRKDDRVDAQTLARLARVDPQLLRPIQHRSERAQGHLMVIHVRASLVEARTALVNTARGLAKAVGERLPSCDADQMGVKQMESLPVGLQATLRLLLEAVESLTEKIQALDAKVEQIARSEYPETALLRQVSGVGPLIALTFVLTVEDRERFQKSRDVGCYVGLRPKRSSSGESEPQLRITKEGDRYLRTLLVQGAHCILGRRGPDTDLKRWGLKLCQRGGSNAKKRAIVAVARKLAILLHRLWVTGEVYEPLRNNQARSGVNVAA

SEQ ID NO: 197060 - protein, 408 aa, unidentified
MNPLFVGIDVSSRNNVAYLMKPDGSKHSSFSVQNNLGGAKILSERIVSALESVPLSDLVIGLEATSIYGDSLVYALREDGSLGRFQRKIHVLNPKQVRKFKEAYPDLPKNDWVDAFVIADHLRFGRIAKEVYMDDYRYQALRTLTRSRFDIIQNLTREKQRFANYLFLKCSGIAQAKDIQNTSATTIALMERFETVDDLANADLDELTAFIAETGRGRFADPDAAAKAVQAAARGSYRLPKTVNDTVNQAMAVSIASMRALKEQVKVLDKAIEQQFEIIPNTLTSIPGIGKVYSAGIIAEIGDIHRFDSQASVAKFAGLVWHRNQSGVFEAEHSQMIKSGNRYLRYYLLEAANSVRRCDSEFRRYYDLKFKEVNKYQHKRALALTARKLVRLVFRLLKDNRLYILPES

SEQ ID NO: 197061 - protein, 319 aa, unidentified
MKMKKYSRRAAGIDTSKDKLDIAIDGSKGALEVANDGVGHEQLVAWLSGHKIERVGIEASGGYEKAVVGALRLAGFQVIVFQPKQVRCFAGFELQRAKNDRIDAALIAKCTAFWEELREAPDPRLQDLAEALTLIDQVSEDMARWKTRLESTRGPELRDWIREEIRRLTRIIAIERKRLLRAVKSHKDLARRYNLIESVQGIGMATALSLVIRMPELGRLSREKIAALAGLAPFDHDTGRFKGQRRIAGGRARVRKALYAAALPAAFRWNPHLNALYTRLIEAKKTHKQALVACARKLLVMVNAVVARNTPWIKIEKAA

SEQ ID NO: 197062 - protein, 321 aa, unidentified
MAADQIQFPQLIKVGCGIDVHQNLMVATIRSSNDTYITRSYDGYTSSLTALRDWCKSEGVSHVAMESTGIYWKPVFNILEEDFEIILVNARHVKNVPGHKTDKKDSAWLSKLLLSGLLKGSFIPTQDIRELRDLVRYKKKIAADMASEKNRVIKILEDANIKLSSVLSNVDGAVGTKIITDIIEGNHNPDELLKHYHGKMKASKATLKKSLEGRITRHHQFMLKLIKQSITDKENLITTLDAQIDTASKAYMVEIELLQTIPGVGKSSAISILSEVGGDMEVFATEHHLSSWAGMSPGNNESGGKKKVPEPSTATNTCNQP

SEQ ID NO: 197063 - protein, 396 aa, unidentified
MKNNFTSFVGIDVSKDKYSYCIINESMEVLKRAELTMNYNGFKSFNNILKKYENSIIALESTGSYHLNLLSFLTSKNYTVALINPALIKRFSQTITLRKTKTDKIGANIIVKFILKNLEYVNYFVPTNMDDIVALARVRENIVRHIAKVKTQLKQHLAIVFPELVAQYNVFTDSILAILKKLPTPKHVLRAPKSYLKGIFNELPSKGRKINLTPEKLIELAKNSIGVSTENFAKIIKHDVQMLEFLQKQLNDLTNDFIDSIRKNKKDDMEIISSIKGISSITSAHFMAEIKSIDRFENAKKLAAYAGIDPSIRKSGKMYSKGRISKKGSKSLRRCLYLMASSLIRFNEYFRKYYDKKRTEGMAHRKAMIALCNKLVRVLFAMHKKREKFNPVFHNL

SEQ ID NO: 197064 - protein, 412 aa, unidentified
MQDILTVAMGLDVHRDIIVACLIKGQIGLEPETEIRTFGTLIPEMQKLRDWILETGCRNIAMESTGIYWQPIYEMLEPCFDSDISILVVNARHMKNVPGRKTDMRDAEWIATLLRAGLLKGSFIPAKPIRELRHLTRYRKSVVHDITAQKNRIDKFLQSSGFRFTAFLSDAFGASGRNIIRHLIEAGSIDRAALDKCLKTKTRNRIDEILVALNGSLSVHQRSFLRMIFEHLLALETHKTAVEGAITEEILKHEEAMNLLCSIPGIDITAAASIIAEIGTDMSSFPDAQHICSWAGLSPGNNESAGKRKSTHINKGNPYLKSMLCEVGWIISGKRTLYLSGWYWRVKQKKGAKRATIALARKLLSLIYSMLKTGVPYNEECFEERRKHSERKRAGRMINELQRLGYTVVAPE

SEQ ID NO: 197065 - protein, 333 aa, unidentified
MSQMRFAGIDVSAKSLAVSYEPQPGKTQPLEVPNTPQGHRELCEKLSGSSTPIQVCLEATGNYSLDVALALHQHGIPVMILNPRAARDFAKALQNRSKTDATDAQVLLEYAKRMEFRPWQPPAQSLLQLRDLSRRIKALTKQVTQEKNRLEAASCCQGFSSAVRKDIEAHLRYLERSIDKLLRQALKLIDQEPALSQTCQRLISIKGVGQLSAVHLMAELLVLPSDMTARQWVAYAGLDPRHHESGSSVQKPTQISRTGNAQLRESLFMPALTASWAEPHVKAFYEKLQQRGKTRMQALVAIMRKLLHSIHGMLKNQENFQGPKFFALETKTP

SEQ ID NO: 197066 - protein, 343 aa, unidentified
MRLFVGLDVSLAKTSICVISEHGKIVKEAQVASEPDALMHWVGEQDGSIAVIGLEAGPLSQWLHRGLTAAGQDVVLMETRQVKGALKAMPIKTDRRDAEGIARLLHLGWFRPVHCKSVSAQEVRAVLCARKAVQQSMIALELSLRGLLRNFGLKVGAISRGRFELRIGELAEGNPMLEAATGPMLRARASLRQELANLERRVRQLAQDDPVCRRLMSMPGIGAVVALTFRSAVDDPTRFTSSKRVGPWVGLTPSRNQSGERDVSGGITKAGDVNLRRALCQAATVMMHRGRSTWLRTWAAQVTRRRGAKRAMVALARRIAVILHRMWVDDADFRSDITTRHAT

SEQ ID NO: 197067 - protein, 344 aa, unidentified
MIKLTNPTQMLFCGIDVSAKTLAVAVQQQEDQPYQEREFANTPSGHKALLAWLGKWKVAVRVTLESTGIYSLDLALRLDQAERIELAVANPKDALRFTQTLRRSKTDAADAQALAEYSRRMRFSAWTAPNRAQLQLRSLGRHLDDLTEERTRWLNRLHAAQGSVATPRCVLADIKRSLAALDKRIVALRRETMELVREDKVLERRFRLLVSIPGIAEVSALRLLAELGLLTAGMSVRQWVAYSGLDPAHHVSGTSVRRPSRISRAGNRHLRHALFMPALVASKRDPHLRAFYNALISRHKAKMQALTAVARKMLHAIYGIFKTDTPYKGQKLFPEITTAQIHTP

SEQ ID NO: 197068 - protein, 322 aa, unidentified
MNPKNYGGIDVAKKNFVIGIYGQDKTKTGANTPKGHAKAVEYLQKHNVDLVVLESTGGLEVPLANALHAADIRVVIANPQRTHQYAASFSLGKTDHLDAKMLADYAQALDSRKMADDMCYAPPSEEALALEALVKRRSQLVEMRKMEKNRLEQTHASQKASVVAMIKHLGELIAALDKEIDQSNRGGFNGKGEILSEMKGVGRITCATLLSMLPELGKVPHKRAALLVGVVPPPRQSGEKEKKSGCVGGRMVVRNALYMAALTATRSEPKIKAFYEKLMSRGKAFKVALNACMHKLLRILNARMRDYLASLKETEESELQGA

SEQ ID NO: 197069 - protein, 344 aa, unidentified
MESMYYIGLDVHKRKISYCVKDGGGKLHAEGMISATRLDLDHWMKTLPQPWSAAMEATMFSGWIYDHLKPHATALKVAHPLMLRAIAASKRKNDRIDASKICDCLRCDFLPECYMASTAIRERRRTLRYRNLLVRQMVQMKIKISALLMESGVSYNKERLHKVGYFRELLATNPDIDEGLRSLLRQCRETVVRLSKIESAMIRSLRHDWLLTERVERLMSIPGVGPITALTWALEIGDVQRFSSIKKAVSYCGLCGAEKSSGNMVQRTPLSKQRNKHLQTTLIEAAKMAPRYSPSLALLHDRERQRGNANRATLAVARKLVAYLVAVDRGQTHFLMADREVCAA

SEQ ID NO: 197070 - protein, 360 aa, unidentified
MATSYIGADVDSKMTELAVDSGREVRRYRVATTIPALKEVLAGIGGRKRLTFEEGPMAQWLYRNLKGDVDELIVCDPRRNRLISDDGDKADAIDAGKLAELLRGRHLRSVYHSDNDRQVWLKQWVSLYHDRVKDAVRQINKIRARCRMHGVRPPRGALCNEVIWQGWLVVLGRHPVAGQLGLLWEGLEANRRQARMARQTVGRLAKAYPVVAAWQDVPGIGPIRAVTLLAYLDTPWRFAGPKQLWKYCGVGLQRRASGTDQRGRPRPGSLKLAYRVNRRLKEAVVGGAWSAIAQGDNVFADYYGRLIRKGLHEANAWHAVARKMLTVMWGMWKNNSRFHEACVCPGAASQPKTAVVQERP

SEQ ID NO: 197071 - protein, 362 aa, unidentified
MLYLGCDVHKNYTTMSFITEDGKVADTSSFYNDIEELKNLLKKFPKEEFSAVLEAGLNWGVIYDMLDSLEEVKNVSLAHPPKVKAIASAKIKTDKIDSKILGQLLRTDLIPEVWIPCKETRILKDIVRSRAFIVKIKTMIKNRIHDILRKSHVNPPEVKDIFGKYGRMWLEDIELSDRRADKLLRYHLKLKDTFEDMEIELKKWINKEMKTNEDLKLVKTIPGIREVFGPIIVLEIDDINRFPDPAHLHSYSGLVPSTHVSGNTSYHGRLIRGNRWLRWAFIEGAHTSVRVSPYFRKHYDSVKRKAGSQAASIASARKLATIIYKVLKEKRPYIEEYIIKQNKGRSPSVRPSGVVYSRSFQE

SEQ ID NO: 197072 - protein, 348 aa, unidentified
MTIVERARSITGGVDTHADVHVAAALDELGALLGTESFPTTPGGYTELVGWLESFGPVVKVGIEGTGSYGAGLTRTVMARGIEVVEVDCPNRRHRHRAGKSDTLDSVSAARAALSGEAHGQPKGGTGPVEAMRVLLIAKRSARGERTRTLNQMRHLVYAAPDPIRARFQGLTHAQLTGQAAALRPRPGPPVDYVTLMTLRELARRAVSLEADIVRLDGLLEPIVTAHAPGLLSLVGCGPYVAAVLSVTAGDRPERIRSEAAWAHMCGTAPIPAGSGKTDGRVRLNRGGNRQANSALHTIVLTRMSCHEPTQLYVARRREEGKGNLEIMRSLKRYVARETFKHLPRTAP

SEQ ID NO: 197073 - protein, 427 aa, unidentified
MKLTLYVNYIQRRIQTMDVLYKTCCGIDVHKMKLVACLCKGHKQEIKEFSAKTKDIKAMANWLEENQCEMVAMESTSVYWKPLVNIFEMRGLNYMIVNAKDFKAVPGRKTDVLDSAWLADLLRHGLLKSSFIPSREQRELREATRYRKAITEERARALNRLQKLLEGANIKIGSVLSTITGKTTMNLLDYVLNNDEMMDEKTAETLIISRISASVKEVTEAMEGIMTPFQKMMMKQVLTHLHELSERIEEMDIIIDTYMAEYWGAIKKLEQIPGVGKKSAEIILAEIGLDMNQFPTAGHLASWAGVAPGNNESAGKRKSGRTRKGNKILKSTLAQAAKSAAKNKNSFFHAQYQRIAIRRGKNRATLAVAHSILIAIYHMLKDDQEFIDLGSDYYYQFNTEKKINSYLKKLAALGYRVDEHSTISPVG

SEQ ID NO: 197074 - protein, 348 aa, unidentified
MVVVGADVHKRTHTFVAVDEVGRALGHKVVKATSAGHVQAIVWAREQFGNDLVWGIEDCRNMSARLERDLLSAGQQVVRVPTKLMSQIRASARTRGKSDPIDAEAVARAVLREPNLPVASHDEVSRELKLLVDRREVLVAQRTAAINRLRWWVHELDPEHVPGALDRDKHQQALWAVLDKHSGLVAELAGEELLDIIALTDKITTLEKRITVRVRKVAPTLLELHGCAELTAAKIVGETAGITRFRSEAAYARHAGAAPIPVWSGNTAGRVRLSRCGNRQLNAGLHRIAITQIRHPGPSQTYYRKKIAEGKTKKEALRCLKRFIARDVVRRLRADHKTSHQSPQNTAA

SEQ ID NO: 197075 - protein, 354 aa, unidentified
MNYVGVDIHKRYSVLVAVDERGRELARGRISGNSVHAFAQFFEALQGPGKVVLEACWNWGRIYDVLSEIEQVEEVVLAHPLKTRLIAEAQIKTDSLDALALATLLRGNLIARAHVPSKATRARKELLRQRLYWARLRTRVRNRVHAVLDRQRELEMPQCSDLFGRKGLNALSKLRLAEPDAILLGEELDLLKLIDSQIKAQEGRIVAFNANEQATQYLQSLPGMGKILGVVAAAEIDAIERFDGAAKLCAYAGLVPTTYGSGGKVHQGHLLKSRNKWLQWAFIEAAWVAVGCSSYFGGIYRYHRARGKKANIAITIVARRMCRIAFTLLKERRNFQEQHRTFPGRSAVRLTAAA

SEQ ID NO: 197076 - protein, 410 aa, unidentified
MEAIVECCAGLDVHQATVVACLNNGPAGKRTTKEIRTYGTTGVELREMRDWLKASGCTLVAMESTGVYWKPVHAELEGHFDLIVGNAHHIKNVPGRKTDVKDCEWISDLARHGLIARSFVPPRPIRELRDLTRYRRKLVQAQATERNRLIKLLESASIKLSGVASDVFGVSGRAMLQALIEGEQSPTEMAQLARGRMRRKRPELARALDGRIDEHHRFVLRLQLQRITAAEADLAQLDQRLSEKLAPYVGELGRLMQIPGVDWVTAAAMLAEIGVDMSVFHGAAHLAAWAGLCPGNHESAGQQRGGKTRKGNVWLKTTMVTAAIAASKTRRSYFAEKYRRLGARRGKMRAAVAVAHKILVAAYHILSRQSDYRDLGPDYLDRLNHHRTAKTLANRLRAMGYEVQITHKAA

SEQ ID NO: 197077 - protein, 367 aa, unidentified
MRIIGCDFHPSWQQVAWLDVATGEAGEGKLVNGDGEAERFYRSLAEPALVGVEACGNSQWFLELLQQLGHEVWVGDAAQIRASYVRKQKTDKRDAAHILRLLLENRFPKLWVPSVEQRDVRQLLIHRHKLVEIRTRVKNGLQHLAMNRGMQKKGKLWSAAGQKAFRELPLQGWSAQRRQDLLALLKSLDEQIGQLDQAAEETAQRDKMAQLLRTQPGVGPITALAFVVTIGDVSRFRRGKQVASYLGLIPRERSSGGRQRLGAISKQGNRFVRTLLVEAVHNVTRLDESFRKTYQQRCHRMAKGVAKVAAARKLAVRLYWMLRTNTAYPEIVRIENSPVVPLDKVEGIVKREFSCGGASAPLARQYD

SEQ ID NO: 197078 - protein, 313 aa, unidentified
MKEEKTFIGIDVSKEKLDVGVRPQVDFMTFANTEDGISLMTDFVKSKQPELIVLEATGGLEMAALRSLVVAKLPAVCVNPRQVRDFAKAMGVLAKTDKIDAHVIARFADSVRPEIRPLKTEETEMLDAFNTRRSQIIIMLTAEKNRLTTASKWTKKDVEKSIKGLEKALAKINREVENLIKKSPHWRHMDKILQSVPSVGPVMSLTILADLPEIGTMNRRQIAALVGVAPLNRDSGKYKGRRAIWGGRARIRSVLYMCVISGICHNPKIKAFYNRLISSGKKHKVAITACMRKLMIILNTMIKNGTCWNESGC

SEQ ID NO: 197079 - protein, 399 aa, unidentified
MESIHPNGERIKRFRELKATLRTQRDWLLVGIDVAKAAAVAQIRLAHTRILERQVVLPMTTTGFTAFWRRLERHQRATGAQAIIVALEPTGTYHQALAQFLVAHGADVVLVDNHVAHLNRRMLDRTWDKHDAKDAANLCDLLEQGKVLFCSLPDEPLASLRRLVRLLRRARVELGACKTRWQNTLRPALGPVGDPLPPAVVAALPAPLRALLPPAERAGGPGRPRALPPGLAAEVADLAARGTAVQQRIAALEATLTRCAAPLPATGLLDSLPGVGGTLAAILVAEIGEITWYTKFSQLRKLAGLDIIRLQSGQWAGTARISRCGRPLLRWALYQAALGASRTPAWRAKRTALLAKRQGDPHAFFKANVELAAKLLRLVWGVWRSGRPYTSARALPPAA

SEQ ID NO: 197080 - protein, 387 aa, unidentified
MFYIGIDIAKHNHEVSIIDDNGKALGKSFSISNSQKGVDKFNTYLDSFNITSENCVIGMESTGHYWINLFSFLVNLKFNVFVINPIQSDAFRKMYIRKTKNDSKDSYIIAQIMRFGEYSSSNISDENIFALRQLSRYRTSLVDECSSWKRKIISILDQVFPEYSNLFSDTFGVTSKELLSKYPLPENMLELSTEELTNLLNKASKGRLGNEKAQEIKESAKNFFGVSFAKQTFSFQIKQIINQISFIESQLKELDNEISKLNSEITTITGIGDVLGACILSEIGDISRFEKASQLVAFAGLDVAVKQSGEFTGTEMKITKRGSPYLRRAIWLAATVASFKDPALSTYYKSLIARGKKHLTAIGAVSRKMCNIIFSVLKNKKVYTPNI

SEQ ID NO: 197081 - protein, 343 aa, unidentified
MQAVTTIGLDIAKSVFQVHGVDAAGQVLIRRQLKRRAVLAFFQKLPVCLVGIEACASSHYWSRELQALGHSVRLMPPAYVKPYVKRQKNDATDAEAICEAVARANMRFVPTKTPEQQSCLMLHRTRHLFIRQQTAVINSIRAHLAEFGIVAPVGRKGVTELLHIVADPSDKRVPEVARVCLAALGNQLLSLKEQIVEFDRMIMVWHRSNETSKRLHYIPGVGPMLATALVASVADPRTFRSGRNFSAWIGLVPKQHSSGGKDRLGSISKQGDRYLRSLFVAGALAVIRYAKIHGTKHRPWLTALLARRPTKVAAIALANKLARMAWAMMAKGERYRQPVALAA

SEQ ID NO: 197082 - protein, 328 aa, unidentified
MFYLGMDIAKAKLDCCLLLDEASGKRKTKVVSNTKTGIVDLLTWVAKQNISPEALHVVMEGTGVYHEQAALALTDAGVTVSIVNPAQIKDFGRGLAVRTKTDGVDSFVLARYGSLLKPKAWVPPAPEARILQALLARRVAIAQDLQRERNRQEKADATDTPDRIQKSLADSIGFLVKQLAELQQVIDEHIDKHPDLQKDMALLQSIPAVGPQVGGNMLSVMHSHHFNSAEQLAAYLGLVPVERQSGSSVLGRAKLSKAGPARIRAVLYMAAIVATRCNPHVKAVYERLLARGKSKMSALGAAMRKLVHLCFGVLKTQQPYEHDHAKNA

SEQ ID NO: 197083 - protein, 318 aa, unidentified
MPEPIVVGIDIAKQTFDAAIGVGGSIATFANDEDGHDALLAKLAGQTVELIVMEATGGLERDLACALQAAGFPVAVVNPRQARDFAKAMGYLAKTDRIDAKALAELAQVLSRHPQRARFVSVLPTPEQQALQALVARRRQLVAMRVAEQQRLSISHAAARKSIEAMIEAIRAQLDEIEAQLAKHIETHHADLARQLASVRGIGPTTTASLIAELPELGRLSRREISALIGVAPFNRDSGQMRGKRAIFGGRAQVRRILYMAALVAIRFNAAIKRFYNRLIAAGKPKKVAIVACMRKLLTILNAMARTGKAWDDSLHPA

SEQ ID NO: 197084 - protein, 352 aa, unidentified
MESDTFVGLDVHKNLVVATAVDGSGRTLSQAKLGPSDRELVEYLEGLPGSKRVALEACSVWEHYHDAAVAAGAQVVLSHPFRTRLIADASLKSDKVDSEALATLLRLNALPTAFVPNAETRALRRLVRERVFYRKENKAVANHTYAQLFGRGIGYEEGILMRPRRRGALRELGIPEVDRGLDRLDDLSAATKELDAAVHTAFLASREAQLLETIPGIGELTAVILVAFLCPIERFRSIDQLSSYCGLCPTNHQSADRSHQGSLKADCNHLLRWVLVEAGWSHRRESRSSYIARVGRRNGRRKGVKRGAVDTAHALLRVVYAILKRGTPYLPHAPERPSCSASTARSPRPSHD

SEQ ID NO: 197085 - protein, 417 aa, unidentified
MERVYRRCCGIDVHKKLIVACFIQKGGKSEVREYGATTNELLKLSDWLTEGGCEMIAMESTGSYWKPVYNIFEAANLKCMIVNASHMKNVPGRKTDIKDAEWIADLLKHGLLEASFIPDRQQRELRELVGYRSSLVGEKARELNRIQKVLEGANIKLSGTICDINGKSGRCLLNAIANGKKLSVEDLEQMKKDRQIASNLKATNEQLAEDFNGVMSPNQVALLKEMLKHVDEIDAHITSVSEQVDALMTEEQQKAAEKITQVTGIGHTSAQAIISVIGSDMSRFPSDASISKWAGLCPGNNESAKKRGSGRSQKGNHLLKTTLTVCANSAVQNKESYFNAQFRRISAHRGKKRAIIAVAHSMIIAIYHILKDNVDFTDLGSDYYNRFNREKKVKAYIKKLKALGVEIEIKTAAPQVA

SEQ ID NO: 197086 - protein, 408 aa, unidentified
MKTLHQRCAGLDVHKQEVVACLRLATKGRVHREVRRFPTTTRGLLELADWLEAARCTIVAMEATGVYWKPVWHILDGRFELVLANAAHIKGVPGCKSDVNDATWIADLLAYGLIRASFVPPQPIQDLRDLTRTRKQLSRETVRHEQRLQAVLEEANVKLASVITDILGASGRRILKAMIAGETDPSHLAELGSRRLGCSRDTLVEALDGRVRDHHRFLLDQHLKTIEQLEETMVAFDARIDAALAPFRDTVERLTQVPGLSTRAAEVVIAEIGLDMSRFPTAGHLLSWAGLVPALDESAGKRRSTRVTKGAPWLKPVLVQCAWAAANKKNSYFEAQFLRLKGRRGPKKAAIAVAASILTTVYHMLRDGTCYQDLGQNYFARRNPARTARKLADRIRSLGYIVEIRSAA

SEQ ID NO: 197087 - protein, 331 aa, unidentified
MSSLTLFVGLDYHQAFVQVCVMNRAGKVLTNRRCDNSAEAIVRCVEAHGEEVAAAIEACCGAAALADELIACGWEVSLAHAGYVSKVKQSPDKTDWSDARLLADLLRIGYLPRVWLPPAELRQLRHLVRHRQQLAQSKRTAKLRVTAVLRTHRVGFAVSRWTKHWIAAVRNCEAIGTQGQWVVGQLLEEIEHLQKLLVEVEARLTDLTSNDAFVQKLLEYPGIGLVTAVTLKAELGTVRRFRSGKQLSRFCALSPRNTSSGLKQADAGLINAGNPQLRTVLIEAAHRLQRCDLRWAELGMKLRRQGKPGSVVAAAVANRWVRWLYHQLLAV

SEQ ID NO: 197088 - protein, 354 aa, unidentified
MPNTTRTEIAVIGIDIGKNSFHVVGHDERGSIVLRQKWSRGQIESRLANLSPCLVGMEACVGAHHLARKLTALGHHARLMPAKYVRPYAKGQKNDFNDAEAIAEAVQRPTMKFVATKTVDQLDLQALHRVRERLVSQRTGIINQIRAFLLERGIAVRQGIRFLRAELPIILAARTDVLSPRMLRVIEDLVGDWRRLDERIESLSREIETIARQDAGCDRLMSVPGIGPIISSAVVAAIGSGDVFSKGRDFAAWLGLVPKQISTGDRTILGKISKRGNRYLRVLFVQAAWVVLVKPKSWERHGLKSWIEAAKKRLHHNVLAIALANKLARIAWAVLAKGRGFEATRTVNGSTQSA

SEQ ID NO: 197089 - protein, 338 aa, unidentified
MSLYCGIDLHSNNSYVAVLDEERRDVECRRLRNELPAVLGFLEPYKEEIETIAVESTYNWYWLVDGLMRAGFDVRLMNPTKATAHRGLKYTDDKHDARWIASLLALGILPEGHIMPVEERGLRDLLRRRMFLVHKRTAHLLSLKAIFARSTGKQVSMEDIQKWDCEAIREEIGDPLVVESITIMLPVVRVLTAQINAVEKRALEIGKLRDEFGLLQTAPGIGQVLALTIMCETGDIRRFAGAGNYASYCRCVPSDRISNFKRKGSGNRKNGNKYLSWAFSEAAHHAIRFEPLAKRYYDRKRARSHLMVASRALANKMARACYYVLRDQVPFDPARAFC

SEQ ID NO: 197090 - protein, 345 aa, unidentified
MDHFAGLDVSVKETSICIVDDAGKIVREVKVASEPEALLAVLKNLAYHFKRIGLEAGPLSQWLFSALAEAGLPVICVETRHMQAVLKAQINKTDRNDARGIAQMMRAGLYRPVHVKTIRSQKLRMLLTHRKLLQSKAIAIENDLRGTLRNFGLKVGMVGKVKFEARIRELVENLLPELAVLVEPMLIVRRTLREQIVILHRRLLAIVRDDEVCRRLMTTPGVGPVVALTYRATVDVPARFRKSKAVGAVFGLTCAKYQSGEVDRNGRVSRCGDEMMRVMLYEAAQSMLRSKKWSWLKAWAMQIARRRGMKKAIVALARRLAVIMHRIWVDGTEFRWTREQATAAA

SEQ ID NO: 197091 - protein, 352 aa, unidentified
MVSAELEGAAVKVIGIDSHKATLAGCAVDELGTPVDERTLGNDRAGHVALADWARSLAVDRIGIEGSGRYGAAAARQLAAAGFDVRDVPPHLSHRERLRTHRPGKSDPTDGLAIARVAAREQTLPPVRLADRSEDLGLLVTARDELVAEATQLRNRIHADLVVLLPGYGERVPNLVARRHRRGVALELATLSGVRAEFTRSRLSRLEETDAATKLLERRLAALLVGHPLLALPGVRVLLAARILAETGDVRRFRSADAFAMFSGTAPIPASSGQTERMRLNRGGDRQLNRALHAMALIQGRYHDRAKAYLARKRAEGKTQREAIRCLARKLARVVFEVLRRSTLATADAFAA

SEQ ID NO: 197092 - protein, 316 aa, unidentified
MENPHPFVGIDVSSERLDVDNAPVRQPCSEANNDSGIASLTAHLKALNPQIVLLEATGGYEIPVAYALYEAGLPVVIANPKAVRHFAKALGKLAKTDKLDAQILALFAQKVQPPVLPLRDQEQLELANLMSRRRQLQGMIIMEENRRRTCTPRVRANIDRSLAHLRQLLKDLDREIHDAIRRTPLWLENAKILQSCTGIGPKVSACLIADLPELGTIPGTKASSLAGLAPMNQDSGKHRGKRMIKGGRPAVRKALYMAALVAAHHNPVIKDFYQRLRLAGKPAKVALTACMRKLLIILNAMLKNRTYWNPKLPITA

SEQ ID NO: 197093 - protein, 330 aa, unidentified
MSQQWFAGIDVALDELVLACCDEQERFLPEQRFPNTKAGITRLKRELRKLSEVRICLEPTSSYHRAALDALSAVAVFYVSVVNSYATRSYARAIQVRGKTDHVDAQVLARYVLHCNPPRFTPPTGAALELRAITRRVSALIKHRTAEKNRWQTSRKAGDPRCVLHSIQAQIKDLDQQIKVLEDAALKLLRTDAQLYQNYKLLLSVKGIGQRSALALLGELGVTPPDMGKAQWVALAGLDPKPQESGKSQHAPRHISRQGNVHLRSGLYMPSLVAAYHSGPAQAYYESLIQRGKKPLQAIVALMRKLLCAIWGMFRTQQPFDPKLFFHQTD

SEQ ID NO: 197094 - protein, 351 aa, unidentified
MPILAEQFDHVIGVDSHKLSLTAAAVNANGGCLELLEVRADTGGHRQLMAMASRYAGPLLWAVEGTGSYGASLTEHLLAAGQIVTEVDRPKRSPRKRGKSDQIDAIRAARDTLAMPRLNPPRRRLEREQLRILLTTRQELVGNRSRLANHLFQLVVTASEILRARYLEVDSRSHSGERLARKCLTSRPNAGMSDEDRTRLSVMHDIARVMNDLTLRANAYELQIQTLVEQMAPGLRAQPGIGTITAAQILVAWSHAGRLHTEAAFAALAGVAPIPASSGQTVRHRLNRGGDRKLNAALHTVVMARSRCDQATRDYISRRTAQGKTRPEIRRCLKRYLARQLFRFLNAIDKA

SEQ ID NO: 197095 - protein, 360 aa, unidentified
MTTMPELEVHVTLGIDAHKDIHVAVAFDQLGRKLDIIQIPTTAAGYGLLLAWACGLGTIDKIGIEGTGSHGAGLCRWLTSRGLVVIEVDRPDRRTRRNKGKSDPIDAESAARRVLSGEATVIPKRQDGNVEMIRVLRLTRRSALIGQNQAGNQIHALIATAPETLRDQLRDLSTRKRVAPAAKFRPGSEPDTVLAATRFALRRLARRFQQLDAEIKDLDRQLTRLVETTAPRLIAQRGIGIHTAAALLICAGDNPERLTSEQSFAALTGTSPLQASSGPRQRHRLNRGGDRDANTALHMIAVNRLANRREPTLAYVQKRTGGPKADLDTLRRIRRYIAREVFPLIRDALNDTPDTIPIAA

SEQ ID NO: 197096 - protein, 338 aa, unidentified
MALYCGIDLHSTNCWVTVLEEGQKVVREKRIGNDLAAILGFLEPHRTELEGIAVESTFNWYWLVDGLMDAGHQVHLTNTWAAKQYEGLKYADDRHDARWLAHLLWLGILPEGYIYPKEERGVRDLLRRRSFLVQKRTSFLLAMKGAFACRTGMIARSDDIKKWTVEDVGLHIEDPLASLGITCLLGPVTALSEQIKLLEKEALKRARLREEFRQLTTVWGIGKVLGLTIMYEVGEIKRFAKVGRFASYCRCVKSEWLTNGKRKGSGNAKNGNPHLSWAFSEAAHFAVMHHERAKKYFQRKRAKTNGIVAIRALAHKLARASYYVMKDQVDFDPERLFR

SEQ ID NO: 197097 - protein, 418 aa, unidentified
MTKSFDNTFIQIIHPVCCGLDVHKDIISACLITLDDNGKEQYQIKEFSTFTKDLLSMKKWLIEHDCPILAMESTGVYWHPIHNVIADSMEVILVNARHIKNVPGRKTDISDSKWLAGLLRHGLLKGSFIPPENIREWRELTRLRKTYTESFADYKRRVHKLFITANIKIDSVVSDLFGLTGRNLIDLLCSKADITPENIEKCTKGSLKKKNLELYESLQGFFKDHHRFQLIGMMDTIIMFEKRVAEINTRLELLTKEHKDLLDRLDDIPGIDKKSAQAVVSEVGVTLDEFMTMSALVSWAGLCPGNNESAGKRKNGRNSVRNHPFKTILVQVAWAAVKTKGSYYKAKYYKLKARRGAKKAIVAIAHRIAKAIYKIIKHGETYRDLGEDYLAAPSRQKILMNLNKRAKEMGFKLVPSEA

SEQ ID NO: 197098 - protein, 345 aa, unidentified
MDSMHYIGLDIHKKTISFCVKRMDGTICMEGVVPARRSDLSRWMRTLPRLWTAAMEATIFTSWVYDHLRISGHAVKVAHPAMLKAIAASKRKNDRIDARKIADLLRADLLPECYMAPSAIRELRRSLRYGNLLVRQMTQTKNKVSSLLMESGVEYNKQKLHQKKYFRELLKTAEHMPASLPPLLELSRTTLDSFGKIERQLVKGIQLDPLLCERIERLMTIPAVGPITAITWALEIGEVDRFPSYKQAVSYCGLCGAEDSSAGKTKRTPISKQRNKHLQTVLIEAAKLAPRLHADLALVHTKELEKGNHNRATLAVARKLVAYLLAVDRRKIGFNREGITTSQAA

SEQ ID NO: 197099 - protein, 354 aa, unidentified
MEKIAIGIDFSKETFDMTVLDTKKTNGKVDADALAKAPHEQFENRRSGFRKSLSWARKVTGRKLDKDNAIFCGEATGKYSVRMSEYLREQGLFVWIDSGLRIKNSMGIVRGKSDKADSYRIAEYAFRHWDKAELYKPLEKSVSALRELYLYRDHLVGIRKATEQRNSLMKEFSDVVGESSFIRRSGDRIVKDLKEEIKRCEEEMRKLIESNKELKTTFECITSIKGVSLINGVAFIVYTNNFEWFGNNPRKIATYWGVAVFGKESGTSVKGKTKTSKCASRKLKKLISEAATCAIRWDPRIKAYYQKMRNKGKHHGVAMNNVKNKLIHIITALAVNKTKYCDTYEEDRKLRKAG

SEQ ID NO: 197100 - protein, 391 aa, unidentified
MPMYFVGIDISKYKHDCCIISAADQQIISKFTITNDKDGFEQLLTALNSLSNPEDIKIGFESTAHYALNLEFFLENAHHSFMEVNPVLIKEYKKSTTLRRTKTDSVDCESIARWLITVEYKPHSKGFYHAYSLKSLTRLRDRLIRQRSFYLVKITNVLDHTFPEFKPFFNERLSKTALYLLENYGSAEKMARMNSASYDKLRCISRGKFSIQQFLRLKELAANTVGVNNSIFDLELNTLLTLYKSLSDEINTLETEIIKLIEEVHPHYMSIPGIGPISAAVIYAEYGDISNFSNPGQMLAFAGIEPGINDSGTESHGGRMVKHGSSQLRYVLLNACLPLIRFDLTFATYYEKKRAEGKKHRVAITHVAKKLIRVIYALERQDVDFNAQKLR

SEQ ID NO: 197101 - protein, 349 aa, unidentified
MVIGCDQHKRYCVMVEIDDQSRVKATKKFYHKDKAALQEYLSDLPEASDLALEACGYESWLGDLIESQGHRLHLAHPLKTKAIAEAKVKTDKIDAKVLAQLLQANLLPEAYHASDSIRQERALLRYRQVMVRMQTQTKNRIHFLVDQLGINSPEVTDLFGKRGLQWLKQLQLRGRYQRILEGHLETLEFLRQEVKRMDRLIDQIIKDNHQARLLQTIPGIGKLSAYLLISEIGPIRRFATSQKLCSYAGLTPSVHQSGQTQYHGHITKQGNKHIRWAMVEAAHRVIRKDPGLKRFFDHIRFKKGSSVATVAIARKLLVAVFHVLSKNETYRYFKTDFGEARVSPALSRA

SEQ ID NO: 197102 - protein, 438 aa, unidentified
MSNKVIFNLDELFISVGIDVGADFSWMSIALPNQQFVGKPYKILHNSIDSLTTAVSKIKEAEELYSLESRIFLESTGIYHYPLFCYLRDKGFNCSVINPIITKNSTNINIRKVHNDRFDSKKAALVGLKPDLKVSLMPSDLALNCRNLCREYYDLMDNRSAYVNKLQGELRMVFPQYLGIFSKVTINTSLTLLETYTSPSAFLKADKQEIIDIIKSTARFGLTYAQNKYNAIIQAATDANQFGYIIDSNIKRIRLYISFIRKYDEEINNILESLHELVDANEDADFVKQIHLIETFKGAGFLSAVSIMGEIGDFSAFSKPKQLFAYFGLDPAVKQSGKFEGTKVQMSKRGSAIARCVIHTLTLQSISISRNGEAKNPVLREYYLQKCDSKPKLVAMGAVSHKVCNMIFAILRDNKPFKIIAPQEHIKQYNAAKCDIAA

SEQ ID NO: 197103 - protein, 361 aa, unidentified
MNEIKAILLNILYTCTGCSFFIRNRHDRALTPSHENGVFSGMDTTQQPTVEFAQLVDRGCGLDVHKDVLVATIQGQGLAAQTRSFGAFTQDIEQLADWLRTHQVTHVAMESTGVYWKPVFNVLGEEFEILLVNARHIKHVPGHKTDKKDSEWLVKLLLAGLLKASFVPPQQVREWRDLFRYQRKATGHIAAEWNRIQKVLEDANIKLSSVLTDISGVSGRKILEALSQGQTNVEELLKLAHGRLKSKRDELKKALVGKLSRHHQFMLTTLLRSIAQQEALIADINKRIDTQLEEWQGQIELLQTIPGVGHHTAVGLLAEIGTNMDQFPSEKHLASWAGIAPGNHESAGKKKVHASPMAASI

SEQ ID NO: 197104 - protein, 366 aa, unidentified
MKKISTVQVFGNEIFKEQQLTIGVDLGDHWSFYCVLDEAGKIILEQKVATTPEAMKQTFGKIPRSLIALETGTHSPWVSRLLTQLEHEVIAAHAQKVQLITKSNRKDDRHDARTLARLARIDPELLGPVQHRSAKAQIHLTVIRARAELVSARTALVNAARGLVKSYGERLPKCGTQQVSRELGAGLSAELRDVLEPLLKEIESLNERTKEYDERMEKIAKEVYPEVSLLQQVKGVGTQIALTYVLTIEDPYRFLKSREVGCFLGLKPGRRDSGESKPQKGISKAGDRYLRTMMVQGAHYILGPFGEDSDLRRWGLKLAERGGKNAKKRAVVAVARKLAVLLHRLWVSGEVYEPLRNSQKAMRAVA

SEQ ID NO: 197105 - protein, 475 aa, unidentified
MPAGNAIVGIDLADVKQAIVVTDHDSRVLARRRLLCRAWQLGEVLDWALVKAKAAGFASVTVACEPTGHRWRVLDQLAAERGLSLVCVQPLLVWRAREAEDLTWDKSDPKDAVIIARLAAQLCCYEPERASAQFARLRHLGARRNQLITDTTAGVQQLRDLLECVWPAVLDAAGAPFRSASWCAGLAVVLDRCDGDLTRVRRMGAKRFLAAVRAQLPRWGATRPRLRIVTAVFDALTDTTGVATHRPGALERAAMVMRDWHINRARLVDTEALMVAVLDKLGLTELVCSVPGLSAVGAAAILAETGDLNRFGSPRSVVKHAGLCPRDNASGHHQDKTTISGRGRPQLRLAAWRAVWAAMLNNSILKGRFTHLTTRQDNKLAAQQARAACAAALLRRLHVIVTQRVPWNPAIAAGETTAAPQTRAAEATTRRRQAPGGASPDVPRRTNLAHEHEQPHPVPHQARLHTVGNRTRLKR

SEQ ID NO: 197106 - protein, 339 aa, unidentified
MGTYAGIDLHSTNNYIGVIDGNDKRLYSKRHGNQLEHVLKALKPFKKTLKGVVVESTYNWYWLVDGLEENGYKVHLANPAAIQTYSGLKHTDDKWDSFWLAHILRLGILPEGYIYPKEQRSVRDLLRRRLMFVRQRTAQLLSLQSMITRNRGFNYPGSAIKRFGEEFIDKLFHYDSTLAFMAKKNLSTIQYLGKIVTEIEVEVKSQLALKKEFKLLLTTTGIGNILGLTIMLEVGNINRFPKAGNYSSYCRCVESKRISNGKKKGENNKKNGNKYLAWAYVEAANHAVRNCKKSERFFQRKMAKSKRVLATKALANKLTKATYYIMRDQVPYDVDKLFR

SEQ ID NO: 197107 - protein, 377 aa, unidentified
MSMIIPAAETTVYLALELSCSNWLAAVRLPGRDKIVLHRMAAGDTAALLSFVATQRARAQARTGVPIEVVSCFEAGRDGFWLHRLLHANDIINHVVEPTSILVNRRARRAKTDRLDAQGLLRVLAARHLGDHQICSVLRVPTPAEEDAKRPHREREHLVRERVRIENRIEALLVTQGIRKRPSLRSWDADLAALRTADGRELPPCLRAELDRLKRRLALARDLIRELETVRASALEGAPQDETGLKIEALSRIRGVGDNFAAVLTREVFYRRFDNRRQLASYVGIAPMPHQSGEMDRDRGIGRAGNPRARTTLIQLAWLWLRYQPESALARWFRERVGALAGRTRRIAIVAMARKLLVALWRYVETGVVPEGVAFKA

SEQ ID NO: 197108 - protein, 353 aa, unidentified
MKKMQEHVVEGKHVFVGLEDSKRTWKLCVRSGGQIVAETSMPAVYENLQSYFEKRFPGCEIEVMYEAGFGGFWLHDLLVADGVECVVTPAHTVTQEKVSMVKTDKVDARRLARNLESGDYRVCAVPDQELREDRQIVRTLNQVQQQITATKNRVRKLFDWHGLNAGFPAGAWTKADYERARGLRLGPSLQICLESYFQLLGGLETVRKRLLLELKGLCEQARYQQAVTIKASCPGIGWLSAIRFTLEWGDLSRFGSGKQLASYVGLTSREYSTGETVHRGRITGQGSGIVRAWLIECSWRALRHDPVLLVKYQAVSRNSGSKKKAIVAVARKLTVRLWALDKAQQTYQIGVIQ

SEQ ID NO: 197109 - protein, 335 aa, unidentified
MSIIGCDLHTRYQVIAMLGTEGGEVVTRRLEHENGEAKAFYAALPKPSLIGIEATGYTQWFERMVAELKQELWVGDPAEIRARAVRRQKTDTRDAEPLLDLLLTKRFPRIWVPTPEERDLRQLLKHRDKLVRTQTSVRNQLHFLAMSQGLCRRQKLWSAKGRAELEALSLGPWATQRRKELLELLDSLGPRIEELNQAVGAQAGRRPECPELMKVKGVGPVTSLAYVLTLGAVSRFPNSRAVVSYLGLNPGEHSSGGRQRLGHLSTQGNQMLRWLLVEAGHGAAQFDGELRRKYQRLKFRRGGAVASVALARHLAVRLYWTLRQASTTPSAGSHA

SEQ ID NO: 197110 - protein, 346 aa, unidentified
MKYYVGLDVSLKEISVCVIDGDGKIKARGTTPADPMAVKSWFKKRSLEPETIVHESGQLSIWLQRGFLELGLPAVCIDARRAHKSLSAGLNKSDASDAEGLAQLARTGWFTPVFVRSVEADRLRALVGARERMIRLRKDLEGHIRGVLKTFGIRMAGVTQGKLRQKFRDQLAAAGETDPVLRIMADAFIDIHAMLCKAAADLGRALKTKVETHPVAKRLMTIPGVGPIVSLSFIALIEDPSRFTKSTDVGAYLGLTPKRYQSGEIDWSGRISKRGDKAMRSLLVESASTLIRNVKRFSALKSWAIRLAGRKGFRKAAIATARKIAVLMLTLWKTETDFQWTKEVKS

SEQ ID NO: 197111 - protein, 365 aa, unidentified
MSDCTSRNVSVGLDVHAASVRLSALRAGELLDERTLPYDHEAVERVIGQWPGARVCYEAGPTGFGLYRYLTARGIACDVVAPGLVPTRPGDRVKTDPRDARRLARLHAGGLLEAIHVPSVEMEALRDLVRAREAARIDRMRDRHRLSKFLLRHDRRMPFKSWGAGRRKWLGEQNFEHAAQQAAFDSYLQTLDLIDARVDGLDRQLAEIALSGEWAPLVARLRCVRGIDTLTALGLVCEVGDFARFRTAEEFMSFVGLVPSERSSGEKQRRGSITKAGNAHARRLLVESAWHARRRPKVSYDLQRRQTGQDPAVLARAWACQQRLHRRWQRMAGRGKPQQKIVVACARELAGFVWAIATDQPPRSA

SEQ ID NO: 197112 - protein, 377 aa, unidentified
MIAADRSEVSVNESVLYVAFELGKKDWKVAMTSGFGRTPWLRTIAGGDLAAVERVINAARPRFGLAATVRVISCYEAGRDGFWIHRALWRLGVENRVVDSASLEVNRRARRTKTDRLDATKLVRMLVRVCAGDRGAWAEVRVPTVAAEAARHVSRERTALTQEQTRLRNQIGSWLATWGCRVPPPMRRQPEWWTHARDWADAPLPRAVQARLARADARLAVIAEQIATIAVEQTRLTQQADPTSARARLVQLKGVATTSASVLLDEGLVWRAFRNRREIGGLLGFAPAKYDSGESSRDQGITRAGNKRLQSVMVQLAWGWLHWQPLSALTRWYQARFSTGQRTRKVGIVALARKLLIALWRYATQGVVPAGAVLKTA

SEQ ID NO: 197113 - protein, 312 aa, unidentified
MPLQESLQFIGVDVAKLSLAIQFPDRLWSTANTPAGHTALIAELRRLGAAHVVCEATGGYERGLVLALHAAGIPVSAINPRQIRDFARACGRLAKTDALDATIIRDFGCRLQPEPDPAPAPGEVEFAELIRSRQDLVGLITEEINRREHTTLPVLLKLSRARQRQLERQLAALDALIDAQVARQAALAAKTERLQQVSGVGRVTALTVVALMPEIGTLRDAEAAALAGVAPMNRDSGQHRGQRRIHGGRPALRRVLYMAALTATVHNPILKAFYQRLRQNGKPAKLALTAVMRKLIILLNRLLKNPHFTLVS

SEQ ID NO: 197114 - protein, 391 aa, unidentified
MILVGVDVAKDKHDCYISNSDGEVIFEAFTIPNNMDGFTELYEKISSVAEDLSKVKVGLEATGHYSYNILGYVLHKGLTTCVINPLHTNLFRKGQSLRKTKTDRIDARSIALMLMTDSSLEPYSLTSYHNEDLKSLTRYRFTKVRERARYKTSISRLVNILFPELEKLMPNLHTKSVYALLSEFPGASFIASAHLTRLTNLLQTSSRGRFNKAYAIRLRETARNSVGSVMPTKSLELRHTINLINILSKEIDEIESEIRRIMDEIDSPIMSIPGISYCMGAMILAEIGDFNRFSSPDKILAYAGMSPSTYQSGHLVSSYARMEKRGSKYLRYALFNATAYVCMWDPHFKEYLSKKRAEGKHYYVAITHAAKKLIRLMYALEKSGMRYGLAT

SEQ ID NO: 197115 - protein, 336 aa, unidentified
MQITTIGLDLAKHVFQVHGVDANEAVVEKRRLRRGQVLGYFAKLAPCRVGLEACATAHFWARELRRLGHEVRLIPPQYVKAYLKRGKNDAADAAAICEAATRPSMRFVPIKSEEQQAVLIMHRARDLLVRQRTQLINALRGHLAEFGLIEAQGPSHVRRLLAGMRTDLTVPELARETLDLLPTALEAVDAQIDAVEAKITTWHKANPTSQRLATIPGIGPLIASAITATVADPAAYRSGREFAAWLGLTPRQKSTGGKQRLGRITRKGDQYLRRLLIIGAQTVLLRSKAAKANLWIQGLLARCARLKVAVALANKTARIAWAVMIRGECYRPVAAA

SEQ ID NO: 197116 - protein, 326 aa, unidentified
MTVYCGVDFHARVQTLSWLDTRDGEIHQKELNHHTDDVRGFYRQFAGEVIVGIEASGYSSWFEDMLEGIGHQVWVGDAGEIRRLARRRQKNDKRDADHILDLMVKGEFPCVHRLCRESREVLGQLRYRHRLVKMRTMAANCLKAIAIGAGLSEKTRLATRKGRSKLDAAGLSAVLNEQSKKWLELIDDLTKKIEAVERWLEERAKADQRVERLRTHPGIGLLTGLALVHTLEPVERFASTRKVAAYVGLDPMEDSSAERKRYGGVSKAGSTLVRFLLVEAGQTAAKRDPQLRSFYQRLRDKRKTAKANWLLYRCTPDPILVSALVE

SEQ ID NO: 197117 - protein, 356 aa, unidentified
MAHNSSRKLISSKVDSILPDDQSLSVLLLQNQEVILLSFKIFRKNCCGLDVHKTWIYACIGITDTNGRTDYKQTRFSSFSKGLKELSDWLAKYHCTEVCMESTGKYWIPVFNVLEKADVSVILSHPKYTKPQKGNKTDRKDAKWICDLFMCDMVKPSFIPPADIRHLRDLVRYRFKLICMITGEKNRAQNCLTVSNLKLDDVFSDVFGKSSRSITEYILEHPGDLFDVTPFVDRRCKTPIEEIQAAVDGAVSPEQAVKLRQCLNHIDELEKHLEQIDQEILRLSDKYQAALDLIRTVPGFDKNPMTAIQVLSEIGGDMSVFPSAKHLVSWAGCCPRNDQSNKKNQINSDFPCRFLF

SEQ ID NO: 197118 - protein, 364 aa, unidentified
MQRTFGNVEGSASADGVVLGVDTHLDVHVAVAVDQLGRRLGELRVPTTARGYERLLGWAEGFGPVGCAGIEGTSSYGAGLVRHLKAAGVSVVEVERPKRRHLRRKGKSDPIDAEAAARAVLAGEALGEPKSGDGKVEMIRTLRSARQSAVKSRSQAANQLKALLVTAPEVLRHRLRELPTKELVASCARFRLGNDPDDVETATKFALRSVARRHEALSEEITELDVQLDRLVAEVAPKLISLPAIGTHHAATLLVVAGDNPQRLRSEASFASLCGVSPIEASSGKVVRHRLNRGGNRDANRALHMICVVRMGSDHRTRKYLARRTAEGKNKWEIMRCLKRYIAREVYHVLVPPTTLPSRRMTCP

SEQ ID NO: 197119 - protein, 331 aa, unidentified
MKNKEFIGIDVSKNVLDIFILKLKFHFVVSNDPAGFAKLLEICCIKLSSTKDKLFFCFENTGRYSRLLSIFFHESEIMYAMVPALDIKQSKGMTRGKSDKKDAKSIALYAWRKKDELVPTKLHSAEVGQLRQLLALKDKLIKHRTAYKNAINDLNDCFCEGETEFIRQTQLRLIKLLNNEISNVEQQIDHIIQALPEWRTNYKLIQTVKGIGPVIAKYFIIYTENFTRFSDPKKFACFAGIAPFEYSSGSSIKGKTKLHPCANKHLKSLLNIAAMGAVQLIGEYKIYYQRRTQQGKNKMSTLNIIRNKLVTRVFAVVKRQTPYVDFSTFAA

SEQ ID NO: 197120 - protein, 346 aa, unidentified
MIIVGCDFHPAWQQVAWVDTETGETAERKLEHSSGEARAFYASLPVPALMGVEATGNCQWFLDLMAEFGHQVWVGDAAQIRASYVRKQKTDRRDAAHILKLLLEDRFPRIWVPNRDERDLRQLLLHRHKLVGMRTRVKNELQHLALNQGVRKQRRLWNEAGQELLRSLPLQPWAARRRDDLFQLLAMLQRHIGLLDQAVREKSQLDKMAQLLKTQPGVGPITSLAFVLTIGDVSRFQNGKQVASYLGLIPREHSSAGKQRLGGISKQGNRMLRMLLVEAAQTAVRSDPEFRKQYLHRCHSKPKAVAKVAAARKLAVRLYWMLRTQTPYPEIVRIESSPRVPLVGAS

SEQ ID NO: 197121 - protein, 338 aa, unidentified
MNKITTVGLDLAKQVFHLVCCDERGKVVGKRMLRRAQVLGYFANLAPARVGMEACAGAHYWARELEQLGHAVKLLPPRFVKAFVRGNKNDFNDALAIAEAVVRPEVRGVAVKTVAQQDIQALHRLRSECADSRTALCNQLRGLLAEYGVVLPRGVSSLRRRLPALLEDGENGLSALFRRLLAQGYQRLCELDAHIAAYNAEVARHSRQDDACRRLQTIPAYGPVVASVFHSQVGDGRAYRRGRDVSAALGLVPRQHSSGGKTVLLGISKRGDCYLRSLLIHGARSVVRQAAHKDDRLSRWINRIKAQRGHNKAVVALANKLARIGWAVLRYQRDYQPA

SEQ ID NO: 197122 - protein, 387 aa, unidentified
MQKPHDNSKASPAAFMQDNTLIAVIELGLSNWLVAGLIPGVSREPLKKLEPNPEDLLKLLHGWRDEAIKAGRPITRIAVAYETGRDSFWLARWLRERGIDAHVIHATSVAVSREHRRAKTDRLDTAMLKRGFLGWLRGERGHCTVAIVPTMEEEDAKRPHREREGLVHEQTRVVNRMKSALIQFGVRNFNPKLRKARVKLETVRTPEGKSLPPNTIAALRRDMERLKIIKEQIKAIEQTRLQQFEQKPEALANRMVYLLVRIYGLGWETADLLVHELLSRTLRDRKAVARYAGLTGSPDESGSKRREKGLSRSGNARVRKIMIQLAWRMVKFQPDSALVQWFKHRTENAKGSRKPMIVALARKLIIALWRYANDGVIPEGFRLHSAA

SEQ ID NO: 197123 - protein, 350 aa, unidentified
MERNKPRSCAVVGVDIGKNLFHVVGLDDKGTPIQRAKFRRETLLQFFERADRTLVGMEACPGSQWLARKLQAMGHQVRIIPAQFVKPYVKSNKNDIIDAEAIAEAATRPTMRFVGIKEAYQVDLQMLHRIRSRLVTNRTNLICQMRSYCLEHGVPIRQGAGVFKTDILRVLDDDTNDLTSLAREILRDLHDDLLKLELRIASISKEIKDVADADERARRLMTIPGIGALGATAIIAAIGDTSRFKRARDVAAWLGLVPRQHSTGGKQTLLGISKRGNGYLRRLLIHGARSCMLHLDRSKDRLGQWIDALRSRMHVNKVTVALAAKIARIVWIVLRQPGATYLRRPMETTA

SEQ ID NO: 197124 - protein, 377 aa, unidentified
MSSSIIWIGMDVHKDTVMVAVYTDDAREPEIVQQLPNDPRKLKRFFQRWGRRGEIRSCYEASGAGYVLQREITEWGHDCEIVAPSLIPIRPGERRKHDRKDATQLARLYRAGELVTIRIPSAAEERVRDLVRCRQCFQREILRSRHYVTKFLARRGLVYREGTNWTRRHRSWLQSLFQQGGLEPEDRSVFSEYLALLDYKVSRREDLDGQIEKLAFSPAYKPKIDRLRCFRGVDTLAAMTLVTEIGDWRRFERPGQLMAYLGLVPSEYSSGDREHRGPITKAGNSRCRHVLVQAAWKYKHRPTVSVDLKKRQSGQLPQAIAHAWKAQHHLHKLFHRIAARKSSRIAVVAVARELVGFLWAVMQELETEQAVTLSTAA

SEQ ID NO: 197125 - protein, 352 aa, unidentified
MTETSPDVSLTIFAGIDTHKDTHHAAIIDYLGREIADRQFPATATGYQALLAWLNGTGITARVGVEGTGSYGSALAMVLQAAGIDVVDVDRTDRRSRRFHGKSDTLDAYSAARLAASGGARTIPKAHNGDVEAIRFLHNTRRSAVKSRAEAITGLKSAVVNAPETIREQLRPLTSTTLVKACALLRPGTVAPGEINAAVKTALRSTARRIQFLDQQIKALEAHLKVLIDATATGLVTTFGVGYETAAQLLITVGDNPHRIADEAAFASLCGVAPIPASSGKTNRHRLNRGGNRQANRALHIIVMARLKYDQRTRDYRDRRLAEGKTKRDIIRCLKRAVAREMFQLLTHKTTA

SEQ ID NO: 197126 - protein, 388 aa, unidentified
MIYVGIDIAKTNHYASIVNSSTGEVLENPFLVTNNKHGFDLLYSKIKDFNKEKVLIGLESTAHYGNNLIFYFHEKQFKLGIINPIQTASLRKTRIRKVKNDKVDSMLICEALSLGYYNLLSDYDIKLLEIKSLCRFHKDLKDKAAEAKIQLKTYVDQLFPELNSFFKNNLDIKTAHELLKLYQSPDDISKVNLTELSNLLIKSSRGKYDKSRAIELKTLASNSVGINNNALSIQIKMTIELIELLESQIKDIEKQVSDFIKKSDNVITSIPGIGDMTAAIIISEIGDINRFDNPGQVLAFAGLDPSVKQSGTFNASSTRMSKRGSSLLRYALILAANNVQLNTKTFNTYYNTKRLQGKLHYNALGHCAGKLVRNIFYMLKRNVKFNLD

SEQ ID NO: 197127 - protein, 362 aa, unidentified
MTESMRWVGLDVHARQTVATVFCPGTGELEQRRIEGRPVEVVDWLVELPRPVRAVYEAGPTGYGLARAAAVRGLDVAVCAPGHVGRHPSDRIKTDARDSLRLARLYAAGELKLVRVPSVVEEQLRDLVRAREDVRLDLMRVRHRISKLCLRRELHFAGPGKTWTLAHRDWLSRLAFADRPSRVVFDDYRHAHDHLLARRDQLERALEELAVDSPWADTIGGLRCLRGIDTLSATGLCAEVGDFHRFRHPKLLTSQLGLVPSEDSSGERRRLGSITKAGSKHARRLLVEAAWHYRRTPRVSETLSRRQQGQDPRAVEIAWRAQRRLHQRWQRLHGDRGKRSTVVAVAVARELATFCWEIATLD

SEQ ID NO: 197128 - protein, 354 aa, unidentified
MEPSTRKDASAPTVIGIDIGKEVFHLVGFDANGKIVLRRKIKRLALADTFGKLAACIVGMEACLSAHFVSRALRALGHSPRIIPAKYVKPFLKGQKNDYNDAEAIAEAALRPNLRTVREKTQAELDLQAYHRIRSRLVSRRTATTNQIRAFLIEQGIAVRTGAKALRTSLFEILKNRQDEISPRMAELIVGLYEDWLCLDKRIESLTAEIEKIAQKEASCQLLMSVPGVGPIISTAMVAAIGDGEAFERGRDFGAWLGLVPRQYSTGGRPILGRISKRGDKYLRMLFIQAAKVLLRRPHTWERFSFGAWLQQAAPRLHRNKLAAALANKLARISWSVLQSRRAFDVHLEELPAI

SEQ ID NO: 197129 - protein, 341 aa, unidentified
MKQFIRIGVDLAKNYFQVHALANEGGPAVTRKLKRSKMHEFFAQIEPCLIGMEACGSAHYWARELETMGHEVLLMPPAYTKPYVKRGKNDAVDAEAICEAASRPGMRFVPIKSAEQQATLMLHKTRELLVKQQTMSVNALRSHLSEFGIVVAKGIGRVDELLELAESDTTLPEVAKAAVKILAQHLEGLDKSIDDLEKQIGRVYAQSEMSRLLDQVPGVGKIIASVISASVPDPSVFKSGRDFAAWLGLTPRQNSSGGKQTLGGITKQGNRYIRKSLVLGATSLLRVVGKRKGALRDWIVALLAKKPARLVTVALANKLARIVWAMMKTGECFRAEMFAKA

SEQ ID NO: 197130 - protein, 330 aa, unidentified
MSREYIGIDLHKAFFQACSVTSGGERLWEGRFARTADGIGAFQQRGIGAEHAIAVEASGPTWSFVDALRPTGARICVVDPRKTQLKAGVAAKTDRLDARRLADALRRDSVVSIYVPPPAIRELREACRGRHQLVRLRTRLAQMIRALLLRCDAGEPPGTQLYAPRALAWLDQVTLPPEAHQALQRLVTAYRAVHTEAQGADAVARLRAAADPIAVALDAMVGIGPVLALTLRAEIGDIARFAGGPALASYAGVVPHVEQSAGRVFHGRITRQGSPWLRWALIEAARHAIRRDDPTGRWARRLVVRKGIAKARVALARALCNEVVTRWPRT

SEQ ID NO: 197131 - protein, 400 aa, unidentified
MLSIGIDVSKGKSTVCGMKPGGEIVYTPFEVQHTREGMSELVSLLRSSGEEVRAVLESTGSYHCPVVAALLENGIFVSVINSLRMKRFCSQSIRRVKTDQIDAMQIALYGLAYWQELQPTRLPENTYRELQLLARQYYQMTSMLIKAKVDFNALCDQVLPGMQELMNDHAGRHKLSDFVLRYRHTTHILEMGETRFRKDYCKWAEKKGYRNCERMAALIFATAQNGIPVLPNAPSTQIVITEAIRVLHTVEASRDAILTQMQALAKTLPEYSLVREMPCIGDTLAPRLIAEIGDVRRFHSKRALIAYAGIDAPPYQSGKFCANNRHISKRGNRYLRKTGYEVMQSYVMHKPANDPIFTFIEKKRSEGKSGKLAMVAGLNKFLRVYYGKVTELYRSLPAIE

SEQ ID NO: 197132 - protein, 354 aa, unidentified
MEIIGAFDVHRKQITFKWLNTETGEIKRGRIAPGLRETVREFLVPFKGRDAHFALEATTGWRFIAEEISRAGLTAHLAEPADTAALRGKKRRAKTDRRDCDHMVELLLTGRLPESWFPPEHALEIRTLVRLRKSVADERREWQQRIQAQLFHQGIPSIRLTTTQGREQLAAADLSAAGRRVVTTGLEVMEHLDRQLMPLDAYLVRFAKLQPGCRALKQRLFGVGDITAVFIWAELGNCIRFSSSDDAVRYAGLDITVYESDDKRPPGHLSRQGPEALRWALYEAAQCAAWRTAPDRSYYQKVKERLNHKRACLSVARKICRRAHHILRNLGESAFAPVDVNVLPSFEQPASEIA

SEQ ID NO: 197133 - protein, 324 aa, unidentified
MNQQPRILGIDISKAKFHVALLLDNGKAKKKVFANNIAGFALLSEWLSTQGVRQVHSCLEATNTYGQAVARYLYEQGHRVSVVNPLQVQGFAQSQLSRNKTDSADAATIAQFCATLQPRTWKPAEPASEQLQQMTRRLEGLQQMINQEKNRLDTAIEMLQEEIEEHIVFMEHQMKKIKEKIQLHIKKNASLQANLQLLMSITGIAQTSGAQILAELGNFQDFHCARALAAYAGLTPQAHESGSSVQGKTRLCKIGNAHLRRALYFPALTALRRCEPIRDWAEQLRARGKTRMQVVGAVMHKLLRIVYGVLKSRQPFNLELLVTP

SEQ ID NO: 197134 - protein, 440 aa, unidentified
MPVGGSTLESFFKRTVRPTSDQVLEGGRSQLEIVREYVSGLDVHKKSVVAAVITPQGRRVKTFPTTTRALLELVDWLEAEGVRHVAMESTGIYWRPVFNLLEQTEMEVLVVNAGHMKQVPGRKTDVKDAEWIAELLQYGLLKGSFVPKREQRELRDLLRYRRTLIEQRADEVKRVQKLLEGANIKLASVASDVVGVSGRAMLEGLIEGTQDNVALARLARGRMKSKQQQLEEALEGSFGPHQRLMLRHHLDMIDYHQGKLKELDTEVAERMRPFQAALNHLDAIPGLGQQTAQEVLGEIGTDMSQFPTDRQIASWAKLSPGNNESGGKKRPGRTGKGGPIRHIMIRAALNVSRNPNSYYGAMYRRLCRRGSKERALVAVAHALLVAIYHMLREGTVHQDLGANYFDERRREQSARNAVRHLQRLGFRVTIEEEPGQRPAA

SEQ ID NO: 197135 - protein, 361 aa, unidentified
MPETITTAQPVAIGIDTHKDTHHVAVITTMGEPVEDFTIPATAAGYTKAIAAIGIYDSVEAVGIECTGTYGANITKAFLEAGYLVYEVNRPNRFARRRQGKTDQFDAYHAAEAVLSHRTTAIAKARNGFVEALRPLHAFRRLAVKNRSAELNHLQALLVSAPENIKAAYQPLSAAQRLKALVDADPSSFTDTIEQEAMYVLKLAAERIQRAHAEIKDLEKRITNLLRQYTPQLLDIYGAGPDTIAQLLLTVGDNPERFYSEAGFAALTGVCPIPASSGRTNRHRLNRGGDRQANRALHTTTLVRMRHDQRTKDYVARRTAEGKTTKEIQRCLKRAIAREMFREIRDALNQLNNHPQLAESL

SEQ ID NO: 197136 - protein, 430 aa, unidentified
MKSNTQNAKIEAITENTLVLGIDIGSETHYARAFDYRGIEYSKKPFKFSNTEVGFMSFKAWIQDMKEMHEKDKVVPGMEPTGHYWFNLGKFLQDNEMRPVLVNPHHVKKSKELDDNHPTKNDRKDPKVIAGLVREGRYMIPYLPEGVYADLRTASNIRFQLQAELTRIQNRISRWFNIYFPEYKTVYGKPDAKSGMMILKVAPLPEDILTLGIDGVNQIWRDAKMRAVGKARAKTLMEAAEHSVGSKEGAVSARMEIRMLLEDYESRNVRLQEVMALIEELVKQIPMAEKLLEIKGVGIKTVSGFLAEVGDISRFNNPKELQKLAGLALVENSSGKHKGETRISRRGRKRLRYLLFEVAMSLVSKNAEFKELHIYYTTRRINPLKKMQSLMAVAAKALRIFYAILTKGVAYDPKKMINDIKRPKIYLQAA

SEQ ID NO: 197137 - protein, 341 aa, unidentified
MQEKDLYCAIDLHSNNNYVAILDRSGHRVFDKRLKNDMSAVLSALAPFKERITAVAVESTFNWYWLVDGLEDAGYAVRLVNTSAVQQYEGLKYSDDRDDAFWLAHLMQLGILPTGHIHPREHRALRDLVRKRMRLVQQRTANILSIQNLQQRNEGVRMTTNQIKAQTVKTIAVSVSDPNRAMALRSTQAIILALDEQISQIERAVMRQVRPDPRWTLLQTVWGIGPILATTIRLESGDVARFGEVGNYVSYCRCVKSERTSNGKKKGEGNVKNGNQYLAWAFIEAANFAVRSYEVANRYYHRKASKTNTILARKALAHKLARASFFVMRDQKPFVPERLFG

SEQ ID NO: 197138 - protein, 344 aa, unidentified
MWIIGCDLHARQQTLAILDTATGEVVNETLAHEGDGVREFYSTLPGPVRVGIEATGSMKWFLNLMEELGIDCQVGHPATIRAAEPRRQKHDQRDAELLLKLLVENRFPSIWQPSKELLDLRALLLHRHQWVRLRTRIQNALQAIALANGLRRGSSLWSQRGQQAIRSLPLATHTAHRRSELQAMYERFEAEIEELNERVLEQANRRTTAGLLMTHPGVGPITALATDVFLGDPKRFRDGKALASYIGIIPRENSSGGRQRLGGLTKQGNPLLRFLWCEAAVHAVRRDPELRQFYRRKLVQKGLGKARELAALTGQVPFNVVSVRLVRHSAAESANRDLHSLFLP

SEQ ID NO: 197139 - protein, 433 aa, unidentified
MRQDPRAFVKVNVPHIQSWKEVILMPNSLLVGIDVSSCDNKVRFLDSSGNSLSKFTVSNNQPGAQTLSSKITSAMTFNRFDSLVIGLEATSVYGEPLVHFLKQDASIGYFKPSIHVLNPKQVNAFKKAYSDLPKTDDVDAWVIAENLRFGRSNQEVYMDDRITALKKLTRARYYTARNLTREKNHFLNSLFLKFSSLTQEKIFSDRFGTTSLAFVEEFLSVDEIAYMPIEELSAFVNEKGKGKFDVPEDVAKLIQKAARSSYRLPKTVNDSVNQILAISLVAIRALKDQLKLFDKAIEEQMKVVPNTLTSVKGIGPVYAAGIIAEIGDINRFKNQAALAKFAGICWSKYQSGKYTADNTHLISSGNRYLRYYLMEAANKVRVHDPEFKRFYDLKYRETPKTPHKRALALTARKLVRLVFALLHDNRLYIPPKE

SEQ ID NO: 197140 - protein, 403 aa, unidentified
MAAVMIGVDPHKGSHTAVVISPAEEPLGELRVRASAGQAGKLIGWAAAWPERTWAVEGAAGLGRLLAQQLVAAGERVLDVQPKLASRVRLLQAGDTNKNDPSDALSVAVAALRSTVCREVIADDYRVVLKVWSKRHRDLARTRNQVACRLHAVLCDLVPGGHQKEISAAHAARILAQATPSGAVALARAELAAEFLADLRHLDGQLRDTRKKLAAAVRASGTTLTQVFGVGPVIAGTVIGDVGDVARFPGRDHFASYNGTAPVEVSSGNRKIHRLSLRGNRRINHAIHMAAITQLRHKHSEGRAYYDKKVAEGKTHKEALRSLKRKVSDAIFARLQADARQARESGPGGQPGNGSDSSAASSHPERQLFGPATPGPDTTIRPGTTAGTPSPSKPALKKTRPAT

SEQ ID NO: 197141 - protein, 340 aa, unidentified
MKLYGAIDLHSTNSVLVVIDEEDRIVYQKRLPNDLALILKELCVYQSRLEGIVVESTYNWYWLVDGLMEQGYKVHLANTAAIQQYEGLKYSNDDSDARWLAHVLRLGILPQGYIYPREERPVRDLLRKRSQLVRQRTMNLLSIQNLMTRNTGSSMTANQIKGLDKPQVDGLLPDGDLSLAVKANWSVMCSADEQVELLEQRVTERVKLRAQFSFLKTVPGIGQILALTIMLETGDIRRFCSVGNFASYCRCVGSQKISNGKRKGSGNTKNGNKYLAWAFVEAANFAIRFNSKIKSFYQRKKAKTKAVVAIKAVAHKLCRACYHIMKDRVAFDVTKAFGPK

SEQ ID NO: 197142 - protein, 350 aa, unidentified
MLIIGCDYHPAFQQIAFVDTETGELQERRLQHREEAEKFYRDLAAQGMKVRVGMEASGHARWFERLLAELQIELWIGDAAEIRTKRVRKQKTDRQDAQLILKLMLKDDFPQIWVASWENRDLRQLLWHRHRMVQARTRILNQLQAVALNEGLRCKKRLWREAGREQLEAFQLAPWASRRRQDLLELLDRLNPTIADLTQTIEQEVEKCPEAQRLRTHPGVGSLTALAFVLIIGRADRFQCGKQIASYLGLVPLEESSGNRRRLGHITKQGNSLLRFLLVEAAQVTVRSIPEWRSKYFHLAMRRGRKIAKVAMARRLAVRLYWMWRQGWNYEQLKKFGPHAGQPENRDGVQ

SEQ ID NO: 197143 - protein, 384 aa, unidentified
MVPTMPKRTALSNPDISNSDISDLGVSHRDAAGVPPLVFGGVDTHADTHTVAAVSHLGVMLGHARFPATPGGYRQLHCWLAAHGSLIRVGVEGTGSYGAGLAAALTDRGVELVEVNRPNRATRRTRGKSDPIDAEAAARAALNGVATAVPKAHTGVVEAIRVILVARRGAVQARTAAINTLHHMIITAPVRLRDQLQPLTRRHQIAVCSGLRSTDITSPTRATKLALRRLARRIKHLTAEISDATKDITALIQGHAPQLLAEIGVGALSAAQLLITAGDNPDRMTSPAGFAALCGTTPIPVSSGKTNRHRLNRGGDRQANCALHTIINSRLRYHPETQAYAAKRSAERKTEPDIRRSLKRYLARRLFTLILNPNQAAENLPAAA

SEQ ID NO: 197144 - protein, 462 aa, unidentified
MGKKRDSQSSAGSRRQLQGLPLVRTKVAGIDIGSERHWVCAPTPDGSGREIADCGATTPELIRMAEWLQARHVESVAMESTGVYWIAPHEVLEAHGLEVLLVDTRQLARVPGRDKKTDPTDCEWIQRLHSCGLLRGSFRPPEAICMLRTLVRDKATLVAESGDWVRRMQKSLDQMNVRVHRAVSDISGTTGMAILRAIAEGERDAGKLAKLRDPHCHKSEEEIAEQLSGHWREDHLFSLQQGLKMYDATQERVAAYDQEILRKLGQMEREEQRGKSAPPLNNANKARLIQNRGQEPTRQALYRMSGVDITQIDAIGVETVAVVISEYGPDLSRFPTEKEFVSHATLAPHVPKSGGKPVKKKKRNSASTRVAAALRMAALSLRHSNTALGAYYRSLAQRIGGDVALFATARKVATLIYRLLRWGQAYVDEGAQAYEKRYREQRIKSLASKAKQLGYQLTPVTA

SEQ ID NO: 197145 - protein, 343 aa, unidentified
MKHYAGLDVSVKETAVCIVDETGMVCREMKDPSHPEDLARVLKDPAWNFERIGLEAGPLSQWLFSGLAEAGLPVVCIETRHVKAFLKAQPNKTDRNDARGIAQMMRVNLFRPVHVKTLTSQKRRALLTARKLLQDKAIAFENDIRGLLRNFGLKVGEVGFEARIRALTDGMPDLAEIVEPLLDARAKLRQNFAALHRKLLAIVRDDQVCRRLMSIPGVGPVVSLAYTATIDIPARFRSSKAVGPILGLTPALHESGESRRLGGISLCGDAMMRTLLYEAAEVLLTRVTKWSWLKAWAMNVAKRRGRQKAIVALARRLAVIMHRMWRDGTQFRWTRTEIMPVAA

SEQ ID NO: 197146 - protein, 355 aa, unidentified
MPTIAQPEPTRVTVGVDTHGELHVAAARDQLGRPLGTTLAPTTPAGYRQLLGWALELGEPVTFGIEGTGSYGAGLTRYLRAAGHLVVEVNRPDRAARRRKGKSDPIDADAAARAVQAGDATAIPKAGVGVVEMLRVLHLARKTAVKARTQTINALRALLVTAPPELREQLRGLSKTRLPRAAAALQVGSVTSPGAATVLALASLGRRHAALTAEIATLDGEIQRLLGRFARPLLERVGVGPDSASALLLTAGDNPGRLRGEAAFAALCGTSPVEASSGKTVRHRLNRGGDRQANAALYRIVIVRLRWHQPTRQYLARRIAEGKTKTEAIRCLKRYVAREVFAVLNSLAFDLAPAA

SEQ ID NO: 197147 - protein, 371 aa, unidentified
MDHYAGIDVSLEQSSVCVVDATGRIVREAKVASEPEALITFLRGLTLPLVRIGLEAGPLSQWLQAALVKAGFAAVLLETRHVKAALSAMIVKTDRKDARGIAQLLRMGWFRPVHCKSMPAQEVRALLVARKQLQAKMRDVELSLRGLLRGFGLKVGEISKGQFAARVRTLVAGHTMLERIAEAMLQAREALRVEFGKLHKAMLAIVRADAVCRRLMTVPGVGALVAVTFTSGVDAPERFARSKGVGAHFGLTPRKHQSGETDITGAVSRVGDVMVRTALYEAAHILLTRAVRFSALKRWALEVAKRRGMKRAKVALARKLAVILHRIWVDGTTFRWGREAAAASSREGEQFGAGRDRSCSPEVPSPGRRTR

SEQ ID NO: 197148 - protein, 353 aa, unidentified
MKKVIMCSADVHEKNISVEIAVHRETPMVKDYPYAVKGRQKLLSDLKTLAKKNQADRIVVVYEASSLGYGFYDDCQAAGVECHVLAPTRMAKSAQDRKRKSDRWDAKKMMELLRGHVLAGNELPSVWVPDHPLRDDRELVRTRIDIGEKKSAVKAQVQMLLKRTRAKRPPECKNWTLAYRAWLKMVELPSGTRTALDSLLRQLHHLEEESDQMDVGIETLSQTPRYLKLVEALQKVKGIGVLAAIVYLTEMGDLSRFANRRKVGAYLGLAPACYESGERSDRKGHITREGPSRLRKILCQAVWSRVRCDKQEQVAYDRIVSRNPKHKKIAVVACMRRLGVLLWHKGLEVKAAA

SEQ ID NO: 197149 - protein, 321 aa, unidentified
MNPVSCVGIDVAKAKFDVALLKPNGKYRSKVFSNNSEGFRQFLDWLEKQEALKAHLCMETTGAYGRSLARFLAQQQLVISVMNPALIHAFGKTELSRAKTDKADARLIARYCQMHRPAPWVPPAEAIVTLQALVQRLDDLLGMQNMENNRLEMAEPAARASIEALLLTIHQQIDAVRRQIQDHMDDHPDLKSQKALLLSIPGIGEATAAMLLAFLSPLTRFHSAKQVGAYAGLNPRIRESGQWAGKSHIAKAGNVLLRKALYLPAVVAKRYNPAIAAFCDRLLSRGKCPMQVIIAAMRKLLHITYGVLKSGQPFDPEKALA

SEQ ID NO: 197150 - protein, 444 aa, unidentified
MKNDRSLTQGDFHLVHPNAAGIDVASEMHFVAVPASRDPQPVRKFGSFTQDLHELARWLKKCQIDTVAMESTGIYWIQLFLILEEYGIEVFLVNARHIKNVSGRKSDVQDCQWIQQLHSYGLLRASFQPDLFGRELRTYMRHRKNLTQSYAMQVQLMQKAFEQMNIKLHNVLTDITGKSGVTIIEAILSGARDAKYLASLADSRVKAPMAEIIKSLEGNWRNEHLFELRQAYELYQFFKLKIRECDHQIEHTLQQQDNSSSNQDGDDTTRKQRGKNTFDFNASVYLKKILGVDITGIFGISEVSAVQIISETGIDMSKWATQKHFVSWLNLAPNNRISGGKQLKSKKIKKKNKAGQAFLIAATTLLRSNHWLGAFMRRISARHGAPVAIKATARKIALIFYKMIKEQTEFNPLPIETYNQLFKERKLQYIKNQASKLGFQLIQV

SEQ ID NO: 197151 - protein, 462 aa, unidentified
MKLYLGGDVSKGYADWVILSETKQAVLDNFQLDDTYAGHCKLYSTLEGYFGKHPGLEICAAVESTGGYENNWFSTLKSYQKVFNLKVARVNPSGVNFNRRAGLKRNVTDAISALSIAEYLINHPDNIKYDQDDQWKSLCRHWNFVEMQKQQRVQTINQLETILYSANPTLMRFKKDNLPNWLLELIIQCPTAATLAKVRPEKLARIPYLTLARAKTLVAEAKQSIASATDKNAEILVSQIARQIKSFDQNIKTQMQLIERDLTCPEIEILKTFKGIDTISAIGLLLEIETIERFSTVKGFSCYFGLHPKFKQSGDKIIGVRMSKQGSKNMRKILFNIAKGAITYNPLITEVYAKKISHGMSKMAAIGVCMHKILRIIYGMLKNKQAYNPLIDKQNYERSKEKKQDKLQQENTNIDKSRRYQEFDVKAPISRKQTKKRREHDLSQCEITSQSPGSTCSSETKL

SEQ ID NO: 197152 - protein, 343 aa, unidentified
MGHFAGLDVSVKETSLCIVDDMGKIVREVKVVSEPEALLQVLKNPAYHFKRIGLEAGPLSQWLFSALAEAGLPVLCVETRHMRAVLKAQINKTDRNDARGMAQMMRVGLYRPVHVKTLRSQKLRMLLTHRKLLQSKAIAIENDLRATLRNFGLKVGIVGTGKFELRIRELVENLPDMAVLVEPLLIVRRVLREQVGMLHCRLLATVRDDDVCRRLMTVPGVGPVVALTYRVTVDVPARFRNSKAVGAVFGLTPSKYQSGEVDRSGAISRCGDEMMRMMLYEAAQIVLMRSTKWSWLKAWAMKIAKHRGLKKAVVALARRLAVIMHRIWVDGTEFRWTREVAAA

SEQ ID NO: 197153 - protein, 382 aa, unidentified
MQTIDPVNPTILLAIELSTSTWLVAARVPGLDKPRLSRIDGGDTAALLALISSLQARAACGLGATMGIVCCFEAGRDGFWLHRLLTAHGVVSYVLEPTSILVNRRARRAKTDRLDAEGMLRVLAAYLRGDHQACSMVRVPTPDQEDAKRTHREREHLVQERLRIENRIEALLFTQGIRKRPSLRSWERDLTVLRTGDGRKIPHHLRAELDRLRRRLVLTLELIREVEAERDQVTKTKSQDQAHHKITALCRIRGIGENFAAVLTREVFYRSFDNRRQIASYVGITPMPYQSGGMDRDRRISRAGNPRARTTMIQLAWLWLRYQPDSELAEWFRERVGTLAGRTRRIAIVAMARKLLIALWRYVETGVIPTGAEIRAETTVAA

SEQ ID NO: 197154 - protein, 356 aa, unidentified
MSHDVKYIGMDVHKEAIVIAVLNESGKLVMESVIETKASSILQFLHGLRGELHVTWEEGTWAAWLYDLLQPHVPHIVVCNPRRNALLKEGSKSDKLDAQKLANLLRTGMLRPVYHGENGSRTLRELGRSYQTIGKDLTRVMNRLKALYRGWGIPCGGTQVYAARAREEWLNKLPQAGVRRRAELLYQQLDGLQALRREVRPEFLAESRKHKAAKLLRQIPCIGPIRAARLIGLMQTPHRFRSKRQLWTYSGLGIETHDSAQYRFVSGQVQRSKKPQQVRGLNRNHNHEMKEIFKSAATRASCGMGPFHDFYTSLLAKGMKPEMARLTLARKIAAITLTLWKKEERFDAEQLKTQAA

SEQ ID NO: 197155 - protein, 381 aa, unidentified
MIDGDGAVIIKPFSFTNNCSGYNRLLAMLAKAKLPLDEVSFAMEATGHYWLALFTRLQKEGFRVQVINPVQTNSIRSFYIRQAKTDPRDALLIAEVIRFGHFSESTLHPENIYELRELCRGRHAIVSMQADVKRKVVALLDQVFPEYETAFTNMFGDTSMAILQTCPTPKELSEMPLEELCHLIEVSSHKRFRMAKAQELQVLARNSFGFAMAGDVFSTMIRLYAKHLDFLKQQVREIDRKIAEIMDTLDTPITTITGIGPTLGAYILSEIGDISRFSSAAKLAAYAGIDPTMRQSGEYNGVRNRMSKRGSPYLRHAIWLAASSAVLHDPALKLYFQKKRDEGKPYMASVGHACRKMVSIIYAVMRDNKAYTPYIPNEISA

SEQ ID NO: 197156 - protein, 452 aa, unidentified
MKTLGRAIGLDVHLKFCEVAIVEAGAVRSAGRIETTPEKLELFAQSLSPADRVALEVTGSTWAIAEILRPHVAKVVVVSPADTGIRQARAKTDRLDARTLARLLWSGELDPVWVPDEQTRMLRRRLNRREQLVRSRSRAKNEIHAVLMRCLKGKPPFSDLFGVKGREWLSELELPLEEQETVCAAMRHIEFLDTEIAAVETLVATDALQSAQARRLLTVPGVNVICAQTFLAAVGDIRRFETSRELVGYLGLDPRVYQSGETPARGGRISKQGSPQARWALVEAAWSVVQQPGPLHAFYERIRARRGAKIAVVACARKLAVLFWCLLTRGEDYAHSQPSLTAKKLRLLEIRAGAPTMAGTDTGTFATRQRMRTAERELAKQAEASYKRTVADWQAAAKKVGASVTPGHASSGPSKGQAARQTTKPLTSALRYVIGSRPSNTLPQEPLLSKST

SEQ ID NO: 197157 - protein, 344 aa, unidentified
MEYIAFDVHKKYTWATVEDQSAQIVRQGRIDHRRGALRGFLSACEPGVPVAVETVGNWYWVVDEIEEGGFAPQLVNARLAKLMIGQVNKTDKLDNRGINRLQRTGTLPTVWIPPAAVRDARELPRTRMMLVGQRTQLKNRVHSTLAKYGLNLPEVSDLFGKAGRQALCPLMAQLPPHTAQATQAVLQQLDGLEQAITAVQQRITEAFTDTAENQLLRSLPGVGPILSVVIGTEIGDCGRFGSAERFASYCGTVPRVHVSGMKSYSGRVRMDVNAYLKWAFVEAANAALLQGDRYGHVRRLYDRIRARRGHGKAVVAVARHLAEAAYWVLSKQQSYQEPRGSTRG

SEQ ID NO: 197158 - protein, 338 aa, unidentified
MNLSRIGLDLAKQVFQVHGVDRHEHVVCRRQLKRAQVRDFFRQLPPCLVAMEACGSAHYWARELRELGHTVRLIAPQFVKPYVKGDKHDAHDAEAICEAASRPSMRYVPVKSAEQQAVQSMHRVRSRLVRARTALCNEVRGLLGEFGLIATRRGRAATMALLETVMATEPASLPAPMGELLRELKDALQTLEARIARLERQIQAHVRGDARIQRLLAVEGIGPISASAVAASAGDARQFRTGRQFAAWLGLVPRQHSTGGQQRLGNISKRGDTYLRTLLIHGTRAVVRCCANKTDARSRWLQGLLQRRPANVVAVALANKNARILWALLSRETCYRPG

SEQ ID NO: 197159 - protein, 425 aa, unidentified
MLALNGKGSAEAHKINGVNWVMKTQSDTRKEPSFIGIDYHKRYSVYCVVDVRGEVLERGRIEHVDPGAFAALVKRWAGCRVVFEASMNWHWLYEILEKELAPADIMLANPYKTRIIAEAQVKTDKVDAMILAQLLRGNLISSVHIGSKENRQRKEVLRQRAFFVRQRTMLRNRIHRLLGGQHEVKLPQCSDLFGKKGVGFLEALELPAPAGLLLRQQLDMLRNLQVRIREDEKVLEAMLVHTPALERVRSLPGMGLILAAVVVSEIDDIGRFPSAQKLCGYAGLCPSTSSSGGKTFNGKLMTHCNKWLRWGFVEAAWVAVGCSAYFGDFYKSKRTLGKKPNTAILATARRMARIAWQLLTEQRTYTSFPMPQEIRRRPARRHHLPAGSAKEMEGSIRSKIRTANLKKRLSPVAPNVDWLVAESKA

SEQ ID NO: 197160 - protein, 345 aa, unidentified
MKKIIIGIDFSKETFDATLLDCRNSELSEALQSAVHEKFTNKKEGFQAFLTWIKSFVKKINSAELLLCGEKTGKYSLALSNFLYAKGYSIWLDSGLRIKRSLGISRGKSDKADSLKIALYAYRYQDMAVCYVPLSKNVSRLKELFLYRQHLVSQIKAMAVRKNVTDDFKKELGDVRFIVDSATEIIQQIKATIKKCEEKMQELIEEDEELKTTHDSITSVKGISLINATAFIAYTNNFKDFGGNAKKIATYWGVAAFAQESGTSVHKVARVSKIASKMLKSLLTQAARIAVRWEPKFRQYFEHLISRGKHQGVALNNVKNKLIHVITALAVSKEKYNPEYECINR

SEQ ID NO: 197161 - protein, 405 aa, unidentified
MTFPRRVVIGADTHLDTIHLAAISDTGQPLGDAEFRTNPTGYWAAICWARSFGEVVTVGVEGTSSYGAGLTQAMQANDIHVVEVNRPDRSARRRQGKSDPLDAYSAARAVLAGHGLAVAKDPHTGALKALLIARRGAIKARTAAIQQIKDLLVTAPVDLRERYRRYPTTLRLVEALAGCRPRAHEDPTTVSVLIACKALAQRIGYLERQDRELTAELDALTATINPALRAAYGVGPDTAAQLLITAGTNSHRLRSEAAFAMLAGVAPIPASSGKTSRHRLSRGGDRAANNALHRIVLVRWSHDRRTRDYVARQLAAGRSKNDVLRLLKRAIAREIFRHLTAPCPIDDYSDLRPARQARNITLTAAAAHFNVWPITISRLERGLKRDDTLATNYRQWLNTLLIDAA

SEQ ID NO: 197162 - protein, 418 aa, unidentified
MEPNRYRHYIGIDWATEAHRICLLDHNGQLCAKVSIPHSGAGLDQLLEWLASHGVEPAFAAVAIETPRGAVVETLVERHYAVFAINPKQLAHFRDRYTSAGAKDDDRDAWVAASALRTDEAAFHRVAIDAPELIQLRELYRTADELREEVQRLTSRLREQLIRYYPQMLVLYSAPDQPVLWDLLELAPLPVTANQLTVPQVEAVLRKHRIRRFTPGQVLEQLRATPLTLANGAAAAASEHALVLVTQLRVVYELRKQTLKRLASVLKKMRQTPTGSGAPSDAAIIASLPGAGVLTTAALLSESSRSVAERDAAALRAYGGVAPVTQQSGKTLQVSMRYACNNRLRNALYHFAMGSLRDPVARRHYDGLRDDGHSHPRALRGVADRWVTVLMAMLRSGTRYDATRRKAWKAADAAGATA

SEQ ID NO: 197163 - protein, 366 aa, unidentified
MGSAKSHQLTRFVEGEVMTIVTIGIDLAKNVFAVHGVDATGKAVLVRPSVARAKLLELIASVPPCLIGMEACSGAHHWAREFAQFGHTVRLMAPKFVSPYRLSGKRGKNDAADAAAICEAVTRPNMRFVPIKSVEQQGQLLVHRARQGFVEQRTATLNRIRGLLSELGIVLPLKAAVVRREALLRLEDLPGWANTVIGDLLSEVSRLDERIGQYDQHIRAMARQSTPAQQLMQLAGIGETTATALVSTVGNGHDFACGRQFCAWLGLVPGQYSSGGKQRLGRITKAGDPYLRSLLVMGARAVLALAMKESNPRQDAVSRWARALAERRGYWRAVVAIAAKNARMCWAMLQRGEAFKMPSATTPVTA

SEQ ID NO: 197164 - protein, 386 aa, unidentified
MATPTTPRMTQDSLSQSTLYLAFELGKNTWKLGFTIGMAQQPRERTLPAGALETLQKEITRAKQRFGLPEDACVVSCYEAGRDGFWLHRYLAAHGVTNHVIDSASIEVNRRQRRAKTDRLDVHKLLTMLLRHMAGERKVWSVVRVPSVEEEDRRQLHRELTTAKCDRTRLSNRIKGLLAGHGVQLVLQGDVDAQLDQLHQWDGSPLPPALLSRLKRAWQQVCFLTAHIQTLEAQRWAVLRRREDAVVDQVRQLFTLRGIGVNSAWLYVMEFFAWRDFQTPKQVGALAGLTPTPSQSGQSRRELGIAKAGNRHMRAMAIEIAWAWRRFQPTSALSQWYEQRFGHGSARLRKIGIVALARKLLIALWRFLKTGVLPEGAVLKAETLGQ

SEQ ID NO: 197165 - protein, 338 aa, unidentified
MTILTVGIDLAKNVFAVHGVNEAGKAELIRPAVPRDKLHELIASLPPCVIGMEACSGAHHWARLFQASGHTVRLIAPKFVTPYRMTGKRGKNDAADAAAICEAIQRPHMRFVPLKTLEQQSRLMVHRARQGFVEQRTATINRIRGLLSEFGIVLPLKAATVRRRACECLEDLPGYANTVIGDLLSEVTHLDERIAQYDTHIQAMAKDDERARRLMQLGGVGPTTATCLLAMIGNGHDFDCGRQFAAWLGLTPGQYSSGGKTRLGRITKAGDAYLRSLLVLGAKALLAAAKNKADPVSRWAIALAERRGYWRAVVAIAAKNARMAWAVLRRGDEFVLPA

SEQ ID NO: 197166 - protein, 354 aa, unidentified
MNTTQNSTKSKIVKVIGVDLAKDHCDVIGYDENGKICLRLDGCSYAKLREILANLPQAVVLMEACKGSMFHARSIADLGHEVRLVKGTDVKALRNVNHKNDLRDAAYIANLYFVPGIKYVYIKNQQQQSLQFLQNEYKSLQELRIQVGNQIHAGLEEFGCPVRKSSKFIKTRMVAHLEKHAELIPEDVMASFKRRREIWLNLLQQEEEAKRRLEQVAATDANAKRIMTVPCVGPQTAVGLLVHVGVDFGRFKNSRQFAASLGLVPKQNSTGGNNTLNHITKCGPKSLRSNLVQCAQLVLMYAEKWKGNFGDWVRKMRDSGKKHGVIVCAIAAKLARIIYRLMKDKVDYTPIPSC

SEQ ID NO: 197167 - protein, 389 aa, unidentified
MYTDPTRTSQATTSPTIVPTLYVAFELGGSSWKLAATTGLGQPPRLRTLPARALPRALDELARAKARFHLDPAAPVVSCYEAGRDGFWLHHALTAHAVRNHVVDSSSIEVNRRQRRAKTDRLDARKLVSMLLRYAEGDRHTWHVVRAPSSEAEDQRQLHRELKTAQRERLAAVTRVESLLVTQGLTLPLSGRETVAEVRAAVAALRRWDATPVPPALQTRLVREWGQVVALTAQLRALARERAELLRTGDAPALAAVRQLMRLKGVGVATAWIYVMELFAWRTFRNRRELGALTGLAPTPDQSGTGRQRELGMGKAGNRWVRAVAVEGAWCWLRHQPQSELSQWFERRFARGGSRQRRIGIVAVARKLLTALEHYLRTGTPPAGAAVRA

SEQ ID NO: 197168 - protein, 410 aa, unidentified
MVKENFIYVGIDLHKETHTAVMIDCYNQKLGEITFPNRPAAFPKLVTKVKKCNTDGKEVVYGLENAYGYGRALAVWLIDKGYLVKDVNTAISHRQAKHRGAMYRKSDSDDAEAIALATLNMLDKLPDACPNDAYWSLGQLVHRRDNIMKQRTRLVNQLHEQLCIAYPSYKSFFNDISRPTALYFWEHYPSKKYLRGKSVEDLRKELVPVSHNRCSTKNCEKILDAVASDKVKNNAYQDARDMVTLSIVSDLQHYDSQLAEVDKMLEQMYKMLGCTLTTIPGVNVITAVKILAEIGDIKRFSNANKLAQFAGIAPLHLSSSGKGKDVATKQGNRRLQATIYFLAIQMVQVSSKGTPRNSVVRAYYEKRKAEGKTSQQALICISRRLISIIYGMLKHGTEYRMPVVESAGEK

SEQ ID NO: 197169 - protein, 343 aa, unidentified
MQRVATIGLDIAKSVFQVHGVDAIGNVVIRRQLKRRYVLAFFQKLPPCLVGIEACASSHHWSRELQARGHTVRLMPPAYVKPYVKRQKNDAADAEAICEAVTRPNMRFVATKTPEQQSCLMLHRTRHLFIRQQTAVINAIRAHLAEFGVVAPVGRRGVDELLDVVADSSDERVPEVARACVSALGAQLRMLKAQILEFDRQIMAWHRSNETTKRLDEIPGVGPALATALVASVADPKAFRSGRNFSAWIGLVPKQHSSGGKDRLGSISKQGDRYLRSLFTAGALAVIRYAKIHGTRHRPWLAALLARRPSKVAAIALANKIARMAWAMMVKGERYKEPAALAA

SEQ ID NO: 197170 - protein, 350 aa, unidentified
MIIVGCDYHPGFQQIAFVDTDTGELQERRLQHREGAEKFYRDLAAQGMKVRVGMEASGHARWFERLLAELNFELWIGDAAVIRTKRVRKQKTDRQDAQLILQLMLENRFPQIWVASWENRDLRQLLWHRHRMVQARTRIMNQLQSVALNEGLRCKKRLWREHGREQLESFRLAPWASRRRHDLLELLDRLNPTIAELSQAIEQEVEKCPEARRLTSHPGVGPLTALAFVLIIGRADRFQCGKQIASYLGLVPLEDSSGNRRRLGHITKQGSSMLRFLMVEAAQVTVRSLPEWRSKYFHLMMRRGRKIAKVAMARRLAIRLYWMWRKGWDYEQVEKFGSHAGQLGTGDGVQ

SEQ ID NO: 197171 - protein, 356 aa, unidentified
MPSTFQRHPNPGVVTVGVDTHADVHVAAAVDGLGRLLGSTAIPTTVEGYAELLAWAEGFGQVGCFGIEGTGSWGAGLTRWLAANGQVVVEVPRPDRARRRRKGKSDTLDAEAAARAALVGLDVGIPKRQDGPVEMIRALRVARRSAMKARIQAGNQLLGLLTRAPEELRARLWKLRGRSLVEAALRLEPAAGVPVSVTSATEVALWELAGRWHGLDGEIARLDELLDALVRKIAPDLLALPGVGTETAAALLEAAGDNPNRLTSEAAFAHLCGAAPLPASSGKTTRHRFNPGGHRDANEALWRIVLVRMKSHAPTRAYVTRRTAEGLSKREIMRCLKRYVAREVYRYLKPTDKSFS

SEQ ID NO: 197172 - protein, 346 aa, unidentified
MEHYVGLDVSLKLTAICIVNERGKIVREGSVASNPEAIAAFVKSHAPHVARIGLETGATSTWLWTELSMMALPVICIDARHAKAALKMQINKSDRNDAVGIARIMQCGWYKEVRVKDLDSHAVKGLLVSRALLVKIKRDLENQIRGLLKNLGLVIGRAKMNVFAVRAAELVEDRPQLAAAVEPLLKTREVVELQIADLDRKALRLARNDAQVRRFMTVPGVGAITALCFLATIDDPTRFKRSRNVGAYLGLTTRRYSSGEIDWTGRISKCGDKMLRSYLYEAANVLLTRVAKWSVLKAWGIRVAKRSGLRKAKVAVARKLAVILHRMWVDGTEFNWSAKEVAAQST

SEQ ID NO: 197173 - protein, 352 aa, unidentified
MDRYVGLDAHAESCTLGVLGPSGKRLKSMVVETNGQALLEAVRSIPGRIHLCLEEGTQSAWLHELLSPHVEELVVVMPPESKRAKDDLRDAWMRAEELRTGTIETRVYKAPQHLAALRNAVRAYGFAVRDVVRAKNRLKSAFLSRGIATDAGIYAAARRRKQLEKLTGPHRQLADWLGRQLDELTPLRDEAEEWLLKEAKTHPIIRTLATAPGMGPIRTAQLVAIAANPERFRTRRQFWSYSGLSIVTRSSADWMRGKDKRWERSQVQQTRGLTRKRHPLLKSVFKGAATTVIAQMPAHPLHKDYERMLEAGIKPNLAKLTLARRIAATVLSMWKHKEVYDPERHKGVTDKA

SEQ ID NO: 197174 - protein, 477 aa, unidentified
MLTIGPQQNHTPILSEFPHEALYVGIDVGKKKHVAGFLSRTLLQRHQRFEGCPALPFEQSREGFHLLVDRLQSYTSLESCYVLLEHTGHYHKLLEQYLQEMDIAVYVVHVQKRQTGMLKTDKRDALNLANTLYSQLELGVQVAEKLSLVRRALPPTKAALQLKGLIRHRYELIQESTQRKNKLTALCDEIFPEFTKVLKDPNSSTALAIRERFPSPHALATASLAALQDVRGNNRSLSDSKLVNLQCLAGQSIGIKDVNRQRGLMLEQSLLIKELRMIQQHLEQLEAEICQIVEQSREGQILMSIPGIGPLSAATLIATIGNIANFSRASELKSYLGWAPTRDQSGTSFDRSSLTSGGSRSTKQTLYLIVWHAIKQKDSEFALLYERLVPLKCIYNDATRRYTGKGKVIGRIAGQMVSMIYGLLMTDYEVTSHLAPGTRPPVPTLYDPEVHKRHRNGQYRALKPRKQKQLLIEQPDM

SEQ ID NO: 197175 - protein, 348 aa, unidentified
MLHAGLDLSRRRVDYCLLGEGGERVEAGVAPADGDGLCGLARLVELRHGRQPVGAVIESMNGARFVHDTLERCGWEVQVADAVKVKGLAPLACKTDRIDAWVLAELSRRDLVPAIWLPGFAERQERERARWRLHLVKHRSSLKHRVHAQLMAFGHACPVTDLFGARGRELLQRLDFPDPWRENVLACVALIDDLDQRIDVLERELRALGADHRYVPLLITVPGVSWVLAYTIAAEIGDITRFVSPRKLCGYSGLCPRVYQSGDTDRRGPLANNGPKYLRWALMVAATNAAKHPLYRQRYQATKKRVGRQRGAKVAQIQLARTLTEAIWQMLTRNQPFAPAGAAFPLAA

SEQ ID NO: 197176 - protein, 400 aa, unidentified
MISIGIDISKEKSTVCMLRPYGEVVEAPYDVTHNESELNALIEHIQSFDEDVKVVLEATGGYHHVVVSKMLSAGIFTVVVNPYIMKKYCAATLRKAKTDKIDSVKIANYGIDHWFSMTAYCPPDEVYSELKLLGRQYEQYVRLKIGCKVHLAELLDGVMPGIKKIFTGNVPAFSTKDKLCDFVEKYWHYDNIKKLSKNQFLIGYEKWAKKKGYRYNESQAIAIYRLSQNNIPTLKSSTPSTKMLVLQAVKSVRDAELTLSLIISQMQEIASALPEYSVVNAMNGVGSVLSVRLIAEIGDVRRFHNGSALVAFAGIDAPPYESGAFVGTNRHISKRGSASLRKIGYEIMHALKVTKPTEDSAVYDFIIKKENEGKPKRVAKIAGFNKFLRIYYARVMEVYC

SEQ ID NO: 197177 - protein, 427 aa, unidentified
MQKVAMQETGRVVWEAVLERCCGLDVHKKTVTACLLVGALDHQPRESLRTFPTTTKGLLELRDWLEQDGCTHVAIESTGIYWRPVFHILEDMVTVLLVNAYHMKQIPGRKTDLKDAQWIARLLRWGLLKPSLIPPKPIRELRDLCRYRKKLTEQASAEKNRIQKVLEDANIKLASVASDIFGLSGRAMLDALLAGDMSPEEMAELARGKMRPKIPQLVDALEGQISEHHRFLIRMHLEHLGYLEQAIAQLHQRIDEKIKPYQHQIDLICSTPGFSITSAQHVFVEIGGDIRLFPSEGHLASWAGLCPGNNESAGKRKSGRTTKGNRWIRGVLVQTAHATSRAKGTYFKSFYHRVAARRGKNRAAIAVAHKQLASIYGELQYGRPYHELGENFFDRLNQKTLEQRLVQRLQGLGYRVQLQPQTAASVS

SEQ ID NO: 197178 - protein, 400 aa, unidentified
MRTVFGIDVSKASSEVAILVNGERVHGYTMPNDIIGFSRLMEDLKTVSNPEIIFEATGVYSRRLQAFLEENSYDYTRLNPLEAKKQLDRLRVRKTDKIDAEKLASSQFVLNRKPTYVQEEVYQNLHDLSRFYQNLTEDIVRTKNRLHKVLQVAFPEIENLLSTPTGEQYWNLVSIFPTKHWVLELSEVELKEAIRNSTSKRISENRVGNLTEKLVGLAKQSYAGISKTSPMVEEVKYDAQELIRLTNRREQVLQQLIALAEPLPEYKILLSIPGIAETTATSIIGELGDIRRFKSANQINAFIGIDLKHYESGDFLGQEHITKRGNPYARKILYKCIHNIASASHTNPCHIADFYEKRKRQSQITSTKPHTIASIHRLIRTMYYLIMHNKLYDYSLAQSH

SEQ ID NO: 197179 - protein, 440 aa, unidentified
MIVWHGPEPPALYATSLANMEGRPAGRRRKPADKGRPQSRSVDCAGGKTANQSYTREGPAVSKHTTEAFSIKYVGLDVHKETIAVAVANSGTAEPRGLGIIPNDTDSLRALVKKLGRPSELRVCYEAGPCGYVIQRFFQRLGIDCVIVAPSLIPRKPGDRVKTDRRDASKLARSLRSGDLTPTWIPDEHHEALRDLVRAREDAIEDQLRARNRLTKFLLRLGVKPPEGVKAWSAPYKKWLDALAWDRPVQQVVFAEYRQSLEEIQQRVSRFEREIETLAPTTAHGPTIAALQAMRGGKLITAATIVSELGDISRFENPRQLMAYAGMVPSEHSSGGNVRRGSITKTGNAHLRRVIVETAWHYRHAPGVSGDLRKRQREVPAPACTIAWNAQQRLNKRYRHLLARGKTSHQTVVAIGRELLGFIWAIASVVKVTSQQPAAA

SEQ ID NO: 197180 - protein, 347 aa, unidentified
MKFYTQQHQFYCGIDLHARTMFVCILDQSGKICLEKNLHSCPDEFLTTIEPFRSDIVVSVECLFTWYWLADLCSEQGIPFVLGHALYMKAIHGGKAKNDRIDAHKIAVLLRGGMIPQAYVYPPGMRSTRDVMRRRLYLVRKRGQLLAHIQNTNHQYNLPEITAKLAYKANRKGFVDRFDDPSVRKSMEIDLELVAHFDQIIRDLELFIVRQARQHDADMFHRLRSIPGIGKVLALTILYEIHDITRFERVQDFASYSRLVKCVKESAGKKYGTGGKKIGNVQLKWAFSEAAVLFLRNNPEGQKWLARLTQKHGKGKALSILAHKLGRAAYFLMSRERSFNMDKFLAS

SEQ ID NO: 197181 - protein, 355 aa, unidentified
MNDTKYIGLDVHQATISAAVRDATGELVMEAILETKAETILQFFRGLRGSLQVIFEEGTWSAWLHDLLQPHVARVVVSDPRKNALLKDGNKNDRIDARKLSELLYLNKFNPVYHGEHGLRTLKELARSYLTITKDITRVMARIKAIYRSWGIPCAGQQVYAPGHRREWVAKLSEAGVRARAEFYYQQFDGLAPLRQQARSELLAEGRKHAAVKLLRQIPSIGPIRAALLVALLQTPNRFRTKRQLWAYVGLALRTYTSGEYRFEHGQLKRSKKVLAIRGLNRNHNHDLKNIFKGAATWAAGNTGPFQNFYEACIARGMKPHLARLTLARKIAAITLLVWKKGVCFDAKHLTQQAA

SEQ ID NO: 197182 - protein, 399 aa, unidentified
MSALRRVVIGADTHLDTNHLAVLTDTGKPLADAEFPTSPAGYDDAVRWAQSLGTICIAGVEGTSSYGAGLTRVLQAAGIEVAEVSRPDRAARRRRGKSDPLDAYAAARAALAGDRLAVPKDEHTTALRALLSARRSAVKAHTAATNQLHALLVTAPAELRERYRRHHITALVAALAQCRPATQGDPTTAAVLTAAKALAQRVKFLEQQRQDLTAQLDGLVGQINPALRAAYGVGPHTAAQLLVTAGTNPHRLRSEASFAALCGAAPVPASSGTITRHRLSRGGDRAANNALYRIALVRMSSHSQTRDYVERQVTKGRTKKEILRLLKRAIAREVFRLLTRPGPVDDYRDLRAARQAKNLTLAAVAQHFGVPIITISRLERGHQRNDTLANHYRQWLTAA

SEQ ID NO: 197183 - protein, 338 aa, unidentified
MYYSGIDQHKQFSYFTTVNDEGIIIKQAELKNNEFDILNYFYTLGKNHIATVETTGGWYWMNDLLSNHGINLKLAHAKYVKAIAYAKVKTDKVDSHILAQLLRLNFIPEAYKISDNLRPLRDTLRARLRLSQKRTSCLNFMNRMLEKFNINSPSQLTEFYKLQYLQFDNQEQLLKQQMLTLEKSLYTSLIPNEDIQRLLRIPGIGKLNAFSILLEVGDINRFQSEKNFFSYCRLVPSARNSAGKSKQRSSKDGNKYLKLVFSDAAVHSLQYYPAIKKYHDSKLRKKKKQVAHAIIAKEIARIVYYVLKNKSAFNNHFKGIELEHKKSVQWPRTSSPDV

SEQ ID NO: 197184 - protein, 404 aa, unidentified
MFKTVELEEVPMEIVSALDIHRSQITFKTLDLRSGEVRRGRVSPATREALGEWLEPFAGLDAHFALEGTTGWRFVVEEIERAGHRAHLADPAETAAKRGRKRRAKTDNADCDLQLKLLLAGELPESWIPPAHILELRTRVRMRKVLVDQRTAWQQRLQAQLFHQGIPSGLRLRTRAGREALARAELSPAGRQLVSLGLRMLEVIDLELVPLDRQLRAFARRQPGCRALIDQLYGVGPVSATAILAELGDCRRFARSNDAVRHSGMDVTVYQSDSKRAPGHLSHEGPELLRWALFEAAQCASRQASPDHAYYRQVAERIDHNRACLSVARKLCRRAYHPHCSCRQAGPGLNGLHRPSGRKQPPRGSSPHRSSCRRTSESVDRGKAGRPARRYLARRYEREMTPMG

SEQ ID NO: 197185 - protein, 417 aa, unidentified
MTPDEKQAYARQFPVHVGVDTAKQFHVLVAQGPDGRRSKPFKVIVCRAGFAATHAHLQDLFPGLTPAQMLVGLEFAGHHGFTFARFLADRGYPVVNVLPAHTNRSKELEDNSPLKTDAKDAAQIAKLVGMGIFVRFPFLTTPYVELRLLSVQRHRLTVEATRFRNRLQGVLDLAWPEFLGQFSGLHKRTPLAILARWPLPQEFAAATPQAVWRHIHAASRGHVSKERVATLIASAKETIALTQATPERRLEITKLLARWALVREQLAVVEARIVALVDQCPEARVLLSVPEISAACAATIVAELGTPADFQHPRQVLKLAGMNLTGRQSGQTEGRRRQSKRGRPMLRRQLFLLAGRWCQPRGLYRPEYEAMRARGIPGTKAVCALARKLVPLLLRIMQTGEPFDEGRWRGNRHQVAA

SEQ ID NO: 197186 - protein, 410 aa, unidentified
MQVLYPHCAGLDVHKDTVVACVRHMAGGTVKRQVRTFKTTTTELLALSEWLAAEKCTHIAMEATGVYWKPVWHILSDGDFSLVLANAAHVKNVPGRKTDVNDATWLADLLAHGLIRGSFVPDQQTQEMRDLLRTRKQLTRERSRHVQRLQKTLEDANIKLDSEISDIIGLSGRKMIEALIAGESDPEQLARLAHRRIKAPPEALREALRGRVTRHHRFLLRLHLHQIDAIDKMIADIDREVDALVEPFRTTVLLLTTIPGVDELSAGVILAEIGRDMSRFPTAGHLISWAGLCPKNDESAGKRRPTRMRKGAAWLKTTLVQCAAAAARKKASYLQAQFHRLRARRGARKAIGALAASILTIAYHMLISGELYHDLGPDHFDRRTKTAQTRRLVMRLQHLGYAVQITPVAA

SEQ ID NO: 197187 - protein, 482 aa, unidentified
MKKTNIYQNQSQELLHLFEEAGGGAKVMCVPMDYAKKDHLVMFLNGHGDILRKPFSVKNTPEGIGYIEDQVTRSCRRRGIEKKHVFFGGEDANSFAKNFVSTLRGKGFVVANVNAHDAKKQRVNMQASTDRIDLMGIATMLLNCRANCCAAQSGIYRNLRTLVRHRRRLVQMLTEVKNRVHGVVDELFPGFLNEKNSGIVPFTQSSLYLMQDRFSPKQIRRRRRQKLIDILKRSGTSKAEKTAAKLQQYAATVLHAPVEYVDTMQLSLAQHVKHIGCLKESVAQMEKQIALNLAQTQGAFLTSVRGIGLVLAAGVTAEIGDPNAQKPLNNLASYAGIIPRVKQTGGWDGKTYSRPVAKRCNRILKDYVVKSAYHLGLHGPPDLMADYKRRDASGQHADFGIGRRYLRMAKSLMRTSQVYLPHHLRNDDDTLKDRASYYLMSWPYLKEKWQKGGALEAAFANNRPLGLWRQIVQELYDIKLKL

SEQ ID NO: 197188 - protein, 385 aa, unidentified
MKKVDYTLYFITNSDGEVLFKSFTIPNNREGFETLFQKILSVSDDLAKVKVGLEATGHYSYNLLGFLLDKGLPTYVINPLHTNLYRKSLSLRKTKTDKVDSHTIASMIMSDVNLKSYSDTSYHNEELKSLTRYRFDKVKERAKLKSSVSRLVCILFPELEKLVPQLHMASVYALLSEFPSAHAVASAHLTRLTNLLSESSHGRYGKETAIIFRVAARNSIGSNMPAKSLELNHTIKLIQELTSEIDEIENEIKIIMDEINSPILSIPGINYRMGAMILAEIGDFSRFDSADKILAYAGMSPSTYQSGQLDNCYSHMEKRGSRYLRYALYNATKYVCHWDESFAVYLAKKRAEGKHYNVALSHATKKLVRTIYAMEKSGQPYQSAS

SEQ ID NO: 197189 - protein, 401 aa, unidentified
MKEFNADGIIIETVSALETIRQAQAERHYPAYIGLDTHKETIAVAVARAGRAAPEPRGEIVNKPKAVAKLVERLNREFAGEVLLFCYEAGPCGYGLYRQLLALGHDCQVVAPSLIPKKPGERIKTDRRDAGKLARLLRSADLTAVWVPDEEQEAMRDLTRARDDLKAQERKARQQLNAYVLRHGHAWPSNRTRWTRTHYNWLESLTFGHDWQQVVLQEYIDAVKAASRRVADITAQMERVLPQWSLAPVVSSLVALRGIDKLAAMVLLAELGDISRFDSPKQLMAYLGLVPSEHSTGRRRRQGAITKTGNGHARRMLVESAWSYRFVARQTMHLKRKAKHASEEAKAIAWRAQKRLCGRYRTLVQAGKNTKQTTVAIARELVGFIWAIVCQEMPKLQQSAR

SEQ ID NO: 197190 - protein, 346 aa, unidentified
MVLIGCDFHPSWQQVSWLVRETGEVGDQKLVHEPGAVEKFYRQFAAGARIGIEATGNCQWFLELLGKLGHEVWIGDAAKIRASDSRQQKHDKRDAQLLLRLLTEERFPRIWVPSREQKDLRQLLIHRHKLVRIRVQVKNGLQHLAMNQGVLKKHKLWSAAGQQALRELPLAAWASRRREDLLKMRSELDAKIDVLDRAVVEAAEKDERARLLMTQPGVGPITSMAFVLTMGDVSRFPRGKQVASYLGLIPREYSSGGQQRLGSISKQGNTFLRMLLVEAAQAAVRCDPGFRKEYLHRCHSKAKGVAKVAAARKLAIRLYWMLRSNTKYPDVVRSESSSRVPVVSAS

SEQ ID NO: 197191 - protein, 427 aa, unidentified
MNTVRPIAVPNRKYVLSVGLDWADQKHTLCQRCWADGQRQQFEIGADPASVEAWLAQLKALAGPEGRVAVGFEQNRGALFAMLRAHTDWIDLYPLNPLTVSKFREALFTSGAKDDPLDSQLIEELLYHHLDRLRPYMAAEPELRELDLLCQQRRKAVDAAVACANELCSLLKVYYPLPLDLHEELRCSLTLHFLKRWPTLEQLKKAKPQTLRSFYYQHHSRSQSLITERLEKIARAQAVTEDLALIRPSVLSLQRLVNQLLTLQASVAAFDKAIQALFAKHPDHLIFESLPGAGPRLAPRLLAAFGSNRAALSHSSEMQKKSGTAPVLDRSGQAKTIARRWCRSKFLCQTFHEFAAHSIPHSTWAKACYQQLLARGKSHNAAVRALAFKWIRIIFRLWHNGTLYDESHYLKALENRRSPLSKKISKL

SEQ ID NO: 197192 - protein, 372 aa, unidentified
MNYNTVYVGMDVHKESFTLCSCKYEDEKASHYQRTPASYKNVLRYLAFLRTIYGEDTRFVCGYEAGCLGYSLYHQLENFNVECVILAPTTMLEQRSKRRIKTDKRDAEIIAKSLAQHNYSPVHIPTKMDNQTKEFIRMRDDHKAELKKIKQQILAFCLRQGYQYDGSGNWTAKHVKWLRSLKTEGLYKEILDEYLLTYTILTDKLNRLDQRIEELASKEEYKESVSKLTCFLGIKTHTALSVIVEVGDFQRFVSARKFAGYLGLVPGQHSSGDDRNGLGITKAGNTHVRRLLVESAQSYTRGKIGYKSRVLRSRQAGNSPQIINYADRANERLRRRYYQMVLKDGKKYNIAKIAVARELACFIWGMMTDNIY

SEQ ID NO: 197193 - protein, 307 aa, unidentified
MANHVTKITLGVDAAKDHHVIYNWQTEQMTKLRNQSNDIKTWLKAFHGPVRIAIESTSDYHLTLVDEALALGYEVYLVNPRQLVHYREAVNVRNKTDPLDAWLAARYLEHEVDHLRPFQPRDPRAQQLWRLVLRRATVVKSRQQLRQSFAGVKVSIQGVLTQLKNLLARIDRHILRLIRELGWWSDYQHCLSIPGIGSANASALVVAYHRGAFSGSDAFISYLGLDVRIRDSGCFKGRRKLTKRGEPELRRLLFCASYPARTCHRFAEYYQKQLDKGLSKIAARVALSRKLARIAFTLIRNEEVFMS

SEQ ID NO: 197194 - protein, 408 aa, unidentified
MNAVGIDVSKGKSMVAALRPMGEVALLPQEFLHTEVGLEQMAYAIIALGEDTRVVMEATGRYHEPVAAALHEYGIYVSVLNPLFIKQSGGGSIRKVKTDKADAMKIAKYGLDNWVDLREYTPMDTVRQQLKLCSRQYNLYMKTVVSLQNNLISLTDKTFPGVNELFSSPERADGHQKWVDFVMTFWHCDCICRVSEKAFTERYQKWCKRKGYHFSTEKALDLYAGSCGHFTTLPKNDNTKLLITTAAQQLLAGKMTLAALHAEMARLARQLPEYDTVHAMYGVGEITAAQLMAEIGDVRRFPRRSSIVGFAGVDPAVNQSGKHAAQSTPTTKRGSPHLRKTLYQIACTYLKKSPAEEPVYQFLDKKRSEGKPYFVYMTAAQNKFLRIYYARVKECLETFDAQQNSAQS

SEQ ID NO: 197195 - protein, 354 aa, unidentified
MANYYIGADVDSKMTELAIEKKEKIVRRYRVPTTIPALREVLGAIPGTKFLTFEEGPMAGWLYRNLKDNVDDLVVCDPRRNKLIACDGDKDDSIDAGKLAGLLRGGFLRAVHQSEDIGRIVLKQWVSLYHDKVREAVRQINKIRARCRMYGIRIPRRALRDQVSRHQWMTGLREKDLAEQLAVLWIGFDTAANQVKMARKQLIRHSKDYEIVKYWSDVPGIALIRATTMVAYLDTPWRFSSEKKLWKYCGIGLQRTSSGTDRFGKPNRGKLQLAWAVNRRLKGVVTGAAMSAINQKNNIFAYEYGRMIRNGLTASNARHAVARKLLSVLWAMWKTSSRFDESLVCYSPVTVKAG

SEQ ID NO: 197196 - protein, 370 aa, unidentified
MKKNNNSSKSPKRATKARKTDRITIGMDLGDKTSRVCFLNEECEVIREGSVATTKKGMAQMFGAMGHCRIALEVGTHSPWVSRLLKSFGHEVIVANARQVKLISNSSRKDDKLDALLLARLAKMDPELLRPIRHRSEEAQADLMTIRIRAALVEARTGLVNAARGLAKSIGERLPKCDTDQMGEEQLAQVPEALAEILKPLMKEVESLTERIQECDGKIEQIARDRYPETKLLRQVKGVGPLIALTFVLTVEDKDRFAKSRDVGCYIGLRPKRSQSGERQPELRITKEGDVYLRKLLVQAAHCILSRRGPETDLKRWGTKLAGRGGKNAKKRALVAVARKLAILLHHLWSTGEVYEPLRHSSATESQKAA

SEQ ID NO: 197197 - protein, 347 aa, unidentified
MRTGKDIVIVVDYHQENLQFRWFSEATGEERTFSLPTCADKILQVVQSATAEVGDGGQVVWIMESTTGWARVKRLLQGRVRFRLANVLQMPLPPKAHRKKTDKIDTGRILREYLVGTLPYSHQPPADIRQFRRLVDTRQDLVRRRTTLRNWINRYLSHETWEDRRGLWSQRGMKRLAAWIAGLQGPDVVTLQTKWAELQHVAVLLEPVERAIQELYAQWPAAQRLSAIRGLGVLSSVTILARIGRIERFANAEALISYAGLAPGVRQSDQTCRTGHIGGGGTDRQLRCALIEASMWARQIPRYCSTYERVAGKRGAKIGRLVVARLLLRSVYKMLTTGTRFNQAPAA

SEQ ID NO: 197198 - protein, 343 aa, unidentified
MQIVRIGLDLAKYIFEVHGVDAHGKVVLRKTLRRNAVSSLFANLPPCLIGMEASNGAHYWARVLSGFGHQVRLISPQFVAPYVKSNKNDRNDAEAICEAAGRPTMRFVPVKSVDQLAVQALHRIRSRLVSGRTKLANQIRGILAEHGIVIARNIAKLRQNLTYMIEGDGNGLSSLVRALVGELKAELAELDQRIAAYDRRIRELYRNNELCQRLGKIEGVGPLSATALMAAVGDRQGFKNGRQFAAWLGLVPKQRSSGGRDRLFGISKRGDRYLRTLLIHGARASLARAKGKQDPRSCWLEKLRERRHPNIAAVALANKNARIAWALLSSGEAYNPSLSVGST

SEQ ID NO: 197199 - protein, 430 aa, unidentified
MKSNTQNKKIEAITEKTLVIGIDVGSETHYARAFDYRGIEYSKKPFKFSNTEAGFVTFKEWILDIKERHEKDKVVPGMEPTGHYWFNLGKFLQDNEMKPVLVNPHHVKKSKELDDNNPTKNDRKDPKVIAGLVKEGRYMIPYLPDGVYADLRTASNMRFQIQSELTRIQNRISRWVNIYFPEYKTVYGRPDAVSGMMILKQAHLPEDILTLGVEGVNQIWRDAKMRAVGKKRAQILIEAARHSIGAKEGSMAARMEIRMLLEDYESRNNHLQEVMTLIEELVKQIPMAEKLMDIKGVGIKTVSGFLAEVGDVSRFSNPKELQKLTGLALVENSSAKHEGQTTISRRGRKRLRYLLFEVAMSLVAKNPKFRELHNYYTTRRLNPLKKMQSLMAISAKLIRVFYAMLTKGVDYDPKKMVSDIKRPAVYLQVA

SEQ ID NO: 197200 - protein, 458 aa, unidentified
MNRRRKKKSGNEQQDWSVNLNVVHPNAAGIDIGNESHYVAVPPDRDAEPVRQFACFTEALQQMAAWLKSCGIDTVAMQSTGVYWLPVYEILTEEGLQVFLVNARHTKNLPGRKTDVQECQWLLQLHTFGLLNNSFRPPEEICVLRAYWRQRAEHVASASTCIQRMQKVLTEMNVQLANVISDISGLTGLAIIQAILAGERDRYKLADLANFRIQASREEIARSLEGNWRKELLFILQQELNLYQTYQQQIAECDIALAAHLQTLEDKVEAGSEPPAAKANKRAGSNAPTSFDLRGELYRISGTDLTQIDGINIMNAQTIIAEVGVDMSRFPSEAHFASFLGLCPDNQITGGKVLRRGTRHVENRAATAFRMAATSLWRSKTYLGAKFRRLRARLGAPKAITAMAHMLARLVYRMLRYGEQYVDKGMKYYEEKYREHEIRSIQKKAKDLGLVVTLSTAA

SEQ ID NO: 197201 - protein, 343 aa, unidentified
MQTITTIGFDIAKSVFQVHCVDAEGKVILRRQLKRRYVLAFFQKLPPCLVGIEACASAHHWSRELQALGHTVRLMPPAYVKPYVKRHKNDATDAEAICEAVTRPNMRFVATKTPEQQSCLTLHRTRHLFIRQQTMVINAIRAHLAEFGIVAPVGRNGVEQLLSVAADSNDKRLPDVARACVTALGAQLQTLKAQILEFDRMIMAWHRSSEASRRLDDIPGVGPALATALVASIADPKVFRSGRDFSAWIGLVPKQNSSAGKDRLGSISKRGDRYLRSLFTTGALAVIRYAKIHGTRHRPWLTALLTRRPTKVAAIALANKIARMAWAIMAKGERYKEPAALAA

SEQ ID NO: 197202 - protein, 412 aa, unidentified
MKRIRDRVAGLDIHRDTVVACCRVVDPDGSVHVAKQSFATTRKGLSELATFLADASVETVAMEATGVYWRSPYYALEGLFPELWLCNAAHVKNVPGRKTDLSDAEWLADVAAHGMVRPSFVPPPEIRELRELTRYRKTQADARAREIQRLEKALQDAGLKITSVASAVWSMSSREIIEALIAGERDPAVLAQMAKGRLRAKIGELEEALAGHFGAHHAILCRQIIDHIDFLDGSITALTEEITTRLVPFEAAVALVTSIPGIARTTAEVIVAETGADMSRFPTPGQLCAWAGVAPASYESAGKRRPAGTRHGSEWLRRALIEAARAGARTKGSYYSAQYARIARRRGPNKAAVAVANSMLFTIWHLLSNGQLFEDPGADYFERRHDPAVEAKRLARRIEALGFDVSVIEKAA

SEQ ID NO: 197203 - protein, 336 aa, unidentified
MTHYCGIDLHSNNHVVVVIDEEGKRVLEKRINNELSLTLKALSPYQESLQGIAVESTFNWYWLVDGLQEHGYNLHLVNTAAVKQYDGLKYSDDHHDAFHLAHLMRLGILPTGYIYPKEQRAIRDLLRRRLSLVRTASTQLISVQSQIWRSTGIRIKSTELRKPAFAPPPVDDYTLQAIHAGLAVYQATQREIDALEQSAHQAVKLTAAFEILQTITGIGKILGLTIMLETGDIHRFAGPGNFASYCRCVDSKRTSNGKKKGEGNAKAGNKYLSWAFSEAAHFNVRFEPLAQRFYERKKAKTNGIIAIRAVARKLARATWMILKHQVPYDARRMFPG

SEQ ID NO: 197204 - protein, 415 aa, unidentified
MALKIVYKICCGIDIHKNFVVACIAKTDMQGVTTYERHHFSTYTKGLKQLLKWLLDRNCKDVCMESTGKYWIPVYNVLEHDCSIVLAHPKYVKAIRGKKTDKKDAKWIADLFKHDLVAGSFMPPADIRQLRDLMRYRFKLTCFKSSEKNRYQNCLTVSNIQLGNVVSDTFGKSSQKIIAKILENPDDTSFDIGSLIHGSMKDKLPELELAIDGYITPEQAAKLKIIKEHFDNLEARKAELEELILALANPYQQEISIILTAPGFKNTFTAIGIISEIGTNMEAFPSAKHLCSWAGLTPTNNESAGKKKSVRVSKAGCYIKPLLVQCANAAIKSKKHPEIRDRYLRIKKRRGHKKAIIAIARMLLTALYHMLKNGENYNSDLYQKSDILPTTREITVEQAILMAQFQGFRIKSATE

SEQ ID NO: 197205 - protein, 360 aa, unidentified
MIYSLGIDIAKDKFDACLIACRLTEQTQQVMARKTFKNISSGFKACMRWARRHGSSEKSLRVTIEATGTYYEPLALFIDEHHPGGHLAVVLPSKSKKYIQSRGLRSKTDKIDARGLALMGAERKLPAWKGIDPFWRELRALTRTRGRLMDQRTALRNQLHALNHGGMNAAESKESLQAVIEALNAEIDKLTSSIYSKLRACKHLQQPIDCLKSIPGIGRLTIAAVLAETNGFDAFESISQLISFSGYDVVIQKSGKWTGKPKISKQGSSYIRRAMFMPASTVVRSGDGPTAELYQRLVAKHNVKMKAHVAVQKKLLRYMYVLWNKKESFDPDHIRSLQAHHKNVAPPEGEATVDTSQAAA

SEQ ID NO: 197206 - protein, 416 aa, unidentified
MKYARVHVLPETSPGGLTAGIDWGSADHAVCVVDAAGQVHARFTVCHDRAGIGKLIAGLRAAGVREAAIERNDGVLVDALLEAGLMVVVITSRQMKNLRSRYGSAGARDDRFDALVLADVLRTDRARLRPLAADMPATAALRAAVRARRDLVAHRIAACNQLRAHLAVVFPGAIGLFAHLDSQISLAFLARFPSQDAVDQLREEDLAAWLCTLPHRGKAPRPGQLHARLQAAAHGTSGADGAARAPVTAALVATLTTLTAQIKALEAGIAAQLAAHPDARIFTSLPRAGTVRAARLLAETGDCRARFPDPGSLAGLAGVTPVTRRPGKHISTGFRRAVNRQLRDAVCDFAADSRHANPWAAAIYDAARARGKDHPHAVRIPARAWIYVLWRCWQDGIAYDPAKHAALQRVLEQQNA

SEQ ID NO: 197207 - protein, 347 aa, unidentified
MRFYNQQHKNYCGIDLHARKMYVCIIDQKGKMKVHQNIKTDPELLFEIVFPFLDDIVIGVECVFCWYWISDLCAEHKIPFVLGHALYMKAIHGGKTKNDKIDSYKIAALLRGGNFPIAYTYPAEMRATRDLLRRRMYIARRCGELVAHIQNTNTQYNLPEFGKKISRKYNRQGVAERFDDPAAKKSVEVDLAMIDSLNEILKKLEWHIEKTARQHDYKTLYLLRSIPGVGQILALVILYEIHDIKRFPRVQDFSSYARLIKPVKESNGKWAGKSNKKIGNHHLKWAIKEAAILMLRSSDQAKEFVAKIEKKSNKGKALGIFTHKLGRAMYFMLKNSEAFSMECFFNK

SEQ ID NO: 197208 - protein, 341 aa, unidentified
MAVAGGLDLHRGQLTFDYVDTGTGESWRGRICPADRESLRGWLRRFHGVPDVEFAVEGCTGWRYVAEELQRAGITPHLAEPAETAGLRGRKRRAKTDWADARHLRDLLLDGRIPESWIPPGHVLEARALVRLYKDLLEERTSWQQRVHATLFHQGIPVVPKLGTADGQQRLEAAELSAAGRRAVQAGLRQIERLTQEMASLRRELARLSSRQPGCRALRRAHYGIGGLLSVAVWAELGDCRRFSSSDDAVRHTGLDVTIYDSDGRRARGHIARQGPPVLRWALYEAALYASRPASPDYACYCGVRDRIDGQRALLSVARKLARRCYHTLRDLGEDALAPAA

SEQ ID NO: 197209 - protein, 391 aa, unidentified
MIYVGIDVAKDKHDCFILNSEGTVLADVFTIANNRIGFETLLSRIQSCSQGESKIKVGLEATGHYSYNLLGFLLDSGLATYVINPLHTNLYRKSLSLRRTKTDRIDARTIAMMLMSDVDLKSYSNTAYHNEELKSLTRYRFDKVKERAKLKSSVARLVNILFPELEKLVSSLHIAVVYALLSNYPGASYIANANTEELAETLCTASKGRYTKSKTAEIQVAAGVSIGSKMPAKSMELKHTIALIRELDKEISEVESAIDKITSQMDSPIFTIPGIGRHMGAMILAEVGDFSNFASADKLLAYAGLSPSTYQSGQLQNCYAHMEKRGSRYLRYALFNAAKYVCLWCPTFSAYLEKKRSEGKHYNVAISHAAKKLVRLIFAMQRSGKAFLADY

SEQ ID NO: 197210 - protein, 329 aa, unidentified
MQAKGTTIDFNGQNVYAGIDIHLKSWKVTIMLGEREHKTFSQDPNAETLWNYLRKNFPGAVYHSAYEAGFCGFSAHRDLVGFGILNLVVNPADIPTTDKEKRQKEDKRDSRKIAKSLRNGELVGIYVPSKGMEELRGLVRYRKTLVKEISRHKCRIKSYLYFNGIQIPIELGGTSTHWSGRFTRWLSEVKLSTVHGKMVLDDTLDTAELLRKKLLKVNRHLRHEVGSGEYSDKLRLLQSIPGIGLITAITLLTEMENILRFRNLDQLCSFVGLVPSTNSSGEKEKVGRITRRNNHFLRSVIVEAAWMASRKDPSLLYSYSLLIKRMEPT

SEQ ID NO: 197211 - protein, 342 aa, unidentified
MSEVTIIGIDLAKRVFQLHGARDDGSVVFRKKLSRGQVLVFFAQQPNCVVAMEACATAHGWGREIEKLGHSVRLIPPVYVKPFVKRQKNDAADAEAIVEAALRPTMRFVAVKTEDQQARAMLFRTRQMFVGQRTQLINALRGHLAEHGLVAATGTAQLKRLADAIEDSNTALLEGVRDLGQMYLAQIEGLNALVAELDLKMRSAAKEADVARRFQTMPGVGPITALAIETFAPDLATFRRGRDFAAWLGLVPKQHSTGGKARLGKTSKMGQRDIRTLLVSGAMAVLQAVERFGTPNNGWLTRMRARKPRMVVAIALANKMARGLWAMMTKQEDYRNPVATMA

SEQ ID NO: 197212 - protein, 338 aa, unidentified
MSIVMGLDQHRAQITADWLDTDTGEVKRGRVAPADRAGVRRFLERFVGRELEVALEATTGWRFLVEELRRVGAVVRLAEPAETADLRGSKKRAKGDRADARHLRELLMIGRLPESWIPPDHILDLRARVRLRHELGEQRSEWQQRIQATLYHHGCPQRRQLMVGDGRDWLAQQPLPDTAREQVTIALAMIDALELQIRPIEKELRAYARRQIGCRALMAHYGIGELTAVTILAELGDCTRFSSSRQAVRYAGMDITVYQSDRHRAPGHISRQGPPALRWALYEAAQVARRPGSPDRDYYVQAAERIGGNRACLSVARKLLKRSYHTLRELEEEALAPA

SEQ ID NO: 197213 - protein, 351 aa, unidentified
MQDQAYFVGIDLHKELIQVCVLDGRGEKVAEHRFPGGSLEQGLAVVKFLSQWKAGGRFGVEALGMNRWLVNAMQAQGMEVVVVDAVKLNLRMLGKKTDRRDAYEIARRLWLGDIDRNAKTHYPGEEEYGGRKLLRTRHKLVQLRQQTVNQVRGLMNAYRIAAPKCDLSSKKNLEWLARVELPAKPLTDCLRALEQVLRTVQGSIDALSALIKTEASKADVACLAENLEGVGPLTALTLKRELGDVTRFHSTRAVASYAGLAPRVANSADKAHHGKITKRGNSELRWILSEWAVRLMATNPVARRWAAPLLRRMHKNKVRIALARRLLIGVYFMLRRGDTFSLERCLAARAA

SEQ ID NO: 197214 - protein, 394 aa, unidentified
MKLVGIDVGKNSHHFCVMDKETGEFNVTPTSFSNNKEGFDFLINSLKPYSKKSILIGMEDTGHYHVALLKFLLSNGYPVALINPKTTDLTRKMEGGITKNDKLDTITICDVLDTPERKKQYRITKVDRFDLYEQRQLTRHHHNLKEELNVYCNRLQKSIDLVFPEFNTLFSSKYSIVYMNLLKTFGSAEAIASTDIRTIRKCFEIKGRGNRISLTPEKLKECAKNSIGISSEVETIQIKHLVSQITLIKEQIAEIDKKIEEFSITNNSPILSIPGISHFSGTSILAELGDIGNYSKPSQIIKFAVVAPYHYESSQYNAQHTGITKKGSKYLRKTLYQIILTVINNNPVFKKYYLLKISQGKGHRCAQGHCIRKLLRIIYHLLETGQSFDPALLR

SEQ ID NO: 197215 - protein, 340 aa, unidentified
MTITTVGIDLAKNVFAVHCIDQNGKAVLVKPKVSRAALSELIAGLPPCVIGMEACSGAHYWARLFRQYGHDVRLMAPKFVSPYRMAGKTGKNDAADAIAICEAVQRPHMRFVPVKDESQQAMQCLHRTRQGFIQERTATYNRLRGLISEFGVIAPQSTDALRHVVSDQKETLPVQVRLCIDDLLTHVTNIEEKIAEYDRVLSRVAKTDHRSQQLMELKGVGPTTASALVASIGNAHDFKNGRQLAAWLGLAPSQYSSGGKSKLGRITKAGDAYLRTLLVQGARSVMVGAENRTDPFSRWVCSLIGRRGYWRAVVAIAAKNARLCWASLHYGDDFRLYSTT

SEQ ID NO: 197216 - protein, 375 aa, unidentified
MSNVIMIGCDLHLRSMLLLYAVGEQKPQQVSFVNDAQGRNKMIQMLQGLAEKHASQRIVFVYEASSLGYGLCDQLCDVGIECHVLSPAHLPKSAKQAKQKTDAKDALMLLEVVRGYVLAGNSLPAVWTPPQRLRDDRELVRARIDTSDEMTRIKLQILSLLKHRGIAKPGTYTHQWSKAFVLWLRNTAAQLDEFVAPVLENLIERYELVAQQKTKLEKAVMKLSQTERYKVPSVELRKITGVGLLTSMTFLTELGDLTRFENRREITAYLGLCPSSHESGETKDRKGHITRQGPSRVRKLLCQAVWVAIPRCKETSQSYHRIRGGKTNRTKKAIVAMMRLLAIKMWHRALECGVSRELVGRGGPHDLELSKNKAA

SEQ ID NO: 197217 - protein, 342 aa, unidentified
MPTTRITTVGIDLGKNTFHLTGLDERGAIVIRQKASRGQLERRFVNMPRCLIGMEACAGAHHLGRQLAALGHEVRLIPAQYVKPFLKGHKNDYRDAEAIAEAVTRPTMRFVPLKAAEQLDLQALHRVRSRLVGQRTAVINQIRGFLLEHGITVRQGPSALRWALPDVLAKRTEVLSPRMVRLIEGLTDDWRRLDTRIDAVTVEIEAVAKQDEDCRRLASSPGVGPIIASAMVAAIGNGSAFARGRDFGAWLGLVPKQSSTGDRTILGAISKRGNRYLRTLFIQGARAVLLRPHSWARYGFQHWLDAAAKRLHRNVLAVALANKLARIAWGVLAHGRSYDPGV

SEQ ID NO: 197218 - protein, 402 aa, unidentified
MNCVGIDVSKGKSMIAVMRPFGEVVVSPFEVSHTASELSELARLLKNLDGETRVVMESTGNYHAPVAWLLHGAGLYVSVVNAMLVHDYGNNSLRRGKTDKKDAVKLANYGLDHWLTLPRYIPEEDTRLMLKTCYRQYQQYSKVQTMLKNNLISLLDTAFPDANRLFTSPPRTDGSEKWVDFVATFWHCECVCGLSKKAFTAKYQKWCRKHGYNFSQDKALDIYASACGRFGVMPKTNTAKLLVEQAISQLQTTSAALAALKQEMQSLAASLPEYPVVMGMFGVGPTLGPQLIAEIGDVRRFHSKKALVAFAGIDAPPYQSGQIDVRSRSISKRGSASLRRTLFLVMGVLLQCAPMDEPVYQFMNKKRSEGKPYRVYMMASANKFLRVYYASVKAYLDSLEHD

SEQ ID NO: 197219 - protein, 387 aa, unidentified
MPKQFDPRHAATAFDHDSTLVVALELSGKSWEADAVVPGVARRPRRRLAARDLAELLRSIERWKAEAAKAGRVVRRTVLTYEAGRDGFWIARYLLNQGIEVHVMHPASIPVERRNRRAKTDRIDLDMLLRTFLAWLRGEPRVCSMVRIPSEAEEDLRRPGRERERLLNERLQLENRMENLLCLHGVSNFKPRLKKAAERLEQVRSFAGTPLPPQTMDELRRLMVRHRLVSDQLRGLEAARDRVTEVAEPDQAEQMIQILIRIVGLGTETATLLVRELFCRSFRDRRALANFVGLTGTPFRSGGMDREQGIGKNGNAHVRRIVMQLSWRWLRFQPDSALSRWFDERTGGAKGRIRKVMIVAVARKLLIALWRYVETGEVPAGARILPA

SEQ ID NO: 197220 - protein, 346 aa, unidentified
MNDMYYIGLDIHKKTISYSVKDAAGHVHREGKIGSTRRELDAWIKTLPQPRMMAMEATMFTGWIYDHLLPHAEKVKVARPLMLRAIAAAKKKNDRIDASKIADCLRCDFLPECHMASTEIRDRRRTLRYRNLVLRQTVQMKNRVSGLLMESGVSYDKQRLHKMGYFSELFSTNKEISDSIRPLLRLGREHILRGQRLDRALISSLERNPLLSERLRRLRTIPGVGPITALTWALEIGDYTRFQSVKEAISYCGLCSAEKSSSDKVMRTPISKQRNKHIQHVLVEAAKMAPRYSHELALVRDKEIQRGNKNRATLAVARKLVAYMLAVDRRQQDFVPTEHLAGKAVA

SEQ ID NO: 197221 - protein, 398 aa, unidentified
MRFVVGIDISKASFDVAIVDETGTLQVRNKHPMTRPGFEALFQTLEPYLSEELHIVMESTGIYHLPLLHYLVEQGLMCHLVNPMQIRHHIQSSTLRKSKTDAKDAEAIAQFGRLHASTLPVVDTAQLVSLRPLLREREALTKEIASLKTDIKGLVDRLFPELSKNTNIFTRSILHLLLQAPSRKRIRNLKEKKIARILQEASGNKATLEAREILSWAKGSIGINDSGLETVLQSKIRRLLHTMQECEAIEEAIEKALGDSDIHEDIDTLTSVPGIGKTTATHFMGEIGDIHRFASVKQLCAYIGFDPAIRQSGSSILSRGHITKRGNRSLRRTLWQMALGVIRHTDKFRAYYDKKRGEGKSFKQAVVAVANKLLRTLFALLKNKTPFQPDLASGGVTP

SEQ ID NO: 197222 - protein, 347 aa, unidentified
MRFYNNSHPYYCGIDLHARLLYVCIIDSKGEVVVHKKIGADKDDLLLMLEPYIGNVIVGVECMHCWYWVSDWCAELGIDFILGHALYMKAIHGGKTKNDKVDSFKIATLLRGGNFPIAYDYPSEMRAARDLLRRRMKIVRHGAMLKGHVVNTNSQYNLPATVLNLKNISARKKLREQYQDPIVQRNIDLDMALLDCYAKELAQVEWFIEKQAKNHNPVYLELLKTVPGIGKILSLTILYEIGDVARFESVQKFASYSRLVKCKAESAGKTYGTNGNKIGNAHLKWAFSEAAVLYLRGNDKARNYLNRLQKRMSKAKSLSALAHKLGRCVYFMLKNKTVFDEQRFLKG

SEQ ID NO: 197223 - protein, 343 aa, unidentified
MYYCGLDVSLRQTSICILDGDGKIVKEVKAASDPDAIGAVLRGTGLWFERVGLEAGATSSWLAAGLRAQGWPIVCIDARHASASLQAGFRNKSDRNDARGIADLMRVNKFREVWIKSPAAQRQGALLTARGTLQRQLVTLENVIRGILRGDGLVLPPGRTRFDQEVHERIDTDAALSTIIAPLLAVRTSLLKQRLALDRIIVAIARKDPVCRLLTTAPGVGPHVALAFKAAIDDPQRFSRSRTVGAHFGLTPRQYSSGEVDYSGRISKMGDQHVRSMLYVAALAILRREHGLWCSLKVWALGLAKTRGIRKARVALARRLAVTLHKMWASGEPFRWRRQEAAA

SEQ ID NO: 197224 - protein, 428 aa, unidentified
MSYRIAGIDVHKKMLAVVVSDVEIESEYQFERRMFSSNPEQLRSLATWLVEQKAEEIVMESTAQYWKPVWETLERYWKPFCEKREGARRRSGTLHLAQALSNRGRRGRKRDFVDAERLVKRLVARELTLSFVPDTEQRLWRTVTRKKYQLRRDVVRLNNQLESLLEEAHIKLSSLVSDLLGVSARRMLKALADGETNPAALAALAHERLRATPEQLCDALGACTELNPVYRRLLKMTLEHLQILEQQIGQLDQELATLLHPHQDAVERLAEVPGFAVDSAQQIIAEVGPAAATFPSEKCLSSWVGACPGEEESAGVNYSHRSPKGNRHMRRLLNQTANAAVKAKGSIFEIIYRRCVPRLGHNQAIGVIAHRQCRLIWLILHQGTRYEERGPAVTKRSRYQRTWRMIRQLRNLGYRIELPNPQASQAQA

SEQ ID NO: 197225 - protein, 322 aa, unidentified
MKTTIPVLGIDIAKAKFDVCLRLPQGQIRQNTFANDPTGFAQLADWLRPHDLTGLRVGLEATGCYWVSLAHDLYQRKCLVCVLNPAYVKAHGQAQGKRSKTDRVDARLIADFVAQHDCEVWQPLPAELEELRELMRLYADVVALKVSAGQRAEGLRTALAQQLQAQLTRTLQEFVAKVLRAAKTQAAKHSSLAKPVKLLTSIKGVGEITALILTAELPRGRSARTVAGWAGVTPRQFESGTSVFRPPKMCKQGSDYVRQILYWPAITALRCNPAMQVFGRKLAGVGLNKMQIIGAAMHKLLRWAVAIINTGKPFDLSFHELT

SEQ ID NO: 197226 - protein, 462 aa, unidentified
MRTNLPGARLRLSIRIFEPARAAQKEQTQAMYPPEAIVPNPAIAAYVGIDWADQKHDVILCPQAEPAVLEHQVITHSPESLLDWVGNIQQRFGTKGKILVCLEQSRGALIYHLMGYECFELYPINPNQLANYRASFKTSGAKDDRPDAELLCELVRCHRDRLIAWKPDTELTRKLATLNEGRRQAVDRRSRLANEIKSTLKIYFPLALQVLENDTTTALAADLLLRWPSLEALQKQSPSKLRKFFYGHNCRGEQKMLERLKLIKEALALTHDLAVIEPAALRVQMLAEQLRSLLPYIARYDKQIAQLFDSHPDSFLFRDLPGAGSALAPRLFTAFGSDRSRFQCAQQLCSLSGIAPVRRASGKKSGKKGEKKASIHFRHACPKFLRQSFHEFAACSIRYCSWAERFYEAQRARGKTHHVAVRALAFKWIRILFVCWKERSPYDESRYLHALQNRGSAHAQPG

SEQ ID NO: 197227 - protein, 350 aa, unidentified
MTMVGGLDVHRQQITFDYVDDDGVVHWGQIRPATRKALRGWLAEHYPGGDAEFALEGCTGWRYVCEELAAAGVGVHLGDPAEIAALRGPKKRAKTDRADARLLRTLLLEGRFPDSWIPPAHVVEIRTLGRLYCTLMDERRAWQQRIHAQLFHQGCPPIKALLTQAGRDALAGAELSAAGRQYENTALGRIDELTTEIEPLRTQLVNFARHQTGCRALQHHYGIGWLCAAIIWAEIGDARRFRSCDQLVRFAGLDITVYSSDGKCSPGHLSRQGSPELRWAAFEAAKCAARRGSPDYGYYHTLAAKRDGHNGKNPTLAVERKILRRCYHTLRALGDAALAMPSPQGQEVAA

SEQ ID NO: 197228 - protein, 352 aa, unidentified
MEHFIGCDVHTRNQMVAWIDAETGEIRKRRLEHAGQEVKEFYAQFPSGTVVGMEATFPVYWFERLLGELGHEVWVGDAARIRASEVRYQKTDARDAEHLLDLLRTGRFPRIWVPTLEERDLRQLLVHRLKQVRARTQVKNQLHALAISQGVCRKRKLWSAKGRKELESLTLLPWAARRRKELLETLDRLDEQVRELDRAVEEAGRARPDVALVRTHPGVGMVVALAFVLTVGPIARFPNSGKLVSYLGLNPREHSSGGRQRLGAISKQGNPMMRWLLVEAAQTAARFDPQLRRTYQRLKRRRHSGVAKVAVARRLAVRLFWMLRTRHNYAQLVHMSGSPSSAVVPPQGGPNA

SEQ ID NO: 197229 - protein, 336 aa, unidentified
MKKFLIGIDVSKQKLDVCLIDQSGVIKEEIIIGNQPSVIYAYFKKASKEYGFGQSELLVCAEYTGRYIYPLCCACHDFGVDLWLENPTQIKYRSGLKRGKNDKLDARKIALYALRFQDDAKLFSMPEKTIATLKQLIKERGMYIVDKGKYQGQLTDQKMFMDNDDYKRKSKRLKGFIKQLDEAISQTEEDIRNLVDSDPDLSHQFKLLRSVEGIGERTAVKMIVETNAFKDFKDPRKFCCHAGVAPFSYTSGSSIRSRNKVSNRADKSIKALLHMGALIAATRMKGELHDYYLRKVGEGKNKMSVLNAIRAKLVYRMFAVIRNDRMYEKNYQNALA

SEQ ID NO: 197230 - protein, 343 aa, unidentified
MEHYAGIDVSLERSSVCVVDATGRIIREAKVASEPEALVDFFRRLGLPLTRVGLEAGPLSQWLHAGLAEAGLEAVLLETRHVKAALSAMVVETDRKDARGIAQLLRMGWYRPVHRKSPPAQEVRALLVGRKLLQAKLRDVELSIRGILRGFGLKVGEVSEGRFAARIKELIAGHEMLEAVVGAMLQARDSLQAEFMRLHRRMLAIVRGDAVCRRLMTAPGVGALVAVTFKTAVDDPGRFRTAKAVGAHFGLTPKRYQSGETDVTGGISKAGDAMVRTALYEAANVMLTRSGRFSALKRWGLEVAKRRGARRAKVALARKLATVLHRLWVDGSEFRFGREAAAA

SEQ ID NO: 197231 - protein, 347 aa, unidentified
MKILALDLGKYKTVGCDYERETGKHRFTASLTTPAGLQQLVREVKPDRVVIEVCNIAGWVSDLLRGMGIETQVANTNEDAWRWRKVKKKNDRRDALKAAQLSAVNQLKEVYIPPLEVRQWRSLITFRQQLVRRRGRMKNHIRDLLVSEGELLPRGQSCWTNAGIARLEALARPLSEVGMNEMWRGQLQIELQQLQAVQAEIAALEKKLDAIAATDVRVKLLRTIPGVGPRLAEAIVALLDRPQRFHKASEVSAYVGLVPKELDSGETVRRGPITKQGSRLLRSLLVEVAWAGLRHNPWVRETYQRISGGKKSRKKIAIVAVARRLLVRCWAMLRDGASWRAPVPSIT

SEQ ID NO: 197232 - protein, 433 aa, unidentified
MEPRLAVGIDFSTQWADASLMAPDGTPIIRHQRFDNSLPGFESLKQLLLESLASAAYTGVDLAGEATGMYWLPFFLELAADPQLHAYDAALFVLNPRRVKWYKQSLPHTDKTDRNDAFVIADRVRVHRPEHAWLVDVPMLALRGTTRHRRHLVRLLAAEKSFFCAYLFLQASAYQRLAPFSSVFGATSRPVLDQACTLDTLAALPVTELAARLDELSRHTLRNSTHNATRLQEVAAQSFQLPQELGLPVHAILTAKLQRIAFFEAQIAQVEAAIARQLSQFPAIRQLQSIPGIGPVFSAGIGAEIGNLDRFLAGTKCDARGRVRAKNLRDAEDAVAKTAGLWWPRSESGTFAAEERRMAKTGNAHLRYYLIPGAEQLRLRVPEYRAFYRRKFREATKHHHKRALVLTARRSVGLYVGLLHRNEPYRSREACQT

SEQ ID NO: 197233 - protein, 345 aa, unidentified
MIIGCDFHPSWQQVSWLDTETGETGERKLVQASGDAEQFYRQLPAPALIGMEATGNCHWLVDLLAELGHELWVGDAAQIRASCVRQQKTDRRDAEHIRILLQEGRFPRIWMPSAEVRDLRQLLLHRYKLVTIRARVKNELQHLCLNQGVQRKHKLWSQAGQKVLRELPLKPWAARRREDLLALLAMLDQQIDPLDRAVKEEAQRDKMALLLQTQPGVGAVTALAYVLTMGDVSRFPRGKQVASYLGLIPREHSSGGRQKLGAITKQGNRMLRMLLVEAAQIAVRFDPGLRKEYLHRCHHKPKAVAKVATARKLAVRLYWMLRTEKPYPEVVRIESSPRVPLVGAS

SEQ ID NO: 197234 - protein, 371 aa, unidentified
MKKDITFVGLDVHKDSIDIALADSGREGAVRFYGTIGGDFAALHKVVRKLQSLGATLRFVYEAGPCGYEIYRSLTRQGFDCVVVAPSKIPRKSGDRIKTDRREALNLARLHRAGDLTAVYVPAVEDEAMRDLTRGREDAAKALRVSRQVLLAFLLRHGYRYTGRTFWSKAHWHWIGDIAMPHRAQQVVLQEYVHSVQEQEARVQRLTAQIQALVPQWTLAPLVKALQALRGVSLVVAATTVAELGDLTRFDSARQLMSYLGLVPSEHSSGGSTRRGGITKTGNGHVRRVLTEAAHAYAHPARESRVLLARLDGLPQEVRQIAWKAQLRLCGRFRQLMARGKHRHTIVTATARELAAFMWAIAQAIAPEPAG

SEQ ID NO: 197235 - protein, 412 aa, unidentified
MDTLVARCAGIDVGKAEVVVCLRVPGRRAGMHRTEVRTFGTTTRSLLELRDWLVAERVTRVGMESTGHYWRPVFYLLEDAVETWLVNPQHIKNVPGRKTDVSDAAWIAQMIEYGLVRPSFVPDKPMRRLRDLTRYRASLIHDRTRQVQRLHNVLEDAGIKLSLVASDIMGVSGRAMITALVRGERDPQRLAELALGRLRPKIPALIEALTGRFDDHHALLCRLMLDQIEGLDAAVAHLDRQIAEEMAPFRVQLQRLRTIPGVGLRTAEVIIAEIGVDMSRFPTPGHLSSWAGLCPGQHESAGKRRSGRTRKGDSWLCGTLGEAAVAAARTKNTYLAERYRRLARRRGAKRAQLAVARSMLEAAWHVLTYDVDYRDLGADHFLKIARNPQARANRLVRDLTALGYQVQVTKAA

SEQ ID NO: 197236 - protein, 414 aa, unidentified
MLYIGIDWAADSHTVTLLATSGEVLDSLVIENRLAGFLTLLEAIRKHLRKLEPTATSELVSFAIEDQNQRLTDFLLAQGFQGYLIEPSRMKGYRLRYRSSGNKTDSDDSFVLADVLCRDHDQLPRIAPDSDRVRTLKTLLRDRESFVRDSTRLTNRLTASLRQYYPEALGFFEDVAGKTALDFISAFPDFAAASRLSRREVKRFLVEHHCYRETRLERILAVLGSSPTPVPAVVIRTKRQQALAIIQQLRMVQATVAGYNAEIERLGAENDEVKRFRSMPGGGPIIGAGLTTLFGDDRTRFKSAMAVQSLAGTAPKTIQSGQFRTACFRFGCNRFYRILLQQMAFGALRSSVWAKRYYRGKRQEGKTHQHSLRCLANLLLKIAYAIWRDRTEYSEDRHLAQITRHHLMSTSNSA

SEQ ID NO: 197237 - protein, 417 aa, unidentified
MNQDVYAAYIGIDWADRKHDIYLYDCTTGEAEESVIGSQPDAIAAWVEGLRKRYGTAMLAVCLEQKRGPLIYALCQYENLVLFPINPRTVSNYRKAFQPSRAKSDPIDARILVELLRKHGDKLPTWQPESAKMRALRQWVESRRMLVGEKVRLTNRLTAALKNYYPQVLDWFEDKDTLVFCEFLERYPTLKAAQGATAEELTEFFQEHRVIRRQAIARRIEQIAASGIPLTEDPGIVEPMQWLVQTLIGQLKPLLARLGELTLKIDECFTSFSDAAWFAALPGAGEHLAPRLLAAFGEDRTRFDNAQQMMGYFGIAPVKESSGKKNWGHWRWSCPIFLRQTFVEWANHSRHHCAWAQAYYQMQRSKGKSHPAAMRSLAFKWIRILFRCWKNGEAYDEAKYLASLKSKGSPIAKLLAL

SEQ ID NO: 197238 - protein, 408 aa, unidentified
MEQLYVGIDVSSTKHAAYLMKPDGHKFSSFPMQNDRVGAKMISEKIVSALTKLGLDDVVIGMEATSVYGDNLVYALREDGSLGRFHRKIHVLNPKQVKNFKKSYPELPKNDPVDAFVIADQLRFGRIGKEVYMDDYRYKALQTLTRARFYAVQNLTREKERFANYLFLKCSGIAQSKDIPNTSATTLALMEYFETVDELANADLDELTAFVNKAGHGRFTDPEATAKAVQAAARGSYRLPKTVNDSVNQVMSASIAAMRALDRQIETLEKAIEQQFEIIPNTLTSIPGIGKVYSAGIIAEIGDINRFTGQASVAKYAGLVWTQHQSNEFEAEDTRLIKSGNRYLRYYLLEAANSVRRCDSEFRRYYDLKFKEVNKHQHKRALALTARKLVRLVFRLLKDNRLYKLPEG

SEQ ID NO: 197239 - protein, 355 aa, unidentified
MDSKKYIGMDVHQASISAAVRDDAGKLVMESVIETKAGTVLEFIRGLRGSLCVTFEEGTSAAWLYALVKPHVTQVVVCDPRKNALLKAGNKNDRVDARKLSELLRAGLLTPVYHGDSGVRTLRELSRSYLTVTKDLTRVMNRTKALYRSWAIPCAGEKVYSPRHRNTWLEKLPEAGVRRRAEQLYQQLDALMKIRREARRELLTESKKHSAQKLLRQIPLLGPIRVALLIALLQTPHRFRTKRQLWAYSGLALETRTSGEYRFTAGQLQPAKRLAAPRGLNHNHSHDLKNVFKGAAMQASGSSNALGDFYKDLLATGMKPAMTRLTLARKIAAIVLKIWKKGGRFDPEQLKRQAA

SEQ ID NO: 197240 - protein, 396 aa, unidentified
MGRIWAGVDIGKTHHHCVVVDAEGRHLLSRRVANDESELLALIAAVLDLGHETTWAVDVTHGGAVLLLGLLANHGQPVFYLPGLAVNRATAGYRGQGKTDARDAAIIADQTRMRRDLEPARPDAEAIAELKILTARRADLVADRTRTVNRLRDQLLGIFPALERALDMGNRGPLVLLTGYQTPAALRRIGVKRLETWLRNRKVRSSADLAAAAVEAAERQHTALPGETMAAQMVHSLAKEVIALNEKVDEIDKLIEGRFRSHAQAEVIASLPGIGPLLGAEFLAATSGDMTRFGTPDRLAGFAGLAPAPRDSGRISGNLKRPARYHRGLQRVFYTSALISIRCCEESRRFYDRKRAEGKRHVQAVLALARRRVNVLWALLRDGRCYQLTPPLAEAA

SEQ ID NO: 197241 - protein, 351 aa, unidentified
MIIIGCDFHTRYQQIAMADDETGELLLERRLDHESGEAQAFYRNFSITVRVGIEATGPIHWFERLLAELGHELWIGDSAKIRASEVRKQKTDERDARLILDLMLANRFPKIWVPTPAERDLRQLLWHRHKLVCLRTMLGNQLHFLAMSQGLCRKKKLFTKKGRVELTGLALGPWTRRRREELLKLLDQLDPAITELDRAVLEEAQRRCDAVLLMTHPGIGPVTSLAFVLAIGPVTRFSRSRKIASYLGLNPSEDSSGQRRRTGAISKQGNTMVRWLLIEAVYPAVRQDLALRQDYQRLKFRRGHAVAKVAIARKLAVRMYWMLRSGAAYAQLVRRQGSPGATLVDASPSLG

SEQ ID NO: 197242 - protein, 441 aa, unidentified
MSDTAITSPEPVWAAFIGLDWGNQKHAWILEPAGGGKREQGVVDHTPEAIADWAADLNHRFGGQPIAVALEQKRGSVVNLLLPYAHLALFPVPGSMSASYRKTFVPSGAKDDPSDAAWILDLLLRHRDRLRRLQPDTINTRLLLLLVEDRRQLVDDKTRLTLRLQDCLKQYFPQLVKWFDMDSALVGDLLKQWPDLQHLQRCHDGTLRKFFRQHHYGEDRIAQRIDAIRAAVPATNDPAVLEAGSRKARHLTESLATLRDQITQLERRRDELVATHPDTPIFASFPGAGRATVPRLIAAFGTIRERYPSAFEVECASGIAPVHVRSGKMDRVSIRRACQDFTRQTFHEFAGQTIPRCQWAKDYYQRHCHKPQQHHAAVRALAFKWIRILYRCWKDGKPYDEQLYLTARRRRSALVGPALASVTELKWNSVAGFSKLSEKNS

SEQ ID NO: 197243 - protein, 430 aa, unidentified
MKSNTQNAKIEAITEKTLVLGIDVGSEMHYARAFDYRGIEYSKKPFKFSNTEAGFVTFKEWILDLKERHEKDKVVPGMEPTGHYWFNLGKFLQDNEMKPVLVNPHHVKKSKELDDNNPTKNDRKDPKVIAGLVREGRYMIPYLPDGVYADLRTASNIRFQLQAELTRIQNRISRWFNIYFPEYKTVYGKPDAKSGMLILKAAPLPEDILTLGIDGVNQIWRDAKLRAVGKARAKTLIEAAEHSVGSKEGAVSGKMEIRMLLEDYESRNTRLQEVMVLIEELVRKIPMTEKLLEIKGVGIRTVSGFLAEVGDISRFNNPKELQKLAGLALVENSLGKHKGETTISRRGRKRLIYLLFEVAMSLVSKNQKFRELHNYYTTRRLNPLKKMQSLMAIAAKLIRVFYAILTKGVDYDPKKMVSDIKRPAVYLQAA

SEQ ID NO: 197244 - protein, 415 aa, unidentified
MPPLVRWVGRAIGLDVHREFCVVAICEDGKVRSGGRVPSTPDGLKLLAESLLPTDRVALEVTASCWEVTRVLEPFVDRVTVVSPDDTGIASARAKTDKLDARTLALLLWKGEIDAVWMPDERTRILRRRLARREQLVHARSRAKNEISAVLQRRLVKRPPFADLFGVTGRRWLAEVELPVEERESVDAGLRQIGFLDGEVKAVEKLVAQQALGWPEIRRLMTVPGVNLICAATFIAAIGRADRFLTNRKLVAYLGLDPKVRQSGEAPARSGRISKRGSASARWALVEAAWSVVKQPGPLRAFYERVRARRGHGRAIVATARKLSILFWCMLTRGEDYAHQRPALTKKKLRELELTAGAKPRTKAAAGIWSTNRAIRDAERALTEQAEISYKRMVTDQQAGGPSRKVGASATPERA

SEQ ID NO: 197245 - protein, 409 aa, unidentified
MDVIHPKCAGLDVHKDSVVACARIGTGPKIAREVKTFGTTTRDLLALSDWLTAQGCTHVAMEATGVYWKPVWHVLEGSFELILANAMHVRNIPGRKTDVNDATWIADLLAHGLIRSSFVPAAPLHELRDLTRTRTQLVREKARHILRIQKTLETANLKLASVLADILGVTGRRLLDALAAGESDPDRLADLAHDHRLKASRAEFVEALHGRMTPHHCFMLALHLRQIDALDTAVRELEARLEDALGPFRPALARLTTIRGIGDTAAHVLIAEIGIDMSHFPTAGHLISWAGLCPRLHESAGKRRSTRTRHGNRWLKTTLVQAAWGAVRHHHGGYLRAQFVRLRSRRGPTKAIVAVAASILTAAYHVLRDGVEYRDLGADYFDRRDKAKLANRLIARLHDLGLRVEVRAA

SEQ ID NO: 197246 - protein, 400 aa, unidentified
MRCTDQPARLRAAVREENSSLFVALELSKSAWLIAASAPGSEKVSKYRVAAGDVAALVALLARLKAQAERYRGGPVQIVSIQEAGLDGFWVHRMLEANGVESHVVDAASIAVNRRRRRAKTDRIDVEGLLRTMMGWARGERRICSMVRPPSPADEDERRLTRERGTLVTERTRHVNRIKGLLATQGVFGFEPLRKSRRKRLEELRQWDGQPLPARLKTELVRELDRLELVMSQLAALEAERDRALQARGTAVANTTKAPSSGAASSGEVGRQLLRLRSIGPEIASVLSLEAFYRNFSNRREVAGYSGLAPSPWKSGGIDVEQGISKAGNVRLRTTMVQLAWLWVRHQPGSALSRWFHEKIGDRRGKIKRIAIVAVARKLLVALWRYVTQGVVPDGAALKA

SEQ ID NO: 197247 - protein, 404 aa, unidentified
MYNAVGIDVSKGKSTIAVLQPGGTVIRKPFDVSHTSQSLIELARYLGSLEGSTKIVMECTGRYHEPMLKALYEAGLFVSVVNPHLIKNFGNNSLRRVKSDPADARRIARYTLDNWAELRQYSGMDNTRTQLKTLNSQFSFFMKQKVAAKANLIALLDNTYPGVNKLFDSPPREDGSEKWVDYAYSFWHVDCVRRIGLKTFTERYRAFCRKHHYIFQPDKPEKLFHASKELVAVFPKEKTYKLLIQQSIRQLNLASEHVERLRQEMNALASTLPEYSTVMGIYGVGKTYGPQLIAEIGDVSRFTHREALTAFAGVDPGVDESGQHKSKSNRASKVGSARLRKTLFQIMTTLLQNAPEDDPVYRFLDKKRAQGKPYYVYMTAGANKFLRIYYGKVKECLRNLEQAE

SEQ ID NO: 197248 - protein, 344 aa, unidentified
MDKSITVIGLDLAKSVFQVHGINAEGEVVVRRKLSRSRVLAYFNQLEPCLVGMEACATAHYWGRELRALGHDVKLMPPQFVKPYLKSQKNDMRDAEAICEAVTRPTMRFVPIKTPDQQALLALHGVRDHWVRLSTRLINTLRGYLAEFGIVAARGRMGVEAILDTLADDQDDRIPDLARECLRPLASELRHVKRQILEMDRKILKAHRANSICQRLETIPGVGPVIATRVVAEVPDPKIFKSGRAFSAWVGLVPKQNSSGGRERMGQITKKGNPELRRLLVAGAISMIIRAKRSDFTRHPWLSRLLERKPMMVVAIAMANKIGRMIWALMVKGEKFNPAKLMPA

SEQ ID NO: 197249 - protein, 377 aa, unidentified
MRRVALDLGNRKISYCEVADGKVIKRQTVSSVSTLEFELGPQQAPAVVAIEACREAWHVHDVLESWGNEVVIIDTTRVRQLGVGQHGRKTDRIDAEALALALERGGIPVAHVLSPARRELRRWLGVRRALVESRAQMVTTVRGICRELGQPLPNCVTRSFVTRVRQASMDASARAVVESLLKTIETVNAQLEEAERRLGELCAVEPLIRLLSTAPGVATIVAAAFVSVVDEAERFRHAHQLESYLGLVPGENSSGGKRRIGSITKQGNRYLRNLLVESAWTILRTAPTDDPLRQWGQALVERRGSRIAVVALARRLAGVLWAMWRNDTFYDPRILSAQSSVGLKLAAQSLEERAEALRRASKKQRALKYADAEVAAI

SEQ ID NO: 197250 - protein, 369 aa, unidentified
MKHSTIFVGLDVHKDSIDIALADDGRNGEIRFYGTIGGDLDSLDKAIRKFRRAGTELRFVYEAGPCGYEIYRHLTAQELHCDVIAPSMTPKKSGDRIKTDRRDAITLAKLHRSGELTPVYVPREDDEAMRDLVRGREDAVNATRKARQRLSAFVLRHGFRYSGSKAWSVAHLRWLADIKMPHPAQQIALQEYIHSIEECSERVDRLTEQILKLIPTWRMAPIVTAFQALRGVAPIVATTVVVEIGDLRRFDNPRQLMAYLGLVPSENSSGQTTKRGGITKTGNCHARRALIEAAQAYSFPARVSRVLRQRQEKLPREIKEISWKAQVRLCGRFRKLMAKGKNRNRTVTAIARELSGFMWAIAKQVPMPV

SEQ ID NO: 197251 - protein, 393 aa, unidentified
MLIIGIDVAKRNHEASFVDASGKVLGKSFSFPNSHDGVNRLLKQLDKHNPASLPVMFGMEATGHYWLALYSRLIQDGYTVHVINPLQSDSLRNFYIRQTKTDAVDSFIIAEVIRFGRFAATALTEPNMIALRQLCRYRFSLVDNISDLKRQVITLLDQVFPEYETLFSNMFGASSKEMLASFTTPEEFLAVDTNRLAEMLQQKSRGRFGATKAEQIQQAARCSFGIKLGLEALSFQMRQLVAQIDFMEDQLADLDEQIVFFYTKFPCNLHTIPGIGYVLAAAILSEIGDISRFSAPEKLVAFAGIDPSIKQSGEFNGSHNHMSKRGSPYLRRAVWLASLPASIHAPAFSAFYQKKRSEGKAHRTSLGAVSRKLLYTVFAILKSGQVYDPERAR

SEQ ID NO: 197252 - protein, 410 aa, unidentified
MNHPKMQYTYVGVDSHKETHTAVFLDCFFEKIGEVSFENMPDKFGDFLERAKKFQSEGTSLMFGMEDCSSYGRNLMKFLKNNGHHVKHVNALLVARERKNQNVVQKSDAIDAECAARVLLSKFGELPDAEPQDEYWILRSLVARRNLLIRQRAATKNYLHSLIMQSYPNYRTFFENIDCKTSLAFFSKYPSPNILHGVTVDELAAFLEIPSNKCLGLPLAKKIINSLQDTAVPFQDVRDSVVQSVVRQIAFIIEEIEQLDTRIASFLVQFNCTLTSMAGIDTPTAAQMLSCIGDIKRFSTPAKLARYAGIAPITYASGKKDLQYANQRGNRELNSLFFWLAVRLSSIQGGNHRVMNSFFYDYYNRRMSEGKTKRQALKCVQRRLVNIIWKMLTYGEEYINPPTYVLSDNH

SEQ ID NO: 197253 - protein, 321 aa, unidentified
MAAFSAPATAKGYLALENWARALGDITSFGIEGTGSYGAGLSRHLLAQGYKVVEVTRPNRQLCYQHGKTDSLDAEGAARSVLAGQAIAEPKTQTGSVEMIRHLKIARDTAVKSRSQAMVTLKTLIINAPASLRDALDQIGGKIALIRHIAAFRPGALTSTTASAKTAMRALAQRWLTLHDEIQMHDKALKQLVAARAPTLLAAHGIATMTAAEMLILVGDDPTRIRSEAALAKLCGVCPIPASSGKTNRFRLNRGGNRQANAALYRVAIVRMRNHQPTVAYVSKRKKEGKSNREIIRCLKRYIVREIFAHLCRPEMPLNTA

SEQ ID NO: 197254 - protein, 319 aa, unidentified
MEQITYKVYIGIDVSKAKLDIKYDESSTLLTITNQVDDYKKLNRYFPKDKRSVLVLLEATGGYETAIVKWLLSKNIPTAVVNAKRVRDYAKASGQFAKNDRIDAGIIREYGQLFVKKLHIKQSRSKLEEQIEELTRRRKQLVSIRNKERQHLATIQNKEGQSSIKRAIKFYNNEIDKLQEKLSAALKKDEKLQAKAKLLQTVKGIGLVTTYTLLGELPELGQVDNKQIAALAGVAPFCRDSGSMKGQRTIWGGRAQVRTALYMAALSASKYNPAIKSFYERLIAKGKTKKVALVACMRKLLIIMNTMVKNNEPWHSEIA

SEQ ID NO: 197255 - protein, 351 aa, unidentified
MLRAATVHTVTAIGIDMGKNTLHMIGLDPRGAIVLREKVSRGRITSRLANLPPCLIGIEAGMATHYVARELAVLGHDVKQVPPAYAKPFRQGHKNDFRDAHAVAEAVQRPTTRFVPAKTDEQLDLQALHRVRSRLVSERTAVINQIRGFLLERGIIVRQGLRFLRQALPDILAKRTDVLSPRMVRIVADLASDWRQLDERIEVVTDEIETLAKSDSSCRRVMTVPGIGPIISSAMIAAIGSGAAFARGRDFSAWIGLVPKQMSTGDRTILGRISKRGNGYLRMLFMQAARVILLRPASWPKHGFGVWLARAAQRLHPNVLAAALANKLARIAWTVLAQERSYETRLTKAAA

SEQ ID NO: 197256 - protein, 332 aa, unidentified
MENFYFIGVDVSKKKLDFCVMFEGKVVHEEETANHQSAIMSLLHHFEEDYGIDNTRMLVCAEHTGQYTFPLACACKTVECKLWLENAAEIKYSSGVQRGKNDKVDARRIAIYASRFQDKVRYYEHPTEDIERLKQLESERTLYVTDLAKYKGQMKDQKDYMPKALYERKMKRLQALMDDLKEAIQAITDEMDEVIASCPVLFRQQELLMSIDGVGRVVATNMIIATEAFTRFDDPRKFNCYAGVAPCSYSSGSSQHSKARVSHRADKVMKRLLHLAAVAVTHRVGGELKKYYERKVAEGKNKMSVINALRVKIVARMFAVIKRNEKYKPILS

SEQ ID NO: 197257 - protein, 336 aa, unidentified
MEKYSFFVGIDISKGHLDFCIRNSSVRLGFNRVPNDPGGIKEAIKWMRSFEGFRVKECLACLEHTGIYGLTVLETLHRLDFAVWMEVAACIKNGSGSLMRGKNDKVDASRIADYAHRFRADAKLWEPPRKEITLLADLMASRTRLMAVISKLAVPVNEIKSFKAKGHYEQIKDASKKTIEAARKEAKAIEKQILEIMMGDAVLARLYEVVTSVQGVGFVTATNLIIATNEFKSINDPRKLACNAGCAPFEHSSGTSIRGRNKVSHKANKRLKSLLHMCATSALQAEGEFKVYFDRKIAEGKNKFIVINAIRNKIIHRVCACVREDRLYTKFPKTVA

SEQ ID NO: 197258 - protein, 381 aa, unidentified
MTTAATYHEPGNTPAGTLFVAFELSEKTWKLGFTTGHGQKPRERTVTARQQERVLDEIAQAKRRLRLPDTAPVVSCYEAGREGFWLHRFLQGHGITNHVVDSSAIEVNRRRRRAKSDGLDVRKLLSMLMRYAQGERQGWQVVKVPSVEAADHRHLHRDLETLKQERASTTTRILGLLSSQGLRVTSLTKLPEQLEALRLWDGSPVPPGLRRRVLRVYAHHTFLSEQIAAVEAERRAQLQVSTDARIDKVRQLMLLKGIGINGAWLLVMEFFGWRAFKNRREVGGLAGFTPTPYQSGASAREQGITKSGNRHVRWMTTELAWSWLRFQPDSTLSVWFRERFGGGGKRLRRIGIVAVARKLLIALWRFLETGVVPEGAILKAA

SEQ ID NO: 197259 - protein, 320 aa, unidentified
MICGVDISSRWLDASIGRAGTPQRFANTADGIARLAALCLAHPVDLVAMEATGGYERRAFALLSGHGLPVVILNPRAVRQFAQSMGRLEKTDAIDAAMIAWFAEVNGSQPSALSPPGQQQLRALVTRLRQLTDLRTAQKNQQRLIDDPLVQASFDELLAVLKRQMRALADSIAELISADPLWRELDLAFRTIKGVADRTVARIMAEMPEIGTLSNKAVSKLAGLAPLAQDSGGRQGRRAIRGGRAAVRDLLFIVASVAGRYEPDFIAFRERLAGTGKPPKVVRIALAHKLLVRLNAKAREIRQRLQSATQPALKSLIPQS

SEQ ID NO: 197260 - protein, 317 aa, unidentified
MRFYNAQHKFYCGIDLHARTMDVCILDHKGEILVHRNMKAGPDPFLQTIAPYREDLVVCVECLFTWYWLADLCAREGIPFVLGHALYMQAIHGGKAKNDKIDAQKIAVLLRGGMLPQASVSPAKMRATRDLRRRRMPLMRKRAELLTHLQQTNSQYNLPEIGKKLAYKANRDGVAERFADPAVQKSIEVDLALISHYDHLLNDVELTLVHTAKHHDAHTLYRLQSVPGIGKILSLVILYEIHDIARFPRVQDFVSYCRLVKCAKESAGKRYGTSGTKIGNAYLKWAFSEAAVLFLRDNPAGQQYLARLEKKHGPGKA

SEQ ID NO: 197261 - protein, 424 aa, unidentified
MKPHSDIEFTAFVGIDWSDTKHDICLQAAHSDEREFAVLLHRPDAIAAWAGALRQRFGGQPVAVCLKLAKGPLVYALQKYDFLVLFPVHPATLAKYREAFVPSHAKADPSDAQFALELLLRYRAKLRPLTPQSVPMRTLLRLVEQRRRLVGDQSRISNRLTDALKQYFPDVLAWFPDKDTILFCDFLTRWPTLKQLKRARRATLLSFFHDHHVRSQARIDERLHAIKSATPLTDDPAVIRPNQLLVLALIEQLRVTLQAIERFDAEIDAVSETLPDYALFRALPGAGGTLAPRLLAAFGEQRERYHSAAELQRYSGIAPVTESSGKQHWIHWRLQCPTFLRQTFVEWAGATIPHSFWAAAYYRQQRDKGCSHHAAVRALAFKWIRILYRCWQTRTAYDESTYLNALQRRGSPLLASMTGLAKNS

SEQ ID NO: 197262 - protein, 347 aa, unidentified
MELGAHAGISLDPPEQLLELTLAVIRLGKRGSSRPFQTIRSPVMNGIGIDVSKRQLDVGTTDGKTLQVSNSRSGFAELDLWLQGHPAVQIVLEATGGYEQPVLDFLHNAGHPVVRANALRARKLAQGLGHMAKTDRLDAYALAKMAALVKLRSYQPLEPWQREMRDFVRARRQAMHALTVARQQQEMVGNRELRRLLQANITCLQRTVERLGKRISEQVSKQPQLAVLKSMKGVGPGLQAVLASYLPELGKISGKAVASLVGVAPMSHDSGTLRGKRSIHGGRAEIRQVLYMASMSAMRHEPRLRDFYQSLRARGKEGKVAIVAVMRKMLVILNARMRDAQSRPIPT

SEQ ID NO: 197263 - protein, 311 aa, unidentified
MTQHDGFVGIDVSKAQLDACLWPDGEARAFANDTQGLRDLLRWLHRLRPQSVGFEASGGYERALLAALCAARLPARRVNPARLRQFARAAGVLAKNDRIDAAMIARFCAALPQREARHDPLLATLAGLVTARRQLCEERTRCTHQAEQADHPLVKRLARQRIKRLAAEILLLETEIARILAGRRDLADKHERLRSAPGVGPVTAATLIAFMPELGSMTGRQAAALVGVAPFDCESGTFKGKRRIIGGRKPLRDALYMAALVASRANPVIAAFYQRMKSAGKPPKVAIVAAMRKLLVALNAMLRDHTNWKNA

SEQ ID NO: 197264 - protein, 348 aa, unidentified
MQSTSALPVIGMDIAKNVFQIHVVDVEAGEIGRHKLKRERVTAFFANRQKSLVAMEACGGAHHWARTLQALGHEVKLLPAKHMRPFVLRDKTDARDDQGIWVAAQQLQIKAVPVKSEQQQACLALHRMRAQLMKMRIMQTNALRGLLYEFGIVLPEGHRILLDRIQGELGKAQERGRLPAVVVLSVQEQLKRIEGLQADIDQLDKRLASLAKHNQQMQALLAIPGIGPLTATAVVSAATDITSFESGRQFAAWLGLTPRQTGTGGKTRQLGISKRGDAYVRTMLMHGARAVIARSRHGGWIERLLQRRPYNVVVAALANKLARTAWAVLAKGKAFDPLQWNPTEITPA

SEQ ID NO: 197265 - protein, 322 aa, unidentified
MSGSSVMVGIDVASTQVEVAAIGAELPATLSRVSNDAEGHSALADGLARLKPALVLMEATGGYEAALACALQAAGLRVAVVNPRMARDFARAMQRLAKTDRIDAGTLAEFAGVLARRTDCDRFIRPLSEPEQQDLAALVTRRRQLVTMQVAERQRLRLARPVTRPSIEALLEAIARQLDDVEAEMVRHVEEHHAQMAKLLQSVAGIGRVATATLIAELPELGRLNRRQICALVGVAPYANDSGMSRGRRRIAGGRFEVRRALYMATLAATRYNPAIRAFYERLVAAGKLKKVALIACMRKLITHLNAIARDHLNGRSGLGNA

SEQ ID NO: 197266 - protein, 402 aa, unidentified
MGKFIAEQARVRTAVALKATRGWSRYAAFIGLDVHKETIAVAIALPGRAEPAYRGEIAHESKALKKWRERLNDEFGGALLLFCYEAGPCGCGLYRQLTEAGHECQVVAPSLIPKKAGERIKTDRRDALKLARLLRAGELTAVWVPDTEQEAMRDLTRARDDMKSQERKARQQLNAFVLRHGHHWPRGKKRWTSVHCNWLESLRFEHDWQQIVLQEYMDAAKAASRRVADLTDQLMQALPGWSLAPVVDALVALRGIDKLAATVLLAELGDISRFQSPKQLMAYLGLVPSEHSTGSRRRQGPITLTGNGHARRMLVESAWSYRFPARQTMHLKRKAKMASPEAKAIAWRAQKRLCGRYRQLSQAGKNIKLVCVAIARELVGFIWDIVRHEMPRLAPQRSAVAG

SEQ ID NO: 197267 - protein, 410 aa, unidentified
MRRVIGMDIHRTFAEVVFWEAGQLHRAGRVDMTRAGLEGFGRTLHKEDEVVVEATGNAMAVVRALEPHVARVIVANPLQVKTIAHAHVKTDKIDAGVLASLRAANFLPEIWLPDADTERLRRQVARRDQVVRHRTRIKNEVHAILHAHLIPRCPHDLFGQRGRHWLERQKLPDDERAAIGRHLRELDRLGEDLDALDRDIAQAVMNNPSVKRLLTITGVNLTVAAGLVAAIGDVRRFASSEKLVSYLGLNPRVWQSGLGLAQYGRISKQGRSHARAMLVEAAWVAATAPGPLRSFFLRIRARRGHQVAAVAVARKLAVLCWHLLTNDVDYQWARPALVANKVRAMELQAGQPARKGNKRGSTYTYNVKELRHREIDMARQAEQAYEQFVRGWQRRRPVKRRTGAATEERR

SEQ ID NO: 197268 - protein, 407 aa, unidentified
MSNTTRFIVGIDISKGKSTVAVIDPFGAIVKSPFEIRHTSSDLKKLTGLLKSLDGETRIVMEYTGIYYQPVARFLSESGLFVSVVHAKILHDFANNSIRRIKTDKADAVKIANYGLLNWDSLKPYTKEDDTRLLLKSTNRQYYYFLKLYVAAKNNLIAVIDQTCPGLNDLFTSPRREDGHIKWVDVAIRFWHCECITDYSLNKFTELYNDWCKKNRYVRSKSKAEELYKLAKECVPTLPKNESTKFIVRRAAEELLTISEALGALQKELVRLAEQLPEYPIVMSFTGVGKILGPQLMAEIGDVRRFRKKACLVAFAGVDAPPFQSGKFDSKSRHISKKGSCELRKTLFQIVTVLLQNTLVYDPVYQFIDRKRQEGKPYYVYMVAGCNKFLRIYYARVKEYLETQEAA

SEQ ID NO: 197269 - protein, 418 aa, unidentified
MKKHNNSGKKSESTSKRAKSRGPVQRDTKEVLAELVGKLKEKLDPKKMAAPSAGEKQQRGELRPNLGRLTVGVDLGDQWSHYCILGLEGETLAEGQLRTTQEDIAEFFQALNAARVVFEVGTHSPWVQEVICGCGHEVLVANPRLMEGSKRRKRKNDRIDANKLARVGRVDPKSLHPIQHRSREVRQDLVVLRARDALVAARTELINATRGLVKSMGKRLPKSSSPSFAQKAEEAVPVEIREALLPLVRMAAALSDCIQGYDEKIEKLGRERYGHTALLRQVKGVGPITALTYVLTLENPDRFVKSRDVGPYLGLVPKQEDSGESQPQLGISKTGDTMLRKLLVGSAHYILGPFGPDTDLRRYGLRVCERGGKNAKKRAAVAVARKLAVLLHCLWVSGEVYEPLRQGMSATIAPAVAA

SEQ ID NO: 197270 - protein, 451 aa, unidentified
MSRPQVIDDEERERVHERVAAVDVAKDAGMVCTRTPHGSRPGARQSTVWAVKARMNAIRKLGRQLARDGIEMVTLESTSDYWRIWFFVLEACGLAVQLVNAAQARNLPGRPKTDKLDAQWLARLTELGLLRPSFVPPAAIRELRDYTRARTRLVQERTRCFQRLEKLLEGALVKLPAVASKLTTISAQDMIKAMIAGQRDPHQLAALARTRMKARHDDLVEALDGRFDDHHGELAGMLLDQIAFCDGKVRQLDARIEQAAAQIPAAWGTDTDGTTGPHAGAGPDAPVLNAVARLAEIPGISPQLARSIIAETGLDMSRFPTAAHLVSWAGLCPSARQSGPRTRAGTKGQGDTWLRGYLGQAANGAARTATFLGERYGRIARRRGKAKAKVAVARSILVIIWQLLADPQARFTDLGPGYYQARTDTSRKLRNHIRQIEALLGHPITITPKAA

SEQ ID NO: 197271 - protein, 366 aa, unidentified
MIMNDRCGCKRKPVNPVVLKTVGEQGAPLAGSLSPNSRRGRIASPYLQGRVRSRRKGAGMFIGIDVSKARLDVHVRPAGESFVVTRDDEGLAALVARLGLLQPRLIVLEATGGLQLRASAVLAAAGLPVAVVNPRQVRDFARATGRLAKTDTLDAEAIARFAEAVQPEPRALPDAETEQLAGLIVRRRQIVEMMTAEKNRRHQVTRPDLKADLDAHLDWLAKALNRIDEDLDNAVRTSPIWRAKEQLLKSVPGIGDVASRTLLAELPELGRLSRRQIAALVGLAPFNRDSGTMRGRRTIWGGRAALRAALYMAALAAIRHNPAIKAFNARLRAAGKPAKVAITACMRKLLVTLNAMVRDDKPWHTA

SEQ ID NO: 197272 - protein, 411 aa, unidentified
MDAIYPCVAGLDVHKKTVVACVRRLDGRGRVSKQVKTFGTMTRDVLELGDWLSRHGVTHVAMESTGVYWKPVFHLLEGRFTEILLVNAQHIKNVPGRKTDVKDCEWIAQLLQCGLLRGSFVPPVEIRQLRDLTRQRSQLVADRARVANRIQKVLEDANIKLASVATDILGVSGRAMLEAMIRGESDPELLADMAKRRLRAKLPQLRQALLGKVTDHHRFLLRTLLEQVDGVERLIASYNNRIEEEMAPFAQARDRLQTIPGVDRRTAECMIAELGVKMDQFPSEGHLASWAGLCSGMNESAGKKRSARTRKGSRWLRQTMVQAAWAASHTKTTYLNAHYRRLAARRGRKRALVALAHTLLGIVYHVLKKGTVYADLGPDYFERRDAGRLTRHLVDRLERLGHKVILEPKVA

SEQ ID NO: 197273 - protein, 394 aa, unidentified
MIYVGIDIAKDKHDCFIVNSDGEILFDVFTIQNNMDGFEDLLFKIKSVEKNPDKVKVGLEATGHYSCNILGFLKNKGLSTIVINPLYTSLSRKSISLRKTKTDKVDARTIANMIMSDVSLKPYSDTLYHNEDLKSLTRYRFDKVAQRAKLKQSVSRLVNILFPELETLVATLHGKAVYELLSEFPSAQHIASANLKHLTHILDKASKGRFKRVTADEIRETARKSIGSYLPAKSLELKHTIKLIGELNTEIAEIETEIKKIMDAIDSPILSVPGIGQNLGAVIVAEIGDFSRFESPDKILAFAGCSPSTYQSGQLYSSHAKMEKRGSRYLRWALLNAAAYVCKWEPTFAAYLAKKRAEGKHYYVALSHAAKKLVRVLYHLETTGDTYHPTSILS

SEQ ID NO: 197274 - protein, 310 aa, unidentified
MAEIVITAGIDVSKDRLDLALWPEPGANCSFTPGEIEPLISWLGAHRVSRIGLEASGGYEREVVRRLSAAGFVVVVANPLRVRRFAQAKGRLAKNDRADAATIAEFTATLAPQRQLREAALDRLGEYLMVRRQLQQAVTDTVNQLEHLREAELRRLVAAQRAGLKRRIQQLDRRIAALVAEQPHWQALAKQLRSVPGVGPVLAHTLIALLPELGRLTRRQVASLVGVAPFDDDSGRRNGARQIAGGRTAVRGALYMAALVAKRCNPTIAAFARRLAGKKPKVILVACMRKLIAILNAMQRDGKPWQPVAA

SEQ ID NO: 197275 - protein, 398 aa, unidentified
MTESSDYESVQVFIGVDVGKDTHHAVAINRSGKRLFDKALPNDENKLRSLISDLKQHGQILLVVDQPATIGALPVAVARSEGVLVGYLPGLAMRRIADLHAGEAKTDARDAAIIAEAARTLPHALRTLKLADEQIAELSMLCGFDDDLAAQTTQASNRIRGLLTQIHPALERVLGPRLDHPAVLDLLQRYPSPEKLASLGEKKLAAQLCKLAPRLGKRLAADIAQALAEQTVVVPGTNAAAVVLPRLALQLITLRKQRDEVALAVEQRVLAHPLYPVLTSMPGVGVRTAARLLTEVACRAFASVAHLAAYAGLAPVTRRSGSSIRGEHPSRRGNKALKRALFLSAFAALRDPLSRAYYTRKMSQGKRHNQALIALARRRCNVLFAMMRDGTFYTPQAS

SEQ ID NO: 197276 - protein, 394 aa, unidentified
MIPHFWGMDIHKDYVMVAAVDDAQQMILPPTRVEMADLARWARRHLRPCDEIVLEAGPNTWAVADLLKVQAGRVVVANPYKTRLIAEAQIKNDKVDASVLARLLAARFICEVWVPDAPVREQRALAAHRATLQKQCTRIKNRLHNLLYRHNLRCPQQSLFSTAGRHWLLTLQLPQLDLLQARHLLSQLDVLQKELDETDRLIAQLASQDPRVPRLMQVSGIGYYTAFAILAAIGPIQRFPSPDKLTAYAGLVPRQYQSGHHAFNGHITKSGSPLLRWLMVEAARVAVRCDPYWRQVYQRIATRRGCNIACVAVARELLVAVWYLLTRQATYYHLQPQTFITKLQEWAYRIGRAHLPATSSKEFVQQHLSALGLHDLANSLTVRGRNGRLRVQTA

SEQ ID NO: 197277 - protein, 327 aa, unidentified
MEYYAGIDVSLERSSLCVVDATGRIVREAKVASEPEALVAWFRGLGFEIVRVGLEAGPLSQWLYAAMRDAGLAVELLETRHVRDAFKAMPVKTDRSDARGIAQLMRLGWFRAVHCKSVPAQETRALLTARKLLQTKHHDVEMSLRGVLRGFGLKVGPTTARSFAGRIRELVGGHPTLTAVAEALLAARDVLGEQLRGLDKRLCNQAREDNRARLLMTTPGVGVIVALSFSAAVDDPCRFRSSKMVGAHFGLTPRKYQSGETDVTGRISKIGDANVRTALYEAANVILTRASEGLGAQELGSPPGEARWHAQGRGRWPGSWPWFCIGC

SEQ ID NO: 197278 - protein, 385 aa, unidentified
MDEEVKPTTKNGDKHMKKTDKYVGLDVHQDTTVIAVADCGRVGEVRIYGTIPSDLQALAKVLGKLGGEGVRLHVVYEAGPTGFVVYRRLKQLGINCIVVAPSKTPQPKGVRLKTDRRDALQLARLHRAGELTGINVPDEVDESVRDLTRARADAVHDLTRAKQRLKAFLLRQGYRYPGKANWSEAHQRYLRKLTLALPALRSVLEEQLLAIDQVTERVKRLDELIEVQVPQWRYYPAVQAVMCLRGFQLNAATVIVAELGDVRRFAHPKNVMAFLGLVPKEETTGNTRRLGSITKAGNAQARWCLIEAVQKALTPPKVSARLSLRQEGQPAAYRELAWKIQVRLHKRGWHLLQRGLMKAKVNVALARELAGFLWDLLRQVPAPEA

SEQ ID NO: 197279 - protein, 476 aa, unidentified
MSKRVQKRQERKRVQPKVDWKALAVVHPDAAGIDIGGSEHWVAVGPDRDEQPVRCFDCFTADLEQMADWLAARGVRSVAMQSTGVYWIPVFEVLQQRGMEVYLVNARHTKNLPGRKSDIAECQWLLKLHTFGLLQNSFQPSDEIRAVRTLWRYRGGLVGQASSTIQRMQKALIEMNIQLSNVLSDLSGVSGMAIVQAILEGKRDPQELAALADPQVKASQEVIAKSLHGNWRSELLFVLGQEMDSYRALRKRIAECDGKVQQHLQRMGSRVDLSVQPIGPRPKGKRARGNAPQTFDLRSELYRLTGVDWSQVDGIDVQVAQTVIAEVGTDLKAFPSEKHFANWLGLCPTNDSSGGRVLKRRTPKVVNRAKTAFRQAASTLIRSHSYLGAQYRRLRTRLGAPKAITAMARKLACLFYRLLTKGQPYVDRGAHYYESHHREQQIRSLIKRARQLGLQVLSGNGQPLGLQVPSPEGQSA

SEQ ID NO: 197280 - protein, 337 aa, unidentified
MHYIGIDLHKKTISLCVMSKGRKVLCEKALRCDDEAGILDFFGRWKPFRAVVEATASYEWFVQLVEPLAKRVILAHPKKLRVIAETKNKTDRIDARVLAEFLALDMIPQSYRPTPRLRAYRRLVRYRHFVRGRVTSVRCKIRHILSDYNLDRPNLFTAEGLEYLQGVEISPADRWVLGQLVLQWQQHRSQVQAANKQLREFAKKAPLAEREHREVLRSIPMIGNVTLDVVLSELGDVRRFHSQKKAVAYAGLDPGVRASADRRKELHITKEGSRLLRWALVEAAWRLVVKSRYWGFRYERLKGRIGAKKAIVATARRLLCVMVAMLQSGQRYRLSAA

SEQ ID NO: 197281 - protein, 371 aa, unidentified
MANDSTVFVGLDVHKDSIVAAYSVGFSEVVSLGKVGIRDRDIDRLCSRMQSKASRVMFVYEAGPCGYGLQRYLARKGFECWLCAPSLIARKAGDRVKTDRRDAEHLVRQLRADDLSFVHVPDERDEAFRDLVRAWGAAKQDLRRARQRLKSFLLVHGVRYAGTADWRDAHRRWLSEFVFLEPWSQIAFEEHRRAIEDRLERCQRLEALLREAAPEWRFYPAIRALQALRGVQFTVAVGLLAEIGDLSRFDSPRQLMAWLGLVPTESSSGLRIRKGAITRAGNSYARRLLVEAAWSYRYPPKVSRIIQVRHQGLPRDVVERAWIAQLRLCKRFRRLTHAGKHPNVAIAAVARELAGFVWDIARRVPPTAPTA

SEQ ID NO: 197282 - protein, 340 aa, unidentified
MGHVTTIGLDLAKNVFQVHAVDQAGDVVVRKQLRRRQVHAFFAGVSPCLVGLEACATAHHWARELTALGHEVRLMPPNYVKAYVKRNKHDMADAEAICEAVRRPSMRFVPVKTAEQQSALMIHRARELLVRQRTMLVNALRGHLAEFGLIEAQGLHKVARLIAIITDETDERIPGLARQVLKVIVNKIENIQTAIAGLEMQLVAWHKNNPVSQRLATIPGIGPVIATAIAATVADPNTFRSGREFAAWLGLVPRQNSTGGKARLGGISKRGDSYLRRLLVNSSHTVLLCSKAAKTDPWLTSLLKRKPRLVAAVALANKTARVAWAIMTRHDTYRRAAAAA

SEQ ID NO: 197283 - protein, 381 aa, unidentified
MDILIACCAGLDVHKDSVEVCVREVEAERKLRHQIRRWGTTTRDLMAMAEWLKAEGVTHVAMESTGVYWKPIFNVLDSDFEVLLVNARMIKHVPGRKTDVADCQWIAQLLQHGLLKGSFIPPRWQRELRDLTRQRAQITDESTRVRNRIQKLLEDANVKLGSVATNVVGVSGRLMLEAMVKGQNDPAELADLARATLRKKIPQLEEALYGNFTEHHRWMLRLLLDQLDSTAQLIARLDERIQELTRPQQPAMEKLDAIPGINRRLAEVVMAEIGPDMTPFPSDAHLASWAGMCPGNHESAGKKKSGKTTKGSRWLRQAMVQAAWDASHTSPPSLFGQTFNFTPSPNRFGLPAFYSLHVWIWKNNPDGMFAMWNPDVTCANA

SEQ ID NO: 197284 - protein, 344 aa, unidentified
MQAITIGLDLAKHWFQVHGVDAAGKVVVKRRLRRAEIIGFFQKLEPCLVGMEACATAHHWARELIALGHQVRLMPPTYVKAYVKRNKNDATDAAAICEAVTRPSMRFVPVKTVDQQAVLMLHRGRALLVRQRTMLVNALRAHMAEFGFIAAKGLAHVEELVEAIEDDETPIPDLALSILRVIVAQLNDTDKRVREFDAKLAQWHREDKTSRLLATIPGVGVMSASAIAATVTDPAMFDSGRDFAAWLGMTPRQNSSGGKERLGGVSKRGDKYIRRLLVGGALAVIRHARGKATAENEWLRAMLARKPVKVVALALANKTARIVWAVMKRGEAYLPREKFVGRAA

SEQ ID NO: 197285 - protein, 422 aa, unidentified
MLAESHDEEQIIARVAALDIGKAELVCCVRVPASAGGKRRLQEVTTYSTMTTSLTELANRLVEMRVERVVMEATSSYWKPVFYLLEAHGLDPWLVNARDVKHLPGRPKTDVLDAVWLCKVAERQMLRPSFVPPWPIRRLRDLTRYRTDLVAARTAEKNRVEKLLEDACIKLSVVASDIFGVSGRAMLAALVAGERDPKVLAQLARARMRGKIDRLEQAFDGHFADHHRFLLSRMLSRIEGLDADIAAVDAQIEAQLAPFAEAAARLDEIPGIGPVAAAAIIAEIGVDMSRFPTAGHLCSWAKFAPGVNSSAGKTKGSASSGHGNPYLARVLGEAAVCTTKTDTFLAARYRRIARRRGQPRAVVAVGRSILVVIWHVLHDPESRYQDLGSDHYARHVDPTAKKRNHIRQLEALGYTVTLTPAA

SEQ ID NO: 197286 - protein, 337 aa, unidentified
MEFKRIAVDTSKSVFTLHGVDEHGRPVLRQDLTRARFETFLGKTSPTEVVLEACGSSHHWGRVAQELGHTVRLIPPQYVKPFVKRGKNNRNDAEAIGEAASRPTMRFVPVKPAETQAEAMDLSARDLLVRQRTQLVNAVRGHAAEFGVIAAKGIAQVDPLLRKIAETDMPQAAKQTLAQLGRVIAQLDAQLEEINRRLAAQHKTHPVSQRLAEIPGVGPLTALTVAMKVDAGQFESARHFAAWLGLTPKERSTGSRQSLGGISRAGNERLRQLLVMGAMTVIRHAKPGSKTASPWLLQLLERRPRKVAAVALANKMARILWAMMANGTAYRRTPQAA

SEQ ID NO: 197287 - protein, 347 aa, unidentified
MDHIIIGVDTHKANHIAVAINSQGARLGSMTIPATHKGYRDLEGWACKLGQIKAFGIEGTGSYGAGLSRELLAKGHTVLDVMRPNRQLRYLHGKSDNLDAESAARSVLNGQATAHAKTQSGSSEMIRHIKIARDSAVKAKSQAIITLKALIINAPLEMRGALDRIRGPISLVRHIAAFRPGEITSPTSSAKAAMRAIARRWLALHEEIQAHEQNLDRMVREKAPELMKSHGISTMTVAEMLILVGDNPERIKSEAALAKLCGVCPIPASSGKTNRMRLNRGGNRQANAALYRVAIVRMRDHEPTQTYVAKRTADGKGKREIIRCLKRYIVREIYRHLCLPPVGSGTA

SEQ ID NO: 197288 - protein, 317 aa, unidentified
MTNHNVKLPVAVLGIDLAKNSFQLHGVDINGVTILRKKLARKKLTQFIALMPPCIIGIEACGGSNYWVRVFKNFGHTVHMIAPQFVKPFVKSNKNDVADAEAICEAVQRPSMRFVPARSVEQQDIQSLHRIRSQAVARRTAQANQIRGLLMEYGLIIPKGISYVRKLIPLILEDATNELTSIFRELLVGLFDEMNHLDNRIKALESKLELICAQSEECQRLLTIPGIGLLSATAMFAAIGDIAAFKSGRELAAWLGLVPRQHSTGGRPTLLGISKRGDTYLRTLLIHGGRTVVGVAAKHADQRNQSGQPHELANCYC

SEQ ID NO: 197289 - protein, 350 aa, unidentified
MIQGQEDPMQISTIGIDIGKNSFHFVGFDARGGIVVRRQCSRTQLIRALANLPPCLVGMEACCGAHHLGRCLVAPGHDVRLIPPQYVKPFVKSHKNDLLDAEAIGEAVQRPTMRFVPLKTMEQLDLQAIHRLRTRLVGRRTAVINQMRGFLLERGVTCPVGREALVKRFPEVLDNPALGLSVRFCRLLKQLRDEWRLLDDDIEDVDHEILSLARGDEACDRLMQVPGIGPLTATALVAAVGNGAAFAKGRDLAAWLGLVPRQHSTGGKTVLRGISKRGNAYLRSLFIHGARAVCRHHRQKPHRLGRWLANLEARAHPNVVAVALANKLVRTAWAVLQRNSHYDGRLLANA

SEQ ID NO: 197290 - protein, 353 aa, unidentified
MGFQLGQATIAIDIAKRVFQVHKVDPDTGEVSRKKLGRHEVTEYFAQLKPCVIAMEACGTAQHWARVFRSHGHEVMLISPQFVRAFVKTNKNDAADAQAIWTAAQQPEMRTVAIKSAEQQSILALHTVRERFKKARTAAVNQLHGLMGEYGVELPKGWRTMLPKAAEALDDATSAVPAILRPQLRAQLDEIRALTVKIDEVEAQLSGWQRKEEDCQRIAAIPGVGLLTATAIVATVGDDAKVFRSGREFAAFLGLVPRQTGTGGKIKLLGISKRGDVYIRTLLIHGARSVMNWNESKQDPESWLSRMIERRPHNVVATALANKMARQIWALLAHKRIYEANRSTGHAGVAEAE

SEQ ID NO: 197291 - protein, 324 aa, unidentified
MTDAVLGIDVSKNTFDTNLGAGTKARSKSFANSPAGWHHLIAWLGEHKIGQVHACLEATGRHGLGIALALHEAGHVVSVVNPAQIRDFARTKLGRNKTDQVDAVHIREYAELFKPRPWTPPSPAMRRLCELQTIRAGTVAGLTEWKNRRRSGIMDDLALSLAKTTIQHFTSQLEAVDQAIAETIDNDVELSAKRDLLVSVNGVGEALAGVVLAELPGPDILGSSAAVTAYAGLNPQQHQSGISVNRPVRISKIGNAVLRTALYMPALSAMRYNPAVAALVDRLKAQGRLKGKQIVIAAMRKLLVLCFGVLKTGKEFDPAMVMGK

SEQ ID NO: 197292 - protein, 340 aa, unidentified
MIDFPHQIQFKDITMELVIGIDVSKKKLDLSVYDGTKHQAFCIQNSKKGIISFLKSYVSRMEECLFVMEATGVYHLNLVTIIYDMGFKVGVVNPLRIKRFAQMKMIRVKTDSADARIIAEYGFEQPVSLFNPRSKERQKIINLLKGIEAHSKTKDAYYNRLKALLQDPGYEKTVVISYRKIIRSLNREIKKFEQDLKKLVLTHYPETYAQLMKIDSVGFKTAVIIIGYFGRFEDFENSKQVASFIGINPSPKESGSSVRGRGRISKKGNTYIRKQLFMTSLSAMQHNKTCKEIYDRLKSKGKEHKVCRVAVMNKLVKQIFAILKYDRAYDPNYCRNILLN

SEQ ID NO: 197293 - protein, 325 aa, unidentified
MKAMGIDVSMQNVDVALCEDGKTFYHGKIQNDKKGFLEIANIVKRSKVDLVVMEATGVYHTQLADYLYEKNIKVSVVNPLIIKRFTQMKLSRTKTDKKDSILIALYGYQENPKLYKPKSEEENELKSLYITRKGLKKDLKQTKNRLHALSKRSYHDSFSLFKLNQLKATLEEMIKEIEDRIRTLLKTRFREEYDLLKDIPGVGLIGIAGIMGMLGGFENFENHKQVSAYIGINPSKRQSGKSLNLPDRISKKGNSNLREQFYMMALSAIKSNKACKIFYERLIANGKSKKQALIAVANKLIKQVMSILKQKVKYNENHISVKKVA

SEQ ID NO: 197294 - protein, 313 aa, unidentified
MTTIICGVDVCAAWLDACVGGAGGEFCRVENSLAGVDALADFCRRQGVGLVAMEATGGYERLAFARLWGEGLACAVVNPRAVRQFAEAMGLLEKTDRIDAAAIAWYAQTKRVCAQAPASDTQRKLTAAVTRLRQLTALRTMQSNQRRLVDDPDARGSIDELLGLVARQIRAFEATILALIAGDPVGAELDAAFRSIKGVANRTVAGLLAELPEIGTLSNKAAAKLTGLAPLARDSGKRTGKRPVRGGRSTIRSTLFVVAEVVRRHEPDFADFHKRLTQAGKPKKVIRIALAHKLLIRLNAKARDARNQITCPA

SEQ ID NO: 197295 - protein, 321 aa, unidentified
MSKNVEFEPFAERCCGLDVHKKEIVATVEGEGIARETKTFESTTRSLTELKEWLLDLGVTHVAMESTGVYWKPVMNVLEPVGFSIMVVNARHIKYVPGHKTDKKDSAWICKLLRAGLLKGSFVPSREQRDLRDLTRYRRKLVQQQAAEHNRMIRIFEDANLKLSSVFSNIRGKTCTAVIDAVIAGETDPQKLSEMCTHWRLKSTQEEIALAVEGNFTEHHMFMIRMIRSSIADIEKHIADLDAEIDRRMAPINGIIERLCGIPSMDRTSVKELIAEIGVDMEVFPTADHLASWAGMSPGNNESAGKKKARTRTTGTRRRKR

SEQ ID NO: 197296 - protein, 412 aa, unidentified
METLVERGCGLDVHQGTVVACLLTVRKDGKVQKQVRTFGTTTRELLSMREWLLSQGCTHVAMESTGVYWKPVYAILEGAFQIVVANAQHVKKVPGRKTDVKDAEWIADLLCHGLLRQSFVPPKPIRELRDLTRYRRKLVESQSAERNRLLKVLETANIKLASVATDVFGISGRLMLRALIEGKATPEEMAELAKRKLRSKIPQLELALEGRLEDHHRFLLKLQLDRLERVEGDLAVLQQHIQEKLQPYAAQLALLQEIPGVEQTLAAVIIAELGVDMSVFQSVSQLASWAGVCPGNNESAGKRKSSRIPKGNVYLKTALVEAAHAAARTKGTYLRDKFYRLKARRGYKRAAVAIGHKILVSIYHMVSQNVSYNDLGDLYLDKLNKNHLTRNLVHRLERLGYSVTLAPQQKAA

SEQ ID NO: 197297 - protein, 342 aa, unidentified
MRLFIGLDVSLDKTAICVISEHGEIIREAEAASEPEVLSRWLAELDGRVAVVGLEAGPLSQWLHRGLMEAGLDAVLMETRQVKGALNAMPIKTDRRDAEGIARLLHLGWFRPVHCKSVSAQETRAVLGARKAIQQNMIALEMSLRGLLRNFGLKVGAISRGRFEVRIRELADGNPMLETATAPMLRARETLRQELATLEKHVRQFAQDDPVCRRLMTMPGVGAVVALTFHAAVDDPTRFRSSKRIGPWVGLTPSRNQSGERDVSGGITKAGDVNLRRALCQAATVMMNRGRSTWLRTWGAQLAQRRGRKIAMVALARRIAVILHRIWIDGSVFQPDAAPKMI

SEQ ID NO: 197298 - protein, 375 aa, unidentified
MRSVALDLGRKISFCEVANGEVQSRATARSIDELERQLGRGTPPARVAFEACREGWFIDRRLREWGHEPLMVDTTRCRQLGIGQHRRKTDRIDAEVLARAVERGMIPLAHVLSPARQQLRMQLGVRRALVKTRAGYVASIRSVARAHGKSLPSCMAYNFAARTRGIELVPALAALIEPLLILIEQVNVQLAVVEQELDRQSSTEPVVQLLQTAPGVGAVVSAAFVSVVDDAHRFDSAHQVQAYLGLVPSENTSVQRRLGAITREGNRYLRALLIEAAWSIFKHKNADDPMRAWALSLAARRGKRVAVVGLARRLVGVMWALWRDGTVYEPARVGLASARGHQEHAQSLELQAAALATAASKVRRARRSPTVTVAR

SEQ ID NO: 197299 - protein, 316 aa, unidentified
MSEPVYVGIDVAKASFEVAASGEMQTFSLGNDEAGHAQLCQVLIPLAPRLILLEATGGHEQLLALALAAAGLRVSVINPRQARDFARCMGKLAKTDHIDAQVLRGFAALLDAQGHEPRALLDEQQRELTALVTRRRQLVAMLVAERQRLALAHPKAKASILAIMDAIAAQLHDVDGQLREHVQAHHADLAKLLTSVKGVGPTTASTLLAQLPELGRLNRKQITSLVGLAPMNRDSGTLRGQRHIFGGRADVRRVLYVAALVGTRFNPVLKAFYAKLLAAGKPKKVALVACMHKLLIILNAIARTKSPWSNEITGIA

SEQ ID NO: 197300 - protein, 348 aa, unidentified
MHSQIYYVGLDVHKRSVSFCVKLADGTVVQDGEVKATRAALAEWAEKLPRPWVGALEATLFSHWIYYWLQNFASEMRMGHPARMKAIASGKKKNDRVDAAMITDLLRCNLFPAIQVLPESYVAMRQVLRYRNLLVRSHVQMENKIAGLLMEAGVEYEKQKLHGGRYFGQLLKNRPEISASVRPLLTFSRSQMETVQRMERQLAGQLSTRPELTDRLQRLTRIPGVGPITALTWVLEVGPIERLATISKAVSYCGLTSAQRSSAGVDKRGPLSKQRNRFLQVGLIEAAKIAPRWNPLLKQLHERELTRGNKNRATLAVARKLVAYLWAADRGHQPAALLRQPTATTAAG

SEQ ID NO: 197301 - protein, 305 aa, unidentified
MERSFVGIDVAKQQLDVHVRPTDASFRLGRDDAGLTELVERLQRLAPVLVALEATGGYEITVAAALGSAGLPVAVVNPRQIRHFARATGTLAKTDALDARVIARFAEAIQPVARPLPTAEAQALAERVARRRQLNEMLGAERNRHQQVRDPRLQRRIATHIRWLTQALADLEADLDDLIRSSPLWRETDNLLQSVPGIGDVTAYTLIADLPELGRLDRRKIAALVGLAPINRDSGTLRGRRMIGGGRPMVRCVLYMATLTAVRFNPVIAHLAGRPKKVALIAAMRKLLTILNAILRDQRPWQQPA

SEQ ID NO: 197302 - protein, 341 aa, unidentified
MQITTIGLDIAKNVFQVHGIDAAENVVVRKQLRRGQVIAFFKALPPCLIGMEACATSHYWARELAKLGHEVRLMPAKDVKAYIKRNKNDAADAEAICEAVRRPTMRFVEVKSAEQQAQLMQHRARDLLMHQRTQLINAMRSHLAELGIIAPQGREGVKELLAIISIEDDKHLPNDARASLIVLAAQLQALQTTIGAIEKRIVVQHRAKKESRRLQTVPGIGIIGASAIAATVTNPKIFRSGRDFAAWIGLVPRQMSTGGKPKLGPISKQGDRYLRRILVVGAVSVLRRAKLHPDKFPWITQMLTRRPFKVVAVALANKMARVAWALMMSGNTCRAARFATT

SEQ ID NO: 197303 - protein, 353 aa, unidentified
MPSKADTAVARTIGIDTGKNTLHVIGLDEKGAIVLRERVSRTRIAARFVNVPPCLVGIEAGMASHHIARELVALGHEVKQVPPGYSKPFRQGHKNDFRDAHAVAEAVERPSTRCVPIKTDEQLDLQALHRVRSRLISNRTAVTNQIRGFLLEHGIPVRQGHHFLRRQLPQLLGTRTDVLSPRMIRVIGDLMSDWNYLDERIERVTDEIESLARADEGCQQLITVPGIGPIISSAMVAAIGTGAAFCKGRDFAAWLGLVPKQMSTGDRTILGRITRRGNRYLRTLFIQGARAILLRPTGWAKHSFGSWLAAAARRMHRNVLAVALANKLARIAWTVLAQARCYEARVEPRVEPA

SEQ ID NO: 197304 - protein, 411 aa, unidentified
MAMEALVERCAGLDVHQASVVCCVLVGPPGCRPRKLLRTFGTTTHELGKLRAWLAEHGVTHVGKESTGIYWKPVYAALEGHFDLTVGNAHHIKNVPGRKTDVKDAEWIARLVRHGLIGKSFVPPPIRDLRELVRFRRALVEARTAERNRLLKLLEGAGVKLAGVASDVFGVSGTAMLKALAEGAAEPAAMADLARGRMRRKLEALAAALDGQVREHHRFLIAVQLRRLEAIARDLGELDARIEAHLEPFRAQHRLLMQIPGVDRVGAAGIIAEVGVDMGVFATAQRLAAWAGVAPGNHESAGRRKGAATRKGNVFLKATLFAAASAAVKTKGSYYRDKYHRLRARRGPVRALVAVAHKLLIAAFHMLRTGSPFRELGEDFLDRVSRKRSTTKLVRRLAALGYDVLLVPKAA

SEQ ID NO: 197305 - protein, 345 aa, unidentified
MAKLYVGLDLGSRHIEQVVMRLNGKVVQRKPIATSEINLRQAFADLKGEVHVHMEAGELAPWVREVIKSYSKSITISHARDNAWIAKDPNKRDRIDAFKLADLLRMNRVTPVYYAEDPARRDFKLLVQHYDDLTAQEVALKAMIKSRLRTQGIIVHTAAPFTEQGCKEVLARVSSVAIRNATRQLYKVLAHTLEVREQANKAMVKAGRRFPEIKLFQEGVPGIGPISACRFSAYVQTPHRFSNKRKLWRYCRLGISYRSSDGKLLAHPKLDRAGCGVLKDVARTAFRAAMSSKDDNQFKRAYEQALARTHDKTHARLTVMRKIVSVLRAMWLTNSPYQDKWASGV

SEQ ID NO: 197306 - protein, 368 aa, unidentified
MKQITTYVGIDAHKKDLFVAMLVGPAKTPVTWQVANEPQAVRRLVRKLEREAPGPVQVFYEAGPCGYALQRQMTTARVRCAVVAPALIPRKPGERVKTNRRDARKLAELGRAGLLTAVQPPTLADEAVRDLARARDDAREDLQRCRHRLGKLLLRRGLHYAGRNWTRAHREWMASVTWTHAAERAVVDDYLLAIDHTAARLLALDARLAEIAGTEPYREPVGWLRCFRGIDTLTAMLILAELHDFRRFASAPALMAYLGLVPGEDSSGDKHRRGRITRTGNALVRRLLVETAWHYQHRPSVGVALMRRRQGQPGRVLAIADQAQQRLCRRFRKMAAEHKPAPKIAVAIARELAGFLWAALQPAPVAGT

SEQ ID NO: 197307 - protein, 344 aa, unidentified
MARSFGHYRLFVGIDIAASTCAVSWMRPNAQPTRAITIKQTPAGFADLQWQLLAIEPDPHAILIVMEATGTYWMRLASSLVAASFAVSVINPAQAHHFANALLKRSKTDAIDAQTLTELGARLQPERWTPPPQVHTELQQRLVHRDGLVAARTQFRNQLHALVQQPVVIASVRTRLETLIASLTEEIATVEQEIAAALQQDEAWAAAAARLATISGFGTLTVAWVLTTTINFTLTATPEAAANYAGLAPQLRQSGSSVRGRPRVGHGGNAHLRRALYMATLSAVHHNPVIAAFYQRLCAAGKPRKVALCAAAHKLLRIAWAVATKKEDFDPAYAPCARQEVAVR

SEQ ID NO: 197308 - protein, 459 aa, unidentified
MNRRERREMIRKMQSEDLSLEVVHPHAAGIDIGNESHYVAVPPTRDPQPVRRFGCTTAELKTMAEWLKQCAIRTVAMQSTGVYWIAVFDILEEAGLEVYLVNARETKNLPGRKSDVQESQWLMKLHTYGLLRNSFRPSRQIRMLRAYWRQRQDLVRSGGRHIQRMQKVLTQMNIQLANVISDISGTTGQTIIKAILAGERDPHELAAYRNARIEASEEEIAQSLEGNWQDDLLFVLGQEQSAYEFCQKQMMECDRQLSHCLAQLEDRSQGATMPQETRKNRLRSKKGNKPQFDLRAELFRRSGTDLTQIDGVDVMTAMTIVSEVGWDMTKWKTENNFVSWLKLCPDNKISGDKVIGKGRMPTNNRATSALRMAASNLRLSGTYLGAQFRRLRSRLGAPVATKAMAAKLARLIYRMLHYGMRYVDQGAEFYEAQYRKQQVSYLKRKALKLGLQVIEVVAA

SEQ ID NO: 197309 - protein, 365 aa, unidentified
MKKLSKKQPRSAAGRKPEQTVGLDLGDRYSFYCVLTGDGELVEEGRLQSTEAALRKQFTDDARMRIALEAGTHSPWVSRLLAELGHEVIVANPRKIQAITASESKNDRNDAEKLARFAACDPALLSPIEHRSPERQQDLNLIHARSTLVRSRTMLVNALRGLVKSAGGRLGACSTRSFPDKMRASIPAALQPACMPLVEQIDQLNQTIARMDRQVEELGKKYPEIPLLRTVPGVGPIVAACYVLTLDRPDAIADNRMAGAYLGLRPRQRQSGDSNPQCGISKTGNTCLRSLLVQAAHYILGKFGPDSALRRWGLGLAASGGTRGKKRAVVAVARKLAVLLHSMWRNRRPFEPFPATSAQTVAVAA

SEQ ID NO: 197310 - protein, 396 aa, unidentified
MARIWAGTDIGKTHHHAVVLDADGNRLLSRRVLNDEPELLALLVDVLAIDEEVVWAVDVADGMATLLVNVLLNHGQQLVYIPGLAVNRASAGYRGMGKTDAKDATVIADQARMRRDLTILQPDDEQVIELRILTDRRADLNADRTRRINRLRGQFTSIFPALERVLDLGNAGPLVLLAGYQTPAALRRTGRNRLETWLRNRKVRGAKALAEAALEAAGRQHTALPGEKITAQVIRALAKEVMSLNEQIAEIDKLIAAQFREHKLSAVISSMPGIGPLLGAEFLAVTAGDMSRFGSSDRLASFGGVAPVPRDSGNVSGNLHRPRRYHRGLQRVFYTSALISIRSCDASRRFYERKRAEGKRHAQAVLALARRRVNVLWALIRDGWCFQHELPVTVAA

SEQ ID NO: 197311 - protein, 389 aa, unidentified
MIVIGADRHKGSHALAAVDEGTGRVRGSREIGADGAGHLAAVRWARGLRDDRVWAVEDCRLVSHRLEQALVAAGERVVRVPPQRMGASRKGQREPGKSDEIDALAVARAVVKDGVEQFPVAYLNERAMEIRLLLDHREDLVADRTRAVSRLRWHLLELCAELERQLKRGAFNDARVLDRVDRRLRKLPAGVGVRVAREQIAQLRSLNRHIDQLHRELAELVAAHRPKLLTEQGCGALVAAILIGHTAGNERFRSEAAFAQQTGTAPIPCSSGRRTQHRLNRNGDRQLNHALHIIAVTRAQRDPATKRYLARKQAEGKTTKGALRCLKRHLARHFHQLLAEPPADQSQPVEPKLAPTNGKPTEIRDRREPHPDAIRIQGGPHISACLNTH

SEQ ID NO: 197312 - protein, 353 aa, unidentified
MTKCSKEPVVTIGIDLAKNSVHVYGVDAQGHQVLSKKVSRGKLSAFMVNQPPCLVAMEACGSAHHWARVFRDFGHEVRLIAPQFVKPFVKSNKNDAVDAEAICEAVQRPNMRFVAIKTVEQQDIQAIHRMRSLNVERRTAQVNQVRGLLLEYGIEIPQGRAALMRRLPEILEEAENGLSERFRAELNRLLEELRHLDEQVAHYDTQIQVIAHSDETVQRLMTIPGIGALIATALMAAVGEDVSLFRNGRGLAAWLGLVPRQHSTGGRERLLGISKRGDVYLRQLIIHGARAVMRWVERKEDATSRWATALKARRHTNVAVVAMANKIARVAYAVMVSGKPYDPAAGKPLQATV

SEQ ID NO: 197313 - protein, 388 aa, unidentified
MNVTADQPEAPTAIRTDLGAIFVSLELSRSSWLITSLSPGGGEKMSKHTVRGGDVSGLLQRFAQLSEKARVRTGKVFRLIVIQEAGLDGFWIDRVLQNEEVESHVVDPASIATSRRRRRAKTDKIDGETLVRSLLAYKRGEPRVCSMVKAPTPEEEDHRRLCRERKVLTAESVRHVNRIKGLLFCQGISGYEPLRRDRRERLEELQTGDGRRLPQHLKAQVDRELDRLELLLKQIKTVEGERDALLAAAQTAMPAPAAMLLDIKGIGSEFAAVLWSEGLLRHFDNRRQVAAYAGLAPTPWQSGAVDREQGVSKAGNPRLRTTLIQLAWLWLRNQPQSALTIWFHERVRRNAGRLRKTTIVALARKLLVALWKYVTTGVVIKGATMKAA

SEQ ID NO: 197314 - protein, 426 aa, unidentified
MKGDDAMKRSFGLDVHLDFCEIAVHEQGRVSRLERIASTPQAIRQFADGLDDGDQVALEASSGAMMIAGLLSESGARVVVCNAAETRAISHARVKSDRFDAAMLAKLLAAGMLAEVWVPDAETAALRRRVARRAGLVRARTRVKNEIHAVLARCLIGRAPVSDLFGKKGRAWLSDLKLPEEESQTTASCLRQIDFLDAEVAELDRRIAVQSLSRPGFEHLLTIPGVDIGTASAVIAAIGEIGRFSSPSQLVAYLGLDPKVRQSGSEPARYGHISKRGDPQARAVLVEAAWRAIRTPGPLRAFGERVRARRGAQIAAVAVSRKLVVLCWHLLSKDQDYAFARPSLTRQKLRRLQLLAGEPPLPRRHGGTPITPTGAQRAAELELAAHGELAYRRLIADWRSMSPDREPGRSPSARGERSQLRSERRA

SEQ ID NO: 197315 - protein, 424 aa, unidentified
MDRVLERPAALDVHKVQVTACVRTPGEGGRRRQEVREFKTTVRGLLGLRDWLAGLGVTTVAMEATGVYWKPVWAILEDEFELLLCNAAHVKNVPGRKTDVGDSVWLCQLLEFGLLKASFVPPKAVRELRELTRRRRTLVRERAQEANRLHKTLEDTGIKLDCVASDILGVSGRSMLDALIAGQRDPQVLADLAKGRLRAKTADLQEAMEGCRFSAQHALLIGGILRHIDFLDAEITALGDAIEAHMAADRQREDSERPFELAVQIACSLHGIQARTAQMLIGEFGTDMSRFPSDAHFASWAAQCPGNHQAAGKRRSGRSRKGPKWLDGALHDAAMGAIRVKDGHFARKYRRIKARSGHKVAIGAVKHAIVIALYHMLKNGEMYRPPTPHPDAERKQRERTTKRLIAQLERLGHSVTLQEGAAAI

SEQ ID NO: 197316 - protein, 319 aa, unidentified
MDKLSQGQIIGIDVCRDWLDVYCLSDGYRRRLPNGPEGHAVVAELAQARDAVVCFESTGGQEWQLWARLETEGIVARQVPPAQVKAFAQSRGRRAKTDRIDAELIARFYAFRPEAGRSLPPEKLRLLRALVSKRAQLVELRKHLLAQNFAHRKLGTAAMFEDLDTELKALFDTRIKELENRIEQAVSCDDTLAERASILRSIPGIGPVASTMLITEMPELGTLTSEQAAALAGLAPVAHDSGTLRGRRAIAGGRRALRNVMYQAALVAAHHNPSLQVFAERLRTAGKPHKVIITAVARKLVTLANSLCKKRQSWAPSAP

SEQ ID NO: 197317 - protein, 354 aa, unidentified
MTSTKYIGMDVHKESISVAVMNAAGKIVMECVIETKASMILQCIDGLRGDLHVTFEEGTSAAWLYDLLKPHVTELIVCDPRKNASMREDNQNDKIDARRLAELLRIDHLAPVYHGEHGLRTLKELVRSYLTVTKDLVRVKTRVKAIYRSWAIPCNGKEVYAACHRAEWLEKINELGVRRRAEFYYQQLDALRVLRQGVRRELLAESKKQKAWKRLCQIPAIGPIRAAVLLGILQTPHRFRTKRPLWKYSGLAIETCSSADHRSINGQLQRSKKNSVRGLNQNCNHDLKNLFKGAAVIASSKPGPFQEFYTALLTKGMRPEMARLTLARKIATIVLIVWKKGVCFDAQHLKPQTA

SEQ ID NO: 197318 - protein, 404 aa, unidentified
MPAVSGIDWAAEWHDVRVADEHSGQLLAERRFAHDEAGIEALIELLIAQRVARVAIERPEGLLVGRLLAAGIRVLALHPNQVAAARDRFRAAAGKSDRFDAFVICELCRTDHHRFAALAPSGDETIALQALVRTREDLVAVRVHLANQLRAQLDCFWPGAKLIFADADSPIALAFLARYPSPEAARGLGPKRLAAFLARNAYSGRRPVSELLERLRSAPVAAIGELEHEARHNAVAGLVAALAPIVSQISLLSSQIAGAVRAHPDGPIFLSFFRDPKSVVCAAGLLAEIGDNRARYPTADSLAADAGQAPVAKQSGKHRAVTFRWACDKRLRNHFGVLADATRHWHPWAHDVYHRATERGAEHPHATRILGRAWTRVLWRCWQDRTPYDPTRHGNLNRLLQHKG

SEQ ID NO: 197319 - protein, 318 aa, unidentified
MEAVSVGIDVSKRELVIAVHPTGEQWTTATTPAAIGTVVTRLRALAPQIIVVEATGGYERTVVAAMAVAELPVAVVNPRQVRAFAQAIGRTAKTDVVDAKILAAFGARLEPAPRPVADTATQELADFLARRRQLLEMIGMERGRLEHAAPTGPLTRELRRHIRWLERRVDDVDDEIGTCIAAHPTWRVQEELLRSVPGVGPTTARTLLGELPELGRLDRRAIAALVGVAPFNCDSGQHRGQRHIWGGRTSVRTTMYMAALSASQHNPVLRAFYRRLRDAGKPAKVALVATMRKLLTILNAMIKHRTAWQQNDVPALNN

SEQ ID NO: 197320 - protein, 344 aa, unidentified
MIYIGMDISSKSFVVHAVDGKKRRIFKGEILPSRAGIKNLIKELGSHRKLVVFEAGNQLKWVAQTLKKLEGVDIHVVHPNEIKWINQSSGKTDKIDARKLAELARADMLPRKVHIVEGTARQLRELVSARQTLQSKRIALVNSIRGMMKQEGYKLPKGFFQDPEWTDRVKRLKIGQAGKAIITSYMNSIESLAASEQELTAQILEIEDKDVELLKSIPAIGEITSRVIKGAIDNAERFDSKRAVSKYGALTPRIYQSGDVIHHGRINRNGRLEVRRVLLQCAHTITRMKSYEARPLREFFERIKRRRGKKKAVVALARKLLTVAYGVLKSQSVYNPALLVAKAV

SEQ ID NO: 197321 - protein, 386 aa, unidentified
MKNNSNSKKQARGSEEWTSPKLAALQEAWRQKQGTEEKLTIGLDLGDRQSNYGVLDQSGEVIGRGQVVTQSQPLEVWLGQMPPSRVVIEVGTHSPWVSRLVKQTGHEVVVANARRVKLISESSRKNDRVDAEMLARLGRVDVQLLSPIQHRSKQGQADLIGVRVRAELVELRTSAVNAVRGFVKSFGQRMPKCDAGVMNRSHAKEVDEAIRGEMELVLEVVEKLNEVIAKADGELKKVNAERYEKETAKLEQVTGVGTLTALTYVLTLEDAGRFRRSRDVGSYVGLRPKSSQSGERDPEMRISKEGDVYLRKLLVQCAQYILSKRGPDTDLKQWGLRIASKGKKKAKRRAVVAVARKLSVLLHRLWVSGEVYEPLRQRQRQHTVAA

SEQ ID NO: 197322 - protein, 331 aa, unidentified
MTNAAREAAADARPLDYIGIDMAKARFEWGVHGARSSQGASNDPAGFEALLAELRQRHVGLIVIEATGGLEHALASLLLQLGFPVAVVNPRAAREFARSMGHLAKTDAIDALALAHYAHTLAHKADQAGVQLMPLPAQLEPLQVMVLRRKQLMDMRTAELNRRGGAMRVLRRSIEAVIKTLDEQIAALDKDIGHHLDEHFKDLDRRFESIKGVGPTTSASVIAFMPELGQISNARAAKLAGLAPLNNDSGNSRGKRSIWGGRKLVRCALYMATLSAMRFNPVIKAFYERMLAAGKCKKAAMTACAHKLLRILNAMARSGKAWNPELHGFTA

SEQ ID NO: 197323 - protein, 355 aa, unidentified
MNKTKYIGLDVHQASISVAVLDENGKLVMQSVIATRAAAIVEFLDGLRGALQVTFQEGTYSAWLHDLLVRRVSKVVVCNPRKNALLKAGNKSDRIDALKLAELLRGGLLSAVYHGENSTRTLQELARSYQALTEDTTRVMSRLKAIYRSQAIPYGGKKLYTQRHRGAWLQQLKQPGLHRRAARLYEQLDLLQQLRRQARQELMVESQKHSVCDRLRSVPYLGPIRAAMLVARVQTPHRFRSKRQFWAYCGLGLETRSSADYQQIEGQLKRSRKKVLIRGLNVDHNHDLKNIFKGAAMSASIFPGPLQEFYQQRVAAGVKAEMAQLTLARKIAAIALTIWKKGERFDPTKLKAQAA

SEQ ID NO: 197324 - protein, 373 aa, unidentified
MYYTTLFVGMDVHKENFTVCCYDMIQDKIFYTQKLEPDYNQILKYLTFVRKAFRKDVDFVCGYEAGCLGFTLYHQLTQHGVSCVILAPTTMMKPAGKKKIKTDKRDAALIARCLASNNFSPVHVPTTQDEEVKEFLRMRDDHRLALKKVKQQILAFCLRHGYSYTATKNHWTVAHIAWLRSLKPEGLYSEILSEYLLTFQALSDKLERLDQRIEELAAMKAYSEGVKKLSCFLGIKTHTALATMVEVGDFHRFASANQFASYIGLVPGEDSSSESVNRLGITKAGNAHIRTLLVEAAQSYTKGQVGYKSAALKKRQAGNTSEVIAYADRANERLRRKYYKMILSKSKRTNVAKTAVARELACFIWGMMTARIA

SEQ ID NO: 197325 - protein, 334 aa, unidentified
MEQITTVGIDLAKRVFALHGVDAGGRVVLRSIVRREQLLEAMAKLPPCVVGMEAGSGAHDWARQLQRLGHTPKLMAAKFVSPYRRKGKNDGNDAEAICEAVSRPGMRFVPVKSLEQQALLSLHRVRQGFIVERTATINRLRGLLAEFGVVLPVRAVVVRREACKAAESLPALGRRAIEDLLAHLRTLDERIAAYDRELEQQARQCEPARRLMKIRGIGALSALAIVATVGNARDFRSGRQFAAWLGLTPRQHSSGGKTRLGHITKRGDAYLRCLLVQGARSVLHTASRHADGMSRWAQTLEARRGYHRTLVAIASKNARIAWALLSRNEVLRPA

SEQ ID NO: 197326 - protein, 354 aa, unidentified
MVVVGADVHKRTHTFVAVDEVGRKLGEKVVAATTAGHAEAVMWARERFGTEVVWAIEDCRHLSARLERDLMGFGQAVVRVAPKLMAQTRASARTRGKSDPIDALAVARGFLREPDLPVASHDEVSRELKLLVDRREVLVAQRTATINRLLWRVHELDPDHAPKAGSLDLAKHRRILGEWLVTVPGLVAELARDELADITRLTETINALAKRIGERVRVVATVLLSLPGCAELTAAKLVGEAAGVTRFKSEAAFARHAGVAPIPVWSGNTAGRVRMTRSGNRQLNAALHRIAVTQIRLDGLGQTYYRHRIAVSGETPWVSRRLGLLDSDQGLVGPVCIVERSFELGRWDVAEVAV

SEQ ID NO: 197327 - protein, 406 aa, unidentified
MKQIVSVGIDVSKGKSTVCAMIHPNTIIKESFEVLHTVEEMSMLADYIGSLDGEIRIVMESTGHYHLPVAQFLYQKGFFVCVENAYIIRQFSRIMLHGAKTDPLDAKKLAKYGLAYWSELKPYKFHPSCYTKLSLLSKQYQTYIKLLIAAKQNVIHLMDEMLPGFKEALDTASSVQFSKVKYVDFAKEFYHVDMIKSMGKEIFRENYKQWCKEKGYRFQSEKADELFHLAEDGIPTLPTEFPSTRLCMEVATEQVSQLGYALEQILSQMQNLAKTLPEYQTIRQMGGMGEKLCVRFIADIGDVRRFHNGKALVAYAGIDAPPYQSGQYTGTKRRISKRGNSALRKTGYEVMKSLKSHPPKTDTRVYDFIIKKENEGKNRKQAKIAGLNKFLQIYYARVMEIYKNIV

SEQ ID NO: 197328 - protein, 421 aa, unidentified
MIQVSHEAFAAFVGIDWADAKHDGCRQVAGSAKRDYCQREHTPEAIDAWGTTLRMRCHGQPVALCLALNKGPLGSALRTYDFLVLCPIHPLTLARYREAFTPSRAKDDPTDAALQLALLLPQRDKLQPLTPQSPTMRALAQLIAPRRRVVGDTVRITNRLTSTLKNYCPHVLHGLQEKDTAIFCDFLSRWPTLKAVQLARRAPLAPFFRAHHVRYAEVIAQRIQASKAAPPLPTDAGVIAPHALLVQALVAQLRGTWQALADCDTAIAQRAQSHPDFPLFQALPGAGPVFAPRLLVACGEQRERYACAADLQKYAGSAPVTERSGTKSWVHWRLQCPKFLRHTFVEWAAESLRPSFWAQVSYQQPRDKGKAHQAAVRARAFQWIRILSRCWQERTPYDAAIYRQALHRRGASLSQTLAKAS

SEQ ID NO: 197329 - protein, 370 aa, unidentified
MPRHLRYWVGLDAGHQETAVCLVDAEGHAFFEAMTETRAAPIRDILRRFGVEPVQSVTIEAGVGTQMVRDLHSFGLPVQVVDVRKSSKFLAIRRQKTDANDAKGLAELGRLAQSFGPHVFIKPVEHQDIRIMINIRRTLLKHRARTDALLQSIFRLHGASIKLLNGRGSLAAEVANQLRLLSTNGVTIRVDVDPLVRMGEDLRSHILDMDRKMRTMAASIPVCARFQTIPGVGTITALSFYSAVGDPYRFKNNRDVGPYLGLTPNLYQSGVTARRGRISRYGNKLTRSHLITAATVLLRTIKTESTLRTWGLQLATKIGFLKARVAVARKLAVIMMAMWKTGASFDPGKSKPRFLQTEEAGLDPVRISGT

SEQ ID NO: 197330 - protein, 443 aa, unidentified
MTNRKRAELTRGDRRRNERLSMLRAIVRPELAIVGVDLASAKQAAVVTDHESQVLAKRMFVGSAWVIDDVLAWAAPIASSAGFGGVVMACEPTGHRWKPLLERGRAHGVDLGCVNPMLVARAREAEDFTKNRADFSDAVLISRLASERRCFVPYLAEGLWARLRHLGVRRSQQLVAATAARQGLRDLLECYWPAILDAAEDPMDSCTLRAVLSVSTDPRVIAGMDLDSFAAAVRAELPQWGGVRRNHRVLAAAFEAARHPGGVRSEVPAAAERARFSLLDWQHALGALAEVEAALVEVMEELGLAELVTTIDGLSVVGAAAILAETGDPTRFDSPRAWVKHAGLAPRANESGTFFGQTKTSGRGRPRLRTATWRAIWPMIHHNTVFRARSEHLRSRADNPLKDGQVRTALGAALLRQLFVVVTRRVAWDPAIASGQEVVTIAA

SEQ ID NO: 197331 - protein, 309 aa, unidentified
MSFKIIRKNCCGLDVHKTWIYACIGIADSHDRVEYKQARFSSFTKGLNELCDWLAKYNCTDICMESTGKYWIPVFNILEKHNLWVTLSHPKYTKPQTGNKTDRKDAKWICDLYMCGMVKPSFIPPADIRQLRDLVRYRFKLTCMITGEKNRAHNCLTVSNLKLDDVFSDIFGKSSRSITEQILQHPGEFFDVTPFVDDRCKTPIPETQAAVEGAISPEQAGKLRQCLEHIDELEKHKSEIEREIFRLSDKYEVALNLIRTVPGFDKNPLTAIQVLSEIGSDMSVFPTAKNLVSWAGCSPSNDKSYSNIK

SEQ ID NO: 197332 - protein, 340 aa, unidentified
MEKRYIGIDLHRNRFTCCIRLENERTYVTEWELEDLGKFIKKLRPTDDVAVEITGNTRLFHDAVAEHVARVVVVNTNQFRVIRQSVKKTDPNDARTLALYLSKNMLPEVRMKDKEHGQLASLTQTRDTLVKLRTALKNKVNNILSARGLNLAKEALSSEKKLAEVLALPFDEIVQIELRVIVEQIRSLNRSIAELEKTIGEEGSKLDGHKGLASIKGIGKITGAILLSVIGDINDFADEGHLASYFGIVPRVSNSNETEHSGRIHKRGTKLGRTALVQSALIAANYSPYLKRFYEQVKARRGAGKAIIALAKKFLGIIYRTLKNKWVFKDFPNFVLAEES

SEQ ID NO: 197333 - protein, 405 aa, unidentified
MNAVGIDVSKGKSTVAIMRPFGEVVTTPYEVTHTNDELNKLADSLKELSGETKVIMECTGSYYYPIAYALHDAGLFVSTVHAKLIYDYGNNSIRKVKTDKADAIKIANYGLTNWLDLPRYIPEEDIRAMLKAFSRQYTKYQKLKTMLKNNFISLTDYTFPGVNELFTSPPRKSDGHEKWMDFAFKFWHCECVCGLSEKAFIESYRKWCKKAGYKFSKDKAETLYASACGHFSVMPMTDTTKLLITQAIKQINAVSENIAIIAHEMKRLAELLPEYPVVFGFFGVGDIVGPQLMAEIGDVLRFRSKSALVAFAGLDAPPYQSGKFDSSSRKVSKKGSPHLRKALFLIMECFLMSKPAEEPVYQFLDRKRAEGKHYYSYMTAGSAKFIRIYYARVREYLLELDNLIA

SEQ ID NO: 197334 - protein, 428 aa, unidentified
MPSILDNATRIKIFRELKATLRSRRDRLLVGIDIAKAQHVAQIRLAHIGILDAKLTIPNTRAGFEAFWARLVAHQAATGAPEIVCAVEPTGTYHQALATFLEGQGATVVFVNNHVAQLNRRTLDGTWDKSDPKDAHNLCDLLEQGKVLFYSLPDEPLADLRRFVRLLRRARRELAACKARWRLTLLPQLAPAGEALPPEVVAALPAPVRALEPAAVRRHAGGRSPAALPPAAAVELADLAAQLTAVQARMAQIEAALVRVADPLPAYTLLRTLPGVGPTVAAILVAEIGDIGWYTKFSQLRKLAGLDIIAVQTGQWTGRGRISKAGRALLRWALYQAAVGAARSPGWRARREALIAKRAGDRYAFFKANVELAAKLLRLVWGVWRSGRPYDPAHSPALAPAKSHTQTRGRRRASILGHSTRSPLLLRP

SEQ ID NO: 197335 - protein, 355 aa, unidentified
MTTQTHRVTGGVDTHTETHHAAALDHVGRLLGTREFRAGPAGYAELLEWLQSFGSIDQIGVEGTGCYGAGLTRFLRGHDHSVIEVNRPDRGSRRTRGKSDPLDAESAARRALAAEDHIIPKDTTTIVEAIRALRIARTGAVESRTAAYNQLRDLTLTAPESLRETLRTKTLHRVALESARLRPDKSRLADPIQATKLAMRTTGHRVASLNTEIKALDRQLGQLVKRAAPRTLELVGVGTENAAQLLITAGGNPERLRSEASSAALCAASPIPASSGKTTRYRLNPAGDHDANRALYIITLVPMRYCPQTRAYIERRQAEGLSKREAIRCMKRYVARQTYHAIRADLATARALDDL

SEQ ID NO: 197336 - protein, 344 aa, unidentified
MSTVARFVGLDYHDDSVRVCVMDSQGNVLASRDVDNHWCDVASLVEHTLPDGCEQFTVEASLEACNGAAHLAHELIERAGWSVRLGHAGIVNRMKQNPDKSDKADAFILADLVRIGYLPRVWLAPQEIQDLRTLVRLRTQYVKRQTEIKLRIRALLRGLRLKAPKDINPWTRAWLAWLKATEMNEITTFVRDEHIEELERIKEKIGRVEAQLKKVTRGDAVVARLLSLDGVGWITAITMRAEIAHFERFNSGKQLARYCGVTPRNASSGKRQADAGLVKAGNNHLRQVLIQAAHRLINFDPHWKAFAHRLKKQGKEYNVIVAAVANRWVRRLYHHMQPERLLSP

SEQ ID NO: 197337 - protein, 357 aa, unidentified
MNYTQNEKIEQVKESTLVLGVDIGSSEHYVRAFDYRGRELTRKVFRFSTDINGFNSFYDWVTQICIKHGKNEAMIGCEPTGHYWYTFYQFVKDHGMKLAFVNPASVKKAKELDDNSPKKTDLKDPKTIAKLVIDGRYSFPYVPEGIYAEIREVTSSRDRIMKELNAASNRIQRWLKIYFPEYLTVYKKFDTTTGMMILEEVPLPTMVTALGVDNIIKIWREHKVRGKGASFNRAKTLVDAAHDSVGKSGGQGAVMEIQMLLEDYKVKKQQLEMVTSVMEELIMQIPNAEKMLSVDGVGLVTVAGFISEVGDISRFKNPKQIQKYAGFELVENSSGKHKGRTTISKRGRKKLRKSYIR

SEQ ID NO: 197338 - protein, 372 aa, unidentified
MPDVSSIAPTDVRLWVALDVHKLSIVAAVLPPAGGKPEVCRIETTEKAIRRFIDRLGGPDGLAVCYEAGPGGFALWRLLRSIGVACDIVAPSLVPVRAGDRVKTDRRDAKKLVALHRGGLLRYVCPPTPETEGLRDLLRCRDDLRCARTAARHRVAKTLLRHGRIFREGRSAWTLKHRAWVARQRLQEPLAQLALEQMLVHLDGIDRQLAALDARLEQIARDQRWAWQVERLRAFRGISTLTALGLIAEIGDFARFSHPRELASWLGITPSEYSSGEAQHRGHITKAGNRHARRLLIEAAWHYRHAPRRPARGPQPSDRAWQAQIRLHHRHRHLTEHNKRSTVTTVAIARELTAFLWADMTNQPTRQQTLTA

SEQ ID NO: 197339 - protein, 410 aa, unidentified
MTKEDFIYVGIDLHKETHTAVMIDCYNNKLGEITFPNRPADFPKLVTKVKKCNTDAKEVVYGLENAYGYGRALAVWLIDKGYFVKDVNTAISHRQAKHRGAMYRKSDSDDAKAIALATLNMLDKLQDACPNDAYWSLGQLVHRRDNIMKQRTRLVNQLHEQLCIVYPSYKQFFNDISRPTALYFWEHYPSRKYLKGKSVEDLRAELVPVSHNKCATKTCEKILDAVASDKVKNNNFQDARDMVTLSIVSDIQHYDKQLVEVDKMLEQMYKMLGCTLTTIPGVNVITAVKILAEIGDIKRFSNANKLAQFAGIAPLHLSSSGKGKDVATKQGNRRLQATIYFLAIQMVQVSSKGTPRNSVVRAYYEKRKAEGKTSQQALICISRRLISIIYGMLKSGTEYRMPVVENAGEK

SEQ ID NO: 197340 - protein, 419 aa, unidentified
MSCLTDAAGADPSDRKGSTIMTNDQHSVGGVDSHKDTIHVAVITALGRPVDDREFPTTKAGYRRAVAWLIEHGPVRSVGIEGTSSYGVGIAAAVTGAGIRVVEVNRTRPAERRKQGKSDRLDAYRAARSVLSGEATTDPKSASIEPLRALTVARRSAVKSQQAAWRQIGALLVNAPSGFRDRYRDLPDAKLVAVLAGTRPDQVRDHAGADTLHALRSLARRHRALGHEIADLEQRMLTRATTANPALLAIKGVGAVVGSQLLITAGDNPARLRSSASFAALCGTAPIPVSSGRTDRHRLSRGGDRHANSALHHIVKNRMTNDERTRAYRDTHLEKGWTQKAVYRALKRAIAREVFAALTGHCEVPQYGDLRPARRAKNITLTTVATALGVWPARVGELELGRRRDDDFANRYRQWLNAA

SEQ ID NO: 197341 - protein, 348 aa, unidentified
MKNKSFVGIDISKKVIDVSIFREDTNIKMFPHEVFNNTRKGFGDMCSWLKKSRVVLSQALFGMEFTGCYSLDLEKFLTSKNYSFCMLSTRIVKHHPMGTIDKSDKNDSAKIADFLYRYDGTECAKPYKLPSKAMQQLKQLVNERKFLVEQRTNFMNRMQMFETKEDSAMYESYIKKLNHDIEKIDQEECELMSKEEDVLDTFQNLLTIPGIGFVNATNIIAITRNFTAFDTARQYARYVGVAPCCHTSGTSVKWRARPSAHCNGQVKADLSMAALRAVEYDVEMQIFYNRKLGGRKDSDTKRKALNAVKFKLIRRMFAIGKQKRKWEVLNTSDDRKNLHIEKSKASEL

SEQ ID NO: 197342 - protein, 394 aa, unidentified
MIESGWAGVDVGKEHHWVTLLDPDGAVLLSRKVANDEREIGQVVADCAAAARRVQWTVDLTTVEAALLLSVLWANDQPVRYLSGRAVNHAARVYRGEGKTDARDAKVIADQSRMRRDLPVLRPGDDLVAELRMLTGRRTDLVADRTRTINRLRQQLTAICPALERAADITAHRGWAILLARYQRPKAIRRAGIDRLTAMLAAAGVRNATTIAEAAVVAAKSQTVRLPGEDVAAELVAALAKEVMDLDTRIKQADTAIEDRFRRHRLADVIISMPGFGYRLGAELLAAIGDPDLITSADHLAAYAGLAPVANDSGKRTGRLHTPSRYNRRLRRAMYMAALTSVRCHPESRAYYDRKRAEGKRPIQAVICLARRRTNVLWALMRDNRAWQPELPTD

SEQ ID NO: 197343 - protein, 403 aa, unidentified
MNNVAGIDVSKGKSMVSVLRPFGEVVAKPFSIGHTGSELKELADYLKSLDGETRVVMEHTGRYYEPVARFLHDEGVFVSAVNPKLIKDYGNNTLRKVKTDKADSRKIARYGIDNWAELRQHTPMDTIRMQLKTLNRQQSLYTKTKTMMKNNLIALLDQTYPGVNALFDSPVREDGSQKWVDFATTFWHVDCVRNMSLTAFAERYRKWCKRHGYNFSQSKAVEVHAGAQDLIAMLPRDALTKTMVRQAIDALNAISASMERLKAEMQALAAQLPEYPVVMTMHGVGDSLGPQLMAELGDVTRFTHRNAITAFAGVDPGADQSGTHEAKSTRVSKSGPPELRRALFLVMDCLLKTQPQDDPVYRFMDKKRAEGKPYLVYMTAGANKFLRIYYGRVKEYLASLEGN

SEQ ID NO: 197344 - protein, 336 aa, unidentified
MRFIGVDLHTTQITVCYLKTSDEYRFETYGLDEMKRFLAGLEEADKLAVEATGNTRWLVNLVKERVNRVVIVNPRDFEVVKQSVKKTDKRDALNLARFLAVDMLPEVRPKSEAAEQVQRMNETRTKFVRLKTSLLNKIHALAVSNGRKLKKESLSSERGLARVMDQEWTHGERLELEIIIEQIGSLKRSIKRIDIAIGDESRKLTGFENLITITGIGERSAGVLLSVIGEVEDFPDENKLASYFGIVPRVSNSNETVNHGRITKRGSKTGRTTLVQCTLVAIRYSSYLKKYYEQIKVRRGHGKAKIAAARKFLSIIYNTLKNDWVFTDFNNFELAE

SEQ ID NO: 197345 - protein, 342 aa, unidentified
MTGTQTIGIDTAKPVFFLHGESRAGRVVFCKKLAREQLLPFLANQPVSLIAIEAGCGAHHWARSFSKLGHEVRLIHPKFVRPFVKTNKNDWNDAAAICEAAQRPTMRFVAVKSLEQQDLLALHRVRARLVAQRTGLCNQIRGLLAEYGIVLPVTVPRLRRALPTVLEDAENGLTVRARRLIASLREELMELEERVKPYEEEIERASLDNETCRRLRGIPGIGPISATAIVATMGDPKVFKNGRHFAAFLGLVPRQHSSGGKSQLGRISRRGDVYVRRILVQGAHTVLRRVRYRTGPRAAWVRALLARRGKQVAAVALANKNARMAWRLISEGSSYDESRAAA

SEQ ID NO: 197346 - protein, 322 aa, unidentified
MKLYLGIDMGKSGFTAALCSEDQTFQIVHPEARNQIDGWQTIRDWVLKQSKEKPVGVHLGVESTGGYEKPMIEWFRSNTDFTITILNPVRVKKFAQSELTRTKNDLNDARLIARYLAIRKPEPTPVIVPEIEELKLMARHLEHLIRKQADEKTYLDSVTEATIRRQTQDIIQTYQKQIEKVQAQIHKHIDSHPNLRNQSNLLQSIPGIGEKTSAILLCECIPALTPKQQVAHAGLAPRHNQSGKMNGKTQLCKTGNKRLRTALYLPTLCAIRCNPIIREFYQRLIARGKVKMVAVGACMRKLIHIIVGVLKNQISFNPNYAL

SEQ ID NO: 197347 - protein, 389 aa, unidentified
MMIFVGIDIAKLNHFASAISSDGEILIEPFQFSNDADGFQLLISKLDSFDKDSLIIGLESTAHYGDNLVRYLVASFYKVCVLNPIKTSSMRKNNIRKTKTDKVDTYIICKTLMMQDHLRFVSFYDLDLMDLKALGRFRQKTLKQRTRLKIQLTSYLDEVFPELQYFFKSGLHQKSVYALLKEAPTPETIASMHMTHLAHLLKSTSHGHFDKETAQQLRVLAKKSVGASDSALSIQVTHTISQIELLDSQLERVEAEMTEIMKFDDSVIMTIPGIGYINGGMILGEIGDIHRFSNSNKLLAYAGLDPSVYQSGNFHATKTRMSKRGSKVLRYALINAAHNVVKNNSTFKAYYDAKMAEGRTHYNALGHCAGKLVRVIWKMMTDEVEFNLK

SEQ ID NO: 197348 - protein, 416 aa, unidentified
MNAVGIDVSSRKSTVAVLRPLGEVVCLPFDVSHDADGLASLAEKLKALDGETRVVMEHTGRYYEAVAKALHEAGFFVCAVNPLLIKEYGANSLRRVKTDKADAIKIARYALDNWADLRDFTPMDAIRYDLKTLNRQFQLASKQRTASANNLIALLEQSFPGIRKCFDSPVRSDGTQKWVDFAHSFWHVDCVRKQPFPAFCERYRKWCKLHTYFFKLRNAEKVYALAKRAVVLTPKAKVVKVLVQEAANQLSSISRSVEVYRAEMDRLAAMLPEYPVVMAMYGVGKSYGPQLMAEIGDVRRFERKQALVAFAGIDPMPNQSGDKNVRSNKSSKRGSPYLRKTLFNVIRTYLQCAPQDEPVFQFLNRKQAEGKPFYVYMLAAANKFLRRYYAKLRDYFASLDTLQSVDPIPTTLKASL

SEQ ID NO: 197349 - protein, 407 aa, unidentified
MKCKKTKKVTYVNEKTLIVAVDIGKSVHHGYLRAPYGKEVKPFPFYNNGHSFKDFWSKICCFQREQGLEKIVIGFESSGPYAEPLCEFFRRRPVTLVQTNPMHTKRLKELTGNSPNKTDKKDPRVIADIISLGHALTVVVPEGAAAELRRLTHAREGELKTQTADKNRLQHLVFIIFPEFLNILDVSTKSALYLIKHHPAPEDILSLGFESLCAILRKVSRGQLGTEQAQELFKAARTSVGIIQGKRSILIEINHLVDRIECEQRFIESLEEMMNTHLREIPYSQNILSIHGIGTVTTAGIIGEVGDFSKFTTSNEMTKLAGFDLFEVSSGRHKGQRHISKRGRSVMRKLLYYAAVNTVKSHGIMHDKYQQMLNKGKPKTKALIAIARKLLKIIYAIARDKTIRVCH

SEQ ID NO: 197350 - protein, 420 aa, unidentified
MKETSEATLERFIGLDVHKRYVVACAINARKEVLLGPVRVEFSRWRQWIQNNIQATDAVVLEATTNAWPLYDQLAPLAGRVLVAHAGKIAGIASARVKTDGRAALHLAKLLAADMIPEVWVPPVAVRELRGLLAHRRRLIKMRTMTRNRLHSLVHRYSLEPPRGALFAAKHRAWWEELELSPTERLRVRQDLAILDQLEPLLEEVRGELERLSTEEPWAREVPYLLQLPGFGLIVSMTVLAAIGDITRFPHAKQLVGYAGLGASVKESGESHRRGRITKEGRRDLRFILVEAARIAVLKHPYWKGQYGRLERRMGTNKAIVAIARKLLVVVWHVLTERAADRQAEAEMVAFKLMCWSWELDDVQRGGLTTRQFVRYHLLQLQLGAELTHVYRGGRNRGIAPVEEVLALRPELQAELAPAE

SEQ ID NO: 197351 - protein, 370 aa, unidentified
MKKDTLFVGLDTDKKHIDVAVAEPLPRGEVRYWGRTANTPASVDRMVKKLGHGRRELVACYEAGPCGYGLYRQLTGKRGVRCLVVAPSMTPQRPGDRVKTNRRDALKLARLLRAEELTEVWVPDAAHEAMRDLVRARSSVVSALTRCRQHISGFLLRQGIPYAGKPWTNKHRAWLGTLKFEHAAHRLLLAELLLALDQAQARRDRLTDHIRELVPTWSLAWLVEALQALRGYDLINAAVMVAELGDPRRFAKPRQLMGFVGLNVSEASSGETVRRGRLTKTGNKRARKALIEAAWTYTRPAATTSKPAAARLPAAVQQIADKARHRLSRRYRHLLRRGKLKQVAIAAVARESLGFIWAIAHAAAPLPVQS

SEQ ID NO: 197352 - protein, 432 aa, unidentified
MNPISVSSPPSKVAAWVGLDWADQQHLVCLYDVGTGQTELSCLEQKPEALQSWLGQLRQRFGGQPVAVVLEQARGAVIYALLSADFLVLYPVNPQSLASYRKAYVTSGAKSDSADAVLLMEMVRNSPQRFRSWTPDDADTRSLQLLTQNRRQLVDQCTAFTNQLTGWLKSYYPQALELAGELDSLQACDFLEKWPTLEALQQARPAQIRKLYLDYGKPRPESLEQRLEQIRRARPLTTDLAAVLSGTMMVRALIELIRPLRATLERFDQQIATLFRKHPDRLLFESFPGAGAVLAPRLVAAFGTDRDRFESAQQIQQLSGIAPVTEQSGKQRWVHWRWACSKFLRQSFHEFADHSRKWCDWAKALYQRLKRTGKGHHAALRMLAFKWIRILFHCWKTRTCYDEQVYLKSLEKRNPTLWAETQALPPRKKKAA

SEQ ID NO: 197353 - protein, 385 aa, unidentified
MDNVCGLDIHKDSVFACILKTNGEKIQTQFGVTTPELDRLRDLLVEAGVSRVAMESTSVYWKPLWRILSMDFHMVLVNPYLIKQLPGRKTDVRDAEWIATLLAKELVRESFVPDETQSALRQYERRLHRLNRQIVHAESQMDNQMQACNIRLSNHVSDIGGKSYRKVVQALIEGETRPEELLKLIHGRTVNRCGSDTLIAALTGFVTGVDRDMLRFYMEECLLYERQREECLKSMEDICQEHYKEQKELLETIPGVSAQSAMCVLSEAGHDMATFPSASALVGWAGLRPRNQMSAGKIKGRKITHGNRFLRIVLVQCAWAAARCQGTRFALKYEGLKRRMPAQKALVAIARKLLVVIWNVLAKREKYRRNLYETASEDERKGKRH

SEQ ID NO: 197354 - protein, 405 aa, unidentified
MSVYGASESSCAVVVAVDVGKNTVALSVTDAGRRRLFGPVDFAMTGPGLADVVDRVRGVLPGGASVRVGVEAAGHYHRPLVAPSAWPAGWEVVELNPAHVSEQRRVQGRRRVKTDAIDLEAITDLVLAGRGVPVTARAAVIGELAAWSAHRTRRVATRTATKNQLLGQLDRCFPGLTLALPDVLGTKVGRLVAEHFADPHRLASLGAARFVRFAQTRGLQVRRTVAERLVGAARNALPTLDAAVARQVLAADLALLGDLDAQVCSAETALARLLPNSPFATLTSVPGWGTVRAGNYGAAIGDPARWPGHRQVYRASGLSPAQYESAGRRRDGAISREGSVELRRALIDLGNGLWLNDTASRGYAAELRARGKPDKVIACAMANRANRIAFALVRDQTCYDPTRWT

SEQ ID NO: 197355 - protein, 311 aa, unidentified
MTHPTIGVDISKDMLDAHRLADGARRRFANTTAGYKALIAWIGCTGARVIFEPTGPYHRAFERALANAGLSLVKVNPRHARRFAEATGQLAKTDRLDAALLARMGALLELPARPVRSDLLTELSELHHAREALVKDRTAAKNRAKILTLPLLTRQNRQRLQQIERQITAIDAEITARLDADPELAHRFAILTSIPGLSRLSAFALLVEMPELGTLEAKQAASLAGLAPVTRQSGRWTGRASIRGGRASLRRHLYMPALVAARFNPDLKAKYTQLIEAGKPAKVALTAIMRKLIILANALLKTGRTWSPKLA

SEQ ID NO: 197356 - protein, 345 aa, unidentified
MQQITTIGLDLAKQVFQVHGAEADGSPVVSRKLRRADVLGFFKKLSPCLVGMEACGGAHFWAREIAKLGHDVRLIPPSYVKPFVKRGKTDAADAEAICEAVIRKTMRFVPVKSADQQAAAMVLKTRELLVRQRTQVINALRAHLSELGIIAGTGPAKTATLIEIVRDEEDARLPPAARFALSELANQIEWTRKRIDKLERAIVIEAKRDEDMRRLVTIPGVGVIIAASIKALVPDPNGFKSGRHFAAWLGLTPRSHSSGGRERLGRISKMGNSTLRSLLILGATSVLKHARHRTDASTWLAAILARRPFKVVATALANKMARIIWALLTKGGTYKSGFAIGTASA

SEQ ID NO: 197357 - protein, 340 aa, unidentified
MYYLGIDHHKRYSQVAVVDEKGTVRTNGKIANEKKAFALLKEYYKEPCRAVIEAGRNWGMMYDLLEGLDIKTVVGHPLKIRAIADAKIKSDSIDAKTLAHLLRADLIPQVHVPSKEVREQKNLLRHRLWLVRLQTMTKNRIHQLIDRNHVKRPKVKNIFGVAGRTFLKGLSLSPIDQKLLKDHLELLDNLHQHIRKTEVWIGKELKDNPYISILLSLPGFGKVLSALAALEIDNINRFRTPAKFASYSALIPSTFASGGKVYHGDLIPGGNRWLKYVFIEASWVSIRTSGYCRFYFEKMKDRKNSNVAIVALARRLSEIVYRCLKEKRAYEERPYMPYTR

SEQ ID NO: 197358 - protein, 321 aa, unidentified
MDRTIEFSQVVDRCCGLDVHKRVIVATVDGTGIERETREFESTTRSLTELKEWLLDLGVTHVAMESTGVYWKPVINILEPGGFTLLVVNARHIRYVPGHKTDKKDSAWICKLLRAGLLKGSFIPDRAQRDLRDLTRYRRKKVQEVAAEKNRILKVLEDANLKLSSVFSDVNGVTCTRLIDEILAGRTDPDYLTSLCTHRRIQSTKEQIHDAVEGCFTEHHKFMLKTIRRSISSLEQEISILDAEIDRRCMSVQAEIERLCTIPGIGKTGAKELIAEIGVNMEVFPTAANLASWSGVSPGNNESAGKKKVRMSTMATRRLKQ

SEQ ID NO: 197359 - protein, 412 aa, unidentified
MSATWTDGRRSVDAQRDKAWVGIDVGKTHHWACVVDAEGKTLLSVKVANDEAEIMALLAKMGSLAVQLICAVDIIGAPSALLLALLARAGQSVCYASGRVVAAMSAAYAGEGKTDAKDSYVIAETARLRRDLSVIDAGTDLVRNLAVLTGHRADLIADRVRMINRLRDLMTSVFPGLERAFDYSSHKGALVLLTGYATPDRIRRIGQTRLTGWLRSRNVRGSADVAARAITAARAQTIVLPGQDLTAGIITELANGILALDDRLKVLDAQIEVTFAEHPHAVIIQSMPGFGPFLGASLLVGANDLRAFPSAGHLAAAAGLVPVPNDSGRRTGNLHRPLRYSRPLRHVFYLSAQTSMMRAGPNRDYYLKKRAQGATHSQAVISLARRRIDVLWALLRENRTWTAAPPRLPQAA

SEQ ID NO: 197360 - protein, 388 aa, unidentified
MRKTITYVGLDVHKDTIVVSLADGGIRGSRGEVREYGKIANTAAAMERLARKLAVNGNELKFCYEAGPCGYGIQRQLSGLGHQCDVVAPSLIPRKPGERIKTDRRDANKLAKLHRAGELTPVWVPDQTHEAIRDLVRARHAAAGELRRARQRLSSFLLRNGHAYHRKSWTALHRRWLASVKFDQPMQHLVLEDTIAAVEAAEERRRRLEAQIEAALPTWSLAPVVGALQALRGVALVGAATLAAELGDVTRFDNPRQLMAYIGLVPSEHSSGRTRRQGGITKAGNSTARRMLIEAAWSYRLPARISRELLLKQEALAKPIRDIGWKAQDRLCRRYRTLARLGKLSTVICTAIARELAGFVWAIAREVGRSASSGKSAGKLAVHRVAVS

SEQ ID NO: 197361 - protein, 389 aa, unidentified
MLLDHLSDGLTAIRTQFGAIFVSLELSRSNWLITSLSPGKGEKMSKYRITAGDVVGLMKLFADLRRKAEAKTGESCPIITIQEAGLDGFWLHRVLQQNGIESHVVDAASIAMPRRRRHAKTDRLDGETLLRALLAYKRGEPRVCAMVVAPSPEEEDRRRICRERRSLIAERITHVNRIKGLLFAQGISDYEPLRRDRRARLEALRTGDGRELPAHLKAQIGRELDRTELLLEQIEAVETERDILLAAASEPASKEAAPDVVTMLLALKGMGANFAAVLWSEAFYRQFSNRRQVAAYAGLAATPWQSGGIRHEQGVSKAGNPRLRTTMIQLAWLWIRHQPQSALTRWFKQRSPQGRKRAIVALARKLLVALWKYVTQGVVIEGAVMKPAA

SEQ ID NO: 197362 - protein, 339 aa, unidentified
MKLYTGIDLHSTNSYLAIVDETGKRVFKEKSPNDMPAILRSLEPYRNEIIGTVVESTYNWYWLVDGLMAEGFAVHLANPSAIQKYSGLKYADDKHDAFWLAEMLRLDILPTGYIYPKDERPIRDLLRKRGHLVSLRSSLMISLQNIITRNCGMKMKTNDIKRLRENRVYPLLADNEDLALAGQVSKDSIDFLTRQIRGIETFLEKKLEIKDAYKGLVMLPGIGKILGLTIMLETGPVTRFEKVGNYASYCRAVSSQWTSNGKSKGKGNKKNGNKYLSWAFSEAAEFARRYDDKARAYYNRKLRKTNFMVAHAALAHKLARAAYYVMRDQVEFIPEKIFT

SEQ ID NO: 197363 - protein, 379 aa, unidentified
MKKNSKKATKQIASAQLSVLAEREAQTLCVGIDLGDRVSTYCVRELKTEEVLAEGTVGTSPGAMLDQFRCLKPQRMVMETGTHARWIAELLRMMGHEVIVGNARKLKLITENTQKSDTVDPRLLSKLGCVSVDWLHPVYQRKQETHNDLLLVRARQALVETRTGLINHVRGVVKSYGCRVKACDAGSFVAAADAVLPEALRPALSGVLETLEGLNEQIYGYECRIEHLCQTKYREETKRLQQVSGVGPITALAYRLTIEDAERFEQSREVGPYLGLTPGKKQSGKRDPQMGITKAGDVMLRKLLVNCAQHILGPKGQDSDLRRWGLKLTAAGQAAGKKGARKRAAAGVARKLAVLLHRLWVGGEKYEPLRRSQTLAAVA

SEQ ID NO: 197364 - protein, 430 aa, unidentified
MINRLQVGIDFGQKRADFCLLFPDGRPLEMHQSFANSCSGYSLAKQLLLDALDSYSFDGIDLSGEATGYYWLPFFLQLDADPDLAAHDLNLFLLNPRWVKWFKKCFAQDHKCDEKDPFYIAERTRTRRPDVVWSPLDSLPLRFYTRLRFHLVQSLAREKCYFSSFLFLKASSYRCLKPFSDVFGVTSRIVLTQQPSLDELAELPVEDLAMHLHELSGHHLRDPFDNARKLKRVAQESFLLNETLALPVQRILDLTLEHIRFLEGQVEQVNTWIATELESYPVIAQLATIPGIGPVFSSGIGAEIGDTQRFLQGSKWDQKRKRYRPRNLRDAEDAVAKIAGLWWPRSASGDFEAEDRRMAKTGNRYLRYYLIQAADHMRKRIPEYTAYYARKFKESAKHHHKRAMVMTARKSVGLVVGLLHRNEPYRSKGR

SEQ ID NO: 197365 - protein, 346 aa, unidentified
MEQIIRIGMDTSKNLFELHGVNAAGEAVLRRRLRRRQMIEFFKELPPTSVGIEACAGAHHWARLLGSYGHAMKLIPAQHAKRYVKRGKNDAADAKALCEAMSRPDMLFVPVKTTDQQAALMLIRIRERLLRNRTQLANAIRGFAAEFGLIAPKGLCRIEGLLERIAADETLPALARKLFARQGREYARLQAELDATEAMLMAWHRADERSRRLTKIPGVGPIAACMLVMKTPAPEAFRSGRDFAAWSGLTPKDHSTAGRRRLGGITRAGDEALRSVLITGATAVIQTARRNRGKPSAWLAGIIASKKPKVAAVALANKNARIAWKLMVSGEQYRARTAAPAAARAA

SEQ ID NO: 197366 - protein, 341 aa, unidentified
MRYIGLDVHKDNITACVLTSTGKPKFEKNFIKDSESWNLTELMEYGDKDGFCVMMESGTYAYQPFRFFSDRDVETHVVHAQALKLITQSDKKTDKKDAYTIARMLRLWKRKEIDLPMAFMPTREQCELKDICRYREEISRKISDETRRIKSHMSRNCEYLPESFDNFQTQRARNYVRFNFSSDITLMNRMAELERLFRERDSVQKEVESRLPESREVEILMTIPGVARQTAVQIMSMIVDIDRFDDAEKLCAYFGLVPRVRDSGGKEHHGHMTKTGDKMMRVIMERVTQSHVQNCDSSVTQYYKRKCSEMGTKKALITASRKMLSVIFAMLKSGSDFRLAA

SEQ ID NO: 197367 - protein, 359 aa, unidentified
MVTVVGIDTHKNTHTLVAVDGLGRRLQELTVEARPSGHEKVLAWLSSQGAVKVAVEDCRHLSRALEVDLLLAGHQVVRVHTRLMAGMRRGARERGKSDPIDAEAVARVALREEDLPTAVLAGPERDLKLLADHRRSMVVRRSALQSKLRWFLHEIDPAIEVPSRALRRYCVLDSLQEQLAGRDGVVVEIAGDMIAEIVSLTRRINELEARLGRLVRTEYPHLLAVDGLGVLGAATIVGETAGAVRFHSKDAFARFNGTAPIPVWSGNHERFRLNRGGNRTINTALHMAAVTQQRLGYEGADYVAKQLARGKTHTEAMRLLRRRISDRVFAALRADEKAKESPIDLRNRPGPEPVFEVAA

SEQ ID NO: 197368 - protein, 311 aa, unidentified
MTDDTIGIDISKATLDIHRLSDGKTMSFSNCPAGFKALSRFCAKTAVARVVYEATGAYHGRLERALGAHLPLVKVNPLQARRFAQAQGVRAKTDAVDAKMLAEMGNAFALVPDEPASGIQHDLKELRAFRSGLIKDRTSIINRLKTQTLSITSRQSKARLAQVDKQIAEISAELDRLISSCDTLAHSMKILRSIPGIGAVCAATILIEMPEIGRLDRKQVASLTGLAPMARQSGQWRGKSFIQGGRKIVRDALYMPALVAMRHNPDLKAKYQALIKAGKPPKVALTALMRKLIELANALIKADRNWVKRRA

SEQ ID NO: 197369 - protein, 358 aa, unidentified
MDDIETSNIVEAEPSYSEAGASLNKTVPSTAEAYQAWAGIDVSKATLDVCLLLEVGKPAFGKFSNDKQGHSQLFKWAVRLSKGSRVHFCMEATGSYGNAFALYLADVKQMVSVVNPSFIHYWTLSRSQGNKTDKADARAIAEYCRIEKPSLWRAAAPEVRELTALVRHYDNLKEHATQLTNRLGGPDVTSLVKESLTKLLKQVNDEISIVQKLIDEHINNSPTLKRDRDLLITIPGIAATTAAKILAELPDVTQFASAASAAKYAGMTPSQFESGTSVRKKTRMFKAGNRRLKTALYMPAMTAIRYNEPVKQIFQRLKHKGHTGISALGAAMRKLLMIAVGVLRTQKPFRADYATAKP

SEQ ID NO: 197370 - protein, 390 aa, unidentified
MQALYPRPDEHAAVRTDLKAIFVSLELSRSTWVITSLSPGGGEKMSKHAVPSGDIPALLARLSQLKEKARARTGQVFPIIVIQEAGLDGFWIHRVLQQEGIESHVVDPASIATSRRRRRAKTDKIDGEALVRALLAYKRGEPRGCAMVQAPTPHEEDRRRISREREVLTAERVQHVNRIKGLLFAQGIGDYEPLHRNRRERLEELITGDGRPLPECLKAQIRRELDRLELLIEQIKAVEAERDAVLAQAQASSGVPAPAAQLLALRGIGPEAAATLWTEGLFRTFSNRKQVAAYAGLAPTPWQSGSVHRDQGVSKAGNPRLRTIMIQIAWLWLRHQPQSALALWYRARIKRTGGRLGKTMIVALARKLLVALWKYATAGVLIEGAVLKPA

SEQ ID NO: 197371 - protein, 347 aa, unidentified
MRFYTKQHNYYCGIDLHARTMYVCILDSTGQVVLHKNMKADPNALAKAIKPFQDDLCIAVECMFAWYWVADFCEDNNLPFVLGHALYMKAIHEGKAKNDKIDSYKIASLLRGGTFPMAYVYPRAMRSTRDLLRRRNHLMRKRAELLAHIHNTNSQYNLPEIGKNLRYKRNRTLVENRFDDKSVQRSVDMDVELINFYDEKLSSVEWYIKKHAKVHDYHSYMLLQSVPGIGTIISLVILYEIDDINRFPRVQDFASYARLVKCKAESGGKSYGTSGAKIGNAHLKWAFSEAAVLFLRCNPKGKAYVEKLAKRHGKGKALSILAHKIGRAVYFILKRKEPFNADLFLPA

SEQ ID NO: 197372 - protein, 330 aa, unidentified
MSAVAANQDARAAIVGIDVAKAKVDVALKQPAGKWKTKAVANNPDGFIELRAWLSKHSVTIAHVCMEATGIYWERLAEHLADHGFAVSVVNPAQIKAFGGALGVRTKTDAVDAKLIAEFCATANPRLWQPASKSVRGLRALVGRREALVELRTQELNRLEVAATDAVRQSIEQVIGHLDQQIQQIERQIAKDVDDDPTLREQRDLLASIPGVGPATTAMFLSHYGGELRFEKTRQAVAFAGLDTKKHESGSSVHGKPRLSKRGHSGIRRALYMPALVAMSRTQWGKAFSKRLLEAGKPKKLILGALMRKIVAIAYGVLKSGKPFSPALHT

SEQ ID NO: 197373 - protein, 421 aa, unidentified
MNTNWSDQPYFAALDWASDHHDVVVLDRQGATVLEFRFAHTPAGWTEFELKMKPYAGAPFTLETSSGPAVDQLLQRGWKLYPLAPTAAATYRQRKAPSGTKSDRHDTWSMADALRTDGQTWRPLLPQDEATATLRLLCRDEIGLIEQRTLLINQLQAALREYYPAVLAAFDDWGQPYAWAFVQRFSSPAELQQAGRRAWEKFLHQHKLWRPATREERLEIFGTATALPASPAVVKAKRLLARSLAKLLQTLQDQIDEYRRQITEAFRSHPDHDIFGGLPGAKEILAPRLLAELGSVREEYPDADSLMCQAGTSPVEYQSGKIKKCRLRRACNKTLRFTVHLWANASRQTCDWARAYYEHKRAQGQNHASALRCLGKRWLKILWRMWQNRERYDETKHCKNLERHGSPIWPAIKPAASANGE

SEQ ID NO: 197374 - protein, 340 aa, unidentified
MTIVMGLDQHRAQITAEWLDSETGEISRGRVAPADREGLRRFLARFGHQELEVALEATTGWRFVVEELRRIAAGVHLAESAQTSALRGRKKRPKTDRADARHLRELLMLGKLPECWIAPDHVLDLRARVRLRHAIVDERGEWQQRIRAVLYHHGIANRSELNLMRRPAREWLARLALPATAREQVTVALELSDALDAKLPAIDRQLRAYARSQTGCKALQAHYGIGPLTAVALLAELGDCRRFSSSREAVRYSGLDITVYQSDQRRAPGHLSRQGPPVLRWALYEAAQHATRPTSPDHAYYQQTAQRLGHNRACLAIARKLLKRSYHTLRSLGDQALEPA

SEQ ID NO: 197375 - protein, 388 aa, unidentified
MNLGADKSEPLTAIHTDLGAIFVSLELSRSSWLITSLSPGGGEKMSKHSVPGGDFAGLMERFAQLQEKARLRTGQSFRIIVVQEAGLDGFWIHRALQNEGIESHVVDAASIATSRRRRRAKTDKIDGETLVRALLAYKRGEPRVCAMVKAPTPGEEDRRHLCRERKALTAERVRHVNRIKGLLFSQGISGYQPLRRDRRQRLEELQTGDGRAFPQHLKALVNRELDRLELLLKQIKTVEAARDALLAVGQTAKPAPAAMLLDIRGIGPEFAAVLWSEGLFRHFENRRQIAAYAGLAPTPWQSGAVDREQGVSKAGNPRLRTTLIQLAWLWLRNQPRSALSVWFHERVSRNGGRLRKTTIVALARKLLVALWKYVTAGVVIEGVTMKVA

SEQ ID NO: 197376 - protein, 411 aa, unidentified
MTDKIAGIDVHKRVLMVVVGTPSTLTEESFGMRRFGTTSSELRHLVTWLQQCGVRDVVMESTAQYWKPVWLNLEPHFRLFLAQAWSNRAPRGKKADFKDAKRLVRRHCAGELTLSFVPDSEQRAMRSLTRRRAQLTRDRVRILNQVESLLEETRIKLSSVVSDLFGGSGVRILKALAEGLSDPVKLAALADSRVQRTPEELADALTGTVSPIQQRILKQHLAMLDLIDEQMQELLTEIGASMSEHAEAIKRLCAIPGIRVLAAQQILAEAGPRASNFDSAPQFTSWVGVCPGQNESAGENHSSRCAKGNIYLRRVLCQVAQAAVRTKNSHWESVFRRLVPRLGYTKAIWAVARRIAVVIWKVLHDGVDYIEQGALSTPGALKRRVQRLKKELRSLGYSDDLKPLSCVAARQ

SEQ ID NO: 197377 - protein, 331 aa, unidentified
MSFKAYVGIDVSKLKFDVYIKEKESYKQFKNDKSGFIAMVKWLQKLIEPGLVETFICFEHTGLYSLPLALFLSEEQIPFAMVAPLEIKRSLGITRGKNDIVDAKRIADFAYRFHDKINVTKLPASDLNKIHLLLTLRDRLSRNLGSYVASKNETERALGEQYLPELFTSYDTIIATIKAEIKRLENEIKEIIEQNEKLATSMQLLTSIKGIGVLTAAYLIVYTDNFTKFDNWRKFACYSGIAPFDYQSGTSVRGRTKVNSIANKQMKRMLYLAAICAISFDTELRDYYHRKQAEGKPKMLVINVIKNKLIARAFAVIKRGTPFVNTKKYAA

SEQ ID NO: 197378 - protein, 411 aa, unidentified
MNNTLFVGIDISKRSNVATFMNCEGKVVGRLTFSNNGSGADQLVAKILSYYEKEDFEAIRIGMENTSVYSKNLVWFLYEHEALNEHKLSIIPLNAIMVANYKKSFLDMDKDDITDSFAIADFIRIRPGLLPFKLDDRQEALKIMTRSRYNYVQALSRMKSQFLTRLFLSFSEMEAGKPFYSIFSKTSLSLLEEEFTLDELAEKPIPELVEFLQEKGGGKFQNPEEIAKVLKKAASSSYRVPAMVRESLNRTMASDMEIMRILENEIHNCDKNIEKLMKSVPAILVSIPGIGPVLAAGIMSEIGDISRFQKQESLGKMAGFKWKRNQSGKKESEDKAAVLSGNKKLRYYLVEAANRVRIHDPVFEAYYRKKYAESKTHAHKRALILTARKLVRVIFYLLKENKLYKPDVGIS

SEQ ID NO: 197379 - protein, 429 aa, unidentified
MEHALNNPTMTSPANALPAQPPGGLTAGLDWAKDDHVACVVDASGTVRDRFGVPHTAAGLTGLVRRLRSLGCQEVAIERPDGPVVDALLTAELTVVVISPSQVKNLRSRYGNAGNKDDRFDAYVLADTLRTDRARLRALLPDSPQTTALRTTVRARKDLVNTRVAVTNQLRSHLQNAYPAGALLFTDLDSAISLAFLTRFTHQGLADWLSPKRLGSWLRATGYSGRTSAEDLHTRLLAAPRGPVGDAGLVLSRITLAYVATLKSLREQISDLERHISEQLTAHPDQQTFTSLPRSGSVRAARLLAEIGDSRARFPTPESLACLAGVAPSTRASGKSHQVGFRWACNKQLRDAVCDFAGDSRRANPWAEDLYQRARSRGHDHAHSVRILARAWLYVIWHCWQNETAYDPAQHNALQRLLADRDMINKEAA

SEQ ID NO: 197380 - protein, 349 aa, unidentified
MLIIGCDYHPGVQQIAWVDTETGECEGRRLTHSGGEAEQFYRELKKKGVSVRVGMEATGHSRWFERLLAELNFELWVGDAAQIRAKQVRKQKNDRRDAEHLLKLMVENHFPRIWVPTPENRDVRQLVLHRHRLVGMRTRVMNQLQAIAMNEGVRRKRGLWSKQGRAQLESLCLPTWTSRRRQELLELLDRLDPSIDQLSQAIEQEAERLPEVQRLQSHPGVGPITALAFVLIIGTPDRFPCGKQVASYLGLIPCEDSSADSRRLGHISKQGNGLLRFLLGQAAQSVARSDEQWRHQYAHLAMRRNQAIAKVAMARKLAVRLFWMWRRGWDYRQLRSLVRTWGSSNIPMV

SEQ ID NO: 197381 - protein, 361 aa, unidentified
MKLYGAIDLHSNNNVTVLIDEQDQVVYQKRLVNDLSLISEQLSPYASSLEGIVVESTYNWYWLVDGLMGKGHRVHLANTAAIQQYNGLKYTDDDSDARWLAHMVRLGVLPQGYIYPQQERAVRDLLRKRSQLVRQKTANLLSIQNLYTRNTGLSLSANRIKKLRSEEVDDLFTLGDVALAVKANLSVMRCLEAEIKTLEQVVKERVKLKPAFRYLLSVSGIGQTLALTIMLETGDIRRFPSVGNFASYCRCVGSEKLSNGKRKGKGNTKNGNKYLSWAFVEAATFAIRFEPLIGRFLSEKEGQDSWSGRHQGGGPQTVAGLLLRHARSSAVRCRAGLFLGRVFQLGRGSELEKGLAQNHKI

SEQ ID NO: 197382 - protein, 532 aa, unidentified
MVQLSPIRSVVPSSVRRTVVNSLEALGRLIPIKRVPSRVRNLAVAWSGEENGNMSRQPEKPSKANAKQRSNRKTRKKRMGLDNRPVLEPNAAGIDIGAREMFVAVPPGRNSHPVQVFDTFTEDLHRLANWLQACGVTTVAMESTGVYWIPLYDILEERGLKPCLVNARHMKNVPGRRTDWHECQWLQYLHSVGLLRGAFRPEADVCAMRVLVRHRSELVQAASQHVQHMHKALTQMNVQIQHVISDITGRTGLAIVEAILAGQRDPAELAKLRDSRIRATEDTIRKSLVGNWRREHLFTLKQSLQLYRTYQQQMVECDQEIEKLLGNFEPRVDPTEKPLPPDRKRNRSEQKRRKKAGHPETGFDLRTEVYRLYGVDVTQIPGVETIALPLFSEVGRDLSRFPTPAHFASWLGLCPDNDISGGRVLWTGTRKVKNRAGQMFRLAAHSLHRNLTPLGNYLRRMKAKLGPTAATTATAHKIALIFYTMITKQVEYDDTIWATRDADRQKRFEAKLKRQAQLLGYQLVPIDKRPAA

SEQ ID NO: 197383 - protein, 326 aa, unidentified
MNWWRSWGIVSLTTDHQAFRSMTAWVRKVIKSRGQMDEALFCMETTGSYDLPLCHWLHKNGLNVWRESALQIHCSKGFQRGKSDKEDSEVIAQYAARHQSRYTAFVPDAEAIADLKELICYRDSLVERRKECKVRLANKKETLVNRNSKAWKCIERLSKAEIKRLDKVIGECDEEIRNLMKEDEEMEKNYQHLTSIVGIGLINGAALIAYTGNFKKITTPNKMSCYCGCFTFYEDSGTSVHRKSPYRNACCKMLKGYLRMAAKSAMLANTELRKYSERLREKGKPYAVILNNVANKLLHIMFSLVKHDYDYEYNHEMVRRMEREIA

SEQ ID NO: 197384 - protein, 407 aa, unidentified
MNKNRNKSKQKADTPPERVIGLDNHPDSFTAAFLIGREANEAKVLRIQDKVRQDRFEAWLQEHTTERDVIVMEASANSFAAVEAAKSHGRRAVVLESAQCAKLGESYCASDRSDAVKLGRLYISGLPKKVWVPDQTTRLRREVFYAHRQAVTDSTRCRQRIRGFLNQHRIRLEKGFKVTSQSGLAQILALRQWEPTQQLLLIQYHGALREAHLRRQQLREVMAQEILKEPSILRLIRLCGLRHITAFALAAFIGDITRFANPKKLVTYIGVNPSVCDSGETKGPTHLRNNGCAPLRALMIQAAQAILRTPGAAFAKWGHQLAIRRGRNRAAVGVARKLVTAVWYCLSGQFTMLEEVPAMVTYKLGLLISALGSLRDRNFAGESPEVYKTRMLETIQHSHTLVFRSGV

SEQ ID NO: 197385 - protein, 344 aa, unidentified
MKQIIRIGIDTSKHIFQLHGVDAAEQVVLRKRLGRKQMVEFFAKLPPTVIGMEACGASHYWARVLEQFGHEVRLIAPQHVKPYVLRNKNDGRDAEGVCEAMSRPRMRFVPVKRAEQQAALMLAGVREQMVARRTQLSNTIRGYAAEFGITAAKGLDKIGPLLAQIAQDESVPTIARDLFALQGRAYAQLQVELKAIEARLRAWHRSNADSRRLAKIPGVGPIGAAALVMKTPDPHAFPSGRHFAAWLGLTPKDHSTAGKTRLGKITRAGDERLRSVLVAGATAVIQQAKHGRGHPSPWVVALLKRKPPKLAAVALANKIARIAWKLMATGESYDGARLPSALAA

SEQ ID NO: 197386 - protein, 312 aa, unidentified
MSNALGVDVSKATLQACADPAQPSRSFANTAQGVAQLLAWAAAQPPSRVVFEASGGYEQRLLQALLAAGWPACRLNAQQVHHFAKALGQRAKSDPVDAKVLQRYGQLLAPPAHVPPAPEQAHLLQLVKRRSQLVAMRTREINRSHHAQDALADSHQRLQQALNEELKRIEALITRCLQQAAPLARRVQLLASAPGIARVTASSLCAGLPELGRYGRRAISALSGLAPLARDSGAHHGQRHIAGGRALPRVALYQATLSALRFNPPIKALYQRLKAKGKPSKVAMTACMRHLLCMLNAMVRDDRPWAYPAAMS

SEQ ID NO: 197387 - protein, 427 aa, unidentified
MKKEDSRLEEFRQLRNEIRGSEKHLLVGIDIGKEKQNAFLGTATGKTLYKRLIFENNKEGFEKLLTHTEAAKVQNNLSQVVFGMEPTANYHKPLGEYLITRGHEVVLVSGNAVAKNRQLLDGRWDKHDGKDAANVADLISQGKCQYYEYPCREVRDLRGLLSLKRKLKKQAQGLWLRIRNNLVAQYFPEMDRYYGSCAQDNLAIVKNCLSPSVIAGMEYNEFFKTVVSRKKGLRQHKHLYKIWQLAGDSICCEAGDAAVCEAEVLVEQLKQTRKAIEQVDKEVLKLCCLFSEYEFLMSIPGFGPDISAKVLAYIGDEYRFDKASQVVKMAGLDLNANRSGKTTDRAVPVISKKGKADLRYALYQAAMVASSRNQHFIKYFTEKIRGREKEKGIKTKMRVKLSAKLLIIAWTLMKNKEPFNPDYLTVA

SEQ ID NO: 197388 - protein, 325 aa, unidentified
MSSHEIVGIDVAARKLVAVGETVALAAAYENTPAGRRALVAALRHSPRPVRVVLEATGIYFLDLACELAAAGIAVMVVNPKATHHFAEAILQRRKTDPVDAAMLREFGRRMDFVPWQPPRQELLAFRALTREVQALSKAVTAAKNRLHAVTATRLAPKALVGALERQIAHNQALIDELVAAALAQTESDPELARLVARTDSAPGFAAKAAVVVVGELAVLPPMTARQWVAQAGLDVREERSGTSLARRPRLSKRGNKRLREALFYPALTAARCCPAATAFVARLVAGGKTRLQAIAALMRKLLHGLHAMWRNDEDFDADKLFAPA

SEQ ID NO: 197389 - protein, 418 aa, unidentified
MTVDSVAQKRSMIKLDTLVIGIDLAKHTHVARARFSDGSYTRPVKVPNTRDGFLALTEQIGAWKLRSDSSVIVGVESTGSYGINLVRWLSEYGCRVVLVPSLHVCREKELLDNGRGTSDDKDALIIADLVARGQYLGFVALSGICIELRPLVNLRARLVREQTGWLNALHQTMDVLFPEFETVFADLGRPSARLVLGRFGTVAAARAHSPTAMRRLLARDGAVRLSLAKLKRLKAAADESIGPPAVSAGQERSLREMLKTMATIEERIAGLEAEIVRLLAQLPEAEYLMSVKGVGAMTAAVILAETGGLAQYSCAAAVLKLAGLNLYQNSSGQYQSGRRISKRGRSQLRRALYMVAVQHARRGWPLEPYYAALVARGKPKTVALTAVCCRLVRLLFALVRDGRCYSVCPPEGAHPQAA

SEQ ID NO: 197390 - protein, 346 aa, unidentified
MKITTIGVDLAKEVFQIHGVDARGKAVLRKQLRRSEMVKFFAKLEPCLIGMEACGSAHYWARKLSEFGHTVKLMAPQFVKPYVKTNKNDMVDAEAICEAVGRPNMRFVPIKNIEQQAILSVHRARQGFVKARTAQANQIRGLLSEFGIVVPKGIKSVVGHMPDILEDAENGLPGTMRKLLERLNDNLKEMDRQVTELELQIKLWHRDSEASRKLEAIPGIGPITASAIVATVGNAAEFKNGRQLAAWLGLVPRQHSSGGRQTLLGISKRGDTYLRTLLIHGARAVIRFAENKAEPDGWLRKLMARRNKNVAAVALANKNARIVWALLAKDRMFRSDYTPAAKAAGA

SEQ ID NO: 197391 - protein, 347 aa, unidentified
MNFYTRQHKYYCGIDLHAKSMYLCIITQEGDIVLQRNIRTHSEVFLKAIERYREDIVVAVECIFTWYWIADLCAQENIPFVLGHALYMKAIHGGKAKNDKIDAHKIAVLLRGGMIPMAYVYPQQMRSTRDLLRRRMHLTRKRAELLGHIQNTNYQYNLPDIEKKIAYKANREGVAEHFPDESVRKSIELDLKLLDHYDQLLPRLEHEISLIAKAHDADSYFRIRSIPGIGRILGLVILYEIHDIRRFPTVQDFVSYCRLVKSAKESAGKRLGSSGKKIGNVHLKWAFSEAAVLFLRKDPEARRYRDKLQKKHGKAKSMTILAHKLARATYYILKRKEVFHIETFFEK

SEQ ID NO: 197392 - protein, 369 aa, unidentified
MGNRSMFVGLDVHKDTIDVSIAEGDRHGEVRHYGVIASDLEPLDKVVRSLRGPNRTLHFVYEAGPCGFGIFRHLTKRGEHCIVVSPSMIPKRSGDRVKTDRRDSQMLARLHRAGELRPIYVPDDTDEAMRDLVRAREDAVAVGIQAKYRLKAFLLRQGRRYPGREGWTLAYRRWLTDLSFPRAAQHIALQEYRDTVDETERRQARLTEQLRELAPTWRWAPVVAALQALRGVKFLTAVGLIAELGDLRRFHHPRELMAYLGLVPSEHSSGPSVRRGAITKAGNPHVRRLLAEAAWAYQGIPRIGRQHAYRQEALPKVVCDIAWTAQLRLTGRFRRLVARGKAKPKVATAIARELTGFIWAIAREVSPAE

SEQ ID NO: 197393 - protein, 394 aa, unidentified
MLDHPSSGPAAIQTQFGAIFVSLELSRSNWVVTSLSPGKGERMSRRGLDAGKFSDLQALFAELQRKGAEQTGTVYPIITIQEAGLDGFWLHRMLEADGVESHVVDAASIPAPRRRRRAKTDKLDGEALLRALLAFKRGEPRVCSMVAVPSVEEEDRRRLCREREALINERVRHTNRIRGLLCAQGIFDYKPLRRDRCKRLEELRTADGRPLPTHVKTQISRELARLALLIEQIKAVEAEQEAMLEAEMAAAKRTADPAKAEPPGRVAMLLAVKGISTQAASILWTEGLSRQFANRRQLAAYAGLAATPWRSGAIVHEQGLSKAGNPRLRTLMVQLAWLWRRHQPDSELSKWFSKRDKRDRKGAIVALARKLLVALWKYVAHGVVIEGAVMKPAA

SEQ ID NO: 197394 - protein, 444 aa, unidentified
MKSKPEVIPDDEHELVIERVCAIDVAKASGKVCVRLPGRSGRRTSKVWDVTATTGAVSELAADLVGERIERVTVESTSDYWRIWFYLMEAAGLEVQLVNARDVRNVPGRPKTDKLDAVWLAKLTEKGLLRPSFVPPAAVRQLRDYTRLRVDLTRERARYWQRMEKLLEDALIKVSSAVSRLDSLSVRDMIEALIAGERDPRRLADLARGKMRPKRAALVDALTGQFDEHHGELARMLLNQIDALGTQIGTLTTRIDELLADLTYTVADDAILDGGSAPVVTGLDAAERLAEITGIGAVSAQVVVAEIGLDMSRFPTGAHLVSWAKLSPRTIQSGATQRGGKTGKGNPYLKGALGEAAAVAARTDTFLGERYRRIVKRRGKLKALVAVARSILVIVWNLLARPGARYQDLGPDYHVRRVDTDRRVRSHLAQLASLGYRVTVEPAA

SEQ ID NO: 197395 - protein, 294 aa, unidentified
MKYIGLDLHKKSIFATVLGEDGKILSKVKIGPTTRDICYYLKSQGKRDELSVAMEASYNWPYYYRAVEEAADNIVLAHPLKTRIIGEAKIKTDKIDSGVLAYMLKADMLPAAYVPSRDTMENKMILRARISLVRIRTQIKNKIHAIVARNRDSYCGLENLADIFGRTGKKILRDTKICPTDHKILTGYLDLMDEVNKKIKDTESQIDKRSLKDRDIELLKTIPGIGTFTAFLVKSEIDDISRFPSKGKLSSYAGLIPSTHSSGERLHHGRIVKQGNKFLRWALTEATQTSIRCS

SEQ ID NO: 197396 - protein, 452 aa, unidentified
MNQERLQQKRQLIEGKIVIGIDPAKCKHQAAIVQPDGMQLGKSFSFPVNTDGFQTLLWKNVAKVLPNCNPQNTIFALETSCNLWQTLAFYLHSVCNFTVVLVSPLSTHYERPILNLDFSRTDPKDAFLVACLARRGAYTLYEQFSPHSNALHALSIAYDKLRKDLARNRARLRAHVERIFPEFLLVFEPDTQSALYLLKKYLFPDEFLALDIDAETQVIQKISRRQLGAPALVRLNALAHRSIGIAKCDKERLADRLALNAWIAQIEVLESQMTPIRSELIRLAEQIPSFAIITSLSGVGDTLAALFLAEVRDLARYRHFKQLEKLAGANLRLSESGRYVGSRRISHIGNKRLLWILYKMTEETSSRVPEIRCKYLTRQLKRRKHRKNVIASMPQLLQLIVALNRDNRLYEKREETVNTMHELERRYAALKAQSSSQSVKRITLRKAQVAVP

SEQ ID NO: 197397 - protein, 365 aa, unidentified
MQKISTMRTSGKRIFKGQLTIGLDLGDRSSSYCVLDEAGQVILEQKVPTTAEAVEQTFKRMPRSRIAMETGTHSPWVSRVLTELGHEVIVAHAQKVRLIVKSRRKDDRMDARTLARLARIDPELLSPVQHRSAQAQLHLTEVRARAGLVSARTALINAARGLVKSCGERLRKCGAFQVSREIGSGLSAGLREALEPLLREVESLNERIKEYDRRIEKMAKEKYPETALLKQVKGVGDLIATTYVLTIEDPHRFRKSRDAGCFVGLQPGRRNSGESEPQMHISKEGDEYLRKLLVQGAHYILGPFGEDSDLRRWGQKLAARGGKNGKKRAVVAVARKLAVLLHRLWVSGEVYEPLRNSQKAMTVAA

SEQ ID NO: 197398 - protein, 474 aa, unidentified
MARTRSRPASPPVPGDAGAEVTDEPVQVISRAAAIDVAKGSGMVCLRLPHESRAGRRTQKVWEVTATFASVVALMDHLVCQGVGRLVLESTSDYWRIWYYLAEAAGLEVWLVNARDVKHLPGRSKTDRLDCVWLCKLSEWGMLRRSFVPPEPVRDLRALTRLRANLTHDRVRHQNRIEKILEDALLKVSSVISDLMGGSGRRFLQALADAERSPAALAALGDYRLHASKAELREALTGRFRDIHGFEIGMLLELIDDLPAKITELDERIEAQLENVPGLGGVCTSCGQPGPDGPCTGCGEPVLGVIARLDEITGIGRGAAQVIVAELGTDMTQFPTPGHAASWAKLTPRAIQSGATSKAGRTGKGDPYLRGATGVAVMTAARTGTFLGARYRRHARRRGKQKAIVAGSRTIIEIAWRVIADPGFRYIELGPDYHDQLDPGRKTRDKIRQLEKLNPGMTVTLTPRPERGGQSPAA

SEQ ID NO: 197399 - protein, 424 aa, unidentified
MTRYIGLDVHKRFVEYCILDAAGKKLSRGQVACVRTTLEAFAKKVLQRTDHVALEASTNTWSVVAILRPHVVRLVVSNPLRTKAIAEAKIKTDKVDAEVLGQLLRCDYLPSVWQPDHDTEQLRRLTTQHATLMTERSRIKNRIQSRIARLLLVPPCKILWTKAGHLWLRELSLPVDERLSLDGDLRMLAATEHELAAIDQLTAVTAHRDVQIQLLMTLPGVNFVGAVGLLAALGDINRFKDGDHAAAYLGLTPSTHQSGKRCFHGHITKAGSSHTRWLLTQGVQHLARHPGPLGVFFRRLAKRRNRNVAIVATARKLVTIAFLMLKHQEPYRYAKPELMRTKFRDLHYQATGKRLPIQRTQRPRGLAEIYRSIGLPDTAAPAELPKGERAMLEKRKLTGWVDEIHQPGHSIRSTRSAPKKKSVG

SEQ ID NO: 197400 - protein, 315 aa, unidentified
MAMPSSEHSTIIGVDVAKAELVIYEDSSGQLSTIANNKTAIKQWIKALHGKVSIAIEATNVYHLLFTDMVHEAGHTLYLMDGYALSHYRKGIGSRAKTDPIDARVLARYLKNEGANLTPWIPPSTLYRDLVSLFRRRAMLVQTRTALRLSWEGEPLLKSLLKSQLTSMKRLEDLIENMIKKLLDQAGLMPLVKQCMKVEGIGFLTAARLVATYQRGEFKSADAFIAFLGMDLRVAQSGKKKERSTLTKRGDPEVRRLLHNAAMSAGRTAAWKTFYEDKQSRGFKKTQVLVMLARKLARVVFALIRSGEEYRPKAT

SEQ ID NO: 197401 - protein, 343 aa, unidentified
MEYYVGLDVSLKQTSICVVDQSGSVVREGVVDSDPEAISVYVRSKAPGAVRIGLETGPTSTWLWTELKRLGLPVICIDARHAKAVLKMQINKSDRNDAIGIARIMQTGWFKEVHVKDIDSHTVRALLASRALLVKIKRDLENHVRGLLKNLGLVIGRAKFNVFAVRVEELIEGRPELIAAIRPLLEARNAVEQQVSELDRKVMKLARGDAQVRRFMTVPGVGPITGLAFKATIDDPARFARSRSVGAYVGLTCRRHASGEVDWSGRISKCGDAMLRSYLFEAAGVLLTRVPKWSAVKAWGVKLVKRNGLRKAKVAVARKLAVILHRMWIDGTEFNWSKKEIAA

SEQ ID NO: 197402 - protein, 341 aa, unidentified
MQITTIGLDLAKNVFQVHGIDAAENVVVRKQLRRRQMLEFFKALPPCLIGMEACATSHYWARELTKLGHEVRLMPAKDVKAYIKRNKNDAADAEAICEAVRRPTMRFVQIKSAEQQGQLMQHRARDLLMRQRTQVINAMRAHLAELGIPARQGREGLKELMAIVADDDDTRVPVNARASLMVLAAQLQALQTLIGSIEKRIIKQHRVNEASQRLESIPGIGVIGATAIAATVADPKVFRSGRDFAAWIGLVPREASTGGKQKLGPISKQGDRYLRRILVVGACAVLKLARQKPEKYPWLTQLLARRPFKVVAVALANKMARMAWALLANGGTYRAPRIAAA

SEQ ID NO: 197403 - protein, 406 aa, unidentified
MDAFEWFVGIDWATRAHQVCLLRAGGGTPEQREFPHTFEGLAGLSKWLEEHGTTPAAIAVAIEVPHGAVVETLLERGIVVYSLNPKQLDRFRDRHTVAGAKDDRRDAYVLADALRTDLHLFKRAAVPDATRLQLRELSRCYDDIVTDLNRVVNRLREQVHRFAPQLLDLCPSANEPWFWDLVELGADPIKGRTLRKNRIQSVLTEHRKRSVSVDEVVAAVRTPALKIASGALAAALEHIWLLLPQVRLLHGQAAVCKHRMAELTAEVGRPAEVLMSHPGIATIIAATLLAEASEVLADGDLARLRVLAGTAPVTRRSGKACVALMRRACNSRVRHAVRQWAFTAARTDPYAHDLYRSMRERGLHHERALRGVGDRLLACLVASLRDDSLYDPNLRARHLSLEPTAA

SEQ ID NO: 197404 - protein, 349 aa, unidentified
MTMLADQVDAVIGVDTHKASHTAAVVTPTGGATAHLMVSSDALGAKRVLAFARRHAPARRVWAIEGTGSFGAGLTTYLLERGEWVVEIDRPKRPARRNGAKSDELDAVRAAREALSREHLAQPRRRGSREALRVLLVTREGAVVERTRAVSALQALVVNAPEQLRDRLRHLGTRELVLRCARLRSSPTRSLEQRATIAALRSTARRALVCEAEATDLESALEDIVTQERPELLAEPGVGVITAARILNAWSHAGRIRSEAAFAMLAGVAPIPASSGQTVRHRLNRSGDRQLNRALHTIVLSRLQHHADTRAYAERRQAEGRSDREIRRCLKRFVARGLFRLLESSAQAA

SEQ ID NO: 197405 - protein, 349 aa, unidentified
MADKLIVGIDVSKDWLDLCASNAAGVERIANTREAVAAWLERVAPGLIACEPTGGYERTLIAAARERGIAYLRVHPNDVIAFRKSRGIKAKTDAIDARLILAFVCDKAARAELRTSLIGDDRLQALAARRRQLVDALQAERCRLDAAALPAVRASLEAVIAVLRQSLETLEAELAEAIAAHPPTAELAKLLQTIFGIGPVAAITLIADLPELGLLSAKQIAALVGLAPHTKRSGKTRYRETTGHGRPGVRRVLFNAARAAVRHPSLFKDFYDRLVTDNRRPGKVALTAVMRKILITANAVARDRQPWRGRPAAGTPCRPHAEQTARRAGRVKTAAAPRAVARSASLEAA

SEQ ID NO: 197406 - protein, 379 aa, unidentified
MKNVRFVGLDVHAQTIAVAVAETGGEVRSVGVVPNSAESVSRLIKKLGKPEQLRVCYEAGPTGYVLYWQLTKLGVRCEVVAPTLIPVKPGDRVKTDRRDAEKLARCYRAGDLTAVWVPDAAHEALRDLVRAREAAKSDQLRARNRLSKFLLRQGRRAPEGTQAWTGKYLKWVKEQVRFEQPAQEATLLDYLHEVEHAGERIERLEKSIDTAIETVPEKMRAVIAGLQSLRGIAKISAVSIVAELGEISRFAKPTQLMGYSGAVSSENSSGERTQRGSISKAGNAHLRRIVVEAAWSYRYRPNIGAGLAARQKDSSEEIKEIAWKAQHRLHSRYSKLLAKGKTKQKVVTAVGRELLGFIWAIGVHVEQAVSASAPKRRAA

SEQ ID NO: 197407 - protein, 344 aa, unidentified
MTYYAGLDVSLRSTNICVVDEQGELIAEGKTDAEVADIVAFLDEFDVEISEVGLEAGTLTQYLTYGLQFAGYKVVCMEARQVKSALSAMRNKTDKHDARGIAQLLRSGWYSRVHIKSMQSHRVRALLTSRRAVLAKCIDLENEVRGIFKVFGIKLPPRLGHGSFDPKVRPLIEADDMLSQSLLPMLDARLVLYRTFLELNNRTRHLANDDPICQRLMTAPGVGFITALTFKAGVDDPTRFKRSRTVAAHFGLTPRRFQSGELDLEGHISRCGDADVRSTLYTAANSMLTRSSKWSPLKAWGMKLAKTRGHRRAVIAVARKLAVILHRMWIDDTRFRWSTEAARS

SEQ ID NO: 197408 - protein, 426 aa, unidentified
MKNTQNEKISQIKITTLVVGVDVAKETHYARAFDYRGIELSKLLKFSNTAEGFQKLEEWMQNISQQHNKTDIIVGFEPTGHYWFNLGDYLKDKGHKLAIVNPFHVKRTKELDDNSPTKNDRKDPKTIARLVKDGCYREVYIPEDVYQELREAISERDRLVQRMSSISNQVTRWLDIHFPEFNTIFKDWRRKAALQILRNYPTPEKIIAAGAFKIEGTWRESMQRTAGLKRAQELVKTAEASIGRKTGLTAAEASLQNLLNEHDLYRQQYEQLEQMMLKLLQQVPNAEKLLEIKGVGLITAATFVGEVGDIRRFQDPRQIQKLAGFNLVENSSGKHKGKTRISRRGRRKLRHGLFMAMITILATNQEFRQLHKKNISRENNPLNKMQSIIALCGKLIRVFYALLRTGNNYSAEKMLGDIELGMKAAA

SEQ ID NO: 197409 - protein, 387 aa, unidentified
MPQLNDLSRSLVALDQDSTIIAVVELSQSSWLVAGVLPGIERQPQKKLEPSAERLLGLLHRWRDEAVRAGKKITRIALAFEAGRDGFWLARWLNARGVEAHVIHPSSVAVSREHRRAKTDRLDTELLKRGFLGWLRGERGHCTMARVPTIAEEDAKRPNRERECLVGERTRIVNRIKSTLARLGIRNFKPTLRKAAERLATVHTPEGMPLPPNTLAELQRDMARLGFVVSQIREIEQARQKRLEQETETGPHAMVRQVARVIGIGIETADMLVHEVLSRPMRDRKAVARYAGLTGSPDESGARRREQGLARAGNARVRRGMIQLAWRFLRFQKQSALALWYQARTADSRAGTRKTMIVALARKLLIALWRFVTTGETLEGVILRPAG

SEQ ID NO: 197410 - protein, 346 aa, unidentified
MRFYTKQHKFFCGVDLHAKSMYLCILNKEGEIVLHRNIKTDPDVFLKTIVPYREDIVVAVECIFTWYWIADLCTEENIPFVLGHALYMKAIHGGKAKNDKVDSHKIAVLLRGGMMPMAYVYPSEMRSTRDLLRRRNHLARKRAELLAHVQNTNHQYNLPDTGKIAYKSKRKGVAERFPDISVQKSIELDLSLLNHYDQLLLHLEHELSLIAKVHDADSYFRLRSIPGIGRILGLVILYEIHDIDRFPRVQDFVSYCRLVKSAKESAGKKLGTSGKKIGNAHLKWAFSEAAVLFLRRNPEAVKYREKLARKHGKAKSLSILAHKLARAVYHMLKRKEVFHPQMFFAK

SEQ ID NO: 197411 - protein, 409 aa, unidentified
MYYVGIDIAKSFHVVTIIDENEVKVTQKPIRVTNCIDGFSKFITKLETISSNTNDFIIGLEATGIYGENLWEFLNSHGFNVKLLNPFQTTRYREQHTMKKVKNDNIDSWIIALFLKDGKYSSGYVTDDEYQSLRTLYRNRASIQSDMKEVKKRILTQVTVTFPELENFIDIFSITGLALLDKYPTAHHYKHSSVDRILKIFRHIQGNSFNNQKAIEVLELAKNSIYSGKAKDARAIAIKSSIRLLKIYQEELSILEEEILALLEKNGIKEEKDVPTNSLIENLKTIPGVSSKTIAAVISECGDLSRFKTPIKFIGYLGLFPTENSSGNSKSTGHLSKRGSSLAKHALYMASVSCLLHNKELKQYYDTKKSQGKSKQEGIIAVARKLATIIYSIFRYNTPYDPSRVFSKS

SEQ ID NO: 197412 - protein, 351 aa, unidentified
MMIIGVDYHPSFQTIAFLMEETGECGEQELNHSDGQAEKFYRDLKQRGICVRVGMEATGYSRWFERLLAELGFEVWMGDPAEIKAKRVKKQKFDREDARLLRRLMLENNFPQIWVPGPENRDLRQLLWHRHRLVQMRTRIMNQLQALAMNEGYRWKKKLFSEQGRAQLEKLALAPWASRRRQELLELLDRMNPTIEELTAAVEQEARKRPDVLRLMTHPGVGPLTALAFVLIIGTWERFPRGKQIGNYVGMIPSEDSSAGKQRLGHISKQGNSLLRFLLVEAAQAAARIHPDGRRRYMHLAMRRHKSIAKVAMGRRLAVRLYWMWRNGCEYSQSVEFGSYAGQLGTGHGVK

SEQ ID NO: 197413 - protein, 345 aa, unidentified
MKITTVGVDLAKNVLQVHGVDERGKAVLRRQLKRKDVLSFFANLEPCLIGMEACGSAHYWARKLSKFGHTVRLMAPQFVKPYVKTNKNDRNDAEAICEAVGRPNMRFVAVKTAEMQTVLALHRARQGFVKSRTAQANQIRGLLAEFGIVIPKGIGNITKHLPEILEDGENELSGMMRQLLERLGEELQALGKQVGEIERQITLWHRDNEQSRKLEAIAGIGSISASAFVASVGDAKNFKNARQVPAWLGMVPRHEGTGGKATLGRISKRGDVYLRTLLIHGARAAITAFERKPDHANTWLKKLLARRNKNVAAVALAAKNARIAWALLAHDRSYQHDYVATGKAA

SEQ ID NO: 197414 - protein, 411 aa, unidentified
MRLFTGDDWAEDHHDVEVMDEAGKVLAKRRLPEGVAGMTQLHALIGRFLPEDADDAEVVIGIETDRGPWVAALIAAGYTVFPVNPLQASRYRGRHGVSGAKSDGGDAHMLADMVRTDSHQLRPAAGDSPEGQGIKVVARAHKTLIWDRTRAVQRLRHQLREYFPAALEAFEDLDAPEVLELLGKAADPARAAKLTRAQVAAALKRARRRDIAGKTGAILAALRGEHLGQPAALTAAYAATARSLIAVITTLNAQVKILEEQVREHFGRHPDAEIYQSQPGLAAILGARVPGEFGDDPRRYVTAKNRKNYGGTSPVTRASGKKKVVAARFIHNDRLVDALMSWAFSSLNASPGARAFYDGQRAKGLQHSDALRRLANRLVGILHGCLKTRTLYDEATAWGHRENLPQSSVAA

SEQ ID NO: 197415 - protein, 363 aa, unidentified
MLIIGIDYHPSFQQIAFMDQETGEYDERRLNHSDGEAERFYRELKQRRVSVRVGMEATGYSRWFERLLAELGFEVWIGDAAEISRQRVRKQKTDREDARLLLRLLRENRFPRIWVPSPENRDLRQLLWHRHRLVQMRTRIMNQLQAVAMNEGYRWKKKLFSEQGRTQLEKLSLAPWASRRRKELLELLDQLDPKIAELTTAVEQEAQQRPEVLRLMTHPGVGSITGLVYVLVIGTPDRFPCGKQIGSYTGLIPSEDSSAGRQRLGHLSKQGNALLRYLLGEAAQAAARCNPHWRRRYVYLAMRRHQNIAKAAMARKLAVRLYWMWRNGWNYSQFVEFGSHAGKLATGHGLKKSVVHLIGHPAP

SEQ ID NO: 197416 - protein, 343 aa, unidentified
MDQYIGLDVSLKDTAISIREDGKRVWRGKCPSDPKLLAELIRKHAPHAKRVVFETGPLSTWFYHALTTEGAPAICIEARHAQKVLNETLNKTDANDADGLAQLAEAGFYKAVRVKSFDAMTTRALVAARNQLLNISTQLSNQIRGLMKTFGLIIPKGAGRVFDANVRELLECQASLAQIILPLLDAWHDIRKRAAILDRQLIASARQSSATKLLMTIPGIGAITAVSFVAAIEDPENFRTSRSVGAWLGLTTRRYQSGDVDYDGHISRRGDNRLRGLLYEAATAILTRTSARNESRLKQWGAKLRERLGFKRAAVAVARKLAVIMHAMLKTGEVFNSQAGTHA

SEQ ID NO: 197417 - protein, 377 aa, unidentified
MKTELYVGLDVHKDSISTATAQEGRNGEVRDTGAISNDLHALEKFIARLRKAHGADVVIRACYEAGPCGFGIARRFQQLGIDCMVVAPSMTPTRSGDRIKTDKRDARKLARLLRAGELTAVYIPEPTDEAIRDLCRARTDAVDDRRRARHRLKAFLLRHGYRYHGKSAWTAAHQRYLRELVLPHPAMKVILEEYLMAIEAAHERIERCEQAMRDLLPGWRLEPAVQALMAMKGFQVVAGMILVSELGEIHRFAHPRQVMAYLGLVPTENTSDDRRRQGGITKCGNAHARWLLIESAQHYVTPPKVSQELSKRQEGQPREVRAISWRAQNRLHSRFMRLAARRLQRNKALVAIARELCGFVWELLRTQPCYQARPACF

SEQ ID NO: 197418 - protein, 344 aa, unidentified
MKDTNILAIDLAKNVFQVCKRDPKGKVLFNRELSRAKLKEMLVKQPRSLVAMEACGSAQYWARLARALGHEVKIISARTVKPFQTKQKTDRNDALAIAIAASQEHIHGARVQSAEEQALQSLERARHLAKTHQIAQSNQVRGLLGEFGIIVPPSLSQLRKHIPFILEDAENSLPQSFRETLNYLWQHLLQQIEHVAILERQLEGAVKYDTTCQKLMKLEGVGPIGALGLAVRLGQGENFTNGREASANIGLTPKQHSSGGKERIGHISKRHADKRLRSTLFQGALSVITQVSKRPARTSKERWLQALVERRGKKIAAIAFANKTVRTAYAILKNDTEYQPISLA

SEQ ID NO: 197419 - protein, 350 aa, unidentified
MLIIGCDYHPSFQQIAYVDTDTGELGERRLAHPEEANQFYGELKQRNVAVRVGMEASGHARWFERLLRQLEFEVWIGDAAEIRTKRVRKQKTDRQDAQLLLRLMMEDRFPRIWVADAENRDLRQLLWHRHRLVQMRTRVMNQLHVVALNEGLQRKKALWRPAGRNELESLVLAPWASRRRQDLLELLDQLAPKIAELTQALEREVEKRPVTRRLMTHPGVGPLTALAFELVIGTPERFRCGKQIASYVGLIPEEKSSGNRRRLGHITKQGNALLRFLLVEAAQVTVRSQPQWRSRFFHLAMRRGRKIAKVAMARKLAVHLYWMWRQGLDYGQWQKLGSHAGEPGHLYGGK

SEQ ID NO: 197420 - protein, 424 aa, unidentified
MNLTQNDRLKQVTSDTLIVGVDVGSQTHFCRAFDWRGFELSRRVFKFSNTGMGFLTFLRWTEELMNKTEMKKVIVGCEPTGCYWLTFQKFLQDHAIQLVTVNPFTVNRSMELDDNSPEKSDLKDPKTIALLVKDGRYSTSYLPSGVYAEIREASVCRDQIMKQHVRLSNQIQGWLQKFFPEYFECYAEWDSTSGLMLLKEAPLPQDILKIGAGGINQIWRDAKVRAAGIKRAQTLVEAAQNSVGLEAGEAARLEIWVLVNDYILKAEQLKRLDEYLEEKVKEVPNVEKLLAIKGVGMSTVIGFIAEVGDIGRFTDPKQIQKFAGLEIVKKSSGKKKGQPRISKRGRRKLRRTMYESARALMTWNPAFQDVFLYYRNRTRKSLGSMQAKIAVACKAIRVFYVVLQTGCDFDEEKFRRDIIRPEAA

SEQ ID NO: 197421 - protein, 403 aa, unidentified
MAKEPLSVFGGVDTHKDVHVAAVVDERGKILDTASFGANAKGYAALNVWLEGFGTLVRVGVEGTGSYGSGLTRHLQANDVDVVEVNRPNRQMRHHRGKSDPVDAEAAARSALNGEATAVPKDHDDIVESIRVLRVAFCSARDTRTRLALQIRDLIVTAPCALRESMPAKTADRVAHCAKFRPTDVRDPHEATRMALKTLSRRYENLSNEMAELTKLLDELTKEANPALRAAKGVGVDVASILLIAAGSNCQRLRSESAFASMCGVSPIQASSGQTNRHRLNRSGNRQANNALWRIAVVRMTTDEETKAYLSRRTAEGKTKRDVTRCLKRHIAREAFWLLQHPAYAEVGPRLRTMRTSAHISLQTVSDDLGVWPTKISRIERGLEHNEEFVTIYQAWLNQHRAA

SEQ ID NO: 197422 - protein, 389 aa, unidentified
MKIFVGIDIAKLNHFAAAISSDGEILIEPFKFTNDADGFQLLVSKLESFDKNSIIIGLESTAHYGDNLVRYLVAEFYQVCVLNPIKTCQMRKNNVRKTKTDKVDTFVIAKTLMMQDDLRFITFFDLDMMDLKALGRFRQKTIKQRTRLKIQLTTYVDQVFPEIQYFFKSGLHQNAVYALLKEAPSPKEIASMHMTHLANLLKVNSHGHFTKEQAKELRVLAQKSVGANDSAISIQITQTIQQIELLDSQLDKIEAEMTDIMKFNDSVIITIPGIGYINGGMILGEIGDIHRFSNPNKLLAFAGLDPSVYQSGNFQAKTTRMSKRGSRVLRYALVNAAWNVVRNNATFKAYYDAKRAEGRSHYNALGHCAGKLVRVIWKMLTDEVEFNLE

SEQ ID NO: 197423 - protein, 344 aa, unidentified
MDHFAGLDVSVKETSVCIVDDTGRIVREVKVASEPEALLQVLSKPTYHFKRIGLEAGPLSQWLFSSLAETGLPVICVETRHMRAVLKAQINKTDRNDARGIAQMMRVGLYRPVHVKTLRSQKLRMLLTHRKLLQSKAIAIDNDLRGTLRNFGLKVGVVGKVRFEARIRELVENLPDLAALVEPLLIVRRTLREQFCILHRRLLAIVRDDEVCRRLMTTPGVGPVVSLTYRATVDVPARFRKSKSVGAVFGLTCAKYQSGEVDWSGKISRCGDEMMRVMLYEAAQSMMRSKKWSWLKAWAMQIARRCGMKKAIVALARRLAVIMHRIWVDGTEFRWTREQAAAAA

SEQ ID NO: 197424 - protein, 347 aa, unidentified
MKFYTQTHQHYCGIDLHARCLYVCILDQQGNILIHKNIKANPQALMKLVTPYQDGLVIGVECMFSWYWVADLCQEQGIAFILGHALYMKAIHGGKAKNDKIDSHKIAVLMRGGMFPEAYVYPREMRGTRDLMRRRMHLMRKRSELLAHIHNTNSQYNLPPISKNLRYAFNRDGIPERFSDSSVQKSIELDLTLIGFYDKQLSKVEWFIQQHANDCDQHSLILLRTVPGIGKILSLVILYEIHTIERFPTVQNFASYCRLIKCKKESAGKSYGTSGKKIGNAYLKWAFGEAAVLFLRKNPEAQAWLERMANKHNKARALTILAHKLGRAVYFMLQRKTVFDQQRFLNG

SEQ ID NO: 197425 - protein, 394 aa, unidentified
MLAANERPEAPTAIRIDLGAIFVSLELSRSKWLITSVSPGGGEKMSKHSVAAEDIAGLLARFSELKRKAQGRTGRCFPIIVIQEAGLDGFWIHRVLQAEGIESHVVDPASIATSRRRRRAKTDKIDGEALVRALLAYKRGEPRVCAMLRVPTPEEEDRRRISRERKALTNERVRHVNRIKGLLFSQGISGYQPLRQDRRKRLEELRTGDGRPLPAHLKAQVGRELDRLELLIGQIKAVEAERDVMLAAAPVGSAHGADCEQGAPAMLLALKGIGQEFAAVLWTEGLSRHFDNRRQVAAYAGLAPTPWQSGQIDHDQGVSKSGNPRLRTTLIQLAWLWLRHQPDSALSLWFKQRVKQNDGRLKKQTIVALARKLCVALWKYVNAGVVIEGAVMTA

SEQ ID NO: 197426 - protein, 412 aa, unidentified
MNLVYERCAGLDVHKRNVVVCAIIPDVKGQRQKELRTFSSMTPDLLRMRAWLKDLRITHVAMESTASYWKPIFNVLEGHLEVLVVNAQHLKAVPGRKTDSKDAEWIADLLQHGLLRPSFVPPAPQREVRELTRYRISLTEERSRLINRLQKTLEDANIKLASVASDVMGRSARDMLTALLAGEADPALLAELARGRMRAKRDLLAQALQGDLKSHHRFLIAEQLADIDALDEAIGHMSLEIAERLRPYEHQLRRLETIPGIKRRLAEVILAEIGPDMSRFPDARHLASWAGMCPGNNESGGKRLSGRTRKGSPWLRSALVEAAHAAIHCKDSYLSAQYQRLVIRRGGKKATIAVGHTLLVIIYHILSEDKDYEELGGNYFDEWDRQAVQKRLVRRLEKLGYEVKLEPTSPAA

SEQ ID NO: 197427 - protein, 357 aa, unidentified
MRQNDIDNHLNKIRGESKMDIKTLGIDLAKNIFQLHGVNAVGQIELKKTIKRAQLLEFIAKLPVCEIVMEACGGANYWARKFKEYGHEVKLISPQFVKPFVKGNKNDYKDAEAIVEASSRPSMRYVTPKTIEQQDMQSLLRSRQGCIQMRTSLSNQLRGLLGEYGLALSIGHASLRRGLPELFDREQENGLSIFFKELLESQYNMLLMIQQQIDEFDIKINNLARTKDVCKRVQQVEGIGPITAVALAATIGNPNDFKNGRHFSAFIGLVPKQHSSGGKDRLLGISKRGDGYLRTLLIHGARSVLMRADKKSDYKSRWVTDLKERRGSNRACVALANKNARTVLALLQKNEDYKKAA

SEQ ID NO: 197428 - protein, 399 aa, unidentified
MGQQLWAGVDAGKSDHYCVVIDADGQRLLSQRVTNDEAVLVELIDEVMALADGGEVTWAIDLNGGGAALLITLLFGRDQRLLYIPGRTVYHASGGYRGDGKTDAKDAVVIADQARMRRDLQPLRVGDDIAVELRILTGRRTDLVADRTRAINRLRAQLLEYFPALERAFDYSTSKAALILLSGYQTPDGLRRTGTTRLAAWLRKRKARNADAVAATALEAAHAQHTMVPGQDLGATMVARLAEEVMALDTEIGDTDAMIEERFRRHRHAEIILSLPGFGVTLGAEFLAATGGDMSLFDSADRLAGVSGLAPVPRDSGRISGNLKRPRRYDRRLLRACYLSAQIAIRTDFASRTYYDRKRAEGKTHTQAVLALARRRLNVLWAMLRDHAAYQPTTTAAAA

SEQ ID NO: 197429 - protein, 339 aa, unidentified
MYFIGSDLHKKTITLHVVDQARRTVASRRFSCSDTGAMIAWISQFIPFRIVVEATASYEWFVQLVEPFADRVVLAHPGRLRVIAESTRKSDKLDAKTLAEFLAMDMIPEAHRPTPRQREHRILVRQRYYLRKRTTSVKNRIRRILSNYNADFLDLFSVSARKEGRHLPACLSTSDRFAMVQLWEEYDLYLRQTDEVEQAIRRLAATAPIAEAQARTLLHTIPGVGEVTVEAFISEVGDVRRFGSQKKVAAYAGLSPGQRESAGKVKELNITHRGSRLLRWALTQAAWQLVRRDLRWRTIFEGMARRRGKKKAIIAIARRLLCMMVSIVQQGRQYHLTAA

SEQ ID NO: 197430 - protein, 403 aa, unidentified
MVFVGIDWAEAHHDICVVNEEGQVLAKRRVPEGLDGVGKLHALIAEHAEDPSRVVVGIEIDRGLLVGSLVAAGYQIYAINPLASSRYRDRHATSGAKSDPGDARVLADLVRTDRHKYRPLAGDSNLAEAVQILARAHQGLVWTRQRQVNQLRNALREFYPGALSAFDDLDAADAVAILQQAPTPIRGRALSQAKIISALRHGGRERNLEAKAAQIQAQLRLPQLEAPALLVEAYGHSVAATVAVIKQLNLQIAALEQELAASFEKHPDAEIYLSLPGLGVVLGARAMAEFGDDRTRFLHPKARKSYAGTAPITKASGTRKIVLARVARNRRLADACYQWAFSALTRSEGARHRYDVLRARGQTHHQALRALANRLVGVLHGCLVNRQAYSERIAWSALVEVAA

SEQ ID NO: 197431 - protein, 362 aa, unidentified
MSDYKGKKVYLGIDVHKKTYSIVAICDKQIIKKATIEAKPEALISYCQKHFSGAVIESAYEAGFCGFSLHRALLKAGINNHVVHAASIEISARDRVKTDKRDALKIAVQLAAERLKDVFVPSVKRELYRALTRLRITFLKNRTRLSCQIKSLLLYFGYTQYYKKAKCSLKWVQSLLEMRETNDVWYSIHQLARAWVETDSKIKNIEKKIKLQAAEDIALERVYRSVPGIGPTSARILANELGNLQQFSNEKKLFSYIGLTPSEYSSGEHVRQGHISRQGRSLPRKILIQAAWTAVACDKRLQGLFEKLGKRIGHKRAIVAIARRLIGHIRACFRTGCLYNENNCLQTGEQDEATMEAVTSMK

SEQ ID NO: 197432 - protein, 340 aa, unidentified
MKDIKVLGVDLAKDVFQMHGNDAKGKKVLTKRLTRKKLIEFLSQANPCTVGMEACLGAHYWARVFGQMGHTVKIMAPKFVKPYVMANKNDANDARAIAEAVTRPDMRFVPAKSIEQQDVLLLHRAKELAMKHRTALTNQIRGLLLEYGVVIPQGVSQIKKLMIILDENTDKLTERSINIFKRLHDQFKNYNAQIDLYDDEIAFFAKENALCNEVMKIEGVGPITASAIVATVGDAKVFKNGRQMSAWLGLTPRQHSSGNTTRLQGISKRGDGYIRKLLVHGARSVVQNCEKKIDKKSKWVTDKKDRIGYNKACVALANKNARIIWAIMATGECYRKSITV

SEQ ID NO: 197433 - protein, 339 aa, unidentified
MQNYNAGIDLHSTNSYIGIVDENGTRIFNKRVLNDLNTIIDTLKPFKEKIKGIAIESTFNWYWLVDGLMDEGYHLHLANVCAMKQYEGIKHTDDQSDAFWLAEMLRLKILPTGHIYPKEQRPIRDLLRRRLQLVHHRTALLMSMTSMIQNCTSINLSRNDKKNLTHHEITGLLDHPYQVMSANSINNVVLEINENIDKIEKEINRKVKLTQRYKKLNSVWGIGEILATTIMLETGDIRRFKDVGNYASYCRCVPTIKLSNGKTKGRGNKKCGNQYLAWAYLEAAYCMQRAYPEAKKWFQRKLNKKGRFVAIKALASKIARACYLIMKNNIEFEPSKLFA

SEQ ID NO: 197434 - protein, 458 aa, unidentified
MAAVEEIVDADHEQVIDRVCAIDVGKSGGTVCVRLPSPDGGRRVSRVWQVDARVNAVAALAEQLVAVQVGKVTVESTSDYWRIWFYLLESAGLDVQLVNARDVKNVPGRPKTDKLDAVWLAKLTERGLLRPSFVPPAPWRVLRDYTRLRVDLVRIRAGHWNRLEKLLEDALIKVSSVASTMTTKSVRDMIEALIGGQRDPNRLAGLARGRMRVKHAALVQALTGRFDDHHGELARILLDQIDDLSGQIDILTGRIGEQLSTLTGPPEAGGCQPDQSTEAGNGDSDPCTAAGTPTPPATVVQRLITIPGIDEQSAQQILAEIGTDMSRFPTAGHLASWAKLTPRTIQSGNKNTAGRTGKGNGYLKGALSNAAAAAARTDTFLGERYRRVVKRRGKIKAIVAVARSILTIIWHLLADPTATFEDLGPDFYTNRFTTERKIRSHIRQLETLGYTVTLAPAA

SEQ ID NO: 197435 - protein, 332 aa, unidentified
MQENFIGIDVGSKELVVALKQSGQTEPSVKTFPNTAAGHQKLLKYATRRCGRALICVEATGIYSLELSLALQRSEKIALMVANPRAIKDFARAAMKRGKTDRVDAQVILLYLERMPFVSWTPPREEVLELRTITRRIVQLKVELGRERNRLHASSRRRSVNNLISNDIDVNMRHLERRIKRLEMAGLDLISSVPDLKRKLEQLVSVKGIGTASAMRILAELMILPSDMRAEQWVAHAGLDPRPFESGTSIAKPRRISKAGNKFLRAALFMPALVGIKLDPHIKAFYEKLIVAGKKPIQAIVAVMRKLLHAIWGMIKHDQDFIGDKFYVIPLK

SEQ ID NO: 197436 - protein, 421 aa, unidentified
MDVLYTACAGLDVHKKLVVACVCISGDQARPHKEVRTFSTMTAGILALSAWLTQMGVTHVAMESTGEYWKPLYQLLEGNFTLLVVNAQHIKAVPGRKTDVKDAEWIADLLRHGLLHGSFIPPQPQRDLRDLTRQRTNLIADRATVVKRLQKVLEWSNIKLASVVSDVMGLSARAMLDAIIGGEADAEQLASLAKGRLRSKQAALIQALEGTVRDHHRFMLAQHLDQIDFLEQQIAALDTEIVARVTPAPMESDMSTEGGVAASAEGVGATPTPLANTSQAADGDAPVTWAEAVRIWDSIPGIGGRIAEQMVAEIGADMSRFPSAAHLASWAKLCPGNHESAGKRLSGKTGQGNRWLRSALIQAAHAAVKLARCARASAPQRSERSPTLRAHQTRHLAGLAPARGGKAPDFHFWHLFRMLAA

SEQ ID NO: 197437 - protein, 389 aa, unidentified
MDEAGKVLVKRRLPEGAAGMTQLHALIGRFLPEDADDAEVVIGIETDRGPWVTALVAAGYVVFPVNPLQASRYRERHGVSGAKSDGGDAHMLADMVRTDSHQLRPAAGDSPEGQGIKVVARAHKTMIWDRTRATQRLRSQLREYFPAALAAFEDLDAPDVLELLGKAPDPDRARRLTRAQVAAALKRARRRDIAGKTDAILAALRGEHLGQPAALTAAYAATARSLIAVITTLNAQVKILEDQVRDHFGRHPDAEIYLSQPGIGAILGARVLGEFGDDPCRYVSAKARKNYGGTSPITRASGKKKVVAARFIHTDRLIDALMSWAFASLNASPGARAFYDEQRAKGLDHNDALRRLANRLVGILHGCLKTRTPYDEATAWSHRESSLAA

SEQ ID NO: 197438 - protein, 337 aa, unidentified
MIVIGVDVHKHSLTAVAVDEAGRQLDELTVAYPDEVLLVWAARLGERLWAVEDCRHVTRALERRLLAEGEELVRVPPKLTGAARGAGKERGKSDPIDALAVARIALREPDLDRPRPGEERYRELKLLVVHRDDLVDERRRCQQRLRWHLHQLDPSLVVPAGALDRAVWLDKVGRWLSRRTPEVQVRIARDLVGRCRSLTRAIVELERELATMSAQMAPALLELPGCAGITAAKLLAEIGPIERFRSDAQLARHGGVAPLQASSGRTQRHRLDRGGNRQLNCALHRIAITQARVHPAARAYISRKKTEGKSNREAIRCLKRQLARTVFNTLKAGDALT

SEQ ID NO: 197439 - protein, 430 aa, unidentified
MNCVNDSRREQFLQLKNEIRGSTQHLIVGLDIAKERHNAFFGIANGRTLHKGMFFDNTYDGFQKLLIQTDALKVQHGLRKVVFGLEPTANYHKPLGEYLIKGGHLVVLVSAAATSKNRELLDGRWDKHDTKDSANVADLIAQGKCLYYDCPGEDLRSLRGLLSLKRRLKKEEHGLRVRIRNQLLAQYFPEMDQHFGSVASLNVVQRCLDPSLISLMEYDEFCRTVAPGKASLAQQRRLMQIWQAAKQSIGCSVGEAVSVEAQIMVAGLNRVRETIKTLEDKIKDICLKFAEYSFLLTIPGFGPDVSSKVLAAIGNPERFTSGKQVLKMAGFDLCASRSGRTSQSATPVISKHGKGDLRYALYQAAIISSFKNSEFIVYHTNKIRGREQEKGIGTKMRVKLAAKLLIIAWTLMKKREPFDPGRLNKLEKAA

SEQ ID NO: 197440 - protein, 342 aa, unidentified
MLIIGCDYHPSIQQIAWVDTETGECGERRLTHSGGEAEQFYRELKKKGISVRVGMEATGHSRWFERLLAELNYELWMGDPAQIRAKRVRKQKNDRRDAEHLLKLMLENNFPRIWVPTPENRDVRQLVLHRHRLVGMRTRVMNQLQAIAMNEGVRRKRGLWTGKGRAQLEALRLPPWTTRRRQELLELLDRFDPSIDQLSQAIEEEAARVPEVQRLQTHPGVGPITALAFVLVLGTPARFGCGKQVASYLGLIPCEDSSADSWRLGHISKQGNALLRFLLGQAAQSVARSEEQWRHQYAHLALRRNHAIAKVAMARKLAVRLFWMWRQGWDYQQLKKLGSHAG

SEQ ID NO: 197441 - protein, 347 aa, unidentified
MLIIGCDFHPGFQQVAIFDNRTGEIEEKRLAHREEAEAFYRSLAGEEVRVGMEACGHYPWFERLLAELGCELQLGDAAKIRASEVRKQKTDRRDAAHLLDLLLSGKFPRIWVPSLEERDARQLLVHRHKQVQARTRTKNQLQAMALSHGVQKKWKLWTAAGRTELEQLPLLPYAAQRRKQLLAALDQLEVEIAELNRRVEEEARRRPAASRLMTHPGVGPVTALAMVLTLGEATRFHTGKQVASYFGLIPSEWSSGGRQKLGHISKQGSSFLRFLLVEAGQAAVRGDAELGRFYRRLSVRKHRALAKVAVARKLAVRLYLMLREDWTYAQLCQAVVQASPSHSVAGK

SEQ ID NO: 197442 - protein, 419 aa, unidentified
MTGISAMKKHIYRTKKINAIDWIQMKEQLQGSPVVFAIDVAKEKQYALLANADSSVSELLSWNHPEQTREVLTHLENLACPLTAVMESTGTYGDALRYQFRCSGFEVNQISAKRVSDARELYDGVPSLHDAKSATVIMRLHRDGLSIPWRESDDAERELDALRREYDLHQSQYQRNKNRLEAYLSRHWPEVLPLLPLDSVTLESLLIEYGSPEQIAKNTEEAAKNMHLWSKNQLKNEKIAVVIQSAVNTLGQPCIDAERRYLQALTAEMRHSRQQQKEVKDILEATVKADTGLSKLASVIGLITTAVLLSCRLDPRNFRNARSFQKALGLNLKEKSSGRDVGRLKITKRGCSMARRYLYFAALRLINNDPVVKAWYQKKVDARAKNKTVIALMRKLAKALWHVARGERFDATKLLSVTA

SEQ ID NO: 197443 - protein, 373 aa, unidentified
MPRYSTAFGMDVHLRSTTVCALDAKTGEAVARRFRGNPWGEVAEWMSGFPGPSLAAYESGYLGFAPQRELSALGVDCVVAAVSKVPRSAADLSSKNDRNDAARMAKAILSHDVTPVWVPSPEIEGLRDLAAAHDAATARLAAAKQRLLAFLARRGYVYGGTTPAGNPRKYWTYGFLRWLDGIRPADDGGIRALAALRNEVEAADETREAVLAEYRAAVAAGPLSAEVEALQSIKGCGFVLAAAFAAEVGDFSRFRSGRQVTAYFGLAPKQRSSADSVRLGGISGAGNALVRRLAVEGSWRYAQAGHQPKLMPKGSGVPLEIRMHGRKGSERLLRRREEMLERGMPQAKANAATAAELVRWLWALGMMCREAGE

SEQ ID NO: 197444 - protein, 408 aa, unidentified
MTVVGIDVSKGKSMVAAMKPGGELVAAPYEVRHSDIELSHLALDVLCMEPDTRVVMEATGRYHEPVAALLHSEGIFVSILNPLLIKQSGAGSLRKVKSDPKDALKIAKYGLDNWSTLREYTPMEAIRQQLKLCARQCDLYNKNIVMLTNNLISLSDKTFPRVNELFSSPEKADGHLKWVDFYRSFWHCDCINRMSPDAFEERYKKWCKRKGYHFSTDAADALYAASCGSYTTLPRDNNAKLLVTVAADQLIALRENQSKLEAEMLNVCKQLPEYETVMAMYGVGKSTGPHLMAELGDVRRFPHRSSIVAFAGVDPGVVGSGKMQLSSVTTSKRGSPQLRKALFQVISTYVKCKPENEAVYQFYAKKRDEGKPFFVCTTAAANKFLRIYYARVKECLNAAESATQVEEG

SEQ ID NO: 197445 - protein, 430 aa, unidentified
MKSNTQNAKIEAITEKTLVLGIDVGSETHYARAFDYRGIEYSKKPFKFSNTEAGFVTFKEWILDLKERHEKDKVVPGMEPTGHYWFNLGKFLHDNEMKPVLVNPHHVKKSKELDDNNPTKNDRKDPKVIAGLVREGCYMIPYLPDGIDADLRTASNIRFQLQAELTRIQNRISRWFNIYFPEYKTVYGKPDAKSGMLILKAAPLPEDILTLGINGVNQIWRDAKLRAVGKARAKTLIEAAEHSIGSKEGAVSARMEIRMLLEDYESRNIRLQEVMTLIEGLVKQIPMAEKLLEIKGVGIRTVSGFLAEVGDISRFNNPKELQKLAGLALVENSSGKHKGETTISRRGRKRLRYLLFEVAMSLVAKNPEFRELHNYYTTRRLNPLKKMQSLMAIAAKLIRVFYAMLTKGVDYDPKKMVSDIKRPAVYLQAA

SEQ ID NO: 197446 - protein, 427 aa, unidentified
MPYHIAGIDVHKKMLAVVVADVEVEGDFHFERLKVGTSPVQLRALADWLVEREVEEVVMESTAQYWRPVWEALERYWRPKRRTRADASPVSGALHLAQAQSNRAAGGRKRDFPDAERLVKRLVAQELILSFVPDTEQRLWRTVMRRKYQITRSRVQLHNRLESLLEEAHIKVSSVVSDLLGTSARRMLHAVGDGETDPAALAALADQRLRATPEQLRDAFGACADLHPVYRRLVKLTLDELRVIEDHLAQLDQQMAQLLAHHHDAVQRLAEVPGLGVDSAQQIIAEVGASAAAFPSEKQLASWMGACPGNEESAGVNYSHRCPKGNRQMRRVLNQAANAAVKAKGTIFAIVYRRLVPRLGHAQAIGAIAHRLCRLIWKILHQGVRYEERGPAVSEEAKKVRARKMIRELRSLGYRVELLPAPSSSPA

SEQ ID NO: 197447 - protein, 337 aa, unidentified
MQVTLIGIDLAKTIFQVCGVNAQGMPAFNRTVKREGLLKFLLQYPEATVAMEACSGSNYWGRELKGHDIKVMLIPPQHVKPFVKGNKNDRNDAFAITEAARRPNLQCVEPRSIAQTDMIQVHRLRERLVGERTGLINQLRGFMNEFGVVVSRGRQILFTSLLEMIDSPNNGLSPSARTLYRRMYDQWRYLNDEIKQLDKRIAAQAKANEDARRLMTIKGVAEKTATAVIAHAGNGAAYKNGRHFSANLGLVPKEHSSGGQQKLGSISKRGNRYLRRLLIQGAWSVMRNATRSEDRLSRWAREVAARSGQQKAVVAIANKLARIIWSMLYHRTEYRAG

SEQ ID NO: 197448 - protein, 394 aa, unidentified
MIYVGIDVAKDKHDCIILNSNGKVVFDVFTIQNNIDGFEDLLFKIKATEKYPDKVKVGLEATGHYSCNILGFLKNKGLSTIVINPLYTSLSRKSISLRKTKTDKVDARTIACMIMSDVNLKPYSDTLYLNEDLKSLTRYRFNKVAQRAKLKQSVSRLVNILFPELEKLVSTLHGKAVYELLSEFPSAQHIASANLKHLTNLLHTASKGRFQRASADQIRQAARKSIGSYLPAKSLELKHTIKLIRELNSEITEIEAEIKKIMDVIDSPIISIPGIGQNLGAVILAEIGDFSRFESPDKILAFAGCSPSTYQSGQLYSSHAKMEKRGSRYLRWALLNAAAYVCKWEPTFATYLAKKLAEGKHYYVALSHAAKKLVRVLYHLETTGKTYQPTSILS

SEQ ID NO: 197449 - protein, 352 aa, unidentified
MLNQHSVVVGVDVHKYSHTAVALDAWGKERGAYTFTNETLDGYLSWLSSLGDRERLIVGLEDANCYGIHLVTALKDARINTRYVPAILTERERTHSTTRQKSDAVDASRVGRVILTKYAETLPAREAIATKDELLAAQELDLILVEREDLTRSKTILKNQLHALLYQHYTEAYRTRCPRSFSKKAIRWFQNDLASAGSILASSILRRLDRLVFVMGQIAAIDKVIARVAGSSSYVRALTVLHGCGALTASQIVAETITPRRFENKHRFAAYAGVTPVPHSSGRRDRLHTNPFGNRRLNRALHTIALSQIALKDEQATAYYAKKLTEGKTKLWALRCLKHQIAKRVYQAMRRA

SEQ ID NO: 197450 - protein, 410 aa, unidentified
MEVIVERAAALDVHKAQVTACVRMPADTGGRTQEVAEFATTVRGLLTLHDWLSAHHVTEVAMEATGVYWKPVWAILEEDFELLLVNARHVKQVPGRKTDVSDAAWLCQLLEAGLLKASFVPPKPIRALRNLTRYRKAQIRERQREANRLHKVLEDTGIKLDCVASDILGVSGRAMLEALVAGTTDPEVLADLARGRLRAKLPALREALEGRFNAQHALLVGAILAHLDFLDEQIERLSEAIREALAPFAAAVELLCSIPGVQQRTAENVLAEIGLDMSRFPFAGHLASWAGQCPGNHESAGKRRSGRTRKGSKWLNEALTEAAIAAVRTNGSYLQALYKRLRPRIGHSRALGAVKHSMICACWHMLSSGELYRDPGGDYFVRRDPERQTKRLVRQLEALGHAVMLQEPAA

SEQ ID NO: 197451 - protein, 350 aa, unidentified
MVVVGADVHKRTHTFVAVDQAGRKLGEKVVAATTVGRHKALVWARVEFGNELVWGIEDCRHLSARLERDLLSAGQQVVRVPPKLMAQTRASARTRGKSDPIDALAVARAVLREPDLPVASHDAVSRELKLLIDRREDLVAQRTSAINRLLWRVHELDPERAPKPRSLDLAKHRELLRAWLATQPGLVAELARDELADISRLTEAINALAKRITERVRVVSPALLALPGCAELTAAKLIGETAVVSRFKSESAFARHAGVAPIPVWSGNTTGRVRMTRSGNRQLNAALHRIAVTQVRLDGIGRAYYRKRRDAGASKTEALRCLKRRLARVVFHHLHTDHQTRNQPCQTAAA

SEQ ID NO: 197452 - protein, 403 aa, unidentified
MSICYAGLDWASRTHAVCVIDEHADVRVQCEINHDAAGLTELRHRLRAAGVTAVAIERPSGLIVDALLEGGFTVVPIHPNVVKATRPRYRSHGGKSDASDAYLLADLLRTDGHRFTPLAPQGDDIRALRALVRGRDDLVATRVQLANQLRSLLQSFWPGAAEIFADIDSPIGLAFVQRYPTPESASRLGPKRLAAFCAQHAYSGRRSADELLARLHQAPAVVVGELEMEAKGELALSLARTLSRLVAQIRLLTSRIEHHVASSDDGQILMSFPRAGHICAAQILAELGSVRERFDSDEHLAAEAGVAPVTYTSGKSRAVTFRWACNHRLRAALTCLADNSRHANAWAASLYAKARARGCDHPHAIRILSRAWVRVIWRAWIDRKPYDANQHRAAQRLLQTATG

SEQ ID NO: 197453 - protein, 385 aa, unidentified
MMMIGIDPHKTTHTAAAVEPGTHQEVASIRLDATLSEYRRLLTWAARWPERRWAIENAEGLGRHLTSWLLARGEEVVDVPTTATARVRQLSRGGGRKNDRIDAGAAACVAALRGDARPMEAEGHADALAVLDERRVNLAQSRVRAVNQLHALLRALIAGGAPTDLSAATAAELLRTVRPSGAVEQARKTVAKDLVAEIRALDTQLKTNAKVIAGLVAESGSTLTQTVGVGPIMAGRLISRTGRASRFPTSSAFANYAGAAPVEVASADKSRHRLSRHGDRQLNSALHTIAITQIRIPSSRGHRYYKTKLEEGKTPREAARCLKRRLADHLWRTMINDERRTEGPGGHMGTTLQSSVAGPTPTASSSDKSLTGPANHDATTAKPAA

SEQ ID NO: 197454 - protein, 298 aa, unidentified
MKFYCGIDLSARDCHVCVINEQLKVVIQQKLRNELPKICQLLAPYKANLKIVVESTFNWYWLIDGLQAAGFEVVLAHTLGLYLITGAKVKTDRRDAYSLAKLLLVGAVPAAYIYPVETRPVRDLLRRRLHLVQVRAGEYGSLRRLLLRQGILSRKQQEIKTATEAELEQWFEHPLVRLHASQELERIELYSQQIAELEKTILELAKTERAYELLLQLPGVGQTIALTILYEVGELTRFANVKVFSSYCRVVPGIAQSGNVTGRGRASKQGNHYLKAAFSQAAVRCVAIQKCVVITSAN

SEQ ID NO: 197455 - protein, 429 aa, unidentified
MNCTQNKKIEQVKETTMIVGIDVGSEKHYFRAFNWRGIELTRKPVAFSNSMEGFNSFYNTIVELMQKSELEEALVGIEPTGHYWFDLGQFMGEKDIKFVMVNPHHVHKTKELDDNSPSKNDRKDPRVIAGLVRDGRYFYSYMPTGAYAELRNASNRRFVLVEEQTRAKNRLQKWIAVYFPEYKGIYTHIDAKGGMLVLKKAPTPEEIVRLGVEGIIKIWKDAKLRGNGHKKAMLILAAAMRSIGLKAGLTEARMEIQDLIEDYELQTKRLERVNDLIKGLCQQVRYADKLLEIKGIGITTVAGFIAEVGDITRFDSTKELQKLAGLELVADSSGKHNGKTKISKRGCKRLRYLLFEAAISVVGKNEEFKEIHRYYTTREKNPLKKMQSLIVVACKLIRVFHAILTKGIRYDASKMLKDIRHPGEQLKAA

SEQ ID NO: 197456 - protein, 381 aa, unidentified
MSIVALDIASKAATFCVLGTQGITGQGSLTFDHDGFSSFIASEQVFDASLFVMESTGGYHLPLYHFLLNHGRKVRIINPLLIKQFHDGQTLRRTKTDALDAVTIARYAQSHMSALEEERMQLDSESKMLARRRARNAEDLAKAKTILKSDLSVAFPELLRFNVFIKTLLEFLSIYGCAKDVLAATEEQLQQALDVQKGRKSDVVTVQKIQELARISIGVSYRAAMVRDSAKAVLACQQRDEELTKALVELENALHKRQMEILTSIPGIGEVTASHFLSEIPDITQFATYQKLIAFAGTDPGIYESGNTSKALKISKRGNPLLRKYLYLMADSCMRHNIVFHAYYHKKREEGFPHRKAMVATMNKLIRTLHTLLTKDETYSI

SEQ ID NO: 197457 - protein, 364 aa, unidentified
MKRKVCVGMDVHKETIQIAILPSNTKALVKEQQIKHEEGQIKKFIQKLKSEGTEIHCCYEAGVTGYPLYRYLKTLGVNCIIAAPGKIPRQSSDKIKTDKRDAIKLARLLRSGELESIHVPSEEDEAVRDYLRSRDSLRLDLGRNRQRLMKFLLRKGITYSTTKYWTASHYKWLNNLHFENEILQATFNDYYSRVRVQEENLKAMDQKIREIAESEPYREKVGILRCFRGVDYLTAMFLLSEVNDFKRFKTAGSFMSFLGLVPGEYSSGPKRKQTSITKTGSPRLRRILVEAAWQHRFPGTGSKVVVARRVGQSALVVSLAEKASLRLHKKFKSMQLRGKTPQVMITAVSRELSGFLWAAMNLVA

SEQ ID NO: 197458 - protein, 314 aa, unidentified
MTDKLFIGVDVSKDWLDIARNDRGEVERIDNTTQAVANFLARLEQPPALVVFESTGGYERPLRAGLLAAGVAFARVHPNEIAAFKARRGARAKTDQIDARQLAAFGASELATRGLGPLVEGDDALREMTTRRRQLVDLLQAERCRAAIAATGVVRQSLAALIATLEKACDDIEAEIDAHIAKSAELAKIAKLLRSLKGVGPVTVHTLLGELPELGRLTGKEISALVGLAPRTNQSGKRSFRATTGHGRPGVRRVLFNAARAAIRWNPVMKEFYQRLVVENRRPGKVALTAVMHKMLVVLNAIAKENKPWKHAAA

SEQ ID NO: 197459 - protein, 421 aa, unidentified
MQNTAAKKMKQVPEGYLIIGIDPHKKRHAAVAITQDFTVRDKFKFDNTRAGLELLLHRVRAEMLKSGCRGVMFAIETGGHYWRNVAYFLDEQGIPFRFINQYTLKRRREGKDLNHRKNDYRDCEVAAQLLCTGEFVESVIPQGVYAELRTAHNAYRRLVKERTRITNLIKGLLDGLFPEFVQVFKDPCGLTALSVLSSCSIPGVIAGMTEEEFIASIEAKHHGRLMRRKLRTLHGVARVSIGIAAGGSSVSCEIAFLVEKLKLIKGHISAIERTLVSLVDETEEGKYLLSITGLNYIAVAGLLAELGCFKSYRTAKQMIKMAGSNPTESESAGKRGTHTPMSKQGRPVLRYCAWTSVIPMLRFNVDFRAWAKQRRERPVHANPLGGREIVGAALNRLLRLAFALAKNRTLYRSPQLATATT

SEQ ID NO: 197460 - protein, 317 aa, unidentified
MSTLRVQFVGIDVSKQQLDIAVRPSGETWTVAHDEAGLSALVTRLGALAPTLIVLEATGGWEVALAGALAAAALPVAVVNPRQVRDFARSTGTLAKTDRLDAQILAQFAAVVGPDPRPLPDAQAQELSALLQRRRQLVDMLTAEKNRLPLASRRIRPQLQTHIQWLQRQIAQFDEDLRELLRASPLWREKDDLLRSAPGVGPVLATTLVAALPELGTLTRHQIAALVGVAPLNRDSGTLRGRRTVWGGRAQVRAVLYMSTLVAVRHNPVLAVFYQRLRAAGKAPKLALTACMRKLLTILNAMLKYHRRWAPVIAQHA

SEQ ID NO: 197461 - protein, 347 aa, unidentified
MKVTTIAIDLAKNVFQVLGMDSHAKQVFNKRLNRTQLIEFMLQQPHCDVVFEACYSSHYWGRKFLVMGHNVKLIPAQHVTPFVRGSKNDNNDTMAIFEASFRPNIRFVPVKTEEQQEILMLHRVRERLVKEKTACTNQIRGVLVDFGICFAQGYKTFEVAMWDIINDASQRPIIKLMANDFWDEYQSVNTHLDRINTLIKKLVERDPNGKILLSIPGVGPIIASAFVASIGKGQAFNTAKELGVWLGLTPKQFASGHRSVNGSITKRGNGYLRKQLIHGARTVVSHASKKQDDLNLWITQLRSRKSICSTVVATAHRLARLIWILLQKQVPYAPQYAANQGVNHGTC

SEQ ID NO: 197462 - protein, 436 aa, unidentified
MRGCRCSMIMGFTKPIEHSNPTTKEGDFMNPLYVGIDVSSKSNVVYFMLADGSKYSNFSVANSHDGSTQLVKRILSVMESKSLDTVLIGLEATSVYGDNLVYFLREDASLASFNRKIHVLNPKQVKKFKDAYNDLPKNDYVDSFVIADCLRFGRINKEVYIGDYRYKALQNLTRARYFSVCNLIKEKQRFMNVLFKKYSTMTQEKVFSDTFSTTALAVYDEFESAEALAYMDLQELTAFIIEKGKNRFPDPDAVAKAIQKAARSSYRLPKTVNDSVNQVLSISITSIKALEAQIKEFDKAISAEMELLPNVLISIPGIGPVYSAGIMAEIGDINRFDNQAQLAKYAGLAWTQYQSGNFEAENTRLIKSGNRFLKYYLCEAAFSLVRCDKEYKAFYHQKYKEVNRYQHKRALALTARKFVRLVFTLLKDNRLYRPAE

SEQ ID NO: 197463 - protein, 407 aa, unidentified
MDSLKTVFGIDVSSRKSNVCIMVNGQKVNDYAISNDMVGFNQLLDDLKQVTNPQIIFEATGVYSRRLQAFLDMHDLRYVMMNPLEAKRKTKDDLHQNKTDKLDAMYLAKMQSEHPQRLAYVQSEEYQELMANNRIYEQASHDLITNKNRLHKAIQLTFPEIEHLLANPRGKNYWSIVLKFPHPNIVLETKEADIIDFLKSLSGIGEKRANDITQSLIRLAKVACPAVKKNSAHVRGLKMAINNILSAEEECQSALQEMAKLAPRRDLEILTSIPGIGENTALRIISELGDIRRFNNPSQLNAFVGVDPQVYESGNLTAHLSISKRGTAIGRKVLCLAINQIQSAKKAGNPCHIADYYEKRKRSSETASHKKAAIASIHKLLRTIFALIKNDQLYSYDVAKHNQRLLS

SEQ ID NO: 197464 - protein, 347 aa, unidentified
MTQAQIYIYGIDLGKNWFHLVAMDRMGHVLTKQKLTRSQLKQFISTTPPCRVAFEACPGSQYWGRLFQQAGFEPKIIPAQFVKPYLKSNKNDFNDATAIAEAGSRGTMRCVPLKSHEQLALQATHRVRQRFIVERTATVNQMRALLLEYGLTVPVGRKIFERSLPTILEDAENGLPDFIRALVLRLRERWQQLDIQIDDMSLMLGQASSTSSLCQKISTVPGIGPIVSTALIAAIGNGSHFKKARDLSAWLGLVPRQYSTGGKSSLGGISKRGNNYLRQMVIQGAKALKIHMKRDKSSLGEWVARLEVGHHHHVVLIALANKIMRICWKVLTSGRDYQPYPNTSSAV

SEQ ID NO: 197465 - protein, 411 aa, unidentified
MDVVNARCAGLDVHKTTVVACVRVPGARRGERRRETKTFATTLRGLRELLAWLIAHGVTQVAMESTGVYWRPVYAVLEGAVTLVLVNARHVKMVPGRKTDVRDCEWLAQLLECGLLRASFVPPRAVRDLRDLTRLRKALIRERGHHVNRIEKTLELAQLKLGSVVTDLMGKTGRAILHALIAGIDDPYRLAELAQGLLRKKRAALREALVGGLTPHYAFLLEQHLSLIDALDVHIATLETRIEEAMAPFAEAAALVQTMPGVAARAAQAMLAETGVDMAPFPTAAHFASWARLCPGNHESAGKRQPTTTGKGATWLRATLQEVAWAAVRTKKSYYRALYHRLKGRGGPKKAIVGVQHAMVVALWHMLKRRVPHHDLGADYFDRRNTERIRRHHVRRLEKLGYNVVLVEAAA

SEQ ID NO: 197466 - protein, 326 aa, unidentified
MEHELHYIGIDTAKEKLDVDVLRPDGRHRTKKFANTTKGHDELVSWLKGHKIDHAHICIEATGTYMEPVAECLYDAGYIVSVINPALGKAFAQSEGLRNKTDTVDARMLAEFCRQKSPAAWEAPHPLERALRALVVRHQALTDMHTQELNRTETAREVQRPSIDAHLLWLEAELKRLEKQIKDLTDDDPDMKHRRKLLESIPGIGEKTSAVLLVYIGLKDRFAHARQFAAFAGLTPRRYESGSSVRGASRMSKAGHVSLRRALYMPAMVATSKTEWGRAFRDRLAANGKKGKVILGAMMRKLAQVAYGVLKSGVPFDASRHNPVAA

SEQ ID NO: 197467 - protein, 351 aa, unidentified
MTIVEPAMRRLTVGIDTHSDIHVAAAIDEQGRVIGTESFPSTPTGDRQLHRWALELGSIDAVGIEGTGSWGAGLARHLTAAGCRVIEVDRADRALRRRKGKSDTIDAEAAARAVQAGTATGIPKSRTGIVESIRVLRVARRSAVKARTQAVVQLRNLVSTAPDELRGELRNLNVAHLVERCARFRPADRHDPTQATKTSMRSIARRWQHLHTEIDELDSDLDQLVADAAPNLLACFGVGTDVAGQLLVTAGDNPDRLHSEAAFAQLCGVAPIPASTGRTDRHRLNRGGDRQANAALYRIVLCRLRWHAPTQAYMQRRTAQGLSKPEIIRCLKRAVARQMHRELLKTTARHP

SEQ ID NO: 197468 - protein, 402 aa, unidentified
MNCVGIDVSKGKSMIAVMRPFGEVVVSPFEVSHTASELSKLARLLKSLDGETRVVMESTGNYHAPVAWLLHGAGFYVSVVNAMLVHDYGNNSLRRAKTDKKDAVKLANYGLDHWLTLPRYVPEEDTRLMLKTCYRQYQQYSKVQTMLKNNLISLLDTAFPDANRLFTSPPRADGSEKWVDFVATFWHCECVCGRSEKAFTTQYQKWCRKHGYNFSQDKALDIYASACGRFGVMPKTNTAKLLVEQAISQLQTTSAALAALKQEMQSLAASLPEYPVVMEMFGVGPTLGPQLIAEIGDVRRFHSKKALVAFAGIDAPPYQSGQIDVRSRSISKRGSASLRRTLFLVMGVLLQCAPMDEPVYQFMNKKRSEGKPYRVYMMASANKFLRIYYASVKAYLDSLEHD

SEQ ID NO: 197469 - protein, 340 aa, unidentified
MTIQSKKVVQEESKSLHAGIDVGAEELILLVRQNGTSHKSQKFTNTPADRARLVKKMVGMPGIIVCLEATGVYHFDLSIALHDAGVALMVVNPKSSHNFAKVLMKNSKTDAVDADTLAQYAERMDFVAWTRPSDEQIGLRSFARRIDALTRQKAASKNHFHALNASQETPKSVLRDVKLAISQLEKRIEHLSEDALTLIEQHADLKRVFQLLIGIKGIAQTSAIALMGELLLLPPGLSHREWVKFAGLDPRAFDSGKSVHKQARLSKAGNRHIRSALYMPALSAKQHDPYVKAYFQHLVDNGKKPLQALCAVMRKLLHAIHGMLKHDMPFDNTRFYAIPA

SEQ ID NO: 197470 - protein, 403 aa, unidentified
MNSVGIDISKGRSTIAVMRPFGEVVISPFEVRHTGSELSKLAKQLKSLDGETRVVMEATGNYHASVAKLLHNAGLYVSVINAKLVHGYGNNELRRVKTDRKDAVKLADYGLDRWLTLPRYIPEEDTRLLLKNCYRQYRQYSKVQTVLKNNLISLLDTVFPNANRLFSSPIRGDGSEKWVDFVAEFWHCRCASEKSERAFTSKYLRWCRKHGYNFREAKAHTIYAEASGHIGVMPKSETTKLLVKQAVSQLRATSTALAALKQEMQSLASVLPEYPVVMDLFDVGPTLGPQLIAEIGDVRRFYSKKALVAYAGLDAPPNDSGDVTGRHKSMSKIGASSLRRTLFLVMSVYLQTAPLDEPVYQFMDRKRAEGKPYRVYMMASANKFLRIYYATVKAYLESLEHTA

SEQ ID NO: 197471 - protein, 393 aa, unidentified
MICVGIDVAKDKHDCFILSSEGEVLADVFTIANNLSGFETLLQRIRVCTHPTDNIKVGLEATGHYSYNILGFLLDKGLPTYVINPLHTNLYRKSLSLRKTKTDRIDARTIAAMLMSDVDLKSYTDTAYHNEELKSLTRYRFDKVQQRAKLKQSVSRLVNILFPELETLVPTLHMASVYALLSELPGARQIADAHLTHLKTLLDDASKGRYDREKAVEIREAARRSIGSRMPAKSLELRHTIQFIRELDKEIAEVEDSIEEIMNSIQSPITSIPGMGYRMGAMILAEIGDFANFDSPDKILAYAGLSPSTYESGKLSLSGAYSHMEKRGSRYLRYAIFNATKYVCIWDPTFAAYLAKKRAEGKHYNVAISHAAKKLVRVIYALQKTGEAYRTAT

SEQ ID NO: 197472 - protein, 362 aa, unidentified
MLIIGCDYHPSGQQVFGIDTESGEVFADRWIAHTGNELEEFYSGLPAGAVVGVECSGNMLWFERRLAHYGHRLRLGDAAQIRSKETRKQKHDRRDAELIARLLLEDNFPDLKWVPTLAERDQRQLLMHRHKLVRMRAQVKNQLQHIALNQGQQKKRQLWTKAGRELLESLRLEPWTARRRDDLLRWLDLLNRDCESLEREVEQAAEARAEARLLMTHPGIGPVISLAFVLTIGSIERFQRSRELVSYLGLNPSEDSSGERRRLGGISKQGSSFMRLLLIQGAQTAVRGDEDLRRQYRRLASKKHRAVAKVMVARKLAVRMFWMLKTHKTHAELVRTRGSSSHPGVGKTDCLSERPASPRIQP

SEQ ID NO: 197473 - protein, 340 aa, unidentified
MHATIIGLDLAKNVFQLHAEDRSGKVLWKRRLRREELEAFLRKQPPALIGMEACGSAHHWARVITAVGHEVRLMHAKYVKAYVKRGKSDVRDAEAICEAVQRSSMRFVPIKSVEQQIDRSLERARDLLVKQRTQLMNATRALLAELGIVARAGLRGFTTLADKIAAGDAVIPRPSLTALKPLVEQWRALQASIDQLEARLVARAHSDERMRRLMKIPGVGPLTAHAVVTAIGDPKRFSTGRDFAAWAGLTPLTDSSAEKTRIGHISRQGDHSLRRLMVLGAVNMARHARAKPCEANAWLNGVIARRPVKVAMVAQAAKTARIAWALLCSGENYRGRTAAA

SEQ ID NO: 197474 - protein, 361 aa, unidentified
MQSTTIIAFDQHAATTVAAVLLPTQRTPALHPLTSESSTILRFVERLRRDGPVHCCYEAGPCGFELQRALTAKQIPCDVIAPALIPRRAGDRVKTDRRDAGQLAVLQRAGALTAIHIPTEQEEAARDLWRCREDIRAELLRARHRLSKFLLRHGRRFTGTKKAWSKRHDAWLRAQTWPIPALDHTHHAYLRGVDEALARLRDVETDLRALLTLEPLQSRVQRLRCFRGIDDLTALTIAAELGDPRRFATAPRTMAFVGLVPSEHSSGSKRAQGRITKTGNAHLRRVLVEAAWHYRHRPFVGAALRARQRNAPADVTARAWVAQQRLYRRYARLAARGKPKQHIVTAVARELTGFVWAARTQ

SEQ ID NO: 197475 - protein, 424 aa, unidentified
MVQNDDSRLGEFRQLKNGIRESHDYLVVGIDVAKERHYAFFGTTAGKTLLRKLIFDNTKEGFEKLCFHADTLKARHTLGKVVFGLEPTGDYHKPLGEYLITHGHRVVLVAGTAVKNNRELLNGRWDRNDTKDAANVADLLIQGKCLFYEHPAPAVRELRALLSLKRKLKKLEHASMVRIRNHLIAQYFPELDPYYRCGEGPAIVRWCFDPRELARLPFPAFARMVSSRNGGEQQKTRLMEIHTKAERSIGCALTPAVPFEAQLTLNMRGQIETMIKETDEAIEKVCKSFAEYPCLLSIPGFGPDVSAKVLGAIGNPHRFDNGRQVLKMAGLDLSGDKSGKREDTPMVISKKGKADLRYALYQAALVASTKNPAFMAYFTDKLKGREREKGIGTKVRVKLAAKLLIIAWTLMKKRETFNPDCMEA

SEQ ID NO: 197476 - protein, 416 aa, unidentified
MTLRIVYPICCGIDVHKSFVVACIATTGGNGITTYKRSRFSTFTGDLRRLARWLSENNCRDVCVESTGKYWIPVFNILEESCNVVLAHPKYVKAIRGKKTDVRDAKWIAELFKHDLISGSFIPPLEIRQMRDLMRYRVKLTNLSTAEKNRMQNCLTISNIKLDDVFSDVFGKSASAIIEQLLLHPNGDFDVTPFIDKRCKAKPETVQAAVDGFLSLEQVRKLRIIRSHLHDISAHKCDLEAVITEIAEPFLPQIELLTTVPGIKLFSAIAIIAEIGVDMSVFPTAKHLCSWAGLVPQNNESAGKKKTTRISRAGAYIKPLLVQCALSVCKSEKHPEIKFRYLALKKRRGHKKAIIAICRMLLTAVYHILRKSEAYNPSLYRKEDAPANRVITVKQALALVKRHGFFVVDSDDKLAS

SEQ ID NO: 197477 - protein, 400 aa, unidentified
MFAELGGSSLVMLGRGLGRLAVQSLRHGGRAVVEHTTTYVAFDNSKDTLDVAIADGGLREEVRFWGTIPNQAEAVRKLVTKLAAKHPVLSFCYEAGPCGYGLYRQILALGHPCLVVAPSLIPTKPGGHIKTDRRDATMLASLFRAGELQGVWVPDADHEAMRELIRGRQTAMQEVRRSRQLVLSFLLRHDRAISTRQHWTRAHRAWLARQSFSHPAEQIVFEELIQRMEVACARQGRHEDAIRRLLPAWSLAGVVAAVQSMRGVALMSAVTLVAEIGDFGRFASPRQLMAWLGLVPKEHSSGRKVARGNITKAGNIRARRVLVEGAWTYRLPARMGEDITRRNDGLPEAIRAAAWKAQVRLCTRYRRLQNTGKPQNVIVVAIAREMAAFVWAIARMAQPA

SEQ ID NO: 197478 - protein, 345 aa, unidentified
MTQYKRIGIDTSKAVFTLHGIDQQDRPILRTNLRRAQLIPFFKKLPPTDIALEACGGSHYWARELTILGHMVRLIPPQYVKPFVKRGKNDRNDAEAICEAAGRPGMHFVPVKSVTQQAQGMVLKVRETLIGQRVALTNTVRGHAAEFGIVAGKGAGKIVQLLSAIEQEAAIPPEAREMFVLLTQQIDEIDARIKEVDAKLNAAHKTNEVSQRLVTIPGVGPIIALTLAVEIDPGMFESGRHLAAWAGLTPKERSTAGKQQMGGISRAGNERLRALLVSGATSVINVALRPGSRQMTDWLRALLLRKPRKLAAVALANKMARTAWAMMKRGETFRRPSSAAGAVAA

SEQ ID NO: 197479 - protein, 370 aa, unidentified
MNDNTIYVGLDVHKSTISVAVAEDGRGGEVRNYGVVENRADLLVKLVERLGTRGQRLHFCYEAGPCGYGLYRLLSGLGQDCTVVAPSLIPKKAGERVKTNRRDAAMLARLHRAGELTAVWVPDAAHEAMRDLVRARATAARVLGKARQHLTGFLLRHGQIYAGQRAWTVAHRRWLTTVRFAHPAQQIVLQDCIHAVEDAETRIVRLSEQIEQLFGHWSMAPVVTAIQAMRGVAFINAITIIAEIGDFARFTNPRQLMAYVGLVPSERSTGESVRRGGITKAGNNQARRALIEGAWSYRMQARVSRKLHDRIVGLPKDIRDIAWKAQVRLCARYRRLVATGKKTVVATTAIAREMLGFIWAIARQVQPQSS

SEQ ID NO: 197480 - protein, 391 aa, unidentified
MIYVGIDVAKDKHDCFITNSDGEVLFKAFTISNNLDGFSELYQKIESVMDDVTKIKVGLEATGHYSYNLLGYLIDKGLPAYVINPLHTNLYRKSLCLRQTKTDKVDARTIASMLMSDVNLKSYSDISYHNEELKSLTRYRFDKVKERAKLKTSISRLVCILFPELEKLVPQLHMASVYAMLSEFPGAKQVANAHLTRLTNLLSESSKGHYGKETAITFRDAARASIGSNMPAKSLELKHTIKLIQELDSEIDEIENEIKIIMDKINSPILSIPGISYRMGAMIIAEIGDFSRFDSPDKILAYAGLSPSTYQSGQLDGAYAHMEKRGSRYLRYALYNATKYVCHWDPTFAAYLAKKRAEGKHYNVAISHAAKKLVRVIYHLEKTKQQYIKAA

SEQ ID NO: 197481 - protein, 399 aa, unidentified
MIAIGIDVSKGKSTVVACKPFGEIVLGPFDVAHTSSDLKELAESIKSLNEECRIVLEHTGKYYQPIARYLFALGYFVSVVNPKLIHDFGNNSIRKVKTDKADSVKIANYALANWDSLSPYDFEDDVRLQLKTYCRQYYYYLNNRTSLKNNLISILDQTFPDCNALFTTKKLDGSAKWIDFAVRFWHRDCVTRYSRSEFTNIYNNWCTRHGYRPSDSKASSIYDFAKSCVPSLPYNDSTKSLIRLSAGLLLDNCRAMGDMIVEMNALASQLPEYPVVMSMPGIGPAMCPQIMAEVGDIYRYKDKHSLIAYAGVDAPPYQSGSFSSAHRKITKRGSSNLRRVTFQIVCGIMQRNDADDSVYRFVRKKQAEGKPYYVYMVAGCNKFLRVYYGRVKEYLEKQS

SEQ ID NO: 197482 - protein, 381 aa, unidentified
MTRATRTAEYTGATTLCLYLAFELGSNEWKLGFATEPGATPRVRTMPARDLARLTREIADAKQWFGVQAASPVRSCYEAGRDGFWLHRYLTSSGIANVVVDSSSIEVNRRLRRAKSDALDARKLLGMLLRYHAGERAVWSVVRVPTVEEEDRRQLHRELRTLKQERTRVANRINGLLANQGLWLPPGTDVGAAAKTVRLWDGSPVPAALRARLEREWEHAQFLRTRILELERERQRVIAHGHGEAIDKVRQLLRLRAVGPTGAWVYVNEFFGWRRFRNRKEVGAAAGLTPTPYQSGDERREQGISKAGSRHIRAVAIETAWCWLRYQPRSRLSRWYQARFGRGGTRARKVGIVALARKLLIELWRFLEFGVVPEGARLKTA

SEQ ID NO: 197483 - protein, 356 aa, unidentified
MQSMTASTAPVTVGVDTHLDLHVAAVIDHTGRLLGTQGFPASTRGYVALVTWAERFGPVERIGVEGTGTYGAGLARFVRAYGLEAVEVNRPDRSLRRRRGKSDPIDAQAAARATQAGVAAATPKTREGQVEMIRVLRVARRGALKARVAAAEQLYGVLYSAPEELRAPLLGLKTKALVRACAAMRPGPLTTPTAATKAALRTLARRWQQLQAELTQLDNQLQVLVSAAAPTLVALPGVGVDTAGQLLVTVGDNPQRLRGEAAFAHLCGVSPIPASSGRTHRHRLNRGGDRQANHALWRITLVRMHCHPPTRAYVERRTKQGLSKLDIMRCLKRYIAREVYHHLTDPPAITPATCPK

SEQ ID NO: 197484 - protein, 425 aa, unidentified
MNYKQNEKINQVKESTLVVGIDIGSTTQYARAFDWRGIELGKVFPFSNSREGFESFKAWMQHLQDKYKKLDAIVGIEPTGHYWFDLGTYLEDEGILLVMVNPYAVKQTKELDDNSQSKNDRKDPKVIAKLVTEGRYSAPYTPDGVYADLRIMVANRKRLIREMTQIKNRFARWFAIYFPEYTDVFGDYEAQSSMLLLKKVCTPEAIVELGAEKINQIWRDAKLRAVGMKRATTLCETAKRSIGLKKGSSAARYEMKLLLEDYEYKKAQLDAVMEEIEKLCRKIPESEQMLAIKGIGVITVAGFLAEVGDVRRFESPRQIQKLAGLSLRENSSGKHKGQTTISKRGRSKLRAVLFNAAIPLIAKNPEFKSLHEYYTTRANNPLKKKQSVIAISCKLIRVFYAILAKGVTYDAQKLISDIHRQPQVA

SEQ ID NO: 197485 - protein, 341 aa, unidentified
MERVSMIGLDLAKNIFQVHAVDKRGHCILRKSLRRAQVSAFFAQLPACIVGMEACSSSHYWGRVIASCGHEVKLIPPQYVKPYVKTNKNDAADAEAICEATSRPHMRFVELKSPEQQSILLIHRERDGLMKDRTALINRLRATLGEFGIAVPSGPARLKQWFRDSYGIDEELLPVLMQRHIQRMRARWAELESCIAELDNEIDEHVKQNEACKRLLEVPGIGRLTASALVASVGNALAFKNGRQLSAWLGLVPNQHSSGGKTVLRGISKRGDAYLRRMLIHGARAVLRHIGTKRNAVSNWLYALSTRANRNVVIVAMANKLARIAWALLNKGQRYMEPAIG

SEQ ID NO: 197486 - protein, 349 aa, unidentified
MTRSLIFEVLIVDHIGIDIGSRESQVCVCNDAGEVIEEVRCKTGDLSSVLAGRAKSRVIVETCTEAFRIADAAIAEGHEVRVVPATLVRSLGVGQRRIKNDERDARVLSQASSRIELPSVHIPSTTSREWKALSTSREALVRARTQLISTIRCYVRSRRSAALRATPESLPPKVRTALLGTEGGLPEHIERVLVVLESLNEQIAAAAKELAELAENNELTRRLMTTPGVGPVTAVRFVAAIDKVERFPSGTFVASYLGLTPGENTTGFRTKRTRLTKAGAPEVRWALGQAAWSIFLQRKESPMARWAKRVAARRGRQVAITALARKLSQVLYALWRDGTTYSSEKAQVH

SEQ ID NO: 197487 - protein, 324 aa, unidentified
MGEDASYVGIDVAKAWLDVGSWPAAANLRVGNDAAGIAQLVERLSARPPRAVVLEASGGLEALVASELHAAGLTVAVVNPRQVREFARSLGRLAKTDRLDALVLAQFAQSAHSNGRLQPLALADEAQLELKALVARRRQLVGFLVAETNRRERAPKVVRKSLVQSIRGLKKALTEVEQQLRQVVASAPAQQAKAKLMTAVPGVGPQLSVTLIAELPELGRLGRREIAALVGVAPHARESGTFKGRRMIWGGRARVRTMLYMAALSAVRHNPVLRTCYQGLLDRGKAKKLALVACMRKLLVILNAMLRDQRPWNPNYLIDLQHSR

SEQ ID NO: 197488 - protein, 416 aa, unidentified
MDKQITSSAAGIDWAKDEHALCVIEQSGRKILLEGRFAHDERGIAKLCRTLEEMGVERVAIERPEGILVERLLEAQITVLVIHPNQLKASRPRFRASGSHAKSDSFDAFCLAELARTDHHRFRVLVADSDESRALKVLTRAREDLVGTRVGLANQLRAELEAFWGGAAVLFSEIDCAISLAFLKRYPSPTDAARLAEKRLESFLSQNRYTGGKSAPELLQRLRKAPQGRASEAEIEARREAVLALVGTLEVLVERIKHLEDRIARAVRAHPDGELFLSLFRSPNSTLTAASLVAHIGDQRERYPTNEALAAAAGMSPVAVESGKRKVASFRRACDKRLRRAVATLAESTRHHNRWAKDIYRRARERGCDHAHAIRILGRAWVRVIFRMWQEGQPYDPARHRGLRRLRSAEGLPQGV

SEQ ID NO: 197489 - protein, 419 aa, unidentified
MQAIIERCCGLDVHQETVVACLLVGAPGAQPTKEVRTFRTVTRDLEALRDWLREAGVTHVGMESTGIYWRPVYAVLEGHFELIVGNARHMRNVPGRKTDVKDSEWIADLVRHGLIEKSYVPPQPLRELRELLRYRRKLVESQAAERNRLLRLLETANIKLASVASDVFGVSGRAMLRALIEGEASPEAMADLARGQLRRKRTDLILALDGRVEEHHRFLLAVQLRRLEAIEADIAALDLRIGERLEPYSAPHALLMQIPGVDWVVAAVLIAEIGVDMSVFLSIYHLSAWAGVCPGSYESAGRQKSGRARKGNIHLRAILVGAAMSAARTKGSYLKDKFHRLKARRGALRAALAIAHKILVCAYHMLAKNLPYRDLGEAYLDQIGQTRTVANLKRRLERLGYRVILEPNAPAQATPAPAR

SEQ ID NO: 197490 - protein, 426 aa, unidentified
MRSVGRSIGLDVHRDFCEVAIAQDGEVRSSGRVGTTPEQLELFGASLDPRDRVALEVSGGAWEVARILERHVARVIVVSPADTGIRQARAKTDRLDARTLARLLAAGELDGVWSPDERCRVMRRRLSRREQLVRARSRAKNEVHAVLVRRLVGRPPVADLFGVKGRRWLATLELPLEETETIQACIRHVEFLDSEIAAVERQIASEALDSPEIRRLMTVPGVNVICAATFMAAVGEIGRFPTQRQLVGYLGLDPRVYQSGSAPAMSGHISKQGSASTRWALVEAAWSAVRQPGPQHAFYERLRARRGHGIAIVASARKLACLFWFLLTRGEDYAHQQPSLTAKKLRLLEIRAGARTVKGTPTGVWATREAMREGERRLAEQAEASYRRMVSDWQAATPKKAGASVTLGRASQKPSKGKVARQTTSP

SEQ ID NO: 197491 - protein, 338 aa, unidentified
MYYTGIDLHKKTSYITTVDEVGKIVKRGNLMNDENAILSYFRELDAQTKIVMESMSSWYWLYDLLTANGMDVVISNPAKTKAIASAKIKNDKLDSHMLAQLLRAGLISTVHVSTLKTRKLKELLRHRNRLVGDATRVKNRIHILLTKNNYQVPFSDLFGNQGLKYLVDLGLPDYHRAQVDTYLALHEHLVHSIEPLSKTIQALAKKDPAARLLMSIPGVGPIVAMFIIAEVEDISRFPSYRNLASYAGLVPSLDSSAGKDRRGRITKQGSAYLRTALIEAAQVIPRMHKCRLNAFFRKRIVRSGYQKAIVATAHKILQIAYYVLKNQTAYQEEYSACA

SEQ ID NO: 197492 - protein, 428 aa, unidentified
MTAQHEYRAEVTLVAIDVAKAWNTVLVEEPDGRRQRFRVANTRSDHDRLVLYLKSQPVPCQVALEPTGNYHRPLAYRLIREGVEVYLVSSVAAARYREAMFNSWDKNDAKDAAVILDLLKQGKVLRYYDPMVAGTHDLQEISKTYVQVTLARTRLQHSILTHFLPLYWPEFGRYWHSSRADWFVRFLKRFPVPEAVRRMEREVFIQEAWPLVGRKVNKRAKLEEIYELAAETIALPIAPESLAVQTFRPQLERYLSLNQLRSQLETWAQEALGKNEDSQLLQSIPGIGPALALMILAEAGDLRRFGHHRQFLKFCGLDLAKSQSGAWRGKERLSKRSNARLRYAFWMAGTVAVRMRENSFREKYERYIQPDPTDPDRKRKALMAVMAKMARVAYAIVKTGVPYRAYFEAAVPSGSIPLSRAVEAIRTS

SEQ ID NO: 197493 - protein, 350 aa, unidentified
MIVGIDVHKHNHAAALIDDRGGEIATLTIANAPKGYRGLIDWLVDHGAAKAVIGVESPGSYGRCLVTALVGAGFEVLQVPAWRTHRERHRRGPGKTDPGDALSIAHVVGTKREDLGPAEEPEIVRVLGMLELQRRRFVRDRVQAIQRLRADWVQHDPVAESGVIRCERQRELKKLKRLQLGEGLAERTAARCIRELARDVEDLNARITQLDREIAQLLVEHDNPLEDLHGAGSNLAATIIAQAGDVRRFRNASAFARFCGAAPIPCGSGQTAGRYRLHRGGNRQLNAALYRIAVVQQRHHPQGRTFLARKIAEGKTPREARRALKRHLANVIYRRLYAWANTAPSMNLLT

SEQ ID NO: 197494 - protein, 355 aa, unidentified
MNSEKYIGLDVHQATISVAVLDSTGKLVMESILETKATTILQFLAGLRGTLSVTFEEGTWAAWLYDLLRPHVANLVVCNPRKNALLKDGNKSDRIDARKLAELLRGGYLKPVYHGENGVRMLRELARSYLTIVKDLTRVMSRLKAVYRSWAIPCAGRDVYYARHRAQWLGKIKEAGVRRRAEQLYQQLDMLQHLRQQARRELLAESRKHAITAKLRQIPSLGPIRSALAVALIQTPNRFRSKRQLWAYSGLALETRTSGEHCYINGQLRRSKKQISVRGLNKDHNHHLKGLFKGAATTASVRPGPLQEFYQASLAKGIQPTMARLTLARKIAAITLTLWKKGENFDANKLKSQAT

SEQ ID NO: 197495 - protein, 319 aa, unidentified
MSKIILGIDVAKLKLDVALIFEQKTLTRQFDNSPSGFKVLSAWLRSLQIERVHACLEATGSYSQTAALFLHEAGHLVSIVNPFRIKGYAKSKLQRNKTDKADARLIADFCLTQNPSQWFPASVQTAELQALTRRVENLEEMLAMEKNRLSVSSSKTKASVKRVIRLLEREIETLRSNIKEHIERNSELKEQHRLLESIPGIGARTAQLLLSEIEFSRYESARQVAAYAGVTPKKKESGSSLNCTNLSKMGNNRIRKGLYFPAIVAGEHNQIVKEFAARLQKNGKTSMQIICATIRKLLHIAFGVLKHRKPFDVNLAFAG

SEQ ID NO: 197496 - protein, 368 aa, unidentified
MSNYVTAIGLDVHARSISACAFDPMTGEVSRARFGYDPASVAEWALGFESPKAVYESGPTGFHLCRALRALGVDCAVGAVSKMHRPAADRGRKNDRRDAEWLARLLACRNVVEAWVPDERTEAARDLSRALADARGDLQRAKQRMSKFLLRHGHVFDERTPTGRRKGNWTRAFWRWADVISFDEPDDAAAYEHYRDCVRRCQEARDELARKVAESAGRPEWKPIVDALRCVKGIDVATAFLLACEAGDFSRFPTAPSFASWCGLTPSEHSSGESASRGGITRAGNAHVRWALVEASWHVPMSSREPKPLAPGQEASSAVRRHATKCNRRLQDRREAMEASGKRPVVANCATAREMACWVWAIAGMAAA

SEQ ID NO: 197497 - protein, 379 aa, unidentified
MKSIKLHLGLDVHKDSITIAIAPAGAQGEIRLFGTITNDLHALQKALARIRKAHPGAHLEAAYEAGPCGFGIARRFQQLRVPCLVAAPSLIPKQPGAPFKTDQRDARSLARLLRAGELTAVYVPEPTDEAIRDLCRARTDAVDDLRRCRQRLKSFLLRHGYRYQGKANWSQAHMRYLRELLLPHPAMKTILEEYLQGIDGAHQRVQRIEANMLALLEHWRLKPAVQALMALRGFQLVAAMLTVSELGDIHRFSHPRQLMTYLGLVSTEHSSGPKQHLGAISRCGNGHLRWLLAECAEHYALPPKVSKELSRRQQGQPPAVLALSWKAQNRLHLRFTRLLARRLQRNKAKIAVARELCGFLWALLRTQSSYRQSTGGAAS

SEQ ID NO: 197498 - protein, 383 aa, unidentified
MLKPTTKAERKLASKPATQPVVSAAEVALAAAASAVVAPRTIGLDLSARKSSYCVMNADAKRGAEGTLAMDRGAVTEFFQAQPPSRVVMEACTSARWVADVAESLGHEVVVANPRTFVLIAASSRKSDRNDARMLADFGQFRPDLLNPVTLRDPIAHNARSILIARDALVTCRTRLVNSVRSIMRDVGHILPACAAERFHARVRDLIPEDKVLVVGPLLQELESLSRTIGTYDATITKLCEETFPQTEVVQQVAGVGPITALGFVVTVGDPQRFPRSRDVAAYFGLTPRSYASGDKTPELSISKCGDAFMRRLLVGSASYILREGSPDTDLKRWGMAIRARGGQASKAKARTAVARKLAVLLHRLWVTGEVYRPLREPQPDAA

SEQ ID NO: 197499 - protein, 376 aa, unidentified
MKNDSTLYVGLDVHKESISVAYAIDAGAVESLGKIGTTKAEIDRLCKRLQSKAPHVRVVYEAGPCGYGLYRQLMERGFECMVCAPSMIPRKPGDRVKTDRRDAMKLARALRAGDLSAVHVPTVEDEAFRDLSRAWATAREDLRQAKQRVKSFLLAHGVRYAGRGDWSGTHKRWLSSYSFGNAWQQLAFEELRRTIDDRLAQCERLEAALREVVVTWRFFPVVQALQAMRGVQFLTAVGMVSELGDLSRFMHPRQLMAWFGVTPSEHSSGGKRRQGSITKTGNSYARKLLVEAAWSYRHPAKVGREIQQRHEGLPKSIVDRAWDVQVRLCQRYRKLVARGKSANIAVVAIARELVGFIWDVARLAMLPASSESAARP

SEQ ID NO: 197500 - protein, 504 aa, unidentified
MPQPKRSRSRTGLSAVHPAAAAIDIGATMHVAAVGPDRDTEPVRTFQTFTDDLHRLADWFARCGVKTVAMESTGVYWIPVFEILEQRGFEVMVVNARDAKHVPGRKTDVSDAEWLQRLHEYGLLRPSFRPQAEIAGLRAYLRQRERLLDYAAAHIQHMQKALMQMNLQLHHVVSDITGVTGMNIIRAIVAGERDPNVLASHRERGCHASVETICQALVGNYREEHVFALSQAIELYDVYQTKVAACDRQIEVILKRLKKSATPPASKLLPPKHRSRQPNAPSFDARAALHAILGVDLTQIHGLGPYLALKLVGECGTNLTAWPTAKHFTSWLGLAPHNKISGGKVLSSKTRRTSNRAASLLRLAAVSVGRTDTALGAFYRRLAARAGKAKAITATARKIAVLFYNTLRHGMSYADPGATYYEERYRQRVLGNLQRRAKSLGYVLHQAERDPIQMVVSEESCDLLGIPLAQRDSEPGPTRPSRSHRPTVFRSSRPVLLSGFHAPA

SEQ ID NO: 197501 - protein, 412 aa, unidentified
MEVLYHCCCGLDVHAQTVVACLIKDGRKQTRTFSTMTDDLLALLDWLVAEGCTHVAIESTGVYWRPVFNLLEGQVEVILVNARHIKAVPGRKTDVKDSEWLADLLRHGLLKASFIPPLEIRELRELIRYRQRVIGDQAAIANRVQRIIESGNIKLGQVASDVMGVSGRLMLRALANGEQDGQKLASLARGRLKQKAEPLKRALTGRLSAAQKFVLGELLDRYDELERAIEKVNKEVGKEVATSSDPFVEAAIKLLETIPGVGRVVAEVIVGEIGVDMTKFATDKHLASWAGRCPGNNESAGKRKSGKTREGNRSLRVALVQAAWAATHTKGTYLAAQYRRLVKRKGRKKALVAVGHSLLVMIYHILQRQESYKELGGDYFDKQQTKGQCQRLVRQLQALGMKVTVEALPALA

SEQ ID NO: 197502 - protein, 354 aa, unidentified
MSIVAHSHPFVVGVDTHARNHVYAVFAAGTGELLDTREFPTTPAGISRAIAWVARRTGADADTLWVIEGAASYGAVLAGTVAAEGFPIAEAPRMDARKRRGVGKSDALDAHRIGAAVLPLPLEKLRRPRVNDGVRQALRILITARDAMSTERTRSVNALTALLRTHVLGMDARKPLSVGQITDVSRWRAREEELSLSIARAEAVRLARRVLELDEQLKSNENQLTELVQISEAAPLLQEPGFGPVAAATCLATWSHHGRVRNEAAYASLAGVNPIPASSGNTVRHRLNRGGDRSLNRALHMVALTKMAHDPETRKYVEKRRAEGHTNREIRRCIKRYLARRIYRTLNASCTNAA

SEQ ID NO: 197503 - protein, 408 aa, unidentified
MTVVGIDVSKGKSMVAAMKPGGELVAAPYEVRHSDIELSHLALDVLCMEPDTRVVMEATGRYHEPVAALLHSEGIFVSILNPLLIKQSGAGSLRKVKSDPKDALKIAKYGLDNWSTLREYTPMEAIRQQLKLCARQCDLYNKNIVMLTNNLISLSDKTFPGVNELFSSPEKADGHLKWVDFYRTFWHCDCINRMSPDAFEERYKKWCKRKGYHFSTDAADALYAASCRPYTTLPRDNNAKLLVTVAADQLIALRENQSKLEAEMLNLCKQLPEYETVMAMYGVGKSTGPHLMAELGDVRRFPHRSSIVAFAGVDPGVVGSGKMQLSSVTTSKRGSPQLRKALFQVVSTYVKCKPENEAVYQFYAKKRDEGKPFFVCTTAAANKFLRIYYARVKECLNAVESATQVEEG

SEQ ID NO: 197504 - protein, 339 aa, unidentified
MKLYSGIDLHSTNSYLAIIDESGKRIFKEKLPNDIVAITERLSLYSGTLEGVVVESTYNWYWLVDGLMAEGFAVHLANPSAIQKYSGLKHADDKHDAFWLAEMLRLDILPTGYIYPKDERPIRDLLRKRSHLVSLRSSLMISLQNIITRNCGSKMKTNDIRRLKEDRVQPLLAGNEDLALAGKVSKDSIDFLTRQIRSIETFLEKKLELKESYKKLITIPGIGKILGLTIMLETGPVERFEKVGSFASYCRMVSSQWTSNGKSKGKGNKKNGNKYLCWAFSEAAELARRYDDKARAYYNRKLSKTNFMIAHASLAHKLSRAAYYIMRDQADFAPEKIFT

SEQ ID NO: 197505 - protein, 359 aa, unidentified
MDTKNCGTGQILYNIGIDQHKHYSMVGVMDQAGNKLMVQKLYHNDKEAIKEFFRQFPSTSARIALEATGFWYWLYDLLESLGLEVKLVHPLKVRLIAENRIKTDKVDAFALAELLRLDALPVSYIPSHEIRDCRELLRHRIVLVHQRTSLKNRIESVLSKLGIEKEVVNLYSLEGKSWLKGLNLSEPYQLELNNYLELIEKLTEMVVGLDKHINKYLTKDERAKYLESIPGVGRYTAYLILAEIGDINRFGSAKKLASYAGLVPSVHQSGQVKYFGRITKEGDIYLRCGMVEAAHVAVRFDEGLKARYQKLRRYKGSAKAITAMARELIEIVYCVLKEKRNYYRKYQKTKGLELITTTE

SEQ ID NO: 197506 - protein, 343 aa, unidentified
MNATTYAIDLAKNVFQLHWVEPGDGEIHRKKLQRSKVLEFFAQLQPCRIAMEACGGAHYWARQLRSLGHQVELLPPHKVKECASGNKDDARDARAIWVCATLTDVRRVGIKGEEQQAQLFTHRVRTHWMSQRTATVNLLRGMLYEYGLVAPKGRQVVVRWVAEHRASIEQSVPPVVLEMLDQQLQALRELDERILACERIQQQHQRCDPVIRELLKVPGIGPLGASALRAELGDGSGWKNSREFACCKGMAPAHTGTGGKVRVGAISKRGDAYVRTLLIHGARNLVRGANQPTWIAEMLKRRPFNVVAVAVAHKLARIAWAIVVRGERFDPLRAFGPTPQPAR

SEQ ID NO: 197507 - protein, 412 aa, unidentified
MEILYAICCGLDVHKDTLTACLRRRGAEGQVTKELRTFGTTTTELLALLDWVTAAGCTHVAMESTGVYWKPVFNILEGHVAQLLVVNAQHIKALPGRKKDTLDAEWIAQLLQHGLLRGSFIPPAPIRALRECTRYRKQLIRTRADEANRIQKLLEGANLKLGSVAADILGASGRAMLAALVRGETDAPTLAGLAKGRLRRKQPALVTALTGQITPVQRELLGHQLAHVEYLDRTIAALDTQVATLLAPYQAAADRLRTTTGIEQRTAEVLIAELGADMTVFPSDRHCASWAGLCPGHDESAGKRRSGKTRKGSRWLRAALIEAAWAASHTRGYLAAQYRRLVRRRGRKKATVAVAHSILVIAYHILKDGTTYRDLGHDYFDKRDTVRLQRRLIARLEVLGLRVTVEPLAQAA

SEQ ID NO: 197508 - protein, 429 aa, unidentified
MTSKSCTTSPVVRVAIDVATLTHQVLLELPSGTRRVLRVANTKAEIDRFVATLRALELSCEIAFEPTGDYHRPLAYLLGQAGFHLCLVSSIAVARTREALYNSWDKNDPKDAQVILHLLKNGTTQRYLDPLMTGYQDLQEIAKTYQQISLRKVRLQHSLVTHHLPLYFPEAERYLHSSRAEWFTELLLFTPCPTAVRRYTKTAFVAAAREQIGGRKVDKARWLADFYETACSSVGLPVSEASETMRMFRVVLEEYRALCQLRKRLETDVVTRLANQPDFVRLQTLPGIGPILAMIILAEARDLRRFGCARQFLKYCGFDLCTEQSGQFRGTTHLSKRGNARLRYAFWMAGTVAIRMQQNSFRRKFDDYIRRDPQNTDRRRKGYTAVAAKMARVAYAVVTTGIDYRRFPEATRPGGRIPSPGAVEAHATS

SEQ ID NO: 197509 - protein, 346 aa, unidentified
MEHYAGIDVSLELSSVCVVDAQGKIVKEAKVASEPEGVVAFFEALGFAVKRIGLEAGPLSQWLHAGLKEAGFETVLLETRHVKAALSAMTVKTDRKDARGLAQLLRMGWFQQVHAKSMASREVRALLVGRKQLLGRLIDVELSIRGILRGFGLKVGAVTRKGFETRIRELVTGQATLERIAEAMLSARAALKAEYEKLHQAVLAIVREDAVCRRLMTVPSVGPLVAITYKSALDDPSRIAKSKAAGALFGLTPKKYQSGEKDVTGGITRTGDEMVRTALYEAANVLLSRITRFSKLKRWGMDVAKRRGSKRAKVALARKIAVILHRMWIDGTTYRWADAKPIAAQA

SEQ ID NO: 197510 - protein, 387 aa, unidentified
MQKPHDNSKASPAAFMQDNTLIAVIELGLSNWLVAGLIPGVSREPLKKLEPNPEDLLKLLHGWRDEAIKAARPITRIAVAYETGRDSFWLARWLRERGIDAHVIHATSVAVSREHRRAKTDRLDTAMLKRGFLGWLRGERGHCTVAIVPTMEEEDAKRPHREREGLVHEQTRVVNRMKSALIQFGVRNFNPKLHKARAKLETVRTPEGKSLPPNTIAALRRDMERLKIIKEQIKAIEQTRLQQFEQKPEALANRMVYLLVRIYGLGWETADLLVHELLSRTLRDRKAVARYAGLTGSPDESGSKRREKGLSRSGNARVRKIMIQLAWRMVKFQPDSALVQWFKQRTENAKGSRKPMIVALARKLIIALWRYANDGVIPEGFKLHSAA

SEQ ID NO: 197511 - protein, 351 aa, unidentified
MLIIGCDYHPSMQQIAFVDTETGELGERRLQHSHEEAGRFYRELKGRGVKVQVGMEATGYARWFERLLGELGFELWLGDPAEIRARRVRRQKTDRQDAQLILRLLLEGSFPRIWAPSPENRDLRQLLWHRHRLVQMRTRIMNQLQAVAMNEGVRRKRALWSEAGRKQLQAIELAPWASRRRRDLLELMDRLNPTIQELTLAVETEAASRPEVQRLMTYPGVGPLTALCFVLVIGTPQRFSCGKQIGSYLGLIPDEDSSADSQRFGHISKQGSSLLRFLLVEAVQVAARVNGEWRRRFLHLALRRGRKIAKVAMARKLAVHLYWMWRREWEYKQLKQFGSHAGQPELRHGVK

SEQ ID NO: 197512 - protein, 309 aa, unidentified
MEHFVGIDVAKDRLDVHLRPSAESFAVARDGEGLVQLVERLQNLAPRLVVMEATGGYETIVASAVAAAHLPLAVVNPRQIRDFARATGKLAKTDRIDAAAIAHFAEAVRPPIRPIADAEAQVLGELVARRRQVIQMIVAERNRRRRATQGRILRAIERHLELLQSELSELEEDIDGAIRKSPAWQADAELLVSVPGIGPATLRTLIADLPELGRLDRRKIAALVGVAPINRDSGTMRGRRAIAGGRPAVRTALFMAAMVASRKNPIIAPYYAKLRAAGKTAKQALTACIRKLVVILNAILRDRKPWQPA

SEQ ID NO: 197513 - protein, 349 aa, unidentified
MNFYNSTHRHYCGIDLHARSLYVCILDQQGETLLHKEIPAKPEPLLNLLEPYLDDLVIGAECMHCWYWIADFCEDQGIVFILGHALYMKAIHGGKTKNDRVDSYKIAALIRGGNFPLAYVYPRSMRATRDLLRRRTGLVRHGGDLKAHVVNTTSQYNLPPNKVNLKNVSAREQLGRTFDDPLVQRHIDLDMAVLECYHRELSQVEWLLEKQAKKHQPTYYHLLKTIPGVDIGRILALTILYEVGDIRRFESVQKFASYSRLIICKAESAGKTYGTQGNKIGNAHLKWAFSEAAVLYLRGNPGAQKLLQRLQKRMGKAKALSALAHKLGRAVYFMLKNEKVFDEQRFLTS

SEQ ID NO: 197514 - protein, 342 aa, unidentified
MKDIMIGVDLAKNVFQVHGALRTGEVQFRKKLTRKQFPVFMARQEPCLVIFEACGSAHYWAREMEALGHEAKLIAPQYARPFVKRQKNDAADAEAIVIAARQPEMRFVEPKTVEQQSRAAVFRSRERLVHQRTADVNALRALLYEHGHVFPIGTRYLNRMTALLEDETSDLPELIREECQDLLAQIAEKTARIAERTAKLKTLASQSDKARRLQTMPGVGPLTAVAVEAFGPDMAQFKTGRDFAAWLGLVPRQHSSGGKERLGRMTKAGQADIRRLLIIGAMSRLNWLGQRTIAEGSWLSRMLARKPKMLVAIALANKMARQIWAMLTKNEDYKDPALAVAA

SEQ ID NO: 197515 - protein, 365 aa, unidentified
MQKISTMRGNAKNIFKGQLTIGLDLGDRSCAYCVLNETGEIVLEHKVATTPEAMKQVFGSMPRCRIAMETGTHSPWVSRELTALGHEVIVGHAQKVRLITKSRRKDDRLDARTLARLARIDPELLSPVKHRSAQAQLHLTEIRARAVLVSARTALVNAARGLVKSYGERLRKCGTQQFRRETTSGLSTGLREALDPLLREVESLNERIQEYDRRIDKMAKETYPETALLKQLKGVGDLIATTYVLTIEDPHRFRKSRDAGCFVGLQPGRRDSGDSEPQMHISKEGDEYLRTLLVQGAHYILGPFGEDSDLRRWGQKLAARGGKNGKKRAVVAVARKLAVLLHRLWVSGEVYEPLRNSQKAITVAA

SEQ ID NO: 197516 - protein, 344 aa, unidentified
MNTTEARDGLYGGADLHGNNVFLTVCDGQGQRVMERRVKANLNAVNQAMEPYWERVQSLAVESTYNWYWFVDGLRSQGRDVRLANPAKMGQYAGLKATNDASDAGWLAEQMRLGILPESYVYPPEVRPIRDALRRRMLIVGQRTQSLLSLESLFARCGLECPGVAELKDWKRSQVEALKLDRFTQLQLDSLLELVRKQEGLAQWIEGAVLKAVKPTGEFARIQQVPGIGPILGMVIVLESGDFGRFASAGNYASYCRKVKSERRSNEKKKGENNRKNGNRYLAWAYAEAAVHAIRCYPRIRSWYERKKSRRNVPVAMNALGCKLSKAAWHVMRGKDFNEAMLFG

SEQ ID NO: 197517 - protein, 392 aa, unidentified
MFYIGIDVSKDKHDCFCCNDNLQPVFQFQFNNDSIGFNQLFEAIKSLDSPFDNIKIALEATGHYSYNITSFILDNSLPLAIINPLHSNLFRKSLSLRKTKTDKVDACVLARMLIAYPDLKFSTSLDDNDIILSELKSLTRFRLSLVKDLSKLKTSLSRIINIVFPEIEKVFSSTNSLYELLYNFPSAKEIANAHLTKLTNVLIKASKGHFSKEKAVQIKELAQNTVGNSSYALTLELKHTIKLINEYNSSIDKIDKEITTIMDKIASPITSIPGIGITLASIIIAEIGNFDNFDSPDKILAFAGMSPTIYQSGKYVASSAKMEKRGSKALRYALYNAARLTSIYCPVFKEHLARKRSQGKHFNVAMSHVVKKLVRVIYHLQTKNELFKNVIN

SEQ ID NO: 197518 - protein, 435 aa, unidentified
MDEVHGIRLLEFRQLKREIRGSRQHLIVGIDVAKERHNAFFGTATGRTVHKGLVFDNTIEGFQKLLALTEALKVQYVLTQVVFGLEPTANYHKPLGEHLIKCGHTVVLVSATAVKNNRSLLDGRWDKHDTKDSANVADLISQGKCLYYDYPDPRIRDLRGLLALKRRLKKEEHSLRVRIRNQLLAQYFPEMDRLFRCATSLAVIGRCLNPSMIAGMEFDEFRRRVVPGRLDMPQQKQLSAIWRMAPESIGCHAGDAVPFEGQVMASKLHQVRETIKAVEDKIEDLCSQFPEYQCLLSIPGFGPDVSSKVLGAIGWAFRFVTCKQVLKMAGFDLCAERSGKTSNSATPVISKQGKADLRYALYQAALIASLRNKGFMCYYTNKLRDRQREKGIGTKMRVKLAAKLLVIAWTLMKKKELFDPSYLTKGDVKAQVGSK

SEQ ID NO: 197519 - protein, 429 aa, unidentified
MKRIRDHVAGIDIGAQKVFTSVEGEPVVSHLTFTEDFHKLRDYLLEHKVETVAMEATGVYWVILYELLEESGIDVWLVDGRQTKQVPGRKTDVKDCQWICELHSYGLLNRCLVVDSDIKELRAYTRMREDHIASASRHVNQMQKALTLMNIRLKEVLSQIHGASGMAIIEAILNGERDRTVLVGLCHRSVLKNKRDLVLKALEGKYTEAGLFALQQAYDGYQFYQNQISSCDKKISEVMNRIGNNGSGQDKRKRKPIRHNKPVVDKLDSNLLNIFGNKDATDISGITDYTWMNLLSEIGSDLSKWPSEKHFTSWLGLSPGQSNSGKRIRNARKKGKPRAGQIFRTIAQSLINSKDIAIGAFGRRLRGRKGPAIAIKAMARKIAIIYWRLMVKGVDFVERGVKSYEEQIAANKLRTVLKLANELNLHIAK

SEQ ID NO: 197520 - protein, 345 aa, unidentified
MLYVGLDLSRKRLDWQALLADGERAAIGAVPPDRDGLAKLVRRLGDGEGVLAVIESMSGARFVHDELELHGWDVRIADAVKARGIAPLACKTDTIDTWVLAELARLELVPEIWLPDPEVRAERERARFRLHLVKHRSSLKNRIHAILFQHGVPNPGSDFFGVGGRELLAGLQLPDPWASTVAASLELIDLLDERIAACEQELRRLGAEHRYIPLLMSCPGIGWVLAFTIASEIGDIARFGSPRKLVGYTGLCPRVEQSGERDRRGRLRKNGPSYLRWALVEAAHTANRHPCYRPVHERFLARHGRKRGTKLAAVEIGRRLAEAIWHMLTTNQPFAPAGAPASLAA

SEQ ID NO: 197521 - protein, 333 aa, unidentified
MNHIGIDVGSKELVVVVSTNGKARKAKSFENTASGHQSIIHLLTKLKGACRVCIEATGVYHFDLAVALSRAGDIEVMVINPKVSHNFSKALMTRSKTDAIDAEVLAVYVERMLFVAWERPADQCIGLRVISRRISALSKQKAQTKNQLHALSSTQESPQLVIEQTEALIAVFTQQITLLRDAALELIQQYEALKQAYILITGIKGIAQAASIQILAELMILPDDMSARQWVAHAGLDPRIFDSGTSVSKKPRISKVGNKYIRQALYMPALVACRFEPNIKGYYHHLIDDNGLKKVQAICAVMRKLLHAIHGMLRTNKEFEGSRFYVLPSKENA

SEQ ID NO: 197522 - protein, 345 aa, unidentified
MHIASIGIDLGKATFHLVALGERNKILLRKKFSRTQLLAYTANLPASLIGLEACAGAHFVGAALREQGHQVRLIPAQFVKPYRKSNKSDFIDAEAIAEAVTKQNMRFAQLKTQEQLDWQAMHRVRDRLVRRRTALINEIRGFLLERGITFAAQPIHLRKNLPTVIEDAEQNLSPRLRWLLDRMWQEWKQTETEIQAITDEIERISNEDARCRQLRQIPGFGPLVSTATVAAIGNGSAFGRGRDFAAWVGVVPRPYSTGGKQKLYGISKRGNVDLRRMLIHGARSVWFRVQYDTGGFGQWVRRLAQRAPHNKVVVAIANKRARIAWAVLSSGRDYRHQPLQQRAAA

SEQ ID NO: 197523 - protein, 419 aa, unidentified
MSFKILKFNCCGLDVHKTWIYACIGITDSNNRTEYKQARFSSFTKGLNELCDWLAKYNCTDVCMESTGKYWIPVFNILEQHNLWVTLSHPKYTKPMKGNKTDRKDAKWICDLYMCGMVKPSFIPPADIRELRDLVRYRYKLTCMITGEKNRAQNCLTVSNLKLDDVFSDVFGKSSRSITEQILQHPGEKFDVAPFVHGRCKTPIEEIQAAVDGAISKEQAVKLRQCLDHIDELNKHISEVEQEILRLSDKYEAALNLIRTVPGFDKNPMTAVQILSEIGGDMSVFPTAKHLVSWAGCCPRNDQSNQKIKSTRISRAGSYFKPVLVQVANALIKSKKHLEFTNRYKRIKARRGHKKAIIAICRMILTAIWHILSDLKPYTPEGFLESRPVNKEKVLTTSQALNLLKQRGYFIKDDPLSVS

SEQ ID NO: 197524 - protein, 332 aa, unidentified
MDNCIGIDVSKASINVHISKNGEDLQFVNSIKGFKSLHSKLKKIYKKEIADNIFIFEPTGSYSETLRKYCYQQEIKCFIINPKQFSNYAKALGVEVKNDIEDARVLSKALPVAKEYQIRVPQYNKDVERIKELMSYYKFTTKQTTQQKNHLESLTSKDGDLFSIKELKKSIKESQAKEQRILDQIQMVIDKNPEYKKSYDNITSIKGVAQIGGIALLHLFLKYPEANQRQITSLAGLNPIYKQSGTSVQSGYKVSKAGSSIYRGSLFMGVLTAVRFEPIFQTFFNRLIANGKHTTQAQIAVMRKIIITAHSLYKNDRKFDQSFNSKEVNITE

SEQ ID NO: 197525 - protein, 340 aa, unidentified
MNATTYGLDVAKRVFQMYWVDAQTGEIVNRRFGRDELIRFLAQRPAGQVALEACGSGHWWARKIKALGHEVVLLHAKFIRPFVQTNKTDAADARAIWTAVQQPEMRTVAAKTEDQQAMLSLHRMRALLVKFRTMQVNQLRGLLYEFGATFRAGRVAGLAEIRARMAELADALPEAMLCSLQDQLQRIDALEQDIDRLEQRIGAWQKQEAECRAIAAVPGIGKLTATALVATVGDAKTFKSGREFASFLGLVPRQSGTGGKIRLGSISKRGDPYLRTLLIHGARSVMCHAKVPTTWQTQIRARRPANVAAVALANKMARTAWAILAHGQAYQKDYVRVKPA

SEQ ID NO: 197526 - protein, 428 aa, unidentified
MNAVESIRLEEFRQLKKQIRGSKDHLIVGIDVAKDKHHAFFGTATGKTLFKRLVFENTSEGFEKLLIQAEALTLQHCLTKTVFGLEPTANYHKPLGEFLIKGGHMVVLVSGVAVKRNRELLDSRWDKHDTKDSANVADLISQGKCLFFEYPPMTLRELRGLLSLKRRLKRQEHGLRARIRNHLLATYFPELDRYYGQSEPDGLSIVRWCVNPSVIAGLDYAHFLQLVAPHRRSLAQQKRLQAVWKLASDSIGCEAGEALEFEAKVMVETLEQIRDSIGATDHKIEDICLQFPEYHYLLTIPGFGPEVSSKVLSAIGNPFRFTTGAQVVKMAGLDLSADRSGKGSDAAIPVISKKGKADLRYALYQAALIASLRNRHFIAYYTHTLRGRDREKGIRTKMRVKLAAKLLIIAWTLMKKKEPFNPEYLNRE

SEQ ID NO: 197527 - protein, 360 aa, unidentified
MRHLSAKLLSDRNSSEWEPSMGEVTTIGLDLAKHVFQVHGVDAEGATVLRKQLRRAQVLAFFSRLPPCLVGLEACATAHYWARELRALGHEVRLMPAQYVKAYIKRNKHDAADAEAICEAVGRPTMRFVPVKTADQQAAVLLHRGRERLVRQRTGLVNALRGHLAEFGVIAPQGLRNVGKLIAIVRDEGDARLPDLARQVLQVLAAQIEQLEAAVAAIEKQLMAWHKSNPVSQRLASVPGIGPIIATALAATVVEPSGFRSGREFAAWLGLVPRQNSTGGKHRLGGISKRGNQYLRRLLINGASANLLRSKATKADPWVIGLRRRRPPLVVAVALANKTARIAWAVMHRHENYQRVAAAA

SEQ ID NO: 197528 - protein, 392 aa, unidentified
MIIVAVDVAKDKHDCFITNTDGEVLYDSFAIQNNQEGFEDLYQKICSVTDSSQNVKVGLEATGHYHLNLLGYLLDKGFPTCLINPLQTSLFRKSLSFRKTKTDPVDARAIARLLMSDRTLQPYSLTSYQNEELKSLTRYRADKVRERAKLKSSLSRLVVILFPELEKLVPTLHMPTVYDLLNEFPGASHIASAHLTRLSHLFSEASKGHYGKDDAIRIRNAARRSIGLVLPSKSLELQHTIAHIRFLDREIDEIESQIFALLDKHPPKMLDIPGMGPRMAAVIVAEIGDFRRFSSPDKLLAYAGLSPTTYQSGQLTSTYAKMEKRGSRYLRFALFNATKYVCVWDPTFRAYLAKKRAEGKHYNVAVSHAAKKLVRLIYHLETTGETYVSKAC

SEQ ID NO: 197529 - protein, 397 aa, unidentified
MLHAGLDLSRRKLDVCLLSQDAEIVEEFAAPPDADGLRGLARRVLAHREPVRGVIESMTGARFVHDALEELGWDVLIADAAKVKGLAPLACKTDKIDARVLALLSQRDLVPEIWLPDSTVRRERELARFRLHLVKHRSMLKHRVHATMITCGHPCPVSDLFGVAGRELLDRLEIPQPWRATVDASLRLMDDLDVQIQQINKQLRALSPEHRYMPLLMTVPGIGFVLAYTIAAEIGDITRFSAPQKLVGYTGLCPRVNQSGDRDRRGPLTKQGPKYLRWAMLEATMHALRHEAYRERYQRTKRRLGKQRGAKVAQVDIARKLTEAIWHMLTRNQPFFIETSMSSGRFRWFGRLCAVTRPCSARGAGCRCDYGVLGRAKACDARTSCSTMSSSASLRGA

SEQ ID NO: 197530 - protein, 343 aa, unidentified
MDRTPRWFAGVDWASQKHDVWLADASGKRLGKRTFEHSGEGLAQMCSWLMATSGGRPEDIHVAIEVPHGAVVETLLDRGFKVYAINPKQLDRFRDRFSPSGAKDDSRDAETLSSSLRTDRRAFHQVALADPAIIELRECSRMADDLSADKIRHANRLREQFRRYYPQMLQLGSDLAEEWIFALWEKAPAPAKAARLRQTEVEKLLKRHRIRRIGAAEVLAILKQPALVVAPGVTEAAVAHVRVLIESIRLFTQQLKEVHRQLDRLCNLLAEPIPGRNEQSGPEPGQTLVAILQSLPGAGRIVLAVLLAEAFETLQRADYAILRMLCGVAPVTRRSGKGWAVTP

SEQ ID NO: 197531 - protein, 338 aa, unidentified
MTTGLAAGTYELFVGIDIAATTAEVSIQRPGAKAGRSFKIDQTPEGFHRLVHTLQATDNEPSHVLVVMEATGSYWISLATRLVHEGFRVSVINPSQAHHFAKALLKRAKTDAIDAQTLAQLAMVLQPEPWMPPPKIYYELQQRLAQRDDLLNLRQQVRNQLHALDQHPEVSASVRTRMERLLVLFQSQIDEVEGEIAAALNQESAWAAAAERLQSIKGVGWVTAAWTLVTTLNFTTCDTVDALTAYAGLAPMPRQSGSSVWHRPSIGHSGNGRLRTAFYMATLTAARFNPAIKAFYNRLLEAGKPEKVARCAAARKLLHMAWAVVKKDQPFDPNYAQE

SEQ ID NO: 197532 - protein, 441 aa, unidentified
MDDCCPECSVSTQAKLVFPSHLSRATQKGTNGMQVLYARCCGLDIHKKTVVACMLLTNPDGTIRRVVRTFGTMTADLLALGDWLRLHEVTHVAMESTGVLWRPVFNLLEEGRTLLLVNAQHIKAVPGRKTDVKDSEWLADLLRHGLLRPSFIPPAPIRVLRDLTRYRKTLVEQRTQEINRVHKVLETANIKLGAVASNVVGVSGRHMLEAIRQGESDPQVLAELAKRRLREKLPALRLALDGRVQAHHRLLIGELLDHLDYLDRAIHRVEVDIAALVAKEEKAVELLLTLPATGAVTAAAIIAEIGTDMSRFPSAAHLASWAGVCPGNKRSAGKQLSGASTKGNKQLKTILCEIAATIARTPGTYLHALYQRIARRRGKPRAMMAVAHSLLVSIYYMLRDQVAYHELGPDYFDQLQAQHLERHYVRRLEALGFQVTLTSAS

SEQ ID NO: 197533 - protein, 313 aa, unidentified
MDMNESVVVGIDVSKDRLDVALHPSGEHFAVSNDHAGLEELIARLGASRPTIVGLEATGGYEMLAVGSLSAAGFGVVVVNPAQVRAFANALGRRAKTDPIDAAVIAAFLVATKPAIRPLRDAETQTLSELIARRRQIVQMVVAEENRLRMALAKQAQKSIKRLLTALRRELENLDADLDSHIRKSPVWRVRETLLTSVPGVGPTTARTLLAELPELGNLDRRQIASLAGLAPWTRQSGKWKGKSFIGGGRGKVRAVLFMAALVASRYNPDLKAFRDRLVAAGKPKIVATVATMRKLLTILNAIIRDGRPWQNA

SEQ ID NO: 197534 - protein, 366 aa, unidentified
MKKTSTVRVNGNMIFKGHQLTIGVDLGDHWSCYCVLDEAGKIILEQKVATTPEAMKQTFSKIPQSLIAMETGTHSPWVSRLLTELGHKVIVAHAQKVQLITKSNRKDDRHDARTLARLARIDAELLGPVRHRSAQAQIHLTVIRARAELVRARTALVNAARGLVKSYGQRLPKCGTRQVSRELGAGLHAELREVLEPLFKEIESLNERIQEYDARMEKIAKASYPQVELLKQVKGVGTQIALTYVLTLDDPHRFPKSREVGSFLGLRPGRRDSGESQPQMRISKEGDRYLRTMLVQGAHYILGPFGADSDLRRWGLKLAARGGKNAKKRAVVAVARKLAVLLHRLWVSGEVYEPLRNSQKAMRVAA

SEQ ID NO: 197535 - protein, 320 aa, unidentified
MLSFCGIDVSKDRLDVMVLPEGHRSSVPNDVAGWAELVEQLRDCSIAAIGIEASGGYERGAMRALLAADLPVRQVNPFKLRQFARASGVLAKSDPLDARMIASFVATMPTRPAPRQARAAERLTEMLAVRRQLSAEKVAAENASRLLEDAMLQRLSRRRIARLAADIDVLDQRLVEIVATDVALAHRYRLLTSMPGVGSVLACTLIALLPELGRLSRKQVAALVGVAPYAFDSGALKGRRCIWGGRANVRQVLYMAAMSASNWNPALKAFHDRLAAAGKLPKVVIVAVMRKMITMLNAMVRDDLAWAERRCSRHIVPTAC

SEQ ID NO: 197536 - protein, 426 aa, unidentified
MVKVTRGMRRRTAKLARRSEIVNSRTLVAGVDIAKRESVVVFVRAADKARVGRLRVPTTPEGVRRTLDRGRQLAGQHGCDRMVLAMETTGHYWKILARSAERIGLPYVTVQSFVVARARELDDLTRDKTDQRDAGLIADLTVELRFNEVQLETGAWAELRSLANARDRYRVDQRAALQEQRALLELTWPELLRDVPDLDGSHLQAMLRLGLSPVAIAGLSRARFTARLRREHSSRFLSWMAGRLWAAARDAVAEDQSPAATLRLQLAGQRNRAGAIAVARLDAELAAAFDATGLAWLRGQIRGLGDGQLHTLLALAGDPRRLDDARCMVKLAGSNPTERSSGEQQAAGGIHRRGRPLLRLLAHQAAVCLVRHNPDFEARFTELTTRSHRPLHKKQAYLAVANKLLRTLWALAVTGQPYQRALQRAA

SEQ ID NO: 197537 - protein, 420 aa, unidentified
MTDMDRFVFFVGIDWGTEAHQVCVLDAQGQPLGERQVLHTAAALEALLGWLAKLSDGGAPSAMAMAIEVPRGPLVETLLERGLTVFSLNPKQLDRFRDRYFPAGAKDDRRDALVLASALRTDRHCFRLVRRDDPQILRLRDLSRLDEELGVNFRRYACQLREQLQRYYPQLLVLCPQADEPWVWSVLEAAPDAAKGRRLSQARIEKLLRAHRVRRLCAAAVVEQLRAPGFALVPGTVEAASEHALLLLPHLRLLAQQRAALAARTETVLEQLAGEETVEGEKQQHRDVTILRSLPGAGRVVAATMLAEAGQALVERDYHALRAYAGVAPLTRQSGKHRGVQMRYSCNERMRNATYHWARVSTQHDAVSKEHYRRLRARGHSHGRALRGVADRLLAVLCAMLRSRTVYDPSLRHGPLRSAA

SEQ ID NO: 197538 - protein, 332 aa, unidentified
MFVGMDVHRNRTQVCVLDRKGNEVRNRNVANDRQALRKELAGLRRGTPVAFEAAYGTGWIAELLGDLGFEPHLALPAGCRAIADAKLKNDRVDARTLANLLRTGYLAEAWLAPKEVREQRLLLRERARLVRIRTSAKNRIRAQIADEGVPAPNHGLWTKDGAAFLDALDLSPMHRWVVSDCQVLIEVLQSRITLLEAEIRRQAKPDKRVDALMAIPGIGLLSAMTLVAEIGDVTRFATSRKLCAWAGIIPSMRNSDRTLHHGHITRAGPAAVRHVLSEAAQTAIRKEPYHSDYLATKRRRGTGIALIRVARKLLTESFHALWALEDEQRQCS

SEQ ID NO: 197539 - protein, 311 aa, unidentified
MTDYTIGVDISKSHLDAFRLEDRAAQRFENSAAGFRALSKWLGTASVARIVYEPTGPYHRGFETALSGRFTLAKVNPLQARRFAEASGTRAKTDAVDARILAQMGAALAPEPNAPVSEASRDLRDLQVARTALVKERTRLRNRDQTQGNRVLKRQIKTRLALVERQIKELDAEIAKRIAKDEAMARKREILCSIPGLGQVAAAAILTFLPELGTMGRKQVGSLAGLAPHARESGQWKGKSFISGGRKPLRDALYMPALVAMRFNPDLKAKYTALRNAGKPAKVAIVALMRKLLETANALVKADRLWVEKAT

SEQ ID NO: 197540 - protein, 362 aa, unidentified
MPPHRLEDEGMTMTTLTRSITGGVDTHLDVHIAAALDERGTLLGVESFATNLRGYRQLLTWLESFGEVELVGVEGTGSYGAGLTRHLHDAKVRVVEIDRPNRQRRRRRGKSDPEDAVAAARAAKAGEANGEAKTRDGNVEAMRVMRVARSSARRARTQALNQMRSLISTAPEPIREELRYLNVYRLLEHCVAYRPAEKRDLVSITKRTLKMLAERSVSLEEEIGELDAVLKPLVRVTAPELIACSGVGTDVASALLVAAGDNPERLRNEATFAHLCGVSPIDASSGKHERHRLNRSGDRNANSALWHIVITRVVFDPRTRHYIERRMKEGLTKKEAVRCLKRYVAREVFNLLPRRHFAIDSP

SEQ ID NO: 197541 - protein, 424 aa, unidentified
MNCNQNFKISQVTEGTLVLGIDVGSNTHYARAFDWRGLELSKVFKFKNSFEGFQSFVLWVNDLCCKYNKSKVIAGLEPTGHYWFSLGELLKENNITIAIVNPYHVKQSKELDDNLQTKNDSKDPKVIAKLVIDGRYSFPYIPEGIYGELRVADKLKNDITQQIISIKNKIHRWLSIYFPEYENIYSSIDSKSGFLLLKETPLPKDIVELGSEGIVERWKQTKLRAVGLDKAKKLEEAAKKSIGCKNITSSARFEIKLLIEDYEYKQNQLNSITEELNKLCEKIPMIKEIAEIKGIGIATAISFVAEVGDIRRFKSAKQVQKYAGLALKENSSGKHKGLTRISKRGRKKLRTILFRATIPLIGFNKEFSSIYNYYIERKDNPLKKKQALTAICCKMIRIFFTILSKGIKYDETKMLHDIKRPVAA

SEQ ID NO: 197542 - protein, 355 aa, unidentified
MVGSISEAKSSVSGVTDPYCRTEHCGKIHPYRCDKEVGVLGIDVSKDNLITSRGGKYENNLKGYEKILDMKPCTIVLEPTGVYSIKPSQYFKEKGIRVLQVSPNVLSREKDFREKKTDFYDAEKLENMVDKAKEYEYNVLRELVTLYLFLKDMEVKQKNRLKRALFLVSDNDKINKERLERLASGDFAQEVLYQLEYTPIVLEEVKILAKALFETQEKLKEVKEMIESQVPEDHVLLTIPGVGKLAAGIIIGVVGDIRRFPKPESFVAYCGLDPVVERSGKAVVSKGISRRGNKYLHSLFYFLAQMNCSKNPTLLRFYESHKDKLHGRKLYTALARKLAKVVWSVWYNNKPYEPK

SEQ ID NO: 197543 - protein, 348 aa, unidentified
MTMLADSADAVIGVDTHTDTHTACMLDHLGRQIATVTTTADPQGCQMLLAWAVRQMPGSRLAWVVEGTRSHGLGLARMLQASGHVVVEADRPARASTRPGGKSDPADALRAARDALAAEKLAQPRSDGPREALRILLTARAQASTARTAAVNTLKALLLGAPDNLRQSLRGLTTPQQASKCRSLRAHAHQPVAEQILRTELRRLATHIRTWDRELRANKAQLRQLVAQIMPALLDQPGVGPMSAAQLLVSWSHPGRCRSEAAFATLAGVSPLEASSGKITRHRLNRFGDRQLNRALHVIINWRMLHHCPTQAYLARRAGHKTEREIRRCLKRYAARSLFRLMETAART

SEQ ID NO: 197544 - protein, 321 aa, unidentified
MVYVGIDISKSNFVAAYPSSKGYRTQTFPNTAAGVRKFIATLSVAEHHCIMEATGNYGFLLLYLLHQSNIAVSLVNPKQIKHFARMMMAVTKTDEKDACMIAMYGEKMNPPIYKMPSQAIILLKQKKTVIRQLRKQLVASKNLRGSLAVLPYQDKACLRTLDKTIDFLTKQIEQLESELADIASSEFDKQLKALTSIKGIGITLATALILTTGGFTYFDNAKQLSRFIGICPTYQQSGTSVNIRGHINRNGDEGLRSLLYVASWSALRSNAACRECYLRLKANGKPSKVALIAVANKLVRQAFAIATTDSTYIDGFISAKK

SEQ ID NO: 197545 - protein, 378 aa, unidentified
MHKDSVYLCILRENGEKIERVYGVLTPQLDSMRDFMAENEVSEVAMESTSVYWIPIWRVLVDSFELKLVNPYFIKQLPGRKSDVKDAQWIAECVMKELIRGSFIPPPLIQQLRLYDRRIFELNAELVRKYSKIDAILQRCNIRLSNYVSNTDCKSYKNVVKRISEGVTSPQELLMLVHKRIINKHGEDTILAALTGVVSEAEIDMLAQYVAESALLEDNKNKCIEKMREICNREFEEQMKNLQTIPGVSERSALTVLAEIGPDVNAFPSAKHLVSWCGFNPRNDESNKKIKSNKITHGNRFIRIASVQCAWAASRTKDCYFSKFYAFHTQVRKKFKLKVVVAVARKILVCIWHILKSNVSYKDFEPQKSVAKDCTQLA

SEQ ID NO: 197546 - protein, 400 aa, unidentified
MLLFFEVITMIFDGIDVAKDTHYAAVSDDFGAVLVKPFAFQNNAEGFCLLLKKLSEFDRSKLLIGLESTGIYSENLICFLYESGFRLAVINPIQTATLRKTAIRKTKTDKVDTMLIIKSLMVNSYRLYSQRDADSLKLRTLCRFRQNLKKSKARMKIQLAEYVNLVFPEFGKFFKSGIHIAASYALLKKYSSPKEIAALRTSTLCTLLSNASHGRFGKDTAEALKSLALSSVGVKNPYISIQIAQTIAQIELLEQQIKDLNSAIEEAMESINSVLMTVPGIGAVNAACILGEIGDIKRFSKPCKLLAYAGLDPTVRQSGQFTAKSTRMSKRGSALLRFALINSAWQLTLNDTTFKAYYDLKRSQGLNHYGALGHVAHKLTRVIFKLLTSDTPFNPAKLVA

SEQ ID NO: 197547 - protein, 356 aa, unidentified
MSRDIKYIGMDVHKEAVVIAVLNSTGKLVMESIVETKASSILQFIHGLRGELHVTWEEGTWAAWLYDLLQPHVQQVLVCDPRRNALLKEGNKSDKVDARKLADLLRTGMLRPVYHGEHGLRTLRELARSYQTISKDLNRVMNRIKALYRGWSIPCAGTQVYAPRYHQEWLHKIEHAGVRRRAELLYEQLDGLQALRRKLRPELLVESRKHKAAKLLRQIPCIGPIRAARLLALMQTPHRFRSKRQLWTYSGLGIETRDSAQYRFVCGQLQRSKKPQQLRGLNRNHNHEMKEIFKGAATRASCGVGPLREFYVALLDKGMKPEMARLTLARKIAAITLTLWKKEEGFDAELLKTQAA

SEQ ID NO: 197548 - protein, 349 aa, unidentified
MPVMIGVDPHKASHTAAALDEHGQLLDRQRIATTLDGYRLLRQWAVRWPDRCWAVEGAHGIGRALAQRLVGDGEQVLDVPAKLAARVRVLSVGHGRKSDPCDAVSVAVAARNAGGLRQVKVEDQATVLHLLTKRRQDLVATRTQTINRLHRLLMDLVSGGARRNLTANRAAALLATVIPAGAPAVTRWQLAGELVADVRQLEQRIAAIEARIKAAVAQSNTSLLELFGVGPVLAATFLGEVGDVGRFPSKHHFAAHTGTAPLEASSGQVIRHRLSRSGDRKLNHALYMMAMVQVRRPSAGQVYYQRKLAEGKSPKEALRCLKRRLSDAVYRCLVIDQAKQPPVMATTSN

SEQ ID NO: 197549 - protein, 354 aa, unidentified
MANYYIGADVDSKMTELAIEKKEKIIQRYRVPTTIPALREVLGSIPGTKFLTFEEGPMAGWMYRNLKDNVDDLIVCDPRRNKLIACDGDKDDSIDAAKLAGLLRGGYLRAVHQSEDMGMVVLKQWVSLYHDKVHDAVRQINKIRARCRMYGLRIPRRALRNLAVRSQWVAELKEKDLAEQLELLWIGFDATAKQARMAKKQLIRHSKDYEIIRYWSEVPGIALIRATTMLAYLDTPWRFASQKKLWKYCGVGLQRTASGTDKYGKANLGKLKLAWAVNRRLKDVVTGAAMSAINQKYNIFAYEYERMVANGLSQSNARHAVARKLLSVLWAMWKTMSRFDESLVCYSPGTLRAS

SEQ ID NO: 197550 - protein, 342 aa, unidentified
MSMVVIGIDPHKSSHTAVAVDQAGRKLACKTVRSDNDGLLRLRAWAARFGTELTWAVEDGRGVAGRLVRTLIGTGATVKWVPPKLMAACRTSARTRGKSDPIDALAVARAALREPDLPTAHLDQQALDLRLLTDRRENLVNRRTASINQLRWHLHDLDPALDQNHHDLTRPRALATLTSAITALDPGVRRDLTLDLLTEITTLGEQITQLEHQLTERVRPLAPKLLSITGVGAITAAKIIGETAGITRFRSPAAYAMHTGTAPIPVWSSNKPHYRLNRGGNRQLNTCIHRIAITQLAHHPPARHYRDTWTTNHPHATTKAALRALKRHLTNTIYQALKADLT

SEQ ID NO: 197551 - protein, 382 aa, unidentified
MNYTQNEKISQITPSSLIVGIDIAKEKHVARAQDDRGMEFGKRLIFENREHGFEMLCEWVVKHQKKQGKNHVIFGVEPTGHYWLSLAYYLKERGFDFVIVNPMHVKKSKELDDNSPTKNDTKDAKVIAQLIKDGRYSVPNLLEGIYAELREGVKVRDQLSKQLMITEGRIQNNLQRYFPEFFDVFKDWSGKAAICSLRCFPPFPSDVIQLTAEAVLAQWKTEVKAGVGIKRAQQLIDKANKSIGIQEGLRFAKREIHDLLDQYMLYQQQLEAIEEELEELVKEIPGAVEMIAIRGIGAMTVAGFYAEVGDIRRYRHPQQVINMAGYTLKEHSSGKHKGQTRITKRGRSKLRKLLYMAVRLLSPIIQRFRHYMSIIQIEKNAL

SEQ ID NO: 197552 - protein, 345 aa, unidentified
MNRTTIAVDLAKSVFQVAVADGDWRVVSRQRLGRGQLLRFFSERQPCLVVMEACGTAHFWGRWLSSLGFTVRLLPPQYVRAFVRRNKTDRSDAEALLEAARSTDLTAVAVKSEQQQALLSLHRLRSAWLASRTARLNTVRGILREFGVNIPRGARRVTAAVETLLGEANSPVPVVLHPLLHQACAEVRDLQARMEQAEDELERLARDLPIVALLRSVPGIGPLTSTALVASIGDVLRFPSGRHLASWLGLTPREHSSGERRRLGGISKRGDRYLRTLLIHGGRSLLAAANRRGGHDHLRAWGLEVERLRGHNRAAVAVANKLARICWAVWRHGERYQGRPIPKAA

SEQ ID NO: 197553 - protein, 347 aa, unidentified
MLIIGCDFHPGFQQVAIFDNRTGEMQEKRLQHRGEAEQFYRDVAGQEVRVGMEACGHYPWFERLLQELGYELWFGDAAQVRASVVRKQKTDRRDAEHLMHLLIEDRFPRIWVPSLEVRDVRQLLVHRHKQVQARTRTKNQLQAMALSHGVQKKYKLWTQAGRGELEQLPLLPYAAQRRQKLLAELDAGEAEIGELDRRVAEEARQRPEAVRLMTHPGVGPVTALAMVLTLGPAERFESAKQVGSYFGLIPSEESSGGKQRLGRISKQGNAFLRFLLVEAGQTAVRYDPQLKRFYRRLASRKNRGVAKVAVARKLATRMYLMLREGWTYAQLNQVVMSVSPSHSVAGE

SEQ ID NO: 197554 - protein, 414 aa, unidentified
MERVYRSIAGIDVHKKMLAVVVRRQSGEQVEYQKQKFGTNRATIQNLSAWLQAQGVSEVVMESTAQYWRPVWNGLEPHFRLHLTHPLKTLAPRGRKFDFRDAKRLTDRWSAGDLAESFVPDHELRTWRWLTRRRVQLKKEVSVVYCHVEGLLEQGGIKLSAVVSDLFGVSGWAMLERIAQGVTDVEVLAGEARGALRKKSAELKEALAGQLEPSYRMVLRQQMEQVRLFRKQVEEINQALTAAMHEHLATLHRLTKIPGVDLYAAQELLAEIGPTAAAFASAERFASWVGVCPGSKQSAGINYSNRSPKGNRYLRRLLCQIAWAAIHTKDTFFASLFARLKPRVEGKGANWAVAHRIAKVIWLVLHQGVEYQEKGSAPPNERTLVRKFKRMLKEFATLGLDARALLEQQLPRPV

SEQ ID NO: 197555 - protein, 397 aa, unidentified
MDIHKKVVVATVQGEGLCKETRSFDTFTRSLTQLREWLVSLGITHVAMESTGVYWKPIYNVFEGFIPHIWIVNARHIKNVPGHKTDKNDSEWICQLLVAGLLKPSFIPPKAQRELRDLTRYRRKLIQSVSANKNRIIRILEDGNIKLSSVLSDTSGATAVKLIDMLCDGKQITLSDIESVRHGRCQHTKEEMLEACTGCLDEHKVYMLGKIRECNASLKEDILDFDKRIKDVLSSYHDAIERMCEIPGIQNRVCEDLVAEIGLDMSNFPTSAHLCSWAGMCPGNNESAGKKKSSRTNHGDKQVKETLVEAAWAASRAKGTFFMERFNRLAPRKGSKKALIAVGHSLLKCIHYVLSTGGRYKELGDNYVPNKKEQKRKEYLKKELQKLGYSVTLSKED

SEQ ID NO: 197556 - protein, 575 aa, unidentified
MLPQPPSAPPAPRRFGVGIDTSRYGHYAAFLRDDLQPAAKELQFAESAAGYGQLRQRLEQIARRHGPCLFVVRLDAAGQYADNLLHFLRGLSATLPLALSCGDPQRNKNYRAAVFGSHKSDPVEARAAARFALTERPGSDTSLSLELRTLRQVAGRLQAVVRQRTRLINQLHHLLALAFPELALLVKDLAGGWVLELVHRYPTAARLAEASAGDLASVPYLPDRQVEPLLAHARSSIASQRGPAVEELVRDQVRQLRDAGARQKRLEKLLADAYHALPTANHLATIPGIGAVTAAVLTAFILDIERFASPAKLVAYFGTLPIEVASGVDRDGKARGPRRFVMSRRGNDLVRRYLWMAALSALRCNPAVRALYARVVAKHPDHKAIAVGHAMRKLLHLVWAIWKTGRPFHPDYYPWHAPGHVDGGRESSSAAEGQAAGHTPVEPAPLVVTAACTDNVNEVVAPGQGSAVDFAHIKRQLPIARVLDQLGLTPRLRGQGPQRRGPCPIHRGDARGRTFSVHLADNVFQCFARECGRQGDVIDLWAGVNGLSLRDAALDLVQTFGLEAVPRPATEKRNG

SEQ ID NO: 197557 - protein, 320 aa, unidentified
MQTLIEALNIGADVAKDEIVVACARGSFPARRLANQRSALLTFLKGLPRGSRIGMESTGAYHELLAEVAHKLGFTVFVLNPKDARHYAKAVGLRGKTDRVDAELIARMVAHEHAKLHPWIPPTPEQREISRLISRRAKLSSLRQALTMSLKGLEGFAPDLKALRARFDQLLARIDQRLKALIEASPERKQQVTHLRTIDGVGSVVGAALVNTLERVPLKSADAFVAFTGLDPRPDDSGQHRGRRRLSKRGPAELRRLLYVAAMSAKKKPTWKPLFEHYRAKGLSSTAALVILARRIARTAWSMYTYKTDFDPARLTKGLT

SEQ ID NO: 197558 - protein, 371 aa, unidentified
MEKSIMYVGLDVHKNSIEIAFAEAGRDGEVRSYGSIDGSLAALDKVIRKLVSKNYDLHFVYEAGPCGYDIYRHLAAQGFDCVIVAPSKIPKQSGNRIKNDRRDAQMLARLHRAGELTTVYIPSVEDEAMRDLTRSREDVKASERKEKQRILAFLLRHGHRYSGKSSWSRAHFRWISDIKMPHPAQQIVLQESLEALAECTYRVDRLTEQIQLLSPQWRMFPVTQALQALRGVSLIVATTAVAEIGDLTRFDGPTELMSYLGLVPSEHSSGQTTKRGSITKTGNGHVRRVLVEAAWAYRLPARVSRKLLIRQEGLSQEICAISWKAQLRLCARYTRFLIKGKSKQLIVTAIARELCAFMWAIANEVQNPGKA

SEQ ID NO: 197559 - protein, 367 aa, unidentified
MENHSIVWVGMDTDAKKNEVAVYRGWETEPAAEWSSSMDGTGIRKLIQRLKREPGEVRCVYEAGPCGYPLARKLRQAGIRCDVIAPSLTPRKPGDRVKTNRRDARNLGRLYRAGELTVIEVPNERQEAVRDLTRAREDVREDLTRRQHRLSRFLLRHGYTYEKRDKWTLQHWAWIRHIAFEDSNLKVVLEESIRAVEQSQEQLKSYDARIEEVAAEPEYAKKVGRYQALRGIKTITAMTIVAEAADLRRYATAPQFMGSTGLVPSEHSTGDHERRGKITKTGNAHLRRVLVEAAWHYRHRSIPGRTVKKRRADQSAAVVTIAERADQRLCRKFHKLVDRYNKKPTIAAVAVARELAGFIWAIGQQQE

SEQ ID NO: 197560 - protein, 333 aa, unidentified
MNTIGIDVGCKELVVVVMVNGKARKAKSFDNTPLGHQSIIQSLTKLKGESKVCTEATGVYHFDLAVALSRANDIEVMVINPKAAHNFAKALMTRSKTDAIDAENLAIYAERMPFEAWDRPADECIGLRATARRIAALSKQKTQTKNQLHALKSTVETPALVIEQTEQLIDILDVQIKTLRDSAINIIHQNKGLKQAYTLITGIKGIAQASAIQILSELMILPKDMTARQWVAHAGLDPRIFDSGSSVSKKPRISKVGNKYIRQALYMPALVASRFEPNIKGYYHHLIDDNGLKKVQAVCAVMRKLLHAIHGMLRTNKEFDGTRFYTLPIITNS

SEQ ID NO: 197561 - protein, 354 aa, unidentified
MDIKYIGMDVHKETISIAVMKGDGKLVMESIIETKASTILQFIEGVRGDLHVTFEEGTWAAWLYDLLKPHVAELVVCDPRKNALMKEGNKSDKIDARKLADLLRGGYLRSVYHGENGLRTMKELARSYLTISKDLTRVMNRVKALYRSWGIDCAGQQVYAPQHRSEWLNKIGETGVRRRAEFFYQQLDALRVLHKAVRRDLLAESRKHSATKLLREIPSIGAIRAALLLALIQNPQRFRTKRQLWTYSGLAIDTRDSAQHCFVNGQLQRSKKPQQLRGLNQNHNHDMKAVFKSAATMASGGEGPFHDFYQGLLTKGMEPAMARLTLARKIAAITLTIWKKGAHFDAKQLKPQAA

SEQ ID NO: 197562 - protein, 360 aa, unidentified
MHATTVAVDLAKSVFQLVVADEHWRITETQRLTRTQFERWFVNRSVGLVVMESCGSAHHWARWLNSLGIGVRLLPAQYVRAYVRRNKTDATDAVALLEAARAADIRPVRVKSVEQQALQGLHRIRSLWMGTRTSRINALRGFLREFGIAIPVGARTGIEAISRVLADPNTAVPELIRGSARLLVEEIRLLEARIAQVERELAAAARLSPACTTLLSIPGIGLLTATALVAATSGDVSHFQDARHFASWFGLKPREFSSGNSRYLGRISKKGDRYLRMLLTHGARSVLRAAKVAEGAGKEVCGVRRWALEVQSRTNHNKAACALANKMARICYATLRDKSAFDETARLSKKMNRQAFAMPA

SEQ ID NO: 197563 - protein, 372 aa, unidentified
MSNIYVGMDVHQQSITLAVLPAGEATPTRIDRLPNEPGALRRYLARLATPAPLQVCYEASGAGFVLHRALTAWGYACTVIAPSLIPTKPGVQRKHDRYDAAQLVRLFRAGELTAVRVPTPAEETLRDLVRCRETLQRELLKSKHYLLKFLARRGHVYRAGQHWTQAHLAWLETLADETSPLAGDDRLVFREYWALFQYKRDRRLVLDREIAARAADPAVRDAVGRLQCFRGIQVHSAMVLATEIGDWRRFASAGQLMAYLGLVPREHSSGGRERKGAITKAGNSHCRHVLVQAAWTYRHRPKVAATLRARQRTQPAPVVAHAWKAQHRLHDLFRHLAFRKQSKIAAVAVARELVGFLWSVMRDLEPAATPTS

SEQ ID NO: 197564 - protein, 339 aa, unidentified
MNLYVGLDLHSSNTYIGVLDQQFNRIFKKRVCNELDLILQTLEPFRGRLRGIVVESTYNWYWLVDGLMDAGYSCIHLANPSAIKQYEGLKHSDDQHDAFFLAQLLILDILPQGYIYPKEARPVRDLARKRLFLVQQKTAHILSLQSLLARCCGQRVTSNQLRKVSGRDLKQWLKEDNLVLSAKANLDNIVFLKQQICRLEAAIQKQVKLSEAFNCLLTVPGIGKILAMTIMLEAGDIRRFANVGNFASYCRCVSTQRLSDGKSKGSGNRKNGNRYLSWAFTEAAQMARRFNSRFRSYYDRKAAQTNSILATRALSNKLARVCYYIMRDQVEFREELASS

SEQ ID NO: 197565 - protein, 424 aa, unidentified
MSKKKSSVAGLGALYARVCGMDVHKNSVVACVRILNAKDGTVQSTLRRFGTMTADLLELRQWLREQQVTHAAMESTGVYWQPVFNLLEGHLEVWVVNAQHIKKVPGRKTDMKDAEWIAQLMQCGLLKPSFVPEREQRELRDLTRQQSKLVQQRNAVDNRIQKVLETANIKLGSVASDVLGVSGRRMIEALIAGEKDTSVLADLAQKKLREKIPQLQRALEGEVSEHHRFLLRQLLDQYDFLEKEIARVSERVGAVAPSSFRAAVEQLDAIAGVGERGARALLAETGTDMSRFPSHKHFASWAGRCPGNRESAGKRKSGKTPAANRHLDAVLTEMAHAAVRKKDSYFKSQYHRLAGRRGKKRAIGAVKHSLLVTIYFMLRDHKPYKDLGADYFDKLNPQHQIRYHVRKLKDLGQKVELSPTADAA

SEQ ID NO: 197566 - protein, 330 aa, unidentified
MLADQLDYIIGVDPHRDSHSVAVVHVHSGAVVFESTVIANSDGYAQALKLVDRHAPGRRAFAVEGTGSFGAGLTRFLTGRGERVLEVGRLRRERRSGGKTDALDAVRAARSALSQQQPSTPRAGGERQALQALVAAREGAVNAKRAGLCQLRDLLITTPEPLRSELRPLTRARLLQRLAATRPHGRQDRELRGSLLALRSIARRVLQLTAEERELAREIETLTRKLAPQLLDQPGVGPHAAAQLVLSWSHRGRITSEAAFARLAGAAPIPASSGQTIRYRLDRSGDRKLNRALHMILLTRKRSHPATIAYIQRRLQEGKTRREANRCLKR

SEQ ID NO: 197567 - protein, 348 aa, unidentified
MNYVGIDLHKEQSWFYVMDNTGKRISSKSISNEIKVLKEYFETIPRPFKLAVESTYNWYFFVDLAELYAEEVFLANSYELKAFAKRNKKTDKIDAKLIADVLRKGYLPTVYISAKQTRASKESLRYRMNLVKDRSKVIFRLKALLDKLGLQASGDFTTDKALNNIPFTSIPEEYRVIVEKYIEQLKWYRIKLYEYRKELERIVTLDQDMLNLMTIPGISFFSAALIKTTIADIARFKSFNRLCAYAGLAPRVSQSANITRHGPLNKNRCKHLQWILIENVIHFIKAMPNIANKHDRIKQRKGYNTAKVASARDMLKVVYHVLKEKRPFFKEKTDKINWTHAIPALSGV

SEQ ID NO: 197568 - protein, 458 aa, unidentified
MKKKNVGKGRKTQAIVMAQIEANAAGIDVGATEMYVAVPPDRDEDNVRCFPNFTADLNRLADWLKRCRIETVAMESTGVYWIPLFQILEERGFRVCLVNARHVKNVPGRKTDVLDCQWLQYLHSVGLLKASYRPAQQICAMRSIWRHRDNQVRMAARHVQHMQKALDQMNLQLHHVISDLTGKTGMAIVDAILKGERDPGKLADLRHGQIKASRETIMQSLIGDYRSEHLFVLRQALEAYRQYQQRIEGCDREIEQRLRAMEGKGDNNTAPSTKQSKKRQKPKGNEPRFELTGHLTRVFGVDLTQVPGISSLTAQVFLSEVGPDLSRFPNAGAFASWLGLCPNNRISGGRLLSSHIPNVTNRLNIALRMAAQSLHGSRSYLGDFYRRTKSRTSGTEAIVTMAHKLARILYRLVTTRQSYDESVFIELEQRNTQRRINSIKKQAAALGLQIVEPQPCVP

SEQ ID NO: 197569 - protein, 409 aa, unidentified
MQVVHEVCCGLDVHKKTVTACVVWATGRRRQTREFGTFTRELLELSDWLRASGVTHVALESTGVYWKPVWNLLEGQFEVLLVNAQHIKAVPGRKTDQKDSEWIADLLQHGLLRASFVPPTPTRELRDLTRYRASLTQEINRIANRIQKVLEDANIKLASVATDTLGASGRAMLEAIVNGEQDSQRLAEMSRGLLRNKIPQLQQALEGRVTAHHRFLLRELLDHHYFVESKMKRIEQEVAERLGPFQSEVARLCTIPGVDRVTAWGLLAEIGLNMKQFPDAQHLASWAGLCPGSHESAGKRKSGKIRKGSLWLRRCLCQGAWAVSTKKNNYLSALYRRLAARRGSKRATIAVAHKLLVIAYYILRDGTCYSDLGPDYFDRLNPEGLRRRLTKRLEGLGFKVTLEPLAQVA

SEQ ID NO: 197570 - protein, 412 aa, unidentified
MEVLYPHCAGLDVHKDTVVACMRHMATGSVEREVRTFKTTTKDLLALSDWLAEHGCTHVAMEATGVYWKPVWHILSDGDFVLVLANAAHVKNVPGRKTDVNDATWLADLLAHGLIRGSFVPDEQTQEMRNLLRTRKQLVRECSRHIQRLQKTLEDANIKLDSVISDIMGLSGRAMIEALIAGESDPERLAQLAHRRIKAPPEALCEALRGRVTRHHRFLLRLHLKQIDAVNAAIDDIDQEVDAQIEPFRTAIQLLITIPGVSELSACVILAEIGHDMNRFPTAAHLISWAGLCPKNDESAGKRRSTRMRKGAPWLKTTLVQCARAAARKKASYFQAQYHRLRARRGDKKAIGAVAASILTTAYHMLKYGTLYEDLGPDYFDKRGKGKHVHRLINRLQNLGFAVQITPVEAAA

SEQ ID NO: 197571 - protein, 319 aa, unidentified
MAQNDRVVAGIDVAKDKVDACIRSLSLRQTCPSGAQGQRKLMVWLRKHQVGRAVMEASGGYERVWAKVLREAGIEVRIVDPKRVRNFALSAGRLAKNDAIDAEMIAWFAETFSDAPSQAYNAAHEELQTLVKARLSLIDFRMRLVSRSEHAAAGLVRKGHAHILKSLASEIAKLEAAICAKVKSIPDFAERAEIIESVPGFAETSSANIVAGMPELGQVSDKIAAALIGVAPYDDDSGKRRGERHINGGRRWVRNAIYMPCVGAATLNNPVLKAYYQRLIAKGKEPKVALIACMRKLIVILNTMIARRQKWDPGRYALS

SEQ ID NO: 197572 - protein, 391 aa, unidentified
MIYIGIDVAKDKHDCFITNSDSEVLFKAFTILNNLDGFNDLYQKIESVMDDVTKVKVGLEATGHYSYNLLGYLIDKGLPTYVINPLHTNLYRKSLSLRQTKTDKVDARTIASMLMSDVNLKSYSDTSYHNEELKSLTRYRFDKVKERAKLKTSVSRLVCILFPELEKLVPTLHMASVYALLSEFPSAKHVATAHLTRLTNLLSESSKGRYGKDTAITFRDSARASIGSNMPAKSLELKHTIKLIQELDSEIDEIENEIKIIMDEINSPILSIPGINYRMGAMIIAEIGDFNRFDSPDKILAYAGFSPSTYQSGQLDGAYAHMEKRGSRYLRYALYNATKYVCHWDPTFAAYLAKKRAEGKHYNVAISHAVKKLVRVIYHLEKTKQQYIKAA

SEQ ID NO: 197573 - protein, 340 aa, unidentified
MKRFFIGIDFSKQKFDAAIFDSEKGLILDNKEFENIEAGYKLMLKWIKQTTKLDVKQCLFCGEHTGLYSYEFSKFTVKKGLNFWLESGYQIKHSLGLVRGKTDKADAVLISKYAYRHQDKAEPFKGIDTILEQMKDLYAFRKRLTNTKKSLEVAAKELYRVKSNDYIVCYINDNSAEIIKQIESQLKEVERKIKELIKSNNQINENYKLLTSIKGIGMVNAALVLITTGNFTLFTNARKFGCYCGVVPFSHRSGTSVKGKDRVSHMANKELKTNLTLAARTAVMHDPKLREYYQRKILEGKGKSLVINNVRNKLIHTMFAVVKNRQSYDANFHHPLLKAA

SEQ ID NO: 197574 - protein, 396 aa, unidentified
MMRFAGIDIGAERHMVAVLDEQGEVLCRSSPFGEDASGYARLFELLGPSADCLVALEATRHYWRNLFVALIAKDYVVAVLNPLRTARFAEEELRRTKTDAIDALGIARFAQQKRPRAAQLPDSVTEELRELERLRERVVEDFADRLRQLHRAVDLGFPEFTRYVRTLESQLAATILSRYPTAASFRGVSVKKLARIVYDGSHKIGEELARNLIEAAEKSVGAHHSEPYRLRIKYLCEDLDVLRRRLKDLARDVERKLDDHEVGKLLMTIQGVGPLTAACLIAELGDPARFDSPGAIASYVGVIPRIRQSGKKRFTKGPAIPLGNARLRKSLFMVVLQMVRRNPWLRQYYERLRAAGKPGKVAIIAAMRKLLTAVWSVATHRRPFVPIMPAPITKNT

SEQ ID NO: 197575 - protein, 370 aa, unidentified
MKEFNAFIGLDVHKDSISVAVAESGRAGEIRMYGTIANSPTAVAKLIRKLVSRHGAIEVVYEAGPCGYGIFRQLSEMNVVCRIVAPSHTPKRPGDRVKNDTKDAMMLARLLRAGELTFVWVPDVIHEAMRDLVRARQTSSDDVRKARALISMYLLKRGCRYEKGKPWTLKFRLWLTSLKFEHVATKYALQSYINRLEQAEGRRVEIDQQITDLIPEWDLAPVVTALQVFKGISQTTAVTLAAEIGDFSRFSSPRQLMSYLGLVPSEYSSGGKQRPGAITKAGNKIARVMLIEAAWGYRWPPKVGQILLQKRMNYSQPLKDTAWKAQVRLNKRFRQLEKRGKRNTVAATAVARELVGFIWYVAIGAMSMNT

SEQ ID NO: 197576 - protein, 406 aa, unidentified
MNAVGIDVSKGKSTVAILRPFGEVVQSPFEAVHTDSELSALAQRLKSLPGETKVVMEYTGAYYEPVAYILHEEGIFVSAVHPQIIHNYGNDTIRKVKTDSADAVKIANYGISAWMKLRQWAPEEDIRKQLKFYSRQYSKYVKLRIMLVNNFIALTDQTFPGVNELFTSPPRKSDGHQKWLDFAMEFWHCECVCNGTPAAFEKRYQKWCKKAGYNFSKEKAWNIFVLACGHCCVLPKDATTKLLIQQAIKQLNAISETIAVIAREMKAIAEQLPEWPVVSAFYGVGEVLGPQLMAEIGDVYRFPKKGSLVCFAGLEAPPYSSGKFESKDREISKKGSPHLRKTLFQVMSIVLQGKPVDDPIFQFLDRKRAEKKHYYSYMTAGCAKFLRIYYARVKEHLDKMEAVAEG

SEQ ID NO: 197577 - protein, 340 aa, unidentified
MRYLGVDLHKREFTVCYMDSSEQYTTKNYQMFQLRNFIQSLKPSDIIAVESTTNSYYFLSKTRPFVKEVKEVNPFQFKVISSSVKKTDAHDAYLIALFLKNGLLPEVRQKTKEEKEILLLAKTRDSLVKDRTALINRIHAALCACGIELKKEGLMHKKNLEGLLELPMDEFTKTAIKSLVPIIITINGSLKELEKEIVSKGKTTKGFECINSIKGVGDLSSTILLAVIGNIDDFKTPNKLDSYIGLVPSVRNSADTERSGRITKRGNKLARTVLIQCAYVVIRYSPYFKSFYEKLKAKKGNGKAIVATARKLLNLIYYTLKKNWVFEDFAAFKKKEKSEF

SEQ ID NO: 197578 - protein, 324 aa, unidentified
MFYLGIDVAKAKIDCCLILENSASKKKTKTFSNTPKGFEQLQIWLNQHAATSTQTIILMEATSIYHELLAKYLFDEGYQVSVTNPARARYFAQSMSKLNKTDKVDSEVLARFAMTANLHFWQPLPKHIQLLNALLDRRAVLCEDLQREKNRLEKAESTFTMEPVLQSLHKSIEQLNKHIQGIDQQIDDHIDQNPDLKNDKELLSSIPAIADRTSLLMLSFLRSHTFERASQAAAFVGLVPTQKQSGSSIHGRSHLSKAGSSKIRAGLYMAAIVATRHNPHIKGMNERLLANGKTKMMAIGAAMRKLVHLCYGVLKHQQPYQADY

SEQ ID NO: 197579 - protein, 449 aa, unidentified
MLDRLNPSVAGIDCGAAEHYVAVPPDRDPTPVQSFPTFTSDLLRLADWIMACGVTSVAMEATGVYWIPIYEILEERGVEVLLVNARHLKNVPGRKSDVSDCEWIRELHSVGLLRASFRPTDAIVALRGYLRHRQTIVESAGAFIQRMQKALVQMNLQLPLVVSDITGVTGLRILRDIVAGQRDPEHLAAHRDYRCRATTAEIVAALTGHCRPEHLFALQQNLEAFDLCQAQLAACDRAMETHVQTFTARVAAPSTPVPAPRVPKKPRHNEPRFEIRTPLHQLTGGIDLTQIDGIAPYTALKLIAKIGTDMTRWPTAKHFTSWLTLAPKNKISGGRLLSSRTQPSANRAAAILRMAVMGLSRTQTALGAFYRRLAARIGKPQANTATARKLAILVYRALKGELVYTDAGADAYDRHQRTRALRRLPQRAATLGFALVNRETGEVLSPAAP

SEQ ID NO: 197580 - protein, 401 aa, unidentified
MNSVGIDISKGRSTVAVMRPFGEVVLEPFEVLHTAQSLNDLAGKLKALDGETRVVMEATGNYHKPVAFVLHDAGLFVSVVNPVLIHDYDNNSLRRVKTDRKDAVKIANYTLDKWTRLRQYLPEDDTRLALKNCYRQYQQAVAVRTMLKNNLISSLDLTFPDANKLFSSPAKSNGCEKWVDFIGDFWHSECVSSLSSDAFAKKYLKWCQKHGYNFTRSKSDTIYACAVNAASLPKSPTSKLLIQQQVAQLKAVSQSVAAFQQEMLRLSQQLPEFDTVMEMYGVGPSLGPQLMAEIGDVRRFSSKKSLIAFAGIEPQPNDSGKIVGNDSGISKVGSAVLRRTLFLIMTVILKTQPQDEPVFQFMNKKRSEGKPYKVYMMASANKFLRIYYARVKAVMDSKHSK

SEQ ID NO: 197581 - protein, 349 aa, unidentified
MNKVNPKGGRLLVNHQIEELTMYFIGNDVSKKTLDLACFDQQRKRWSRPCKLDNNSKGWDTLIQWAEKQTQASREDICIVMEATGVYHLKVAAYLSLEGLNVIVVNPQQASQYAKSQNQQNKSDKLDARSLQEFGAQLKKYHLFIPDSIEINQLKALLSRMRQLDKDLQRERNRLEKCDFQEGSSWARASIKRQIGHITSEQKLTQQQIDQLIKKNHTLKQNQKLLHSIKGIGKLTSQWLLPLLSTQRFNNAREVAAFLGLVPCHKSSGTSLKTRGRLSGRGDADLRARLYMPAVCAITHDPAMKAFYQQLVAKGKPSKVALTAVMRKLVHVCYGVIKHQTPYIENYAA

SEQ ID NO: 197582 - protein, 346 aa, unidentified
MKYYAGIDVSLESASVCVVDERGLIVHEGKVASEPEALIGWLLKAGTKVVLVGLEAGPLSQWLHAGLSQAGLTVELLETRHVRAAFKAMSVKTDRKDARGIAQLMRLGWYRPVHCKSLPAQEMRALLVARKLLQEKLHAVEMSLRGILRNFGAKVGQTTARSFEGRVRALVDGQPTLQAVADGLLAARTTLARELATLDKRVRSTSRHDDRVKLMMTAPGVGSIVGLTYVAAIDVPGRFRSSSSLGPHFGMTPKRYQSGQIDISGRISKIGDGTVRSALYEAAHIILTKPVKDAGALKRWALAIAKRAGKKKAKVALARKLAVILHRMWMDWKPFDPTKAVGSAAA

SEQ ID NO: 197583 - protein, 437 aa, unidentified
MQTSPGGPASTPHYVAFLAIDWADQKHIWKLYLPESGQFHSGELDHRPESVELWAADLAHRFGGGQIAVALEQSRGSLFYMLSKYALFVIHPVHPASLASYRKSFSPSGAKDDHRDVDLILDLLLKHRERLRPIKTEDPRTRLLAFLGEQRRNLVDQKTAQLNRLTDNLKLYFPQVLDWFSDLDAPLVAALLRRWPTLPDLKTARCATLRKFFYQHNCRSKQSIDQRIGQISQAVAATTDSAVIESCTLLTPVLLAQIVVLVQAIKKLEQRIGQLFAQHPDAFIFDSLPGAGPALAPRLLTAFGTDRDRFATAADAASFVGIAPVRKQSGKMCVVAFRYACPKFLRQSFHEWANCSIRFCDWARQHYQHQRDKGKGHHAAIRSVAFKWIRILYRCWKDRTPYDHDRYRQALARRRAPQPSPVAWPLWKTAAGFSKLA

SEQ ID NO: 197584 - protein, 353 aa, unidentified
MTLYIGVDLHPHQQTAAWCDTRTGEADTVDLKHDLGKVRAFYTGFREPAIVGIEASAKMSWFETMVFETGHKLFVGNPVLTASRRSSRHKNDRRDAELILELLLRSEFPAIWRRPLESNQVIEIMGLRQSLVRQRIQCYNRLQRLAHSIGMPKVRMKTAAAQSVLKAAGMDEADSMRREHLFSLIEQLDGQIDKLSKWLMKKAEENSSARLLQTQKGVGYLTALVTVHTLGDVTRFKKVSKAVVSFAGLDPREMSSAGRARFGSITKAGSPLLRHHLGQAVMTATRYDPRLKAFYKRLTKKKPKAVARTAASRKLLVKLSIMLRDNITAEEFDQRGRTVGNARRIARSEMTAA

SEQ ID NO: 197585 - protein, 347 aa, unidentified
MEHIAIDLGGKKSRICVRDSKGTILEERNYSTERLSQYLENRPVSQVVLETCSEAFAIADQAKQLGHEVKVVPATTVKALGVGSRRVKTDKKDARVLSEVSCRIDIPSVHIPSARARDWKTLCSARDCLVASRTKLINHVRGWLRTQLAEVRSGGVQTFPERVEEKLLSRPEGMPVYIDRELTVIKTLNEQIVAADKELEEIAARETRCRNVMTVPGVGPVTALRFVATIDDVSRFPGAHALQSYLGLTPGENSSSTRERKTSSTKAGAPAMRWLLVQAAWCAWRTRPDDPMVRWAKQVAQRRGNQIGIIALSRKLAGILYAILRDGTRYESKRGSQVVALPADSTT

SEQ ID NO: 197586 - protein, 344 aa, unidentified
MNSTVIAVDLAKDVFEIAVANRAGKIQERLRLNRSQFNKLLIHREPAELVFEACGTAHHWGRVATEHGHLVRILPAQYVSPYRQRNKTDKADTEALVEANKRDGIIPVPIRSVEQQQILQIHSLREQWKKTKVQRINGLRGCLREIGFFIPLGARSVDSRVRAILSEEDIPVPLAHLYNELLTEIAELEAKIKQAERSLKDLTQDDQRVQLLQQVPGIGIMTSTAMVASVGNPHRFSNGRKLASWLGLTPLERSSGNRRRLGKISKRGDCYLRMLLTHGARSVLTRAKLLKRTDQQLTPLQQWAAQLEQRVGHNKATCAIANKLARICWAVWTTESSFNYQVTS

SEQ ID NO: 197587 - protein, 336 aa, unidentified
MKKLKQTVGIDVAQNELVCTFGYLLEDLSIGLKSSMTFKNSLTGFKKLKKWADKLTDDKKPFFVLEATGVYHQKLAHWLYDNAYQIVIVLPNKISNYCKTLKIKTVTDKTASQAITRFGLERKLERWMPSKPIFRKMKQLTRERDQIIAERTTIKNQIHAEKTEAFPNTNSLKRLKARKKLLDMQELAVKNDIEQLVEQDIEIRERISNMTSIPGVGILTAAIVLGETNGFELIRNKRQLTSYAGLDVQEKLSGTSVKGKPRISKKGNRHLRKAVHLPALSAKRFSTKYHGSFERLVAIHGIKMKALVAIQRKLLELMYTLYKNRTNFDPNFGCYP

SEQ ID NO: 197588 - protein, 418 aa, unidentified
MNEDGNTRGSKRYVALDIHKHYCVVAGVDRDGRVQLAPVRVEHADLEGWLKQKLCPTDHVVIESTTNAWHVYDLLEPLAERVVVANPIEVKQIANARVKTDIRDTLILARLLAANLVPEVWVPPVYVREMRQLLSQRRQLVETHTQIVNRMHSVAHRHHLQHARGKRFNEKTTGWQKDKTLSSLEQFQLGLEMENLTYIQKQIERISQEVRKLCHQKPWAESMTYLMQLPGFGVITAMTVLSAIGDIQRFETPRHLASYSGLTPGLEQSGTKNRGKGITKAGRRELRWALVEAAQMAVKSDPLLKMKFQALQKRMHRNQAIVAVARRLLELVWYVLTRRQPYRGFTQERIAYKYLTWAWRMDEAARAGLTRQQFARYYLMRLGIGHDLTRIALDPKHPRKLASETELLALRPELQHIE

SEQ ID NO: 197589 - protein, 338 aa, unidentified
MNKFSGIDLHSNNSVVVVSDESDQVVYRRRHANDLKEILGVLEPYRAELVGVVVESTYNWYWLVDGLMAAGYIVHLANTTAIKKYDGLKYSGDDADAAYLAKLLRLGLLPEGYIYPRETRGARDLCRKRLQLVQCRTAQILSIENILSNQTGGRMTSAQVQRLTPEQIEALGFAPDVTLALQANAAIMMALQQQILVLEERLKERVQLNADFALLKSVPGIGQVLATTIMLETGTVARFAQVGNFSSYCRCVQSLRISNGKKKGEGNTKNGNRYLAWAFVEAAHFALRNCPQAKRFYERKKCQRNAVVATKALAHKLARACYHILREHKPFEVERCFA

SEQ ID NO: 197590 - protein, 350 aa, unidentified
MVIIGCDYHPGFQQIGFVDTETGDYGEQRLEHSEGAEKFYRDLAAQGKKVRVGMEASGHARWFERLLAELTFELWIGDASEIRAKRVRKQKTDRQDAQHILQLLMENRFPKIWVPSGENRDLRQLLWHRHRMVQMRTRIMNQLQAVALNEGLRCKKRLWRQHGREQLESFRLAPWASRRREDLLQLLDRLNPTITDLTQVIEQEVEKCAEARRLRTHPGVGALTALAFVLIIGRAERFQCGKQIASYLGLVPLEDSSGNRRRLGHITKQGSSMLRFLLVEAAQVTARSIPEWRSKYFHLAMRRGRKIAKVAMAWRLAIALYWMWRKGWNYEQSRKFGSHAGQLGTGDGVQ

SEQ ID NO: 197591 - protein, 410 aa, unidentified
MRYYLGVDWADQTHAVWVVNESGTKTAARTVPHTAEGLSEWGRELDEWRAQGIELWAAIERREGRVVDFLLDHGVVVYPVNPKALDRARDRFRQSGAKSDPFDARVLADFLRTDHPHLQALQPSSAAAQELKLLTEDYQQQIRQQTRLINQLTATLKAYYPRALEIAELPTALAREFLQAYPTPEAVAALTPRQWQRWARAHRLSETRTRALWHVLQQPQLPVPAHVVRAKARLMRSLVAQLTLGVAAVAEYRAAIEDFFARMPAAQWARTLPIGKHGITAPTLWARLGDAPGRWESFRHLQAQAGTVPVTKRSGKQQRVIQFRFACDKALRYVIDHVAFLSLHSSVWARAYYDQQRARGHSHRQALRALAAKWLKIIFVMWERQVPYDEQYHLATMTRQQLRHCQKQIA

SEQ ID NO: 197592 - protein, 401 aa, unidentified
MQEPLQHNSIDVFVGVDVGKGHHHAVALDRSGKRLYNKALPNDEAKLRALINELKAHGQLLFVVDQPATIGALPVAVARDSGVLVAYLPGLAMRRIADLHAGEAKTDARDAAIIAEAARSMPHTLRSLRLADEPLAELTMLCGFDDDLAAQATQTSNRIRGLLTQIHPALERVLGPRLDHPAVLDLLERYPSPAALAATSEKTLANRLIKLAPRMGKRLAAEIVQALGEQTVVVPGTQAATVVMPRLAKQLAALLQQRDEVASEAERLVHAHPLYPVLTSMPGVGVRTAARLLTEVAHKAFASAAHLAAYAGLAPVTRRSGSSIRGEHPSRRGNKVLKRTLFLSAFAALRDPISRAYYTRKIQQGKRHNQALIALARRRCDVLFAMLRDGTIYQPQTVPNA

SEQ ID NO: 197593 - protein, 407 aa, unidentified
MNPLFVGIDVSSKNNVTYLMKPDGSKHSSFSVQNNLGGAKLMSEKIVLAMETMGLNDVVIGLEATSIYGDSLVYALREDRRLGRYQRKLHVLNPKQVRKFKESYPDLPKNDWVDAFVIADHLRFGRIGKEVYMDDYRYKSLQTLTRARFDVVQNLTREKQHFANYLFLKCCGMAQDKDIANSSATTIALMERFETVDELAYADLDELTKFIDETGRNFADPAAKAKAIQTAARNSYRLPITVNNSVNQAMAVSIATMRALGKQIKVLDKAIEQQFEIIPNTLTSIPGIGKVYSAGIIAEIGDIHRFSSQASVAKFAGLVWTQHQSGDFEAQHSKLIKSGNRYLRYYLLEAANSVRRCDSEFRRYYDLKFKEVNQFQHKRALALTARKLVRLIYRLLMDNRLYIPPEG

SEQ ID NO: 197594 - protein, 353 aa, unidentified
MSDDKYIAFDVHQATTVASVLNAAGREVNTGIVPTQAQPLIGFLEGLQGKLHLSFEEGTYAAWLYDLLQERVAELVVCDPRHNALLKEGNKTDAGDARKLAELLRAGMLRAVYHSSRSLRSLQELAHSYEVLRDDTTRVMNRIKAFYRGRGIDPAGRGVYAQGQRASWLGRLPAGASRLRGELLHDELDQLRSLRRKARRALLAESRKHTVAARLGEIPGLGPLRVALLMARLQTPHRFRSSRNLWTYAGLGLVRRGSSEYRLVEGRIVRRPKAVNPRGLNPNHRPELKEIFKSAALTAIRRPGPFKDYYDPRAQQGVDPAILRVTVARKLAALTLSLWKKGGHYRAESPKQA

SEQ ID NO: 197595 - protein, 338 aa, unidentified
MIVIGLDVHKQSVTAVAVDEAGRPLEEKLILVGSDELPSWAAALDSERLWAVEDCRQLTRWLERQLLSVGEEVVRVPPKLTVPERRAGRTRGKSDPIDALAIARAAIREPCLSRPRPDERVYREVKLLVDHRDDLVDQRRRIQQRLRWHLFQLDPTYQVPLRMLGRSSHLERVARWLARQDQQLQVRLARELVTSCRQLNRQISELDLQLEQRVRDTAPGLLELPGCAAVTAAKLLAEIGPVDRFRSDAQLARHSGVAPLEASSGRTQRHRLDRGGNRQLNAALYRIAITQARYHAPARDYLDRKRSEGKSRREAIRCLKRLLIRIIFNTLKASPALT

SEQ ID NO: 197596 - protein, 429 aa, unidentified
MICAAVERCAGIDVGKEFLAVCVMTGPLQGEARKQTRRFGTIIAELERLRDWLKQEEVTHVVMESTGSYWKSVFNVLEDAVKVLLANPQEVKVRKGHKTDDKDGWWLAHLLRHAMIHPSFIPPRVIRELRDLTRRRKKLLGAGTGEKNRVQKILEDANVKLGNVLSDVFGVSGQLMLDALLKGKAEPAEIAEFAQRRAKQKIPQIIAALEGHRMSDHHRKMIGYSLEHMRFLEDQIGKLDTDIVAKIKEAGLEREWQLIQSAPGLKETSAANVLAEIGPDMSQFPSVRHISSWGGVCPGNNRSAGKNKSSHTTGGNPWLRAALTECAWAAAAKKGCFLKEKFWRITTKSGGKKAPAIVAVAHTVLGLVYEALRTGEPYQERKVPDLNPGQKDRMIRHHVKRLGKLGVTVRSNPLKREKKAAKTKNAKRT

SEQ ID NO: 197597 - protein, 351 aa, unidentified
MRYIGVDVGKNRCQACIMDEEGVVVEEFPFTNTWEGIQALLEKTGDTKSKAVVESTGNLWLRIYEALEGHGVEVKLANPYKTKAIASAKIKTDKLSARILAHLLRADLIAECYVAPREIRQVRALLRQRASLVKMRTMVKNRVHSHLDRYGLSSPWSDAFGAGGVEWLHGLELEPVDRCILDTHLRHLECLNSEIEFLDSRIADQALESEDALLLMTMTGVDYHSATLLAYEIGDIRRFPSPKHLVSWIGLCPSLYQSGNSLVMGRMKKDSNGRARWVLVQAARTASRRDPRMRELYLRVASRKGTGKAAVRVANKMAVIMWHMLTERKPYMQVKEGLYRSKLKKMKRLAV

SEQ ID NO: 197598 - protein, 449 aa, unidentified
MAEPQEIEDEEYEQILERVCAIDVAKASGMVCTRVPHPSRPGQRRTRVWDVAATTNAILELGEQLAGEGIERVTLEATSDYWRIWFYLLESCGLAVQLVNASDIKNVPGRPKTDKLDSVWQAKCTERGMLRPSFVRPAEIRRLRDYTRLRTDLTRERTRHWQRLEKLLEDALIKVSAVASTMGTLSVRDMLEALIAGERDPRVLAGLARGKMKAKHAALIEALTGRFDDHHAELARMLLDQIDHLTAQIGALTTRIEELITAIPAAQGVNADGTTGPGAGTGPDAAVADAITRLDEIPGISPLGAQVILAEIGLDMTRFPTAGHLVSWAKLCPRTIQSGAKNRSGKAGKGNPYLKGVLGEIATAAARTDTFLGERYRRIVKRRGKLKALVAVARTILVMIWHLLSDRAARYRDLGAGYYASRTDKDRKTRNHVRQLEALGYTVTIAQAA

SEQ ID NO: 197599 - protein, 467 aa, unidentified
MTPHKDYCLDPPQAAPTPMLPESAVLSEALQVCHPRAAGIDIGEAEHWVAVPPGCAPQPVRRFGTFTVDLDTLADWLIDCGVTTVAMESTGVYWIPLFELLEARGVQVLLIDPRQAKRVPGRPKTDRLDCKWLQRLHTYGLLAGAFRPADQVCVLRGYLRHRQMLLTYAAHHIQHMHKALEQMNLKLTQVVSEITGVTGMAILKAIIAGERNPQRLAKLRNPHCHHAEDDIAKALQGTWRAEHLFALRQAVELYTFYHQQIAQCDQQIKAHLETFGDKSAGQPLPPKPRRHKKTNEPRFDARTPLYRMAGVDLTTIEGIEEGTALVILSEIGTDMHRWPSVKHFCSWLGLCPQHKISGGKVLSRRVRPGAHRVTVALRLAARSLHHSQSALGAFFRRMKARLGTPKAITATAHKLARLVYSLLQHGSAYVQQGLDAYEAQYRERKLTTMAKQAKALGYTLVPLPAQG

SEQ ID NO: 197600 - protein, 350 aa, unidentified
MKDIVAGMDLHSNNVVIGLMEKDGKRLGSRKIACDIDDVVAYLAPHKDRLKMAAVESTYNWYWLVDGLAERGYPVVLANPAGMAQYDGLKHGDDHSDAFFIADLLRLDILPQGHIYDRDLRPVRDMLRRRMSLVRQRTALMISFKSLYSRTTGAEMPLKKLKDLDVETAQKLYEHPANNLIAGLQLEQIEHLDAAIKRVEKVVLESARELPYYANLSTLPGIGRILGMTITMEVGDIKRFAGPGEFASYCRTVDAGRTSNGKKKGDNNSKCGNKYLSWAFVEAANFARRYDEQCRQWYDRKAAKKGKVLATKALACKMAKAAWYVMARNTSYDAARMFGGAGGEKKTMKP

SEQ ID NO: 197601 - protein, 320 aa, unidentified
MKPILGIDVAKAKLDLALRLPEGKMRSKVIDNTRQGFETLLAWLAKQGVDELHVCMEATGTYWEAAAEFLADAGHTVSVVNPAQIKAFATACLVRTKTDRLDARLIAEFCAAQHPEPWQAPSPAARELRALVRRRNALEAMRTQESNRLLVARETVRAGIEAHLEYLGQAIEQIEAAIAKKIDGDSGLKAQRELLDSIPGLGEKTIPVLLSYYGGAARFDSAKQAAAFAGLDPRQHESGSSVRGRPRLSKIGHALLRKALYMPAMVATTRTAWGRAFKDRLAAAGKPPMLILGAMMRKLVYVAYGVLKSGKPFNPKLHLT

SEQ ID NO: 197602 - protein, 379 aa, unidentified
MSTTATTRRSDPTASETCLFVAFELGEKEWKIAWATALGEKPRLHTLRARGTQRLLEWIRKAQREMNAARIASCYEAGRDGFWLHRFLCANEIENRIVDSASIEVNRRARRMKTDRLDAEKLLSMLLREALGEKDLWSLVHVPSVEDEDARSLQREYRTLVKERTRSVNRIRGLLASHGLVPDRIDERLPTWLTEARLWDGSPLPSGVRQRVLREFERWKFTQTQVREIEQERRHRTQDLSDPSLDEVRQLHALKGIGLGAAWTYGLEFFSWREFNNGKEVGALAGLTPTPYQSGDSEHELGISRSGNRWVRGLAIDIAWGWLRHQPQSALSRWYQERFARSGPRARKIGIVALARKLLVALWRYLETGALPEGAELKS

SEQ ID NO: 197603 - protein, 410 aa, unidentified
MEVLYPHCAGLDVHKETVVACARHMVNGTVTREVRTFGTTTKDLLALSEWLASQGCTHVAMEATGVYWKPVWHILSDGDFTLVLANAKHVKNVPGRKTDVNDATWLADLMAHGLIRGSFVPDAQTQELRGLLRTRKQFVRERSSHVQRLQKTLEDANIKLDSVISDILGLSGRAMIEALIAGETDPDALAALAHRRIKALPAVLREALRGRVTNHHRFLLQLHLHHIKALDTAIDAIDREVDTQIEPFRIAVLLLTTIPGVNDLGAQAIRAEIGGDMTRFPNEGHLLSWAGFCPRNDESAGKRRSNRMRKGAPWLKTTLIQCAWAATRKNGSYLQTQFRRLRARRGAKKAICAVAASILTAAYHMLKDGTVYHDLGPDHFDHRAKTVHTRRLLTRLQKLGYAVQITPLAA

SEQ ID NO: 197604 - protein, 399 aa, unidentified
MLAVGIDVSKSKSAAAILNPDGTVHTKPFEFRHSQPEMDALIRYIKDQNQPVTILMENTGHYHYPVLKALEAAGLPVCLINAYQMKKYGDMELRKAKTDKKDALRIARYALEKGYSLVPHTSMDQKYEDLRFLARQYDQRMGTLTMNKVFLINLLDETMPGITKLLSLTTRDPETSLTMLFIKRFKSYDRIKKMGRTRFLDSYNKLARKSRNRRAYGYGLAIYELAVNSITTRGENEFTLAAQDQCVDLVSESQKAADAIILKMQTLAETLPEYAVLRSMAGVGDRLGPLILAEIGDIRRFHSGKALNAYAGNDAPPYQSGTFESHNRHISKRGNAALRKYCFEVMQALKLTRPQDDPVYLFLIKKEQEGKPYNVAKMAGVNKFLRIYYARAMEALRLQ

SEQ ID NO: 197605 - protein, 343 aa, unidentified
MKNKTIAVDLAKNVFEIGVSDRPGHVEKTYRLSRVKFLRFFVNREPATVLMEACGSAHHWGRQIRELGHEVKLISPQYVRPYVPRNKTDRADVKGLLEAYRNSDICPVPIKTMAQQQLTALHRIRSTWMGTRITRINMVRGLLREFGYVIPVGARHLVPGVMGLIEDAEIEIPSVVREMLDQVCGEIRELESHLRSVERELEALAQQTPVVERLRSIPGIGLLTATAMVGFVGDIQRFRSSRQFASYLGLTPRERSSGNQRRLGRISQRGDRYLRTLLIHGGRSLLWTAHKTKNPSPLQKWGLRIHELRGHNKAVVALANKLARRVWAVWKRDCDYQANYRAA

SEQ ID NO: 197606 - protein, 392 aa, unidentified
MINIGIDVGKSRHCASVLDDRTGEWIYVPFFFTNDKAGFESLYERIKPYLNRKHAVGMECTGHYMYNLSNFLLEKKCTVMYINSRATHMRRIELGRTAKNDKLDSKMISEMLSEKHFWQHVTEHSLQLYELRELTRVYHQLKEQQNQDQNRLQRALDIVFPEYTGLSWKSYGTAYMNVLRRYPSAAIIASTDIRSLRNVLATKGRGRKSKVTAEILKSAARDSIGDAHNVAVELEIQSVIAVIEARAEQIDILEKKIEEFSQQLNSPITSIPGIGAITGMSILAEIGDITRFSDASKLISFAGMAPGVYQSGNYDAARLPISKHGSRYLRKALYQAVFTVCNYSPIFKKYFSGKKSQGKQYRCAQGHAVRKLLRVIYKLLSTGTQYDPALCL

SEQ ID NO: 197607 - protein, 396 aa, unidentified
MISVGIDVSKGKSTVCIMKPCGEILESPFDIGHTADELDSLISLIKSFDEETRVVMEDTGHYHLPVATYLSSHNIFVCCVNALRMKKFCSQSIRRAKTDKIDSIKIASFGITYWNELVKAYPSNVIYDELKFLARQYYQVTGMLVKSKVNFSNLLDQVMPKINDVLSNQGENHKLTEFVNRYIHFQNILDMGEMKFTSDYCKWAKKKGYRLNERKAAEILALAQNGIPTLPNSQSVKIAVSEAVKLIHSIEESRNTILAQMKDLCNTLPEYSVVKEMDCIGDTLAPRIIAEIGDVRRFKNKHSLIAYAGIDAPPYQSGAFHASERHISKRGNSYLRKTGYEIMQSLIKHKLADNAVYNFIQKKRSEGKCGKEAMIAGLNKFLRVYYGKVMEFYSEH

SEQ ID NO: 197608 - protein, 476 aa, unidentified
MSKGSSGMTRGDRRRNARRERLRGLLPRDGAVIGIDLADEKQALAVIDHDVRVLARKTVRVKAFRLGEALDWAAGQARAKGFTSVTVACEPTGPRWLQVQRLCGERGLPVVCVQPLVSHIARQQQDYTSHKTDEADCVMIARLAAELHCYIPEALDEVWADLRHLGRRRVTLITSGTASVQRVRDFLSVAWPVAAEACARPFHSVTWLAAMQVVTSRCGGEPEKLAALGLEAFTALVRSAVPGWGGQRVCGPVCRAVFTALTNTEGVVRAHRRGLLRRVAAELGDLQRTRAQQRDTEAAMVACLASLGLARLGEIPGLTAAGAAAILAETGDPDRYDTSSSLVKHAGLSPSDNASGAFDGEAHISRRGRPGLRLAVWRAVWPMLTHNPVMAAKYAAMTQAADRAAAEAQAGGGRAGHATSAAEAARRRRAKARVACAAALLRWIYSLVVHGTCWDPAVAAGRKDAQAAPSYRPEAA

SEQ ID NO: 197609 - protein, 398 aa, unidentified
MTESSDCESVQVFIGVDVGKDTHHAVAINRSGKRLFDKALPNDENKLRSLISDLKQHGQILLVVDQPATIGALPVAVARSEGVLVGYLPGLAMRRIADLHAGEAKTDARDAAIIAEAARTLPHALRTLKLADEQIAELSMLCGFDDDLAAQTTQASNRIRGLLTQIHPALERVLGPRLEHPAVLDLLQRYPSPEKLASLGEKKLAAQLCKLAPRLGKRLAADIAQALAEQTVVVPGTNAAAVVLPRLALQLITLRKQRDKVALEVEQRVLAHPLYPVLTSMPGVGVRTAARLLTEVACRAFASAAHLAAYAGLAPVTRRSGSSIRGEHPSRRGNKALKRALFLSAFAALRDPLSRAYYTRKMSQGKRHNQALIALARRRCDVLFAMMRDGTFYTPQGS

SEQ ID NO: 197610 - protein, 368 aa, unidentified
MIERVHGIDRHKSFSTISVLNRQGEEVQFQGACREFGKYVEGLGPTDAVVLEASTGSFWWADQIEGRGVKCFVVDPRKFRIIKDSWNKTDKHDARNLAKALWVHVVTGEFGIPTVYKPAVVVRELRKLFAQYCLLNRQIATHKNNAQAIFVENGFELKKELKHRLFAPESGLELLKEMNVSAASRVCLELTLQILWKVVEAKERLAEEILLAGEPLKSQVELLISIKGVTPLVALAFLADVADVRRFKTLRKMNAYLGLVPRASNSGGKSRPGHITRESRKLTRTILTQCVHHVAASSESLNRYYQELREKRGTGRARIAVIRKLCGMMRRMLLSGEQYRWMDRGLYEKKLRQYERVLKRVKEERLAA

SEQ ID NO: 197611 - protein, 340 aa, unidentified
MRIIGCDLHTAKQTIAMLDRDTGEVVEQTLSHDGETVREFYAAIPKPAVVGIEATGSMGWFVRLMEELGVTCCVGHPAAIRTAEPRRQKHDRRDAQLLLRLLLEDRFPAIWMPTAEQRDLRALLLHRHQWVRMRTRVQHALQAIALGQGVRRGATLWSTQGQAVLAALPLLPHATDRRDALHALYRQLDAHVEQLDEHVRAVALQRSGATLLMTHPGVGPVTALATDVFLGAPSRFPSGKALASYVGLIPSEYSSGARQRLGHLSKQGNPFLRFLWGEAVMGAVRRDPELQRFFRRKLPQKGLGKARVAAARKLGIRLWIMLRDQITYNEFCRRSPRRPS

SEQ ID NO: 197612 - protein, 354 aa, unidentified
MLAELVDHVIGIDPDKDWITAAIIEADTTRFIESARFSADRDGYARAVAWADEHTTPGERVWAIEGAASFGRGLTAALSRVDEWVIEFDWARQKATKDAAKSDELDAIQAAREVLGRERLNTPRTHEGQREALRVHTVARAGAVRARTAAINELKALVVTADDDLRAELRNLTTRALVATCAGFRSSRTRSVTQQCTRLTMRALAQRITHLNTEIADHDRAMKALLRQVAPQLLGEAGIGHVTAATFVLAWSHHGRCRSEAAFARLAGAAPIPATSGQTQNRHRLNRRGDRRVNHALYIVAVTRLQRDPATRAYMSRRLAEGKTKREVIRCLKRYIARRVWRLLEHQPPPALTT

SEQ ID NO: 197613 - protein, 457 aa, unidentified
MYRELHSLRQALREELKGTLPPLMGVEPDKILATYLNQLTLYVGLDVADKTVTLLAMNANQEELGHLLDVPNTLKGYAQIGDWLESLRVQHHLRIIAVACETTGVFYWGVWDSLAQRPNVARVLYNPRTTEHMGEVLSKRVRTELVDALLLAEQLRLGSTPEVVLIDNAELLSARLCSRAARDAAQTINRKKNQLRSLVRGYNPVISQVFPGPKFHHPAVYAVIQQYVFPDEVMAAGVETLTTILTEHSRSAFGTEQAQKLVDLCRGYLSRPIRREIVRQRVHDLIEEITLTRKHQQAMLKAGYALIKDRPQAKVLKASTGAGISNTLALVSELGDIKRFPDGEHAASFLGLTTSKHISGTSIYHSKHITKQGSPNGRYAAVNMAFHLAVRVPKYQAMYKAIKSRKPPRKGHRTALVAIARDFVTNVLYDMWRYDRPFFIKVEDYRQYRKDHPRPTS

SEQ ID NO: 197614 - protein, 254 aa, unidentified
MTTDTVALCIIDAGGCIIFERTLDCEVDAIDGYLRKFGKPITKLGFEAGVMSQTLFHGLQALGYDAVCMEARQVNAALSAMRNKTDKNDARGIAQVVRTGWYQPVHMKSRESHYIRAMLSSRKAVLRKCVDLENEIRGLFKTFGIRLPSTLGHLQFDDTVRPIIEADEGLSFALLPMLEARAALYLHFREMDKRVKRVAAQDPVCNLLMTTPGVGAMTAMHFKAAVDDPMRFKSSRTVGAHFGLTPRRFQSGDI

SEQ ID NO: 197615 - protein, 408 aa, unidentified
MKTLHKRCAGLDVHKVEVVARLRLISKRKVEREVRRFPTTTQGLLALAEWLESAGCTHVAMEATGVYWKPVWHILEGRFALILANAAHVKNVPGRKSDVNDATWLADLLAHGLIRASFVPPPAIQELRDLTRTRKQLTREIVQHVQRIQAVLEEANVKLCSVITDIMGVSGRRILKALIAGETDAAKLAALGHERLGCTRAELVQVLTGCVREHHRFLLGQHLRTIEQLEDSVAAFDARIEAALLPFHDVVERLHEVPGLGATAVETVIAEIGIDMSQFPSAGHLLSWAGFVPGLDESAGKRRSTRIKKGAPWLKPVLLQSAWGAARKKNSYLQAQFLRLKARRGAKKAAIAVAASILTIVYHMLRDGTYYQDLGPEYFARRNPAKTAARLANRIRNLGYQVEIRAAA

SEQ ID NO: 197616 - protein, 411 aa, unidentified
MHNRQNYLYVGVDLHKEYHTAVIINCWQEKLGEIQFENKPSAFSKFLLEVETYVSDGLSVVFGLEDVGGYGRALAKYLVDHEQVVKEVNPALSFLERKSQVMIQKNDSWDAECVARILINKLNQLPDAKPNDLFWSIQQLVSRRNALVKAQSALKNQLHIQLNHHYPSYKKFFSELDGKTALAFWQQYPSPSCLEGANIKQLTAFLLDVSNNTCSVKKASDILKLVKEDGHTMKEYQETRDFLVRSIVRDIEFKKTEMKYIERELKQLVNLLDYQLETMPGIELVTASALIAEIGDVRRFSNANKLARFAGIAPVYFGSGGKGKTHKSKQGNRALHALFYNLAVQQVQVAKGSKMPRNPVFHAYYQKKLKEGKTKGQALVCIMRRLVNIVYGMMKYKTAYELPVVEEKEVV

SEQ ID NO: 197617 - protein, 349 aa, unidentified
MIGVDYHPSFQQIAFLDPETGECGERRLNHSDGEAEKFYRELRQKGISARVGLEATGYSRWFERLLVELGIEVWIGNAAEIKAKRVRKQKTDRQDAQLLLKLLLENRFPRICVPSPANRDLRQLLWHRHRLVQMRTRIMNQLQALAMNEGKRWKHRLWSAEGRAVLEKFPLAPWASRRRQDLLELLDRLNPTISELTAAVEQEARKCPEVLRLMTHPGVGPLTALAFVLIIGTPGRFHRGKQIGSYLGLIPKEDSSGGRQRLGHISKQGNALLRFLLVEAAQAAARYNQDWRQKYWHLAMRRHKSIAKVAMGRRLAIRLYWMWRNGCGYSQSLEFGSHAGQLVTGHGMN

SEQ ID NO: 197618 - protein, 441 aa, unidentified
MAHRGSTARGMAIVRGEDQQVKGRVRVVGFDCAEDEHVAVLLDEGGAFEERVKVVNRRDQVQDALAVLMLRVGPEAQLVVVVESKRSHGRLVADVAKQLGCKVWQVNTVALNHFRDVEGQPRKDDEWDAYLAGRMVYLRLRGCRVVTEVTEEERALSRLTRAYERLREDRTRQTLRLRAVLLELAPEMLHRSWEGPQPESKAMVYLLQRWPGFEGMETAQLRSIEKILHRCRYGGKATEVAILLREAARRISVAAEERTAITLEMSLLVQQMAVCDASLDRLFEEIKHRVEKHPVGLKLLEVHGVGPVIAGTLVSELLPVARTATEAQCATYAGVTPIGRKSGKSRDTSDLARGVNKRILHALYTSAVVAVKHSAVDRAYYRKKLGDYAGHPKPHVAAFIALSRQRHKLIFKLMTTDAHYDKEVLISRHLERLEDARGAAA

SEQ ID NO: 197619 - protein, 356 aa, unidentified
MLADQLDYVVGVDPHRDSHALAIVHVGSGAVVFEATVVASSDGYAQVLKLVDQHATGRRAVAIEGTGSFGAGLTRFLVGHEERVLEVGRLRRERQSGKSDALDAIRAARSVLSQTRPARPRAGGEREALRALAAAREGAVTARRSGLCQLRGLLVSAPEPLRAKLRSLTRAQLLRRLAAVRPGRCQDQELRGTLLALRALARRVTALTVEERELAREIETLTRKLAPQLLDQPGVGPLAAAQVLISWSHCGRIRSEAAFARLAGCAPIPASSGQTIRYRLDRSGDRRLNRALHMILVTRHRAHAPTIAYINRRVQEGKSRREATPASSATSPATSTDSSRTRQRRLDLHRSITRIA

SEQ ID NO: 197620 - protein, 355 aa, unidentified
MSQEKYIGMDVHQATISVAVMDAGGKLIMECLLETKAATILEFLQGLHGTLSLTFEEGTSAAWLHDLLKPHVDRLVVCDPRKAALLKDGNKSDRIDARKLAELLRTNQLKPVYHGEHGVRTLKELGRSYLTLTQDVTRVMNRIKALYRSWGIPCSGTTVYAPRHRAEWLAKIGEPGVRVRAERLYQQLDVLQPVRQQARHDLLVESHKHPAVKLLRQIPSIGPIRAALLVALLQTPHRFRTKRQLWAYSGFAVETHDSGEYRYVRGKLQRNRERITVRGLSDNYNKDLKNLFKGAAISARTRPGPLHDFYVALVAQGMRPTMARLTLARKIVTITLTLWKKGVSFDPQQLHRQAA

SEQ ID NO: 197621 - protein, 394 aa, unidentified
MKLIGIDIGKNKHFFCVMDQQTGEIISQPVSFSNDKEGFDFLVQKIKSYPKDSILIGMEDTGHYHFALLKYLLDLQYTVALINPKTTDFNCKMQGGITKNDKLDTINICDVLDTPERKKQYRITKVNSFDLYEQKQLTRHHHNLKEEENVYKNRLQKCIDVVFPEFNKLFNSKYGIVYMNILKMFGSAENIANTDIRTIRKCFEIDGRDNRISLTPERLKECARSSIGISSSAEVIQIKHLTAQIELIEEQLTEIDKKIEEFSIQNNSPILSIPGISHFSGTSILAELGDISNYSKTSQIIKFAGVAPLHYESSQFNAQHTAITKKGSKYLRKTLYQIILPVIRHNPVFNKYYQLKISQGKGHRCAQGHCVRKLLRIIYHLLKTNQQFDPQLLR

SEQ ID NO: 197622 - protein, 382 aa, unidentified
MQASTGTPAAGHNGTVFFSTELSQKTWLITVYSPDRGKISHYKMKGGDHAELLQLVDRICTRVERALGCRPRVVSCYEAGYDGFWLHRLLIAAGIENYVFDPASIAVEQRSRRAKTDRIDGEALLRTLMAYLRGEPRVVRIVHVPTEAQEDARRVTRERDRLVNERTAHVNRIKALLRLQGFAVGKPRRDDWLSWLADQRDWQGKPVPEKLFAEVKHDYERLMLINQQIGELERSSAEADRAAAAAGTVNDRVMLRRLKSLGPVFSAALANEVFYKDFERARQVGSYFGLAPSPWRSGGIDREQGISKAGNPRARQKAIELAWLWLRHQPGSALAEWFMARTAHGNKRIKRIMIVALARKLMVSLWRYVRTGVIPEGAVLNG

SEQ ID NO: 197623 - protein, 377 aa, unidentified
MTAVLQSKDSVSGAVLYMAMELSNKRWKLGFSDGERQRQVSIEAGDWDSLNDQITRAREKLRLAADCRMVSCYEAGRDGFWIHRALVDQGIENRVIDSASIEVSRRKRRAKSDKVDVKALLRLLQRYWQGERGMLSVVRVPTLEAEDHRRLNRERERLLKERGAHSARIKSLLVAHGIRLRLDGDFLVKLDAARGGLGYALGADLKAELIREHERYRLVDEQIRGLEQEQKARAQAGMDETMLQVNGLMQLKGVGWQSSWLLVMEFFSWRAFQNQRQVGACAGLTPTPYSSGDSEREQGISKAGNRRVRTLMIELSWLWLRYQPGSALSRWFQRRFAGGGKRMRRIGIVALARKLLIALWRYVTDGVIPEGAVLKAV

SEQ ID NO: 197624 - protein, 411 aa, unidentified
MDVLYKTCCGIDVHKMKLVACLCKGHKQEIKEFSAKTKDIKAMANWLEENQCEMVAMESTSVYWKPLVNIFEMRGLNYMIVNAKDFKAVPGRKTDVLDSAWLADLLRHGLLKSSFIPSREQRELREATRYRKAITEERARALNRLQKLLEGANIKIGSVLSTITGKTTMNLLDYVLNNDEMMDEKTTETLIISRISASVKEVTEAMEGIMTPFQKMMMKQVLTHLHELSERIEEMDIIIDTYMAEYWGAIKKLEQIPGVGKKSAEIILAEIGLDMNQFPTAGHLASWAGVAPGNNESAGKRKSGRTRKGNKILKSTLAQAAKSAAKNKNSFFHAQYQRIAIRRGKNRATLAVAHSILIAIYHMLKDDQEFIDLGSDYYYQFNTEKKINSYLKKLAALGYRVDEHSTISPVG

SEQ ID NO: 197625 - protein, 325 aa, unidentified
MEKLYGGIDIHKEKLAGCIMDRDGNITREHTFPSSKKAVERFLCDIPSPGITIAIEACGMWRGTYKILTDMGYEVKLANPKKTHDIACKKKTDRVDAKILADLLRTNYLPEVWIPDEQTLRFRDLTRHKSQLTRLKTQVQCKIKSYLLRKGVKYGKLWNEKTLSTLAQEDQDIQNLINVYNSVKKEEKEVMKRIKQVARNRKETTLLMSMPGIAEFSSLMILAEIGDIQRFRSPKELVSYAGLCHGIYQSASTERSVHNTAVNKWLKWIIYECSGRAIMLDQRFQQYFYPIQKRKGENTARRATARKMLTIIWYMLTNKETYRAS

SEQ ID NO: 197626 - protein, 424 aa, unidentified
MGNSAHYVAVRPDRDSQPVRRFECFTAELHRLADWLQSCGVKTVALQSTGVYWIPLYDILEERGFEVYLVNAQHTKNLPGRKSDVQESQWLLKLHTYGLLNNSFQPPAKIRTLRTYWRQRLQHVTGAATCVQRMQKALTQMNIQLANVISDLSGVTGQLIMRAIISGERDSWRLAELSHPRIQASRAEIAKSLEGTWRPELIFVLQQELEMYDTYQRRIAECDQQLQKHLAAFAGTITPPAKEELPPKKKKKQNKNNPHFHLADELQRISGVDLTRIDGVDVFVAQTVISEVGLDMGRWKTEAHFASWLGLCPDNRISGDKVLARGTRHVLNRAATALRLGASTLLKSQTYLGAQYRRLRSKLGAPKAITAMAHRLARLVYRMLKYGHQYVDKGAEYYERRNRQQQVEFLRKKAARLGLQIIPA

SEQ ID NO: 197627 - protein, 344 aa, unidentified
MDHFAGLDVSVKETSVCIVDDTGKIAREVKVASEPDALLAVLTNPAYCFKRVGLEAGPLSQWLYSALAEASLPVVCVETRHMQAVLKAQINKTDRNDARGIAQMMRVGLYRPVHVKTLRSQKLRMLLTHRKLLQSKAIAIENDLRGTLRNFGLKVGMVGTVKFEGRIKELVENLPDLAILVEPLLIVRRALREQIVILHRRLLVIVRDDAVCQRLMTTPGVGPVVALTYRATVDVPARFRKSKSVGAVFGLTCSKYQSGEIDRNGRISRCGDEMMRVMLYEAAQSMLRSKKWSWLKAWAMQIARRRGMKKAIVALARRLAVIMHRIWVDGTEFRWTREQAAATA

SEQ ID NO: 197628 - protein, 364 aa, unidentified
MKKELLTSEDNLFFDNKDLFIGIDVHKIKWVVSIRTYDLLLKTFSMSPSAEELEKHLITNYPNAKFSIVYESCFSGFWIYDYFSRKGYKIIVTPTNRIYKDGSSIKTDIIDSRKLAFQLSRELLKEVKVPDKKTREYKYIFRIYDKEKMRKGQILRQIKAMLEQKNHPLKWERWNNALIEKLKELKFENRLFNRKFSNLIKEYEFVINQIKDSETIIEQIREDESLGKRIKTLEKINGIGIISAVRLVVYLFDRKDRFESGEKLNHYLGLTPSERSSGEKVIRGKSGLYGNKQLRTIIIQLAWIAVRKDGALLDKFERVYKKSGSKQKAIVAVARKLMTKIYAVINKEEEYKINFTGTNSVKAA

SEQ ID NO: 197629 - protein, 451 aa, unidentified
MARQSIKPAGLPVIHDRAAGIDIGARFHVVAVAPELCDEAVQTFQAFTGDIERMADWLVSIGIKTVAMESTGVYWVPVYELLRARGIEVIVANARETRAVPGRKSDVNDAQWLQRLHACGLLRPSFRPERDIAALRAYLRLRERHLDYAAAHIQHMQKALTLMNLQLHHVVSDVTGVTGMRIIRAIVGGQRDPNVLATMRDGRCKASNEIVRAALVGNYQPEHLFALTQALALYDFYQMCLAECDARIERTLAELNADKQDPAEPIPKSRQKTVQANAVSFDTRGPLYQLTGVDLTQIHGIGPYLALRLVAECGTDLSKWPTAKHFTSWLTLAPGCKISGGKVLSAHTRKTTNRVSAHLRLAAVTVGRTNTALGAFYRRLAARVGKAKAVTATARKIAVLFYNAMRFGIRYQDPGADHYERRYRERVIKQLHRRAAEFGFTLQEATVQGVS

SEQ ID NO: 197630 - protein, 313 aa, unidentified
MTQATIGVDISKDHLDVHCLPDGASRRFDNTPCGHRALLKWLKPKAAIARVVFEATGRYHRAFEQAAADAALPLCKVNPRQARRFAEATGKLAKTDKADAAMLARMGLALQPETRPAPGRALNELRELHIARQALIKDRTAAKNREKSLTIALLKRQNAQRLKDIERQLAALDIEIRTRLEADPALAARFKILTSIPGVADLTAYALLIGMPELGELDGKQAASLAGLAPVARQSGSWTGRSFIRGGRASVRQALYMPALVAARFNPDLKAKYDQLIAASKPAKVAITAIMRKLLVLANALLKAGRKWTPEPA

SEQ ID NO: 197631 - protein, 317 aa, unidentified
MSVASEVFVGIDVSKAELEVCWLPQLGRLQVAREEAGLMQLVERLKALGPSLVVLEASGGYEMPVVMALAGAGLPCVVVNARQVRDFAKASGKLAKTDRIDAQVIAEFAQAIRPQVRALPDAAAAHLIALVARRRQLVEMLTAEQNRLALSHAAVREDLKQNIAWLKSRLQDLDGELSRAVRESPLWRESDKLLQQVPGVGRVVSAVLLALLPELGRLSPKQIAALVGVCPFNRDSGGWHGKRSIFGGRAPVRTVLYMAIVSAIRWNPLIKAFYQRLLAAGKPKKLAMTACMRKLLVILNAIMRDRTSWNPNGALAT

SEQ ID NO: 197632 - protein, 366 aa, unidentified
MSKCIMLGVDVHDATLVIRMAEGMKTPETLRVENTRTGRRELWQTLHRRATSRGAARVVMAYEASSQGFGLYDEASDEGFECHVLAPTKIARSRAHTRRKTDQEDAKRLLELLRGHVLAGNDLPAVWVPDAQTREDREIVRSRLDVSAKLTGIKAQIQTLLKRNGLKRPKATGDGWTGLFEAWLLGLTGPKGALSKGARVALATLLRQKRALEIEMLKLDEEVKKLAQEPRYLEPAKVLDAVGGVGILTAMVVLTELGDMSRFMNRKQIAAFLGVVPSSDESGEANDRKGHITRQGPWRVRRVLCQCVWARIRTEPEERAVYQRIVKKNPKHKMIAVVAMMRRLAVVLWHLGRDAQQRHGCFAKAA

SEQ ID NO: 197633 - protein, 391 aa, unidentified
MVCVGIDVAKDKHDCCILDSEGTTLVDCFTIPNNMDGFKSLLQTIQDCSQKSDKIKVGLEATGHYSCNILGFLLDNDLPVYVMNPLHTNLYRKSLSLRKTKTDRVDAKTIATMLLSDVDLKSYTDTAYHNEELKSLTRYRFDKVQERAKLKQSVSRLVTILFPELEQLVSSIHGTSIYALLSEYPGAKQISEAHLTRLANILVTTSRGHYRKDRATHIRDAARTSIGSVMPAKSLELKHTIKLIQELTSEINEIEDAIRKIMDELKPPILSIPGMGFHSAAMILAEVGDFSNFNSPDKVLAYAGCSPSTYQSGKLTNCYAHMEKRGSRYLRYALYTATKYVCYWNPVFTEYLTKKQAEGKHYNVALSHATKKLVRLIYALQKSGKAYLAIT

SEQ ID NO: 197634 - protein, 338 aa, unidentified
MEQITTIGLDLAKNVFQVHGVDAAGKVLVRKQLRRAEVLRFFAALPPCLVGMEACGTAHHWARELTQLGHTVRLMPPAYVKPYVKRGKTDAADAEAIAEAVTRPTMRFVAGKTVDQQSVLMLHKVRDLLVRQRTMLINALRGHLAEFGIVAARGPGGVTAAITALHEAQDGLPALARQVLHGLIAQMRLIGAEITKTEKQIMAWHRASAASQRLATIPGIGPITASAIAAAVPDATLFRSGRQFAAWLGLTPRAHSSGGRQRLGGISKQGDGYIRRLLVIGATAVIRFARQDNASKTWAARLLERKPARLVSVALANKTARIAWAVLARNQSYTAPAV

SEQ ID NO: 197635 - protein, 345 aa, unidentified
MEITTVGLDIAKRVFQLHGVDAAGKAVLRRKLQRSEVLSFFKALPPCLVGIEACGTAHYWAREIRELGHEVRLMPPSYVAPYVKRGKTDAADAAAICEAVTRPTMRFVPIKTAEQQAVLMLHRTRDLLVRQRTMLVNALRGHMAELGVIAPQGIARVADLMAVLLGEDTTNVPALAREALRGLAAELEALDRRVKEIEVTIVAWHKDNEASRRLATIPGVGPITASAIVATITDPFQFHSARHLAAWIGLVPRQHSSGGKQRQGGISKQGDRYLRRLLVLGATAVIRHSRSKSTAEAGWLKSLLERRPARLVSVAQANKTARIVWALLVRGETYRMPAAVPGGGV

SEQ ID NO: 197636 - protein, 406 aa, unidentified
MNHLFVGIDVHPKANTVYIMLPNGSKHCSFSVLNNLGGAQKLSKQVVETLEKLQLSNVKIGMEATSIYGQNLVYFLREDGALAKFNRVIFVLNPKQVDKFKQSHPEIPKNDDVDAFIIADFLRFGRLPAPVHMDDYRYQALRNLTRVRVVAADNLVREKQRFINHLFMKCSGLVQEKTFSNKFGAAAVATVEAFETPDDIANMDLDELVAFVTEKGKNRFPNPEKIAKTVQAAARGSYRLPKTIVDSVNQVLSISISSIRAIQFQIKILDMEIEKQIANIPNTLTSVRGIGPVFSAGIIAEIGDINRFNDHPALAKFAGLAWSQHKSGSFIAQNTRLIKTGNRFLKAYLFEAAFSLVRCDTEFRRFYDLKYKEVNKYQHKRALALTARKLVRLVFRLLKDNRLYVP

SEQ ID NO: 197637 - protein, 341 aa, unidentified
MTDVIRIGLDLAKSIFQVHGVNAEEKVTVRRSLRRGQMLEWFGRLPPCLIGVEACATAHYWARELARLGHTVRLIPPGYVKAYVRRNKNDAADAAAICEAVSRPSMRFVGAKTEAQQAASGIHKVRELLIKQQTAAMNALRGLMAEFGLTARQGAAGIQELLAIAADPEDTRIPDPLRAGLAALASVLDGLEKQIGETDKAIRNWGRTSKTARHLDTIPGFGPVLSTAMAARACHPEAFSSGRHFAASLGIVPRQDGTGGKVKLGPISKRGDGYLRKLLVNGAMSVLCSKQAGNDPWLVKLRASKPLKVAAVALANKMARIAWAVMMRQEDYRAAPRPAAA

SEQ ID NO: 197638 - protein, 416 aa, unidentified
MRTLKLTLKGFKMYYVGIDVAKDKHYVCILNDTGEIAVKPFWIYTDILGLRRLIEKFADLSLDNDDFLVGIESTGAYSENLYEYITDSDYKVVLLNSYQTAKYRDFSTMKKIKNDTIDALVIAELLLSGKYKESHISNDVYHSLKMLGRAKKSLMDKIKTIKREISTVMATVNPEICKVFPNIFTKTALVVINKYPTATHLCKATPKKLTRLFRHVKGNNFSEDKGRYLIDLANTSMYAGRAHKARASTITSYIRILELYCQEKKQIELQIKQLIEEEIDTLDNSVENLQSIPGVSDKTISAILGECGDLRRFDSAKAFIGYIGLYPTQYQSGNSLSVGRLAKRGIPIAKHALYMAAVGSVLHNPQMNKLFHDKVSSGKSKKEALIILAKKIAAIMYSIVKHNKPYESNRVFIPNR

SEQ ID NO: 197639 - protein, 387 aa, unidentified
MSQTVAALIPAAVDYERTLILAVEVSNKSWVLAAQVPGLPHTKAKRTIDPEAEALLTAVSGYRARAAATGRSIERVIAVYEAGWSGFWLARWLIRHGVEVYVIQPSSVPVDRRMRRAKSDGIDSELLLRTLLAWLRGEPRVCSMVPVPDEADEDARRCVRERTELTSERVGLINRIGAVLATLGVSDYNPLLRNRGRRLAELRTALGEALPANAHAKIKRLLARLELVLRQIAELERERDAVVKTEASDKASEMIQQLTALRGIGVQSATVLVREAFVRRFANGKALGSYAGLASSPYSSGGIDREQGIGKAGNRRVRTVMVELAWLWTRYQPGAAQVCWFRERVGSTGRRVRKIMVVALARKLLIALWRFVTDGVVPEGAVLKPAV

SEQ ID NO: 197640 - protein, 427 aa, unidentified
MNEGRIPNTKICYKWGFHMNIICIGIDVSDGKSTVSAYAWGDQMVMKPRDVYHTVSALRKLADEIKRLPGEVRVVMEHTGRFWLPIAQSLRMAGLYVSAVNPKLIKDFGDNKLRNVKTDKADSRKIARYGLRYWNELLPYAPTEATRQKLLEFSRQLDNSNKLLTAQKNNLQAIVSATFPGLRKLFTSPARADGRIKWVDFVCQFYHCDVVRKLSADGFAERYRAWCKKKGYIFTKTSCTKIYALACDCVSSMPCDHDTKLLINEVAKQLTAVSAAVETYRAKIYELASTLPEFDCVMKIFGCGRTTGPQLMAEIGDPTRFKDRIVDGKRVKGKKQLAQFSGVAPGNNQSGSYEQKGVKASKKGSPHLRKTLFQVISTYIKQRPDDPIFHFLDRKRAEGKPYYVYMTAAGNKFLRVYYARVNKSLAV

SEQ ID NO: 197641 - protein, 343 aa, unidentified
MQSISTIGLDIAKSVFQVHGVDAVGQVVLRRQLKRRYVLAFFQRLPPCLVGIEACASSHHWSRELQELGHTVQLMPPAYVKPYVKRQKNDTTDAEAICEAVTRPNMRFVPTKTVEQQSCLMLHRARHLFIRQQTAVINSIRAYLAEFGIVAPVGRRGVEQLLEVVADTADRRLPEVARACLAALGGQLRALKAQILEFDRRIMAWHRSNATSRRLDAIPGVGPALATALVASLADPRAFRSGRDFSAWVGLEPKQNSSGGKDKLGNISKQGDRYLRSLFTAGALAVIRYAKIHGTRHRPWLTGLLARRPTKIAAIALANKLARIAWAMMARNERYKEPAALAA

SEQ ID NO: 197642 - protein, 423 aa, unidentified
MAYRIAGIDVHKKKLAVVVADVEVDDAYQFERRWFASNPEQLQRLAEWLLEQQVEEVVMESTAQYWKPLWSALERYWKPGCQNREGAGKMSGTLHLAQALSNRGRRGRKKDFPDAERLVKRLISQELTLSFVPDTEQRLWRTLTRTRYQRTRDKVRLQNQLEALLEEAHIKLSSLVSDLLGVSARRMLHGLAEGETDPASLAALAHQGLRATPAELRDALGACTELNPVYRRLVRLALDDLQLIEQQIGKLDQETASLLQQHQDAVQRLAEVPGLGVDSAQQIIAEVGAKAATFPSAKNLVSWVGACPGDDETAGVNRSKRSPKGNRQMRRILNQAANAAVKHKGSIFEIVYRRFVPRLGHNKTIGTIAHRLCQLIWIILHNGVRYEERGPSVCEKAKRARTSRMIRTLRNLGYRVEPAAVPA

SEQ ID NO: 197643 - protein, 362 aa, unidentified
MRIIGCDLHARQQVVAMLDTETGEVVSMTLKHEGNNVREFYSQLPRPVRVGIEATGSMQWFVNLMEELGIECLVGHPAQIRAAEPRKQKHDRRDADLILKLLVENRFPAIWLPSKELQDLRSLLRHRHQWVRMRTRIQNALQSIALANGLRRGPSLWSHDGQNTIASLPLAPHTAYRRSELQTLYAKFDAEIEKLNQRVEEQACERAGARLLMTHPGVGPVTALATEVFLGDPARFADSKALASYVGMIPREYSSGGRQRLGGLTKQGNPLLRFLWGEAGAHAVRRDPELKRFYRRKVIQKGFGKASVAVARKLGIRLWIMLRDQIEYNEFCRRGQKQQKSSDACAGMPETRYGAKSHRPVD

SEQ ID NO: 197644 - protein, 346 aa, unidentified
MVIIGCDFHPSWQQVSWLDTETGETGERKLVQASGDAERFYRQLPAPSLIGMEATGNCHWLVDLLAELGHELWVGDAAQIRASCVRRQKTDRRDAEHIRILLQEGRFPRIWMPSAEVRDLRQLLLHRYKLVMIRARVKNELQHLCLNQGVQRKHKLWSQAGQKVLRELPLKPWAARRREDLLGLLAMLDQQIDPLDRAVKEEAQRDKMALLLQTQPGVGAVTALAYVLTMGDVSRFQRGKQVSSYLGLIPREHSSGGRQKLGAITKQGNRMLRMLLVEAAQIAVRFDPGLRKEYLHRCHQKPKAVAKVAAARKLAVRLYWMLRTQKPYPEVVRIESSPRVPLVGAS

SEQ ID NO: 197645 - protein, 411 aa, unidentified
MHEKQKHLYVGVDLHKQPHVAVVINCWQEKLKEIKFENKPSDFPTFLMDIDKLIEEGMTPVFGLEDVGGYGRSLAQFLADHGQVVKEVNPALSYAELKSHMTTQKSDSWDAECVARILLNQLNHLPDAKPNDLFWSIQQLVTRRNALVKAQGALKNQLHIQLNHHYPSYKKFFSEVDGKTALAFWKRYPSPSCLEGLSVKQLTTFLLEVSNNTCSVKKANEILKLMKEDGNTTKEHQEIRNFLVESTVSHILFGKQEIGKVERKLKELMSLLDFQLESMPGIELVTASALIAEIGDVRRFPNANKLARFAGIAPVFFGSGGKGKEHKSKQGNRALHAIFYTLAVQQVQVAKGSKLPRNPVFHAYYQRKLKEGKTKGQALVCIMRRLVNIVYGMMKHKTPYRLPDIKEKEVV

SEQ ID NO: 197646 - protein, 388 aa, unidentified
MQFAADRLEAPTAIRTDLGAIFISLELSRSSWVVTSLSPGGGEKMSKHTVRGGDVAGLLKRFAQLREKAKGRTGKVFPLIVIQEAGLDGFWIDRVLQNEGIESHVVDPASIATSRRRRRAKTDGIDGEALVRALLAYKRGEPRVCSMVRLPTPEDEDRRRLCRERKVLIMERVQHVNRIKGLLFSQGVSGYEPLRRDRRERLDVLQTGDGRPLPLHLKAQVRRELDRLELLLAQIKAVEAERDALLAVEQTKAPVAPAMLLGVKGIGPEFAAVLWSEGLSRPFENRRQIAAYAGLAPTPWQSGSVDREQGISQSGNPRLRTTMIQLAWLWLRHQPDSALALWFHDRVKRNGGRLRKTTIVALARKLLVALWKYVTAGVVIEGAAMKTA

SEQ ID NO: 197647 - protein, 346 aa, unidentified
MNHYAAIDVSLELSSVCIVDTTGKVVKEAKVETHPEALVKFFRDTGLTFTRIGLEAGPLSQWLYEGLSAAGFEMVLMETRRVKAALSAMTVKTDRRDARHMAQLVRFGWFQPVHAKSPGSQEVRALLVARKLLQHKLTDVEMSIRGILRGFGLKVGKVTDKTFAARIRELVTGHPMLTQITDAMLAARATLLTEFSKLDKAVLAIARKDQVCRRFMTTPSVGVVVALTYKSALDDPHRLKKSKDAGPLFGLTPRRYQSGETDVIGPISKVGDEMVRTALYEAANVLLSPRTRFSALKRWGLEVAKRRGLKRAKVAVARKLAVILHRMWVDGTDFRWTNAKPAEAAA

SEQ ID NO: 197648 - protein, 428 aa, unidentified
MDFEVKHLICAGLDVHKKTIVAAVCMTDPVTLEAAYKVKSFSTNNSQIAAMRDWLLSYNCHDVCMESTGKYWIPVFNILETHMHVVLTHPKYVKAIKGKKTDKRDAKWIANLFRFDIVKASFIPPADIRALRELSRYRLKFSYMRSAEKNRFQNSMTISRIRIDCVLTDPFGKTASSIMDYLLSDVPFDETECAKLIHGRVKASNEEIFDSIRGFEILSEQRFKMSHAKQHMELLSSYMDDIETELFRLSRSYDEVIKRISGIVGFTERSALFVISEIDADMGVFESAKHLCSWAGLTPANNESANKKKSTHCSKAGQYLKPLLIQCALAAVKSKKNPYYAIKYNRLAKRRGRKKAVIAIARMMLTNIYHMILNNEEWKPDDYEAIIHPSKPVKVALTLDNVIQFLGEQGADPETLKLLQQQCAVTPG

SEQ ID NO: 197649 - protein, 457 aa, unidentified
MARRSKSKSSRQPSELNRIHSRAAGIDVGSTFHVVAVPPDLTSEPVQTFQSFTGDLYRLANWLVDIGVTTVAMESTGVYWIPVFDILEAHGLEVLLVNARHVKTVPGRKTDVNDAQWLQQLHSYGLLRGSFHLAQQWAALRAYLRHRERLVEYAANHIQHMQKALMQMNLQLHHVVSDITGVTGMKIIRAMVAGQQDAMTLATYRDVRCKASEETIREALTGHYRREHVFALRQALALYDSYQERIAACDQEIQATLETLQNDAISMAALPAARYKKSRQANEPRFQVREALFRVLGTDLSQIHGFGAYTVLKLVSECGMDMSRWPTAKHFTSWLTLSPGNKISGGKLLSTKTRRSSNRAATILRLAALNVGKTTTALGAFYRRLAARAGKAKAVTATARKLAVVFYNTLRYGMIYQDPGASHDEERYRQRILKGLRRRAKEFGYELMELRAAEGVS

SEQ ID NO: 197650 - protein, 404 aa, unidentified
MHDPTDAFGGVDWATDGHAVCVVDPHGRVLVEFDVTNTAAGLAELCRRIEAAGARRVAIERPDGPVVDALLEAGLEVVVVSSRSVKALRERYGTAGNKSDRSDAFVLADCLRTDGHRWRSLEPDSPATVTLRSHVRARKDLVETRVATANQLRAHLRIVFPGAVGLFRDIDSPISLRFLERFPSAGRAAWLSHKRLGAWLRANGYCGRKNPADLYARLTDAARGATGDDGDARAAITLAYLAILKALRAQIDELDTRIAELLDAHPDNHIFRSLPRSGTIRAATLLAEIGDCRARFPDPESLTCLAGVAPSTRTSGRHRAVTFRWSSDKKLREALCDFAGDTMRASPWADQRYRALRASGKSHPHAERILARSWAHIIWRCWQDATAYDPTRHRAAQRLTHEAA

SEQ ID NO: 197651 - protein, 453 aa, unidentified
MAQGSGLTRGDRNRNNRIAALRAVVRRDRAVLAIDLGEDKQAAALVDHEGRVLARRIVKAKAYQLGSLVGWAADKAAAAGFAGLTVACEPTGHRWKALMGLADAAGHGFVCVQSLAVARAREGDDYTRDKTDHRDAYLIGKLVIRLDCYLPERADEVWARLRHLGARRFALVADVISCMQQVSDLLACAWPAALGVAARPVESTTWLTAMGVVTDRCNGDPARLRKMGYDKFVAAVRRELPRWGAKKIYHKIVKGLWEALADAGGVIAQRRGALERVHLLMGDWRSLLARLADTEGRMTAVLDELGLTELVTSIDGLSAVGAAVILAETGDLTRFASARSVVKHAGLNPSEHTSATLAGKTRISHRGRPGLRAAAWRAVWGGMRHNRVLHARHAHLTGRDGNRLSDGQARAACAATLLRWLYAVVTTRRMWDARIAAGAISGRPGAVTTAAAA

SEQ ID NO: 197652 - protein, 370 aa, unidentified
MDEGIKFFVGLDVHKDSIAVAVAEAGRAPARLVGSIAHDVGKLRKLLARYGEAGAVQVVYEAGPTGYGLQRELARRGYHCQVIAPSLIPKRAGDRVKTDRRDGLRLAELVRAGELRAVWIPDPADEAIRDLARAREDAVNARTQARHQLKGFLLRHDVRYAGKTSWSKTYYRWLATLNFGLPGAQTAFTEYWQAVTAADERVARLTAASAHSIAGWRFEPVVRALQALRGIDEISAIGLVAEIGDIGRFAHPRQLMAYLGLVPSEHSSGDRVARGSITKTGNAHARRLLTEAAWNYRFQARIGRRAQQRAEDLPQALRDVAWKAQLRLTRRFARLRARGMQINKVCVAVARELAGFVWAMASTQAKLAPR

SEQ ID NO: 197653 - protein, 345 aa, unidentified
MNITTVGIDLAKNVFQVHGVDARGKVVLRRQLRREQVARFFVKLPPCLIGMEACASSHHWGRTLERFGHAVRLMAPQFVKPYVKTNKNDAADAEAICEAVSRQNMRFVPIKSIEQQAILSVHRVRQGFVKARTAQANQIRGLLGEFGLVIPKGICHVAERVPGLLEDASNELPLALRQLIDRLTSHLKDLDQQVRELERQIIAWHRGSELSRKLEKIPGIGPLAATALVASIADPRSFKNGRQVSAWLGLVPRQNSSGGKSTLLGISKRGDVYLRTLLIHGARSVILMAKRQTENKNVWLANLLNRRHPNIAAVALANKNVRTVWALLAHGRDFKPDYVPVRATA

SEQ ID NO: 197654 - protein, 417 aa, unidentified
MKVVYPICCGVDVHKSFLVATIIKTEGITPHYSKKRFSTFNNSILQFKQWLIENNCYDVCMESTGKYWYPIYNLLEDTIRLTIATPKWVRAVKGNKDDTKDSKWIGDLFRLGLVPGSYIPPKPIRILREYTRYRFKLVSCKSSEKNRFQNAFTVCNVALDSVVSDMFGKSAASITDYLIKTDSFDPEYCSSLLQKSLKKKSVAVIESVVGYEITPEQKYRMLMVRSHLDYIENSIQKLDEKMDELVKPYENTINLLCTIPGVNRASAITIISEIGTDMAQFSSSKRLCCWAGLTPGNNESAGKKKSVRITRAGVYLKPALVQVAHAAVKSNNSPYYKTKYEHISKRRGKKRAIIAIARMILTAIYHMFTTGEVWNPCDLFKIDMPQQLQEKQKEKAIKQAMKLLITEGIIQDTNASV

SEQ ID NO: 197655 - protein, 362 aa, unidentified
MFRPHTLYIRIRIVRKVHEPVFAMRDQDVSDVIKTKNRTAMQYIGIDVSKATFVVAYSSDKGGEIRTFNNTTAGIKQFIGTLPKDGSIHCVMEATGNYSALLLYMLNVAGITVSMENPLKVKNFARAMLSTVKTDKIDARLIALYGEKMNPQPFKVQGEAILRLRQKRTVIRQLTKQITAMSNLRGSLACLPVPDKGATHTVDETIKFLEKRRDRLQSELTDLVEVEFSRQLALLTTIKGIGITLATALIITTGGFTYFQNAKQVSRYLGICPTYEQSGTSVNIRGHINRNGDAYTRGLLYIAAWPASRFNAQCKETYTRLRQNGKPGKLAMIAVANKLVRQAFAVVAHDKEYIDGFVSNRP

SEQ ID NO: 197656 - protein, 360 aa, unidentified
MKKIVIGIDISKEKIDATAIDVRDSQLGVVKLDYQVFENRPKGFRCMLAWARRLVKGIGLEEVLFCCETTGSYDRCLCDYLYGKGLDIWREGALQIKRSMGVRKGKDDKADSLMIAEYTMRHIDKAVIYETPDGAVRELKALFLYRHKLVQERTEKKVRASELKATAAMSDSMRFIMRDAMKSVRALDKSIRDCEKQILALIASNEEFRRNYGHIVSIPGISIVNATAFITYSNNFKGITTANKMASYWGCASFRLQSGISVDKKAYVKCYSSSLLKATLTQAAECAIKEHGIYRNYYLRLKKEGKPYGVIVNNVRNKLIHLAFSLVTNDKDYEENHELLREKRKREQRIHDKLEIINQK

SEQ ID NO: 197657 - protein, 429 aa, unidentified
MNYTQNEKIEQVTDTTMVVGVDIGSQIHYARAFDNRGRELTKRVFSFHNDLEGFNSFNLWAETLRTENDKTAVLIGCEPTGHYWFAFAKYVNDHQKRLVMVNPFSVKKIKELDDNSPKKTDSKDPKTIAKLVVDGRYSIPYMPEGIYAEIRDLVYSRDRIMKQHNISANRIQRWLAIHFPEYLGLYTRFDATSGLAVLEKAPLPKDVIALGVNGIRKIWHEKKMRGRGVTEDRAKTLVEAAHNSVGLDGGIGTKSELYMLLEEHCLWTSQLEAINKVLEETILKVPYVEKLLAIKGVGSITIAGFIAEVGDIRRFDSPKKIQKYAGLELVENSSGKHKGRTRISKRGRRKLRKILYQVMVPLLARNEEFRTIYDYYVTRVKNPLKRRQAMVAVSCKLIRVFYAVLTKGIDYDRFKMMSDIHRKRDVIAA

SEQ ID NO: 197658 - protein, 437 aa, unidentified
MHVLQPNSAGIDVGATEIYVAVPDDRSSKAVRRFDTFTEDLHGAAKWLKECGIESIAMESTGVYWIPIFQILDTYGFDVILVNARHVKNVPGRKTDVQDCQWLQYLHSVGLLRGSFRPDQDICAVRSLLRHRDNMVKDASSHVQHIHKSLTQMNLQIHNVISDITGVTGLAIIDAILAGEQDPYIWADLKRPRIKADRQTIVNSLTGDYRSEHIFTLKQTLQSYRKYCQMIQDCDAEIERHLKEFDSRIDLDDCPKPPEKKLKRKPRGNEPTFDLKSHMHRLLGTDLTRIDGISDLTAHVFFTEVGPDLSKFNNANHFCSWLGLCPIKKISGGKILSSHTRPGSNRVAQALRISANSLWNCKSYLGDYFRRMRARHGAPKAITATAHKLARIIYHLVKEQRAFNETIFSEQEKNHQIRLRKRVINQAKSLGLQLVPA

SEQ ID NO: 197659 - protein, 379 aa, unidentified
MRHVCGLDVHKDSVFVCILNEKGVVFQEKFGVLTPELERMVGVIMEHGVTEVGMESTSVYWMPVWRVIDPYVEQKLVNPYFIRQLPGKKSDVKDAEWIATCILKGLVRGSHVPEERIQRLRQYDRRIFDLNDDIVHKLTRLDAALQRCNIRLSNYVSTTDCKSYGDVVDAIARGETSPDALLRCVHGRIVNRHGADVIRSALTGVVTPVDVDVIRQLREEIELASRHRDECQRRMDGLCSEWFPEQYANLQTIPGVKARSATAIIAELGTDMSSFEDAAHLVSWAGLRPRNDESAGRIKARGITHGNKYLRKTLIECAWGASRTRGCFYSRFSHHQTVVRRKSRMKVQVAIARKMLSAIWFILHDGVAYRDFEGDANAA

SEQ ID NO: 197660 - protein, 388 aa, unidentified
MACARLSGDGAAKQEVRTFATTTSGLLALADWLESLGVQHVAMEATGVYWKPVWHVLEGHFVLVLANAAHVKNVPGRKTDVNDAMWLADLLAHGLIRASFVPPAAVQELRTLTRTRKQFVRERGSHAQRIEKILEDANLKLSSVITDILGKSGRAVLKAIIDGETDPQALVGRIGRVKAARAELLEALRGRITAHHRFMLKLHLDHIETLDKAIAHIEQEVGLGLEPFRQAAKLLSTMPGLSSVSAHVVVAEIGIDMSRFATPGHLLSWACLCPRNDESAGKRRSTRLRRGGKWLKTTLVQAAWAAIKVKGSYLQAQFHRLRARRGAKKAIIGVAASMLTAAWHMLRNGTEWHELGAAHFDRADATKTANRLIRRLQQIGYKVEATPA

SEQ ID NO: 197661 - protein, 339 aa, unidentified
MKLYGAIDLHSTNSVVSLIDEQDRVVYQKRLDNNLTVILHQLSPYRSSLEGIAVESTYNWYWLVDGLMQADYRVHLVNTAAVQQYDGLKYTDDHSDARWLAHLLRLGILPQGYIYPKQERAVRDLLRKRSQLVRHRTANLLSVQNLVTRNTGSSISSNRIKQLPLEGVSSILADKDHVLAVQANLSVMQCLEEQIGRLERVVKERVKLRPAFRYLKTVDGIGEILALTIMLETGEIGRFSAVGHFASYCRCVGSQKISNGKRKGSGNKKNGNKYMAWAFVEAANFAVRFNPQIRRFYQRKKAKTNGIVAIKAVAHKLARACYYIIQDEVPFDVAKAFAD

SEQ ID NO: 197662 - protein, 330 aa, unidentified
MVAPLSLPVVGIDVSKATLAVCYQATDQQLKHLEVSNSKVGFQQLVKACGAQCLFVMEATGTYNLALAYYLHEQGGEVAMLNPLVIRRFIQMHLSKGKSDRKDAQWLLRYGQQQPVSRWQPDEQVLVECRQLEQVTEQLLKQKTMVSNALEALQRQPIISKTALKRLQQTLKALTQQVEAVENELLLLLEQRFGPEIALLCSIPGIGRKTASMLLLFAGGLTRLNNYRQLIAMAGLSPREHSSGTSIRGKVRITKMGGGLIRGKLFMCSFSAKKSNAACQALYNRLVAKGKNGKVALIAVCNKLLKQAFAIIKSGVPYQADFPSKLALNP

SEQ ID NO: 197663 - protein, 344 aa, unidentified
MITIGIDPHKSSHTAVALDADGHSLGELRLPATRTTAERLLRWAGRWPDRTWAIEGASGLGHLLAQRLVAAGEIVLDVPATLAARARLLDRGHGRKTDALDATCAARVAMSQPGLRRVCPEDHTAVLRLLSDRRDELTGERRRVVNRLHRLLRDLRPGGAPTDLSTAAAARLLGRIRPTTAVDLERKLMARTLVAELRRIDRALAENRTRCASAVAASGTTLTAIFGISDVLAAKILGHVGDVDRFPSDDSFASYSGTAPIEVSSGEVTRHRLSRNGNRALNNALHLAARVQTMHPGLGRDHYERKLAEHKSSREALRSLKRQLAKVVYRRLVADHVHRPALAS

SEQ ID NO: 197664 - protein, 378 aa, unidentified
MNRIIKIGMDVHTTNYTLCIFEPSFEHDGTVHCITQVKPEIKKIIHVIETFKKKHENEELNIVCGYEAGCLGYSLYHELKEKGVECVILAPTTMKTEKGGRKLKNDYRDAKMIAECLAYGGYSAVHVPTELDNSVKEFIRMRDDIKENLKSIKQQIIAFLTRNGKQFEGKSYWTRKHIDWINTVSFSEPLLQDTLKEYMIEYNHLCDRVETLDKQIEEVSLKEEYVEKVQQLQCLIGIKTHTALSLIVETSDFNRFKKGNMYSAYLGLIPGDDSSGGHENKLGITKAGNSHLRRLLVEAAQGYTRGRVGFKSKDLKSRQEKCSSEVVAYADRANERLRRKYYRMTLRGKKFNVAKTAIARELACFVWGIMTDHIDLCN

SEQ ID NO: 197665 - protein, 371 aa, unidentified
MQHTRFIGLDVHKERISVAAAESGRSGTVEYLGEIANEPGAISKLCDRLGRPGKRLSFCYEAGPCGYGVHRQLTGLGHQCDVVAPSLIPKKPGDRVKTNRRDASMLARLHRAGELTAIWVPDADHEAMRDLVRLRSVVRYVVTRARQHLQGFLLRHNRKHGRGRAWGLSYRRWLSSLAFEHAAQQIAFQDYVDAVTDAERRLKRAEEQILGLVSEWDLRPVVEALQAMRGIGLINAVVLVAEVGDFTRFANPRQLMAYFGLIPGERSSGETVRRGGITKTGNSHARRALVEGAWAYRMKPRVGRHKVDRIEALPKIIRDIAWKAQVRLCARYRRLRARGKTANVVNVAIAREMVGFIWSIACTIQSPPKAA

SEQ ID NO: 197666 - protein, 362 aa, unidentified
MRAVFGIDVSKTSSEVAILVNGEKVHGYTILNDAIGFNRLLGDLKTVHNPEILFEATGVYSRRLQAFLEEYSYAYTRLNPLEAKKQLDSLRVRKTDKIDAEKLAKSQLVHNRKPTYVQEEVYQHLRDLSRFYQNMTEDLVRTKNRLYKVLQVTFPELENLLSTPTGEQYWNLVMAFPCKEFVLSLSQSNLCKIIHQSTSKRISEKRIAYLTDKLVELANRSYCAVKKTSPMMEEVRYYAQELLRLSERRQVVLNNMVALVQPLPEYDILRSIPGIAETTATSIIGELEDIRRFQSTNQINAFIGIDLRHYESGTFSPRNTSLSVGILMQEKFCTSAFITSLQLVILIPAISLTFMSNEKDSR

SEQ ID NO: 197667 - protein, 361 aa, unidentified
MHVVYERCAAIDVGKDEIAVAVRMPGDGPDGRVTVKRTFRTFYGVMGEAARWLVSLGVTHVAMEATGIYSMPVYYALLEHGDFTRVLVCNAAHVKNVPGRKTDYADAEWLAHLLECGLLAGSFIPPADIKAARDVIRYRTKIVQQRVSEIARLGGTLQDAGIKIDSVASSIATKSGRAMTGALIDGERRGPVLAQLAKGTMRAKIADLSMALEGRFSDHHALMCRLHLDHIDHLEAAIARLDARIEMMMEPFQRWRDLLITVPGIGRLAAAAVISEIGVTVQEFFPDDAHLASWAGLCPGNHESAGKRRSGKPRKGNTHLQALLVECAWSAVRHDGYLKSLYHRHVMKNGGYSDRQGAGGD

SEQ ID NO: 197668 - protein, 348 aa, unidentified
MPNYNQPHQFYAGVDLHARSMFVHVLSAKGKTVFERDLPAEPDAFLDAVKPFRKNLVVGCECMFAWYWLADLCEDQRIPFVLGHALAMKHIHGGKAKSDKIDASKLANMLRGGMFPLAYVYPRAKRQTRDLLRRRSFFVRQRAQLITHIVNTNSQFNLPPFAKKLSYAANRSEEIAERFPDPSTRLMIGADLRLIDAYDAQIATLERHLLQSAKVDDPVTFGFLRTIPGIGPILGLILLYEIDRISRFPEAGIFLSYSRLVRCAHESAGKVKGFGGKKIGNAHLKWAFSEAACLMLRTCLPVKSWMQRQEQKRGKRKALSVLEAKIGRTVYHLWNKQQAFDAKKFLHA

SEQ ID NO: 197669 - protein, 432 aa, unidentified
MEVVHPQVAGIDVHKKVIWVAVRLPGQERGQRAVTVRRFKAFWRSLQKMAGWLAELGVAGAAMESTGVYWWPACHALAQAGIEVCVCNAAHMRNVPGRKTDLADCQQLAELHEYGLLRTGFIPGAQVAALRQRTRYRKKLTGQRSSEGQRLAKVLEDAGIKIDSVASDMLGKSGRAMTGALIAGERDPARLAGLALGVLRRKTGELAMACDGRFTAGHGQMCRPHLDACDHLTAKIAELDALVAEAAAPFAALIARLVTIPGIGQRTAEVIIAETGGDMARFATAARLAAWAGLAPGDNESAGKRKKAPARNGNPHLRTAMVEAAWATWRTAARPGARFRRLARRFGKGNEKKAAIAVAHTLLSIAWAVMRYDADYIDAGAGYYQRRDQRNREHLVRYHQNALARLGLQVTVTAPGDGAPPSPTPDNPGQAA

SEQ ID NO: 197670 - protein, 355 aa, unidentified
MTAPSMTQTIAGVTVGIDTHAEVHVAAAFDQLGRPLDHLEIPTTPAGYRQLLMWARGLGPVVAFGVEGTGSYGIGLARYLVGAGCQVVEINRPNRQTRRRRGKSDPIDAEAAARAVLAGEARGIAKADTETVGMVRALRVARRSAIKARSQAANQVQGILVCAPAALREELRQLSLAQLVQHAAAFRPGPVTNATAANKLALRSLATRYQALTDELAILDAELHRLTKAAAPALSSLKGVGPDVAGALLVAAGDNPERLRSEASFASLCGAAPIPASSGKTTRHRLNRGGDRIANNALWRIVMVRLASDEPTQNYMARRTQEGRSKREIIRCLKRYVAREVYRALLTPATVALAA

SEQ ID NO: 197671 - protein, 343 aa, unidentified
MEKIARIGMDTSKHVFQLHGVDATESVVLRRKLRRTEMLAFFAAREPTVIGIEACAGSHHWARELSALGHEVRLLAPQLVKPYVKRSKNDAADAEALCEAMSRPSMRFVPAKTTDQQAALMLVALRDRLVRTRTQLTNAIRGHAAEFGLIAAKGLDKVEPLLVRIAMDESLPALARAIFTIHAEEYAALEARLRVVEAELRTWFRSNATCRRLSAIPGIGPVIASLLVMKTPDPHAFRSGRAFAAWLGLTPKDHSTAGKTRHGGITRAGDEALRSTLVVGATAVINQARRRDKATAWLAGLLARKPAKLVAVALANKMARIAWKLMVSGEIYATGRMGATTAA

SEQ ID NO: 197672 - protein, 436 aa, unidentified
MFVGHRFRTDPDELDTLWARLPKDAERIEVVMEPTRNAWVALAAWFRRHGATVVMVPPEQSADLRDYYNKHTKTDRLDSKVLARLPLLHPEGLHREDSLGPGDELKRAVKIRSGLVHRRTACMARLDALLEILGPAWIAALGSDMTLTALRFLARYANPVQVKRLGKARLAAFFRRSSRQAWADERADAVIEAAATTLRLWGADGGELDFDALAADIAAEARLALTLTDEINGFDKRIGALYDKADPAGIVRSVPGAGRVCAPQILGRLGDPTRFANLAAVRSFAGLVPAADSSGQADGHRGPTKAGDCCLREALFIAADHARKVDPTLAVRYQRLMLAGKHHDSAVCTLAAVLLTRIAACLRAGTHYLLRDTDGRVITEAQGRAIVAERYTVPPEVRAARRKVTPHKHPRRNERNERAKTGVATRSKASPVPQPA

SEQ ID NO: 197673 - protein, 374 aa, unidentified
MADYSEVFVGIDTSKLRNAVAIAEGGRNGEVRYLGEIDNTEAATSKLVKKLAAQHRRLTFCYEAGPTGYGLHRLIKTLGHECVVVAPSLIPKKPGDRVKTNRRDALNLAKLLRAGELTAVWVPDARHEAMRDLVRAREAAVDDLKSKRQQILSLLLRLGRHFTGKRTWTRAHMNWLVSQKLAHCEQRIAFEEMLLAVRQADERVIRLERAIAAAVPDWSLAAVVTALMAVRGLDLISATIFLAEIGDLSRFASPRQLMAYLGLVPGEESTGDRVWRGGITKAGNHRARRILVECSWSYRHPPRVGKKKLARVEAAPPAVQEIAWKAQARLTARYRALARRGKRPTLVVTAIARELSGFIWAVSRAVGAPATPAM

SEQ ID NO: 197674 - protein, 371 aa, unidentified
MKNNNTASVVTNSSTPAATVPGGFTLGLDLGDRCHHVCVLDVTGQIVCEGALSNTRPALAKLLADFPRAIVALEAGTHSPWISRFLQEHGATVFVANPRKLHAISRNERKCDRRDAQMLARLARVDPALLHPIHHGSAQAQHDLLGLKLRDALVRTRVNLINAVRFTLKSLGHPVRNPSSESFHKTVLADIPADCLPVVQPLLTVLAQVTEQIKGMERDLVQRSQKEYPATQRLQQIAGVGPLTALCFVLKIGDPVRFGRSRDVGAYLGLCPRRDQSGGTDKQLRISKCGDGLLRRLLVSAAHYVLGPFGPPCALREHGQRLTGTGSAREKKRAVVAVARKLAVLLLSLWKHGTEYEPRTTAASAVVMTPA

SEQ ID NO: 197675 - protein, 395 aa, unidentified
MYYLGIDIGKNNHEAGFIRDDGSHVGKSLRFSNSREGFEKLLLFMEQRLPEHEAFCIGMEATGHYWLALYSFLREKGFVLHVINPIQSDSLRNFHIRQQKTDSVDCFLVADVIRFGKFSETHLADEDILVLRNLARFRESLKDSCADYKRQVITVLDQVFPEYDTLFSSIFGESSKAFLKTYGTPDQVVEVNTKSLATLLRKASRGRHSTDKAREIKSLAANSVGLTLCADAFAFQIRILIEQIEFTEKQIDEIDKKISKQLKKLNSVILTIPGVGPATGAIILGEIGDIGRFSNPKKLVAFAGIDPTSYQSGNFVGQHNRLSKKGSPYLRRAVWMSALIAARYDPVFKAFYEKKRREGKAHGTALGAVARKLLYTIHAVLKANEPYEVRLDTIE

SEQ ID NO: 197676 - protein, 370 aa, unidentified
MGNRSMFVGMDVHKETIDISVAEGGRLGEVRHYGVIATDVEALDKVVRALQAPSRVVHFVYEAGPCGFGIHRHLTGHGLDCVVVSPSMVPKRSGDRIKTDRRDSVSLARLHRAGELRAIHIPDALDEAMRDLVRAREDAVVVATQAKYRLKAFLLRQGHRYPGRAGWTIPYRRWLAARSFSSAAQHIALQEYRDAIDETERRSERLTEQLRQLAPTWRWAPLVSALQALRGVSFITAMGVVAELGDLTRFGHPRDLMAFLGLVPSEYSSGPTVRRGRITKAGNPHVRRLLAEAAWAYQGLPRIGRQQLNRQEGLPKVVCDIAWKAQLRLTGRFRRLVARGKAKPKVATAIARELSGFIWAIAREVRPASA

SEQ ID NO: 197677 - protein, 403 aa, unidentified
MSAVFAGLDWASQSHAVCVIDERARVRTQFEIAHDAAGLADLVRRLRAAGVTAIAIERPSGLIVDALVEAGFSVVPIHPNVVKATRPRYRSHGGKSDASDAYLLADLLRTDGHRFKPLAPQSDEVRALRALVRGRDDLVATRGQLANQLRSELQSFWPGAAEVFADVDSPIALAFLKRYPTPESAARLGPKRMAAFCAQHGYSGRRSAQELLQRLHQAPSVAIGELEMDAKGELALCLVRTLTQLVQQIRLLTSRIEHDVSACDDGPILMSFPRAGRVCAAQILAELGSVRERFDSDQHLAAEAGVCPVTYSSGKSKAVTFRWACNHRLRAAITCLADNSRHASAWAADIYARATARGCDHPHAIRILARAWLRVIWRAWIDHKPYDPALHGGAQALLKTAGG

SEQ ID NO: 197678 - protein, 330 aa, unidentified
MHIGVDVGKESLDICYPNGNKEHIKNTKRCRAKLIKEAKRLGAIISFEATGPYEESLEVDCLSAGVPAVRLDAWKTRKYAESQGILEKTDAIDCEMIRDYAASLRLEKLHFVREMSEGYRRLKRASGVRRNLIKAKVLIANQLESVMDADIKASIVRLVDSIDRQIEKMDDACSAAIASDEKMNALSKRFEQVVGIGPVLINTVFATCPDIGSFTAKGIAKFTGVAPLENKSCTIKKKPKPRRGRRDLRNALYMAAVSACHSNHLLQSMYKGLLARGVPKRVALVALARHIIILMNYIAKYPDFNPAIDPKKAAILASPKRKPGRPRKNP

SEQ ID NO: 197679 - protein, 343 aa, unidentified
MYFIGLDVHKKTISYCVKDAAGRVYQEGKIGSTRRELDEWIRMMPEPRSIAMEATIFTGWIYDHLLPYAEKVKVAHPVMLRAIAAAKKKNDRIDAGKIADCLRCDFLPECHMASTEIRDRRRTLRYRSLVIKQMVQMKNRVSGLLMETGVSYNKQRLHKVGYFAELLTANEDVHESIRPLLKLSREMISRSQKLDYALVSSLERDPLLKERLRRLRTVPGVGPITALTWALEIGDFTRFSSIKQAISYCGLCGDEKSSADKVMRMPISKQRNKHIQRVLIEAAKLGPRESPELAVIRARELERGNPNRATLAVARKMVSYMLAVERRNQDFVPAEEFSRTAAA

SEQ ID NO: 197680 - protein, 343 aa, unidentified
MTEVTTIGVDLAKNVFQIHGVDASSQPVIRRQLKRSQVLSFFKKQPPCLVGMEACASGHHWAREVSKLGHEVRLMPARYVKPYVKRNKNDAADAEAICEAVTRPTMRFVPIKTREQQSGLDAAPDAQAVVRQRTALINAMRAHLAEFGIVAGVGRNGVEKLVRLIDKGDDERVPSAARECLLALRDQLEAVKFRIHELDLRILAWHRSSELSLRLGEIPGVGPLIATALIASIPDPHAFRSGRDVSAWIGLVPKQNSTGGKERLGHISKAGDRYLRSLLMIGAFSLIKRAKQAGSTPRPWLAALLARRPTKVAAIALANKIARIAWAMMVRGTRYSEPAAQAA

SEQ ID NO: 197681 - protein, 403 aa, unidentified
MNAVGIDVSKGKSMVTILRPFGEIVSSPFEIKHTSSDIHSLIKLIHSIEGESRVVMEHTGRYYEALAHQLSAADLFVSAVNPKLVKDFNNDSLRKIKSDKADSVKIARYALDKWQSLEPYSITDELRAQLKVMNRQFHFYVKQKTAMKNNLIGLIDQTYPNANTYFNSPTRSDGSQKWVDFVSTYWHVDCIRKMSLNAFVEHYQNWCKRKKYAFNKSKAEEIYTKTKELVPVFPKNEITKHIIRQAIDQLNSTSVTVETIRTLMNQTASKLPEYSIVMQFKGIGPSLGPQLMAEIGDVTRFTHKGALTAFAGVDPGVNESGSYAQKSVPTSKRGSSNLRKTLFQVMDVLIKTMPQDDPVYQFMDRKRTQGKPYYVYMTAGANKFLRIYYGRVKEYLSVLPDPS

SEQ ID NO: 197682 - protein, 350 aa, unidentified
MKKELYLGLDVHKECMATVVAEEGRTGQVRDTGVISNDLHALEKWIARLRKAHGKEVLLRACYEAGPCGFGIARRLRQLGVECEVVAPSMTPMRTGDRVKTDKRDARKLARLLRAGELTAVYIPEATDETMRDLCRARSDAVDDRRRSRHRLKGFLLRHGYRYQGKSAWSAAHERYLRELVLPHPAMKVILEEYLQAIAAAGERIERCEMGMRDLLEKWRLAPAVRALMAMKGFQIVAAMILVSELGEVHRFSHPRQVMAYLGLIPSERTSSDRRRQGAITKCGNAHARWLLVECAQHYATPPKVSHQLRVDVSKVKKRRCGRLAGVLSTVCTVVTRVCWDDVSCVTRPW

SEQ ID NO: 197683 - protein, 410 aa, unidentified
MMYVGIDVGKNNHEMGIVDDEGNHVGSSLPFPNTVEGAQKMLQYLKLMNPSNEDVLVCMESTGHYWLSLYSFLQKEEYETVVVNPLQSDSFRKLSLRKTKTDPVDSFLLADLIRFGKYSNTTLPNEKTHALRQLSRFRTSLVETCSDCKRQAIAVLDQVFPEYASLFSDVFGKTSQEILLKYTTPEEILSVDTRKLTYILSKASRGRLGKDKARALKKAAKISFGIVYAQDAFPFQLKMILRQIQFMETNIKEVEEKMVQTLKEVNNVITTIPGVGPILGAAIVGEIGDIKRFSDCNKLVAFAGLDPSVKQSGSFTGTKNHISKRGSRYLRRAIWLAAVVAAFHDPVFSAYYLKKRGEGKAYGTSIGAVARKLTFTIFAVLRDNKPYEIHLPEKKDNKILPANLSSTTHI

SEQ ID NO: 197684 - protein, 315 aa, unidentified
MTAAATFVGIDVAKSYLDLAVRPAGGHQRLAHDEAGIAQIVAQLQALRPTLVVLEATGGLEVPLAAALATAGLPVAVVNPRQVRDFAKAVGQLAKTDALDAQLLARFAEVVRPAPRPLPDAEAQALSALLARRQQVIAMLVAEQQRLPTTLPALRPRVEAHIAWLRQERDELDRELRRQIRASPAWREADDLLQSAPGIGPVLATTLIAEVPELGRLNRKQIAALVGVAPLNCDSGSLRGRRIIWGGRARVRAALWMGTLVAVQRNPVIRAYYDRLLAAGKPKKVALTACMHKLLLILNALLRQRVPWQAPAQPA

SEQ ID NO: 197685 - protein, 360 aa, unidentified
MRIIGCDLHARQQTLAMLDTETGEVVNRTLMHEGNQVREFYSELPRPVLVGIEAIGPMQWFLDLLAQLGIECRVGDAAKIRAAEPRKQKHDRRDAELILKLLVEKRFPAIWMPSKELLDLRALLLHRHQWVRLRTQVQNALQAIALANGLRRGPGLWSYDGQAKIAFLPLPPHASLRRSALQAMYGHMEEEIEKLTAQVAEQVEHRSGAQLLMTHPGVGPVTALATDVFLGDAQRFDDGKSLASYVGLIPEERSSGRRRRLGRISKQGNPLLRFLWNEAGAHAARRDPELRRFYRRKLVQKGLGKARVAVARKLGIRLWIMLRDQIDYQEFCRRGQKQSSAVCAGMPEVGYGANRHRPVE

SEQ ID NO: 197686 - protein, 339 aa, unidentified
MELYAGLDLHSRNTYIGIMDNAFNRVFKKRVPNHLEQILQTLDPFRDQIKGFVVESTYNWYWLVDGLMDAGYSSAHLANPSAIKQYEGLKYSDDQHDAFFLAQLLILGILPQGYIYPKKDRPVRDLARKRMFLVRHKTAHILSLQSLLQRCCAIKIRASDMRHLTVEELEMWLEEEYLVLSAQANLDSINFLKQKIKQLEKAIIQKVKLNKAFKYLLTVPGIGNILAMTIMLEVGDINRFPKVGNFTSYCRCVPSRRLSDGKSKGSGNRKNGNRYLSWAFTEAVHLGRRYNERFRKYYNRKVAQANTSLATKALGNKLARICYYIMRDQAPFREELFCH

SEQ ID NO: 197687 - protein, 432 aa, unidentified
MIAVSEPVAPDASLFAAFVGLDWADRKHDLVLYDPRGGRPEHVELPHTPEAIDQWAAGLRQRFGGRPIAVCFEQTHGAIAYALLKYDFFLLFPLPPSRLAAYRESFSNSGAKDDPSDAALLVDYLLRHRDQLRVWRPDTPATREMLLLAEARRDAVDQRTRLSNQLTAVLKRYFPQALVLVGHDVDTPLACDFLGKWPTLDAVQRASPATLRKFYYAHFCRSEERIVERLELAKSAIPLTTDTALIQAGILQVQCLIGQLRALHKAIDRYEARLRELLAQHPDAALFNDLPGAGAALAPRLLAAFGTDRERFQSAGELQTLSGVAPVTKRSGRRWIVHRRWACPKFLLQTFHEFAHCSTKRSSWAKAFYLQQRAAGKGHHAALRSLAFKWIRILYRCWKTSTAYCEQRYLQSLRRTNAPLLAFLPVATAAGV

SEQ ID NO: 197688 - protein, 403 aa, unidentified
MTVTTLDPGTIIGGIDTHADTIHVAAIDPWGRELGDKEFLTTPLGYRQALEFLASHGQVTVVGIEGTSSYGLGITRTASEAGLDVLEVLRPERSVRRREGKSDPIDAYQAAHAVLAGRATAAAKSAEVTALRALHNARRSAVKARAAAQVQIRHQLITAPLTSREKYRHHTAVRLIQALAACRPAVHADIEERLVLTALKSLARRHQLLSEEIAALDVELTSVIEQTAPHLLGLHGVGNSTAAQLLITAGGNPDRLRSEASFAALCGTAPVPASSGKTTRHRLSRGGDRRANNALHTIALVRLRNHPPTKAFAARQRAKGRSTPEILRMLKRAIAREMFKQLTRPHEHLGVHDLRPARQAKNITIDAAARALGIAPMTISYTERGKYLTPEVITRYREWLTTA

SEQ ID NO: 197689 - protein, 403 aa, unidentified
MWFLGVDWGERHHDLCLLDQDGMVLAARRIADGLAGVGELHALVATHVLDPAQVTVGIETDRGLLVGALLAAGFQVYAVNPHTMSRYRGRHGSSRAKSDRGDAKVLADLVRTDRHNHRPVAGDSPLAEAVKVLARAHQGLIWARQRHVNALRSALREFYPGALAAFGAQLAEPEALAVLTLAPTPELGRQLTRAAVRRALVGAGRRRNLQARVVAVHDALSAPQLAAPALMESAYCEVVGALVAMLGCLNQQITGLEQQLAARFGTHPDAQIVRSLPGLGTVLGARVLGEFGDDPHRYATAKGRKAFAGTAPVTRASGLRTVVVARAACNQRLVDACYLWAFAALTASPGARRCYDAHRTRGASHHQALRALGNRLVGILHGCLAHRVAYQEQLAWPAAEPAA

SEQ ID NO: 197690 - protein, 356 aa, unidentified
MDNRKYIGMDVHQASISIAVSDAAGKVLMECIVETKAATVLEFIQGVRGSLSVTFEGGTSAAWLYDLLKPHVTHVVVCDPRKNALLKAGNKNDRVDARKLSDLLRAGLLTPVYHGESGVRTLRELSRSYLAASKDLTRVMNRLKAIYRSWAIPCAGQQVYSPRHRAAWLEKLREAGVRRRAEQTYQQLDFLIRVRRETRKELLAESRKHPARKLLEQIPRLGPIRVALLIALLQTPHRFRTKRQLWNYCGLGLRTRSSGEYRYTGGQLQHARKPPALRGLNVNHNHELKNLFKSAATQAGTLKDDPFGEFYQNLVASGMEPPMARLTLARKIAAIALKIWKKGERFDPAKLKPQAA

SEQ ID NO: 197691 - protein, 376 aa, unidentified
MAQTDVQYPTIHLAIELSRSAWLVAARLPGVEKPSLHRIEGGDTAALLALAAALRARAAARLGTPVRVACCFEAGRDGFWLHRLLTAEGVAAYVLEPTSILVNRRARRAKTDRLDALGMLRVLAAYLGGDRQACSMVRVPTPEEEDAKRPHREREELVRERVRLENRIAALLATQGVRERPSLRSWERDLAALRTGDGRPLPPHLRAELDRLRRRLVLTLGLIREVEAERDAALAAGPRDAAGRKIAALCRLRGVGANFAAVLTREVFYRAFDNRRQLAGYVGLAPVPHQSGEADRDRRISRAGNARARTTLIQLAWLWLRYQPDSAPARWFRDRVGALRGRTRRIAIVAMARKLLVALWRYVETGLVPEGVEVAA

SEQ ID NO: 197692 - protein, 365 aa, unidentified
MFNERTAIGLDVHARSVRAAALDTETGEIVAAKLPPGNAAVIDWIDRQQHLGPLAATYEAGPTGFGLARALEAAGIRCVVAAPSKIIRPAGDRVKTDANDALLLARLLRMDELTAVRVPTVIEEDARDLVRARDDARTDLPAARHRLSKLLLRRGIVYEGTTWTGKHDAWLRRIRNQDLGDAGPGTLAAFDAAIDTVTLTLARRDRLDAVIAAMAADSPFTELTNRLACLRGISTLTAFALAVEIGDWHRFTGATIAAYLGLVPSEHSSGGSRSLGPITKTGNSHARRLLIESAWQHKARYAPGKVMTDRWAKAPAAVAARGDAGNRRLHHRWQVLTASKKRHTIANTAIARELAGWCWSLAVMD

SEQ ID NO: 197693 - protein, 410 aa, unidentified
MQSIIERCAGVDVHQATIVVTVRVPDSVGGRRSDTQTFGTMTSDLLAARAWLQAYGVTHVAMESTGVYWRPLYYLLEDSCTLLLVNMQHLQQVPGRKSDVRDSAWLAQLLECGLLKSSLVPPPPLRDLRELTRYRKRQIEDRAQEVNRLYRVLEDAGLKLASVMTDVMGRSGRAMLEAILGGSTDVHALADLAKGRLRAKLPALRLALDCQLRRRHTFLIAQILSKIDFLEAHIAAVTAEIDQQLVPFEPVIAKLTTIPGVARRNAVTILVETTGDMGHFPTAGHLCSWASMCPGQNESAGKRRSGKTREGNRYLRGALIESGQAAMRAKHTALQARYFRVKRHRGHKRAVVAVGHQILEIAYFIMRDGVTYHELGAAYFERHNRDRARRRHVKHLESLGYRVTLEEAAA

SEQ ID NO: 197694 - protein, 324 aa, unidentified
MAQSVLGIDVSKQTLDVSIVVREKPRHQQFANSDEGLRALLGWLKHVRAGQVHACLEATGPYSMKAALVLHDAGHLVSVINPAQIRDFARTKLGRNKTDKVDCGHIREYGEMFRPPAWTPPSPALRRLCELQTMRAGFVASKVEWTNRAGSSAGDATARALALATLAHFEAQIKAVNTAIDATIDGDDELRRKRALLLSINGVGEVLAAVILTELPGPGVISDSGQAVAYAGLNPRRFQSGSSVNQPTRISKIGNGTLRSALFMPAMAAMRHNPAVAALAERLRAQGRLKKKQIVIAAMRKLLVLCFGVLKSGTPFDARMAMPA

SEQ ID NO: 197695 - protein, 439 aa, unidentified
MAWNFPGPFISQVIWVRPRRGTCCKNSRKKGPQTVFTLCIDVSQKTSRYLLLNPEGRKVKSFTLDNSPEGFQSLLQRLQELSIPQADLLIGMEATGNFWENLYSYLKEKGFSVVLLNPYHVKKYREALAKKAKTDDIDALVIAQFLRTGEYVQSQVAEEAIQSLREITRLRYELLTEKKNYQRQAYSLLSLVFPEHAQTALKNPFSISALAIFQRFPTAQDLAQAKPKQIEKIIRSIPGNSFGPEDIQNLIATAQKSIYSGRAKEARATSLRILLGHITNLMSSIELLDQEISKMLSPQGPQDSFPGENLLAIPGIGEKTVAAVLSYLGTDGANFSSSTKAVGYVGYFPKIYESGQTKRENKISKRGPKVLRWALYMAAVASLKHNPEMRALYHRKISQGKNEKQALIYLGKKLLQIMLAMLKSGEPYNPHMVFVNAQK

SEQ ID NO: 197696 - protein, 409 aa, unidentified
MEDHQIVFEQVVYRGCGIDVHKDNIVATIRGDGIKEETRTFSTFTSILKECAAWLKSYGITHIAMESTGVYWKPVYNILDPDFEIILVNARHIKHVPGHKTDRKDSAWIAKLLLSGLLKGSFIPPQKGRELRELYRYKRKLIGHRTAEYNRLQKILEDANIKISSLITDVFGVSGRAMIAAIIDGQNNPEILTELAKGPLRKKRKELLQALEGNITDHHRFMLRISRTAIDNIDNIVVQVDEQIDSHLAAYEEQNRLLQTIPGVGQATATAIIAEMGTDMSVFPNQHHLASWAGLCPGNNESAGKKKSERINEGNKSLKTALVEAAWAAAYTKETYFKRRFGSLAARRGRKKALIAIAHKILVAAYFILKNKVDYQEPDNQAWIEKRKQAQIKLYQQRLHELGVNAPSQ

SEQ ID NO: 197697 - protein, 343 aa, unidentified
MTQYVGLDVSMKETKLHVLDEAGKRVWRGRCASEPAAIAAAIRRYAPAAVRVGLETGPLTTWLWTELTAEGLPMVCLDARHAKKALDMKVNKTDANDAEGLAHLVRAGWYREVRVKGRGAMLTKALLGARSHLLSISLSLENQIRGLLKTFGRIVPKGAGGLFEKNVRALITDDAEIAAVIMPLVQARQMTRSKCAALDSRLIAAVRGNATHRMLMTMPGIGPITAVAYVAALERPDTFKRSRAVGAWLGLTPRRFQSGEIDYDGHISRRGDGQLRALLYEAAAVLLTRVRMESGLRRWGLMLRKRLGFKRAATAPARKMAVILHAMWKSGTPFNPTLGAAAS

SEQ ID NO: 197698 - protein, 335 aa, unidentified
MQIKHFIGIDVSKDTLDLSVVVNGNVLTHYCIANNSREIKSTVNKIMKSLGGSFEDTIFCMEHTGLYNRPIVKWLHNNQGKMWLESGVHIRKTLGLVRGKNDKIDSSRIAMFAYTNQHKIKLWALPRQVIEKIAALLSQRARLVKVRKQLTTANKEQKKFLEKDVMHSLNIYTDRTVSVIDKQIEAIESEIIALIKDDEKLNRMYQIITSITGIGFVTASYILVTTNEFININDPKKFACYSGVVPFEHTSGTSVRGKNRVSHIANKTIKALLHLSAMSTLNTPGEIQDYYKRKIAEGKNKMSIINAIRNKLILRVFACIKQNREYEKNYCYKFA

SEQ ID NO: 197699 - protein, 332 aa, unidentified
MQLLAIDLGKQSFHIHGITDEGEVISKKVSRSKLEAAVQKLSPETVAMEACASAHHWGRCFEAMGYPVRLIHPRFVTPFVKGSKNDAVDAEAVHEAALRPTMRFVPVKTTEQQDLQMLHRTRDRLIAQRTGLINHIRGLLGEYGIVIAAGAFRFRKDVRNVVAEASLSLLAKQNFNALIAEFEALDKRITEIDKKLVAICRTDDRCKRLSTLPGVGPVIATALIAAVDDGRHFSSGRALAAWIGLVPRQYTTGGKPRLGGIGKRGNQYLRRQLIHGARSVLIRIAGRNDRRAKWAQDLLARVGHNKTLVAIANKTARIAWAVLRSGESYKTA

SEQ ID NO: 197700 - protein, 324 aa, unidentified
MSHSACGIDVSKVTLDVSVMIGGKPLGRQFANSDEGYKSLIGWLKHRKVRQVHACLEATGCYSLGVALALHEAGHTVSIVNPAQIRDFARTRLGRNKTDKVDCGHIREYVALFSPPAWQPPSPALRRLCELQTMRAGFVASKVEWQNRAGSGGSDATAAALAHATIAHFAAQIEAVEKAIAETIEGDDDLRRKHALLVSIDGVGDTLAAVILAELPDRDVIGSSAQAVAYAGLNPRQYQSGTSINRPTRISKIGNATLRSALFMPAMSAMRCNQAVAALVARLRAQGRLKGKQIVVAAMRKLLVICFGVLKTGEPFDAKTAMRT

SEQ ID NO: 197701 - protein, 355 aa, unidentified
MKREVQNKKVLVRGKEVFIGVDVHKESWHVTAQMEGEEVFHGGIPSQYHALWRLLDRFKDCKIKVAYEAGPCGFWLYDRLTEDEIETIVVPPSLIPVESGNKVKTDKRDSRKLAKLLEGNLLKRVYVLKEEDRVDRELLRTRRQIVEHRNDVARQIKSKLLFYGITSPFAPRHGWSQSYLQWLRGLGLPREGLRVCFESLIELYEYLSDQLMKMNQRVKELSQSSKYRQRLKLLCSVPGIGTLIGMEILVELQEVERFKRAEELASYIGLTPSEFSTGQYVRQGRITRCGNKRVRTCLVESSWVLITKDPLMRLKYNKLKAMKGAKRAIIAIARKLIIRIRRILLNNEPYRIGVC

SEQ ID NO: 197702 - protein, 323 aa, unidentified
MPHVTSIGLDVHARSVAAAAFNPFTGEVVHRDFGTDAAEIAEWALGFEEPRACYESGPTGFHMARELRALGLDCAVAAVSKMQRPAADARRKNDRRDAEFIARMLATHNIVEVPLPDAAVEAARDLDRALDDATAEYRRARQRLNMFLIRLGHVWDERNADGARKGSWTRAHWRWISGIRLEGPQRDVLEYYVTAARCAESDRRQLEKKVLALARTDRWRPAVEALSCIKGIDTLTAFRLAAEAGSFTRFRTAPAFASWCGLVPSERSSGETERRGGITKTGNRLARTALVESAWHYLTCTPRPKAPAPGADVPAAIRAVDVH

SEQ ID NO: 197703 - protein, 340 aa, unidentified
MQLYAGIDLHSTSNHLGVINDNDRRIFRKKLVNDPVVILEALEPFHKHLKGVVVESTFNWYWLVDALMDQGYQLHLANPSAIRKYEGLKHSDDTHDAFWLAHLLRLGILPEGYIYPKTQRPVRDLLRKRGHLVRLRTSLILSLQGIIQRNTGLRVNVNQVKKVTTDEVLPLLAGQEDLEFSGRVSKESIDFLSCKIRQIENSVQKKVKLKQAFKYLPSICGVGKILSLTIMLETGPIKRFARVGNYVSYCRKVPTQWTSVGKRKGKGNKKNGNRYLAWAFSEAAEFARRYDPDARGYFNRKASRTNRMVAHSALAHKLARAAYVVMRDVVPFDAAKLFAK

SEQ ID NO: 197704 - protein, 344 aa, unidentified
MIIIGCDYHPSFQQIAWVDTETGEIQERKLMHANGEAEQFYGQLTGPVRVGLESTGNCHWFLDLLSEMGYEVWIGDAAKISAKQVRQQRTDRRDALHILDLLMKDDFPRIWTPSRQERDHRQLLIHRYKLVTLRVRVKNELQHLAMNRGMQRGRSLWSREGQKQLQELPLAFWASTRRQNLLELLKKLDEQITVLDQAVKKAAEENEKARLLMTQPGVGPITSLAFVLTLGDVTRFRRGKQVASYLGLIPREYSSGGKQRLGGISKQGNRFLRMLLVEAAQTVVRYDPKFRKEYLHRCHHKPKAVAKVAAARKLAIRLFWMLRTNKTYPEVVRIESSSRVPLAG

SEQ ID NO: 197705 - protein, 367 aa, unidentified
MKQQTSATSETQVKGRNIIDFTGKTIYVGIDVHQKDYQVAKVHDGICLGTHRMAANDDALIEHLRSHYPGADFKCVYESCAWGFNLQRKLTAAGIECIVVHAADVSTSDKERKRKTDKVDALKLARNLAAGDLKAIHVPDETIQKERNVMRYRSRLVGDINRSKNRLKSLLKYQGIEIPAQYAKKNWSRNFLTWVEQQAAKDKLLADTLLLMLEQIKLLRELLLKTEKKLRELRKGKYQPQAKLATSVPGIGPTTAMLFLLEVGDVKRFKGFDALNDFIGLCPDTDSSGETERDRGITTRRHKQLRSTLIEAAWQAIRIDPALMNSYQALTKRMKGTQAIIRIARKLLRRLRAVLLTGIEYQKGVVA

SEQ ID NO: 197706 - protein, 352 aa, unidentified
MKDTIITGIETIGCDLGDKRTELFVMRADGGSERHNVRTTKEAMKQWFTRPSAHVVIEVGPHSRWVAELLQDLKHEVTVANPRQVKLISAGNRKSDRRDSELLARLGRADVQLLAPITHRSQNAQADLAVAKARDILVATRTKLVNHVRGTVKCFGERLPSCSTAAFVRKTQAMLPAHLKPALDPIYEVIQRLDEQIKQHDQMIDRIAKRYPDVAVISQPDSVGNLTALVYMLTMEDKNRFVKSRMAGAFIGLCPRKSQSGDDDPQLRITKAGDPFVRRLLVNCANRILGPFGTDCDLKRWGLELAKRGGKNAKKRAKVAVARKLAVLMHRLWVTGEVYQPLGYREATTAAA

SEQ ID NO: 197707 - protein, 392 aa, unidentified
MQSSEGWPSEDGSEPHAWETSQVKAITRYIGLDVHKSTISVAIAEEGRGGEVRHYGVVENRADILARLTDRLGRRGERLRFCYEAGPCGYGLHRLLNRLGHDCAVVAPSLIPKKPGDRMKTNRRDVAMLARLHRAGELTSVWVPDAAHEAMRDLVRARATAGRVLTKARQHLTGFLLRHGKGYAGARAWTLAHRRWLTTVRFDHPAQQIVMQDYIYAIEDAEKRIIRLVEQIEMLLEHWSMAPVVKAIQAMRGVAFVNAVTIVAEIGDFARFDNPRQLMAYVGLVPSEHSTGDSVKRGGITKAGNSQARRALIEGAWTYRMQARVSRKLHDRIDDLPQGIRDTAWKAQVRLCARYRRLIARGKTRVIVTTAIAREMIGFIWAIARQVGPQSA

SEQ ID NO: 197708 - protein, 355 aa, unidentified
MDSTKYVGMDVHKDTISIAVMNSAGKVVMESILETKAATILQFIQGLRGNLLITFEEGTWAAWLYDLLKPHVTKVTVCNPRKTALLKSGNKSDRIDAQKLAELLRNGSLSAVYHGENGLRTLKELARSYLTISKDLTRVMNRLKALYYSWGIACAGTQVYAPRHRLEWLSKITEVGVRGRAEFTYQQLDGLQALRQVVRRDLLAESRKHLATKLLRQIPGIGPIRAALLVALLQTPDRFRTKRQLWAYSGLAIETHGSGQYRYLEGQLRRVKKPVALRGLNRNHHHDVKWIFKSAAVKASSPSGPLHEFHEALLAKGIKPSLARLTLARKIAAITLTVWKKGVRFDAEHLKPQAA

SEQ ID NO: 197709 - protein, 424 aa, unidentified
MENTAARKRKQVPEGYLIIGVDPHKKRHAAVAITQDFTTQAKFKFDNTREGLEMMLDRAKVEMVKSGCRGVMFAIETGGHYWRNIAYYLDERGIPFRFINQYTLKRRREGKDLNRRKNDYRDSEVAAQLLCTGEFVESVIPQGVYAELRTSHNAYQRLVKERTRITNLVKGLLDALFPEFTQVFKDPGGLTALSVLSTCPIPRVIAGMTEDEFVATIEARHKGRRLMRKKLKALHRSAKTSIGIDAGARSLSSEIAFLVDKFELIRRQICIMEGTLVRLVDETEEGKYLLSIRGLNYIAVAGLLAELGCFKAYRSAKQMIKMAGSNPTESESAGKKRSRTPMSKQGRPLLRYCAWTSVIPMLRFNPDFRAWARQRRERPAHANPLNGREVVGAALNRLLRLAFALVKNQTYYQNIKPALTPVAV

SEQ ID NO: 197710 - protein, 347 aa, unidentified
MAIVGGFDIHRRQVTFDYLDTVTGQVRRGRISPACRETLRHWLERFAGREDVTFAVEGCTGWQFVVEELQRAGITALLAEPAETAHLRGPKRHAKTDKTDSRHLRMLVADGRVPLSWIPPWQVCELRALLQLYRDLAEEHTAWTQRIHATLFHQGVPSLAGRLGDPQVRARLAGGAGMGLSPAGAQAVAVALRRMDDLEAELGPVHARITAFARRQAGCKTLARELFGVGPLVAAIVWAFLGDARRFSSSAQAVRHTGLDVTVRSSDGKGPPGYLSHQGPPILRWALFEAGHQSSRTASPDHRYYADVAGRIDANRAALSVARKLARRSHHILRRLGDQAYAPVPDW

SEQ ID NO: 197711 - protein, 384 aa, unidentified
MNKHSMIFIGLDTHKEFHEVAYCEEQRGASPVHYGRIPSSKVSVKKLLRQFESKYPGATLHVVYEAGPCGYWIYRLITSLGHCCYVVAPSLIPKKPGERIKTDRRDALKLVRSLKSEDLTPIYVPEPEDEAVRDLSRAREAAMKDLKEAKYQLKALLLRNNIRYEGTANWSKKHLRWLTELILPHPAQQIVLQEQLQTIEERIRRLERLDNELTLHVHQWRYYPVVKAVQAMRGVRLLVAVGVVAELGDLNRFDHPRKLMAYLGLVPSEQSSGGKRHLGAITKAGNGRARRLLIEGAHSYRYPANVSTELQLRQEGLPKDIVDIAWKAQLRLCKRYQRMSKKGKHYNLIITAIAREMAAYIWAIAKDVVLTPVNPKLRLSRVPA

SEQ ID NO: 197712 - protein, 345 aa, unidentified
MELHTIGIDLGKTVFHLVGLNLRGEVVVHKKFSRKQLLHFTANLKVELIGMEAYGGAHFLGRALREQGHEVRLMPAQYVKPYVKTNKSDYIDAEAIAEAVGRPKMRFVPIKSDDQLDLQSLHRVRERWVMRRTAVINQIRGLLLERGITLRKGRCHVDAALPGILEDASAKLSGALRVLLAQLKLELDHLQMRIDEADAAIKKTAGDNEACRRLVAIPGIGPITATAIIAAIGNGAAFKKGREFAAWLGIVPGEYTTGGKQKLLGISKRGNSYLRKLFVHGARAVLQQSAKQSSGLSAWLAQLTARAHHNVVAVALANKLARMAWAVLAKNESYRPPVLVDVAAA

SEQ ID NO: 197713 - protein, 338 aa, unidentified
MTIVMGLDQHRAQITAEWIDTSTGELSRKRIAPADRAGVRAFAGRFCGRELEVAMEATTGWRFVVEELHAIGAQVHLAEPAETAARRGTKKRAKSDRADARHLRELVMVGRLPESWIPPEHLLELRARVRLRHTLVDQRREWQQRIQATLYHHGVPPRSWLLGAESRAWLTSLELPPAAREQITIALALIDAHDAQLGPLDQELREYAKRQPGGRALMRHYGIGPLTSVTILAELGDARRFSSSREAVRYSGLDITVHQSDARRAPGRLSRQGPPALRWALFEAAQCARRPGSPDHDYYLQTAARLGGNRACLAVARKLLKRSYHTLRELGEEALQPA

SEQ ID NO: 197714 - protein, 399 aa, unidentified
MLAVGIDISKSKSVAAILNQDGSMHTSPFEFHHTQPELDAFIKYILNSNQSATILMENTGHYHYPVLKAFREAGLPVCMVNAYQIKKFGDMDLRKAKTDKKDAVRIARYALEKSYSLVPYTSMEQKYEDLRFLARQYNQRMLTLKTNKVFLLNLLDETMPGITNILPLTTRTPETSLSVLFINRFKSYDRIKKMGKSRFLDAFEKITRKSRNRQTKTYGLAIYEAALRNITTRGENEYTLAAQDQCLELVCESQKAADSIILKMQTLAETLPEYAVLRSMAGVGDRLGPLILAEIGDIRRFHSGKALNAYAGNDAPPYQSGTFESHNRHISKRGNAALRKYCFEVMQALKLTQPQDDPVYLFLLKKEQEGKPYNVAKMAGVNKFLRIYYARAMETLKQQ

SEQ ID NO: 197715 - protein, 349 aa, unidentified
MVADEVDYVVGVDTHRDQHVLAVVVAPTGAVVARREVAANARGYAQALRVADEHAAGARVWAVEGAGHYGAGLARYLSARSETVLEAGRSPRGERRLHGKDDRLDATRAARVALGQELASPRAGQRREALRLLLVARRSAVDVRREALVQLRSVIVTAPDRLREELRGLPVQRLLDRCSRLRHSTTAAADELATRLVLRTLARRISAATVEADELEHEILAHVRTLAPQLLDEPGVGPIVAAQLIVAWSHPGRVRSEAAFARLAGVAPLPASSGQTTRHRLSRGGDRQLNRALHTVILHRRQHDPATKEYIARRVAEGKSRRDATRLLKRYLARHLYRALNHQEAPLMT

SEQ ID NO: 197716 - protein, 359 aa, unidentified
MNAYHYTGFDVHKKTIQFCTKLIDGTIVAEGRIPATRAGLAAWLAQQKQPWQGALEATMFSAWIYDVLAPHAVALKVAHSALLAAIAAGKHASDRLDARTIADLVRANLIPGVWMAPPEIRALRLQLRYRNLVVRQATQTMNRIASTLMEQGVEYSKTKLHGKRYFQELLESLEEVPETVRTMLRYSRGNLEMFRTTQRLLLNRLGGDARLAARLRVLQTIPGVGQITALTWALAIGDPQRFRSAARAMSYCGLVAPLQESAGKQYRQPLSKKRNAHLQTMLIEAAHLAPRYHPELRRLYDATKQKRHAGAAVLAVARKLVCYLLAVDKGQQPFELRTPRAGTSAPAEQAANPPAPPSD

SEQ ID NO: 197717 - protein, 413 aa, unidentified
MQTHQELTHFAGFDWAKDHHDVIIIDAKGGIVADFRIEHTPSGWKLWRERIAAWPKLGVAIETSFGAAVEQLMESGIAVYPVNPMNAKRYRERKCSSGNKTDRHDAWALADALRMDGHAWRTLSAQDPVIAELRILCRDEVALIEERTALINQLQQALQEYYPTALEAFDDWTLPGAWAFVEAFPSAALLTKAGRRKWERFLHSHRLYRPETYEARLSAFAQAAQWKACAPLVAAKSLYAVARCKQLRVLQGQLDEYRARIEALFASHPDSGMFGSLPGAGVKLAPRLLSEIGSDRALYDDAQGLQCIAGTAPVSYQSGQVHKVNMRRACNKSLRSTMHLFANNSRAKCAWAQIYYQALRESGKSHAQALRCLGQRWLKIIWKMWRTYTCYDPDLHTRNQLAHGSWVLQINPQ

SEQ ID NO: 197718 - protein, 352 aa, unidentified
MPMLEGRVDAVIGVDTHRDSHAAALLDPNGGVRATLEVPSDRAGHARLLQLATAQAPGRRVWALEGTGCYGAGLTGFLVDRGEWVVEIDRPKRPRGRNGAKSDALDAIRAGREALAREHLASPRQRGHREAIRVLHTTRSAIVEAGANARRQLKALIITAPEPLRDTLRGRTWLQQARASAALVAAPSDPVDHRATIRVLRMTAQRVLTARAEAKELEVQLRMLITAVAPVLLAQRGVGPISAAQVLISWSHPGRFRSEAAFAMLAGAAPVEASSGQVVRHRLNRGGDRQLNRALHTIVMIRQTHHQPTKTYTTRRITQGKSQRDIRRCLKRTVARQLYRLLERTAAKQATS

SEQ ID NO: 197719 - protein, 471 aa, unidentified
MSTTPTRAKRRPKVRSVSKSKVPLPPQLKRINLNAAGIDIGSEEHWAAVPAGRDSEGQDVRRFGAFTGELGVLADWLKHCEIETVAMESTGVYWIPLYELLVERGFEVLLVDARQAKNVPGRKTDVLDCQWLQELHTYGLLRGAFRPVDQVCVLRSYLRQRSMLVAYASHHIQHMQKALEQMNLKLAHVVSDISGLTGMGIIKAILNGERDPAELAKLRDPRCKNSETTVARALEGHYRREHLFALKQAVELVEFYQQQITACDCQIEACLQQFEQKSTETPVTTRRRKRRRGGIAFDAHSYLYRMTGVDLTQIDSIEANTALTVIGEIGLDMSRWPTEKHFGSWLGLAPGSKVSGGKRLSGRTKPSANRAAAALRLAAQSLNQSQSALGAYFRRLKARLGAPKALTAAAYKLARILYRMLKYGAGYVDQGEAAYEERYRDRLLRNLKRRAAELGFQLTTITSGAVEAALI

SEQ ID NO: 197720 - protein, 351 aa, unidentified
MRFYKEQHQFYIGIDLHARTMYICVMNHDGMVVYHKNMPSTPASLDHVVGQFGTDIVIGVECIFTWYWIADFCTDRSIAFALGHALYMKAIHGSKSKNDRIDSEKIAAMLRGGMFPIAFVYPKAMRATRDLLRRREYFVHHRAELFAHIENTNYQYNFNTTLKTTKMKSATYRNTLPGAFNDPLAQKSIRADMFLADVFHTLIQGIEKDIQEIALFHDPLSLELLKSIPGIGSTLALVILYEIQDIQRFPAVGNFISYARLVKPAHESAGKRVSGGNSKIGNGHLKWAFSEAAVFFLKNNEQGQAWHQKLVARYGKAKALSLIAQKIGRTVYFILKHKEPYNAVKFFKDGM

SEQ ID NO: 197721 - protein, 399 aa, unidentified
MLFTGWDWASASHAVTILDPTGGVVDRWVFEHTEQDLDTILARLANHGDPADLPVAIERADGLVVDRLLAAGHPVVAIDPGAFHAARPRWGAAGAKTDPGDSYKLADYLRTDGHRLRRLQPPDAVTRELQALVRLRDDHVAAKTAASNQLGALLDAHWPGAKQLFFRLASKITLAFLTEFPTPQAAAQLDQAELAAFCRRHAYRGGRHPAELLERLRSAPLPPVGLDPGVLSQAVGAQVQLLGTLLATIAELEQAIGKRLIQHPRARLLARLPRVGQLSHAQLLAELGPILDRASSAEHAAAQAGAAPVTRTSGKTSSVHFRLAANHRARQALHIFADNARHGSPWAAKLYADARARGKRHPQAVRVLGRAWLRVMWACWHTNTAYDPAKHRAEQRHAA

SEQ ID NO: 197722 - protein, 354 aa, unidentified
MLYLGIDQHRKQLTVNLRDEEGITLVRRQVSTQWGRVRAFLGEVQALAEPHGGYLAMVEVCGFNDWLLRLLGQYGCQQIVLVQPAGRSRRKTDRRDANSLSEQLWINRHRLLSGQPVHGLRRVAFPNEQDAQDRQLTALRQRLVQWRTKTINKVQHLLLKHNLQQECPTKGIKSKRARQWLAELSLTEIDRLELDLLLAQWALWDEQLAAIEQRIVRRQQAHPLAPIVATMPGAGASGSLALASRMGPIDRFPTPGSLANYWGLTPACRNSGDATDRLGSITKQGSSLARFQLSQMVMHVLKRDRWMKNWYRRIKSRRGAKIARVAVMRRLATILWQMVKHQQPYVVGGFCPGT

SEQ ID NO: 197723 - protein, 376 aa, unidentified
MMDDTGKVVFKAFSFPNTSDGGHALFSKLASYSPSPDDFEIGMEATGHYWLSVYSFLFEKKFLLHVINPIQTDGWRRGTEIRKRKNDIIDSVLIADLIRYGQFVETRLADEDLFSLRSLTRFRTYLVESISDLKRKVVCVLDQVFPEYQSIFSDIFGKTSKEILLQFSSPIDFESVSSQTLAELLAKLSRKQVGPAKAAQLKAAASCSFGVTFAKSSFTFQLKALIEQIAFIEKQVKETETEIAGIMEKLESPITTITGIGNVTGAAIISEIGDISKFDSPRKLVAFAGLDATVTQSGEFEAAHNVMSKRGSPYLRKAIFQAALVAAFKDPVLSAYYQKKRAEGKHHLTCIGAVARKMCNIIYAVVKNNQPYVPKA

SEQ ID NO: 197724 - protein, 387 aa, unidentified
MYYIGLDVHKKTISYCVKNAAGQVLSEGKIGSTRRELDGWVRTLPEPRMMAMEATIFTGWIYDHLLPHAEKVKVAHPLMLRAIAAAKRKNDKIDASKIADCLRCDFLPESYTIPTEMRDRRRFLRYRNLVLRQSVQMKNRISGMLMETGVSYEKLRLHRKGYFDQLMKSNEEVSDSIRPLLKLCREQIDRSIRLDATLLRTLERDPLLSGRLERLRTIPGVGPLTALTWVLEIGDVSRFRSIKQAISYCGLCGEEVRSADKVMRTPISKQRNKHIQSMLVEAARLAPRYSPELAGLYDRGTAERRRQQSYACCGSQISGTHGSRGETAEQFPAGGRVQADRGSVKTLPEKGKTKGSMPSADCQVPQVTGRAMEATPEALYELFRDWQ

SEQ ID NO: 197725 - protein, 361 aa, unidentified
MDVLHPRCCGLDVHKSSISACILVQVAGRVQKHQRRFGAMTRDLQELANWLRQFEVTQVAMESSGVYWKPIWNILEGPFTVVLVNAQHIKNVPGRKTDQKDAEWIAQLLQHGLLRPSYVPCEIIRDLRDLTRMRASLSQEASRISSRVQKVLEDANVKLASVATNTLGKSRRAMLEEIIGGQNDPEYLASLALGHLRAKTPQLRLALEGKIRPHHRFLLRRLLDQLRFVEHEIALLDERLEDIGRQQPELLQAVARWDTIPGIDRVAGWVLLAEVGHTMAQFPTAEHLASWASLCPGNHESAGKRLGGTTRKGSPWLRRVACQCAWAAARTKNTYLSAQFRRLAARRGSKRAIIAVAHTAL

SEQ ID NO: 197726 - protein, 380 aa, unidentified
MPDVSSTAPAQVRILVAIDQHKLSLVAATLPVTGGQPEVMRVENTERAIRRFVQRLGGADGLAVAYEAGPGGYQLHRLLSSMGVACDVIAPSLIPVRAGDRVKTDRRDAKKLVRLYRAGELSFVQPPSPMQEGLRDMMRCRDDLRCARTAARHRVAKALMRHGHIYRQGKAWTLRHRAWIESQRLEDPLAHTALEHMLTHLGALDAQIAALDQQLEQIATHQPWADPVAWLCSFRGISTHTALGLLAEIGDFRRFAHPRELMSYLGLTPSEYSSGQQQHRGHITKTGNRHARRLLVEAAWHYCHRPRQSTRAARLQEHVPPEVTTRAWQAQIRLHHRHRVLAEHGKRSTVANVAVARELTGFIWGAMTKAPLREQEAAAA

SEQ ID NO: 197727 - protein, 499 aa, unidentified
MELVGYSFKSCKFMKKRVANHKEEVIKLLKKQKIRNLKDLEDYKLSICHPYSAGIYIGSREIYVAINPEVAAELDMPIVRVFSTFTSGLQECRDWLKYCGIDSVSMESTSVYWKNIYDILENAGIEPCLVNPRKFRMVPGRKTDVLDCQWLQTLHMYGLLSGSFVPQGNIRQLRSYMRHRDCVLKERGKYIQRMQKNLIEMNLMLVNVVDDIMGMTGAKIITAILDGERNPNVLAAFRHGGCKRLEQEIAEALNGNYKEEQLYLLKANYEAYKFFNDQITDLDNQIEVLLDKFPLAQKKEPGTDTSNESGSMENYSPVKKKKQSKSKNDLRIKNLPDKLTEIIGIDLTTVTGLQANTILQIISEVGTDMSKFPSAKNFASYLGFVPHNKITGGVIISSSTDRVKSPAAHAFRKVVASVGQGKTALGAFYRRIAAKGSKAKAIIALCRKLAMIYYNTIVYGKEFVEYGAEKYKKQQELREKRLIAKLAKKHKLTVQAAVC

SEQ ID NO: 197728 - protein, 388 aa, unidentified
MTQTPAAIPQPAALDYDGTLVLAIELSDTSWVLAAQVPGLPRVKAKRSIEPTAEALMTAIDIYRDRARDAGRMVERVIAVYEAGWSGFWLARWLERRGIEIHVIQPSSVPVDRRARRAKSDGIDAELLLRTLLAWLRGEPRVCSMVPIPAEADEDARRFIRERSELVAERVSLVNRIGAVLATLGIRDYNPLLRNRRRCLEELRTALGTTLPPHAQAKISRMLDRLELVQAQVTELDRERDAVLEEERPDKAAAMIQQLAKLRGIGVQSATVLVREAFVREFPNAKALGSYAGLTATPYSSGGAEREQGVSKAGNRRLRTVMVELAWLWHRYQPGSIQVSWFRQRAGEAGRRARKVMVVAMARKLLIALWRFATQGIVPEGAVLKPGL

SEQ ID NO: 197729 - protein, 408 aa, unidentified
MKTLLRRCAGLDVHKVEIVACLRLVEKGKVARRVRRFPTTTQGLLELVEWLEGAGCSHVAMEATGVYWKPVWHILDGHFALILANAMHVKAVPGRKSDVNDATWLADLLAHGLIRASFVPSTPIQELRDLTRTRKQLTREIVQHVQRIQAVLEEANVKLSSVISDIMGPSGRRILTAIIAGETDAEKLAALGSERLGCGRAALSEALKGRIREHHRFLFAQHLRTIEQLEESVAAFDARIAGALAPFRDVVERLNEVPGLGRIAIETIIAEIGTDMSRFPTAGHLVSWAGLAPRLDESAGKRRSTRIRNGAPWLKPALVQAGWAATRKKNTYLQAQFLRLKSRRGPKKALIAVAASILTIVYHMLRDGTFYRDLGPEYFARRSPAKLAANLANRIRNLGYHVEISATT

SEQ ID NO: 197730 - protein, 367 aa, unidentified
MSVDTFVGLDVHAESITAAIFRPGSEQPEVIKLSPDLMKVRRLFRRLAGHGPVRSCYEASGAGFVLQRVLADDGFSCEVIAPSLIPRKPGDHRKTDRLDAVMLGRLYRSGHLTAVHVPTEDHEALRRLLRLRTTYHQYSTATMHRISGILRNHGFVFHEGKSTWTKKHRMWLARLRLTLQGPLSTALAVEIQHLEYLETQLQSMDTELERYAQSPLYRSKVEALCCLRGVKILTALTILCEVDDVCRFPSPRQLMAYFGLVPSEHSSGPREYRGSITKAGNIHVRRLLVEAAWNNRHKARAALILNRRRQGQPPEIVAIALKAQHRLTKKYLRLDQRKHRHVAITAVARELCGFVWAILMALPKTQN

SEQ ID NO: 197731 - protein, 335 aa, unidentified
MKNYLFYVGVDISKSKLDVVLLKKEEPNVTNHFIVENNLKGVKEIFKNLIKQKIDLSAVLFCCENTGVYTFPLSSCLSENNLDFWVVPAIEIKRSKGISRGKNDKADAKDIALYSIRNIDKLKLSTLPETVLQQLKLLFTEREKVMKSFKIFEGTKENADFTPKQVYQSIKGINNKTVKFLKATLKSIEKEMKAIICNHFELKKQFELIKSVPGIGDKTAIYMLIVTRGFTAFENARKLACYAGTAPFEHTSGSSIKGRTKVNHMADKKMKSILQMCALTAVKHDPQLKEYYERKKGEGKNAMLVLNNVKCKIIGRVFSVINRQTPYINTYKFAC

SEQ ID NO: 197732 - protein, 343 aa, unidentified
MEYYAGSDVSLKESSVCVVDAAGKLVREVKVGSEPECLVGYFDQLDFPVERIGLEAGPLSQWLHAALVAAGHEVVLLETRHVKAALSAMTVKTDRKDARGIAQLLRMGWYRPVHAKSSPAQDTRALLDGRKLLQSKLLDVELSIRGILRGYGLKVGEVSRGRFEVRIRELIAGHPTLSMVIDAMLTARAALWSEFTKLHREMLRIARADRVCQRLMSAPGVGALVALTYRSAVDDPARFEKSSTVGAYFGLTPKKYQSGETDRDGGVSKVGDAMVRTALFESAHIILTRATRFSSLKRWALDVAKRRGMKRAKVALARKLGVVLHRMWMDATDFRWSANPMAA

SEQ ID NO: 197733 - protein, 354 aa, unidentified
MLIIGCDYHPSFQQIAFVDTDTGELQERRLEHREEAEKFYRELAVQGIKVRVGMEASGQARWFERLLGELKFELWVGDATEIARKRERKQKTDRQDAQHILKLMLKDDFPQIWVPSWENRDLRQLLWHRHRMVQARTRIMNQLQAVALNEGVRCNKRLWREKGREQLESFRLAPWASRRRHDLLEWLDRLNPTIGALSQAIEQEVEKCPEAQRLRTHPGVGPLTALAFVLIIGKPDRFQCGKQIASYLGLVPLEDSSGNRRRLGHITKQGNSLLRFLLVEAAQVTVRSLPEWRRKYVHLTMRRGRKIAKVAMARKLAVRLYWMMRKQWDYEQLKKFGSHAGQPGNRDGVKQNIE

SEQ ID NO: 197734 - protein, 371 aa, unidentified
MDHSTFVGLDVHKKSTSVALAEAGRSGEVRFHGEIPSTPEALRRLVEKLGRPGRRLHFCYEAGPCGYGVHRLLRGLEQDCIVVAPSLIPSRPGDRVKTNRRDALALAKLHRAGELTEVWVPDDAHEAMRDLVRARATARRVLGKARQHLQGFLLRHGRVYTGKRGWTQAYRRWLTTVRFDHPAQQIVLQDYIHAVDDGEARLARLEQQIEDLLPSWSMAPVVEAVQAMRGVGLVVAVTVVAEVGDFSRFANPRQLMAYLGLVPSEHSSGASIRRGGITKAGSALARRVLIEGAWTYRMQARVSRKLLDRIEHLPKEVRDTAWRAQLRLCNRYRRLSAAGKPKVVVTTAIAREMVGFIWAIACMVQPRPAVG

SEQ ID NO: 197735 - protein, 412 aa, unidentified
MPKIVYPICCGIDVHKSFVVACIATTDEKLVTTYSKPKRFSTFTGDLRRLADWLVQNNCRDVCMESTGKYWIPVWNILERTCNLVLAHPKYVKAIKGKKTDKRDAKWIADIFKHDLINGSFIPSADIRQLRDLVRYHVKLTSCTSGEKNRAQNCLTVSNIKLDDVFTDVFGKAASAITERLLENNEPFDVRPYLTKGIKASPEEIQAAVDGAMCASQAEKLRIIRSHMDSLNLCKLNLESEILTVAEKFLPQINLLSTVPGIQTFSAVAIIGEVGADMSVFQTSRHLCSWAGLAPQNDNSAGKKKTTRISRAGVYIKPLLVQCALAALKSNKHPEIRNRYQAIKKRRGHKKAIIAIARMLLTAVYNILKKNEPYNAQLYRKSDKPPVQRVVTVEQAVFILQRQGYLITAPTA

SEQ ID NO: 197736 - protein, 332 aa, unidentified
MMAQNEVVVVGIDVAKDKVDACIRSLSQRQTFPGTAEGQRALVRWLRKHKVSKAAMEASGGYERDWAKALREAGLEVRIVDPKRVRSFAKSAGQLAKNDPIDAEMIAWFAETFIEAPSQAQDATREKLAQIVNARQNLLDMQTSLQNRSEQSMPEVVQKMQGRLLKEIACEVAKLEAAIVALIKATAHFVELAEIIESVPGLGKITSAGLIAAMPELGQVSNEIAAALLGVAPYDDDSGRRQGQRHIKGGRRRVRNLFYMACLGAATQHNPVLKAFYARLIAKGKEPKVALTACMRKLIVILNTMIARRQKWDASAYKVGDPARLPPSACPA

SEQ ID NO: 197737 - protein, 317 aa, unidentified
MPTSAVYIGIDVAKATFDVGSSERLLLQKVANTNAGHRQVIDYLRGRSVALIVIESTGIYGADLVRALILAGLPVAVVQPGRVRYFARSLNILAKTDAIDAVVLARFAEATKPRLYALPPENLVRLRALSDRRDQVVDDRVREQNRLEACRDPVIAKDLKASIARLEKAEVKLDKAMVVVIAEDPALKTKSDLLQNESGIGPQTAAILLAQLPELGTVNRQEIGALAGIVPYDRSSGTSDGKRHIYGGRERVRRALYMATLAACRFNQQIADFYQRLIKRGKQDKVVRIACARKLLVRLNTVLANAAKPKPQETVMA

SEQ ID NO: 197738 - protein, 353 aa, unidentified
MIGLDTAKSVFQVHAVDGEGQVVIRRKLHREELLTFFEKQGACTVAMQACGAAPHWGRALTDLGHTVTLIAPEAVRPFVKRGKKNDAADAAAICEAASRPGVTFVPIKSLEQQGTLAVHAAFSLLVKQQTMLANAMRSLAAEFGLTVPKSMGKLGDLMTLVDVDEAMPEEARQVLGALFGQCRALEESIGALEAKIVAHARRDDAARRLATVPGIGPITSSLIAATAQTFGFAEVADIGVFQSARHFAAWLGLVPRQHSTGGKTRLGRITKAGNREIRRLLVLGATSMVHRAAGWNSAAGAWTRGVLQRRPVRLVTVALANKMARIAWALMTRKEVYHAKGRPAAAALAPAAA

SEQ ID NO: 197739 - protein, 416 aa, unidentified
MNAVGIDVSSRKSTVAVLRPLGEVVCLPFDVTHDIAGLASLVEKLKALDGETRVVMEHTGRYYEAVAKALHEAGFFVCAVNPLLIKEYGANSLRRVKTDKADAVKIARYALDNWADLRDFTPMDAIRYDLKTLNRQFQLASKQRTASANNLIALLEQSFPGIRKCFDSPVRSDGTQKWVDFAYSFWHVDCVRKQPFAAFCERYRKWCKRHAYLFKLSNAEEVYALAKRAVVLTPKSKVVKVLVQEAANQLISISRSVEVYRAEMDRLAAMLPEYPVVMAMYGVGKSYGPQLMAEIGDVRRFERKQALVAFAGIDPMPNQSGDKNVRSNKSSKRGSPYLRKTLFNVIRTYLQCAPQDEPVFQFLNRKRAEGKPFYVYMLAAANKFLRRYYAKLRDYFASLDTLQPAAPIPTILKAAL

SEQ ID NO: 197740 - protein, 279 aa, unidentified
MDQYIGLDVSLKETAISIRQDGKRIWRGKCASDPKLVAEMIRKHAPHAKRVVFETGPLSTWFYHGLIKEGVPAICIEARHAQKILNETLNKTDSNDADGLAHLAEAGFKAVRVKAFDSMLTRTLVAARNQLLNISTQLSNQIRGLMKTFGLIVPKGTGRVFDGNVRQLLDGNDGLAKIILPLLEAWRDIRMRAADLDRQLVAAARESQATKRLMTIPGIGAVTAISYVAAIEDPDNFKTSRSVGAWLGLTTRRYQSGEVDYDGRISRRGDPYLRGLAAL

SEQ ID NO: 197741 - protein, 424 aa, unidentified
MKVTYQTCCGVDVHKSFLVATIVKTTGGIEPSYQKKRFSTFNNSILEFKQWLLDNDCHDVCMESTGKYWIPVFNLLEDEINVVIANPKWVKAVKGNKDDAKDSKWIGDLFRLGLVKGSYIPCKKVRILREYTRYRYKLVSCRSSEKNRYQNALTVCNVALDSVVSDIFGKSSTSIIDYLLEQSGTSINHEEIASKLLRSLKSKEDAVIESVEGYQMTDAQKYRMRLVRAHMDYITAEINDVDSMIEKLISSNTDYENAVKFLCTIPGVKRDSAVTIISEIGIDMSQFSSSKRLCCWAGLTPGSNESAGKKKSVRITRAGVYLKPALVQCAHAAVKSDKSPYYKKKYDSLVKRRGKKRAIIAIARMILTAIYQMLSAGELWNPSDLYKIDMPVALVEKQKAKAIKQAKKLLQQEGLLPPDEPLAS

SEQ ID NO: 197742 - protein, 324 aa, unidentified
MTDAVLGIDVSKNTFDINLGAGTKARSKSFANSAAGWHQLIAWLGKHKIGQVHACLEATGRHGLGIALALHEAGHVVSIVNPAQIRDFARTKLGRNKTDQVDAVHIREYAELFKPRPWTPPSPAMRRLCELQTIRAGTVAGLTEWKNRRGSGIMDDLALSLAKTTIQHFTSQLEAVDQAIAETIDNDVELSAKRDLLVSINGVGEALAGIVLAELPGPDILGSSAAVTAYAGLNPQQHQSGISVNRPVRISKIGNAVLRTALYMPALSAMRYNPAVAALADRLKAQGRLKGKQIVIAAMRKLLVLCFGVLKTGKEFDPAMAMGK

SEQ ID NO: 197743 - protein, 346 aa, unidentified
MEHYAGIDVSLELSSVCVVDTQGKIVKETKVASEPEALVDFFGSLGLAVTRIGLEAGPLSQWLHAGLKRAGFETVLLETRHVKAALSAMTVKTDRKDARGLAQLIRMGWFRPVHAKSMGSQEVRALLVARKQLLGRLIDVELSIRGILRGFGLKVGPVTRKGFEARIRELVTGQATLERIAGTMLSARAALKAEYEKLHKTVLAIVREDAVCRRLMTVPSVGPLVAITYKSAMDDPNRIAKSKAAGALFGLTPKKYQSGEKDVTGGITRTGDEMVRTVLYEAANVLLSRITRFSKLKRWGMDVAKRRGAKRAKVALARKIAVILHRMWVDGTVYRWNEATPIAAQV

SEQ ID NO: 197744 - protein, 356 aa, unidentified
MNILAIDLGKYNSMCCFFDTKTQKHSYLNAATTRSYLTSVLENHPIDLVVMEACGPSGWIHDLCLKHGLKTLVCSTNEEAWKWKNVKRKTDKDDALKLARLAMMRQLKPVHVPGHRVREHRTLVKYRKTLSGRINRIKNSIRSLFANRGIEIASGARAWHAGRELIDQHRNQLAECAMEDLWKGQLDLELTQLDSLTEQLAEIECRLEAIAKQDHRIERLQTIPGVGRKTAEVLVTALDDVHRFDNARQVSAYIGLVPRQYQSGLTDRNGRITKRGSRLLRTMLLECAWSSLRYNPWARATYDRIHGGQQTCRKKAAIALARKIAVVAWAMLKHETDWDPKRMGIAEELNTDTVPS

SEQ ID NO: 197745 - protein, 316 aa, unidentified
MYVGIDVSKEHLDVASDDGALEARFTNDEEGHGQLVARLRELSPELVVMEATGNFQLELSIVLASAKLPMAVVNPRQVRDFAKALGILAKTDAIDARTIASFGATVKPTAQPLPDEQALELEAMMTRRRQLVGMIASEKNRLQALFGPAKGSWAEKSIRDTLSHLIKQLKQLDKDLQKRIERSPAWKAKDDLLKSVPGIGKVTSLTLSIDLPELGTLDRKQIASLAGLAPINRDSGKSVGKRRIWGGRATVRTALYMACVASLRCNPVIQALYTRLTKVARKPPKVALVACMRKLLTILNAMVRAQRPWNPALAGG

SEQ ID NO: 197746 - protein, 424 aa, unidentified
MDHVIIGVDTHKDNHIAVAIDAQGARLGSTTIPTTRNGYQDLEIWAAQFGQVKAFEIEGTGSFCAGLSGDLLAEGHEVLDVMRPNRQLRFLHGKSDSLDDESAARSVLNGQATALAKTQTGSSEMIRHLKVARDSAVKARSQAMITLKTLIVNAPSDLHDALDGIRGRITLVRHVAALRPGEITSPIASAKTAMRAIARRWLALHEEINAHDQELERLVREKAPELMKSHGISTVTVAEMLILVGDNPERIQSEAALAKLCGVCPIPASCGKTNRMRLHRGGNRQANSALYRSPLCACAMMKEPRPKPSGELRKAKPDAKLCAASSATSCAKSTALSAPHPTWFLPLDKYRSINALAESIISLFKTEVIKFLGPWKSVGQVEWETLKWVDWYNTNRLHSAIGYVAPQEAELAFYDSLNEDEKAA

SEQ ID NO: 197747 - protein, 349 aa, unidentified
MQHYAGIDVSLELLSVCIVDAKGKIVKEAKVGSDPDTLVAFLRGLDLAIERIGLEAGPLSQWLHAGLTSAGFEAVLLETRHVKAALSAMTVKTDRKDARGIAQLIRMGWFRAVHCKSAGSQEVRALLVARKLLLSKLLDVEFSIRGILRGFGLKMGMVTRKRFEARVRELYAGHAMLEQICSAMLTARSALQTEYAKLHKALLVIVRKDEVCRRLMTTPGVGPLVAITFKTGVDDPSRIHKSKAVGALFGLTPKKYQSGETDVTGGITRAGDEMVRTALYEAASVLLSRVTRFSALKRWGMDVAKRRGTKRAKVALARKIGVILHRMWVDMTSFRWTKGAPTTMRLARV

SEQ ID NO: 197748 - protein, 330 aa, unidentified
MRYIGIDISKDSFTVAFSSVKGSKTQSYKNTPKDIQKFIKTLDKEQDHCVMEATGNYTFKLLYLLIEQGYKASLVNPKQTKYFAKTMLSVTKTDPQDACLLACYGEKMTPPVYKMPSEKIILLKQKRTVIRQLRKQLTALKNLKKSLEVLPRKDKNALTCLNNTISYTEKQIEKLEKELIDNITEDFDQQLDLLTSIKGIGDKLAASLIIVTGGFSFFENPKQISRFLGICPTYQQSGSSINIKGSINRNGDSHLRGMLFLASLAAIRFNTACKELFSNFKAKGKPVKVALIAVANKLIRQAFAVVKSGISYTDGYISKPPITTVKITSN

SEQ ID NO: 197749 - protein, 416 aa, unidentified
MDTMYERCCGLDIHKKAIAACFHSGKKKAHMSFGTTSAELRKLTMWLVENGCQSVAMESTGFYWKPIFNILELSGTDMEIIVVNARHMKNVPGRKTDVHDAEWIAELLQYGLLRPSFIPDREQRELRELSRYRKSLVGERAREINRLQKMLEGGNIKLTSVVSEVTGYSSRRLLDRLLRSDEPMTEEVISELVHTSLVGKSKELETALDGLLSELQKELLIKVLDHIDDMSRRIADLDDFCRKQMKKYEDALDKLDEIPGIARRTAETILIETGLDMSRFPTAKHFARWAGLAPGNNESAGKRSSGRTTKGNPTLKSTLIQSAKVAARKKNSFFKARYQKIAAKRGANRASVAVAHSMLIAIYHILKSGERFKDLGEDYYNQFNKEKKKKYYLKKLTKLGVNLKEATLLISIQAAT

SEQ ID NO: 197750 - protein, 421 aa, unidentified
MIEHETFTWFAAIDWGTDKHQACVVDVRGGIAGERAFSHDGAGLALLCDWILSIVGNATIVAVAVEVPHGPVVDALLDRGLAVYAINPKQLDRLRDRFSVSGAKDDRRDAYVAADGLRTDRHLFRRLQIADPRLIQLREWSRLAEELQQERVRLSNRLYSQLWRYYPQMLGLSDDLAAGWLLDLWTMAPTPVKAMHLRKTSVVQLLKRNRIRRIDAETVLRALRGPAINVADGVVEAATLHIGSLVTRLRIVGRELHDAMRKLDELCACLDEPSPTAAEHGGSGRHDVKILKSMPGIGKIILGILLAEASGPLSRRDYQALRTLSGVAPVTKQSGKSRMVVRRYAAHVRLRDAVYHWARVAIQHDPRSHSRYVALRQRGHSHGRAIRGVADRLLALACTLLQRQTVFDRDFSKGEKLTAVP

SEQ ID NO: 197751 - protein, 348 aa, unidentified
MYGRGVDIAKSVFQVHYVDQETGEIVNKPIKRAKFLEHFANRAPCLIGMEACGGAHHWARQLTKLGHEVKLMPGEFVKAFNIRNKSDAADAKAIWLAVQQPGKPVAVKTEMQQAMLGLHRMRQQLIKFRTMQINALRGLLTEYGEVMGKSRAKLEKEIPAVLERIAERLPAVLMDTFRAQWNGLEKLDEQIAEIERRMREWKKEDKAVKAISEIPGVGLLTATAAVAMMGDAKAFSSGREFAAWVGIVPKQTGSGGKVNLHGISKRGDTYLRTLLIHGARSVLTHAKEPGEWVEQIQKRRPKNVVIVALANKMARTIWAVLAHDRQYQKGYVSVKPGVDPVKPDTPSH

SEQ ID NO: 197752 - protein, 376 aa, unidentified
MGAPPEVGMSSAHANSSGKDPTETEVRALMKVLIGVDPHKESVAVAVVDEAKGELLERASFPQNRAGLRALERWAKRFPERRWAVENAGGLGRHLAGRLAAAGEFVVDVPPKLSARVRVLSSGNARKNDGLDALATALAASRNERLAAVDSESNSEVLRLLSERREDLVAERTRALNRLHGLLRDLVPGGIAGTLSADRAARILRGIRPKGGASARLRRRLALEILRDVRTLDRKIAELNWRIEAEVEASGTTLTEIFGIGPILAARIIGTVGDVGRFPTKAHFASYSGTAPVEASSGEAVRHRLSLAGNRKLNYALHMVAICQARSDARGGSYYRKKIAEGKSRKEALRCLKRRISDAVFRSLMADSRAPSRSAA

SEQ ID NO: 197753 - protein, 365 aa, unidentified
MVKNSTAFVGLDLGDKRSNVFILDPEGELIEETCIPTTEPAFRRKFASLPPCRVAMEAGTHSCWASHLLEQLGHEVLVANPRTLRLIYGSPRKADEADAQYLARLARLNPQLLSPIRHRGPEAQAHLTVIRSRDSLVRARTLLINHVRGSVKSSGARLLSCSADSFHHRVSPSIPAELQPALLPIIETIASLTAQIHAYNRQIAQLCQEHYPETRHLRQVSGVGPITALAYILTLDDPDRFRKSREVAPALGLVPKRDQSGSRDPQLRTLAPALQVQVSLRPATATCVACSSAAPNTFSGPSDPIVTCAAGVSSSPNAEARTPRGERLWRWPASWPSSFIASGSAARSTTPSSTLARIKHRRQPR

SEQ ID NO: 197754 - protein, 355 aa, unidentified
MLADRVDYIIGVDTHTATHTAAVVTPTGAALAHQTVPTDADGYLHVYRFAVEQAPGHRVWAIEGTGSYGAGLTTHLLEQGEWVVEVDRPARPARRNGAKTDDLDAVRAAREALGREHLAQPRQRGDREAIRVLVTTRQSAMQARTCAINHLKALVVNAPERLRRQLRALATDQLLARCARLRSHPTQPIEYRATIAALRRTAQRSLALAAEADDLHAELDTLIRRRAPWLLAEPGIGVICAAQLLNAWSHAGRLRSEAAFAMLGGAAPIEASSGKVVRHRLNRSGDRQLNRALHTIVLSRMAYHAETRADVARRIAEGKTARAIQRCLKRYLARRLFKLLEAPPAHAQKEKIATT

SEQ ID NO: 197755 - protein, 310 aa, unidentified
MGVHVGIDVSKQHLDWVLGAEGRVERTSNSPAGVRRLVSKLSSVELASIIVESTGGYERRLTEALAAADLPVILVNPWRVRRFGEGLGVLAKTDPLDARVLALFGERARPPRRPLPGPRQREMADLVRRRRQLIAMIVAEKNRLDTASKVIRRDIQSLVQLLERRVAKLDRRIDQAIAADADRAENWKRLQTVPSVGPGVARALIVDLPELGALGRRQITSLVGLAPFAKDSGKKSGYRRIRAGRAAPRTALYLAAMNGSRFNPVLKAMYQRMIAAGKPPKVALIALARKLLTILNAMLRDGTDWAETPS

SEQ ID NO: 197756 - protein, 388 aa, unidentified
MRLPEGVAGLARLHALIAEHAGGLEPDQVAIGIETDRGPWVHGLVCAGYRVFAINPRQAARFRERYAISGAKSDTGDAHALADMVRTDAHQLREVAGDSDLAEAIKVLVRAHQNLIWDRTRQVQRLRVGLREYFPVALEAFEDLAGADALELLARAAPDPVMAARLNRTQISGALRRARRNHVELKTERVRTALRSEQLSQPRELSAAFAVVTCSLTALIAGLNTQIAAMHKEVASYFERHPAASIYRAQPGLAAVLSARVLAEFGDDPARYADAKARKNYAGTSPITRQSGMKKTVQARFVHNDRLVDALHRQAQGALTGSPGARDYYDRQRARGLGYQPALRQLANRLVGILHGCLRNGTPYDEDTAWPPRRPLNPSRLRGQPPHR

SEQ ID NO: 197757 - protein, 392 aa, unidentified
MNRIVYIGMDVHTSNYTLCSLDPGYGVEKDNYFAEVQFTNNFVTNVVNYVSNLKKKLKDCEFVCGYEAGCLGYSTYKDLTKVGIKCVLMAPSTMAVQKGGKKVKNDRRDARVIAQCLAYQTYKEVYVLSEHDEAVRGYLRMRDSHNKALKRIKQQIIAFCTGHGLFSPTKSNWTVAHLKWLKDLKFNDPVEQEILNEYLSSLTFLSDKIKAMDVRIEELASEKQYCENVKKLRCIKGIETNVALTLLAEIGDFNRFSKPTDFASYLGLIPGEQSSGDKVRGTGITKAGNSTLRRKLTESAKGYWRGRIGIKSSTFKKLEKELPKEVTEYALKANTRLQRKFFNMTHVKGKNMNVAASACAREMACFVWGLITNHYEKAPAVPKTDEELLDLN

SEQ ID NO: 197758 - protein, 413 aa, unidentified
MSVTPQGVPARVCAGVDWAKDDHAIAIIDSDGQMLDRFAVTDDAAGLKSLVRRLLTAGVDEVGIERGDGPVVEALIQAELVVLVIPPGQLKNLRSRYGSAGNKDDRYDAYILADVVRTDRRRLRPLVRDSAATTALRTTVRARRDLVEHRVAAANQLRAHLQIVFPGATTVFAAIDSAISLTFLERFTTQTQADWLSPKRLGTWLSSVSYSGHTDPRILHTRLLTAPHGTTGADADTHTVTTLAFVAILRSLNTQIEALAKSIGEQLAIHPDAHIVTSLPRSGTVRAARLLAEIGDARGRFPTAESLACLAGVAPSTRQSGKVKAVTFRWGANKELRDAVCDFAGDSRHANPWAADLYTKARTRGHDHPHAVRILGRAWIHVIWRAWQDNLAYDPTKHRALQALLNNTTNKAA

SEQ ID NO: 197759 - protein, 463 aa, unidentified
MNKTVKKQSKGTVAMPLINPDAAGIDVGDTLLSVAVPEGRDEQRCRNFGTFTRDLQAVAQWLHQCNITTVAMESTGVYWKPLFSVLIQSGFAVYLVNAKHTKNVTGRKSDESDAMWIQRLHSCGLLTSCFLPDDATETLRTLVRLRRTLQEDSTRYILRMQKALELMNVKIHTVINDITGKTGKAIVESIVAGKTQPADFIPLIDSRIKASKETILQSLEGNWRQEHLYSLKLCYEMYTTMQHKMMELEEQIEQVLQRYSSTVHQQEQVPAEAVATTAATDSSKGKNKRAKRKTKNQAVFDIQAYLLHIHGVDVTAIYGLSATSALEILAETGVDLSKWEKPDHFVSWLNLCPNNKISGGKLISSTRLKKKPNRAAQAFRAAANSLRRSDHWLGDFFRRMRAKAGSKYAIVATARKLAIIYYQMVRYKQPFQPLNLEVYRNKNREAKIAWHKRKLQQLEREAA

SEQ ID NO: 197760 - protein, 409 aa, unidentified
MRYYLGVDWADQTHAVCVVDESGMKITARAVAHTAEGLEEWGRELNEWRAQGIELWAAIERPDGRVVDFLLDHGVIVYPVNPKALDRARDRFRQSGAKSDPFDARVLAEFLRTDHAHLRALQPSSEAAQELKLLTEDCQRHIRQQTRLVNQLTATLKAYYPRALEVAEVPSALMREFLPAYPTPAALTAVTERQWQRWARAHRLSESRSAELWAILRQPQLPVPAHVVRAKARLMQTLMEQLNPVVAAVAQYRTAIDDFFARIPAAQWARTLPIGKHGITAPTLWARLGDAPGRWASFRHLQAHAGTVPVTKRSGKQRIVQFRFACDKALRYVVDQVAYLSLLSSAWARAYYDRQRARGHSHRQALRALGAKWLKIIFVMWQRQVAYDEQYHLGMMTRQQLRQRQEKVA

SEQ ID NO: 197761 - protein, 470 aa, unidentified
MSKGNGMTRGDRRRNARREQLRGMLPRDGAVIGIDLADEKQALAVIDHDVRVLARKTVRVKAFRLGEALDWAIGQARAKGFTHVTVACEPTGPRWLQVQRLCAERGLPLVCIQPLMSHIAREQQDYTTHKTDEADCVLIARLAVELHCYLPEELDETWAHLRHLGRRRQQLITAATASAQRIRDFLSVAWPVVTETCAQPLESKTWLAALQVVTSRCGADPGKLAVTGPEAFTALVRGAVPGWGGKKGWGTICGRIFAALTSTEGVVVSSRRGLLRRCADELGDLQRARAQLRAVEADMAAVLAELGLSRLADIPALTAVGAAAILAEAGDPRRYDSSSSLVKHAGMSPSDNASGAFYGEAHISRRGRPGLRLTVWRAVWPMLRFNPVMAAKYAAMTQAAGAAAQTAEAQADAGSRQVSAAAAAARARRARARVACAASLLRWIYSMVVHDTSWDPAIASGAASCPAEAA

SEQ ID NO: 197762 - protein, 426 aa, unidentified
MKYNTQNAKIKSITEKTLIVGIDVGSETHFARAFDWRNYEYSKKPLEFSNTEAGFMTLKAWMADFAEKYGKNVVIPGMEPTGHYWFNLGAYLQDNGMKPVHVNPHHVKKSKELDDNNPNKNDRKDPKTIAALVNEGRFSYPYTGIYAEIRSLSNLRLQTQEEITRIKNRIARWFSIYFPEIKDVYRNPDSVSGLMILKEAPLPQDIVKLGVDGINKIWRDAKLRAAGLKRAKTLVTAAEHSIGSQEAPDSARIELKNLLNDYEIYKNREEDLMSLTEEKLSEIPHIDKLLEIKGVGLKTVSGFVAEVGDITRFDNPKQLQKLAGYAIVECSSGKHKGESHISYRGRKRLRYVLYEAAISLIARNEEFKEVHRYYRTRKENPLKKMQSVIAVACKVLRIFYTILTKGVTYDGAKMMQDIKRPQMLAA

SEQ ID NO: 197763 - protein, 343 aa, unidentified
MYYIGLDLHKKTISYCVKDAAGHVHREGKIGSTRRELDAWLHTLPQPRMMAMEATIFTGWIYDHLLPHAEKVKVAHPLMLRAIAASKKKNDRIDAGKIADCLRCDFLPECHMASTEIRDRRRTLRYRNLVMRQMVQMKNRISGLLMESGVSYDKQRLHKMGYFTELFSTNEEISDSIRPLLRLSREHILRGQRLDRALISSLERDPLLSERLRRLRTIPGVGHITALTWVLEIGDYTRFQSVKKAISYCGLCGAEKSSADKVMRMPISKQRNKHIQHVLVEAAKLAPRYSHELALLREKEIQRGNKNRATLAVARKLVAYMLAVDRRKQDFVPTEELAAKAVA

SEQ ID NO: 197764 - protein, 361 aa, unidentified
MVGTMTWVGLDVHARSTHAAAIDAVTGELSRMRFGAGAEAPVEWLRSLSGPVRACYEAGPTGFGLYRALTAAGIATQVIAPGKTPRGPSDRVKTDRKDAELLARQLLAGSLTEVVVPAIEVEAAREMTRAHDVCRQELMRARHRVSKMLLRHGLVYPKPKTWTAEHRRWLSEQRFEQAPSDAVFADLLAAVDGITSRKAAIALAISGLAGDERWWPTVSRLRAFRGIDTLSALSIHLELGGDWSRFDRASALSSWLGLTPSLSQSGESSRQGAITKTGSMLARRLLVESAWHYSRQPRLGATLANRQVGQPDHVLAIANRAQQRLYRVNRRMRARGKPHNVTVVACARELACFLWAAATAD

SEQ ID NO: 197765 - protein, 350 aa, unidentified
MMIIGVDYHPSFQQIAFLIEETGEYDEQRLNHEGGEAERFYRDLKGKGIRVRVGMEATGYSRWFERLLAELDFELWIGDPAEIEAKRVKKRKTDREDARLLLRLMREDRFPRIWVPSPENRDLRQLLWHRHRLVQMRTRIMNQLQALAMNEGKRWKSKLFSQRRAEFEKLALGPWASRRRSELLELLDRLNPSIEELTTAVEQEVNKRPEALRLMTHPGVGPITALAFVLIIGTPERFARGKQIGTYVGMIPIEESSGGKQRLGHISKQGSSLLRYLLVEAAQAAARYNPHWRRRYVRLAIRRHRSIAKVAMGRRMAIRLYWMWRNGCEYSPSFEFGSYAGQLEKRYGGN

SEQ ID NO: 197766 - protein, 347 aa, unidentified
MLIIGCDSHTGFQQVALFDKRPEENQERALSHRAEAEQFYRALAGQAVRVGMEACGHYPWFERLLAECGHELWVGDAARIRAMEVRQQKTNRRDAKQLRTLLMEDRFPCIWVPTLEERDVRQLLVHRHKQVQARTRTKNQLHALALSQGVQRKRKLWTEVGRAELEKLELLPYAAVRRERLLAMLDRLEQEIQQLNRQVEEEVKQRPSAMKLMSHPGVGPVTALAMVLTLGPAERFTSGRQVGSYFGLIPSEHSSGEWQKLGHITKQGNSFLRFLLVEAGQSAARYDAELGRFYRRLAARKHRALAKVAVARKLALRLYLMLREDWTYAQLCKALVQASPSHSVVEG

SEQ ID NO: 197767 - protein, 417 aa, unidentified
MTAYCGIDWAEAHHDVALVDQNGHRLGRCRIPDTPEGLAVLLALLAEHGDSPENPIPVAIETGRGLLVACLVATGRDVVVINPMAAARYRERTAVTRTKSDAADALMLANVLRTDRHAHRSLPNDSELVRAVAVLARAGQDATWQRQQAANQLRSLLREFFPAALTAFQIKHVGLASPEARAILAAAPTPAAAAQLTKTRLRTLLTKAGRRRNLDRWVDRLHATFHAGAMRHPVEVENAYGQAALAILKRLDAAVSAAQDLQHATTAVFEQHPHATIITSFPGLGPLTGARVLAELGDDPDRFDDARALKAYAGAAPVTRASGKSHLVMHRRVKNHRLASAGYNWTFAALSHSPGARQHYDRRRATGEGHAAALRNLYNRFLAQLYYCLSTGQHYDEQRAFSAPASDPSKATMPHVT

SEQ ID NO: 197768 - protein, 366 aa, unidentified
MREQNERSRITIGLDLGDRRHRFCALDGKGEVVEEGTLSNKRESLSELSRRYRRALVVMEAGCHSPWISRHLEGAGCEVVVSNPRKTRAIYQHERKSDRRDALMLARIARMEPALLYPVQHGSAQAQHDLLRIKLRDSLVRARVGVINSLRFTLKSLGYAIANPSTERFHKVIQEQVPESVDSVIAPSVQALKELSLRIKLLDREIASLARSKYPETTWLEQIPGVGPITALYFVLKIQDPARFERVRDVGAFIGLCPRRDQSGENDPQLRISKRGDAYLRRLLVSAAQYILGPFGPPSALRQYGLALASGGTPRAKKRAVVAIARKLAVLLLTLWKNKSVYQAFPLSRDGEKMRTSDLERLRCIA

SEQ ID NO: 197769 - protein, 334 aa, unidentified
MSIVSTVGIDLAKNVFSVHGVDASGVVLIRRTVTRAKLAQLIAQLPPSLIGMEACSGAHEWARRFAGFGHTVKLMAPKFVAPYRKGGKNDGNDAEAICEAVARPSMRFVPIKSIEQQADLTLHRVRQGFVEERTAMLNRIRGLLAEFGHVLPLRAAEVRRRVPELLQTLPTRVAGCVRDLLEHAVSLEAKALEYEREIRAHVRTNALAQRAQTRLGIGPITASALVATVGNAHDFKNGRQFAAWLGLVPRQYSTGGKTRLGHITKRGDPYLRTLLVMGARAVLQGALRLNDPLSRWALALQQRRGYHRACIAIAAKNARIAWALLAKDTVIAAA

SEQ ID NO: 197770 - protein, 473 aa, unidentified
MARAARRPGARQYPKRRSSRGRSAPFEQMHLNAAGIDVGATEHWVAVPEDRDEEPVRRFGAFTAALYVLTEWLRQCQIETVVMESTGVYWITLFEVLEERGFDVKLVDAHDARQVPGRKTDVKDCQWLQELHTYGLLRGAFRPEDQICVLRSSLRQRSMLVAMASRAVQHMQKALEQMNLKLTEVVSDINGKTGMEIIHAILAGERDPQRLASHRDRRCKHDQATIAKALEGHWRAEHLFALQQALEQYEFLQQQLQACEQQIEACLQTFVTHVEVEPPQPTPACKRRARQRQAPSFDVHQYLDAMTGVDLTQIDGIDELTALKVISEIGLDMTRWPTGKHFASWLGLCPGNKLSGGKRYRMRSKPTANRAASALRLAAQGLVNSHSALGAYYRRMRARLGAPKAITATAHKLARLVYSLLRYGTAYVDAGQQAYEQKYRDRVLTNLQRKARVLGYQLVHVEDTGRVQAAATL

SEQ ID NO: 197771 - protein, 343 aa, unidentified
MELYVGMDVSLKETSICVVDGSGEIVSEGTVISAPSAIATFLRAKAGSAKRIGLETGPTTTWLWHELQALGFPVICIDARHAKAALSMQINKSDRNDAVGLARIMQAGWYKEVQVKSLPCHEIRAVLNSRAQLVKIKCDLENQIRGLLKNLGLVIGKAGGKAFHRRVEELVEDHRLLQEAVRPLLNVRELVRREIASLTRKLLALARNNDVSRRLMTVPGIGSINALAFCAAIDEPSRFQHSRSVGAYFGLTPRRYASGEVDWSGRISKCGDTMVRSYLFEAAGVLLTRVPHWCALKAWGHRLWKRIGFKKAKIAVARKLAVILHRMWCDGTDFIWSNKEAAA

SEQ ID NO: 197772 - protein, 344 aa, unidentified
MSKHTIRSGDVAGLWSRFSQLKDKVLDRTGQIVPIIVIQEAGLDGFWIHRLLQSERIESHVVDPASIATSRRRRRAKTDKIDGEALVRALLAYKRGEPRVCTMVRAPTPQEEDRRRICRERKTLTAERVEHVNRIKGLLFAQGISDYEPLSRKRGERLEELRTGDGRPLPEHLKAQIRRELDRLELTLEQIKAVETERNATLSPSDDGTPAPGAMLKNLKGIGPEFAGVLWSEGLFRSFSNRRQVAAYAGLAPTPWRSGSVAHEQGVSKAGNPRLRTTMIQLAWLWVRHQPRSILTLWFYQRVQLNGGRVRKVLIVALARKLLIAFWKYVTAGVVLEGAETAAA

SEQ ID NO: 197773 - protein, 413 aa, unidentified
MTRMSFGWYVGIDWATQAHHVILLDAERRVLGERAVPHTGSALAELAGWLTEVCGGEVDRVAVAIEVPRGTVVETLLERGFIVFAINPKQLDRFRDRYTVAGAKDDRRDAFVLAASLATDQPAFRPLRLDDPLVIRLRELSRLEAELHQEEARLTNRLRDLLHRIYPQVLRLSPAADEPWVWELLELAPTPADARRLTRPALSKLLRAHRIRRLAADAILAHLQAPPVWVAPGTVEAVSEHIGLLVPRVRLVHEQRARCLHRIERVLETMAGDAPGQRGEHRDVEILRSLPGVGRLVAATMLAEASQLLAQRDYHALRAQGGIAPVTRQSGTRARVDMRYHCNHRLRNALYHWGRVSAQCDLLSRRHYEVLRRRGHSHGRAIRGLIDRLLLILMAMLRSQTSYDATRRRAYAA

SEQ ID NO: 197774 - protein, 348 aa, unidentified
MAHFVGLDVSVEETSVCVVDDVGKVLCERKVRTEPEDIAVLLTSIGGDYVRIGIEAGPLSQWLVNGLTEADLPVVCVETRHMKALLKAQQVNKSDRNDARGIAQMMRVGLFKPVHVKTLIAQEQRMLLTSRKLVQRKLMDIESDMRGTLRNFGLKVGAVSSIRYEARIRDLVEGFPRLAAIIEPLLTVRRVMRQQLATLHKLLLNAVRVDPVCRRFMTVPGVGPIVALTYRASVDQPHRFIHSRAVGAHVGLTPKRHQSGEIDYDGGVSKCGDSMLRAMLYEAAQSMLTHSKKWSWLKAWGMRVAQRRGMGRAIVAVARRLAVILHRMWVDGTDFRWRNGSTAVVQVA

SEQ ID NO: 197775 - protein, 366 aa, unidentified
MGWTPPRRHWCARVVVFATTEQEAPVSEVNTIGLDLAKHVFQAHGADASGNVVFRKRLRREKVLEFFAGKPACVVAMEACSSAHHWAREIARLGHIVRLIPPAYVKPFVKRQKNDAADAEAICEAVQRPTMRFVVVKSATAQANAVVFRARDLLVRQRTQAINALRGHLGEYGLVVAKGPGHVIKLIAHVEDPDSDVPDAARLVLRTLVEALQFLSARIDLLDREIARRAREDVEVRRLTSIPGVGPITATALAALAPPADAFRRGRDFAAWVGLTPSQHSTGGKQRLGTTSKMGERTLRRLLIIGASSVVQKAVRQGVAAESWLGRMLARKPRMLVIVALANKMARIAWAVQAKREVYRGPVVVA

SEQ ID NO: 197776 - protein, 356 aa, unidentified
MAKAMRWVGIDWAYRRAAWCALGAGGETVGEGMVAADEDGLARLVLSLGGEVEACVEMMSGAVWVRDRLAAAGWRVKIAHARKVRDVAPLACKTDKVDARVLAELCRRDLVPEVWLPSLEDRELRERLRRRMHLVRLRTSARNRIFGLLTQWGLRLSLARLRAPDAMVLLDSRGVPAVWRRSIAEALRVIDLLDERIAPLDGELSPFAAADPRVALLDTIPGVGELLGLTIAAEIGDITRFGSPRKLIGYAGLAPRVNQSGQRSRTGKLSKAGPRNLRWAAVEAGQHGWRESNPWHRLYVDVARRHGKNPAKSAVARKVLIAAWHVLSRHEPFNPSRPEGGDPVPVSASSRVFLAA

SEQ ID NO: 197777 - protein, 384 aa, unidentified
MSVRPRSVRLAHAAVCMALRDLVAFLGRHGVGEVAIERPDGPVVDTLLTAGLTVVVVSPNQVKNLRGRYGSAGNKDDRFDAYVLADTLRTDRARLRPLVPDTESTIALRRACRARKYLVKHRVAAANQLRAHLRNAFPGAIGLFKDLDSEISLAFLARFDTQDRADWLTPKRLAHWLSTQGYSGRTNPELLHQRLLQAPRGATGEHATSQAHITAALIALLRTLVEQIKALSTQIDHQLDAHIDAHIFTSLPRSGRVRAARLLAEIGDCRARFPSPESLTCLAGTAPSTRQSGKLRAVGFRWSCDKQLRDAVTDFANGSRDANPWAADLYDRARARGHDHAHAVRILARAWLHVIWHCWQDRVAYDPQTHRALQRVLTTPTQAA

SEQ ID NO: 197778 - protein, 339 aa, unidentified
MALYCGIDLHSSKSWIAILDKELRVEVETSVGNDLEHMLRVLAPYREELEGIAVESTWNWYWLVDGLMEAGYRLHLTNTWAAKQWAGLKYTDDRHDARWLARLLSLGILPEGYIYPKEERPVRDLLRRRSFLVRKRTSFLLSMRGSFECRTGMRTSSNDVKRWSPADVEAYVEDSTAALGITCLLEPIRVLTAQIQTVEKEVLAHGKLRDEFAPLQTVWGIGKIIALSVMYEVGDIARFRKVGDFASYCRLVKTARLSVGKSKGSGNRKNGNPYLSWAFSEAAHHAVRHHETAKRYFQRKRSKTNGIIAIRALAHKLARASYHVIRDQVDFDPVKAFGA

SEQ ID NO: 197779 - protein, 345 aa, unidentified
MYRTRVGVDLAKEVIQVCIYRNKKVQSNIEMTPNEFLCWLINTKPATIIFEACSTSNYWKQKAIEAGHDARLISAKLVSTVRQNQKTDKNDALAIIQAASLPDVTFIGGKTVEQQQLQSIKRLRELAVKQQGASQKQLVSLLLELNIRISNRKGGIIRAIEGVLEDATNGLSVECRAAIHTAKEQLSMLIKAAHRYDDCLEKSVAAHPDCKKLLKLEGVGSVNAINLYLALGCAEIGTFSKGRDASACIGVTPIQYSSGGTVKLGSIGKYTKNSLLRSQLICGAMATIRHVVKREAKTQKDVWLKALVERRGKKCAAVALANKTVRTAFSMLTKGTEYKAVLITA

SEQ ID NO: 197780 - protein, 393 aa, unidentified
MRQTPFSSAITTQREQLLFVGMDVHKDTHAAVGATVYGEKLFDIAIGNSREDFNALIEQSRLVANERGLGLVFGLEDTSGYGERLAKHLFLNNILVKTVSPIFVDRERKYETHPEKNDSLDAFAAAKVLIQRIDTLPTYRIAEQSELAKEIKELSLDREFLVKEQSRIKNQLHRALHKAYNGEYRKKFKDPFGLKSLKYWFAHPLPTGKAKDDIVGIPSVLKNQIKRKVKRLMYIREEMKELELELNELVEQTGQKITTLNGCGVALGSKVLAEIKDISRFSSSAALAKYAGLAPREKSSGKTFRHVKTKSGNRQLNTTIHRIALSQISRSGNKLAKDYFQRKISEGKTKAQALCCLKRRLVDIIYMMLKHKQSYNKELHVVSHNVNVIHSGI

SEQ ID NO: 197781 - protein, 340 aa, unidentified
MNITTYGLDIAKSVFQLYWVEPSSGEIHNRKFSKQALLEFLATREVGLIALEACGSAHWWRRKLMAFGHEIKLIHAKFVRPFVQGNKTDAADAKAIWTAVRQPGMRTVAGKTEEQQAMLALHRMRQSLIKFRTMQVNQLRGLLYEFGITLKGGRQAGVEEILQRTDEFEEILPGMLFKALKEQLDRLETIETDLQNLERRIKEWQKEQTACQKIAAIPGIGVLTATALVATMGEASSFKSGREFAAFVGLVPRQSGTGGKVKLLGISKRGDTYLRTLLIHGARAVMFKAKDKGAWSEALLQRRPTNVAIVAMANKMARTAWAILAHEREYQKDYVSVVPA

SEQ ID NO: 197782 - protein, 403 aa, unidentified
MIFVGIDWAEAHHDVCLVDESGQVLAKRRVADGLEGVGKLHALIAEHAEESASVVIGIETDRGLLVGSMLAAGYQVFAINPLASSRYRDRHATSGAKSDRGDARVLADLVRTDRHQHRPVAGDSELAEAVKVLARAHQGLIWTRQRQVNQLRNTLREFYPGALAAFEDLDSPDAIAILERAPTPNLARALSQAKIASALRRRGRARNLETKALSIQSHLRQPQLEAPALVAQAYGHSVAASVAVIRQLNQQIAALEQELARSFETHPDAEIYLSLPGLGRVLGARALAEFGDDRTRFAHPKARKNYAGMAPITKASGTRKVVLARVARNRRLADACYRWAFSALTTSDGARRRYDSLRARGQTHHQALRALANRLVGILHGCLAKRDTYREDVAWQPTFEVAA

SEQ ID NO: 197783 - protein, 412 aa, unidentified
MLEQSQDDEQIIARVAALDIGKAEVMCCIRVPRDAPAGRRRQEVQAYSTMTRSLLVMADRLRELGVTRVVMEATSDYWKPVFYLLEAHGFDPWLVNAKDVKHLPGRPKTDKLDAVWLCKIAERQMIRPSFIPPPPIRQLRDLTRYRVDLVSARTAEKNRAEKLLEDAQIKLSVVATNIFGVSGRDMMAALIAGERDPRVLAQMARVRLRAKMSQLEEAFHGHFTDHHAFLLAKMLARVDERIEAQLRPFADAVTRLQQIPGIGPVAAAVIIAEIGTDMGRFPTAGHLASWARFTPTVKQSAGHNKGNGSTGRGNPYLARILGEAVVAAGRTRTFLGERYRRLARRRGKQKAIVAVGRSMLIITWHLLSSPSTQFADLGPSFYDSRIQPDRKKREHIRQLEALGYKVNLKPAA

SEQ ID NO: 197784 - protein, 392 aa, unidentified
MIYVGIDIAKNKHDCCILGMEGQILFDSFTFPNSKSGFQELTSSIQACLQKANEKEVRVGLEATGHYSTNLVAFLRNSGIEPVLFNPLSTNLFRKSQTLRKTKTDKVDARCIASMLRSANSAPHVSVSYHTDELKALTRSRYRLIGYRSKLKISLNRLLDIVFPELAGLVWSTTQKSVYALLLELPNTNAISHCRIDKLTRILHDSSKGKYGREKALLIRQAALDSIGSQSPALAFEIRQTIHLVQNVQVEVDQLDQEIENEVKRVNTPLLTIPGIGYTLASIILAEIGDIDRFDSPEQLLAFAGLEPSTHQSGNFSANNTPMVKRGSTYLRWAILQAARLVAMRDSTFKAYLKKKRHEGKHFLVALSHTGKKLVRVIFHMLKTNRVFVPQS

SEQ ID NO: 197785 - protein, 412 aa, unidentified
MTAKDQFAAHVGLDWADKKHDVCVQFKNGDRIFHVIEHTPEALDSWLNELHQRAKGRIAIAVELKKGPVVYALQKYPFVTVFPVHALSLARYRQAFWPSGAKDDPQDAELALDLMLRYPHKIKAIEVDNPDIRLLQQLVEQRRLLVEDKRRFVNRLINTLKQYYPQPLEWFSHRDSSLFCELIIRWPSLQQLKRARSDTVRHFMNAKGGPAVAYTEQRVASIASAIPLTTDKTVIEANALMATALASQIKLTGDLIRTYDERIESLFDTLPDAELFKSLSGMGPCMGPRMLAALGDNRDRFNNAEEIQNYAGIAPVTERSGQKSWVHWRWQCAKFVRQTFVEWTAKTVNSSYWARLYYQSQREKGKSHQSAIRALAFKWIRIIYRCWKTRTRYDEAKYLLALEARKSPLLKP

SEQ ID NO: 197786 - protein, 404 aa, unidentified
MFYVGIDVAKEKHYVCILDDTGEYAVKPFWIYADILGLRELIKRFGDLSLDNDDFLVGLESTGAFSENLYEYITDSDYKAVLLNPYQTAKFRDFRTAKKVKNDTIDAYVIAELLSTSKYKESHISNDAYHSLKVLGRAKKSISDKIKTLKREISTVIATVNPEITKVFPNIFTKTALVVIKVYPTATDIAQATPKKLTRLFRHIKGNNFSEDKAKYLIDLAQTSVYAGRACKARASLLSSYIRILELYCQEKKEIEAQIKQLIEEEIDTIDNTVENLQSIPGVSDKTISAILGECGDLRRFDSAKAFIGYLGLYPTQYQSGNSLSVGRLAKRGIPIAKHALYMAAVGSVLHNPQLNKLFRDKVSSGKSKKEALIIISKKIATIMYSIVKYNKPYQSHRVFIPNR

SEQ ID NO: 197787 - protein, 368 aa, unidentified
MKKSITFIGLDVHKNSIDVAIADEGRNAEVRYYGSIGGGLDDIDRLVKKLAIPSKELRFVYEAGPCGYDIFRSLTEKGFDCSVCSPAHIPKSPGNRIKTDRRDAMMLARLHRSGELTYVFVPRADDEAMRDLTRAREDAIKAQRVARQQLGSMLLRLGIKYPRNNWTIQHFRWLSDQKMPMPAQQVVFQEYIYAIRETTDRVERLTKQIESLVSSWRMAPVVYALHALRGVSLIVSSTMIAELGDLSRFTSPKQLMSFLGLVPSEHSSGDKKVRGSITKTGNSHARRALVEAGQAYSYQARITRRLLKRQEGLSQEVREIAWKCQVRLCARFRRLMMKGKNRNTVVTAIARELVAFMWAIAKQVPIAA

SEQ ID NO: 197788 - protein, 341 aa, unidentified
MDKVSIVGIDIAKNAFHAHGAGSDGSVVFRKTLTRSKVAELLSGMERCVVAMEACASAHHWGREIAKLGHDVRLIAPQYVKPYVKRQKNDAADAEAIAEAASRPSMRFVAVKSACQQGQAMVLKTRDLLTGQRTQTINALRGHMAEHGIIAPKGAQHLLRLEEELRKEATGLPRAVVELCDMLIDQIQTLTKRIDALSAKVRKIARENETARRLTTIPGIGPVTAVALATLAPPSETFSKGRDFSAWVGLTPRQHSTGGKTRLGRTSKMGQRDIRRLLIIGAMSAIQAAERRGGAPIGSWLARMLARKPKMLVAVALANKMARTAWALIARGGVYETPTVA

SEQ ID NO: 197789 - protein, 319 aa, unidentified
MAQNDLIVAGIDVAKDKVDVCIRPLSLRRTFASTAEGRRELASWLRRKRVGKAVMEASGGYEREWAKALRDAKIEVRIVDPKRVRDFARSAGRLAKNDTIDAEMIAWFAETFGEAPGQAYDAERDKLAQIVNARLGLLDIQTEMLNRGEHAGPEAVQKMQARMLKNIAVEIAKLEAVIAAMIEATPNFAERAEIIESVPGLARTTSATLIAKMPELGQVNGKIGAALLGAAPYDDDSGRRRGERHIKGGRRKVRNAFYMACLGAATRHNPVLKAFYDRLIAKGKEKKIALVACMRKLITILNTMIARRQKWDPSRYALN

SEQ ID NO: 197790 - protein, 357 aa, unidentified
MLGMGDSAPRKGTDAMTFVGCDLHTRMQQVAVLDTGTGEVSEHRLPHEGTAVEEFYAALARPVTVGIESTGYAVWFHTLMQRLGHTLLVGDAAKMRAMVVRKTKTDRRDALHSLDLLRHDRFPAIWVPDPATRDLRALLTHRMRLVRIRTMVKNGLQAIALNSRLAWGSKLLRQAGLAQLQALALPPHTAQRRDQSLALLAGLTTQIRELDDVITTAALAHPDAPRLITHPGVGALTALTTIVVLGPVSRFHDSKHVVSYVGLAPAVHASADKAHLGHITKQGSPLLRFALGQAATHAARMDPDLKRTYGSLLHRRGRPKAKVAIARKLLVRLFIMLRDHIDYDEFRRRGRTAPASA

SEQ ID NO: 197791 - protein, 338 aa, unidentified
METYAGIDLHSSNNFIGVINDKDKILYGKRHANRLDDVLRALDPFKDSLKGVVVESTFNWYWLVDGLQEHGFPVHLANPSAIQQYEGLKHTDDQWDSFWLAHMQRLGILPEGYIYPKEHRAVRDLLRRRLLFVQHSTSHILSLQSMISRNLGFKMSNNEIRKLKPEDIDGLFTCPNLVFMANNSLSAIKFLKKISLDIEKKVKSQVKMRKEFEMLLTIPGIGNILGLTISLEVGDIGRFPKVGDYSSYCRCVESKRISNGKKKGENNKKNGNKYLAWAYVEAAQFARRYCVKAQSFYQSKEAKTKPVVAIKALSNKLSKASYYIMRDQVAFDEEKLFG

SEQ ID NO: 197792 - protein, 340 aa, unidentified
MKLYGAIDLHSTNNVTVVIDEQDRVVHQKRLPNDLALILNELSVFQSEIEGIVVESTYNWYWLVDGLMEQGYKLHLANTAAIQQYEGLKYTDDHSDARWLAHLLRLGVLPEGHIYPRVDRPVRDLLRKRSQMVRQRTTNLLSIQNLVTRNTGSSINAKRVKGLDGQQVDELLADSDLGLAVKANLSVMLSADEQTEILERTIMERVKLRPQFRFLKTVPGIGEILALTIMLETGDIRRFPSVGNYASYCRCVGSQKISNGKKKGKGNTKNGNRYLAWAFVEAAHFAIQFNSKIKSFDQRKKAKTKAVVAIKAVAHKLCRACYYIMRDRVAFDMSKAFGPK

SEQ ID NO: 197793 - protein, 356 aa, unidentified
MTISTKYIGLDVHKESISIAVRNSVGKVLMDCVIETKASTILQFIDGLRGDLHVTFEEGTSAAWLYDLLKPHVTKLVVCDPRKNKSMREGNQNDKIDARRLAELLRLNHLNPVYHGEHGLRTLKELVRSYLTVTKDLARVMTRVKAIYRSWAIPCSGKQVYARCHRAEWFGKITEPGVHRRAEFYYQQLDALRVLRQEARRDLLAESKKHKAWKRLCQIPAIGPIRAAVLLGILQTPHRFRTKRQLWNYGGLAIEMHSSADHRSVDGELQRSRKNVLVRGLNRNCNHDLKNLFKGAAAVASSKPGPFEKFYAALVAKGIRPEMARLTLARKIATIVLIVWKKGVSFDANHLKPQTV

SEQ ID NO: 197794 - protein, 315 aa, unidentified
MSKETLDANCARGQRKQAKIFANSPDGWRLVLSWLKALGSKQAHVCMEATGRHSLGVALALYDAGHIVSVVNPAQIRDFARAKLGRNKTDKVDAALIGDYAALFNPAPWTPPSPAMRRLCELHTVRAGIIGSRTEWKNRLGSGLGDSTATGLAAMTIEHFTHQLETIDRAIGETIDQDAALRGRRDLLLSVSGVGETLAALLLVEMPSPEVLRRSGEMVAYAGLNPSHYRSGSSIDRPTRISKIGNATLRSSLYMPALSAMRFNPAVAALVARLKEAGRLKPKQIVVAAMRKLLVICFGVLKTGRPFDPAIAMPA

SEQ ID NO: 197795 - protein, 322 aa, unidentified
MNTIALIGIDLGKHSFHVHCQDHSGKALLRKKFTRTKLMEFLAGCSPATVVMEACAGAHFMARWIADLGHEAKLISPQFVRPFVKSNKNDFIDAEAICEAASPPSMRFVQPRTEAQQAMRALHRVRESLVRDKVKTTNQMQAFLLEFGISMPKGIAVIKQLSTVLDEHELPPYLVQVLLRLQAHYHYLVKQITEIETALSQEIAQDDTGQRLMTIPGIGPITTSVLSSQLGDGKQYARSRDFAASMGLVPRQYSTGGKTTLLGISKRGNKTLRQLLVLCARTFILHIEHKKGKLADWVQQQLERKHSNIVACALANKLARIA

SEQ ID NO: 197796 - protein, 374 aa, unidentified
MSKYLFVGCDLHDNSMLLKIGVDDQASRHKSYVNAGEDRVQMISDLLTSAKEVGRVQVVFAYEASGCGFGLYDELSEAGITCHVFAPTRLHHTPKSQKNKTDAKDAENLLTVLRSHYLAGGALPTVWAPDQALRDERQVIRARMDVGEKISKVKTQIQAVLKSFEVKPEKSLGERWSKKYLEHLKLLSQKDAPLNAWTRERLGTLLRQLEFLQQEEKHLDEAILKLSRTPKYQKAFNALRQVPGVGPLTAMAFLTEIGDPRRFHNRREIGAFFGLAPSSYESGEDNDHKGHITHQGSPMMRKLLCQAYWCSLRVNIHEQKRFDHMIARNPKKRKIATVAGMRRLAILLWHLMMDAMPPEPEADPRARKRSRVNP

SEQ ID NO: 197797 - protein, 340 aa, unidentified
MDLFVGLDVSQKTTLISVVDANGAQVWHGACRTEPAIIAGKVREHAAEAIRIGLESGSLSTWLWHELNGMGLPIVCLDARHAKAVLSMQINKSDRNDALGLAQIVRTGWYREVKIKRFDSHKIRMAIGARVQIVRMRTDIMNQARGLLKLRGIVLPTGRPVEIEQHISGDDDPLAPALRALAQVLASIRTAIRDLDRKIRQLTKDDADCRLLQSIPGVGPLTALAFVATIDNPDRFRRSRSVGAYVGLTPQRYQSGETDYTGRISRCGDGLVRSYLYEAANSLLTRVTRFSPLKAWGVRMAVRHGGKKARVAIARKLAVIMHRMLITREPFRWSIADAQA

SEQ ID NO: 197798 - protein, 323 aa, unidentified
MQGKVLLERSAEERVYVGIDVSKEWLDVYFHPSGSRLRVANDAAGLRSLKCKLGRLGVAGMVMEATGKFHRAAWRSLAADGFPATVADPRRVRALATGLGFTAKSDAIDARVLALIGALLPATATPVPSKALEELQELVNTRSATLADAVAVSNRRQTCQTPLLRTELARLHTACRKLVAKLDAAIAARIAAEPALARRFAILTSVPGIGAGVAATLIATLSELGSIDSKQAAMLAGVAPIAHDSGRRRGDRAIGFGRGLPRQALYMAALSASRYNQALAAFASRLKAKGKKPKVVLVAVMRKLLVLANALLANDRLWSSNAP

SEQ ID NO: 197799 - protein, 338 aa, unidentified
MKLNRIGIDLAKQVFQVHGVDSHEQVKCRKQLKRHQMLDFFRQLEPCRVVMEACGSAHYWARELRMLGHEVRLIAPQFVKPYVKSGKNDANDAEAICEAGSRPNMRYVEVKSSEQQAGQSVHRIRNRVIRSRTALVNEVRGLLAEFGLIEPRKGVAAARELLRQAIDTQDNGLPGPMRELLRGLEEELQGHDEQLANLERLIQRQAREDERVKRLMQVEGIGPISATAVVSAVGDARQFRSGRQFAAWLGLVPSQYSSGGKERLGAISKRGDKYLRTLLIHGSRSVLKHCQEKTDKRSEWLNKLMCRRNKNIATVALANKNARIIWAILSKGETYQPC

SEQ ID NO: 197800 - protein, 384 aa, unidentified
MEKSSTLYVELDVHKDIIDIATVDAGLEGEVRHVVSLGGDLVGLDKALRRLISKGHRLHVVYEAGPCGFVIWRHLRAQGIDCEVVAPSSIPKRSGDRVKTDRRDAMMLARLSRSGDLTAVRVPGAADEAVRDLARSREDAVRKCRNARHRLKALLLRNGIGYAGKSAWTAAHLRWLATLKLEHAAQQIALQEYLHAVTEATARIARLEQAMRDTLPEWGLAPVVQALQAMRGVQLVAAMTLVAELQDFLRFDNPRQLMAYVGLVPGEHSSGPKRRQGSITKAGNSAARRMLVEVAWHYQHSPRVSPIIAARHDQLPKAVTDIAWKAQLRLNAKFKRLVARRVMKNKAVVAVARELTGFVWAIGREVQTSGWQGIKAEPVRSAAD

SEQ ID NO: 197801 - protein, 388 aa, unidentified
MNVGADKSEPLTAVHTDLGAIFVSLELSRSSWLITSLSPGGGEKMSKHSVPGGDFAGLMERFARLQEKARRRTGQSFRMIVVQEAGLDGFWIHRALQNEGIESHVVDAASIATSRRRRRAKTDKIDGETLVRALLAYKRGEPRVCAMVKAPTPGEEDRRHLCRERKALIAERVRHVNRIKGFLFSQGVSGYQPLRRDRRQRLEELQTGDGRAFPQHLKALINRELDRLELLLKQIKTVEAARDALLAVGQTGKPAPAAMLLDIRGIGPEFAAILWSEGLFRHFENRRQIAAYAGLAPTPWQSGAVDREQGVSKAGNPRLRTTLIQLAWLWLRNQPRSALSVWFHERVSRNGGRLRKTTIVALARKLLVALWKYVTAGVVIEGVTMKVA

SEQ ID NO: 197802 - protein, 373 aa, unidentified
MSRDIKYIGMDVHKEATVIAVVNGGGKLVMESIVETKASSILQFIHGLRGELHVTWEEGTWASWLYDLLQPQVAQVLVCDPRRNALLKEGNKSDKIDARKLADLLRTGMLRPVYHGEHGLRTLRELGRSYQTLSQDLNRVMNRIKALYRGWSIPCAGTQVYAPRYREEWLHKIEHLGVRRRAELLYQQLDGLQTLRRTLRPELLAESRKHKASKLLRQIPCIGPIRAARLIALMQTPHRFRSKRQLWTYSGLGIETRDSAQYCYVRGELQRTKKPQQIRGLNRNHNHEMKAIFKGAADPSQLWGRTVARLLCGLAGQGNEARDGASHLGTQDRGHCFDTLEEGGTFRRGTTEAASSLSVAQNSGGLPGFTPRW

SEQ ID NO: 197803 - protein, 340 aa, unidentified
MEKRYIGIDLHRDRFTCCLRLENGRTYLSGWKLEALERFVKKLRPADELAVEITGNTRLFLDTTAPHVARVVVVDSNQFRVISRSVKKTDSNDARLLALYLSKDLLPEVRMKNKQQARVASLTQTRDTLVKQRSALKNKVNNLLSARGLNLPKEALSSEKRLAEVLSLPFDELLQVELRVIVDQIRSLNKSIAELDKTIAEASSELEGHTNLTSIKGIGATTSAILLSVIGDVNDFPDESRLASYFGIVPRVSNSNQTEHSGRIHKRGSKLGRTALVQSALIAANYSPYLKRFYERVKARRGAGKAIIALARKFLGIIYRTLKNRWVFQDFPNFVLAEKS

SEQ ID NO: 197804 - protein, 350 aa, unidentified
MLIIGCDYHPSFQQIAFIDDETGELRERRLMHREEAEQFYRALATSGAEVRVGMEASGHARWFERLLAELKVELWTGDAAKIRAKRVRKQKTDRQDAQHILRLMLKDDFPKIWVPSWENRDLRQLLWHRHRMVQTRTRIMNQLQAAALNEGLRYKKKLWRESGRQQLESMPLAPWASRRRSDLLEVLDRIHPTIAELTQAIEQEAEKCPPVQRLMTHPGVGALTAMAFVLIVGEAERFSCGKQIASYLGLVPEEDSSGERRRLGHISKQGNSLLRFLLVEAAQVTVRSDGRWRNRFFHLAQRRGRKIAKVAMARKLAIRLYWMWRRGWNYEQLESFGSHLGQPGNPHGVK

SEQ ID NO: 197805 - protein, 335 aa, unidentified
MNIIVGCDFHSRFQLLVVHDMTSQSRREVRLEHDDPGQVASFYRQLPPGSLLLIESTAFTHWFLDLIADMPLRVKMGCAGRLAAMRPKKVKTDRRDAAHLVDMYLQGAFPEIAMPTAAQRELRHLLLHRDRLVRMRTRLKNGLHWLAMNHGLNRKSGLFTTKGRRELAQLRLDRWERVGREDMVLLHDQLEVRIAELDQEVRRAAEADAAAARLMLYPGVGAVTALAWVLIMGDCSRFPTSAHAASYIGLVPSEDSSGSRRRLGAITKQGNRFLRWVLVQAAQTAVRGDAELGRYYKRLAARKKTATAKVAVARKLSERLYWMCRRGVGYPEVVR

SEQ ID NO: 197806 - protein, 454 aa, unidentified
MGKALPLQIVNPHAAGIDVGSRSHFVAIDQNRENVRSFGIGTKDHQELMLHLRDSGVTTIAMESTGTYWQTLFNALQKAGFEVLLVGGSQTKHVQGRKTDVLDCMWIQKLHSLGLLSGSFLLSDTLQELRTYYYHRQHLVEQISKYTHKMQKALRLMNVRLDVAIRDITGKSGLAIIEAILSGSRDPQHLASLVDIRMKKSKQQIAEALHGSWREELLFELKACLHFYRLYEEALRECDQVIESALMKHLPQRAASEPEGKAVKQSKKKSSKNAPGFNVPQIAYQYFKTDLFAIPGISYGTVLCLLTTMGNDLHRFPTAKSFASWLRLVPNNKVSGGRIISSRTPSGKSYLAIALGQAANSIGNQKEHELTPFFKRIAFKKGRIAAITATARKLAVIIWNMVTKAEPYKKSEIKETNEKSRRTGLKQVERRINALKLSQSELERLFSRASFLAT

SEQ ID NO: 197807 - protein, 413 aa, unidentified
MERVIERCCGLDVHKASVTACVRVPGEAGERHQQIREFATTTRGLLGLRDWLASFEVELVGMEATGVYWKPIYYILEDDFECWLLNAHHLKNVPGRKTDIKDAEWICQLLEHGLVRPSFVPPKELRELRNLTRYRKTQIEERTREVQRLEKILQEAGIKLSSVASQVLGVSGRVMLDALIEGTTDPEVLAELSRGRLRSKLPALREALEGRFSSHHALMASRILAHVDYLDESIAQLSAEIERVIAPFSDKVALLDTIPGVNRRIAEMLIAEIGVNMDQFPTHRHLSSWAGMCPGNDESAGKRRSGKTRKGSKWLRSALVEAAHAASRSKGTYLSAQYARLRGRRGPKKAAVAVGHSILVIAYHILERGVPYKELGEDYFDQRRSNEAYTKRLVRQLERLGHQVALEPLPQPA

SEQ ID NO: 197808 - protein, 422 aa, unidentified
MLEETEDREAIIERVAALDIGKAEVMCCVRVPAQSGRGRRLQEVQAYPTMTRSLRRMAGQLRGLGVTRVVMEATSDYWKPVFYLLEAAGLETWLVNAKDVKHLPGRPKTDKLDCIWLCKVAERQMIRPSFVPPPQIRRLRDVTRYRADLVGARTAEKQRAEKLLEDACIKLSVVASDIFGVSGRAMMAALIAGQRDPKALAQLARGRMRAKISALEEAFTGHFTDHHAFLLAKMLTRVDAIDADIAVLDAKIEELIAPFAAAVDQLDEVDGVGRTAAACVIAEIGTDMTRFPTPGHLASWAKYAPGVKESAGKKKGKSTTGHGNRYLARVLGEAAIGAARTDSFLGERYRRIARRRGKNKANVAAGRSLLVIFWHLLSDPQARYHDLGPDFYDTHISNSRKMRNHVRQLQALGYKVILEPAA

SEQ ID NO: 197809 - protein, 350 aa, unidentified
MRFYHIQPQQHYFCGIDLHTQMMYLCVFDQHGTIVLHKNIRTRPEAFLKAIAPFRDGLVVACECIFCWYWLADLCQREEIPFVLGHALYMKAIHGGKSKNDKLDAEKIALLLRGGMLPQAYAYPKQKRATRDLLRRRSYLVRMRADLLGHVQLTRYQYNLPAFKKRITYKTNREGIAERFSDEVVQANVALDLALIGSFDEQIRPLELYLVRQAKIHDPQAFYLLRSVPGIGKVLALTMLYEIEDIHRFKRVQQFVSYARLVKGQKVSAGKRLGTMGAKMGNRHLKWAFSEATVLLLRESERAKAYLAHLEKKHGKGKALSILSAKLGRAVYFMLLRGEPFDIERFFAQA

SEQ ID NO: 197810 - protein, 367 aa, unidentified
MSETGNSRLCVGVDLHKTQFTVCALNADGEYLMEKQYPTKEDGYKKFSEEMHHFEEQGYSIELAVETTGNARHFKNRMESEYFEVKVVNTNRFKVITVSTKKTDANDAAMLAYYLLKEMLPEAHLCSQTSEEIRRLLKTRSVLVQSMVKIKNQIHGMMLGYGIETKSAQLQSKKKRQELINDLADHDYSAYTASSLKVMIKILDDLSSEIKEIEKHLEEMVSNNEDVELLMTVPGIGINTATTIAAYTEELERFEGNYKKFAAYVGIVPSVHNSNESKHYGRITKHGPQELRTAFVQAALGMIRLTKVTSEWRIIKDYQRRKGEKGSGRAIIALARKITRIVFVMLSKREGFNPELMCCEETLQQTA

SEQ ID NO: 197811 - protein, 358 aa, unidentified
MKYYIGCDAHKKYSVFSGISEAGEIIPAKRVAHDRGKYRLFLEALPEGSTIAIESVGNWYWLVDEMERAGHRPTLVHPAKAKLMMGQINKTDKLDAQGLSRLARNGTLPAVWVPPGDLRDQRELPRMRLVLVGIRTKLKNRIHATFAKYGITFDEVSDIFGGKGRRLLAQAMPELPPETRHSAQEQLQLIDQIEESIKVAEKRIAEVIKEDSSMQLLKTIPGVGSILAITIALEMGEAERFPSGEKFASYAGKVPRVNSSGGKTYYGKVRPDVNRYLKWAFTEAANAIVLQQHRLGDCHVLRLYWHVRKGKGHAKAITALGRHLAEASYWMLKKKEPYQEPRANRLVSPIPGVSARLA

SEQ ID NO: 197812 - protein, 395 aa, unidentified
MYYLGIDIGKNNHEAGFIQDDGSHVGKSVRFSNSREGFERLIHLIEERLPQEESFCIGMEATGHYWLALYSFLHEQGYILHVINPIQSDSLRNFHIRQQKTDSVDCFLIAEVIRFGKFTETHLADEDILVLRNLARFRESLKDSCADYKRQVITILDQVFPEYDKLFSNLFGESSKAFLKTYGTPEQTVDVNTRSLATLLRKASRGRHSTDKARELKEAASRSVGMTLCSDAFAFQIKILIEQIEFTEGQINEIEKKIDVQLKKLNSVIQTIPGVGPATGAIILGEIGDINRFSTPKKLVAFAGIDPTMNQSGNFTGKHNRLSKKGSPYLRRAVWMAAVVATRHDPVFKAFYEKKRSEGKSHGTAIGAASRKLLYTIHAVLKANKPYEVRLDTIP

SEQ ID NO: 197813 - protein, 355 aa, unidentified
MNDAKYIGMDVHQATISMAVRDSRGNLVMEAILETKAETILQFISGLCGSLYVAFEEGTWAAWLHDLLQPHVARVLASDPRKNALLKAGNKSDRIDARKLSELLYLNKLSPVYHGEHGIRALKELARSYITITRDLTRVMSRLKAIYRGWGIACAGQQVYAPRYRAEWLAKISEASIRRRAELYYQQFDALAALRQGTRRELLAEARKHPALRLLRQIPAMGPIRAALLIALVQTPNRFRTKRQLWAYCGLALRTYSSGEYRFVAGQLKRSKKVLAVRGLNINHNHDLKNVFKGAATRAASTAGPFQDFYQACVARGVKPHLARLTLARKIASITLLVWKKGARFDAEHLKQQAA

SEQ ID NO: 197814 - protein, 305 aa, unidentified
MITVGCDIGKNNFDVFLGGKYHKFENKKEGIEKFIKECRKHEISRIILEPTGGYERNLLKELSFCKFPISVVNPFYVRNFARSKRDLAKTDKIDAKMLSEYGEKMDLKLYEQKESYCFDLEELTARRDNLVCMQKEEKQRLEKEPSKIIAKSIEQHIKYLKKSAENIGLEISRLVKENAKEIDEVLQSEKGVGDQTSAILIGSLPELGLLDNRQIAKLVGLAPMAYDSGKMSGNRSIRGGRERVRMALYMASISALRSNPKVKDFYKRLRAQGKKPKVAIVAVMRKIIVILNSKMRLFYEGKDYF

SEQ ID NO: 197815 - protein, 358 aa, unidentified
MNNLQTENNEVILGVDTHLDVHVGAVINISGNLLGTRAVSVSSHGYLDLLEWAESLGKLKQAGVEGTGTYGAGLCRFLTSRGIVIIEVNRPDRSNRRRQGKSDPLNAGNAARAVHSGTATATPKKQHGACEAIRIISVARRSAVKAKTQAMNQIRGILVSGPQDIRELVWKTKPHDCAKACIEMISSDSSDLLESMTETLKLLGQRWLILTDELALLDKKLDKLTNEHCKQLRTRMGVGPYTAGILVTVAGDNPERLRNEAALAALCGVNPLPLPASSGKTIRHRLNRGGNREANNALWTIALVRARSDPRTRLYVARRTAEGLTTKEIYRCLKRYIVRELYPLILSDLKRINFSGLT

SEQ ID NO: 197816 - protein, 349 aa, unidentified
MFTEKISTKDSKINNDKYDYYIAIDWSQRNMAIATLRNEGNKAKITDIESNVDDLKAYFKSLRGTKIVTIEETTSTHWLYVELFEYVEKILVCDPYRNKLLSDGPKTDKLDAENLCKLLRSGLLKEVYHSLDKKYELRQLVSEYEQLVKFGVRVKNEKSAIYRSMGKSYKKKEELGDDTLGWIISQKDQRIELYETQKAEYEKMFAEKIKQDKDLKHLKGVNGIGVIGAVKILSTVIDAKRFKNEGKYLSYCGLVKHQKMSGGRSYGQKKTRYSRRLKSVYRIAANAVINGNSPMKEYYDSLLQRGISGENARNQLSRRIAIITYGILKTGTQYKPYKWRESKQVGNES

SEQ ID NO: 197817 - protein, 382 aa, unidentified
MRNIHNTQDGEKTKEEFSLLIYHLLKLIGMKKIVKQAVGIDVAQKELVICLGRMYDDWTIELYAHKTFANTAKGYTALMLWVKKQTDKTIAVRYIMEATGVYHESLAYFLDESNQQLSIVLPNKISNYFKTLDVKTITDKSASEAITLFGLERNLENWKRPKAIFKTLKQFTRERDQIIEERTVVKNQLHAEQAEAEPNPSTISRLKQRIAFLSKQEKAIKEDIETLVKNDEDLKNNVLLICSVSGVGLLTAAIVLAETNGLELMRNKRQLASYAGFDIKEKQSGTSVKGKSCISKRGNKYLRKAMHLPALSAIRHDERFKAIFIRLVSKHGIKMKAIVAVQRKLLEIIYTIFKSRIPYNKNYLKTAGIKKEFSSETEKRLK

SEQ ID NO: 197818 - protein, 407 aa, unidentified
MDLLKTVFGIDVSSRKSNVCIMVNGQKVNDYAISNDMVGFNQLLGDLKQVTNPQIIFEATGVYSRRLQAFLDMHELRYVMMNPLEAKRKTKDDLHQNKTDKLDALYLAKLQSEHPQRLAYVQSEEYQELMANNRIYEQASHDLITNRNRLHKAIQLTFPEIEHLMVNPRGKNYWSIVLRFPHPDIVLETKEADIIDFLKGLTGIGKKRANDIAQSLIRLAKVACPAVKKNSAHIRGLKMAINNILSAEEECQTALQEMTKLAPKRDLEILTSIPGIGKNTALRIISELGDIRRFNNPSQLNAFVGVDPQVYESGNLTAHLSISKRGTAIGRKVLYLAISQIQSAKKVGNPCHIADYYEKRKRSSETASHKKAAIASIHKLLRTIFALIKNDQLYSYDVAKHNQRLLS

SEQ ID NO: 197819 - protein, 336 aa, unidentified
MYVLGIDVGKTEIYVRLVERCPGGPPKTIGKQKSFDYVEKGLDELTAWLSSMLIVFSDVHAVMEATGVYWERCAFYLHRMGFVVSVVNPAQIKYFAQSSLRRGKTDSMDADIIARYGATMALKRWEPPVAELENLKLLVHERDGLVKELSQAKNRRHALNTREQPDKLVQKLTEDRIAFLKGQVEAVDQAMRERVAANTALNEQVKLLQSVPGFGFLTSLSILVETAAFSTMETSRQLAAYAGVSPAPHQSGAMNRRGRISKIGNPRLRRIVYLAAVAATRTKTKEKAFYQRLREQGKPGKVAVTALARKLLCVGFAVVKSGKPYDPLYVRLSSET

SEQ ID NO: 197820 - protein, 338 aa, unidentified
MEVYAGVDLHSSNSYIGVIDEQDERLYAKRLPNSISQILVALEPFKEDLKGVVVESTYNWYWLVDGLQQEGYKVHLANPSAIKQYEGLKHTDDKWDSFWLAHMKRLNILPEGYIYPKEERPIRDLLRRRLLFVRQRTSQILSLQSTIERNLSLRMSGNAIKKLSQEDVEDLFDSPYLVLSAKSNISVIQFLTQRIKVIEKAVKSEVKLRKEFQLLKTIPGIGDILALTIMLEVGDISRFAQVGNYSSYCRCVSSKRLTNGKKKGENNRKNGNRYLSWAYVEAANFAIRFSQEAQRFYQRKMAKTNGIVAIKALSNKLARASYYVMRDQVAYDADKLFG

SEQ ID NO: 197821 - protein, 367 aa, unidentified
MKKVSTAAAKATKNFSQAKLTIGLDLGDRSSWYCLLDEVGEVLQEQKLGTTPKAMRGVFGVMPRCRIALETGTHSPWVSRILIELGHEVIVAHARNVRLIGESRKKDDRMDARTLARLARIDPQLLCPVKHRSAQAQADLTVIRARAGLVRARTSLVNTARGLAKSYGERLRGCNVRNMNPEKAEGLSPELQRALQPLLAGIESLSERIRECNEGIEELAQKSYPQVALLKQIKGVGTLIGLTFLLTLEDPHRFRKSRDVGCYLGLQPGRRNSGQSQPQLHISKEGDPYLRTLLVQGAQHILGPFGVDCDLRRWGLKLAERGGKSGKKRAIIATARKLAVLLHRLWVSGEVYEPLHNSNRVALPAAA

SEQ ID NO: 197822 - protein, 322 aa, unidentified
MSVSNQRCAGIDVSKSTLDIAISSIAQPFTVPNEDGGFNQILKELKRSETQLILMEATGGLESGVAGYLQSEGFDVVVINPRQARDFARAMGYLAKTDQIDARVLLQMAKVINQHPEREKYIRPLPDAHRQLLAAMVVRRRQLTTMLTAERNRLHPSHPQNQESIKFIISVLKSEMARIEAEMSAYISKNFSELSSLLSAVKGVGAATVAVLLAEVPELGKLSRREISALIGVAPVNRDSGTMRGRRTVFGGRASVRTALYMSALVGTRHNPVIKEFYTRLVAAGKPKKVALTACIRKLLTILNAMLKNNEAWDPLYHQHTS

SEQ ID NO: 197823 - protein, 408 aa, unidentified
MSQMLVGIDISLRSHHVQLMDEQGRELTSFSISNDRPGADTLIHKVKEAAKRAKSQSVRIGMEATSNLGWHLAHYLQDQFHDQQPKAEIYVLNARKIARFKKGYDTLPKNDRIDAWVIADHLRFGRLPYAMTETIQFEALQRLSRTRFHLMHSITRDKTYFLNQVFLKFSGLRQDNPFSNNFGSTSLAVIQELEPEQIVEMPMEELVAFLRDKGKNRFHNPEEVAQYLQKLARSSYRLNKAMADPVNISLASILSVINHMESEVRKLDKEIAKLMKGIPQTLTSVKGIGDVLAAGIIAEIGDIKRFDNHNALAKYAGLTWNQHQSGEFEAEDTKRVLTGNKYLRYYLIQAANCIRKHDSEYRAFYQKKYDEVPKHKHKRALVLTARKLVRLVYMLLCTNKLYTPLERR

SEQ ID NO: 197824 - protein, 393 aa, unidentified
MTTTTTEIATATDIILAIDLGKYKSVACLHSSAAQRFTSFPTSKSELTRLIDRERPKVVLIEACLLAGWVRDLCQAKGVPCLVANTTSEAWKFKHLKRKTDRDDALRLAEVYWLGKFPNVALPAKEVREKRALIEHRQKLVGRRVALQNRIRAILVSQGLVAPVGARAWSELGLAGIAAYAQPLAQCTATELWRGRLHLTLAELGHVRALLEQADRMLDELAKTDAAIKILGTIPGVGPRTAEAVAAFLPEPQRFRTTKQVSAYGGLVPRQYQSTDTDHRGRITKRGPRTLRKLLVECAWCMLRYNAWARAVYQRLTHGGKTRKKQAIVALARKLLVRCWAMLRDGAAWHDPRTEPKQALPPSKRRRQAEAQQRRAAKQQVKQTAALAPTASP

SEQ ID NO: 197825 - protein, 421 aa, unidentified
MRAVALDVHRDFCEVAIVAEGRLRSAGRIEARPEALELFGQSLDAGDWVALEVTGNAWEIARILEPHVARVIVVSPSDTGIRQARAKTDRLDARALARLLWAGELDGVWTPDERIRAMRRRLARRSQLVRARSRSKNEIHAVLMRCLKDRPPASDLFGVKGRRWLAEQQLAVTERETVDSAMRQVAFLDAEVAEVEKLIAAEALSWPEVKRLMTVPGVNVIVAATFIAAVGDIRRFPDRRKLTAYLGLDPRVRQSGAAPATHGHISKQGSASARHALVEACWSTVRQPGPIAGFYQRVRARRGHSIAIVASARKLACLFWCLLTRGEDYAFAQPSLTKKKMRRLELQAGAAKFQGGRGVWSTNEAMRQAERELALQAQRAYERTVKDWQQNKGASATPGRASHGSSKEHVARQTSRPTSAL

SEQ ID NO: 197826 - protein, 343 aa, unidentified
MEHYAGIDVSLERSSVCVVDATGRIVREAKVASEPEALVDFFRRLGLPLARVGLEAGPLSQWLHAGLAGAGFEAVLLETRQVKAALSAMIVKTDRKDARGIARLLRMGWYRPVHRKSPPAQEVRALLVGRKLLQGKLLDVELSIRGLLRGFGLKLGEVSKGRFAVRVRELVAGQPTLERVIGPMLRAREALRSEYLALHRAVLAIVREDAVCRRLMSVPGVGALVALTFASAVDDPARFRRSRDVGAHFGLTPKRYQSGETDVTGGISKVGDAMVRAALYEAANVMLTRAGRFSTLKRWALEVAKRRGARRAKVALARKLATVLHRLWADGSEFRFGKEAAAA

SEQ ID NO: 197827 - protein, 350 aa, unidentified
MEKRSMKHYAGLDVSVKETSVCIVDEAGKIIRVVKVPSHPHDLVDVLRNSAWRLDRIGLEAGPLSQWLFSGLADAGLPVVCIETRHTKAFLKAQVNKSDRNDARGIAQMMRVNLFRPVHVKTLTSQKRRALLTARKILQDKAVAIENDIRGLLRNFGLKVGAIGLRKFEERIRELVEGMPELIAIMEPLLAARQKLREMFTKLHRQLLLAVRDDGVCRRLMTIPGVGPVVSLAFCATIDVPARFKNSRAVGPSLGLTPLLNQSGESRRIGRVSLCGDQMMRALLYEAAQVMITRVKKWSSLKAWAMNVARRRGLKKAIVALARRLAVIMHRIWVDGSVFRWTNKVTPAAA

SEQ ID NO: 197828 - protein, 400 aa, unidentified
MRAVFGIDVSKASSEVAILVNGERVHGYTMPNDAIGFARLLGDLKTVHKPEIIFEATGVYSRRLQAFLENNDYAYTRLNPLEAKKQLDSLRVRKTDQIDAEKLAQSQFVLNRKTTYVQEEIYQNLRDLSRFYQNLTEDIVRAKNRLHKALQVTFPEVENILSTPSGEQYWNLVIAFPCKEMVLELSSDKLLHVIRNSTSKRISDKRVAYLAEKLITLANQSYCAVKKTSPMLEEVRYYAKELLRLSEQRQTALDQMVELAQPLPEYDILLSIPGIAETTATSIIGELGDIRRFQSANQINAFIGIDLRHYESGNFLAKEHITKRGNPYARKILFKCIHNIASASHTNPCHIADFYEKRKRQSQTTSTKPHTIASIHRLIRTMYYLITHNKLYDYTLTQNR

SEQ ID NO: 197829 - protein, 351 aa, unidentified
MSQTLNYSVAVIGIDIGKNSFHVVGMDARGAIVLRQKWSRGQIEARVANMPPCLIGMEACVGAHHLSRKLRAIGHDARLMPAKYVRPYSKGQKNDFRDAEAIAEAVQRPTMKFVATKTGEQLDLQALHRVRERLVSQRTGIVNQIRAFLLERSVAVRQGLRFLRAELPRILATPPDVLSPRMVRVIEGLAEDWRRLDGRIEYLSDEITALARQDAGCERLVSVPGIGPIISSAMVAAIDNGDAFSKGHDFAAWLGLVPKQISTGDRTILGKISKRGNRYLRVLFVQAAWVVLIKPQSWERHGLKPWIEAAKKRLHRNVLAIALANKLARIAWSVLARGRTFEARPIVAQAV

SEQ ID NO: 197830 - protein, 427 aa, unidentified
MGLIEPTPMPPERDEQATSYDWYVGIDWGSQQHQVCVLDRDRHVVGERVVDHDGSSLAQLATWLWALSAGHPQRVAVAIEVPRGAIVEGLIERGFHVFAMNPKQLARFRDRHTMSGAKDDRRDAFVLADSVRTDQPSFRRLHLDAPQLLLLRELSRAEETLLEEFRRSANRLRDQLHRFYPQMLHLCSGADAAWLWDLIDLAPTPAHAALLSKEQIQRVLKAHRLRRVKATEVLTCLQASALPVAPGAAEAAQAHGAFLLPCLRVLAEQLRSCAQQAEALLHTLAEAPDETGGPSDVAIVQSLPGVGRKITAWLFAEAAQPLTEREYQVWRTQGGVAPVTKHSGKRRHVVMRRGCNPRLRHALYHMARVAMQREAYFGGVYEALRAKGQRHGQALRNIGDRLLRILIAMLHDRTCYDATRSRREPAV

SEQ ID NO: 197831 - protein, 373 aa, unidentified
MFHFTTLFIGMDVHKESFSLCYYDMMANQFKHSTKVGPNVSYIVNYVNELRRLYGQDAEVLCGYEAGCLGFTLYHQLQAHGIPCIVMAPTTVMKEGSKRVKTDKKDAAQLAKALAFRSYRPVHIPTVEDEQVKEYIRMRTDHKVALKKIKQQILAFCLRHDFRYTEGSSNWTQKHVRWLRSLKPDGLYAEILTEYLLTYEKLVDQIERYDARIEQLGQSDSYQEKVSRLSCFIGIKTLTALSIVTEIGDFNRFATAQHFASYLGLTPSENSSGDKERRGAITKAGNSHVRRLLIEAAQSLAKGTIGYKSKELKRRQSGNRVEVIAYADKANERLRRRYRTLVLGKNKKQNVAKTAIARELSGFIWGMMTGRIA

SEQ ID NO: 197832 - protein, 351 aa, unidentified
MSEITTVGVDLAKELIVVCAGDAVGRTLFFRQFGCAGFAGWMANLPPCTVGMEACSSAHHWARVLAGHGHRPKLMAAEFVKPFRKSQGAKNDRNDAQAILSAVREPNMRFVSVKSLEQQSILACHRMREGWHAERTALLNRTRGLLAEFGIWLARSSAALYRALPRLSQEEAVPARVRALLGQAHEHLRQIDAQISHCEAQIRLHAKQSECAQRLTAITGIGPITASAVVATVANARDFRNGRQMAAWTGLVPRQSSSGGKERLGSITRRGDTYLRALLTQGARAALQAALMRAPEKRSRLEHWMVELRQRVGYHKTLVAIANKHARICWAILAKGEEYDPQAWQRHALAA

SEQ ID NO: 197833 - protein, 425 aa, unidentified
MNYKQNEKINQVKESTLVVGIDIGSTKQYARAFDWRGIELGKVFTFSNSREGFEAFKAWMQHLQDKYRKSDVIVGIEPTGHYWFDLGAYLEDEGILLVMVNPYAVKQTKELDDNSQSKNDRKDPKVIAKLVTEGRYSAPYTPDGVYADLRIMVTNRKRLIREMTQIKNRFARWFAIYFPEYTDVFGDYEAQSSMLLLKKACTPEAIVELGAEKINQIWRDAKLRAVGMKRATTLCETAKRSIGLKKGSSAAWYEMKLLLEDYEYKKAQLDAVMEEIEKLCRKIPESEQMLAIKGIGVITVAGFLAEVGDVRRFESPRQIQKLAGLSLRENSSGKHKGQTTISKRGRSNLRAVLFNAAIPLIATNPEFKSLHEYYTTRANNPLKKKQSVIAISCKLIRVFYAILANGVTYDAQKMLSDIHRQPQAA

SEQ ID NO: 197834 - protein, 343 aa, unidentified
MQDVATVGLDIAKQVFQAHGADASGETLFNTQIKRENVLEFFSKLKPCLIGMESCATSYYWARQLLEFGHDVRLIHTSYVKPFVKRGKTDANDAEAINVALTQKTMRFVPVKTLNQQAAITIFRTRSLFVSQRTQLVNALRGHLAEAGLVAAKGIQNYSKLLKLMESAADTVLPTVMKQALTDICDQIHRLNDLVTKLDKEIERRVQHDENACRLLTIPGVGPKTAMCVIATIPDIHRFPSGRHFSSWLGLTPRTHSSGGRSVLRRITKMGNSELRTMLYLGGTVIMMRDSKTPIGRWAARLRARRPYKVAAIAVANRLARIIWALLTNGGVYDPTYGREASA

SEQ ID NO: 197835 - protein, 408 aa, unidentified
MQRRENLLYVGIDLHKESHTAVMVNCWNEKLEVIVIENKPSEFKKLAEKVKRKSCHLGLEPIYGLENAYGHGRSLAVWLIENGYIVKDINPALAYDQRKSAPMLRKNDEYDAYCVATVLINQLHTLPDAKPKDNEWTLAQLVNRRDLLVKDGIRFKNGLHEQISMAYPSYSKFFSEIDGKCAMYFWKTYPSPAHLQEKTAEELTIEFKEISPIIRKDKAEMILDCMKHDGNTFREYQESRDFITRSLVRDLEHQKEERAGIDIEIEKILLSFDYKLTSMPGIGTSVASKLIAEIGDIRRFPSADKLARFAGVAPVKFSSAGKGKEQSSRQGNRQLHGLFYFLAVTMVSKPKNGVPNHPIFYDYYMRKIGDGKTKSQALVCIMRRLVNIVYGMMKNKTEYREPIREEEQ

SEQ ID NO: 197836 - protein, 384 aa, unidentified
MHKHNIVFIGLDTHKVSTEVAHIEDQRGAKPVHQGKIKTTKAAITKLARQYQSKYPQATLHFVYEAGPCGYWIYRLLTSLGHCCYVVAPSLIPKKPGDKVKTDKRDALKLAKLLKSEDLTPIYVPEDEDEAIRDLSRARETAMKDLKDAKYQLKGLFLRNNITCKVNDNWSNQHLRWLTELVLPHPSQQIVLQEMIQTISERIKRVERLVNELMHQAKQWRYYPVIQALQAMRGIRFLVAVGTIAELGDLRRFDHPRKLMAYLGLVSKENSSGDNRKQGGITKCGNGRARRLLVEGAHSYKHNANISTELQKRQEGLPKVVIDIAWKAQLRLCRRYKRLMQRGKHRNVVVAAIAREMVAYIWAISREIVLVPIAPKTRLSRVPA

SEQ ID NO: 197837 - protein, 362 aa, unidentified
MVYIGVDLHRKVSHVVALDEAGATILSRRFEHSPAAFRRVFGELEPEPVSVAFEATYGWGWFADLLADAGIEAHMAHPLATKAIGAGRVKNDAVDAATLAHLLRTNLLPEAWIAPPEVRELRRLVRMRASLVRIRSRLKCQVHALCADAGIPIPVSDLFGVRGRDLLATLELPPVSAGRLAACLRLIDDCAREIIAADREIVRAFKGDDRVRRLLPIPGIGLLTAATIIAEVGDVGRFPSANHLASWAGLTPTERSSADHVRRGHISKQGSRWLRWAMVEAATKIGSSRSAQLHRFADPIAERRGAKIARVALARRLLILVFYALRDERGCREYPALPRPSRRTVPARSLQRMVSSDGRLLD

SEQ ID NO: 197838 - protein, 321 aa, unidentified
MEVFKTRVAGVDVHKEILAITIVIGEPESQPEVHQFSCLTFTDDLMKAGLKLKEMNVLDVAMESTGVYWKPIYNVWAPMGIRITLGQAAHMKNVPGRKTDMGDSRWIAELHRFGLIKQSYIPEDIFQRMRLLSRHRTNLVDDLSRVKNRIQRILEDGNIKYGSIVSDVFGVSGLKILDLIADGVTDAGALTSAVTTKIKRKEEAQKALTNSLTKDHCFVIKRLMTQFYEIKDHMREIENQLFDKVQPYRHLVDKLKEIPGIDEVLAIGILAEATDDMSRFDDERKFAAWSGVAAGNNESAGKKKIRSNSITGAVRTFVILC

SEQ ID NO: 197839 - protein, 313 aa, unidentified
MNIHHYIGFDVHKKSISYCLKTADGKIVEEGRLQARRQAIEEWARKHSEPWHGAMEATLFSAWIYDVLKPFAAKLEMGNPAMMKAIGAAKKKNDRLDARKIADMARCNLLPACFVVPPEMRDLRRLLRYRNLVVQQGVQMKNRMSGLLMEVGAEYSKQRLHGAKYFSELLDQLQDVPESVKDLLQLSRGALETFTATQRQLLDRLQKDPRLVKRVELLRTIPGVGEVTALTWALEVCDAARFPSIDDAVSYCGLTAAQNSSAGKEQRGPISKQRNSHLQTVLVEAAKLAPRWNQQLAAVHERELKNGHRNRRP

SEQ ID NO: 197840 - protein, 362 aa, unidentified
MEVVGNAAGLDLGKRTYEMCLISKDNQIIRTGGKTDFSGLDKLCTKLTKDDVVVMEACNLAFRIERILRKKVGCRVIILNPGRLAIIFMSTRKTDKEDSLKLAKYIRSHEEDEMPIVVPPSDEEWARRKLLSEYRSLKSLRTKEINRLHAIFEHNGYTLFTRKDMCVSKNREEILPLLKGYEKEEAERLVERLTLLEKQVELLYKKINDETEKDVKVQKLMTVPGIGPITALSYVAYIGDVNRFENAHQVSNFIGFVPKVDRSCTINRLGHITKQGNSLLRSLLVQAAWSCVRSKNGGALRDKYNYMADIRGIGKGKSIVTIARKIGELLYTLLKYDTVYETKIFISNEQYISKLAEEALRA

SEQ ID NO: 197841 - protein, 377 aa, unidentified
MNDLIRIGMDTSKSVFQLHGVDTDERPMLRKKLRRRQVVEFFEKLPRTQIGIEACGAAHYWAHQLTSLGHTVLLLPPQRVKPYVARNKNDAADAEAICEAMSRPTMRFVPVKTAEQQATLMLAGVRDQLVRRRTQLSNTIRGYAAEFGLVAARGLDKIEPLLARIAANETLPALARELFAEQAEDYAELTRKLRRIDARLQVWHRQNALSRRLAEIPAIGPIGASLLAMKVSDPAAFKSGRDFAAWLGLTPKDHSTAGKMRLGVITRAGDESLRRTLVLGATALIQQVCKGRGHPSPWLIALLKRKPPKVAAVALANKTARIAWKLMVSGGRYDRNRAAASRAERGASLAGGFAARPALEANTLPHRTAAPVAVPEA

SEQ ID NO: 197842 - protein, 322 aa, unidentified
MIFIGIDISKLTFDAAYILNSRYVHKQFANNAKGFEVFLKWMNKSEECIYTCLEATGIYSFNLAQYLSQHKMNVMVVNPIITHAFFKMELNRNKTDKADAQLIARYCQHAVLNGDFEKKSYQPKGSDYEAIQRLVTRCDQLEKSKTQESNRLEASVNKQASRSIKRLQKAINSEIIQVKKAISNIVKNNLQLKQQVELLISINGIGERTAWSILAYIGDINFFSNSKQIASYAGLTPKIIQSGTSIDKSSLSKLGHKRLRKSLYMPALVAIRYNPTLKAVYERLVSNGKPKKVAIIAVMRKLLILSYGVLKSEKAFDVNYQP

SEQ ID NO: 197843 - protein, 418 aa, unidentified
MQVWAERCAGLDIHKKTVVACRIFPDADGHEVIEKRTFGTMTAELLDLADWLAECGCTHVAMESTGVYWRPVYNILEARESFDIYVVNAAHIKAVPGRKTDVRDAHWIADLMRYGLLKKSFVPAPEQRDIRELTRLRTKFVQERTSMINRVNKTLETANIKLSSVASEVHGVSGRAILAAMIGGQTDASTLAEMAKGRLRNKRVELEAALSGQFRGHHRVILSELLMQVDTLNESIDRLTQAIDTAMKEADGPFIQAVELLTTMPGVQRTAAEKILGEIGVDMNRFSSPRQLASLCRLAPGNNQSGGRNRSGKICQGSVPPRQAMLEIAMAAVKSKDTYPSSQYKRLAARLGKAKAIVAVAHSLLVAIYWMLKKMVPYRDLGGNYFTAGRETQIVRSLTKRLTHMGYYVSLEQIPAAA

SEQ ID NO: 197844 - protein, 365 aa, unidentified
MKKLQRRVEKFKGLSIGLDLHKAFIQVSVLDGHGDEAAAQRIAADADELGRLVDRLGEWGMPMRVALEASGCFVWVYDLLVARLGREAVRVAAPSKVKVIAEAGEKTDASDAWWLAYLLQEGRLPEAFVAEGDLRELRIACRELRSVTDQRSDLMRRLRSHLAQLGVTFAAGAWSSVPGRGKIEALVRQAEAAHGLRGEAIARLWTRVQAMNEEVEHWDKRMAELSGSLDEVALLDDQLPGVGPMLAAIMWSELGDPRRYRSAKAYGKATGLTPGYRESGGRRQAKGMTRQGSAHVRWALTRAVVSCRRCKKDPAGLAVKRWVDKMSRRKSTKAAIVAAARKLAEATWRLFALGEAFDLRRVFPA

SEQ ID NO: 197845 - protein, 331 aa, unidentified
MNIKETIGIDISKLKFDARIHSNQMFKTFENSKKGFRNLIKWVNTNSDYSANETLFIYEYTGLYSYQLAVFLTECDLPFTLVPGLAIKRSLGISRGKDDRIDATKIALYGYRLREELTPQKLPSKAIIKLKRLLTLRERLVKQRAGYKGSLKEQKSVLLKKDNLILFDTQEKMIKTLTKGIDKIDSEMQEIIKADRELETIYKLVKSVKGIGTQTTLFLIAYTDGFTKFKNSRKFASYCGIAPFPNSSGSSIRGKTKVSHLANKKIKSLLDLCAKTSIQYSPEMKAFYQRRVNQGYNKMSTINIIRNKLLARAFAVVRRRVPYVDILKYAA

SEQ ID NO: 197846 - protein, 391 aa, unidentified
MPEDAPRPMQAAIRTDLGAIFVSLELSRRTWLITSLSPGSGEKMSKHSVPAGDTAGLLRRFAQLKEKARARTGRDFPIIVIQEAGLDGFWIHRVLQSEGIESHVVDAASILISRRRRRAKTDRIDGETLVRTLMAYKRGEPRVCSMARAPTPQEEDRRRVCRERRTLVGERVRHVNRIKGLLFAQGVFGYEPLRKGRRERLEDLRTGDGRPLPVHLKAQIMRELDRLEVLLEQLKSVEAERDALLKPATEEAASPAAMLARLKGIGPETAVVLWSEGLFRQFDNRRQVAAYAGLAPTPWQSGSIDHEQGVSKAGNPRLRTTMVELAWLWLQNQPASALSLWFHERVRRLGGRMRKTTIVALARKLLVALWRYTTAGVVIEGAVMKAAPATI

SEQ ID NO: 197847 - protein, 430 aa, unidentified
MKSNTQNAKIEAITEKTLVLGIDVGSETHYARAFDYRGIEYSKKPFKFSNTEVGFATFKEWILDLKERHEKDKVVPGMEPTGHYWFNLGKFLQDNEMKPVLVNPHHVKKSKELDDNNPTKNDRKDPKVIAGLIREGRYMIPYLPDGVYADLRTASNIRFQLQAELTRIQNRISRWFNIYFPEYKTVYGKPDAKSGMLILKAAPLPEDILTLGIDGVNQIWRDAKLRAVGKARAKTLIEAAEHSIGSKEGTMSARMEIRMLLEDYESKNMRLQEVMVLIEELVKEIPMAEKLLEIKGVGIRTVSGFLAEVGDISRFNNPKELQKLAGLALVENSSGKHKGKTTISRRGRKRLRYLLFEVAMSLVAKNPEFRELHNYYTTRRLNPLKKMQSLMAIAAKLIRVFYAMLTKGVDYDPKKMISDIKRPTVYLQAA

SEQ ID NO: 197848 - protein, 452 aa, unidentified
MPAGKDITMHYQKVLKMPESIPYLSVGFDVGADFTWMSIMLPNGILIGKPFKIIHSDPQSRELAISKIKEAQEMYSLESRCFLESTGIYHIPLLCFLRDKGFDCAVINPIITKNSTNMNVRKLHNAKFDSKKAAKVGLDASLKASIVPDDAIIDLRNLVRDYYYFKDLQSAIVLKLHAELKVSFPAYLNVFSKVTTQTSLKLLEAYPLAADMLAAPKDELVETIRSTARFGETYALARYDAICTAAKDAAVFGRALPSNALRIRLYIKMYREYQAHLDSILEELHQAVGKLEGTPDYDRISFIQTLHGVGFLSAVVLIAEMGSFDLFSSPKKLYAYFGLDPGVNDSGKFHGDRVHMSKRGSSLARRILHMVAINNLKVDKATKTPVNPVIYDYYTRKCASKKKSVAVGAVMHKICNIIFAMLRDNKPFELITPEEHRERYAAEHPESVNPAA

SEQ ID NO: 197849 - protein, 398 aa, unidentified
MCQYFLGIDISKDSFDFCFIDSNEKLLDKNHYLMSYEDFTNLGDILSSFSKDEILICIEATGIYHLNLLSFLLELNFNVCVINPLFVNAFTKSITIRKTKTDSKDAYTISLFAKRNSSTLRLSKLSDLETIKPIIREKEKLTNQISAIKTDIKALVNQLFPEFLKNTNIFSKSSLNLLLQAPSKQAIRNLKEKKIASLLNKDNQRGAKAKISANDILLLAQNSIGINNPSLEKILISKIKQLEFLQIQLDEYIKIIEEFVDEHHNDDIEILTSIAGVGKDSASSFLAEIGNIKNFESPKQIIAFAGTDPAIYQSGSSVNIRGSISKRGNSHLRRTIWHMARAATVWNETLKSYYDKKRNEGKTFKQSVIAVANKLIRIIFKMLKNNTKFESNHTNLAI

SEQ ID NO: 197850 - protein, 424 aa, unidentified
MMKLVYSICCGVDVHKKTIVATIVSTDKLGVSTYLQKTFSTLNYDIENFHNWLIENDCYHVCMESTGKYWIPIFNYLENDIDVCLTHPKYVKAIKGKKTDKKDSKWIADLYKFDLVRNSFIPPKDIRQLREISRYRFKLVCMKSSEKNRIQNSMTVSNIGIASVLSDPFGKTATEIISYLLNNTSESFDEKVCRKLIKKGAKAKSDEIIAAVNSYDIQTDQRLKLNFARGHLDYLDEMIAQTEVELYVRIKPYWQLVELIAAMPGMTEISATMVLAEIGADMSVFEDSNHLTSWAGLIPSNNESAGKKKSVRILKAGQYVKPLLVQCALAAVKSKKDPYFAIKYQHIKKRRGHKKAIIAIARMMLVCIYHMVSEVKPFNPTDYAELMDPHNHVEKVVLNESNVFNFLQQQGYNISLIKKNCNDI

SEQ ID NO: 197851 - protein, 379 aa, unidentified
MKKTYYIGLDVHKETIAIAYTFSGTREVATYHGECGGSNPAAERALRKLAAKLGVKLQDLHICYEAGPTGFVLARRLRQLKVDCVVMSPSKTERKPNEKIKTDKRDAKNIAKLFRNGDITEVRVPPALDEAVRDVCRARTDASDDLSRAKQRLNSFLLRNGFRYSGKARWTPSHMSYLRHLTLPDPVQNIVLEEYIQAIDSGIERVLRLKERMIDILPDWEWCPVVRALMACKGFQEVAAMTIISELGDLRRFDHPRKLMAFLGLVPSEFTSGSKRRQGGITKCGNSHARWMLVECSQHFRKAPKISAALTKRQVGQNKKVKELSWRMQNRLNKRYVKLKVRGKRENKAIVAVARELSAFIWELQNKLDLPMPGETHTP

SEQ ID NO: 197852 - protein, 359 aa, unidentified
MYCKQNQKINQVKECTLVVGIDIGSTTHYARAFDWRGIELGNVFKFSNSLEGFQSLSGWMQRIMKKTEKSEVMVGIEPTGHYWFDLGAYLENGGILLVMVNPYAVKQTKELDDNSQSKNDRKDPKVIAKLVTEGRYSLPYTPQGVYADLRVMVTNRQRLIREITQIKNRFARWFAIYFPEYKEVFGDYESQSSMLVLRRACTPEKIIELGIAGINQIWRDAKLRAVGIKRATTLYETAQHSIGLKNGRNAAEYEMKLLLQDYDYKQAQYESVMEELEHLCRQIPESEQMLAIKGIGLITVAGFLAEVGDLRRFESPRQIQKLAGLSLKENSSGKHKGQTTISKRGRMRWYNKVVTPTLE

SEQ ID NO: 197853 - protein, 415 aa, unidentified
MHRTCGIDWAEGHHDLAIIDRDGKLVSKKRISDDPTGFAELTDLLAEAGDTADDPIPVAIETPRGLMVAALRATGRPVYAINPMAVARYRERHSMTRAKSDHVDAMTLANIIRVDAEYHRRLPVDSELVQAIAVLARAQQDAVWRRTKASNELRSLLREYYPSFLATFAGKSATNLARPDARALLAIAPTPAHAAKLTKARVATALRRAGRQRGIDASAAETLTGLRAPQLRQPAPVEQAMGRQALALLATLEAACTGADDLERAVAEEFRKHPDYAVVTSFPGLADLTGARVLAEIGDDRTRFASDRALKAYAGSAPVTRASGKTISISHRRIKNDRLAAAGWIWAFASTGKPGPARNHYLRRRAHGDRHAPALRHLFNKMLGQLHYCLLSGEPFDPVKAFGLPSDTPPTRSAA

SEQ ID NO: 197854 - protein, 374 aa, unidentified
MGEDSVAYVALDTAKLRNAVAIAEAGRDGEIRYLGEIENSRPAIAKLVRKLAAKYRRLVFCYEAGPTGYGLHRQLKELGHECLVVAPSLIPRKPGDRVKTNRRDAMSLARQLRAGDLTAVWVPDARHEAMRDLTRARWATVRDLRSKRQQVSSLLLRLGRHYPRRTKWGKAHKAWLASQKLDHVEQRFALEELLQAVRQAEERIQRLEQAIRDGLEAWSLHPLVTALMALRGFDFVAAATLAAEVGDLGRFRTPRQLMAWLGMVPSEASTGEHVRRGGITKTGNRRARQLLIECAWSYRHPARIGRDKLAKLAAVPAEVRDIAWKAQVRLTKRYRALCRAGKLDVVAIAAVARELAAFVWAIARAVAPRPTTAG

SEQ ID NO: 197855 - protein, 320 aa, unidentified
MKTATLPLDFGADVAKGEIVVACAQQSSAPRKIANRRAPLLAWLRTLPPGSRIAMEATGTYHELLAELAQKRGFVVYVLNPKDTRHYAKAMGIRGKTDRVDAELIARFVAHEHAKLHPWTLPTPAQRQLDRLLKRRAELSRIAVALRQSLQGLTGFTAELKSISARLDGLIARIDAKIRAHIEASPERHAHYTHLRGINGVGPVVGSALVNALERLPFGSADAFVAFTGLDPRPDESGRHRGRRRLSKRGPSELRRLLYIAAMAAARSKVWKSLYQHYREKNLPRTAVLVILARRIARTAWSIYTHKITFDPQRLITNLT

SEQ ID NO: 197856 - protein, 388 aa, unidentified
MNKIIYIGMDVHSTNFTLCSFEPGYGFEADKIFGQTQIKEDIFNSTVKYINKLKSMRPDVDVVCGYEAWCLGYNLHRKLKAKEIESVILAPTTMAVSRNCSKKKNDYRDAITIAKCLASSAYKAVYIPDDKDEDVRDFIRMRDDHKTALKQIKQQLNAFCLRHGHHYDKTKWTGLHLNWLRKLELSKLQRETVEEYLVTYETLTSKITALDIRIEDIASEERYAEKVNKLKCIKGIKTHTALSFVCEIGDFNRFKSADKFAGFIGLVPGECSSGNTERMLGITKAGNRHLRRLVVEISNTYRRGTVGRKSAALKERQKDMPKDVVAYADKAINRCQRKYQRMMFKGKNSNQAVAAVARELCCFIWGMMTGHHSRTAQAEASVYRSELD

SEQ ID NO: 197857 - protein, 439 aa, unidentified
MSRRAYRATGVNEVNWEQIAHGKEGLDVTLGVDVGKFDVLVVCRWADERFERPWRVKNPREIPTLVALAKRVQTDRKLVVAMESSGTYGDALRQALSDNGIEIQRVGGKAAHDYAEVFDGVPSQHDGKDAAVVAELAAIGKGRPWPYEAPDSWEEELTYWVEEMVIQRQLVTCWQGRLEGLVARHWPEAFQVLKLSSGTLLRMLKRYGSPQALAADPQAPRQLARWGGALLSAKKIDQLLAGARSSVGVRLGPWQQRQIQECAEKALAARRQSNQAQRRLRQLAVGHQVLQAQGKVVGIPTACVLWVCTGDPRKFDSAAAYRKAMGLNLVERSSGTYQGQLRISKRGHARTRQWLYFAAMRLVQKRGVRPWYEAKKARDAGDARRLLVAVMRKLAVALYHVGVRNEEFQPRRLFGRIGKHRGRGAQRAIAVAEPSKIQG

SEQ ID NO: 197858 - protein, 383 aa, unidentified
MASMTSAIPTAQPDRVVIGGIDTHKDIDVAALLDCAGMVLGTAEFPTTRAGYWQLLGWMGSAGHLGRVGVEGTGSYGAGICRQLTAAGVEVVEVNRPDRSQRRRRGKSDALDAAAAAEAARSRNRIAIPKSRDGQVEALRVLRLTRVSAVKARTKALQLLQQLIVTAPEQLRDQVGELPGMELIRCCAAWRPPSHDAADPTVATRIALKKLARRYLQLAEEISDSDTLLDGLVTDLAPQLIAVTGIGTDTAGQFLLTAGDNPERVHSEPAFAMLCGVAPLPASSGKTQRHRLNRGGDRQANRALHVIATTRKRCDHRTQAYLKKKIAEGHTRREATRSLKRLIAREVYYLLNPAPHPGRFLHPGQPAGAQTRSRWSPPRAERP

SEQ ID NO: 197859 - protein, 530 aa, unidentified
MACFKDEETRNCQRERSFSSDDLKSLTLDDGTKIVTAPVNDIKRPLCGGIDVHKNILMAAACITDKATLKAVFYVKGFTTSNSDIRKMAEWFNTYGVTDVCMESTGKYWIPVYDILEQSGMKPVLTHPKYVKQAKGKKTDFRDAVHIANLFRMDLVVASFIPPSDIRDLRELCRYRLKLTYIRTSEKNRFQNSMTISKLRLDSVFSDPFGTSASKIMDYLIHTPKESVQDDAILSLVDKRVKASPDKILDSIRGYEFIGAQRDKLEVISKHLEDINKCIALIDNKLDYYREKYAGIIRHLITIPGISEEAALYILGEIGADMSVWRDSKSLTCWGGLTPANNESAKKKKTTSIGKGGHYLKPLLVQCALASIKSTRKHPYFYRKYQTLAKRRGHKKAIIAIARKMLVSIYHMIKSDSDFKPIDYDKVAAQKQNTTELSMKKVIEFLWEQGIDSAVIRKIESQCPKGQSTGQGEIRKEAPKKMAQKKQPESIARKLVSIGHRKRLANIPKRSSRPKRMLPRINGAVATAQD

SEQ ID NO: 197860 - protein, 346 aa, unidentified
MVLIGCDYHPSWQQVCWFDQATGETGDEKLVHASGDAEKFYRRFSSPVRVGIEATGNCQWFLELLNRLGHEVWVGDAAKIRASDSRQQKHDKRDARLLLQLLREDRFPRIWTPTREQKDLRQLLIHRYKLVGLRARVKNELQHLAMNQGVTRKGKLWSKAGEKVLRELPLAPWASQRRKDLFRVREMLNEQIDLLDRAVVEAAEKNEKARLLMTQPGVGPITSMAFVLTMGDVSRFQRGKQVASYLGLIPREYSSGGKQHLGSISKQGNRFLRMLLVEAAQAAVRYDPGFRNEYLHRCHKKAKGVAKVAAARKLAIRLYWMLRTNTGYPEIVRVESSSRVALVSAS

SEQ ID NO: 197861 - protein, 420 aa, unidentified
MIENYDSVDVFIGVDVGKGEHHAVALDRTGKQLFDKALPNDEAKLRELIGQLKRHGQVLFVVDQPATIGALPIAVAQAEDVLVGYLPGLAMRRIADLHAGEAKTDARDAAIIAQAARSLPHALRSLQLADEQVAELSMLCGFDDDVVGQITATSNRIRGLLTQIHPALERVLGPHLDHPAVLDLLQRYPTPATMKAAGPTRLGNRLLKLAPRMGRRLADEITQALAEQTVVVTGTNATSIVLPKLAEQLAALRRQRDEIAVEVERLVEAHPLHPVLISMPGVGIRTAARLLTEVSGKDFASAGHLAAYAGLAPVTRRSGSSIRGEHPSRRGNKILKRALFLSAFAALATRSHGPTTTARSPKASATTKPSSPSPDDAATSSTPCSATAPSIKPTINSPLDKNIGAPPPTSAGPGSTVLAW

SEQ ID NO: 197862 - protein, 430 aa, unidentified
MTKPQLTPTQGILVAIDIGKTRNEVLIEIPGQARRRRLTVLNTRADYDRLIDLLSGLGQPVTCAFEATGNYHRPLAWRLLQAGFTVRLISSLALARTREALHNGWDKNDPKDAQVALHMLRIGASQHYHDPLAAGLNDIQEVSKTHEAISKAKTEVLHRILTPPLALYFPEIGRFRHNSRSDWFFAFLDRFPTPGSITALSKEAFIAAAWGVVGRKVAKERLLGDIYETARASIGLPIPIDAPAVRLFRLVIAEARSLIEQRNALEAMAIELLHESPDYKLLCRIPGVGPITALTILAEAGDLRRFGHHRQFLKFCGLDLATHQSGAFRGQTKLSKYGNARLRRALWLAGQVAIRQKENSFRDKFERTIARDRHNADLRRKALTAITAKMARVVHAIIKSGADYRPFVEGPVPGGRTSLSMGREGATATL

SEQ ID NO: 197863 - protein, 318 aa, unidentified
MTQSVGIDVGKEELVACIRDTDGKSAMPAPFPNTSIGLKKLIVHIKTEGIGADDPILLESTGPYHWQAARTLADRGYFVKVANPLHTKQIARLSIRKRKTDNVDASHLAFLASQQYGYRFIETEEMAKKKALVRHFWKLRRTATNLMIHERYLKQYRHISRASVSALLVKRCEKLKKEIVQEWSTGNDVKYLDSIPGITPFLAATILAELMPLERFQRIDQIIAFAGLDPSVKQTGGKRGTHGPISKRGSPTLREALFLAAFGSFSKGLMRGVYKRYKDRGLHHNAILCILARKILRIAVALLKKRRVFDPARLLTGT

SEQ ID NO: 197864 - protein, 384 aa, unidentified
MNTAATRTGKYGVEGPVLYLAFELGNMEWKLGFSVGFGQRPRVRTIPARDVEGLQREIDLAKTRFGLPAAARVMSCYEAGRDGFWLHRYLVEAGVENLVVDSSSIEVNRRFRRAKTDRMDVAKLVDQLMRFERGEKKVWHVVRVPGAEAEDRRHLHRELEDLKAERTQHINRMKGLLAGQGVRLEEIGSGFPDQLNAIRLWDGRPIPEGLKARLEKEYERLQFIQGQIRELEAQRVEAIRRSADPEVEMVRQLLRLKGIGLNSAWVDTMEFFAWRDFHNGKEVGGLAGLTPTPYQSGDSSRERGMSKAGNRHVRALAIEIAWGWLRYQPESELSQWYQRRFGDGSSRVRRIGIVALARKLLVALWRYLETGLIPQGAVLKARLI

SEQ ID NO: 197865 - protein, 327 aa, unidentified
MSNRKWIGIDVSKAELAICVMNADKTVVHAIFANTKEGFRSLINYLKKRKAVGCAVCLEATGPYGEDLAAYLHARGYLVSVVNPVRIKRYAESQLRRNKTDKLDAEVIADFCRTQEPALWTPPDPAWVELRALVRHLDDLIAMQVQEKQRLESTTSATVRADLKVHIAYLQEQIEQVTQQVNDHIDHNPEWKHKRELLNSIKGISDRTSSRLLAEIRDITAFDTVEQLVAYVGLNPKQRQSGKYKGQVKISKIGNAALRSALYMPARSAKRHNPLVQNLVKRMTDEGYCANAITVAVMRKLLHYVYGVLKSGQPFDPHYLEKQAISA

SEQ ID NO: 197866 - protein, 316 aa, unidentified
MATSSSVSVGIDISMRSLEVAFHGITKIYSFLNNAEDISRLIVFLLENRTTLVVVEATGGYEKALVQALNSASIPVSVVLPKRIRDFACAQGISAKTDKLDAKNIAFFASSLKPHPNAPYSAELLRLSALVDRRRQIVLMIKAEKSPHPKASPEIRPSISDHIEWLIDEEKRPNAEIQDLMQNQPEMKRKSEIIRSAKGIGPGTASNLVAELPELGSLDRKKIAALVGVAPWNADSGKKHGKRRIRGGRSMIRRTFYMATLTAVHFNPVWALFYQRLLSRNKERKVALVTCMRKFITILNAMVRDNQPFRYQSAMA

SEQ ID NO: 197867 - protein, 340 aa, unidentified
MMNREGKLFWVGVDVAKESFSASLAPVDLCCAQWRELESRTFEHTRQGVSQLLGWVSQSGSCVGVCVESTGIYSKIFAGLWSGCGAAPEVSIVNPQRTSKFAGSLGVRDKSDPVDAKVLAVFGVVHRPAPQRVRPALYVQLRELSRLREDLVREHTSWSNRLGQALDPSVRKMIKQQLKRLESAVKKVEEQIETLLLSDEAASRDYKRLQKLPGFGKVVATVLLSELGDLRDWSRSEIVSFAGLFPRIYQSGKSIERRPRLAKGGGGRIRRALFMAAISVQSRENAFRQFAKHLQHVGKSKMSSIGAVMRKLLLVARATVISEQDYNPNWRCELMPKTAE

SEQ ID NO: 197868 - protein, 370 aa, unidentified
MRFYQGQHAFYVGIDLHARTMHVCILDHAGNTVFDRGIPCRPEALLRAIQPYREHLVVGAECMFAWYWVADLCVAQDIPFVLGHALYMKAIHGGKAKNDRIDAGKIARLLKGGNFPLAYAYPKGMRETRDLMRRRTYLVRKRAELLTHLQILNAQYNLAPFPKKLAFAANRVEMNVAERFADPSVQKSAAIDLALIDRLDELIGDLELYLVRTAKVDDVQTFYRLRSIPGVGKVLALILLYETHDVGRFDTAGQFLSYARLVRCAHESGGKKLGSGGKKIGNAHLRWAFAEAACLLLRSSERAKKWKQKQAAQRGEGKALAILAARLGRAVYHMLRKGEAFAEERFWSGASPTRTDSSSLSRKEARDAGH

SEQ ID NO: 197869 - protein, 362 aa, unidentified
MESTPLIAFDQHAATTVAAVLLPGERAAALHTLASDSPTILRFVRRVARQAGTVRCCYEAGPCGFELQRALTQHGIACDVIAPALIPRRPGDRIKTDRRDARQLAMLYRAGALTAIHIPTEHEEAARDLLRCREDIRGDLLRARHRLSKFLLRHGRRFTETKKAWSKRHDVWLRAQQWPLPSLEQTHRAYLRTVDEAMARLRAVEEDLRALLDLEPLRPRVQRLRCFRGIDDLTALTIAAELGDARRFATAPSLMAYVGLIPSEHSSGTKQARGAITKTGNAHLRRVLVESAWHYRHHPFVGDTLRARQRGAPAAVIAHAWAAQQRLHRRYARLAARGKPKQHVVTAIARELTGFVWAALTQ

SEQ ID NO: 197870 - protein, 341 aa, unidentified
MTIVEDACVITGGVDTHADTHVAAALDPVGGLLGVQEFPATAAGYASLLSWLAGFGTVALVGVEGTGSYGAGLARYLAAAGVRVVEAVRSDRQDRRRNGKSDPLDAVSAAQSGRASGAPKGRDGAVEAIRALMVAKRSARNERTQALNQARALILTGPDELRARFAGKRAAALAEAIAALRPRPGDAAEYSLRTALRELGRRVEFPDAQIERLDELIVPLVTARAPALLALYGVGPDTAALLLIAAGDHPGRLRSEAAWAHMCAVAPIPASSGKTRRHRLNRGGNREANHALWRMVITRMSAHPATRAYVRRRTAEGLSKKEIIRCLKRHVAREVYPYLRG

SEQ ID NO: 197871 - protein, 341 aa, unidentified
MSEIKRIAIDTSKSVFTLYAVDAGERPVWRGNLRRRELLSFFAKQPPVEVVLEACGGSHHWGRSLQALGHRVRLLPAQYVKPFVKRGKNDRNDAEAISVAAAQPSIGSVPVKSTEQQAAAMLLSVRELLVRQRTQLVNAMRGHAAELGVVAPLGNKGLAELQSEIAASDEAIVPAAAKQAIALLGREADRIEMRLAAVDAELMQQHKANPLSRRLAAIPGVGPISALSFALRVDPTQFKSGRHLAAWLGLVPRERSTAGKQRLGAISRAGNERLRQLLVLGATAVIRFAKPGRPATSPWLLQLLSRKPRKLAAVALANKMARILWAMMTSGEAYRPRPAGV

SEQ ID NO: 197872 - protein, 358 aa, unidentified
MEAKTNKLDFTGQNIYVGLDTHKNSWKVTILTDTVSHKTFSQDPVPEILYNYLKRNFPGANYFSAYEASYCGYWIHYKLTELGVKSIIVNPADIPTTNKEKIQKEDKRDSRKIAKCLRSQDLTPIHIPSNKTIQDRTLMRTRYIIVKELSRFKNRIKSLLFFYGIKFPEEFYKSNTHWSKRFINWIETLSFEEDTAAYSLSVFIKQVTYLREILLDTTRKIRALSKTEAYYYKMTLLRSIPGIGLNTAMLLLTELEDISRFKSLDKLCSYVGLIPSTNSSGDTETVGDITSRKHKALNSALIESSWIAIRHDPALLMKYSELCKKMEGNKAIIRIAKKLLNRIRYVMKNEQEYVKAVA

SEQ ID NO: 197873 - protein, 369 aa, unidentified
MSNYIMVACDLHDKTMVLLIARNRETGVRRKFANDPEGRRLMIQDLRRRSKAAGGAEVVFAYEASGEGFGLHDELTDAGIRCHVLAPIHIPRSAKHRASKNDQRDAKAILVLLRGHLLAGNELPTVWIPDHATRDDRELVRARLDAAVKLAKVKNQITSLLKRHRLRRPASSGKGWTQTYVSWLQSLARKQGSAKNPLGPGARAALRSLLRQMESQEKEVADLEKAVVALSATPRYAKPAEAVIALKGVGAVTAMVFLTEIGDLRRFRNRRQLASYLGLVPRSNESGEANDRKGHINRQGPSRIRKVVNQAVWSAIRDDPELAAAYGRIVRKHPKQKKIAVVAAMRRLSVVMWHRGLDALGPPPGREAA

SEQ ID NO: 197874 - protein, 349 aa, unidentified
MKKLSKTQKQMTETIGIDLGDKLSRYCVLDQDGEAVEEGTFRNQVSSIEMHFSGSPRRIALEAGAQSAWISRELQRLGHEVIVANPRQLKWITASDNKNDPVDARKLAMLARADARLLHPIQHRTAEQQSQLLVIRARDAMLRARTLLVNMARSAGKGFGQRLPPSITASFGARALACLPAELHTALRGLLEQIDALSLQIKIYDQHIGELAAQHPELEPLHSIPGVGTLTALTFVLTLGNAERFEHSRDVAGYLGLRPKQRQSGARDPQLGITKSGNGYLRKLLVQCSHHILGHWGKDSALREWGLAKSEGGKKATLRAIVGVARKLAVLLHRMWVTGEKYKPFPKMV

SEQ ID NO: 197875 - protein, 346 aa, unidentified
MEQVTTIGLDIAKSVFQVHGIAADGTVVVRRQLRRGQVLPFFEKQAPCLVGIEACATAHHWAREIGARGHEVKLMPAKYVKAYVKRNKNDAADAEAICEAVSRPTMRFVPVKTTEQQALLMLHRTRKLLVRQRIRLVNAMRAHLAEFGIVAGVGRNGVDRLLKLIEAGDTRLPAPARDCLLALRDQLAITRQQIIEADRRILAYHRESELSRRLEEIPGVGPLIATALVASVPDPHAFKSARDLPAWIGLVPKQSSTGGKERLGHISKAGNRYLRSLLMIGAFSLIKRAKLGTGRHRPWLLELMARRPIKVAAIALANKIARIAWALMTRRTRYREPEVKLTPQAA

SEQ ID NO: 197876 - protein, 347 aa, unidentified
MTIVESTRPILGGVDTHADVHVAAAIDAQGGVLGVESFPATRSGFIALHAWLVGFGPLDRVGVEGTGAYGAGLARYLRGRGLEVIEVDRANRQLRRRAGKSDTIDAIEAARAVLSGRAAGLAKSADGNVEAIRALLIAKRSGRETRIRCLNQIRHLGFTAPDTLRERLRGIPRKRLAQCVATLRPTVGSDPVLYATKLALRTLGRQVLDLEEAARGLDATLDQLVRTTSPSLLELNGVGVDTAAILLVAAGDNATRVRSEAAWANLCGVAPLPATSGKRTERHRLNRGGNRQANHALWRIVFTRMSSDDRTRAYVTRRIAEGKSKPEIMRALKRYVARETYQHLPTT

SEQ ID NO: 197877 - protein, 363 aa, unidentified
MSANATSIGLDVHARSVVACGLDGRTGELFERRLTPDHGDIESWVRSLPGPVSVTYEAGPTGFGLARYLIGQGIECQVAAPSRLQRPSGERIKTDVRDARHLARLLHLGEIVAVAVPSVEREAARDLVRAREDVRGDLMSARHRLSKLLLRQGIVYYGGKPWTGSHDLWLRAQRRSALFALPGLGLAFDIAYDTLLATVARRDRLDTAITEMAAASEFTPVVTRLGCLRGVSTLTAFGLAVEIGDWHRLTGRRIGAYLGLVPTESSSGSTRSQGSITKTGNAHARRLLIEAAWHHRKPCRIGADLRRRQDRATPAARDRGQRANRRLHARWVGFDARHKRPVVANTAIARELAGWCWSLAVLD

SEQ ID NO: 197878 - protein, 399 aa, unidentified
MYKKLILGGAYILIYYVGIDISKYKHDFCIISNAGELIVENFSFQNNKIGFQTFLDQLKPYNKSDIRIAFEATGHYSLNLELFLVNNGFSFMKVNPLIIHQFLKTRSLRRTKTDKADSITIAKYLMSVPYKPNSDLLYTIFTLKSLCRARENLIKERSKFAVLLTNELDKSFPEIKPFFNNMISTTLLYILEKYTNTKHIAAMKDYESLRKLSHGKFTYARFAQLKELAKNSVGFHNENTDLLISTYVSIYNDFNNKIDPIEKQISTIINVLNPRMLTIPGIGEISAATILSEYGDIKNFSNPNKMLAFAGLDPSINQSGTLESNGKMVKHGSGHLRYAVMNSALSILRFSPEFYDYYLKKRSEGKCHRVALSHVCKKLIRVIYSLEKNNIDFNPSLLK

SEQ ID NO: 197879 - protein, 385 aa, unidentified
MKPNSQMTLGDFFRQCVGIDISKKKFTACLYMYDRASDVGCYTKSIDFANTKSGFNQMVKWSRKEAVKEYPLTYLMEPTGIYYEPLAYHLHKIGQTVYVVLPNKARKFCEAEGIKTKTDAVDARCLALMGCVSRKLSPWSPPSTIYHELRQMTRFHADLCKVRTSVSNRMEALDHMHGPDKSVIRHCQKLLEEIDKLMEKNGQALLQKLSENKELEERVKRIATAKGISVQTILCVVAETNGFHLIRNRKQLTSYSGLDVIAKQSGNEDPKHRISKKGNVHIRAALYMPALVAIRYNRQLKTTYDRICQKHPKEKMIGITAVMRRILLLIYTLWKNGEEYDETRDMIHMPRKKGLEPENGQEDLVGIDREPIDWNAVGDNGEPPF

SEQ ID NO: 197880 - protein, 347 aa, unidentified
MLYLGLDVHSKWFTYAGFDKETGEIFSKKKTANTPDAMRAAFASLPAPRIGALETGTNAVAMHRLLAPYFTDLLIVAPNKVWDRRRDTQAKTDHRDALGLAEQLAAGTLTPLFVPTEDLQVWRTVGRARIQVTQDSTRATNRLYALARQWGYLDEKRFLTKGGRAWLETLTLPDQAQDVLTAALTALEALQARETAYDQTIAALVQGDPIGQLLVTIPYVGPFTAFIVRAEIGAITRFANADKLIAYAGLVPRVFQSGERLRYGRLTKAGNAYLRYVAVVFAQNCLNGKKDTPFKRRFYRLCHTHDPNEIKIMIARDFLTVVYAMWSQGTVWRDDRAAVRGATSSVA

SEQ ID NO: 197881 - protein, 338 aa, unidentified
MNYMGIDHHKQYSHITLMDETGGVLRRGKVANYRIELEKFLTGFGDVKAVVEAGRSSYTMVDVLDEMGIEVTIAHPKEVKAIAKARIKTDKRDSWMLAHLLRTDLIPEIYKRSRENRESQRVLRQRAFYVGSITRVKNRIRALIAQQSEVVRDEASRAKNLFGTNGMKVLRGLSLPGNQKELLEALVKTYRHLEERRKETNGLVEKLYLEIPEAQLIHTVPGFGVFLSVLVAVEIADIERFEEVGKFHSYAGVIPSTRSSGERTYHGRIVKEGNRWLRWAAVEAVWPGIRADFDLRRYYERLKRKKGANSAKVATARRLLTIIYRMLKEGRSYIPYKR

SEQ ID NO: 197882 - protein, 361 aa, unidentified
MAGTVTWVGLDVHARSTHAAAINPVSGELVRARFGAGLAGPLAWLGALPGPVKACYEAGPTGYGLYREARKAGVDMEVIAPGKTPRGPSDRVKTDRGDAERLARLLLAGSLTSVVVPPPEIEAARDLVRAHDACRRDLMTARHRVSKLLLRHGLVYPKPSTWTMEHRRWLARQRFDEPASELTFADLVAAVDGLSARKGALAERLSQLALNEQWWPTLARLRCLRGIDTLTTLALHLELGGDWRRFERAPALSAWLGLVPTLTQSGESSRQGAITKTGSTLARRLLVESAWHYSREPRIGATLRNRQQGQPDHVLQIANRAQQRLYRVHRRMRARGKPGNVCVVACARELSCFLWAAATAD

SEQ ID NO: 197883 - protein, 350 aa, unidentified
MDRYIGLDAHASSCTVAVIGPSGRRLASHVIETSARALVTVIDTIPKTRHLCLEEGTLAGWLHEVLTPHVQEIVVTAVPQSRGPKNDKRDAFALAEMLRIGAVPRKVYKQRGRFTRLAYLAKAYQVLVSDDVRVQNRIKSLMRSRGVQVSGSAVYTTTGRSAYLDQLLIEARVMTDFLYQQHDHLTDLRKQAQKEMITEARKHHEFRCVKSCPGLGDVRAALLLPVVVTPYRFANKRQFWSYCGLAVVSRSSSDWVRTRSGEWIKAPVQQTRGLNKNFNRTLKTVFKGAATTIIGQARDEPLYQHYQRLLDGGTKPNLAKLTIARQIAAITLALWRNEEVYDRTKIAHKT

SEQ ID NO: 197884 - protein, 378 aa, unidentified
MTIVADRPAPVDTLEISLGVDTHLDTHVAAVIDPLGRHLGQESFDTTVAGFKALLAWATTFGTITVVGVEGTGAYGAGLARFLTAEGLIVVEVDRPDRKTRRDQGKSDPIDAYSAARAAASGRASGIPKTHTGDVESIRVLRVARTGAVRARAKALTQLKSLIVTAPDALRAQLGDLNGSRLVTTCARLRPARSQSPPSSSPSSKRSPSPAPLTDPTAATKRSLAAIAARFELLGKEIAGLDDDLDALLTPLAPTLLGLQGVGLDNASQLLVTAGDNPDRIHGEAAFAHLCGAAPIPASSGKTTGRHRLNRGGDRAANAALYRIVMCRLRWDPRTRAYVDRRTTEGLSKKEIIRCLKRYVVREVFSAILADLSPKISA

SEQ ID NO: 197885 - protein, 401 aa, unidentified
MSYFAGIDWGCSEHALCVVDEFGKVILATQVPHDAQGLSSLCQRLQRLDPAVPIAIERPSGLLVDTLLHAGMKLVPIHPNIVKACRPRYRAAGGKHDLGDAYLLADVLRTDGHRFRTLSPVSDAIQALRALVRTRDDLVAQRVALANQLRALLESFWPGAGAVFADIDSPISLAFIDRYPTPASAARLGEKRLASFLASEQYSGRQPISMMLQRLREAPVGQAGAAEAEAKGELVRALARVLSSLVSEIARITSRIEHEVAKLPDGKIVMSLPRAGRLNAAQILAELGDVRERFATDDQLAAEAGLAPVTRQSGKTKTVVFRWACNHQLRRAITTWAGNSRHGCAWAKAIYAKARDRGCRHPHAVRILARAWVRVLWRIWTDKALYQPAQHNGAKLFLVAA

SEQ ID NO: 197886 - protein, 359 aa, unidentified
MNPMLAGAVQYVIGVDTHRDSHTAAIVEAATGAVVEQLTVATDAFGYRRLVTFADLHTTGRRVWAIEGTGSYGAGLTTSLLEHGEWVVEIDRPTRPARRDGAKSDDLDAIRAAREALSREHLAAPRARGDREALRVLTTARHGAVVARTKAIGQLKALIVNAPQSLRDQLRRGTTDEQLHRCSRLRTLPTHSIEHRATIRAIRGTARRALALEAEAAEYETELEQLVVAICPVLLDQPGIGTITASQFLISWSHCGRIRSEAAFASLAGVAPIPASSGATTRYRLNRAGDRQLNRALHTVALSRLRIHASTQAYAAKRTHEGKTPRDIKRCLKRAIAREVYRLMETHAAAVARHLPKTA

SEQ ID NO: 197887 - protein, 430 aa, unidentified
MKSNTQNAKIEAITEKTLVLGIDVGSETHYARAFDYRGIEYSKKPFKFSNTEVGFATFKEWILDLKERHEKDKVIPGMEPTGHYWFNLGKFLQDNEMKPVLVNPHHVKKSKELDDNNPTKNDRKDPKVIAGLVREGRYMIPYLPDGVYADLRTASNIRFQLQAELTRIQNRISRWFNIYFPEYKTVYGKPDAKSGMLILKAAPLPEDILTLGIDGVNQIWRDAKLRAVGKARAKTLIEAAEHSIGSKEGTMSARMEIRMLLEDYESKNMRLQEVMVLIEELVKEIPMAEKLLEIKGVGIRTVSGFLAEVGDISRFNNPKELQKLAGLALVENSSGKHKGKTTISRRGRKRLRYLLFEVAMSLVAKNPEFRELHNYYTTRRLNPLKKMQSLMAIAAKLIRVFYAMLTKGVDYDPKKMISDIKRPTVYLQAA

SEQ ID NO: 197888 - protein, 340 aa, unidentified
MQAIRYGIDLAKSVFQVHGVDGSGKVVVAKPLRRDQVLKFFAKAAPALIGLEACGSAHYWARELRALGHEVKLIPASYVKAYVKRNKNDARDAEAICEAVSRPTMRFVGVKSVEQQCARALQRSRELLTRQRTQLGNALRGHLYEMGITAGEGAAGLRSLVERIEAGDAAIPAALRSSLACLAGQWRAVGEAADALKEEICVQVQASEAAGRLLKIPGVGPISAHAVIGAIGDGGQFASGRDFAAWLGLTRKNYDTGGKHRNTGHISKAGDRALRSLLVLGASAWLRHVRAKPEKGSAWIRGVLGRRPVKVAVVAQAAKTARIIWAMLRSNKPYQAAAAA

SEQ ID NO: 197889 - protein, 371 aa, unidentified
MEHTRFVGLDIQKERISIAVAESGRSGAVEYLGEISNDPVAIGKLCARLERRGNALAFCYEAGPCGYGVHRQLTSLGHRCDVVAPSLIPHKSGDRVKTNRRDATMLARLHRAGELTPVWVPDADHEAMRDLIRLRSVVRQIVTRTRQHLQGFLLRHGRKHGRGTAWRMAYRRWLSTLAFGHPAQQIAFQDYTDAVMDAERRLKRVEEQISGLLPEWNLRPVVDALQAMRGIALINAVVLVAEVGDFTRFSNPRQLMAYFGLVPGERSSGETIRRGGITKTGNTHARRALVEGAWAYRMKARIGRHKVDRIEALPKIIRDIGWKAQVRLCTRYRRLRARGKTANVVNVAIAREMVGFIWSIACTVQSTPKTA

SEQ ID NO: 197890 - protein, 347 aa, unidentified
MKYVGVDIGKWKCRAALMDPDGSIIEEFTFPNDAEGIHDLASRLTPEDRVVMESTGSVWETLYNHLDERHIPVVLANPLKTKAIASARIKTDKVDARILAHLLRGDLVAECYVPPRDLREIRALVRHRASLVRARTTVKNRVHALLDGHGLRCEYSDLFGKRSLEWLGRLELGALDRLMLDNHLGHVESLNGQIRRVDEMIRSRGSLDEDVRLLLSLTGVDIYTALLIRSEIGSISRFPDYKRLVSWAGLAPSLHQSGTVEYSGGITRQGSRMLRWAMVESARTAVRHDERMRAFYERVKRRRGDGKAVVAVACKMLKVIWFMLSRREVYQSRNEGRYGRKLKSLDR

SEQ ID NO: 197891 - protein, 338 aa, unidentified
MKTYAGIDLHSSNNYIGVIDAKDKRLYSKRHANRIEDVLKVLGKFKASLQGVVVESTYNWYWMVDGLMDHGYKVHLANPNAIQAYDGLKHTDDKWDSFWLAHLLRLGILPVGYIYPKHQRPIRDLLRRRLMFVRQRTSQILSLQSMITRNRGLNFSGAQIKRFRDEFIEKLFSDHYLVFTAKRNMATIRFLDHIVSEIEVEVASQIKLKKEFIKLLTTPGIGNILGLTIMLEVGNIGRFIKAGNYSSYCRCVESKKTSNGKKKGENNKKNGNRYLAWAYIEAANHAIRCCPKAQKFFQRKMAKSKRVLATKALANKLTKATYFIMRDQVAFDEDKLFR

SEQ ID NO: 197892 - protein, 360 aa, unidentified
MKRQRTSIGLDVHARSIVACGLDADTGEVFQRRLCPDHREVLEWIRGLPGPVAVTYEAGPTGFGLARALIGAGIDCRVAAPSKLQRPAGDRVKTDARDAAHLARLVHLGQIVEVTIPSVTQEAARDLARTREDCRGDLMTTRHRISKLLLRQGIVYYGGQAWTGKHELWLRGQHFDDPALTLTYESTLDAMVTCVHRRDRLDDAIAAMAADSAFTPVVNRLCCLRGVSTLTAFGLAVEIGDWGRLTGRTIGAYLGLVPTESSSGASRSQGGLTKTGNGHARRLLIEAAWHHRPGYRPSRDLRRRWEAAPAAARERGHTANHRLHTRWAGFDARKKRPVVANAAIARELAGWCWSLATMTD

SEQ ID NO: 197893 - protein, 403 aa, unidentified
MNAVGIDVSKGKSMVTILRPFGEIVSSPFEIKHTSSDIHSLIKLIHSIEGESRVVMEHTGRYYEALAHQLSAADLFVSAVNPKLVKDFNNDSLRKIKSDKADSVKIARYALDKWQSLEPYSSTDELRAQLKVMNRQFHFYVKQKTAMKNNLIGLIDQTYPNANTYFNSPTRSDGSQKWVDFVSTYWHVDCIRKMSLNAFVEHYQDWCRRKKYAFNKSKAEEIYTKTKELVPVFPKNEITRHIIRQAIDQLNSTSVTVETIRTLMNETASKLPEYSIVMQFKGIGPSLGPQLMAEIGDVTRFTHKGALTAFAGVDPGVNESGSYAQKSVPTSKRGSSNLRKTLFQVMDVLIKTMPQDDPVYQFMDRKRTQGKPYYVYMTAGANKFLRIYYGRVKEYLSVLPDPS

SEQ ID NO: 197894 - protein, 390 aa, unidentified
MDVLYQSCAGIDVHQANIVVCILHGPLTSTRPKREMATFDTTTKGLRACHDFLSQFHVEAVGMESTGVYWRPVWHALCDDFELILAQPAHMKAIPGQKTDKKDAHWIAKLTRIGLLPRSFVPDETIQELRELTRQRKHYVESRNRETNRIHKFLQSGGIKLTTYIEDIMGLSGRNLLQLLVDGTPITPRIVHQSVYTSLKKKVPQLLEALDGYFSDHHRFMLKQSLEIYDFYQKQIELLEERITVYLSQYENHVETLDSIPGIDVITASVIISEVGVDMSQFPTSGHLASWAGLCPGNNESAGKKRSTKIRHGNSYLKKCLCQAAFAVKRQKGSPLAERYYQIQSRRGSQKATIALAHQLLKIAYILLKEQMTYPEFLAQKKTTRDELVA

SEQ ID NO: 197895 - protein, 333 aa, unidentified
MQDLSTKQHFVGCDVSKDTLDLALYQPKTDYRKFEHVQISNDTEVFKQLLQWLKARKIKKNEVAIAFEHTGAYSIALAEWLHKKKITFNMLHPLDVKNACSRGRNKTDEVDAKFIADYAYTMREKLAPSGPEPKNIKHLRELRNERDLCVRCRASYLCQIKVQTEAQTIARMHKMVDFMTVQIHQIEEEIKKIIAADETIATNYHLLISIPGIGMVNAVNTIVATGNFTRFQTSRQYAKFCSVSPMAVQSGTSVHSGNHVCKKGHNELNATLSEAARSAIIHDPQLRHYYQRKRSQGKSHGCVMNAVKFKLICRMFAVIKRQQPYGNTECYRG

SEQ ID NO: 197896 - protein, 373 aa, unidentified
MCEFIMVGCDLHDKTMLLKIARGQESAEKLTVRNTSAGRARLIDDLRQRAQVAAGARVIFAYEASGQGFGLYDELTAAGFECHVLAPTKMARSTQHRKRKTDEQDAEQILQILRGHVLAGNPLPKVWIPDAQTRDDRELVRARLDVAEKAATIKVQIRSLLKRHRLLPEGLKCTWSQKASGWLRMVTRDPAVGLGVRATLASLLRQWEFLQAEIDRLDEALESLARSSRYAAAVGELVKLQGVGLLTALVFLTEIGDVGRFANRRQISAYLGLVPRSYESGAADDRKGHITRQGSSRVRRVLCQAVWSVIRHEGSDHAVYQRLVQRNPKHKKIAVVAIMRRLGVRMWHRAQAARREDLPSRVGRRSITPAPAG

SEQ ID NO: 197897 - protein, 371 aa, unidentified
MNESSKMIYVGLDVHKDAIAVAYAPEDRGAEVVSLGSVGPRQCDIDALIRKLQSKGATLGFVYEAGPCGYWLYRYLTRKGLSCHVVAPSLIPRKPGDRVKTDRRDAITLARLMRSGDLSSIYVPGIEDEALRDLSRGREAAMEDLKRSKRRLKSFLLRQDIRYEGRASWNAAHLRWLSEVVCPTPPQQIVFQEYVRAVTEQSERLQRLERELHEAVKGWRLYPVVEAIQALRGVELTGAVILMTELGDLTRFDTPRQLMSYLGLTPSEYSSGARRRQGGITKAGNTHARRALVEGAWAYRYPAKVSRHLQLRLEKLPPEIQAIGWKAQVCLCKRYRQLTARGRHVNQVVVAIAREMAAFAWAIARLVPRAA

SEQ ID NO: 197898 - protein, 438 aa, unidentified
MELSHSSSSPVDSSSFRYVVGIDIGSEACSFCALKPDKSQVIRPTEFANAAAGFAVLTNKLEGLSSSPEQILIGLEATSRYGENLYHYLESQGYQLCLLHPRQTHQFAQQRGLRAKTDKLDAGTIARLLLSGEARRGYVPSELIATYRELVRLHTQLQDEGARYKNEIHALLAVLFPEMSQVFTDPCRPTALGLLKRYPSAKAMAEAGVEAIAVTLHDLAPRHYGRKTAEQLTQLAQQSVGSTIATSARSTSLKILCDQLEHTQQNVAQLEEEIDKLVEHDEGIKGLKSVPEFGRKMMIVLRAELGDVARFQRTDQVVAYAGMDIEVKESGKWKGQAKLSKRGSGRLRRTLYMTAVRCIRLKDSAFGVYYHRLLARGMKARAALMAVMRKMLIVAYQLLKTEEMYDPAKVCAVPVAQPEVEPQALHTPSSAKLVAGGA

SEQ ID NO: 197899 - protein, 386 aa, unidentified
MTLFVGIDVSKYKHDLAILDEHGEILSKHFRFANTYQGFQKLKEHLETLELPTSELRIALEDTGHYADNLIAFLQNIGYPTFTYNPLIIKEFVKSLTLRKSKTDKKDALSIARKLLADPTPERYTVEPQLQELKELTRYQNRLIHERSKNKTLYVRTLDIVFPEFAKIVKNVHNQFVYDLLSKYPSPQKIKRAHFQSLLTIKRLTADKIKQIQEAAHLTIGNSSLALQLELTQLIDMIRIQTIQINKVQEQINHLMTEIDSPITSITGIGQRLGAIILAEIKNIHNFKTPSQLQAFAGLEPSIYQSGTMDITVHMVKRGSSYLRYALIQAAKLIANYSPHFRAYLRLKISQGKHYNVAVSHVAKKLIRIVYYLLKTNQSFDESKLR

SEQ ID NO: 197900 - protein, 342 aa, unidentified
MYYIGLDVHKKTISYCVKDASGRVQQEGKVGSTRRELDCWMAGLPQPWTVAMEATIFSGWIYDHLLPHAVEVKVAHPLMLRAIAAAKKKNDTIDAAKIADCLRCDFLPECHMMPREIRDRRRTLRYRHLLVKQMVQMKNRVSGLLMETGVEHTKSRLHKVGYFHEMLSKKAEIDASIRPLLKLSRETIERCQKTEYALVSSLQRDPLLADRIRRLRTVPGVGPITALTWALEMGDVARFRTIRQAISYCGLCGDERSSADKLMRMPLSKQRNKHIQRVLVEAAKLAPRLSPELAMVHEKEKQKGNRNRATLAVARKMVAYLLAVDRQQREFIPAGQRGSRAA

SEQ ID NO: 197901 - protein, 369 aa, unidentified
MATIKNQSKSIKNKMKTLNENSIVVGVDVHKYSHTAVAMNAWGEERGTLNFTNNNLEAYANWLEQMGLKENIVIGLEDVNSYGVHLVEKLRRDNFHIRYVPAILTERERKSSTKRHKSDEVDAKRVGKVILHKYEETLPAKESIADERELYTAKSLDLLLMERRDLTKQKTITKNQLHCLLHQHYTESYRAVCPRSFSKKAIKWFLDDLKDNPAILATSITRRLQKLLFIEEQIYAISKEVAVIGEMSKEARALTEIHGCGMVTACQIIAEVITARRFKNKHHFSMYAGIAPTPHSSGRKHKMHTNPFGNRQLNRAFHTIALGQIAIKGDPRGKAYYQRKLKEGKTKLWALRCLKHQIAKVVFQKLKYV

SEQ ID NO: 197902 - protein, 455 aa, unidentified
MKESVYLGIDVSKGYADFVLVDINQELIEPLFQLDDTPKGHDKLGIILDQYASTKPDVEICCGVESTGGYERNWYNYLLSLSGEIPVKVALLNPVVVKGISKASLNRTITDGISALNIACYLISYKGKVNYCQGDAEQKNPFKSGRSLYTYQRMLNKQKVQLNNQLEKLLYQYFSEVLVYCRNGIPMWLLRTLSKYPTAQSIKKAGVGKLRKIKEIGPNRAIRIVEKAKQNRQDSSSHIGFIIKNTCLEILHKKEKISESKAFLEATYKDNDLVKLLCSIIGIGYSSAIAILFEVEDINRFPTTKKIAAYFGVNPEFKQSGDGTWGSHLSKKGRKSMRAVLYMACFSAIKYDPLMKKKYADIRAEGKCHYFAMGVLMHKMIRIIYGVLKSGDPYDAAIDQRNRQKSLEKQSDLQELKKQQTRDNLKKKRRYQKQKLDEIPISNRKVKKIKELETS

SEQ ID NO: 197903 - protein, 402 aa, unidentified
MNCVGIDVSKGKSMIAVMRPFGEVVVSPFEVLHTDSELSELARLLKSLDGETRVVMEATGNYHAPVAWLLHDAGLYVSVVNAMLVHDYGNNSLRRAKTDKKDAVKLANYGLDHWLTLPRYVPDEDTRLMLKTCYRQYQQYSKVQTMLKNNLISLLDTTFPDANRLFASPPRADGSEKWVDFVDAFWHCECVCGLSEKTFITRYQKWCRKHGYNFSEDKALDIYASAFAHFGVMPKTDTAKLLVEQAISQLQATSAALAALKQEMQSLAASLPEYPVVMGMFGVGPTLGPQLIAEIGDVRRFHSKKALVAFAGIDAPPYQSGQIDVRSRSISKRGSASLRRTLFLVMGVLLQCAPMDEPVYQFMNKKRSEGKPYRVYMMASANKFLRIYYASVKAYLDSMEYD

SEQ ID NO: 197904 - protein, 310 aa, unidentified
MEHRRIAGIDVSKDRLDVHVLPSQEAFAVSRDVTGFVELCRRLGDTVDLVAVEATGGYETLVAATLSDHGLPVVIVNPAQVRAFARALGQRAKTDPIDAAVIARFAEATRPQIRPLPDGAARLLADLMARRRQIVEMIASERQRLHRTEPPRVRKSIERLLKALERELGTIDHDVDGAVRGSPLWREKEDLLASVPGIGRIIARTLLAELPELGRLDHKQIAALAGLAPHTRQSGLWKGKARIGGGRAVVRTALFIGAQVAKRWNPPLKAFYERLIGAGKTRMVATIAVARKLLVILNAILRDRTSWQNA

SEQ ID NO: 197905 - protein, 418 aa, unidentified
MEDSHSKKVKHINKKTLMVTLDIGKAVHYGYMRTPTGEDVKPFPFDNKRQGFNELWDKVCQFKQAQGLDNIVIGFESTGPYAEPLFHFLRTKPVRLVQVNPLHSKRLKELTGNSPCKTDQKDPRVIADIISLGHALTLVVPQGAAAHLRRLTQARERATQRRTALLNQLQHVIFIVFPEFLHEFKRVHSKSALYLLQHHPSPQDILALGYESLAGLLKRVSRGKIPAQRARQLFEAAQGSVGIREGRASIVVELQHLIKAIGHEDQLIDDLEQQMKDYVQQIPYSQSMLSIKGLGTVTVAGLIGEVGDFDAFATVAEVMKLAGLDLYEVSSGKHRGRHHISKRGRALMRKLLYFAALTMVRKQGIMHEQYHHMLDRGIPKVKALVALSRKLLRLIYALVRNRTVYVAHYHQRTIGIAA

SEQ ID NO: 197906 - protein, 268 aa, unidentified
MYIGLDVHKKLSYYSMVDGEGTEMKRGRFPTTCEGLDEFASKLPEGAKVAIEASTSGIFAYEYLDEGGIEVHLAHPVYVKPFAKKHVKTDKVDARVLAQLLRMDYLPESYVPGKEIRDQRVMIRHHASLVRLRTSIKNRVHALLAIEGIQTSKFSDLFGKRGMEFLKGVKLRQVRREALDNYLEVLKALEERIEEMETILKERAKITDEAKWLMSIPGIGYHNALLILSELGEIERFSNLRSIVSYSGLAPKMEQSGDYTRYASPVRA

SEQ ID NO: 197907 - protein, 389 aa, unidentified
MKIFVGIDIAKLNHFAAAISSDGEIILEPFKFTNDADGFQLLVSKLESFDKNSLIIGLESTAHYGDNLVRYLVTELYQVCVLNPIKTCQMRKNNVRKTKTDKVDTYVIAKTLMMQDNLRFVSFFDLDMMDLKALGRFRQKTIKQRTRLKIQLTTYVDQVFPEIQYFFKSGLHQNAVYALLKEAPSPKEIASMHMTHLANLLKVNSHGHFTKEQAKELRVLAQKSVGANDSSISIQITQTIQQIELLDSQLDKIEAEMTDIMKFNDSVIMTIPGIGYINGGMILGEIGDIHRFSNPNKLLAFAGLDPSVYQSGNFQAKTTRMSKRGSRVLRYALVNAAWNVVRNNATFKAYYDAKRAEGRSHYNALGHCAGKLVRVIWKMLTDEVEFNLE

SEQ ID NO: 197908 - protein, 346 aa, unidentified
MLHAGLDLSRRRLDFCLVDDEGVALERGAAAPDGDGLRGLAEGLAHYQEPIRAAIESMNGARFVHDELERYGWEVLVADALKVKGLAPLACKTDRIDAGVLAELSRRDLVPAVWLPDPAVRAERELARFRLHLVRHRTALKNRVHQTLVAFGTPCPVSDLFGRRGRALLERIVLPAPWRGTVEASLRLIDQLEREIAACEHELRQLGADHRYVPLLMTCPGIGWVLAFTIAAEIGDIARFPSPVKLAGYTGLCPRVYQSGESDRRGPLTKHGPRYLRWALIEAAMHASRHPAYGQRYQRTKRRLGRQRGARVAQVDLARRLSEAIWYMLTRGQPFAPAGAPPVMAA

SEQ ID NO: 197909 - protein, 355 aa, unidentified
MKRSYYIGIDISKKTLDASIFVEKMEEKRFPHLKVDNNKTGFKEILKWARKEKVNLKDCMFCMENTGHYGLDLYSFLEQKGIEYCSICPLVMKRSMGISRDKNDKIDSARIATFAFEKAYKLKPSKLASEDILKLKQLQSERAMYVSERAKYKAYISDKCEKKGSTFKRMSLLVEALSQQIEAVEAEIQSVIQRNEELKTSYDLITSVPGVGKVIAISTLTHTNNFQSFSNARQYACYAGVAPFARTSGTSIHGAATVSRIGDAQIKAELSQGAMSARHNDPEMSVYAARKREEGKHPGVILNAIKFKLIERMFAVIHRGTPYVLTHEYKTMKNTAEGCHSGGRRKVSQERVFAS

SEQ ID NO: 197910 - protein, 417 aa, unidentified
MGSMKKCCCGVDVHKSFIIAVIAKFENDEVHFTKHVRFSTFTKGLREFKEWLERNNCYEICMESTGKYYMPVYRIVSDEKFHVDVVHPKYVRAPKGKKNDKRDAKRIADMYMRDHIAEYSIIPPAEILAIRDIARYRRKTINTMTAEKNRMSNCLTVSCIKLDEVLSDMYGKTGKAIIGQIIEQGTCSFDPEPFIDRRVKAPVEAFRQALDGDVTPATLAKMKIIQERLNSLDKQKAELESTMESLSQDFNRQIELLVSAPGIDTASAMTIISEIGVDMNTFGSVKKFLSWIGLVPQNDESAGKKKSTRIGKGNQWLKPVIVQCANAAKNSKNHPEIRDKYLALKKRRGYGKAIIAIAKRIMTAVYYMLLRDEMYNPKICVDRAPKRGKIQLQSLINYYSSKGYTIVSNDGEVLESA

SEQ ID NO: 197911 - protein, 427 aa, unidentified
MSYRIAGIDVHKRVLAVTVADVTVEGEYQFERRMVGTSPNQLRVLAEWLVTEEVEEVVMESTAQYWRPVWETLERYWQPTRRTREGAGLRAGTLHLAQAQSNRAPGGRKKDFPDAERLVKRLVAQELTLSFVPEVEQRLWRTGTRRKYQLTCNRVQLQNRLECLLEEAHLKLSSLVSDLLGASARRMLQAIADGETSPEAVVALASQRLRATFGQLCDALGACTDLHPVYRRLLHMALDELRLLEEQIAQLDEVLAGLLRNHQDAVQRLAAVPGLGVDSAQQIIAEVGPTAATFPSAKRLASWVGACPGDDESAGVNHSRRSPNGNRQMRRLLNQAANAAVKTKGSIFELVYRRLVVRLGHAQTIGAIAHRLCRLAWKILHEGIVYEERGPAVTKQRAQRRAAKMIRELRSLGYRIDLGPSPEGSPA

SEQ ID NO: 197912 - protein, 416 aa, unidentified
MNAISVGIDVSKGWSMVAAIRTPRETVWKPRKVMHTAAALETLAYEIKGLGYDGGADVRVVMEATGRYYEPVANELHEVGNFVSVVNPKLIKDYGHNTLRKVKTDKADARKIARYGLEYWDDLREYTPVEAGRAKLKQFSRQYNLYNKMKVQLTNNFIALLDQVFPGANELFDSPPKTDGRQKWVDFVTTFWHCECIADMSETAFIERYRKWCKRLRYNFSETKAGDVYICSLGHITTLPKNANTKLLVTEAAKQLTSISRMVEIFRSEMLHLAQMMPEYEVVMGLYGVGPTIGPQLMGEIGDVRDFANRKALVAFAGVDPGDNSSGKHESKSNPSSKRGSALLRKALFLAVETYVKKQPADEPVYQFYKKKRAEGKTYYVCTTACANKFLRIYYARVKEYLDKTLPEEDRFPCQG

SEQ ID NO: 197913 - protein, 337 aa, unidentified
MFYIGIDVGKFNHCACVISSEGEVLIEPFFFTNNLDGFDSFIKAVKKFKSPRHIVGLEATGHYGDNLINFLITHDYEVALINPLTTDAKRKSKIRKTKNDKKDTFLICSVLFDRDYTRVTQRKLDMKQARELTRYHASIAEDINQKKNQLQKCIDIVIPEFNTWFKTKYSKAYMAVLKEFGSSYNLASANLAHLKKVLKPKSSGSRVNIDASSLRSSAKKSIGENNEAVTLEIKMLIENIELLASQLKTVDKKIEELAVKLDSPIFSIPGIGIYTGMSILSEIGDIHNFSSAVKVMGFAGVDPGTYQSGEYSAPRTALSKRGSRYLRKSLYQCILIK

SEQ ID NO: 197914 - protein, 343 aa, unidentified
MNKVMAGIDLHSNNLVIGIVDSEGRRLGHRKLDCELKQVLEFLTPYRERLEKVAVESTYNWYWLVDGLVAADYAVALANPAKIDQYSGLKHSDDTNDAYFLAELLRLGILPTGHIYDAQLRPVRDLLRRRLSLVHQRTALMLSFKSLFTRTTGQEMSLSRLKGLSESEVRSLYAHPANDLIAQLQHRHIEALNESIDTIEKAVLKVARQLPSYPRLTTLPGVGVILGLTITLETGPIRRFAHAGEYASYCRTVDATRFSNGKKKGDNNQKCGNKYLAWAWVEAANFARRYDEPSRKWFDRKAAKRSNVIATKALACKLAKAGWFMMAKECDYEPGRMFPELKR

SEQ ID NO: 197915 - protein, 362 aa, unidentified
MDKVIKDGTDMTIGVDLGDKWSRLCVLDEHGEVCEEGRIATTADAMRKRFSTEAPCRIVIEVGTHSPWVQRLLQELGHEVITAHTQSVRLIYGGTNKNDRLDAERLARLGRLDPKLLHPIRHREGSAQADRAVIRSRYVLVGCRTKLINHARGMVKSMGGRLPTCTADCFPKRVREALPKELKPALRPVLETITALTTKIRGFDRLIEKLGSERYPETGVLRQVSGVGPVTSLSFVLTIEDPARFRRSRALGSYLGLSPRRSQSGDDDPELRITKAGDDDLRRLLVGSAQYILGPFGPDTDLRRWGLALAARGRKNAKKRAVVAVARKLAVLLHRLWVSAEVYEPLRNPADKPDSTAQAVPA

SEQ ID NO: 197916 - protein, 395 aa, unidentified
MYSLLVGIDVSKDFFATAGIDAEGKESFSRSYVMDSNGFGDFLKMITSHCEDFSRVMVAMESTGCYHINLFSFLTSQGVRTMVVNPLLIANFAKLSLRKTKTDKKDAMTIARFLMDHHEEVSHLSLSQDHQDLRDLSRERESICHLMAATKVEIKRVLRTTFPELESIGNLYTRVMLRFLQRYPSARLVRVAKPRAVAKALKGPYVGDKLTFTAEDIVKAAQSSVAVVSPAKEIILQGKIATLVHLQERLDEMTKLLTDLCKATRIDDLKILRSIKGVGPKTAVPFLAEMGEVQHYASHKKLIAFTGIDPSLHESGNYIGTSKLSKRGNRHLRRAVYLMTAAVASKNPFFKAYFLRRKRQGLPPQKALFATAHKLLRVIFAMLTQRTYFNPKEVI

SEQ ID NO: 197917 - protein, 337 aa, unidentified
MKVTLIGIDLAKSIFQVCGVNQACKAVFNRAVKRDQLLGFLARYPGVVITMEACSGSNYLRRTLQQHGYPVRLIPPMHVKPFVKGNKNDRNDAFAICEAANRPQMVFVQPRSVEQTDLILAHRVRERLIGQRTTLINQLRGLLQEYGIVLAQGKEKLRQQLPQILEDAQNPLSMAARACFAQMLQEWADLDHSIGVHDRCITQQCRQTPACQRLTGIKGVAQITATALVAYAGNGAQFRSARHFAANLGLVPREHSSGGKQKLGGITKRGNRYVRRLLVQGAWSIIRHIERATDRLSVWARQLMERRGKHVTALALANKLARISWAMLYKQQEYKAV

SEQ ID NO: 197918 - protein, 432 aa, unidentified
MMTIMKTINTSEFAATIGLDWADRKHDLWICPEGQAKAEHLRLDQTPEALHHWVAKLRERFPNRRVAIAVETSRGPVISALMAYDFIVLFPVNPKGLKDYRGAFCVSGAKDDRTDAMRLEELVRLHRDKLHALEPDTELTRKLAGLVENRRHLVDERTRLVNQQHSTLKTYFPLALDLLEDQMNTLLAAEFLTRWPSLAALQKEKPKVLRAFFYQHNSRNAQRIEQRIQAVPAAQPLTTDAAIIEPACALVSARAGMLRPLLKAIAPLDEAIQEAMDQHPDAPIFRSFPGAGPALAPRILVAFGTNRDRFASADEVAQFYGIAPVVEQSGNSKTVHVRYRCPKFGRQSFHENAACAFKKEPWARAYYDQHKKKHDDKHHPACRALAFKLIRIYFACWRDKRAYQSDLYVQALRKNGSPLHKTLKTQRAPSCE

SEQ ID NO: 197919 - protein, 374 aa, unidentified
MEKLRYVGLDVHAETINVAVAEPERNGEVRALGSIPNRPESVRKLVKKLGSADQFQACYEAGPTGYVLYWQLTEMGVKCEVVAPTLVPVKSGDRVKTDRLDAQKLARCYRAGDLTAVWVPDAAHEALRDLVRARLAAKRDQLRARHRLSKFLLRHGQRPSSKMSAWTAAYLNWVKKGVHFDQPAQEATLADYLHEVEHAQDRIVRLEKAIDASIETMPEKMREVIDALQSLRGIAKISAVTIMAELGEVSRFETPRQLMGYSGAVSSEYSSGERTRRGGITKTGNAHLRRIAVEAAWAYRYRPCIGASLKARQKCASQEVKDIAWKAQHRLHGRYMKLMEKVVTAVARELLGFIWAIAVEVEQRHKSSPKKQAA

SEQ ID NO: 197920 - protein, 343 aa, unidentified
MDHFAGLDVSVKETSVCIVDGTGRIVKELRVASEPDALLRVLGNPAYRFKRIGLEAGPLSQWLFSALAEAGLPVICVETRHMRAVLKAQINKTDRNDARGMAQMMRAGLYRPVHVKTLRSQKLRMLLTHRKLLQSKAIAIDNDLRGTLRNFGLKVGVVGTVKFEARIKELVESFPDLAELVEPLLIVRRTLREQIGILHRRLLAIVRNDDVCRRLMTIPGVGPVVALTYRATVDVPARFRNSKAVGAVFGLTPSRYQSGEIDRPGTISRCGDEMMRVMLYEAAHIMLVRLAKWSWLKAWAMKIARHRGMKKAIVALARRLAVIMHRIWVDGTEFRWSREVTAA

SEQ ID NO: 197921 - protein, 361 aa, unidentified
MKTLQRQGKRFKGYTIGLDLHLAFIQFVVFDKKGNEVAGGQVAFKREALEKFLKQWQSRGAVQVSFEACGCFVWVFELAVELLGRERVHAAHAGKLRVIAQSMEKNDHNDAWWLGYFLYEGRLPHAYVAEGQLRELRIAGRELRSYTDRRSDLIRRVRSSLFQLGHKLPKGWHTSKLKREITWKVIESVGGLQGEALRDLYAEIERLTETIVKWRKAVEGLCEMIPEVQAMMHELPGVKAVVGGLIYGEMGPAGRFRSEKAYAKGTGLTPGRRISAGKGQAVSMTREGSRLARWALTRAVLACMRCNKGAGAQVKRWVLKQVSRQKAKRKVIVAAARKMAEGVWRLVSRGESFDLRRAFPA

SEQ ID NO: 197922 - protein, 336 aa, unidentified
MTNHTVTPIRSSGNANLPDHVVAFEVSKHQLVVHTLPANRQCTIANRPAAVRRVLMAEIKHNRRAQLGRMLVICEATGGYEAHVLEAAIALDLEVHQAHGTRVRHFARYKGLKAKNDPIDARLIALYGLQTEKLVRYRPPSPAVKALRALQERRHDLKLMLQAETNRLEHASNRHVLNSLKTSIKTIRKTLDRIEAEIDLLLEAEDSLARKAQLMRTVPGVGPVVAATLIAHMPELGTLPRGQAAALAGLAPYDNDSGEHKGRRHIDAGRGAVRRCLYMAALTAIRACPHLHDYAARIQARGKPAKVAITAVMRKLIVILNAVLASQNPCHYAKPA

SEQ ID NO: 197923 - protein, 421 aa, unidentified
MRFYTKQHRYYCGIDLHARRMYICVLDAEGQIRVHRNGPATAEHFLATIAPYREDLVVAVECIFTWYWLADLCAQEGIAFVLGHALYMKAIHGGKAKNDKIDAHKIAVLLRGGMLPMAYVYPREMRATRDLLRRRCHFTRKRAELLTHIQNTASQYLLPALGKIAYHGNRIGLAEQFGDPAVRKSVETNLALVDHYDRLLTELELHLAQTAKVHDVNAFYRLRSVPGIGKILALVLLYEIHDIHRFPRVQDFASYCRLVKCAKESDGKHYGYAGTKIGNAHLKWAFSEAAVLGLRKNPVAQRYVARLAQKHGKGKALTLLAHKLARAVYYMLRRGQAFDATKFFASTSSGAPAARAAMPPLAGPDDHDASRAASPRLDLEGGRDLAPPDHERHEPVHERGGAIPRRRGRRRGKEMRPSLST

SEQ ID NO: 197924 - protein, 311 aa, unidentified
MDATVVGIDVSKNQLDVHIRGQNESFVVPRDAEGLAALIERLRPLEPLAIGLEATGGFETFVAAGLASAGLPVVVVNPAQVRAFANALGKRAKTDPIDAAVIAHFVEATAPEMRPLRDEETRLLADLVARRRQIVAMIVAERQREMHAPARVKKSIVRLLKALRRELDSLDGDIDESVKGSPIWREKEDLLASVPGIGTTIARTLLAELPELGTLDRRKIVALVGLAPWTRQSGQWRGKSFIGGGRASVRAALFMGAMVAARYNPALKAFRDKLVAAGKPKLVAIIATARKLLVILNAIVRDKKPWADQTA

SEQ ID NO: 197925 - protein, 398 aa, unidentified
MNYFLGIDIAKTNHVASLIDKEGNVVIRAIKFTNSNEGFEKLLTTIQDKLGDLSNIEVAMEATGHYWLALYSALIDNNFNVSVYNPYQIKSYRGAYNNRKQKNDIIDSIIIADFLRVFGSKESKLPEDDLMSLKQLTRFRSNIVDNISSLKVQVIGIIDKIFPEYKGIFCDVFGTASKQLLLKYPTPEEILKTSSTKLTNLLSKYSNGRFNKEKVKQLKKIAKNSFGIKFTTNACSFEIKQLINQIIFLEEQIDEVQIQIEEIYNKLDSHLLSVPGVGKALAPIILAEIGDINNFNKPSKLIAFAGIDPSENQSGNKLSSNDKTSKRGSPYLRHAIYTASLVAISSEPALRTYYDKKKSEGKHHFVALAGISRKLLTIIYYILKENRDYKRYNNIKTN

SEQ ID NO: 197926 - protein, 348 aa, unidentified
MKRYIGVDLHKNTFTVCYLSRKGKELKSFKVSKEGIEAFKQTLTRDDEVAVESTGNTGYFVREIKDRVGGVKIINPTQFKIISQSVKKNDKRDAKTIAKYLSKGLIPEVRMKSKKEAQLSSLIGTRDKFVKLRTALKNKIHNILNANGIVTKREIFASEKNLDRVLKYELDEGSLFELRIIIRELRNLNKAIEEIDEELKGRGKKLKGHKNLTNITGIGDISATILLNTIGDINDFGGDHKLAAYIGIVPRVYISNKTTHYGRITKMGNKIARTALVQCALIAIRYNSYLRPFYLKLKAKKGSGKAIIATARKLLTIIYRTLKNDWVFEDFNNFKLTSVSKGYHLSPA

SEQ ID NO: 197927 - protein, 417 aa, unidentified
MTEDVHWLVGIDWASQKHQVCLLDLDGRVVGEREFDHEGTGLSQLCNWLIEQTKALPGQIAVAIETSHGPIVEMLLERGFQVYSINPKQLDRFRDRFTVAGAKDDSRDAHVLADALRTDRRAFRRLSVENPLLIELREWSRMLEDLKQERNRLSNRMRAQLWRYYPQALEIADDLAANWFLDLWQQVPTPAKAARVKQATIETVLKANRIRRFDAAEVLRVLRQKPLWVAPGTTEAACAHIRTMAARIRLVNQQIAEANRQLDELCDKLEAEADNAPGQKCEQRDVTILRSCPGLGRINIATLLAEAPEPLRRRDYHALRALCGAAPVTRRSGKQHIVVRRFACNKRLQNAVYHWARVASQHDPISQRRYAALRGRGHSHGRALRGVADRLLSVMCTLLQQQMQFDPHYASSQMATA

SEQ ID NO: 197928 - protein, 325 aa, unidentified
MTHDTIGIDISKLHFDAHRRMTGRHARFDNTAAGFKAFSHWIGADHPDLVVFEPTGPYHRDFEAAFAGRLPLAKVNPLQARRFAQSQGTRAKTDAVDAAMLARMGRALELVPDRPAEEIQTVLRELRVARAGLVRDRTALMNRLSAARLPLVRRLVKARLAQAERQIATLDAEIDGRLDACPRRRRAAQLLTSIPGIGRITARSILAECPEIGTLRHKQIAALAGLAPMTRQSGTWCGKARIEGGRRHLREALFMPALVAMKKNPDLSAKYDQMRAAGKPHKVALTAFVGKTAPHAVFWSSSLRKLIQLANTLVREDRTWHPKCA

SEQ ID NO: 197929 - protein, 346 aa, unidentified
MYQDNLFAIDLSKKTIQGALFDRSHQVRFNRGFSAKKMIDWLSRQPPLTVAMEACATAHHWARVVERLGHAALLVPTRTANRYREGHKTNATDATAVGIAARQPTTRFVAPKTIAQQELQSIERIREHLSDHLTATSNMMRGLLAEFGLGIGKGKKAFKQGVLDALEDAENELPPRLRIEIANQWAYYLELEQKLEQVTHTQQCLLHGHEACRRLQQLESVGPVNALSLYLALGDLGSSFKNGREASACIGATPKQYSTGDTVTMGGISQTCANKRVRSNLIQGARSVIQQLRKRDPRNAKEVWLKQLIERRGEGRAAVALANKTIRVAWAMLHYGDEFKLHPNMA

SEQ ID NO: 197930 - protein, 417 aa, unidentified
MNSPPTSIPITRYIGLDLHKHYIMVGGQNHLQQWVLRPRKVPTSRFRDWASQNLKPGDSVVLEATGNTWDIYDIVAPLVSQAIVAHPGKVRQIAEARVKTDTEDIKRLITLLIAGIVPEVWVPPMHVRELRSLISFRWRLGKQIAMSKNRLQSVVQRFNLEPPEGHLFADMNQSWWEAQSFSELTGFQVDLDQQIITVLEAQKAKIDQTLAELSDTAPWADDIVFLMQIPGFGILFSMIVLAAIGDVSRFDSPKKLVGYAGIGAGVHDSGMKHQDKSITKQGRRELRWALVEAAWGAVRSDPYWKAQYQRLSKAKHPSKAIVAIARRLLVSVWYILTNREPYRHADDETIAYKMMIWSQRMDEKALNGLTRQQFIKYGLLRLGVGQDLARIVRNGVPRRIAPSEEVLALRPDLRPPG

SEQ ID NO: 197931 - protein, 322 aa, unidentified
MSLPNPLCVGIDVSKATLDIAATSEFAQFTTGNDADGFGAIIAELRKHSVALILMEATGGLEAAVVCSLQAEGFEVAVVNPRQARDFARAMGYLAKTDRIDARVLAQMAEVINRHPERERFIRSLPDAERQVLTAMVVRRRQLITMLVSERNRLHPAHPQSRKSINIIIQALENELARIDEDMNRHIQSHFKELAERLISIKGVGTMTAAALLAEVPELGSLSRREISALIGVAPVNRDSGTMRGRRTIFGGRAGVRTALYMAALVATRFNPVIKAFYMRLLAAGKAKKVALVACMRKLLTILNAMLKKNEEWNESYHHVAP

SEQ ID NO: 197932 - protein, 1443 aa, unidentified
MKGKLFQMKTSLSSITNLSISPRGRKLPVSIYEFVATVLSEYALSNLKVDSNDSAFHSISSYFVGGEILAKDLIQKLLIIPEIASIFDCFPSMGNGKEYDYAVWSQFLSDTTWEYDGKSSVFVFKEHTYAMENKVLILEKEPDGLFAKRLHCEATEQYYGRIGPGAREDKTAIQTPPIFTPRPQEVTLQDKDVEKAVSDADFFTLDESLQGADPQQREAITSGIDKNLIILAGAGSGKTRTLVARLAYLRAVKKIPLNRILLLTFTVAAAAEMRSRGKSLVDVIYSNIAPTKKSTVNARTIDSFVIQLVNTYYPQMGFSQKPVIYYSDNVETKQQKIQMLSEIIRENKLEGIFRFYLAGAGTQPEKLGRLLSDLIDYARGLPINCAGFDFLLQQYQEHQRASGKIMGFTEASLFVRDAIMQEDSPVKKGIIGKYSCILIDEFQDVNVLQNSIFEPFYDVGSINFTFVGDDDQSIYYWRGSDNTIIKNLIGKPNCKTTYLLTNYRNNPNIVEAGNAILSTIQNRAKKGKPIRANRATGEKIRVTTYNSKFTNLVNEINILLASGKSADEICILSRDRRTANSIRDELTAADIAVSKEDSIIVLSDMYREMKAILSILNAYNITASAKELRLITQSVNVTERHIQKIVKGRCTEVECEDSLKKVKALSDEVRLNQITSLADAVDRFSIKAGELYEGRVNEHHSDEVFEQFEEYCQNTSAPWPVPRAQLKEIFSTFEDNAKKRAVSGKPLTPGVRISTIHSAKGLEYDIVIITGLSAGQYPNTEQIDRKYAERNEQLKTFQESRACYYRQKQELDQSVFPTLLEECDSPIFTEAERDRMQDFQQELFDMRDGLLTLSADGVEEYLDAYVYFMAPLIAQYSSDIAKLNTELLNKQSEAEEMKEQILVATSDTAEDESNYNSQLEELCKSIADIGESIERLKIKRNRFFEATANLNNFYVQCLTVKGLLADMARADEIEELQQELKVEREQRTNEERRLFYVAVTRARDYLYLCYEAGTQPSEFIRLIPEKLKAEHIMMTLEEERDYRRIAIGIDVSKGKSTVCGMKPGGEIVYTPFEVQHTREGMSELVSLLHNSGEEVRAVLESTGSYHCPVVAALLENGIFVSVVNSLRMKRFCSQSIRKVKTDRIDAMQIALYGLAYWQELQPTKLPEDTYRELQLLARQYYQMTSLLIKAKVDFNAICDQVLPGMQELMNDHAGRHKLSDFVLRYRHTTHILEMGETRFRKDYCKWAEKKGYRNCERMAVLIFATAQNGIPVLPNAPSTQIVITEAIRVLHTVEASRDAILTQMQALAKTLPEYSLVREMPCIGDTLAPRLIAEIGDVRRFHSKRALIAYAGIDAPPYQSGKFCANNRHISKRGNRYLRKTGYEVMQSYVMHKPANDPIFTFIEKKRGEGKSGKLAMVAGLNKFLRVYYGKVTELYRSLSAIE

SEQ ID NO: 197933 - protein, 386 aa, unidentified
MHRATTLPVSEQTCSPEHCATLFVSLELSRSTWVATTLAPGSTKMSKHTLVGGDGRKLLDLLARLKTRAEQRISAPVKVVAIHEVGLDGFWIHRLLEANGVESHVVDPASIAVPRRHRRAKTDAIDGETLLRTLMAWQRGEPRVCAMTVPPSPSEEDRRRMTRERAKLLQERIRHTNRIRGLLFGQGITNYNPLHKNRRKGLEELRTGDGRSVPAHLKSEILREIDRLELVLRQIGEVEAERDEMLQLAQASSPAALLMRLKGIGPEFATVLYLEGLFRQFGNRRQLAAYAGLAPSPWKSGSIDQEQGISKAGNPRLRTTMVELAWMWVRYQPASALSCWFRQRVGSKRGRIRRISIVALARKLLIALARYLSHGEIPAGAVMTAG

SEQ ID NO: 197934 - protein, 470 aa, unidentified
MTRGDRRRNARRERLRGLLPRDGAVIGIDLGDEKQAIAVVDHDVRVLARKTVRVKAFRLGEALDWAVAQARAKGFTAVAVACEPTGARWLQVQRLCAERELPLVCIQPLVSHIARQQQDYTAHKSDESDCVMIARLAIELHCYFPEELDEAWAQLRHLGRRRAQLITSATASVQRVRDFLSVAWPVAPEACAHPFESVTWLAAMQVVTSRCGGQPGKLAAIGLAEFTALVRQAVAGWGGQRPASLVCRAVFAALTSTEGVVVSHRRALLRRCADELGDLQRTRAQLRAVEADMAAVLGELGLSRLADIPGLTAVGAAAILAETGDPRRYDSSSSLVKHAGLSPSGNASGAFEGQAHISRRGRPGLRLTVWRAIWPLLIHNSVMAAKYAAMIAAADAAAAQAAQAQSRTGSRQASAAAAAQARRAKARVACAASLLRWIYSMVVHDTGWDPDVASGAASCQHAPRCQAEAA

SEQ ID NO: 197935 - protein, 372 aa, unidentified
MEEYSEVFVGLDVAKDRHAVALAESGRTGEVRYVGEISSDSASVRRLVRKLGRPGVRLRFCYEAGPTGYGLKREIEALGHECAVIAPSLIPRKPGDRVKTNRRDAEKLARLFRAGELTEIWTPDAAHEAMRDLIRAREAAVKDRTRKRQEIRSFLLRHGKIYPGLKTWGTRYLRWLHGLSFSFRSQQAVLQELILAETQCRERAARLEKAIEDGLLDWPLAPVVERLQALRGVRLICAATFMVEIGDVRRFANPRQLMAYLGLVPSERSTGDAVRRGGITKTGNARVRRVLAESAWTYRYPAKLGKTKYFESRHLPEVVRDIAWNAQARLTKRYRALIARGKRSTVAVTAIARELAAFMWAIARADEQQAGT

SEQ ID NO: 197936 - protein, 360 aa, unidentified
MPSIALGRSDVIVGVDTHKDEHVAVAIDGLGGTLGDPLFVPASPDGYADLLAWADSLGAIYAFGVEGCGSYGCGLARFLRRQDQKVFEVARPRRTDRRLSGKSDTLDAERAARSVLSGTGNATPKLADGKIEAIRLIKIARDTAVKAHTATLITLKAVLVTASDELRGRLEALTDHKLVVASAAFETQESVSDPEAAMRHTLSHLARRWLDLHEEIKVHSSHLKILTKAVAPQMLERFGIGFDTAAELLITAGDNSERIRSEAAFAKMCGVCPIPTGSGKSSGRHRLNRGGNRQANAALHRVVIARMQWHAPTIAYFARRTADGLSKKDVIRCLKRFVAREIYSLLPGTSNSSESGELAA

SEQ ID NO: 197937 - protein, 406 aa, unidentified
MELSTLHKRVIGLDVHQAQITACAILEDADGATRIEQRQFGAFKRDRRALADWAASLRPDQVVMESTGIYWKSPYAALEAAGIRAQVVNARHVKNVPGRKTDVGDAHWLAMLARAGLLRGSFIPPATLRELRLIARQRQKLVGQLASEKNRLHKVLTDGGIRLGVVVSDVHGQSARAMVKALINGQPPHEVLAFASGRLKASREELFDALEGELTDSHRFVLDELMRHIEEIEARINRFDARLLDGLDGERNALALLQTLPGVDRIGAAMLLVEIGTDMDAFGSADRLASWVGLCPGNNESAGKRKSGRVRKGNPYVRRLLCEFAHAASRTTSVFKSKFQSLVVRRGYKRSIIAIAHKMMRTLFFMLKRGEYYRDSAIDYEALSVKRNAPRWIKALTQFGFMPAAN

SEQ ID NO: 197938 - protein, 348 aa, unidentified
MRTNNRIVNKLCVGIDLHKDTMMICVLDPATGEERFERIACKCREKIVEFFKTLPRPHVVAIEAVGFYRWLWELLEPIVEKLVLADATQCRALAGRRVKTDRDDASNVAQLLACGRLPVAWAPPMNIAHLRDVTRHRHYLSRQHARVLHRVKSIMAMLNRPGPDRLKAPTLHKFLCAQRSKIPAHFVEQMEMAYDELVILERNKAKIDERLKAMIEADPKLSAQVKRLMSFPGVGMVIAATVIAEIGDFGRFVERDALTRYAGLDPRVFSSADTLRTGAISKTGSRILRWALVQASWTAVRTDPAVKSLWLKTKARNDGKRAIVAVARHMLRWMWVASRGNREYRPAA

SEQ ID NO: 197939 - protein, 370 aa, unidentified
MIRLARAMQYLINTELSSHEETRFEFNRSTGAIKLGIDVHQDFYVVVEQVEGGNPKPPQRFDKQAFLHWASKLKQRGAEVHAVYEACGFGFSLQRNLTALGIKCHVVCPQKLDERNKRVKTDGLDAKALCLKLDRFVQGNRDALALVRVPTEEEERSRAIHRQREQLVGARKRLEAQGRSLMVNHGVDPVQNWWKPRTFATLPVPHWMRELLLNSQPILLALQEKIAVLTLQLQNAAAPNQPRGLGKMTSVVIDREIGDWHRFNNRRQIASYTGLCPGEYSSGNTRLQSCVTKHGNPRLRAALVELAWRLVRFQPNYKPIVKWRQILAKGALATGAARKKAIVAVARQLVVDLWRIKTGRLRAQELGLIN

SEQ ID NO: 197940 - protein, 408 aa, unidentified
MNAVGIDVSKGKSMVAALRPMGEVALLPQEFLHTEVGLEQMAYAIIALGEDTRVIMEATGRYHEPVAAALHEYGIYVCVLNPLFIKQSGGGSIRKVKTDKADAMKIAKYGLDNWVDLREYTPMDTVRQQLKLCSRQYNLYMKTVVSLQNNLISLTDKTFPGVNELFSSPERADGHQKWVDFVMTFWHCDCICRASEKAFTERYQKWCKRKGYHFSAEKALDVYAGSCGHFTTLPKNDNTKLLITTAAQQLLAGKITLAALRAEMARLARQLPEYDTVHAMYGVGEITAAQLMAEIGDVRRFPRRSSIVGFAGVDPAVDQSGKHEAKSTPTTKRGSPHLRKTLYQIVCTYLKRSPVDEPVYQFLDKKRSEGKPYFVYMTAAQNKFLRIYYARVKECLETFDSQQNSTQN

SEQ ID NO: 197941 - protein, 343 aa, unidentified
MATVTRFLGLDYHQDSVQVCVMDAEGNTLANRSVPNSWRCIGAVVGGTVLPAEFVAVRASIECCSGAAHLAEELIEQLEWSVTLAHPGIVKRMKQNPEKSDWADAHILADLMRLGYLPRVWLAPQEIRQLRSLVRYRYQQVKQQTRLKLRIRALLREHRIPKPQEIGAWSLMWFAWLKCLELDDVTRFLMDQYIEELRQVQGKIADVKKLLFDRTRNDALVAKLLKQDGIGPITAITMRAEIARFERFDTGKQLARYCGLTPRNASSGKRQADAGLVKAGNPQLRMVIIQAAQRLINFNPHWGQFASRLMQRGKPRNVAVAAVANRWIRRLYHQMQPEQLVVV

SEQ ID NO: 197942 - protein, 351 aa, unidentified
MDVHARSTYAASMDVITGELTRQRFDTGAVEPVVGWLASLPGPVRCCYEAGPTGFGLYRAAVAAGIDCQVIAPSKTPRPPGDRHKSDRRDTDLLLRQLMAGALTAIVVPSPTFEAARDLARAREQVRVDLMRCRHRLSKLLLRHGRVWDRSTWTNVHREWLGSQTFAHQNTELAFIDNLAACDGLTARKQTLDERLSWVATDPEFWPLVRRLRAFRGIDTLSALILVLEVADFTRFPRAVQLGSWLGLVPSREQSGESDRNGSITKTGSKYARRILVEAAWHYARPPRIGKTLYERQEGLPDHVLQIARRAQTRLYRVHRRMQERKKPGNVITVACARELACFLWAAATAP

SEQ ID NO: 197943 - protein, 338 aa, unidentified
MAIVMGLDQHRAQVTADWLDTASGEVSRARVAPADRAGVRRFLERFGGCELEVALEATTGWRFVVEELRRVGATVHLAEPAETAARRGNKKRAKNDRADARHLRELMMVGRLPESWIPPDHILDLRARVRLRHSLVAQRGEWQQRIQAVLYHHGFPQRRNLMTEQGRQWLAAQALPVTAREQIAGAVAMVEALDLQLAPIDKQLRAYARRQPGCRALMGQFGVGEMTAVTILAELGDARRFSSSRDAVRYAGLDITVHQSDRRRAPGHLSRQGPPALRWALFEAALCASRTGSPDRDYYRQAAERLGGTGAGLTVARKLLKRSYHALRELGEEALAPA

SEQ ID NO: 197944 - protein, 482 aa, unidentified
MKPKQQEKTKEATCRATQGNWQQMNRKQRREMTRKIQSEDIRLEVVHCDAAGIDIGNESHYVAVPPARDSQPVRRFGCTTAELKEMAVWLKQCAIRTVAMQSTGVYWIAVYDILEEAGLEVYLVNARDTKNLPGRKSDVQESQWLMKLHTYGLLRNSFRPSQEIRTMRTYWRQRNDLVQSGGRHIQRMQKALTQMNIQLANVLSDVSGMTGQAIIKAILAGERDPHKLAAFRDPRVKASEEEIARSLEGNWEEDLLFVLQQEQDGYEFCQKQMAECDQRLAQYLERREDRSAGAHLPEEKRKGRLKKKSGNKPRFDLRTGLFRMSGADLTRIDGLDVMTAMTILSEAGWDMSRWETEDHFVSWLRLCPDNRISGDKIIGKGRLPTNNRVTTALKMAANSLRTSKTYLGAQFRRLRSRLDTPVAIKAMAAKLARLVYRMLRYGKKYVDRGAAFYEAQHRQLQIKHLKSKATKLGFQIIQVPTA

SEQ ID NO: 197945 - protein, 318 aa, unidentified
MNTAPKQSINIGVDTGKAQLDIYVRPTAHFFSVPNTDKGIKDALKIIKPYQPERIIIEATGRLEMSFVLACIEANLPIVRANPVHIKRFAGAIGRRAKNDRLDAELIAHYGDAIKPEITIIKAENIRLMSDLIIRRNQLLSMQTMEKNRLQILPKTLHSTIKPMLTAMKNQITNIEQKLVKLIEACPEYQTKNTLLQSVPGIGSIATASIISNVPELGYITNKQAASLIGVAPVTKESGRYKGKRVIQGGRAQVRTVLYMAMMSAMQCNPVFKATYTRLVAAGKPKKVAIIACVRKMVVILNSMLRDGVMWDKNLAKI

SEQ ID NO: 197946 - protein, 355 aa, unidentified
MNQEKYIGMDVHDASISAAVMNAQGKLLMECVLETKAATILEFIQGLRGTLALTFEEGTLAAWLHDLLKPHVSRLVVCDPRKNALMRDGNQNDRVDARNLAELLRTNQVKAVYHGKHGIRTLRELGRSYLALTKDSTRVMNRIKSVYRSWAIPCGGSSVYGRRHRAEWLAKLVEPGVRIRAEHLYEQLDSLEPVRQAARRELLRESRKHAAVNLLRQIPAIGPIRSALLVALLQTPHRFRTKRQLWAYSGFAVQTYDSGEYRMVRGKLQRNRERITVRGLNRNHNHDLKNLLKGAAISAIERPGPLQDFYAALVEKGMRPSMARLTLARKIAAITLTMWKKGVSFDPKQLQRQAA

SEQ ID NO: 197947 - protein, 429 aa, unidentified
MTRISAGVDVSKNRSTVCIIDQDGKFIMRPFLVWHSTEELDFLADTLKRLNGEVRVIMESTSVYQYPIALQLKERGLFISIVNAYEMKQFANIDFRGGKTDKKDSRTIASYGISYWYKLVEWQIPKDTYFNLDLLNRTYMNAKKHRQIILQELQHYIDCAMPGMDKELHSLNLNTKKDFMLDFVEKFWHRDEIVNMTEAEFTEVFTAWAKKKGYRPVEGKAAKIYAIAKSCIPYYPANPTVKTILQCIVDKLSGVNRTLVTIVTQMIEEAKKLPEYQIVREMPGVGDPLAARFFGYAGDIRRFKNSKALVAYAGIDSPPDESGDFSSTHRHITKKGSKVFRDTGYEIMMALRAQKRTWEKVRKNPDVYDYMLKKEAEEKPRKVAKIAALNKSLRIVYARIKELYDNMALAERAKTKTRSKTRAKTKVTA

SEQ ID NO: 197948 - protein, 310 aa, unidentified
MGTLTAVGIDVSKDRLDVAVRPGGDAFIVSRNAAGLDDLVRRLVAVKPDIVALEATGGFETVVTATLASAGLPVAVVNPAQVRAFAKALGQRAKTDPIDAAVIAHFAETTKPEPRPLPSEETQVLSDLVQRRRQIIEMIGAESQRKKRAKGALQKRIARLIGVLEKELAEIDTDIDGAVRGSPAWREKEDLLSSVPGVGPVISRTLIAEMPELGTLDRKEIAALAGLAPFTRQSGSWRGKSFIGGGRTSVRTALFMGALCGIRRNPLLKAFFDRLVAAGKPKMVALIAVARKLLTILNAILRDQKPWQTA

SEQ ID NO: 197949 - protein, 412 aa, unidentified
MEVLIERQCGLDVHKAQVTACVRVPDEDGGRRELIAQFATTVPGLLGMGDWLAAHRVSHVVMEATGDYWKPVWHLLEDDFELMLVNARHVKQVPGRKTDVSDAAWLCRLAEAGLLSPSFVPPKPIRDLRLLTRYRRTQIVERRREAQRLHKALEDTGIKLSCVASDILGKSGRAMLDALIGGTTDPEVLAAMALGKMRRKIPALREALQGRFEPLHALLVGSILAHLDFLDEHIAGLSGAIEVQIAPFAAARDLLMSIPGVGQRTAETVIAEIGTDMSVFPDAGHLASWAGQCPGNDISAAKRRSGRTRKGSRHLDIALKDAALAAIRTNDSYLQALYRRKRTSLGHGRAMGAVKHSMLCAIWRMLTTGELYEDLGGDYFARRDPERQTKRLVAQLERLGHHVTLAESAEAA

SEQ ID NO: 197950 - protein, 387 aa, unidentified
MSKQNDLSRCRIAHQQDATLIAVIEMGQASWLVAGIVPGLDRYPLKKLGPDRDALLQLLHRWRNEAAKAGYAIDRIAVAYEAGRDGFWLARWLRSQSIEAYVIHPSSVPVSREHRRAKTDRLDTELLKRAFLGWLRGEPKHCSMAAIPTVEDEDARRPGRERQILVEERTRIINRLKANLARLGIRGFRPNLARAPGQLEALRTPEGVAIPMNALAEMRRDLDRLRFVKQQIKEIEKTRAERLAKAPDERRHVAARALTRVVGVGVETADMLVQEVFSREIRDRRALARYAGLTGAPDESGQRRRERGLAKAGNARVRRGMIELAWGHLTHQKGSPLSVWYRTRTADARRGVRKTMIVALARKLLIVLWRLATTGEAPEGLQLRPAA

SEQ ID NO: 197951 - protein, 347 aa, unidentified
MEQTVYIGIDYHQHFLQICVLDRAGAVLCNRRCDNSLAELLPTVSDVVNARNVDKVGNGSVTRIHAAIEAGCGSADLAEALTVAGWSVSLAHAGYVSRIRQSPDKTDFSDARLLADLTRVGYLPRVWLAPTVVRELRALVRERQSLADERRRIKQQIRGQLREHRQRTNLRAWTKAWFIWLNNEAELGEQGRWIVNRRIRHLDMLCEEIETVEARLREVTIGDAVIERLLRQSGIGEVTAWTLRAEIGRFDRFRTGKQLSRFCGLSPRNASSGERTADAGMIKAGQPQLRAILIEAAHRLAMHDPRWKAFHEQLKARGKPGSVIAAAIANRWVRGLLHEMKELPAMT

SEQ ID NO: 197952 - protein, 343 aa, unidentified
MLRTNVIGIDLAKNVLQVCHISHQGELLSNKAVSRQKLKELLAKSKPSLVALEGCASCHYWGRYAESFGHEVRIINPKKVKAYVDGHKTDANDALAIANAALQIGIKYSKPKSMEQQTLMSLEANRQFLSKTIVSLGLHIRGIINEYGIVKAKGTKGLAALVTSTLYESDVLPASLVTTLSMLWQQYLNLKDKLSKLQKSMNSTTRQIEPCKRLMALEGVGETTASMLYATLGNGTQFTNGRQASAFVGLTPKQYSSGGKVTMLGIDKFGGVKDLRSMLYLGAMAYIYRLPESPKNQKQAWLIKLVDRVGFKRACIALANKTVRTAWAMLHYETEYQPKPLSI

SEQ ID NO: 197953 - protein, 331 aa, unidentified
MFPVGIDVSKNTLDLCMLYDGIKGRIKTRNIQNNRHSVENILRWLRLQHCGPEDVHVVMEATGVYHELLATELHDAGFRVSLANPHRSREFARGMGIMTKTDKVDAYMLACYAFLKKPHRWEPPAPEIRYLGALLRRRDVLLGDALREENRLEKHLSTDTPADIISSCRRMAQLLREEVSNIERQIKAHIKASPALRRDYTLLTSIKSVGPQLGMHMLVVLRSHNFVSAEQAAAFLGVVPIEKRSGTSVRSRPRMSKIGPPQLRAKLYMSALCGKIYNKRMRNIYDEICLRGKPKMVAIGALMRKLVHWCYGVLKTGTVFNDEGLKQVLST

SEQ ID NO: 197954 - protein, 348 aa, unidentified
MVVIGVDAHKRTHTVVAVDEAGRKLAERTAPATADGHLELLGWSRTWPERTWPLEDCRNLTRGLEADLLRAGEAVRRVPTKLMAGARRSAREPGKSDPIDALSVARAALREPNLPTAKLDGVERELRLLVDYRDVLIADRTRYQSRLRWFLVELGIPEPPARKLAVPIVLASVDLLLVGRTEPCARIARGLITRISELTGAIDALARQIGELTEAIAPSLLALFGCGPLTAAKLVAETAGVSRFRSRAAFAAHTGTCPIPVWSGNLVRHRLNRGGNRQLNAALHRIAVTQLRCPGLGQTYVAKRQAAGDTKTEAIRALRRRLSDEVFRRLQADEAARVDVEGVTRAAA

SEQ ID NO: 197955 - protein, 387 aa, unidentified
MYYIGIDISKFKHDCAVIDDSGEIVTPSWSFTNDAEGFSQLKLLLNSLDTETGIGLESTGHYGMNLKLFLESNNFSFMEFNPLLINRFVKSKSLRKTKSDSIDCMMIAHYLMTVEYKPYPSSFYHTEKLKSLTRFRDSLIRLRSRQLVELTNILDKVFPEFKPFFGSRFSVTALYILSNYSSPEKIANMNSKSYEALRKLSRGRFSTVDFAKLKQLAKNTIGTTEDYLLLQMQIVLDIYRQLDSKVDETEVSIKECVSDMNPPMLSVPGIGIESAAVILAEFGDFSKFKNASQMLSFARLEPGYFQSGTSETTGKMVKHGSSYLRYALMNCAQTVVNYEPTFAMFYSKKRAEGKPHRVALSHVVKKLLRVIYTLQTKNIAYDADFVR

SEQ ID NO: 197956 - protein, 466 aa, unidentified
MENNYILYVGMDVSKGKADAAILKVSDRRSVKPKFLRKKLSFKFVKSEVASFLETVRSYSDVNCTSICFALEVTGIYSTNVYDYIKANLYENESIKFLNTDFVNQWRIAHNIAKSDPLDAQTISTIIGTDSDVQYVNDNVFENKNGYQDLKALVHRHYQIKKIYSQEINRLIAQCDCLFPELQYVFEPKSAAFIAVLSSYPTTHDIINASRVEVFDVVYEATKHRCSMDKVDKLFELCQDTLVPDDISYYGKSIILDLVENIKNIKGQLKSIERYIKDIASLNPAYKLLLTITGCGPITAATVIAETGNIRRFKNADCFVSYSGTSPRNKRSGTSVETMGKISKKGSRYLRHAIYMIAEFARRHNPVLKHQFERIKNGNKKRHKLANIAIANKIARYIYSIMKNKSSFVILHDHIMRLPEETRDTFFNSISLDFPKNTRKQIYQYSDINGELHRFVYIKTDEMIPA

SEQ ID NO: 197957 - protein, 341 aa, unidentified
MSELALVGIDLGKHSFHLHGQDKPGRELFRKKLSRQQMMRFFSNLPACTVVMEACAGAHFVARQLMGMGHQAKLISPQFVRPFVKGNKNDFVDAEAICEAASRPSMRFVSPKTEAQQTLSVLHRLRESLVRDRTKSVNQLHGFLLEFGISLPKGLAIMKRLSSVLAEHELPVRLAVLLQRLHEHFVYLDEQIKALDKELAGQLAEDDLGRRLLGVPCVGPITASLLAVEMGDGKQYGCSRDFAASVGLVPRQYSTGGKANLLGISKRGDKNLRRLLVQCARVYMQRLEQQTGPLADWVRSLLMRRHSNVVACALANKLARIAWAMSVRHTEFATGPGTMNA

SEQ ID NO: 197958 - protein, 378 aa, unidentified
MSTTQAVPQAKNTAMQSELYMSFELGDKSWKLTASDGQRGPSRYSVHAGDTEAVLDCVRRAKERCRLSPQAAVHSCYEAGRDGWWLHRWLTQQGIDNVVVDAASIEVNRRARRPKTDRLDGDKLLTMLRRHHTGEHVWSVLREPTPEQEDARRAHRELARLTQERVAHMNRIRSLLVLHNLRPQVVIGGRDWANWWANHRGLVPPTLCNEIERESIRLALVKQQTRVLESARRDELAEGKHPLVAQLARLRAIGPKGAWVLVKEVFGWRRFANRREVAGCLGLTPTPYNSGDSQIEQGISKAGNRRARTMLVELAWRWLRLQPNSVLTQWFNRRFAGNGKRMRRVGIVALARRLAIALWRYLEHGEIPAGALLRPATP

SEQ ID NO: 197959 - protein, 333 aa, unidentified
MIASSPLLALPRLGIDISKLTFDVHLCTPGGRTHSAQFANNPEGFALLDAWLSKHRATTTRAGLEATGPYGVLLLWHLHTQGHTVHQLNPRRVKDYARSQGRRVKTDAVDAAVIAAYLRACEDLKPWAPASQALQDLQDLVRRRDQVIISLNAERNRKEKGTSKVVIASLDRLIKNLKAEVTKLDEAIEAHVLKHTALQKSVRLLRSIDGVGRLVAVTILAEVPQISAFERARDVAAFAGLTPSLSQSGTSVKRRGAMTKEGSALLRKMLYMAALQAVKRTNNTFHSCYNAFVERGKSKMCALGAIMHKIIRVAFGVLKHDTPFVKNFAKVDA

SEQ ID NO: 197960 - protein, 334 aa, unidentified
MSKKSNDVLPVDYFLGCDVAKRKLDVALINKQSVVLWNDTITNEEVAIAEFWLTLTGALAGESVAGVVESTGTYHQAFAATSHSLGIPCLVYNPLITKSGIKSTVRGKKTDRTDAIIIARMGLRGEGRLYSPEPFMATRHYARGCQKLSILSSSFSQYKSHITDLLDGELTDDAMEVLEGIKQAIKEARAQLNKDMAASAKGPLFTRLQTIPGVGPFVANSIIGEIQTMERFKSAHSLTAYAGLDPKIFKSGESLNRTGRLTKRGSVYLRRSVFIAASVARQFDPKFKALYDKKRAEGKPYTVATCVVARKLLSVVRAVWLSEKDYDISLWPDD

SEQ ID NO: 197961 - protein, 427 aa, unidentified
MREIGLDVHRDFCEVAIAEAGEVRSAGRVETTPEVLELFAQSLGADDRVALEVSGNAWEIARIIEPHVAQVLVVSPADTGIRQARAKTDRLDARALAKLLAAGSLEGLWVPDEPTRMMRRRLARRAQLVKGRTRAKNEIHAALMRRLIAKPAVSDLFGLAGRRWLGELELPIEERETLESCMRQIEFHESELEGLERVIAQEALTMPEAKRLMSVPGVNVITAATFLAAIGEIGRFPSSRRLVGYLGLDPRVRQSGAAPAAHGPISKQGSAPARCALVEAAWSVVNAPGPLRAFYQRIRARRGAQVAIVATARKLASLFWCLLTRGEDYAYAQPSLTRKKLRRLEITAGAPKGKGSCEPGVWSTNDAMRKAERELASQGERAYARSVRDWQASLPTNKGAGATRERASRGSSSDQAARQGSAQEPAL

SEQ ID NO: 197962 - protein, 351 aa, unidentified
MVVTIGSDPHKSSHTFVATDGNGRQLAEKTVKAVPEGHLEALRWASQWPERVWALENSRHLVRRLERDLLVAGEAAVRVPSRLMAESRKKGRQRGKSDPIDALAVARAALREPGLPVAQLEGVSREVRLLVDHREDLVGDRSQMQNRLRWHLHELEPGYRVPAGALSRVATLNRLGVLLAGHSGTVAELARELLGRIRELTVRIDQLESQLGQLVRPLASSLLALQGCGVLTAAKIIGEVGNISRFRSKAAFARYNGSAPIPVWSGNDDHHRLNPGGNRQLNAALHRIAITQARSSGLGRAYLDHRLQEQDTKKEAMRALKRRLSDEVYGRLLTDERTRLSDRETPDAQAA

SEQ ID NO: 197963 - protein, 422 aa, unidentified
MKLKYSICCGLDVHKNVIVATIVTTNKDGISEYKQKSFSTINSDIQKFHNWLIENNCYHVCMESTGKYWIPIFNYLENDIDVCLTHPKYVKAIKGKKTDKKDSKWIADLYKFDLVRCSFIPPKDFRQLRELSRYRFKLVCMKSSEKNRIQNCMTVSNVGIASVLSDPFGKTATEIISYLLEHTADSMDEKAVRKLIKKGAKSKADEIIEAIKGYTIETDQAKKLELARGHLEYLDDMITQTEVELYVRIKPYYEFVEFVSTMPGMTELSSTIVLAETGVDMDIFDDAKHLCSWCGLSPANNESAGKKKSVRIAKAGDYLKPMMVQCALAAIKSKKKPYFAIKYGRIKKRRGHKKAIIAIARMMMVCIYHMVSEKKPFTPTDYEELMNPQNHVERVVLNENNVFAYLESLGYDSSKLVKRNDN

SEQ ID NO: 197964 - protein, 394 aa, unidentified
MKLVGIDIGKKHFFCIMDKDSGEVLLQPSSFSNTKDGFDSLIQKLSSYSKDSILIGMEDTGHYHFALLKYLLEKNFTVALINPKTTDYTRKMQNGITKNDKLDTLTICDVLDTPVRKKQYRITKVNSFDLYEQKQLTRHHHNLKEELNVYTNRLQKCIDIVFPEFNSLFSSKYGIIYMNVLKTFGSAENIASTDIRTIRKCFEIKGRGNHISLTAQQLKDSAKSSIGISSAAEVIKIKHLISQIELINEQLAETDKKIEEFSIQNNSPILSIPGISHFSGTSILAELGEISNYSKPSKIIKAAGVAPYHYESSQYDAQHTAITKKGSPYLRKTLYQIILPVINNNNPVFKQYYDLKISQGKGHRCACGHCVRKLLRIIYHLSSTNQQFDDALLR

SEQ ID NO: 197965 - protein, 347 aa, unidentified
MEQFVGLDVSQKLTHVCVVDQKGSVVWRGTCLSTPEDIAATIRARAPHAERIGLETGPLSTWHWHALKAMGLPVICIDARHAKAALSMQINKTDRNDAEGLAQIMRTGWYREVGVKSLDNHQIRAVLGARAQLVGIQTDLKNQIRGLLKVFGSVLQRGHSQSFEQQVIAAAQGNDLLEASVRSLLAALKTVSEQVAKLDRLVIDQAKETAMCRHLMSIPGVGVLTALAFMTAIEDPGRFRKSRSVGAFLGLTPKRHQSGEIDWDGHISKCGDALVRAYLYEAANALLTNCRKWSALKAWGMQLAKRRGLGKAKVAVARRLAVIMHQMWTTGQAFRWSSEAKGKPTAA

SEQ ID NO: 197966 - protein, 343 aa, unidentified
MQTITTIGLDIAKSVFQVHGIDAEGNVIIRRQLKRRYVLPFFQKLPPCLVGIEACASSHYWSRELQTLGHTVRLMPPAYVKPYVKRQKNDTADAEAICEAVTRANMRFVATKTPEQQSCLMLHRTRHLFIRQQTAVINVIRAHLAEFGIVAPVGRNGVEQLLDVVADAGDKRLPELARACVAALGVQLQTLKAQILNFDRRIMAWHRSNATSKRLDEIPGVGPALATALVASVADPKAFRSGRDFSAWIGLVPKQHSSGGKDKLGSISKQGDRYLRSLFTAGALAVIRYAKIHGTKRRPWLTALLARRPTKVAAIALANKMARMAWALMAKGERYKEPVAVAA

SEQ ID NO: 197967 - protein, 358 aa, unidentified
MGLYAGCDLHAKSNFWGVVDGEGKRVFKKKLGNDPDRILEVLRPFQGELVGVAVESTFNWYWLVDFLMDKGYRVHLANPTKMQKYSGMKYVDDEQDAFWLAEMLRLGVLPEGYIYPKEERPIRDLLRKRAHLVRMRTSALLSLKNILSRNLGGRVRGREEKSGRSEGLRSELLGNEDLVLAGKVSEEVMDVLGEKIREVEGVILGRVAGRESYGGLLSLPGVGKILGLTILLETGPVGRFGDVGNYVSYCRKVPSRWWSDGKAKGQGNRKNGNRYLAWAFSEAAELARRFHAEPRAYYQRKMGQTNAAVAHSALAHKLARVAYYILRDGVFYDPEKLFGTNRAGAESLKGGLVHNHEA

SEQ ID NO: 197968 - protein, 418 aa, unidentified
MKAEYKTSGQEKRYIGLDVHKHYITVGGMNAKQEIVLKPRDVAMDRFKTWAEQNLRASDEVVLEATTNTWDVYDTVASLVKRIVVAHPAEVKQIANARVKTDKQDVNRLIRLLIADLVPEVWVPPVDVRQLRALISYRWRLVKMATAIQNRMHSLLHRHNIPAPDGKVDTGENREWWEKLTLSELEDLRLKQEIRMLRMVREHIVEVEKELGRLSTSQRWGNQAVYLMQIPGVGIIVTMTILSAIGDIRRFESPRKLVGYAGLGAGVHDSGQKHTDKGITKSGRKELRWALVEAAWQAIRANPRLRTQYDEFCQRKLPNQAIVAIARKLLVTLWYLLSKKESYDRASDEDLAYKMLTWAWHIDQTALNGLTNQQFAKYGLLQLGRGEQLTRIVKGDVPRRIAPKEEVLALKPDLRSPL

SEQ ID NO: 197969 - protein, 370 aa, unidentified
MLDTTTFVGLDVHARSIKAVSLDVMTGEVRCATFGYDAGAVAEWVRSVDPKARCVYESGVTGFDLQKRLSGLGVDCVVGAVSKMIKPSADRRRKNDRNDAEFLARMLSVGNVVEVWVPDDECEAARDLTRALEDARDDLSRSKQRLSKFLLRHGLAFDERTPTGRRKGNWTRAHWSWIESIRFAEGADNDVLAYYVDAVRRAAEEKARLEGLVEAEARKPRWRKRVDSLRCLKGVDTATAADLVFEAGEFSRFRNARSFAAWVGLTPSEHSSGESRFRGGITKAGNKHLRRVLVESAWHYLGCSPHSKDLAKGQVPDPAARRHAAKGVRGPVERRRAMLERGVHKNKANVATARELACWRWAIGCMVENG

SEQ ID NO: 197970 - protein, 367 aa, unidentified
MKKVSTVSAKQGKNFSQPTRTIGLDLGDRNSWYCVVDGGGQIQLEQRVGTSAKALQEVFGAMPRSRVVLESGTHSPWISRLLSELGHEVIVAHARKVRLIGESRKKDDRLDAQTLARLARIDPGLLCPVKHRSAQAQADLTLIRARAGLVRSRTALVNTARSLAKSYGQRLHGCNVRNMNPEKAEGLSPELQRALEPLLLAIEELSGRISEYNDRIEALAQQSYPQVALLKQIKGVGTLIALTFLLTLEDPHRFRKSRDVGCYLGLQPGRRNSGQSEPQMHISKEGDPYLRTLLVQGAQHILGPFGVDCDLRRWGLKLAERGGKRGKKRAIVATARKLAVLLHHLWVSGEVYEPLHNSSPTTVAAAA

SEQ ID NO: 197971 - protein, 396 aa, unidentified
MNAVGIDVSKGKSMVTILRPFGEIVSSPFEIKHTSSDIHSIEGESRVVMEHTGRYYEALAHQLSAADLFVSAVNPKLVKDFNNDSLRKIKSDKADSVKIARYALDKWQSLEPYSITDELRAQLKVMNRQFHFYVKQKTAMKNNLIGLIDQTYPNANTYFNSPTRSDGSQKWVDFVSTYWHVDCIRKMSLNAFVEHYQNWCKRKKYAFNKSKAEEIYTKTKELVPVFPKNEITKHIIRQAIDQLNSTSVTVETIRTLMNETASKLPEYSIVMQFKGIGPSLGPQLMAEIGDVTRFTHKGALTAFAGVDPGVNESGSYAQKSVPTSKRGSSHLRKTLFQVMDVLIKTMPQDDPVYQFMDRKRTQGKPYYVYMTAGANKFLRIYYGRVKEYLSVLPDPS

SEQ ID NO: 197972 - protein, 345 aa, unidentified
MSYYAGIDVSLEQSSVCVLDGEGKIIREAKVASEPEALIAWFGSLGLAMTRIGLEAGPLSQWLFAAMKQAGLPVELLETRHVRNAFKTMPVKTDRKDARGIAELMRMGWFRPVHCKSISAQETRAILTTRTLIEAKLRDVEMSLRGVLRGFGLKVGKTTPTNFAERIKQLVSEHSNLQVIADALLAVREVLLREFRSFEKRVRTMARHDERARLLMTTTGVGAVISLTYAAAIDDPARFKNSKQVGAHYGITPKRYQSGEIDYTGRISKIGDKSVRTALYQAAHVILTRPVKASALKSWAMQLAKRIGMAKAKVALARKLAVILHRMLVEGKPFDHKLPNQVAAA

SEQ ID NO: 197973 - protein, 346 aa, unidentified
MSIAEDAGLVVGVDTHRDTHTAAICDGRGRVIAQLQVPATPAGYADLLAWASTAADGRQLAWAIEGTRHYGLGLARHLTGAGQQVAEIDATRHIGKRRAGKSDPIDAVRAARELLARPRTGQLRADGDREALRLLMTDRDNAVQSAKTARTVLASLIVTAPARLREELRHLPARRRAAACAALTCPAGADRLTRVAYQTLIRLGQRIAGLADAAAEIEAQITAIVEDMAPGLVAAEPGVGVLSAAQILLSWSHAGRIRSEQAFAMLSGTAPVPVSSGRTDRHRLNRLGDRQLNRALHVIAVNRMRHHQPTLAYIERRRAEGKTDKEIRRCIKRYLARHLYRVLNRA

SEQ ID NO: 197974 - protein, 340 aa, unidentified
MVHVGVDLDKRSSQIAVLTEEGEIAQQRLPNDPGRLEKFFAELPPHTPVAIEASGTWWWLVDLLEHLGHDPILSHPKQTKAIAAARLKNDRVDAERLALLLRGDLLPTVWIPPTALRAARELVRHRVQLVWLRGIVRNRLHAMLARRNLQPVSTKSWLTQRGQRELQRLPLADTPNRIREDCGALLPLLDAQIRRLDGELGARWGGDPRVQRLTTIPGIGPFIAIGLVLELGDIARFPSAKQVASYVGLTPRIRASAGRIRAGHISKEGHRLLRWGLVLAATQAVRRPGPLRTWFHAVKKRRGKKVARVALARRLAEIVFHVWKQECDYFTVVRHGVVRG

SEQ ID NO: 197975 - protein, 376 aa, unidentified
MTKLRFLGLDVHAETIAVAIAEPGGEVRSIGTIPNRLESIRKMIGKLGPVKELRACYEAGPTGYVLYWQLTQLGVECQVIAPTLVPVKAGDRVKTDRRDAEKLARCHRAGDLTAVWVPDEAHEALRDLVRAREAGKKDQLRARHRLSKFLLRHGCRHPKGMTAWTKKHLDWVKGHVHFEQPALEAALQDYFHEVEHAAARIERLEKALDEAISKAPEQIRAVIEALQALRGVAQLTAATIVSEIGSFSRFEPRKLMGYSGLVASEHSSGNRLKRGAITRTGNAHLRRVIVEAAWSYQRRPWIGGYLLRRQRNLNLSEEVKEIAWKAQYRLHKRYMKLTAGGKNKNQTVTAVGRELLGFIWDIAVRTERAWEQAKAA

SEQ ID NO: 197976 - protein, 375 aa, unidentified
MKEKVRFLGLDVHAETITVAVAEPGDEVRSLGTIANRADSIRKLVKQLGPVEQLKACYEAGPTGYVLYWQLAELGVKCDVIAPTLIPVKAGDRVKTDRRDAEKLARCHRAGDLTAVWVPDAGSEALRDLVRAREAAKQDQLRARHRLSKFLLRSGQRPAAGLKAWTQLYMAWVRQLRFEQVAQESTRLDYLHEVEHMAERVVRLEQAIAEAVKLASPEIQEVVKDLQALRGIAQISAVTIAAELGNIRRFESARQLMGYSGAVPREDSSGKRTQRGSITKAGNAHLRRIAVEAAWSYRLRPGVGPGLRKRQEGVPEEIKEIAWKAQNRLHKRYSRLAAAGKDQRKVITAVGRELLGFIWSIGIKAETAAQQRMAA

SEQ ID NO: 197977 - protein, 378 aa, unidentified
MPTMPKRAALSNPGMFDLGVSHLDAAGVPPLVFGGVDTHADTHTVAAVSHLGVMLGNASFPATPGGYRQLYCWLAAHGSLIRVGVEGTGSYGAGLAAALTERGVELVEVNRPNRVIRRARGKSDPIDAEAAARAALNGVATAVPKARTSVVEAIRVILVARRGAVQARTAAINTLHHMIITAPRQLRDQLQPLTRRHQIAVCSGLRSTDITSPTRATKLALRRLACRINHLTAEISDATKDITALVRGHAPQLLAEVGVGALSAAQLLITAGDNPDRMTSPAGFAALCGTTPIPVSSGKTNRHRLNRGGDRQANCALHTIINSRLRYHPETQAYAAKRTAARKTERDIRRSLKRYLARRLFTLILNPNQAAENLPAAA

SEQ ID NO: 197978 - protein, 329 aa, unidentified
MKEFLVVGVDVSKASLDICFKPSNLEMKISNDQSGFKKWYQGLKKAMNAVLKTMVIMEHTGSYSNRFEKFLRNKGIAYCKVSALQIKRSLGMIRGKNDRVDAVRIAEYGWLRREQLKADEPCSGPVMKLKSLLGLRSKMVRDRSGYSCRLKEIKNAGDHEKSDPIIGVHNKVIVTLTSEIKAVEKQIRELINSNKELAKTSELIRSVKGVGEIVAAHMICYTNNFKRFSKARKFNCYAGLAPFNYESGTSIRGKARVSHLANKEAKTLLTLAASCAIRCDKELKRYYQKRVAEGMKKMSCLNIIRSKIVSRIFAVAKRQTPFVDLSLAA

SEQ ID NO: 197979 - protein, 353 aa, unidentified
MRTDPVPTKSATTKSSRSKSKTQREPSRHRRRSVIVRRTESGETLDTVRIDNDPVALAAELAKAGEHPEVIIEATYGWYWAADVIQECGGTVHLAHPLGNNCGNRRVKNDERDATDLVDLLRMGRLAEGWVAPPPLRELRELIRYRGKLVHLRSNLKAQVHAVLAKEGVAVPMTDLFGVGGQRLLDEVELAKAYRIRVESLRDLIEICDREIAMLEKETAPFFAGDLGYHAVQAIPGVGPVLAAIFVAEIGDISRFTSARHLASWAGLTPTHHESDEMVRRGHITKQGSRLVRWAAVEAVSRQRGDTPIRAHHQRVGERRGKQIGRVAAARKLLILVYYGLRDGEIRCLAKAG

SEQ ID NO: 197980 - protein, 391 aa, unidentified
MIYVGIDVAKDKHDCFITNFDGEVLFKAFTIANNLDGFNDLYQKIESVMDDVTKVKVGLEATGHYSYNLLGYLIDKGLPTYVINPLHTNLYRKSLSLRQTKTDKVDARTIASMLMSDVNLKSYSDISYHNEELKSLTRYRFDKVKERAKLKTSVSRLVCILFPELEKLVPTLHMASVYALLSEFPSAKHVATAHLTRLTNLLSESSKGRYGKDTAITFRDSARASIGSNMPAKSLELKHTIKLIQELDSEIDEIENEIKIIMDEINSPILSIPGINYRMGAMIIAEIGDFNRFDSPDKILAYAGFSPSTYQSGQLDGAYAHMEKRGSRYLRYALYNATKYVCHWDPTFAAYLAKKRAEGKHYNVAISHAVKKLVRVIYHLEKTKQQYIKAA

SEQ ID NO: 197981 - protein, 342 aa, unidentified
MKIIGCDFHPSFQQIAMVDADTGEYTERRLTPEEARRFYAELQGAVLVGMEACGNTLWFERLLASLGIELWLGDAGKIRAMEVRKQKTDRRDAQLLLQLLLENRFPRIWVPSVEQRDVRQLLLHRHKLVQMRRQVKNELQHLALNQGVQQKRKLWSAAGRQRLEELPLEGWTARRRQEELELLDELNGRVAKLDVAAQQEADGDAVARLLQTHPGVGPITALAFSLTLGTIERFTRSRQVVSYLGLNPAEHSSGGRQHLGAISKQGNPLLRSLLVEAGQSAARSVPELQRAYQRLKHRKHSGVGKVMVARKLAVRLFWMWKTQQPYTAARTQGSPSHHVVAV

SEQ ID NO: 197982 - protein, 345 aa, unidentified
MTKRQSKDVAVYAGADISKDTIDISYHFGDKLIIDKIANNEQAIKRFVRTMKMEKGAVLHFILEPTGHYSQTLYRTLRDMKVRFTQLNPRLSRQFAEFTGVMEKTDKKDAQVLEDYGRLLKPKPTIPEEDIQMELHDLYVLRNALAKERGEWKQRKHQHKGGIPKRFVERVSKALDKEIAALDDTIEQQVKSLEVYKAIYEEVVKIVGVGRNTACAILCLLPEIGVLNSNKITKLAGLAPIPNESGTSVKKTAHTRGGRKNVRTALYMPCMVACRCNPVLRPYYQRIRERKGGKGVKGSGAIALTACMRKLLIHINSVARIVREKMQRNVAAVGCGEAAQASPCR

SEQ ID NO: 197983 - protein, 372 aa, unidentified
MNYNTVYVGMDVHKESFTLCSCKYEDEKASHYQRTPASYKNVLRYLAFLRTIYGEDTRFVCGYEAGCLGYSLYHQLENFNVECVILAPTTMLEQRSKRRIKTDKRDAEIIARSLAQHNYSPVHIPTETDNQTKEFIRMRDDHKAELKKIKQQILAFCLRQGYQYDGSGNWTAKHVKWLRSLKTEGLYKEILDEYLLTYTILTDKLNRLDQRIEELASEEEYKEPVSKLTCFLGIKTHTALSVIVEVGDFQRFASARKFAGYLGLVPGQHSSGDDRNGLGITKAGNTHVRRLLVESAQSYTRGKIGYKSRVLRSRQAGNSPQIINYADRANERLRRRYYQMILKDGKKYNIAKIAVARELACFIWGMMTDNIY

SEQ ID NO: 197984 - protein, 343 aa, unidentified
MKLHVLGIDLGKTVFHLVGLDSTGKVVIRKKCSRTQLLAFTANLQVQLIGMESCSGSHFLGRALREQGHEVRLMPAQYVKPYVQTNKSDFLDAEAIAEAVQRPRMRFVPIKSEEQLDLQALHRVRERWVMRRTAVVNQIRSLLLERGLTLPKGRSYVDRQLPRILEDAELRLSGCFRILLAQLKLELEQLSARIEEMDRVIQKTAKENEDCQRLTEIPGVGPVTATDLIAAVGNASAFQKGRNLAAWMGIVPGEYSTGGKQRLLGISKRGNKYLRTLFVQGARSVVQQRNKQSPGLSKWLAELLARAHQNVVIVALANKLVRMAWAVLCKNERYRAPILATTN

SEQ ID NO: 197985 - protein, 351 aa, unidentified
MDSTKYIGMDVHKETVSIAVMNSGGKLLMESILETKAATILQFIQGLQGNLYVTFEEGTWAAWLYDLLKPHVTKIVVCDPRRNALLKEGNKGDQVDARKLAELLRAGLLRPVYHGENGLRTLKELSRSYLTISKDLTRVMNRLKALYRGWGISCAGATVYAPHHRSEWLDKITEAGVRRRAEHFYQQLDAPQPLRQEVRRDLLAESRKHSARKLLRQIPSIGPIRAALLIALIQTPNRFRTKRQLWAYSGLAIETHDSAQYRYVAGQLQRWKKPQQLRGLNQNHNHDLKAIFKSAATRASSSDGPFQDFYQALLTKGMRPSMTRLTLARKIAAITLIVWKRRKEHISTLNN

SEQ ID NO: 197986 - protein, 309 aa, unidentified
MKQSVVYIGIDVAKTHLDVAWAGTFRRWPNERSGHAALVRWIKQSATPVQLICEASGGYEQALLESLEKSEVKVTLVQAVRVRQYARAAGILAKTDRIDAKVLAAFGSAMQPQPTPPLSAEQKRLRQYEAQRRHLSRILVAEENRLAQLSCAELRSLSRCLISKIKTQIKTLDRGISDLIAQDQTLCVKAQKLTAISGVGIRTAALLLAQMPELGQLNRRQAAALAGLAPFNRDSGSLRGKRAIFGGRPALRSGLYMAALSAARFNPILSNFYQRLRAKGKPHQLALTAVMRKLLLALNHTLKPIPCTT

SEQ ID NO: 197987 - protein, 320 aa, unidentified
MRNTVGLDISKLTFDATAIVGNAEYSAKFDNDSKGLNQFSDRLKSLGCQNLHICMEATGNYYEEVADYFAQYYSVYVVNPLKISKYAESRFKRTKTDKQDAKLIAQYCRSAKESELVKRQKPTDEQYRILRMTAAYAQIKSECAAMKNRHHAAKDEEAAKAYAEIIKAMNEQLEVLKEKIKEQTEKPNCKEGVKRFETIPAIGRMTAAVLFHHLTSSKFETSNKFAAFAGLSPQQKESGTSVRGKGKLTKFGNRKLRAVLFMPAMVAYRIRAFPDFIKRLEEKKKPKKVIIAALMRKLAVIAYHVHKKGGDYDPSRYKSA

SEQ ID NO: 197988 - protein, 358 aa, unidentified
MTDTSKEQTKITAGLDLGDKYSHLSMLDTESGEVIEETRLRTTPETLRKRLDSEAQMKIAIEVGTHSPWVSRLLTECGHEVLVANARKVRLIYGDKRKNDKLDAENLARLARLDPRLLYPLQHRGENSQAHLALIRSREALVGSRTQLINHVRSVVKAFGHRLPACSSRSFHKKVAEHLPDELVPALGPLLETIGELTERIRQYERELEEIANEHYPETAALRQVGGVGTLTALSFVLALEDPYRFTKSRAVGAYLGLAPGEDQSGDSNPQQRISKEGDELLRRLLVGSAQYILGPFASDSDLRRHGEKIAERGGKNAKKRAVVAVARKLSVLLHRLWVTGEIYEPLYNARHSGGEAA

SEQ ID NO: 197989 - protein, 352 aa, unidentified
MIVLGADTHKSSHTVAAVDAATGQVLGDKTIQVGARGFAALVLWARGLNAERVWALEDCRHVSGALERFLIGRGERVVRVSTRLMAGTRRSSRDRGKSDQIDAMSVARAALAAGIETLPTAALAGPELDLRLLVDHRERLVRARVALNNTLQWNLHDLWPELQLPRGALFSKTWSTKIARRLARAEQTMRVRIARDELRHLRELTTSIRALEVEISDLVGELAPQLVAEPGCGPLTAAKLVGEIAGADRFASDAKLARAAGVAPIPASSGRTDRHRLDRGGNRQINAAIHRIAVTRARCDATTADYIARKKTEGKTQRDAIRCLKRHLTRRVWQLLRAPTPAKNDPLSMSLS

SEQ ID NO: 197990 - protein, 391 aa, unidentified
MATSERVVIGMDPHKRSVTIEVMTADEEVLGGGRFGTDVDGLAAMVEYVKQWPERVWAIEGCNGMGRHVAIRLLAEGQDVVDVPPKLSARARVFSTGQGRKTDATDAHSVALVGTRMSGLRPVVADDQLAVLRMLADRRRALGEEHTRKVSQLHALLLDLLPGGAKKDLSAAQAKALLARVRPRDLVGKTRRRLAAELVADLEQNYTRRKAADKELRALIAQTGTGLLDLHGIGPSGAARLLVEVGDITRFPDRNHFASWTGTAPVDASSGDRVRHRLSRGGNRQINRVLHTMAVVQLRNPTEGRAYFDRKKATGKSSNEAMRCLKRRLSDAVYRVLIDDLSATKRTDPGGQPGNDSVSSATGSQPNTGSSDKPLPGPVTRKPRTPLPSAP

SEQ ID NO: 197991 - protein, 344 aa, unidentified
MEGYAGQQFVGIDLHRRRSVIVRTTDRGDPLETVRISNDVDSLEKVMARAGEAPEVVLEATYGWYWAADALADVGAVVHLAHPLGVKAFSYRRVKNDVRDATDLADLLRMGRLPEAWIAPPATRELRELVRHRAKLVALRSGCKCEVHAVLAKCGVQVLMSDLFAPTGIGLLERLDAPAPYLARVGSLRRLIDDLDVEIDLFARLIRGRLVTDPGYRAVQTIPGIGPVLAAVFVAEIGDVTRFPGPAQLASWAGLTPKHHESDTHVHRGRITKQGSRLVRWAAIESVQALGPGTGAGRLKRRVGDRRGRNIGKTAAARQQVGYVYYALRDGHVRALTQRPRVAA

SEQ ID NO: 197992 - protein, 341 aa, unidentified
MSKQYEGRQYVGMDLHRRRSVLVRMSEAGERLETVRIVNDRDRLAAVMAQAGQAPEVVLEATYGWYWAADALAELGATVHLAHPLGVKAFSYRRVKNDERDAADLADLLRMGRLPEAWIAPPATRELRELVRHRAKLVHLRSGLRNQVHAVLANQGIAVPVSDLFGVGGTKLLERTRLSPAARARVDSLLRLMDAFDVEIDAAAKTTARQLNSHAGYQAVQTVPGIGPILGAVFVVEIGDITRFPGPTQLASWAGLTPKHHESDTTVLRGRITKQGSRLVRWAAIEAVQHSSKHTRIGAYRERVGERRGRNIGVVAAARELIECVFYALRDGKVRRLHTPT

SEQ ID NO: 197993 - protein, 412 aa, unidentified
METVVERPSALDVHKEQVTACVRVPGEGRQHEQHVAEFPTTVVGLLTLRDWLAAFGVQQVVMEATGVFWKPVWAILEDEFECLLVNARHVKQVPGRKTDVKDAEWLCQLAEAGLLRASFVPPKPIRALRNLTRYRKTQIQERAREANRLHKALEDTGIKLDCVATDILGVSGRAMLDALVSGTTDPEILADLARGKLRKKIPALKEALEGRFDHLHAVWIGAILAHLDFLDEQISNLTEAIGEQIAPFEKAVELLCTIPGIQRRNAECIIAEIGLDMSVFPTAKQLASWAGQCPGNDQSAGKRRSGQSRKGSKWLDWALEETAMAAIRTKDSYLAAQYARLKPRRGHKKALGAVKHSIICIIWHMLTTGELYTDLGGDYFRKRDPERITKRLIAQLESLGHKVTLEELPQAA

SEQ ID NO: 197994 - protein, 337 aa, unidentified
MGLYCGIDLHSNNHMLLVIDDADRRVYERRLPNDLAITKAALEPYRAELVAVAVESTFNWYWLVDGLMEAGYAVRLVNTAAVRQYEGLKHSDDEHDAFWLAHLMRLGILPTGYIYPKSERGLRDLARQRMRLVQHRSSLITSVQNQVWRSTAVRLRSETIKGQGKHPWPQISDPDLALSVKAGRAAIDTLTVQIERLEKLILKRVGPSTQFRMLKTVSGIGPILAMTIALEVGEIGRFAGVGEFASYCRCVDSKRLSNGKKKGEANRKCGNRYLAWAFMEAAHFAICNLPAAKRFYERKRRQRHAVLAVKALAHKLARACFYVLRDQVPFAPERLFM

SEQ ID NO: 197995 - protein, 373 aa, unidentified
MPRYSTAFGMDVHLRSTTVCALDAETGEAVTRRFRGNPWGEVAEWMSGFPGPSLAAYENGHLGFAPQRELSGLGVDCVVAAVSKVPRSAADLSSKNDRNDAARMAKAILSHDISPVWVPSPEIEGLRDLAGAHDAATARLAAAKQRLLAFLARRGYAYGGTTPAGNPRRYWTYDFLRRLDKVRPADDGGIRALAALRNEVEAAAETRDDLLAEYRAAVAAGPLSAEVEALQSIKGCGFALAAAFASEVGDFSRFRSGRQVTAYFGLAPKQRSSADSVRLGGISGAGNALVRRLAVEGSWSYVQASHQPKLMPKGSGVPLEVRMHGRKGSERLLRRREEMLARGMPQAKANAATAAELVRWLWALGAMCREATE

SEQ ID NO: 197996 - protein, 354 aa, unidentified
MNTTQNSTKSKIVKVIGVDLAKDHCDVIGYDENGIICLRLDGCSYAKFREILANLPQAVVLMEACKGSMFHARSIADLGHEVRLVKGTDVKALRNVKHKSDLRDAAYIANLYFVPGIKYVYIKSQQQQSLQFLQNEYKSLQELRIQVGNQIHAGLEEFGCPVRKSSKFIKTRMVAHLEKHAELIPEDVMASFKRRREIWLNLLQQEEEAKRRLEQVAATDANAKRLMTVPCVGPQTAVGLLVHVGVDFGRFKNSRQFAASLGLVPKQNSTGGNNTLNHITKCGPKSLRSNLVQCAQLVLMYAEKWKGNFGDWVRKMRDSGKKHGVIVCAIAAKLARIIYRLMKDKVDYTPILSC

SEQ ID NO: 197997 - protein, 365 aa, unidentified
MKKVAYVGIDYHLNSLSIAVVVKGKKEPVDVVRLKNDDKMIRKYMTKLSERFEIKACYEASSNGYSFQRKMAAWGYPCDVIAPSLIPRKPGDHRKNDFRDARDLAQNYAHGTLSIVHPPTEEQEAVRSLVRCRFAFKEAAKKVKQQINSFLLSQDQHWNQSKWTPHHRKWLWEMRMPNTYSQQVLEEHLAHLDYLETRLQHLEDQIEQIATSPVYAPSVKKLAAIKGIKTLTAMLLIVEITDFRRFPNPRALMAFLGLIPSEDSSGDKRKDGAITCAGNKRCRSALIESVQHYPRSPHMSAQMKSDLSQLDAHSAGIAVKCLKRLHKRYWALTLKGKLRPVAITAIARELVGFIWAMMQPQPAIA

SEQ ID NO: 197998 - protein, 424 aa, unidentified
MQNTAARKRQQVPGGYLVVGVDPHKKRHAAVAITQDFTTQAKFKFDNTREGLEMMLERARVEMLKSGCRGVIFAIETGGHYWRNIAYYLDERGIPFRFINQYTLKRRREGKDLNHRKNDYRDSEVAAQLLCTGEFVESVIPQGVYAELRTSHNAYQRLVKERTRITNLVKGLLDALFPEFTQVFKDPCGLTALSVLSTCPIPRVIARMEEDDFVATIEARHKGRRLMRKKLIALHYSATTSIGINAGACSLSYEIAFLVDKLELIRQQIRIMEGTLVKLVDETEEGKYLLSIRGLNYIAVAGLLAELGCFKSYRSAKQMIKMAGSNPTESESAGKKKSQTPMSKQGRPLLRYCAWTSVIPMLRFNPDFRAWAKQRRERPVHANPLSGREVVGAALNRLLRLVFALVKNQTYYLDIKPALTSIAA

SEQ ID NO: 197999 - protein, 409 aa, unidentified
MLFVGNDWAEDHHDVEVQDETGRRLGKARLPEGVAGIARLHELIGGFTTEDMTAEQVLVGIETDRGPWVAALVAAGYTVFAINPRQVARYRERHGTSGAKSDAGDAHVLADMVRTDAHQLRAVAGDSALVEGVKLVARAHQNLIWDRHRQVLRLRSALREYFPAALEAFDDLAAADALDLLGAAPDPEQAARLSRSRIAGALKRARRRDVEVKAETIQAVLRSPRLSQPPQLAAAYAATVQATVAVIAVFNTEIATLQGQVEAHFGRHPDVEIYRSQPGLGGVLGARVLGEFGDDPDRYQGVRARKNYAGSSPITRASGKKTVVLARFVRNQRLADALHQQAFCALRASPGARAYYDQLRARGVGHHAALRQLSNRLVGILHGCLKTRTLYDETTAWGHHANKDQQTAA

SEQ ID NO: 198000 - protein, 464 aa, unidentified
MRELRLGVDIACRTPHQASLADETGKFLWSGRRFRTDVGELEALWASLPDDAQITVVIEPTRNAWVLLAAWFRRKGATVVMVPSEQSSDLRDYYSKHTKSDRLDSKLLATLPLLHPEGLYPLEHLGPAEPIRRATRLRSSLVKRRSKVIGRIDSLLEILGPQWYSALDGKLAQLTPLRFLAAGYADPYLVRRLGRARVARFMHRHSHGRWNTEHAQAVLDAANETIALWGDEIDYGELADDLAVEARLALTLCTEIHELEQRIEVMRSALDPTDILRSVPGVGSVNAAQILGRLGDPGRFRSLAGARSFSGLVPSLNSSGRNGSHGGPTKSGDALLREALFTSADAARKIDPTLAQRYHRLMTVAGKHHNSALCHVSTALLTRIVSCWRSGEHYVIRDLDGAVLTPDEGRRIVSARYTVNPRLRAQRRTTKPSEWTSRRSKESQGAPSTGPSDRKPRDFVVDVA

SEQ ID NO: 198001 - protein, 421 aa, unidentified
MTHVSHPTFAAFVGLDWADAKHDVCLQTASSATCEYFQLEHTPEAIDAWVTTLRTRFNGQPVAICLELNKGPIVSALRKYDFLVLFPINPLTLARYREAFTPSRAKDDPTDAALQLELLLTHRDKLQPLNPQSPTMRALAQLVEHRRRLVGDKVRLTNRLTSTLKNYFPQVLHWFQDKDTAIFCDFLSRWPTLKAVQLARRATLETFFRAHHVRYADVIAQRIAAIQAATPLTTDDGVIAPNALLVQALVAQLRVTLPAIADFDTAIAQCAQRHPDFPFFQALPGAGPVFAPRLLVAFGEQRARYASAAELQKYAGIAPVTERSGKKAWVHWRLQCPKFLRQTFVEWAAESIRHSFWAQVYYQQQRDKGKAHQAAVRALAFKWIRILYRCWQERTPYDESVYLQALHRRGSSLIQNLAKAS

SEQ ID NO: 198002 - protein, 418 aa, unidentified
MKDIKPEKGKKINRKTLIVAFDVAQEKHMVYIRCPDGREEKPFVVFNRREEYEQMWERISQTREAYGVEEVVVGFESTGPYAEPLVHYLMKKEVKLVQVNPMHTKRVKEIRGNSPNKTDEKDTQVIADIIELGNYLTVVIPEGASAELRRLTQARERAVERRTMLVNQVQGLVSVVFPEFLMVMKDIKTKTAHYLLNHCPRPEDIVALGYERLAETLKKISRGRMSKERAGALYEAAVNTVGVREGQGGMVFEIKQLVAGIEETERVIEEIEEKMREYLKEIPYSRCMLSIQGIGEVTVAGLIGEVGDFGKYKTIAEITKLAGLDLFEVSSGKHKGERRISKRGRPLMRKLLFYAAINVVRKGRIMHERYERYIQRGMPKIKALTAIARKLLGVLFALVRDQSEYVRNYEEIPLKKVA

SEQ ID NO: 198003 - protein, 342 aa, unidentified
MEHTTIAVDLAKSVFQVAVSHRPGRVDEERRLSRDRFLESFAQRAPATILLEACGSAHYWARQLQPFGHVVRLLPPHDVRPYVRRNKTDRTDAKGLLEANRNEDTHPVPVKTIEHQAIASLHRLRSTWLATRTARLNTIRGLLREFGIFIPVGAHHVVARVRTRLLESTTVPVLLHTTLAAACDEIDVLEADMRAVERQLGALAAEMADVTLLQTVPGVGLITATALIALVADIRRVPSGRHFASFLGLTPKEESSALRRRLGAISKQGDVYLRMLLTHGARSFLWHAKAARQPTALQHWALSVEQRRGHNVATVAVANKLARIVWAVWTQQRPFVTDHRQP

SEQ ID NO: 198004 - protein, 372 aa, unidentified
MNNLRFVGLDVHADTIAVAVAEPDGEVRSLGVIPNRAASIQKLVKKLGPPAQLRACYEAGPTGYVVYWQLAALDVACQVVAPTLVPVKPGDRVKTDRRDALKLARSYRAGDLTPVWVPDAAHEALRDLVRAREAAKTDQLRARHRLGKFLLRHGQRPPTAMKAWTQAHLTWVKTAVHFAHAPQEATLLDYVHEVDHAADRVARLERAIEEAVQTAAPAVRAVIAALQALRGIAFVSAVTIVTEVGRLSRFVRPRQLMSYSGTVASEHSSGPRIRQGGITKTGNAHLRRIVVEAAWAYRHRPSVGPTLRKRQASLDPAVLAIAWKAQHRLHARYRSLTAQGKSPHSAVTAVGRELLGFIWAIGTAVEAPPAVA

SEQ ID NO: 198005 - protein, 336 aa, unidentified
MNGSTGRWVGIDVAKSKLDVALLDERGKVKNHVFANDAKGHALLIAWLLDRAGAAIQVHVCMEATGPYGEASATALADAGFVVSVVNPARVKGFAQSELVRNKTDRADAALLARFGQTMQPEPWVAPPPEVRELRALVDRLHSLKEMHQQEANRLESALNQPGTRGSIESHLQWLQTSIKDLERQIDDHIDGHPRLRGDCALITSIPGVGKTTAAKLLAYLGDVRRFKNGKALAAFIGVTPRLTLSGSSVRGRSMSSRNGHAQVRHSLYMPALVALRHNPLVSVFGIRMRAAGLAPKAVIAACMHKLVLLVYGILKSRQPFNPNLGAIRLDFQDGI

SEQ ID NO: 198006 - protein, 277 aa, unidentified
MNKDIKYFGIDISHLVFDVTDSDGNYYQFKNNPSGFKKFVKLMEMDSHCVMEATGYYHYQLAYYLLESGVKVSVENPLAVKRFIQMKLSKIKTDKSDSRLICEYAKQVDMKLWQGNSKHQTECLQMTRLLSVYTKQSTMLKNKLHGEAVLGNPSKAVVSSLKRSLKQLQKEIKSLEDTLLIFVKQTHQDLLTRLKSIPGIGPKTAIMLVVLTGGFDRFSSASELCSYAGLTPVIRQSGTSVKGRPRISKIGNQKLRNLLFMCSFNACKYNKACRDFL

SEQ ID NO: 198007 - protein, 414 aa, unidentified
MAGVMIGVDPHKASHTAVAISGAEEPLGELRVRACAVQAERLLAWAAAWPERTWAVEGAGGLGHLLDWQLLSAGERVLDVQPKLGARVRLLATGNVNKNDPNDARSVAVAALRSPGVREARPDDHAAVLKVWSKRRRDLAGSRTQVVCRLHAVLCELVPGGVGKKIIAAHAARLLDSITPPDTVAAARWELAAALIEDLRRIDAQLGETRKKLDTAVRASGTSLTGLFGVGPVIAATIIGEVRDVSRFKNRDRFAAYNGTAPIEVSSGQQKVNRLSRRGDRRLNHAIHMAAVTQVRQKHSEGRAYYDKKLAEGKTRKVSSRTQRDPRRPDLAAMLTPNDANRPQDAQREWRLTSPSADGDAGHISACSGRCRSAARSRGRAGARGHRELASGGHGAPGARVTAAVRWFHSGSMP

SEQ ID NO: 198008 - protein, 397 aa, unidentified
MYIVGIDIAKRKHEAAVIDGEGAVIIKPFSFTNNCSGYNRLLAMLTKAKLPLDEVSFAMEATGHYWLALFTRLQKEGFRVQVINPVQTNSIRSFYIRQAKTDPRDALLIAEVIRFGHFSESTLHPENIYELRELCRGRHAIVSMQADVKRKVVALLDQVFPEYETAFTNLFGDTSMAILQTCPTPKELSEMPLEELCHLIEVSSRKRFRMVKAQELQELARNSFGFAMAGDVFSTMIRLYAKHLDFLKQQVREMDRKIAEIMETLDTPITTITGIGPTLGAYILSEIGDISRFSSAAKLAAYAGIDPTMRQSGEYNGVRNRMSKRGSPYLRHAIWLAASSAVLHDPALKLYFQKKRDEGKPYMASVGHACRKMVSIIYAVMRDNKAYTPCIPNEISA

SEQ ID NO: 198009 - protein, 340 aa, unidentified
MGIVGGIDIHRRQLTFDIVDLATGENLRGRVTPADRVELRRFLAGLDGAGRDVAMEGCTGWRYVTEELERAGFRAHVAEPADTAALRGNKRRAKTDRGDAQHLRKLLMTGELPESWIPPRHVLEARGVVRLYKDLADQRVAWTQRLHATLYHHGVPELGCPVAGEQARTLLRDVELSPAARRAVEVALAQIEVVNEMLAPIKLDLARLSRHQPGCQALTAHYGIGPVTSVAIWCEMGDTRRFSSSSDAVRHAGLDITVYQSDTNRAKGHLARQGPGVLRWALYEAAMSSTKKASPDHEYFCSLRERLGTQRAALAVARKLARWCHHALRAAGDDAWAEAA

SEQ ID NO: 198010 - protein, 369 aa, unidentified
MIVIGADTHKQSHTVGAVGAATGRVLGDRTVKAKRRSFDDLLVWARGLGAERVWAIEDCRHVSGALERFLLRRGERVVRVAPKLMAGARRSARERGKSDVIDAVAIARAAVREGLDTLPVAQLAGRELDIRLLVDHRERLVAQRTALINDLRWHLHDLWPGFEIPARALTAGRWQQRIAGRLARAEQTARVRIARDELRRIRQLTRSIDALERELAVLVADLAPRLLAEQGCGVLTAAKLIGEIAGIARFTSDAKLARIAGSAPIPASSGRIDRHRLDRGGNRQLNCALHRLAITKGRLDPQTAAYLARKQSEGKSRREALRCLKRHLARRVWRLLQPPPTQQTPRPSTRPRTAITIHCNVPYSRFSLT

SEQ ID NO: 198011 - protein, 351 aa, unidentified
MPRATSSTNVIATIGIDIGKNAFHVIGLDDKGAIILRHKLSRGQVYARFANIPPCLIGMEACVGAHHLGRQLRTLGHDTRLMPARYVRPYSKGQKNDFRDAEAIAEAVQRPTMKFVAIKTVEQLDLQALHRIRERLVCQRTSVINQIRAFLLERGIAVRQGLRTLRTEMPIVLAKTDKLSQRMIHMIEDLCMDWRHLNGRIETVSKEIETLSEQDDGAKRLMTVPGIGPIISTATVAAIGTGEVFSKGRDFGAWLGLVPKQMSTGGRTILGPISKRGNRYLRMLFVQAARAVLLRPQSWEKHGLKLWIEAAARRLNRFKLAIALANKIARIAWGVLHGGRNFEVRPMNQAA

SEQ ID NO: 198012 - protein, 365 aa, unidentified
MNATAALPVVGIDVAKSVFQLAVADGAWRVFEEHRLTRTQMERWFANRAVGLVVMEACGSAHHWARWLNALGIEVKLLPALYVRAYVKRNKTDAADACALLEAARCADIAPVKVKSLEQQALQGLHRTRSLWMGTRTSRINALRGFCREFGIDIAQGARLGVERIERVLADPHSAVPELIRGTMKLLIEEIRLLEARTAQLERELTLLARRSSACTTLLTIPGVGLLTATAMVAATSGSVAHFRDARHFASWFGLTPKERSSGTTRILGRISKRGDRYLRMLLTHGARSVLHAAARATLAGKQVDGLRQWALGVQQRANHNKAACALANKLARICYATLRDGAPYGEPVRRPEKKIARTSFELAA

SEQ ID NO: 198013 - protein, 304 aa, unidentified
MKVFYLGVDVSKKKLDLCLRSNGKDILYDVIPNDLSSIKSWLTRTFEKFFLSEDSLVVCAEHTGQYTYPLVCATKSIGVYLCLEDAAKIKYCHGIPRGKNDKIDACRIAMYAERYNDCLQPYTASELIIQKLKNLSTERSMLVADRAKYQSQLKDQVDYMEHSIYIAKCNRVEGIINTFTDYIAQIDLEIKELINQAPVIAHQMDLLMSVDGVGERVALKMIMETDAFTSFTDPRKFCCHAGVVPFVYVSGSSQRSKNRVSNRADKSIKHLLHMAALSVSQVKNSPLKKYFFFREIIKIRLRNP

SEQ ID NO: 198014 - protein, 344 aa, unidentified
MEHIGIDVHKVESQICILTESGEVVERRIRTQRERFAAVLGERPRAKVLIEASTESEWVARCLEELGHEVVVADPNFAAMYATRSRKVKTDLRDARTLAEACKLGAYRPAHRTSDRQRHVRAQLSVREALVQTRARYISLIGALLRREGLRVASGNAVSFTKRVAGLALPGQLKSEIAPLLAVFVSINRQLVWVDTRLEHLAQSDETVERLCTAPSVGPVTAAAFSSTIDDPGRFKSAHRVEAYLGLTPSEWSSGEKQSKGHITKAGNSRMRRLLVQVAVSILRLRSPRTEALRKWATGIAARRGKKIAIVALARRMTGVLFAMMRDRTCYFQATLPEPSAQVA

SEQ ID NO: 198015 - protein, 324 aa, unidentified
MIDGILGIDVSKNTLDASMSSCNKVRAKSFANSPDGWRHLLDWLIGQKIRRVHACLESTGLYSLGIACKLNEAGHVVSIVNPAQIRDFARTKLGRNKTDAVDASHIREYCELFKPPPWSPPSHAHRQLGELQTIRAGIVAGLTEWKNRKNSGMVDVVAQSLADATISHFTSQLGAVEKAIAQAIDNDTDLRRKRDLLLSISGVGETLASVVLAELPGPDVLRSSAEAVAYTGLNPRRHQSGTSIDRLTRISKIGNAVLRAALYMPAMSAMRYNPAIVALVTRLKARGRLNPKQIVVAAMRKLLVLCFGVLKTGKPFDPALAMGC

SEQ ID NO: 198016 - protein, 386 aa, unidentified
MYFVGVDIAKSFHVASVIDGFGVIRLESFSFDNNHKGFSKFIDLISSFPKEELLIGLESTAHYGEVFAQFVFNLGFKVAIVNPLQTSAIRKAGIRKTKTDKVDSLIVAKALILNNFTILERKDMITLGLRSYARARRNLVTQRTKSKIQLVAYADQIFPELEGFFKNNLHINTAYQLLLKYTMPTEIAGLHLTKLTNILKNASRGHFNKETAIALKELAKNSVGIYSPVLAMQVRMAIEQILFYDAQIEQIERECEILIKELNSVILTIPGISTNSASAILGVIGDFNKFESPKQLVAFAGLDPVVYESGKFKARSTRMSKRGNSLLRQHLILTAHNVVRNNQVFKEYYDKKRAEGKNHYNALGHCATKLLRVIFKLVKENQNFNL

SEQ ID NO: 198017 - protein, 381 aa, unidentified
MKNDIRFVGLDVHAESITVSVIGPDGEIRSLGSLPNRAEAVRRLVKRLGPPSRLRVCYEAGPTGYVLYWQLTELGVHCDVVAPTLVPVKAGDRVKTDRRDAEKLVRCYRAGDLTPVWVPDAAHEALRDLVRAREAAKTDQLRARHRLGKFLLRHGRRPPKEIRPWTAKYLEWVNRKVQFVPPAQQAVLLDYLTEVDHARDRIQRLERSLDEAVRTSPERMRAVIAALQALRGIAQVSAATIVAEVGELSRFARPRQLMGYSGAVPREHSSGGKTRRGAITKTGNSHLRRIVGEAAWSYRHRPAIGGALRKRQEGLSEEVKAIAWKAQHRLHGRYRRLVAKGKIHQQVVTAVARELLGFIWAVGVAVEREITSTTSAKRPAA

SEQ ID NO: 198018 - protein, 362 aa, unidentified
MVYLGVDLHRKISHVVALDEEGGPILSRRFEHSPDAFRRVFGELEPEPISVAFEATYGWGWFADLLADAGIEAHMAHPLATKAIGAGRVKNDAVDAATLAQLLRTNLLPEAWIAPPEVRELRRLVRMRASLVRVRSRLKCQVHAICADAGVPVPVSDLFGKKGRTQLEALALPPITASRLAAHLRLIDDVAREIIAADREIVAALKGDDRVRRLLPIPGIGILNAATIVAVVWDVTRFPSADHLTSWAGLTPTERSSADHVRRGHISKQGSRWLRWAMVEAATKIGSSRSAKLRRFADPIAERRGTKIARVALARRLLVLAFYALRDERGCRDYPPLPRPSRRPVTARSLPVMASPDGRPSD

SEQ ID NO: 198019 - protein, 346 aa, unidentified
MEKLIRIGIDTSKSVFQLHGVDVREQPMLKKKLRRSQVVPFFSKLAPTLIAIEACGSSHYWARALAGLGHEVRLIAPQRVKPYVPRGKNDAADAAGLCEAVSRPSMKFVAAKAPEEQAALMLAGMRDRLIKTRTQVSNAIRGYAAEFGLIAPKGLDKIEPLLIRATTDESLPELARRLFALHGQEYTRLQGEIREVETMLMSWHRNNQDSRNLAEVPGIGPIGGARMAMKKADAAACQSARYYAASIGLTPKDHSTAGKLRLGGITRAGDPVLRSMLVTGAMAVIRQAERNPAKASPWLLALLKRKPKKLVAVALANKNARIAWKLMRTGERYNPNHTALAVANAA

SEQ ID NO: 198020 - protein, 342 aa, unidentified
MTALYAGLDVSLELTSVCVVDEEGRIIREAKVASEPDAIKRELRSTLGDYLRVGVEAGPLSQWLCFGLKDAGLPVVCIEARHAKAAMGAMNRNKNDRNDARSLAQLVRSGWFKAVHVKSRPSQELRTLLTAREFYVNKLRDHENEIRGLLRPFGLKVGKVGARDFEARARELVAGNPLLELCTHTLLAEREAMKKALADLHRALLRLTENDELCRRFMTIPGVGPVTALAFKATIDDPARFRRSNDVGAHLGLTPRQYQSGETDVRGRISRSGDAFTRAALFTAAHVMLTRSRQWTAIRAWGVRIAQRSNLKKAKIAVARKLAVIMHRMWRDETPFRWGAAA

SEQ ID NO: 198021 - protein, 364 aa, unidentified
MDPALGLGWDVEVSTTEQETSMNIVRIGLDLAKYVFHLYGVDERGKVVLRKTLRRPGVAPFFANLPRCVVGMEASNGAHYWAKTLSEFGHDVRLISPQFVTPYVKSNKNDRNDAEAICEAVGRPNMRFVSVKSAEQLAIQAVHRIRSRLVASRVRLVNQIRGLLGEHGVVVAQAIGNLRRALPRIIDDEANGLNSIVRALIGELREELSDLDGRITIYDRKIINLYRMSEACQRLGEVEGIGPITATALVAAAGDGKCFKNGRQFAAWIGLVPKQRSSGGRSRLLGISKRGDRYLRTLLIHGARAALGRTRGKQDPRSLWLLKMRERRHANVVAVALANKNARIAWGLLASGMNYDQHLTVSSA

SEQ ID NO: 198022 - protein, 343 aa, unidentified
MSKISIVGLDLAKNVFQVHGIDASGGVVLRRQLRRGAVEKFFAQLPPCTVGVEACGSAHHWARVIGRYGHQVRLMPPAYVKPYVKRNKNDGRDAEAICEAVSRPTMRFVPVKSVEQQATMAVHTTRALLVRQRTMVANSLRAALSELGIVAAQGIKGLRELMAKLEAPHEEVPEIMRGALLLLAKHWQALEADERVLERQIAKAARSDREACRLMEVPCVGPIIASTVLAKVPDATVFRSGRNFAAWIGLTGRDHGTGGKHRPGRISKQGDRMLRALLISGASAYLRHQRTRGVSDPWLRDLLARRPYKVVMVALAAKTARILWAMLVKGEPYRDRASAPAAA

SEQ ID NO: 198023 - protein, 317 aa, unidentified
MKDTEVVYIGIDVSKGTLDVDAGDFGVAKIPNTPMEVRKALEALTGKANAKSLQVCFESTGPYTGALVAECQALGLPYSMLNPCKVRLFALSVATAKTDAIDARLIRLYSETKRPGPTLAPRKAIAELDRLVLAREAIMKGTVALRGVLETLKGSAAAKPMERTIAFNTKKIADYDRLIAQAVSADAEASGLVGALSAVKGIGTLSAAKLVAGMPELGRLGKRKAAALAGLAPRTRESGQFKGKSRIGGGRWKVREALFMPATVAIRHNPEMKRLHGHLMAQGKPYMLALTAVMRRLLCHLNSVARDYYAKRREVPA

SEQ ID NO: 198024 - protein, 294 aa, unidentified
MANSVTLFVGMDVHKESISVAYCREHESEPPHFVGKIGTRKADIEKMVRRLQSKASYLVFAYEAGPCGYVLYRHLTSKGLECRVIAPSLIPKRPGDKVKTDRRDSVEIARLLRSGDLTPVYVPLVEDEAIRDLCRARDAARMVLKSAKLRLKSFLLRLGLNYTGRANWTNAHRRYLSTVACPTPAQQIVFQESIRAVDEQVDRLQRLEQELIELGSQWRLAPVVQAVQALRGVQWVVALTVVAELGDITRFATPRQLAAFVGLIPSENSSGGKRRQGPITKTGDTCPSAPVWLA

SEQ ID NO: 198025 - protein, 346 aa, unidentified
MKQVTTIGLDLAKHVFQVHGADADGVPIFNRRLRRVEVLRFFEKQPPCLVGIEACGSSHYWAREIAALGHEVRLIPPAYVKPFVKRGKTDATDAEAISKAVIRKTMRFVPVKSVEQQTAALVLKTRGLLVRQQTQAINALRAHLSELGIIGGAGIAKVAGLVEIIRDETDARLPKAARFALSAIADQIEALARQIDRLEREIIAEAKRDEDMRRLITIPGVGAITAASIKALVPDPAGFRSGRHFAAWLGLTPKSHSSGGKERLGKISKMGNPELRSLLVLGATSVLRHARDNKNASKWLTAIMARRPYKVAAVALANKMARIIWALLTKGGTYRNMEPAIGTASA

SEQ ID NO: 198026 - protein, 430 aa, unidentified
MNEFVSEQPLSPKVAAYVGIDWADEKHDVVLRSVDDPAKSEHQIIKSEINALNDWIAQMQKRFEAKGKVLVCLEQSRGALIYQLMAYELFELYPINPSQLAYYRKTFFSSGAKDDRPDADLLSELLMCHRDRLKAWKPDDQLTRELASLNEGRRSAVDRRTELANEIKSELKVYFPVALQILDNDITTALAADLLVKWPTLAELQKVSPAKLRKFFYGHNSRQEKKILQRLALIKEAKPLTTDVAIIRPNALRVKLLARQLKSLLPFIAEYERRIAEIFGSHPDRFLFDNLPGAGPALAPRLLTAFGTDRDRFEVAGDLLNLSGIAPVRIASGKKTGKNASVHCRRACPKFLRQSFHEFGECSIRYCSWAQACYQAQRGRGKGHHAAVRAVTFKWIRILFACWKQRTPYDPQRYFQALQTRGSDYAQTTA

SEQ ID NO: 198027 - protein, 336 aa, unidentified
MSAYIGLDVHKDWTFATVLDQTGRVVVRRKLENEHVPSFLEQFNVLKVGLESSTYVVPLYRALVGRGFRVEVGHPKKTRYIAEARIKSDKVDSKAIAELVRLDALPQSYMPPPDIAALREKVRRRAFLVRQRAKLMAKIRIVLAYEGLKPPEGLSLFTRKGVDWLESLGLEPINCYLRLIMAFNGEIRRLSFDLRRMAGLDEDVRLLMTIPGIGYYTALLVKAETGDVNRFSNGEHYCSFIGIVPSTYSSGGVTRHGGITREGNPWLRWALFEAAMTHVKYDTSISRSYHRIAERRGRKVALVATARRLALCCYSVLKNRRPYRAFPHGQAFHNSS

SEQ ID NO: 198028 - protein, 347 aa, unidentified
MKIIGCDYHPSYQQIAALDTETGELREGRLEHEHGEAKRFYQALRGPVRVGMEAVGNSQWFEGMLAELGHELWIGDAARIRRLVVRQQKTDRRDARHILDLLLDGRFPRLWVPSAEVRDMRQLLRHRQKLVELRTQVKNQLQHLALNQGVRRKRRLWSLAGRAVLEQLPLAGWTARRRSDLLAMLDQMNVHIAELDSAVRAEAERRSEVRLLMTHPGVGPVVGLAYVLTLGPVSRFPRGKQVASYLGLIPSEHSSGGRQKLGSISKQGNTMMRTLLVEAAQNAARFDEPLRRDYRRLAARKHKALAKIMVARKLAVRLYWMLRNQQPYSPRPVARMQGSPSHSVVAG

SEQ ID NO: 198029 - protein, 385 aa, unidentified
MAPIRMPEAVIGLDVGKSSHWACVATRDGEVLLSTPVANREDDLDSLFGRFPDALVVVDQSRNIGALALARARAAGMSAAYLPGLAAHGAARLFAGDAKTDERDAMVIAKTALGIPDALLPVGDPGPTIAAARALAAQRNFLTCENTRNKNRLRSILLESCPAFEALVDLSDGCQLRLMASLGGAWSVADAGPRRAAALTRGAARGKIEALVRSTTSSTRPDASVVAAEDRAVKLLARRISENSAEIEAITAEISALLEGDDTYRCLLTVPGIGPKTASELAISIDIEDFPSHDRLASYCGLAPRNRQSGTSISSVTASRQGNKRLKNLLIFSCNCLTRTEGRWGDYYTRCRERGMSHGKALKALARKRLKVIYAVMRDRVPYAA

SEQ ID NO: 198030 - protein, 423 aa, unidentified
MSYRIAGIDVHKKMLAVVVSDVEVDGEFQFERVRYSSSPEYLRRLAEWLIAQRVEEVVMESTAQYWKPVWGALERYWKPICQEREGAGPRSGTLHLTQAQSNRGRRGRKKDFPDAERLVKRLVADELVLSFVPDTEQRLWRTVTRRKYQLTRNHVRLQNQLEGLLEECHIKLSSLVSDLLGASARRMLKALAEGETNPVALAAMADKNLRATQAQLCDALGACAELRPIYRRLLKMFLEELQFIDQQISELDHELASLLSRHHDAVVHLAEIPGLGVDSAQQIIAEVGAGAATFPSAKQLSSWVGACPGEEESAEVSKSHRSPKGNRHMRRILNQAANAAAKPKGTIFEIVYRRLVSRLGHNQTIGAIAHRLCRLIWIILHGGVRYQERGPSVNAKTRRHRTNRMIRELRNLGYRVEPLVTTV

SEQ ID NO: 198031 - protein, 347 aa, unidentified
MEHVGIDLGMNKSQVCILTEGGELVERSIQTTSERFAAVLGGRPRARVLIEASTESEWVARSLESLGHEVIVADPNFAPMYAQRSRKVKTDRRDARALAEASRLGAYRPAHRMADDRRHMRATLAVREVLVRTRSRWVVLIRSLLRREGLRIRSGKAETFAQRAQSVDLPEHLKCEIAPLLVLLTPLNEQIEVLDQQLVGMVAQDAVTTRLTTAPGVGPVTAVCFVSTLDEVERFRGSHQVESYLGLVPREWSSSEMQRKGRITKAGNGRTRWLLIEAAWCILRRKRKPETAALRDWAEKIALRRGRTIAAVALARRLTGILYAMWRDGTDYDPATLTVEGRQKRAA

SEQ ID NO: 198032 - protein, 351 aa, unidentified
MIIIGVDYHPSDQYIAFADTETGECGERRLNHGDGEAERFYRDLQQRAVSVRVGMEATGYSRWFERLLAELGIEVWIGDAAKIKTKRVRKQKTDRNDAQLLLGLLIENNFPRVWVASPENRDLRQLLWHRHRLVQMRTRILNQLQALAMNEGNRRKKKLWSAQGRAQLEKLPLATWASRRRQDLLELLDRMTPAIAALTAAVEQEARKRPEVLRLMTHPGVGPITALAFVLIIGTPERFPCGKQIGSYIGLIPSEESSAGRQRLGHISKQGNALLRYLLGEAAQAAVRCDADWRRRYVHLAMRREKNIAKVAMARRIAVRLYWMWRNGWEYGPSAEFGSHAGQLVTGHGGQ

SEQ ID NO: 198033 - protein, 423 aa, unidentified
MAGVMIGIDPHKGSHTAFVIDGREKPLGQLRVRASCEQAEALLGWAGRWRQRTWAIEGARGLGQLLAQQLLAAGERVLDVPAKLTARVRLLESGQINKTDENDARAVAIAALRARQLPQLTVEDQTIVMRVWARRYHDLGRLRTQAVCRLHTVLCELVPGGVRTQLRTSQAIAVVDSITAESPVAQAKLELAHDLVADLQRLDAQRREVKRRVSRAVAAAPTSITEVYGVGPIVAACVLGYVRDIRRFPSRDRFASYNGTAPIEVSSGDRKIYRLSRRGNRQLNHAIHIAAVSQISHRGSEGHAYYQRKRAKGMTGKCALRALKRKISDTLYERMLHDIRPRKDPGGHSGNDAVSSAAGSHPDGPALRTSHSRATANSKTATTNQRPLTSPPAPDKRRTSRSGTGVKLQPRPRPRRGRGQERA

SEQ ID NO: 198034 - protein, 320 aa, unidentified
MAIIGVDVSKLSLVAVRTSSTGITKENFEIPNTAVEIGTWLDQLQGKHKYLLVASEATGDYHNTLAKACLSRGIKFRLLNPILTKQFNRATIRKRKTDLTDSEIIAKLAIQGEGSIVSATTFAPSKAIHRATIRLVKVKQALERMSTRFNEMFPEENAVNQQLSNCVELLGESCIKLRKEAKIKTDPKLRKLLTSIPGIGEHVVVTLINEINDIGRFPSPKSLVAYAGLDPRVKQSGTSLKHNTHITKRGSVYLRRDIFIAASIASRWEPEIKNYFEKKLGEGKRYREALVAVSRKLLNRVYAVWKRGTPYERRLTTTGA

SEQ ID NO: 198035 - protein, 340 aa, unidentified
MGEQYVGIDLHRRRSVIVRMTGEGEVLDTVRIDNDPVALSLELAKAGPDPEVVLEATYGWYWAADLLQACGATVHLAHPLGVKMFGYQRVKTDARDAANLGDLLRMGRLPEAWLAPPAVRELRELVRYRAKLVALRSGLKAQVHAVLAKEGVRVPMSDLFGVAGTRLLEELRLPRAYGLRVASLGELLGALDQQIAMLGREIGSALAGDVGDLAIQAIPGVGPVLAAIFVAEIGEVGRFAGAPQLCSWAGLTPRHRESDTTVHRGPITKQGSRLVRWAAVEAVQRLPGTTKQAAWFHRIADRRGKGIGRVAVARRLLTLVYYGLRDGQVRCLAPAPAEAM

SEQ ID NO: 198036 - protein, 386 aa, unidentified
MSQSSNILMRDINYDHTLVLAIELSNKSWVLAAQVPGLPQTKAQRTIEPNKNALLAAIDGYRARAAAVGYAVERVITTYEAGWSGFWLARWLVAQGVEVHVVQPSSVPVDRRMRRAKSDGIDAELLLRTLLAWLRGEPRVCSMVPIPDEADEDARRCVRERTELLSERVGLTNRIGAVLATLGVGDYNPLLQSRRRRLAELRTGLGEPIPPNALAKIERLLIRLELVLAQIAELERKRDEVAAADAPDRAGKMIQRLTSLRGIGVQSATVLVREAFVRHFANGKALGSYAGLTSTPYSSGGIDREQGIGKAGNRRLRTVMVELAWLWQRYQPGTAQVAWFRDRVGSTGRRIRKVMVVALARKLLIALWRFVIDGVVPEGAVMKPSI

SEQ ID NO: 198037 - protein, 330 aa, unidentified
MSAKETIMTETNKELIMIGVYVAKHKLDIAIDEKTVQTIDNEEESFKKLIRTLSDIKSICFVMEATGGYEKKRVNFLQSQDIAVAVVNAKRVRDYANAMSAYAKNDRIDAQMIRQFGQVSYTRKRLKLREFRTVTAQRLEERLRRRNQLVDQRAVEKQHLEAASDKETVRSIKRIIKQFDKEIEKIEVKIKADIEDNECLKKSHQRLIKVPGIGEITVLTLLTQLPELGRLSNKEIVALVGLAPYCNDSGHKTGRRTIYGGRTLIRSTLYMATLSAVRYNKPIREFYQGLLARGKLKKVALVACMRKLVTILNSMTKAESEWDAAFEKTA

SEQ ID NO: 198038 - protein, 337 aa, unidentified
MERQYVAIDLHARRSLIVRQNEDGEELGVVHIDNDPVALSLALADAGPDPEVAIEACYGWYWAVDVLQAEGAKVHLVHPSGMNWEERRVKNDYRDCCDLLDRLRIDRLPDAWIAPPKTRELRELVRYRAKLVALRTGLKAQVKALLAKHGLHAPVNELWGPTGKEYLDELILDRGYTVKLESLRDLVEIYDREVAMLEREIHGWLRDDVGYQAIQAINGVGKTMAAIFVAEIGDISRFPSPDRLCSWAGVTPKHREADVKVRRGKITKQGSALVRWAAVEAVAYVREPKLKADFHRIGARRGRNIARVAIARKLLTLVYYGLRDGEIRCLAQADEAG

SEQ ID NO: 198039 - protein, 422 aa, unidentified
MLEETQDAEEIIQRVAALDIGKAELTCCVRVPSTGTRGKRAQEVRTYQTMTRSLLVMVDRLAELGVTRVVMEATSSYWKGVFYLLEAHGFQTWLVNARDVKHLPGRPKTDMLDAVWLCKVAERQMLRPSFVPPPAIRQLRDVTRYRADLVAARTAEKQRVEKLLEDAQIKLSVVASDIFGVSGRAMLAALLAGEGDPKALAQLARARMRAKLPRLEEAFTGFFTDHHAFLLGRMLDRVDALDADIAALDAKIADLIDPFAHAIDRLDEIPGVGQTAAQLILAEVGPDMTRFPTAGHLVSWAKYAPGVKESAGKRAGRATTGHGNPYLARVLGEAAVAAGRTDTFLGERYRRIARRRGSKKAIVAVGRSILVIVWHLLADPDARFVDLGAGFYDTRINADRAKRNHVRQLEALGYKVTIEPAA

SEQ ID NO: 198040 - protein, 345 aa, unidentified
MEPSHYVGLDVSQELTSVCVIDEQGAVVWRGKCATDPDAITGTIHRHAPRLVRAGLETGLLSNFLTRALRTRGVPVVCLDARHAKAVLRVQINKTDANDAHGLAQVVRTGWFREITIKSMDAQSLRLLLVARAQLVSQRQATANTLRGLLKAFGHVVRKGAGGLFASRVREVCDDNPALCAIAEPMLAVWQSLREQIRILDGQLLKRAKSDPAARRLMSIPAVGVIVALAYVAVIDNPERFRQSSSVGAYLGLTPRRYQSGDVDCAGHISKCGDGLLRSYLFQAANATLTRKVTDSTLRSWGRALAARIGLRRSTVAVARKLAIIMHVVWKSDRDFDCAGIPARV

SEQ ID NO: 198041 - protein, 379 aa, unidentified
MPARKDYIMHYNKLLQMLDHTPYLSVGLDVGADFTWMSIALPNGSFIGKPFKVIHNDPYSRELAVAKIKEAQEMYSLKSRCFLESTGIYHIPLLCFLRDKGLDCFVINPIITKNSTNINIRKLHNDKFDLKKAALVGLNSSLKTSVIPDEDIADLRNLVRDYYYFKDLQSAVVLKLNAELKVSFPAYLKVFSKITTKSSLKLLRACPLARDMLATPKEELVGLIRSTARFGEAYALNKYEAILEAAKDSAIFGRALPSNAVRIRLYIESYQTYQKHLDTLLLALHEAVDKLQGTPVYDRIYLLQSLRGVGFLSSVVLMAEMGDFDLFSSLKKLYAYFGLDPAVKQSGKLNGDKVHMSKRGSSLARRVLHMVALNNLKVD

SEQ ID NO: 198042 - protein, 334 aa, unidentified
MQNITLIGIDLGKHSFHIHCQDKSGKALLRKKFTRTKLMQFLATCPPSVVVMEACAGAHFMARRISDFGHETKLISPQFVRPFVKSNKNDFVDAEAICEAASRPSMRFIQPGTETQQTMRALHRVRESLIRDKVKTTNQIHGFLLEFGISLPTGDAVIKRLSLVLAEHEIPEYLSRLLVRLHTHYFYLVEQIAELESELSQSINADDTAQRIMTIPGVGPITASLLSSQLGDGKQFSCSRDFAASTGLVPRQYSTGGKSTLLGISKRGDKNLRRLLVQCARSFIMRLERKHGKLAEWVREQLNKKHSNVVTCALANKLARIAWAITTQKKEYQA

SEQ ID NO: 198043 - protein, 340 aa, unidentified
MNFVGVDLHKKVIRLCVIRVVRGKREITARRRFACRDTEGIRSFFEGLERFQTVVEATASYEWFFLLIEDVADRLVLAHPKKLRVIAESTRKTDKIDAEVLAVFLALDMIPEAYRPSPRIRQYRVLVRHRRWISRRITAVKAKLRNKLAQYNADIAELFTRRGKTYLAELALGRSDRFETGALLEQLQLFERQLNEVDAELAKFAETAPLAELEARAILASIPLVGPVTIDVALSELGDWRRFRGAKAAVDFAGLAPGIRESAGRRHELSITKEGSRLLRWALIQAAWRLAVRSPRWNRLYLRLQRNTGSKKKAIVGVARQLLCVMFSMLQSGQTYRLAA

SEQ ID NO: 198044 - protein, 319 aa, unidentified
MANSPAQAVVGLDISKKQLDIAVRPQGLSFTAPNTEAGIARLLRRLQKLNPQLIVMEATGGYEFLLVAALAGEDLPVAVVNPHQVREFARAAGRQAKTDKLDAQVLAHFGEVMRPEPRPLPTPEQQQLTALMRRRGQILGMILREKNRLEQTHIDAVRRDIRENLTWLEQRLKQMEKDIQALIHQSPLWREKDCLLQSVPGIGPVIARSLITYVPELGVLSGREVASLIGVAPFNRDSGRFKGKRMIRGGRGHVRRLLYMGALVASRFNEIIRDFYQRLLAAGKPKKLALTACIRKLLLMLNAMLKKQQPWQPCATQKA

SEQ ID NO: 198045 - protein, 358 aa, unidentified
MQRNKKTFKGQNIYIGIDVHKKNWQVAVITESGYTERLSTAADAKALFKFLKSHYPDGNYRAVYESGFSGFATHYALSDLGVSCVVAHAADIPSSQYELTMKSDRIDAEKLARALRAGLVRGIYVRPKDNLDDRGVLRIRKTIQIQVGGYKTRIKHLLHSNGVELPERFSRSGTHWSRAFIAWLREEVRLLSDTRRSLDLLLLQVETLRANLLEATRRVRALSMTDRYREDCALLMGIPGIGLTVAMTILTEVCDIGRFGNERQFASYLGLVPTSHSSGERVSHGEMTFRGNKHIGPLLVEASWVLIVRDRELGRMYTEYRWRMAGQKAIIKIARKLSNIIFAVLKTRKAYEPYRRDA

SEQ ID NO: 198046 - protein, 308 aa, unidentified
MADTEFPTSPVGYDDALRWARSFGTVVIAGVEGTSSYGAGLTRVLQAAGIEVAEVGRPDRAARRRQRKSDPLDAYTAARSAVAGHGLAVPKDAHTAALRALLTARRSAVKAHTAATNQIHALLVTAPAELRERYRRYSTAAVVKALARCRPASHSDPTAVAVLTAAKALVQRAEFLERQKQDLTAQLDVLVLQINPALRAAYGVGPDTAAQLLVTAGTNPHRLCNEASLAALCGVAPVPASSGKITRHRLSRGGDRAANNALYRIALVRMSVDPKTRDYVQRQAANGRTKKEVCGCSNAPSSVKYSDC

SEQ ID NO: 198047 - protein, 410 aa, unidentified
MERVIERCCGLDVHKKTVAACVRVPGPKGERQQHIRTFGTTTVELLALRDWLEAHGVTHVAMESTGIYWKPIFYVLEEVFTCILANAAQIAQVPGRKTDVKDCAWIAQLLEHGLVRGSFVPPAPIRELRDLTRYRKALIREQTRGANRLHKILEDAGIKLASVASDVLGVSGRAMLEALVAGTTDPEVLADLARGALRKKLPALRQALQGRFRAHHAFLVTQLLAHLDYLDDVIETVSAQVDVVIAPFAEEVVRLDTIPGVNKRTAEVIVAELGVDMSVFPSAGHCASWAGICPGNNESAGKHHSGKTRKGNKWLRSALTEAALAVGPRSTKGAFAARYRRVMPHRGHKKAVVAVAHAILVTAYHLLARKTTYQEPGADYYDRRHVERVKHRAIQALERQGYRVILEPAA

SEQ ID NO: 198048 - protein, 357 aa, unidentified
MISTDSQLDFTGQDIYVGLDIGKKSWKTCILTKDLEHKTFTQPPNVEALVGYLHRQFPGARYLSVYEAGYFGFWIHDELQSRGVDNLVVHPADVPTTDKEKKNRNDRVDARKLARHRRNEDLKPLYVPSRTALEDRSLVRTRAQMVQKQTRCKNQIKGLLAFYGITIPDEVISSHWSRRYLQSLESIAFQRASGNLALTALLDELKHLRQTIASLTRQIRALSREEPYRIPVANLVSIPGISTLSAMILLTELVDIQRFRSPDHLAGYVGLVPGEDSSSEMEVNTGITRRRNAPLRGILIEASWMAVRKDPALLLAFSTLTRRMSKNRAIIRIARKLLNRIRYVLKHQKPYQPGIVK

SEQ ID NO: 198049 - protein, 342 aa, unidentified
MNHYAGIDVSLECSSVCVVEANGKIVREAKVVSEPEALLAWFRSSGLELERIGLEAGPLSQWLFAAMKAAGLAVELLETRHVRKAFETMPVKSDRNDARGIAQLMRLGWFRPVHCKSVGAQEARSLLTARKLVQSKLRDVENSLRGILRGFGLKVGKTTERGFAGRIKELVAGHPHLQMIADALLAVHAVLRKEFAAFEKQVRKMARSETRARLLMSTPGVGPIVALTYASAIDDPGRFKSSKQVGAHFGLTPKKHQSGETDYTGRISKIGDGSVRTALYEAAHIMLTKPVKGCSQLKSWAMRIKRRAGMSKAKVALARRLAVIMHRMLADRTPFNAAAAAA

SEQ ID NO: 198050 - protein, 428 aa, unidentified
MEQIQPIVKAEPEPEFAALVAIDWADQKHYWSLQVVGQKGLQRGTLDNTPEAVEVWIMELHMRFGGRPLAVALEQRRGALAVMLSKYAHVHLYPVHPTTLAKFREAWYPSRSKSDPSDADLLLEILTAHRSRLRRLDPDTVEMRFLQNLVENRRKLVDERTALSNRLTDLLKLYFPQILGWFNDVASAVVGDLLQHWPSLQDLQQVKPAKLEKFLRDHHCSEIPERLTQMRQAIAATHDRALLDSAPYLVTAWVRQMAVLRESIRQLEKRIAERAAQQEDWHIFQSLPGAGAALAPRLMVALGTQRDRYCSAGDLQSFSGIAPVKEASGNTQWVHFRWACPKFLRQTFHEWAACSIAQCEWAKAYYEQQKARGKQHHVAVRALAFKWMRILYRCWKDRQPYREEIYLASLAKRRIAMVAALAQASQMP

SEQ ID NO: 198051 - protein, 346 aa, unidentified
MEISTIGLDLAKNVFQVHGISATGEVVLRKALRRSQMLPFFEKLPPCLIGAEACGTSHHWARELTRLGHEVRLMPAAYVRPYVKRGKNDAADAEAICEAVTRQTMRFVPIKSREQQAALSLHRVRSLLIKQRTQLVNMLRSVLAELGIAIPVGIVRALQIAREIVDGEPKLDLPTEATNVVAVLAGQLLQLHTQLRKLDLRLAALQRNDERARRLATIPGIGPVGATALAASVTDPSQFSSGRQFAAWLGLTPRQSSSGGKERLGRITKMGDRYLRQLLVIGATALVRYAKEKPATVDPRFVTLLARKPARVASVAIANKMARMAWALMARGGVFERGHAPMLAGA

SEQ ID NO: 198052 - protein, 425 aa, unidentified
MQQSAPEDFGAYIGIDWADQTHFVSLRDANSQEVKRYKLEQKPEVLSQWVNELQQRFPGQQVAVALEQTRGALIYALMSYEFFVLFPVNPKALARYREAFNVGGAKDDPTDSDLLLELVTLHRSKLRAWRPDDELTRTITLLVQYRRDLVDMRTALTHRLAALLKLYFPQALQWAGELDTFQACDFLQRWPTLAKVQKTPMAKLRQFYVSHNCRTVAVIEKRLQQIPTAQPLTTDGAVITTSITMVKAIVNQLRPLMVSIKELDKQIAELFAKHEDYELFSSFPGAGEVLAPRLLSAFGADRDRFASAEEIQQLSGIAPVTERSGKACWVHHRFACPKFLRQSFHEFAAQSIGQSPWARTYYKRRRERGNSHQAAVRSLAFRWIRIIYRCWQMRVPYSEQTYQQALRRGGSPIAKLIPLLVDQTS

SEQ ID NO: 198053 - protein, 320 aa, unidentified
MQQIYGRVAGLDVHRDNVVACFRRLGPRGGVVFEKERFGATTARLRELEAWLAERQVELVAMEATGVYWKPVYYALEAKFAVWLCNARHVKKVPGRKTDLTDAEWLADVAAHGMIRPSFVPPPPIRELRELTRYRKTQSAARAAEIQRLEKVLQDAGIKLTSVASRVLTQSGRAMIEALIAGERDGARLAELAMGKMRPKVPALTEALTGHFGSHHAVACGRILGHLDFLNASIQALSEQIDARTAAFASVYTSLLPVPGFDRLSIDVIIAETGADMSRFPTPGDLASWVGVCPGSHESAGKRRRVGTTKGNPWLRQALI

SEQ ID NO: 198054 - protein, 343 aa, unidentified
MDHFAGLDVSVKETSVCIVDDTGRIVREVKVASEPEALLAVLASPAYHFKRIGLEAGPLSQWLFSGLAEAGLPVICVETRHMRAVLQAQINKTDRNDARGVAQMMRVGLYRPVHVKTLRSQKLRMLLTHRKLLQSKAIAIDNDLRGTLRNFGLKVGIVGTVKFEARIQELVEKLPDLAVLVEPLLVVRRVLREQLGILHRRLLAIVQDDEVCRRLMTIPGVGPVVALTYRATVDVPARFRRSKAVGAVFGLTPTQHQSGESDRPGGISRCGDEMMRVMLYEAAQIMLVRSTKWSWLKAWAMKIARHCGMKKAIAALARRLAVIMHRIWVDGTEFRWTREVAAA

SEQ ID NO: 198055 - protein, 422 aa, unidentified
MLAESQDEEQIIARVAALDIGKAELVCCVRIPAEGNPRKRLQEVSTHSTMSRSLAELANHLVDLRIERVVMEATSDYWKPVFYLLEAHGLEPWLVNARDVRHLPGRPKTDVLDSVWLCKVAERQMLRSSFVPPAPIRRLRDLTRYRIDLVGARTAEKNRVEKLLEDACIKLSVVASDIFGVSGREMMAALIAGEQNPRVLAQLARSSMRRKITELEEAFTGQFDDHHRFLLSRMLARIDGIDADIAAVDEQIEAQLAPFAVAAERLDEVPGIGPVAAAVILAEIGADMSRFPTAGHLCSWAKFSPGINSSAGKTKGNGSTGHGNRYLARVLGEAAVVAGKTDTFLGERYRRIARRRGKKRAIVAVGRSILMIVWHLLQDPDARFHDLGADHFSRHNNPDTSKRNHVRQLEALGYTVTLTPAA

SEQ ID NO: 198056 - protein, 412 aa, unidentified
MKDLLEISCGLDVHKEKIVACILTGPLGKPTHSEIREFSTLIPDMIALRDWIVSRNCHHVAMESTGIYWMPIYEILEDAFSGDITLLVVNARHMKNVPGKKTDMRDSEWISTLLRAGLLNGSFIPEKRIREFRDLNRYRKSIIRDITSQKNRIEKFLQSSGFRLSSFISDIFGASGKNIILHLIEHGQIDRTALDSCLKTKTRNHIDEILMSVNGTLSEHQKKFLKILMNHYDSLKEHLNEIEKDLEQDIEPFILQVQQLNSIYGISTTASCAIIAEIGVDMKPFKTAEHICSWAGLCPGNNESAGKRKSTSVTKGNPYIKSMLCEIAWVIAGKRNTYLSAWYWRIKQKKGAKKAIVALAKKLLVIIYTMLKQGTLFDESCFEARRKNCEQKQLSRYIRELEKHGYHVEAQG

SEQ ID NO: 198057 - protein, 381 aa, unidentified
MTTAVPHHEQRNPTEATLFVAFELSEKTWKLGFTTGHGQKPRERTVTARHHEHVLNEIAQAKRRLGLPATAPVVSCYEAGREGFWLHRFLQAQGITNHVVDSSSIEVNRRRRRAKSDGLDVRKLLSMLMRYAQGERQVWQVVKVPAVEAEDHRHLHRDLETLKQERASTTTRIQGLLSSQGIRLTSLSKLPEQLEALRLWDGSPIPPGLRRRVLRVYAHHTFLSEQIAEVEAERRAQLQTSTEAHIDKVRQLMQLKGIGINGAWLLVMEFFGWRAFKNRREVGGLAGFTPTPYQSGESAREQGITKAGNRHVRWMTTELAWSWLRFQPDSALSCWFRERFGSGGKRLRRIGIVAVARKLLIALWRFLETGVFPAGAVLKEG

SEQ ID NO: 198058 - protein, 417 aa, unidentified
MNSPLETIPIQRHIGIDIHKDYLMIGGQNRHQEWTLRPRKVHVSRFRDWAEKNFQPGDAVVIETTGSVWDIYDIVAPLVSKTLVAHARKVRQIAEARVKTDKEDIKRLITLLIADIVPEVWVPPMHVRELRSLISFRWRLTKQITMSKNRLHSVVQRFNLNAPEGGLLTDTNKSWWEEQEFSDLTGFEVKQDLEIVKTLEGQKEAIDQKLAELSNTEPWASDMVYLMQIPGFGLIFSMVVLSAIGDISRFSNPKKLVGYAGLGAGVHDSGKKHQGKSITKEGRKELRWALVEAAWRAVGSDPYWKAQHKRLEKRMLRNKAIVAIARRMLVSIWHILTKRETYHHFDEETIAYKMLIWAQAIGEEGRQGLTRQQFAKFGLLRLGIGKDLERIVKGGGPRRIAPTEEILALKPELAPPR

SEQ ID NO: 198059 - protein, 344 aa, unidentified
MEKHTTIAMDIAKNVFEVAVSEEPGRVRERRRLTRSQMLRFFANREPARVVIEACGAAHALARELEGHGHEMVLLPPAQVRRYVLRNKTDRTDTKGLLEADRNEEIVPVPVKTVAQQSLVAVHRLRSGWMATRTARLNAIRGFLRELGVTVPVGATRVLPALTGAMEGGRVPGTLEALLKTTAEEVRDLELRIEEAEKTLKRMAREMDAAVRLQTVPGIGLLTATALIGSVGEPGRFPSGRHLASFLGLVPRESSSGDRRRLGAITKRGDGYVRMLFTHGARSVLRAASVRKQNDRLRTWALETQKRKGHNKATVALANKLTRIAWAVWLKDRPYEGRAPEETL

SEQ ID NO: 198060 - protein, 361 aa, unidentified
MRYYTGKHPFYCGIDLHARTMHVCILDHDGNVVVDQGIACNPKAFLKLIAPYRQGLVVGVESIFCWYWLADLCQQEQISFVLGHAFYMKLIHGGKGKNDRLDAGKIARLLHCSSFPLAYAYPKGMRETRDLLRRRLHLVRQRSGLLAHVQIVNSQYNLPAIDKKLHWDSNQAGVAERFASASVRQNVSADLRLVNYLSQLIVELEDYLVRTACVEDQQTYELLQTIPGVGRVLALVLLYETHDWSRFRTVGQFLSYARLVRCQHESAGKAVGSGNNYIGNPHLKWAFAEAACLMLRVSERARRWKQRYQQKRGPGKAMRVLAAKLGRAVYHMLRKREAFAEARFWKKGSEAGKQPALAAKV

SEQ ID NO: 198061 - protein, 287 aa, unidentified
MGTYYVGLDVHSRDSMFVIQDEAGAIRGRGVVPTTPEGLARLCQDYQLPAGTTVALETGTSAFYVARQLAALHLVPVVVDAHEVRRKASRPAQKSDRRDALELCDGVRRGFYQAVVHIPSPAISTLRTTLSRRRHFIRIQTAEVNAAKRVLRGAGWPGDTRRSLRTAAGWQRLLAALEPEPEIQRCVGFHYALWRQAGEQVQAVDHVLGELARNMREDVRRLETVPGVGPVVALTAIAVFADARRFPSAKHAASYAGLVPSTYRSGSCDRPWAHHQAWVRRAPRDAL

SEQ ID NO: 198062 - protein, 340 aa, unidentified
MKHYAGIDVSLECSSVCVVDANGKILREARVASEPEALIAWFGSQGLSFERIGLEAGPLSQWLFAAMKAAGLAVELLETRHVRDAFKAMPVKSDRNDARGIAQLMRLGWFRSVHCKSLDAQEVRAMLTARKLVQSKLRDVENSLRGILRGFGLKVGKTTERGFARRIEELVSGHPRLEVITRALLAVRAVLQKEFAAFEKQTRKMAQTDARTRLLMSTPAVGPIVALTYASAVDDPGRFKSSKQAGAHFGLTPKKHQSGETDYAGRISKIGDASVRTALYEAAHIMLTKPLKGCSALKSWAMRIAKRAGMNKAKVALARRLAVIMHRMLADGTPFNPAAV

SEQ ID NO: 198063 - protein, 345 aa, unidentified
MRRVLKQVLGVDVAKDELVVTLGRVLDDFTIELYAHKVFKNKESGFVGLVDWVNKLTDEQVKVLYVMEATGVYHQKFTHYLFDNDYDVSIVLPNKISNYMRTLETKTITDKTCSEAIAQFGLERKLDLWRRPNKTYKQLQQLTRERDQIVLQRSITKNQLHAEQHEAEPNQKSLKRLQEQIVFFNKQEKDIKRDIEAIVNEDLSVKGEVDMITTIPGVGRLTAVIALAETNGFEHIRNKKQLTSYAGLDVKEKQSGSSIKGKPRISKKGNRSLRKAMHLPALSAARYDENFKALYARIVAKHGIKMKALVAVQRKLLEMIYVIFKNKTPYDKEFQQKNRVQTHIA

SEQ ID NO: 198064 - protein, 418 aa, unidentified
MKSMEITAVGIDVSKRKSTVAIRRPGGVIVACPFDISHSSHDLEKLVSILKTTGGDIRVVMEHTSNYWKPIALTLKNAGFYVSVVNAMLIHDFSDNSIRKLKTDRADSLKIANYALTFWNQLPPFNDEDETRLVLKEQSRMYERLASTATSLRNGLIALADQTFPSIDQAFGHAIKNADGHEKWVDFFSIYWHRDCVLRLSIEKFTESYRKWCLRRNYKFRTNTAHKLYALAQDAVPTLPKNNGTKALVLQACKSLNAVCEAKQSTQEEMNRLASLLPEYEVVMQMEGTGPITGPALMAEIGDVRRFKNKKALVAFAGIDAPPFQSGNFESKSRHVSKRGSPHLRRAVFLVANIILTLSHKDNSVFCFMDKKRAEGKHYYVYTIAGSAKFLRIYYARVTEYLRTQEIPVAASCLNGNS

SEQ ID NO: 198065 - protein, 317 aa, unidentified
MNPSSINLYVGIDVSKNMLDVALGTDGEYWQASNDRKGIQRTVSRLVDIQPVLVIVESTGGLEKALITELYKAGISFALVQPRRVREFARSIGLLAKTDKIDARLLARFGEAVKPPLTRLPSEAQQYLDALMVRRRQLLDMLTIENNHLSTTRLSLRAKVEEHMDWLNKELEELDKQIYDQIHQIPEFKEKEKILRSAKGVGPVLCAKLLSGVPELGTIDRKKIAALVGVAPFNDESGHRQGKRRTKGGREDVRNVLYMATVAASRSNPVIKPYYQHLLDGGKLKKVALVACMRKFLTILNAMIRDMEPWRSNPVLL

SEQ ID NO: 198066 - protein, 412 aa, unidentified
MQVVHPVCCGIDVHAKMLVACLILANGEKKKRTFSTMTAELLQLRDWLVAVQCTHVALESTGVYWKPVFNILEDALTVILINPEHAHALRGRKTDVKDAEWLADLLRHGLLQPSFIPPPLIRELRELTRYRESVVREQSSVANRIQKLLESGNLKLGQVASDALGVSGRMILKALAKGESDPRKLAALARGKLKEKSLSLEQALQGRLTGNQRFVLGELLSRWEQLEAADARVTSEIDKYVQANPKLARARELLDSIPGIGPRVAEVIMAEIGIEMASVFADAAHLASWAGICPGNKATGGKRLSGRTRKGNTYLRSALVQAAWGASLKKHCYLSSQFHRLVKRIGRKKALVAVAHSLLVIIFHVLQNDQTYTELGGDYFDRRHVEQQRDYYVRRLQMLGLKVTLEELPQAA

SEQ ID NO: 198067 - protein, 416 aa, unidentified
MQVIYPCCCGLDIHKKFVVACILTTADDGQVQKATRTFGTMTDDLLAMLDWLTGAGCTHVAMESTSSYWRPVYNLLEGQVALLVANAYHIKAVPGRKTDVKDAEWIADLLRHGLIRGSFIPSPAQRHLRDLTRYRTHLVEERSRLTNRLQAVLEDANVKLASVVTDVRGVSARAILEALLAGATDPTVLAELARGRLRTKRDALARAVVGRFTAHHAFMLTEHLGHLDYLEEAMERVSAEIAARLQEDLAAVELLDTVPGISARSAEVLLAELGTDLSRFPDAKHLASWAGMCPGNAESGGKRLSGKTRKGNQALRQALIQIAHVASKTKDTYLAAQYRRIAARRGKKRALVALGHTVLVIVYHILTRRQPYHELGVAYFDQLDHQRVEQRLVRRLERLGYTVSLTAPDLEPIVAA

SEQ ID NO: 198068 - protein, 373 aa, unidentified
MTSIIYVGMDVHTTNFTVCAYRIGRESVFGETSFTASAENIAVYLETLRYNEENPKDIKFICGYEAGCLGYSLYRELSEKGIECKILAPSTMATSPLDSRKKNDRLDAQRIAKCLAFGTYKNVYVPDEEDDAVKEYIRMRDDVNAELKRVKQQITAFCVRHNKIYDGTKHKWTNQHRLWLKTLIFESKTLREVLDEYLLHLKQLEEKIATYDKRITEFAGENRYKESVCKLSCLKGIATHTALSLVSEVGDFHRFPTAQHFSSYLGLTPGEHSSGNSQHSLGITKAGNSHLRSLLVEAAQCFSRGAVGQKSAALKARQEGNSGAIIQYADRANERLRRKYMRITMRSSSNIAKTAIARELACFIWGLMTDHIS

SEQ ID NO: 198069 - protein, 379 aa, unidentified
MKTKTKTNTTNTNNTTTAPAVVPTSTAAVGSGFTLGLDLGDRSHYVCVLDAAGEILHEGTLPNDRVALALLLAKYPAATVALEAGTHSPWISRHLTGLGATVIVANPRKLHAISRHEHKCDRRDAVMLARLARADAALLHPIAHGSAQAQHDLLGLKLRDSLVRTRVNLINSVRFTLKSLGHAVTNPSSEAFHKNILTAVPADCLPVVQPVLTVLALLTAQIKIPERGLIARSKKDYPVTQRLQQIAGVGPLTALGFVLKIGEPARFGRSRDVGPYLGLCPGRDQSGGTDKQLRISKCGDGLLRRLLVSAAHYILGPFGPACALRAYGQHLAGTSAREKKRAVVAVARKLAVLLLSLWKHGTDYEPRVPAVPVLVMTPA

SEQ ID NO: 198070 - protein, 428 aa, unidentified
MKTNNNAKLEAITHKTLIVGIDIAKLTQWARFVDYRGLELGKAAKFKNDKNGFENILATIEWFCKTKSFDAVIVGLEPTGHYWKPLANYLLIHDVKVVMVNPYHTKRAKELDDNSQTKNDKKDALTIAKLVRDGRYYDVYMPQDIFAELRVLTNTRISLMRRHNSIKNTITALLDEYFPEINTVFKNVFRGKASMQILKSCPFPALILELGVEGVLTEIKKVVKRSVGRKKAEQLVETARNSIGVNYGLSSAKFKLDLMVEELDLLTRQLEQIEDAMASALSQLDYADLILGIQGIGVVTAASLLGETGDLLRFDHPRQISKLAGYNLVEDSSGKSKSGTIISKRGRKNLRSILYRIALVMVAKNNEMKELYQYLKTRKDNPLKKKQALVVVSKKIINVIYHLVKKNMEYKPELVLGEYRKNQIRQAA

SEQ ID NO: 198071 - protein, 370 aa, unidentified
MGKSVLYVGLDVHKMSVDVAIAEAGPAGEVRFYGRIGGDLEALDKVTRKLQAQDAELRFAYEAGPCGYQVYRHLTARGLECLVAAPALIPRRPGDRLKNDRRDALALARLLRAGELTPIKVPDEDDEAMRDLTRAREDAICVERRARQRTVAFLLRHGRVYQGKTTWGRGHWAWLLQQVMDHPAQQIVLQEYLDAVREASARVLRLTGQIRDLVPQWRQAPFVAAYQALRGVSLIVAATVVAEVGDLDRFNNPKELMAYLGLVPSEHSSGASVRRGRITKTGNSHARRVLVEAAWAYRMQARVTRHLLKRQEGLPERVRQLAWKAQLRLCTRYRRLLARGKARQTIVIALARELAAFLWAIGRAVAQATA

SEQ ID NO: 198072 - protein, 340 aa, unidentified
MSLYGGIDLHANNSVVVLLNEHDEVIYQKRLPNDLTTILGQLAPYRMELKGLVVESTYNWYWLVDGLMEADYRVHLANPAAMQQYSGLKDTDDHSDARWLAHLLRLGVVPEGYIYPKAERAVRDLLRKRTHLVRQHTANVLSVQNILARNTGARFSGKRIQELTKQDLTTLLADETQVLAVTSSLVVLDCLRQQIKTLEQTVHKRLHHTPSYEQLLTVQGIGTILAQTITLETGAISRFPTVGNYASYCRCVDSTKISHGKRKGTGNVKNGNPYLAWAYMEAAQFALRFQPEAQRFYQRKLAKSRNNMILARKAVAHKLARACYYILRDLVPFEATKAFG

SEQ ID NO: 198073 - protein, 435 aa, unidentified
MVETRLQVGIDFSTRWVDVCLLNPVDNVPVAQQRFANSLPGYAGVKQLLLETLKTHSYGGCAISGEATGMYWLPFFLHLAADADLQAYDAELYLLNPRWVSWYKKCFAQDHKTDPRDAYYIAHRTRTQPPSVSWQPDSDGLALRSYTRYRFHLVETLTREKCFASAYLFLKANLYRQLKPFSNVFGVTSRTLLSDSATFADLTALPVTELAAQLDALSQGKLPEPLRNAQRLQQVAQESFPLDAPLAEAVQHILSATLEHITCLATQITQAEAWIASALTQYPTMQQLQTIPGFGRTCAAGIGAEIGALDRFLSGTKWDARRHHDRPKNLRDAEDAIAKMAGLWWPRAQSGEFEAEERRMAKSGNDYLRYYLIQGADHLRKCVPEYRRFYARKYAEATKHKHKRALVLTARKSIGLIVGLLHRNEPYRSEEARQT

SEQ ID NO: 198074 - protein, 426 aa, unidentified
MEEELKVFVGIDWGREEHQVCVLDALGKVIFERKIVHEVSALRKIIDEVIGLAGGDPAGVGVAIEVPHGVIVETLVDADLKVFSINPKQLDRFRDRFTVAGAKDDRRDAHALASALRTDRRAFWPVAIGAPKWIELREESHNYEDLRADFTRLTNRLRELVTRYYGQLLTIGDVTEPWIWELFERAPDPQAAQKIRLSSIEIILRRHHIRRIGADEVREKLRAASFTAADGVREGVVRRIESLLPQLRAVMAQLKESQRNIDRLLDRCGQADTEDVSSGQDRPPDEHSDVAILRSLPGVGRIVSAAVLAEAHAVLLHGERSTLRALGGIAPVTKRSGKSLLVVQRRRACNPRLSNAFYHWGRTAVQHDEHCRQHYARLRQRGHGHARAIRGVVDRLLDVLLRMLKDRTLYDANRRTAAPLVLVPAA

SEQ ID NO: 198075 - protein, 344 aa, unidentified
MNSIDYIGFDIHKKAISFCAKAQDGRILDEGSIPARRTDLSAWAKQRSRPWWGAMEATLFTGWVYDHLKPLTQELKVAHPTMLKAIAASKKKNDKVDARKIADLLRCDLLPECYMAPSATRELRRVLRYRNLVVRQATRMKNRIAGLLMETGTPYNKERLHGRAYFSELLASLREVPRSVVELLQLSRGQLEFFATIQRRLLKGLCQNPDLSERVARLQTIPGVGEIMALSWALEVGEVKRLPSIAQAASYCGLTSAQHNSAGKEQRGPISKQRNKHLQTILIEAAKLAPRHNPQLAVVHERELKRGDRNQATLAVARKLVAYLMAVDKSGKPFAMRASGEEAA

SEQ ID NO: 198076 - protein, 400 aa, unidentified
MNKTSFSGFLGIDISKDKFDAYCIDINGEKQFYLSCSMDRAGFEKLVGHMDNLSISKEGLLIGMESTACYHMNLFSFLLAGGYTAVVINPLLIANFVKMQLRKTKTDKKDAFVIAQFLLMYVDTLAQTSISPHVSDLRDLSRQRESLLNQMMALKCDMKRLLTMTFPELEKLTGVFTKSVLQLLSRFPSAHAIVQADPAEITQLLIDHSMGRNTATTTQAIIQAARSSVGTTSPSRELILKQKADVLIHLEGHLKELTAMMIELCRSDMGDDIDIMTSLRGIGEKTATNFLVEMGGDIRKFKDHKKLIAMAGLDPAIYQSGKHDGQGRITKRGNRHLRRVIWLMTVRVIQFNDCFRQHYQKRRQDGLPFKKAVLATAHKLLRVIFAMLTQRKTFCYATNS

SEQ ID NO: 198077 - protein, 397 aa, unidentified
MVLVGIDIGKSKHDYAIVDQSGGVLKTGEFSSNRSGFEKLEKVLSGFEVELIGMEATGHYWRNLWQALEQSGYSCDLLNPTSTVYFRRMSLTKHKTDALDAVCIARYLATIGSDKRNLNIQTQEQLRSLARAQATTAEQITQTVNRLHKYLDLSFPEYPQMVGRLDSPKSLALLELYPTASLMSKARKLADKRYGKQNHRVGESLAARLKKAAKTSFGCAQTTSDALLIQQSISHIQLLQQQTKTLMHEMEIIVAEQDYDAANLLSIPGIAIKSAAAVLGEVGDIQRFETAKKLTGYIGAHPRFHESGNKSAHPRMSKAGNKKLRRILWQCTIVAMQHNPIIKAHYEKKLAEGKKKMVAIGHCMNKLIHIIWAVLTYHETFDPKGGKRLQKLGFNAR

SEQ ID NO: 198078 - protein, 403 aa, unidentified
MSPEHSIDIFLGLDVGKSEHHACALDRDGNKVFDKPLPQLESELAGVFHQLQKLGTVLVIVDQPNTIGALPIAVARDCGCEVGYLPGLAMRKAADLYPGRAKTDKRDAFIIADTARTMPHTLRAVDRNDEVLSALKMLSGFDDDIARDCTRTVNRLRSVLTQIYPSLERVFAGSTLTRTPILELLIHYKGPQGLKRAGYQRVLNWMIKRTRKDPTPLVDDIFTALKAQTVTVPGSDAAELVIPQLAANIQALKEQRNTIAEQVEEMLADFPLCEVLMSMPGVGIKTAAQILLAIGDGSDFASAGHLAAYAGIAPVTRRSGSSIRGEFPARSGNKRLKNALFYSAFAVIRSHEPSRRYYQRKRAEGKRHNAAVICLARRRCNVIYAMLKNKEFFREIPPRPVAA

SEQ ID NO: 198079 - protein, 350 aa, unidentified
MTSLSDVADIVIGVDTHVDTHTAAIVDTATGAVLDQMTIPTTPTGYEDLLAWAGEHSPARAWAIEGTGGHGAGLTRVLARDAEVVFELDRPQRIARRHGAKSDPLDAVRAAREAMSRPVRGTPRAGGQRQGLSVLLAARRSAVEAATIAQRQMFSLIVAAPETLRATLGQATGTERVQRAATLRAHRSDDVETATTRHVLRTLARRVQALTAEAADLEKQITVLVKAWHADLLDLFGVGPIVAATVLCAWSHPGRIHSEAAFAMLAGIAPIPANSGRVTTRYRLNRYGDRQLNRAIHTIVLSRQRYDATTQAYTARRTSQGKTPREIRRCLKRYIIRDLYRILESGPPTA

SEQ ID NO: 198080 - protein, 341 aa, unidentified
MKQDISVVGIDIAKRVFHLVGMDERGKIVMRKRCSRDEVLPSMANLGPVTIGLEACGGAHYWARHLREQGHEVKLMAPQFVKPYVKSNKNDMRDAEAIAEAVTRPSMRFVPVKDIAQQDIQALHRVRERLVTARTALVNEMRGLLAEYGIVLPQGVAKFRQALVSTLEAEQTKLTPLGQELFHKLFAELGKLDAEVAYYQEKLEALADTHPVCQRLQTIPGIGPLTATALMAAVSDAQVFKNGRQFAAWLGLVPKQYSTGGQTRLLGISKRGDSYLRKLLIHGARATLRWVKLKTDDRSRWMRGLLARCGWNRTAVAVANKNARIVWALLSRGGVYGDNAS

SEQ ID NO: 198081 - protein, 340 aa, unidentified
MSTINILGIDIGKFTFHLVGHDLSGREVYRKKFSRPKLIQVLSTLEITTIAMEACGGSHWLARKCQEFGHKVRLIPPQYVKPYVKTNKNDFIDADAIAEAATRPTMRFVSVKTESSQVISVIQRIRSSYLKDRTACMSRIGSILLEFGMAFPKSHAKMKTLFQWLAEHGEPISPMLLLELRDHHDFYLKLNQLILTQDKKLKEIVDHDERAQLLKTIPGVGTLTASRCISDISNAADFKNGRHLAAWIGLVPRQFSTGGKPTLLGISKRGNKGLRELFIHGARAVLVRPEKAVAVFGNWILELLSRKHFNVVVIALANKLARIAWSVLSTKQAFEVRVQA

SEQ ID NO: 198082 - protein, 318 aa, unidentified
MTRIICGVDIASATLTARIGRTGAWREFANSREGISELADFCQSQGVQLVAMEATGGYEKRSYVQLTEHGLGVAIVNPRAVRQFAQSMGALEKTDAIDAGMIAWYAETKGSQPLSLAPKAQLELRARVTRLRQLTEVRTAQKNQRRLVSLPAIEKSFEQMLGFLAQQIAELEQAISELIEADPLWREFDRAFRTIKGVGDRTVANMMAEMPEIGTLSNKTISKLAGLAPLANDSGNHQGKRSVRGGRGAVRDLLFIVGSVVGRHEPDFMAMEKRLRTANKPPKVVRIAVAHKLLVRLNAKAREIRQSHAQKQALACPC

SEQ ID NO: 198083 - protein, 405 aa, unidentified
MGDAIEAVWVGIDAGKLSHHATLVDAEGAIVWSRKVRNDQAAIEQLIAKATATAKTVRWAVDLTSAGAALLLALLMAAGQRVVYVPGTVVNRMSDTFAGEAKTDARDSFVIAETARLRRDFAELSTPNELVAELALLTGYRADLLADWVRGINRLRELLTRVFPALEQSFDYSTRSALILVSHYCTPDVIRDADTDELAAYLQREGAHRPSIPGMVAKAQTAAAAQTVALPGEATTAALITRQARKLLDIDREIKNLDKQLTERFRDHPQAHIIESMPGMGPILGAEFIAITAGDLAAFGTAARLATYAGLAPVPDDSGKRKGVMRRPRRYHRRLRHVFYMAAFSSLKSDGPSRDFYTRKRSERQRHTRAMIALSRRLVDVLWALLRDNRTWQTQPPTPLPATAA

SEQ ID NO: 198084 - protein, 361 aa, unidentified
MSTIAEDDVRVVAGIDTHKEFHVVVVLDELGRQLDMATFAATPRGYRELTGWVTDFGEVLAIGVEGTGSWGAGLCRHLRERGLNVIEVNQPDRHKRRRKGKSDRLDAEVAARAVLAGDATALPKSGDGPVEALRQIRVARAGAMKARTAAANQLHSVCDTAPDQIRSQLRGLSTRRKIAIASRYRPGDPLTPTGAAKRALVTIARRWAALDAEIAELDRAIKTILDAIAAPLLARHGVGYETAGALLCTAGDNPERLATEASFASLCGTAPVPISTGNSNRRRLNRAGDRRGNSALWTIVMARLRSGHAPTVEYLQRRVAEGHSKRDAIRCLKRFVAREVYGDIQAITAAQTTKSPLEIAA

SEQ ID NO: 198085 - protein, 338 aa, unidentified
MKNTKYFIGLDAHKEKTSYCVRDRLGNILTEAEAATLYSELEPQLKPYLTASMIGLEASTSYYTLYQNFLRNSYRIKVANTIQLRQLIAKNDKLDAQRLCEMLRLGTFPESYIPGEKIQQLRSLIQMRHALMQEKVRCNNRIQAFLDRNGMAMPPCKAFSKKWKHALMQYMGAGNFSTELRYEYDHYVYLEKKNEQADQEIIGYTTTNWKQEYQLLHSITGFGVLLPCYIIAFVHPIERFLSNRKLRRYAGVIPVSKESGDITSKGRIPKTTSKALLRWALVQAANTIGKTNTRLGRYYRRKKNQKKNTGIAKIAVASTLVDIIYKVLTTKKPYIAAC

SEQ ID NO: 198086 - protein, 349 aa, unidentified
MEHYAGIDVSLELSSVCVVDAKGKIVKEAKISSDPVALVTFFRGLGIAIERIGLEAGPLSQWLHAGLTQAGFEVVLLETRHVKAALSAMTVKTDRKDARGIAQLIRMGWFRPVHCKSVGSQEVRALLVGRKLLLGKLLDVEFSIRGILRGFGLKMGVVTRRNFEARVRELCAGHSMLEQICAAMLAARSALQTEYTKLHKAMLTIVRKDEVCRRLMTTPGVGPLVAITFKTGIDDPSRIGKSKAVGALFGLTPKKYQSGETDVTGGITRVGDEMVRTALYEAANILLSRVTRFSTLKRWGMDVAKRRGAKRAKVALARKIGVILHRMWVDSTNFRWTKEALTAPRPIQA

SEQ ID NO: 198087 - protein, 402 aa, unidentified
MNCVGIDVSKGKSMIAVMRPFGEVVVSPFEVRHTANELSELAGLLKSLDGETRVVMESTGNYHAPVAWLLHGAGLYVSVVNAMLVHDYGNNSLRRGKTDKKDAVKLANYGLDHWLTLPRYVPEEDTRLMLKTCYRQYQQYSKVQTMLKNNLISLLDTAFPDANRLFTSPPRADGSEKWVDFVATFWHCECVCGLSKKAFTAKYQKWCRKHGYNFSQDKALDIYSSACGRFGVMPKTNTAKLLVEQAISQLQTTSAALAALKQEMQSLAASLPEYPVVMGMFGVGPTLGPQLIAEIGDVRRFHSKKALVAFAGIDAPPYQSGQIDVRSRSISKRGSASLRRTLFLVMGVLLQCAPMDEPVYQFMNKKRSEGKPYRVYMMASANKFLRIYYASVKAYLDSLEHD

SEQ ID NO: 198088 - protein, 344 aa, unidentified
MNHFAGLDVSVKETSICIVDDTGKIVREVKAASEPQALLKVLGNPTYRFKRIGLEAGPLSQWLFSGLAEAGLPVVCVETRHMQAVLKAQINKTDRNDARGIAQMMRAGLYRPVHVKTLRSQKLRMLLTHRKLLQSKAIAIENDLRGTLRNFGLKVGMVGKVRFEARIKELVESLPDLAELVEPLLIVRRTLREQIVILHRRLLAIVRDDEVCQRLMTTPGVGPVVALTYRATVDVPARFRKSKSVGAVFGLTCARYQSGEIDWSGRISRCGDEMMRVMLYEAAQSMMRSKKWSWLKAWAMQIARRRGMKKAIVALARRLAVIMHRIWVDGTEFRWTREQAVAAA

SEQ ID NO: 198089 - protein, 339 aa, unidentified
MRLYAAIDLHANNCVLVILDERDRIVVELRLHNQLQLILAQLAPYRESIEAVAVESTFNWYWLVDGLMEAGYTVKLVNTAAVKTYEGLKYTGDEHDARHLAHLLRLGVLPVGYIYPKEERGVRDLLRKRAQLIRCRTAQILSIQNLVSRNSGRGISTTDIRELDDEALSRICGDSEARALALRSNLAVLRCLDEQIRGLERVVLAQAKLKPQFEKLLSVNGIGKILGMTIMYETGAIERFAKVGQFASYARCVSSSRWSNGKKKGEGNRKNGNKYLSWAFVEAAHFAVRSNERIRRFYQRKKAKTNGVVAIKAVGHKLARACYHMLKDQVPFDEARAFA

SEQ ID NO: 198090 - protein, 371 aa, unidentified
MKSIIYIGMDVHKKTYSLCALLKETGEIIGETKIPADVSLIIKFIENAKKSVDSDDVQIKTGYEAGCLGYSLYWQLAEKGIECDILAPSTMHRSAKNKVVKNDRRDAKNIATNLANGTYKSVYVPTDEDVEIKEYIRMMHDFKIELKKVKQHINAFLLRFGHHYPGKSKWIPAHIKWLKELELSDMYREILDEYLSQLEILTEKIERFKYRLEELSQKETYNEKIGQLRCIKGIDTTAAMTMHAETSDFDRFPTANAFASYCGLTPGEDSSGDSYHRLGITKQGNSMIRTTLVEAAQVLVRGTIGKKGKKVKSKQKDQDVKVIDYADKAVIRLQKKYHRMIFRGVKRNVAITAVARELACFVWGIETGHIS

SEQ ID NO: 198091 - protein, 333 aa, unidentified
MLIIGCDYHPSVQQIAWVDTETGETRERRLKHSDGEAERFYRELKEKGFRVRVGMEATGHARWFERLLAELDFELWVGDPGRIRAKQVKKQKNDRRDAEHILQLLMKDDFPRLWMPTPENRDVRQLVLHRHRLVGMRTRVMNQLQAIAMNEGVRRKRGLWSKQGRAQLESLSLPPWTSHRRQELLELLDRFDPSIDQLSQAIEQEAEEWPEVKRLLTHPGVGPITALAFVLVIGTPHRFRCGKQVASYLGLVPRKTPVPIASVSATSASRAMRCCDTCWGRRRKVWLAVTNSGVASMSTWRSAVIVQLPKWPWHESLRCGCSGCGARDGIISS

SEQ ID NO: 198092 - protein, 455 aa, unidentified
MDTRIIGIDLAVKGAHKAIVLDQVSNTFVSKLLTFHTDPADLDRILTAARAGASEDVRVMAVLEATGMAWYPVGLYLQRHGVEVYRVNGQQVADLRRVYQRHAKSDRIDARVMARLPLLYPERLHRCHFPSGPQMALQRACREVARLKGQVVASKNRILATDQFAWLGWLDILPPYEAAAFWVRAHYYDPWLVLEVGESGLAQAWQAVAPEQPAKTSWISVLVQCAERVIALYGDPNCIDYAQLQASLQREQARLSQAEEQAHQLRLTTVRPLYRQLHPERHLESIQGVGQDSAAVYIAFIGDILRFPSLRDFRGWSGLIPFSRQSASGQARGLHITKAGPDLVKATAFLDAQVARLWDPQIAAVYYNQMMALGKHHLQAVCACATHLLDRVYVVLRENRSYELRDVDGTPVDKHEARRICLEQYRVPDEVRRRNNYRVRRARKEKQLEKRNKQR

SEQ ID NO: 198093 - protein, 365 aa, unidentified
MHKLNSAATLIQRTTTEAPRDHMYYIGLDVHKRTISYCVKDAAGHVHQEGKIGSTRCELDAWIKTLPQPRMIAMEATIFTGWIYDHLLPHAEKVKVAHPLMLRAIAAAKKKNDRIDAAKIADCLRCDFLPECHMASTEIRDRRRTLRYRNLLVKQMVQMKNRVSGLLLETGVSYNKRRLHKVGYFADLMSTNDEVTESIRPLLRLSREHIVRAQRLDYALVSSLERDPLLWERLTRLRTVPGVGPITALTWALEIGDFTRFRSVKQAISYCGLCGDERSSADKVMRMPLSKQRNKHIQRVLIEAAKLAPRECHELALVRERELEKGNPNRATLAVARKMVSYLLAVERRKQDFVPAEEFKCTAAA

SEQ ID NO: 198094 - protein, 352 aa, unidentified
MRTSRKAAGIIATIGIDIGKNTFHLVGLDKRGAIVLQQKVSRGQLERRLANIPRCLIGMEACSGAHHIGRQLAAVGHDVRLIPAQYVKPFLKGHKNDYRDAEAIAEAVQRPTMHFVAIKTPEQLDLLALHRVRSRLVGRRTGVINQIRGFLIERGITVRQGPMPLRKALAEILSSDTGVLSPRMVGLVTDLVQDWRRLDERIAAVSAEIEALAEQDDGCQRLMTVPGVGPIISSAVVAAIGNGAGFKQGRDFGAWLGLVPKQESTGDRTILGKISKRGNKYLRTLFVQAAHVVLVRRPSAAMRSLWPWIEQASKRLHRNMLAIALANKLARIAWAVLARGRAYQPRNTVDAA

SEQ ID NO: 198095 - protein, 390 aa, unidentified
MEQYVGLDVSLEETSICILDESGAVVFEGNVASNPQTIAKLLRRRAPQAIRIAFETGSLSNWLWHELKALEFPVLCLDARHAKAALSMRMNKSDRNDARGLAEMARMGWYREAKVKSIESRHVRATLAARAKLVDLRRDLENQMRGLLKSLGIILGKAGSKALPRKILDALREAPHLRPLIEPLMLAHSALISQVIKYDDQLKAMARSNQTVRRLMTVPGVGPVTALAFASTVDDPQRFRRASDVGAYLGLTPRRYQSGELDRTGRISKRGDRLTRYYLFEAANVLLRVVRRGSPLKSWGLKLIKRIGPKKAKVAVARKLATILHCLWTDGTQFDWEMRKHDALINPLPPSADRIVPAGTMVSVTSKFVPAAPEQIRSGYRALHNEASHR

SEQ ID NO: 198096 - protein, 341 aa, unidentified
MMIIGCDFHPRFQQISFVDQETGEYGERRLSHPGEAEQFYRSLAGRQVRIGAEATGNFRWFRRLMQELGLEFLLGDASAIRASCTRKQKTDKRDARHILTLLVEDRFPAVWQPPMENDDLRQLLMHRCRLVRMRTGVKNQLDSMAKNEGVLSPRVWSSKRRSEIEALPLPGWYAQRRSDLLGLLEELDERIKPLDKAVGEAAEGNAEARLLMTHPGVGPIVSLAYVLTIGDWRRFPRGKQVGSYLGLIPAEESSGNSRRLGHISKQGSTLLRWLLVEAATTAQRYDASWHRQYVRLSMTKHHGVAKVAIAHKLAVRLYWMLRSGEDYSKVMERGSHVGQSV

SEQ ID NO: 198097 - protein, 359 aa, unidentified
MYFAGLDAHLRYVSVAVLDRRGELALETTVSTREPERLLAALAPYRPLDVVVETCPFWPWLHDLLVPAGIRFHLAHAKQLRAIAAAPQKSDAVDARLLARMLLSGLIPEAYPRSADQRDLLRLLRHRTALVRFRTRLAGRIHSQLHQQRLSLPREQLLRRATRTWLKETAGPRLTVEQRAIVTTHLELIDHLTPLIRALERRIAAAAAGHTTAPLLATIPGIGPYRSLLLAAELGPITRFPRAEHLVSYAGLAPVTRSSGGHTHHGSIPQGANRWVRGALVSAIPSHVRYAPTSRVTVAYEQLKARLGWRVARVAAARKLARVVYVMLTRRTRWGSAPTADDGRDEVQNSHVAPTTSFC

SEQ ID NO: 198098 - protein, 345 aa, unidentified
MKYYAGLDVSIKETSICILDETGKVCRETKVMSHPEDIIQALNCPALRLERIGLEAGPLSQWLFSCLAEAGLPVVCIETRQAKAFLKAQVNKSDRNDARGIAQMMRVNLFRPVHVKTLTSQKRRALLTARKLLQEKAIALENDIRGVLRNFGLKVGVVGAVKFEERICELVEGARELAEIMTCLLAARRTLREQAAKLHRMLLSIVRDDDVCRRLMTIPGIGPVVSLAFVATIDIPARFKNSRSVGPALGLTPILNQSGESSRIGRISQCGDAMMRALLYEAAHVMLTRTIKWSWLKAWAMNVAKRRGKQKAVVALARRLAVVMHRMWSDGTTFRWTRQQEQHTA

SEQ ID NO: 198099 - protein, 410 aa, unidentified
MQVLHPCCCGLDVHKRFVVACLIWSTEDGKQHKELRRFDTLTPDLLRLIDWLQNAACTHVALESTGVYWMPIFNLMEGLFEIVLVNAQHMKAVPGRKTDTKDAEWIADLLSHGLLKASFIPPQPQRDLRDLTRYRTSLKQERTRHVNRIHKLLEETNLKLSSVLGDLMCKTGRAILHELAAGEANPEVLADLALLRAPHKRDALVPARHQCMRAHHRFLLQELLEMVQTLERAIGRLDHEIEERLQPQKELMEQLDAITGVSQRVLETLFVEVGWELDSFPDAAHLASWVGICPGQHESGGKRRSGRTRKGNRHAKTMLVQAAHAAGKTKTYLGAQYRRLSKGRGIKRAAVAVGHSILVIYYHMLTTSQPYEEKGENYFAQHDHQEKQRRLVKQLERLGYTVKLTQEHIA

SEQ ID NO: 198100 - protein, 393 aa, unidentified
MEYIAFDAHKHYTLASVARPDGQLVREQRLPHERGALQQFLARCEPGSPVAVETIGNWYWIVDEIEAAGCVPKLVHARKAKLMMGEINKTDRLDVRGLNRLQRNGTLPTVWIPPGELRDQRDLPRTRMVLVRQRTQLKNRLHATLAKYALHDFTVSDIFGVRGRELLRQRLELLPPHTAYASQHLLRQVEELGGQIRQFEQRIQATFKPTPAIQHLMTVPGVGLTLAVVIALEVGDVARFATAEKLASYAGTTPRVHASGGKTRFGRSRPDVNRYLKWAFVEAANAICVTRRRSACRHVSRLYERIARRKGHPKAIGALARHLAEATFWILSKQEPYREPKISTVSSTGDKREIPPELPEARPLIATSPETTIMPLMTAKIWLRRNGLMIRTR

SEQ ID NO: 198101 - protein, 345 aa, unidentified
MQNMYYIGLDVHKRTISYCVKDGSGAIHAQGTIPATRFDLDRWMKTLPQPWTAAMEATVFTGWIYDHLQPHAAALKVAHPLMLRAIAAAKKKNDRVDASKICDCLRCDFLPECYMASTAIRERRRTLRYRNLLVRQMVQMKNKIGMLLMEAGVSYNKQRLHKASYFRELLTTNPDIDEGLCSLLRLCRETVVRLQKTESALVRSLERDSLLMDRVERLMTIPAVGPITALTWALEVGDVQRFSSIKKAISYCGLCGAEKSSANTVQRTPLSKQRNKHLQTTLIEAAKMAPRNSSELAMLYDKEKQKGHANRATLAVARKLVAYLMAVDRGQRDFQVLEASHCTAA

SEQ ID NO: 198102 - protein, 316 aa, unidentified
MNETIVEKFVGIDVSKSTLDLSIEPSEETLHVVYDEAGIKQIVVRLKEVNPTLIVMEATGGLEIRIATELASKGLPVAIINPRQVRDFAKATGQLAKTDKVDAAVLAAFAKAIRPQARTLKDADTRALDDMVSRRRQLVDMRVQETLRLGTAASKPLEKSLNKHIAWLDKRIAEIDTDLTSRLRKSDAWRTKDDLLRSIPGVGPVTTLTMLAKCPELGKLNRREIAALAGVAPLANDSGKHRGKRFVWGGRADVRAVLYMAAISAIRCNDTIRVFAERLKKAGKPPKVVIVACMRKLLTMMNVMLKNNTQWNPKNA

SEQ ID NO: 198103 - protein, 456 aa, unidentified
MSKRRQRVGYLPIVYPNAAGLDIGSCEIYACVSPDRAEDTVKVFGTFTADLNALADWLGANQVDTVAMESTGVYWIPAFELLESRGFKVYLVNARHMKGVPGRKSDYQDCQWIQKLHSVGLLTNSFRPDVEMCALRAYLRHRADLLHHRASHILHMQKALQQMNIQLPQVLRDITGETGLAIVRAIVAGERDGVKLAQFRDPRCKSSAETIAKALTGTWKEEYLFALQQSLELYDFYTQQVANCDAQIQQQYTVMKPRWQYSPDNPVTPVPKRRRKKRNKNSPPSGVENEIIRITGVDIAAVDGIGPGLAQTILSEIGTDMSKWPNDKHFTSWLGVAPHNDVSGGRVLRSRTLPTNNRAGQAFRQAANAVSHTSSAFGAFYRRKRAQGGPLHAQVATANRIARTVYHMLKYHVQYEDMGADEFERRHWERDIKALRKKAAKLGLTLVKAQSVQATT

SEQ ID NO: 198104 - protein, 362 aa, unidentified
MVDFIHVGLDVHARSVQGCGISGETGEVFERRLDNDPDQVAMWLLGLPGVPNVVYEAGPTGFELARVLIEYGLKCAVLAPSKIPTFGDRIKTDKRDARRLSEVAASPRLSDVSIWIPDRDTEAARDVYRAREDAMLSCRAGAQRLTHFLLRHQRRWEGGSTWTKAHLGWLTSQRFTDPCVQASFDYYLGAVLDLRRHLHDADALVTEYAGTARWVGVVNAFQCLRGISTLSAYGFAVEIGDFTRLTPQTIGAYLGLVPSEYSSGQSRHQGGITKTGNAHARRILVEAAWEHHKPYRPTQSVKLQRAWGNVDAPIRACSHQANQRLFRRWVSFDQRGKRSVKAVVAIARELAGFCHDLAIMTT

SEQ ID NO: 198105 - protein, 335 aa, unidentified
MQVYGIDLSMEKFDVNFLDAKGKEKNREVKNGLVSISRFLSSVPEEGILCAEHTGAYGDLLVSLCNQANIPIALVPGYTIKHSLGLVKGKSDPLDSKRIREYGERFHDRLVFSEYDQESIVEIKQLYTLRSQLVKARKALLTSDKGRCHLPLQNVSVHYHLQSVLSGLDTEIAAIEEEIEALINANQELNENYELVKSIFGIGPVIATDLLIKTGNFKNIDTARKAASYAGVCPFPNTSGKMVGKSKTSPFADKKLKSLLYLGASSAVQYNKEYKLYYQKKRLEGKPHYLIMNNISNKMLRTIYSVVKNKTLYSQDHICLDPRERNINSSTKKVA

SEQ ID NO: 198106 - protein, 361 aa, unidentified
MRMIGVDLHTRQQTLAMLDSTTGEVVEKTLMHEANNVRNFYSPLSRPVCVGIEATGSMQWFVNLMEELGIECQVGHPAQIRAAEPRKQKHDRRDADLILKLLLENRFPSIWVPSKELRDLRALLLHRDQWVRMRTRVQNALQAIALANGLRRGASLWSQAGQHTIASLPLAPHTAHRRTELQALYVKFEAEIEKLNQRVEEQAWERPGALLLMTHPGVGPVTALATDVFLGDPTRFADGKTLASYVGMIPSEYSSGGRQRLGGLSKQGHPLLRFLWCEAAMHAVRRDPQLQRFYRRKLIQKGLGKARVAAARKLGIRLWIMLRDQIDYNEFCRRGQMRHENGGACAGMPDTAHGAKQSPAE

SEQ ID NO: 198107 - protein, 473 aa, unidentified
MNVKAAKKKNQVVNIFEQQELLKKAEVIRENLTASTWREWETNGKFDKNAKLSFISDDMLILGCDIGSEIHYLRVIDTRGRELSKTAFSFSNDSEGFHNAKEWALELAAKHNKNQIVLGLEPTGHYWFCLATWMISNGISVVQVNPYAVKQTKEVEDNSQLKDDRKDPKLIANLVKDGNFGMPYLPEKLYAELRRLSMFRDQLNEDRIRSINRMHRELKIYFPEYKDALGKVDGAFSLELLKQAPFPEDLTALGEDGIRQIWHNAKLRGRGYSRAGEILQYAKTSVGIKDGVNAGKMAVQWFVKRIMELDAELAVIENEINQKCQEIPHMGNILEISGIGENTLSGILAEMGDISRFDDAKEIQKLGGLGLVACSSGKHKGETKISHRGRKRLRYWLFQAAKSVVAHAEEFKELHIYYTTRTDNPLKKMQSLIVIACKLLRIIFAILKNGTVYDPKKMLMDIKRPENQGAVAA

SEQ ID NO: 198108 - protein, 387 aa, unidentified
MPQLNDQSRSHTALKQDSTLIAVLEMSQSAWLVAGLVPGIERHPLKKIEPDEAALLRLLRRWQEEATQAGHPITRITLAFEAGRDGFWLARWLRARGIEAHVIHPTSVAVSREHRRAKTDRLDTALLKRAFLGWLRGERGHCSMAEIPTLQEEDAKRPTREREGLVRERTRLVNRIKGALARLGIRGFKPTLRHAPERLSALRLPEGAPLPPNTLAELRRDMARLRFVLDQIREIEAARLEQLEQHPETGTHTMVRVLARILGVGIETADMLVHEVLSRNLRDRRAVARYAGLTGAPDESGRRRREKGLAKAGNARVRRGMIPLAWRFLRFQPESALTRWYRARTADARGTTRKTMIVALARKLLIGLWRLVRSGEPLEGVVLRPAA

SEQ ID NO: 198109 - protein, 400 aa, unidentified
MRAVFGIDVSKVSSEVAILVNGEKVHGYTMPNDAIGFARLLGDLKTVHKPEIIFEATGVYSRPLQAFLEDNGYAYTRLNPLEAKKQLDSFRVRKTDQIDAEKLAQSQFVLNRKPTYVQEEVYQELRDLSRFYQNLTEDIVRAKNRLHKVLQVTFSELETILSTPTGEQYWNLVIAFPCKDFVLDLSKDKLSESIRQSTSKRISDKRVAYLAEKLITLANKSYCAVKKTSPILEEVRYYAKELLRLSEQRQAVLDEMVELAQPLPEYDILLSIPGIAETTATSIIGELGDIRRFQSANQINAFIDIDLRHYESGNFIAKEHITKRGNPYARKILFKCIHNIASASHTNPCHIADFYEKRKRQSQTTSTKPHTIASIHRLIRTMYYLITHNKFYDYTLTQNQ

SEQ ID NO: 198110 - protein, 421 aa, unidentified
MENTAARKLKQVPEGYLIIGVDPHKKRHAAVAITRDFTTRDKFKFDNTREGLETMLRRARMEMVKLDCRGVMFAIETGGHYWRNIAYFLDEQGIPFRFINQFTLKRRREGKDLNRRKNDYRDSEVAAQLLCTGEFTESTIPQGVYAELRTAHNAYRRLVKERTRITNLIKGLLDSLFPEFTLVFKDPCGLTALSVLSTCAIPGVIAGMTEEEFVATIEAKHQGRLMRKKLRALHHMARASIGIVAGARPVSSEISFLVEKLELIRGHICIIERTLVSLVDETEEGKYLLSIRGLHYIAVAGLLAELGCFKAYRSAKQMIKMAGSNPTESESAGKRGSHTPMSKQGRPVLRYCAWTSVIPMLRLNSDFRAWAKQRRERPAHANPLNGREIVGAALNRLLRLAFALVKNQTYYRLPQLVQISG

SEQ ID NO: 198111 - protein, 376 aa, unidentified
MENDSTLYVGLDVHKDSIMVAYAIGMGDVELLGKTGTTHIEVDRLCKRLQSKARHIVAVYEAGPCGYGLYRRLTDKGFDCMVCAPSLIPRKPGERVKTDRRDAIKLVRSLRAGDLSAVHVPTVEDEAFRDLARAWSSAREDLKQARCRLKSFLLSHGVRYVGRPDWGPTHRRWLSTFSFDSAWQQLAFNEHRRTIEDRLAQCERLEVALREAVPNWRFYPAVLALQAMRGIQFTSAVGLASELGDLSRFEHPRQLIAWLGVTPSEHSSGGKRRQGSITKTGNSYARKLLVESAWSYRHPARVSIDIQRRHEGIPKPIIDRAWDAQLRLCRRYRKLVARGKSAHVAIIAVARELTGFIWDIGRLGMSLASPLGPRSA

SEQ ID NO: 198112 - protein, 341 aa, unidentified
MSKLTTIGLDLAKNVFHVVGCDARGKRVLRKRLRRAQVLGYFSQLPPCRVGMEACAGGHYWGREIQALGHEVRLIPAQHVKPLVRGNKNDYNDALAIAEALGRPGLRFVGLKSAAQQDIQALHRLRARCVAERTALCNQLRGLLAEYGIVLPRGVASLRRRLPELLEDADNGLSALFRRLLAERYRQLQELEAHLATYTRELERHSAASEACQRLQGIPGYGPVLASAFHGAVGDGAAYRRGRDVAASIGLVPRQHSSGGKARLLGISKRGDRYLRSLLVHGARAVVSRAASKRDRLSVWINRLRERRGFNRTVVALANKLARIGWAVLARNTAYQAQRAV

SEQ ID NO: 198113 - protein, 402 aa, unidentified
MNAVGIDVSKGKSIVAIMRPFGEIVSAPFEIKHTASDIKSLVSLINSVEGESRIVMEHTGRYYEVLAHQLSEANLFVSAINPKLIKDFDNDSLRKVKSDKADAVKIARYALDKWHNLKQYSVMDELRNQLKTMNRQFGFYMKHKTAVKNNLIGILDQTYPGVNAYFDSPARSDGSQKWVDFASTYWHVDCVRKMSLNAFTCHYQNWCKRKKYNFSQSKAEEIYGKAKELVPVLPKDDLTKLIIKQAVDQLNSASTTVEALRTLMNETASKLPEYPIVMDMKGVGPSLGPQLMAEIGDVLRFTHKGAITAFAGVDPGVNESGTYEQKSVPTSKRGSSDLRKTLFQVMDALIKTKPQDDPVYRFLDKKRAQGKPYYVYMTAGANKFLRIYYGRVKEYLATLPKS

SEQ ID NO: 198114 - protein, 371 aa, unidentified
MGKHRLAFVAFDSAKNKHAVAIADSGRGAEVRYLGEIDNSPDAVRKLVAKLTRQYERLHFCYEAGPTGYGLHRQLTELGHVCDVVAPTMIPKRSGDRVKTNRRDCVALVKLLRAGELRAIWVPDSVHEAVRDLTRARATAMVDLKTKRQQLLSFLLRHGRGFPDGRNWTKTYERWLAKQTFAHPAQQIVFQDQLEAITTAQARLAALEQQLREIVPTWTMAPVVAAYQALRGVSFLVAITFVAEVGDVRRFATPQQLMAFLGLVPSERTTGDTIRRGSITKTGNHRARRVLIEGAWTYRFSARVSETLRTRLKDLPSSVRAIAWKAQVRLCARYRRLIARGKKTPVVTTAIARELSAFLWAIGQQVAPQTR

SEQ ID NO: 198115 - protein, 441 aa, unidentified
MTEFFLGIDVSKGYADFVLIDSQKNIVEKNFQLDDTFQGHNLLFSFLQSFFLNNPQSNIIAAVESTGGYENNWVSFIAKLKADFPICVTRLNPFGVSHSSKAELKRVITDKISALTIAEYVINHRAKISFVGEDYFAPLRKQWIYIKLLVKQKVQLYNQLEALLYTANPELITYCKHGMPNWVLMLLKQYPSSKSLAKASPSVLSRIPYVTVQKAETIISNAKISVASQTDPVTGALLKSVVEQIIFLDKTIKAQEKKLTDSCAFPEVKLLSSFIGIGAYSAVGLLLEIRTIERFSSSKKLAAFFGLHPVYKASGDGMGSMRMSKKGRREPRLILFNIARTAINCNPLIKEVYKNNLKKGKSGLSAIGVVMHKILRIVYGMLKTNTPFNPDIDRRNTEHAAIKKPKVVVLKSRRFQEFDSLAPVSKKQNKKREEQKTSQKE

SEQ ID NO: 198116 - protein, 391 aa, unidentified
MIYVGIDVAKDKHDCFITKSDGEVLFKAFTITNNLDGFNELHQKITSVMDDVTKVKVGLEATGHYSYNLLGYLIDKGLPTYVINPLHTNLYRKSLSLRQTKTDKVDARTIASMLMSDVNLKSYSDISYHNEELKSLTRYRFDKVKERAKLKTSVSRLVCILFPELEKLVPTLHITSVYALLSEFPGAKHIATAHLTRLTNLLSEASKGRYGKDTAITFRDAARASIGSNMPAKSLELKHTIKLIQELDSEIDEIEKEIKIIMDEINSPILSIPGINYRMGAMIIAEIGDFNRFDSPDKILAYAGFSPSTYQSGQQDSVYAHMEKRGSRYLRYALYNATKYVCHWDPTFAAYLAKKRAEGKHYNVAISHAVKKLVRVIYHLEKTKQQYIKVA

SEQ ID NO: 198117 - protein, 411 aa, unidentified
MDKVYDICCGIDVHKKLIVVCFKKGNKQEIREFGATTRELLELADWLKEGGCEMCAMESTGSYWKPLYNILEASDLKAMVVNAQHMKAVPGRKTDVKDAEWIADLVQHGLLNPSYIPNKDQRELRELVSYRKSLVGERTRELNRLQKMLEGANIKLSGTIKDINGMSARNILEYILTGKAFDEKKYDEMYEQRLISHNLKASKEQIIDDLNGVMSPLQRRMMRELLAHLDELNQHIRNLDNEIDNFMKPEDKNAAQAIQSIPGIGNSSAQAIIAVIGTEMDRFPTDAHLASWAGLCPGNNQSAAKRKSGKTRKGNALLRTTLITCAHSAVKNKKSYFYAQYSRISAHRGSKRAYVAVAHSMLIAIYHMLKYGLAFEDLGADYYNQLNKERKIAAYLKKLKGLGWEAPVVAA

SEQ ID NO: 198118 - protein, 450 aa, unidentified
MGNASGVSRGDRNRNARLARLRSLVPVTNAIVGIDLADAKQMVVVTDHDSKVLARKTFRCRAWDLGAALGWAAERAAAKGFSGVTVACEPTGHRWRVLGQLAADRSMPFVCVQPMLSSWARRSEDLTSDKTDEKDAVLIARLTAQLRCYVPEPVDETWGRLRHLGARREQVIVEMVSQIQQMRALLECVWPAALDTAKQPFRSKTWVAAMSAICERDGGDLDRTRRLGPARVEQAVRREILKRGGQKPSLRIARRLFAALTDPTGVIAHRPGALERVAFLLVDWHTAGDKLTDTEARMISVLGELKLTALATSIPGLSPVGAAAILAETGDPNRFASGRALVKHAGLAPREKLSGTFVGRTKLTGAGRPGLRLAAWRAVWGTQRGNTVYAARYRHLTSREQNKLTATQAQTVIAAAILRQLHAVITTGQAWDPDIATHGTGHRKQMPIAA

SEQ ID NO: 198119 - protein, 320 aa, unidentified
MQTSSVVRHIGADVAKDEVVFACAEASFTVRGVKNQHAALSAFLKGLPAGSRIGLESTGIYHELLANLAHKLGFVVYVLNPKDARNYAKAIGLRGKTDRVDSEMLARMISREHEKLHVWVPPTPEQREIGQLLNRRAKLSSLRQSLGQTLSGVDGFGADLKSMRKRFDEVLARIDARVKELTDKDPKRKEHVQHMLTLDGVGKVVAPSLVNALERLPLKSADAFVAFTGLDPRPDESGRYRGKRRLSKRGPSELRRLLYLAAMSAKKTKTWKPIYEHYRAKGLSSTASLVVIARRLARIAWSMYTHNREFEQTRFKNALT

SEQ ID NO: 198120 - protein, 417 aa, unidentified
MNSPPKTTGIDRYIGVDIHKYYVMVGGQNRSMEWILRPRRVQMSRFRDWAEKNLKQSDAVVIETTGSVWDIYDIVAPLVGKTLVANARSIRQIAEAKVKTDKKDIERMLRQLINGTVPEVWVPPVHVRELRSLISFRWRLNKQITMSKNRLQSVVQRFNLDLPEGGLLTEKNRGWWDEQTFSNLTGFEVEQDLEIVEILEGQKTALDRKLAELSNSEPWASDMVYLMQIPGMGLILSMAVLAAIGDIGRFPHPKRLVSYAGLSPGVHTSGETNRSKPITKEGRKELRWAMVEAAWAAVRSDPYRKAQFKQLEKRMHRNQAIVAIARRMLVSIWHILTKREPYQHFDEEDIAYKMLIWAWAMDEGSRKGMTPQQFAKYGLLRLGTGQDLERIYRGGAVRRIAPTEEILALKPELAPPI

SEQ ID NO: 198121 - protein, 408 aa, unidentified
MNAVGIDVSKGKSMVAALRPMGEVALLPQEFLHTEVGLEQMAYAIIALGENTRVIMEATGRYHEPVAAALHEYGIYVCVLNPLFIKQSGGGSIRKVKTDKADAMKIAKYGLDNWVDLREYTPMDTVRQQLKLCSRQYNLYMKTVVSLQNNLISLTDKTFPGVNELFSSPERADGHQKWVDFVMTFYHCDCICRVSEKAFTERYQKWCKRKGYYFSAEKALDVYAGSCGHFTTLPKNDNTKLLITTAAQQLLAGKMTLAALRAEMTRLAKQLPEYDTVLAMYGVGETTAAQLMAEIGDVRRFPRRSSIVGFAGVDPGVDDSGKHSAKSVPTTKRGSPHLRKTLYQIVCTYLKKSPADEPVYQFLDKKRTEGKPYFVYMTAAQNKFLRIYYARVKECLEAFDAQQNPAQS

SEQ ID NO: 198122 - protein, 438 aa, unidentified
MSNKVIFNLDDLFISVGIDVGADFSWMSIALPNQQFVGKPYKILHNSIDSLTTAVSKIKEAEELYSLESRIFLESTGIYHYPLFCYLRDKGFNCSVINPIITKNSTNINIRKVHNDRFDSKKAALVGLKPDLKVSLMPSDLALNCRNLCREYYDLMDNRSAYVNKLQGELRMAFPQYLGIFSKVTINTSLTLLETYTSPSAFLEADKQEIINIIKSTARFGLTYAQNKYNAIIQAATDANQFGYIIDSNIKRIRLYISFIRKYDEEINNILESLHELVDANEDADFVKQIHLIETFKGAGFLSAVSIMGEIGDFSAFSKPKQLFAYFGLDPAVKQSGKFEGTKVQMSKRGSAIARRVIHTLTLQSISISRNGEAKNPVLREYYLKKCDSKPKLVAMGAVSHKVCNMIFAILRDNKSFEIITPQEHIKQYNASKCDMAA

SEQ ID NO: 198123 - protein, 406 aa, unidentified
MEQVNSVGIDVSKGKSTVAIIQPLGVTVKKPYDVRHNRKELQSLISNLHDLPGKTKVIMEYTGRYYEPVARSLAGAGLYVSVVNPKLIKDYGNNSLRKVKTDRADAVKIARYGIDNWTELREYNAMDHLRNQLQTLNRQFDFYLKQKTALKNNLISILDQTFPGVNTLFQSPVREDGHQKWVDFAASFWHVDCVLQCGKKGFAKRYANWCSRHGYNCRKGDADSIYEYSRELVATLPKNADSKTMVTTAITALTTISVIMEKTRSEMNTVASKLPEYETVINMFGVGPSLGPQLMAEIGDVRRFENRNSIIAFAGVDPGQNQSGTYEQKSVHTSKRGNSQLRCTLFKVMEVLIKTKPIDDPVYRFMMKKKLEGKPFHVYMTAGSNKFLRIYYGKVKEFYAATNINE

SEQ ID NO: 198124 - protein, 342 aa, unidentified
MNITTVGLDLAKNVFQVHAIDEAGEVVVGKALRRHQMMPFFSKLDPCLVGMEACASAHHWARQLMALGHAVKLMPPHYVKPYVKRNKNDMADAEAICEAVTRPTMRFVEIKTRDQQSVLMLHRTRQLFVRQRTTLINALRAHVAEFGIVAGVGRNGLERLLKVIEDGEDDRVPAAARDCLLALRDQLEMVKGQVLDADRHILAWHRSSEVSQRLDDIPGVGPLIATALVASVPDPHVFKSGRDLAAWIGLVPKQNSTGGKDRLGHISKAGNRYLRMLLVVGALSVIRRAKQVGYTRRPWLTKLLQRRSTKIAAIALANKIARTAWAMMAHGTFYQEPQSEVV

SEQ ID NO: 198125 - protein, 370 aa, unidentified
MSDVSVSYAAFVGVDLHKCTVSLCAVDPQGKTIAALTCDTKCVERIEQWLAALPRPSRLAVEAVGFVEWFIDRFRSCVDKIDIADATELANRRGKRRKTDRKDAADVAQRLARGECPLGWIADEPVMQLRKLGRHWRHLSRTISRAKHAMQSMLLAANLRGPKFDGASAQKWLLAHGHLLKDVQREAFGNLLDIVCLIERQRECLRRRIIFANRDPKFSALITILKSVPGIDEIWACIIAAEVGNFARFPNADALEFWSGLTPDNLESAGRTQSGHITKAGSPCLRWALCKAAVTLCRSDARQEAIRQRLIGHMPKAKANVAMGRRLLRVLFAMVRHGTLYQGQEPTGHEKAANKARRRKINKRKESIAA

SEQ ID NO: 198126 - protein, 397 aa, unidentified
MIAVGIDVSKSKSTVAILNGDGSIRAKPFDVHHVADELQALVDYIKRTSEPPTILMEPTSHYHYPLLKAFTEAELPVCLINPYQMKKYGDTELRKAKTDKRDSLRIAQYALEKSYSLIPYTPQDQKYEDLRFLSRQYSQRISTLTVAKVQLLSLLDETMPGITTILPLKSRDPDNCVLLRFIKRFKSFDVIRKMGKTRFLDSYQVLVKKTKDRFAGSKGLAIYELVLSSVTTRGENPLSAMTQDQCVDLVSTSQKAADEINLQMRIIAETMLEYKVLRSMAGVGDRLGPIILGEIGDIRRFHSGKALNAYAGNDAPPYQSGQFESRNRHISKRGNPALRKACFEVMQALKLTKPQDDPVYLFLLKKEQEGKPYNVAKMAAVNKFLRIYYARAMELYK

SEQ ID NO: 198127 - protein, 441 aa, unidentified
MEKINQHCAGLDVGSNKVYMSPDGEEVFHYETFTADFRELVNQLQELCITTVAMEATGVYWVILYEMIQTVGIDVYLVDGRQTKQVPGRKTDVKDAQWIQQLHSYGLLSRCHVTIGQIQTLKVYQRLREDHIGQAAMHVNHMQKALIQMNIRLPEVLSQVHGKSGLSIIKAILAGERDKQSLLKLCATSIIKRKGPQVLKALEGFYKEEQLFALQQSYDGYEFYQHQIKQCDLKLDAILTEISKSKEDVEVPKKRKVIRHHKPQVQDLAKKLLKISEGKDPTILPGITDYSQLKLLGELGTDLSKWPSEKQFTNWLGLAPGQNNSGKRNRNKSKRGNFKAGQIFRQSARSLIESKTIALGAFGRRIKARKGPQIAIKATARKLAEMYWRLMVKGSQYVEKGVQHYEEQLMNQRMNYVHRLAKQLNMTVSHNTSTTLEKNVL

SEQ ID NO: 198128 - protein, 400 aa, unidentified
MRTVFGIDVSKASSEVAILVNGEKIHGYTMLNDAIGFNRLLNDLKTVHNPEIIFEATGVYSRRLQAFLEEYGYAYTRLNPLEAKKQLDSLRVRKTDKIDAEKLAKSQLVHNRKPTYAQEEVYQHLRDLSRFYQNLTEDIVRAKNRLHKVLQVTFPELENLLSTPTGEQYWNLVMAFPCKEFVLSLSQSNLCEIIRQSTSKRISEKRIAYLTDKLIKLAKQSFCAVKKTSPMLEEVRYYAQELLRLSEHRQVVLDDMVALAQPLPEYDILRSIPGIAETTATSIIGELGDIRRFQSTNQINAFIGIDLRHYESGNFLAKEHITKRGNPYARKILFKCIHNIASASHTNPCHIANFYEKRKRQSTTASTKPHTIASIHRLIRTMYYLITHNKLYDYSLTQNR

SEQ ID NO: 198129 - protein, 371 aa, unidentified
MKKDSTTKFIGLDVHSKTISVAIADEGREGEVRHYGTIENTFEAIDKVIKKLTATGVELKFIYEAGPCGFALYRYLTGNGFTCIVISPAMIPRRKNVRIKNDRRDAMTLARLYRAGELSGIYVPEPEDEAIRDLARTRDDARVAERKAKQRLNSFLLRQNLIYPGKTKWNRTYFNWLGSVGMKYPAQKIALQEYIETVNECTGRVARLTEQIGLAVEEWKMAPMVKALQALRGVSLICATVTVAELGDLSRFQNPKELMAYLGLVPSEHSSGETIRRGGITKTGNGHARRVLVEGAWTYKHHARITSPLIKRQRDLPKSICQISWKAQLRLCARYRKMVARKKPNNVVVIAIARELAAFMWAIAQEVRAAA

SEQ ID NO: 198130 - protein, 432 aa, unidentified
MTEQNSAASPIQDPEPGFAAWVAIDWADQKHYWSLQVAGSNRIERGELDNTPEAIEVWVTELHLRFGEQPLALALEQRRGALVAMLSKYGQLYLYPVHPLTLAKYREAWNPSRSKDDPKDADLLLEIICQHRGRLRRLDPDTIDLRRLQFQVENRRKLVDQRTAIANRLTDLLKLYYPQVLVWFKDVASPLVGDLLSHWPSLQELQKARPATLQKFFHQHNCRDQQTIQQRIEQIGRAIRATDDEAIIDSARFLALVYVRQIAGLRAAIGELDKLIHGLAQQQPDWEIFDSLPGAGEVLAPRLMAALGSRRERFESAVELQCFSGIAPVKEASGNTQWVHMRWACPKFLRQSFHEWAGCSIPYCGWAKAYYEEQRSRNKSHHTAVRALAFKWMRILYRCWKDRQPYREDWYLLSLAKRNLPLPRLSKSVQMP

SEQ ID NO: 198131 - protein, 381 aa, unidentified
MRQVCGLDVHKDSVFVCILNENGIVFQEKFGVLTPELEQLATVLQEHDVGEVCMESTSIYWMPVWRVLEPYVAELKLVNPYFIKQLPGKKSDVKDAEWIATCLLKDLIKGSYVPADIIQQLRQYDRRIFDLNAECVRKLCKLDAALQRCNIRISNYVSTTDGKGYKEVVRLISEGVRDPEVLIKAIHGRTINRAGRDAILASLTGVISEADIDIIRQLREEVDLAQRHRDECQSRMDAICRQHFPEQLKNLQTIPGIKGRSATAIIAEVGTNVSSFQDAAHLVSWCGLKPRNEESAGKIKARSITHGNRFLRKTLIECSWAAAKTQGCFLNKFSYYQTVVRKKNKMKVQVAIARKILIAVWYVMHDNVAYRDYTPDIAPAG

SEQ ID NO: 198132 - protein, 323 aa, unidentified
MSSVSPSTNIGIDVSKETLDIAVHESAVHWTSKHDFTEFPQLLKSLKALHPIRIIIEASGGLENLLASYLGAHNLPVIVINPRQVRDFARATGKLAKTDRIDAFVLASFGAILKPAVRQLKSAETQELEALVARRTQLVNMLTAERVRLQQAQQQRRQSIVVDLKAHISWLEKRLDKCEGDLSQLLRSSPIWRATDERLQSVPGIGPVTALVLIAELPELGQLPDKQIVALCGLAPHARDSGKWHGKRTTRGGRARVRTALYMAALVATKHNLVIKTFYHRLLSAGKQKKLALTACMRKLLVILNAMFRNQTSWHSPQLVPGA

SEQ ID NO: 198133 - protein, 358 aa, unidentified
MKTIAYVGNDVHQESITMSVYVGAEQEPCIEKRIPNERMAVEKFYKRLSREYDVKACYEASGNGYVFYRWLKGIGIMCEVIAPSLIPQKSGDKNKTDKRDARKLARYYRSGELTVVHVPEEIEEASRSIVRLREQLSKEVRNAKQYLLKFLQLRGLTYREGTNWTVKHRRHLKGLKFEQGLEQRVFDEYMLLLAYKEEALKKLDKEIYELAHGDKYGARVERLTMLRGVKETTAMGLITELVDFTRFARPREIMAYLGLVPGERSSGEEQMFLGITKTGNVRVRRLLIEAAWHYRHKPALLKRPDHRLDAAWDIAQKAQRRLHDKYWRLVSRGKCTRKAVTAVARELAGFVWAIMQTV

SEQ ID NO: 198134 - protein, 426 aa, unidentified
MEKVNSVMDNRSEEPQFAAFVGIDWADQEHVWCLQACDSEKREMGRVRNRSEEMEAWIGQLCQRFKNRPIAVAIEKCRGTLILLLSRYEQLHLYPIAPQAAANFRKALHPSGATDDGRDAAALLEMVRQHRNHWQRWSPDTEQTRLIQNLVEERRRLVDQRTQLLNRLTAKLKIYFPQMLEWFDRLDTKLVAALLQRWPTLPQLQKAGTTRLRNFFRKHHCRQVELLERRLQSIRQAVPALEDQAVLQAQVPTVQLLTRLLEILNEGIEDLQRRIEQAVTVHQDFPIFDSFPGAGAVLAPRLLAAFGSQRERYRTASELQNLSGIAPVREQSGRTAWIHFRRSCPKFLRQTFHEWAGHSIAFSSWARAYYELQRARGKDHHAAVRALAFKWIRIVFRCWQDRVLYDEQRYAASLVKRNSPLRPLSL

SEQ ID NO: 198135 - protein, 395 aa, unidentified
MTRRRVLGRHPPVGWGPSCRLITAGDGALVHRPGRCRAIQDTYAKGMAMTIVENRTLITGGVDTHLNFHVAAAIDANGGTLGVETFQVGAKHYGELLAWLVGLGPVDKVGVEGTGSYGAGLARHLRQAGIDVVEVDRPNRQMRSRQGKSDDVDAIAAARAALSGTATGLPKDRDGNVEAIRVLMVARRSAVDERIQILNQMRHICFCAPDEIRTRFDGTSPKAFINATSALRPRQSDDDVVRYTTLMTLRELGRRVRNLHEENKRLNKLLRPLIRDTAPGLLEVYGVGFGTAAKLLVAAGDNPERLHSEAAWAHMCGVSPIQASSGKIQRHRLNRGGNRQANSALYTIMLSRMRHDQRTRDYVARRSAEGKTMGEISRMLRRYISREIYKELRPA

SEQ ID NO: 198136 - protein, 407 aa, unidentified
MIFVGVDWAEAHHDVYVADEEGKRLSKARLPEGVEGIARFHELVGAHVEDPTEVVIGIETDRGLFVTALVAAGYQLYAVNPMSTSRYRDRHSTSGAKSDAGDAQVLSDMVRTDRHNHRLVAGDSEGVEAIKILARAHQTMVWSRGRQTNQLRSTLREFYPAALVAFEDLAGSDALEVLRIAPTPTLGSGLSRSKIAAALRRGGRQRRVEERAAEIQVALRAEQLQAPAVIATAMGASVLASVSVIAEMVIQIDHLAEELASGFEQHPDAEVVRSLPGLGTILGARVLGEFGDEPNRYASAKCRKNYAGTSPITRASGTKKTVLARHVRNRRLADAIYLWAFAALTASPGARAYYDARRAAGDGHHQALRALGNRLVGILHGCLAHQTAYDETVAWAHRSENELASAA

SEQ ID NO: 198137 - protein, 344 aa, unidentified
MKTYYIGADVHKHSSNLAIMNKNQIIRREEFRTEIPNFLKLFEELNGNVYMIIEESTLAGWLYCNLHDKVKNFVVCDPRKNRAIYDDGDKDDQIDAGKLVEILKNKSYREVYHNDDADRIELKAWVKLYDTHVKEVVSCKNKIYSLGGKYGVIIPASVVKNVKLRNKWHLNISDTRLLSQLNFLFTSLDDKVKQVKLAKRQLEALCGKYDVIDKWCQLPGIGLIRAATIFTYIDTPFRFSNRSKLHKYCGVGLVRSTSGTDQNGRPKATRLKLPKYYNRHLKNAFVGGALSAISANNNMFKDYYESLILKGKYANTARRCVARKLINTMMGMWKSKQPYIEGLA

SEQ ID NO: 198138 - protein, 336 aa, unidentified
MEVKFVHFAGVDVSKSKIDVCVIANNHRSEIVHNCFEQSKKGFNALKKWLQQVTNQQAEKLLICVENTGLYDDALLHYLWSHSLAASLENAANIKRSIRDNRGKTDKLDARNIALYALKHCDELTLWEKPRDQVVELQQMLSERSRLVNALKMLKQVQQERKEFSWSKVVQAKSYQSGIKGLQEDIKQIEKDIWELVKSDKELLQMFVLITSIPSIGKVTACHFICYTNEFKLVKSGKQLASYCGVVPFERSSGSSLKKRARLSHQANKILKTLLHLCAITAIKMKGVFAAYYRRKIEEGKSSLIAINGIRNKLALTIAAVIRNNEPYNENYIYHH

SEQ ID NO: 198139 - protein, 338 aa, unidentified
MSIVYIGIDLAKTVFAVHGVNEFGRAELVRPSVPRARLHELIATLPPCTIGMEACSGAHHWARLFIAAGHTVRLIAPKFVVPYRLSGKRGKNDAADAAAICEAVQRPSMRFVPLKSIDQQAQLMVHRARQGFVEQRTATINRIRGLLSELGIVLPLKAATVRMQASLHLEALPGWANIVIGDLLSELQRLDDRINQYDRHLGQIARGDDRARQLTSLPGIGETTATALAATIGNGHDFRNGRQLAAWLGLVPGQYSSGGKTRLGRITKAGDPYLRTLLILGARAVLATAAKKHDSVSRWAVALEQRRGYWKAVVAMAAKNARMAWAILARGDKFALPD

SEQ ID NO: 198140 - protein, 428 aa, unidentified
MIPAVLERCAGIDVHKKFVMVCTLLGPAQANPEPKIRRFGTCNAELEQLRDWLQELNCMHVVMESTGPYWKPVFNVLEEAGVQTTLANPQQVKNLRGHKTDMKDCQWLAHLLRHGMIRPSYIPPRPIRELRDLTRRRKQLVRNGAMERNRVQKLLEESNVKLGNVLSDVFGASGQEMLFALVQGEATAEQIAQLAKQRARKKIPQIQAALEGHRMNQTQRELIHQCMAHMAFLEEQIEEVDRQIQDKIRSFGLSQSYALLQTVPGMKKEAAATVLAEVGANVDAFSTPAKLSSWAGVCPGNNESAGKRKSTRTTKGNPYLRDMLLECAWASSHRKNSQMQHRYQRLQPRKGHKRAIVAVAHALIQAIYYVLSTRQPFVDTAEPPRSPATVRRLIRHHTRRLRKLSCWLERRVQQTPSSTQEDPQITSG

SEQ ID NO: 198141 - protein, 373 aa, unidentified
MDTIYIGVDFHARQQTICYLTTETGELVTAALKHEPKTAVRTFYEQFSGQVIVGLEASGYSPWFERLLEELGHQVWLGDATEIRRRARWRQKNDRRDAELILDLMLHDEFPRLHRPSLQSREVMRMLRYRQKLIKMRTMSKNSLQSLALQSGIARRGRLFTREGKAELDAAVMSPAMQWQRAHWWQLLEPLNQQVLETMTWLKAASQNDVSITRLRTHPGIGLLTSLCLVHTLQPVARFGNTRKVAAYAGFDPMERSSAERKHFLGISKAGSRVLRYLLVEAANTAVRKDEDLKRFYQRLAQRRGRPKAKVAAARKLLIRAYIMMRDEIDYAEFRRRAVAARLARLRQGPPIPAALIGQPASTARQEPPPRAK

SEQ ID NO: 198142 - protein, 346 aa, unidentified
MVETTIIGLDVAKQIFQVHGVSADGKVTVKRQLRRSEVLSFFGKLVRCIVGLEACGGSHFWAREIRALGHDVRLIPPGYVKPYVKRGKTDAIDAEAICEAVSRPTMRFIPIKAAECQATLMVLKSRDLLVRQRTQAINAVRGHLAELGIVAAKGLAKVETLIAIVRDENDQRLPAAARMALKLLADQIEGLTDRVDTLGREIVAEVRRDDTMRRLATIHGVGPITAATIQALVPDPGAFTSGRHFAAWIGLTPKMHSSGGKERLGKISKMGNPALRSLLVVGATAVLRHARRGATISPWLTALLARRPAKVAAIALANKMARIIWALLTKGGTFIRKSLATEHPVA

SEQ ID NO: 198143 - protein, 371 aa, unidentified
MSPIQIAAQPRAPRQIATTTSSSSTQVWAGVDTHQLTHHVAVIDAAHTQLGHAQFPACQAGYADLVAYVNRFGTVAAYGIESTGSYGAGLTRHLLTQIAGVEVFEVDRPEKSTRIKHGKSDPVDAYSAAVQVCTGRAVGRAKLTTGAVEALRALKVPRDGAVKDRTRAYSQLRDLITTAPGSLKDDLIGLTGKQRAAKALAMRPDLTQINDPVQATKHAMQSLARRIRFLDGEIAVADQQIHQLTKMLVPSLLAMRQVGPQTAAQLVITAGQNIDRMTSEAAFAKLAGVAPLPASSGKNNTRHRLNRGGDRQANAALYLIVVGRMKNHPETLTYIERRRGEGMSNPEIIRCLKRHLARHIYRALRTDLMTP

SEQ ID NO: 198144 - protein, 343 aa, unidentified
MQAVTTIGLDIAKSVFQVHGVDAHGNVVVRRQLKRRHVLAFFEKLPPCLVGLEACASSHHWSRELQALGHTVRLMPPAYVKPYVKRQKNDATDAEAICEAVTRPNMRFVPTKTAEQQGCLMLHRTRHLFIRQQTAVINAIRAHLAEFGVVAPVGRKGVEELLRVVADARDERVPEIARACVAALGAHLRMLKAQILEFDRRIMSWHRSNAASKRLDAIPGVGPALATALVACVADPRAFRSGGDFSAWIGLVPKQRSSGGKDKLGAISKKGDRYLRGLFTAGALAVIRYAKIHGTKHRPWLTALLARRPTKVAAIALANKLARMAWAMMAKGEHYKEPAALAA

SEQ ID NO: 198145 - protein, 316 aa, unidentified
MTTNAIVVGVDVAKDRLDVAVRPSGETWSTANDEAGVTALVARLRPLGPALIVCEATGGFERAAIAALAAAGFPVVVANPRQVRDFARATGQLAKTDQLDAGILALFAERVRPTPRPLPDAAAQLLDAVLTRRRQLLEMLVAEKNRLGFAPKPLHRGIQAHIRWLERQLDDVTKELASQIEASPVWRAKDDLLQSVPGVGPIVSSTLLGELPELGTLSHKQIAALVGVAPLARDSGTLRGKRMVWGGRASVRTALFMAAMCGRRWNPVLKVFYERLKAAGKPTKVALIACARKLLVILNAMMRDQSRWASNVQYSC

SEQ ID NO: 198146 - protein, 336 aa, unidentified
METVRAIVGIDVSKKKLDIALLVNGKIKAKVVDNSTDGYELLLMWLSKSKVEKDALHVCMEATGIYYEPVALALHDAGVAVSVVNPACIKGFGHSENIRNKNDTADAGLIARYCAAMQPALWSPPPLEQRQLRAWSLRVQALKDIRQQEENRLEANTFTGMTDVAEHVKQHIAWLSAEIQKLEGDIDDHIDRHPGLKRDAELITSIPGIGATTVARILGQLGDIRRFDNAKAFAAFLGVTPKQRSSGTSIKGRTMMSRAGSMSMRAALYMPSLVACRHNPILRRFAQRLSATGMAKKAVIGAVMHKMTHLIYGVIRTGKPFDPNYLANGLAIQDGI

SEQ ID NO: 198147 - protein, 340 aa, unidentified
MRQLYVASDLHGNNNLIGIIDGEGKRIFKKKLPNDPLLINDILKPFKEEIVGIVVESTYNWYWLVDALMEEGYKVHLANPAAIQQYSGLKHTDDKHDAFWLAEMLRLGILPEGYIYPKEERPLRDLLRKRGHLVKLRTSLILSLENIISRNFGRKLPVNDVKGLRKDHVTPLFEGKEDLGLAGRVSKETIDFLTHQIRQIEGVVEKRITLKEQYRNLLTIHGVGKILGLTIMLETGPIGRFETVGDYTSYCRKVPSQWVSNGKRKGSGNRKNGNKYLSWAYAEASDFARRLHPESRAYYNRKMQKSNPAVAHSALSHKLARAAYYIMRDQVAFRPEKLFG

SEQ ID NO: 198148 - protein, 341 aa, unidentified
MKTFIRIGVDLAKNFFQVHAIEQEGGAAVARKLTRTKFREFFKGVAPCRVGMEACGSAHYWARELRAMGHDVVLMPPAYTKPYVKRGKNDAADAGAICEAMSRPEMRFVPVKSAAQQAVLMLHKTRDLLVKQRTMNVNALRGHLAEFGLIVAKGIHRLEELLALARAETTLPDDALAAVETLALQTEQLDTRIASLAKSIGKTNAKSPTSQLLLEVPGVGPLIASAMTASYPDPGVFKSGRDFSASLGITPNQYSSGGKEKLGVITKKGNRYLRKMLVVGCTSVLRVAAKYKGGLAEWIVSMRSKKPERVVAVALANKLARICWAIMSTGEGFREELFTRA

SEQ ID NO: 198149 - protein, 426 aa, unidentified
MPFAALDLHKKIVEAVVLDDTGNVLHRDRFATTREALTDFARNHLPPGTHIAVEATTNTWAVVRLLQPFAAEVVVSNPLRTRAIAEAKVKTDKVDALVLANLLRCDFLPRVWIPDQETIALRHQSTERANLVADRTRIKNRIHSVLHQRLIQAPSDDLFSPRSLAWLRQLEIDALGRQALDRHLRQLDHLEAEIFDLSGELAQQANDDPRIKLLMTLPGADFPVAQTLSAAFGDVSRFPTADKAAAYLGLVPSTRQSAHHCYHGPITKQGNSHARWMLVQAAQSLDSHPGPLGVFFRKLAKRKNRNVAVVATARKLVTIAWHMLKNNEPYRYAQPSTLKAKFDRLRIRATGQKKPNGSKKGAPRPANYGSGVRTRAVPSVDDVMAEAGLPPLQPLAPGEQKMIGERGSAAFARSIRQAKRIPRRSK

SEQ ID NO: 198150 - protein, 349 aa, unidentified
MSSLIIGIDLAKSIFQIHGIDGRGQVVVRRKLRRSELLPFLASHPKEDSLIAMEACASAHHWGRLLREMGYKVVLLPPHHVKPFVAPGKKNDANDAAAIAEAAIRPHIHAVPIKSEEQQAVLMQHSCRALLVRQRTMLVNALRTHLAEFGLIAPKGIENVDRLVDAMTEAVLPEVARHVLDMLVQQINDLDTQIDDLHKRIQDHAKSQSLCRLLTGIPGIGPVTASLLVASVPDINVFASARHFAAWLGLVPRQNSSGGKSRLGGISKTGNVDLRCHLVLGSTSLLAVARKNSPPPMLAWVCALLKRKSSARLVSVAIANKLARIVWAVLKTGTAFEPNRWIARQQGAV

SEQ ID NO: 198151 - protein, 354 aa, unidentified
MVVLGVDVHKDTHTTVAVDEIGREIGQKTVPARDRGHAALVRWARAHHPGGRMWAIEDCRHVSTRLERALLSAGERVVRVPPKLMAGARAAARTRGKSDPIDALAIARAALREPDLPAAEHDRTSRELKLLVDHREDLVAERTRMQNRVRWHLHELDPDLDIPSRGLDRLRVLDRLLAWLGQHPPAPQSQMVARIAAELLADIRAVTVRVNALERELSRLVEQVAPQLQAVPGVAGLTAAKIIGEVANMSRFRSEACFAMHAGVAPIPASSGRTNRHRLARGGNRQLNAALHRIAVTQARLPDTPGRTYYQRRLEMGNTKMEALRALKRRLARVVFNLLHTTTSTATGPQPVAA

SEQ ID NO: 198152 - protein, 523 aa, unidentified
MARAPKSKKRSAPAPQTIHKARGVISPRVQRVGPEHFGIVCVDCAKARSKWMLTDFYGRILVPPTEVEHTQACFASMIERLRSALEQAGIRDQIVVIERTGRYHRPIQRTFAKAGFEVRIIHPLTTKQHRQPANPGNKTDDTDLAAMQRAAVNGFGLLEPPADPLSIRLQLLARHRRDLVEKSVALRSQIHEHLYAVMPGYSKCFEDIYDARIPLWIARQFGSATAILQAGLPGLIVQLRRAEIRVHLPTLEKILAWARTAPAAEDESHLHLKILSALDDDRLSKVRGVRAIEAELAGLLVQTPYVLLMGIPGINVVSAAEFAGEMGPIERYATARAITGRAGLFPSRYQSDHVDYPDGQLVRCANRNLRRAIMMIADNLVKCNDHFRVLATGWRLHGRDARAVRVQVAGRFSRIAYQMVAGRKAYRHPCCQQRDYILNKLLIFHTDNEIGYDQLMRNLDAAVAQLPHSEYREEAVPLADELDRVLKKRGKGPRPLSEILPVVLAKLGVKPVRLPKSGEAILT

SEQ ID NO: 198153 - protein, 339 aa, unidentified
MNKQSIAVQATVFCGIDVSAATLAVALIEPDRPVQQCEFANQSSGHRKLIGWLHKRKAVVRVSLEATGIYSLDLALALDAAPQIELAVLNPKMVNRFAQTLRRSKTDAADAIVLAEYSRRMPFTAWAPPSLSGLRLRAVSRHIAALAVEHAREKNRLHAAVGSQAAPRCVIQDLKRSLLSLERRMVKMRREAMVLVRSDAEVEQRFRLLTGIPGIAQTSAVQILAELALLSPHLTVRQWVAHSGLDPVHRDSGTSVHKRSRISRAGNRHLRRALYMPALSAVRWDPHMKAFYELLQARHKTKLQALIAVARKMLHAIYGIFRSRTPYDGGKLFPQLQTA

SEQ ID NO: 198154 - protein, 272 aa, unidentified
MDRYVGLDAHAETCTLAVMGPSGRRLTSRVVETNGRALVEAIRSIPGRIHLRLEEGAQSGWLYEILEPQVTEAVVTVPRESKGAKDDLRDAWAQADELRTGAIRTRVYKAPKHLTGLRSAACAYRLATRDVVRAKNRLKAVLRSRGIVGDSKVYDTEARTKWLKELPAGHRELAEWHGRELDRIAPLRDEAEEWLLKEAKSHPIIRKLGTGPGMGPIRTAQLVAIVGTPHRFRTRRQFWSYCGLAIVTRSSSDWVRDKRGQWVRAEVRRRGG

SEQ ID NO: 198155 - protein, 346 aa, unidentified
MYQDTLIAIDLSKNSFQGCLLDKYHHERFNRKFSRNKLTDWLSRQQPLTVAMEACGSAHHWARLVERMGHRPLLVPTRTVSRYREGHKTDATDARATGVAARQPKVKFVAPKTVEQQGIQGIERIREHFSDHLTATSNMIRALLYEFGLTIPKGISAFKRGVVEIMEDAENDLPMPLRIQLIESWEYYLELEARLKIAKRARDQIIAQHEVCQQLMQLQGVGPVNSLGLYLTLGDRGASFGNGREASACIGVTPKQYSTGGEVTMLGISKKCANKRLRSSLIQGARAVIKALKKRDPKNGLEAWLKALIARRGEGRAAVALANKTVRLAWAMLHYGENFKLHPDMA

SEQ ID NO: 198156 - protein, 412 aa, unidentified
MDVVYERCCGLDIHKKTVVACLLTPGAAGQPVKVLRTFGTVTEELWALAQWLQAAGCTHVAMESTGVYWKPLYNLFEGHLAVLVVNAQHMRNLPGRKTDVADATWIAGLLRHGLLKPSFIPDRPQRELRELTRCRSSLVQERAAVVNRLQKTLEGANIKLASVASDVTGTSAREMLELLVAGVSDPALLAQCARGRMREKIPQLEQALSGHFGPHQRFLVAQHLAHIDFLDDSIARLNGEVAQRMAPFEEEIVRGDPVPGVNRRTMEVVIAEIGVDMSRFPTSDHLTAWAGLAPGNNESAGKRKGGKTRKGSRWLRAALINAAHGAARKKGSALAAQYKRIAARRGAKRAAVAVARSILVIIYHLLRDKETYHEPDLAYLDERRRLRVQHRALDQLRALGFDVTIAPQVPAA

SEQ ID NO: 198157 - protein, 379 aa, unidentified
MTSTDAAADTRETVYAAIELSKKTWVLGIAPPDRDRPSIHRIGGGNIAELVSRLRVASRNNRRIVVCYEAGYDGFWLARALVKIGIECRVLDPASIQVNRRARRVKTDRIDVLALLRALIATDRGERHVCAVVRVPSIEEEDARRSHRERQRLVRERTGHINRIKGLLFAQGIRDIKPKLRRTRIDFATLETAEGHPLPGRLRRELEREYARLALIETQLREVENERDTADSQDPVVEQKRQMLVALHGVGGTSAAILAREVFARSFASRRQLGSYLGLTPSAYDSGSTTRCQGISKAGNSWARRILIEVAWLWRKYQPASPLSNWYIQKTNGQSSRIRRIMLIALARKLAISLWRYVETGLVPQGVLLARAEPQCVPA

SEQ ID NO: 198158 - protein, 352 aa, unidentified
MTVTIVETRTQARAITGGVDTHADVHVAAALDPIGGLLGVQEFPVTPAGYACLLEWLGGFGTVCLVGIEGTGSYGAGLARHIAAAGIRVVEVDRSDRQDRRRRGKSDPLDAVSAARAAQSGRAAGTPKGRDGQVEAIRALMVAKRTARSERIQTINQARSLIVTGPDDLRARFAGHSADDLVAELASLRPRPGAVVGYATRMALRELGRRVEFLDGQLQRLDELIVPLVTARAPGLLALYGVGHDTAAKLLIAAGDHPGRLRSEAAWAHLCAAAPIPASSGKVTRHRLNPGGDRQANHALYRIVITRMSSHPPTRAYVARRSKEGLSKKEIIRCLKRYVAREVYPHLRPGPR

SEQ ID NO: 198159 - protein, 373 aa, unidentified
MCEFIMVGCDLHDKTMLLKIARGQESAEKLTVRHTSAGRARLIDDLRQRAQVAAGARVIFAYEASGQGFGLYDELTAAGFECHVLAPTKMARSTQHRKRKTDEQDAEQILQILRGHVLAGNPLPKVWIPDAQTRDDRELVRARLDVAEKAATIKVQIRSLLKRHRLLPEGLKCTWSQKASGWLRMVTRDPAVGLGVRATLASLLRQWEFLQAEIDRLDEALESLARSSRYAAAVGELVKLQGVGLLTALVFLTEIGDVGRFANRRQISAYLGLVPRSYESGAADDRKGHITRQGSSRVRRVLCQAVWSVIRHEGSDHAVYQRLVQRNPKHKKIAVVAIMRRLGVRMWHRAQAARREDLPSRVGRRSITPAPAG

SEQ ID NO: 198160 - protein, 350 aa, unidentified
MEYIAFDAHKRYTLASVVTPDGQLVREERIEHDRGALRGFLERCERGSPVAVETIGNWYWIVDEIEAAGCLPRLVHARKAKLMMGEINKTNKLDARGLNRLQRNGTLPTVWIPPGELRDQRDLPRTRMVFVRQRTQLKNRIHATLAKYALHDLEVSDLFGVRGRALLRERFELLPPHTAYASQQLLGQVEELGRQVRAFEQRIQATFKPTPAIQRLLTLPGVGLTLAVVIALEVGDIARFASAEKLAAYAGTTPRVHASGGKTRFGPSRPDVNRYLKWAFVEAANAICLHRGRAAHHHVSRLYERVARRKGHAKAIGALARHLAEATYWMLSKQEAYREPKGVGRFVHGG

SEQ ID NO: 198161 - protein, 321 aa, unidentified
MYKYNKFYGVDISKDVFDVMNSKGEHFQLRNDETGFKKLVKAIDKGSLVVMEATGYYHYCLAQYLYEKGYFVSVVNPLSVKRFIQMKLSKVKTDKSDAKAICEYAMSNEVPLYTAKDKSQAECLQLIRLIDTYLKHRTAVKNKLHGEKTLGIPSKAVYRSLNRSLKSIDKEIKVLENRLTELVKEHQQTQITLLKSIPGMGMKTALMLIVMSDGFNRFENAKQLCSYAGITPTIRESGSSVRGRSRISKMGNKKLRNLLFMCSFSACKHNKACKEIYERIIAKGKSKKLALIAVCNKLLKQAFAIAKSGLPYDENFVSTLK

SEQ ID NO: 198162 - protein, 361 aa, unidentified
MLKYCLGLDVSSKELYACLSVIDHLQKVTVKSSSKFLNNANGFESLVAWLVKHHKQKDVPLVVVMEATGVYYENVALFLHLKGYKVSVVLPNKAKKYLQATGLKSKNDRIDAQGLSRMGAEQSLDVWQPKDEYFYQLRSLTRQQQSLQELKTNINNQLHADEHGMYQNEVVISQLKLLIKTINDQIRDMEAAIVAHLNKDKEVAKLVEGITLIKGVGALTVAIILAETNGFALFKNIPQLISFAGYDVVENQSGNHTGKTRISKKGNGHIRRSLHMPALAVIRYQQSPFIQLFNRTLQRHGIKMKSYVAVQKKLLVLIYVMWKKKERYQPIEKIDYSGEQEQMSSSLFSFEEAGAHCIETK

SEQ ID NO: 198163 - protein, 312 aa, unidentified
MDGIFVGLDISKDAVDVHVQPTGECFVAGTDEAALATVVQRVQAMAPTLVVLEATGGYEIPVAAALATAGLPVAVVNPRQIRDFARATGHLAKTDALDARVIARFAEAVQPAVRPLPTAQAQLLSDLVARRRQVVDRLGAELNRHRQARAAQLQHRIAGHVAWLRQALGELDRDIAQLIRSSPVWRAQETLLTSMPGIGDVTAQALIADLPELGQLDRRRIAALVGLAPFNRDSGQWRGRRMIGGGRPAVRRALYMATIVAIQYNPAIAAGYQRLVSGGRPKKVALVAAMRKLLTTLNAMLRDQRPWEARIA

SEQ ID NO: 198164 - protein, 310 aa, unidentified
MSDRFIGIDIAKNQCELYVHPTAERITFGISDIVDVVDRIRELSPVKIVMEATGGLEVPVAAQLAAAALPVAVVNPRQVRDLARAMGILAKTDTIDAQVLALFAEKMRPESRPLPDSNMRALKDLVTRRQQLVEIQTMESNRRRMLLSERALASITLVHDTIEAEIRDLDHDIKKHITGSPIWHKKADLLKSVPGIGTTTAPLLVVTLPELGMLNRRQIASLVGLAPMNRDSGTLRGHRTIIGGRRMVRSALYMPTLSAIRCNPLIKRFYKRLRAIGKPPKVAITACMRKLLILLNAIIRDNQPWVPYSA

SEQ ID NO: 198165 - protein, 311 aa, unidentified
MTDDTIGIDISKATLDIHRLSDGKMMSFSNCTAGFKTLSKFCAQTVVTRVVYEATGAYHSGLERALGAHLPLVKVNPLQARRFAQAQGVRAKTDTVDAKMLAVMGNAFALEPDEPATKIQHDLRELRAFRSGLVKDRTRIMSRLKTQTLSITCRQSKARLGHVDKQISEIDAEIDRLINSSDTLAHSMKILCSIPGIGAVCAATILIEMPEIGSMDRKQVASLTGVAPMTRQSGQWRGKSFIQGGRKVVRNALYMPALVAMRFNPDLKAKYQAMIKAGKPPKVALTALMRKLIELANALIKADRNWVKKGA

SEQ ID NO: 198166 - protein, 388 aa, unidentified
MPQPIDLSRSLTVLDPDSTLVAVIEMSQSSWLVAGIVPGIERQPLKKLEPDAEALLALLHRWRDEGVRAGKTIKRLSVAYEAGRDGFWLARWLRTRGVEAHVIHPASVAVSREHRRAKTDRLDTELLKRAFLGWLRGERNHCSMAAVPTLDEEDAKRPNRERESLVGERTRIVNRMKSVLVRLGIRGFKPTLRKSSERLEALRMPEGSPLPPNTLAELRRDMARLRLVREQIKEIEEGRLRILEATSRTQGRHAMVRLLARVIGIGVETADMLVHEILSRTLRDRKAVARYAGLTGSPDESGGRRREKGLARAGNARVRRGMIQLAWRFLQFQKESALANWYRARTADGRSGTRKTMIVALARKLLIALWRMATMGELPEGVRLHPAG

SEQ ID NO: 198167 - protein, 341 aa, unidentified
MKLTTIGIDLAKNVFQVHGVDERGKVVLKKQLKRAQVLPFFANLAPCKIGMEACGSAHYWARKLQTLGHTVQLIAPQYVKPFVKRNKNDAADAAAICEAVTRPDMPTVPIKNVEQQAILSVHRARQGFVKARTAQANQIRGLLAEYGFAIPKGMGQLLRQAPEIIEDGENDLPGGFRLFIARLLDQLKELDRQVGELGAEIQLWHRHNAASQKLAVIPGLGPLTATAMAASIGDARNFKNGRQLAAWLGIVPRQHSTGGKPTLLGISKRGDAYLRTLLIHGARAVIRAAERKADVDPWLKALLARRNKNVAAVALANKNARTIWALLAHDRQYDPHYAMAA

SEQ ID NO: 198168 - protein, 436 aa, unidentified
MEGAGDEPLFCERAAGIDIGKAVVSVTIRVPSDTRRGGRQQETREFGTTRRQLLELADWLRCWGVERAGMESTSDYCKPVYFLLEREGFDCVLYHSSQVKALPGRPKTDKLGSVWLAKVTEQGSLAGSFVPPEEIRRLRTHTRYRRRLIQARTAEKQRCEKLPEDGHLKLSSVISDIHGACGRDMLRAIIAGERNPRVLAGLARGVMRRKTARLEEALDCSFFTGEHAFVLQMMLDEIDHFTARIAGLDERIAVLCEPYGRQIAQLDAVPGFGVTAAQELIGEIGTDMTAFPTPGHLCSWARVAPRVTRVCGQAQRQERHRQGQPLHRRHPRRRGRGRGPHPDIPPGQVPAHVHPDAEEESPGCPHENPARHRPRPPVRPPGRVPRTRPRLLRAPGRHPPPGPQPRAQPRTPRLQGHHRARPRSRSRDRGTDHPHR

SEQ ID NO: 198169 - protein, 375 aa, unidentified
MNQISRIGMDTSKSVFQLHGVDAAEQPVLRKKLRRRDVLAFFAKLEPTRIGLEACGGAHYWGRELRALGHEVVLLPPQYVKPYVQRNKNDAADADAICEAMSRPRMRFVPVKSAEQGAVQMLMGMRERLVGCRTQLSNAIRGHAAEFGVVAAKGLDKIEPLLARIATDPTVPDLAKDLFALQGQEYARLKAEIREIEAKLMAWHRNNELSQRLAEIPTIGPIGACLMVIKVTDPQAFRSGRDLSAWIGLTPKDHSTAGKRRLGVITRAGDETMRRVLVAGATSVVQQVRKGRGNPSPWLLDLVRRKPPKLAAVALANKTARIAWKLMVSGERYDPAAAIQMRERRRAPLNGGCAHRRSLVPCPTTGGAVHATLEA

SEQ ID NO: 198170 - protein, 412 aa, unidentified
MRRVIGIDIHRTFGEVVMWEDGRLRRLGRVDMTRTALEGLGGKLQRTDEVVVEATGNAMAVSRVLSPFVARVVIANPLQVKAIAHARVKTDKVDAGTLASLLAAGYLPEIWTPDAETERKRRLTARRYQIVRHRTRIKNEVHAILHTHLIPKCPHADLFNWPGREWLARQGLPEDEREAVDRHLRELDRLGEDLDVLDREIAAGALDDNAVKRLMTITGVNLTVATGVMAAIGDIRRFDDPGKLVSYFGLNPRVRQSGLSAAYHGRISKVGRSHARAMLVEAAWAAAKAPGPLHAFFVRVRAKRGHQIAAVALARKLTVLCWHILTKDEHYLWARPALVANKTRALELQAGKPQRKGNRRGPAYAYNIKALRDQELELARQGERNYARFVERWRTRPPKGEARERLNPARNE

SEQ ID NO: 198171 - protein, 359 aa, unidentified
MQTKVNEKLFDGQSIYVGIDCHKKNWTVTILGEQYEHKTMSQNPDPDILASYLKRNFPGAEYNAVYEAGFNGFYPCRKLKQLGINCNVIHAADVPTSNKEKIQKMDPVDSRKLARSLRSKEFEPIHVPDPNLEADRALVRQRFRVMKDVTRTKARVRSLLFQFNVSVHDRFTLSQTRSWSRVYMNWLKELQTEHESLKQTLDNYIRIGEWQRKELLSVNRQVRSLSQTDAYRDNYNLLISIPGIGFLTAMTFLVQIGDIRRFERLDALCDYIGLVPMMHGSGDKMSTGKLINRGRKELKIMVIEAAWEAVRLDPALMAKFNELTRRMNKNKAIIRIARKLVSRMRYVLINHESYKLDIT

SEQ ID NO: 198172 - protein, 360 aa, unidentified
MKKVSKQMRKMEAPDKPEMTMGLDIGDRYSHYCLLNQPGDVVEEGRIQSTEAALRRHFEGEPCMRIALECGTHSPWISRLLTALGHQVIVANARKIPAITGSESKNDRNDAEKLARFAAYDPRLLSPLEHRRPERQMDLNLIHARSTLVRARTMIVNALRGLVKSAGGRLPACSTESLPSRALSAIPRGLAVVATPLIQQIALLNAQIGGMDKQVEKLAAKYPEIVLLRTAPGVGPIVAAAYVLTLDRPDAASNRAAGAYLGLRPGQSQSGDADPQKRISKTGDRCLRSLLVQSAQYILGRFGPDSDLRRWGLKLAATGGKRGKKRAIVAVARKLAVILHAMWRNGQRFRAFPQAATVAA

SEQ ID NO: 198173 - protein, 404 aa, unidentified
MKGPIVSIDVSKGKSDYQAFKDLNVKYTGSRSIKHTKEGFDEIVNLVREMEKKLETEVCVVYEATGVYHRVLKKVLEDNNIKQFIINPLLSAKTRKNDSLRSPKTDKLDPKSIAKTYYSHSLHNSHKQETIYHELRELSRYYEDILVHIRKDKVAFRAQLDIVFPGYDTLYDDLYGPVALAIIEKYPHPEMLQKKKINTVSKVIQNKTCHRQAVSDTMADKAIEYSKTIYSGCDKDDIEVLILQRFIKKLNEDMAEAERTIGEMIKLAQELPDFNIIKSIPGIGDNLAARIIAELGDMTRFKKKNELVAFAGLDPRISESGQNDGDHMHITKKGNKRLRCLLYLAVTCSIRLKRDDNSIKDFYIKKKQQSNPMCSKAAKTACASKLVRIIYSMCKTGELYQYNK

SEQ ID NO: 198174 - protein, 404 aa, unidentified
MKQLLYAGIDWATKTHAVGVVDDHGGIRARFQVANTGKGFGGLIRRLVKLQVAGVAIERPDGPLVEAMLDAGLRVVVITPRQVKALRSRYRAAGAKSDAADALLLADVLRTDGHRLASLCPDSDATQVLRALSRTRKDLQKARVALCNQLTAQLERCFPGAVGLFADLHSATAIAFLRRYPTGQAAAGLTQARLAAFLRRIHYSGRTPVAVLLERLQTAPEANLSSDQAAGRAVCVTALLDAIQACHGRERELEAEIIERLEAHADQAVFTSLPKAGRGIRAAALLSELGDVRSRFPDEEALAALAGVAPVTRASGKLRSVGFRWACDKKLRAAVIDFADDSRHGSPWAAKVYTDALARTGRHPQAVRILARAWIRVIWRIWQDHTSYDPAKHGGAVRLLATQG

SEQ ID NO: 198175 - protein, 386 aa, unidentified
MPHVDDLSRSLTAFDQDSTLVAVIEMSLKSWLVAGIVPGVSRAPLKKLGADENAVLRLLHRWREEATKAGRRITRVVVAFEAGRDGFWLARWLRARGIETYVIHAASVAVSREHRRAKTDRLDTEMLKRAVLGWLRGEPEHCQMAAVPTLPEEDARRPNRERDCLVRERTRIVNRMKSALVRLGIRGFNPKLRKAVERLEELVTPEGEALPLNTLAELRRDLARLALLREQIKAIETARLERLEHAPKEGPHAMVRLIARVVGVGVETADMLVHEILSRNLRDQRALARYAGLTGSPDESGSRRREKGLARSGNGRVRRGMIQLAWRFLRFQGDSALAKWYQARTETAKGTRKTMIVALARKLLIALWRFATTGTVPDGVALRPAA

SEQ ID NO: 198176 - protein, 372 aa, unidentified
MNTSIIYVGMDVHKDTFTLCCYSLENDEILYKQKITADYKLVIKYVNQMRRLFPDLSQFICGYEAGCLGYSLYNQLTNHGLECIILAPTTMGITNTNNVKTDRKDASNIARCLAFHTYSKVYIPTDQDNAIKEYIRMRDDHKIKLKGIKQQILSMVLRHGKRYDGTKTYWTERHLSWLKAMPFTGVLKETMDEYLISYVYLLQKIDRFDSRIQELANNENYRDRVKKLSCIIGIKAHTALALIVEVGDFNRFSKAQKFSAYLGLVPSEDSSADKQNRFSITKAGNSHLRRLLIESSQGYTRGSIGYKSRALKQRQAGNDPNVIAYADRANERLRRRFYRLTMKNGLKHNVAKTAIARELSCFIWGMMTESIA

SEQ ID NO: 198177 - protein, 312 aa, unidentified
MNTIFIGIDIAKSSLDIHVKPTDDHWTCTHDAAGISDTVERLAALNPICIVLEATGGLESLLAASLTAATLPVAIVNPRQVRDFARALGRLAKTDAIDAEVIALFAERIRPTCRPVPSDEEQAFKELISRRRQLVDMRTMESNRQQLITSRLVADSITTILSAIDSELRDIDRTIKQLIKASPVWRAKDKLLKSVPGIGDGAAALLMASLPELGTLNRRKIASLVGLAPMNRDSGMLRGRRMICGGRAAVRSYLYMPTLTAIRHNPCIRSMYTRLIAAGKPPKVAITACMRKLLTILNAVMRDLRPWRPITP

SEQ ID NO: 198178 - protein, 423 aa, unidentified
MKSSGTQTFRAYVGIDWADTKHDFCLQERGSDRREFGCIAHQVECIDEWAKSLQQRFGTPVAIALELAKGPIVYALQKYDFLVLFPINPLTLAKYREAFKPSRAKDDPSDAELALDLLIRHPERFAALRPQSVGMRTLISLTERRRELVNDKIRLTNRLTHTLKEYYPQALDWFDQHDTVLFCDFLTRWPTPLQARRAHQASLKAFFHAHNAHRPQIIAARLKAIKAAVPLTQDPGVIVPCRLHVMVLIEQLRLALQAIEQFDRHIAELAPTLPDYRLFAGLPGAGPHLAPRLLVAFGEDRERFQRAEELQKYAGIAPVTERSGKKNWVHWRWQCPTFLRQTFIEWAGQTINKSFWAGAYYYQQRARGSTYQAAVRALAFKWIRILYSCWKTRTPYDESKYLNALKRRQSPLLNNLVPIPQNA

SEQ ID NO: 198179 - protein, 395 aa, unidentified
MSAEGEAIRSNDYRKDTTVKAPSTRPAAVLGLDVGKSSHWACLIDRDGEVLDSAPVRNREAELDALFASAPAGTLVVVDQFRNIGSLAVRRARAAGLGGAYLPGLAASRAAGLFAGEAKTDERDAAVIARTALGVPDSLSGVPGRGEALEAARALSSQRDHVVACATRDKNRLRAVLLESCPALEAAVDLSDRRWLELLAGFGGAWGIARSGAGGPRAEAAGEAAAASTAPPPALVEAENRQVRFLAARISEALDEAGALEAETAALLEGDETYACLLTVPGIGPRTAAQLAVSVDIGRFPDHDHLASYCGIAPRVRSSGTSVRSVRASRRGDARLKSLLIFSCNSLVRSSGRYGEYYRACRARGMGHGRALKAVARKRLRAIYAVMRDRVPYRE

SEQ ID NO: 198180 - protein, 439 aa, unidentified
MQVLYSRCSGIDVHKDSVTVCVLVYSGSAEPEIRKKQFGTHYKALLNLKVWLLTQKVTHVAMESTGVYWKPVWQTLEGHFQIILANPYQVKNIPGRKTDSRDCQWLAELLAHGLVRPSFVPPQATRNLRDLTRYRVKLTEERNRIHNRIHKVLEDACIKLDTVASDILGVSGRAMIRAIMAGQEHPDWLADKAKGTLRGKRPELRLALRGRITDHHRLMLAELMEDLEFVERKIQRIDTSIAAQCDVEKLERLATIPGIDLITAWTLLAELGCDMQAFVSPKHAASWAGLCPGNHESGGKRLSNRTRKGNRWLRRAMCQAAWAAARKKNCYLSAFFYRKAGKHGMRKAIVALAHRLLIIAFCILRDGTAYHELGDNYFDRLHPERTRNRLVRRLQRLGLEVSLRPATPLPPLDAPPPLRKKGRPCKCLERAIPCKHSRL

SEQ ID NO: 198181 - protein, 342 aa, unidentified
MAAFIGLDVSQKLTAICIVNEEGRRLWRGQSASAPEAIAKAIALQGAEDAVIGLETGPMSTWLVHELRARFLNVICIDARHAKAALSMQLNKTDRNDAEGIAHIMRTGWYRPVYVKSFDAHRVRALLGARLQLVGMVTRISNHIRGVLKTFGLLPGGMRGRPFTERVEALVADRPDVASIILPMLAARSKLREQIIAFDKAIRAVVKESPACRLLMTAPGMGPITALAYVSAIEEPSRFSRSRAVGAHLGLTPKQYQSGETDRCGRISKCGDELARLCLYEAATVILSRVKRSFALKSWAENITKRSGTSKARIALARKLAVILHRIWISGEPFDWSLPAAG

SEQ ID NO: 198182 - protein, 338 aa, unidentified
MKLYAGIDLHSNNSVIDLLDEKDKVIYDKRLPNDLPTILSALSPYQSQIQSIAIESTFNWYWLVDGLIDAGYSVQLVNTAAVQTYSGLKYTDDNHDARWLAHLLRLNILPTGYIYPKAERAIRDLLRKRTQMVRFQTMNILSIQNLIARNTGDSMKSNVIKRMAAENITLPLPNDDHALAMSCNLSVLQQCHEQIRILESSILKRIRLRSEFQSLLTVPGIGKILALTIMLETGDIHRFNKAGNFASYARCVQSKRISNGKKKGENNRKNGNKYLAWAFVEAAHFSIRYSDTIKRFYQRKCAKSKKVVALKAVAHKLARACFYVMRDKVDFDINKAFR

SEQ ID NO: 198183 - protein, 339 aa, unidentified
MNVMIGIDPHKASHTAVAIGRDEDQIACVKVRATLRQVDQLLTWAEPFEKRTWAIESVGGLGYLLAQQLVARGEDVLDVPATLASRIRVLATKRSNKNDPNDAHSIAIAALRAPTLRQVEPADHVEVLRLLSKRNRDLGRQRSRVICRMHSLFAELVPGGIAKEMYVSDAEALLAKLSVESPAQQMRYELTLELLDDVRRLDAQIKDSHRRIRMAVKASGTSVTDIYGVGPIHAGTIIGYSGDRGRFANRDAYASYNGTAPIERSSGGRVVHRLSLRGNRKLNHALHMVAVTQIRNPGTVGRIYFERKVAEGKTKKEALRVLKRHISNAVYRQLVIDAR

SEQ ID NO: 198184 - protein, 401 aa, unidentified
MNAVGIDVSKGKSMVSIMRPFGEIVSEPFEVKHTSSEIKALIALINSVDGESRIVMEHTGRYYEVLAHQLAEANLFVSTINAKLIKDFDNDSLRKVKSDKADSIKIARYALDKWTGLKQYSLMDEIRNQLKIMNRQFGFYVKQKTAMKNNLIGILDQTYPGANTYFDSPARNDGSQKWVDFIDTYWHVDCIRNMSLNAFTEHYKKWCKRKKYNYSQSKAVEIYENAKEVVPVLPKDEITKLIIKQAISQLNNASATVESLRQLMNETASKLPEYPVVMSMKGVGPSLGPQLMAEIGDVTRFSHKAAITAFAGVDPGVNESGTYAQKSVPTTKRGSSELRRTLFLVMDALIKSMPQDDPVYQFLDKKRLQGKPYYVYMTAGANKFLRIYYGRVKEYLVKLEK

SEQ ID NO: 198185 - protein, 429 aa, unidentified
MKPCEQTPQDWLAHRAFGGLDWASQKHNVVVVDPRGKVVENFEIEHCALGWKKFRQRLAPYGAIPFGIETSQGSAVEQLLEAGMEVYPINSKSAKSYRERKAPSGVKDDRLDAWSFADACRIDGQGWRALRPEDPLIKELRLLCRDEVGLIEQRTSFVCQLRHALGEYYPIALEAFEDWSSVGAWMFVQRFPTPQILQEAGKRQWEKFLHARHMWRTESGPRRLELFAQATELCGTVPMANAKSQLALSLISMLFALEKQLGIYRQRIEELFHRHPDHDLFGSLPGAGPKLAPRILAEIGDDRGRFEEGPQALQCLAGSAPVTRRTGKCKVRDHWPCHQRWACDKYLRHAMHLFAEHTLNQCVWAQIYYSHHRQKGSSHADALRRLAQRWLKIIYRMWMDGKPYDPMLHHHNQLKHGSWVFELKTANCK

SEQ ID NO: 198186 - protein, 322 aa, unidentified
MARMQGKTTSDDFQCFAGVDISKAHLDLAVSGAGRGVRFSNDAAGIAGVVAHLGGRRHRVVLEPTGRYHVMLWRALSAAGHAVAPVNPYRARQLAEGLGRIAKTDAVDARMLALIAARLPLRALEPPDDMTLDLKALYSARRSLIRRRAAARTQATGAGHAFVRHLLEQEIGFLSEQIAALETRLDALIQAQPERRRIRAILTSVPGIGAGASLAILAELPEIGRAGPGEVSALAGCAPMTRESGQWKGASRTRGGRRSLRAALHMAAVVAMTHNPPLRAFADRLRARGKHGNLVLAAVLRKLIVLANALVAQNRKWSKNAP

SEQ ID NO: 198187 - protein, 457 aa, unidentified
MPQPKRSRSRTGLSAVHPAAAAIDIGATMHVAAVGPDRDTEPVRTFGTFTEDLHRLADWFARCGVKTVAMESTGVYWIPVFEILEQRGFEVMVVNARDAKHVPGRKTDVSDAEWLQRLHEYGLLRPSFRPQAEIAGLRAYLRQRERLLDYAAAHIQHMQKALMQMNLQLHHVVSDITGVTGMNIIRAIVAGERDPNVLASHRERGCHASVETICQALVGNYREEHVFALSQAIELYDVYQTKVAACDKQIEVILKRLKKSATPPASKLLPPKHRSRQPNAPSFDARAALHAILGVDLTQIHGLGPYLALKLVGECGTNLTAWPTAKHFTSWLGLAPHNKISGGKVLSSKTRRTSNRAASLLRLAAVSVGRTDTALGAFYRRLAARAGKAKAITATARKIAVLFYNTLRHGMSYADPGATYYEERYRQRVLGNLQRRAKSLGYVLHQAERDPVQMVVS

SEQ ID NO: 198188 - protein, 352 aa, unidentified
MTVTIVETRLQARAITGGVDTHADVHVAAALDPIGGLLGVAEFPATPAGYAQLLGWLGGFGTVCLVGVEGTGSYGAGLARHIAAAGVRVVEVDRSDRQDRRRAGKSDPLDAVSAARAALSGRARGAPKGRDGQVEAIRALMVAKRSARSVRTQTINQARALIVTGPDELRARFARHTPADLVAELASLRPRPGSMIRYHTLLALRELGRRAQYLDDQLARLDQLIVPLVTARAPGLLALYGIGPDTAAMLLVAAGDHPERLRSEAAWAHLCATAPLSASSGKVTRYRLNPGGDRQANHALYRIVITRMSSHPPTRAYAGRRTNEGLSKKEIIRCLKRYVAREVYPHLRPPAG

SEQ ID NO: 198189 - protein, 411 aa, unidentified
MTKEDFIYVGIDLHKEIHTAVMIDCYNQKLGEITFPNRPADFPKLVTKVKKCNTDAKEVVYGLENAYGYGRPLAVWLIDKGYFVKDVNTAISHRQAKHRGAMYRKSDSDDAEAIALATLNMLDKLPDACPNDAYWSLGQLVYRRDNIMKQRTRLVNQLHEQLCIAYPSYKSFFNDISRPTALYFWEHYPSRKYLRGKSVEDLRKELVPVSHNKCSTKTCEKILDAVASDKVKNNAYQDARDMVTLSIVSDLQHYDSQLAEVDKMLEQMYKMLGCTLTTIPGVNVITAVKILAEIGDIKRFSNANKLAQFAGIAPLHLSSSGKGKDVATKQGNRRLQATIYFLAIQMVQVSSKGTPRNSVVRAYYEKRKAEGKTSQQALICISRRLISIIYGMLKHGTEYRMPVVENAGEKL

SEQ ID NO: 198190 - protein, 391 aa, unidentified
MVCVGIDVAKDKHDCCILDSDGTIRADCITIPNNMDGFKQLLQTIRDCTKKSDKIKVGLEATGHYSYNILGFLLDNDLAVYVMNPLHTNLYRKSLSLRKTKTDRVDARTIATMLLSDVDLKSYTDTAYHNEELKSLTRYRFDKVRERAKLKQSVSRLVTILFPELEKLVPSLHIASVYALLSEYPGAKQISEIHLTKLTNLLVTASKGRYGKDKAIQIRDAARTSIGSVMPAKSLELKHTIKFIRELTSEIDEIEVSIQKIMDELNPPILSIPGVGIQSAAMILAEIGDFSNFESPDKILAYAGCSPSTYQSGKLTNCYAHMEKRGSRYLRHALYNATKYVCYWNPVFAEYLAKKRAEGKHYNVALSHAMKKLVRLIYALQKSGKAYLAAA

SEQ ID NO: 198191 - protein, 363 aa, unidentified
MTRKRLSGNHLLDFIGTDEKAPVWIGLDVHKRSYHVALRRADGVCQSWVSAADPIVLARQLSVILQRISFIVYEAGPTGYCLERVLKANGYKVAVVAPSRIPRPVTNVAKTDKLDCLKLAEYAAKGMIEAITTPSEQESAERSVLRRRNQLVDSTRKTKQRIKSFLLFHGIEEEYGLRYWSRSAKSKLSKLPLQSDLKFVLKSLLRQLSYEEEELAKITNRLTRIAKRRPHWEVVKNLKTVPGVGDIVACAFRTELFRPERFRRAEEVCSFLGLAPAIRQSGEKRQGGWLMRSGQTRLKSLLIEAAWMWQAKDPWARKKYRTHLSRCGIAQKAITALARRLAVILWRLSVENRAYVMLKVDSV

SEQ ID NO: 198192 - protein, 387 aa, unidentified
MQSVTSATAVATTARSNDIRLFVSLELSKSKWVVTINNPGSEKFSKHVIEGGDGAGLLELLSRSRAKAEQRYGVQVKAIVIQEAGLDGFWIHRLLLANGIESHVVDAASIAVDRRHRRAKTDSIDGETLLRTLMAWARGERRVCSMVRAPSREDEDRRRLTRERGTLLKERIQHTNRVRGLLSGQGVQDYDPLRRDRFERLEALRTGDGRELPPMLKEEIRRELDRIALVTTQLAAVERARDALIRMDAEERNNPAALLLKLKGLGPEFASLLWLESLFRSFGNRRQVAAYGGLAPSPWQSGGVERDQGISKSGNRRLRKTMIELAWLWLRHQPDSALSRWFQARVGAAKGRIRRIAIVALARKLLVALWRYVTQGVVPEGAVFKAA

SEQ ID NO: 198193 - protein, 340 aa, unidentified
MYYVGLDIHTKRISICVLSEVGQLVRRCQVRGIEEMLGTLKALPDRFEVCYEASCGYGHYHDLLQPLAARVVVAHPGRLRLIFRSRDKSDRKDAERLAKLLYLGEAPTVHVPAPDVRTWRELINCRGQVIAKRTRAKNALRALVRGAGVTPPRHPDLWTKAGLAWLRRLGLPTVSQQLRRDLLLEEVEALHRQVRRIEQQLGRRARPLPAVARLRSIPGVGIRTAEAVAAFVDDPDRFRSAKAVGRYLGLVPCQDQSGDRNRLGHITREGAPVVRQLLAEAAWQARRRSPRVRAYFERVQRGDPQRKKIALVATAHYLVRVMWAMLKRGTTWEENPAQAK

SEQ ID NO: 198194 - protein, 377 aa, unidentified
METLYKRCAGLDVHSETIVACVLMGESEADLVKETETFPTMTKDLFRLLKWLEEKQVTHIAMESTGVYWKPVYNILEDFFDITLANAQRIKNVPGRKTDVSDAEWIAKLLRHGLIEKSFVPPEDIRNLRDLTRLRKKWIGHMTSEKNRIQKVLETSNIKLSTVISDVFGVSGRKLLEQLMSNGYLDQKDVEQRIHGRMAHKKQSITDSLFGTINDHQLFLIKQSWMHIVYLEELISDIEKRIDEILKDYKEEVDIIVTMTGIKKDTAATIIAEIGVNMEQFPTSKHIASWAGLSPGNHESAGKRKSTRTVKGNPHIKSALCEAAWAASRSKNTRLSAKYWSLAARRGKKKALVAIGHRMLTIIYHMLKNKEPYHEST

SEQ ID NO: 198195 - protein, 312 aa, unidentified
MAMRTKLESLGVDVAKDWLDIFNGEEVVRVDNNIKTIRVFLKSLTQSIPIAVEATNVFHELFVRLALAAGHRVYLVDAYRVSRYREAVGVRVKTDDVDARLLFRYLNAEMDHLRPYQPPPKAVKRLMTLLRVRAKLTHSKTALKQSLAGVGELAQTSKALLRHIDQAVKLINNKLVDCISQSGYIDDYRRCQTINGIGPINAAALVAFYHRGEFRKADAFVSFMGLDVRVRESGKFKGKRKLTKKGNPEIRRLLFNAARAGARTAQWKPYYDSLLGRGLTTTAAAVAVARKIAKLAFALMRDQTEYQEKMAQ

SEQ ID NO: 198196 - protein, 366 aa, unidentified
MATYCGVDFHARQQLVKWCNTEDGEIHEAQLKHESIDEVREFYAQFSGEVIVGFETSGYSSWFEAMLEKVGHQVWIGHATEIRRRARSRQKTDRRDAELLLDLLLKGEFPRIHRVSAASREVLRQLRYRHRLVQMRTRSYNSLQAIALGAGVSLKAKLRTCKGKERLLGLSVTEAQQEQRSEWLALIEQLNACIERVEQELKLVAEVDDRVQLVRTHPGIGLLTGLALVHTLSPVSRFANSRKVAAYVGLEPREYSSGERQQFGGISKAGSRLLRLLLVEAGHKAVRQDGQLKQLYYRVMQRREKAKAKVAVARHLLVRTYIMLRDGINYAEFVRRGVAVQSARVSYRPQVPGKLIERLASEQQLS

SEQ ID NO: 198197 - protein, 357 aa, unidentified
MLAEMVDHVIGIDPDRDWITAAIVDAKTTGVVSSARFTADASGYDEAIAWADSNTVEGERAWVVEGTGSYGRGVTAALSHTGEWVVEFDRPREKASKDGAKSDELDAARAAREALGRSKISSPRAHDGHREAIRVHTVARAGAVCSRTAAINELKALIVTAPDTLRSELRHMKTPSLVKKCAAFRNSPSRPLAEQCTRNTMRALARRIDYLSDEIADHDTAIKTLIDQAAPQLLAETGIGYVTAAMFYIAWSHHRRCRNEAAYARLGGAAPIPATSGQNQTRHRLNPRGDRQLNSALYIVATTKLRCDPETRTYKAKRLAEGKTNREITRCLKRYIARRVWRLLEQQPALPDPLDRT

SEQ ID NO: 198198 - protein, 315 aa, unidentified
MDEQPTIFVGIDVSKYRLDVYLRPLDEAFHVPRDVKGLEALARRFTSLPVALVVLEATGGFEASVAAALAAAGLPLCIVNPRQIRDFARAMGRLAKTDTLDAEVIALFAERIRQPVRPLPEPERSHFAELVSRRRQIIGMINMETNRRDQAVDKQLSRRLSRHIAFLEKELVELDGDIGQTIKASPVWCETEALLKSVPGVGDVTARTLLAQLPELGTIGRHQLAALVGIAPINRDSGLMRGRRSIAGGRTSVRGVLYMAALTAIRRGSPFRPFYERLTGRGRPRKVALVAVMRKLLVTLNAIVRDRTPWRPLKA

SEQ ID NO: 198199 - protein, 353 aa, unidentified
MVYVAVDIGKRRCVTCVMGEDGSILDTSSYPNTFLDASLYAKQIVDRYGSECKAVVESTGNMCMKTYEAFESNGVEVKLANPVKTRAIAEARVKTDKLDSKILAHLLRADLIAECYVPSRDVRLSRALLSHRVNITREQTRMKNRIHSLLDKYDLECKYDDIFGAHGMRWLHTIQLNGHDHEILQSLLRELIFLQDEEETANSTIAKDALHSQYVPIIMSMTGFNYYSASVLAAYIADISRFPSPSHLVSWVGLCPSVYQTGESLYMGRMKGGSRKVKWIMIQAANTAIRSDPRMKAYHERKLRRHHHNVAVTHVANKMLRIIWHMLRENRLYNERKERLYESKLKRMTHTAQ

SEQ ID NO: 198200 - protein, 295 aa, unidentified
MNIITYVGLDVHKATVWVAVAESGRGGRVRQIGVFANRPEIVMKLAAGLSKGGRQLSFCYEAGPCGYGLHRLLTGCGHDCVVVAPSLIPIKAGDRVKTDRRDAVMLAKLHRAGELTPIWIPDAAHEAMRDLVRARATAGRVLSKARQHLQSFLLRHDQIYRGARAWTLAYRRWLTTVRFAHPGQQIVLQDYIHAVQDAEARLDRLTRQIEELLPNWSMAPVVTALQAMRGVALVVAVTIVAEVGDFRRFTNARQLMAYLGLVPSEHSSGASVRRGGITKAGNVLGRRVLIEGAWS

SEQ ID NO: 198201 - protein, 388 aa, unidentified
MHYVGIDIAKRKHVALTLDGEGQPVGKALTITNDRDGFDKLLVHLGQLGMEVAVGLEATGHYWLALYSHLVEADYEVIVLNPLQVQAYRKSGIRKRKDDRYDAFWIADYIRISRQYLSPSVQPDLVQLRELTRFRASLSHQIGDCKRKVIGILDRVFPEYETLFSNVFIQTSRRLLAEALTPEEFVDLELSELSQKLRETSRGRHGQAKAHEIQTLAARSVGVGFLGHALRVQMTCLLEQLALLEQQLDELDAEIEAMMKRLPQYITSIPGIGPVTGATILAEIGDVQRFGTPEKLVAYAGIDPVVYQTGEFRAINTRMSKRGSPYLRHALWQAAFAASRFDPQLRDYYQRKRAEGKAHGTVLGAICRKLLHRIYIILKEHRPYVIRD

SEQ ID NO: 198202 - protein, 348 aa, unidentified
MTLVGCDLHSRKQQVAVLDTSTGELLEQELVHDGDAVERFYRALRPPVTIGIETTGYTQWFHALMHRLGHTVLVGEAAKIRAMVVRKTKTDRRDARHLLDLLQHDRFPSVWIPDPATRDLRALITHRVRLVRMRTMVKNGLQAIALNQRLALRSALWTQRGLAQLQALSLPTYATRRRDDNLELLAWFTARIDVLDDRIAASAAADPRARLLLTHPGVGPLTALATVLVLGPVTRFPDSKHVVSYVGLAPAVNASADKHHLGKITKQGSALLRWVLAQAAPLAARADDDLRRRYFAILHRRGRPKAKVALARKLLVRLYVMLRDHVDYEEFRRRGRASQQSRRVTSIM

SEQ ID NO: 198203 - protein, 406 aa, unidentified
MLYVGWDWAAETHDVTIIDHDARTVDRWALDHDEEGIDGTLARLAGHGRPGELPVAIETTNSLVVDRLLAAGHPVVPIHPNAFNAARPRWGASRAKSDPGDSWKLADFLRTDGHRLRRLEPVDPATAQIQALSRMRDDHVEAKVAATNQLAALLGRHWPGATRIFARLDSEIALAFLDDYPTPNSAIRLGEARMKMFCRRHSYCGRRPPAELVGRLRTAPEPTQALPAETLTELVRAQVRLLRSLLTTIADLDRAMGAALLEHTKAQLLAPMPRIGEVNLAQIVGELGPILDRAIDLEHACAQVGATPVTKESGKGRAVTFRWAANTRARKALSTFADNSRHQSPWAAQLYADARTRGKRHPHAIRVLTRSWMRVIWACWHTDTPYSPDRHGAERRIRQQPEKIAS

SEQ ID NO: 198204 - protein, 345 aa, unidentified
MELHTIGIDLGKTVFHLVGLNLCGEVVVRKKFSRAQLLRFTANRHVGLIGMEACGGAHFLGRALREQGHEVRLMPAQYVKPFVKTNKSDYIDAEAIAEAVTRPRMRFVPIKTDDQLDMQSLHRVRERWVMRRTAIVNQIRGLLLERGITLPKGRSHVDTVLPRILEDADLKLSGALRTLLAQLKLELDQMAVRIDEADTVLSRTTHQNPACQRLVAIPGVGPVIATALIAAIGNGAAFRKGREFAAWMGIVPGEYSTGGKQKLLGISKRGNSYLRRLFIQGARSVLQHSTKQTSALSAWLKQLQARTHPNVAAVALANKLARIAWAVLAKDEPYRPPLLPCTAAA

SEQ ID NO: 198205 - protein, 346 aa, unidentified
MGKLPTDLSCVTTVGLDLAKHIFFVHAVDAAGKVVVARELRRRDVAAFFANLPPCLVGIEACGSAHHWGRTLIAQGHDVRLMPPAYVKPYVKRQKNDAADAAAICEAVTRPSMRFVKVREINNQAVLMRHKAREMLVGQRTQLLNGLRGHLAEIGVIAAQGAGHGRALAALIRQGHEDVPESVRAALLPLVVQLDHLDAAIDDADAAIGQLAKAEPVARRLMSIPGIGPLTASALVATVGDPSTFTGPREFAAFLGLVPRQHSSGGKPRLGRISKMGNQYLRRLLVVGAHAVLHHRARHSDPLRCWAEKLIATKPFKLVAVALANKLARMAFAIMTTDQRYRGAPA

SEQ ID NO: 198206 - protein, 467 aa, unidentified
MKSFYLGVDTSKGYADFVIINQHKQPVVKNFQLDDTFDGHSCLHEIVSRFLTDHPQAVMCAGLESTGGYENNWYNTLIRLQASLNIKTARLNPLAVMHNSKADLKKNTTDKISAQNIAEYLIAHPEKVVYQQQDQLANLRKQWGFIQMLTKQCTQLLNQLHSLLYTANPELLNYCRNEMPAWVLKLLLKYPTAANLKKARDKTVAKIPYVSLTRAKQLITAAKLSVASATDPLTAQLVTATVEQILQLKKTIAAQTNLMATQCDVPEVKLLKTFTGIGDISAIGLILEIQSVARFKTVKKLASFWGIHPVYKISGDGSGAFKMSKQGRVNPRKILYTVTLSAIEHNPVIKPIYQYHLQQGKHKMDAIGICMHKILRIIYGMLKNNTAFDPKIDAANRQRSLPDMTAYPKKTKNRRFQSYDSKAPVSRRQRKKRLEREQSHSVITDTKCGISAPVPIGDIISDMLSNI

SEQ ID NO: 198207 - protein, 390 aa, unidentified
MIYVGIDIAKLNHFASAISSDGTELMKPFKFTNDGDGFQMLDSRLSALSYEDDSIIIGLESTAHYGDNLVRYLVACNYNVCVLNPIKTSVMRKDNIRKTKTDKVDTFIIAKTLMMQDSYRFVSFYDLDLLDLKQLGRFRQKTIKQRTRLKIQLTSYVDQAFPELQYFFKSGLHQKAVYALLKEAPSPQGIASMHMTHLSHLLVTASHGHFKKEQAKELRVLAQKSVGASDSSLSIQITHTIAQIELLDSQLNSVEAEMTEIMKFNDPVIMTIPGIGYINGGMILGEIGDIHRFPSPSKLLAFAGLYPSVYQSGNYSARRTRMSKRGSRVLRYALINAAHNVVKNNATFKAYYDKKMAEGRSHYNALGHCAGKLVRIIWKMLTDGVEFNLD

SEQ ID NO: 198208 - protein, 420 aa, unidentified
MPDDRCRLGSDDVVIGLDLASVEHQVVVLTADGQRLTRFKIPHSRVGLEELLRRTMPAALSRTGGSRVFAFEATGHVWEAVAYIIRALGERYVVINPLTTFRVREARQLSREKTDLTDAEQIAELCRSGLVTRTQLEARPYLALRRAWGEYRRLREERARLKVLVAHQLYGLFPEFLRVWADLLQPGALAVLRTGLTPATMAALSLGEFVARVREHRAGRRVWRFKLAQVHRYAEQTIACPDGVDVLAREVQRAVARIDVLTAQMTTVATEVDALLADLEETPYLRTIPGLGWASVAGLLAHVGAITKYRHGRQLIKLAGTNPSRRDTGQTVGRGQTMSRRGRAGLREVMYLATISCLQHNPRIRAHYDRLIQRADRPLSKMQALGACMNKLLLYAFAVMSRREAFQLDHDWQRTMSRVA

SEQ ID NO: 198209 - protein, 438 aa, unidentified
MKVLHEHVAGIDVHKDMIKVAIRSPGEKPWTRKTEVLEFRTFYGVLQEMARELRRRGVTHVAMEASGVYTEPVYHALCEQDFTEVIVVNPAHVKALRGHKTDARDCARIAELLECGLLHGSFIPSAEQKEVRDLTRYRMKTVQARTSEIQRLHKALESAGIKLGSVLSDITGVSGRLMIDALIDGERRAQVMADLAKGTLRQAGKQADLSMALAARFTDHHAMLCRLHRDQIKLADHAIAGLDAQIADRAGRWPRELGLLDSVPGFGDVVSAAWLAEIGPAPHRWFPSHGKLASWVTLCPGNNISARKRKHGRTGDAGTYIKPVLVQAAWAAIRVRGRLQARYRRLVRRFGGDKNPGAKKKAIIAIAHTLLKIAYQVLKTGQPYTDLGADFYTRRQSPEQQQAYLARRLQKLHPGCTVTITISPPPGSPPPSAPAEAA

SEQ ID NO: 198210 - protein, 443 aa, unidentified
MSFDRLKRTQRRKRLPGHKLKPSRATLFVQNSKPHLSMKPTYFLGIDAAKHKMRATLSNRSEHVLFEKDLSVEATGLRQLLAAIKRQVNDPEQLLVLIEATGLLHLNWSAALTKAGYAVAVINPLIARRLYTLQNSIRDNKSDPIDARGLCTIGLLHGEKLLVHYRFSLRPEQFTLQRAQSVRKALRSALTNLKKTYQSLMDLSFPELGGLLQLDGVGIRQLLIQAPTPAAIAGKRLSTLENNWMVRPKAAALKALAADSMADPDLAAASGPALVALLQSVAAMEARLHALDQQIAKLACTSVDPQTKALIETIPGFGPVNAAKTLAWLPTEILHSGSNRKVAARLQAFMGNDPRLRQSCQCKGHTKMSKRGVEMLRTAFFQSAFSAAHNDPKLRAYYQGKRAQGKTHQVARSHLMRILTRRLVAVLRSGKPYQSHYNLKNAA

SEQ ID NO: 198211 - protein, 408 aa, unidentified
MLLVGDDWAEDHHDVEVQDETGRRLGRARLPEGIAGITQLHGLIGRFLPEDATPEQVVVGIETDRGGWVAALVAAGYQVFAVNPLQVARSRQRHVTSGAKSDTGDAHTLADMVRTDRHQLRPIAADSALAEAVKVLARAHQTLIWDRSRHVLRLRAALLEFFPAALQAFDDLAAPDALELLAAAPDPASAAGLQPSKIRAALKRAGRHRVADKAAELQVRLGADHLAQPSVVVDAYAATVQATVAVIGTLNDQIETLEAQVGAYLGRHPEAEIYRSQPGLGKVLAARVLGEFGDATDRYATVRSRKNYAATSPITRQSGKRKLVLARYARNNRLADALHQQAFSALRASAGARAYYDGLRARGVGHHAALRQLANRLVGILHGCLKTHTCYNEATAWSRHPQAETAAA

SEQ ID NO: 198212 - protein, 316 aa, unidentified
MQTPSVCVGIDVSKARLDVAVHPSGEQVSVIQDEQGMATVVQWVRQRQPTRIVVEATGGVERPLLRALVDAALPVIVVNPRQVRDCAKATGQLAKTDALNAPVLARFAAVIQPAVRALPDPQTQELAAVLTRRRQVLTMQRAEQNRLDRAPARVRKRIEVHLHWLRAELARLDADLDDMIQQSPVWREREDLLQSVPGIGPVMSRTVLAELPELGLLNRKQIAALVGVAPFNRDSGRLRGHRTIWGGRAPVRTALYMATLVATRWNPVIRPFYQRLRAAGKAPKVALVAAMRKLLTILTAMVHAGTPWRPVVAPNA

SEQ ID NO: 198213 - protein, 342 aa, unidentified
MTIVTVGIDLAKNVFAVHGVDAAGKPALVRPSVARSNLLELIAALPPCLIGMEACSGAHHWAREFEKLGHTVRLMAPKFVAPYRLSGKRGKNDAADAAAICEAVTRPQMRFVPHKSIEQQGQLMVHRTRQGFVEQRTATLNRIRGLLSELGLVLPLKAATVRREALARLEELPGWANTVIGDLLSEVTRLDERIAEYDRHIALMARHSTQAQQLMQLGGIGQTTAMALISTVGNGHDFACGRSFSAWLGLVPGQYSSGGKQRLGRITKAGDAYLRSLLVMGARAVLAAAMNTRMPKQDPISRWARSLAERRGYWRAVVAIAAKNARMCWAVLQRGEAFKMPA

SEQ ID NO: 198214 - protein, 454 aa, unidentified
MAKKPEKRECRAVVLEPDAAGIDIGAEEIYVAVPPDRDEESIRMFSSFTCDLHALADWLQKCRIRTVAMESTGVYWIPLFQILEARGLEVYLVNAHYLKSVPGRKSDVSDCQWIQYLHSVGLLRASFRPTMEICAVRSLWRHRASLLQMASEHILHMQESLSQMNLQIHHVLSDITGASGQAILDAILAGERNPVQLAQLCNCRVKSPREKVAKALEGDYRPEHMFTLKQSLDGYRYSQKLIAELDREIQRLMQTLPSAVETGQEIPQRTKHSAFQRQGNDPGFDLRGQLYRIAGVDLTDIPGVSAVTAQVILTEIGPDLRRFRHASAFASWLGLCPENRVSGGKVLSCKTRKVKSRAALALRLGANSLSRAKGYFGEFFRRMRAKLGTAQAITATAHKIARVLYHVLRTKQPYTETVFHRSDEHARRRAEMRLRKQAALLGCQIIPVPADSAT

SEQ ID NO: 198215 - protein, 354 aa, unidentified
MSQEKYIGMDVHQATISVAVMDASGKLIMECLLETKAATIVEFIQGLHGTLALTFEEGTSAAWLHDLLNPHVSRLIVCDPRKAALLKEGNKSDRIDARKLAEMLRTNQLKSVYHGEHGLRTLKELGRSYLTITQDVTRSMNRIKALYRSWAIPCSGSTVYAPRHRAEWLAKIEQPGVRIRAERLYEQLDSLQPLRLQARCELLRESHKHAAVRLLRQIPSIGPIRSALLVALLQTPHRFRTKRQLWAYSGFAVETHDSGEYRSVRGKLQRNRERITVRGLNDNHNKDLKNLFKSAAISASTRPGPLQDFYVALVAKGIRPTMARLTLARKIAAITLTMWKKGVSFDPKQLHRQA

SEQ ID NO: 198216 - protein, 347 aa, unidentified
MKVTTLGIDLAKSIFRLHGVDARGVAVLRRQLTRQQLLPFLAKLSPCLVGMEAGSGAHFWAREIGKLGHEARLMSPHFVKPYVKSNKNDANDAEAICEAVGRPSMRFVPNKNTSQQDVQALHRIRAQLIKWRTALANEIRGLLAEYGIVVTRGIAPLRRMLPMILEDAENGLSGLFREMLVEMAERLQVLDERLRQYDLRVARVFGQDERCHRLAQVEGVGPLIATALVAAVGNAHEFKSGRELSAWLGLVPRQHSSGGRTVLFGISKRGDRYLRTLFIHGARSAVRTVERRKDLRSVSISRLKGRQGPNVAAVALANRNARVLWALLTKGENYRTTPFSARIPQAG

SEQ ID NO: 198217 - protein, 343 aa, unidentified
MHTITTIGLDIAKSVFQVHGVDAEGKVVIRRQLKRRYVLAFFEKLLPCLVGIEACASSHHWSRELKALGHTVRLMPPAYVKPYVKRQKNDATDAEAICEAVTRANMRFVETKTPEQQSCLMLHRTRQLFIRQQTSVINAIRAHMAELGVVAAVGRKGVEQLLAIATDASDQRVPEVARACLAGLGAQLRMLKEQILEFDRRILAWHRSNETSRRLDELPGVGPALATALVATVADPKAFRSARDFSAWIGLVPKQHSSGGKDKLGSISKQGDRYLRSLFTAGALAVIRYAKIHGTRHRPWLTALLARKPTKVAAIALANKIARMAWAMMAKGERYKEPVALAA

SEQ ID NO: 198218 - protein, 377 aa, unidentified
MKKELYIGLDVHREAIAIAVAEPGRNGEVRDYGQISNDLHELEKLIGRLRQAHGRPATLHLCYEAGPCGFGIARRLKQLGVRCEVVAPSLTPKRAGERLKTDRRDARKLARLLRAGELTAIYIPEPTDEAIRDLCRARSDAVDDRRRSRHRLKAFLLRHGYRYHGRSPWTNAHERYLRELVLAHPAMKAILEEYLMAIGAAGERITRTEEAMRDLLEQWRLKPAVEALMAMKGFQLVAAMILVSELGAIDRFSHPRQLMAYLGLIPSERSSSERRRQGAITKCGNAHARWLLVECAQHYAAPPKVSKELSRRQQKQAREVRAISWKAQNRLHHRYSRLLARRLTRNKAMVAIARELCGFIWELLRPQCCYQEQPPSI

SEQ ID NO: 198219 - protein, 384 aa, unidentified
MQKPSDLNQSRIVLKQDSTLIAVIEMSLSSWLVAGIVPGVERQPLKKLAVDESALLKLLNRWREEAEKAGRRIERITVAFEAGRDGFWLARWLRARGIEAHVIHASSVAVSREHRRAKTDRLDTELLKRAFLGWLRGERDHCKMVAIPTTKDEDAKRPNRERQSLVGEQTRIVNRMKAALIRLGIRGFNPKLKKAAGRLEDLRTPEGEPIPPNTLAELHRDMERRRLVSDQIRQIEKARLERMEQAPGDGPHAMVRLIARVIGVGIETADMLVHEVLSRKLRDRRAVARYAGLTGAPDESGSKRREKGLAKAGNARVRGGMIQLAWRFLLFQKDSALAQWYRTRTEGGRNRKTIIVALARKLLIALWRLVTTGEVPAGVVLRAA

SEQ ID NO: 198220 - protein, 350 aa, unidentified
MLIIGCDYHPSFQQIAFVDTDTGELQERRLEHREEAEKFYRGLGVQGMRVRVGMEASGHARWFERLLGELNFELWIGDATEIARKRERKQKTDRQDAQHILRLLLKDDFPRIWIPSWENRDLRQLLWHRHRMVQARTRILNQLQAVALNEGLRCKKRLWREHGREQLESFRLAPWASRRRQDLLALLDRLNPTIAELSQAIEHEAEKFPEARWLMTHPGVGPLTALAFVLIIGRADRFQCGKQIASYLGLVPLEDSSGNRRRLGHITKQGSSMLRFLMVEAAQVTVRSLPEWRSKYFHLMMRRGRKIAKVAMARRLAIRLYWMWRKGWDYEQVKKFGSHAGQLGTGDGVQ

SEQ ID NO: 198221 - protein, 400 aa, unidentified
MNQNILLYIGIDVSKDKHDICIKSNDGNVLKRFQIKNTNEDLNKLYTTVDKLKSNAGENTDILFGMEATGVYCFPLYSALKRDRYPVKLYNPIQTNAYRKMEIRKTKTDSIDAAIIADMLRYQEPPATTAIDNLVLYQLRELCRVRQRNVEKRTKCKIQFVRNLDMIWPGYKSVMKSVYGKTSTALLNQYSVPSNVAAEPFEDIYALIKQVSRSQITRERAEEIYNHAGNTLTAPEIDSIVSIEIKTLISEIEMYDVQIQALEKKIKQLMDQVESKITTIPGIGSILGAMILCEIGDIDKFSSAKKLVAFAGLDPVTHQSGNFKNSTGPISKRGSPQLRSALFIAANVARQNDENLGAYYNGKIDNGKHYKSAVNALAAKLLRIVYWVLKNDKEYKVQSV

SEQ ID NO: 198222 - protein, 373 aa, unidentified
MGKGITWVGLDAHKKAINVAVLVGHETKPQEWVVENKPAAIRRLVKKLVRDADGGEVRCCYEAGPCGYALQRQIEAEGPVICEVIAPALIPRKPGERIKTDRRDARKLAELLRAGLLTEVQAPTPEQEAVRDLCRAREDAKEDLLRCRHRLGKLLLRRGLVYGGGKKAWTQAHRKWLRSLAFDNASDQAVLSDYLLAIEQVEQRIQTLEHQLTAAAESEPLREPVGWLRCFRGIDTVTAVTLVAELHGIERFSSPRALMAYVGLVPSEHSSSERTRRGGITKAGNSHARRVIIEATWHYRHPPRVSVALKERRENQPAAVIAIADKAQHRLYRRQRHLVTHGKTTTQAVVAGARELTGFLWAALLHQHQAVSA

SEQ ID NO: 198223 - protein, 341 aa, unidentified
MYSIGLDISKKSISVHIPLNSLDLEIENSKKGLKSFYSKLKKLYKKELDKIVFVYEPTGSYSTLITKFCALKNIKAFIINPKQSSNFAKALGYRSKSDKIDAKMLSLSISIAKESEIKVPIINKTAEDIKELMSYYMFTLKQRVAVQNHHEALRVKEGNSYALKDLKKRVKELKIKEEEIIQKIDEIINEDEELLNSYNNIKTIPGIGTITAIVLLHLFIKYPKANQKQIVSLVGLDPVIKESGTSVNTKPKISKSGSRLYRGVLFMATMVSIKFNNQMKDFYDRLKANGKHSTVAQIAVMRKLVVIAHSLYKNGTQYDAQLYQRACGVNKSKSENIEVFV

SEQ ID NO: 198224 - protein, 386 aa, unidentified
MTLERTQAPPEGARDGGISEQVGISPCRRQPNRATLGVRQNNTTRQRRNPVQPQRYVGIDFHRRRSVIVHKDGAGNLIETVRLDNDRAAFANEIAKAGEHPEVVLEACYGWYWLADLLDELGANLHLAHPLGNNWGHRRVKNDERDAEDLVDLLRLGRLAEAHIAPPELRELRELVRYRAKLVALRSGLKSQVHSVLAKAGIAVPMTDLFGVAGRQLLDTVALGHAYATRTESLRRLISAYNDEITMADSEIDQWLNGDVGYLAIQAIPGVGPILGAVFVAEIGDVKRFSSPERLASWAGLTPRHRESDVHVVRGPITKQGSRIVRWAAIEAAQRRRGFRNARFDAIAERRGSNKIARVALARHLITLVYYGLRDGEIRCLADKTG

SEQ ID NO: 198225 - protein, 340 aa, unidentified
MELYAGMDLHSRNTLVGVIDSSLKRVFERRVPNDLSLIVATLEPFSSELEGIVIESTYNWYWLVDGLMDAGYSNVRLANPSAIKQYEGLKHRDDRHDAFWLAHLFALGILPEGYIYPKEDRPVRDLLRKRSFLVKHRTAHILSLQSMLEREKGYKLSGNEIKRLKAEDIARIFSQEHLVMSAQANRSSIEFLGHHIKRIEKAVRNRVKLSKSFEYLQTVPGIGDILALTIMLEVGEIARFARVGNFASYARCVSSQRLSDGKKKGQGNRKNGNRYLAWAFVEASHHARRYNEGLRSYYQSKCAKRNKAVATKAVCNKLARACYYIIRDQVPFREEALFCS

SEQ ID NO: 198226 - protein, 347 aa, unidentified
MLIIGCDYHPSFQQIACVDTDTGELSEHRLAHREEAEAFYRILKQRNLSVRVGMESSGHSRWFERLLCEVGFELWIGDPAEIQTRRVRKQKTDRQDAQLILQLMMENRFPRIWVPDAENRDLRQLLWHRHRMVQMRTRVMNQLHVVPLNEGLRRKKALWRPAGRKELESIALPPWASRRRQDLLDLLDQLTPKIQELTRALEQEVEKRPVTRLLRTHPGVGPLTALAYELVIGTPERFHCGKQLASYVGLVPEEKSSGDRRRLGHISKQGNVLLRFLLVEAAQVTVRSQPEWRNKFFHLAMRRGRKIAKVAMARKLGASVLAVASGLRVRPDAKARFARGRARKSRW

SEQ ID NO: 198227 - protein, 347 aa, unidentified
MDITTIGIDLAKLVFQVHAVNAHGKVVLKKQLKRNQMAEYFVNLKPCLIGMEACGSAHHWARKLQSYGHTVKLMPPQYVKPYVKTNKNDAADAEAICEAVARPNMHFVPIKTLEQQGILTIHRIRQGYVKARTAQANQIRGLLAEFGIEIPLGIGYITKRVPELIEDASNDLPGIVRIEIQELLEHFKHLEERVNDCEKKIVCWHRKDGTSKRLEAIPGIGPITASALVASIGDSKHFKNGRQVAAWIGLVPKQHSSGGKQTLLGISKRGDSYLRTLLIHGARAVIHHSVGKIKPTGTQSWVNQLAARKNKNIAAVALANKNARIVWALLNHDRDYQDNHKTLRVAA

SEQ ID NO: 198228 - protein, 309 aa, unidentified
MEHFVGIDVAKDRLDVHLRPSQETFAVARDGEGLAQLVDRLQTLAPQLVVMEATGGYETIVASAVVAARLPLAVVNPRQIRNFARATGKLAKTDRIDAAAIAHFAEAVRPPARPMADAEARALGELVTRRRQVIEMMVAERNRRRRVTQSRVLRAIDRHLELLQTELSELEHDIDGALRKSPAWQADADLLASVPGVGKATLRTLIAELPELGRLDRRKIAALVGVAPINRDSGAMRGRRTIAGGRPTVRTALFMAALVASRANPIIAPYYVKLRAAGKTGKQALTACMRKLIVILNAILRDRKPWQPA

SEQ ID NO: 198229 - protein, 312 aa, unidentified
MAFLHHPPVCCLGVDVAKDSLVACGDRTTATVANSRSAIRALLKTTRPDLVICEPTGGHELLLLEECLKAGIACHRADTLKLKAFIRSFGTLGKSDAIDAAQMAAYARERWTTLPLWKAPEADERRLQALVRRRTDLVAFKVAERNRSKAPGAGMLAASFKAMLKTIERQIDALDAAIAALVATSRSIGQRVAVCTAMNGIGLTSAATLIAQMPELGSLQRRQAAALAGTAPHPNESGTAKGRRRQRGGRPQIRTALFMPALRAAAGKGEFATFYKRLVDNKKPPIVAIAATMRKIVITLNARLRDAQMVQS

SEQ ID NO: 198230 - protein, 408 aa, unidentified
MLFIGVDLSDRFFDYCISDSSGHAILIGKLDFNDDGFCSFVKKIQEHESENQNCIVGMENPHSRLVDFLIQRGYIVMPTHPESIARYRESRIPSRAKSDPVDAGLISDYIREHHKNLRPINMPDETIRELSILLEDRDKLVEQKVRFSNQLTNTLKEYFPQALDAFGSITNKSALEFLMRFDTHQEVKSRSSEEIENVLKECQCFRKDSKERFWGAMGKTPSQISIAVVKTKVRLKNVLVGHLLLLIQQIEDYEKQVQKIVDETPDGGIFRTLPGADYILGARLLVLYSSREFASASEAQAFWGTCPCTSRSGSSIVVRFRKGCNIFGRNTFHQLAFCSLKSSQWAKKQNAKKRKEGKGSNHALRCIANTWVKVTFAMWCSKTPYNESKHLASIANHIINQPSFILGG

SEQ ID NO: 198231 - protein, 338 aa, unidentified
MKEITTLGIDLAKNIYQLHGVDRHGKPILKKAVSRAKLLETLGNLPPCLVGIEACGGAHHWAREIGNLGHQVRIIAPQFVVPYRKSGKNDANDAEAICEAVSRPSMRFVAIKTLEQQAVLVVHRVREAIKAERTALINQIRGLLQEFGIVLPQGAATFSKRLVEALADSEIPLDAVSVFSELRGHLLRLEERLADYDRKIARLAQDETARRLAEIPGIGPVTATAAVATVGDARLFRNGRELAAWVGLVPRQSSSGGKTRLGRITKQGDSYLRTLFVQGALVVIRHLGEKTDPRSQWIRALVARRGIQKAAVALAAKMVRTAWAIMARGEHYRLAASG

SEQ ID NO: 198232 - protein, 360 aa, unidentified
MKQSNKINFKGQNIYIGIDVHLKSWHVTIMTDFGFKRKHSQVASASVLFEHLQNHYPKGNYCAIYESGFSGFSTYYSLKSYGIDCVIAHAADIPTGQNESVMKSDAVDSEKLARTLRERILKNTVYVPSKEILDHRGIVRYRKHLQDYISGCKSRIKHLLYSNGVTIPGCFISSSTHWSRRFIEWLKNDVELLSPTKRTLERQLEHIENLRSEVLSVTREIRELSRSEYYAEKMRLIQSVPGIGMITAMNMLVELERIERFNNEKSFASYLGLIPTCRNSGEKTRTGEITFRGNNRLRTMLIESSWVAIRRDIALAAAYSEFCKRMKPQNAIIRIARKLSNRIFAVLKSGNIYEYDKCCQ

SEQ ID NO: 198233 - protein, 386 aa, unidentified
MKRNDLSRSLVAFEQNSTLVAVVELSLKTWLVRGLVPGLGREPVKKVGAEANGLLALLHRWRAEAIKHGGKVERIVVAFEAGRDGFWLARWLRARGIESHVIHSTSIPVSREHRRAKSDRLDAGLLMRALLGWLRGEEKHCSMVAIPTLAEEDARRPNREHEHLVGERTGILNRLKATMIRNGIRNFNVKLRKAAHRLADLRTPEGAALPANTLAELGRDMERLRLIREQIKAIERERLERLRAAPQEGPHPMLLMLAKVLGIGVETADMLVHEVLTRELRDDRAVGRYAGLTGAPDESGSKRREKGLARAGNARVRRGMIQLAWRWLMFQKDSALAQWFQARTAGAGHIVRKKMIVALARKLLIALWRYVTTGEVPAGVKLRAAV

SEQ ID NO: 198234 - protein, 342 aa, unidentified
MIDGESGELRSRRLSGTTSEVVELCCSLPGPTRAAYEAGPTGYGLARALHTAGVGCVVAAPGKIERPAADKVKTDQRDAERVLRLLMIDALRPVRVPSGEEEALRDVVRAREAIRGDLMRARQRLSKLLLRHDVRYEDTASVWTVSHRGWLTEIDLGERGAQVTLLEYLGAIDAIVIRRDALEKTIAELIPGSPWEQTVARLRCLRGVDTLSAVGLCAEVGEFQRFAKAGQLMSYVGLTPSEDTSGEKRRLGSITKTGSRHARRLLVEAAWHYRRAPAKGQSLRRRQDGQPAHIIEISWQAQRRLHNVWQRLDTRRGKRRTIVAVAVARELAGFCWALANAD

SEQ ID NO: 198235 - protein, 422 aa, unidentified
MLEETADREEIVQRVAALDIGKAEVVCCVRVPHEGRAGRRLQEVQAYSTMTGSLLRMADRLRALGVTRVVMEATSDYWKPVFYVLEAAGFDTWLVNAKDVKHLPGRPKTDKLDAVWLCKVAERQMIRPSFVPPPEIRRLRDVTRYRIDLVGVRGSEKNRVEKLLEDAQIKLSVVASDIFGVSGRDMMAALIAGERNPKALAQLARSRMRTKISALEEAFTGHFTDHHAFLLAKMLARVDGIDADIAELDARIEAMIAPFAAAAGRLDEIPGIGPVAAAIIIGETGIDMSRFPTPAHLASWAKFAPGVKESAGKKTGKGSTGHGNSYLARVLGEAAVGAARTDTFLGERYRRIARRRGAKKAVVATGRSILVIIWHLLSDPEAHYTDLGSGFYDQRTNPERRKRAHVHQLEALGYKVILEPAA

SEQ ID NO: 198236 - protein, 355 aa, unidentified
MSSKKGIKFEALMSVGIDIGKDVFHLIGFDPDGNVVVRKKIKRMALEKAFEELPCCVVGMEACLSAHFVSRSLRKLGFEPRIIPAIYVKPFNKGQKNDYNDAEAIAEAVLRPNLKTVPEKSQEQLDLQALHRVRSRLVSRRTATINQIRAFLIEQGITVRKGLRALKTSFHTILEERKEEISTRMRKILIGLYSDWLWMDDRIDVVSKEIEDISHSEENCVNVMTIPGIGPMISTAMVAAIGTGEAFDRGRDFAAWVGLVPRQYSTGGRTVLGRISKRGSRYLRMLFVQAAKVILMRPQRWPNFSFGAWLIRAEPRMHRNKLAVALANKLARTAWSILHHGTRFDTPRDKVMMGV

SEQ ID NO: 198237 - protein, 350 aa, unidentified
MLIGVDYHPSFQQIAFFEEETGECGERQLNHSDGEAERFYRDLQQSGIRVRVGMEATGYSRWFERLLAELGIEIWMGDPAEIKAKRVKKRKTDRNDALLLLRLMREDNFPRIWVPSPENRDLRQLLWHRHRLVQMRTRIINQLQALAMNEGYRWKKKLFSEQGRALLEKLSLAPWASRRRQELLELLDRMNPTIEELTKAVEREARKRPEALRLMTHPGVGPLTALAYVLIIGTPTRFQRGKQIGTYVGMIPSEDSSAGKQRLGHISKQGSSLLRFLLVEAGQAAARIHPDWRRRYIHLAMRRHKSIAKVAMGRRLAIRLYWMWRNGCEYSQSLEFGSYAGQLATGHGVK

SEQ ID NO: 198238 - protein, 334 aa, unidentified
MDHFAGLDVSVKETSICIVDDTGKIVREVKVPSEPEALLAVLKNPAYNFKRIGLEAGPLSQWLFGALAEAELPVVCVETRHMQAVLKAQINKTDRNDARGIAQMMRVGLYRPVHVKTIRSQKLRMLLSHRQLLQSKAIAIENDLRATLRNFGLKVGMVGKVRFEARIKELVEKLPDLAALVEPLLIVRRVLREQIVILHRRLLAVVRDDEVCRRLMTVPGVGPVVSLTYRATVDAPARFRKSKAVGAVFGLTCSKYQSGEIDRSGRISRCGDEMMRVMLYEAAQSMLRSKKWSWLKAWAMQIARRRGMKKAIVALARRLAVIMHRIWVDGTEFR

SEQ ID NO: 198239 - protein, 358 aa, unidentified
MNRNTGMSAGQIIGTMAGKQVIGLDIAKHVFQLHTVNMCTGEIVNVQIKRAKVLEYFANLTACLVAIEACGGAHHWARELSKLGHTVRLLHAKIVRPFVSGNKTDATDARAIWLAVQQPGVKFVGVKSATQQATLTLHRQREALMKMRIMQTNALRGLLYEFGATFAKGKRALFKEIEATLEGLADRLPQMVADSLREQILRIKAIEVDMQAIQMRLQLQLKQDPQMQRIAQIPGVGLLTATAAIATMGDARAFKSGREFCAWLGLVPKQSGTGGKVKLLGISKRGDTYLRTMLIHGARSVIAHAKEPGPWLQQIKARRPANVVFVAQAAKMARTIWAVTAKEQDYQAGHKSIRPQAA

SEQ ID NO: 198240 - protein, 412 aa, unidentified
MIQAIAKRVAGLDVHQVMVMATLLYEDNQGEIKKETREYKTFPNDLKRLAIWLKQAEVELIVMESTGIYWKTVYEAMEDEELKSYVVNARFIKNVPGRKTDIMDSEWLAELGRCGLLRPSFIPPRDIRELRLLTRYRMKLMSIYGCEKNRLTKVLEASGIKLGCIVSDIDGVSARRMVEAILEGKEPKDIAKLAIGKLKRKEQELIQALENYRLSGPSRFVLNEILSHIKWLEIRLDQIDEEVVSAMKPYEVEWQLLQTIPGINRISAAMLVSEIGVDMSCFKSKEHLSSWAGMCPGNNESAGKKKSGKTRKGNKYIGSLLCECANSTRNTTSQFKGMYQGLVIRRGHKRAIVALGHKLLEIIYVILKNKKPYKDPIVNYEEMAVKKNAPRWIQTLKKYGYISEAGIKQNVN

SEQ ID NO: 198241 - protein, 328 aa, unidentified
MTFVGCDLHTRQQQVAVLDTTTGEIHEQQLPHAGTAVEDFYAALPRPVTVGLESTGYAIWFHTLLQRLGHTVLVGDAAKIRAMVVRKTKTDRRDALHILDLLRHDRFPTIWLPDPATRELRALLMHRMRLVRIQTKLLRTAGLAQLQALSLPPYTAQRRDQSLDLLGTLRTHLDHLDDAIAAAALVHPDAPRLLTHPGVGPLTALATVVVLGAVSRFPDSKHVVSYIGLAPTLNASADKYRLGKITKQGSTLLRFVLGQAAAHAARLDPDLTRTYRTLAQRRGRSKAKVAVTRKLLVRLFIMLRDHIDYDEFRRRGRAPAAAPGSGGS

SEQ ID NO: 198242 - protein, 315 aa, unidentified
MREQGAVVVGIDVAKAWLDVAVRPSGEQRRLDQTAVGIAQAVAWLQRLGPQVIVLEATGGYEAALVAELGVAGLPVAVINPRQVRDFAKATGRLAKTDRLDAQVLAHFAEVLRPAPRPLPDAQAQALAALVERRRQVVAMRTAEQNRRGAVRVEPVRARIQAHLAWLEAELADVDTELRHLVRASPLWREQGDLLRSVPGIGPIVSLTLLADLPELGRLSHGQIAALVGVAPLNRDSGTLRGRRAVWGGRATVRAALYMGTLRATRCNPAIQPFYDRLVAAGKAKKVAIVACMHKLLTILNAVVRHQTRWQAQVA

SEQ ID NO: 198243 - protein, 340 aa, unidentified
MEISTIGLDLAKNVFQVHAVSASGEKMLAKGLRRGNVLAFFSALPRCLVGIEACATAHYWARELRALGHEVRLIPPAYVKAYVRRGKSDAIDAAAICEAVQRPGMRIVPIKSPEQQAELTLHRAREQMVRQRTRLINVLRALMAEFGLTAPLGPRNLGGLIEIIADESDARLPACARLALGELVGAFKDIEHRLLVVTKAITAAHKADAASRRLATQPGVGPIVASAVRASVPDPRHFRSGRDFAASLGITPRQHSTGGKERLGRISKMGDRYLRTLLVLGATSVLAQAKRFGRPEHAWILRLLQRRPPRVVIVAIANKMARVMWAMMVSGEAYRAPLAA

SEQ ID NO: 198244 - protein, 344 aa, unidentified
MGEVSTIGLDIAKSVFQVHGVDVGGAVVIRKRISRSKMLEYFGDLPPCLIGIEACPSAHHWGRELQALGHTVRLIPPSYVKAYLKRSKNDANDAAAICEAVTRPSMRFVPIKTKEQQTALMLHRTRQLLVRQRTTLSNALRGHLAELGIVSAKGRNGTAELLKIIADGGDSRVPPAVRGILNVLARQYSAIGIEIASVDKGIMALHRGCEASRRLAEIPGIGPIGATALVAEIGDWMAFSSGRSLAAWIGLVPKQYTTGGKDKLGSITKQGNRYLRWLLVVGAMAVIRYARKHGTERRPWLARLMERRPTKVAAVALANKIARMAWAIMVRGERYKEPKLLLAA

SEQ ID NO: 198245 - protein, 482 aa, unidentified
MKPKSPLGTNKTNDHAMQGRWQEMNRKQRRETMRKIQSEDLSLDVIHRNAAGIDIGNESHYVAVPPSRDSQPVRCYGCTTGELKAMADWLKQCGIQTVAMQSTGVYWVAVYDILEQVGLEVYLVNARDTKNLPGRKSDVQESQWLMKLHTYGLLRNSFRPVQEIRTMRTYWRQRNDLVQSAGRHIQRIQKTLTQMNIQLANVLSDVSGVTGQAIIKAILEGERDPHKLAAFRDSRVKASEGQIARSLEGNWQPDLLFVLKQEQDGYEFCQKQMAECDQQLKQYLQNREDRSQGAALPEEQRKARRQKKKGNKPQFDLRAELFRLTGTDLTRIDSIDVMTATTIISEAGYDMSKWGTENHFVSWLRLCPDNRISGGKIIGKGRLPTNNRATVALRMAASTLRLSDTYLGAQFRRLRTKLGTPCAIKAMAAKLARLVYRMLRYGMKYLDRGAAFYDAEHRRLQIKHLKWKAANLGLQIVEAPAT

SEQ ID NO: 198246 - protein, 343 aa, unidentified
MNYSPAHQFFVGWDTSKETLNYCVRSMLGAIINEGEVKNDRSSIRALLQQLAQQHEVFLGEFLHCVENTGQYCHPLLGLSAQLPELYIWLEDPLQLNRSMGRQKNKTDIIDARNVSEYCLLHHRKATQYQLPSQLQQQVDFINKMRLRLVRHKQALGTSLEERKAFVLGPLDKLAVELIKQQLEATKKTITELEQRLEHLIAKDTKAARKYAIARSVLGFGPKNTLTVMAITGLFEKIPTAKACASYAGISPHPRQSGKCLKRNSRISRAASKELKTAIHQGAKYLITPQCDSPFKDIYQRLRLRGRTYNQAINAVRNKMITVLYACLQKDTMYEKKVHQSFG

SEQ ID NO: 198247 - protein, 400 aa, unidentified
MTYDYVIGMDVGKYFHHACILDSGGNQVLSKRVNQHEQSLRKLFNCYATNEAKTLVVVDQPNNIGRLTVAVAQDIGVDVRYLPGLAMRQLSRIHAGNSKTDIRDAYVIAYAGKYLPESLRQVDRVEEAFIQLKVLNGIDEDLTRSYTRLINQIRSALVGTYPEFEHVLRGQMIHRKWILHLLAKYGGPSKIKRLGKARVNAFARKHRARNPEPVTDAIFAAIAGQSVQIAGAKYAELGVAMSAKDALLKLEHRREIEAEVIELIDEIPQTQLLLSMPGIGPRSAAQILMTVGDMSDFPTAGHLASYAGLSPRTNQSGTSIMSNSLNRAGNKKLKNALWQSSFASIRFHERSRQFYERKRNEGKRHNAAVVALARRRLNVLFAMMKNHEYYREPQAEVAAA

SEQ ID NO: 198248 - protein, 323 aa, unidentified
MSETQYHHFAGLDVSRDTIELHLLPEGCRVEVGNDERGYRTLIELLPSREDTLAVLESTGGFEQGAAKALARQAIDTTIVNPMKIFHFAKALGIHAKTDRQDAYVIARFAQATRPEPNVLLREEQDALRELGRRREQLKKMLIAEKNRKRKAFTPWARESVQRLIDVLEKELEAIEQQIRERVDADPDWKRKETLLTSMPGVGETTAHLLIALLPELGTTDRHRIAALVGVAPYNRDSGRKIGKRSIKGGRHHVRSTLYMATLVATRHNPAVKAIYERLLNQGKKKKIALVACMRHLIIWLNKMLADDIPWEQMDVCAAATET

SEQ ID NO: 198249 - protein, 391 aa, unidentified
MPEDAPRPAQAAIRTDLGAIFVSMELSRRAWLITSLSPGAGEKMSKHSVPASDVSGLLRRFAELRRKAVARTGRDFPIIVIQEAGLDGFWIHRVLQSEGIESHVVDAASILTSRRGRRAKTDRIDGETLVRTLMAFKRGEPRVCSMARAPTPQEEDRRRVCRERRTLVGERVRHVNRIKGLLFAQGVFGYEPLRKGRRERLEDLRTGDGRPLPVHLKAQIIRELDRLEVVLEQLKTVEAERDALLKPANDEMPSPAAMLAQLKGIGSETAVLLWSEGLFRRFDNRRQVAAYAGLAPTPWQSGSIDHEQGVSKAGNPRLRATMVELAWLWLQNQPTSTLSLWFHERVQRLGGRMRKTIIVALARKLLIALWRYTTAGIVIEGAMMKPSPATT

SEQ ID NO: 198250 - protein, 430 aa, unidentified
MKSNTQNTKIEAVTENTLVVGIDVGSEFHYARAFDWRGIEYSKKPFKFSNTEPGFTEFKAWILHIQTEHGKDAVVPGMEPTGHYWFNLGKFLQEAGIRPVLVNPHHVKKSKELDDNDPTKNDRKDPKVIAGLINAGRYSYPYLPDGVYAELRTASNLRFQMQSELTRIQNRISRWFSIYFPEYKDVYGSLDAKSGMMILKTAPLPEDIMALGVEGVNRIWREAKMKAAGLKRAKTLVEAAEHSIGSREGSAAARLEIRMLLEDHESRAMRLQEIMTLIETLVKQIPMAEKLMEIKGVGLKTVSGFLAEVGDISRFDNPKQLQKLAGLAIKENSSGKHKGETTISKRGRKRLRYLLFEVAMSLVSKNAEFAELHRYYTTRANNPLKKMQSLMAVACKLIRIFYAMLTKEVDYDPQKMVSDIRRPAMYLQTA

SEQ ID NO: 198251 - protein, 343 aa, unidentified
MQAVTTIGLDIAKSVFQVHGIDATGNVVIRRQLKRRHVLAFFQKLSPCLVGIEACASSHHWSRELKALGHIVRLMPPAYVKPYVKRQKNDAADAEAICEAVTRKNMRFVETKTPEQQSCLMLHRSRHLFIRQQTAVINAIRAHLAEFGVVAPVGRKGVADLLDIVADPSDRRLPEVARACLAALGVQLRLLKAQILEFDRRIMAWHRSNETSKRLDEIPGVGPALATALVASVADPKAFRSARNFSAWIGLVPKQHSSGGKDRLSSISKQGDRYLRSLFTAGALAVIRYAKIRGTKHRPWLTALLARRPAKVAAIALANKIARMAWAMMAKGERYREPAALAA

SEQ ID NO: 198252 - protein, 345 aa, unidentified
MTKRQSKDVAVYAGADISKDTIDISYHFGDKLIIDKIANNEQAIKRFVRTMKMEKGAVLHFILEPTGHYSQTLYRTLRDMKVRFTQLNPRLSRQFAGFTGVMEKTDKKDAQVLEDYGRLLKPKPTIPEEDIQMELHDLYVLRNALAKERVEWKQRKHQHKGGIPKRFVERVSKALDKEIAALDDTIEQQVKSLEVYKAIYEEVVKIVGVGRNTACAILCLLPEIGVLNSNKITKLAGLAPIPNESGTSVKKTAHTRGGRKNVRTALYMPCMVACRCNPVLRPYYQRIRERKGGKGVKGSGAIALTACMRKLLIHINSVARIVREKMQRNVAAVGCGEAAQASPCR

SEQ ID NO: 198253 - protein, 428 aa, unidentified
MLKQNTEPDPAPDFAAFLAIDWADEEHAFHLQVVGQSKIETGTLEQKPHVLGPWVAKLRERFGGRPIAVGLEQSRGALIHGLMSYDFLVLYPIHPTTVAKYREAFKSSGAKSDPLDAGQILEILTQHQDRLHRLNPDTVETRLLGRLVEDRRKAVDLRTTHVQALGANLKEYYPQALELTNDNLSSRLAGDLLIKWPTFEDFQQAKPSTLKRFYYGHNVRSPEVIERVLTLAQKSQALTTDPAIVESGRRLTQMYARLIQALHPAIADYDQRIQQVFNAHPEAKLFRDLPGAGPALAPRLLAFFGTDRSRYAAAFNVQSFTGIAPVTKSSGKSKVVYARAACPKFDRQTFHEFSRLSVTRCQWARNYVQYYTDKGKKYHTIVRALAYKWIRILFKCWQERTPYNEDKYLETLKLRGSIFATWHLQKKS

SEQ ID NO: 198254 - protein, 310 aa, unidentified
MDAVFVGIDVSKDRLDVHVVPSGEAFAVGRNGDGLAALNERLAGLVVTTVAVEATGGFETVVAGSLASAGLPVVVVNPAQVRAFAQALGKRAKTDPIDAAVIARFAEATRPEVRALPDEQTQILADLIARRRQIVQMIVAERQRGKRATVKRIKRSIERLINALEKELSELDQELDETIKGSPAWRHNEDLLQSVPGVGPIIARTLLAEMPELGKLDRRQIAALAGLAPWTRQSGKWKGKSFIGGGRASVRTVLFLGALAAARHNPALRAFRQRLIEAGKPKIVAAIAVARKLLTILNAIVRDQKPWRAA

SEQ ID NO: 198255 - protein, 336 aa, unidentified
MYVGLDVHKRFNQATVVDGNGVVLRECTVQNKDKELDRFLQTLAPGTKLALEACSVWEPVYDFIQSKGLDVCLIHPKKTRLIAESRNKTDRNDATMIAQLLRANMVYRAYVPDKETRKLRFLVRHRKSLVKQKKYVKNKVHAILAREGITHGLSDLFGKRGMTILENIPLRNENRFAVNQLLDSLKSIKQQIVEADEYIAIQSSGIREIELLKTIPGISTYSAAVIYSEIADIKRFSDWKKLCGYAGITSSVYQSGDTKRFGPISKQGSRMLRWILIQCVQHTVRKPNSAQKLYMRVLKKKGHKKAIVAASRKLLVYIYIMLTQDKKFNELRVNSA

SEQ ID NO: 198256 - protein, 370 aa, unidentified
MRHGSTLYVGLDVHKDSIAVAYATTDGPSDPVHVGAIGTRQCDIDALVRKMQSKSAPLVFIYEAGPCGYWLYRHLTRKGLTCFVVVPSLIPRKPGDRVKTDKRDAVTLARLARSGDLTPVYVPDVPDEAIRDLARAREDALRDLNAGRYQLKALLLRHDIRYVGRANWGPEHVRWLARLVLPTPAQQLVFQEYVRPVTERTQLLHRLAAELLEQAKPWRLYPVVDALQALRGVQFTVAITTIAELGDLTRFDNPRQLMSYLGLTPSEYSSGDRRRLGGITKAGNGHARRVLIEAAKAYRHRAKVSEPIQTRQQHLPAPIRDIAWRAQVRLCGRYRKLLARGKHPNTIAAAVARELAAFMWAIARTQAVSA

SEQ ID NO: 198257 - protein, 381 aa, unidentified
MFAETTYTDQYTVSQPHLYMAFELSQSKWMLGFTIGFGQRPRLRTIAARDLAALRDEIHLARERFGLGEEVPVISCYEAGRDGFWLHRYLLSLGVTNLIVDSASIEVNRRAKQAKTDKLDLGKLLTMLMRYQAGEKKVWHVVHVPSSEVEDHRHLHRELADLKAQRTQHTNRIKGYLSNQGVCLEVRDDFPELVEHQRLWNGEPLPPGLQARLLCEYERFRLVQQQVKALEVERRETIRHSTQPEMEQVRQLLHLRGIGINAAWLYVMEFFSWRAFRNRREVGALAGLTPMPHQSGEEDHELGISKVGNRHIRAMAIEIAWGWLRYQPNSELSRWYQRRFGKGSKRLHKIGIVALARKLLIAIWRYLEFGTLPTGAVLKST

SEQ ID NO: 198258 - protein, 456 aa, unidentified
MKIPQSTIRLLTGRLVKILLNREVSTMKSNTQNKKIEAITEKTLVIGIDVGSETYYARAFDYRGIEYSKKPFKFSNTEAGFVTFKEWILDLKEKHEKDKVVPGMEPTGHYWFNLGKYLQDNEMKPVLVNPHHVKKSKELDDNNPTKNDRKDPKVIAGLVREGRYMIPYLPDGVYADLRTASNIRFQLQSELTRIQNRISRWFNIYFPEYKTVYGKPDAKSGMLILKEAPLPEDILTLGIDGVDQIWRDAKMRAVGKARAKTLIEAAEHSVGSKEGAVSARMEIRMLLEDYESRNMRLQEVMVLIEELVKQIPMAEKLLEIKGVGIKTVSGFLAEVGDISRFNSPKELQKLAGLALVENSSGKHKGETTISRRGRKRLRYLLFEVAMSLVAKNPEFRELHNYYTTRRLNPLKKMQSLMAIAAKLIRVFFAMLTKGVDYDPKKMVSDIKRPAVYLQAA

SEQ ID NO: 198259 - protein, 354 aa, unidentified
MSNQSNATVATMGIDIGKNSFHVVGLDRRGAIVLRQKWSRGQVEARLANMPPCLIGMEACVGAHHLSRKLQSFGHDARLMPAKYVRPYAKGQKNDFRDGETIAEAVQRPTMKFVATKTAEQLDLQALHRVRERLVSQRTGIINQIRAFLLERGVAVRQGPRFLRTELPNILAKRSDVLSPRMMRIIEELAGDWHRLDERIEGLSTDIKTLADQDPACGRLMSVPGIGPIISSAMVAAIGNGAAFSKGRDFGAWLGLVPRQMSTGDRTILGKISKRGNRYLRVLFVQAAWVVLVRPKTWERHGLKSWIEAAKKRMHHNVLAIALANKLARIAWAVLNKECNFECTKTNAMEPRPA

SEQ ID NO: 198260 - protein, 417 aa, unidentified
MSEYAALVAVDWADQQHAVCLLDPSTGEREQSIVKHTPAALQEWALSLRQRFAGQPIAVCLEQSRGPLIYALLQYDFFVLYPINPATLAKYRQAFSTARGKDDPTDADYLLDLLEHHRNRLRPWHPDDEKTRTLRLLVEQRRRLTGDRTRVSNRLTALLKGYFPQVLDWFEDIRTQLVCDFLERWPQLSVLQQARPATIDKFLRSHHSTSKPTNLRRLTEIKTALPLTTDAAVMTSSVINVKALVAQMKTVIAAISEYDRHLEALCQTHDDYHLFAALPGAGPIHAARLTAALGSDRSRWQSADELVTFAGIAPIIERSGKQFRIRWRYFCPKFFRQTFHEFAAQSIQDSFWARAYYSMQRAKGKDHHAAVRALAFKWIRVIWKCWHTRTPYNEVIYLESLRKKGSSLLKFAVDYQQ

SEQ ID NO: 198261 - protein, 375 aa, unidentified
MIKDSEVFVAFDTSKLRNAVAIAEAGRAGEVRFLGEIENTAGATTKLVRKLEAKYERITFCYEAGPTGYELQRHIRGLGHECIVAAPSLIPKKPGDRVKTNRRDAVSLVKLSRAGELTAVWVPDRRHEAMRDLTRAREAAVIDLRAKRQRISALLLRQGRPYPADKKTWTKVHMNWLASQRFEQPELGVVFAEMMFATRQAQERVERLEQAIRTAVPDWSLAEMVTAFMAFRGIDLVSATCLLAELGDLTRFPTAPEVMGYVGLGCSEGSTGDRIKRGGITKSGNRRARRTLVECAWSYQHPPRVGIAKQAKVAAAPTKVREIAWKAQCRLNRRYRVLLRRGKLKTVAITAVARELAGFLWAAARELSSPQRVAK

SEQ ID NO: 198262 - protein, 344 aa, unidentified
MNTPPKSTIDRFLALDLHKHYLVVGGVNFHQEIVLNPRRISLEKFPAWAKTNLLPTDAVVIEATTNAWNIYDQVVPLVGKAVVAHPPMVKWISEARVKTDRHDVLRLAHLLAADLIPEVWVPPVPVRELRSLMAHRRRLVSMGTRARNHLHSLLHRHNIRPPQGKIFTQKHREWWQGLDLSSTERMRLRHDLATIDHIAEQLGEIDEELARLSTADPWAEQVPFLLQLPGFGLIVTMTILAAIGDISRFPHPKKLVGYSGLGASIHISGLKHRSGRITKRGRKEIRWILVEAARRAADTHPYWKAQYQRLEPRLGSNKGDRPQTPRRSMARAHQAHRRPPRGSR

SEQ ID NO: 198263 - protein, 303 aa, unidentified
MPNSKTTEQQMIHLGLDVAKNSIAVAILRPGETEPDAEKIGHDEATIRRLVKRLGDQRRLWACYEAGPTGYDLHRLLTSLGVRTDVVAPSLIPRHPGDRVKTDRRDARRLARLHRAGELTPIRVPTVAEEGVRDLCRARQVVVEERRRARQRLGSFLLRHNEVFRDGAAWTARHEAWIASRHFSDPAMKSAFSFYRCAVAVEDAALAAITADLAAYFDAPALSDPVHRLAAYRGIDHLGALTILCEVCDFRRFAHAGAFMGFCGLVPSEYSSGETVSRGHLTLAGNVHVRTQLVEMGGTQSCT

SEQ ID NO: 198264 - protein, 355 aa, unidentified
MNSEKYIGLDVHQATIVVAVMDSSGKVVMESILETKAATILQFFAGLRGTLSVTFEEGTWSAWLYDLLNPHVDKLVVCNPRKNALLKDGNKSDRIDARKLAELLRGNQLKPVYHGETGVRMLRELSRSYLTIVKDLSRVMNRLKAVYRSWAIPCAGRDVYYTRNRAQWLAKIREAGVRRRAERLYEQLDMLRYLRQQARRELLAESRKHAITAKLRQIPYLGPIRSALAVALIQTPHRFRTKRQLWAYSGLALETRISAEYRYVEGQVRRSKKLLSIRGLNKDHNHDLKGLFKGAATMASVRPGPFQDFYQAALAKGIKPTMARLTLARKIAAITLTLWKKGENFDAEKLKSQAA

SEQ ID NO: 198265 - protein, 433 aa, unidentified
MNTSHPYDLIIGLDRSDQKADLHLITTTTGERRSVVIATAPEALWEWLLELRQQQPQARVGLCLEQPAVHLIAFLESYDWITLHPINPITLQKYREAFVTSRAKDDAKDAFYLAELLLHHHDQLQVWAPEDSATRAVQQGVFHRRAVVDERTGLTNRLIALLKQYFPQALVLCGEDLWRPLATRFLLKWSSLQAVQKAKPATLKAFYYLHGSRSAKLLEQRLALVQRAVPVTDETALIASFALRVQLLCRQLQLVQQTITDYEKQIASAYAAHPDHAIFASLPGAGPVLGPRLLASLGSQRERFGAAADLQQYTGVAPVTKRSGGSCYIHRRYLCPKFHRQSFHEYAKESILWSRWAAAYYLQQRTKGSPHHTAVRALAFKWQRVIWRCWQDRTVYREETYEAALRKSGSPLVALFDKVELGKSPFKNPVKKS

SEQ ID NO: 198266 - protein, 348 aa, unidentified
MNYIGMDAHIATLDFAVINERGKISKERTVKTGVKDMIEYVRSIPKPRKIYTEEGSLATWLLETCNEFGETLIITDPKRNKWIGKSEQKYDRIDARKLGELARGGYIKEIYHAVGKRKRFCELVSAYHDMIKSQTRIKNKLKAKFRQHGIRCSGETVYGAKHRDQWRKKLDKEELVLNIVEEIWHQLDSTRSSINRILKLMRKESKNYPEIKNFQAVPGIGFINAVTISAIIETPNRFSNKKKVWMYAGLGIVERGSGEKIYSKKLSKDYNRMLKRAAKSSMEAAIGGKDNQFRRQYLKLTLEKGVLPHRAKLTVARSLLAALYGMWKNGEKYDPTRNPKNADIQSES

SEQ ID NO: 198267 - protein, 387 aa, unidentified
MSQASDLTRCLAPYDQATTLIAVIELSLSSWLIAGMIPGFERQPLKKMAPDEAGLLRLLERWREEAVKAGSVINRMSVAFEAGRDGFWLARWLRTRGIDAHVIHSSSVAVSREHRRAKTDRLDTALLMRVFIGWLRGERGHCSMVAVPSIEEEDAKRPNRERENLVGERTRIINRMKSALARLGIRGFKPELRKAPQRLDTLSTPEGIPIPINTLDEFRRDLVRLALVREQIDAIERTRIAQLEAAPKTGPHAMVRLLAKILGLGIETADMLVNEVLSRNLRDRRAVARYAGLTGSPDESGKKRRERGLAKAGNARVRRGLVQLAWRFLLFQKESALVLWFRARTESAAGVRKTKMIVALARKLLIALWRMVTTGEVPAGVVLRPSP

SEQ ID NO: 198268 - protein, 495 aa, unidentified
MPIFRRLSQAASLSQESQTMKKHKKTKPNPEAPKPLHEPKPDAAGIDLGATEIWVAVAPDRCQMPVRRFGAFTQDLMAILQWLLECGIRTVAMEATGVYWIPLYQLLADAGIEVCLVNARHVKNVPGRKSDVRDCQWLQYLHSVGLLMASFRPAQIICQTRSIYRFRQNLLTQVGQHLQHMQAALDQMNIKLHHVINDLSGQTGMAIIEAILNGERDPLRLAQYRDRRIKATQETIAKSLEGDWRSEHLFVLRLAWENGKQVQEQIKKCDQELMQYARQLEASTIVAKPIVPVKIMSLTVEPGVPQLHPAPGVRPAKPRKKTSKNEPDGPWREELHRFFGVDLTLIPAISVLTGITLMTELGNDLSAFKTPHHFSSWLCLCPDNETSAGKVLHKSTRRSQNRVRQALRMAASSLHHDKSYLGDKYRRLRAKLGAPKAITAMAHQIARIIWYLITHQVAFDMSIFADLEKANQKRRLNRLNSAAHQMGYQLTPIAA

SEQ ID NO: 198269 - protein, 410 aa, unidentified
MIEAVVERCAGIDVGKKFVLVCVMTGAAKDEPHTKIKKFGTIVSELERLAAWLVDEGCTHAVMESTGSYWKPVFNLLEAHVRVILANAADVQNRRGHKTDPNDSRWLAHLLRHGMIRPSFIPPLPIRELRDLTRRRRQLIGENSRERNRIQKVLEDANVKLGDVLSDVFCVSGRLMLQALLDGDLSPAQIAELAKKKARVKIPQIAASVTGHRLTDHQRFLIRHALRHLQFLDEEVEALNQEIRRRMEDPALGEAFLLLQSIPGIKEESAASILAEVGADMQQFPTAAQPSSWAGLCPANHESAGVKKSVRTNRGNVWLKTTLTQSAWAATNRKGSRLQSRYYALRARCGNKRAIVALGHTLLKTIYTVLSSGTPYREAPIGEETERQEQRARYHLRCLRKLGHPTLAAE

SEQ ID NO: 198270 - protein, 393 aa, unidentified
MICVGIDVAKDKHDCFILSSEGEVLADVFTIQNNAEGFDTLLQTIRRCVCPGDKIKVGLEATGHYSYNILGFLLDKGLDTYVINPLHTNLYRKSLSLRKTKTDRVDARTIAAMLMSDVDLKSYTDTAYHNEELKSLTRYRFDKVRERAKLKQSVSRLVTILFPELEKLVPSLHMASVYALLSEFPGAKQVAGAHLTHLKAVLYDASKGRYGRDMATTLREAARCSVGSVMPTKSLELQHTIRLIRELDAEIEDIEAAIQSMMDEMQSPITTIPGIGVRMGAMILAEIGDFSRFNSPDKILAYAGMSPSTYQSGQLSLSGPYSHMEKRGSRYLRYALYNATKYVCLWDPAFAAYLAKKRGEGKHYNVALSHAAKKLVRLICALEKSQQSYRNAA

SEQ ID NO: 198271 - protein, 351 aa, unidentified
MDRYIGIDAHSASCTVAVIGPTGKRISSQVIETNGKSLVTAVGVIPGTRHVIFEEGNLAAWMYELLDPLAHETVVVRVSKKRRGSKNDEIDAFGLAESLRIKSFENRVYKKVGEFAELAELARAYRVVMRDSVRAQNRIKGLLRSRAVPTAGKKDIYSSAGRQAYIRRLPARSKPRAKTLYAEMDLLLELRKHAEKEMISEAKKHRVFHIIKTIPGLGDIRVAQLLPLVVTPYRFRNKRTFWAYIGLAIVTSSSSDWVQDPDGKWHRTKGEMTRGLNRNYNRALKDIFKGAASTVVQCKHDDPIYHHYNALLDDGTKPPLAKLTIARQIASITLGLWRTGEEYEPKKLLKQ

SEQ ID NO: 198272 - protein, 341 aa, unidentified
MKKFIRIGVDLAKNYFQIHALASEGAPAVTRKMTRVKMREFFSRIEPCLVGMEACGTAHYWARELKAMGHEVLLMPPAYTKPYVKRGKNDAVDADAICEAMSRPGMRFVPIKSAEQQATLMLHKTRELLIKQRTMSVNALRGHLSEFGIVAAKGIGHVDELLDLAESDAMLPAAAKTAMRVLAQALEGLDKAIDDLEKEISSAHGQNEVSRLLDQVPGIGKLIASVIAASVPDPSVFKSGRDFAAWLGLTPRQNSSGGKQTLGGITKQGNRYIRKMLVLGATSLLNVVGKRKGALRDWIVGLLAKKPARLVTVALANKLARILWAMMKTGECFRTEMFAKA

SEQ ID NO: 198273 - protein, 349 aa, unidentified
MSPKLNAGIAVIGIDIGKNSFHVVGLDRCGAIVLRQKWSRGQVSTRLATMPPCLIGMEACVGAHHLSRKLTSLGHDARLMPAKYVRPYSRGQKNDFRDAEAIAEAVQRPTMKFVATKTAEQLDLQALHRVRERLVSQRTGIINQIRAFLLERGVAVRQGLRFLRAELPRILATPCDGLSPRMVRVLEELACDWRRLDQRIEGLSSEIEVLARRDAGCERLMSVPGIGPIISSAMVAAIGTGDAFTKGRDFAAWLGLVPKQISTGDRTILGKISKRGNRYLRVLFVQAAWVVLIKPKSWQRHGLKPWLEAAKKRLHHNVLAIALANKLARIAWSVLARGRAFEASRIQVA

SEQ ID NO: 198274 - protein, 323 aa, unidentified
MSSFVGVDVAKNTFDIATHLPNGKHKTKAKLVNDAKGFKEFEAWLQKQVEPSALIVMEATSVYHLALAEFVYNKGYRVCVVNPATTHAYAGSELRRIKTDKSDAKLIADFAREKDEKLQPWAPEPLKYRQLKALVRRLDDLQEMQQMELNRLEVSDEKVKASINSVLRHIEKEIVETNKAIKKHIDDDSDMRGMRDLIVTIDGIGQKTLERLLAELGDLRKYDDPRQLVAAAGLNPKLQDSGLLKGRTVISKIGSARVRAGLYMPGLVALQHNKAIMAMKDRLKANGKAPKQIICAAMRKLLHFVYGVLKSGQPYDPKLALAR

SEQ ID NO: 198275 - protein, 337 aa, unidentified
MSSIHILGIDLGKHCFHAIAHNRCGVVVLRRKFNRNQLLIFLSKIEPTTIAFEACGGAHWLARKCSEFGHQPRLIPPQYVKPYVKGNKNDFIDASAIAEAAGRPTMRFVAVKSEEAQVIAAIHRVRDSYIKERTATMSRIGAILLEFGLSFPKGHAKMKSLFQWLAEQTVSLPKSLLCELISIHEHYKYLNEQIKTQDNKLQTIVNNNESAQLLKTIPGIGDLTSTLCIADVSSPSNFTNGREMAAWLGLVPRQFSTGGKTKLLGMSKRGNKHLRTLFVHGARAVLSRLETTGKVFGEWLVNLRATKPFNVVVVALANKLVRIAWAVLYHRQAFKAV

SEQ ID NO: 198276 - protein, 330 aa, unidentified
MQTLSQIYVGVDVSKDELVVAYPQAQGGWVKAKITNELADIFEWLNKLELKDKFFILEHTGPYSQRLIHALDKVGATFSVVNPIQSRSMAKLLMKTNKTDDQDAQTLSQLGQTLKTQVYRMPSSIEKNRKEAFSALVSLQKQEGQLKNQLHAFQFLVDPNPVAVRALEQVLHSVRLAIADLEAQIKPQIEEAQACDLVKRISSVKGIGQTTAEALVTLFGDFSSFECAKAFAKFLGLTPSEFSSGKSVRGRRFITKKGNSKIRGLLFNCARSAMNHNPTCKALYQRIIAKEKNGKIALTAVMHKLARIVFGVVKSGRLYDPNFTIQKKCV

SEQ ID NO: 198277 - protein, 570 aa, unidentified
MVVVGTDAHKYSHTFVATDEVGRQLGEKTVKATTAGHATAIMWAREQFGLELIWGIEDCRNMSARLERDLLAAGQQVVRVPTKLMAQTRKSARSRGKSDPIDALAVARAVLRETDLPLATHDETSRELKLLTDRRDVLVAQRTSAINRLRWLVHELDPERAPAARSLDAAKHQQALRTWLDTQPGLVAELARAELTDIIRLTGEINTLAQRISARVHQVAPALLEIPGCAELTAAKIVGEAAGVTRFKSEAAFACHAAVAPIPVWSGNTAGQMRLSRSGNRPLNAALHRIALTQIRMTDSRGQAYYQRLQDAGKTKRAALRCLKRRLARTVFQALRTVHQPSSEHTQPAAACHRSYCSSHLGEPPRLTDMTQKTRIQPLPPKRAGLLIRALYRIAKRRFGEVPEPFTVTAHHRRLLIANVVHEALLQRASRKLPPSVRELAVFWTARSIGCSWCVDFGAMLQRLDGLDVDRLTDIDNYATSSKFSDDERAAIAYAEAMTADPHSVTDEQVADLRARFGEAGVIELTYQIGVENMRARMNSALGITEQGFNSGDACRVPWAAPDVPSAESR

SEQ ID NO: 198278 - protein, 369 aa, unidentified
MDQGTIVVGLDVHKQRIVGAVLPWGSDHVTEKVVIENRPQEVERFVTRVAGKGPVEFVYEAGPCGYEVQRQIAGLGYRCVVVAPGMTPVRPGDRVKTDRRDAEKLARYYRAGELREIRVPSREEEAARDLPRVREDVLKDLLRAKNRLGKFLLRQGRVYAETRTWGVKHRSWLRTQRFEWTPLQQSFEAYLRAVEEAEFRLETLNHQLEELVQQDPYRVPVQYLRCFRGIDSLSALTLVVEAMEFKRFGTARKFMSYTGAVSSENSSANRVRRGSITKAGNAHIRRILVEAAWSYQHPHGESRVLAERRKECPREVVYLARKAQDRLSRKFRRMIHRNKRSQVAAVAVARELAGFVWAMAQHFPLPAAA

SEQ ID NO: 198279 - protein, 335 aa, unidentified
MEQITTVGIDLAKSVFSLHGVDAAGRTVLRRTVRRDRLVDTVASLSPCLIGMEACSGAHEWGRRFEQYGHTVKLMAPKFVAPYRKSDKNDGNDAEAVCEAVTRPNMRFVPVKSTEQQALLALHRVRQGFVVERTAVINRMRGLLSEFGVVLPLRSVTVRRQAAQAAEGLPELARRAIGDLLEQLRLLDERIGAYDNEIEAQARLSEPARRLMKIRGIGATTALAIVATVGNAREFKNGRQFAAWIGLVPGQYSTGGKSRLGHISKRGDAYLRNLLVQGARSVLQTAAAHQDRISRWALELQQRRGYYRTLVAIANKNARLAWALLAKNEELRTLN

SEQ ID NO: 198280 - protein, 478 aa, unidentified
MADRRLVGIDLGITSAHTVRVLAGDGTTVCRRKAVPTVASLAEVEQAALAGTAPAVRLEVVIEPTGPAWLPIAVFFSARGHTVYRVSSAKAHDLRRLLSRHAKSNGIDAEVLARLPLVDPAGLVPLVLPDAPRAALDRRVRATDRLTQQAATHKRRIKDLVRQLLPCSPLAGELGQADLAVLERYPDPHALLAVGRARLARVITNASRGQQGAARATQWLAAAHAALDLYSDHPAIAFAELAAEVQTEIRLLRAIQAELAAHASKREACYRSVDPQGLARSLPGLATIGGPALVATTGPASRFPRAGKFRAFTGLAPRASETGQTDRKPQPISKAGNRLLRTTLVRAADNARRVDPQLARIYYLQMVERGKDHLGAVCVVAAHLAERAWVTFNREMPYVVCDTDGVPVTPDQAKAIIAEHWTVPEEVRRRRRSKKGKAPQQVLTGHVTGAQGATRRPSPSPSSLGRRPGRVKQAPART

SEQ ID NO: 198281 - protein, 337 aa, unidentified
MELYSGLDLHSRNTYIGILDTDFKRVFKKRVSNNLDLVLETLQPFKDQLKGLVVESTYNWYWLVDGLMDAGYGCVHLANPSAIKQYEGLKHSDDQHDAFFLAQLLILGILPQGYIYPKEDRPVRDLARKRMFLVKHKTAHILSLQSLIACCCGQRISSNEIRKFTSVDLRQLLKEEYLLLSAQANLNIIAFLIQQIKALEKAIKKKVKLDKAFEQLMSVPGIGFILAMTIMLEVGDISRFAKVGNFASYCRCVSSQRLSDGKSKGSGNRKNGNRYLSWAFVEAAQLGRRYSQRFCRYYDRKAAQTNTIVATKALSNKLARICYYIMRDQVSFKEELF

SEQ ID NO: 198282 - protein, 377 aa, unidentified
MGDYSEAFVGFDTSKLRNAVAIADAGRSGEVRFVGEIENTAAATAKLVRKLSAKYQRLTFCYEAGPTGYGLHRQIKDLGFECVVVAPSLIPKRPGDKVKTNRRDALSLAKLLRADELTPVWVPDGGHEAMRDLTRARETAMLDLRTKRQHVSAFLLRLGRPYPESRKTWTKAHVSWISSQNIEHPQQRLVLEEMMLAIRQAQERLQRLEQAIAAAVPEWSLAPLVTALMAMRSIDRIAATTRLAEVGDLSRFRTPTELMAYLGLVPSESSTGDTIKRGAITKAGNRRARRMLVECAWSYQHPPRVGQAKQPKVDAAPPAVREIAWKAQCRLYRRYRTLIRKGKLKTVAIVAIARELAGFIWAVARAATTAPVAAAPA

SEQ ID NO: 198283 - protein, 416 aa, unidentified
MRFRCIAGIDVHKKMLAVVIRREPNGKLEYLKRKFGTMRSEIEHLAAWLRSEQVEEVAMESTAQYWRPVWNGLEAHFRLHLCHPLKVRAPRGRKQDFKDAQRLADRWWSGDLEDSFIPGAEQRQWRWLTRTRVQLRRLIGVVRNRVEGLLEQGGIKLTAVATDPFGVSGWAMLKLIAQGETDIDVLVRQARGRLRKKDAELREALGGKLDPVYRMLLQQNLEQVELLRRQIEETNQALSIAMQAHVATLVRLSKIPGVDLAAAQELLAEIGPGATAFPTPEQFASWVAVCPGSQESAGVCYSRRSAKGNRFLRRLLCQIAWAAIHTKESFFTGLFARLLPRLEAKGAAWAVAHRIAKVVWLLLHEGVEYEEKGSPPNPKVLVRKFRHLMKDLARAGLDVNSLLAESAQAQSPQATA

SEQ ID NO: 198284 - protein, 348 aa, unidentified
MEHICRIGMDTSKHFFQLHGVNAAEEPVVRKKLRRKDMVAFFEKLAPTVVAIEACGGSHHWARLLSSFGHQVKLIAPQLVKPYVKRGKNDAADAEALCEAMSRPTMRFVPVKTVEQQAAVMLVGVRDRLIRNRTQLANSIRGYASEYGLTAAKGMAHLDPLIERIQADESLPVLARELFAAQAKEYQQLQAQIDEVDVKLKAWHHADECGRRLAQIPGVGPIGAALLMMKTPAPEMFRSGRQFAAWIGLTPKDHSTGGKVRLGVITRAGDEALRSVLVVGATALLRFVANGKSKSALSPWLGQLLKRKPAKLVAVALANKLARIAWKLMVTGQSYVRKSTPTTVAGAA

SEQ ID NO: 198285 - protein, 371 aa, unidentified
MEQSNKTLYVGLDVHKDSIAVAYAPEDRGAEVVSLGAIGTRQCDIDKLIRRLESKGAALVFVYEAGPCGYGLYRYLTGKGFACHVVAPSLIPRKAGDRVKTDRRDAMTLARLMRSGDLRAIYVPGVEDEALRDLSRGRDDALQDLKRSKRRLKSFLLRQDIRYEGRATWNPAHLRWLSEVVCPTPPPQIVFQEYLRAVSEQHERRQRMEHELHEAVQGWRLYPMVQAIQALRGLELTSAVIVMTELGDLTRFDNPRQLMSYLGLTPSEYSSGARRHQGGITKAGNSHARRALVEGAWAYRYPAKVSRHLQLRLETLPAEVQAISWKAQVRLCKRYRQLTARGKHVNQVVVAIAREMAAFAWAIARLVPLAS

SEQ ID NO: 198286 - protein, 348 aa, unidentified
MTLTTIGLDLAKLVFQVHGVDESGRAVLKRKLHRHEVATFFEELPRCTVFLEACGAGHHWGRLLTGLGHEVRLIAPEAVKPFVKKGRKNDAVDAAALCVAGSRPEIQFVPIKREAQQAVLALHAARSLLVKQQTMLANAIRGLASEFGLIVPLGLPRLEELMARVTAEASIPAQGQQALMLLHAQLQATAERVTALEEQIVVHARQDASARRLATIPGIGPITASLIAATVGDNIGAFKSARSFAAWLGLVPRQRSTGGKPRLGRITKAGNAESRRLLVLGATAMVRRATIWSNALGRWVRGVLVRRPVRLVTVALANKMARIAWALLTRNEVYRAQGRAQLAAGAVA

SEQ ID NO: 198287 - protein, 454 aa, unidentified
MSRTRTERAPVDALPLVNPHAAGLDIGSEEIWACVPADRAAEPVRKFGTYTPDLYALADWLTACGIETVAMESTGVYWIPVYEILEARGFQVYLVNARHLKHVPGRKSDVQDCQWIQRLHSFGLLTNSFRPEAEMCALRAYLRHRADLIQHRAAHIQHMQKALHQMNVQLSQVLSDITGVTGMAIMRAIVAGGRDPVALAQLRDPRCAKPEAELAKALTGNYRAEHVFALKQALALYEAYTTQLCECDQEIERQFSALKPRHTDDLPPLDSTDKRNTHSKNAPAYDARALLYQFLGVDLVAVTGLNASTVQDIITEIGVDMTCWPSVKHFCSWLRLAPHNDISGGKVLRSRTLKTRKRAAQAFRLAAQSVSRTQSAFGAYFRRMRAKHGPQKAIVATAHKIARTVYAMLKHRKPFHDLGADEYDQREREREITRLQKHAAKLGLTLVLPSAQPA

SEQ ID NO: 198288 - protein, 428 aa, unidentified
MNQQPDDAKEVRWDQMRLFAGLDWARDHHDVVAVDAQGRVVAELTLPDTAEGWAGLRAKLLAGAGGDLSAVAVAVETNNGPAVERLLALGCWVYPMNPKAATRYRDRKAPSGGRNDRLDAFSFADALRTDGHAWRALRADDPITQELRLLCRDEVRLIGQRTALVNQLREALHEYYPAALEAFDDWLCPGAWSFVQRFPTPGGLVAAGKRQWEKFLHAHRLYRPATCARRLEVFTRADRFAGPPAVIKAKSRLAVALAGQLRVLQKQIGEYRAAIEALFSQHPDHDLFDSLPGAGDKLAPRLLSELGDDPKRFEEAQGLQSYGGTAPVTRQSGKSRWVQMRRACNKRLRYAVHLWVNESRKGCVWAAAYYDRKREEGKSHATALRCLGQRWLKILQRMRQDHRPYDEAMHLRNRVKRGSWRLDLAAES

SEQ ID NO: 198289 - protein, 374 aa, unidentified
MSSNVCHQIIHLAIELSSSSWVIAYRVPRNDKAKLHRLEAGDGAGLLAFIAGLRHRLDPPDDASTLVVSCFEAGRDGFWLHRLLTAHGVINHIVEPTSILVTRGARRAKTDRLDAVGLLRVLAARFAGDPGACRTVVVPSVEEEDAKRPHREREFLVQERVRIENRIAALLATQGVRERPSLRSWDADMRALRTGDGRPLPTHLVAELNRLRRRLLLTLEMIRELDAVREQALETQHDSASRTVKALCTIRGIGVNFASVLTREVFYRTFDNRRQIASYLGLAPTPFQSGGMDRDRRINRAGNSRARKTLVQLAWLWLRYQPESSHAAWFRDRVGSLQGRIRRITIVALARKLLIAIWRFVTLGLAPEGAIIAA

SEQ ID NO: 198290 - protein, 341 aa, unidentified
MNIVTVGIDLAKNVFALHGVDQSGKAVFIKPKVVRGQLLEMVAQLPPCLIGMEACSGAHHWAREFSRFGHTVKLMAPKFVAPYRMSGKRGKNDAADAAAICEAVTRPNMRFVPVKDVDQQAILCLHRTRQGFIEERTALYNRLRGLISEFGIVLPQKVERLRREIGAHLEELPGWANRCVGDLLVHADRLNERIDEYDKAIAQAARQDARSRQLMQLPGIGPTTASALVASLGGGHDFKNGRQLAAWAGLVPGQYSSGGKARLGRITKAGDAYLRSLLVMGARAVLAGLGEKQDRFSRWARSLVERRGYWKAAVAIAAKNLRLSWAVMKYGDDFRLTAAIA

SEQ ID NO: 198291 - protein, 406 aa, unidentified
MADIFALDVSMGKSYCVWYRGKHCLKEFSLVHTKAEFNALRDMINKAQKPIIYFEATGIYSRVIEHFFETNGLRFCRLNPLELHLKSESLRRVKTDQKDAHRITLTVQENTFRLTVPWKKDYLQLHELSRFYNQLNADWNYRLNHLHTALEQVFPELKQLFVNKTSKLALNIVELFPHPALVRPYSRVKLKNILMASTDKRISKMKAYKYADRLIDLAQQSYPAVSSDAIQVDEVRYYTRQLIALARKKEEVIKRIESIAQLLPKYGLYYSFPGIGKQTAAQLVGELGDISRFDNSNQLNAYVGIDIRRHHSGTYVGQDHINKRENPIARKLLYFTIGNMIRQQHVNPNHIVEYYYRLKEKRPYPKLNKVAVVACMNKTLKCLLSMIKHHEKYHYRYTDSMVPVRA

SEQ ID NO: 198292 - protein, 343 aa, unidentified
MIKNQSKTKQATPTYIGMDLHKNYLQIAVMDKDGNILHNSKIDNNAESIDGFFQTINTNAKIVMESSSVWYNIYQKLQEKGFDVTLSNPLKTKAIASAKIKTDKIDAKILADLLRGGYIAECYVPPRPIMEFRIMVRYRHSLVNQRTILKKKIHAILLLNGIKIIGKPFSKVYNNKLHNLSNYRIDGYLRIIEFLDGEINQVTKQIESCVRDDESARLLTTIPGIGHYSALLISSEIGDINRFADSHHLCSYAGLVPSTHSSGGITHYGKITKTGSRHIRWVLTECIHSHVRHQDSNITQFYNRIAKKKGNAKATVAAASKMLRIIYWVLKEKREYQNITVKQ

SEQ ID NO: 198293 - protein, 312 aa, unidentified
MKKISTVQIFASEIFKEQRLTIGMDLGDHRWCYCILDEAGRILLEQKVATTPEALKQTFAKIPRSLLALETGTHSPWVSRLLAELGYKVIVAHAQKVQLISKSNRKDDRHDARTLARLARIDPELLGPVRHRSAQAQIHLTVIRARAELVRARTSLVNAARGLAKSYGQRLPKCGTQQVGRELGAGLPAELREVLEPLLQEIESLNERIQEYELRMERIAKENYPQVALLKQVKGVGTQIALTYVLTLDDPQRFPKSREVGCFLGLRPGRRDSGESQPQMRISKEGDKRKTYLTLTGLLMEGLEAARWPVGM

SEQ ID NO: 198294 - protein, 402 aa, unidentified
MAKKGRDGGSLPILKASAAGIDIGSAEHWVAVPIDCADEHVRSFSALTHGLHEVADWLQACGIQTVAMEATGVYWVPLYEILEERGIEVCLVNAHHVHNVPGRKSDVLDCQWLQQLHSYGLLRASFRPSADFVALRTYLRHRESLLRSNARFIQQMQKSMTLMNIKLDRVVTDVAGDTSMRIIRDIVAGQRDPVLLARHRDPRCKASEAELADSLRGEYRADLLFTLRHGLELYDAHQQRLVECDVEIQNLVDAIAVNMPAVEPPRTATKVRRDRRRDPKLNVHASLHRIAGGVDLYQVAGIAEITAVQLIAEIGTDMTAWPTAKHFASWTTLAPGCRITGGKRYRPKRPHSAHRVAQILRMAAVSAGRTQSAIGAFYRRLSARIGKAKAIVATAAKLARII

SEQ ID NO: 198295 - protein, 361 aa, unidentified
MNATTVAIDLAKDVFQLAIADENLRLRESLRLSRPQLIHWFAKHAVSRVIMEACGSAHFWARRFASQGIEVVLLPASYIRAYVRRNKTDAADAAALLEAARGGQITPVQVKSETQQALQSLHRIRSQWMATRTQRINLLRGLFREFGIPLACGARTGVENISRVLADPSSAIPELVRTSLKMVLEEIRVLEARVNQVECQLAAFAKQCPACKLLMSIPGIGLLNATAMVASTAGTVAHFQSARHFASWFGLTPKESSSGNSRFLGRISKRGDRYLRMLLTHGARSVLRAAAAARNKSIEPSGIRAWALNLQARSNHNKATCALANKIARICFAVLRDQQPFGQPTTRLSKKVSRHPFALAA

SEQ ID NO: 198296 - protein, 391 aa, unidentified
MIFVGIDVAKDKHDCFILNSEGTVLADVFTIANNRIGFETLLSRIQGCSQGESKIKVGLEATGHYSYNLLGFLLDSGLATYVINPLHTNLYRKSLSLRKTKTDRIDARTIAMMLMSDVDLKSYSNTAYHNEELKSLTRYRFDKVKERAKLKSSVARLVNILFPELEKLVSSLHIAVVYALLSNYPGASYIANANTEELAETLCTASKGRYTKSKTAEIQVAAGVSIGSKMPAKSMELKHTIALIRELDKEISEVESAIDKITSQMDSPIFTIPGIGRHMGAMILAEVGDFSNFASADKLLAYAGLSPSTYQSGQLQNCYAHMEKRGSRYLRYALFNAAKYVCLWCPTFSAYLEKKRSEGKHYNVAISHAAKKLVRLIFAMQRSGKAFLADY

SEQ ID NO: 198297 - protein, 415 aa, unidentified
MPMQVLYQRCAGLDVHKNTVVACVLTSTAKGMATPVVQTFKTMTRDLEALSRWLKELEVEQVCLESTGVYWWPVYNLLEEAGLPVTLVNAREAKHLPGRKTDVGDAIWLADLCRHGLVRASFIPPAAIRELRELTRYRATQVQARSREVQHLLKTLASANLQLGSVASNVVGVSGWQMLEAVAAGEEDPHTLADMAKRKLRAKLDELEQAFIMRVKPHHRLLIQTSLDLLRFLDDSIAALDTAIEAAAAPFAAQLAALDAVPGIGKVAAAAIVAEIGVNMDQFPTAGHLASWAGVCPGNKQSGGKRLSSKTTKGDVWLRRILGEAAWAGIREEHSVFRARYYRLKSRLGAQQALVALMHQQLKVIHHILKTGEVYRELGADYYQTADPHRAVQRHTKQLERLGYTVTLTPVAKAS

SEQ ID NO: 198298 - protein, 420 aa, unidentified
MTISNSIPADAVLVAIDIAKVRNEVLIEDPSHSRRRRLQVLNNRAEHDRLIEVLQAYDRRVVCGFEATGNYHRPIAWRLAEAGFEVRLISSLALARTREALHNSWDKNDPKDAQVMLHMLKMQATQRYHDPLRAGINDVQELSKTHEAIAKAKTEIQHRILTHYLPLYFPEIDRFRGNSRSDWFFAFLDAFPTPATITALTKEEFIKAAWDVVGRKVSKTQILLDIYETARTSIGLPLPLDAPAIRMFRMVVAEARSLIRQRNEIEEQADELLRHSQDYQLLRQIPGIGPINALTIIAEAGDLRRFHHHRQFLKFCGLDLSTQQSGQYRGQTRLSKFGNARLRRTLWIAGQVAIRQRENGFRHKFERYIAKDRDNPDLRRKAMTAITAKMARVVHAVVKGGSDYRPFVEGRVPGGRTSVS

SEQ ID NO: 198299 - protein, 407 aa, unidentified
MYYLGIDISKKSFTVSVLDEEGEAITRFLTFPCTRKGMEKLVDKISSLKLEKDKTVIGIEATGNLWENLYSFLEGYKVIILNPYQTRKYHQVLSKKAKTDKVDSLVIAGLLRSKEALASYVPEDEVQVLRELVRLRHHLQKDKKNYLRKAYTLLNLVFPEYTDLIKSPFKKVSSMILKKYPTAVDMARARRTDLVKMARRIQGNNYSSELAEKLIEAAKESIYSGKASEVRGMALRILIDEIQFLKNKIKEIEEKIEEILSSNEPSSPQKRLLSIPGVGPKTVAAFLGEVGGDVSRFSSANKLIGFIGWHPRISESGESKNLHPKMSKKGPSALRASLYMAAVASLKHNPYLRSLYHRKISEGKESKQALISVGKKIISIMYSMLKYEAEYDPQRIFFQLEKEQVLT

SEQ ID NO: 198300 - protein, 338 aa, unidentified
MFYSGIDLHTDNCYITTLDEHGELVKQQRIENISDLVLGYFDSLPGPHIAVVESTSGWYWLGDLLEDHGIELVLAHAIPINRDKAIAYAKVKTDKVDSHTLAILLRQNLIPRAHKISRQLRGLRDTMRLRLRLVQQRTASLRRINSIAVKFNTTGAVPDPYRFQLCVLEHTRDTFTNQILALEKSLHPVLIPNDDVQHLLGVPGIGKLSAFTIYLEIDGIERFASDKRFESYCRLVPAADNSNRRQHHRSSKDGNKYLKIAFTEAAVHAIQYYPEFRSFYQKLARRSNEAVARTVVAKELAKTVYYILKNKTHYHGFKGQPISRHKSQQWPRRSSSDA

SEQ ID NO: 198301 - protein, 364 aa, unidentified
MSEDRRTVVVGLDVHKSSVRLAAVRDGELLREMTLGYDHEQLLGEVLAWPGVRVCQEAGPTGFGLHRALVAAGVDSVIVAPGLVPSRPGDRVKTDKRDARRLAGLHAAGLLTEIFIPTEVHEALRDLVRAREDARLDRMRARHRLGKFCLRHERTMPTTCWGPTRRAWLGRQSFLLPGQQQAFDDYLFAVDQVDRRIEMLEAELDRLAGEGPHSELIARLRCMRGIDTLTAIGLVAEAGDFQRFKSAEQFMSFVGLVPSERSSGESRRQGSITKAGSAHARRLLVESAWNGRRRPTVGYELARRQRGGDPQVLEHAWRCQQRLHRRWQRMAGRGKPHQKIVVACARELAGFVWAIATEQPLRTR

SEQ ID NO: 198302 - protein, 326 aa, unidentified
MSSVLGVDVSKAKLDVALLGENDKYRSKVVPNTRAGFELLRQWLQAQLPQGLSSVHVCMEATGAYHEPLALYLHDLGIRLSVVNPMRVKRFIELEGSRNKTDAGDAKSLARFCRMTEPQPWQAPAPAVRTLQALVARLDALQQMRQSEANRLDVAHAAVQPSLQRVLAELDKAIADIKAQIRQTIDDDPDLRQRDALLDSIPGLGERTIPQLLAYIGAPERFKNVKALIAYASLSPMIRQSGSSLDKRRGTHPQGHRQLKRALYMPALVASRHNPMVMAFCERLKAQNKPSMVIVVACMHKLLAIAYGVLKSGLPFYPRRIAPHSA

SEQ ID NO: 198303 - protein, 352 aa, unidentified
MSQKPESTIAIVGIDIGKNSFHVVGLDKRGAIVLRQKWSRGQVEARFANMPPCLVGMEACVGAHHLSRRLKALGHDARLMPAKYVRPYSKGQKNDFRDAEAIAEAVQRPTMKFVATKTADQLDLQALHRVRERLVSQRTGIINQIRAFLLERGIAVRQGQRFLRAELPRILTTPPDVLSPRMVRIIEDLAGDWRRLDERVENMSNEIKAIARQDAGCERLMSVPGVGPIISSAMVAAIGAGDVFTKGRDFAAWLGLVPKQISTGDRTILGKISRRGNRYLRVLFVQAAWVVLIKPKSWERHGLKSWIEAAKKRLHRNVLAIALANKLARIAWSVLAHGRDFEARSIATAQPV

SEQ ID NO: 198304 - protein, 353 aa, unidentified
MDSVDQSNSRQTTMDITTLGIDVSKNSFHVIGANRAGKPVFRQKFTRQKLTEFIANHPPCLIGMEAFPGSQHFARKFEELGHQVRLMPAQFVKPYVKSNKNDFNDAAAIAEAVRRPTMRFVTTKTTEQHDLQAMHRVRERLVRTRTSIICQIRSFLLENGITVRTGRAALARALPAILEDPDQPLSERMRSLICRLRDQWRFIDEDINAVSKELEAIARSRDDCRRLLTIPGVGPLVATALVASVGNGRHFKRGRELAAWLGLVPREHSTGGKQRLLGISKRGSSYLRKLMIHGARSCYLNMNREPHRMGQWIDQLSQRGAHRNIVVVALANKLARICWAVMRDGSVYHCVKA

SEQ ID NO: 198305 - protein, 393 aa, unidentified
MVCVGIDVAKDKHDCFIISSEGEILADVFTIPNNAEGFDTLLQAIRRSTRPEDKIKVGLEATGHYSYNILGFLLDKGLPTYVINPLHTNLYRKSLSLRKTKTDRVDARTIAAMLMSDVDLKSYTDTVYHNEELKSLTRYRFDKVRERAKLKQSVSRLVTILFPELEKLVSSLHSASVYALLSEFPGAKQISSTHMTHLKAVLKNASQGRYGQEMAETIRNAARSSVGSVMPAKSLELQHTIRLIRELDAEIEDIETAIQAIVDEMQSPITTIPGMGVRMGAVILAEIGDFSRFDSPDKILAYAGMSPSTYQSGQLSLSGAYSHMEKRGSRYLRYALYNATKHVCHWDSTFAAYLAKKRAEGKHYNVALSHAAKKLVRLIFAMEKSQRPYCAAA

SEQ ID NO: 198306 - protein, 352 aa, unidentified
MEYYIGCDAHKKYSVFAGISDGGEIIPAQRVEHNRESYRSFLKSLPPASQIAIESVGNWYWMVDEMENAGHVPTLTHPAKAKLMMGQLNKTDKLDARGLAVLARNGTLPAVWIPPGELRDRRELPRMRMAMSQVRTKFKNRIHSAFAKYGITFDEVSDLFSGKGRKLLEKSLDGLPPETKLSVQEQLWLLDQVEQSIKKAEKRIGQAIKMDDTMQLLQTIPGVGPILAIVIALEVGSVDRFATAEKLASYSGKVPRVNSSGGKTYYGKVRPDVNRYLKWAFTEAANAIVLQQKRRPDRHVVRLYQRVRKHKGHAKAVTAVGRHLAEATYWMLRNNETYREPGGKRLVSSTQG

SEQ ID NO: 198307 - protein, 418 aa, unidentified
MKRERNTRELELRYVGLDVHKHYITVGGMNAQQEIVLRPRDVEMERFKTWAESNLRKTDEVVLEATTNTWDVYDTIAPLVKRVVVAHPAEVKQIANSRVKTDNQDVIRLVRLLIADIVPEVWVPPVEVRELRAMISYRWRLVKMSTAIQNRMHSLLHRHNIQAPQGKIDTGENREWWETLKLSELETLRLKQELKTLRLIRENIGEVEKELGRLSNSERWGDQAVHLMQIPGVGIIVTMTILSAIGDIRRFESPKKLVGYAGLGAGVHDSGQKHREKGITKFGRKELRWALVEASWQAVRSNPRWRAEYDALCKRKHQNQAIVAIAHKLLVTIWYLLNRKEVYKQSSEEDLAYKMLTWAWHMDKTALNSMSNQQFAKYGLLRLGKGAELTRIVRGGVPRRIASKEEVLALKPELHLKQ

SEQ ID NO: 198308 - protein, 391 aa, unidentified
MIFIGIDVAKDKHDCFIANSDGEVLCDVFTISNTLTGFNDLLSKLKSFSKDLSKTKVGLEATGHYSYNLLGFLLDNGLPTYVLNPLHTNLYRKSLSLRKTKTDKVDARTIASMLMSCKDLKPYTRALYHNEELKSLTRYRFDKVSERAKLKTSVSRLITILFPELEKLVPVVHCVSVYALLSEFASAKHIANANLTRLTNLLYSASKGHYNRDTAIRLREAARNSIGSVMPAKSLELKHTIKLIGELDNEISEIEAAIKQIVDSLGTTILTIPGIGYATAASILAEVGDFSNFETPDKILAFAGMSPSTYQSGQLTNCYAHMEKRGSKYLRFALYNATKYVCKWDSNFTAYLAKKRSEGKHYNVAISHAAKKLVRLIFALEKSRLPYMPVA

SEQ ID NO: 198309 - protein, 433 aa, unidentified
MNPCEQTAQDWLAHRAFGGLDWASQKHNVIVVDSRGKIVEDFEIAQSALGWKKFRERLAPYGAIPFAIETSQGSAVEQLLEAGMEVYPINSKSAKSYRERKAPSGVKDDRLDAWSFADACRIDGQGWRALRPEDPLVKELRLLCRDEVGLIQQRTSFICQLRHALGEYYSIALEAFEDWGSMSAWMFIQRFPTPQLLQEAGKRQWEKFLHARHLWRTESGPRRMELFAQATELCGTVPMANAKSQLALSLISMLFALEKQLGIYRQRIEELFSRHPDHDLFGSLPGAGPKLAPRLLSEIGDDRGRFEDGPQALQCLAGSAPVTRRTGKGKVRANPDHWPCHQRWACDRYLRHAMHLFAEQTLGQCVWAQIYYQHHRQKGSSHADALRRLAQRWLKIIYRMWIDRKPYDAILHHHNQLQHGSWVLELNPPANCK

SEQ ID NO: 198310 - protein, 350 aa, unidentified
MYFAGLDAHLKYVTVAVLDRLGTIVLETTVSTREPERLLAVLAPFRPLEVVVETCPFWPWLYDLLVPAGIGFHLAHAKRLRAIATAPQKNDRVDARLLARMLLAGLIPEAYPRPGDQRELLRLLRHRTTLVRFRTRLAGRIHSQLHQQRLLLPREQLLRQATRTWLRETAWPRLTAEQQAIVTTHLALIDQLTPLIQALERRIATAAGANPTAALLATIPGIASYRSLLLAAELSPLSRFPRVEQLASYAGLAPVTRSSGGHTRHGSIPQGANRWVRGALVSAIPSHVRWAPTSPVTRAYGQLTARLGWRVARVAAARKLLRIVYLMLRRGEPWRGAGRVEADVRDEVHA

SEQ ID NO: 198311 - protein, 369 aa, unidentified
MKKGITHVAMDDSKRRIVAGILRDGATEPDLREVPNEPRLIRRLFERLKREGPVRACYEAGPAGYDLYRQLTALGVPCQVMAPALTPRKPGERIKTNRRDAAKLVRLFRAGELTPIHVLEEAEEAVRDVLRCREDLQEDLLRWRHRLVKFLFRHGRVYREGKHWRRGHWAWLREQRFADPVLARTFHESLLLVEHLLARLADLEREIEVLAAAAPYREPVGWLRCFRGIDTLSAMTLLVEVGDFQRFRHPRELMAFLGLVPSESSTGERERRGSITKAGNIHARRILVEAAWHYRHPPRLRGKLAARSLGQPPEVCAQAWRAQQRLHRRYRHLVGRGKRATVAVVALARELVGFIWAAMTRTQGLRQAA

SEQ ID NO: 198312 - protein, 344 aa, unidentified
MKLFIGLDVSLAKTAVCVVNEHGKIIKETEIASEPEALSLFAGTLPGMIAIIGLEAGPLSQWLHRGMTEAGLDVVLMETRQVKGALKAMPIKTDRRDAEGIARLLHIGWFRPVHCKSVSAQEVRALLGARKAIQQGMITLEMSLRGLLRNFGLKVGAISRGRYDVRVRELVAGNAMLEVATTPMLKSRDALRQELANLEREVRGLAKDDPVCRVLMTMPGIGAVVALTFKSAVDDPSRFKSSKRVGPWVGLTPSRHQSGERDVIGGITKAGDVNLRRALCQAATVMLHRGRPSWLRTWAARVAKRRGNKRAMVALARRIGVVLHRMWRDGTEFNHEAPPTVGGV

SEQ ID NO: 198313 - protein, 427 aa, unidentified
MTKEAQKQQEFGAYIGLDWADRTHVISLRSADSNKVERYQIKHTPEALAEWVNSLQQRFPGQRVAVALEQSRGAVVHALMGYDFLVLFPVNPKTLAKYREAFSPSGAKDDPTDADLLLELVTLHRDKLRAWVPDDELTRAITLLVEYRRQLVDTQTGLSNQLTSLLKLYFPQALAWAGELTTVQACDFLQHWPTLAQVQQVAPTKLRKFYIAHGCRKAKVIEQRLQEIKVGQPLTRDLPVITASVAMVQATISQLRPVLEAIAGMDKQIAELFAQHDDHDLFSSFPGAGPVFAPRLLAAMGADRGRFAAASEVQQLSGIAPVIERSGKSCWVHRRWACPKFLRQSFHEFAGQSIRWSAWARAFYDQQRQRGNGHHAAVRSLAYRWIRIIYRCWQLRVPYCEETYCRALQRRQSPLARVLSLQMQKEG

SEQ ID NO: 198314 - protein, 409 aa, unidentified
MQVMHECCAGLDVHKKSVYACAIWPGDKGEKKQEVHSFGTFTADLLKLADWLRGHGVTHVAMEATGVFWRPVWAVLQGQFELLLVNPQHIKAVPGRKTDTRDCEWIADLLQHGLLRGSFVPPRDIQDLRDLTRYRAELTQAQNKVDNRIQKLLEQCNIKLSSVASDTLGVSGQLMLEAIIEGEDDPAQLADLAQRRLREKIPQLRLALAGKVRDHHRFLLKEYLQEWKSLRGRIARVEQEIERRMRPFEQAVALWESMPGVDHITACNLIAEVGVDMGQFPSGQHLASWAGLCPGNNESGGKRMSGTMRDGNKWLRRTLCQAAWAVTRKKDCYLSAQFRRLAARRGMKRAVMAVAHSMLIIGYTMLKTGRSYHELGGTYFDRINKDQLQTYFIKRLERLGLAVSVVPAA

SEQ ID NO: 198315 - protein, 355 aa, unidentified
MTSTKYIGLDVHKESISIAVLNFAGKVVMECVIETKASTIQQFIYGLRGDLHVTFEEGTWAGWLYDLLKPHVTELVVCNPRKIALLKDGSKSDRIDAHKLADLLYMNKIKPVYHGEHGLRMLKELSRSYLTISKDLGQVMNRLKALYRSWAIPCAGTQVYAPRYRSEWLSKITEAGVRRRAELYYQQLDALRLVRQQARKELLVEAKKHRATKLLRQIPGIGPLRAAHLVAVMQTPHRFRTKRQLWTYSGLGLETHDSAQYRVVEQQLQRSKKSVTLRGLNTNHNHDLKDIFKGAAMRASTAAGPLHDFYEALLAKGRKPKMARLTLARKIAAIMLIVWKKEIRFDANYLKPQAA

SEQ ID NO: 198316 - protein, 407 aa, unidentified
MDLLKTVFGIDVSSRKSNVCIMVNGQKVNDYAISNDMVGFNQLLGDLKQVTKPQIIFEATGVYSRRLQAFLDMHELRYVMMNPLEAKRKTKDDLHQNKTDKLDALYLAKLQSEHPQRLAYVQSKEYQELMANNRIYEQASHDLITNKNRLHKAIQLTFPEIEHLLANPRGKNYWSIALRFPHPDIVLETKEADIIDFLKGLSGIGKKRANDITQSLIRLAKVACPAVKKNSAHIRGLKMAINNILSAEEECQTALQEMAKLAPKRDLEILTSIPGIGENTALRIISELGDIRRFNNPSQLNAFVGVDPQVYESGNLTAHLSISKRGTAIGRKVLYLAINQIQSAKKAGNPCHIVDYYEKRKRSSETASHKKAAIASIHKLLRTMFALIKNDQLYSYDVAKHNQRLLS

SEQ ID NO: 198317 - protein, 402 aa, unidentified
MEIYCGIDWSERHHDVAVVDRAGVLLGRRRITDDLAGFTDLTALLAEHTGDEFTAVDVAIETDRGLLVAALRAAGHRVYAINPKAVDRYRDRHAVSGAKSDPGDALVLAHLLRTDRDQHRPLAADTELGQAVSVLARAHQDMVWARQQDTNRLRSLLREFFPAALTAFADLTTKTALTVLAAAPTPAAAAALTRANLIALLHAAGRGTRPADAARLVEVFAQPQLHQPPAVEDAMGEAVRAIVRTVAATSESIKDLEKALNASFEQHPDAEILDSLPGLGLVLGARVLSEFGDDPNRFTHAASRRAYAGTAPITRASGRHRAVLARHIRNRRLADACYLWAFAALTKSAGARAFYDRRRAAGDHHNAALRRLGSKLIGQLHHCLHQRQPYNELLAWTQPEPA

SEQ ID NO: 198318 - protein, 384 aa, unidentified
MSKIRFVGLDVHADTIAVAVAEAGGEVRSLGIIPNRLESIRKMMSKLEPVGTLKCCYEAGPTGYVLYWQLTQLGVACEVIAPSLIPTKAGDRVKTDRKDAEKLARCYRAGELTSVWVPDANHEALRDLVRAREAAKKDQLRHRHRLGKFLLRHGKRPTDAGKAWTQKYLNWIRIHVHFEQPALEATLKHYREEVDHIAERITKLEQAIDEAVRQAPPEIRAVIEALQALRGVAQTTAATVVSELGSLSRFPNPSQLMGYSGLVSSEYTSGNRVQRGRITKSGNAHLRRVLLEAAWTYQHRPNVQGRVLRRQKSLALSEEATRIAWKAQQRLHKRFSALTARGKETNVAATAVARELLGFMWAIAVHTEAQHKPRQQKSAKTKAA

SEQ ID NO: 198319 - protein, 405 aa, unidentified
MPYILALDVSMGHSYSVLYKDDTCLFEDEIEHTQRGFHALLEEIQHLPERPLIVFEATGIYSRPVEKFFQDHHFSYCLLNPLEAKKQMEESTLRSWKTDKSDAHRLAQTHLKNQRQPKEVQSNFYLEMRDLARFYQEIEKKITRLRMDLHNCLQLTFPELEQFFSNRLTPYALTLIRLFPHPDFVLASTRTKIKNKLINETRKKISANRAEQKADQIIHYAQCAYPAVEKDSIHCQKTIYYAELLQDLLEQKEALATQMIKKAEGSPCFLLYQTFPGIGALTAALLLGELGDITRFKTHKQLNAFVGIDIRRYQSGKHTGQDRINKRGNPKARKIIFFTIRNMIRQQRAAPNHIVDYYYKLKKQPIPKKEKVATVACMNKLLKCMHAMVRAHTEYDYAYAVSVDH

SEQ ID NO: 198320 - protein, 400 aa, unidentified
MLSIGIDVSKGKSTVCGMKPGGEIVYAPFEVQHTREGMSELVSLLRSSGEEVRAVLESTGSYHCPVVAALLENGIFVSVVNSLRMKRFCSQSIRKVKTDRIDAMQIALYGLAYWQELQPARLPEDTYRELQLLARQYYQMTSMLIKAKVDFNAICDQVLPGMQELMSDHAGRHKLSDFVLRYRHTTHILEMGETRFRKDYCKWAEKKGYRNCERMAVLIFATAQNGIPVLPNAPSTQIVITEAIRVLHTVEASRDAILTQMQALAKTLPEYSLVREMPCIGDTLAPRLIAEIGDVRRFHSKRALIAYAGIDAPPYQSGKFCANNRHISKRGNRYLRKTGYEVMQSYVMHKPANDPIFTFIEKKRGEGKSGKLAMVAGLNKFLRVYYGKVTELYRSSSAIE

SEQ ID NO: 198321 - protein, 390 aa, unidentified
MIYVGIDVAKDKHDCCILGSDGEILFSPFTFQNSLQGFDVLYEKILSLTSDLSEIKVGLEATGHYHLNLLRSLLDNGLASFVINPLHTNLYRKGQSLRKTKTDKVDAASIAMMLLTDRSLKPYSDTSYHNEELKSLTRYRFDKVQERARLKISVSRLVSILFPELEKLVPTLHMASVYALLSEFPGASFIAAAHLTRLKHLLYDASKGHYGRDMALTVRDAATSSIGSVIPAKSLELKHTIHLIQVLSAEIDEIEDAINAIMDTLDSPITTIPGIKNRMGSMILAEIGDVSRFDNPDQILAYAGLSPSIYQSGQLTSSYAHMEKRGSRYLRYALFNATVYVCQGDPAFKAYLTKKRAEGKHYYVAVSHACKKLVRVIYRMQLTGEAYRSA

SEQ ID NO: 198322 - protein, 337 aa, unidentified
MDTSKHFFQLHGVNAAEKVVFRKKLRRKQMVVFFDALAPTVIGIEACGASHHWARILRSFGHEVKLIAPQLVKPYVKRGKNDTADAEALCEAMSRPTMRFVPVKTAEQQAALMMVGLRDRLIRNRTQLSNAIRGYAAEFGFTSARGMAHIDPLLDRIQADESVPVLARELFAAQAEEYAQLQAQIAEVDAKLMAWHKADECSRRLANIPGIGPIGATLLLMKTPAPEMFRSGRQFAAWIGLTPKDHSTAGKVRLGVITRAGDEALRSVLVVGATAVIQHVRRGGRGSPWIVGLLKRKPPKLAAVALANKMARIAWKLMVTGNSYAAKSAPAALMGAA

SEQ ID NO: 198323 - protein, 322 aa, unidentified
MRYIGIDVSKATFVVAYSSDKGGEIRTFNNTTAGIRQFIGTLPKDGSIHCVMEATGNYSALLLYMLNVAGITVSMENPLKVKNFAKAMLSTIKTDKSDARLITLYGEKMNPRPFKVQGEAILRLRQKRTVIRQLTKQITAMSNLRGSLACLPVPDKGATHTVDETIKFLEKKRDRLQSELTDLVEVEFSRQLALLTTIKGIGITLATALIITTGGFTYFQNAKQVSRYLGICPTYEQSGTSVNIKGHINRNGDAYTRGLLYIAAWPASRFNAQCKETYTRLRQNGKSGKLAMIAVANKLIRQAFAVVAHDKEYIDGFVSNRP

SEQ ID NO: 198324 - protein, 332 aa, unidentified
MECHSEELTLKTFSQNPRPELLHQYLVRNFPGAVYHTAYEAGFCGYWIHNKLTALGIDSIVVNPADVPTTDKEKVNKDDKRDSKKIARSLRSGLLKGIHVMSLKTIEDRGLTRTREIMVRDLTRIKNRIKTFLYFHGIEFPEKFKNKSTHWSKRFLNWLKSIDLVEYGAKKTLSLLIEEAEHIRSSVLNATKAIRELSQSEEYCHRIKLLRSISGIGILSGMIFLTEIEAINRFSNFDKLCSFIGLIPSTHSSGEKEVTGELTRRGNNYLKRTLVECAWISVRWDRALNKSYHDYCKRMEPNKAIIRIARKLLNRIRFVLKNDQPYVCSIIK

SEQ ID NO: 198325 - protein, 351 aa, unidentified
MSNYKIGCDAHKHFSQFAVCDANGRLCQQRRIEHEPGAIRDFLVQFPSGTPVALESVGNWYWIVDEIEAAGCIPHMAHAAKAKVMMGNIHKTDKLDAAGLAVLEHLGTLPKVWIPSGEQRDRRELPRTRMALKKHVVGLKNRIHATLAKYAICIEAKDIFAGTGRRALEGALSNLPVETSYCARQELAVLDAVDAQIKNLEKRIKQQNAQTPSIQLLKTLPGFGDILSIVVDCEVGSISRFDYCDHFASYAGVVPKEQSSGGKVRYGHMLSESNHYLKWAFIEAANVVSSRRNAPAWRNKHVVQLYERICSKKGHNKAIGAVARHLAEAAFWVLKKGEPYREPQPHLPKQA

SEQ ID NO: 198326 - protein, 329 aa, unidentified
MSTSNGPHSSAGVFVGIDVAQDKLDLAMDEDGKVLTFTNDPRGIAAILRLLIPLAPQIVVVESTGGLERPLLEALLENNLPAALVHPGRVRFFAKGLGILCKTDRIDARVLHRFGKLANPRLMEKRSKNEGELQSLVSCRRQLNVTRVQQKNRRAATSSKSALRSIDKIIEALDKQIGLLDKQIRELIDADDQFKHLDKLLQSVPGVGPTLSATLASELRELGQADHRQVAALVGVAPYACESGKFAGQRSIRGGRTAVRCVLYMASITAIRVNPVIKPLYQRLVAAGKKKKVAIVACMRKLLALLNAMIRDGVSWDQLNVVKKLANNS

SEQ ID NO: 198327 - protein, 343 aa, unidentified
MDHFAGLDVSVKETSVCIVDDTGRIVREVKVPSEPEALLQVLRNPAYHFKRIGLEAGPLSQWLFSALAEAGLPVICVETRHIRAVLKAHINKTDRNDARGIAQMMRAGLYRPVHVKTLRSQKLRILLTHRKLLQSKAIAIENDLRATLRNFGLKVGAVGTVKLEARIKELIENLADLAVLVEPLLIVRRVLREQIAILHRRLLAIVRDDDVCRRLMTTPGVGPVVALTYRATVDVPARFRNSKAVGAVFGLTPSKYQSGEIDRMGSISKCGDAMMRTVLFEAAQAMLTRTIKWSWLKAWAMKIARHRGLKKAIVALARRLAVIMHRIWVDGTEFRWTREVAAA

SEQ ID NO: 198328 - protein, 345 aa, unidentified
MEPMYCIGLDVHKRKISYCVKDSGGKAYSEGSLTATRLDLDVWMKTLPQPWSAAMEATMFTGWIYDHLKPHAAALKVAHPLMLRAIAAAKKKNDRIDAGKICDCLRCDFLPECYMAPTAIRERRRTLRYRNLLVRQMVQMKIKISSLLMEAGVSYNKQRLHKAGYFRELLATNPDINEGLKPLLQLCRETVVRLQKTESAMVRSLERDSLLMDRVERLMTIPAVGPITALTWTLEVGDVQRFSSIKKAISYCGLCGAEKSSGSMVQRTPLSKQRNKHLQTTLIEAAKMAPRNSPELAMLYDKEKQKGNANGATLAVARKLVAYLVAVDRRQKEFLTVQRENRTAA

SEQ ID NO: 198329 - protein, 408 aa, unidentified
MLSACCGLDVHKKFVTACLLIAGASGRVTKEQRQFGTTTAEVLELLAWLQARGCRHVALESTGVYWKPVHNRLEGAMAQVLLVNAQHIKHVPGRKTDMRDAEWIATLLRHGLLTGSFIPPKEIRELRDLTRTRTTLIRQRAAECNRIQKLSENSSIKLASVASNVLGKSGRAMPEGLAAGRDDAEALAELARGTLRNKIPELTEALRGVLSETQRWLLAEQLRRVGELDAAIGRFDARIAAQSRPYEALLVLLDEVPGVNRQMAEVILAEIGPDMSQFASASRLASWAGMCPGQKESGGKKQSGKTRPGNVWLRSALVQAGWAASKAKGSSLKAQYHRVARRRGKKRACLAVGHRILRIVWAMLSSGQEYREGGPDYFVAASKEQVKDQLVRRLQKLGYAVSVEAPAA

SEQ ID NO: 198330 - protein, 420 aa, unidentified
MDSLIERCAGIDIGKDEVVACVRVPGPGGRGRVKQTRTFAAFTATLEAMIKWFLEHGVTAVVMEATGSYWKPVWYLLEEHPGLELMLVNAHHVKILPGRKSDVLDAEWLAELLEHGLLRGSFVPPKMIRELRDLTRYRRRMVQAHTSECQRIEKTLEDAGIKLGSVASDVLGVSGRAMLAALVAGERDPVVLAEMAKGTLRRKMPALREALRGRFAEHHALMIGLALEHTAHLESTIARLDDRVDTLFAAHTSEGGVPFDRARDRLETITGVGKRAAETIIAEIGADMTRFPTPAHLASWAGLAPGNNITGGKRGSGKTTKGDVWLISIMTQCAWSASRTRDTYLAAQFWRLARRTGKKKAAIAVAHSMLVISWHLLTNDCDYDDLGGDYFTRRNTDRQRDRLVNQLHHLGYRVTLEQPA

SEQ ID NO: 198331 - protein, 313 aa, unidentified
MSASCNIGIDVSKDSFDVFVHETSLHKKFEMNKGHIRKALSWIKKHKPALIVLEATGGYERTLVAELVGAKLPVVVNNPRQIRDFAKATGKLAKTDKIDAAVIAHYAAVIMPEVRPLLSKQEQKLSALTSRRRQLVDARAVEKNHKEHAYLPEISTSIETVIQKLTTEIENIEAMITDLISSDPNMQEKIDRISSVPGVGKVTAAVLMADLPELGTLNRRQIAALIGVAPMNRDSGQFRGKRMTGAGRKSVRTALFMAMLAVVQFNPKLKAFYKHLVAQGKPKMVALVAAMRKLIIILNSMLKNNEQWRVQNA

SEQ ID NO: 198332 - protein, 416 aa, unidentified
MKGPVEATSERYIGIDVHKHYCVLAAVDAHKEVVLPPQRVSFSRWQEWIHKHLQPRDAVVLEATTNAWQVYDQVVPLVARAVVANPLKMRSLTAARVKTDARAALHLAKLLAADMIPEVWVPPVAVRELRALLTHRRRLLKMRTMTRNRLHSLIHRYSLEPPPGEIFSPKHRDWWAGLELSPTEGLRVRQDRVILDQLEPLLEEVRGELERLSTEEPWVEALPYLLQLPGFGLIVSLTVLAAVGDIRRFAQPKKLVGYAGFGVCVDESGQKRRRGGITKEGRKDLRFVMVEAARSAVRYHDYWKAEYERLQRRMHHNKAIVAIARKLLVVAWHVLTECAADRRAEADMVASKMMQWSWKLDDELRDGLSTRQFVRYQLLQLGLGAELTHIHRGGRDRPIASVEEVLELRPELQPAG

SEQ ID NO: 198333 - protein, 316 aa, unidentified
MANHVEKITLGIDVAKDHHVIYNWQTKQTTRLPNECGDIKAWLKTFHGPVRIAIEPTSHYHMIMVDEALALGYEVYLINPRQLLHYREAVNERNKTDPLDAWLLARFLEHEVDQLRPFKPRDPRAQRLWSLVLRRATVVKSRQQLQQSFAEVKLSIQALLTQFQHLLDRIERRIIALIQELGWWSDYQRCLSIPGIGEGNAGALVVVYHRGCFAGSDAFISYLGLDVRIRDSGHFKGKRKLTKRGPPELRRLLFCASHAARHYHRFAEYYQKQLDKGLCKIAARVILARKLARIAFTLMRNEENFIKEEKIHCVAS

SEQ ID NO: 198334 - protein, 339 aa, unidentified
MNSMAVGVDIAKQVFQVHYVDRETGEIVNRQIKRAKFLEHFANRAPCLIGMEACGGAHHWARELTKLGHEVRLMPAEFVKAFNIRNKNDAADARAIWLAVQQPGKPVAVKTEMQQAMLALHRMREQLVKFHTMQVNGLRGLLTEYGEVMSKGRAALDKEIPAALGRIAARLPAALIDTLREQWNGLARLDEQIAEIERRMREWKQQDRAVKAISEIPGVGLLTATAAVAMMGDPKAFRSGREFAAWAGLVPKQTGSGGKVNLHGISRRGDTYLRTLLIHGARSVMTHTKEPGRWVEQMKQRRPMNVVIVALANKMARMIWAVLAHESPYRNDYVSVKPA

SEQ ID NO: 198335 - protein, 310 aa, unidentified
MDGVYIGIDVSKDRLDVHVLPEGQAFAVARDGEGLAALCARLAGEAVTLVAVEATGGFETVVAAALAGAGLPLVVVNPAQVRAFAKALGQRAKTDPIDAAVIARFVAATKPAVRPLPDAATQLLAELVGRRRQIVEMLAAERQRQSRLTARHLARSLARLITALERELDAVDREIDTAVRGSPAWRQREDLLSSVPGVGPVIARTLIAELPELGSIGRKEIAALAGLAPYTRQSGRWKGKTFIGGGRKDVRRALFMGAMTARTHNPPLKAFYERLLAAGKPKMVALIAVARKLLTILNAIIRTKTPWLYA

SEQ ID NO: 198336 - protein, 427 aa, unidentified
MNYNQNHKISQVTPSTLVVGIDIAKDKHVARAQDDRGYEFGKRLIFENRIEGFELLIGWISKLQKENDKTHVIIGAEPTGHYWMGLGYYLASKDYDFVLGNPMHVKKSKELDDNSPTKNDTKDARVIAQLVKDGRYSIPNLLDGIYAELREAIKLRDQLIKQQGITEGRIQNNIQRYFPEFNDVFKDWDGKTALYTLQAFPFPSDIRDKTPEDILAEWKTVVKRGVGIKRATSLVEKAKKSIGIEIGLRFAKRELHSLLDQYELYADQLEELNQEIKTLLEEIPGAKEMLAIKGLGVTTVAAFFAEVGDLSNYHHPQQLVNMAGLSLREHSSGKFKGETKITKRGRKKLRKAIYLAIRPLVANNPTFQALHKYYTTRPENPLKKQQSLIALCGKLLRVLFVIGQKQCEFDGSKLLKGLPQIETLQAA

SEQ ID NO: 198337 - protein, 368 aa, unidentified
MGMVIFGIDAHKRTHTVVAVDENGRQLDMRTTTQTTTSDHLELVRWADRFGPERSWAVEDCRNLSRRLEADLLRSGERIVRVPPKLMAHARDAGRSYGKSDPIDALAIARAALREQDLPTAQLDGPARELRVLIDHREHLVAERTRHINRLRWHLHEIDPAWDPKPQSLVTDKHLRIIATRLADTCGVVGAIAQDLVARIHALTLDIRRVQVEITQRVEPLAPALLAIHGVAAISAAKIIGETAGIGRFYSRHAFARHNGTAPLPVWSGNQRRHRLSRVGNRQLNAALHRIAVTQSRSHPEAIAYLERRVGTGNTRTEAIRALKRRLSDVVYRALVEDENTARARGELVGFDSVTLAVEMSTAHAATA

SEQ ID NO: 198338 - protein, 316 aa, unidentified
MICGVDVSKQTLEVRVEQEGPGGSFANSQEGIAQLADFCRAQQVHLVAMEASGGYEKLPFALLWAEQIAVTIVNPRAVRRFAEGMGYLEKTDALDAGVIAHFARTKKSKPCSPASAQEQHLRALVTRLRQLTEVQTAQSNQRLLVTDSTVQELCQQMLTLVKKQIRRLEKAIAQLIGADPLWQQLDASFRTIKGVAGRTVSRLMAEMPEIGTLSHKRISKLAGLAPLAWDSGKAHGKRAVRGGRRPIRDTLFIVAGVVARFNPDFMAFRQRLTLAGKAKKVIRVALAHKLLIRLNAKAREVRQQFSQATVSSAIGA

SEQ ID NO: 198339 - protein, 347 aa, unidentified
MIIIGCDLHTRTEQVAMLDTETGEVIEKRLDHESGEAKRFYAELKEPALVGIETTGYTRWFAEMLSELGHELVVGEAGKIRAARPRKQKHDRGDAEHLLNLLVRGDFPKVWLPPPAERDVRVLVEHRHQLVELRTRAKNGLQAMALSYGIRKRGRLWSQAGQEELKKIPLREGMGRRRQDLLRLLAQLNAWVKELDQRIEEEVAGRQAAQLLMTHPGVGPQTALATVLVLGPVERFPDTRHLTSYLGLIPEEESSGSRQRFGHLTKQGNRLMRFLLVEAAQTASRFDPGLKRVYRRLAFRKGAAIAKVAVARKLAIRLFIMLRDQIDYAEFVRRGSHAGMLGDVALA

SEQ ID NO: 198340 - protein, 408 aa, unidentified
MVVQASRVTSSTVVVAVDVGKTEFAFSVTDATRTSLLKPRTGCPMTGPSLTQIVADIVQVLPLDAVVRVGIEAAGHYHRPLLNAGWPVGWEVLELNPGHVTEQRRVLGKRTIKTDVIDLQAMTELLLAGRGQPARDRSLVLGELTAWSAHRTSRVMVRTATKNQLLGHLDRSFPGLTLALPDVLATKVGRLVAAEFADPARLAALGSSRFIRFGATRNLQIRKPVADRLVQAARDALPTADAAVARAVLAADLALLVDLDAQVEQASTHLARLLPRSPFAPLVSVPGWGAVRAGNYGGALGDPARFDHHRQVYRTAGLNPIQYESAGKRRDSVISREGSVELRRALIDLGVGLWLNDPAAKVYGSQLRARGKKGLVIGCAMAHRANRIAFALVRDQSDYDPSRWNRED

SEQ ID NO: 198341 - protein, 339 aa, unidentified
MDATTYGLDVAKRVFQMYWVEVETGEIVNRRFGRDELIRFLAQRPPGQVALEACGSAHWWARKIKALGHEVVLLHAKFIRPFVQTNKTDAADARAIWTAVQQPGMRTVATKTEDQQAMLSLHRIRALLVKFRTVQVNQLRGLYEFGATFRAGRAAGLAEIRARTAELEDALPGTMMCCLQDQLRRIEELQRDIDLLETRIGVWQKQDAACHAITAVPGIGRLTATALVATMGDAKAFRSGREFAAFLGLVPRQSGTGGKVRLGPMSKRGDPYLRTLLIHGARSVMYHAKVPTPWQKDIQARRPANVAAVALASKIARTAWAILARGQGYQPNYVSMRPA

SEQ ID NO: 198342 - protein, 313 aa, unidentified
MTLPVFVGIDVAKATLDIAARPSGERWQLANEEAAFPLLLARLRPLAPALVVLEATGGFEHAVVAALAAAGVPVVVANPRQVRDFARATGQLAKTDILDAQILALFAERVRPVPRPLPDAAAQALDAVLTRRRQLLEMLTAERNRLGVARAPVARRIRTHVRWLERELADVDRDLGRLIEQSPVWRAQDDLLQSVPGVGPVVSRTLLGELPELGRLTHKQIAALVGVAPLARDSGTLRGKRLVWGGRAPVRAVLYMGALVATRWNPVIRAFYQRLRMSGKPPKVALVACMRKLLIILNAMARTGTRWRHTALA

SEQ ID NO: 198343 - protein, 392 aa, unidentified
MVVSVGIDVSKDKHDCFIVSSEGEVLADAFTIPNTMDGFHCLLQRIQDCTAPQDKIKVGLEATGHYSYNLLGFLRDNGLATYVLNPLRTNLYRKSLSLRKTKTDRVDARTIASMLLSDAGLKPYTNTAYHNEELKSLTRYRFDKVTERAKLKSSIARLVCILFPELEKLVPSLHIASVYALLEEFPGGKQVAAAHLTRLKSLLETASKGRYKRDMALEIREAARTSIASLMSAKSLELQHTIRLIRELDNEIAEIEEQIQSIMDELHSPITTIPGLGFRMAAMILAEVGDFTRFDSPDKLLAYAGMSPSTYQSGQLKNCYPHMEKRGSRYLRYALYNATKYVCHWDPAFADYLAKKRTEGKHYNIAISHAAKKLVRLIFAMEKSRQPYCSVA

SEQ ID NO: 198344 - protein, 346 aa, unidentified
MNTVVRIGMDTSKNVFQLHGVDEAEAVVLRRQARRREMIKFFEKLPPALVAIEACGSAYHWGRLLGSFGHDVRLIRPQYVKASVKRGKNDAADAEALCEAVSRPSMRFVPVKSRDQQAACMLVSVRERLVGVKSQLSNAIRSYAAEFGIVGPAGRQNVNALIKHILEDDTLPEMARDLFRLQARKYASVETRLKEVDAKLMSWHRADDVSHRIATIPGVGPIGSTMLSIKAPPADSFKSARHFAAWLGLTPKDHSTGGRVRLGGITKAGDPGIRSTLIVGATALLRHVRKGRTRPSPWLAALLERKPPKLVAVALANKFARIAWRLMVSGGVYNRPPAPMPAALAA

SEQ ID NO: 198345 - protein, 358 aa, unidentified
MTQVRQLDFSGTTIFCGVDVHKKSWRVNIQSSEFELEDFTQNPDAVLLHRHLAKRYPGATYKIGYEAGFSGFSMQRSLSQLGCDCLVINAADIPSSDKDKKQKQDKADARKLCHYLQSRQLKGIHIPQAEWEHARTLVRTRERIVTNQTRCKNRIWQLLHFSGLKAPGDQQEGKYWSKRFISSLQAMDCGGSIHLQQSLQLYIKDYLQTRGLLLEATRAIRALCREERYAAAIKLLRSIPGIGEINAAVLLFELQDVSRFKRFDHLCSYVGLVPDTADSGDTKRTKGITHRHNYYLRTALVESSWSVVRKDPALLMKYQAYCKKMNGNKAIIRIAKHLLSRINFVLKNKKEYVTGVVA

SEQ ID NO: 198346 - protein, 340 aa, unidentified
MQIHSVGIDLGKTTFHLVALGAAGKVLVRKKFTQRQLLTYTANMQTSLIGLEACSGAHFLGRALRKQGHDVRLIAAQFVKPFVKSNKNDFVDAEAIAEAVDRKNMRFVPIKTDDQLDLQAIHRVRDRLISRRTAVINQVRAFLLERGLVFAKTPAKLRAAMPDILENAEADLTPQMRNLIDLLWGEWKTVEQQIEVLSLELERISAADAGCTRIRQIPGIGPIVATAIVAAIGNGAAFRKGREFAAWLGLVPGQYSTGGKAKLLGISKRGNVYLRKILIHGARAAVLRIKRDRSSIGVWMDALDARAPKNVVVVATANKLARIAWAVLSSGENYRSIANA

SEQ ID NO: 198347 - protein, 317 aa, unidentified
MAMQVGKLIVGADVAKAELVIHHDDRDEIIRLKNSKLEIRRWLKQQPLNTAIAVEATNVYHLDLVELAHSLGFEVYVIDGFQLSNYRKSVGGRVKTDPSDARLLSRFLKNEGEDLRPWSPPPAVYGKLQSLLRRRAALVTARTAVTQSWANESLLKAAFETFVKSIDRLDQLIQKKIKEVLREAGLQEQVARCQAVEGIGFLTAAALVMAFIRGEFKSSDSYIAFLGMDLRVSDSGQKNGRRRLTKRGCSEIRRLLHNAAMAASRSAAWKGLYEQHRSSGKATTQALVILARKLARVAFALMKNQDEYVTKGEKLAC

SEQ ID NO: 198348 - protein, 263 aa, unidentified
MLIIGCDYHPSFQQIAFVDTDTGELQERRLEHCEEAEKFYRGLGVQGMKVRLGMEASGHGRWFERLLAELNFELWIGDATEIARKRERKQKTDRQDAQHILKLMLKDDFPRIWVPSWENRDLRQLLWHRHRMVQARTRIMNQLQAVALNEGLRSKKRLWREHGREQLESFRLAPWASRRRHDLLELLDRLNPTIAELSQAIEQEVEKCPEAQRLMTHPGVGPLTALAFVLIIERADRFQCGKQIASYLGLVPLEDSRTHKDFS

SEQ ID NO: 198349 - protein, 344 aa, unidentified
MQVSVLGIDLGKNVCSIVGLDVSGAVVLRRRVKRETLISLARKLPPCIIAMEACCGAHHLGRLFAGQGHEVRLMSPEYVRPYIKAQKNDDRDAEGVAEAATRPTMRFVELKTQEQLDMQTLHRSRDRLIGERTALINQARAVLLERGIVVPQGKRRLAEYLNTLMGDPEAGGLSSRMRVLIADIQLQWQELDRRIEIFDAEFMAFMKENDDARRLVTIPGVGVTIASALIAAVGKAETFDHGRDLAAWLGLVPRQSTTGGKPTLLGISKRGNKYIRRLLIHGARSILRFIAERDTALGLWVKELLLRVHHNVAVVALANKLARIAWAVLRRGDRYTARGTPVSA

SEQ ID NO: 198350 - protein, 331 aa, unidentified
MKNVTQTIGIDVSKLTLDVCIRTTAVHKQFSNDVKGFKQLICWVIKQKSDLEASLFCFEHTGWYCLMLSYFLYENKYDYCCINPIEIKRSMGLRRGKSDKADAWEIANYAWLRRDELIPSIPPAKNLLELQRMMALRDQLVKQLTACKNLNSGMQEITANRSKDVSLVILAKSMHHLEKQIKAVEKAMDGLISQDESMTTNYKLSKTVKGVGRVLAVQMLLHTHNYSRFASPRQFSAYCGLVPYPYQSGTSIHGRNKIHPISDRKMKSLLSMSAISAIQHDNELKLYYRKRVEEGKPKMVVLNIIRNKLVSRVFATVSRGTPYVEMNKFLA

SEQ ID NO: 198351 - protein, 357 aa, unidentified
MPSITPEDAAIIEVTGGVDTHLDTHTAAVIDSVGRVLGTQQFPATTSGYCTLLAWMRGFGRLRRIGVEGTGAYGAGLARRLRDEHLEVIEVDRPDRKTRRFQGKSDPIDACQAAKTALARERTGTPKQRDGRVEALRNLRVARRSAVDQRADAQRQIKALIVTAPDDLRAQLRGLAVTQLIGTCANLRPDRTDAATPGTAAKIALRSLARRHQHLAVEVADLDELLEPLVAAINPALVAVNGVGADTAGQLLVTAGENHDRLTSEAAFAMLCGVAPIPASSGKTNRHRLNRGGDRQANKALYRVVLCRLRWDPRTRSYMQPRTKDGLSKKEIIRCLKRYVARELYQIITSNDLELAA

SEQ ID NO: 198352 - protein, 351 aa, unidentified
MQKPLYGMDKFKLFCGIDISKADFDVVYGTASSSQHVKLSNDVKGIHQLLKVLLSLEPDRSKILICCENTGSYMDKLACILKGEDIFLWVVHPLLLSYYSIELNRFKTDKADASKIFSYSVTNQSRATVYHLSSQPARDLKELFNCRKNLVDTRAVYICRIKDNQQKASCFNLVMEIQKQLITILDGYIKMIEKAIRAVIVADQRVKKMYKILQSIPCIGPVTAWHLLFVTDCFDKFDNWKKLASFIGSAPFPKKSGTSVNFKDKTSNKAYKPLKADLNQGIVSVCTRPGQLFYHYYQAMIKNNRPHLYILNTIKNVLLKLIFKLIKADILFDVDVFMKNKISWQKHLLMS

SEQ ID NO: 198353 - protein, 386 aa, unidentified
MQKLNDLSRSLTPLKPDGTLIAVIEMSLSSWLVAGIVPGVERQPLKKLEADESTLLKLLNRWREEAKKAGHRIERIAVAFEAGRDGFWLARWLRARDIEAHIIHASSVAVSREHRRAKTDRLDTELLKRAFLGWLRGERNHCKMVAIPTIKDEDAKRPNRERESLVGEQSRIVNRMKAALIRLGIRGFNPKLKKAVERLDGLRTPEGEPIPPNTLAELRRDMARRRLVSDQIRQIEDTRLERLKQAPSDGPHAMVRLLARVIGVGIETADMLVQEVLSRNMRDRRAIARYAGLTGSPDESGRRRREKGLTRSGNARVRRGMIELAWRFLRFQKDSVLAHWFRTRTENARGARKTMIVAVARKLLIALWRLVREGVVPDGVVLRPVS

SEQ ID NO: 198354 - protein, 310 aa, unidentified
MTKRFVGVDVAKASLTVVVRPELSSFVFPNTPSGRKKLAETLQKLSPSLVVLEATGGWEREVVETLAEAGLPVRVVNPRQVRDFAKALGKLAKTDRIDAAILAHFAEATQPEPRPLPDEETRELRDLLTRRKQLQDMLTAEKNRLRRAPSSLRPDIEEHIRWLEEKLKELERKIEEKTATFGERMQILMSVPGVGLLTSAVLLGYLPELGKLSGKEIAALAGVAPFNRDSGEHRGKRAVWGGRKEVRAALYMATVAAVRWNPTLRGFYQRLLGAGKPVKVALVACMRKLLVILNAMVKRGTTWSPTYATP

SEQ ID NO: 198355 - protein, 370 aa, unidentified
MEETITYVGLDVHKKSIAVAVADGGMAGEVRYLGMIDNMTKALDRLTARLERPGRVVRFCYEAGPCGYGVYRHLQGRGYACMVVAPSLIPRRPGERVKTDRRDAAMLARLLRAGELTAVWVPDADHEAMRDLVRTRAAAMRSRRRARQQLSGFLLRHGRVHSGKNWTLAHRRWLSTVRFEHPAQQIVLQDLIDAVDDADARCARLVARIEELLPQWSMAPVVEALQGMRGIALIVAVTLVAEVGDLGRFDNPRQLMAYLGLVPSEHSSGPRVRRGAITKAGNGEARRVLIEGAWTYRLQARVSRTLLDRLQGLPKPVRDIAWKAQVRLCARHRRLTAAGKPQPVVTAAIAREMLGFAWAIARHVQPRPTN

SEQ ID NO: 198356 - protein, 410 aa, unidentified
MTDINITRTKPVLVAIDISKARHEVLIAVPGKKRRRRLTVLNQLEDFNRLIATLSDYGCPVRVAFEATGNYHRALAYHLAAAGFEMKLVSSVALARTREALHNSWDKNDPKDAQVILHMMEIGNEQFYHDPLVRGTNDIQELSKTHDIVSKSKTELWHRILTHYLPLYFPEADRFHRSSRSDWFFAFLERYPSPHFISAMCKEAFTADAWDVVGRKVAKERLLSDIYETAKASVALPVAPDSDAISMFRLVLGEGRSLIAQRNQIEDRAIALLKDFPDYQLLTTVPGIGPINALTILAEAGDLRRFRHHRQFLKFCGMDLATIQSGTFRGQTKLSKYGNARLRRTLWMAGQVAILQRTNSFRDKFERYISKDRHNTHLRRKAYTAIAAKMARTVHGIIKHGEPYRPFFEG

SEQ ID NO: 198357 - protein, 324 aa, unidentified
MTLPILGIDIAKLKFNVCLINARGKLRHKVLPNTTTGFEQLLEWLSRQGVQQVHACMEATGTYGEALALFLHQAGHTVSVVNPAAIKAFAQSRLSRTKTDRVDAELIARFGVAQAPSAWKPLPTEVRELQALVRRLESLVEMRVMEENRLSSSMLVEAVRASVEAHLSYLNEQIKHTEELIRDHINSHPTLKRQSQLLDSIPGIAQTTAALLLSEITDITQYRSARQVAAYAGLVPRERQSGSSVRGRTRLSKIGNARLRKALYFPAITALRCSPFFQAWAKGLRDRGKCKMSVIGAAMRKLIHLAYGVLKTGQPFDPEWIKTA

SEQ ID NO: 198358 - protein, 339 aa, unidentified
MDGETGEVFQRRLCPDHREVLEWIKGLPAPVAVTYEAGPTGFGLARFLLAAGIMCLVAAPSKLQRPAGDRVKTDARDAAHLARLLHLGQITEVTIPTVVQEAARDLARARDDCRTDLMGARHRVSKLLLRQGIVYYGGQAWTGKHELWLRGQRFDNPALSMAFEAALDAMVACVHRRDRLDAAITVMADESEFTPVVRRLGCLRGISTLTAFGLAVEIGDWHRLTGRSIGAYLGLVPCEYSSGESRVQGGLTKTGNGHARRLLVEAAWHHRPHYRPSRDLRRRWEAAPAAAQERAHAANHRLHTRWAGFDQRKKRPVIANAAIARELAGWCWSLAVMHD

SEQ ID NO: 198359 - protein, 311 aa, unidentified
MPAKPPPTYVGLDISKDQLDYCLSETAEDRCAYDPAGRAELIKKVRSVPRARVVCEASGGYEKLIVAELLQAGIEVCVVQPGRVRAFAHAEGLLVKTDRIDARLLRRFGEKIDPRLAAPTDPAAATLRELLEHRRQLTTQLSEVAGRLSLAGPTLGPLLTTQRTFLMEQIAHVEKLIDQHIDQDPNLKRKSERLQQVKGIGPVLAATVLAYVPELGQIDSAQLSALIGVAPFADESGHTCSPRHVRGGRATVRHVLYMAAVSASHSNPILTAFYQRLRANGKPAKVCLVAVMRKMACLMNRMLQEPDFVLA

SEQ ID NO: 198360 - protein, 428 aa, unidentified
MNKKETTRYAQFCQFREEIRGSRDYLIVGIDVAKDRHHAFFGTATGRTILKRLVFDNSAKGFSKLVERAGQLMRHFDLRQVVYGLEPTGNYHKPLASWLLDKKQMLVLVSSKTIADNRQTLDGRWDKNDTKDSANVADLLSQGKCQFYERADDRLEQLRTLLLLRQRLKKDEHRLRMQIRNGLVCKHFPELDRYWGKSRQENLAIVRWCLDPRQIVQMPFDEFVRKVTNRDRGLKQKQRLRAIYDVAAESIGIAMSPADRHQACLLADQLRQKQQLLKQLMERIEKVCQGIAHYQLLLTIPGFGPYIAAVVLARIGDPLRFSRRKQVLRLAGMDLSAKRSGKRSQDVVPVLSKKGNSTMRYALYQAAHTSSCRNDTIRELFTRYLEGREKEPGIRKKMRIKLAAKLLVVAWTMMKNNTVFDASLMLTR

SEQ ID NO: 198361 - protein, 497 aa, unidentified
MPTKSTIYSRCNPQLLKLFETAGHPAKVLCVALDYAKAQHTALMCNGLGELLRPSFAIDNTPQGAAQLLSEVRACVKPRKIRPEHVFFGGEDYPSYAENFLRHLRQEKFLVVRVNAWEAKQQRDNFQASSDSLDLLGIARCCLNRRGESVRDLPQAYPNLRIATRDRDKLVRMRTAVSNRIHSYVDRLFPGFLSGGNSGLEPFSKASLELMADRFSPAQLSRRPRQALAQWLGRRGVTQPRDTADQLKRFARNVLEPAPEQTLMLQQTLAQLVGLYRNLEQSIARIDREVAHWLARTPGAWLTSIAGFGITLSAGWTAELGPPSQWHSVRQLCSYSGVVPKSKQTGGPQKEPLVGAVQQRCNKRLKNVVLQAVQKVIQHGPEELRRTAQELQARGAHTEFALAKRLVRLAKYLALTGTVYRPKAMMDPDTPQATLAAHYQSLWEKLLPKWRDKADLREVFAPEQPLGQWRKMVQELYALDLRLPQQKAAPKSSALAP

SEQ ID NO: 198362 - protein, 342 aa, unidentified
MNQYAGIDVSLEYSSVCVVDANGKILREARVASEPEALTAWFGLYGYDLERIGLEAGPLSQWLFAAMREAGLAVELLETRHVRKAFEAMPVKSDRNDARGIAQLMRLGWFRPVHCKSMSAQETRTLLTARKLVQSKLRDVENSLRGILRGFGLKVGKTTDGKFAGRIEELVVGHPHLQVVAKALLAVRAVLRTEFAAFEKQVRRMARSDTRTRLLMSTPAVGPIVSLTYASAIDDPARFRSSKQAGAHFGLTPKKHQSGETDYTGRISKIGDSSVRTALYEAAHIMLTKPLKGCSQLKSWAMRVARRAGMSKAKVALARRLAVIMHRMLADGTPFNTAAAAA

SEQ ID NO: 198363 - protein, 320 aa, unidentified
MNHKTLSVGIDVSRDELVIAYADRLRPIEHIANTAAAIQRWLKSLPAGARIGLEATGAHHRLAAELAVAAGHVVYVLNPREVAHYLHSLRSRGKTDVLDACGIARFVLNEAGPCHPYVPPTALQRDITTLVQRRHQVMKNRTALRLSFSGISDCTKAVSQLLAAFDRLLADIDTRLQALVRQDEHLAAGRARLATISGIGPLVSTALAVRLSRINYATSDALVAALGLDPRPKESGQFKGRRHLSKRGNPEERRLICMAAICACRSAVWRPILEKLLAKGHPKTAAYCIIARKLLRIALAVWKSGKPYQPQLVGQAGLRL

SEQ ID NO: 198364 - protein, 350 aa, unidentified
MKTTHPVIVGIDTHKASHVAVAIDTQGTRLATLSIPTNPKGYLELERWSQSLGKVQAFGIEGTGSYGAGLSRSLLAHGHNVIEVTRPNRQLRYTQGKTDSLDAEGAARSVLSGQATARPKTQTGSSEMIRHLKIARDTAVKSRSQAMVTLKTLIINAPADLRDALNHIRGKIALIRHIAAFRLGDIDNPLASAKAAMRALARRWLWLHEEIIAHDKELERLVTERAPELMTSHGIATLTVAQMLILVGDDPTRIRSEAAFAKLCGVCPIPASSGKTHRFRLNRGGNRQANAALYRVAIVRMRSHEPTLAYVKKRTKDGKSKSEIIRCLKRYIVREIYSQLCVPKSSQIKA

SEQ ID NO: 198365 - protein, 344 aa, unidentified
MGQHYIGLDVSLETTSVCVLDEAGGIVWRGKVGSTPEALANVIRTRAPQVARIGLETGPLCTWHWHALRALGLPVICLDARHAKAALSVQMNKTDANDAYGLAQIVRTGWYKEVAVKSLDSHRLRTLLSSRAQLVNMRRDLGTKLRGVLKTFGKVVGKVGERGFEAHVRELAAGEAGLEEAVSALLAVRERLEQQIEALETRILRFARRSDPCRRLMTIPGVGALTAVSFVTAVDDPARFRRSSGVGAYFGLTPRRHQSGEVDRDGKVSKFGDTLTQTYLFEAAGALLSRVARWSALKAWGTRLARRIGSKKARVALARKLAVLMHRVWMDGTEFRWSKESATA

SEQ ID NO: 198366 - protein, 297 aa, unidentified
MSDYSYFGGIDLAKNHFSIHVVDSQGKVTLHKSVTRSKLLTTIANMPPMRIGLEACGGAHYWARTLNKLGHDARIMAVKYVVPHRTKGKNDLNDAVAICQAVHHPSTRFVPVKSPEQQAILSVHRMREHWVRERTALMNRIRALLSEFGLIIPVGRSSLMKQVPLMLEDAENELPQLARTVIADAYYHLEQLNQRIADTEQVFEAFSKVSENVQRIMKVRGIGPQTATAILASIGNGSQFDKSRDFSAWLGLVPKQYSTGGKPRLAAFFKIVAIICLLIKLLLFLDLGVRYQLVHSS

SEQ ID NO: 198367 - protein, 404 aa, unidentified
MEVLHERCAGLDVHKDMVQACARIGTGKAGRELQRFGTTTPELLRLSDWLRERGVTHVVMEATGVYWKPVWNVLADDFELVLANAQHVKAVPGRKSDVNDATWLAELLAHGLVRGSFVAPQPQQELRDLTRTRKQMTREVSRLTQRLQKVLEDANVKLSSVVSDVLGEAPRRILEAIIAGETDPSKLVELRGKLRGAPESLHAALTGRVTEHHRFMLRLHLEQIDAIDRGIAEIERRIERQLEPFRESIERLTTIPGVSKTIAHVVVAEIGLDMSRFPTHPQLLSWAGLCPRQDESAGKVRSTRVRHGNTWLKTDLCQAALAAMRAKGTYLQAQFHRIRSRRGIKKAIVAIAGSILCAAYHILLHGQPYRDLGPDHLDRREPGRALRRLTKRAEALGYTLVKAA

SEQ ID NO: 198368 - protein, 416 aa, unidentified
MTQSDSPHVERHLAVDLHKHYLVIGGVNARQEVVLSPRRVDLDDWPTWAKANLKPSDVLVVEATTNTWWFYDQTYQSVGQVLVADPRKIAWIAQTKVKTDAHDVMKLARLSAAGLIPLVWVPPLAVRELRALLAHRRRLVRTQTVLKNRLHSLLHRLQIASPEGDPFCAKHRAWWAALQVSPTERLHVRHDLATLDQVVGQLGEIADELRRLSCAEPWSDVIPYLMHLPGVGLIVAMTILAAIGDITRFPTSKKLVGYSGLGAGVHDSGQTHRTGHITKEGRKELRYVLVEAAWHAVETNDFWKAEFERLCRRMEKNKAIVAIARQLLVVIWHVLTERAADQHADPDMVAFKLMTWSWKLTNEQRGGLTTRQFVRYQLLRLGLGHDLTHVVRGGGKYLIAPPDEVLKLKPELHATT

SEQ ID NO: 198369 - protein, 314 aa, unidentified
MTQCIGIDVAKHHVDLYDLNAKQAKHWEQTPTGIQQCVAFCKQATPQLVVMEATGGYELPLAAALQAEGLPVAVVNPRRIRDFARAAGQIAKTDQLDAQIIARYGATLEPMPTERLDDNSRKMKALVARRQQLVQMYTAENSRADLTTDKDIRKSIATLLKTIQQQIDNMDEQIKDHIDRQPELKQKAETLKSIPGIGETTASMLVAELPELGRYNRRQIAALVGVAPINRDSGLFRGKRMTGGGRKAIRSGLFMPILVAVRFNPVLKAYYQKLLKRGKRKMVALVAAMRKLLCIMNTMLKNNQPWQPNLLKKA

SEQ ID NO: 198370 - protein, 389 aa, unidentified
MMYCGIDVAKYKHAALILDEKGKVLKPALSFSNDRQGFDQLLGLLAEFSQPVTIGMEATGHYWLSLYDDLTSQGHPVIVLNPLQIAAYRRSGIRKVKNDRNDAFWIADYVRIANLSPTEQDLPSLLQLRELSRFRFGLTDQIGDCKRKILAILDRVFPEYESLFSSVFLKSSRQLLKEAVTADEFADFDLAELSQLLRSTSRGRFGADKAETIQRTARRSVGVGFLADAVRIKMRCLLEQIELLEQQRTQVDEELEALMAQIPQHITSIPGIGLATGAAILAEIGDVNRFESAEKLVAYAGIDPTVYQTGQFQASRARMSKRGSPYLRHALWQAASMAVRYDPDLQSFYQAKRAEGKHHGTVIGAVCRKLLARIYIILKEQRPYVIRNC

SEQ ID NO: 198371 - protein, 335 aa, unidentified
MMNAKLNKQASNPTDVAIYCGIDVGKKVFVVSLSCKDKTKTFSNTGGDIKQAVAYLNTNAGIHLSLVVLESTGGLEIPLAKALYQAGFRVVIANPNKTSQFAGSYSNAKTDNQDAKMLALYAKFLTLDELELTKHLYAPPSKEQEHLEALVVRRTQLVSMRVQEKNRLHQIHQSQLDSVKQVISYLDEQIARLEQDIDTLNKHFDDTTKKFKDIKGVGNLTLATLMSMLPELGTLNNKQIASLVGVTPYPKESGTMKWKSRCTGGRQSVRNVLYNATNVARQHEPKFKQFYERLINKGKPFKVAINACMRKLLTVINAIVKNDSVWQADYHLRCC

SEQ ID NO: 198372 - protein, 383 aa, unidentified
MGAVARTQLRETPVMQNRTCVGLDVHARSVWACTVDDESGEMRTSRISPKTAEIVKWVKALPGEVEVAYEAGPTGFGLARALIAAGMQCHVLAPSKMERPSGDRVKTDKRDCEWIARLVRLGELPVVVIPSEGQEAARDLVRAREDVRGDLMRSRHRLSKLLLRQGIVYEDTAWTAAHGKWLRSQSFDKPGVQFAFDEAYDTVLTTLARRDRLDKAILTMAAEPAWAPVVARLGCLRGVGTLTGFGLAVEIGDWHRFTGNSIGSFLGMTPSEHSSGGSRSVGSITKTGNGHARRLLVESSWHHRKPYRLSAEMIRRRDGQSPLVRARADQANRRLNQRWRTFDARKKRPTVAAVGVARELAGWCWSLAVMDGEKDNSAMNRQR

SEQ ID NO: 198373 - protein, 373 aa, unidentified
MRKKVTGSRRVGKEIRLLAGEAAFVGVDVHKKVYQVSVWTESREWVAQWTQPADDEALCRRLEPVREQVAHVVYEAGPTGLGLARTLRARGFTADVVAMSKTPVAPGRSNKSDRRDAAQLAWLSGKGMLTAIYVLTPQEEADRQVLRRRWQMVTDVCRTQHRIKSLLLQHGIAEPAGLRYWSRAAVAELRGLPLLAELRFCLDLLLDDLDHGRTKLVAAARKVRELAASERHAAAVAWMRSVPGVGVITPMTFATELPHPERFTTPEAVGGITGLAPRVRRSGQTVKGGPILKTGNAHLRRVLVQSAWQWVRRDPAAAALYGHLVGETGCAQKAIVAVARHLAILLWHLVTEESTYTPGQPAAQDPEPAAAEA

SEQ ID NO: 198374 - protein, 422 aa, unidentified
MLNDVIDDGVIIERVAAIDVGKAEIVVCARVPSPTGRRSRAQEVRKFATMTPALMECSDWLSQLQVTRVVMEATSDYWKPVFYLLEAAGFETWLVNAKDVKHLPGRPKTDTLDAVWLCKVAERQMLRPSFVPPEPIRKLRDLTRYRVDLINERSREKNRVEKLLEDAGIKLSVVASDIFGVSGRAMLAALVDGERDPKVLAGLARTRMRTKIPALQEAFVGRFTDHHAFLLGKMLARIDRIDADLTDLDTQIEAMISPFAEAVDRLDTIPGIGATAAQAIIAEIGVEMTRFPTPAHLASWARFAPGVNQSAGKTKGNGSTGHGNPYLARALGEAALAASKTDTFLGERYRRIARRRGKKKALVAVGRSILVILWHLLNDPDAVFIDLGPDHYTNRVGTQRAVRNHIRGLNALGYTVTLNPAA

SEQ ID NO: 198375 - protein, 432 aa, unidentified
MEDVHEEPLFVQRVAGLDIAKAEVEVTIRVPSDTSRGRRQQETRTFGTTRRELESLADWLRSWGVTKVGMEATSDYWKPVFFLLESRGFDCDLYNAAQVRALPGRPKTDRADSIWLAKITERGMIASSFVPPEPIRRLRTHTRYRRHLTQARTAEKQRVEKLLEDGHLKLSSVISDIHGVSGRDMLDALAAGQRDPHALAAMARGKMRGKIRRLEEALECSFFTDEHAAVLAMMLVTIDHYTTQVQALTQKIDKLAEPYLPQIGQLDAVHGIGTICAQDIIAEIGVDMTVFPTAGHLVSWAKWSPQVKQSAGKRKGSNSTGRGNPYLGAALGEAGISAGNTQSFLGARYRKLTRRMPRKKALVATGNSMLTIIHALLSDPAAVYTDLGADYYEQRMHARRQARNHVKSLERLGYKVTIEAIDPATGELTAAS

SEQ ID NO: 198376 - protein, 399 aa, unidentified
MLAVGIDISKSKSVAAILNQDGSMHTSPFEFHHTQPELDAFIKYILNSKQSATILMENTGHYHYPVLKAFREAGLPVCMVNAYQIKKFGDMDLRKAKTDKKDAVRIARYALEKSYSLVPYTSMEQKYEDLRFLARQYNQRMLTLKTNKVFLLNLLDETMPGITNILPLTTRAPGTSLSVLFINRFKSYDRIKKMGKSRFLDAFEKIARKSRNRQTKTYGLAIYEAALRNITTRGENEYTLAAQDQCLELVCESQKAADSIILKMQTLAETLPEYAVLRSMAGVGDRLGPLILAEIGDIRRFHSGKALNAYAGNDAPPYQSGTFESHNRHISKRGNAALRKYCFEVMQALKLTRPQNDPVYLFLLKKEQEGKPYNVAKMAGVNKFLRIYYARAMETLKQQ

SEQ ID NO: 198377 - protein, 347 aa, unidentified
MFPFYLGIDLHLKRSCLVLMNAEGEVIDKQRLKNTDIPDYISENVPQETYAVMEATRNWPFFYDLLEKHVDRVELAHAKGVRMIAEAAVKTDRVDASALAHLARLNYLPTAYAAPQEIRDLRQHLRCREWLIDERWRAKNRIHAVLAGYNLASPVTDLFGRAGQEWLVEVAEKELRPTSKKVVLETLNMIDQLDDQIKELKNDIPLPEELKPKAELLMSMPGIGKLISAVILAEIGDISRFHSPKALCSWAGLTPRAHQSDRTVRHGRISKQGSRYLRSAMVCAAMTASRVSPRRYGVYEHLARKIGRRGARVAVGRRLLTVVYYMLKRNQPYDEEYEQRRTAEQGA

SEQ ID NO: 198378 - protein, 299 aa, unidentified
MRFIALDVHRDFCEVAIAENGQVRLAGRVETKPSALELFAGSLGADDQVVLEATGNALAIARILEPHVGRVVLANPKAVKGATQTAKTDKLDARTLAKLLAAGFLPEVWRPDEQTGALRRRIARRAQLVRQRTREKNQVHAILIRNLSERAPVTDLFGAAGRRWLAAQRLPVEECEMVEACLRGVDFLDGEIAAIDRALAELVLASDEMRRLLTLPGVNSVTAAALMAAIGDVTRFPTARHLVSYLGLDPRVRQSGAEPARHGRISKQGPGEARHVLVEAAWHAARRRLRPLCSITVPS

SEQ ID NO: 198379 - protein, 430 aa, unidentified
MKSNTQNAKIEAITEKTLVLGIDVGSETHYARAFDYRGIEYSKKPFKFSNTEAGFVTFKEWILDLKERHEKDKVVPGMEPTGHYWFNLGKFLHDNEMKPVLVNPHHVKKSKELDDNNPTKNDRKDPKVIAGLVREGRYMIPYLPDGVYADLRTASNIRFQLQAELTRIQNRISRWFNIYFPEYKTVYGKPDAKSGILILKTAPLPEDILTLGIDGVNQIWRDAKLRAVGKARAKTLIEAAEHSVGSKEGAVSARMEIRMLLEDYESQNMRLQEVMVLIEELVRKIPMAEKLLEIKGVGIRTVSGFLAEVGDISRFNNPKELQKLAGLALVENSSGKHKGETTISRRGRKRLRYLLFEVAMSLVSKNQEFRELHNYYTTRRLNPLKKMQSLMAIAAKLIRVFYAMLTKGVDYDPKKMISDIKRPTVYLQAA

SEQ ID NO: 198380 - protein, 409 aa, unidentified
MKLFVGLDVSSFDIKVCFLNGEGDELKSFTVTNDLPGATELRDEILNVVQDKSVSELKIGLESTSVYSFHPSMFLHNDEYIRAFGGQVLVMNPKQIANFKKSYSDMDKTDEIDAFVIADYLRFGRLPMSIVKEEQYVALQQLTRARYQIVRQITQEKQRFLQYLSYKCNTFTEEVESSVFGKAMMDLFLENYSLDELSNMPLEDLADYLKAKGKNRFPDPKYVAKSIQKAVRSSYRLDKVIEDSIDTILGTSITLIRTFEKQIKELDKSIERILKGLPQTLQTIPGIGPVFTAGIIAEIGQIDRFEDEMKIAKYAGLYWRKHQSGRFTADDTSLSRNGNQYLRYYLVEAANSVRRHIPEYSEYYAKKYQEVPKHQHKRALVLTARKFVRLVDALLRKNQIYTPERSVNT

SEQ ID NO: 198381 - protein, 422 aa, unidentified
MSYCPVAGIDVSKRFSDMCILSPDNKIFAQEKIYHDETSINRANALLQKAERLFFSKPVIVMESTSHYHLILFQFFSEHGYDVIVVNPLQSNSMKDFSIRKRKTDRVDAFKLAMIYRTKTLRPSQIPQTATRALRQLCRHRAELLNDVSSYKNRLTALLDQTFPGYDKVFSDVGGVTSCAVLVRFPTPTILLVEEESELVEVIAAASKSGYSFAKKKAGLLISAAQKAQTLGIHSCADETLIVCTIQMLRTLSESVLQIETAIDNLLAQIKEMRNNVSLLQSIPGVGSHSAALLLGEIGDISLFKKPKQLAAYWVLDPTERQSGSFRGTKNKLSKRGSSYARAALHMGVVNSICKRGKDSAANPVLLSYYEKKCKNKPAKVAQAASMHKLVFIVFAVLRDQKPFELKTPEQHAVEQGFVKAA

SEQ ID NO: 198382 - protein, 356 aa, unidentified
MSYEVKYIGMDVHKEAIVIAVLNGTGKLVMETVVETKASSILEFLHGLRGELHVTWEEGTWAAWLYDLLQPQVQEVVVCNPRRNALLKEGSKSAKVDARKLADLLRTGMLRPVYHGENGLRTLRELGRSYQTISKDLTRVMNRLKALYRGWGIPCAGTQVYAPRYREQWLNKIPQAGVRRRAELLYQQLDGLQTLRRNLRPEFLAESRKHKAAKLLRQIPCIGPIRAARLIALMQTPHRFRSKRQLWTYSGLGIETHDSAQFRFVRGQLQRSKKPQQIRGLNRNHNHEMKEIFKSAATRASCATGPFRDFYAALLTNGMKPEMARVTLARKIAAITLTLWKKEERFDAEQLKTQAA

SEQ ID NO: 198383 - protein, 372 aa, unidentified
MTVAGSKQRCGEDSGIGTEEVVLGVDTHLEFHVAVALDGLGRRLGELAVPTTERGYEGLVSWAEGFGHVGRAGVEGTSSYGAGLARHLKAAQIPVFEVERPKRRHLRRRGKSDSRDAEGAARAVLAGETAGVPKSGDGRVEMVRVLRTARRSAVKARTQAANQLRGVLVTTPEAMRHRLRGLSTKELVAAAARFRPGDDPEDVDEATRFALRSVVRRYQYLSEEIAKLDAQLCRLVAQTAPELTSLPGIGTDHAATLLAVAGDNPERLGTEASFASLCGVSPVEASSGKVVRHRLNRGGNRDANRALHLICVVRMRVDERTRRYAARRASEGKSKKEIIRCLKRYVAREVYRVLATSVTFADSCVDEGRSSP

SEQ ID NO: 198384 - protein, 386 aa, unidentified
MQAVANHTDARVAIRTDLGAIFVSLELSRSKWLITSISPGAGEKMSKFIIRAGDIAALLTRFGDLQRKAEARTGQSFKIISIQEAGLDGFWIHRILEREGIESYIVDPASIATSRRRRRPKTDRIDGEALIRALLAYKRGEPRVCAMLRVLSPEDEDRRRAVRERKALLNERIRHVNRIKGLLFNQGVSGYEPLNRDRRERLNTLVTGDGRLLPTALKTQISRELDRLELLIKQIVEVEEARDAMLVTAEKSASEPALLLNLKGIGPEFAAVLWSEGLSRHFNNRRQVAAYAGLAPTPWQSGQVSQEQGVSKSGNPRLRATLVQVAWLWVRHQPTSALTAWFKARVAQNGGRQKKSAIVALARKLLVALWKYVNAGIVIEGAVTRA

SEQ ID NO: 198385 - protein, 365 aa, unidentified
MQYIAFDAHKHYTLASVAWADGQLVREQRILHERGAIQHFLERCERGSPVAVETIGNWYWIIDEIEAAGGVPKLVHARKAKLMMGMINKTDKLDARGLNRLQQNGTLPTVWIPPGELRDQRDLPRTRMVLVRQRTQLKNRIHASLAKYALHPQAKEVGDLFGVHGRTLLRQRIELLPPHTAYATRLLLEQIESLDRQVAGIEQRIQSALKPTPAIQRLMTLPGVGLTLAVVIALEVGDVVRFATAEKLAAYAGTTPRVHASGGKTRYGPLRPDVNRYLKWAFVEAANTICLSRRRAPRLHVSRLYERVAQRKGHAKAIGAVARHVAEATYWILRNKDLYREPNAAAVSGSGDKRWQNHELVKLGE

SEQ ID NO: 198386 - protein, 488 aa, unidentified
MKSKKVPQGKAAHTSRPRKSKARSLKVVHPNAGGTDVGAREHYVAVPPDAVPAEQSNVRVFGTFSADLDALVEWLKACRVDTVAMESTGDYWIPLFQKLEAAGLEAVLVNAHHLKSVPGRKSDMKDCQWIQQLHSYGLLSGSFRPEDPVCRLRTLVRHRANLVSAGAEHILHMQKALTQMNVQVHHVVSHLTGETGLRILRAILAGERDPDQLVQLRDPQITKSTVEQMRQGLVGDWRPELLFVLKQSLKGWEFSQEQMNQCDVEIEKQLRSMRSAEESPLPAKPKADPLAAASPKPKRPQSRKRNDPQRDLAPELARVCGVDLMQAHGLRILTILVVLSEIGVDMGAWRSGKAFSSWLGLCPNNKISGGRVLSTRTRPNANRAAQALRMAAVGLAETDTWVGSFYRRMRARLGPAGAVTATAHKLALVVYHLLKHRESFLDRDLAGYEARVSRDKLARLRKQANRMGFELVPKNEPQKTNKEQTVTE

SEQ ID NO: 198387 - protein, 341 aa, unidentified
MEYHAGIDVSLEASSICVVDASGKIVKEAKVPSEPEDLIAWFKALPFALTRIGLEAGPLSQWLYAGLKEAGFAVELLETRHVRDAFKAMPVKTDRKDARGIAQLMRLGWFRPVHCKSLPAQEVRALLTARKLVQSKLHDVEMSLRGVLRGFGLKVGRTTPVRFARRIEELTEHHPVLSAIAKALLAVHAVLLRELNGFEKQVRQQAKADGRARLAMTAPGVGAIVGLTYVAAIDDPGRFSSSKTVGAHFGMTPKKYQSGQIDVTGRISKIGDKGVRTALYEAAHVILTRPVKGGALKSWAAKLAKRVGMQKAKVALARKLAVILHRMLTDGTPFDAAKAAA

SEQ ID NO: 198388 - protein, 410 aa, unidentified
MRRCIGLDVHRDFAEVAIWQEGVVRSAGRIETTPEELRLFADSLSEHDEVALEATCNTHAIARLLERHVGRVVVSNPMKTRAIAEAKVKTDKVDAQVLAQLLAAGFLPSVWLADEETQALRRQVARRAHIVRQRTRLKNRVQAILHRNLVPRCPAADLFGQKGRRWLAEQELGADERQAVEALLRQLDFHADELRLIDAALAQVALAREEVKRLMTIPGVDATVALSIVAAVGDFDRFRSPDKLVSYLGLNPRVRQSGSHPAVHGRITKQGRAHARGMLVEAAFAAARVPGPLRAFYERVRARRGMQIAIVATARKLAVLCWHLISKGEDYAYQRPSLTAKKLRALELRAGARSHRGRKGTAGAYSLREVRARENALAEQGELVYRHLVADWQAKRPAKAGAGAATGERL

SEQ ID NO: 198389 - protein, 340 aa, unidentified
MDKTLPAVGIDVSKLSLDVRVDAQERPRRSPGHLANSGEGFLQLQGWFQEHGMPRVHACLEATGTYSDAIARFLFEQGHQVSVVNPARVAAFRTSEGIRTKTDRQDALVLARFCTQKRPALWSPTPASVQQLQVLLGRHEEVQVTCRQERNRLENHRLDPLTRQEIQQHIDWLQTQSAHALQRADNLLLEHGELRQACAHLDSIPGIARLTAMRLYSVFFDQQRFDGAAKLVAHAGLCSAKEESGTSVHRKASISKKGNALVRKWLYMSALAVKRCNPDFRQWAAELKARGKSGMCIVVAIMRKLLHLVHGVLKAGEDYDARKAFPSHYSRPTPPVEEAA

SEQ ID NO: 198390 - protein, 338 aa, unidentified
MRNYVGLDLHSTNTYIGIIDEEGRRIYKGKKLNYTALILNELEPFQEKVAGVVVESTYNWYWLVDELMGAGYNVHLANPSAIKQYEGLKNTNDYNDAFHLANLLRLGILKEGYIYPKEERAVRDLLRKRGMLVRHRTAHILSFQSLYNRQTGFMLGGEDIKRIKDRELDELSPLEHVRLSGQANISIIRFLSAEIEKIEKAVLSSMRLKEQFQKLKTVTGIGDILALTIALETGEINRFAKVGNFTSYCRLVTSQRLSNGKKKGEGNRKNGNKYLCWAFIEAAHHAKRYCPYAKKFFQRKSAKSKKVVAFKALAHKLARASYFVMRDRVDYDPQKAFG

SEQ ID NO: 198391 - protein, 296 aa, unidentified
MPMYQLGIDVSKNTLDLCLLREGIKGRIKTRKLKNTADAAKVVAEWLKKQSCELGEVHIIMEATGVYHEPLAYGLHFAGARISLANPHRTREFARGMNILTKNDKVDAWMLACYGSLKEPEAWTPPPESVRYLRALLRRRDALVADSTREKNRLEKSVFTDSPDAVRASIENMLQELSNEIEHLDVLIQEHIETHPELNQDFRLLTSIKSVGYLLGLNMLAILKSHSFESAEQAAAFLGVVPVERRSGTSVKGKPKLSKIGPPEIRTKLYLAALCGLRFNPAMNEPPRVSWRVFYL

SEQ ID NO: 198392 - protein, 420 aa, unidentified
MKELIVSDFSALIGVDWADKKHDVCELIPDTQKITFSVISCKPEALNDWALSLKKRYPGKQIAVACELKKGPLIYALSRHSHITLLPVDPSTVAKYRKAFTPSGSKNDPTDASIIAEILSLHMNKLTCIKPESSDIRALSQLVVYRRKLVQDRVDLSNRITATLKNYYPQVLDWFKEKDTIIFCDFICRWPSLPIVKAARKTSLQAFFNKHNSRYPTVNEKRISEIKSAMPLTDDSGVVEPNRIFLEILVPQLKLLIESIMRMDSEIRKYYKRQDDRIIFDSFPGAGPQLAPRLLAAFGNNRDKYKSAAEIQKYAGVAPVIEQSGQQSWTHWRYSCTKFLRQTFVEWAGQSVRFSFWAKAYYDMQISKGKPHNTVIRSLAFKWIRIAFRCWKTRTPYDESKYLKALKKRGSPLLEYAING

SEQ ID NO: 198393 - protein, 309 aa, unidentified
MTTSSYVGIDVSKDRLDIAVLGKEQMWQVDNTCEGIAQLVKRMVDLQPELIVVEATGGYQRSVVEALFQAGLSVAVVNPARVRQFARACGLLAKTDRLDAQVLAVFGQRVQPKRYEGKSEAEKQLSALLVRRKQVEEMLQAEQNRLRTISPSLRGSVERIIVILKEEKQRLDEQSRELMNEHKAWQEQTEILGSAPGVGKVTTATLLAELPELGKMDRKKIAALVGVAPMNFDSGKKRGYRKTKGGRTEVRSVLYMSTLVATRYNPVIRAQYQHLLKRGKEKKVALTACMRKFLTILNAMMRDQQPFRM

SEQ ID NO: 198394 - protein, 340 aa, unidentified
MRLIGCDLHASQQSIAMLDRDTGAVIEKTLKHEGEAVREFYASIPPPVLVGIEATGSMGWFLRLMEELAIECRVGHPTAIRKAETRRQKHDRRDAALLLQLLAEDRFPAIWIPSTEYRDLRSLLLHRHQWVRMRTRVQNALHAIVLAHGVRRGHTLWNRDGQARLASLPLPPHTADRRSELQALYQHLQAHIDRLDDRVEHVANERARATLLMTHPGVGPVTALATEVFVGEPARFLDGKALASYVGMIPREYSSGKRQRLGALSKQGNPFLRFLWCEAAAHAVRRDPDLQRFYRRKVAQKGFAKANVAAARKLGIRLWIMLRDQIDYAEFCRRGLARQS

SEQ ID NO: 198395 - protein, 410 aa, unidentified
MELLHRRCCGLDVHKETVVACLRLISDGKVTTEVRTFQTTTADLLRLSEWLAANECTHVAMEASGVYWKPVWHILDDGEFELVLANAAHVKNVPGRKTDVNDAMWLAELLAHGLIRASFVPDSQTQEMRNLLRTRKQLVREQSSHVQRVQKTLEDANIKLDSVLSDLMGKSGRAMIEAMIAGETNPAKLASLAHPRAKASHEEFREALRGRVTKHHRFLLRLHLNQIDALNAAMATLDTQVEANLGPFRTAVELIMSIPGIKNLGANVIVSEIGIDMSRFPSDAHLVSWAGICPRNDESAGKRRSNRLRKGAPWLKTTLVQCAWAAVKKKNSYLQAQFYRIKARRGPKKAIMAVAASILTAVYHMLKDGTMYKDLGSNHFDRRSTDQQKNRLIKRLADLGYAVQIKPLSA

SEQ ID NO: 198396 - protein, 338 aa, unidentified
MKIVTVGLDIAKQTFQAHGVDGKGRVVMRKRLRRAEVPSFFAGVEPCLIGLEASGGAHYWFRVLSRLGHTVRLIAPQFVKPYVKSQKNDSNDAEAICEAVSRPSMRFVPAKRVEQQDLQCLHRVRSRLIGCRTQLVNQIRGLLAEYGIVLPQHVAQLRRHLPALLEDDGNELTISTRHLFHSLYEELVELEAKIGSADQRIERAFRENAECRRIAAVEGIGPVTATAVVAAISDGHAFRNGRQFAAWLGLVPRQHSSGGKTQLLGISKRGDPYLRTLLVHGARSVVYRAKAKTDYRSRWINDKQQRLGTARACVALANKNARILWSLIAKQQAYRPAV

SEQ ID NO: 198397 - protein, 348 aa, unidentified
MEQFVGLDVSQQLTHVCVVDGEGRVVWRGTCLSTPEEIAATISARAPYAVRIGLETGPLSTWHWHALKKMGLPVICIDARHAKAALSMQINKTDRNDAFGLAQIMRTGWYREVGVKSIENHKVRAVLGARAQLIGMRTDIRNQIRGLLKVFGVVLARNSGKSFEEQVREAARNGDDVLQLSLRSLLATLKTVCEQAEKLDRMAVGQAKQNPMGRHLMDIPGVGALTSLAFVTAVEDPGKFRKSRNVGAFFGLTPKRYQSGETDVSGRISKCGDPLVRSYLYEAANSLLIHSKKWSALKAWGMRIAKRAGMNKARVAVARKLAVIMHQMWTTGEAFRWSNKGSEMEVAA

SEQ ID NO: 198398 - protein, 339 aa, unidentified
MERFIGVDLHKNMFMVSFFEPQTGKHHLKDYHIKDIMSFKKALHSDDTVGVESTNNTRYFVNQIRDYVKEVKVINPSQFKVISKSVKKTDKNDARVIAEFLSKDMVPEVRMKDKKTAQINSLANTRDKLVKLRTALKNKIHNILSSHGILLKKESLSSDKGLNRILEQPVDPTARVELEVIITQIRSLNEGIKKLDKELEDKGKELPGHENITSIKGIGKKSGSILLSVIGDINDFESEKKLAAYFGIVPRVSNSNKTEWQGRITKRGSKLGRTTLVQCTLVAIKYSPYLRSFYERIKAKKGSGKAIIATSKKLLGIIYNTLKNNWVFEDFPSGLIRTT

SEQ ID NO: 198399 - protein, 467 aa, unidentified
MTPRAGKQFRRSAQAEDLAIRHRHAAGIDVHSREHFVAVATEDVPAGFINADDQLPPGVRKFGTNTGDLEAIAAWLKDCGVTTVAMESTGVFWIPLYDLLASQGFEVLLVDPRQTKHAPGRPKTDVVDCQWIRRLHSYGLLTGSFRPDDDIIRWRGLQRQREMLIRYAAMHVQHMQKVLEEMNVKLTEVVSDIVGQTGMKIIKDIVRGVRDPLKLAKHRHERCQRTEAEIASALYGNWRLELLFALKQALKLYEFYQTQLRECEGQIEACLRSLKDQSDGRPLPPNLRKCKPGKNEVRFGARALLFRMSGVDLTQIEGISESTALVILSELGTDLSAFAYEKNFVSWLGLCPQHRGSGGKIFKRRIRRGANRVSRALRMAAQGCHHAKNALGAFYRRIQSRAGGAKAIVATARKIAERVYRLLKYGQEYVRQSQETYEQAYQQRLHKALAKKAASLGYKLVPETITP

SEQ ID NO: 198400 - protein, 320 aa, unidentified
MSDHLNIGVDVDSKTLVVAVRGVKGSRRIENSDTDIKAWLAELPAGCRIGMEATNRYHELLVQRAQCAGHAVFVLNPRDIKHYAQSVGQRGKTDSEDAQVIARYLDKEGDELHEYVPRTPQQERLHVLLQQRQALVKSRAQMQLSLNAKSTKVGKFAGFFRAIAEAIKAQDRDIQKECSESEHGDLYRRMLTIPGVGPTVAACLTHHITRWKLTSADAWVACTGLDPRPNQSGARVGRCRLSKRGNAGLRQMLYMAAMGLTRSGAGKPLYKAVRERGHSSTASFTILARKLARIAWGVFKSGRDFDPALLEIGGTRFGTA

SEQ ID NO: 198401 - protein, 412 aa, unidentified
MVGIRHIGVDCSETEHRMVLLTPDGDWQARQVVRNEHGSIQRGFQRLLSTTSGETVRVVLEGLYGFSASVAEVSIDLGLELWQANSKALNRYRDLEGQPRKDDDRDAFLLARMSYGKMQGCRLAIAPEPFTHRLRRISRLHTRLTKVRSDFARRMRSRLVEWSPEIVQKAWQGPKWSSRPFLAIMRRWPGFEGVPKARPSTIERVLAKHGTEAAKQGVQAQALKAVARRLSGVPEREAIALEITCLVAQLDALDKSLKEVDRRMEAWVEAHPIGRKLLEMPGVGHFTAAVLIGEVLPLARTVSEAQTATYSGLTPLSRISRDKGKSILARGVNKHALYACYMSAVAARRKSALDREYYRKQQVLHQGHPVPHIVANIALARQRMKVMYKLMTTEAHYDKEVLIASHLKRIAA

SEQ ID NO: 198402 - protein, 339 aa, unidentified
MKVTTFGLDIAKRFFQLHWVDMETGEVHRRQLKREQMAEFFATCEPGVVAMEACGSAHYWARKLVSLGHEVRLVAAKFVRPFVKTNKTDAADARAIWEAAQRPEMKFVAVKSEEQQSMLTLHRLREQLVKFRTMQTNQLRGLLYEFGVCLPAGRAKGMPAAIEALGQLEDTLPAMVIDALRQQMARIQALNEDIADIEKKLTLWKKQERLAANLMEIPGVGILSATAAVATMGDAGAFRNGREFAAFIGLVPRQSGTGGKVRMLGISKRGNTYLRTLLIHGARARINLQKERDPWVDRLLARRPFNTVVVALANKMARTIWAMMAHNRAYQKNYATSIA

SEQ ID NO: 198403 - protein, 372 aa, unidentified
MSTLRFVGLDVHAETIAVCVAEGSGEVRPLGTIPNRLESIRKLVGKLGPVKQLRTCYEAGPTGYVLYWQLAALGVACDVVAPTLVPVKAGDRVKTDKRDAEKLARCHRAGELTAVWVPDAEHEALRDLIRAREAGKKDQLRARHRLSKFLLRHGRRPPEDTKAWTKKYLEWVKSQVHFEQAALEATLSDYFHEVEHAAARIERLEKAIDGAVEKMPPQLRAVVEGLQALRGIAQITAVTIVSEIGSFSRFEPRKLMGYSGLVSSEHSSGNRIQRGSITKTGNSHLRRVIVEAAWSYQHRPWLGGYLLKRQRDLKLSEETKEIAWKAQNRLHTRYKKLSAGGKNKNQVVTAVGRELLGFIWSIAVQIEAGFKA

SEQ ID NO: 198404 - protein, 443 aa, unidentified
MVRKKAQRHFQLIHPNCAGIDIGSREHWVGVDPRHGLAVRSFTTFTDDLVKLADWLEQLKISVIAMEATGVYWIPLFELLDARGFDVYLVNSRATRQISGRKSDVLDCQWIWQLMSHGLLRGAFRPADAICSLRALVRQRATKVRDQAKALNRIQKALSQMNVQLANVISDISGVTGMKILRAILQGERDPKKLARLRDGRIKADEDTIARSLQGNWRVEHLHALDQEVACYDFLETQIAACDAQITRALERMPMREEAPQPSKKALRSPHRSNQEQAALHQALWRTLGVDLTAIPTIGVDTALMLACEIGPDLSKFPSMKHFCSWLGVAPPTRISGGKQLPGKGPKVNNRAAQALKQAASNARNDQSFIGASHRARLARMDSGCAIKATAHQLARLIYAMLTKGQPYIERGIEVFEAQSKERQYRALLRKARKLGLELVPAA

SEQ ID NO: 198405 - protein, 353 aa, unidentified
MSEDKYIAFDVHQATTVVSVMNAAGREVKTAVLPTQAQPLLGFLESLRGRLHLTLEEGTYAAWLYDLLQGRVAELVVCDPRHNALLKEGSKTDHQDAHRLADLLRTGMLRPVYHGNRSLRNLRELAHAYQALVQDTTRVMNRIKAYYRSYGIDCAGRGVYSRKQRESWLERLPAGASRVRGELLHEQLEQLRSLRRRARRELLGESRKYLVAARLCGLPGFGPLRVALLIAGMQTPHRFRTRGKLWSYSGLGLVQKGSSEYRLVEGRAVRRPGALQLRGLNRSHRPGLKALFKSAALVAIRQPGPFQDYYQSRLQQGVDPAILRVTVARKLAALVLSLWKKGGRYRAEGVKQA

SEQ ID NO: 198406 - protein, 436 aa, unidentified
MNQTKLNRKRTASDGEDFAALIGLDWASQRHALCLYDCATGKRESCTLEHAPEAIAQWAHGLQQRFGGRKIALCLEQAKGALINALLEYSFLVLYPINPATAARYRQAFKTSRAKDDPSDAQVCLEIVLHHREKLTPSLANDGATRELSRLLEARRSLIDLRTLLTNMLRDALKSYYPQALELAGQDLFAPLGCQFLLKWPSLGQLQKARSESVRKFYYAHNCRRMDVIEKRLHSIASMIPLCRDPALIEPAIVQVKMLASQLLQLGIALKEYDSRIEQLFTQHKDASIWGSFPGAGPTLAPRLCCAFGNERSRYQSALAIQQYSGIAPVIERSGKNQHWVHRRWGRPHFVHQSFFEYASQSVLHCSWAKVFIQDQIARGKAYPTAVRALAFKWQRIMFVCWRDRLPYNETIYLNSLKCRGSHLTSKLNHELPKAA

SEQ ID NO: 198407 - protein, 348 aa, unidentified
MVTIGVDPHKQTHTGVATDQLGSELAQRRVPARRDGFGQLLQWGRGLAPERVWVIEDVRHVAGGLERFLLDHGETVVRLPPRLMADARRGVRERGKSDPIDALAIARAALREGIDTLPIARLAGPELEIRLLGVHRERLVGARTRMINELRWQLHDIWPDWEIPARALIVPSWQVRVSRRLAQAERGVRVQIARDLIGRVRELTRSITALCDQLAGLVAQVAPQLLSEPGLGVLLAAKFIGEIADINRFRSDAQLARLAGCAPIPVSSGRTDRHRLDPGGNRQLNHAFHMLAVTKIRHDPRTAVYLAKQRSNGKTNKDAIRSLKRHLVRRVYHLLRDPNNVPTTVCLT

SEQ ID NO: 198408 - protein, 400 aa, unidentified
MAQPLWAGVDAGKSDHYCMVIDADGKRLLSRRVANDEAALEELISTVITLADDGELTWAIDLNAGGAALLITLLVAAEQRLLYIPGRTVHHASGGYRGEGKTDAKDAAVIADQARMRRDLAPLRADDDIAVELRILTARRTDLVADRTRAINRLRAQLLEYFPALERAFDYSKSKAALILLTGYQTPDGLRRAGAARLAAWLRKRKTRNADAVAATAIEAANAQHTVVPGQQLAAAMVARLAKEVMALDTEIGDTETMIEERFRRHRHAEIILSMPGFGVTLAAEFLAATGGDISAFGNTDRLAAVAGLAPVPRDSGRISGNLKRPRRYNRRLLRACYLAAHIATRTDPASRAYYNRKRAEGKRHTQAVLALARRRLNVLWAMLRDHKLYQPTAPNAAAA

SEQ ID NO: 198409 - protein, 341 aa, unidentified
MKNLFIGVDFSKEKVDVAIIFADGLTETAARVFNEFKTTVSGYKQLVKWVEQNSYGIDSSLWLFCGENTGDYSKGLCNFLYGKGYDMWLENAKSIKDASGLRRLKSDRADASMIAEYAMRNYDRAIMYEPLSESLAQLRELFLYRQMVVRHRCSFQVRRGEKRLTMEKSPVKTMISQSGRHIVSELNKEVEKIDKRIAELIKSDEELTEVFTIVTSGPGIGTQNAVCLMVYTDNFRRFNYDSRKISCYYGIAPFGKDSGTSVHSEPHVHYMANRQIKAMLTQAALAAVNFNPIMARYYMRLIERGKKKQVALNNVKNKLVHLVTAMVRNRQTFTPEYKISA

SEQ ID NO: 198410 - protein, 335 aa, unidentified
MKQEMIIKQNVGVDVSKDDFKVALSHLTHEHRIVVRCTRTFANTMQGFKQLQEWVNLKKQSQQDTHFTMEATGVYYEGLAFFLYEQSYNLHVVLPNYVKKYAESLGIKSKTDKLDAKTLAQMGLERELRLWQPVTPSLLGLKQLTREREALVRTRTNVANQLHAYRHQGKPKKESIQRSQKLIAFIDKQVKQIEKEITIFINHDEKLRTKIGYLDSIPGVGVLTAAVIVAETNGFAAFESIKQLTSYAGLDVRIQESGKWKGKSKISKRGNSHIRKMLFMPSLSKKKNDLATKQFFDRIKEKKGIGMIATIAVERKLLGLMFTLWKKEEMYCAAI

SEQ ID NO: 198411 - protein, 348 aa, unidentified
MTMVGGLDVHRKQITFDYVDDDGLVRWGQIRPATRTTLRGWLGEHCPEVGGAEFALEGCTGWRYVSEELAAAGVGVHLGDPAEIAALRGPKKRAKTDRADARLLRTLLLEGRFPESWVPPAHVLEVRTLGRLYCTLMDERRAWQQRIHAQLFHQGCPPITALLSQAGRDGLASAELSAAGRQYVDTALRRIDELSAEIDPLRTQLVNFARHQRGCQALQARQYGIGWLCAAIIWAEIGDARRFARSDQVVRFAGMDVTVYSSDGKRSPGHLSRQGSPELRWATFEAAKCAARRGSPDYAYYHKVAARPHSGKNPTLAVERKILRRCYHTLRDLGDAALSAPEPAREAA

SEQ ID NO: 198412 - protein, 322 aa, unidentified
MQQESSSQSVAGIDVSKSKLDCFIDVIDKSFSVDNDPGGIARLIEQLRAANVRLVLIEATGRYHRRCAAELLDGGIEVAVVNPQRAREFARSMGKLEKSDHIDARILADFARAGKDHRRLVKPSAQQTQIDDLVSRRRALVQMRVAEKNRLHDDLPKLARNQGNKLLRLIEQQIEDLDRAIARLIESDDDWQNKSDIISSVPGVGTSSAHQLIADLPELSKLNRQQIAKLVGVAPLNCDSGQHCGKRRIAGGRGPVRNTLYMAAFNAIHYCDRFRGYAARLKKAGKPFKVIMTACMRKLLITLNQMIKTNTAFNASPTASIA

SEQ ID NO: 198413 - protein, 340 aa, unidentified
MTQSSTITIDLAKTVFQVAFFNKFGVLKLNEKMTEHKMLSFIVNHPEALICMEACSSAHYYGRKFEGQGHKVKLLPPHIVAKYRAGNKNDANDALAIYEALKRPNIYSVAVKSISQQDLASLLKLRKGYIKQRTQVSNRARGLGAEYGVKLPEGIMSLKKRLPDILEDDGNQLTPASRFILADLLEEVHRLDSKIKHATAQLVELAKSISECELLTSLPGVQWITASALYARLGNGSEYKYGRNASASVGLVPSHSGSGGKNKLHGITKRGDKYLRSLITHGARAVVSNIRDKQDKLSCWIRALSSKHHFNKITIAVANKLVRMALAMLKSATPYRADLA

SEQ ID NO: 198414 - protein, 316 aa, unidentified
MNPQVFIGLDVSKQHLDVAVRPHNRHFVTSNDDRGIKQIVKRLAALKPQLIVLEASGGYEFLVTAALAEALLPVALVNPQSVRKFAGATGKLAKTDKIDAQVLAHFAEALRPEPRSLPDQAQQMLKAALQRRLQVVKMIGQEKNRLEKTFIPSVRQDIQAHLIWLSQRLEQLDRDLSDQIRQSPLWRDRDRLLRTIPGIGPIVSRAIIAQLPEIGTLPGKKAAALVGVAPYNRDSGRFRGKRMIRGGRSYLRRMLYMAAVVASRWNPVIRAFYQRLLTAGKPKKLALTACMRKLVLILNAMVKNNQPWNQFITQVP

SEQ ID NO: 198415 - protein, 341 aa, unidentified
MDEVTLIGIDLGKHVFHVHGQDAKGHAIFRKKLSRQQLLSFFSNLRAVTVVMEACAGSHWLARKLNAMGHVTKLISPQYVRPFVKSNKNDYIDAEAICEAACRPAMRFVEPRTEAQQLLAALHRTREGLVTERTATINRIHGILLEFGVVVPMSKATLRRLPDVIAIHDLPVRLLQIIQRLHEHYKYLDAQVVETEKELVAQLHGDENAARLLSIPGIGTITASLLASEIGSIAQYAGGRNFAASIGLVPRQKSTGGRAKLCGISKRGDKHLRHLLVQGARAVIQRVHKRNDRLGEWIRSMLTRRHSNVVACALANKLARIAWAVLTKHTEYQGSLLVRTS

SEQ ID NO: 198416 - protein, 428 aa, unidentified
MALPRAAVLVLAKTGEQMRLLLVGDDWAEDHHDVELMDEAGRVLARARLPEGAAGMARLHAMIGEQLGEDAEDAQVRAAIETDRGLWVTALAAAGYQVYGINPLQVARYRERHGVSGAKSDAGDAHTLADMVRTDAHQLRPVAADSPAAQAIKVVARAHKTLIWERTRQVQRLRHQLRDYFPAALEAYPDLAAPDTLELLAKAPDPASAARLTTAQVSAALKRARRRDITAKTAVIRAALRGEQLAQPPVVTAACAAVVRALTAVITALNTQIKVMEGQVEAHFRPHPDAEIIMSQPGLGPILGARVPGEFGDSPHRYASGKARKNYAATSPVTRASGKRKTVLARYVHNDRLRDALDGQAFAALTASAGARAYYDRQRARGLGHRPALRQLANRLVGILHGCLKTRTLYDETTAWPQYASNEIKTAA

SEQ ID NO: 198417 - protein, 345 aa, unidentified
MNYCGMDIASVSSYVYLADKLGHKLSAGPVDTTEEALRDRLEPFVRRGLAIAIEAGNQTAWIYDVLVQMGAAVTVVHPAKVKPIAQSRRKTDKIDAKLLCDLLRLDALPHPVHMPSERARAVRGLLKARKQLISARTKLCNVVRGMLRQEGVRLPLRALSSYVGWQRVMAEGFDRPHVAVIVSTYSDSFVGLTRSIREVDRALGAQERTDARAARLRTMPKVGRITAMTTVGTLDEPGRFGSSRKVVSYSGLAPTVRSSGERTAYGPISREGRSELRAVWVQVAHLVVRDRRRSSQPLRTWYHRVARRRGKKTAIVALARKLLVIAYHILRDETVYDARRLKRAG

SEQ ID NO: 198418 - protein, 350 aa, unidentified
MKNIIAIDVASEVSAVCIIGKDGKIRSEELVPTGIRELSKIIQKVREPKQVVFEEGTQAAWLWSELSHYCDDIFVCDPRQNSQLSGEHKRDQSDARNLGFRARAGLLSRVWHGGQELRELREAVRLYQTLVEDCVRQKNRLRAVFRSSGVRSSRESYDPKLRKEVVKVLALPIQRERVERLGRVLDVLETQRAAALKTMVKLARQNKMYKPLRTIPGIGPIFASIFVSEVGCPQRFRTRSQLWSYGGLSIITDESSEFEVRNGKISRKTRAVKTRGLTTSYNRLLKYVFKQTAMTLSRSAWKGHYISILKNAKNANNAQLTLARKLASIMLNVAKSGEEYDVKKAFKSAQ

SEQ ID NO: 198419 - protein, 322 aa, unidentified
MDHHEKVVLRKQLKRGQFLSFFAELPPCLIGLEACGGAHHWARELQKQGHSVKLMAPQFVKPYVKSNKNDANDAEAICEAVGRPTMRFVTVKTVAQQDLQAIHRIRSELIKRRTAKVNQIRGLLAEYGLVVGQQVNTLRQALPGLLEDAENGLSFDFRALLEELRQDFIQLDKRTVEIDKKIHALAHADPVSKRLQGIPGIGPIIATAIICAVGEGKQFKRGRDMAAWLGLTPGQHSSGGKDRLLGMSKRGDPHLRTLLIQGAKSSLNAAGKKTDPRSLWLNNLCARRHKNVAVVALANKNARIAWALLRNETDYLSECITI

SEQ ID NO: 198420 - protein, 469 aa, unidentified
MRPVQRSQKPQPELPTELQQVNLHAAGIDIGATSHFVAVPSSGDPQPVREFGAFTRDLHQLADWLQSCGVETVAMESTGVYWIPVFEVLEQRGFVVKLVDPRQLKRAPGRKTDVLDCQWLQQLHTFGLLVGAFRPPDQVCVLRSYLRQRENLVRSATREIQHMQKALTQMNLQLHHAPIQIGVTGATGMAIIRAILAGERDPRALAKLRDYRCKNDCKNDEATIAKALEGTWREEHLFALQQAVELQDIYQEKIKACDTRIQATLGTFADRSEGAPVPKRSKDKGRKRRALAPAFDLHPELFRLTGVDVTSLDGIESLTALQILSETGIDVSPWPTEKHFASWLGLSPGSKKSGGKMISSRTKSSANRAAAAFRMAAQSLHRSRSALGAYYRRMRARLGGPQAITATAHKLARTFYALLKYGHAYVDPGQDAYQRQHRDRAVKALRRRARELGFDLATNQGKLSAVAPA

SEQ ID NO: 198421 - protein, 429 aa, unidentified
MKKKNNSLTKSDRIGKPGKARGPVQRDAKEVMAELVTKLSQRFEPQSARTIKDEGRQQGIPGPNRDRLTVGVDLGDKWSNFCVLGLDGEKLTEGELRTGQEDFAEFFQSLAAARVVMEVGTHSAWARDVVARSGHEVLVANPRQMEGPKRRKRKNDRIDAHKLARVGRMDPQSLFPIEHRSVEVRQDLVAVRARDALVAVRKDLINTTRGLVKSMGARLPKCSTQSFAKKAEGALPAAVREVLLPLVRLAETLSSYIQEYDERIEKLATGKYAHTELLRQVKGVGPLTSLAYVLTLEDPQRFVKSRDVGPYLGLVPKQEDSGDRQPQLRITKMGDMMLRRLLVGSAHYILGPFGPDTDLRRYGLRLCERGGKNAKKRAVVAVARKLAVLLHRLWVSGEVYEPLHQALPKVTQEQAARPAPAEATEEEAA

SEQ ID NO: 198422 - protein, 350 aa, unidentified
MNVNHYIGFDVHKKSISYCVKTADGTILEEGKLPAKRAILRAWARKRTEPWHGAMEATLFSGWIYDTLKPFAAELQMGHPAMMQAIGASKKKNDQLDARKIADLVRCHLLPVCYVAPAELRELRRRLRYRNLVVAQAVQMKNKMSGLLMEVGAEYNKQQLHGAKYFTELLEDLEEVPESVKDLLRLSRGALETFQTTQQQLLARLEQHPRLAERVKRLKSIPGVGQVTALTWALEVAEPQRFGSIARAVSYCGFTSALGSSAGQEHRGPISKQRNAHLQTALVEAAKLAPRWNPQLAAVHEQEVQRGDRNRATLAVARKLVAYLLAVDKSGKPFQIRTPATAEQEVGTAA

SEQ ID NO: 198423 - protein, 345 aa, unidentified
MNITAVGIDLAKNVLQVHAVDARGKAVLRRQLRREQVTAFFAKLPACLIGMEACASAHHWGRTLERFGHTVRLMAPQFVKPYVKTNKNDVADAEAICEAVTRPNMRFVPIKSIEQQAVLSFHRVRQGFVKARTAQANQIRGLLGEFGLVIPKGIWHVAQRVPGLLEDASNELPLALRQLIDRLTDHLKGLDRQVRELEREILTWHRNCGLSRKLEQIPGIGPLAATALVASIADARSFDNGRQVSAWLGLVPRQNSSGGKSTLLGISKRGDVYLRTLLIHGARSAILAARRRNDSRNGWLANLLTRRHANIAAVALANKNVRTVWALLAHGRDFKPDYRPVRAAS

SEQ ID NO: 198424 - protein, 419 aa, unidentified
MTNQLNIVCGADIHQRFLVATILCRDGRTWANRFLMNLNGLIDFKSWLVSHGCQKVAVESTGRFWIPVHMILEGTIDVIVANAYKIKHIPKKKTDLKDSEWLAELCLNDMIEPSRIFPKEDRELRNLTRTREAYVRDLSKEKNRIHNVLESCSIKLASVISDIFGKSGMHILKGLLSGTSIDEVLKGIPDKRVREKKSEELRDALMGKLDATDIFLIRQSLQIMNQFEMRIEELDREIRSRIASRPMDIKILRSIPGIGMVSAYTILAEIGNYLDFKKPEQLAMWAGLVPSVYQSADKLITGGITKQGSKHLRWILVQVAHAIAHAKGGKLKKFFLKIRAKKGYLVAVVALARKVLCLIHHLLVNQEMYEEEGRLSKRDAPIPKNKNPAILTIEDMIQCIAQAGYEIKKVNFGADGQCR

SEQ ID NO: 198425 - protein, 375 aa, unidentified
MKEKLRFLGLDVHAETIAVAVADPDGEVRSLGTIPNRGESIRKMIKKLGPAEKLRACYEAGPTGYVVYWQLAELGIQCEVVAPTLVPVKVGDRVKTDRRDAEKLARCYRSGDLTAVWVPDEGSEALRDLVRAREAAKQDQMRARHRLSKFLLRSGQRPPTGVRSWTRPYLIWVAQLRFTQVAQEATRQDYLHEVEHMRERVARLEQAIMEAVKLASPALQQVINDLQALRGIADISAVTIAAELGQVSRFGSARQLMGYCGAVPSEDSSGKRIRRGSITKTGNAHLRRIVGEAAWSYRRPPGIWYGLRRRQESISEEVKEIAWKAQHRLHKRYMKLGAAGKPQGKIITAVARELLGFIWAIGTRAETSVSQRTAA

SEQ ID NO: 198426 - protein, 364 aa, unidentified
MFYLGIDQHKRQLTVNSRGEDGTVLLQRQVSTEWEKVRAFFADYAEKAKADGGFMAIVEVCGMNPWLLAMLKEYGCREIVVIQPTERPKQKTDRRDAGKLGHLLWVHRQQFLEGKHPEGLRRVEPPTSQQADDRQLTALRARLTKKRTAVLNGIHKILRKHNLEQSQPTKLFQTQKVRRWLAEMELPAMDRLEVNLLLPQWALLDEQLETTEAKIAERAAADEQVKLLESVPGLGHYSAVAISSRIGDIARFRRPDSLANFLGLTPGCRNSGLATQRLGSITKQGSKMVRHLLNQAVIKVLRFDGQMRTWYKRIKKARGSKIARVAVMRRLATILWHMLKKKAEIRGRESLFLPLTSKTPDLGR

SEQ ID NO: 198427 - protein, 482 aa, unidentified
MKKGNIYQDQSQQLLSLFEPAANNAKVMCVPIDYAKKDHVVMFCNGYGDILRKPFSVKNSPQGVDYLTDQVMRSCRQRAISEKHVFFGGEQVGSFADNFVSTLRGQGWLVAGVNAHEAKKQRENLQASTDCLDLLGIAKSLLNRRANCSPAQSGIYLNMRTVVRHRRKLVDITTEVRNRIHAVVDRLFPGFLNEKKSGITPFSNSSLWLMKERFSAPQIRRRRRSTLIEALRRLGTKKPECTADTLQQYATQVLKPPQEYVHMLQLSLAQHVKHFCCLQQSIGQLETEIAVNLAQTQGAFLTSVRGIGIVLAAGVSAEIGNPFEQKPLNDLVSYCGIIPRVKQTGGPEGKTKTGKVAKRCNRILKDYIVKSASHLGLHGPADLMSDYKRREANEQHADFGMARRYLRMAMCLMRTSQVYLPSRLLKAQAQIEQRADYYLMTWPSLRDKWQKLGALETAFNADQPLGQWRKIVQQFYGIKLTL

SEQ ID NO: 198428 - protein, 377 aa, unidentified
MKRIKFVGLDVHAETISVAVAEHDGEIRSLGVIPNREESIRKLVKKLGLVEELRFCYEAGPTGYALYWQLTRMGAKCEVVAPTLVPVKAGDRVKTDRRDALKLSRNYRAGELTAVWVPDAAHEALRDLVRAREAAKQDELRARHRLSKFLLRHGRRSPMGVKAWTMKYLEWVKREVHFEQMAQEATLLDYLHEVEHGAARIARLDSAITEAVKSAPPQMRAVIEALQALRGIAHVSAVTVVAELGELSRFARARQLMAYGGIVPSEDSSGERTRRGNITKTGNAHLRRVVVEAAWAYRHRPSVGAKLRKRQAHVSEEVKEISWKAQQRLHQRYRKLLAKGKNKGVVMTAVGRELLGFIWAIGIKAEAAQKESLQRAA

SEQ ID NO: 198429 - protein, 338 aa, unidentified
MTMYAGLDVSDKVTHICVVDGEGVLLRRDVVASDPDALAKWFKRHCPGVVRVVLETGPLSTFLYHGMTERGCPVTCICARHAKRALSARVHKSDVNDAESLAQLARTGWFKAVHMKAGATHIDRAALKIREQLVTARNAMANQLRGMLKLFGLRMGNVTTPGKRRERLDALFTQRPDLRCVFASLIESIEALDGQIARSGRLLAARAEADPVCQRLMSAPGVGPITALTFRSSIEDPGRFSRSSDAGAYAGLVPRRSQSGERDYMGHISKGGDAMLRSALYEAANSVMVRLKRRCALQDWGRKLAETKGPKRAKVAVARKLAALLHRLWQSDIDFCWD

SEQ ID NO: 198430 - protein, 480 aa, unidentified
MNIKAKKAKVQPLSKKLVINVLSQDEIKKKVQVIEQELKASTWRELETKGKFEKNDKLSFISEEMLIVGCDIGSETHYIRAIDTRGRELSKGAFEFSNSSEGFASAKAWVLKLAAKNDKKQIVLGLEPTGHYWFAIAAWMVSNGISVVQVNPYAVKQSKEIEDNSQLKDDRKDPKIIANLVKDGNYGMPYLPEDIYADMRRLSMFRDQLTEDRIRNINRLHREMKIYFPEYMDAFGKIDGAFTLEILKVAPIPSDIVELDEEGLKSLWHEAKLRGRGYSRARVIVDYAKKSVGLTGGTDAGRESIKWFVEQIIQLDERLAEIENVLHQKCMEIPHAENILEINGVGENILAGILAEMGDISRFDNVKEIQKLSGMGLVACSSGKHKGQTKISHRGRKRLRYWLFQAAKSAVAHAVEFKQLHAYYTTRSMNPLKKMQSLVVIACKILRVIYTILNTGMKYDPERMLRDIRYPQGNTVQAAA

SEQ ID NO: 198431 - protein, 325 aa, unidentified
MCQVGHPGVRRSDVPCCVGIDGAKAPWDIALRPAGERWAVPNDAGGVVMRVERWQALPPTLMVLAATGGLERAATAALATAALPGVVVHPRQARDCARATGQLAKTDAVEARALAHCAAVIRPTPRPLPDAQTQELRALLGRRQHLIGMRTAEQHRLAGTTARLTTDSAAHMTWRNAAIATLDGDLETLRRASPRWRDKDDLWQRATGIGPVWARTLRRALPALGTRTRQQSAAVVGVAPLHCDRGTLRGRRMIWGGRAPVRPVFYMGTLVATRFNPQSKVFAERLLAAGQVNKVALTACMQKLLPILNAMLKPRTPWQPQEVQS

SEQ ID NO: 198432 - protein, 377 aa, unidentified
MGDYSEAFVGLDTSKLRNAVAIADAGRGGEVRFFGEIENTPAATAKLVRKLSVKYKRLTFCYEAGPTGYGLHRQIKDLGFECVVVAPSLIPKRPGDKVKTNRRDALSLAKLLRADQLTPVWVPDGRHEAMRDLTRARETAMLDLRTKRQHVSAFLLRLGRPYPESRKTWTKAHASWIASQKLEHPQQRLVLEEMMLAIRQAQERLQRLEQAIAAAVPEWSLAPVVTALMAMRGIDLVSATTLLAEIGDLSRFQTPTELMAYLGLVPSENSTGDTVKRGPITKAGNRRARRMLVECSWSYQHPPRVGQAKQPKVDAAPPAVREIAWKAQCRLYRRYRTLIRKGKLKTVAIVAIARELAGFIWAVARAATTAPVAAAPA

SEQ ID NO: 198433 - protein, 411 aa, unidentified
MDPLYPRCAGIDVHKNSVVVCVRCAGHAGKATEQVRTFSAMTADLLALSDWLAEQGVTHVAMESTGVYWKPVFNILEGRFTVILVNAEHIKKVPGRKTDVKDCQWIAQLLQHGLLKASFIPPAPIRELRDLTRQRTQLIEERTAAANRIHKVLEDANIKLGSVATDVLGASGRDMLEALIAGQTDPERLADLARKRLRAKIPELQRALHGRVTEHHRFLLRMHLDHIDHLEGLIGRLSARVEGLMAPFARDRERLETIPGISRRVAETVLAEIGTRMEQFPTAGHLASWAGMCSGSNESAGKRRSGRTTKGDRWLKRALVQAAWAASHTKATYLAAHYRRLAKRRGRKKALVAVGHTLLVIIYHVLRRGTTYQELGADFLDRLEPERLTRQLVKRLEALGHKVTLEACPAA

SEQ ID NO: 198434 - protein, 338 aa, unidentified
MIHVGVDLHQRFCYMTALDARGKKLQAGAVTNEKAALRRYFRQFGGQAVQVAVEACGFWPGFREVVEPAVERLVLVHPQRVKAIASAKLKNDRVDSETLAHLLRCDLLPESWKADRETQARRQQVRLRTTLVRQRTRLKNQVHAVLHQQGLRSPVTDLFGRKGRRWLSQVKLPEMARPSVDACLRMIDHYGEEIQKQNLQLGEKAKTDERVEWLTSIPGIGEVSAMMLLAEIGDLGRFGTKEALCSYAGLVPRVRESAGKAARGGITRQGSSTLRWIMVEAAQVATRSSPAAKRYYERRLRQKHKHVARVALARKLLVAVYALLHDGEVFDEQKFAAR

SEQ ID NO: 198435 - protein, 340 aa, unidentified
MRLYLGIDLHSSNSYLGIIDETGKRVFKRKLPNDPGVILAALAPYKNDIVGIVVESTYNWYWLVDLLMAEGYTLHLANPTAIQKYSGLKYSDDQHDAFWLAEMLRLGILPEGYIYPKEDRPIRDLLRKRSHLVRLRGSLVISLQNIINRNIGFKLKGNKMMASTTDHVTPLLEFNEDLALAGKVSKESIDFLTRQIKAIEATVEGKVELREPYTRLLTIQGVGKILGLTIMLETGPISRFDKAGNYASYCRKVSSKWISNDKGKGKGNRKNGNKYLAWAFSEAAELARRFYPEARAYYNRKMKETNIAIAHAALAHKLARAAYYVMRDQVPFMSEKLFES

SEQ ID NO: 198436 - protein, 483 aa, unidentified
MRKRRMSTFERLNSGRITRKQRRELARRVAAADPGLSIVNPHAAGIDVGNAGHFAAVPPDRDPTPVREFGFWTADLHKMAAWLVACRIDTVAMQSTGVYWIPLYDILEQHGLRVVLVNAQHTKNVPGRKTDVQECQWLMKLHTYGLLRDSFRLAQHLEGVRTVWRVRGRHVEEAARSVQHMQKALTKMNVQLANVISDVSGLTGQAIVGAILQGQRDPYKLAELSDPHIRASKEEIARSLEGTWREDVLFELQQAVDSYHFAHRQIRQCDDKLKAYLASLESRVLEKPAVPAGTKPLQPKTRKARKQGANAPPMDLTGELVRICGADLTSIDGINIISAMTIVSEVGTDLRQFPDEDHFASWLGLTANENISGGKRVKGAKRKVKNRVADVLRMGATSLLNSASYLGARYRQLRRNAKIPAVAVKAMARHLAVLVYRLLTKGQAWVDRGAELYEQQRRERDLIVLQEKAKRHGLQLVPVAAAN

SEQ ID NO: 198437 - protein, 412 aa, unidentified
MERMIARGCGIDVHKATLSACVRITGSDGSVSQEIRSFGTTSDELLALHEWLTSMAVTHVAIEATGVYWKPVYYVLENAFRMVLVNPAEVKQLPGRKTDVSDCAWLAQLLEHGLLRSSFVPPPEIRELRDLVRYRTSLKADHTRLANRLHKVLQDADLKLSSVMSNILGVSGRQILSQLATGHRDPAALAELARGRLRNKLPELRQALAGRFSAHHAYMLSRLLADLDNVEDAMTDVSQRIEERLAPFAEALEHLCTIPGVKRITATAILAEVGADMSPFACAARLASWTGICPGNNQSAGKRRRTKARNGNRWLRTALVEAGHAAGRTRNSALAAIFRRNVVRHGPKHAAFVVGRHILTIAYHLLARNTVYQEIGPAYFEQRRAEQVKRRCLAQLQRLGFQATLTPLPTAA

SEQ ID NO: 198438 - protein, 349 aa, unidentified
MLHVGLDLSRKRVDVCLISSEGELIQHFRAPADRDGLYGLTRRVAAYGQPIRGVVESMNGARFVHDELVRFGWEVLVADAQRVKGLAPLACKTDKVDARVLAELSFRDLVPAIWLPTPELRAERERARWRLHLVKHRAILKNRIHASLIAFGHQVPMADLFGVAGRRLLAELDFPEPWLGHVRASLELIDDLERRIGEIERWLRRSGADHRYIPLLMTAPGIGWITGFTIAAEIGDISRFSSPVKLTGYTGLCPRVSQSGEVDRRGPLAKHGPRYLRWGLMEAAIAASSHPLFKERYQRTKRRLGRQRGAKVAQIELARKLTEAIWYMLNRNQPFKPFAPAGAVIRLTA

SEQ ID NO: 198439 - protein, 369 aa, unidentified
MKRTIKNIGLDVHKNSISIAIADDGRDGEVRYYGKIDNDMNQLDKVIRKLISKGATLRFVYEAGPCGYCIYRYLTNNGMDCAVVAPSKIPQQSGNRLKNDRRDCLSLAKLHRAGELTPVYVPTEADEALRDLVRAREDATRALRTAKQQLGGFLLRHDTVYSGKSKWTKAHFNWLSTIAMPHPAQQIVFQEYIDTVVDCSNRVQRLTEQIRQQSMQSRLHGLIKALQSMRGISLIVAATIAAELGDLTRFENPGKLMAFLGLIPSEHSSGDRVKKGAITKTGNGHVRRALVEAAHAYRFAARKSREIRKRQEDLPKEVLDISWKAQCRLCTRYQYLMAKGKKSNVAKTAIAREIAGFSWAIAQVLPKTA

SEQ ID NO: 198440 - protein, 355 aa, unidentified
MSQEKYIGMDVHQATISAAVMDAHGKLLMECLLETKADTIVEFIQGLHGTLSLTFEEGTSAAWLHDLLKPHVSRLVVCDPRKAALLKEGNKSDRMDAQKLAELLRTNQLKPVYHEEHGIRALKELARSYLRITKDVTRVMNRIKALYRSWAIPCSGAGVYAPRHRAEWLAKLAEPGVRVRAEHLYQQLDSLQPLRLQARGELVWESYQHPAVKLLRQIPSIGPIRAALLVALLQTPHRFRSKRQLWAYSGFAVETHDSGEYRCVRGKLQRNRERITVRGLNDNHNQDLKSLFKSAAISASTRPGPLRDFYVARVEKGMRPTMARLTLARKIATITLTMWKKGVGFDPQNLPRQAA

SEQ ID NO: 198441 - protein, 453 aa, unidentified
MTKRKSGDHPDLKMVNANAAAIDIGSTMHMAAVNPDADIMPVRAFGTFTQDLHDLAAWFQSCGVTSVAMESTGVYWIPAFEILEAHGFEVILVNARYAKNVPGRKTDVSDAGWLRQLHSYGLLRGSFRPEAEIATLRAYVRQRERLTEYAAAHIQHMQKALMEMNLQLHHVVSDITGATGMRIIRAIVGGERDPETLAAFRDVRCKSSVDTIKASLVGNDREEHVFALTQSLELYDFYKAQIETCDRRLEAAVAALTVRADNDLAPLPKARIKGKQHNAPSFDVRAALYGVLGTDLTQIHGLGPSLALKLVAECGTDLRAWKSAKHFTSWLCLAPGNKISGGKLLSSRTRRSSSRAAALLRLAAVTIGKSDTALGAFYRRLSSRIGKQKAVTATARKIAVLFYNAIRHGMTYQDQGAAAYDERHRQRVLSNLQRRAKIMGYALAPIPETAGVS

SEQ ID NO: 198442 - protein, 343 aa, unidentified
MEQLAVIGIDLAKSVIQIHGSDSRGKCLIRKKLRRNQLLPFMAKLPRCLVGMEACGGSHYWAREIKQLGHDVKLIPPQFVKPYVKTNKTDVADTEAICEAVDRPAMRFVPIKGPEQQAVLLLHREREGLIKERTAVINRIRSSFSEFGIAIPSGPKRLRQWLSDSYGDVENDLPATLNRLMLRMVDRLNYIESEICDLDKEINDQNKSDERCKRLIEVPGVGRLAASAIVASVGDAQEFRSGREFAAWLGLVPRQHSSGGKQNLQGISKRGDAYIRKMLIHGARAVIRHMNRNNAPVDWLQDLMRRRHHNVVIVALANKLARTVWALLSKEQSYKRYEDTVVA

SEQ ID NO: 198443 - protein, 423 aa, unidentified
MNPITTYQATIGLDWADQKHDLWIHPADGAKPQHLQLEQTPEAIHQWVAQLRERWGSGAVAIAVETSRGPILSALRAYDFIVVYAVNPKGLKDYRAAFCVSGAKDDRTDAYLLEEMLRLHADKLKPLRPDDELTRKLGGLTEARRGLVDQRTEMVNQTHATLKTYYPLAERILGSEMNTLMAAEFLGRWPDLASLQAASSQSLRTFFYKHNCRSAKRIDQRLQAIKEAEPLTTDSAIIEPARALVLARARMLKCLSQSIAELEAQIQQAMDQHPDAPIFRSFPAAGPALAPRLLAAFGTQRDRFEDADQVAQLYGIAPVVIQSGNSKVVRVRYRCPKFGRQTFHENAACAAKTELWAQSYYQRQRQRHQDKHHQACRALAYKLIRIYFACWKNRTPYRSDTYLAALQKNGSSLYKEITQAPGE

SEQ ID NO: 198444 - protein, 412 aa, unidentified
MKDLLEISCGLDVHKEKIVACILTGPLGKPTRSEIREFSTLIPDMIALRNWIVSKNCHHVAMESTGIYWMPIYEILEDAFYGDITLLVVNARHMKNVPGKKTDMRDSEWISTLLRAGLLNGSFIPEKRIREFRDLNRYRKSVIRDITSQKNRIEKFLQSSGFRLSSFISDIFGASGRNIILHLIEHGQIDKTALDSCLKTKTRNRIDEILMSVNGTLSEHQKAFLRILMTHYDSLKKHLAEIETSLEEDMAPFALQVEQLNSIYGISTNASYAIIAEIGIDMKPFKTAEHICSWAGLCPGNNESAGKRKSTSVTKGNPYIKSMLCEIAWVIAGKRNTYLSAWYWRIKQKKGAKKAIVALARKLLVIIYTMLKQGTLFDESCFETRRKHCEQKQLSRYIRELEKHGYHVEAQS

SEQ ID NO: 198445 - protein, 440 aa, unidentified
MTEFGKINLHAAGMDLGTEQIFVSTDGETVKAFGTFTSDLHDLKTYLIANGVTTVMMEATGVLWVPIFDILESAGINVCLVNAAHAKNVPAQKSDPADCRWLYKLHVYGLVRASFIPDEAIRELRIYIRQREDNKDIAASHIQHIQKAFELMNIKLHNVISDIMGVSGLSIIEAILAGEHDAEKLTALCNKQILKKKKEKVLESLKGNFKREYIFMMQQAYDAWCFYQKQIENCDIKIGELLKKMTENLPKPPQELLGKPKPSRHDDLNVDNLHDQLVCINNGRNAASLPGFSDSAVLKLTAELGTDFSKWVTDKHFTSWLGLSPRKYQSGKTNKTRRSLKKNTKAGQIFKELSMSIAGSKHLALKGFYNRIKSRSGSKAAIKAVARKLAKLYYDYMTRGFTYVEQGLIEYEKKFKAAMIKGLEKKAKNIGYQLVPIDVH

SEQ ID NO: 198446 - protein, 377 aa, unidentified
MSKNTLYVGLDTDKKHIDVALAEALPGGEVRYWGQVANEASAVARLVKRLQAGGRQLAMCYEAGPCGYGLYRLLNGKPAVRCRVVAPSMTPRRPGDRVKTNRRDSIALARLLRAGELTAVWVPDATHEAMRDLVRARGAGVADLLRCRQRIAGFLLRQDIRYAGKPWTKKHRVWLGQLVPALALPAHRLMLGEALQALDETTARRDRLTDHIAELVPDWSLAWLVDALQALRGFALINAATLAVEIGDPRRFAKPSQLMAYLGLVPSEHSTGERVRRGGLTKTGNGRTRKALIEAAWTYSRPARAPRNNARHAPAVAAIAAKACHRLSLRYRRLTNTRGKRPIIAVAAIARELSGFVWAIAQVAGPAAATPERSTRR

SEQ ID NO: 198447 - protein, 341 aa, unidentified
MNVYIGLDVSLRSVAMCVVDLKGAIVEELNLPCEVESIASHIEAADYQVERIGFEAGAMSQMLFHGLNAKGFDTVCMEARQVAAALSAMRNKTDKTDARGIAHILRAGWYNPVHMKSRESHDIKALLAARKAILNKCIDLENEIRGLFKAFGIRLPSHVSRLRFDEKVRPIIEADEALAFALLPMLDVRGALYDTYRLMEQRVIVVSRHDPVCKLLMTAPGIGPITALSFKAAVDDPTRFNSSRLVGAHFGLTPRRFQSGEMENPGRISRAGDKDVRATLYNAANSLLLRSTRPSSLKTWGLRLIRTKGTRRARIAVARKLAVILHRMWVTNTPFNAEGTA

SEQ ID NO: 198448 - protein, 313 aa, unidentified
MITNQHIIHVGVDIAKEKLAVCIPGGPMLDLPNTKDGARRLRASLRRLPGACHAVCEPTGGYEKTLVAELRQAGIPFSLVNPRQVRDFARAQGRLAKTDPLDARVLADYGAAFRPPPASPAPPAAAMLAELVARRRQLLAIQVAEQSRKEHGVAAPLRRLDRGLVRLLKKQITQVEMLMDELIAREPWLGERVRILTQVHGVGQLTACVLIAEMPELGTLTRRQAAALAGVAPFNRDSGHFHGQRHIRGGRANARKALYMASLSASQSNPVLRPFYQRLLAKGKPPKLALTAVMRKLVIYLNHLLMPLQFQLA

SEQ ID NO: 198449 - protein, 346 aa, unidentified
MIIVGCDFHPRWQQVAIFDPATGEIGERKLVNGNGEAEQFYRSLPVPCLVGVESCGNSQWFVELVEQLGHEVWIGDAAQIRASYVRQQKTDRRDAAHILKLLLEGRFPRLWRPDAAVRDLRQLLIHRHRLVQIRTRVKNGLQHLAMNRGMQKKSKLWSEAGQRAFLELPLPGWAGQRRQDLLALLTKLEEQTRPLDAAVEEAALAHPQARLLMTQPGVGPVTALAFVVTIGDASRFQRGKQVASYLGLIPREHSSGGRQRLGAISKQGNGFLRLLLVEAAQSAVRLDEGLRKKYQHRCHRKAKGVAKVAAARKLAVRLYWMLRSNTAYPEIVHNESSSRCPMAGAS

SEQ ID NO: 198450 - protein, 372 aa, unidentified
MVANFTFDEYAVQCVGIDISKDKFTACLFTYNTASDLGWWTDVIEFRNNKTGFNQLVRWSRKNANKEYPIRYLMEPTSTFHEPLACHLNAIGGTVFLIFPAKAKEFAKYEGIRSKTDEIDARTLSTIGCTNRKLKPWTPPKPIFRKLKQMCRFNNRMERMRTELTNQQSALKSGANAEASLMNRYEALLNELDKQVENNKKLIKKTVESDSDLKERVARITTIKGVGYLTAVAIIAETDGFSQIGNRRQLASFAGLDVIAYKSGTIDTNHRISKKGSSYIRAALYLPSITASMHNPQMKELYNRIASKNTRTKMIAITAVMRKLLLLIFTLWKSGEEYDSKRPVSCTDVVTLSLDQMYNDEPGATLKESVLV

SEQ ID NO: 198451 - protein, 353 aa, unidentified
MKTYYVGMDVHRASIVIVVLNGAGKVVMRLVIETGAERVRGFLKQLRGKVYVTFEEGTQANWLHDVVRSLVTEVVVCDPRHNKLLTSGNKSDRVDAQKLAELLRLGSLKAVYHGDNGVRALKELVRTYDCLMSDTTRVMNRLKAIYRGRAIGCAGHDIYRQDRREQWLEKLTERGAKQRASFLYQQLAALKPLRHEAKRMMVKEARRQPAYPWLMSVPQFGSVSVAQLLAIVSTPHRFRSKRQFWTYIGLAVVTRTTADHEVVNGVLRRSQRPVSTRGLNRNHNHLLKRVFKNAANGACHSGPFKPAYDLRIAQGMAPSLARLTIARQLAAITLALWKRGQQFNPERMNQQAA

SEQ ID NO: 198452 - protein, 458 aa, unidentified
MSRLRKHVQGQRGESFLEIVRGVDRERIISVAIDVHKYYHLVMIHNGYGDVILPGFEIDIFQAGFDHLCAEIDSVVKETQATVLLIGMEPTGHYFENLARHLLDKYPHIKLVNSYAVKENRNQKMLRLQKNDEIDVCAIGDLVLRNECFTYQPLSEPYLNLQYWCRHRQAKLKMRTMLKNQVIGHLDRIFPGLVMPNGGSTEDQPRLFVEFWQNQTAQHLIRLCPDPRRLRAMSVDQLIDLFHKYGARMGPVTAQRFISFAQQVLLPSEEIIAARLPLLRADLALVEALNAAIKQAEEQMAHYLSQTRASHLTNIKGIGVIHVADYIAGMGNPECYQHAGQIFKRSGLVSGRHDSGLRQKGGKGHKVTKVGDAHLRYALTRLSHSLCQWQPYFSDYRTKLIEAGKHSGIATVATARKANGVLFALLRDQVPFRPCDRHGRPISPKASIRRQQEGGHQP

SEQ ID NO: 198453 - protein, 275 aa, unidentified
MEKVTIIGVDLAKNVFQLHGAAADGSVVFRKKLTRLQFCKFMAGQPACVVAMEACAGSHYWAREMVRLGHQPKLIAPRYVKAFIKRQKNDAADAEAIVEAAQRPTMRFVEPKTEEQQSRSIMFRTREQLVNQRTELVNALRAHLYEFGYIAPQGIRYLSRLECFVEDENAKLPDLAREICRDLLDQIYQLTGRIDALRKKIDALSREAEASRRLQTMPGVGPIAALAIETFAPPMETFKCGRDFAAWLGLVPLQKSTGGKQRLGRTSKMGQCDIR

SEQ ID NO: 198454 - protein, 314 aa, unidentified
MACSIGIDVAKATLVVATEPAQSLGPFPNDDSGHAALVTALTPLAPTRIVLEATGGYERAVTGALAAAGLPVVVVNPRQVRAFAQATGQLAKTDALDARVLAAFAQRVAPEVRPIPDATTQELRDWVTRRRQLVAMLGQERTRLLQAQGPAHRALRRDLEQHIRWLERRLRASDDEVGRLIEASPLWRVRDQLLQSVPGIGPVVAHTLLASVPELGTLDRKQIAALVGVAPRNRDSGQWQGRRQIWGGRAAVRQVLYMGALVATRHNPVLRAFYLRRRAAGKPAKVALVAVMRKLLIMLNAMLAHQRPWRATAA

SEQ ID NO: 198455 - protein, 333 aa, unidentified
MKNYTNFIGIDVAKLTLDYCMITPNPQPEQGQILNTQKLVDKFLKTLKKAGCQMNETLFVFENTGIYSSLLALVLSENKLDYAQVPALEIKRSLGITRGKSDKVDAKEIANYARRNTDKIALSALPELSLQQLKIVFAEREKTIAAIKSFERTMENEMYLNKKVFTSVKAINRQTVTQLKKQLAALDDRIKTLIREDEILYKQQQLLKSIPGIGEITSVYLLMVTKGFTAFTNGRKFACYSGVVPFEHTSGTSVKGKTRVSHLADKKMKSLLHMAALTAIKYDPELKAYYRRKKEEGKHTMLVLNNIKCKMVYRIFAVIARETSFVNLHKFAA

SEQ ID NO: 198456 - protein, 342 aa, unidentified
MSIAVLGIDLGKTSCSLAGLDETGRVVLRRRIRRETVIAFAAKLPACVVAMEACCGAHHMGRALVAQGHEVRLMSPEYVRPYVKAQKNDDRDAEAIAEAATRPTMRFVALKSEEQLDMQTLHRVRDRLVAERTSLSNQIRSLLLERGITVAQGFAKLRDRLGELQEAPSPVSPRIQLLLREFHDRLRALTEHIRAYDAEFTAQAQADERARRLMAIPGIGVLNATALVAAVGEARTFGQGRDLAAWLGLVPRQATTGGRPKLLGITKRGSKYLRKMLVQGARAAMPVLRQSDTRLGAWLRSLLARAHPNTAVVALAAKMARIVWALLHHGRSYEAMAAPIAR

SEQ ID NO: 198457 - protein, 351 aa, unidentified
MSRTLKTAIAVVGIDIGKNSFHVVGLDQRGAMVLRQKWSRGQVEARFANMPPCLIGMEACVGAHHLSRKLKALGHDARLMPAKYVRPYSKGQKNDFRDAEAIGEAVQRPTMKFVATKTADQLDLQALHRVRERLVSQRTGIINQIRAFLLERGVAVRQGLRFLRAELPRILGMPPDVLSPRMVRVIEDLAGDWRRLDERVESLSGEIEAVARKDAGCERLMSVPGIGPIISSATVAAIGTGDVFSKGRDFAAWLGLVPKQISTGDRTILGKISKRGNRYLRVLFVQAAWVVLIKPKSWERHGLKHWIEAAKKRLHRNVLAIALANKLARIAWSVLAHGRNFENTTISVAAA

SEQ ID NO: 198458 - protein, 374 aa, unidentified
MSRSIIYLGLDVHQDSITIAVLPAGAPAPTRVERLPNDLAKLRRFCERLAAQGDVRACYEASGAGYVLHRALREWGYPCDVIAPSLIPTKPGHQRKHDKHDAAQLARLYRAGELTCVRIPSEAEERVRDLVRCRETLQREVLKSRHYILKFLARRGFVYREGTNWSTAHYHWLRRLAATSSPLVAEDQIVYGEYLGLLEYKLSRRDELDRRIAELALTPALAPAVNRLQSFRGVQRHVAMVLTTEIGDWRRFASPRQLMAYLGLVPKERSSGDRERRGSLTKAGNSHCRHALVQAAWAYRFQPKVGVALKARQRGQSPVVIAHAWKAQHRLHTLYRRLAFRTRPQIAVVAVARELVGFLWAVMQDQDCGSRAAA

SEQ ID NO: 198459 - protein, 344 aa, unidentified
MTQFVGLDVSQKDSAVSVVDEEGRQVWRGKVRTDPNVIADTIASRAPNAKRVGFETGPLSTWLWHAMKDLGLPLVCMDARHAKAGLSVQVNKTDENDALGLAQLVRTGWYREVKVKSLGSHLMRGVLGARAQLVSTRIQMTTTVRGLLKNVGVFVAVGRRQTFAAAAEEAIGDRAALTAMIAPLIAAWRAITEQIRVYDGLLRRQALNNDRTKRLMTVPGVEPIVALAFASMVDEPGRFAKSKSVGAYLGLTPRRYQSGEKDVTGSISRTGDTLVRAYLFEAANVLLTRVQRWTGLKAWGVKLARRIGMNRARAAVARKMGVIMHKMLVTGIDFRWGKEEAVAA

SEQ ID NO: 198460 - protein, 341 aa, unidentified
MKHFVGLDVSMKETAVCVVDDAGQRVWEGSVPSSADAIAAIMCEKAPDLVRAGMETGPQAVWLWHALREKGIAVDCIHARRAAAALKLQANKTDRNDAFGLARLVHSGWYEPVAIKSFERYRMRAVLTARERIVRMCTMMINQIRGLAKTFGLQLSAGKGQVFEQSVRRALPDDAVLRDLFESLLSVLSGLKDQRRAFDRRLARFAREDAACRIVLSAPGVGSLTAIAFVTAVDDPTRFKSACDVGAYLGLTPKRYQSGEVDIGGRISKTGDRLTRKLLFEAATVIMYRASPSIALKQWGLRLSARSGSWKARVALARKLAVTLLTMWKTNTMFENRSFAT

SEQ ID NO: 198461 - protein, 458 aa, unidentified
MAGQRKRSQPAPDIPEGLPLLYRNAAGIDVGSREHYVAVPPGRDPRPVQRFGSFTADLHRMAHWLKACGIETVAMQATGVYWIGLFEVLQAHGFQVQVVNAQHTKTLPGRKTDVQECQWLQKLHTFGLLNNSFRPVEEIRVLRSYLRQRENLVVASSTCVQHMQKALTEMNLQLANVISDITGVTGLAILRAIVAGERNPEKLATLKHVQIRASREEIARSLEGTWRSELIFMVEQNLALYEVYLAKIQQCDEQIETHLKTMTSKVDPALQPMPPSRHGRKRRKHGPGFDLRQHLYRLTGVDLTEIDGFDVQIAQTVLSEVGTDMEPWKTEGHFASWLGLCPDNRTSGGKVLKRGTRKVINRAATALRIAAWNLIRSQSALGAKFRRLRARLGAPKAITAMAHHLARIVYRMLKFGQAYVDQGQQSYEAKYRLQQRKWLEKQAAALNLQLVPRQGFAP

SEQ ID NO: 198462 - protein, 354 aa, unidentified
MSQTPNTAIAVIGLDIGKNSFHVVGHDVRSAIVLRQKWSRGQVEARLANIPPCLIGMEACVGAHNLSRNLASLGHDARLMPAKYVRPYSKGQKNDFNDAEAIAEAVQRPTMKFVATKTAEQLDLQSLHRVRERLVSQRTGIINQIRAFMLERGIAVRQGIGFLRIELPTILATRTDALSPRMLRVIEELAGDWRWLDQRIDGLSGEIEALARLDQACLRLMTVPGIGPIISSAMVAAIGTGDLFSKGRDFGAWLGLVPKQISTGDRTILGKISRRGNRYLRVLFVQAARVVLARIKHLERYGLKSWIEAAKKRLHPNVLAIALANKLARIAWAVLAKGRAFELTRTDDAGVRPA

SEQ ID NO: 198463 - protein, 390 aa, unidentified
MRRPIPPAGTQYLSVCHELPTGQGPSRKEPTMTHPISATIQFTTLGIDVGDRKSHVCVLDPAGEVAHETSIPTTPKALAGLVEAYPGARVAYEVGIHSPWITRIVDEQGCESIVANPRKFSYIAKSNKKNDRADAETLARFARLDPKLLSPIQHRGAETQAHRALLRIREGLVGARTKLINAARGIVKSFGARLPACSTPSFHRKVVDAIPKELRTVLTPLLEVVAHLTDQIRNHDKEIEQLAEQRYPETSKMRKVHGVGPTTSLAFTLCIEDPSRFQRSRDVGPFLGLVPKQFESGNSSPQLRITKAGDRQVRTLLVQCAQYILGHLGEECDLRRYGEAIAARGGKNAKKRAVVAVARKLAVLLHRLWVSDTPYDPDFKLNRQLSRKSA

SEQ ID NO: 198464 - protein, 340 aa, unidentified
MGYYVGLDVSLKSTHICVLDGERRVVWRGVSDTQIAMIAEHLARWGEQIVLVGLETGSLTPWLYHGLSDLGLPMVCMDARRASDALKARAEKTDKADARALAEMLASGWYSAVHVKSLESHQLKALLGARDQLVRVKRQLYGQVRGLLRPFGIKISQRAGAKSFDEAVRMACNKEDVLYIAVGALLDTLANVASQIAVLDKQVRTLTQKRKACWYLMSVPGVGPITALAFTAAIEDPHRFGSNRDVGAYLGLTPKRYQSGERDISLSISRQGDEMVRHYLYEAANCLLTTVTGASALKSWGLKMVKRCGAKRARTAVARKLAVLLLRLWKQESHFEAQSA

SEQ ID NO: 198465 - protein, 375 aa, unidentified
MPAKVRFLGLDVHAATIAVAVAEADGSVRSLGTIANRAESIRTLVKKLGAVEQLRACYEAGPTGYVLYWQLAELGVACEVIAPTLVPTKAGDRVKTDRRDAEKLARSYRSGDLTAVWVPDEGSEALRDLVRAREATKQDQLRARHRLSKFLLRTGRRPALGMKSWTAPYMAWVRQVQFAQPAQQATLLDYLHEVDHQGERVKRLEQAITEAVKLASPQVQEVVKGLQALRGIAEISAVTIVSELGQISRFESARQLMGYSGAVPSEDSSGKRKQRGSITKTGNAHLRRIVVEAAWSYRHRPATGPRLSKRQEGVPEPIKEIAWKAQHRLHKRYLRLSAAGKEQRKIITAVGRELLGFIWAIGIKAEIAGKQEIAA

SEQ ID NO: 198466 - protein, 345 aa, unidentified
MTTMNYIGLDVHKKTISYCVKDVSGRIQQEGKIGSTRRELECWMKTLPQPWTVAMEATIFSGWIYDHLLPHATQIKVAHPLMLRAIAAAKKKNDQIDASKLADCLRCDFLPECHMMPRAIRDRRRTLRYRHLLVRQMVQMKNRVSGLLMETGVEYNKQRLHKVSYFRELLSANGEVPPSIRPLLKLSRETIERCQKTEYALVSSLQRDPVLADRIKRLRTVPGVGPITALTWALEIGDVSRLGSIKQAISYCGLCGDERSSADKAMRMPLSKQRNKHIQRALVEAAKLAPRQSHELAVIYDQERQKGNSNRATLAVARKMVAYLLAVDRQQRDFVPAEERRTSAA

SEQ ID NO: 198467 - protein, 310 aa, unidentified
MDVFIGIDVSKDRLDVCIRPSGETFTVTRDGEGLERLGERLCALAPVLIVMEATGGYETVAASALAAAHLPLAVVNPRQIRDFARSTGKLAKTDRLDAAAIAHFAEAIRPPAQPVADDEAQALGELVARRRQVIEMIVAEKNRRRLAGQPRVLKAIDRHVDLLQAELSDLDRDIDGAIRKSPAWQADADLLASVPGVGKATLRTLIAELPELGRLDRRKIAALVGVAPINRDSGVWRGRRTIAGGRTTVRTALYMAALVASRANPVIAPYYQKLRASGKSGKQALVACIRKLLVILNAIMRDRKPWTLSA

SEQ ID NO: 198468 - protein, 348 aa, unidentified
MIVGIDVHKRSHAAAIVDEHGAPIATLTIPNSRAGIARLCRWLSEQSADGVAVGVENAGGYGRLVCAVLAAAGHEVLNVPSWRVKRERVHQGPGKSDPGDAVAIGQCVLRHRDKLGPALEPPLIRAIALLETHRRQSVTRRTDAIQRLRAVWAQLDPEAESATSNVATRRALRQLKEIDFGDGLAEHAAARCIHDLAREIEALNARVAALEHELADLLAAPGDPFAEVRGAGLATTVTLIAESGDVRRFRGDAAYARYGGSAPIPCGSGSTAGRHRLHRGGNRQVNACLHRIAVTQARVDPRARAFLERKMAEGKTKREARRALKRHLSDVVYRRLYAWAEQALPPAT

SEQ ID NO: 198469 - protein, 347 aa, unidentified
MRFYTKQHRYYCGIDLHARSMYVCILDPQGKILLHRNMPCAPELFLKAVAPYREDMAVGVECIFTWYWLADLCAKQNIPFVLGHALYMKAIHGGKAKNDKIDAHKIAVLLRGGMLPMAYVYPPEMRASRDLLRRRMYLMRKRSELLAHVQNTNSQYNLPEIGKKIAYKANRQGVAERFSDPSVQRSIEVDLKLMDHYDQLLTDLELYIMRTAKQHDAHALYRLRSVPGIGKILALVILYEIHDINRFPTVQDFVSYARLVKCAKESAGKRHGTSGKKIGNVHLKWAFSEASVLFLRANPKGQRFVEKLSSKHGKAKALSILAHKLGRAVCYMLSRKQAFDMNKFFNS

SEQ ID NO: 198470 - protein, 376 aa, unidentified
MKVVYQTCCGVDVHKSFFVATIIKTTSGLTPSYHKKRFSTFNNSILQFKDWLIENQCFDVCMESTGKYWVPVFNLLEDEINVTIANPKWVKAVKGNKDDTKDSKWIGDLFRLGLVPGSFIPCKAIRILREYTRYRYKLISARSSEKNRYQNSLTVCNVALDSVVSDIFGKSATSIVDYLIEQSDNSINHEEISSRLLRSLKKKSDSVIESIEGYQMTDSQKYRMHLIRTHLDYITSAINDIDTKLDSLIAPYENAVQLLCTIPGIKRNSAITIISEIGTDMSQFSSSKRLCCWAGLTPGNNESAGKKKSVRITRAGVYLKPALVQCAHAAVKSTDSPYYKQKYERIMKRRGKKRAIIAIARMILTAIYQMFSTGEA

SEQ ID NO: 198471 - protein, 366 aa, unidentified
MEVTTIGIDLAKSVFAVSGVDSRGRVVIRRQLRRAQVLGFMRGLPRCVVGMEATGGAQYWARQFTALGHAVRLMSPALVMPYRKGNKTDRNDADAILEAVSRPSMRFVTVKSVAQQDLLALHKVRAQLVKSRTALCNQLRGLLRERGVAVRMGVAALKRGLPAALADESSELSGEMRELLSEMSQWLGTLEQRIASCEARITQKFKHDERCVRLAEVPGVGPLTATALVAAVGNAQRFKNGRELSAYLGLVPRQHSSGGKTVLLGITKRGDRYLRTLLIHGARSALRQCKLKGDARSDWARRISAARGPNVAAVAMANKNARILWALLSRGDRYRSSRVLTRAVLRPGSPPPVKRARGAKLRVAKD

SEQ ID NO: 198472 - protein, 391 aa, unidentified
MVCVGIDVAKDKHDCCILDSDGTIRADCITIPNNMDGFKQLLQTIRDCTKRSDKIKVGLEATGHYSYNILGFLLDNDLAVYVMNPLHTNLYRKSLSLRKTKTDRVDARTIATMLLSDVDLKSYTDIAYHNEELKSLTRYRFDKVQERAKLKQSVSRLATILFPELEGLVSSIHGTSIYALLSEYPGAKQISEVHLTKLTNLLTTASKGRYGKEKAIQIREAARASIGSVMPAKSLELKHTIKLIQELASEINEIEDSIQKIIDELNPPILSIPGMGVNSAAVILAEIGDFSNFSSPDKILAYAGCSPSTYQSGKLTNCYAHMEKRGSRYLRHALYNATKYVCYWNPVFAEYLAKKRAEGKHYNVALSHAMKKLVRLIYALQKSGKAYLAAA

SEQ ID NO: 198473 - protein, 411 aa, unidentified
MNHKFKELAFVGVDTHKDEHAACMTDCFGQSLGVFTVENRPNRIEELLEEIDKTAKSHNLKPVFGLEDVMGLGQHLARSLIAGGYELKEVNPIETERKRLRKAHPDKSDPEDALAISKVLISEFDKLPTIQSLDEVYLAIHQLSNRRDSLVKEQTRIKNKLHILLHREYPYYQSMFKTTFSKAALAFWERFPIAPFLKGIGVERLAQYLRANSNNTVSTKKALSILKLVDKDSLPSCLNLVHASLIRNLVKHLRFIQEQITIARKELEPLIDQTGIKLSTLTGVDTPAAAKLIAEIGDVKRFASSDKLAKCAGIAPQQKSSGKKQRFKKSNRGRRQLNTAIYRIALCQIGCDRSGKPKNSKARDYFLRKISEGKTKKEALTCLQRRLCDIIYAMMKNKTEYRFKRTVNTTA

SEQ ID NO: 198474 - protein, 375 aa, unidentified
MTGVGSRYRPCRDRKPAAVSDPKPRVSLELRSLLPYPNSCLGTSPHQQERDTKMAMLSFGGIDVSKDRLDVMVLPEEQCSSVNNDVAGWAELVEQLRGSSIAAIGIEASGGYERGVMRALLAADLPVRQVNPFKLRQFARASGVLAKNDPLDARMIASFVAIMPTRPAQRQAPAAERLTEMLAVRRQLSAEKVAAENASRLLEDAMLRRLSRRRIARLAADIDLLDRHLVAIVGTDAALAHRYRLLTSMPGVGVVLACTLIALLPELGSMNRKQVAALVGVAPYAFESGTLKGRRCIWGGRANVRQVLYMAAMSASNWNPAFKAFHDRLKAAGKLPKVAIVAVMRKMITTLNAMVRDDVVWADRLTGRHSVPTAR

SEQ ID NO: 198475 - protein, 356 aa, unidentified
MPVYLGVDFHARSQTVCWCSTEDGVIRQRTLDHERDNVPAFYAQFAAPAIVGLESSGYALWFHRLLAEQGHHVLVGDAAAIRKFAKRRQKNDRRDAELLLDLLLRGDFPAVHVPPPASRDVLGLLRYRHRLVRMRTMLRNGLQAVALNHQLRLGPGLFTARGRQQLSALPLDGADATQRTHSLALLEALQKKILEVEEILDARAADDPRVTRLRTHPGVGLLTSLAVVHTLEPVTRFDRARRIAAYCGLDPKEHSSGETQRYGHISKQGNRLLRFLLIEAAHHAVAPGQDDDLRRFYYHLLVKKHAAVAAVAVARKLVLRLYRMLRDQIDYDEFRRRGRDARRAREISSLPIHRDG

SEQ ID NO: 198476 - protein, 343 aa, unidentified
MEHYAGIDVSLERSSVCVVDATGRIVREAKVASEPEALVDFFRRLGLPLARVGLEAGPLSQWLHAGLAGAGFEAVLLETRQVKAALSAMIVKTDRKDARGIARLLRMGWYRPVHRKSPPAQEVRALLVGRKLLQGKLLDVELSIRGLLRGFGLKLGEVSKGRFAVRVRELVAGQPTLERVIGPMLRAREALRSEYLALHRAVLAIVREDAVCRRLMSVPGVGALVALTFASAVDDPARFRRSRDVGAHFGLTPKKYQSGETDVTGGISKVGDAMVRAALYEAANVMLTRAGRFSTLKRWALEVAKRRGARRAKVALARKLATVLHRLWADGSEFRFGKEAAAA

SEQ ID NO: 198477 - protein, 292 aa, unidentified
MAMRVSKSVIGVDVAKIELVTYQADSDLLALIPNEKPAIKRWLKTLPRPAALAVEATNIYHVDLVELAYQAGFDVYIIDGFQLSNYRKGVGGRSKTDASDARLLARFLKNEGECLRPWTPPPAVYGKLQSLLRRRASLIQAKTSLTQSWANDASLKASFAAFLKSIERLDLLVKKKLKDALREAGLLEQVARCQAVEGIGFLTATALVMAYSRGDFNSSDSYIAFLGMDLRVTDSGQKNGRRSLTKRGCSEIRRLLHNAAMSASRTSAWKEFYNHHRGRVQSEYQPRGCVMA

SEQ ID NO: 198478 - protein, 343 aa, unidentified
MQIRSVGIDLGKTTFHLVALSAAGKVLLRKKFTQKQLLTFTANLQTSLIGLEACSGAHFLGRALREQGHDVKLIPAQFVKPFVKSNKNDFIDAEAIAEAVDRENMRFVPIKTDDQLDLQALHRVRDRLMARRTALINQIRAFLLERGIVFAKSPIRLREALPEVLENVNENLTPRMRNLVAMLWSEWKDLELQIVQMNDEVERIASSDAACRRLRQIPGIGPLVATAIVASIGNGAAFRKGREFAAWMGLLPKQHSTGGKARLYGISKRGNSYLRKILIHGARAVVLRSKRDRIAMGAWMTSLETRAPRNVLIVATAHKLARIAWAVLSTGQDYRAVPEALTV

SEQ ID NO: 198479 - protein, 400 aa, unidentified
MNAVGIDVSKGKSMVAALRPFGEIVAKPFEVPHTSSGFHQLVDQLNSLDGSTRIIMEHTGRYYEPMARWLSDSGFFVSTVNPKLIKDNTLRKVKTDKADSVKIARYALDNWQDLRQYTSMDIIRNQLKTMNHQFSFYMKQKTSYKNNLISLLDQTYPGINDFFDSPARSDGSQKWVDFVSSFWHVDCVRSLGLATFTERYQKWCKRHGYNFQPEKPAQIYSFSKELISVFTKDSVTKFLVKQAVEQLNTVSFTVEQLRLEMNRLAAQLPEYQVVMAMKGVGPSLGPQLMAEIGDLSRFSHREALTAFAGVDPGVNQSGTYEARSVRTSKRGSPQLRKTLFQIMDVLIKSAPSDDAVYRFLDKKRSEGKPYYVYMTAGANKFLRIYYGRVKEYLAALPKPE

SEQ ID NO: 198480 - protein, 347 aa, unidentified
MNDEKYIGLDVHQATIVVAVMDSTGKLVMESILETKAATILQFFAGLRGTLSVTFEEGTWSAWLYDLLYSRVDELVVCNPRKNALLNNGNKSDRIDARKLAELLRGNQLKPVYHGETGVRMLRELSRSYLTIVKDLSRVMNRLKAVYRSWAIPCAGRDVYYRRHRAQWLAKIREAGVRRRAERLYEELDMLQHLRQQARRELLAESRKHAITAKLRQIPYLGPIRVALAVALIQTPHRFRTKRQLWAYSGLALETRTSAEYRFVEGQVRRSKKLLCIRGLNKDHDLKGLFKGAATMASVRPGPFQDFYTAALAKGIKPTMARLTLARKIAAITQSGRLPGPTRRCLR

SEQ ID NO: 198481 - protein, 373 aa, unidentified
MEKSITYVAMDTHKKQHRVVLFYPNNEEILEFSVKNAPAEIRKMVRKIKRNAPGKVKFCYEAGVCGFTLQRRIEALGCKCSVIAPSLVPRKPGERKKTDRRDAKKLLGLFMADMLTEVYPPNEEQEAARELTRCREAAQENLKRIRHQLQKMLVRHGYVFIDGQHWTQKHYRWLEAVEFNQPLLQDVFDCYLTEMRHCLQRVKTLDKELEKLAQSEDYREVVGILRCFYGIETLTAISIIAEVFDFARFASAREFMSYLGLTPSESSSGEKEHKGPITKTGNKRVRRLLTEAAWHHRHTYVVSKALNKRREGQPQWAIDIADRAGIRLRRRYRRLVNCGKLPCKATTAVARELAGFIWSALVEYEARKKKKVA

SEQ ID NO: 198482 - protein, 419 aa, unidentified
MNYVGFDWASRAHDVTVLDEAGGVLDRWAFPHSETGWVTTLDRLARHGSAAEVPVIIERTCGLIVDRLLAAGHPVVPVHPTAFYAARPRWGASGAKSDPGDSYKLADYLRTDGHRLRRLTPTDPGLHELQALVRLRDDQVRARTAATNQLTAILDNYWPGPKQLFMSLASQIALAFLTDYPTPTSAAHLGEARMAAFCRRHAYRGGKSPAELLSRLRAAPVAPVGLPPATLAAMVTAQVTVLKTLQTVISDVERLIAVRVVAHPRSNLFENLPGVGMINLAQLLAEVGPILDRVDSAEQAATECGAAPVTRSSGQTRGVYFRWAANTRARKAITSFAHNARMHDDWAAALYADARARGKRNPHATRIVARAWLRVIWACWTSGQPYNPDRHHSSRFLHRCHPAGAQARSRWSPPPEERS

SEQ ID NO: 198483 - protein, 342 aa, unidentified
MIVIGTDAHKRSYTCQAVGAGTGELRSSETVPATSAGHARVLGWARGQDPERVWAIEDCRNVSGKLERFLLARGERVVRVAPRLMAGRRRGARQAGKSDPIDALAVARAALEEGIDTLPTAVLAGPEREIKLLLDHHDDLTAERTRVQNRLRWLLHDRWPELELPKGCLSRIVWLDRVAGRLQRADQLADVRVMRAQLRRVRELIREIKQLDRELTALVTTQQPRLLKLPGVGILTAAKLITEIAGIQRFRSHAKLARLASVAPIPASSGATHRHRLHPGGNRQLNAALHRIAITQLAHHPPAKTYTQAKLAQGKTKREAIRCLKRQLVRTIYNTMNTPALT

SEQ ID NO: 198484 - protein, 397 aa, unidentified
MYIVGIDIAKRKHEAAVIDGEGTVIIKPFSFTNNCSGYNRLLAMLAKAKLPLDEVSFAMEATGHYWLALFTRLQKEGFRVQVINPVQTNSIRSFYIRQAKTDPRDALLIAEVIRFGHFSESTLHPENIYELRELCRGRHAIVSMQADVKRKVVALLDQVFPEYETAFTNMFSDTSMAILQTCPTPKELSEMPLEELCHLIEVSSHKRFRMAKAQELQELARNSFGFAMAGDVFSTMIRLYAKHLVFLKQQVREMDRKIAEIMDTLDTPITTITGIGPTLGAYILSEIGDINRFSSAARLAAYAGIDPTMRQSGEYNGVRNRMSKRGSPYLRHAIWLAASSAVLHDPALKLYFQKKREEGKPYMASVGHACRKMVSIIYAVMRDNKAYTPHIPNEISA

SEQ ID NO: 198485 - protein, 319 aa, unidentified
MFNLGIDVAKAKLDCALRLPNGKHRNKVVENNAKGFVALSEWLLKHDAGSPRVCMEATGTYWEGVAEYLAGLGMVVSIINPAQIKAFGASRMVRTKTDKVDAQLIADFAHERQPEPWLAPSPSAQALRALVLRLEAVQAMRLQETNRLDVAREAVRQGIENHIDWLDREIKELVRAIKRHIDDDPDLRDKRELLDSIPGLGERTIPVLLSYYADTERFDNAKQAVAFAGLDPRQHESGSSVRGKPRMSKIGHSFLRKALYMPAMVAVHRTAWGKRFGQRLSAAGKAPKLIIGAMMRKLVHVAFGVLRSGKIFDPTLHTA

SEQ ID NO: 198486 - protein, 338 aa, unidentified
MDNYIGMDAHSSICVFSIVDANGKEVNQAKIATNGQLLVEYIRSIEGSKKLVFEECELSAWLFETLRGEVDELIVCNPTRNQQYKKAKTDKLDAQNLARLLRGGFLTPVYHDGSKTEHLRALMSGYQDIVDTGVSIKNRYKSLFRKAGLPARGAGLYDDSSLLENLSRPDQRFIGRGFYRLLETLEKEREQYIVAIRKSSRAFPEIRLLKAIPGIGDIQAAKIVSQVISAQRFRDKRKFWSYCGLVRHRMESGGHIYGSKRSWGNRILKCVFKMAAQTVVRGENEFRAYYDELRLKGTSDRAAKNAVSRKLAAISLSILKTLRPYDETRIMPQTEQAG

SEQ ID NO: 198487 - protein, 418 aa, unidentified
MKVHRNCCGLDVHKATIAACLIREDANGNTSKEKRLFGTMTQHLRELAQWLREAQVTAVAMEATGVYWVPVWNVLEGEGLHLVLINPEHYRAVRGKKTDLKDGERIAELLQDGRLEGSYVPPVELRVLRDLTRYRIKLVEHQCSIACRIQKLLEQCNIKLGSVASNVLGVSGTAMLHALAQGESNAERLADMAKMQLRRKLPALRLALDGYLLPHQRFLLSEMLDELNHSQSKIARLEAEIELQMQPFQKALQAWMSMPGIKQRVAWTLVAEIGPEAQAFPSAAHLASWVGVCPGDHESAGKRRSGKSRKGNRWARHALCEAAWAASKTKHSYLAAQFRRLAAARGMKRAVIAVAHTILTTGYHLLQRGTTYQDLGPNYFDQRHKLRTTKRLLKRLEALGHKVVLDSPLSSALTPAGA

SEQ ID NO: 198488 - protein, 337 aa, unidentified
MKYSGIDLHSNNCVVTVTDDEDRVVAEKRVPNDLPKILALLVPWKEELAGVVVESTYNWYWLVDGLQAAGFTVHLANTAAIRKYDGLKHSGDEADARYLAHLLRLGILPTGTILPPEARAIRDLARKRMQLVRSRTMHILAVENITARQRGARISSNQVKRLTPEAIDQMSVPDDVAFAIKANSAVVTTLSAQIELIEKRLQERMAERADYILLTSVPGIGRVLATMILLETGPIDRFPSVGNFASYARCVGSERTSNGKKKGEGNTKNGNKYLSWAFIEAAAHALQNCAQAKRFYERKKTKTNGVVAMKSLAHKLARACFHILKEHKPFDVTRCFA

SEQ ID NO: 198489 - protein, 302 aa, unidentified
MNATPVGLDIAKSVFQVHYIDPETGEIVSRQIKRAQLLEYFANRAPCRIGMEACGSAHHWARQLMQMGHEVKLMPARFVKAFNVGNKNDAMDAQAIWLAVQQPRKAVAIKSEMQQAVLMMDRQREQLVRFRTMQINGLRGMLAEFGEVMGKGRAAMVKVISDALARVETRLPKVLIDTLREQWARVEKLDEEIATIERRLQAWKKDDKAVQAVIEIPGVGLLTATAVVAMMGDPKAFKSGREFAAWTGLVPKQTGTGGKVNLHGISKRGEDTSIAHSNATTGDGVAYLLIRSTYGCSVKVVL

SEQ ID NO: 198490 - protein, 389 aa, unidentified
MRTKVKVTRIGLDGHKTFGSATGRGADGGIVWRERLDYRDRGKLREQLARWPKGTPVVLEATFGYGWQCDELAGAGLEPHLANCRKVAGWRKARGLPKSNRIDADLLSELLGEKSRWWEVWLAPPEVRDQREWLRYRMALVMIQTGLKNRIHAVLHRHGIVWEGSDLFGVKGRRFLSLLVVPNDATLSESAQATLKGYLQLLDHVRRQVAKVTWQFRKQLRKLSTGDRLRTLPGISWILAYTIVAEVGRIDRFKSARHLASYSLLAPRADDSGEPDEGDPKGRHLGRAGRRTLKWAWIEAAHGAARRGRFREIYDRVTDGNKRNRNRGYIVVAHELCRIAYVLWKKDVDYREDRPARPGRRSEVQDSRPGTGQPDPAMVAAVHGRLQAS

SEQ ID NO: 198491 - protein, 415 aa, unidentified
MERLYERCAALDVHKQQVTVCVHVPDQAGVRSELRAEFATMTADLLGLRDWLKGLGVTHVAMEATGVYWKPVYYLLEDDFELLLVNAQHVKNVPGRKTDVQDAQWLCQLLEHGLLKSSFVPPQPIRELRDLTRYRKSLVWERGREANRLQKVLEDANIKLASVASRPLGVSGKAMLKALCEGESDPEALADLAKGELRAKLPALRAALEGRFRGHHALLVGHLLAHIEYLDETISSLSEEIEERVRPFERQVQLLCTIPGVAERTAEVIIAELGPDVERFPSHRHAASWAAVCPGHDESAGKRRSGKTRKGDSWLRVALIEAANSAAGRTKDTYLRSQYLRIRRRRGHKKAIVAVAHSILVSAYHVLQDGLSYQELGGDYFLGREDRERITKRLVRQLERLGQTVTLEPATVEAG

SEQ ID NO: 198492 - protein, 427 aa, unidentified
MPYKIASIDVHKAMLAAVNSDVEVVGEFEFERRQFGTTDGGLHQLVDWLIEQQVDEVVMESTAQYWKPVWAALERYWKPVVQKREGARPTTGSLHLAQAQSNRARRGRKRDFTDAERLLKRLVANELVLSLVPDPEQRLWRTIARAKKQQIGNRVQLQNRLEALLEEAYIKLSCFVSDLLGLSARRMLKALADGETDPEAVAALADNRLRATPNQLSDALGACRQLNPVYRRLIKAVLEELELIDKHISRLDQEMADLLRPYQEQVQRLAEVPGLGPDSAQQIMAQVGATAATFPSGKALSSWVGVCPGDNESAGVNSSSRCPKGNRTMRSLLNQAANAAIKYKGGIFQIIYRRYVSRLGHKQTIGVVAHRLCHLIWKILHQGVRYDERGPDVNRRSQHQRTRRMIYELRKLGYRVELANSQSPVQA

SEQ ID NO: 198493 - protein, 344 aa, unidentified
MQIITIGLDLAKSVFQVHGVDAAGQVVVRKLLRRSQMLPFFAKLPPCLVGIEACGTSHHWARELIKLGHEVRLMPPAYVKPYVKRGKTDAADAEAVCEAVTRPTMRFVAVKTLEQQAALSMHRTRDLLVKQRTQLINMIRSLLAEFGVDIPKGLERALLMARQIIDGQSPDVPVEAAKIVGTLSQQALDTHMRLREIDRDLLVWLRSNDVARRLTTIPGIGPVGATALAASVTDPHQFRSGRQFAAWLGLTPLQRSSGGKERLGRITKMGDKYLRKLLIVGMTSLVRRAKYNPGRIDPRLADLLARKPTRVATVAMANKTARVIWAIMARGETYRAGHRPALAA

SEQ ID NO: 198494 - protein, 403 aa, unidentified
MSPPNTIPERYIGLDIHKHYFVAVGVNSQQEQIFGPQRIPMHALEGWGQEQVKASDAIVLEMTTNTWEVYDQLIAKAHSVTVVHSPHVALVTHTRVKTDYKAAHSLAQLHAAGLLESIWVPPKAVRDLRALIAYRAKMVRLATQAKNRLHSVLHRYAIALPEGPLFGKQQTAWWLSLPLSSLELVCIQTNLHTLAFAEEQIDLIEAELKSQAAQDERLVFLVHLPGFRWLTGMTVLAAIGEISRFPTAKNLVGYAGLGSSVHLSGKTNRSGRITKQGRRDLRTAMVQVAHAAAKSHSHWRAERQRLEPRLGYSKAIVAIARKMLVVVWHVLTRRQADRFAHPQKVARKLLQHSYDLGKENRLLGQTAAAHVRDMLENLDIGQSLDHVIWGSKQKVILPPAYNA

SEQ ID NO: 198495 - protein, 347 aa, unidentified
MAMTIVEAARAVTGGVDTHLDVHVAAALDPVGGLLGTEGFTADPAGYKAMLSWLEGFGEVAKVGMEGAGSYGAGLARFLRHEGIEVVEVDRQSRQARVRHGRSDPIDAVEAARATLAGRASQPKSMDGAVEAIRVLVVAKRSARQARSKALTQMRHLGYTAPDQLRCRLKGLTIPALVAEAASLRPTRSPDPVTAGTKASISSLAHRVRFLDAEIARLDELIEPLLFATAPELLALKGVGPDTAASLLITAGDNPERLRSEAAWAHLCGVSPIQASSGKVTRHRLNRGGDRQANSALWRIVMVRIAHDPDTKAYLERRVKEGRSKREVIRILKRYVAREVYRHLPRG

SEQ ID NO: 198496 - protein, 352 aa, unidentified
MDQKGKILANQSVANDQHAVFRVVAPYGNNVHAAIETSTGSAAFAEELITKYQWSVSLAHPGYASRMKQTPDASDWTDAKLLADLIRVGYLPRVWLAPPYIRELRDSVRHRHGYVQQRAQPKLRLRALLRQHRIDCPESPWTIKGKKWLLDANNIASSHVRTLLQDYYETIEFLSKKIVNAEERMAAVTADDPIVKQLLLHPGIGLITAITMRAIIGHFDRFRTGKQLAHFCAVCPRNNSSAGKTTTGGLIKAGDDLLRQVLVEAAHRLIRYNPEWKAMADRLRANGKKTCVIIAAVANRWIRKLFYQMRAPMPADGADVRFLRHLQESTPALETPSDTGRSVSHGTGRLST

SEQ ID NO: 198497 - protein, 337 aa, unidentified
MDHFAGLDISMDETHICVVDREGVVVYESKTASTAEAIADKLSDAPSCHRIVFETGRMAPILFHGLSQLGLPAVCVESRQAYQALRSLATHKTDRNDARGLAHLARTGFFKPVHVKSLSAHALRSLIIARKKLVGQRVTLENQIRGLAVVFGVRLPRALTAAFIDQALKASEGVAGLSAAMRGLIAARTAVMSAVAAIDADMRRMTRASEACRRLMTIPGVGQLTALAFVAAIDDPSRIRRSRDVGAYLGLVPKRYQSGEVDYVGGISKCGDRRVRTLLYEAANVMLTRYNGQLKLKEWAFAIARRSSMRKARIALARRLAIIMHAMLRNGTEFVVA

SEQ ID NO: 198498 - protein, 369 aa, unidentified
MKKHSTAKTTARRNRLARVRELTIGMDLGDRVSRYCILDETGDVISEGSVPTTKAGMNQIFGPMACCRIAMETGAHSPWVSRQLSGFGHEVIVANARNVRLIGESTRKDDRLDAKTLARLARIDPGLLSPVRHHSAQGQAHLTVMRARAVLVSARTTLVNAARGLVKPHGESLRRCGTQQFGKAIGSHLPAELGAALEPLLSAVEALNEQIQLYEQQLEHIAKEEYPQIARLKQVDGVGTLIALSFMLTIEDPHRFRRSRDVGCYFGLRPGRRSSGASQPQLHISKEGDRYLRKLMVQGAHHILGPFGKDCDLRRWGLKLAERGGKNAKKRAIVAVARKLAVLLHRLWVSGAIYDPLRNSQTQMGRAAA

SEQ ID NO: 198499 - protein, 459 aa, unidentified
MILRMGIDIAVRAPHQASLADERGELLWSGHRFRTTVADLDALWARLPKEFQAAEVTVVMEPTRNAWVRLAAWFRRQGARVVLVSAERSSDLRAYYAKHTKSDRLDSVLLARLPLLHPEGLHPQRGLGPGDPLRRATKMHSTLVKRRTTSIARLDALLEILGPDWHAAFSADLTNKTPLQFLAAGYADPHTVCRLGRARLTRFLYRHSRGAFGEIHAERILAAARASLDLWGEDICFPDLAEDIAVEARLALALTAEVKELDERIAVLVRDRDPHGIITSAPGVGAITGAVILGRLGDVSRFQSLSAVRAFSGLVPSLDASGVSGRHGSPTKRGDHLLREALFISANQARRLDPTLAAKYHRLMIDGKHHNSALCHIATTLLTRVAACWRAQTPYQIRDADGRPISAHEARAIVSERYSVPTKIRQARTTTGTGRRSKESLSAPSTGPSNTHAKHTGAA

SEQ ID NO: 198500 - protein, 349 aa, unidentified
MNHYVGLDVSLEETAICVVDGTGRIVKEARAASEPEALIAALREIDWPLERVGLEACSLTAWLHDELHSAGLPAVCIETRQANAAMKTMPNKTDRNDARALAQIMRTGWYRQVHVKSRQCRLWRSLLVARRTVLNEMRSMENVVRAVLREAGLKLGVPGRAAFAGRVRELTEGDARVTTLVEPLLAILATMLDQLAHLTKQVQDIVRQEAVCRRLMSVPGVGPITALAFRATIDRPDRFRRSRDVGAHLGLTPARYQSGETDIQGKISRCGDELARTALYEAAHTLLVRSRKWSALRAWGMKVAKARGMARARVAVARKLAVILHRMWSDGAEFRFGKEPSAGVAGVSA
